United States Patent Application Publication US 2025/0084491 A1 - sequence listing, part 27

SEQ ID NO: 509938 - DNA, 75 bp, synthetic construct
  source 1..75: mol_type = other DNA
caatgtctctgatttcgctaacatcgatcaagcccgcgaggttgctcgcaatttagttcaaaccatgaagttgac

SEQ ID NO: 509939 - DNA, 75 bp, synthetic construct
  source 1..75: mol_type = other DNA
attctggaagaccggcgagatatcgtcaatgataccgaaatacgcgcagataaacgcaaatgggtttttccggct

SEQ ID NO: 509940 - DNA, 75 bp, synthetic construct
  source 1..75: mol_type = other DNA
tctgcattatctaataaactagatagatatttctctatagctgaagaagatgacgcagatgtccagcatgagatt

SEQ ID NO: 509941 - DNA, 75 bp, synthetic construct
  source 1..75: mol_type = other DNA
gtgccggggcgcaaaccctttctgaacaacggttatgtcgggtactgaatatcgacatcggcggtggcaccgcga

SEQ ID NO: 509942 - DNA, 75 bp, synthetic construct
  source 1..75: mol_type = other DNA
cgcaatgcccgtccggcggtgatggcgctctcccggtcgctgggcgattttgtcgtcgccagcgccggaccgcat

SEQ ID NO: 509943 - DNA, 75 bp, synthetic construct
  source 1..75: mol_type = other DNA
gttcagaaattcattgaagcccatccggggtgtacttccggagacattgcggatgcttttgcaggttactcacgg

SEQ ID NO: 509944 - DNA, 75 bp, synthetic construct
  source 1..75: mol_type = other DNA
ataaaattacatggtgattttttatttgacaatatcaagaatactataagggagcttgagtcacttgaagataac

SEQ ID NO: 509945 - DNA, 75 bp, synthetic construct
  source 1..75: mol_type = other DNA
aggggattcatttttataatacccccaattatttgattgcaaactctgcatttcgtgctggagagtataatgaat

SEQ ID NO: 509946 - DNA, 75 bp, synthetic construct
  source 1..75: mol_type = other DNA
cccttgacgggtggcaaggcaccgaaacaggttatcagatctacgattggtaatgtttcagattttgccaacatt

SEQ ID NO: 509947 - DNA, 75 bp, synthetic construct
  source 1..75: mol_type = other DNA
gagaggctctgacagaagaagaagccagaacgaccagctatgttgatcttgaaaataggataattcgattttacg

SEQ ID NO: 509948 - DNA, 75 bp, synthetic construct
  source 1..75: mol_type = other DNA
ctgaacgaaagccgtatattatcactgacaaccacagggattcacccgtaggtttcggtgtcaaaatcagtgcca

SEQ ID NO: 509949 - DNA, 75 bp, synthetic construct
  source 1..75: mol_type = other DNA
acaactcccgttggcagtcattgacgaagtgattgtccgcgcgggggactatatcgacattggtacgcctctttt

SEQ ID NO: 509950 - DNA, 75 bp, synthetic construct
  source 1..75: mol_type = other DNA
catcaccggtgaaagcgcgaaaacccgcaatgctcgcccggcggtgatgacgctctcccagtcgctgggcgattt

SEQ ID NO: 509951 - DNA, 75 bp, synthetic construct
  source 1..75: mol_type = other DNA
gtcggcggtcgcctgctggaaaccgacagtcagggacgcgtggtgtacgcccataaaccggggcagatgattgtg

SEQ ID NO: 509952 - DNA, 75 bp, synthetic construct
  source 1..75: mol_type = other DNA
gaccttgatagtgaagctactaaagagacctctaaaacatctgacttagaggaagataaaatctctgatgtgaat

SEQ ID NO: 509953 - DNA, 75 bp, synthetic construct
  source 1..75: mol_type = other DNA
gaatattcagacagacaagcgattcagaccttttttcttttgttaagtggatcaacagcaattcatctgcattcg

SEQ ID NO: 509954 - DNA, 75 bp, synthetic construct
  source 1..75: mol_type = other DNA
accgcgagcgtgggcgcgctgacggtgacggatgcttggggaaatacgcgaaataatttccagtcgacgagtgaa

SEQ ID NO: 509955 - DNA, 75 bp, synthetic construct
  source 1..75: mol_type = other DNA
gactttgatgatggtgacgatgattttacttacagacccaaaaagaaaactcacactgattcaaagaaagagaag

SEQ ID NO: 509956 - DNA, 75 bp, synthetic construct
  source 1..75: mol_type = other DNA
gatgactttctttctttggatgaattaaatgattttctctctatgaatgaatctgaccttgatagtgaagctact

SEQ ID NO: 509957 - DNA, 75 bp, synthetic construct
  source 1..75: mol_type = other DNA
aaatgacaccactaccagtgacaaaatgtcatcagtaccagtgacaaaatgtcatgggggtagtgacaaaatgtc

SEQ ID NO: 509958 - DNA, 75 bp, synthetic construct
  source 1..75: mol_type = other DNA
atatggcggagacggtagaagcccacggttacaccttcagtcgaccaaagctggcggcagaagtgagcaatgaaa

SEQ ID NO: 509959 - DNA, 75 bp, synthetic construct
  source 1..75: mol_type = other DNA
gtggcatggatgaaggggcggggacacaaaactgcggtattcaggcatccagtactgcggggtttgcaacctgct

SEQ ID NO: 509960 - DNA, 75 bp, synthetic construct
  source 1..75: mol_type = other DNA
accatttacggcgtgaccggtgccgacgggtcaacgacattgaccctgaaacaggataacagtaccgggttaaga

SEQ ID NO: 509961 - DNA, 75 bp, synthetic construct
  source 1..75: mol_type = other DNA
caggcgaaaatgtgggggcatatgccggaaacggtgacggctgaggacggtacggtctttaaacgcccgcggtta

SEQ ID NO: 509962 - DNA, 75 bp, synthetic construct
  source 1..75: mol_type = other DNA
gcaagattcacctcgactcagtcggctgacaccagcatgaatgggtgtggtacagattatatgccaacgctggat

SEQ ID NO: 509963 - DNA, 75 bp, synthetic construct
  source 1..75: mol_type = other DNA
aacctggtccaccttcacctggagcggcgcagatagtcactgcaccgtgctgcccggcatgcgccacttcggcgc

SEQ ID NO: 509964 - DNA, 75 bp, synthetic construct
  source 1..75: mol_type = other DNA
cgccaatatgctcccacgccgttctcagcttagcgcgctctatgatgccaataacggtgacggtgtacagacagt

SEQ ID NO: 509965 - DNA, 75 bp, synthetic construct
  source 1..75: mol_type = other DNA
catggtactgaaggtgaagtgtatgctaatccgcagcgctgcccgcagatcaatctcattgaccgtgaagggatg

SEQ ID NO: 509966 - DNA, 75 bp, synthetic construct
  source 1..75: mol_type = other DNA
actggctggtgaaaaaggtcagaatgccgatgtcgtgttattagggccgcagattgcttatatgttgcccgaaat

SEQ ID NO: 509967 - DNA, 75 bp, synthetic construct
  source 1..75: mol_type = other DNA
cttgaagctgcagaccccacaaaatttgacagtacgaataatgttgtcaaagcgaaaaaaggcgaagaagccgta

SEQ ID NO: 509968 - DNA, 75 bp, synthetic construct
  source 1..75: mol_type = other DNA
cgcgtacgtgctggcgcttcccgcctcgctgcctgtgcgttacgccgcggtactgacggtcatcaacgcgctggt

SEQ ID NO: 509969 - DNA, 75 bp, synthetic construct
  source 1..75: mol_type = other DNA
ttcacgggccgatggcatcatggggcgttgatgcccctggcgaagtacgtcatacccatgaactgccttcgcgct

SEQ ID NO: 509970 - DNA, 75 bp, synthetic construct
  source 1..75: mol_type = other DNA
tccggtttttccgctttatctggggcgaaaaagtcatccgctggcattacctcttgcgccgttactgctcgaagg

SEQ ID NO: 509971 - DNA, 75 bp, synthetic construct
  source 1..75: mol_type = other DNA
cagggatctctgtatcctccaataccgtagatgatctcattttagatgaagtcaccccgacatcggcgcgtatct

SEQ ID NO: 509972 - DNA, 75 bp, synthetic construct
  source 1..75: mol_type = other DNA
ccactgacgcgttgacgtggtattacggcgtcattaatttgaaaacgggacaatcgacgacgactattaatggat

SEQ ID NO: 509973 - DNA, 75 bp, synthetic construct
  source 1..75: mol_type = other DNA
atctttaccgtcctcaccagcccggatgttccgcaggctacaatgtggggtcatatgcccgatacgctgaaggcc

SEQ ID NO: 509974 - DNA, 75 bp, synthetic construct
  source 1..75: mol_type = other DNA
catctggatgacggcattaaccgtaagaatcaaactgacgccgtgtgggagacgcatccggtacaaattgatggc

SEQ ID NO: 509975 - DNA, 75 bp, synthetic construct
  source 1..75: mol_type = other DNA
cgtatgatgtcgtttcgctgaagacaggagatgaaacgcagatgccctcatctggtggtgcattactgagctgcc

SEQ ID NO: 509976 - DNA, 75 bp, synthetic construct
  source 1..75: mol_type = other DNA
gacgaaggtactggagcgcaggattgtagtatcacgctaataaataaaccgggtctggtgacctgcttccagtaa

SEQ ID NO: 509977 - DNA, 75 bp, synthetic construct
  source 1..75: mol_type = other DNA
cacctgtgtcggcggagttttctctggccgcacacgatacgcaatggcaaggtttcaccggcagtgatggtacgg

SEQ ID NO: 509978 - DNA, 75 bp, synthetic construct
  source 1..75: mol_type = other DNA
tcggccttgcgtgtgtaaatattgctgagttaaaccacggtctccccaattttgactgggcacgttatacctcag

SEQ ID NO: 509979 - DNA, 75 bp, synthetic construct
  source 1..75: mol_type = other DNA
ggcaacggcgcaggcgctggtcacgctgccggtttctctcatcggctatctcgtcgcctgttactggctgaatac

SEQ ID NO: 509980 - DNA, 75 bp, synthetic construct
  source 1..75: mol_type = other DNA
ctgcgattgttaagaagtcatcagcagctaagtccatttctgaaggtgccttctctgccgttgcgaatttcaacc

SEQ ID NO: 509981 - DNA, 75 bp, synthetic construct
  source 1..75: mol_type = other DNA
gtaacggatgcctggggaaatacccaaaatgattttctttcaacaaccctggttatttatggcgtgacgggtgcc

SEQ ID NO: 509982 - DNA, 75 bp, synthetic construct
  source 1..75: mol_type = other DNA
actcaactctttaagtttgatgtcgtttcgttgaacacgggagatgaaacacagatttcatcaactagtgtaggg

SEQ ID NO: 509983 - DNA, 75 bp, synthetic construct
  source 1..75: mol_type = other DNA
ggtctgctgggcatggtatgccctgcgcaacgcccgctggctgtgggaaaatcccgacaaacatccgatgatgtg

SEQ ID NO: 509984 - DNA, 75 bp, synthetic construct
  source 1..75: mol_type = other DNA
atgattaagtcggttattgccggtgcggtagctatggcagtggtgtcttttggtgcatatgctgctccaactatt

SEQ ID NO: 509985 - DNA, 75 bp, synthetic construct
  source 1..75: mol_type = other DNA
atcatcgatccggtcgccaagtctttaaaggatgtatcaggattgcattatcatacaccaacatcttcgttttta

SEQ ID NO: 509986 - DNA, 75 bp, synthetic construct
  source 1..75: mol_type = other DNA
ttaataaggggttggaaggattgacatgggatggaaataagcagaatctgtttgcagcaaaggagatgaaagatg

SEQ ID NO: 509987 - DNA, 75 bp, synthetic construct
  source 1..75: mol_type = other DNA
tggtcaatccaagccaatgaacttggatattgaattagttaattgtgacattactgcctttaaaaatggtaatgc

SEQ ID NO: 509988 - DNA, 75 bp, synthetic construct
  source 1..75: mol_type = other DNA
ctgcattatacagctgttgttaagaaatcatctgatggtaatgctcaaattactgaaggtgctttttctgcagtc

SEQ ID NO: 509989 - DNA, 75 bp, synthetic construct
  source 1..75: mol_type = other DNA
gaaagatagtagtggtaaccctgtaaaagagggggccttttcagcagttgcgaattttaacctgacttatcagta

SEQ ID NO: 509990 - DNA, 75 bp, synthetic construct
  source 1..75: mol_type = other DNA
cctaatcaggggacggtgccgttggctgaacataaagtgacgctgaatattgctcccgcccagggcgacctggtg

SEQ ID NO: 509991 - DNA, 75 bp, synthetic construct
  source 1..75: mol_type = other DNA
gttgtaacgtgttatttatccagcacgcccgacaacactggcatggaacagcgtaactacaaagcggtggatctc

SEQ ID NO: 509992 - DNA, 75 bp, synthetic construct
  source 1..75: mol_type = other DNA
gctgggaaaaccagacgccgccgaccgtcagtctggtgtgggcggatgccgccacgccggatacgccgctcaacc

SEQ ID NO: 509993 - DNA, 75 bp, synthetic construct
  source 1..75: mol_type = other DNA
ctggtctaatcaggcattttcacctgttaatggtcagttgatgcaggcatcgtccagctatacagcggtagtgat

SEQ ID NO: 509994 - DNA, 75 bp, synthetic construct
  source 1..75: mol_type = other DNA
cgttgaacgacaccgcgggattttatactgccatgaccggtagcgacggcagcaaaatcctcaatattacccgcc

SEQ ID NO: 509995 - DNA, 75 bp, synthetic construct
  source 1..75: mol_type = other DNA
gtaatacgccgtttacactgaagcgcagcagttctttcaatcgccagaatgtattagtgacgatgcagacggttt

SEQ ID NO: 509996 - DNA, 75 bp, synthetic construct
  source 1..75: mol_type = other DNA
gtatttctggggtcatatggcggataccgccacggtaagtggcaagacgctgcatcgcccgctattaaaatcgga

SEQ ID NO: 509997 - DNA, 75 bp, synthetic construct
  source 1..75: mol_type = other DNA
tgacagaaaggttaaggtttcaccaacacttgatgttccgttacctgaaaatattccaggaaaatattccaagta

SEQ ID NO: 509998 - DNA, 75 bp, synthetic construct
  source 1..75: mol_type = other DNA
cggcgcacattcaacgccattgaggatgccagcgaacagctggaggcgttggaggcatacttcgaaaattttgcg

SEQ ID NO: 509999 - DNA, 75 bp, synthetic construct
  source 1..75: mol_type = other DNA
tgagtaatggcaccagcagtgtactggagtcaaaaggggggtatttaacctgccagacaacggctaacccgaagg

SEQ ID NO: 510000 - DNA, 75 bp, synthetic construct
  source 1..75: mol_type = other DNA
gcagggatggccggtaaaaacgacctatctcaccaataccccgagtgatacgcaaacagggagccgttactacaa

SEQ ID NO: 510001 - DNA, 75 bp, synthetic construct
  source 1..75: mol_type = other DNA
caatacggcaaccgatatatgtacaaaggctttaacgaaatgtgtgaaccgccccgggtttcctggagagtgttt

SEQ ID NO: 510002 - DNA, 75 bp, synthetic construct
  source 1..75: mol_type = other DNA
tctgtaaaccagaaccagcaagaatcggaacagaacgaccagaaagcggaacaaaacagcccaaatacgcaacaa

SEQ ID NO: 510003 - DNA, 75 bp, synthetic construct
  source 1..75: mol_type = other DNA
aatacgccgccggcagatggagctggatattctgaaaaaggcggaggaaatcataaaaaaaaaccgggcatcagt

SEQ ID NO: 510004 - DNA, 75 bp, synthetic construct
  source 1..75: mol_type = other DNA
cgttgaacattatcttaaccacggctgctgcctggcgtttaccagcagagccctgggttatccctgcactgatgt

SEQ ID NO: 510005 - DNA, 75 bp, synthetic construct
  source 1..75: mol_type = other DNA
ccctgaccgtggctgatttcctttatcatacatcaggattgcctttttcaacactggctcggctggaaaacccta

SEQ ID NO: 510006 - DNA, 75 bp, synthetic construct
  source 1..75: mol_type = other DNA
gaacagttcacgttatggactggcaaagatttccctctggaatacgttaaacaggtcatggggttcggcgcctga

SEQ ID NO: 510007 - DNA, 75 bp, synthetic construct
  source 1..75: mol_type = other DNA
ccgccacagtttatcgcctgaaatgcagaataaagccttagaaaaagcgggattgccatttacctatatggcctt

SEQ ID NO: 510008 - DNA, 75 bp, synthetic construct
  source 1..75: mol_type = other DNA
aaatcataaaaaagccccgggcatcagtatcagtcacctggacaacagagaaaaaacaaagatcgctgatgccct

SEQ ID NO: 510009 - DNA, 75 bp, synthetic construct
  source 1..75: mol_type = other DNA
ccgtcattacatctctgatggttctatggatggcgacagaacatttgcacgtcttggtttcaaaggcgaaacaca

SEQ ID NO: 510010 - DNA, 75 bp, synthetic construct
  source 1..75: mol_type = other DNA
aaatcgcttagaaatgctagttactaccgatgaatttttaagtaatcttaagaaaatattgtttatgcatatttg

SEQ ID NO: 510011 - DNA, 75 bp, synthetic construct
  source 1..75: mol_type = other DNA
cgtcttgaaggcgtcgagatgcctttagtcactcttactgccgcagaggctttagcgcgccttgaagcgctgagg

SEQ ID NO: 510012 - DNA, 75 bp, synthetic construct
  source 1..75: mol_type = other DNA
gatgagtaaggcgtttaccggacttgtggtgcaaatactgattcaggaaggcagactccggcaaggggatgatat

SEQ ID NO: 510013 - DNA, 75 bp, synthetic construct
  source 1..75: mol_type = other DNA
gcccggcagaaaaaggcacatttcgtcatttcctcgctgagtcaaactggttcagcgaggccacaggtatcggca

SEQ ID NO: 510014 - DNA, 75 bp, synthetic construct
  source 1..75: mol_type = other DNA
tactttttctgctcaatatcagggtaaaaatgaccgtgataatttacttgaagctaatggtgatggatatggctt

SEQ ID NO: 510015 - DNA, 75 bp, synthetic construct
  source 1..75: mol_type = other DNA
tgtgaatatgttgatgaattaacgccagcagccaaactggtgggtgccatcaacaccatcgttaatgatgatggc

SEQ ID NO: 510016 - DNA, 75 bp, synthetic construct
  source 1..75: mol_type = other DNA
aacctgcctcaattgcaaccgggttcttccattatgcctggtaaggttaaccccgttatcccggaagtaacaaac

SEQ ID NO: 510017 - DNA, 75 bp, synthetic construct
  source 1..75: mol_type = other DNA
tacaaacgcgtttcgccaaacgaccatgctaattttggtcagtccaccaatgatacatatccgacagcattacat

SEQ ID NO: 510018 - DNA, 75 bp, synthetic construct
  source 1..75: mol_type = other DNA
ggcccccgttgcggcctggctgaaattaacctgcctcaattgcaaccgggttcttccattatgcctggtaaggtt

SEQ ID NO: 510019 - DNA, 75 bp, synthetic construct
  source 1..75: mol_type = other DNA
gggggcgcggcgagatttcggcgattcaggaagttgagcgtgattacaactgcaaggtgatctctatcatcaccc

SEQ ID NO: 510020 - DNA, 75 bp, synthetic construct
  source 1..75: mol_type = other DNA
aagtgattgccacaacgaccgcggacctcgcaatgctggtggaacaaaatcgttttagtcgccagctgtattacg

SEQ ID NO: 510021 - DNA, 75 bp, synthetic construct
  source 1..75: mol_type = other DNA
actttacagcgtcatcgagaatcttgctctgagtagtgataatgggcgcattcgcgtcagtgatttgccggaaca

SEQ ID NO: 510022 - DNA, 75 bp, synthetic construct
  source 1..75: mol_type = other DNA
ttgtgcagtggactggagcgcgcgcaacataccgcacggctggttcttgattcccgtcagctctgcgtacaaacc

SEQ ID NO: 510023 - DNA, 75 bp, synthetic construct
  source 1..75: mol_type = other DNA
atccctgaactcaacgaaatgttttttggcgactgggagatgcgacatcatcgcgacctcatgcaagaagatgcc

SEQ ID NO: 510024 - DNA, 75 bp, synthetic construct
  source 1..75: mol_type = other DNA
tcaaaatgcgcggcaccggtgtgtcgatgccgaacaaacaactggcgtgtgaatatgttgatgaattaacgcctg

SEQ ID NO: 510025 - DNA, 75 bp, synthetic construct
  source 1..75: mol_type = other DNA
tagctcgttcttcttctggggatgacgaaaaagctaaggccatgtttgtattattttcccttctcgcacttcagg

SEQ ID NO: 510026 - DNA, 75 bp, synthetic construct
  source 1..75: mol_type = other DNA
atgattaactggccctggtgttttttctcagcgcaaggctcttttcaggaaaagcgtgatgattggttctggtgt

SEQ ID NO: 510027 - DNA, 75 bp, synthetic construct
  source 1..75: mol_type = other DNA
tcgcgagctcatgcaagaagattccgaaaattatcacgcctggtgcaatgactggctgcatgcggccccaactaa

SEQ ID NO: 510028 - DNA, 75 bp, synthetic construct
  source 1..75: mol_type = other DNA
aaaggttgcacctgatccagaacatctcatgcgttcgcgttactgcgcttttgtgatgcaagacgcagattattt

SEQ ID NO: 510029 - DNA, 75 bp, synthetic construct
  source 1..75: mol_type = other DNA
cctggttcaggttttgaacccgcgagcagtgaacgtgtatttcatctttgtgtttgcagcccgttagacagcatt

SEQ ID NO: 510030 - DNA, 75 bp, synthetic construct
  source 1..75: mol_type = other DNA
aactgcacaggattaatgtcattcagtcagttgtcgaaaagcgcatgcgccgtcgtgacgctgcacaccaacttg

SEQ ID NO: 510031 - DNA, 75 bp, synthetic construct
  source 1..75: mol_type = other DNA
tgggatatttcactttagcgctttataccagtgccccttcaaaactaaagggagatcttaattatctgcgacttg

SEQ ID NO: 510032 - DNA, 75 bp, synthetic construct
  source 1..75: mol_type = other DNA
ccagtatcgcgtatcagggcatggcaatgatgagcgtacttaggcgtggtgtcgcaaacgcatctggtcgctatt

SEQ ID NO: 510033 - DNA, 75 bp, synthetic construct
  source 1..75: mol_type = other DNA
cagagttagcagagttaagcaagccgcagttgcgcatggtcgatttaaacttattaactgttttcgatgctgtga

SEQ ID NO: 510034 - DNA, 75 bp, synthetic construct
  source 1..75: mol_type = other DNA
ttatgaagacttccatcgtcctgaatttaccagcgtgccattatttaaagatgaaatggtgttggtagccagcaa

SEQ ID NO: 510035 - DNA, 75 bp, synthetic construct
  source 1..75: mol_type = other DNA
gtggcctgttattgctgattatcagtgccattatggggcacaaagtgttaccgtccagccaggcttcaacaggct

SEQ ID NO: 510036 - DNA, 75 bp, synthetic construct
  source 1..75: mol_type = other DNA
cctaccattaacgttgtcggttcccctttcagtccggctcaaattaccatcgaaacagcattttttgaagcatca

SEQ ID NO: 510037 - DNA, 75 bp, synthetic construct
  source 1..75: mol_type = other DNA
ccctctcccggtcgctgggcgattttgtcgtcgccagcgctggaccgcatctcgaatccgtgatcgccggtcacg

SEQ ID NO: 510038 - DNA, 75 bp, synthetic construct
  source 1..75: mol_type = other DNA
accatgaccgtttcccgcgcgctgagaacaccggaacaggtttctgacaagctgagggaaaagatagaacaggcc

SEQ ID NO: 510039 - DNA, 75 bp, synthetic construct
  source 1..75: mol_type = other DNA
ccgctttatgccatatggctgcaaaatagcgataaaaatgcgttgattcgcgatcttttgaaaattaacgtgctg

SEQ ID NO: 510040 - DNA, 75 bp, synthetic construct
  source 1..75: mol_type = other DNA
ccgacttcaggggatgtggtgctggcggcgcaagcttccgaaatgtcgctgattgacttcgccttcaaaacgacg

SEQ ID NO: 510041 - DNA, 75 bp, synthetic construct
  source 1..75: mol_type = other DNA
aaatcatccaacaattaaaggcccgttactgaaacatgatgtttataacgaacaacatgctgcggtttcgctcga

SEQ ID NO: 510042 - DNA, 75 bp, synthetic construct
  source 1..75: mol_type = other DNA
tttgacagtacgaataatgttgtcaaagcgaaaaaaggggaagaagtcgtggttcgcgtgaccactaaagattcg

SEQ ID NO: 510043 - DNA, 75 bp, synthetic construct
  source 1..75: mol_type = other DNA
agtcgctcaatatgaaagatggcacaacgacattgaatggtaatgccgcttatcaggcgtgtctggtgtctgcgc

SEQ ID NO: 510044 - DNA, 75 bp, synthetic construct
  source 1..75: mol_type = other DNA
cactgaaacaggacaataccacgggtttaaaaaccgaactgaccgccatgctggatacagataataacgtaaaat

SEQ ID NO: 510045 - DNA, 75 bp, synthetic construct
  source 1..75: mol_type = other DNA
aggagatgaaacgcagatgccctcatctggtggtgcattactgagctgccggaccacgcctgtcgccgttgccag

SEQ ID NO: 510046 - DNA, 75 bp, synthetic construct
  source 1..75: mol_type = other DNA
ttactgggggcatatggcggaaacgttcactacgcgttctggtactgccttcaaacgccccttactctctgctga

SEQ ID NO: 510047 - DNA, 75 bp, synthetic construct
  source 1..75: mol_type = other DNA
aacaatactgcgcctgtaaaactgggcacgaccgaattaaccaccaccgcgacggaatatcgtggtactaccgat

SEQ ID NO: 510048 - DNA, 75 bp, synthetic construct
  source 1..75: mol_type = other DNA
tctttagtctatgccggtactacggatgcgcagggttttgctactgtggaaattaagcaaccgcaaggtgtgggc

SEQ ID NO: 510049 - DNA, 75 bp, synthetic construct
  source 1..75: mol_type = other DNA
gcgcatttcagctttttggctctgtgcgtcaggcgctgcaattagtacaaaacgagttaccgggttcagggtttg

SEQ ID NO: 510050 - DNA, 75 bp, synthetic construct
  source 1..75: mol_type = other DNA
aacaacatgcggcggtttcgctcgatcgtttcgcgtcatttagtcaaccgtggtatgacacggtagataagcaag

SEQ ID NO: 510051 - DNA, 75 bp, synthetic construct
  source 1..75: mol_type = other DNA
ctccttcaaccagaatacgtcggcatggagcggcttcaccggcagtgatggcacgataacgttcaacgttaccca

SEQ ID NO: 510052 - DNA, 75 bp, synthetic construct
  source 1..75: mol_type = other DNA
gtagcggtgatgcgctggttgcgccggttgtgatcaatagtggcctggcggatgaaacttcgctcaatgataccg

SEQ ID NO: 510053 - DNA, 75 bp, synthetic construct
  source 1..75: mol_type = other DNA
tctttaaacgcccattattgttgaaagagttatccagtacgtcgggtcgaacagcgattgcagaagagaatgaag

SEQ ID NO: 510054 - DNA, 75 bp, synthetic construct
  source 1..75: mol_type = other DNA
ttcacgaccgacactgacggtttctaacctggacggtatggtcaccggaatggcggaagatgtgcagagtctggt

SEQ ID NO: 510055 - DNA, 75 bp, synthetic construct
  source 1..75: mol_type = other DNA
ccgggaagcctgtattttcaacgttttggcggcttgaatattgaacaggacgcgttatgccaatttatcagatag

SEQ ID NO: 510056 - DNA, 75 bp, synthetic construct
  source 1..75: mol_type = other DNA
attacctgttcgatggtcatgtcatcggcatgtttattttcccgtcgattatcgcgctgattgtcggttttatcg

SEQ ID NO: 510057 - DNA, 75 bp, synthetic construct
  source 1..75: mol_type = other DNA
aattagcgctattaagggcgagaatgtgaggttagatataataggagatggaacccaaagaaaaaaacttgaatt

SEQ ID NO: 510058 - DNA, 75 bp, synthetic construct
  source 1..75: mol_type = other DNA
atgctgatttcatatgtgacattgagaatataaaacttttagcaaaatgccactgtgctttcattaaaaacattt

SEQ ID NO: 510059 - DNA, 75 bp, synthetic construct
  source 1..75: mol_type = other DNA
aagcagtaatagaacgaattgttgaggcttacggttacaagacgcgtcaagccttagctgatcaccttggtattt

SEQ ID NO: 510060 - DNA, 75 bp, synthetic construct
  source 1..75: mol_type = other DNA
tctatatgatgccggaactgttttttttgataaaacaatactacctaaaaatattgtcagccccattgttatcga

SEQ ID NO: 510061 - DNA, 75 bp, synthetic construct
  source 1..75: mol_type = other DNA
ctgatacggggttttctgaccaccttaaccgcggagaaagtcaacgcgtttagccagttccgtcaggtggattaa

SEQ ID NO: 510062 - DNA, 75 bp, synthetic construct
  source 1..75: mol_type = other DNA
ttaccgctgcaattttccaccatgaaaaccggagcgacggatggcgggcgctacaacgtgatgggcggcgggcgt

SEQ ID NO: 510063 - DNA, 75 bp, synthetic construct
  source 1..75: mol_type = other DNA
ggcgtaccggtttgctggccgtggtttggtccggcggcacaacaaggtctgcctgcgcacggttttgcccgcaac

SEQ ID NO: 510064 - DNA, 75 bp, synthetic construct
  source 1..75: mol_type = other DNA
agcctgttctggcacttcctggatgtggtttggatctgtgtgttcactgttgtttatctgatgggggcaatgtaa

SEQ ID NO: 510065 - DNA, 75 bp, synthetic construct
  source 1..75: mol_type = other DNA
tgctgatggtacaaatcgctcgtcgcggcctgaccagcactaaccgtacccgcattatgtgcctgagcctgttct

SEQ ID NO: 510066 - DNA, 75 bp, synthetic construct
  source 1..75: mol_type = other DNA
tacgctgtatggcgttggcagtgtggaagaagaagttgggctacgcggggcgcaaacctcggctgaacacattaa

SEQ ID NO: 510067 - DNA, 75 bp, synthetic construct
  source 1..75: mol_type = other DNA
ttcccaaagcacgatggctaacagatatgcccgcgatacatttcctgcagattgggttgttatctgctcaatgga

SEQ ID NO: 510068 - DNA, 75 bp, synthetic construct
  source 1..75: mol_type = other DNA
ccgattgttgcggttatttatacccacagccataccgaccactatggcggcgtgaaaggcattatctctgaagcc

SEQ ID NO: 510069 - DNA, 75 bp, synthetic construct
  source 1..75: mol_type = other DNA
gttatctacacccacagccacactgaccactatggcggcgtaaaaggtattatctcagaagccgatgtaaaagca

SEQ ID NO: 510070 - DNA, 75 bp, synthetic construct
  source 1..75: mol_type = other DNA
atgaaagccgttgtcatacaaaatcgtggtggtcagaaagtaatcgaacggatactcatggcttatgacttcaag

SEQ ID NO: 510071 - DNA, 75 bp, synthetic construct
  source 1..75: mol_type = other DNA
tgagcaggattgttattgcgttaactgccgtcagcggcatgatggtaaataccgcttacgcgaaagaggaagcga

SEQ ID NO: 510072 - DNA, 75 bp, synthetic construct
  source 1..75: mol_type = other DNA
catgaatgaaatcggcgacatgattaagctgccgcctgcgcttgccaataactgggccagccgcggctattacgg

SEQ ID NO: 510073 - DNA, 75 bp, synthetic construct
  source 1..75: mol_type = other DNA
aaaatggcggatctggtaaaagcgaagaaagccaaaattattggcaatggcgcgaaactggaagaaattatcgcc

SEQ ID NO: 510074 - DNA, 75 bp, synthetic construct
  source 1..75: mol_type = other DNA
attcgatgtgcacttgaaacaggaatatcattactgtggctcgcaaacggcaatgggccaaaatttctcagtgac

SEQ ID NO: 510075 - DNA, 75 bp, synthetic construct
  source 1..75: mol_type = other DNA
gtgaacgccttatccggcctacgagtggcgcaagaatctgtaggcctgataagcgtagcgcatcaggcatttgtc

SEQ ID NO: 510076 - DNA, 75 bp, synthetic construct
  source 1..75: mol_type = other DNA
catccccttcaccagaacaacatgttgaaacacactccgaagatggttcttatcatgatgttcactataaacaac

SEQ ID NO: 510077 - DNA, 75 bp, synthetic construct
  source 1..75: mol_type = other DNA
atgttgaatacgctgattgtgggtgccagcggttacgctggcgcagagctagtgacctatgtaaatcgccatccg

SEQ ID NO: 510078 - DNA, 75 bp, synthetic construct
  source 1..75: mol_type = other DNA
atttgataaaaatctgttacctgaaaatacgatatttccttgtttgattgaaaatgtaaataacttttacatttg

SEQ ID NO: 510079 - DNA, 75 bp, synthetic construct
  source 1..75: mol_type = other DNA
atgcaacatctcctattggcttgtggtgagtcagttttaatcgtggctttaacttcacatttcggagaatgggat

SEQ ID NO: 510080 - DNA, 75 bp, synthetic construct
  source 1..75: mol_type = other DNA
tgcaatgggccaaagacggggcgctcacacaggaagaggtgcagcaagtgatggacctgctgcataaattaatta

SEQ ID NO: 510081 - DNA, 75 bp, synthetic construct
  source 1..75: mol_type = other DNA
aagattgttgaagagaacacttacggtatcgtgaaagagaagattcctgagggcaaaactacctgctcactgtgc

SEQ ID NO: 510082 - DNA, 75 bp, synthetic construct
  source 1..75: mol_type = other DNA
taacctgcaacgtcaggtgattgccgatatgttgcgtgattgggataagcgttatccagggcgtattgagacaat

SEQ ID NO: 510083 - DNA, 75 bp, synthetic construct
  source 1..75: mol_type = other DNA
atgcagagcgataaagtgcgcgccgttttaatgaaagcagaggatattgtgttggggacgatagggatgggattt

SEQ ID NO: 510084 - DNA, 75 bp, synthetic construct
  source 1..75: mol_type = other DNA
gacagggccgacttttcggcctttatggaaagaattggctattatgatgacgagtcgatgcaggatgatattctt

SEQ ID NO: 510085 - DNA, 75 bp, synthetic construct
  source 1..75: mol_type = other DNA
aagacggctattttgtaaacgtgcgtatcattagtgatgtgaaaacaccgtcaatattcgataaatatgcggttg

SEQ ID NO: 510086 - DNA, 75 bp, synthetic construct
  source 1..75: mol_type = other DNA
atgagcgatgatggcaaacatatcgtgattcgtccgctggcctactgccgcgaaaaagatattcaacgttttgcc

SEQ ID NO: 510087 - DNA, 75 bp, synthetic construct
  source 1..75: mol_type = other DNA
gacgagtcgatgcaggatgatattcttattgacgtgataggtaatgtgtacaaagaaaccggagaacttactgaa

SEQ ID NO: 510088 - DNA, 75 bp, synthetic construct
  source 1..75: mol_type = other DNA
tatggatagcattggttatgaagatgacgaggtaatgcagaacaatgttctcattgatgtgataggtaacgtgta

SEQ ID NO: 510089 - DNA, 75 bp, synthetic construct
  source 1..75: mol_type = other DNA
gatttaacactcaaatttgccgacagggccgacttttcggcctttatggagagtattggctattatgatgacgag

SEQ ID NO: 510090 - DNA, 75 bp, synthetic construct
  source 1..75: mol_type = other DNA
gcatagcgtgctggcggaagttcgccatccagtgatgagcagttttgtgagtttgtttccggcaacgacgatgct

SEQ ID NO: 510091 - DNA, 75 bp, synthetic construct
  source 1..75: mol_type = other DNA
tttcgcccactggctgtatgcatgttcagtattggcgttgtggttcaactggtttatgccgcctggcaaactgcg

SEQ ID NO: 510092 - DNA, 75 bp, synthetic construct
  source 1..75: mol_type = other DNA
attacccacggcgctgcggacatcgcttggcattcaactcgctccggctctggtggcctgtagtgcctggttaag

SEQ ID NO: 510093 - DNA, 75 bp, synthetic construct
  source 1..75: mol_type = other DNA
gacagggccgacttttcggcctttatggatagtattggctattatgatgacgagtcgatgcaggatgatattctt

SEQ ID NO: 510094 - DNA, 75 bp, synthetic construct
  source 1..75: mol_type = other DNA
tgaaagccgcgcgttgtctgcctgttgttctggcagccctgattttcgtcggttgtggcacccatactcccgatc

SEQ ID NO: 510095 - DNA, 75 bp, synthetic construct
  source 1..75: mol_type = other DNA
ggcatgatatcatccctttaggattagaatttacagggttaggtgaaaggttttacaaactttttatggggggag

SEQ ID NO: 510096 - DNA, 75 bp, synthetic construct
  source 1..75: mol_type = other DNA
gcaactggccctttgggagctgccggggctggttcgttaggggtgattgtcgcgaaagctggtacaaaacttctc

SEQ ID NO: 510097 - DNA, 75 bp, synthetic construct
  source 1..75: mol_type = other DNA
tgctggtcgcacctctgcaaaagagaaaaacgcgacgctgattgaagcgattaaatcagcgaagttaccgcacga

SEQ ID NO: 510098 - DNA, 75 bp, synthetic construct
  source 1..75: mol_type = other DNA
atgcaggatggtgtccggattgcccgtgataatcctgacagcggtgtggtagtgagaatcgccggtgaaggccgt

SEQ ID NO: 510099 - DNA, 75 bp, synthetic construct
  source 1..75: mol_type = other DNA
agttgtttaaccaactaccgcaagaactgaacgattctcagcgtcgcgagaaaacactgctggcggcagagatta

SEQ ID NO: 510100 - DNA, 75 bp, synthetic construct
  source 1..75: mol_type = other DNA
ctgctggcggttctggtgatgtcctttctggtcactatgctattcaactccaaactctctgacgatccgatttat

SEQ ID NO: 510101 - DNA, 75 bp, synthetic construct
  source 1..75: mol_type = other DNA
gacagggccgacttttcggcctttatggagaggattggctattatgatgacgagtcgatgcaggatgatattctt

SEQ ID NO: 510102 - DNA, 75 bp, synthetic construct
  source 1..75: mol_type = other DNA
gacagggccgacttttcggcctttatggacagcattggctattatgatgacgagtcgatgcaggatgatattctt

SEQ ID NO: 510103 - DNA, 75 bp, synthetic construct
  source 1..75: mol_type = other DNA
aatccgggcagacagtcattatcagtggcttccagcagtcagggcgtcgcagtggaaaacagggtgtcggcacac

SEQ ID NO: 510104 - DNA, 75 bp, synthetic construct
  source 1..75: mol_type = other DNA
cgatgggtgaaacaattacgtgatgagcggcagggaaaaacaccaaaaacctcccccattaccccggaacaaatt

SEQ ID NO: 510105 - DNA, 75 bp, synthetic construct
  source 1..75: mol_type = other DNA
tcgctgaagttgcgaaggaacaaggcgtcaaaccttgccgtccgctgtctactgcagtggtatccgcgcagattg

SEQ ID NO: 510106 - DNA, 75 bp, synthetic construct
  source 1..75: mol_type = other DNA
tcttactttatttctgtttttaaagacttctatggtatgacgccactgcattatgtcagtcagcacaaagaatgt

SEQ ID NO: 510107 - DNA, 75 bp, synthetic construct
  source 1..75: mol_type = other DNA
agaagccgggctgagtacctacgaaaaagagtgtgcaaaacgcggcgatgactatcaggaaatttttgcccagca

SEQ ID NO: 510108 - DNA, 75 bp, synthetic construct
  source 1..75: mol_type = other DNA
atgggaaagaacctattagccttaatagctaaccatatggcgttattaaattgtgaaaataatattatcgacgtc

SEQ ID NO: 510109 - DNA, 75 bp, synthetic construct
  source 1..75: mol_type = other DNA
gtaaatgaattaatgatggacggtaaaaatatctctcaggtatcacagtcctgcggctacaacagtacgtcgtaa

SEQ ID NO: 510110 - DNA, 75 bp, synthetic construct
  source 1..75: mol_type = other DNA
tgtctggataagggtgaatgggaaagaacctattagccttaaagctaaccatatggcgttattaaattgtgaaaa

SEQ ID NO: 510111 - DNA, 75 bp, synthetic construct
  source 1..75: mol_type = other DNA
tcgcgcggaaatgcccgtgctgacgatctggtcagaaataatggctatgcggcaaacgccgtgcagctccaccag

SEQ ID NO: 510112 - DNA, 75 bp, synthetic construct
  source 1..75: mol_type = other DNA
ttctcattctgggaggcccgttccgggtggtgccgtgccgagtggattggtgccggtcgtatggcgattgatggc

SEQ ID NO: 510113 - DNA, 75 bp, synthetic construct
  source 1..75: mol_type = other DNA
aagttttgctcttcaaaaaaatgcataagtcggaatttaaataaaaatttcccttgtgataaatgtgctttcttt

SEQ ID NO: 510114 - DNA, 75 bp, synthetic construct
  source 1..75: mol_type = other DNA
ggattcagacaatggattttcggcacttgaacaggcgctgctgcggtatatcgccgccggtcttggcgtttccta

SEQ ID NO: 510115 - DNA, 75 bp, synthetic construct
  source 1..75: mol_type = other DNA
gcagatgccgccaaagctatggatatcggcctttccacaatgacaagatgggtcaaacaactgcgtgatgagcgt

SEQ ID NO: 510116 - DNA, 75 bp, synthetic construct
  source 1..75: mol_type = other DNA
cttaagtttacgtattggtatcaccagcggaatcggattatttattgccttaatgggattaaaaaacactggcgt

SEQ ID NO: 510117 - DNA, 75 bp, synthetic construct
  source 1..75: mol_type = other DNA
attcaatgcagaaccatattttgcattcacaattcatcattccggtttcttccaccatcgcaccggacgggcgac

SEQ ID NO: 510118 - DNA, 75 bp, synthetic construct
  source 1..75: mol_type = other DNA
ctgaggaaaaagctacaacgcattgaaatggagaatgaaatattaaaaaaggctactgtagattcaattggtcaa

SEQ ID NO: 510119 - DNA, 75 bp, synthetic construct
  source 1..75: mol_type = other DNA
agtttaaacgcgaatccgctcaactggttgttgaccagaactacatggtggcagatgccgccaaagctatggatg

SEQ ID NO: 510120 - DNA, 75 bp, synthetic construct
  source 1..75: mol_type = other DNA
cgcattgaaatggagaatgaaatattaaaaaaggctaccgcgctcttgatatcagacttcctgaatagttcccga

SEQ ID NO: 510121 - DNA, 75 bp, synthetic construct
  source 1..75: mol_type = other DNA
ttacggctttacccatcaatacccggaactgctggaacaggccgcttatggtctggcggagtggtgcggcaataa

SEQ ID NO: 510122 - DNA, 75 bp, synthetic construct
  source 1..75: mol_type = other DNA
gggaaagttcaggtaatcgctccggcaggctttatggacgaagctatcagcgaaaacgtgctggcgggtaacatc

SEQ ID NO: 510123 - DNA, 75 bp, synthetic construct
  source 1..75: mol_type = other DNA
ggcgtgacgctggcaaccggtgacccaagcattattgcgccaaccaaaacaatcgtcagaactggcgagaagatg

SEQ ID NO: 510124 - DNA, 75 bp, synthetic construct
  source 1..75: mol_type = other DNA
gataaccgggctcggtgattatcctgataatgtgaccatcatcgaaccactgacgccttatgaccgctggaacgg

SEQ ID NO: 510125 - DNA, 75 bp, synthetic construct
  source 1..75: mol_type = other DNA
gtaatccagtgcgcccttgaaacgggcacctcgcttaattggctcacaactggacatggttcaaagcaaacttca

SEQ ID NO: 510126 - DNA, 75 bp, synthetic construct
  source 1..75: mol_type = other DNA
attattgtggcgaccgaagacaatttattgaaaggtgcggcggcacaagcggtacagtgcgccaatattcgtttc

SEQ ID NO: 510127 - DNA, 75 bp, synthetic construct
  source 1..75: mol_type = other DNA
gggctggaatgcggcaggtggtgcgctgggtaactggattgacaacaaagatccgctgtcgggtgcactaatcaa

SEQ ID NO: 510128 - DNA, 75 bp, synthetic construct
  source 1..75: mol_type = other DNA
atcacttacggcgtgggtaaaacgctggtttcctactatgccgacggcaaaaataccaaacagttcctgccgttt

SEQ ID NO: 510129 - DNA, 75 bp, synthetic construct
  source 1..75: mol_type = other DNA
ggggatgattggcctgggtttctccatcacttatggcgtgggtaaaacactggtttcctattacgccgacggcaa

SEQ ID NO: 510130 - DNA, 75 bp, synthetic construct
  source 1..75: mol_type = other DNA
ttggtgctgccgatggtattaaaggcacctttgcttacctgattggcgacagctttgccaagttagggttgggga

SEQ ID NO: 510131 - DNA, 75 bp, synthetic construct
  source 1..75: mol_type = other DNA
tgtacgcttttcaggagctgaaactttccaaagaagtggcgattcagggttttacgctgtttgaagcaggcgcgc

SEQ ID NO: 510132 - DNA, 75 bp, synthetic construct
  source 1..75: mol_type = other DNA
agctttgccaagttaggtctggggatgattgccgatggtactccggtattcggcctcaccggctgggctggaacc

SEQ ID NO: 510133 - DNA, 75 bp, synthetic construct
  source 1..75: mol_type = other DNA
gcactcaaactggctcggttaggaaggccagttaaaatcatgatcggcggggtaaccggctgggaagatgaaggc

SEQ ID NO: 510134 - DNA, 75 bp, synthetic construct
  source 1..75: mol_type = other DNA
cgtctggggaatgcccgtgcagatgatctggtacgcaataacggtatagcggccaatgcggtggccctgcataag

SEQ ID NO: 510135 - DNA, 75 bp, synthetic construct
  source 1..75: mol_type = other DNA
aagcgagaacagcctggggaaatgccaactggatcggctcaggccgcatggctattgacgggctgaaagaggtac

SEQ ID NO: 510136 - DNA, 75 bp, synthetic construct
  source 1..75: mol_type = other DNA
cagatgagttactcgactgcgcgcgcaagcgctaacgagtcatgggcgtacttcatgggccgtcgcaagtttgtg

SEQ ID NO: 510137 - DNA, 75 bp, synthetic construct
  source 1..75: mol_type = other DNA
gaacgcagcgaaacggcgcagcaaattatcgaccgtctgcgcgtgaagctggcgaaagaaccgggggcgaatctg

SEQ ID NO: 510138 - DNA, 75 bp, synthetic construct
  source 1..75: mol_type = other DNA
acgccggtggtgtatctctttttcgaccgtctgcgactgcgtttttcgcgtaaacctaaacaagcggtaaccgag

SEQ ID NO: 510139 - DNA, 75 bp, synthetic construct
  source 1..75: mol_type = other DNA
tgttaactccgatcaggaagataatggcgcggagatgaaccttatttacgatcgcgacaccatggcgcgattggg

SEQ ID NO: 510140 - DNA, 75 bp, synthetic construct
  source 1..75: mol_type = other DNA
caggcgaagatgtcgttgctcaaaaaacaccgtgtagttttgatgtctcggtatgggagtttttctggccgttta

SEQ ID NO: 510141 - DNA, 75 bp, synthetic construct
  source 1..75: mol_type = other DNA
cagcagggaaatacttcaacggagctgtttaccaccattgaaggcaactacgctgatgcagtgcgcttgttgacc

SEQ ID NO: 510142 - DNA, 75 bp, synthetic construct
  source 1..75: mol_type = other DNA
atcaaggtgtttgattatcaactggatattccgggcgtgcgggcgcaaacccatactctggcaaccggtccggtt

SEQ ID NO: 510143 - DNA, 75 bp, synthetic construct
  source 1..75: mol_type = other DNA
aacgccaaaccggctattttgctgatgatccgcaagctgccggaagccaatattatccagacggtagacagcatc

SEQ ID NO: 510144 - DNA, 75 bp, synthetic construct
  source 1..75: mol_type = other DNA
acatcagtgctctggaaaagatgttcgttatcaataaagaaggcaaagcgatccccttgtcgtatttcgctaaat

SEQ ID NO: 510145 - DNA, 75 bp, synthetic construct
  source 1..75: mol_type = other DNA
acgccggtggtgtatctctttttcgaccgtctgcggctgcgtttttcgcgtaaacctaaacaaacggtaaccgag

SEQ ID NO: 510146 - DNA, 75 bp, synthetic construct
  source 1..75: mol_type = other DNA
tttcgcccgattatgatgactaccctggcggcgctgtttggtgcgctgccgctggtgttgtcgggcggtgacggc

SEQ ID NO: 510147 - DNA, 75 bp, synthetic construct
  source 1..75: mol_type = other DNA
cgattgatctgcaaattgctcaggatcgctcccccaccattcgcgcctcgctggaagaagtcgagcaaacgctga

SEQ ID NO: 510148 - DNA, 75 bp, synthetic construct
  source 1..75: mol_type = other DNA
cgaccggaaaatcgctctcggacgccagtgcggcgatcgatcgcgcaatgacccagcttggtgtgccttcgacgg

SEQ ID NO: 510149 - DNA, 75 bp, synthetic construct
  source 1..75: mol_type = other DNA
gcgcgtccgtcgctgttaatcaccaccgacgatcaactgccgcgctttgccgatgttccagatttaacccgcctt

SEQ ID NO: 510150 - DNA, 75 bp, synthetic construct
  source 1..75: mol_type = other DNA
cgatctcacagccagccgttttattgccgatccgttcgctcctggtgaacgcatgtatcgtactggcgatgtggc

SEQ ID NO: 510151 - DNA, 75 bp, synthetic construct
  source 1..75: mol_type = other DNA
gcggtacgctggcgcagggtattgcggcgcgactgcgtgcccgtggcgaacaggtggcatttcttggcttgctgg

SEQ ID NO: 510152 - DNA, 75 bp, synthetic construct
  source 1..75: mol_type = other DNA
agattgtgctcatgtggatattatctcgccaatggcatttgaaaaaatcgggccaattattttggcgacgctaaa

SEQ ID NO: 510153 - DNA, 75 bp, synthetic construct
  source 1..75: mol_type = other DNA
tacgatgccgaacaaattgtccgtgacagcgggcgagcggcgggagaggaaccgctgttcggtccggtactcaat

SEQ ID NO: 510154 - DNA, 75 bp, synthetic construct
  source 1..75: mol_type = other DNA
ggcaagctggatcgcaaagctctgccgttgccggaactaaaagcccatacgtcgggacgtgcgctgaaaacgggc

SEQ ID NO: 510155 - DNA, 75 bp, synthetic construct
  source 1..75: mol_type = other DNA
tgcgcagttgccgctcagcgccaatggcaagctggatcgcaaagctctgccgttgccggaactaaaagcccatac

SEQ ID NO: 510156 - DNA, 75 bp, synthetic construct
  source 1..75: mol_type = other DNA
atgtcgatattatgctgccaggtgagtatgcgcagctggcgcagatcaacgccactcaggttgagattccagaaa

SEQ ID NO: 510157 - DNA, 75 bp, synthetic construct
  source 1..75: mol_type = other DNA
ctgcgtgcccgtggcgaacaggtggcatttcttggcttgctggatacctggccgccagaaacgcaaaactggcag

SEQ ID NO: 510158 - DNA, 75 bp, synthetic construct
  source 1..75: mol_type = other DNA
cgcatgggattcgaaaccattctgccgttgcgtgaaggtaatggcccgacgctgttttgtttccatccggcatcc

SEQ ID NO: 510159 - DNA, 75 bp, synthetic construct
  source 1..75: mol_type = other DNA
gtgacgtgcaggatgccgatgctgatttcttcgcgcttggcggtcattcgctactggcaatgaaactggcagcgc

SEQ ID NO: 510160 - DNA, 75 bp, synthetic construct
  source 1..75: mol_type = other DNA
tgttgcctgacgaatatgcgcggctggcgcagataaacgccacccaggtagaaattcctgaaaccacgctgagcg

SEQ ID NO: 510161 - DNA, 75 bp, synthetic construct
  source 1..75: mol_type = other DNA
gggaattccgccagctggctatgcaactttcaggtgtgcagcgtaccgatttagcccttgcgctggcggctttgt

SEQ ID NO: 510162 - DNA, 75 bp, synthetic construct
  source 1..75: mol_type = other DNA
acatcagtgcgctggaaaaaatgttcgttatcaataacgaaggcaaagcgatcccgctgtcgtatttcgctaaat

SEQ ID NO: 510163 - DNA, 75 bp, synthetic construct
  source 1..75: mol_type = other DNA
tctggaaggtaagcacgctctcgaacgcccgaaaccaactgatgcagtatcccgggcgctacaacatgatctcag

SEQ ID NO: 510164 - DNA, 75 bp, synthetic construct
  source 1..75: mol_type = other DNA
gaaaaattatcgtcgcgaaagataacgaagatgaagtggggctaattaacggtgaaggatgcctgatagccgatc

SEQ ID NO: 510165 - DNA, 75 bp, synthetic construct
  source 1..75: mol_type = other DNA
aaaccataaccgctgcacaccagagcaaacgctgcgttatctcaaccgactctctggtccctttctcgaccgctt

SEQ ID NO: 510166 - DNA, 75 bp, synthetic construct
  source 1..75: mol_type = other DNA
tgaaaagaattttcatggaaatccatccgatcttatattctggcccgatgaatggtttcaggatccagatatgtt

SEQ ID NO: 510167 - DNA, 75 bp, synthetic construct
  source 1..75: mol_type = other DNA
ccgtaaaagtcagcagcaaaaaaataagagaattagcacagaaagctaaagagatacttgcagctatagatagtg

SEQ ID NO: 510168 - DNA, 75 bp, synthetic construct
  source 1..75: mol_type = other DNA
ctggatgccttgcgagagccgattgaatccgggcagatccatctttcacgcacacgagcaaaaataacctatcca

SEQ ID NO: 510169 - DNA, 75 bp, synthetic construct
  source 1..75: mol_type = other DNA
gaaaagaactcccgccacaggcccatccgttgtttgccgacctggccagctgcggttttcccagccctgccgctg

SEQ ID NO: 510170 - DNA, 75 bp, synthetic construct
  source 1..75: mol_type = other DNA
ttgactttgaatggatgaacaaggcgttgttttacaatacctggagtcgcacgaacagttattttcagaataccg

SEQ ID NO: 510171 - DNA, 75 bp, synthetic construct
  source 1..75: mol_type = other DNA
ctcaggttgcagggaaaggcaagcttaaacaaatcgaccgtgaaaagagtttgcaggcattgatgacgaccaacc

SEQ ID NO: 510172 - DNA, 75 bp, synthetic construct
  source 1..75: mol_type = other DNA
cacacagatgtacggtaagccggtgagtgaactgagtgagacagagaaacagacggtctcgacactggcaacggt

SEQ ID NO: 510173 - DNA, 75 bp, synthetic construct
  source 1..75: mol_type = other DNA
atgtttaagctccttatcaccctgattaactgccagaacggcgacgttcgccagatgattcatgcccgggaatac

SEQ ID NO: 510174 - DNA, 75 bp, synthetic construct
  source 1..75: mol_type = other DNA
atgcctgtcgtatggcatattcccgcaatgacaaacaggggcgattaacccacaaatgcgcagtaaaaatcatgg

SEQ ID NO: 510175 - DNA, 75 bp, synthetic construct
  source 1..75: mol_type = other DNA
aaaaaattttgctcttttgttgcttgaaaagaattttcatggaaatccatctgatcttatattctggcccgatga

SEQ ID NO: 510176 - DNA, 75 bp, synthetic construct
  source 1..75: mol_type = other DNA
gccgtcaacgtgatgttagatccagggctggcgtttggtacgggtacccatccaactacctctctgtgcctgcaa

SEQ ID NO: 510177 - DNA, 75 bp, synthetic construct
  source 1..75: mol_type = other DNA
ggctggcgtttggtacgggtacccatccaactacctctctgtgcctgcaatggctcgacagcctcgatttaaccg

SEQ ID NO: 510178 - DNA, 75 bp, synthetic construct
  source 1..75: mol_type = other DNA
gtggtggtcgctaacatccttgcaggcccattacgtgaactggcaccgttaatcagcgtcctgccggtttcaggc

SEQ ID NO: 510179 - DNA, 75 bp, synthetic construct
  source 1..75: mol_type = other DNA
aggcggcgatcaacgccgcacaaagtctgttgcccagcgggatgcccagccgtccgacctatcgcaaagcgaacc

SEQ ID NO: 510180 - DNA, 75 bp, synthetic construct
  source 1..75: mol_type = other DNA
ctgcccggtgcgtcgccggagacaatggcgtcttccgttgccacgccgctggagcgctcacttgggcgcattgcc

SEQ ID NO: 510181 - DNA, 75 bp, synthetic construct
  source 1..75: mol_type = other DNA
tgccgatgacgtggactatgtccgctttgactgcaaagtcaccggtagcgaagcgcgtaagctgattgcccgctg

SEQ ID NO: 510182 - DNA, 75 bp, synthetic construct
  source 1..75: mol_type = other DNA
tgatgcagaaaagtttgaccctcgctacctggatatggtgctggattctgcatgcaagaacaggaacaagaccat

SEQ ID NO: 510183 - DNA, 75 bp, synthetic construct
  source 1..75: mol_type = other DNA
gtgcgggaaggcgtcccgtgaaacagtgagccgggtgctgacaatgctgcggcttacgggctggctgagtctgtg

SEQ ID NO: 510184 - DNA, 75 bp, synthetic construct
  source 1..75: mol_type = other DNA
ggccctgcgtgtccgggatatcaacccgcgcggcgggctgtccggtctggttacctgggtggcttacatcatggc

SEQ ID NO: 510185 - DNA, 75 bp, synthetic construct
  source 1..75: mol_type = other DNA
gaaaccggcgtcagtctgaaagcccatctgctgcacatcgggctcatcaaaattgacggtgaagaggtttaccgg

SEQ ID NO: 510186 - DNA, 75 bp, synthetic construct
  source 1..75: mol_type = other DNA
ttcagcagagcgtctgagtggtattgtggcagggctgcgggcctccctgcgtaaccgttctgcgataagagcccg

SEQ ID NO: 510187 - DNA, 75 bp, synthetic construct
  source 1..75: mol_type = other DNA
ggatgctgaaatactggatccacgttatctggatatggtggcagatgcctgtatgagccggaaccggaccataag

SEQ ID NO: 510188 - DNA, 75 bp, synthetic construct
  source 1..75: mol_type = other DNA
tcaaccttcgtacaatttactgaaccgctgggtggataaaagcggcctgctggataccctgcaaaataacggcgt

SEQ ID NO: 510189 - DNA, 75 bp, synthetic construct
  source 1..75: mol_type = other DNA
ttgggtggtaatgattacaagaactttaaagtaaaaggtttattcactttcctccttgaagatattatccgtcca

SEQ ID NO: 510190 - DNA, 75 bp, synthetic construct
  source 1..75: mol_type = other DNA
atgctcacctcagaacaagacaggtgttccaatgaaaaaagaaatttcagcgcagagtttaaacgcgaatccgct

SEQ ID NO: 510191 - DNA, 75 bp, synthetic construct
  source 1..75: mol_type = other DNA
agtttaaacgcgaatccgctcaactggttgttgaccagatatacacagtggcagatgccgccaaagctatggatg

SEQ ID NO: 510192 - DNA, 75 bp, synthetic construct
  source 1..75: mol_type = other DNA
agtttaaacgcgaatccgctcaactggtagttgaccagaaatacaccgtggcagatgccgccaaagctatggatg

SEQ ID NO: 510193 - DNA, 75 bp, synthetic construct
  source 1..75: mol_type = other DNA
cttattgaatgaaatggcacagcagcgtggacaatcaatggcgcaaatggcgttaagctggttgctgaaagatga

SEQ ID NO: 510194 - DNA, 75 bp, synthetic construct
  source 1..75: mol_type = other DNA
gcgctggttgccgatcctgccacctttatgggcatggcgggggtgcttacctgtaccgacaaccagtcgcgtaac

SEQ ID NO: 510195 - DNA, 75 bp, synthetic construct
  source 1..75: mol_type = other DNA
gtcagttcggtggcgggtgcgtttatcggtacctcgtctgttaccgcctatattgaaagtacttcaggtgtggct

SEQ ID NO: 510196 - DNA, 75 bp, synthetic construct
  source 1..75: mol_type = other DNA
gctgtatgcaccctggttcagacctggtagggaaggttgaaatgactgagtggttagttgactttgctgcccagc

SEQ ID NO: 510197 - DNA, 75 bp, synthetic construct
  source 1..75: mol_type = other DNA
tgcaatgggccaaagacggggcgctcacacaggaagaggtgcagcaagtgatggacctgctgcaaaagttgctca

SEQ ID NO: 510198 - DNA, 75 bp, synthetic construct
  source 1..75: mol_type = other DNA
ttgggagaaggctctgcattacctgttggtgtccctgttccgtggccttcagcccccccgccgacaggctggctg

SEQ ID NO: 510199 - DNA, 75 bp, synthetic construct
  source 1..75: mol_type = other DNA
cgacagtgccggtggcgggttgtacacggatggaataagtcaggcaagcggtggattatcaacgcttttcagctc

SEQ ID NO: 510200 - DNA, 75 bp, synthetic construct
  source 1..75: mol_type = other DNA
agtttaaacgcgaatccgctcaactggttgttgaccagagatacactgtggcagatgccgccaaagctatggatg

SEQ ID NO: 510201 - DNA, 75 bp, synthetic construct
  source 1..75: mol_type = other DNA
aaagagttcgatctgagtaacccgctggttcaggcaaagctcaaagaacgctacggcaaaaatattccgcttgag

SEQ ID NO: 510202 - DNA, 75 bp, synthetic construct
  source 1..75: mol_type = other DNA
atatcccgcttgaagaaacggtggtttcaccacaggccgttttcgatgcgccacaactcactaccgtcgctaaag

SEQ ID NO: 510203 - DNA, 75 bp, synthetic construct
  source 1..75: mol_type = other DNA
ctacggcaaaaatattccgcttgaggaaacggtggtttcaccacaagccgttttcgacgcgccacaactcaccac

SEQ ID NO: 510204 - DNA, 75 bp, synthetic construct
  source 1..75: mol_type = other DNA
atgaaagatttaacactcaaatttgcagacaggaccgacttttcgacctttatggatagcattggttatgaagat

SEQ ID NO: 510205 - DNA, 75 bp, synthetic construct
  source 1..75: mol_type = other DNA
gattcgcatccattcgatcaaccgggaacttaactttttctaccgctttttaacgcgttttttcgctgctttcca

SEQ ID NO: 510206 - DNA, 75 bp, synthetic construct
  source 1..75: mol_type = other DNA
gcgcgtgggcgagcagcagaagttgaaagagttcgacctgagcagcccacaagttcaggcaaagctcaaagaacg

SEQ ID NO: 510207 - DNA, 75 bp, synthetic construct
  source 1..75: mol_type = other DNA
gaggactacatccggggccagacggttatcgaagccaaactggatgcgctgtataacaaaatcgaactgtcgcaa

SEQ ID NO: 510208 - DNA, 75 bp, synthetic construct
  source 1..75: mol_type = other DNA
tcatcgaggccaagctggacgcactctacaacaaactggaagtggtacagcagtatcgtcatacaggaggtcacc

SEQ ID NO: 510209 - DNA, 75 bp, synthetic construct
  source 1..75: mol_type = other DNA
agtttaaacgcgaatccgctcaactggtcgttgaccagacatacacggtggcagatgccgccaaagctatggatg

SEQ ID NO: 510210 - DNA, 75 bp, synthetic construct
  source 1..75: mol_type = other DNA
cagccgtaaattcatgtactagcgatgtagaaaatttcaataagcatttgtcatgcaaatcagctgttaaagaaa

SEQ ID NO: 510211 - DNA, 75 bp, synthetic construct
  source 1..75: mol_type = other DNA
tgcaataaggataactttgatgcatgcaaaacgtgtgaacaattatcaaaggctatcgacttaaaagaacctaat

SEQ ID NO: 510212 - DNA, 75 bp, synthetic construct
  source 1..75: mol_type = other DNA
tcctacagccgccagttcattgcaatgcaataaggataactttgatgcatgcaaaacgtgtgaacaattatcaaa

SEQ ID NO: 510213 - DNA, 75 bp, synthetic construct
  source 1..75: mol_type = other DNA
agagtgattgctgtatgcaccctggttcagacctggtagggaaggttgaaatgactgagtggttagttgactttg

SEQ ID NO: 510214 - DNA, 75 bp, synthetic construct
  source 1..75: mol_type = other DNA
ctttaagtatcagacaaggtattaatatttgcttttttacgtcatcagagttgccggatggtgatgatattcctg

SEQ ID NO: 510215 - DNA, 75 bp, synthetic construct
  source 1..75: mol_type = other DNA
tggccaatgagatgtttatctctggaaacaaaaaacaaaggaaatgtgcgataaagataaaaaatgcacttatgg

SEQ ID NO: 510216 - DNA, 75 bp, synthetic construct
  source 1..75: mol_type = other DNA
ttggatatcgaaaaatattgtacgttaaggccattttttgtacttccagaccgcggtaagggcgatagatcacgt

SEQ ID NO: 510217 - DNA, 75 bp, synthetic construct
  source 1..75: mol_type = other DNA
cagtgtgattaatgacgaagcgttgaatcgtactattaccgttggtcaccagcatcatctgaacgtcgtcggctg

SEQ ID NO: 510218 - DNA, 75 bp, synthetic construct
  source 1..75: mol_type = other DNA
gctacaaaacctttgtttgtgtagaaacggcttacgcttcagaaacgcaaaaagtgaccaaagaaaaacctgcac

SEQ ID NO: 510219 - DNA, 75 bp, synthetic construct
  source 1..75: mol_type = other DNA
tcattgataaagtgaatgacgcgaaagaagatgtactgaccgacggtattcagaccttcactgaccgtaccgatc

SEQ ID NO: 510220 - DNA, 75 bp, synthetic construct
  source 1..75: mol_type = other DNA
ccgcgttaataaaagctgatgaatgcatcatttcaaaaatttcttcgtattctggttttgctgtaacagcctttt

SEQ ID NO: 510221 - DNA, 75 bp, synthetic construct
  source 1..75: mol_type = other DNA
tcacacactccctctgatttcgtgtggacatcaaaagatagttccttttgcagcgttaataaaagctgatgaatg

SEQ ID NO: 510222 - DNA, 75 bp, synthetic construct
  source 1..75: mol_type = other DNA
aagattgttgaagagaacacttacggtatcgtgaaagagaagattccggagggcaaaaccacttgctcactgtgt

SEQ ID NO: 510223 - DNA, 75 bp, synthetic construct
  source 1..75: mol_type = other DNA
ctgcttttagtgatggtgatgatggatttcaccagcaggataatgttggtactgactgatggcgctctggtctgc

SEQ ID NO: 510224 - DNA, 75 bp, synthetic construct
  source 1..75: mol_type = other DNA
atggtgatgatggatttcaccagcaggataatgttggtactgactgatggcgctctggtctgcggcattgtggta

SEQ ID NO: 510225 - DNA, 75 bp, synthetic construct
  source 1..75: mol_type = other DNA
attctgcaggagcaatcactcgttactttgcaaaagctaacttgcctactcagcaggaaactctcggggaaattg

SEQ ID NO: 510226 - DNA, 75 bp, synthetic construct
  source 1..75: mol_type = other DNA
ctctggcgaagaaaaatcggcattagaaaaagcgcagtccgctctggcggagttaggcattgaatttcagtctga

SEQ ID NO: 510227 - DNA, 75 bp, synthetic construct
  source 1..75: mol_type = other DNA
cagtactgttcggaagtggtgtggaaggtctaccagaatgcgctgggaatgcgtgtgggcgagcagcagaagctg

SEQ ID NO: 510228 - DNA, 75 bp, synthetic construct
  source 1..75: mol_type = other DNA
ttttagccattctgatctggggttttacaggtctgacttttaaagatgccattctgtttacatccgtcggcctga

SEQ ID NO: 510229 - DNA, 75 bp, synthetic construct
  source 1..75: mol_type = other DNA
ctcctccggtacgctgattggtgtgaccgataaagcaggtctggcagatgagaaggggaaattcccgcgcatgaa

SEQ ID NO: 510230 - DNA, 75 bp, synthetic construct
  source 1..75: mol_type = other DNA
gcgctggcggcggagaatgcgggtctgaagtctggcgctatggacgaaatcaaggttatcaaccgtggagggcag

SEQ ID NO: 510231 - DNA, 75 bp, synthetic construct
  source 1..75: mol_type = other DNA
aagcccattccagccactgatgctttcctgtctgaagtgcgggcgcagggggtggatgctgctatagaagctgca

SEQ ID NO: 510232 - DNA, 75 bp, synthetic construct
  source 1..75: mol_type = other DNA
acacgcccggtgatgaacgatgtgaagacgttatcaaatggaccggctttgatggacagaaaaatgcagagaaca

SEQ ID NO: 510233 - DNA, 75 bp, synthetic construct
  source 1..75: mol_type = other DNA
tccggctggttattattcccggtgttgtgcgacatgtgcgtctgacaccggacagtggtgactatattcagttgt

SEQ ID NO: 510234 - DNA, 75 bp, synthetic construct
  source 1..75: mol_type = other DNA
accaaaagcgtcagaaccgcaggaacttacgctggcagcgaatggtcaaagctttggtcgggtgctgactatcgt

SEQ ID NO: 510235 - DNA, 75 bp, synthetic construct
  source 1..75: mol_type = other DNA
gccaaacttctttgccgactggaacacgcgacaggggaagaggaacagaaacattataatgcactaattgggttg

SEQ ID NO: 510236 - DNA, 75 bp, synthetic construct
  source 1..75: mol_type = other DNA
tggaacggttatgtccgcaacttgtgaaaacgccgccgggtggtctgttacaatctgttgatttacatccggcga

SEQ ID NO: 510237 - DNA, 75 bp, synthetic construct
  source 1..75: mol_type = other DNA
atttaaccatatcgatgagatcatccgccgcattgcgctggcgcgtttcgacgtcacgatcaacctgtcgcataa

SEQ ID NO: 510238 - DNA, 75 bp, synthetic construct
  source 1..75: mol_type = other DNA
gaacttgctaaggagctggcttctgtatctcaagggaaacagattaagagtgtggatgatgcactgaacgctttt

SEQ ID NO: 510239 - DNA, 75 bp, synthetic construct
  source 1..75: mol_type = other DNA
aaacccggcattgccgcaccgattatcggaacttcgcgggaagaacagctagatgagttactgaatgcggtggat

SEQ ID NO: 510240 - DNA, 75 bp, synthetic construct
  source 1..75: mol_type = other DNA
cgttggtgatttaccagaaggattatcccgcgcacaaattttgcgctctattgacgacagcctgcgtcgtctcgg

SEQ ID NO: 510241 - DNA, 75 bp, synthetic construct
  source 1..75: mol_type = other DNA
gatttcgcccgtcgtgaagacgtggtcgttgccaccaaagtgttccatcgcgttggtgatttaccggaaggatta

SEQ ID NO: 510242 - DNA, 75 bp, synthetic construct
  source 1..75: mol_type = other DNA
ccagatcgcggtaatcacgcatggacactgccggaagaaagcagccgtcccataattaaacgtgcactggaaggc

SEQ ID NO: 510243 - DNA, 75 bp, synthetic construct
  source 1..75: mol_type = other DNA
ccgaccttcgcgtttcccgactttgcctcggctgtatgacctttggcgagccagatcgcggtaatcacgcatgga

SEQ ID NO: 510244 - DNA, 75 bp, synthetic construct
  source 1..75: mol_type = other DNA
tgatgagctgctgaacgcggtagatatcactttaaagccggaacagattgccgagctggaaacgccgtataagcc

SEQ ID NO: 510245 - DNA, 75 bp, synthetic construct
  source 1..75: mol_type = other DNA
tgctgggctcggcagagatggttgagttggctgaagcgaagctgcatggcgaagatgtttctctggatgcactaa

SEQ ID NO: 510246 - DNA, 75 bp, synthetic construct
  source 1..75: mol_type = other DNA
tatgctttcgataacgtcgctttcccgtatggcgaaaaaagcgaagcgtttattgttgagcgagtggtggcaatt

SEQ ID NO: 510247 - DNA, 75 bp, synthetic construct
  source 1..75: mol_type = other DNA
cggttgtgttcatcatgacgtttaccgttatcagtttcaacgcacgcacaaagggaaacgctcatagacaggatc

SEQ ID NO: 510248 - DNA, 75 bp, synthetic construct
  source 1..75: mol_type = other DNA
ggcattaacttttttgataccgcgaatagctattccgatggcagcagcgaagagatcgtcggtcgcgcattgcgg

SEQ ID NO: 510249 - DNA, 75 bp, synthetic construct
  source 1..75: mol_type = other DNA
ccgacagcgttaacgtgcaggcgctgaacatgggcgcattgtcgttgacgtcgatggtgttaatctcgctgaact

SEQ ID NO: 510250 - DNA, 75 bp, synthetic construct
  source 1..75: mol_type = other DNA
ctccacagccgcttgaggagattggtctcggattactggtttcaacagtcgcatcaatccttaattttgtgacgg

SEQ ID NO: 510251 - DNA, 75 bp, synthetic construct
  source 1..75: mol_type = other DNA
ccactgtgttatcaggaaggcgtggcggtcattccgtggagtccgctggcgcggggccgtttgacgcgtccgtgg

SEQ ID NO: 510252 - DNA, 75 bp, synthetic construct
  source 1..75: mol_type = other DNA
atacaggtggatattaccgaagatgcgaacctgatccagacggaaacccgcaaaaccaacatccgctcgattgat

SEQ ID NO: 510253 - DNA, 75 bp, synthetic construct
  source 1..75: mol_type = other DNA
cgatcgacatggtgagtaaaacgactttcggcctgtttggttgtgaaggacgtatccctaccgccaactacagtc

SEQ ID NO: 510254 - DNA, 75 bp, synthetic construct
  source 1..75: mol_type = other DNA
aagatgcgaacctgatccagacagagacccgcaaaactaatatccgctcgattgatttcaaactctatcgccagc

SEQ ID NO: 510255 - DNA, 75 bp, synthetic construct
  source 1..75: mol_type = other DNA
tcgggacggccagttgccaggtaaaaccatcattttcgcccgtaaccacaaacacgcgctgctgttgaatgaatt

SEQ ID NO: 510256 - DNA, 75 bp, synthetic construct
  source 1..75: mol_type = other DNA
cgcaacggcgagccagtcacgcaaaacgagctggatgaactggcgaagctggtgctgatccagaaccccaatgtt

SEQ ID NO: 510257 - DNA, 75 bp, synthetic construct
  source 1..75: mol_type = other DNA
ttcaaactctatcgccagcaagttcagggggcgctggagccgctgttccagcaaaacccggttctgaagaaaatc

SEQ ID NO: 510258 - DNA, 75 bp, synthetic construct
  source 1..75: mol_type = other DNA
ccgaaggatcgtggcgatcgcaagctggcagctattgctgttagtggccccttcggggcggtgaaagagcaatcc

SEQ ID NO: 510259 - DNA, 75 bp, synthetic construct
  source 1..75: mol_type = other DNA
ctaagtctggtgaatatgcgacacatttttcaacaaattttgccccggcggctatggctggcggggttgccttgt

SEQ ID NO: 510260 - DNA, 75 bp, synthetic construct
  source 1..75: mol_type = other DNA
cttcggggcggtgaaagagcaatccagcggcctgtatgcgcagacgctggctgaacagggatttgtcactctggc

SEQ ID NO: 510261 - DNA, 75 bp, synthetic construct
  source 1..75: mol_type = other DNA
gcagctaaacaatgtggtgtaaatatactcaacccactaccttatttatgtcatgatggtcgctgttggggtagc

SEQ ID NO: 510262 - DNA, 75 bp, synthetic construct
  source 1..75: mol_type = other DNA
tagcgtttggaaaacaatccacggaaatatctatttcgctcgaagagtatcatgctcgtcacaagttggtgtggg

SEQ ID NO: 510263 - DNA, 75 bp, synthetic construct
  source 1..75: mol_type = other DNA
tttatttctaatgtcaagttctggcgtgaagctggctattttgatgctgcaagtcacgaaaaatggttattgcac

SEQ ID NO: 510264 - DNA, 75 bp, synthetic construct
  source 1..75: mol_type = other DNA
aaaaatcacttcccttcttggaagaaaatctgcgagcacatataaaatggaaacagcacggcggcccttgtgaaa

SEQ ID NO: 510265 - DNA, 75 bp, synthetic construct
  source 1..75: mol_type = other DNA
agcattactgcgtatcgggtttgttcgctctttctactcgtggcagatgagtttatcggtgtgattttatcgggc

SEQ ID NO: 510266 - DNA, 75 bp, synthetic construct
  source 1..75: mol_type = other DNA
gttcacagataaaacactctccaggaaacccggggcggttcagaaagcctattcccgtcatctcgatgaaaaata

SEQ ID NO: 510267 - DNA, 75 bp, synthetic construct
  source 1..75: mol_type = other DNA
acctagcaaaagagacaggtattggcctagcaggatcgctaggagcacgcgctttaataaagagcggacagacag

SEQ ID NO: 510268 - DNA, 75 bp, synthetic construct
  source 1..75: mol_type = other DNA
ctgtgtagagcaggtaaaaattatgccgattgtgtgagaaggaatccatcagggagcttagccaaatattataac

SEQ ID NO: 510269 - DNA, 75 bp, synthetic construct
  source 1..75: mol_type = other DNA
agccagtacggggccgtgtcgttacgtgagcaggcccgttattgcaccaccagatattcctgctggctttgtggc

SEQ ID NO: 510270 - DNA, 75 bp, synthetic construct
  source 1..75: mol_type = other DNA
tactctaaaaagaaattctaaattatcccagcatgccatatcagacttaaccggagtcagtagggatacaattag

SEQ ID NO: 510271 - DNA, 75 bp, synthetic construct
  source 1..75: mol_type = other DNA
tgttgatccgtgagctgaccgggagggacgatgatttcactcccatcaggtacccgtatctggctcgttgccggc

SEQ ID NO: 510272 - DNA, 75 bp, synthetic construct
  source 1..75: mol_type = other DNA
gctccggaggcattatcagttgcttgtgcggcttcctgccatgtggaattccattacggtaaaatgacactggaa

SEQ ID NO: 510273 - DNA, 75 bp, synthetic construct
  source 1..75: mol_type = other DNA
tctggccggtattcaatgaaaatcgaacgctgtgtgtaaatacacttagcgccgggcaggagccgctttcaaacc

SEQ ID NO: 510274 - DNA, 75 bp, synthetic construct
  source 1..75: mol_type = other DNA
acgcgaggcactaggaaacgaagggttccagcgtttagcaagagctggaattgtggcatcgctaagcggaatggc

SEQ ID NO: 510275 - DNA, 75 bp, synthetic construct
  source 1..75: mol_type = other DNA
ctggaattgatataaacgcattaacaccaggaatgcgatctggaagtcgtggaattgcacaagccgaaggcgcat

SEQ ID NO: 510276 - DNA, 75 bp, synthetic construct
  source 1..75: mol_type = other DNA
gatcgaccgacagacccttacgcgcaagccggtgaaacaattggtgggtatctcctgccaattggcacagcggca

SEQ ID NO: 510277 - DNA, 75 bp, synthetic construct
  source 1..75: mol_type = other DNA
gcatataaaaagaatcaattacaataagtatatacacagcgaacataaaggagttgacggtttatatggtagcta

SEQ ID NO: 510278 - DNA, 75 bp, synthetic construct
  source 1..75: mol_type = other DNA
atgacgtggataagctgaaaaaacttgtggaagacctgatcaggaaccacgactttcacaataacagactgacct

SEQ ID NO: 510279 - DNA, 75 bp, synthetic construct
  source 1..75: mol_type = other DNA
caaaaaggatccccctgtttcgccagagcctgccgcgcatagagaaagtcgcagcagttagcgtaaacagcgggc

SEQ ID NO: 510280 - DNA, 75 bp, synthetic construct
  source 1..75: mol_type = other DNA
gtggatatacgcaaagagacgcgtgagttttatcggcagttctttggcctgacgttaagcgatgcgcagatgagc

SEQ ID NO: 510281 - DNA, 75 bp, synthetic construct
  source 1..75: mol_type = other DNA
ttcatcatgacgtttgccgttaccagcatcaacgcacgcaaaaagggaaactcccatacacaggatctgttatca

SEQ ID NO: 510282 - DNA, 75 bp, synthetic construct
  source 1..75: mol_type = other DNA
aaaccaggactggattgacctggccggcggcaaaaatatcgctgaaaattggtttggcgagcatcaacaaaaccg

SEQ ID NO: 510283 - DNA, 75 bp, synthetic construct
  source 1..75: mol_type = other DNA
ctctattacgaattactgagcatgatttcgcttactgttgtcgccacgctaaagtccgtggggattattttatcc

SEQ ID NO: 510284 - DNA, 75 bp, synthetic construct
  source 1..75: mol_type = other DNA
aatcatttaaaggaaacaacaaactcattgaggattatgaaaaaatccttattggtatggctgacaataacaaag

SEQ ID NO: 510285 - DNA, 75 bp, synthetic construct
  source 1..75: mol_type = other DNA
agtgtgatgccaattatattttcacgttgaaaggtaaaatagatattatcaatgcattaaataagaatcctgatg

SEQ ID NO: 510286 - DNA, 75 bp, synthetic construct
  source 1..75: mol_type = other DNA
atgatcatcgcaaggcagaaatttatcatggaaaaatctgggataaggttcctgcgtctgcctggcggaatgtga

SEQ ID NO: 510287 - DNA, 75 bp, synthetic construct
  source 1..75: mol_type = other DNA
cccttgcgctggcggtggtggcttgcaatacagccagtaccgtttcgcttcctgcattacgcgaaaagttcgctt

SEQ ID NO: 510288 - DNA, 75 bp, synthetic construct
  source 1..75: mol_type = other DNA
gttggctgaagcgaagctgcatggcgaagatgtttctctggatgcgctaaaacgtatcctacgcccgtggttaag

SEQ ID NO: 510289 - DNA, 75 bp, synthetic construct
  source 1..75: mol_type = other DNA
gtctggcagattgaaatcttcgatgagaaagggcgtttgtgctgttcgtcacgattgacgaccgccattttgtga

SEQ ID NO: 510290 - DNA, 75 bp, synthetic construct
  source 1..75: mol_type = other DNA
accgaccttaacgccggtcgctgccgcgtgcagaccggcggcatgtgcaccgactggcttcagtggctgacccat

SEQ ID NO: 510291 - DNA, 75 bp, synthetic construct
  source 1..75: mol_type = other DNA
ggatttattccggcgataaccccgcaccgtctgcgtcggcggatgccctgcatatccgtttccctgacggggcgg

SEQ ID NO: 510292 - DNA, 75 bp, synthetic construct
  source 1..75: mol_type = other DNA
tcggagagtctggtaagaaaggtcggagagtttctgaaataccgcggagccgatgcagccgaaaaatccataacc

SEQ ID NO: 510293 - DNA, 75 bp, synthetic construct
  source 1..75: mol_type = other DNA
atgaatacatcaaatatcattcaagagcttgcccgtgcaatacgcaacctcattcgcacaggggtggtgactgag

SEQ ID NO: 510294 - DNA, 75 bp, synthetic construct
  source 1..75: mol_type = other DNA
gccgtctgcctcacccgatgccctgcatgtctcgtttcctgacggggcggttattgagtacgaacccgaaaacgg

SEQ ID NO: 510295 - DNA, 75 bp, synthetic construct
  source 1..75: mol_type = other DNA
gcgacgcatctcgaactctaccgccgttacccgtcgcttggcggcatcgtgcatacccactccactcatgccacc

SEQ ID NO: 510296 - DNA, 75 bp, synthetic construct
  source 1..75: mol_type = other DNA
gtaccccggaacactgccgatagatctctcgcagttgaaatcggtgcgccgcatccgcgaatttgacgatctgat

SEQ ID NO: 510297 - DNA, 75 bp, synthetic construct
  source 1..75: mol_type = other DNA
ctgatagccgccattgaactggacgaacggattggttgttcagccagcctcctgttctccctttcttttatcagt

SEQ ID NO: 510298 - DNA, 75 bp, synthetic construct
  source 1..75: mol_type = other DNA
atgacatcgcagcaattagcgcacttggcggctcaatgttggcggatattatcgccgcgcaatataaagtgattg

SEQ ID NO: 510299 - DNA, 75 bp, synthetic construct
  source 1..75: mol_type = other DNA
tatcgttaggagcagtagggacttcggcggtaagtctgggattaacggcaaattacgcacgtaccggagggcagg

SEQ ID NO: 510300 - DNA, 75 bp, synthetic construct
  source 1..75: mol_type = other DNA
tttactggtgctggtcgttatgacgacactgtgcgtgtggatatttaagcgcatcagaaataatttagaaaattc

SEQ ID NO: 510301 - DNA, 75 bp, synthetic construct
  source 1..75: mol_type = other DNA
tcacctcgaattggcttggttttatgtgtggcctgatattcgtggtagggattgcgataattctgtatgaaattc

SEQ ID NO: 510302 - DNA, 75 bp, synthetic construct
  source 1..75: mol_type = other DNA
gctcgataaaaataaattcactgaaagaacaggagtatcaaccgacgatattgtcgctattggtctggtttatca

SEQ ID NO: 510303 - DNA, 75 bp, synthetic construct
  source 1..75: mol_type = other DNA
ttcttactacagacataagaaatagaggcgcaacggcctcaacgatggaaatagttgcaactaacttactaattt

SEQ ID NO: 510304 - DNA, 75 bp, synthetic construct
  source 1..75: mol_type = other DNA
aatcgtgtttatgttgtcggtggtggggccccgttgatctatgattcgataaaaacggcatggcaccatcttggg

SEQ ID NO: 510305 - DNA, 75 bp, synthetic construct
  source 1..75: mol_type = other DNA
aaaggagagataaaaaaactgtttgagttattagaaattgaaggaagccaaaatccttttcagaaggatgttcaa

SEQ ID NO: 510306 - DNA, 75 bp, synthetic construct
  source 1..75: mol_type = other DNA
atgcacggcaacatcgagcataccggtggtgaactctcatcaaacggtaaggtactgcatacccataaacacccc

SEQ ID NO: 510307 - DNA, 75 bp, synthetic construct
  source 1..75: mol_type = other DNA
cgactggcttcagtggctgacccatcgcgccggacgttcgcgcacgtggtgggcaccttccgagggggaacaggt

SEQ ID NO: 510308 - DNA, 75 bp, synthetic construct
  source 1..75: mol_type = other DNA
tagttcattcgtcaaaggggattcatgcaaagtatgaagtagacgtatttattgaaagtatcagagcacatattc

SEQ ID NO: 510309 - DNA, 75 bp, synthetic construct
  source 1..75: mol_type = other DNA
acggtacgtttaaatcaaacggcgttcaggtcgacaaacacggtcacggcggtgtgcaaaaaggtggagcctgga

SEQ ID NO: 510310 - DNA, 75 bp, synthetic construct
  source 1..75: mol_type = other DNA
cggtggcccacttttccttaaatttctgggtcaacgactgccctttaaacctgtacccacagagtttgccgatct

SEQ ID NO: 510311 - DNA, 75 bp, synthetic construct
  source 1..75: mol_type = other DNA
cgtctaatggtgtcgttgtccattcgcacaaacatagcggcgttcagtccggtggtagtaatacaggtggcccgg

SEQ ID NO: 510312 - DNA, 75 bp, synthetic construct
  source 1..75: mol_type = other DNA
aacgcataccagctactatattgcagatcaactggttagaaacagaaatgctgatgatttattcgaaattgttgt

SEQ ID NO: 510313 - DNA, 75 bp, synthetic construct
  source 1..75: mol_type = other DNA
taaggcatggaaccaccttggcgaaaagggggttcttatggatgaacctcagacagcgctggtccaggttttttc

SEQ ID NO: 510314 - DNA, 75 bp, synthetic construct
  source 1..75: mol_type = other DNA
gcggtgaactctcatcaaacggtaaggtactgcatacccataaacaccccggcgacagcggcggcacaaccgggg

SEQ ID NO: 510315 - DNA, 75 bp, synthetic construct
  source 1..75: mol_type = other DNA
cctatccgccagtttaccttccgccacctgcgggggaaccgtttgtcgacagtttcgtgcgcggattcggctaca

SEQ ID NO: 510316 - DNA, 75 bp, synthetic construct
  source 1..75: mol_type = other DNA
gggtacaggcaaaacccgcgtggcaatagcgctaagcaaactgatgattgatgcccgctgggtaaaacgcgtcct

SEQ ID NO: 510317 - DNA, 75 bp, synthetic construct
  source 1..75: mol_type = other DNA
accaacccggaagagctggatgtgctctggtcggccatcgtcgaaaaagtggaacgcctgccgccgcatttggcg

SEQ ID NO: 510318 - DNA, 75 bp, synthetic construct
  source 1..75: mol_type = other DNA
ctccgaaaacacagcaggagctgctatctgttctggccccgctgatgcagtggctggacgtgcgcgggcaaagcg

SEQ ID NO: 510319 - DNA, 75 bp, synthetic construct
  source 1..75: mol_type = other DNA
atttggcgcggtgaaagagcaatccagcggcctgtatgcgcagacgctggcggaacgagggtttgttaccctggc

SEQ ID NO: 510320 - DNA, 75 bp, synthetic construct
  source 1..75: mol_type = other DNA
taaatgggataaaacgttcgccgagagccagaaagtcgatcaccgtaaagtatcgttcccgaaccgatatggcat

SEQ ID NO: 510321 - DNA, 75 bp, synthetic construct
  source 1..75: mol_type = other DNA
gaattgatccaggttgccgatagtttagttcgccataatattgatggcgttattgcaaccaataccacactcgat

SEQ ID NO: 510322 - DNA, 75 bp, synthetic construct
  source 1..75: mol_type = other DNA
gctgggtaaaacgcgtcctgtttctttgtgaccgcaaagaactacgtaaacaggcggcgaatgcctttaatcaat

SEQ ID NO: 510323 - DNA, 75 bp, synthetic construct
  source 1..75: mol_type = other DNA
ctctctattgatgaagcggaaacccgccgccgcctgattgactcccgcctgcttgctgctgactggaatgtaggt

SEQ ID NO: 510324 - DNA, 75 bp, synthetic construct
  source 1..75: mol_type = other DNA
ttctgccaggtcatcgataactacgatccccgcgctgagcaactgattgatgattttaaaggactggatgaaagc

SEQ ID NO: 510325 - DNA, 75 bp, synthetic construct
  source 1..75: mol_type = other DNA
cgcagcgtaagttcgacaaacaggcggtggatttagtcgctcaccagctccgcgagcaaatcaacgcgctggatg

SEQ ID NO: 510326 - DNA, 75 bp, synthetic construct
  source 1..75: mol_type = other DNA
atcgctggcgcaaaaacgcttcgaagcgtgggttatgctgggggccgctgcgcagcgtaagttcgacaaacaggc

SEQ ID NO: 510327 - DNA, 75 bp, synthetic construct
  source 1..75: mol_type = other DNA
caggcggcgaatgcctttaatcaattcaccaatgagccgctgtatgtggtcggtaaatcgaaaaaagcagacagg

SEQ ID NO: 510328 - DNA, 75 bp, synthetic construct
  source 1..75: mol_type = other DNA
attctaccgccgaccgtcgtgccgttctgcaatatctgaatgaacagcgctggaaggatgcgcagagcggaacgt

SEQ ID NO: 510329 - DNA, 75 bp, synthetic construct
  source 1..75: mol_type = other DNA
tttcaacagcggacgcactctgcaccagtgaccatgcgtgatacacaacgtcaggctgcttcacagcaatttcat

SEQ ID NO: 510330 - DNA, 75 bp, synthetic construct
  source 1..75: mol_type = other DNA
gagaaagttcagaatcagcaacgaccgctgagccaacagcaaagggatagcgctcgccagcgaattcagtcagca

SEQ ID NO: 510331 - DNA, 75 bp, synthetic construct
  source 1..75: mol_type = other DNA
cgccaatacattgaacaacagcaaacacctggtcaggtggaaaaccgcgccttatatccccgccctgaaggacgg

SEQ ID NO: 510332 - DNA, 75 bp, synthetic construct
  source 1..75: mol_type = other DNA
gcagcacagaagtttaatgaagctgaacactatggcaattatgacgacttccgcgagttcagccatcaccagtct

SEQ ID NO: 510333 - DNA, 75 bp, synthetic construct
  source 1..75: mol_type = other DNA
ctggtctttgtcaccagatacagacgtcagatttttgaccatgacgcgacagaaaaactacgcgcttacttttca

SEQ ID NO: 510334 - DNA, 75 bp, synthetic construct
  source 1..75: mol_type = other DNA
ccaaactaccgtaatggtgtgccctatcatgatcaggatatggcaaagcggtttcatcaaaccgatgtcaacggc

SEQ ID NO: 510335 - DNA, 75 bp, synthetic construct
  source 1..75: mol_type = other DNA
aatgtatgtgctgattttgaagctgaactggttgaaatggatggcgaaccagatcacgtccatttgttaattaat

SEQ ID NO: 510336 - DNA, 75 bp, synthetic construct
  source 1..75: mol_type = other DNA
atgcaaaagctgaaacagcaggtatttgaagccaacatggatctgccgcgttacgggctggtggtgatcaagccc

SEQ ID NO: 510337 - DNA, 75 bp, synthetic construct
  source 1..75: mol_type = other DNA
aaaaactgacgcctttgaaagaattttaggggctcagttttacgactacatgtcaccggacagtacagtcattgt

SEQ ID NO: 510338 - DNA, 75 bp, synthetic construct
  source 1..75: mol_type = other DNA
ccgtacatgccccatcacatcctcaacatcaaagtattagagccttgcaaaccattatgcgtctcagtttgtctc

SEQ ID NO: 510339 - DNA, 75 bp, synthetic construct
  source 1..75: mol_type = other DNA
tgtcggcagctttcgattctgcttgtcgtcaagaattgtcaaagtcgttagcgcaggcatatatgctttcccatc

SEQ ID NO: 510340 - DNA, 75 bp, synthetic construct
  source 1..75: mol_type = other DNA
ccatacccactccactcatgccaccgcgtgggcgcaggcggggctggcgatcccggcgttaggcaccacgcacgc

SEQ ID NO: 510341 - DNA, 75 bp, synthetic construct
  source 1..75: mol_type = other DNA
gctcgctgtatgaagatgtcaaacgcaaagcgacaaccacaattaccgcttatcccgttagcactaccggaaaat

SEQ ID NO: 510342 - DNA, 75 bp, synthetic construct
  source 1..75: mol_type = other DNA
tagaagatttaaagaataaatatactcatgatgtgagcgcaaatggaaaaaatatatcgcagacctctcttgtta

SEQ ID NO: 510343 - DNA, 75 bp, synthetic construct
  source 1..75: mol_type = other DNA
ctaaagcacaggctcttgaacgatatggcgttaattttaaaggagagaaaaaattaattgcattcagagccgggt

SEQ ID NO: 510344 - DNA, 75 bp, synthetic construct
  source 1..75: mol_type = other DNA
tgatgccaggcgttattgcatctatgctgccagatcattctgctgtactggcagaaaactgtcattttcgctatg

SEQ ID NO: 510345 - DNA, 75 bp, synthetic construct
  source 1..75: mol_type = other DNA
caggacggcatgagcgtcccgctctatattcatctcgccggtagccagggtcgccaggacgatcagcgaatcggc

SEQ ID NO: 510346 - DNA, 75 bp, synthetic construct
  source 1..75: mol_type = other DNA
tatcccgttagcactaccggaaaattacccgctgccggggattatagcggtattgctaccatacatgtcgaactg

SEQ ID NO: 510347 - DNA, 75 bp, synthetic construct
  source 1..75: mol_type = other DNA
gtgctgacagcatcctggaaggaacaactggagaatctgccggagatgctggagcagattgagtctgcccgggaa

SEQ ID NO: 510348 - DNA, 75 bp, synthetic construct
  source 1..75: mol_type = other DNA
tggaaggccagagaagagaaatgctttctgcgtcagaactcgcgcccctgagaatgaaactgacagagacggaga

SEQ ID NO: 510349 - DNA, 75 bp, synthetic construct
  source 1..75: mol_type = other DNA
attcagtggtaacctcttctatatgtcgttcatggatattgataagggaacgatgaacatcggaggggtaacgga

SEQ ID NO: 510350 - DNA, 75 bp, synthetic construct
  source 1..75: mol_type = other DNA
gcagatactggtttccggttttggtcaggttgaacgtattacactcagtacatcgatgtcggagctgccggtatg

SEQ ID NO: 510351 - DNA, 75 bp, synthetic construct
  source 1..75: mol_type = other DNA
ttccggcagcaaccgggcaaaactggcaggtgatggtatccggattcgggcaggtggaacgaataaccctgagta

SEQ ID NO: 510352 - DNA, 75 bp, synthetic construct
  source 1..75: mol_type = other DNA
ggatcactgttatggctgatgatgttcctgtgattcattttgcgccgggtacgtttaagggaagtgtggtgagac

SEQ ID NO: 510353 - DNA, 75 bp, synthetic construct
  source 1..75: mol_type = other DNA
gcatcaggtggaggagaagcggattttttacttgtggctgaactggatgcatccgtgctcagttacacggacaaa

SEQ ID NO: 510354 - DNA, 75 bp, synthetic construct
  source 1..75: mol_type = other DNA
tgatttatatgattttttaagtggacttgcattatctgctttttatttgtcaattttattattcactttaaaaga

SEQ ID NO: 510355 - DNA, 75 bp, synthetic construct
  source 1..75: mol_type = other DNA
atggataagctggaaataaacgatcagtttgctgttatcttatttcaagataaaaaaggcggcgcatggtgtaag

SEQ ID NO: 510356 - DNA, 75 bp, synthetic construct
  source 1..75: mol_type = other DNA
aaacgaaggcgaattgcctgccatccctattaagcctgtcaaaatttacaagcgtggtgacgatgatgaagccta

SEQ ID NO: 510357 - DNA, 75 bp, synthetic construct
  source 1..75: mol_type = other DNA
gcagaaaggaagcatatgttcaaacaaaacaagagagagatttaacaggcgttcaaacaaatgttggtgttgtgt

SEQ ID NO: 510358 - DNA, 75 bp, synthetic construct
  source 1..75: mol_type = other DNA
taatctatccataggagaaactaaatttacaggtggcatcactgcacataacagccaaatagccataggtgatca

SEQ ID NO: 510359 - DNA, 75 bp, synthetic construct
  source 1..75: mol_type = other DNA
gcagacctcatttgatcagcctgactggaaaaccggggggtttaaatttgatacattacacctgaacaatgctga

SEQ ID NO: 510360 - DNA, 75 bp, synthetic construct
  source 1..75: mol_type = other DNA
ctccgggaactgcggtacaactgacgctggctccggtgccattgcagaatgccagtattaaacgtcgccggattt

SEQ ID NO: 510361 - DNA, 75 bp, synthetic construct
  source 1..75: mol_type = other DNA
tcattttgcgccgggtacgtttaagggaagtgtggtgagacttccggcagcaaccgggcaaaactggcaggtgat

SEQ ID NO: 510362 - DNA, 75 bp, synthetic construct
  source 1..75: mol_type = other DNA
gtgactcacctgccattcaaattttcggataccagacaaccatgccttatatcgatataaccactatgcgcggga

SEQ ID NO: 510363 - DNA, 75 bp, synthetic construct
  source 1..75: mol_type = other DNA
gtatgattatattctgaatgagctgcacaccctggtaagcgggcatttcggcacatcggaaaaacgggcactgtt

SEQ ID NO: 510364 - DNA, 75 bp, synthetic construct
  source 1..75: mol_type = other DNA
gggctgacctgcaacgagcagaattttatcaccaaagccggggcacagcgttacgcagcggaacacggcctggtg

SEQ ID NO: 510365 - DNA, 75 bp, synthetic construct
  source 1..75: mol_type = other DNA
gcaaaactggcaggtactggtttccggttttggtcaggttgaacgtatcacactcagtacatcaatgtcggagct

SEQ ID NO: 510366 - DNA, 75 bp, synthetic construct
  source 1..75: mol_type = other DNA
cctatgagctaacccgtagccaggtgggcaacagctctgacgtcatttctgcatgggatgatcgccgattaaaga

SEQ ID NO: 510367 - DNA, 75 bp, synthetic construct
  source 1..75: mol_type = other DNA
ccgcgagttaatcctgctaaaatgccagcgccatctgttaacccagttgttgtgaagcaaacgccacaaactact

SEQ ID NO: 510368 - DNA, 75 bp, synthetic construct
  source 1..75: mol_type = other DNA
cagcctggcgtgcgagcattaagcgtgagccgaacggtcgtcagacagttacgacagaagcctttgtcagccagc

SEQ ID NO: 510369 - DNA, 75 bp, synthetic construct
  source 1..75: mol_type = other DNA
tggtaagaaaactggtaacaccccagacggtcgtcgtgctggcgcgccgttcggaccgggtgctaacccgatgca

SEQ ID NO: 510370 - DNA, 75 bp, synthetic construct
  source 1..75: mol_type = other DNA
tagatgtagtcaccttgtccgatggtgaacattacacaaaggaaagcttaagagacccgttagctctgattaaaa

SEQ ID NO: 510371 - DNA, 75 bp, synthetic construct
  source 1..75: mol_type = other DNA
tgaacattacacaagggaatctcttaaagacccgttagctctgattaaaagcattttgataatgcaaagggcgca

SEQ ID NO: 510372 - DNA, 75 bp, synthetic construct
  source 1..75: mol_type = other DNA
cttaaaaaaagaaacatcaaaactacaacagcaggaagcagaacagagtgtcaaatatccaacctttaaaccaaa

SEQ ID NO: 510373 - DNA, 75 bp, synthetic construct
  source 1..75: mol_type = other DNA
gcgacccgatctgggcaaccgaatctatcggtggtatgggcctcgacggtcgtaccctggttaccaaaaacagct

SEQ ID NO: 510374 - DNA, 75 bp, synthetic construct
  source 1..75: mol_type = other DNA
aactgggcctgacgtttacttatatggcgaccgataacattggtgtggaattgctggcagcgacgccgttccgcc

SEQ ID NO: 510375 - DNA, 75 bp, synthetic construct
  source 1..75: mol_type = other DNA
atacccgcagtttggtaacaacgatccgcgtgtagatgacctggctgttgacctggtagaacgtttcatgaagaa

SEQ ID NO: 510376 - DNA, 75 bp, synthetic construct
  source 1..75: mol_type = other DNA
tggatcacttcatggactggctggctaaacagtacatcactgcactgaacatcatccactacatgcacgacaagt

SEQ ID NO: 510377 - DNA, 75 bp, synthetic construct
  source 1..75: mol_type = other DNA
tgagccgatcaaaggcgatgtcctgaactatgatgaagtgatggagcgcatggatcacttcatggactggctggc

SEQ ID NO: 510378 - DNA, 75 bp, synthetic construct
  source 1..75: mol_type = other DNA
ctatctcgtcttgaccgatttgatagcgatatgacgaatactgtagacacactgaagctacaccgtgaacacatc

SEQ ID NO: 510379 - DNA, 75 bp, synthetic construct
  source 1..75: mol_type = other DNA
tagcagcttgtgaacgtttagaagtaaagcacagcttaaccattacacaaagtctcaaaggccaaaaatcagacg

SEQ ID NO: 510380 - DNA, 75 bp, synthetic construct
  source 1..75: mol_type = other DNA
atagagatgatgaactcattaggagcttctcagcaagaaaagatgatgaaccaaatagtgttggacgatcatttg

SEQ ID NO: 510381 - DNA, 75 bp, synthetic construct
  source 1..75: mol_type = other DNA
atagagatgatgaactcgttagaagcttctcagcaagaaaagatgatgaaccagatagtattggacgatcaccta

SEQ ID NO: 510382 - DNA, 75 bp, synthetic construct
  source 1..75: mol_type = other DNA
tgaggtgacggatggtggtttcaaaggtctgaaggatacaatctcggacctccttattcaggttcagacaaaggc

SEQ ID NO: 510383 - DNA, 75 bp, synthetic construct
  source 1..75: mol_type = other DNA
attatcggagtcagtcagcacagctttaaaccagacacaacagacactaacaagagtgaacaactcattagaggc

SEQ ID NO: 510384 - DNA, 75 bp, synthetic construct
  source 1..75: mol_type = other DNA
aaaccagcccgtttagtgctacagaacgcactacaagcggctttagtcggtaagcctgatttgtctacgttcttg

SEQ ID NO: 510385 - DNA, 75 bp, synthetic construct
  source 1..75: mol_type = other DNA
aaagctcaggaaggcaaacacttcctgttgctggaaagcgaaccgaaagagtggcgtgaatggggcaccgccctg

SEQ ID NO: 510386 - DNA, 75 bp, synthetic construct
  source 1..75: mol_type = other DNA
gcctccgggtacgccactggcaccgaaagcccaggaaggcaaacacttcctgttgcaggaaagtgaaccgaaaga

SEQ ID NO: 510387 - DNA, 75 bp, synthetic construct
  source 1..75: mol_type = other DNA
gagttcgttgttgtgccaggcgaaaaagccctgctacaagagccggatgttctgacactgaccctgacagcacca

SEQ ID NO: 510388 - DNA, 75 bp, synthetic construct
  source 1..75: mol_type = other DNA
caggcttcgccactttcacgggcgttaaagggggctatcagcttcgataacctcagcggcgccagcgccagccag

SEQ ID NO: 510389 - DNA, 75 bp, synthetic construct
  source 1..75: mol_type = other DNA
gtcactggaatgacgctgggcacactatctgatcgggtgatgattgcgatgcgcattagtaaacgttatcaacac

SEQ ID NO: 510390 - DNA, 75 bp, synthetic construct
  source 1..75: mol_type = other DNA
gcgatctgatgatccacctgcaagcccccgatctcggttcgctgaacagcggttcattggtctatttccgcaaga

SEQ ID NO: 510391 - DNA, 75 bp, synthetic construct
  source 1..75: mol_type = other DNA
aataaaagaacttattactgaatttgagaggttaggaagaaaggaacttttttataacaaagtgaaattcgattc

SEQ ID NO: 510392 - DNA, 75 bp, synthetic construct
  source 1..75: mol_type = other DNA
tattatagcgaatattttgctgggaaaagatcctcgcttacttgtgattgttggtccatgctcaatccatgacgt

SEQ ID NO: 510393 - DNA, 75 bp, synthetic construct
  source 1..75: mol_type = other DNA
actgattaccgagcattcctggaaacgggggcgctgattgaaaaggatcatcatggttttgttcgttgcgcgcta

SEQ ID NO: 510394 - DNA, 75 bp, synthetic construct
  source 1..75: mol_type = other DNA
tgactggctgttgaatatgtcggtctggtacatggatattgataccgacgtgaaatataaatccaacggcgcagt

SEQ ID NO: 510395 - DNA, 75 bp, synthetic construct
  source 1..75: mol_type = other DNA
ctaagtataaatctggtgttactaccgtgaaagactcggtacgactggatccgtgggtgtttatgttctccgcag

SEQ ID NO: 510396 - DNA, 75 bp, synthetic construct
  source 1..75: mol_type = other DNA
caaattataagctgggtggtgcacagcaacacgatagcgtacgtcttgatccgtgggtgtttatgttctcagcag

SEQ ID NO: 510397 - DNA, 75 bp, synthetic construct
  source 1..75: mol_type = other DNA
tgcccacaaagcgtgcccggactcgccgctggtggagtggcaccaggaagggctgaagctggataaggagtttat

SEQ ID NO: 510398 - DNA, 75 bp, synthetic construct
  source 1..75: mol_type = other DNA
aaacggtatatcagcgggctggtgacggcagcgagggtggtcggccatgagggccgttcggtaacgtatgaatta

SEQ ID NO: 510399 - DNA, 75 bp, synthetic construct
  source 1..75: mol_type = other DNA
ggagcgcataacgtcacggtaagtggtagcgctgtgccgccgcagatgctgctttttgccagtataaatggttcg

SEQ ID NO: 510400 - DNA, 75 bp, synthetic construct
  source 1..75: mol_type = other DNA
tgagcacagcgagaacagtcacacgttagtgctggctgatgccattaatgtccacaaggcatgcgcagattcgcc

SEQ ID NO: 510401 - DNA, 75 bp, synthetic construct
  source 1..75: mol_type = other DNA
gaactgcaccccaccagcgaagtttaccgcccacagcgaaccctgagcaaaccccacaccaaaggcccgcagagc

SEQ ID NO: 510402 - DNA, 75 bp, synthetic construct
  source 1..75: mol_type = other DNA
accctcatgacgggttacacctttacattgatgaatcatccaacggcagaggtcaaccaggaatacctgctggta

SEQ ID NO: 510403 - DNA, 75 bp, synthetic construct
  source 1..75: mol_type = other DNA
acctgctgtgggcgagattcataaagaaatcgcagtatcagaagaaaccgtaacatggatctctctgcaacgaga

SEQ ID NO: 510404 - DNA, 75 bp, synthetic construct
  source 1..75: mol_type = other DNA
ccattctgactgtgcattactggagcgagatggaaaaatttcacttctatctctgcctgtggcggagcgctggtt

SEQ ID NO: 510405 - DNA, 75 bp, synthetic construct
  source 1..75: mol_type = other DNA
gaaaaccgcgtggcggcggggcgcaatcactttgcagaaccggcagctcgtgagccggtagctccgcgctacact

SEQ ID NO: 510406 - DNA, 75 bp, synthetic construct
  source 1..75: mol_type = other DNA
ccgggactcgccggatattttctaatgaatttaaacttcatatggttgaactggcttcgagaccaaatgctaatg

SEQ ID NO: 510407 - DNA, 75 bp, synthetic construct
  source 1..75: mol_type = other DNA
agccgtgaactgctccatcaacgcattgagcagcgttttcatcagatgttggcttcaggttttgaagcagaagtc

SEQ ID NO: 510408 - DNA, 75 bp, synthetic construct
  source 1..75: mol_type = other DNA
agcaaggttgggagtcattgcatcgtcaacttcaggaggtagatccggttgcggcagcaaggattcatccaaatg

SEQ ID NO: 510409 - DNA, 75 bp, synthetic construct
  source 1..75: mol_type = other DNA
ttacagcatttctcgtgaaggtcatattatgaaggatactcacggggaagtttaccggattagaccaaagaaaga

SEQ ID NO: 510410 - DNA, 75 bp, synthetic construct
  source 1..75: mol_type = other DNA
ctacagcatttctcgtgaaggtcatcttctgaaagatactcatggggaggtttaccggattcgaccgaagaagga

SEQ ID NO: 510411 - DNA, 75 bp, synthetic construct
  source 1..75: mol_type = other DNA
atgaaagaatatcacggtgaaaagagatacaaagattacctgttaaagcgttacagcatttctcgtgaaggttac

SEQ ID NO: 510412 - DNA, 75 bp, synthetic construct
  source 1..75: mol_type = other DNA
cgacccacatcaggtggacgtcaacgtgcaccccgccaaacacgaagtgcgtttccatcagtcgcgtctggtgca

SEQ ID NO: 510413 - DNA, 75 bp, synthetic construct
  source 1..75: mol_type = other DNA
gtcaacgtgcaccccgccaaacacgaagtgcgttttcatcagtcgcgtctggtgcatgactttatctatcagggc

SEQ ID NO: 510414 - DNA, 75 bp, synthetic construct
  source 1..75: mol_type = other DNA
gatacaaagattacctgttaaagcgttatagcatttctcgtgaaggccacttaatgaaggatactcacggggaag

SEQ ID NO: 510415 - DNA, 75 bp, synthetic construct
  source 1..75: mol_type = other DNA
atgcgcagcacagcggtcagaaccagcattttacctatgtcaccacgtttgaactgcaccccacctgcgaagttt

SEQ ID NO: 510416 - DNA, 75 bp, synthetic construct
  source 1..75: mol_type = other DNA
aattgcccgtctgactaacgagcgatgggctgatgttgaaccatccttgcgggagtttttttgcgataacggcga

SEQ ID NO: 510417 - DNA, 75 bp, synthetic construct
  source 1..75: mol_type = other DNA
cgcgcaggcgggctatcagtcgccctgttcgtctgacggcagaagaagaccgggaaatcagaaaaagggctgctg

SEQ ID NO: 510418 - DNA, 75 bp, synthetic construct
  source 1..75: mol_type = other DNA
aatgggggattgcgccaatcggatggcgaaatgatgatttgcctgaaattggtaaagacaatacctataagcaga

SEQ ID NO: 510419 - DNA, 75 bp, synthetic construct
  source 1..75: mol_type = other DNA
ggcgttataaaaggcattcggctgggaaatgagagcgtgtttcgtccacatgaaggctatatcaactgggatata

SEQ ID NO: 510420 - DNA, 75 bp, synthetic construct
  source 1..75: mol_type = other DNA
gatgatgaaacaaaagcggcaaccccaaaggctgtgaaagcggtaatggcagaagtgcaggcagcaaaaacgaag

SEQ ID NO: 510421 - DNA, 75 bp, synthetic construct
  source 1..75: mol_type = other DNA
cctgagacgttgcttcgacaggttaacaccgtctcgtttccggacagtgcgatcccaccaggcttcagggggtaa

SEQ ID NO: 510422 - DNA, 75 bp, synthetic construct
  source 1..75: mol_type = other DNA
gcacttgatcaacgtgatacacctgatgacaagggtatttacagttatcggcagacaaataatcggcgtaatcgt

SEQ ID NO: 510423 - DNA, 75 bp, synthetic construct
  source 1..75: mol_type = other DNA
acggttatcaacaggattattggggaatgcatggggccgaacgcagtataggaatgggatacagtacgacctgga

SEQ ID NO: 510424 - DNA, 75 bp, synthetic construct
  source 1..75: mol_type = other DNA
tataacagtggaaatccgtgggtcaaggtgaccggaagagtgaataacaattcacttatgacagatatggcaaat

SEQ ID NO: 510425 - DNA, 75 bp, synthetic construct
  source 1..75: mol_type = other DNA
tgccagaatccaatatattaatgccttcactcgaaaaagttctttatagtggtatgattgctgaaggagatagcg

SEQ ID NO: 510426 - DNA, 75 bp, synthetic construct
  source 1..75: mol_type = other DNA
tgatcaacgtgatattcctgatgataagagtatttatagttatcgccagaccaataatagacgtaaccgtttgca

SEQ ID NO: 510427 - DNA, 75 bp, synthetic construct
  source 1..75: mol_type = other DNA
aatggacaagaacacagctttattcaggctagttcagcggttccaatcctacagcgagaaaacgcattaaaatat

SEQ ID NO: 510428 - DNA, 75 bp, synthetic construct
  source 1..75: mol_type = other DNA
agtcgcacaccatgaggtgattactttcccgtcactggatggagcacaaccaacgattcccggcatgaatatagt

SEQ ID NO: 510429 - DNA, 75 bp, synthetic construct
  source 1..75: mol_type = other DNA
gcggatctgtttggtgcgctgccagaaccgtcaggactggtaaaagcagcagtggcagcagcgcaggccgccgcc

SEQ ID NO: 510430 - DNA, 75 bp, synthetic construct
  source 1..75: mol_type = other DNA
acagctcctgctggatccgagtgagctacccgtgggcagggaaaggattcggcatgatccagatcccgcgtattg

SEQ ID NO: 510431 - DNA, 75 bp, synthetic construct
  source 1..75: mol_type = other DNA
ttgatatgaatccggatggtggaaaagccattactgcgaatgatattgccccgttacccactccggatgcttctg

SEQ ID NO: 510432 - DNA, 75 bp, synthetic construct
  source 1..75: mol_type = other DNA
tttccagaacaaaaccgtggtggatattctcagtgaagtactggatgaatattcctttccggtggaaaagcggct

SEQ ID NO: 510433 - DNA, 75 bp, synthetic construct
  source 1..75: mol_type = other DNA
gatcgttacggtaacaatgacgaaaacagctcctgctgggtccgtgtcagctatccgtgggcagggaaaggattt

SEQ ID NO: 510434 - DNA, 75 bp, synthetic construct
  source 1..75: mol_type = other DNA
ccatcagcgtgggagaagaccgtaatgccaccatcacaaacaatgatgggctttccgtcaaactagctcaaacca

SEQ ID NO: 510435 - DNA, 75 bp, synthetic construct
  source 1..75: mol_type = other DNA
gcgagaacagccacacgctggtgctggcggatgccatcaatggtcataaagcgtgccctgactcgccgctggtgg

SEQ ID NO: 510436 - DNA, 75 bp, synthetic construct
  source 1..75: mol_type = other DNA
catccagcgcctgatgcaggaatgggggatttactggtggtttgagcacagcgagaacagccacacgctggtgct

SEQ ID NO: 510437 - DNA, 75 bp, synthetic construct
  source 1..75: mol_type = other DNA
tgacccacaccagcgactacaaagctttccagaacaaaaccgtggtggagattctggatgaagtcctggctgaat

SEQ ID NO: 510438 - DNA, 75 bp, synthetic construct
  source 1..75: mol_type = other DNA
tttgagcacagcgagaacagccatacgctggtgctggcggatgccatcaatggtcataaagcgtgccctgactcg

SEQ ID NO: 510439 - DNA, 75 bp, synthetic construct
  source 1..75: mol_type = other DNA
cccacccgcgaagtttaccgcccacaacgaaccctgagcaaaccccacaccaaaggcccgcaaagcgccattgtc

SEQ ID NO: 510440 - DNA, 75 bp, synthetic construct
  source 1..75: mol_type = other DNA
cacgaaggatgaaggcgagatgctgacgcgcatccgcatggaagaacaacgaagccctggtagccgggtgcatgg

SEQ ID NO: 510441 - DNA, 75 bp, synthetic construct
  source 1..75: mol_type = other DNA
atattcaactggcagaaaacatgggcattaatggtttacgctacgaccgcgaaaccctgaactggccgatgattg

SEQ ID NO: 510442 - DNA, 75 bp, synthetic construct
  source 1..75: mol_type = other DNA
ttcttccgctcgctctcgtatgccatgggcgtcaccctgcacctgaaaaccaaaggcaaaaacgatcaccaccgt

SEQ ID NO: 510443 - DNA, 75 bp, synthetic construct
  source 1..75: mol_type = other DNA
acgtcgaactggccaataatatgggcatcaccggcctgcgctacaaccgcgaaacgcttaactgggcggcgattg

SEQ ID NO: 510444 - DNA, 75 bp, synthetic construct
  source 1..75: mol_type = other DNA
accgcgacggcaccctgattgcagagccgccgagcgatttccaggttgaccgtttcgacaaactggaatttgaac

SEQ ID NO: 510445 - DNA, 75 bp, synthetic construct
  source 1..75: mol_type = other DNA
tacgtcattggtgatcgggcgaccgatattcagctcgctgaaaacatgggcattagcggattgcgttaccatcgc

SEQ ID NO: 510446 - DNA, 75 bp, synthetic construct
  source 1..75: mol_type = other DNA
cgctttgacaaactcgccttcgagccggaagttgttcccgttttgctgaaactgcaaaaagcaggttttaagctg

SEQ ID NO: 510447 - DNA, 75 bp, synthetic construct
  source 1..75: mol_type = other DNA
atgggcacaccacgatttacacctgaatttaaggaagaagccgtccgtcagataacggaacgcggttattccgtt

SEQ ID NO: 510448 - DNA, 75 bp, synthetic construct
  source 1..75: mol_type = other DNA
aaacgcatatcgttatggctggtcaggttgatgggggcaagaacgctgacgttaggatatgcaatttcatttgcc

SEQ ID NO: 510449 - DNA, 75 bp, synthetic construct
  source 1..75: mol_type = other DNA
tggcgccaaaccttctttctgttgcattaattgagcaacaaaccgggatattaataggatggactgactggtttg

SEQ ID NO: 510450 - DNA, 75 bp, synthetic construct
  source 1..75: mol_type = other DNA
aaagagacgcagattgacgttcaggtgtggctggatcgcgaaggtggcagcaagattaacaccggcgttggcttc

SEQ ID NO: 510451 - DNA, 75 bp, synthetic construct
  source 1..75: mol_type = other DNA
atgagtaagctgattgtcccgcagtggccgctgccaaaaggtgttgcggcctgtagctccactcgtatcggcggc

SEQ ID NO: 510452 - DNA, 75 bp, synthetic construct
  source 1..75: mol_type = other DNA
gcgccagatacttccaagatggaaacatcccgatatccttcgccggagaattgataaggatattaacccctgcat

SEQ ID NO: 510453 - DNA, 75 bp, synthetic construct
  source 1..75: mol_type = other DNA
tgggtaccgatagctatccgcaggctgacttcgatggcccacataatctgatgatgcagattttcacctcgcagg

SEQ ID NO: 510454 - DNA, 75 bp, synthetic construct
  source 1..75: mol_type = other DNA
agatggacgcgccgcatattcgactacggaatcaaacggcacgcgctggagattaacccctgttcagcctttgag

SEQ ID NO: 510455 - DNA, 75 bp, synthetic construct
  source 1..75: mol_type = other DNA
tgggtacttccggcgcggaaaatgcagcacaggatgatcccccacattcaggagagcaccctacccgttgcactg

SEQ ID NO: 510456 - DNA, 75 bp, synthetic construct
  source 1..75: mol_type = other DNA
ttcgctcatctactggattatggcgacagtgttatcgacgctgcagaaccattttgagaatcaactaaatcgcca

SEQ ID NO: 510457 - DNA, 75 bp, synthetic construct
  source 1..75: mol_type = other DNA
acgccagatcctcaatcggtggaagcatccagacatcctacgccgccgcatagataaagacattaatccggcaat

SEQ ID NO: 510458 - DNA, 75 bp, synthetic construct
  source 1..75: mol_type = other DNA
gcgcgatcacatctggcggcgttagggattgatccggtagttgcagaacgttgcttgaatcacagaattaaaggt

SEQ ID NO: 510459 - DNA, 75 bp, synthetic construct
  source 1..75: mol_type = other DNA
agcaaaaacggcgacgctatagacattccattagcaccgccagcagtcgaatggctgagagagcttaaaacgttc

SEQ ID NO: 510460 - DNA, 75 bp, synthetic construct
  source 1..75: mol_type = other DNA
atcgacgatcaccacaccgtcgaagataccggcctggcgctgggcgaagcgctaaaaatcgccctcggagacaaa

SEQ ID NO: 510461 - DNA, 75 bp, synthetic construct
  source 1..75: mol_type = other DNA
attaaaaatggcgctcggcgacaaacgcggcatcaaccgttttggctttgtactgccgatggacgaatgcctggc

SEQ ID NO: 510462 - DNA, 75 bp, synthetic construct
  source 1..75: mol_type = other DNA
ttcgaccacatgctggatcaaatcgccacccacggcggcttccgcatggagattgccgtgcagggcgacctgtat

SEQ ID NO: 510463 - DNA, 75 bp, synthetic construct
  source 1..75: mol_type = other DNA
gcgggtggcactgccgccgctgtcgaacagctttatcagcctggtgaaagatacctcactggccgcgacgattca

SEQ ID NO: 510464 - DNA, 75 bp, synthetic construct
  source 1..75: mol_type = other DNA
aacgacgggacgcactggcgaagtggaccaatctgttagtgtcgctggaacgcggagaacactacaacgtgacac

SEQ ID NO: 510465 - DNA, 75 bp, synthetic construct
  source 1..75: mol_type = other DNA
gcacgggcaatggtcattggctcctatgctgattactcgctatcaaaagccagagaaacagcaaaggaactatcc

SEQ ID NO: 510466 - DNA, 75 bp, synthetic construct
  source 1..75: mol_type = other DNA
ccgtaatctgccagctctgtatggctcctgcccacatgatgaaagcgcccggaaaataggtgcttacttaatgtg

SEQ ID NO: 510467 - DNA, 75 bp, synthetic construct
  source 1..75: mol_type = other DNA
cccgaagtcgaacggcaagttgcgtccgctcgggataccgaccatgagagacagggctatgcaggcgttatacct

SEQ ID NO: 510468 - DNA, 75 bp, synthetic construct
  source 1..75: mol_type = other DNA
ttcccattgtgctcaatggctaatgtaattaatgggtataaagccgcagcatctttttatagtggtttaaatctt

SEQ ID NO: 510469 - DNA, 75 bp, synthetic construct
  source 1..75: mol_type = other DNA
aagagctacatgctttagaaaaaacgacctttactctggaaggattacaggaactttatgatttacaggaagcaa

SEQ ID NO: 510470 - DNA, 75 bp, synthetic construct
  source 1..75: mol_type = other DNA
tgcccgtttattcgggttgaacaaccaggattctcaacccagaaattaagagcaggtgaagccgcgacggtttcc

SEQ ID NO: 510471 - DNA, 75 bp, synthetic construct
  source 1..75: mol_type = other DNA
ctcaggcaggagaaacgctgcccgctctgtaaccagttaattactatggaaacaggctggcacgttcaccataag

SEQ ID NO: 510472 - DNA, 75 bp, synthetic construct
  source 1..75: mol_type = other DNA
ctacaaacgctgggtgaaggcgaaatactttcacacggtgggcaaccggcactggacgtttcaatggcgggagga

SEQ ID NO: 510473 - DNA, 75 bp, synthetic construct
  source 1..75: mol_type = other DNA
tcctgtttttacaagggatggtcaactcgacgcgtttttcctctatgaacacgctgacgctgaaagatctacctg

SEQ ID NO: 510474 - DNA, 75 bp, synthetic construct
  source 1..75: mol_type = other DNA
tgatgccgaactacaccatgcagacgcggcgctttgatctctccggctttctgttgctggctgttagcatggcgg

SEQ ID NO: 510475 - DNA, 75 bp, synthetic construct
  source 1..75: mol_type = other DNA
tctcgtcggcatcgagcgctacaacgaattgcgcctccagaaagccatttctcttcctgagaaaaaccccggcgc

SEQ ID NO: 510476 - DNA, 75 bp, synthetic construct
  source 1..75: mol_type = other DNA
cctcgaaatcggtgcagacgattacatcaccaaaccgttcaacccgcgtgaactgactatccgtgcacgcaactt

SEQ ID NO: 510477 - DNA, 75 bp, synthetic construct
  source 1..75: mol_type = other DNA
atgaagcaatggctcatcataattgctgtttttttgctcatttacactgttttcccagcattaaaagcaccaatg

SEQ ID NO: 510478 - DNA, 75 bp, synthetic construct
  source 1..75: mol_type = other DNA
tggtcaacatacgatccggaagacaaatcaacagcccccacaaaacacgaggtagtcagttttttgcgctcgcgt

SEQ ID NO: 510479 - DNA, 75 bp, synthetic construct
  source 1..75: mol_type = other DNA
atgaaactgagcttgttgatttcggaaaagatatcagaattgttttggcttcatcggattttagcaaggaactga

SEQ ID NO: 510480 - DNA, 75 bp, synthetic construct
  source 1..75: mol_type = other DNA
ttggtggcgctgttgcgttaatttctatgcgcaaagtagaaacaccacgccatatgcaaaacctaaccacaaaag

SEQ ID NO: 510481 - DNA, 75 bp, synthetic construct
  source 1..75: mol_type = other DNA
gctggatgcgtgttattcgctggtttggttgcctcgggatggcagcatcaagtttagcgttttactacatgccgc

SEQ ID NO: 510482 - DNA, 75 bp, synthetic construct
  source 1..75: mol_type = other DNA
gggaaccttatggctggcactggcgttctgctttgctggcggtgtcattgccatgatctccttgcgtcatgttaa

SEQ ID NO: 510483 - DNA, 75 bp, synthetic construct
  source 1..75: mol_type = other DNA
cacgatttatccggtgatccgtaatctgccgactctgtatggctcctgcccacatgatgaaagtgcgcggaaaat

SEQ ID NO: 510484 - DNA, 75 bp, synthetic construct
  source 1..75: mol_type = other DNA
ccggagcagacgctggccggcaacagtgaactgagcgaaatattggctaatctggcggtgacggagggaacgctg

SEQ ID NO: 510485 - DNA, 75 bp, synthetic construct
  source 1..75: mol_type = other DNA
atgctgctacaacgctcttgagcatgcgggctatattcccacgcaacttaagcgagtcggcgtctatggggcgac

SEQ ID NO: 510486 - DNA, 75 bp, synthetic construct
  source 1..75: mol_type = other DNA
gcgtgcgatggcgtgacaaccgcgcggatggcggaacaaagccttgaggccggtcattacagcctggtggtactg

SEQ ID NO: 510487 - DNA, 75 bp, synthetic construct
  source 1..75: mol_type = other DNA
attattacgcgattggataaatcaatttaatcctgcaagttataatgatttaataaatgggttaagtgaagactt

SEQ ID NO: 510488 - DNA, 75 bp, synthetic construct
  source 1..75: mol_type = other DNA
tcatcggattttagcaaggaactgactaccactgcgatttggttaagagataagggggtagacattcgatgcgtt

SEQ ID NO: 510489 - DNA, 75 bp, synthetic construct
  source 1..75: mol_type = other DNA
tgaatatgggtcgccgtcaggtatggatgggcggtgaagagctgatcctgacaccaaaagaatatgccctgctgt

SEQ ID NO: 510490 - DNA, 75 bp, synthetic construct
  source 1..75: mol_type = other DNA
gatttagggttacccgacgaagatggactgcattttctcgcccgtatccggcagaaaaaatacaccctgccggta

SEQ ID NO: 510491 - DNA, 75 bp, synthetic construct
  source 1..75: mol_type = other DNA
cggtcattacagcctggtggtactggatttagggttacccgacgaagatggactgcattttctcgcccgtatccg

SEQ ID NO: 510492 - DNA, 75 bp, synthetic construct
  source 1..75: mol_type = other DNA
caggatgctggattcgaaagtgtcgactattacaacctgacggcaggggttgtggcgctgcatcgtggttataag

SEQ ID NO: 510493 - DNA, 75 bp, synthetic construct
  source 1..75: mol_type = other DNA
ctcgccaccgaagcccaacaggtggataacaccactaacattttacgcctgatgttgctgctctcgctggcaatc

SEQ ID NO: 510494 - DNA, 75 bp, synthetic construct
  source 1..75: mol_type = other DNA
ggaaaaatggcccgctcggctatctgcgtctgacgctggacacccatacgctcgccaccgaagccaaacaggtcg

SEQ ID NO: 510495 - DNA, 75 bp, synthetic construct
  source 1..75: mol_type = other DNA
ggtgcgcaatgtattcaggctgatttttcaaccaacgacggtgtgatggcgtttgccgatgaagtattaaaaagc

SEQ ID NO: 510496 - DNA, 75 bp, synthetic construct
  source 1..75: mol_type = other DNA
aaaaccaggtacaccactggccgacgtactggcttgcatgatgcagatccacgttaataccccatacctgctcaa

SEQ ID NO: 510497 - DNA, 75 bp, synthetic construct
  source 1..75: mol_type = other DNA
ctgctgacaaaacactggttcgccagatagtcggtgatgcggatatccgcaaattaccgaaacaatcggtcgaca

SEQ ID NO: 510498 - DNA, 75 bp, synthetic construct
  source 1..75: mol_type = other DNA
attatcgacaacattaacggcgataatttccgtcaggatgtgccttacaccatcacatgtgaccccgatgtgcgc

SEQ ID NO: 510499 - DNA, 75 bp, synthetic construct
  source 1..75: mol_type = other DNA
gacattaacggcagtaattatgagcaaatcgtgccgtatcgcattacttgcgatacaccggttcgtgacccttta

SEQ ID NO: 510500 - DNA, 75 bp, synthetic construct
  source 1..75: mol_type = other DNA
ggcagagctttaacatcaatacgccactggtagtagatgaaaccgccttgccggtgctaacggcggtaccggtca

SEQ ID NO: 510501 - DNA, 75 bp, synthetic construct
  source 1..75: mol_type = other DNA
aaagccgcatcctcgacgcgggtgtgtatgacgaacaaggcgatcttatcgcccgcgcaggcgaaagcgtcgaag

SEQ ID NO: 510502 - DNA, 75 bp, synthetic construct
  source 1..75: mol_type = other DNA
accctggcacgtcaggtgacgctgaacgttgcgccgctgatgcgtaccgactcgccggatgaaaagcgcattcag

SEQ ID NO: 510503 - DNA, 75 bp, synthetic construct
  source 1..75: mol_type = other DNA
ggctgcatcgggcagtgattgtcctgttctgtcttgccttgttagtggcgctgatgcagggagcgtcatggttta

SEQ ID NO: 510504 - DNA, 75 bp, synthetic construct
  source 1..75: mol_type = other DNA
aaaaccaggtacgccactgactgacgtgctggcctgcatgatgcaaatccacgttaataccccataccttcttaa

SEQ ID NO: 510505 - DNA, 75 bp, synthetic construct
  source 1..75: mol_type = other DNA
ggcacgttttcctgatttaaccgtatcgcatatgcaaaaatccaaattttcgtatattgagaacgaatgcgggat

SEQ ID NO: 510506 - DNA, 75 bp, synthetic construct
  source 1..75: mol_type = other DNA
acctttcgctattatccgtatccggcattaaccgtgccggtctggggcgctggcgcgctggctggtgccttacta

SEQ ID NO: 510507 - DNA, 75 bp, synthetic construct
  source 1..75: mol_type = other DNA
aagcaagattatgaaatttgaattacagaatgcctcgcccgtcattgccaatgagttgagtctgtcgcagggcca

SEQ ID NO: 510508 - DNA, 75 bp, synthetic construct
  source 1..75: mol_type = other DNA
ttaacagggcgggccagctgtttgacgcggcggcacaggtctgccggattgttgatggcatccggcagtgttcgc

SEQ ID NO: 510509 - DNA, 75 bp, synthetic construct
  source 1..75: mol_type = other DNA
actggaaaactggcagtttcgtcgggtggctattccacctgatcagcaaacccggctgggaaggtgtgagccgga

SEQ ID NO: 510510 - DNA, 75 bp, synthetic construct
  source 1..75: mol_type = other DNA
tacgccagaatcgcagcggtgctgagcattttggccttcagcggttaatgctgcatgccagtcagttgtcattga

SEQ ID NO: 510511 - DNA, 75 bp, synthetic construct
  source 1..75: mol_type = other DNA
acgaactgctggactctgcgccagcggcggtaacgggcgatgaaggggatctgccgagcggcgttaacctcaaca

SEQ ID NO: 510512 - DNA, 75 bp, synthetic construct
  source 1..75: mol_type = other DNA
ctatgacgcggaatataagcagactgagccgggtaaggcagagcaggttgatattaccggaaaccatgtggctct

SEQ ID NO: 510513 - DNA, 75 bp, synthetic construct
  source 1..75: mol_type = other DNA
gcgagaaagaagtgatcgacctggtcgattatttactcaccagttgctttgttaccggacgcagttttccgcttg

SEQ ID NO: 510514 - DNA, 75 bp, synthetic construct
  source 1..75: mol_type = other DNA
atgaaatattttttcaatacccggctgggggaaacccgctatcagcttgctgacgactctctgttgtgcaaagac

SEQ ID NO: 510515 - DNA, 75 bp, synthetic construct
  source 1..75: mol_type = other DNA
gaacccggaaaagccgagcaggtcgatatcaccggaaaccatgtggctcttgtccctaaaggcagagccggaaat

SEQ ID NO: 510516 - DNA, 75 bp, synthetic construct
  source 1..75: mol_type = other DNA
ttaatctttcaccgcaacaaccattgccggacaaaaagccggaaatgggcggagagccaaccggcgacggcgagg

SEQ ID NO: 510517 - DNA, 72 bp, synthetic construct
  source 1..72: mol_type = other DNA
atgttaactggggcttttctctatctgccgttggtgttcatgcccgaggcagatagcctcaagcacccgcag

SEQ ID NO: 510518 - DNA, 75 bp, synthetic construct
  source 1..75: mol_type = other DNA
gtattcacaatggactgggatcggctgttgcggaggttctggtcgaaagctgtccggtaccgatgcgtcgcgtgg

SEQ ID NO: 510519 - DNA, 75 bp, synthetic construct
  source 1..75: mol_type = other DNA
gtccgctgtggttccgtgcggatggtcggtattcctctgccgctactcacctgccttgcggatatcagtaccgcg

SEQ ID NO: 510520 - DNA, 75 bp, synthetic construct
  source 1..75: mol_type = other DNA
agggcatgtcggtcgtaaaatgtcagcgacgctggcctctacgggtacgcctagtttctttattcatcctgcaga

SEQ ID NO: 510521 - DNA, 75 bp, synthetic construct
  source 1..75: mol_type = other DNA
cctcagggcgacgaagccgaaccgaatgaagcggggttagcgttttacgatcggctgtttgatgaaatggcgcag

SEQ ID NO: 510522 - DNA, 75 bp, synthetic construct
  source 1..75: mol_type = other DNA
catcaactggttgccagtgcgcgggcagttaaagcctgtcatagcctgatccccgaagcgaaaatcggcaatatg

SEQ ID NO: 510523 - DNA, 75 bp, synthetic construct
  source 1..75: mol_type = other DNA
cctatgctgttgaactgatcaacaaaggcctggcgtatgttgacgaactgacgccggaacagatccgcgaatacc

SEQ ID NO: 510524 - DNA, 75 bp, synthetic construct
  source 1..75: mol_type = other DNA
gcagcatgatgtcccttcggttcacctggatgcgccatttaaaacggtaattcaacgtatcaccagcggttgcca

SEQ ID NO: 510525 - DNA, 75 bp, synthetic construct
  source 1..75: mol_type = other DNA
cgagtttctttattcatccggcagaagcattccatggcgatctgggtatgattacgccctacgatctcctgatcc

SEQ ID NO: 510526 - DNA, 75 bp, synthetic construct
  source 1..75: mol_type = other DNA
tcctgcaatagccagtgggttcttccagcaagaaagatgcagcaccgcatgatccctcatattcaagaaagcaca

SEQ ID NO: 510527 - DNA, 75 bp, synthetic construct
  source 1..75: mol_type = other DNA
accgaggcgcaggaattcatagtactgtgcaattacctgacccgccggcgggagaagttgatggcaaaagtacca

SEQ ID NO: 510528 - DNA, 75 bp, synthetic construct
  source 1..75: mol_type = other DNA
agtctcagacgcgcaaaatcagcggcatcagcaccactgcagcgcagttccgcagcgatgacggcagtacctact

SEQ ID NO: 510529 - DNA, 75 bp, synthetic construct
  source 1..75: mol_type = other DNA
ggcaagccaatcgatgatacgcacactcatggcggtgttcagcgcggtggaagcaataccgatagggtaaactga

SEQ ID NO: 510530 - DNA, 75 bp, synthetic construct
  source 1..75: mol_type = other DNA
gcggcggcgctgggggatatcggcaagctgttcccggataccgatccggcatttaaaggtgccgatagccgcgag

SEQ ID NO: 510531 - DNA, 75 bp, synthetic construct
  source 1..75: mol_type = other DNA
tattactatcgacgtggcctaccgctatttctccactgaaaagcgcaaatttattatcgccgacaccccagggca

SEQ ID NO: 510532 - DNA, 75 bp, synthetic construct
  source 1..75: mol_type = other DNA
aaggcgacaacgtggcttcgcaaagtgaaagtatgccgtggtacagcggtccgacactgctcgaagtgctggaaa

SEQ ID NO: 510533 - DNA, 75 bp, synthetic construct
  source 1..75: mol_type = other DNA
gtagcgtcgatgacggcaaaagtaccctgattggtcgtctgctgcacgatacccgccaaatctacgaagatcagc

SEQ ID NO: 510534 - DNA, 75 bp, synthetic construct
  source 1..75: mol_type = other DNA
tgatgacgacgtgaagattggcattaagtccaccgcgatcctgtttggacaatacgataagttgattatcggcat

SEQ ID NO: 510535 - DNA, 75 bp, synthetic construct
  source 1..75: mol_type = other DNA
ttactgctgctctggccaacattatgggcgttgtgggtggcgacaccgggcgttccccagctctggatcctggcg

SEQ ID NO: 510536 - DNA, 75 bp, synthetic construct
  source 1..75: mol_type = other DNA
gaaaaccccaacgtcaccattccgctgctcggttttatgggcgttccgtcggcaatcgacatcacccgcgtgggt

SEQ ID NO: 510537 - DNA, 75 bp, synthetic construct
  source 1..75: mol_type = other DNA
agaaaatgcgtaccggcggttttgaagaaggtaaagcctgcctgcgtgcgaaaatcgacatggcttcgccgttta

SEQ ID NO: 510538 - DNA, 75 bp, synthetic construct
  source 1..75: mol_type = other DNA
agctgatgtcgcgcctgggatgggcatggcgactggtcatgaccgggttatgttttgtcctgtttggtctcggcg

SEQ ID NO: 510539 - DNA, 75 bp, synthetic construct
  source 1..75: mol_type = other DNA
acttagggcgtcagctccaggattcccgtttgattaaaaaaagagggctttctcgtgcatcaggtaaaaatgaag

SEQ ID NO: 510540 - DNA, 75 bp, synthetic construct
  source 1..75: mol_type = other DNA
agtgaagagacattcacccgcattcgtgaagactacctgactttcgccgaacagttacctggcaatctggatatt

SEQ ID NO: 510541 - DNA, 75 bp, synthetic construct
  source 1..75: mol_type = other DNA
cctgcttgaacctttgccaaaaggagcattttcgattggtgagattgagcagtatgacaaatacaagacaatcca

SEQ ID NO: 510542 - DNA, 75 bp, synthetic construct
  source 1..75: mol_type = other DNA
tcttctgtacttatgacgccgacaccttaagcaaagatccggcagatggtcgtaaagtcaaaggtgttattcact

SEQ ID NO: 510543 - DNA, 75 bp, synthetic construct
  source 1..75: mol_type = other DNA
atgtgctctcaggcgtgctgcttaccagctttaatgcctcagcggttcccggactatggcagcagggttatggtc

SEQ ID NO: 510544 - DNA, 75 bp, synthetic construct
  source 1..75: mol_type = other DNA
cggctgggacacgttcagtaatttctttggcctgaaatacgatccctccgatcgcgtcatcttcctctacctggt

SEQ ID NO: 510545 - DNA, 75 bp, synthetic construct
  source 1..75: mol_type = other DNA
ccgcagggcttgctgcccatgacgcgcccgcaactcaagctgaaaaacggcgcagcgaaaggagagcaggcatga

SEQ ID NO: 510546 - DNA, 75 bp, synthetic construct
  source 1..75: mol_type = other DNA
atttattctcgcggtgctgatttcctttagtgtttgcctgctctatatggtgcgcatttatcatcgcagtgaatg

SEQ ID NO: 510547 - DNA, 75 bp, synthetic construct
  source 1..75: mol_type = other DNA
tcatcatcatgtactggcgctggataaccaggaagaagtcgtttcagggcagacaacacaacaggtattgctgct

SEQ ID NO: 510548 - DNA, 75 bp, synthetic construct
  source 1..75: mol_type = other DNA
gctggctggcggagcaatcctgcgcacatcatcatgtgctggcgctggatagcagagaggagatggtttccgggc

SEQ ID NO: 510549 - DNA, 75 bp, synthetic construct
  source 1..75: mol_type = other DNA
aagccatcacgctgaaaatcgacccgtcagtggtgcttgcgacgcgccagtatgtagatcagcaaatagaagttc

SEQ ID NO: 510550 - DNA, 75 bp, synthetic construct
  source 1..75: mol_type = other DNA
attcctgacccgactttgtttattcagaatttgggacttaaaccgacggttgataaggctgaaagtgctctgcaa

SEQ ID NO: 510551 - DNA, 75 bp, synthetic construct
  source 1..75: mol_type = other DNA
tgctgtcgtgctggcaacccgtcattatgtagatcaacaaatagaaattcatgagcaatcgcgccgccatccttc

SEQ ID NO: 510552 - DNA, 75 bp, synthetic construct
  source 1..75: mol_type = other DNA
ttccggtgctgcgtctgcgtggtgattatctggcgatcgttaccctcggtttcggcgaaattgtgcgcatattgc

SEQ ID NO: 510553 - DNA, 75 bp, synthetic construct
  source 1..75: mol_type = other DNA
atcgcgtcatctttctctacctggtggccttgttgctggtggtgttttccttattcgtcattaatcgcctgctgc

SEQ ID NO: 510554 - DNA, 75 bp, synthetic construct
  source 1..75: mol_type = other DNA
gtgcaactggagctggacggcaccaaactggtggtcgacagcgcttcaaatgttcgttgggagtgggtgtttatc

SEQ ID NO: 510555 - DNA, 75 bp, synthetic construct
  source 1..75: mol_type = other DNA
tgtgcaatattacgctggcagttgggaacgcgttggcgttatggcttgaccacccgaaacgtctggcaacgtctc

SEQ ID NO: 510556 - DNA, 75 bp, synthetic construct
  source 1..75: mol_type = other DNA
tataaggcacctcataaaacgggtgccgggattggcgtcctgaaaattctgaaggcgacatatgacgcgccgggt

SEQ ID NO: 510557 - DNA, 75 bp, synthetic construct
  source 1..75: mol_type = other DNA
cgaaatgagcgcgatgtattgtgcatctggtgcttccaatactgagttttcggagtccataaaaaagagcttgcc

SEQ ID NO: 510558 - DNA, 75 bp, synthetic construct
  source 1..75: mol_type = other DNA
tgtaatgaagaagggattacaactaaagcatataatatttacagaagctttatttatgacattccctttgacgat

SEQ ID NO: 510559 - DNA, 75 bp, synthetic construct
  source 1..75: mol_type = other DNA
ggttacaacgcattggacgtgccggacatcaggttggcggtgtatctaaagggctttttttccccccgaacccgg

SEQ ID NO: 510560 - DNA, 75 bp, synthetic construct
  source 1..75: mol_type = other DNA
tacgagaaagaagcgcagcagctactggcgctggaaaatccgctgccgctgcctgcctacgagcgtattctgaaa

SEQ ID NO: 510561 - DNA, 75 bp, synthetic construct
  source 1..75: mol_type = other DNA
tgagcgtcagcgctatattctgcgcattcgcaccctgaccaaggcagtggctgaagcatactacgcttcccgtga

SEQ ID NO: 510562 - DNA, 75 bp, synthetic construct
  source 1..75: mol_type = other DNA
gcgctattgcataaacttggggtgcaatatctgcaaggatatttaattggtcgtccgcagccattagctgattaa

SEQ ID NO: 510563 - DNA, 75 bp, synthetic construct
  source 1..75: mol_type = other DNA
atcgcaagagcaagaggccggaaagagtttttgctgcctgcgtattgataatcttgaatttatgagtcgtcatta

SEQ ID NO: 510564 - DNA, 75 bp, synthetic construct
  source 1..75: mol_type = other DNA
tggggacgcgttggcgttatggattgaccagccgatatgtctggcaacgtctgttctggcttggtttggtgacgc

SEQ ID NO: 510565 - DNA, 75 bp, synthetic construct
  source 1..75: mol_type = other DNA
agaccctctaaaaatagaaaagttagacacttcacttttagaggcatttataaataaaagtgatgaattatcctt

SEQ ID NO: 510566 - DNA, 75 bp, synthetic construct
  source 1..75: mol_type = other DNA
ccgaaaagtattgctcggtggcgctaatgctggaaaaagcagtgaatattacccattcgtatgaagtggttgacg

SEQ ID NO: 510567 - DNA, 75 bp, synthetic construct
  source 1..75: mol_type = other DNA
tgcaccggtaatccggatgagcaaaacattctgcagcatggcgtattagtaaccctgcccaatggtacgatgctg

SEQ ID NO: 510568 - DNA, 75 bp, synthetic construct
  source 1..75: mol_type = other DNA
cgatgagatgcagtcactagatgatatgcttatttttggtgaaccagtaacaaggatttatcctgctggtgatat

SEQ ID NO: 510569 - DNA, 75 bp, synthetic construct
  source 1..75: mol_type = other DNA
acaaatcggcgagctttccggtggacaaaagaaacgcgtctttctggcgagagcgattgcacagcagggtgatgt

SEQ ID NO: 510570 - DNA, 75 bp, synthetic construct
  source 1..75: mol_type = other DNA
atgatgcaatctgcaggcattgtcgttaatgatgttagtgtcacctggcgtaacgggcacacagcactgcgcgat

SEQ ID NO: 510571 - DNA, 75 bp, synthetic construct
  source 1..75: mol_type = other DNA
tagtcgatacctggtggcagaccgaaactggcggtttcatgatcacgccgctgcctggcgctaccgagctgaaag

SEQ ID NO: 510572 - DNA, 75 bp, synthetic construct
  source 1..75: mol_type = other DNA
atgccgaaagacgaatccatgaatatccgttacctactgtgtaacgccgatgaaatggaaccgggcacctataaa

SEQ ID NO: 510573 - DNA, 75 bp, synthetic construct
  source 1..75: mol_type = other DNA
catggggcaaaccgacctgtgtcaataacgtcgaaaccctgtgtaacgttccggcgatcctcgctaacggcgtgg

SEQ ID NO: 510574 - DNA, 75 bp, synthetic construct
  source 1..75: mol_type = other DNA
atgaaaaacattatccgtactcccgaaacgcatccgctgacctggcgtctgcgcgatgataaacagccagtgtgg

SEQ ID NO: 510575 - DNA, 75 bp, synthetic construct
  source 1..75: mol_type = other DNA
aaactgattaaagaaaacacggctgccatgtacgcaacactgaacgtcaatagtgaggagaagctacatgaatgc

SEQ ID NO: 510576 - DNA, 75 bp, synthetic construct
  source 1..75: mol_type = other DNA
gagatgctgcgagtgggcggaaaagtgctggcgattaccggctttactccgaatgccctgcaacagcgtgcttct

SEQ ID NO: 510577 - DNA, 75 bp, synthetic construct
  source 1..75: mol_type = other DNA
gcgtcgtcccctgacgatctgttattagccatttcctacaccggtgtacgacgcgagttaaacctggcggcagat

SEQ ID NO: 510578 - DNA, 75 bp, synthetic construct
  source 1..75: mol_type = other DNA
aacgaaggtaacccgctggaaggcgctaccgaaggcagtctggtgatcaccgactcctggccgggtcaggcgcgt

SEQ ID NO: 510579 - DNA, 75 bp, synthetic construct
  source 1..75: mol_type = other DNA
atgatgttactgtcacctggcgtaacgggcacacagcactgcgttgtgcgtctgaccagcggaaagatatctgtt

SEQ ID NO: 510580 - DNA, 75 bp, synthetic construct
  source 1..75: mol_type = other DNA
gaagaaagcattattactgacgatgaacacccttttgtggcacatcgaccgtcagcggtgcagagggaagtaaga

SEQ ID NO: 510581 - DNA, 75 bp, synthetic construct
  source 1..75: mol_type = other DNA
ggaaatacaaaagcagttcgatacttctgtttttgctgaagggatcacttatgccctggaccagataaaggcaga

SEQ ID NO: 510582 - DNA, 75 bp, synthetic construct
  source 1..75: mol_type = other DNA
actatcacttatttaagtgatactggttgtctggagattcagggggccagtctaggttcacactacatcgttgat

SEQ ID NO: 510583 - DNA, 75 bp, synthetic construct
  source 1..75: mol_type = other DNA
ctcaggtgatttctttggtgataactcactggcaacaagaggtatcagaggtatatgtctgtacatcattcgttc

SEQ ID NO: 510584 - DNA, 75 bp, synthetic construct
  source 1..75: mol_type = other DNA
tggcctgaggtgcaccttcacgtgctgctgttgcatagactccactgcgatcacgcgagacaacctgtatttccg

SEQ ID NO: 510585 - DNA, 75 bp, synthetic construct
  source 1..75: mol_type = other DNA
atgtttgaaaatgttatgtctggggctattccagaaggttccctgattgttgtagagaactttgaccgcttcagt

SEQ ID NO: 510586 - DNA, 75 bp, synthetic construct
  source 1..75: mol_type = other DNA
aagcaaaagcgtatagctcaggtctggaaccataaaacacagcttgcaagagaacttaagaagcctatgggtaag

SEQ ID NO: 510587 - DNA, 75 bp, synthetic construct
  source 1..75: mol_type = other DNA
aaacagggaaggggaaaacatccagcggtgaacactggctatatgtgaacatactgaaggggcttatccgttgta

SEQ ID NO: 510588 - DNA, 75 bp, synthetic construct
  source 1..75: mol_type = other DNA
tctgccgccgtatccggcataaccgatattgggttaatgaggctaacaagtttggcatagaggcactttgcgaac

SEQ ID NO: 510589 - DNA, 75 bp, synthetic construct
  source 1..75: mol_type = other DNA
tggtggtggtttgcatcaccattctgatatttgtctggatggttcgcggttcgctatgcgagctgcacatcaggc

SEQ ID NO: 510590 - DNA, 75 bp, synthetic construct
  source 1..75: mol_type = other DNA
aacgatgaaccccagccgcatcaatttaacagtacccaaccgttctttatggacaccatggaaccactggagtgg

SEQ ID NO: 510591 - DNA, 75 bp, synthetic construct
  source 1..75: mol_type = other DNA
aagcattaaaggtattcgatttttcttatcctaattttttagagtttattgagagtgatgaaagtttattatcca

SEQ ID NO: 510592 - DNA, 75 bp, synthetic construct
  source 1..75: mol_type = other DNA
cggacttgcgacgcgcagtgatgcgggtcacaagtctatttcacgtgccagccggggatgtgatcgcctctcctg

SEQ ID NO: 510593 - DNA, 75 bp, synthetic construct
  source 1..75: mol_type = other DNA
tctggttgaatgcgatcattacagataaagcgccgtttaacccctatgatgcacggtgtgcctgtaaacacattg

SEQ ID NO: 510594 - DNA, 75 bp, synthetic construct
  source 1..75: mol_type = other DNA
aagaaatacacgtcaggcgttctgtcgttcgcggagaaggagttaccgccgggtgaacgcgaaagagtgatgacg

SEQ ID NO: 510595 - DNA, 75 bp, synthetic construct
  source 1..75: mol_type = other DNA
tttctggacggctttgcgccagcgaaaaacccggatatgtggacgcaaaatctgtttaacgccatggcgcgactg

SEQ ID NO: 510596 - DNA, 75 bp, synthetic construct
  source 1..75: mol_type = other DNA
agaaagaggcgcgctgcggtgtgcgttgtgccacccgcgatcatctgccaatggtaggcaatgttcccgattatg

SEQ ID NO: 510597 - DNA, 75 bp, synthetic construct
  source 1..75: mol_type = other DNA
tcggggagataaaaggccgtcaggatgtgattcaggcgctcacagaggcggggcttgaagtggtcagggtgacgc

SEQ ID NO: 510598 - DNA, 75 bp, synthetic construct
  source 1..75: mol_type = other DNA
aggaacggttgatacatgagcgcgaacatgcgttatccctggaacgggaacgcacgctggatggtccttcgttgt

SEQ ID NO: 510599 - DNA, 75 bp, synthetic construct
  source 1..75: mol_type = other DNA
agcggacagaacgcttgagccagttatacagcgagaactggagataagagaggaacggctgatacaggagcgcga

SEQ ID NO: 510600 - DNA, 75 bp, synthetic construct
  source 1..75: mol_type = other DNA
ccttgcccggttgccatcgtttattgctcgatgaaggccgcgtgacgctggatttatggtttggcgatattaatg

SEQ ID NO: 510601 - DNA, 75 bp, synthetic construct
  source 1..75: mol_type = other DNA
gacgcaaacgggaaatgctttgtggggtgatggaacagacattaccactcccctgctccacgccgtggtttaatc

SEQ ID NO: 510602 - DNA, 75 bp, synthetic construct
  source 1..75: mol_type = other DNA
tgccagtacgctggcggcattaaatccaaatcggttatgggtacggaagttattgaagggtaaagcggttaaggt

SEQ ID NO: 510603 - DNA, 75 bp, synthetic construct
  source 1..75: mol_type = other DNA
ccgtggtttacaggaagccggatttaccatgcaaaagcgcaaagggtttggtcgtaaacgggaaatgctttgcgg

SEQ ID NO: 510604 - DNA, 75 bp, synthetic construct
  source 1..75: mol_type = other DNA
gagaaatttcccctcactcgtgcggatttaggattagcgcatcaacactggccagaactggcaccgtgggcagaa

SEQ ID NO: 510605 - DNA, 75 bp, synthetic construct
  source 1..75: mol_type = other DNA
ggcgaagcttaagcaggtgctgtgttatgacggttatctcacgccacaaaatccggcgaatcagcatcattgtat

SEQ ID NO: 510606 - DNA, 75 bp, synthetic construct
  source 1..75: mol_type = other DNA
ccggagagataaaaggtcgtcaggatgtgattcaggcgctcacggaagcggggcttgaagtggtcagagtgacgc

SEQ ID NO: 510607 - DNA, 75 bp, synthetic construct
  source 1..75: mol_type = other DNA
gatctgcgcggcggaaaacgggcaaatgatatgatagttaagcaatacacgttaaatcatatcagatatgatatt

SEQ ID NO: 510608 - DNA, 75 bp, synthetic construct
  source 1..75: mol_type = other DNA
agtgaagagacgttcacccgtattcgtgaagattatctgacttttgccgggcagctgccgggtaatctggatatc

SEQ ID NO: 510609 - DNA, 75 bp, synthetic construct
  source 1..75: mol_type = other DNA
ctggatctggcactgctggtggacggcctgcaagctgagcgcgaacaaggcatcactattgatgtggcctaccgc

SEQ ID NO: 510610 - DNA, 75 bp, synthetic construct
  source 1..75: mol_type = other DNA
aaactgcaactacgggcgattaccgtgtcgtatttaaaaccggggactatttcaagaaacaaaatcttgaaagtt

SEQ ID NO: 510611 - DNA, 75 bp, synthetic construct
  source 1..75: mol_type = other DNA
aaagagcaaaaaacaagcatactcgcttcgttcctttccattattgggcatgaaaaagttaaagcaggcacctcc

SEQ ID NO: 510612 - DNA, 75 bp, synthetic construct
  source 1..75: mol_type = other DNA
ggatccctgaagccctgaatcaaaaagttgctgaccactataaaaaatttggttttaaaggtgatataagcttgc

SEQ ID NO: 510613 - DNA, 75 bp, synthetic construct
  source 1..75: mol_type = other DNA
ccagttcgaggcgaccctggtgtggatggccgaggagccgatgctgcccggccgcacctacctggccaagatcgg

SEQ ID NO: 510614 - DNA, 75 bp, synthetic construct
  source 1..75: mol_type = other DNA
cagcacgatggacacacactggcaaaccgtgctgaaaatgagcgtgaaacgctggctgtggctgattatcgtctc

SEQ ID NO: 510615 - DNA, 75 bp, synthetic construct
  source 1..75: mol_type = other DNA
ttacgggctgcatgaccccaacgccccggagaaccgccggatactgactctccctgataacctgccggaaacgaa

SEQ ID NO: 510616 - DNA, 75 bp, synthetic construct
  source 1..75: mol_type = other DNA
acccgccaaatctacgaagatcagctctcatcgctgcataatgacagtaagcgtcacggcacccagggcgaaaag

SEQ ID NO: 510617 - DNA, 75 bp, synthetic construct
  source 1..75: mol_type = other DNA
atgaacaccgcacttgcacaacaaatcgccaatgaaggcggcgtcgaagcatggatgattgcgcaacaacataaa

SEQ ID NO: 510618 - DNA, 75 bp, synthetic construct
  source 1..75: mol_type = other DNA
gaatgccctgtaccgcaaatgcccaaaatatgagcgcattattgctgatgctattggtgttgcgccggaggagat

SEQ ID NO: 510619 - DNA, 75 bp, synthetic construct
  source 1..75: mol_type = other DNA
atggtgggaaatgtccccgattatgacgccacgctcgcggaatatacctcgctggcggaacagaaagatgaagcg

SEQ ID NO: 510620 - DNA, 75 bp, synthetic construct
  source 1..75: mol_type = other DNA
gcacgtgatcaatcgctgccgtaaaccttctgacgctgatattctggtgcccggcgataccatttcactgattgg

SEQ ID NO: 510621 - DNA, 75 bp, synthetic construct
  source 1..75: mol_type = other DNA
tgaagtgcagtacgcagtagaaaatttaaacgttaacagcctgctggatttacgccgtcgtacccgtgtagggat

SEQ ID NO: 510622 - DNA, 75 bp, synthetic construct
  source 1..75: mol_type = other DNA
ggttgccagcgatgacgacccgagcggccgtaacgtcagtcgtggcatcgtgctgctcgaccatgctgaacgcga

SEQ ID NO: 510623 - DNA, 75 bp, synthetic construct
  source 1..75: mol_type = other DNA
cacggtctgctgcacagcggcgcgcgctatgcggtaaccgatgcggaatcggcccgcgaatgtattagtgaaaac

SEQ ID NO: 510624 - DNA, 75 bp, synthetic construct
  source 1..75: mol_type = other DNA
cgctgaagttaccttacgcaaagtgatctccctgcccgccccgctgcgcggttctgcggtttaccgtcacggcga

SEQ ID NO: 510625 - DNA, 75 bp, synthetic construct
  source 1..75: mol_type = other DNA
cggcagaagaggtggatatcctgctgcgtgaaggggaaaaactggctccggtgatggcgaaaacgcgcattctgc

SEQ ID NO: 510626 - DNA, 75 bp, synthetic construct
  source 1..75: mol_type = other DNA
attataccctcgcccatgatgatggaatttcgttgcgcaacctcgatcaggctcaggtgatcctgctcggtgttt

SEQ ID NO: 510627 - DNA, 75 bp, synthetic construct
  source 1..75: mol_type = other DNA
ggttacaacgcattggtcgcgccggacatcagttggcggtgtatctaaagggctgtttttcccccgtacccggcg

SEQ ID NO: 510628 - DNA, 75 bp, synthetic construct
  source 1..75: mol_type = other DNA
tcgattccgcagtcattgtagagtgtatgttcgcaggcaggctggaaaacctgacaccccgcataatccactcga

SEQ ID NO: 510629 - DNA, 75 bp, synthetic construct
  source 1..75: mol_type = other DNA
tgatcatggatcaccgcattaatcagcatgtgatcaaccgctgccgtaaaccttccgacgccgatattctggtgc

SEQ ID NO: 510630 - DNA, 75 bp, synthetic construct
  source 1..75: mol_type = other DNA
caaaagtgggaccaattatttccttactatgatgaaatggctttccccatgcatgtgtcacaatgtgagcgctgt

SEQ ID NO: 510631 - DNA, 75 bp, synthetic construct
  source 1..75: mol_type = other DNA
tgtccgtatccccggtgatagccctgacttccgcagattgcatttagatataaataatcaagattattggcttat

SEQ ID NO: 510632 - DNA, 75 bp, synthetic construct
  source 1..75: mol_type = other DNA
tcgcacacccgcctggttaagtgaaggccgtttgcaccgcagcctggtctgtgaatgcgaagccgtcactgcagg

SEQ ID NO: 510633 - DNA, 75 bp, synthetic construct
  source 1..75: mol_type = other DNA
gcagcgattgcacttcattagttttgagaaatttcccctcacccaggctgatttatcgttagcacatcaacactg

SEQ ID NO: 510634 - DNA, 75 bp, synthetic construct
  source 1..75: mol_type = other DNA
acaacgcttacatttcattagttttgagaaatttcccctcgcccgtgcggatttagccttagcgcatcaacactg

SEQ ID NO: 510635 - DNA, 75 bp, synthetic construct
  source 1..75: mol_type = other DNA
gcagcaatcgaaagcgcagcagcagagtaccggcgagatgctgaaagccgcattcagcgagcacgagaagtctgt

SEQ ID NO: 510636 - DNA, 75 bp, synthetic construct
  source 1..75: mol_type = other DNA
ccaacctcgaatttaatgctgagggtacacctgtttcccgagattatgacgatgtctatttttccaacgataacg

SEQ ID NO: 510637 - DNA, 75 bp, synthetic construct
  source 1..75: mol_type = other DNA
tgcgccgagattctggcggcacagatgagtgaagaaccgattccgatggatgccagtacgctggcggcgttaaat

SEQ ID NO: 510638 - DNA, 75 bp, synthetic construct
  source 1..75: mol_type = other DNA
cttggtgcttctggtaatcgtcagggagcgctgtatccgttattaagcaaacacgatgaggcgctgaaccgcttt

SEQ ID NO: 510639 - DNA, 75 bp, synthetic construct
  source 1..75: mol_type = other DNA
gttgatgaccaaattacgagaccgaaagagcttgatgatatgttcaagagtatgcctgaaggtccacgccaaggt

SEQ ID NO: 510640 - DNA, 75 bp, synthetic construct
  source 1..75: mol_type = other DNA
ccgggatctgggggcaacatattgccgaatatgccgatctgcgcattcgtatgttcccggccaaaggatcactgc

SEQ ID NO: 510641 - DNA, 75 bp, synthetic construct
  source 1..75: mol_type = other DNA
accggtggcaaactgatgacctatcggctgatggctgaatgggctaccgacgccgtatgccgcaaactgggcaac

SEQ ID NO: 510642 - DNA, 75 bp, synthetic construct
  source 1..75: mol_type = other DNA
cagcccggcgtctataaagtggcctttaaaaccgcagattacttccacgggaagaagctggactccttcttcccg

SEQ ID NO: 510643 - DNA, 75 bp, synthetic construct
  source 1..75: mol_type = other DNA
acggaaaagaaaactttaactgtccccgatgtggtgtctatgcacaacaacactggaagcagcttctttttagac

SEQ ID NO: 510644 - DNA, 75 bp, synthetic construct
  source 1..75: mol_type = other DNA
cgagttccgaatgtcaacatgctctcattgtggtgatgatgcttattggtatgacggcaatatgattattccggc

SEQ ID NO: 510645 - DNA, 75 bp, synthetic construct
  source 1..75: mol_type = other DNA
ggcactggtagcgatactggtgccttttttattggtgggatgcgttagcctggataaggcgcgccagcttttcga

SEQ ID NO: 510646 - DNA, 75 bp, synthetic construct
  source 1..75: mol_type = other DNA
gcttgaatcgtcttgtcgggatggctatacgccatgctaacgccttaaaagcgggcgggtatgtggaagagttgc

SEQ ID NO: 510647 - DNA, 75 bp, synthetic construct
  source 1..75: mol_type = other DNA
ctctctttctcgcgatcaattctatgacgctattcgtagcggtgttatgcgggtaactgggaaagatcgtggcgg

SEQ ID NO: 510648 - DNA, 75 bp, synthetic construct
  source 1..75: mol_type = other DNA
acccgctgaatgtcgtggacggcgagggattcctccaggcattgtatggatatgattacatccagggaatgcagg

SEQ ID NO: 510649 - DNA, 75 bp, synthetic construct
  source 1..75: mol_type = other DNA
tggtatctccggacgattacgaaggtaaggacggggtatttaccggctatcagctacgaaccgtaaacggcaaaa

SEQ ID NO: 510650 - DNA, 75 bp, synthetic construct
  source 1..75: mol_type = other DNA
gggattctggctttgtcatgggaccagatatcggcgatcgcgtccgactatccatcggttgtcagtgatgaagtg

SEQ ID NO: 510651 - DNA, 75 bp, synthetic construct
  source 1..75: mol_type = other DNA
ccagaaaatttccggggaagtggaagagaagcaggggctggtgggcttccagaaccttgatggcctgcgtggtat

SEQ ID NO: 510652 - DNA, 75 bp, synthetic construct
  source 1..75: mol_type = other DNA
gtaacggatggtgctgccggtattgactttacacgcccggaacaagttgtaacccaccttttcagtgacgtggca

SEQ ID NO: 510653 - DNA, 75 bp, synthetic construct
  source 1..75: mol_type = other DNA
atggtccgccgcacgcgattaagctgaatgggattgctgaagctggcgctaaaaactggatgactttcactggca

SEQ ID NO: 510654 - DNA, 75 bp, synthetic construct
  source 1..75: mol_type = other DNA
ggcattctggctctgtcatgggggcagatatccgcgatcgcttccgactatccatcggttatcagtgatgaagta

SEQ ID NO: 510655 - DNA, 75 bp, synthetic construct
  source 1..75: mol_type = other DNA
cgttctcctggctcaaccatgacattaccgtttgactcagtggttgaagcggtaacatttgaagagggggtggct

SEQ ID NO: 510656 - DNA, 75 bp, synthetic construct
  source 1..75: mol_type = other DNA
aacacttacgcgcgatcagttctatgatgctattcgcaatggggtaatgaatgtcactgccgggaagcctggtag

SEQ ID NO: 510657 - DNA, 75 bp, synthetic construct
  source 1..75: mol_type = other DNA
atatgtcagagatcgccaatggtgatgcggatgacgctgatgaacgcgccattatgctggcggcaaatccggaag

SEQ ID NO: 510658 - DNA, 75 bp, synthetic construct
  source 1..75: mol_type = other DNA
cgtttgactctgtgattgaagcggtaacttttgaagagggggtagctgaatcgcgcgcaacggctgcgcgtggtg

SEQ ID NO: 510659 - DNA, 75 bp, synthetic construct
  source 1..75: mol_type = other DNA
gcaactgcctacttttgtctggtgtttatttgtcggtattattatccgtaatacactgactcatgtatttaaaca

SEQ ID NO: 510660 - DNA, 75 bp, synthetic construct
  source 1..75: mol_type = other DNA
cactacgtgaacgcgcgtcgcgttcgcgagattgttgccgctggtcgtgaaatcgttgtcgattcaccggaggtc

SEQ ID NO: 510661 - DNA, 75 bp, synthetic construct
  source 1..75: mol_type = other DNA
gaaaatgcatagcattaatcgtcagcatggctgttgtgaaccgccccgggtttcctggagagtgttttatctgtg

SEQ ID NO: 510662 - DNA, 75 bp, synthetic construct
  source 1..75: mol_type = other DNA
cggcggcagtgtgtttcccgcgaagacctggcctgctggaaagtggaccgtttcagaacagaggcgcagctgaca

SEQ ID NO: 510663 - DNA, 75 bp, synthetic construct
  source 1..75: mol_type = other DNA
atgaccgtttcactgctggcccgtgtgcaggcaaatattcctgtctgggcacatgaacaactggctgcatgggat

SEQ ID NO: 510664 - DNA, 75 bp, synthetic construct
  source 1..75: mol_type = other DNA
gtgatgctttgaaatctgaatggggacagccaggtacaattgccttcctcaatccaccctactccaaaatctccc

SEQ ID NO: 510665 - DNA, 75 bp, synthetic construct
  source 1..75: mol_type = other DNA
ctgttgcctgacgacgccgaacggttcgccgcgatcgccggggatcatcaaacggcggtggaagggggaatgttc

SEQ ID NO: 510666 - DNA, 75 bp, synthetic construct
  source 1..75: mol_type = other DNA
atacgtcactaactcatgtggcagccgtgcctgcccgtcctgcggaaaaaaggccacagacctgtggatagcgac

SEQ ID NO: 510667 - DNA, 75 bp, synthetic construct
  source 1..75: mol_type = other DNA
ggcattatcaatgcgacgaccgttagccaagctggcggcatcaagctgaagaaggtgaataaaccgactgaacct

SEQ ID NO: 510668 - DNA, 75 bp, synthetic construct
  source 1..75: mol_type = other DNA
aatttaatcactggtgggcaacagagggcgactgggttgaagagcctaactatcgccgcaatggtatgagcgggg

SEQ ID NO: 510669 - DNA, 75 bp, synthetic construct
  source 1..75: mol_type = other DNA
tgcaatgcgtcgagcgcaacggcaaaaagctgtatgtaaagcgcatgacgcatcatctgtttcattccgtacgtt

SEQ ID NO: 510670 - DNA, 75 bp, synthetic construct
  source 1..75: mol_type = other DNA
cgctcacggcggaacagttcgcctggcttaccgccggcgttgactggctgcgtctctctgccagccccctgcaga

SEQ ID NO: 510671 - DNA, 75 bp, synthetic construct
  source 1..75: mol_type = other DNA
gcgcaatgacgcacccggcgaaactgtaagctatcaggtggcaaacgcacaatatcggctgacgattgtggaatc

SEQ ID NO: 510672 - DNA, 75 bp, synthetic construct
  source 1..75: mol_type = other DNA
aagattactgggataattataacgaggtcggtgctaacttaagtctgacaaaaagttttgatcaaataacaatga

SEQ ID NO: 510673 - DNA, 75 bp, synthetic construct
  source 1..75: mol_type = other DNA
tcattttgcgcgtttccttgtggagtgcggcaaagccagttcaatggcggatgtctttaaaaagtatctggcgcg

SEQ ID NO: 510674 - DNA, 75 bp, synthetic construct
  source 1..75: mol_type = other DNA
taaactctggctgcccgcaggcgttgaaggcgtctggcagctttgggaacagccacagaacaagacagagaggga

SEQ ID NO: 510675 - DNA, 75 bp, synthetic construct
  source 1..75: mol_type = other DNA
caataaagaattttataaagcgtatcttaatcccgcacgcaactgctatatcatagataaagagaagaacagccg

SEQ ID NO: 510676 - DNA, 75 bp, synthetic construct
  source 1..75: mol_type = other DNA
tgaaattcttgccgacgattttaactatagttttatccgcggcggcagcaaagaggtgcctgaggtgttgaaaaa

SEQ ID NO: 510677 - DNA, 75 bp, synthetic construct
  source 1..75: mol_type = other DNA
tgtgaccccaacgggaaatgctatcatttataaaaatgtgaagtttaagaaaattaatacctatgtggttaaact

SEQ ID NO: 510678 - DNA, 75 bp, synthetic construct
  source 1..75: mol_type = other DNA
atggcggctatgctcactattatggaggtaaacggtgtcagttttattcaagtgatgtcggtatgtcttcccacc

SEQ ID NO: 510679 - DNA, 75 bp, synthetic construct
  source 1..75: mol_type = other DNA
tacttggtgcaatattttttggtattcgccaggggggaatcggtattggtttatgtggcgggcttgggcttgcca

SEQ ID NO: 510680 - DNA, 75 bp, synthetic construct
  source 1..75: mol_type = other DNA
atgactgcaaaaactaaatttaaaagtcctgcatttgaggctattcacagcgcagcggctggattgtccagcgtc

SEQ ID NO: 510681 - DNA, 75 bp, synthetic construct
  source 1..75: mol_type = other DNA
tgcggcaaagccagttcaatggcggatgtctttaaaaaatatctggcgcgcgggaaaaccggatacgttccgcca

SEQ ID NO: 510682 - DNA, 75 bp, synthetic construct
  source 1..75: mol_type = other DNA
ggcaaatatgtgctgaatcatccatttatgctgcctgggttggggggaattattgctggagtggcattaggcttt

SEQ ID NO: 510683 - DNA, 75 bp, synthetic construct
  source 1..75: mol_type = other DNA
atggcggccatgcttactattatggaagttaacggcgtcagttttattcaagtgatgtcggtatgtcttcccacc

SEQ ID NO: 510684 - DNA, 75 bp, synthetic construct
  source 1..75: mol_type = other DNA
tgtaacgccgacagaaaacgcgattatctataaaaaggtgaaatacagaaaaatcaacacctatattgttaaagt

SEQ ID NO: 510685 - DNA, 75 bp, synthetic construct
  source 1..75: mol_type = other DNA
tggaaacgccaccgacaattcatgactttggcggctttcctcaggcgttatacgaaacgtattatccggctccgg

SEQ ID NO: 510686 - DNA, 75 bp, synthetic construct
  source 1..75: mol_type = other DNA
gttaccctggataaagaagcctggggttttgaccacggttcctggggcgtgctgattaagatgtatcctgacgct

SEQ ID NO: 510687 - DNA, 75 bp, synthetic construct
  source 1..75: mol_type = other DNA
aaggtgcactgttaggcgcaggcgttggtttactgactggcaatggtgttaatggcgtactgaaaggtgctgctg

SEQ ID NO: 510688 - DNA, 75 bp, synthetic construct
  source 1..75: mol_type = other DNA
cgcacaatatcggctgacgattgtggaatcgacccgatacactaccctggtgacaatagaacagactgcgcccgc

SEQ ID NO: 510689 - DNA, 75 bp, synthetic construct
  source 1..75: mol_type = other DNA
cgccattccctgaatggaacagcggtcattatatcgaaattccaggtgagggcattatattcaatgatatcatca

SEQ ID NO: 510690 - DNA, 75 bp, synthetic construct
  source 1..75: mol_type = other DNA
ggcgtatttgtcggatattctggccgggcagtttacggggcagtttaatagtcagcgtaattcgttaccgtccgg

SEQ ID NO: 510691 - DNA, 75 bp, synthetic construct
  source 1..75: mol_type = other DNA
ctcaaggaaatactaaagaaaaactggctgttatcgccgatctcacaaccattgcgggaatatcgattgcaacta

SEQ ID NO: 510692 - DNA, 75 bp, synthetic construct
  source 1..75: mol_type = other DNA
cttatctttatctgtatttttttgctggctgtctttacattttatgaggttatttcttcgatgagaatactctat

SEQ ID NO: 510693 - DNA, 75 bp, synthetic construct
  source 1..75: mol_type = other DNA
gtcagtcaactcgactggaaattcaataacgctgcaattattaaaggtgcaattaattgggatttgatgccccag

SEQ ID NO: 510694 - DNA, 75 bp, synthetic construct
  source 1..75: mol_type = other DNA
agaaaaaggccgcgacggtaaaaatgcgcgtaaaggtgcaaaagtgggtgccgccgttggtgctgtcactggcgt

SEQ ID NO: 510695 - DNA, 75 bp, synthetic construct
  source 1..75: mol_type = other DNA
aattcgatgaagtacgtacggaagcacgcaacgaggggattaactataccgcaagccgtcttgctgctgctttca

SEQ ID NO: 510696 - DNA, 75 bp, synthetic construct
  source 1..75: mol_type = other DNA
cgaaacaggagcatggaaggatgctgttgactgggtgctcagagaggcctgctgcgctgccattctgggtaagcc

SEQ ID NO: 510697 - DNA, 75 bp, synthetic construct
  source 1..75: mol_type = other DNA
cgcaagctgatgtgagttttagtgccgacgccagcgatctgctgatgattgcggcgcgtaaacaagatccggata

SEQ ID NO: 510698 - DNA, 75 bp, synthetic construct
  source 1..75: mol_type = other DNA
ccattgaactggagcaaatgccgaaagccttacgcatgatgctgctgcaactggcggattttgttgattcgggaa

SEQ ID NO: 510699 - DNA, 75 bp, synthetic construct
  source 1..75: mol_type = other DNA
gtattcgctacaaatatacgcccgttcccccgctggaagacatggagctttaccagacgtttactgatgaattct

SEQ ID NO: 510700 - DNA, 75 bp, synthetic construct
  source 1..75: mol_type = other DNA
aagaacgggaggaatacacattgttcgcccaggaatgtatccgatacaccgccacgcggtcgctgaatgacgcta

SEQ ID NO: 510701 - DNA, 75 bp, synthetic construct
  source 1..75: mol_type = other DNA
ggggttatgcgtgatgatcgttttaatgccctgaaacaggaattttccggcgttcctggtgatgcggctgatgcg

SEQ ID NO: 510702 - DNA, 75 bp, synthetic construct
  source 1..75: mol_type = other DNA
ctggcggattttgttgagtcgggaatgaaaaccgcgcctgaaaccaaacagacatcggtaggtgaaccatgctaa

SEQ ID NO: 510703 - DNA, 75 bp, synthetic construct
  source 1..75: mol_type = other DNA
gtggcagggggtgctgcgccgtatattgctgaaattatcaaacagactaccccggacggtgcgggacgtgtggcc

SEQ ID NO: 510704 - DNA, 75 bp, synthetic construct
  source 1..75: mol_type = other DNA
ggtaccaccgcttgaagatctggagcttcaccagacgtttactgatgagttctttgacggtgcatttgcatcact

SEQ ID NO: 510705 - DNA, 75 bp, synthetic construct
  source 1..75: mol_type = other DNA
tcgtccgcgagcctgctgacatacgcgccggcatcgactccctgacgcgactcgccactcaggccgccgggcatc

SEQ ID NO: 510706 - DNA, 75 bp, synthetic construct
  source 1..75: mol_type = other DNA
gcatcatcgcagctcccggactggatactgaagctgtcacaaaatccctgtgtgtaattgcagaaaaacttcgcg

SEQ ID NO: 510707 - DNA, 75 bp, synthetic construct
  source 1..75: mol_type = other DNA
cgcgcgtaagggaaagtaccggccttgccaccgccattaatgatgtggattccagtgttattggtattgtggcta

SEQ ID NO: 510708 - DNA, 75 bp, synthetic construct
  source 1..75: mol_type = other DNA
gctgtggcagatgatgccgataccggcacgtttcctctggataagcctgttctgctgacccgtgtgaatgatgtg

SEQ ID NO: 510709 - DNA, 75 bp, synthetic construct
  source 1..75: mol_type = other DNA
gcgtgatgatcgttttaattccctgaaacaagaattttccggcgttcctgatgatgcggctgatgcgctttcgtc

SEQ ID NO: 510710 - DNA, 75 bp, synthetic construct
  source 1..75: mol_type = other DNA
atcaaattaaaggcgtgatcagtaaaaaaacagctcgggccggagtttcagcgtcagctattaatgtgcctgtat

SEQ ID NO: 510711 - DNA, 75 bp, synthetic construct
  source 1..75: mol_type = other DNA
ttgatcgtcgttcgcgtggctgaacacaaagaagaagacggaaagacgcaggatcaactggttatcggtggttct

SEQ ID NO: 510712 - DNA, 75 bp, synthetic construct
  source 1..75: mol_type = other DNA
gaagcgcagtttgaaaccatcgacagtccactgacgcctgcgaacgtgaaggatgttatcagcgccatcagggca

SEQ ID NO: 510713 - DNA, 75 bp, synthetic construct
  source 1..75: mol_type = other DNA
aatataccttcaataatttccgcatacaatcctgtgatgacaaaggtgatggatatctacgggaaaagcgctccc

SEQ ID NO: 510714 - DNA, 75 bp, synthetic construct
  source 1..75: mol_type = other DNA
acgaacttaacactattgatttatcccccttaatccagagtaagctgccagttacctgctttgatatcacaaagt

SEQ ID NO: 510715 - DNA, 75 bp, synthetic construct
  source 1..75: mol_type = other DNA
ctgggagaggccggggttgatggatggattgatactcactttaaagaccgctttttaggtgcggcaatgcttggg

SEQ ID NO: 510716 - DNA, 75 bp, synthetic construct
  source 1..75: mol_type = other DNA
agatgttatcagtgccgtcagggcaaaactggattcgctggtgacagccgggaaactgattggggcgtcgtgctg

SEQ ID NO: 510717 - DNA, 75 bp, synthetic construct
  source 1..75: mol_type = other DNA
tcatcgctaaacagttgtatggcggtctgggacaaaacccgtttaatccggcaatgattggttatgtggtcttac

SEQ ID NO: 510718 - DNA, 75 bp, synthetic construct
  source 1..75: mol_type = other DNA
atggtattcagaatagctagctccccttatacccataaccagcgccagacatcgcgcattatgctgttggtgttg

SEQ ID NO: 510719 - DNA, 75 bp, synthetic construct
  source 1..75: mol_type = other DNA
atgtgctggggatgtccaggcatgtgttctggtcgttgcaggctgctgacagcgatgccaacagcctcaacaaca

SEQ ID NO: 510720 - DNA, 75 bp, synthetic construct
  source 1..75: mol_type = other DNA
gagcggcttttttcttactttccacgagagaatataaatcaacggggcttgatgtactgaatatcgccgccgatt

SEQ ID NO: 510721 - DNA, 75 bp, synthetic construct
  source 1..75: mol_type = other DNA
cgcaccggaagatacagatattgcgctgttatgtgttgctgacatggtaaaagctgcatgttttttgctggaaac

SEQ ID NO: 510722 - DNA, 75 bp, synthetic construct
  source 1..75: mol_type = other DNA
ttttaaaaaagaaccacgcaggcatgaaattacgcagatggtttgctgtgctgatacattgctaccgttaaccat

SEQ ID NO: 510723 - DNA, 75 bp, synthetic construct
  source 1..75: mol_type = other DNA
tagccttgcttggggaagcctgggatatcgtccaacgacagccccaaaaatcggaattcatttttccatataaca

SEQ ID NO: 510724 - DNA, 75 bp, synthetic construct
  source 1..75: mol_type = other DNA
caaaaccaggcgaattatatacagagtgcttctcagctgatgtctgattctgcgcgagtgaatagccgtattgtc

SEQ ID NO: 510725 - DNA, 75 bp, synthetic construct
  source 1..75: mol_type = other DNA
tttggttggttgggcgtcgcattaacagccgttgccgctgtttttaacccagcactctgggctgttgttgccatt

SEQ ID NO: 510726 - DNA, 75 bp, synthetic construct
  source 1..75: mol_type = other DNA
tatgggaaacgaggttcttcacactaccacaatgggttatccccagccattaccgcctggtcaaagtgccgtgag

SEQ ID NO: 510727 - DNA, 75 bp, synthetic construct
  source 1..75: mol_type = other DNA
tttggcggcatcagtggtgatgttattagtcgcactggtgagacagaatcacagagtagtacacgaagtacaact

SEQ ID NO: 510728 - DNA, 75 bp, synthetic construct
  source 1..75: mol_type = other DNA
ggttaggggttgcagcaactgctattgcagctatttttaacccggcactctgggctgttgttgctattagtgcaa

SEQ ID NO: 510729 - DNA, 75 bp, synthetic construct
  source 1..75: mol_type = other DNA
gatggtacttcgcggtatcggtcgtctggatatggggcttgccaccgttggcggcgtcgggattgtgatcctcgc

SEQ ID NO: 510730 - DNA, 75 bp, synthetic construct
  source 1..75: mol_type = other DNA
ttgccatcggcgcaatcggtgcctggtcgcaggcaatggttactctggcgctggtgttaaccgccctgctgttct

SEQ ID NO: 510731 - DNA, 75 bp, synthetic construct
  source 1..75: mol_type = other DNA
gaatgaacctttacgggcatgggatgcggcagagtttgcggcaatgtcggattttattacggaacactactggac

SEQ ID NO: 510732 - DNA, 75 bp, synthetic construct
  source 1..75: mol_type = other DNA
gcgttgaataatgaggctgcgcaactccaaatgttgtctcagttagctgctttcgcggtgcaaaacttaactcga

SEQ ID NO: 510733 - DNA, 75 bp, synthetic construct
  source 1..75: mol_type = other DNA
cataaacagcctttatcaagccgcctctgatgaaaaaagagcaattgtggctttcctcttatctggaaatgctac

SEQ ID NO: 510734 - DNA, 75 bp, synthetic construct
  source 1..75: mol_type = other DNA
caacggtttccagcaattgctgctgggtatgcccgcgccggtggcgattatcgttttcgctctcatcgcctggca

SEQ ID NO: 510735 - DNA, 75 bp, synthetic construct
  source 1..75: mol_type = other DNA
gccccgtagctaacgatcttgaacagttaggaaccaaagagaagttttggttctatttctccgatgacactgtaa

SEQ ID NO: 510736 - DNA, 75 bp, synthetic construct
  source 1..75: mol_type = other DNA
tccagcgtgctgtcacgcgggctgattgcggaacaccagggcgagctgtgggtcgccagcccgctgaaaaaacag

SEQ ID NO: 510737 - DNA, 75 bp, synthetic construct
  source 1..75: mol_type = other DNA
tataaagatcacaagaaatggtcagaaaatggctttctgtattgcgctgattatcatactggcagccgtcttttt

SEQ ID NO: 510738 - DNA, 75 bp, synthetic construct
  source 1..75: mol_type = other DNA
atgaacgccttatgcgacctacacagcactgaactcgtaggcctgataagacgcgcaagcgtcgcatcaggcaat

SEQ ID NO: 510739 - DNA, 75 bp, synthetic construct
  source 1..75: mol_type = other DNA
ggaaacatcatggtggttctgattgctggagaactccatctttgttatttaagaacttacaccgtgaatttggtt

SEQ ID NO: 510740 - DNA, 75 bp, synthetic construct
  source 1..75: mol_type = other DNA
caccgtttccaagtgcaattgtcatctttaaaactgagccacgcaagcatgaaattacacagatgatttgctgtg

SEQ ID NO: 510741 - DNA, 75 bp, synthetic construct
  source 1..75: mol_type = other DNA
cgccctgtaccctgacggtaatcgggaggtgattgccatcctgccggtaacagaactgggcgcactgattaaccg

SEQ ID NO: 510742 - DNA, 75 bp, synthetic construct
  source 1..75: mol_type = other DNA
atgatgtcggcgcaaaaacattatccagaacgggagtgcgccttgagcgacacgaattacgcagtgatttacgac

SEQ ID NO: 510743 - DNA, 75 bp, synthetic construct
  source 1..75: mol_type = other DNA
actggaaaaagcgcaaatacccggtgcgctggaaggcgcacaacgactggcgcagggcggggcggttacgcgcgg

SEQ ID NO: 510744 - DNA, 75 bp, synthetic construct
  source 1..75: mol_type = other DNA
gttatcatccgggcgggtgatatggtcattgatggcagcatacgcggtcgtcttgagcgccttgcagacgtcttg

SEQ ID NO: 510745 - DNA, 75 bp, synthetic construct
  source 1..75: mol_type = other DNA
ctattggtggcgggagtagttataccccggagttactggaagggtttattaagcgttatcacgaattgccggtta

SEQ ID NO: 510746 - DNA, 75 bp, synthetic construct
  source 1..75: mol_type = other DNA
ttactacccaactgcgcgtaggccaattaccggcgcgcgaactggatgaacgtattccattaagtcatggttatc

SEQ ID NO: 510747 - DNA, 75 bp, synthetic construct
  source 1..75: mol_type = other DNA
tgaaaagattggttgcgcattttgccgaacaccacggcgacgcgatggaagtcgcgcagtgccagcaatcgccca

SEQ ID NO: 510748 - DNA, 75 bp, synthetic construct
  source 1..75: mol_type = other DNA
gtgaccgacaagcacgttgaaggctgggatgacccgcgtatgccgaccatttccggtctgcgtcgtcgtggttac

SEQ ID NO: 510749 - DNA, 75 bp, synthetic construct
  source 1..75: mol_type = other DNA
tggggaatgattcagcacaacaatgtaccgcaaaatataagttatccatggatgcaatgcagggtggaattattc

SEQ ID NO: 510750 - DNA, 75 bp, synthetic construct
  source 1..75: mol_type = other DNA
ctttttcttccttttctatctctgtggtggcggtcgcggttgccagcacgttttctgcacatgccggaaaattta

SEQ ID NO: 510751 - DNA, 75 bp, synthetic construct
  source 1..75: mol_type = other DNA
gtgggtgtagtaaagaaacgactggcaggggctttgttgtgtcaaaaaataccgaagaagcaatttgtgactcat

SEQ ID NO: 510752 - DNA, 75 bp, synthetic construct
  source 1..75: mol_type = other DNA
gaaccatccgaacaaaccggaaatgggtagccgccaggtgccgtttagtgctgagatttggatcgatcgtgccga

SEQ ID NO: 510753 - DNA, 75 bp, synthetic construct
  source 1..75: mol_type = other DNA
aaggctgggacgatccgcgtatgccgaccatttccggtctgcgtcgtcgtggttataccgcggcttctattcgtg

SEQ ID NO: 510754 - DNA, 75 bp, synthetic construct
  source 1..75: mol_type = other DNA
gcgtggtagccattgcgctttatctgctgcacgccagaaacaacaaccgcgccctgttcagtttgaaactgttcc

SEQ ID NO: 510755 - DNA, 75 bp, synthetic construct
  source 1..75: mol_type = other DNA
acccggtattaccggcaaactgtttctggcgattttcgccacctgcattgtcttgctgatcagtatgcactgggc

SEQ ID NO: 510756 - DNA, 75 bp, synthetic construct
  source 1..75: mol_type = other DNA
gcggcgctttgatctctccggctttctgttgctggcggttggcatggcggtattaaccctggcgctggacggcag

SEQ ID NO: 510757 - DNA, 75 bp, synthetic construct
  source 1..75: mol_type = other DNA
atgtcacggaagaccgtttctcgtactttttcttccttttctatctctgtggtggcggttgctgttgccagcacg

SEQ ID NO: 510758 - DNA, 75 bp, synthetic construct
  source 1..75: mol_type = other DNA
acaatcttatcgtttcttatattccaagagcttcgaaagcggcaccgatttccgccttgcgggctatcggtactc

SEQ ID NO: 510759 - DNA, 75 bp, synthetic construct
  source 1..75: mol_type = other DNA
tgtttaccctcggttcgctgttttgcgcactttccgccacgttaaacgaactgttgcttgctcgcgcgttacagg

SEQ ID NO: 510760 - DNA, 75 bp, synthetic construct
  source 1..75: mol_type = other DNA
cttattttcggcgcgcttgcgggcttattagtctggttgatccgcagtttcggcggctatcctgacggcgtggct

SEQ ID NO: 510761 - DNA, 75 bp, synthetic construct
  source 1..75: mol_type = other DNA
atgcagcaaaggggatatgtctggtcaaaactgcgaaaatgcgcgtgaagccattcaaaaagagcaatcgggtaa

SEQ ID NO: 510762 - DNA, 75 bp, synthetic construct
  source 1..75: mol_type = other DNA
ttactggcatccgacgatgaaatgttgccggatagccagcgtggctttgctccggtggtgcgcggcatcgccaaa

SEQ ID NO: 510763 - DNA, 75 bp, synthetic construct
  source 1..75: mol_type = other DNA
aaaaccaatgggataacgttggtacatcgttaaaccgggcaattattccacttaaatcacagataactctgggtg

SEQ ID NO: 510764 - DNA, 75 bp, synthetic construct
  source 1..75: mol_type = other DNA
cgacaccacaaaaagtgccacgatggatgttattttcactgtgataaccagtccgaactcaccgaaagcaaaata

SEQ ID NO: 510765 - DNA, 75 bp, synthetic construct
  source 1..75: mol_type = other DNA
atattcacggcaggctgatggcggggacgctggacagtcagagcagttgcccgtgtaaggcacggtttattgcgt

SEQ ID NO: 510766 - DNA, 75 bp, synthetic construct
  source 1..75: mol_type = other DNA
cgaaaacctgaccctgcgccagcgtattaccgataaatacctggcaaatctggtcacttcggttaacagcaatta

SEQ ID NO: 510767 - DNA, 75 bp, synthetic construct
  source 1..75: mol_type = other DNA
ggaagctggcaggccatttgtgatgcagcgcggcagattggtatgccggaagagacgttgcaggctttctgtcag

SEQ ID NO: 510768 - DNA, 75 bp, synthetic construct
  source 1..75: mol_type = other DNA
tcaggtaaccgtggatggttatcggcaactcgggtgatttacgttagtggtgatcaggctttttttacaactgtt

SEQ ID NO: 510769 - DNA, 75 bp, synthetic construct
  source 1..75: mol_type = other DNA
gtggtacggcgtttaacttctccgcggctcgaatttgaagctgcggcaatttatgaatatcccgaacatttacgt

SEQ ID NO: 510770 - DNA, 75 bp, synthetic construct
  source 1..75: mol_type = other DNA
cgacagtgactatcggcgttatcataagcgcagccagatacaaggtaacatcactcagcaactgggagactacgg

SEQ ID NO: 510771 - DNA, 75 bp, synthetic construct
  source 1..75: mol_type = other DNA
acagctttagtggcagcaatggacgcaatgaaggtacaggttcatcttcagattcgaccagtgacagttattacc

SEQ ID NO: 510772 - DNA, 75 bp, synthetic construct
  source 1..75: mol_type = other DNA
gattcgaccagtgacagttattacctgaacctgcgcagcggtttgaacgtggggccgtggcgtttacgtaataac

SEQ ID NO: 510773 - DNA, 75 bp, synthetic construct
  source 1..75: mol_type = other DNA
ggctggtactacgttttaccattcgttctgtttttacaagggatggtcaactcaacgcgtttttcctccatgaac

SEQ ID NO: 510774 - DNA, 75 bp, synthetic construct
  source 1..75: mol_type = other DNA
accgcgataacgtcgccagaatcattaaaaacgcaatgctggatatcggcctggctatccctgtgaaaatccgca

SEQ ID NO: 510775 - DNA, 75 bp, synthetic construct
  source 1..75: mol_type = other DNA
ggtggcagatattacgctggatccgaaaacctatttgccgcgcgtgacgctggaaattgaacaacgttataacca

SEQ ID NO: 510776 - DNA, 75 bp, synthetic construct
  source 1..75: mol_type = other DNA
gctatcctgaaggatggcgatacaattcaggacaccaagtctgcgatggtgctggaagatctcattggtcagttc

SEQ ID NO: 510777 - DNA, 75 bp, synthetic construct
  source 1..75: mol_type = other DNA
gtgaatacttaccacatcacaataccctggcccccgagcaataaccgctagtaccgccataatcgcgggcgcact

SEQ ID NO: 510778 - DNA, 75 bp, synthetic construct
  source 1..75: mol_type = other DNA
gtgaatacttactacatcacaatgccctggcccccgagcaataaccgctagtaccgccataatcgcgggcgcacc

SEQ ID NO: 510779 - DNA, 75 bp, synthetic construct
  source 1..75: mol_type = other DNA
gtgaatacttacaacatcacaatcccctggcccccgagcaataaccgctagtaccgccataatcgcgggcgcact

SEQ ID NO: 510780 - DNA, 75 bp, synthetic construct
  source 1..75: mol_type = other DNA
atgagctataccaatgttcttgttgctgtagctgtctcgccagaaagccagcaactgttgacaaaagcggtctct

SEQ ID NO: 510781 - DNA, 75 bp, synthetic construct
  source 1..75: mol_type = other DNA
actgaaccgccccgggtttcctggagagtgttttatctgtgaactcaggctgccagatcatcgtttccgatggaa

SEQ ID NO: 510782 - DNA, 75 bp, synthetic construct
  source 1..75: mol_type = other DNA
gataaggcgcgccagcttttcgatacggcttctcaggtctgcgaaattgtcgacaatgttcggcagcgtgtgcag

SEQ ID NO: 510783 - DNA, 75 bp, synthetic construct
  source 1..75: mol_type = other DNA
caaaatcattggcacctttgaaactttctcccctacttttcctaccccagaaatcgccagtattttacggatcag

SEQ ID NO: 510784 - DNA, 75 bp, synthetic construct
  source 1..75: mol_type = other DNA
ctcggcctcgatgacgatgcgctgtcgctggagtggacgctcggcggtctgcccgacgttgagctgtgggcgcag

SEQ ID NO: 510785 - DNA, 75 bp, synthetic construct
  source 1..75: mol_type = other DNA
tttcccagagtaatgattggcgcacactggtttactgacatcattgtcggttcgatgaccgtgatattgatcggt

SEQ ID NO: 510786 - DNA, 75 bp, synthetic construct
  source 1..75: mol_type = other DNA
gtgaatacttaccacatcacaattccctggcccccgagcaataaccgctagtaccgccataatcgcgggcgcacg

SEQ ID NO: 510787 - DNA, 75 bp, synthetic construct
  source 1..75: mol_type = other DNA
ttctgccgtattttgccatgtgtttcatctggatcctgccgggcagtttatcaatgtcatggttatttttatctg

SEQ ID NO: 510788 - DNA, 75 bp, synthetic construct
  source 1..75: mol_type = other DNA
ctgacgatgttcgtgtccttcatcctgcgcgatcagcttgcctgggacttacatctggggctggcgccggagcag

SEQ ID NO: 510789 - DNA, 75 bp, synthetic construct
  source 1..75: mol_type = other DNA
cccctcatctgatttcgggtaatctcccggtaaatgaaggaccgaatgatccactgggtcaggttttccataatg

SEQ ID NO: 510790 - DNA, 75 bp, synthetic construct
  source 1..75: mol_type = other DNA
cggtgatgctgcccgccagcggctggctggcggacaaagtcggcgtgcgcaatattttctttaccgccatcgtgc

SEQ ID NO: 510791 - DNA, 75 bp, synthetic construct
  source 1..75: mol_type = other DNA
cggtcaggtcggcccgctattgggtccggcgctcggcggcctgctggtggagtacgcgtcgtggcactggatctt

SEQ ID NO: 510792 - DNA, 75 bp, synthetic construct
  source 1..75: mol_type = other DNA
ctttgattgaactgaatgtgtttatcccagcaatattatttattgcggtaatcattctgtgcttgacgatatatc

SEQ ID NO: 510793 - DNA, 75 bp, synthetic construct
  source 1..75: mol_type = other DNA
atgctggatatcggcctggctatgcctgtgaaaatccgcattgagtgccacatgccggatcgccgtcgccgtgac

SEQ ID NO: 510794 - DNA, 75 bp, synthetic construct
  source 1..75: mol_type = other DNA
tctgccgcaactgggcatcgagttcagcggcccgggtgcgaaagagctgaaaggctatatgacccgcgtctttga

SEQ ID NO: 510795 - DNA, 75 bp, synthetic construct
  source 1..75: mol_type = other DNA
atggctgtcgctgccaacaaacgttcggtaatgacgctgttttccggtcctactgacatctatagccatcaggtc

SEQ ID NO: 510796 - DNA, 75 bp, synthetic construct
  source 1..75: mol_type = other DNA
aatgcgttgcgaaatatgaactgccgattaaggaaaaatcgtcaggtattatttctgtgacaacaaattgccaat

SEQ ID NO: 510797 - DNA, 75 bp, synthetic construct
  source 1..75: mol_type = other DNA
tgcttacagttggaataaaagccctgaatgggatgaaaacgaccagttatggtcatttaatatttctattccgtt

SEQ ID NO: 510798 - DNA, 75 bp, synthetic construct
  source 1..75: mol_type = other DNA
atgtcatggatggtcgtttcgcgcacttacacttctttgcccttttctttatctgtattggcgcttacggttgca

SEQ ID NO: 510799 - DNA, 75 bp, synthetic construct
  source 1..75: mol_type = other DNA
atgaatatgatgatctcatatcaggaacttgttcgcaccttccctaacacatcagattcacgcagcaccgatgcc

SEQ ID NO: 510800 - DNA, 75 bp, synthetic construct
  source 1..75: mol_type = other DNA
aggcccagttgggtcatcgcagcagtcagtcttcacaacggtatgcgcatcttcaccctcagcgtttacaaaaca

SEQ ID NO: 510801 - DNA, 75 bp, synthetic construct
  source 1..75: mol_type = other DNA
ataacataatttgcgaggaatgtcgtaacagcgaatcaatgcagcgtgtgctggctttttaccggggtaattttc

SEQ ID NO: 510802 - DNA, 75 bp, synthetic construct
  source 1..75: mol_type = other DNA
acttatggggcatcaaaatttatttctggtgttataggggatcgttctaatccaagatggtttatggggattgga

SEQ ID NO: 510803 - DNA, 75 bp, synthetic construct
  source 1..75: mol_type = other DNA
aatcttgcaggggatacctcatgtgacatttttgcacaattacaaagtgcatcccttacgggaattaatttcttc

SEQ ID NO: 510804 - DNA, 75 bp, synthetic construct
  source 1..75: mol_type = other DNA
atgaactctttaatcagcattatctgccatgggctaaatctgctaaacgcagctgggggaaggatgtacagcgct

SEQ ID NO: 510805 - DNA, 75 bp, synthetic construct
  source 1..75: mol_type = other DNA
gaaacgtttataacggaacattagggattatgtctttaatggctccgttctttatcggcatggcgctggcagaag

SEQ ID NO: 510806 - DNA, 75 bp, synthetic construct
  source 1..75: mol_type = other DNA
gctgggcgtatgtgatctttgttccgctgctgtggttcttcggtattcacggcgcactggcgctgaccgcgctgg

SEQ ID NO: 510807 - DNA, 75 bp, synthetic construct
  source 1..75: mol_type = other DNA
tctggcggcaatcaccctcgcagcgtactacatgggcatcattcctccggtgaccaatattgcaccgtggaccat

SEQ ID NO: 510808 - DNA, 75 bp, synthetic construct
  source 1..75: mol_type = other DNA
ccttatccgtgcattacctgacggaaaaatacgtcgttacgacaggcgtcataacataatttgcgaggaatgtcg

SEQ ID NO: 510809 - DNA, 75 bp, synthetic construct
  source 1..75: mol_type = other DNA
gggttcacctgcgctggcacagcatctggttgagctgttagcgccggtccctgtgacgctggataaagaagcctg

SEQ ID NO: 510810 - DNA, 75 bp, synthetic construct
  source 1..75: mol_type = other DNA
tttgtggtggtggctaacaaagcacaaaacgtgattgataaggaagagagcgaagaagatattgcgagtgctctg

SEQ ID NO: 510811 - DNA, 75 bp, synthetic construct
  source 1..75: mol_type = other DNA
ccccacctattttgaatcgcgctggaatctgggcgacgcactttctgatatggcactgtttgaacgcgtagaagt

SEQ ID NO: 510812 - DNA, 75 bp, synthetic construct
  source 1..75: mol_type = other DNA
attggcggtctgctgaataccatgtggaactggcgggcctgttacctgtttttgctggtgctctgtgccggtgtg

SEQ ID NO: 510813 - DNA, 75 bp, synthetic construct
  source 1..75: mol_type = other DNA
gcaaaacattggttccggcgtgctggcgtcgctctctgcgatgttgccgcaaaccggtcagggcagcctggggtt

SEQ ID NO: 510814 - DNA, 75 bp, synthetic construct
  source 1..75: mol_type = other DNA
gaacggacacaattgcgtcacgctaatagtctgttaaatatggggattcttgtaagtccgttgcttgcaccgttg

SEQ ID NO: 510815 - DNA, 75 bp, synthetic construct
  source 1..75: mol_type = other DNA
cgtaagaatcactatcacggcctgccgttcaaagtgactaattactttgagtttatcgcccgtgaaacccgcgag

SEQ ID NO: 510816 - DNA, 75 bp, synthetic construct
  source 1..75: mol_type = other DNA
ccaacggcttgcgtcacaagatccgtttgcaggtcgatggcggcctgaaaacgggtgtcgatatcatcaaagcgg

SEQ ID NO: 510817 - DNA, 75 bp, synthetic construct
  source 1..75: mol_type = other DNA
acactactcgttcccgccgcgctgttcttttttggtgccggaatgctatttccgctggccaccagcggcgcgatg

SEQ ID NO: 510818 - DNA, 75 bp, synthetic construct
  source 1..75: mol_type = other DNA
caggacgataccacacatatgaaatcgttatatgctgccactcgtgtcacccttgccgatccgctgcatctgatc

SEQ ID NO: 510819 - DNA, 75 bp, synthetic construct
  source 1..75: mol_type = other DNA
gtttgctgatacctggcaagcgacactgaatgccacccactctgaagtcgaatttgacagcaaaatgatgtatgt

SEQ ID NO: 510820 - DNA, 75 bp, synthetic construct
  source 1..75: mol_type = other DNA
ataatccacatcaagccgtaaccaaaccgtcgctgcttaccgcctgtatagcgctggcactatttccttctgccg

SEQ ID NO: 510821 - DNA, 75 bp, synthetic construct
  source 1..75: mol_type = other DNA
cttatccgcgatcctgctttactagaacgtttcaggtcgcttcatgacaaagcctgtgttgccgaaatggaagcc

SEQ ID NO: 510822 - DNA, 75 bp, synthetic construct
  source 1..75: mol_type = other DNA
gatatggcgttgttcgagcgtgtagaagtggtgcgtggcgcgaccgggctaatgaccggtactggcaatccttct

SEQ ID NO: 510823 - DNA, 75 bp, synthetic construct
  source 1..75: mol_type = other DNA
tacgccagctatacctctattttccagccgcaaaatgatcgtgacagttcaggcaaatatctggctccaatcacc

SEQ ID NO: 510824 - DNA, 75 bp, synthetic construct
  source 1..75: mol_type = other DNA
aagccattattaacgcctcaacgtgggaatggctgcgcccgggaaatattgatattcagccgtttccccgggagg

SEQ ID NO: 510825 - DNA, 75 bp, synthetic construct
  source 1..75: mol_type = other DNA
atgaaacactttttcttacctttggggggttgtgcgctgttgttgtcgggatgtggtgatgacgatgttacgcag

SEQ ID NO: 510826 - DNA, 75 bp, synthetic construct
  source 1..75: mol_type = other DNA
gtcgtcgtgtgcctcctgccgcgcttcctgtcagcattggggtcgttgttaataacgttcagactgtacttaata

SEQ ID NO: 510827 - DNA, 75 bp, synthetic construct
  source 1..75: mol_type = other DNA
ctgctgattacgatgcgcaaaccattcgtgagcgagtgcgtgcagccggtgtggtcggtgccggaggcgctggtt

SEQ ID NO: 510828 - DNA, 75 bp, synthetic construct
  source 1..75: mol_type = other DNA
acaggtggcatctggggcttttacgcaatacggatttaaagggaacttgcctgcgggtttacaaggatctacggg

SEQ ID NO: 510829 - DNA, 75 bp, synthetic construct
  source 1..75: mol_type = other DNA
catgaacgaattaaccatttgatgaatcagagaaaaagtgagctggcagacgttgaaagctatatcacgaccaag

SEQ ID NO: 510830 - DNA, 75 bp, synthetic construct
  source 1..75: mol_type = other DNA
attctgctgttggcatactgctttgcggcagtgaagaccgtgctattcataaattcttccgtgaaagcgcctttc

SEQ ID NO: 510831 - DNA, 75 bp, synthetic construct
  source 1..75: mol_type = other DNA
atatccctggaagaagcaccaccggcaacacagcagattgtctgtagtcgcagttttggtgaacgaatcacagac

SEQ ID NO: 510832 - DNA, 75 bp, synthetic construct
  source 1..75: mol_type = other DNA
tattttccagcaattatgcgctgtaccacagcatgagccaacgggttatggctgttctggagtcgctttctcccg

SEQ ID NO: 510833 - DNA, 75 bp, synthetic construct
  source 1..75: mol_type = other DNA
tcagccgcgtctcaatgagttacaggggctatataatgatcatccaggcgggacaatactgacagatttggggtt

SEQ ID NO: 510834 - DNA, 75 bp, synthetic construct
  source 1..75: mol_type = other DNA
attgcgtcgcggttggatccatcaacttcgtcaacgtagcgacggccctgcgcaagtcttttgccacccggatta

SEQ ID NO: 510835 - DNA, 75 bp, synthetic construct
  source 1..75: mol_type = other DNA
tcagcggcgctgcgggagaaaaaacagacccatttcctgcatcaaaacaacaccggtattacgcaaaacttatcg

SEQ ID NO: 510836 - DNA, 75 bp, synthetic construct
  source 1..75: mol_type = other DNA
cagtcggttatctgttgcctgctggctggcttgctgatgtggatccccgactggtttggcgtgatgaatgtctgg

SEQ ID NO: 510837 - DNA, 75 bp, synthetic construct
  source 1..75: mol_type = other DNA
tcccgtctggcatggttagcaacggttatccctcagttttccaaatcgggaattgtttataccctgacgactcgc

SEQ ID NO: 510838 - DNA, 75 bp, synthetic construct
  source 1..75: mol_type = other DNA
gtgattttaatactccaccttttaaaaaagtgccggcttactggcttcatccggggctgacttatcttaaagtgc

SEQ ID NO: 510839 - DNA, 75 bp, synthetic construct
  source 1..75: mol_type = other DNA
ttgccattgattacctgaagaacaataaaaagcaggggctgatgaagtgcattggtcgttgcatgggatatcttc

SEQ ID NO: 510840 - DNA, 75 bp, synthetic construct
  source 1..75: mol_type = other DNA
ggtcgttgcatgggatatctgcagatagctgctgagattgaagcgctggccagtggtgctgacaaggatgcagtt

SEQ ID NO: 510841 - DNA, 75 bp, synthetic construct
  source 1..75: mol_type = other DNA
aagccattattaacgcgtcaacgtgggaatggttgcgcccgggaaatattgatattcagccttttccgcgcgagg

SEQ ID NO: 510842 - DNA, 75 bp, synthetic construct
  source 1..75: mol_type = other DNA
tgatatcgctaacgccctgccgggagaaaccatcgacaccggcgctgacagcgattaccgcattcgtgcaaatgc

SEQ ID NO: 510843 - DNA, 75 bp, synthetic construct
  source 1..75: mol_type = other DNA
acgctgccagccggtgcggaaattcgtggtgaaggtgtcagcgtggccaccacagcagactgcaccatcggtgat

SEQ ID NO: 510844 - DNA, 75 bp, synthetic construct
  source 1..75: mol_type = other DNA
gttgctaaaccaataacggttagcgtccccattgggatgtctttacgcgaagtactggcgctggcgggcggtgta

SEQ ID NO: 510845 - DNA, 75 bp, synthetic construct
  source 1..75: mol_type = other DNA
tccgggaccgacggtgggagaaaaaacaggtcgctctggccgggatgacggacggggaagacgcaacggcaaaat

SEQ ID NO: 510846 - DNA, 75 bp, synthetic construct
  source 1..75: mol_type = other DNA
aaaaatgctcaacgctggctggccatccgggaccgacggtgggagaaaaaacaggccgggatgacggacggggag

SEQ ID NO: 510847 - DNA, 75 bp, synthetic construct
  source 1..75: mol_type = other DNA
aggcactggcgcaaaatcatcacaactgggccgcctgtgcgcggatgctggaaaccgacgtcgccaacctgcata

SEQ ID NO: 510848 - DNA, 75 bp, synthetic construct
  source 1..75: mol_type = other DNA
tcaactggcaataaacgcactcacaccactgttaccaccggatatccgcctgcatattttgcccgatgtttaccc

SEQ ID NO: 510849 - DNA, 75 bp, synthetic construct
  source 1..75: mol_type = other DNA
acgtctgcgccagtgtcgcctgtccggtaggaatttcaccaatgcgcataaaccgcctgcttaagcaggaattac

SEQ ID NO: 510850 - DNA, 75 bp, synthetic construct
  source 1..75: mol_type = other DNA
tgatgagtaatggtgaaagagggtgtttgattctcgataaggagacacaattgccagtttactatcaaaaccttt

SEQ ID NO: 510851 - DNA, 75 bp, synthetic construct
  source 1..75: mol_type = other DNA
tacgtgagatagcaaaacaggcaacacaaggcgaatgggtcgcatttatttcgccgggcaaatacggcacgtacg

SEQ ID NO: 510852 - DNA, 75 bp, synthetic construct
  source 1..75: mol_type = other DNA
tggatattgaagagctgccgcacgtcgtcaactatgaactgccaaacgtaccggaagattatgtccaccgtatcg

SEQ ID NO: 510853 - DNA, 75 bp, synthetic construct
  source 1..75: mol_type = other DNA
cgatattaaagccctggcggaaaaactgttgcataacccgctggaaatcgaagtggcacgccgcaataccgcgtc

SEQ ID NO: 510854 - DNA, 75 bp, synthetic construct
  source 1..75: mol_type = other DNA
gtttgccccagcgtattttcccgcgttacaacgtctgagcggagagaaagaaacgcgtgatgtccatgaattcct

SEQ ID NO: 510855 - DNA, 75 bp, synthetic construct
  source 1..75: mol_type = other DNA
gcccaccgaaggacggttcataccccaatcctacgggcgtatacgcagggcccgcctttcaacaacaccccgtaa

SEQ ID NO: 510856 - DNA, 75 bp, synthetic construct
  source 1..75: mol_type = other DNA
ctactgacgctttcctggttgatatacaggcggtggcgtttaacgagcttcgcgcggcgtttgtcaggcatgcaa

SEQ ID NO: 510857 - DNA, 75 bp, synthetic construct
  source 1..75: mol_type = other DNA
atcagctagcgcgaagcccgcagaaaaaccatctcgtcgcctcggcgatgccaaaccggcaggcgaacaacaacg

SEQ ID NO: 510858 - DNA, 75 bp, synthetic construct
  source 1..75: mol_type = other DNA
ccgaaccgatccagaacggtcgccagcaacgtggcggcggcggtcgtgggcaaggtggtggtcgcggtcaacagc

SEQ ID NO: 510859 - DNA, 75 bp, synthetic construct
  source 1..75: mol_type = other DNA
gttgatgaacacaaactgctgcgtgatatcgaaaaactgctgaaaaaagagatcccgcgcattgcgattccgggc

SEQ ID NO: 510860 - DNA, 75 bp, synthetic construct
  source 1..75: mol_type = other DNA
tttgtcgataagaaacgcaaacgggaattgctgtcacacatgattggtaaaggcaactggcagcaggtgctggtg

SEQ ID NO: 510861 - DNA, 75 bp, synthetic construct
  source 1..75: mol_type = other DNA
gttgatgttctggtggcaacgccgggacgtttgctggacctggaacatcaaaatgcagtgaagctggatcaggtt

SEQ ID NO: 510862 - DNA, 75 bp, synthetic construct
  source 1..75: mol_type = other DNA
aaaccatctcgtcgcctcggcgatgccaaaccggcaggcgaacaacaacgtcgccgccgccgtccgcgtaaacct

SEQ ID NO: 510863 - DNA, 75 bp, synthetic construct
  source 1..75: mol_type = other DNA
ttacaacgtctgagcggagagaaagaaacgcgtgatgtccatgaattcctggctgagcatgttcgcactttagct

SEQ ID NO: 510864 - DNA, 75 bp, synthetic construct
  source 1..75: mol_type = other DNA
atatatggcggcaggccatcagcggagcctgatgtcacactgctgaccgccttaaaaaaactgcgccgcagccgt

SEQ ID NO: 510865 - DNA, 75 bp, synthetic construct
  source 1..75: mol_type = other DNA
cacgatgctatgcctttctggattatcccgatgccattcatgcaaggcgttgtatcagacgttcgtcagagctgt

SEQ ID NO: 510866 - DNA, 75 bp, synthetic construct
  source 1..75: mol_type = other DNA
ccggagcgggagaatctgcttgatgccatcgtgccgcttatggtcagcaccgttgaccgggcaacccatatagac

SEQ ID NO: 510867 - DNA, 75 bp, synthetic construct
  source 1..75: mol_type = other DNA
tttctcaacagcattcgctggaaaaaggaagactcgctctccggcattctcgaccagctgacactgatggccgat

SEQ ID NO: 510868 - DNA, 75 bp, synthetic construct
  source 1..75: mol_type = other DNA
aaccgatctccatcgatgttactcaccgatctccttcacggtaatacgcaactgctgaccttctggatggcgaac

SEQ ID NO: 510869 - DNA, 75 bp, synthetic construct
  source 1..75: mol_type = other DNA
tcttcgccaactgcgctcttgttcaggaaaccggtatccagacggcgcgggcgctcgatacccgcctgccgctgg

SEQ ID NO: 510870 - DNA, 75 bp, synthetic construct
  source 1..75: mol_type = other DNA
aatttgtatttctgacgacggcggcagtatatattcgctttatatctttctggagcgtgggttaccacaggctta

SEQ ID NO: 510871 - DNA, 75 bp, synthetic construct
  source 1..75: mol_type = other DNA
tttcagggggttaaggtcttttctccggatggagtaaagcagcaggaatccattcttcatccccaaaaaatgata

SEQ ID NO: 510872 - DNA, 75 bp, synthetic construct
  source 1..75: mol_type = other DNA
agtgtccagcaaagggaacgcagccagatggcatgtaggagtgattgctcaggacgtacagaaggtcttctctga

SEQ ID NO: 510873 - DNA, 75 bp, synthetic construct
  source 1..75: mol_type = other DNA
ttcacgcagcgcgtattcagccacctttatcagctcgatctggggctggagagggaagcaggccccctgcttatc

SEQ ID NO: 510874 - DNA, 75 bp, synthetic construct
  source 1..75: mol_type = other DNA
aatggtggggcgtgggaccgtccatccgtgcttggtttggcaaataactatgatgaagcctgtgaacttgccgaa

SEQ ID NO: 510875 - DNA, 75 bp, synthetic construct
  source 1..75: mol_type = other DNA
cctgtttacctctttctcagggagtttagtctccaggatttccggggcggttcagatcatcaacaagaaattgtt

SEQ ID NO: 510876 - DNA, 75 bp, synthetic construct
  source 1..75: mol_type = other DNA
tatgagccggacccgtcaatcaaagccgaaccgatacagaacggtcgccagcaacgtggcggcggtcgtggacaa

SEQ ID NO: 510877 - DNA, 75 bp, synthetic construct
  source 1..75: mol_type = other DNA
ccggaattttgaaaacccctggttgctcccggtaagcggcacgaacaaccagcgttgcgtgaatcacatttctga

SEQ ID NO: 510878 - DNA, 75 bp, synthetic construct
  source 1..75: mol_type = other DNA
gacagataaagatacagataaagatacagatcaagaagatcaaaacactatggtccatggcgtaaaaaacgccac

SEQ ID NO: 510879 - DNA, 75 bp, synthetic construct
  source 1..75: mol_type = other DNA
aaccggatgcggcgctggtgcagcatacgcgccagcagccgcaggacggctacattctggcagatgtgctggcaa

SEQ ID NO: 510880 - DNA, 75 bp, synthetic construct
  source 1..75: mol_type = other DNA
attacccagcgtgtggaacaggtgctggctgatgcatttcacgcacaggctgcggcgctggtacagggcgcgggt

SEQ ID NO: 510881 - DNA, 75 bp, synthetic construct
  source 1..75: mol_type = other DNA
atgaagacgtttcctctgaaaagtctgaccattgctgaagcgcagcagaagcagtttgcgctggtggatagcatt

SEQ ID NO: 510882 - DNA, 75 bp, synthetic construct
  source 1..75: mol_type = other DNA
tttcgccaggcgaatccacaatcagaacattgtgcgaatcgcagcggtgaagagacggtgctgcggattttgcgt

SEQ ID NO: 510883 - DNA, 75 bp, synthetic construct
  source 1..75: mol_type = other DNA
agttaaaagcgccgttattgctaatgcgcagtcgaaggtgttgattgtcgagtttcatcagccgattgccgccag

SEQ ID NO: 510884 - DNA, 75 bp, synthetic construct
  source 1..75: mol_type = other DNA
tacttaacggtggcgcagtggcggaagtgaaaagcgcggtgattgccaatgcgcagtcgaaagtgttgattgtgg

SEQ ID NO: 510885 - DNA, 75 bp, synthetic construct
  source 1..75: mol_type = other DNA
gcggattggttatttcgatatgttcttgcaaagaagtaccagtagatacctgaacatttcggaagagacgtttaa

SEQ ID NO: 510886 - DNA, 75 bp, synthetic construct
  source 1..75: mol_type = other DNA
attgggaaggcctggatggtccggagcggattggttatttcgatatgttcttgcaaagaagtaccagtagatacc

SEQ ID NO: 510887 - DNA, 75 bp, synthetic construct
  source 1..75: mol_type = other DNA
ggccagtgcccagaccggcacgggtaaaacagcgggctttacgctgccgctactgcaacacctgatttcccgtga

SEQ ID NO: 510888 - DNA, 75 bp, synthetic construct
  source 1..75: mol_type = other DNA
gtggcagggaaattataaaacgcaagttgaacagatgtcagaacaatatcaacaatgtgtcgaatccctggttga

SEQ ID NO: 510889 - DNA, 75 bp, synthetic construct
  source 1..75: mol_type = other DNA
ggatcctgacatgccaggaagcgaaaggacgtgaacagcttgccacgatgctggcaggacaacagggcatgagcg

SEQ ID NO: 510890 - DNA, 75 bp, synthetic construct
  source 1..75: mol_type = other DNA
ccggtcatctggcgcaggccggtgtggatatcacgctgatttactcaggtgcgcacaaggtggatggcaatcagt

SEQ ID NO: 510891 - DNA, 75 bp, synthetic construct
  source 1..75: mol_type = other DNA
gcatccacgcagagtgaagccgatcgcattatggcgtgtgaagaagcgaacggtcgtgaacaactggcggcaacg

SEQ ID NO: 510892 - DNA, 75 bp, synthetic construct
  source 1..75: mol_type = other DNA
acggtatggacaccgggtctgtcaaaagtctttaccggcatggataaagttcccatcgcaggaacaatggctact

SEQ ID NO: 510893 - DNA, 75 bp, synthetic construct
  source 1..75: mol_type = other DNA
aaagagataccagcagagaaaatattaggcgcaccagaatggaaagactaccatcccaaatactctggtgccaca

SEQ ID NO: 510894 - DNA, 75 bp, synthetic construct
  source 1..75: mol_type = other DNA
ggtatctttgccgatgatctgccgcagaacgccgactttgttggcgcggtgacggcggcatatcagcagctgtgt

SEQ ID NO: 510895 - DNA, 75 bp, synthetic construct
  source 1..75: mol_type = other DNA
gaattacgatggatttatcgcaacaaagacaacgaccagataatgaaaaacataaagttttacttgcgtgggaaa

SEQ ID NO: 510896 - DNA, 75 bp, synthetic construct
  source 1..75: mol_type = other DNA
tatctctgactggatgtagcaatattatactgccggagaaactcccggagagtctgagatctgtaaccattcatg

SEQ ID NO: 510897 - DNA, 75 bp, synthetic construct
  source 1..75: mol_type = other DNA
atggacgccgggtttgtcaaaaatctttaccggcatggataaagtttccatcgcaggaacgatgactacaggagg

SEQ ID NO: 510898 - DNA, 75 bp, synthetic construct
  source 1..75: mol_type = other DNA
actgggtggccatgtccgtaaaggcgaaatggcgacgaataccgtgatattcaaaccggtgaaggtgccggcaaa

SEQ ID NO: 510899 - DNA, 75 bp, synthetic construct
  source 1..75: mol_type = other DNA
gctatcttgacagctggctgcgggtactgaaatcggacaaaaaagcgttgttccgggccgccgggcaggcccgcc

SEQ ID NO: 510900 - DNA, 75 bp, synthetic construct
  source 1..75: mol_type = other DNA
ttggtctggacgattaactattccgatcgggcgctcaaatcgttacgcaagatggacaaacagaacgcacgacgg

SEQ ID NO: 510901 - DNA, 75 bp, synthetic construct
  source 1..75: mol_type = other DNA
agaaagacgctcttatcaagagagcattaagtgagtctgatagaggaattaactttaagcagtatttgaagaacc

SEQ ID NO: 510902 - DNA, 75 bp, synthetic construct
  source 1..75: mol_type = other DNA
ggctcattctcattgagcaggccaatcaaggtgtctatgccgcccgaaatgctgctctagccttgcaccaaggag

SEQ ID NO: 510903 - DNA, 75 bp, synthetic construct
  source 1..75: mol_type = other DNA
tccgttatttaacatcgcccagtgtgatgacctgccggcatatttttacgaaaaacggcgacaacccggagagga

SEQ ID NO: 510904 - DNA, 75 bp, synthetic construct
  source 1..75: mol_type = other DNA
gtgctggcgcaactttacctgacgaccctagcgattacggacccggtgccagtgctgagcgatgaagagattgcc

SEQ ID NO: 510905 - DNA, 75 bp, synthetic construct
  source 1..75: mol_type = other DNA
aatcgctacattgaagtggtcagtcttctttcaaaggcatcagaaagcggagagcagcatgtcgatatctttatc

SEQ ID NO: 510906 - DNA, 75 bp, synthetic construct
  source 1..75: mol_type = other DNA
tggtcaaatattattctggctttaacgtcttttcttatctgacgtttcgagccatcgtcagcctgctgaccgcgc

SEQ ID NO: 510907 - DNA, 75 bp, synthetic construct
  source 1..75: mol_type = other DNA
ggtggtgcgttaggcattatcgccgtactgctacgtcaggaattcctgctggtgattatggggggcgtgttcgtg

SEQ ID NO: 510908 - DNA, 75 bp, synthetic construct
  source 1..75: mol_type = other DNA
ttatcagcgttatctggctaaccagacaccaacaccgctgaatcttgttccgccagaagatattgcagatatggg

SEQ ID NO: 510909 - DNA, 75 bp, synthetic construct
  source 1..75: mol_type = other DNA
tgtatatgaatgaggtgtatctcggtcagagcggcgacaacgaaattcgtggcttcccgctggcgagcctgtact

SEQ ID NO: 510910 - DNA, 75 bp, synthetic construct
  source 1..75: mol_type = other DNA
ccggagtccgctatctgggcatggccgctggtcactaacctcggcgtctatatggcggggatcgcgctgggagca

SEQ ID NO: 510911 - DNA, 75 bp, synthetic construct
  source 1..75: mol_type = other DNA
actcaagtagtgaaaacaacccaaaaactaataaaaaatattaatgaatattatgaagaagatactccaacagaa

SEQ ID NO: 510912 - DNA, 75 bp, synthetic construct
  source 1..75: mol_type = other DNA
atggcaacggtaaacatgaggaaggaaaactcccctcaagcgaatggcgtttccatatggcggcctatcaaagca

SEQ ID NO: 510913 - DNA, 75 bp, synthetic construct
  source 1..75: mol_type = other DNA
aaagctcccctcaagcgaatggcgtttccatatggcggcctatcaaagcagaccggatgccaacgcggttgttca

SEQ ID NO: 510914 - DNA, 75 bp, synthetic construct
  source 1..75: mol_type = other DNA
atttctggatgtcggtgattgcgctgggtgttgccttcgcgctgtaccttgccggcaaagacacgcccgcaacgc

SEQ ID NO: 510915 - DNA, 75 bp, synthetic construct
  source 1..75: mol_type = other DNA
gccatcgtcagcctgctgactgcgctgttcatctcattgtggatgggcccgcgcatgattgctcatttgcaaaaa

SEQ ID NO: 510916 - DNA, 75 bp, synthetic construct
  source 1..75: mol_type = other DNA
gccggcaaagacacgcccgcaacgcagctggtggtcccattctttaaagatgtgatgccgcaactggggctgttc

SEQ ID NO: 510917 - DNA, 75 bp, synthetic construct
  source 1..75: mol_type = other DNA
tcagcggcccgctcattgccatgatacttttcatcatgcctacgctgtcaacgtatctcatcccggcgcttaaac

SEQ ID NO: 510918 - DNA, 75 bp, synthetic construct
  source 1..75: mol_type = other DNA
attctgctggatatggatacaccgggcgggatggtggcgggagcatttgactgtgctgacatcatcgcccgtgtg

SEQ ID NO: 510919 - DNA, 75 bp, synthetic construct
  source 1..75: mol_type = other DNA
tgccggagactgatatttccctttccgccacctccgactttgatgcatactccgccttcgtcggaggtatggccg

SEQ ID NO: 510920 - DNA, 75 bp, synthetic construct
  source 1..75: mol_type = other DNA
actggatttcacctctctgcgtaatgccgtaaccgagttcgaacagcatcgcgacgagcacgcctggcaaatcga

SEQ ID NO: 510921 - DNA, 75 bp, synthetic construct
  source 1..75: mol_type = other DNA
taatgttgtgatgaaagaacttaacttacggccggggcagagcgtggaggcgcaagtgagcaacaatcaactgat

SEQ ID NO: 510922 - DNA, 75 bp, synthetic construct
  source 1..75: mol_type = other DNA
cctttccgttcgtccggcacatttagcacgtttacagttactgcatgatgaaggtcgtttgttgacagctggtcc

SEQ ID NO: 510923 - DNA, 75 bp, synthetic construct
  source 1..75: mol_type = other DNA
tcttcgccaaccgcgcgcttgttcaggaaaccagcatccagacggcgcgtgcgctcgatacccgcctgccgctgg

SEQ ID NO: 510924 - DNA, 75 bp, synthetic construct
  source 1..75: mol_type = other DNA
ctgacgcctgcggcggacagcctgaaccgccagtggcaccgggcgattgtcagccactggaatcaggacttcgcc

SEQ ID NO: 510925 - DNA, 75 bp, synthetic construct
  source 1..75: mol_type = other DNA
ttccgtggctacgcgccgcgctgatgtccgctgtctgcgtgctggcaatatggggggccggaatgacgacctcgt

SEQ ID NO: 510926 - DNA, 75 bp, synthetic construct
  source 1..75: mol_type = other DNA
tgtgtatacaaaatcagtgagcgcgacaaatatttgtgtcgtgaactttataaagaaggcctggctattcatgtg

SEQ ID NO: 510927 - DNA, 75 bp, synthetic construct
  source 1..75: mol_type = other DNA
ataaccggcatctgcatgctggcgatatggggggccggaatgacgacctcgttcttcgccaaccgcgcgcttgtt

SEQ ID NO: 510928 - DNA, 75 bp, synthetic construct
  source 1..75: mol_type = other DNA
ggggatatctaattctgattattggtctggcagggatttgcgccctgttaattattattaatcaggatgttctgg

SEQ ID NO: 510929 - DNA, 75 bp, synthetic construct
  source 1..75: mol_type = other DNA
gttattgccacacctccggtacagcgtcttgagccgggaagtaaaagtatggtgcgcctttccacaactccggac

SEQ ID NO: 510930 - DNA, 75 bp, synthetic construct
  source 1..75: mol_type = other DNA
aattaacggcgtaaaatttgacggctcggcaaatattgaagcgtttccgccaggtgttccgctgccgtggccatc

SEQ ID NO: 510931 - DNA, 75 bp, synthetic construct
  source 1..75: mol_type = other DNA
ttgggaacgaaaacgaccagttcatttgattacggcacgaagacggtcagtacgtttaaccacggcacaaaatca

SEQ ID NO: 510932 - DNA, 75 bp, synthetic construct
  source 1..75: mol_type = other DNA
aggttgaaagcgtttacggtgatgtcctgcgacaacgtgcgagaaaacggtcatgtggcgaaggttgccgttctt

SEQ ID NO: 510933 - DNA, 75 bp, synthetic construct
  source 1..75: mol_type = other DNA
agctgctggtggtgcgggcgattgtcgcgggactggcattattgctggtgtttatgtcagtcagaaaacaacctg

SEQ ID NO: 510934 - DNA, 75 bp, synthetic construct
  source 1..75: mol_type = other DNA
tgcccgccgcagtgcgttgattttcctgatggcgattttcacgcttggcaacgtactttccgccatcgcgccgga

SEQ ID NO: 510935 - DNA, 75 bp, synthetic construct
  source 1..75: mol_type = other DNA
ggcttgttgcccgtcattgcgcgcggtgtggatgtctcgattcccgctgccggaatgttaatcagtgcttatgca

SEQ ID NO: 510936 - DNA, 75 bp, synthetic construct
  source 1..75: mol_type = other DNA
ctgagtcagggagaaaataatttaattcgtcttggagaaaatctggcgggatattttcgtgcgatcctgagttaa

SEQ ID NO: 510937 - DNA, 75 bp, synthetic construct
  source 1..75: mol_type = other DNA
attcaatatacccaacatttaaaatacgcagcattggccattgtcggtgaagggaaattagatagtcagagcctg

SEQ ID NO: 510938 - DNA, 75 bp, synthetic construct
  source 1..75: mol_type = other DNA
tgctgaacaaaaccagcggaggttaccggattgaaaacccgacgccatattacgtgacggtaattggtattggtg

SEQ ID NO: 510939 - DNA, 75 bp, synthetic construct
  source 1..75: mol_type = other DNA
agaatgccgactttgttggcgcggtgacggcggcatatcagcagctgtgcgaacgcggtgcgcgcgagtgtgtgg

SEQ ID NO: 510940 - DNA, 75 bp, synthetic construct
  source 1..75: mol_type = other DNA
aaattgataaaaagtatggctaatgaaatttcagagttaaaaaatgcattaactatcttgtgtgataataaaaga

SEQ ID NO: 510941 - DNA, 75 bp, synthetic construct
  source 1..75: mol_type = other DNA
aaaaaacgctgatggcggtagcgtgtttgagcacagtaccggcagcccaggctgccatctccctggaccgtacac

SEQ ID NO: 510942 - DNA, 75 bp, synthetic construct
  source 1..75: mol_type = other DNA
ttgaaaaaactcagttagttcgtgaagaaataattccttttaataaagggagaagttctattggtgatatgcaat

SEQ ID NO: 510943 - DNA, 75 bp, synthetic construct
  source 1..75: mol_type = other DNA
tataaaagccatattctttctgaatatggcttttataatcaaaacatatataaagggagaacccaaagatggcaa

SEQ ID NO: 510944 - DNA, 75 bp, synthetic construct
  source 1..75: mol_type = other DNA
cgtgctcatccatgcgcccaacgggggcaaagaggggtgcaaattttgccgttccagcagatcaccgcaaaggat

SEQ ID NO: 510945 - DNA, 75 bp, synthetic construct
  source 1..75: mol_type = other DNA
cgatggcatctactggggaggaagcgcatccgggctgacgaatttatccggaggaattgtaagagtaaaatcaaa

SEQ ID NO: 510946 - DNA, 75 bp, synthetic construct
  source 1..75: mol_type = other DNA
tagtgacacttatagtgaatcagtgtataaaagccatattctttctgaatatggcttttataatcaaaaacatat

SEQ ID NO: 510947 - DNA, 75 bp, synthetic construct
  source 1..75: mol_type = other DNA
atagaaaaacaatataatcataagtcatcagttaatgctgggctacgtttaccaattacgaaaaatatctctgtt

SEQ ID NO: 510948 - DNA, 75 bp, synthetic construct
  source 1..75: mol_type = other DNA
cttatacacaaatccccacccggggatttgtgatgtctgtcagtctgctttagggggactctttccatccggtag

SEQ ID NO: 510949 - DNA, 75 bp, synthetic construct
  source 1..75: mol_type = other DNA
ggtgatgtcacgtaatcagcagaaaaacgcgctggtgagcgagacattgaaagccaaccagttgtggagcgaagt

SEQ ID NO: 510950 - DNA, 75 bp, synthetic construct
  source 1..75: mol_type = other DNA
gcgcgtgattggtgctgaacgcaacgaaatgcagatcattcgcaactttattggtcaggcagataacgccgatca

SEQ ID NO: 510951 - DNA, 75 bp, synthetic construct
  source 1..75: mol_type = other DNA
cagacgctcgccgcgcgcagcagctatcttgaggcgctctctgccattccggatgaggtcattgaaatggccgca

SEQ ID NO: 510952 - DNA, 75 bp, synthetic construct
  source 1..75: mol_type = other DNA
aaggacgggcttcagatcatcccgttgtcagaagtcgcggcgaaggatgagtttctgaatatcaaaaatgtcagc

SEQ ID NO: 510953 - DNA, 75 bp, synthetic construct
  source 1..75: mol_type = other DNA
attgcggtgaaatgcaacattttgaccagcacctacatccctcacccgctgctcagccaacaggctttttcgcgt

SEQ ID NO: 510954 - DNA, 75 bp, synthetic construct
  source 1..75: mol_type = other DNA
atcctattgatgtttcagccaatgttagttttacttacgttggacgtggagttgatgttaagggacgacctttat

SEQ ID NO: 510955 - DNA, 75 bp, synthetic construct
  source 1..75: mol_type = other DNA
ggtggaaaaggtaatgacaagctgtacggcagtgagggggcagatctgcttgatggtggagagggggatgatctc

SEQ ID NO: 510956 - DNA, 75 bp, synthetic construct
  source 1..75: mol_type = other DNA
tatcgttatctgtcaggatatggtcatcatattattgatgatgatggggggaaagaggataaactcagtttggct

SEQ ID NO: 510957 - DNA, 75 bp, synthetic construct
  source 1..75: mol_type = other DNA
agttcttctgagatggcagaagcgagtattgagctaatcaatcaacttgtggatacagctgccagccttaataat

SEQ ID NO: 510958 - DNA, 75 bp, synthetic construct
  source 1..75: mol_type = other DNA
ctttctattggccacaaaaatggtattacatttaaaaactggtttgaaaaagagtcagatgatctctctaatcat

SEQ ID NO: 510959 - DNA, 75 bp, synthetic construct
  source 1..75: mol_type = other DNA
atcatattattgacgatgatggggggaaagacgataaactcagtttggctgatattgatttccgggatgtggcct

SEQ ID NO: 510960 - DNA, 75 bp, synthetic construct
  source 1..75: mol_type = other DNA
gtaaatttactgatatcttccatggcgcggatggtgatgaccatatagaaggaaatgatgggaatgaccgcttat

SEQ ID NO: 510961 - DNA, 75 bp, synthetic construct
  source 1..75: mol_type = other DNA
cggcttttgttttgtcctgtattcttggtagcttacccgtttatgctgccccaagtgaaatagaaaatattcctg

SEQ ID NO: 510962 - DNA, 75 bp, synthetic construct
  source 1..75: mol_type = other DNA
ttttaacaagggaggagcctcttttggggatatgcaatgggatgtgtttgctcaggctggtaatattgtcaataa

SEQ ID NO: 510963 - DNA, 75 bp, synthetic construct
  source 1..75: mol_type = other DNA
gcgagaaaaatcttgcctacgcgcacaaggtgaaggccgcactggaaaaaggcgcatcgccgggcgacttcccgc

SEQ ID NO: 510964 - DNA, 75 bp, synthetic construct
  source 1..75: mol_type = other DNA
gtatgtccgaaggggttgaacccgacgcgcgccatcggccatatcaagtcgatgttgttgcaacgtaatgcgtaa

SEQ ID NO: 510965 - DNA, 75 bp, synthetic construct
  source 1..75: mol_type = other DNA
gatttcggtgtcatattacagccgcataacctgtctgaatgaatcatcagaaatatcagaggaaacttataatga

SEQ ID NO: 510966 - DNA, 75 bp, synthetic construct
  source 1..75: mol_type = other DNA
acctgttccgtcgcttaaacctactcaacttaactttgaagaaaacgcgaaagagaataagaatattgctattct

SEQ ID NO: 510967 - DNA, 75 bp, synthetic construct
  source 1..75: mol_type = other DNA
acgccgttgctgttgtggttggcctggagtctggcaaaaccggcgcgtaagctgaaaaacgctgccgatgaagtt

SEQ ID NO: 510968 - DNA, 75 bp, synthetic construct
  source 1..75: mol_type = other DNA
gctggacaatatgtactgtgctgataacgggcggtggtacgaaaccccggtggactggtacggtctggcaagagc

SEQ ID NO: 510969 - DNA, 75 bp, synthetic construct
  source 1..75: mol_type = other DNA
tcttcagaaacgattagaagagttaaataggtggcttggcgaaaatgtcattaattttacgaactatgaactatg

SEQ ID NO: 510970 - DNA, 75 bp, synthetic construct
  source 1..75: mol_type = other DNA
ttttccctctgctcacaggatacgtataacgagttaattaaacgctttggtatcgaccgtatgccgggtttcatg

SEQ ID NO: 510971 - DNA, 75 bp, synthetic construct
  source 1..75: mol_type = other DNA
ccggacggcaacggctcattcggtgatgtggagaaggccgcgcgcgtgtttgccatcaacgaactaatgccagca

SEQ ID NO: 510972 - DNA, 75 bp, synthetic construct
  source 1..75: mol_type = other DNA
cgacaacggatcccacgccgggtgcatcatctacatcggtgcagcgcaggtaaaccgcgaaagcatggactccct

SEQ ID NO: 510973 - DNA, 75 bp, synthetic construct
  source 1..75: mol_type = other DNA
atcaatgactggcttggcgaagaggtgatccgctttaacccttatgcactgctggacacccagcccacatcctga

SEQ ID NO: 510974 - DNA, 75 bp, synthetic construct
  source 1..75: mol_type = other DNA
atttacagcatagtattgtgtggcaagccttattgccaaaactaacggttatagaagcgctacagcaggcaagtg

SEQ ID NO: 510975 - DNA, 75 bp, synthetic construct
  source 1..75: mol_type = other DNA
tttattgtccgcaaaagtattcgcggaaagaatgtttacgtttccgtaggaagttaccctgaattttccattaat

SEQ ID NO: 510976 - DNA, 75 bp, synthetic construct
  source 1..75: mol_type = other DNA
gcgtcggccgggcatggagatgctgaagctggatacactgagtatggctgacgccgctactatcctcatgcgcag

SEQ ID NO: 510977 - DNA, 75 bp, synthetic construct
  source 1..75: mol_type = other DNA
agtcgtacatattttctgcaataatccacattggcaaagataacttcaccagtaacgatgtagcaataattcttg

SEQ ID NO: 510978 - DNA, 75 bp, synthetic construct
  source 1..75: mol_type = other DNA
aataagaactcttattgaaaaatacagcagcgagttggaaaaagtatcaggagcaaaggagatttatgaagaatt

SEQ ID NO: 510979 - DNA, 75 bp, synthetic construct
  source 1..75: mol_type = other DNA
gccactgctgatccgcgaccgttccggaagtgcccgactggcgacgcgggaagaaaaggcacgaattctggatac

SEQ ID NO: 510980 - DNA, 75 bp, synthetic construct
  source 1..75: mol_type = other DNA
tgctggatattatcttcagcctcgactcggtgattacggctgtgggtctgtcagatcacctgtttattatgatgg

SEQ ID NO: 510981 - DNA, 75 bp, synthetic construct
  source 1..75: mol_type = other DNA
aaacacgtcaacgactggctgggcgaagaggtgatccgttttaacccttacgcactgttagacacccagcccata

SEQ ID NO: 510982 - DNA, 75 bp, synthetic construct
  source 1..75: mol_type = other DNA
ggaatgcgtacagatggatcgctggtatgagccgcccgtcagttttgacggactggcacgaaccttccgcgccgc

SEQ ID NO: 510983 - DNA, 75 bp, synthetic construct
  source 1..75: mol_type = other DNA
gttaagcgtgacattatcagcagtacctatattccacatcgccttctcagccagcaggcatttacccgttttgtg

SEQ ID NO: 510984 - DNA, 75 bp, synthetic construct
  source 1..75: mol_type = other DNA
aggtttggggctggcgattgttgaaaccgccattcagcagcatcgtggctgggtgaaagcagaagacagcccgct

SEQ ID NO: 510985 - DNA, 75 bp, synthetic construct
  source 1..75: mol_type = other DNA
tttacgcaattaacgagctgatgcccgtcatggaggctatgaagcacatcaatgactggcttggcgaagaggtga

SEQ ID NO: 510986 - DNA, 75 bp, synthetic construct
  source 1..75: mol_type = other DNA
gtgcagataacgggcgctactttgatacccccatggactggaacgctatcgcccgtgcatcccgtcgtgcgtcct

SEQ ID NO: 510987 - DNA, 75 bp, synthetic construct
  source 1..75: mol_type = other DNA
accacgcagccgtatcagttcacgaaaggctgcatctttcatctgatagaaccggacatcaaccaggagatctac

SEQ ID NO: 510988 - DNA, 75 bp, synthetic construct
  source 1..75: mol_type = other DNA
cgttttgtgcaggactatctggtatttggtaacgcctacctggagaaacgcacgaaccgcttcggtgaagttatc

SEQ ID NO: 510989 - DNA, 75 bp, synthetic construct
  source 1..75: mol_type = other DNA
tacggaatgccggaatatctcggtggcctgttgtctgccagtctgtcgcactcggcagatcgcttccgcaaactc

SEQ ID NO: 510990 - DNA, 75 bp, synthetic construct
  source 1..75: mol_type = other DNA
cgccgcaaatgatgggcatcattcccaacaacactggcggctttggggatgtggaaaaagcgagccgtgtcttcg

SEQ ID NO: 510991 - DNA, 75 bp, synthetic construct
  source 1..75: mol_type = other DNA
aaagcgactgcaggagctgaatgactggctgaatgaagaggtgatccgttttgaagcttatgacttagggcttaa

SEQ ID NO: 510992 - DNA, 75 bp, synthetic construct
  source 1..75: mol_type = other DNA
tgacccggtggcgaataataacgatgtggaaaagcttaagaagtcgctgaaagatgcacgcggcaacggtgcttt

SEQ ID NO: 510993 - DNA, 75 bp, synthetic construct
  source 1..75: mol_type = other DNA
cgataacccttcgtgatgtcaccattattgatgacggtaaactgcgaaaagccattactgcagcatcgctgggta

SEQ ID NO: 510994 - DNA, 75 bp, synthetic construct
  source 1..75: mol_type = other DNA
actattcaaatgttcggacaacaggctaaggcaattaatagcctggggatgctaacaccacttcaatatttctgt

SEQ ID NO: 510995 - DNA, 75 bp, synthetic construct
  source 1..75: mol_type = other DNA
acgattcaagcatttggacatcaggccaactccattaacagtctgggaatgctaacaccgcttcaatatttttgc

SEQ ID NO: 510996 - DNA, 75 bp, synthetic construct
  source 1..75: mol_type = other DNA
tttgttgcggaatactcccctgaccgtaaacgtggctttatgggcagctggctggacttcggttctattgccggg

SEQ ID NO: 510997 - DNA, 75 bp, synthetic construct
  source 1..75: mol_type = other DNA
gaatcgtccactgaaaggtgcgacgcctgcggcgtcagatttgcaggaagcgaaggaaattctcgtcgagcatta

SEQ ID NO: 510998 - DNA, 75 bp, synthetic construct
  source 1..75: mol_type = other DNA
gatcccggcgtttattctgattaacagtaacgtcatcggcctgatttttgccgggttactgatgctggcggtgat

SEQ ID NO: 510999 - DNA, 75 bp, synthetic construct
  source 1..75: mol_type = other DNA
acacgctacgtgctatatcatggggcgttcttgcaactctcaccatgatgcttggcgtaagcgctttttccgcta

SEQ ID NO: 511000 - DNA, 75 bp, synthetic construct
  source 1..75: mol_type = other DNA
gcaggtaatggacaagaaagcagcgtttcgccatgtgtggcaggaaagtgaagcgcggccagttttcgacactta

SEQ ID NO: 511001 - DNA, 75 bp, synthetic construct
  source 1..75: mol_type = other DNA
acaccggaatgctatgcaaaagcgcaccacaaccccgtcagagagtgcaagcaggtaatggacaagaaagcgacg

SEQ ID NO: 511002 - DNA, 75 bp, synthetic construct
  source 1..75: mol_type = other DNA
tttcgccatatatggttggaaaacgcatcacaacagatttttgaaaaatatctttggcacgaccagaccaagcga

SEQ ID NO: 511003 - DNA, 75 bp, synthetic construct
  source 1..75: mol_type = other DNA
agagaacttcctcgactggggctggcgtattccgttctttatcgctctgccgttagggattatcgggctttacct

SEQ ID NO: 511004 - DNA, 75 bp, synthetic construct
  source 1..75: mol_type = other DNA
gttaaccgatgacaactatgcggtgatgaaggtggcgcgaatcggctgtgaatgcggcgcgaatgtctcgacatt

SEQ ID NO: 511005 - DNA, 75 bp, synthetic construct
  source 1..75: mol_type = other DNA
tcgcgccacgctttactccggcggtagccagatccagggcgcacaggcgctggaagtcttgcgtggtctggtgtt

SEQ ID NO: 511006 - DNA, 75 bp, synthetic construct
  source 1..75: mol_type = other DNA
actggcgcgattcgcgccgggctggcggctttgctcaaaccggggcagcgtcttctggtgcatgacgcgcctgtt

SEQ ID NO: 511007 - DNA, 75 bp, synthetic construct
  source 1..75: mol_type = other DNA
ggtgcattgccatatccagttggtgcggagtcgaaatatgaaattccgccgctcttttatcgtctttccgggaca

SEQ ID NO: 511008 - DNA, 75 bp, synthetic construct
  source 1..75: mol_type = other DNA
tgcttaacggtggtgcggtgccggaagtgaaaagcgcggtgattgctaatgcgcagtcgaaggtgttgattgtcg

SEQ ID NO: 511009 - DNA, 75 bp, synthetic construct
  source 1..75: mol_type = other DNA
gcgcagtcgaaggtgttgattgtggagtttcatcagccgattgccgccagggtgctggaagaggcgcaaaagcgc

SEQ ID NO: 511010 - DNA, 75 bp, synthetic construct
  source 1..75: mol_type = other DNA
ccctggctgctcccggtaagcggcacgaacaaccagcgttgtgtgaatcatatttctgaaccggataccgaaatt

SEQ ID NO: 511011 - DNA, 75 bp, synthetic construct
  source 1..75: mol_type = other DNA
ccggcggcatcggatttacaggaagcgaaggaaattctcggcgagcattacgataatatcgagcagaaaattgat

SEQ ID NO: 511012 - DNA, 75 bp, synthetic construct
  source 1..75: mol_type = other DNA
atggttgctgcacttgccacgttctccgttccctttctgattcgaccgcttggcgggctcttctttggtatgttg

SEQ ID NO: 511013 - DNA, 75 bp, synthetic construct
  source 1..75: mol_type = other DNA
taaagatacagatcaagaagatcaaaacactatggtccatggcgtaaaaaacgccacgaaccaggcaggggatgt

SEQ ID NO: 511014 - DNA, 75 bp, synthetic construct
  source 1..75: mol_type = other DNA
atggagcgtgaacgttatatcggtgtctccggcgtgttgctgaaatccgatctctacctgacgctggggatctcc

SEQ ID NO: 511015 - DNA, 75 bp, synthetic construct
  source 1..75: mol_type = other DNA
aatccgctttcagtgcctggaaggccagattacgcgagggggtgccaccagaggccatgctggatggcgtgaggc

SEQ ID NO: 511016 - DNA, 75 bp, synthetic construct
  source 1..75: mol_type = other DNA
cgccagtgcacgcattatgggcgttggcctcaacacggttttacgtcacttaaaaactcaggccgcagtcggtaa

SEQ ID NO: 511017 - DNA, 75 bp, synthetic construct
  source 1..75: mol_type = other DNA
gtgcggatctcggcgatcagcgcggcttcggtatcattgcttaaagggttaggggtctgggatgcagtacaggct

SEQ ID NO: 511018 - DNA, 75 bp, synthetic construct
  source 1..75: mol_type = other DNA
gccagttatcctatcctcaagcgttaccagatgcggcgcatggcggataacttcattatgcaaagcggtatggat

SEQ ID NO: 511019 - DNA, 75 bp, synthetic construct
  source 1..75: mol_type = other DNA
actgccgtaaaacatggcagctacagttcacttacaccgcctctcagcccggtacacaccagaaaatcattgata

SEQ ID NO: 511020 - DNA, 75 bp, synthetic construct
  source 1..75: mol_type = other DNA
ttccgccgctcctgccgtgaaggggtgtgcggttctgacggtctgaacatgaacggcaaaaatggtctggcttgt

SEQ ID NO: 511021 - DNA, 75 bp, synthetic construct
  source 1..75: mol_type = other DNA
ttaaaagcacactacagtctgcaaagcaatcctctgcaaataaattgcactcagcaggacaaagcacgaaagatg

SEQ ID NO: 511022 - DNA, 75 bp, synthetic construct
  source 1..75: mol_type = other DNA
ggccagtgcccagaccggtaccggcaaaacagcgggctttacgctgccgttgttgcaacacctgatcactcgcca

SEQ ID NO: 511023 - DNA, 75 bp, synthetic construct
  source 1..75: mol_type = other DNA
tcacgacatccgtcgcgtgttgactaagctgcctgcgaagcgccagaacctgctgttctccgccactttctctga

SEQ ID NO: 511024 - DNA, 75 bp, synthetic construct
  source 1..75: mol_type = other DNA
taaatggtaaggatacatggtctgtaaaaggcataaaaaatcataaaggtgtatatgattattcaaaattgattc

SEQ ID NO: 511025 - DNA, 75 bp, synthetic construct
  source 1..75: mol_type = other DNA
aagttgggagtaaaataggaggaaccgctgaaaatgtaggtaataatctgggaaaagccggaacagttctctcag

SEQ ID NO: 511026 - DNA, 75 bp, synthetic construct
  source 1..75: mol_type = other DNA
tgtcaggacggcagatgaactgggaattgaagtccagtatgatgaaaagaatggcacggcgattactaaacaggt

SEQ ID NO: 511027 - DNA, 75 bp, synthetic construct
  source 1..75: mol_type = other DNA
aacaccaaaatggcgatccccgagcaaccgctggagatcctgcgtactctgcacagctttgacccgtgcctcgcc

SEQ ID NO: 511028 - DNA, 75 bp, synthetic construct
  source 1..75: mol_type = other DNA
gtcaaaggcagcgataccaacattcagcagctgaatgaacaggaacgctactcgtggatcaaagcgccacgctgg

SEQ ID NO: 511029 - DNA, 75 bp, synthetic construct
  source 1..75: mol_type = other DNA
ccgcctccactgaaaaatgggaacctgcaacctggccgacagagtgccgtggtgtcggttttaccgaagcgccgc

SEQ ID NO: 511030 - DNA, 75 bp, synthetic construct
  source 1..75: mol_type = other DNA
aacctgaaaaacggcaatcttgccaccgcctccacggaaaaatgggaacccacaacctggccgacagagtgccgt

SEQ ID NO: 511031 - DNA, 75 bp, synthetic construct
  source 1..75: mol_type = other DNA
gcggggcgttaggccactgggctgccattcgcgatggcaagattgatctctatcagtgcgtggtgccgaccacct

SEQ ID NO: 511032 - DNA, 75 bp, synthetic construct
  source 1..75: mol_type = other DNA
gcgtaccttacacagcttcgatccgtgtctggcttgttcaacgcatgtactgggcgacgacggcagcgaacttat

SEQ ID NO: 511033 - DNA, 75 bp, synthetic construct
  source 1..75: mol_type = other DNA
tcgtactctgcacagctttgacccgtgcctcgcctgttcaactcatgtgttaggtgacgacggtagcgagctgat

SEQ ID NO: 511034 - DNA, 75 bp, synthetic construct
  source 1..75: mol_type = other DNA
aaaccgcctgaagaaattcgttgaaggcggccagttggggatcttccgtaacggttactgggggcacccgcagta

SEQ ID NO: 511035 - DNA, 75 bp, synthetic construct
  source 1..75: mol_type = other DNA
gcgtaccctgcacagcttcgacccgtgcctcgcctgttcaacgcatgtgctgggcgacgacggtagcgaactgat

SEQ ID NO: 511036 - DNA, 75 bp, synthetic construct
  source 1..75: mol_type = other DNA
cggtttcttccgtcttgatccacgcctgatcaccatgatctcctcgccaaacggcgaacagcgcttgtttgtgcc

SEQ ID NO: 511037 - DNA, 75 bp, synthetic construct
  source 1..75: mol_type = other DNA
gtcaacacaaatcacggaatacagatatcgttcaccacaaaaatcaccgggcgtggccaacagtggctgaccaga

SEQ ID NO: 511038 - DNA, 75 bp, synthetic construct
  source 1..75: mol_type = other DNA
tagggggctatcaggaagccagtttactgcgtttggatgtcggcaccggttatcagtattggtacgggttaccca

SEQ ID NO: 511039 - DNA, 75 bp, synthetic construct
  source 1..75: mol_type = other DNA
gataaacaagcaccatcggcaggccgcccttccggccctaatggtgcgtggaaccgctatcgcaaacagtttatt

SEQ ID NO: 511040 - DNA, 75 bp, synthetic construct
  source 1..75: mol_type = other DNA
ttgtacgggtatatcgattatcttgccagaaatctgttgccggacatgtgtgatgaagactggttgtaccggcac

SEQ ID NO: 511041 - DNA, 75 bp, synthetic construct
  source 1..75: mol_type = other DNA
aggcgaacaaggtaagcgagacagtattgtcgttgttgcccagttgtcgccagagttcaccgctcgccttgttga

SEQ ID NO: 511042 - DNA, 75 bp, synthetic construct
  source 1..75: mol_type = other DNA
atgaatgagctgataaatagcaatgccatcaaaatgacaagcattgaaatcgctgagcttacaggtaagcgtcat

SEQ ID NO: 511043 - DNA, 75 bp, synthetic construct
  source 1..75: mol_type = other DNA
tctggttgattgccctgtttgtggcgctgattttctggctgccatacagccagccgctgttcggtgccttattcc

SEQ ID NO: 511044 - DNA, 75 bp, synthetic construct
  source 1..75: mol_type = other DNA
gttgctggtggcactggcggcgatcatcgtagaccgcctgtttgaaaagttggtgcaggcgcttagccagcacgc

SEQ ID NO: 511045 - DNA, 75 bp, synthetic construct
  source 1..75: mol_type = other DNA
gcacggcgaccatcgcctcaacggtaggggccagcacgctgggtacgccgatcatcatcggacttagcggattta

SEQ ID NO: 511046 - DNA, 75 bp, synthetic construct
  source 1..75: mol_type = other DNA
cagcgtgacagacgttgccaaagggatgggaatgagccggggtcagcgattgcgtaaagtggagttaccgctggc

SEQ ID NO: 511047 - DNA, 75 bp, synthetic construct
  source 1..75: mol_type = other DNA
atgaaaataatgcgcgatccgctgttctggcttattgctctgtttgtggggctgattttctggctaccctatagc

SEQ ID NO: 511048 - DNA, 75 bp, synthetic construct
  source 1..75: mol_type = other DNA
cgcagagtcagagtgccagcaccatcggctccactgccggtaatgtcagtattaccgcgggcaaacaggctcata

SEQ ID NO: 511049 - DNA, 75 bp, synthetic construct
  source 1..75: mol_type = other DNA
atgaaacaggattttcgctgcggctgctggctcatggagaaacctgaaacggcaatgaaagccatcacccgcaac

SEQ ID NO: 511050 - DNA, 75 bp, synthetic construct
  source 1..75: mol_type = other DNA
ttatcaccggacaacagactgaccgactcgccgatctggaaagaatgctacatctgttcagcgacaaaccgattc

SEQ ID NO: 511051 - DNA, 75 bp, synthetic construct
  source 1..75: mol_type = other DNA
gacatcgcccctaatttaatcgcccgcaaactggcgaccaattaccgcattctctgcgcgtcgccggaatttatt

SEQ ID NO: 511052 - DNA, 75 bp, synthetic construct
  source 1..75: mol_type = other DNA
cgatttggtcaatgaaggtgtcgatctcgatattcgcattggcgatgacatcgcccctaatttaatcgcccgcaa

SEQ ID NO: 511053 - DNA, 75 bp, synthetic construct
  source 1..75: mol_type = other DNA
ttcaaaggtatgctcgggctgccgtttggcatagccgacccaaattttaaaattcagttaccgccgttcgcgctc

SEQ ID NO: 511054 - DNA, 75 bp, synthetic construct
  source 1..75: mol_type = other DNA
gtttttctttattttttgcaacaccgttgtggttcctcctacgttgctttcggcttttcagttgccgcaaagtag

SEQ ID NO: 511055 - DNA, 75 bp, synthetic construct
  source 1..75: mol_type = other DNA
aaagcctgttatcaggatttcagtggtttttctttattttttgcaacacggttgtggttcctcctacgctacttt

SEQ ID NO: 511056 - DNA, 75 bp, synthetic construct
  source 1..75: mol_type = other DNA
ttaatgaggtggcaaaagagaaattgccgcattacgtcatgagtgcaactgcagagatcgggcgtgttgctgcag

SEQ ID NO: 511057 - DNA, 75 bp, synthetic construct
  source 1..75: mol_type = other DNA
ccgttcccctatgcattggtttagggttgggttcgaaagccatcccaccgcgtctgttatttgccggaatcgtcc

SEQ ID NO: 511058 - DNA, 75 bp, synthetic construct
  source 1..75: mol_type = other DNA
atgccaaccgttattactcacgccgccgttcccctttgtattggtttaggtctgggatcgaaaatcatccctccg

SEQ ID NO: 511059 - DNA, 75 bp, synthetic construct
  source 1..75: mol_type = other DNA
ggggagtgatcaacgtcttcaaagggctgagctgggattacaaaaccaactcaccctgtaaattttgcagtaaaa

SEQ ID NO: 511060 - DNA, 75 bp, synthetic construct
  source 1..75: mol_type = other DNA
tgactgatatcacagaagactcaacgctggttgacggttttctggctcaaatccattgcctgccgtgcgtgccat

SEQ ID NO: 511061 - DNA, 75 bp, synthetic construct
  source 1..75: mol_type = other DNA
cttactgcaccagaaatttggctgcttactgatctgacagaagactcaacactggtagatggttttctggcacag

SEQ ID NO: 511062 - DNA, 75 bp, synthetic construct
  source 1..75: mol_type = other DNA
tctggctgattgctctgtttgtggcgctgattttctggctgccttacagccagccgctgtttgctgccttgttcc

SEQ ID NO: 511063 - DNA, 75 bp, synthetic construct
  source 1..75: mol_type = other DNA
atggcgcagatcgactcgtatcgtagcggtgaagctgtttccctttcatttgccttcaacgtgctggatatcgaa

SEQ ID NO: 511064 - DNA, 75 bp, synthetic construct
  source 1..75: mol_type = other DNA
gcatggtagttatcaaggcgtttatcgcggtacgggtgctgggcctgcggcagggaggcgtcagtgaagaaacac

SEQ ID NO: 511065 - DNA, 75 bp, synthetic construct
  source 1..75: mol_type = other DNA
aaaaactatttcgctgtatattaaagcctgacggtaacagcgctaaaggcgtagacggttggcaactgatcaatt

SEQ ID NO: 511066 - DNA, 75 bp, synthetic construct
  source 1..75: mol_type = other DNA
cctaaaaaagcgttaattgtagtactcgcgacgctacttggcggcatgctgagtgtagcctttgttttagtgaaa

SEQ ID NO: 511067 - DNA, 75 bp, synthetic construct
  source 1..75: mol_type = other DNA
gtgaaagaaattgatgttgctcgaaaccgttttgagcaatcgggcattgaagttaaaggtgtgattctgaacgcg

SEQ ID NO: 511068 - DNA, 75 bp, synthetic construct
  source 1..75: mol_type = other DNA
tgacgcatgaagagcggcaaatgtatgttctgctgaatagttttgaactgtcgataccagaacagtcgtttgcaa

SEQ ID NO: 511069 - DNA, 75 bp, synthetic construct
  source 1..75: mol_type = other DNA
gctggtgctgattggcgttgggttctctatcggtaactatctcggcggtaaactggcagatcgttcggtcaatgg

SEQ ID NO: 511070 - DNA, 75 bp, synthetic construct
  source 1..75: mol_type = other DNA
actgccgcattacgtcatgagcgcaactgcagagatcggacgtgttgcagcaggtgcggtatctggtgatgtaaa

SEQ ID NO: 511071 - DNA, 75 bp, synthetic construct
  source 1..75: mol_type = other DNA
tgaatgtgcagatcctgcggaacaagctgaacccatctcaacctcatttattaaccgcaccagaaatctggctgc

SEQ ID NO: 511072 - DNA, 75 bp, synthetic construct
  source 1..75: mol_type = other DNA
gcgggactggcattattgctggtgtttatgtcagccagaaaacaacctgaaacagtttgcgttgccaacagctaa

SEQ ID NO: 511073 - DNA, 75 bp, synthetic construct
  source 1..75: mol_type = other DNA
caacgccggtgttcgtcacggcaatgctggtgctgattggtgtcggattctctatcggtaactatctcggcggca

SEQ ID NO: 511074 - DNA, 75 bp, synthetic construct
  source 1..75: mol_type = other DNA
cgtcgccagcgaagcgccgggtttgtcttcatcagtaaatattggtgcctttaaccttggaaatgcgctgggtgc

SEQ ID NO: 511075 - DNA, 75 bp, synthetic construct
  source 1..75: mol_type = other DNA
caactgctgtacaccgtggcggaaaaaggcgcagaaagcaccgagctgaaaattatcggttcgatgaaagaagcg

SEQ ID NO: 511076 - DNA, 75 bp, synthetic construct
  source 1..75: mol_type = other DNA
taaagatacatccaaagctgaaaatgcggttaaagcgtgggtggatgcctataacgcattacaggataccttcag

SEQ ID NO: 511077 - DNA, 75 bp, synthetic construct
  source 1..75: mol_type = other DNA
atggctagtatttcaacgcttggggttgggtcggggctggacttaagcagcatccttgacagtctggaggcggca

SEQ ID NO: 511078 - DNA, 75 bp, synthetic construct
  source 1..75: mol_type = other DNA
ttggtccaaacaaactgtttgcgtggatgcgcgatcacaaaatccttattgcttcaggttcccggcgcaatgtgc

SEQ ID NO: 511079 - DNA, 75 bp, synthetic construct
  source 1..75: mol_type = other DNA
ttgccgggctgggagcgattgatgccagcgtgacagaagttgcgaaaggtatgggaatgagtcgtggtcagcgac

SEQ ID NO: 511080 - DNA, 75 bp, synthetic construct
  source 1..75: mol_type = other DNA
gcctggtcgttcaggccaaaagcgaacgaatttcagacatcagcacccaactgaacgcctttgatggctgtgaag

SEQ ID NO: 511081 - DNA, 75 bp, synthetic construct
  source 1..75: mol_type = other DNA
tcctccaccgggataatccaggccgcaaaagatggcgtcagcaaaacgctgaacaatttgaccgatcaatacaat

SEQ ID NO: 511082 - DNA, 75 bp, synthetic construct
  source 1..75: mol_type = other DNA
cagaagttaccgcagcgtctgctggatccggtgcgtctgcatctgcaaaacggcggtagctggcgtcacctggcg

SEQ ID NO: 511083 - DNA, 75 bp, synthetic construct
  source 1..75: mol_type = other DNA
agtccgcgattggttacatcgtcgaagccttgcgtctgcgtcgtgaaaaagggctgaaagcgtttactgtcatgt

SEQ ID NO: 511084 - DNA, 75 bp, synthetic construct
  source 1..75: mol_type = other DNA
gtgggcgcacagttcgtttcggacgttgtaccattcgaaatgatgaaactgcgtatgctcaacggcagccactct

SEQ ID NO: 511085 - DNA, 75 bp, synthetic construct
  source 1..75: mol_type = other DNA
gcttcaggtgcccggcgcaatgtgccaatgcaggaatatatggatcgcggctatttcacagtgaaagaaacagcg

SEQ ID NO: 511086 - DNA, 75 bp, synthetic construct
  source 1..75: mol_type = other DNA
tgaatgtgcagattctgcggaacaaactgaacccagctcaacctcatttattaaccgcaccagaaatctggctgc

SEQ ID NO: 511087 - DNA, 75 bp, synthetic construct
  source 1..75: mol_type = other DNA
aggtctatatgcagttgctgaacaagcaacaggaactgaagattaccgaggccagtacggttggcgatgtgcgca

SEQ ID NO: 511088 - DNA, 75 bp, synthetic construct
  source 1..75: mol_type = other DNA
cgcacatcacgttcaggaaaccagagctggttgacagactgaatgatattattgcgcaatactatccggaaacct

SEQ ID NO: 511089 - DNA, 75 bp, synthetic construct
  source 1..75: mol_type = other DNA
tcagcgataaaccaatccccgaaaaccgggaaaacatcacccttcgtctggatgatcacatccggtctgttcagg

SEQ ID NO: 511090 - DNA, 75 bp, synthetic construct
  source 1..75: mol_type = other DNA
caactgcaccagaataaggatgaggtttttgagcgaggggtaatcaatgctttcaggggattgagctggaattac

SEQ ID NO: 511091 - DNA, 75 bp, synthetic construct
  source 1..75: mol_type = other DNA
ggctccgcgcacatcacgttcagaaaaccagaactggttgacaggcttaatgatattattgcgaaacactatcca

SEQ ID NO: 511092 - DNA, 75 bp, synthetic construct
  source 1..75: mol_type = other DNA
tccgcacacatcacgttcaggaaaccagaactggttgatcggctaaatgatattattgcccggcactatccggaa

SEQ ID NO: 511093 - DNA, 75 bp, synthetic construct
  source 1..75: mol_type = other DNA
cgttcagaaaaccagaactggttgacagactgaatgatattatcgcaaaacactatcctgatatgctggcagtat

SEQ ID NO: 511094 - DNA, 75 bp, synthetic construct
  source 1..75: mol_type = other DNA
ccggcaactggctgaaatatcagcaatgacagaaagtattggaggtaaaactgctccggactgggccatgaaaca

SEQ ID NO: 511095 - DNA, 75 bp, synthetic construct
  source 1..75: mol_type = other DNA
atgaaacaggattttcgctgcggctgctggctgatggagaaaccggaaaccgcaatgaaagccatcacacgcaat

SEQ ID NO: 511096 - DNA, 75 bp, synthetic construct
  source 1..75: mol_type = other DNA
aaatttcagtactgacaaaaagtatccgaggtaaaaccgcactggactgggcgttgaaacaggattttcgctgcg

SEQ ID NO: 511097 - DNA, 75 bp, synthetic construct
  source 1..75: mol_type = other DNA
cgggcaacaggccgatcgacttgccgatctggaaagaatgctgcacctgttcagcggcaaaccgatccccgacaa

SEQ ID NO: 511098 - DNA, 75 bp, synthetic construct
  source 1..75: mol_type = other DNA
aagccatcacctgcaatctcgatcgagaaatctggcgtgacctgatgcaatgctccgggatgctttccttaatgg

SEQ ID NO: 511099 - DNA, 75 bp, synthetic construct
  source 1..75: mol_type = other DNA
aatgcacatttgatcgtctgtcggcgtccaggttacccacttgaaatggcgcaaccgcaataccagcaatggctg

SEQ ID NO: 511100 - DNA, 75 bp, synthetic construct
  source 1..75: mol_type = other DNA
tgacggcggagatctggtttggccgtcgcttaggccaggatgccgcgccagagaaactgggcgttgaccgcgcac

SEQ ID NO: 511101 - DNA, 75 bp, synthetic construct
  source 1..75: mol_type = other DNA
cctcgaagaacatcaatttgcgttgcagttagtaaacgatgaagttccggtcgcagcgcctgtggtctttaatgg

SEQ ID NO: 511102 - DNA, 75 bp, synthetic construct
  source 1..75: mol_type = other DNA
ggtcgttatctggggcgtatgcaccagacggggcgcaaacagctttttatccatcgcccgaccatcggcctgaat

SEQ ID NO: 511103 - DNA, 75 bp, synthetic construct
  source 1..75: mol_type = other DNA
tttacactacaccgaaaacgagtgtgaaatgcgcgacggcgacctggtgttgattgacgcaggctgcgaatacaa

SEQ ID NO: 511104 - DNA, 75 bp, synthetic construct
  source 1..75: mol_type = other DNA
acattgtgattaccgaaaccggtaacgaaaacctcaccgccagcgtggtgaaaaagccggaagaaatcgaagcgt

SEQ ID NO: 511105 - DNA, 75 bp, synthetic construct
  source 1..75: mol_type = other DNA
aggttacgcgggcgatattacccgcaccttcccggtcaacggcaaattcacccaggcccagcgtgaaatctacga

SEQ ID NO: 511106 - DNA, 75 bp, synthetic construct
  source 1..75: mol_type = other DNA
tctgagcacatttgaacaactgcaccagaataacgatgaggtgtttgatcggggcgtgatcaacgtcttcatagg

SEQ ID NO: 511107 - DNA, 75 bp, synthetic construct
  source 1..75: mol_type = other DNA
tctgagcacatttgaacaactgcaccagaaaaaagatgaggtgtttgagcggggcgtgatcaacgtcttcatagg

SEQ ID NO: 511108 - DNA, 75 bp, synthetic construct
  source 1..75: mol_type = other DNA
gaatatcttactgagccacgtaagctgtttgaggacgccacactaataccttccgggttgaagaccgcattcctg

SEQ ID NO: 511109 - DNA, 75 bp, synthetic construct
  source 1..75: mol_type = other DNA
tcggtggtcgtcaattcgaagccgacaatattgatcagatggaagcggtggggcgctatttggggcggatgcacc

SEQ ID NO: 511110 - DNA, 75 bp, synthetic construct
  source 1..75: mol_type = other DNA
tctgagcacatttgaacaactgcaccagaagaaggatgaggtgtttgaccggggcgtgatcaacgtcttcatagg

SEQ ID NO: 511111 - DNA, 75 bp, synthetic construct
  source 1..75: mol_type = other DNA
ttcaggaagccagaactggttgacagactgaatgatattatcgcaaaacactatcctgatatgctggcagtatag

SEQ ID NO: 511112 - DNA, 75 bp, synthetic construct
  source 1..75: mol_type = other DNA
gacctggaaaggatgctgcacctgttcagcggcaggcccatccccgacaaccgggaaaatatcatcatccgtctg

SEQ ID NO: 511113 - DNA, 75 bp, synthetic construct
  source 1..75: mol_type = other DNA
cagagtgccggtcgcagactggtgacattagaacaaaagttgctcaggatgcaggcacagcaggagaatatttct

SEQ ID NO: 511114 - DNA, 75 bp, synthetic construct
  source 1..75: mol_type = other DNA
aaaatcccgtcattgtggtgaaaaaacgtcgttctttttcgccgcctaccttagccgaaaaaaaagatgttatcg

SEQ ID NO: 511115 - DNA, 75 bp, synthetic construct
  source 1..75: mol_type = other DNA
cactgttgcaaatcgacacacttatccgacaactggctgaaatctcggtgctgacggaaagcatcggaagtaaaa

SEQ ID NO: 511116 - DNA, 75 bp, synthetic construct
  source 1..75: mol_type = other DNA
ccttgagcagattcaggcggcacagaaggccctttccctgcggctggacacactggcggcactggcagagaagcc

SEQ ID NO: 511117 - DNA, 75 bp, synthetic construct
  source 1..75: mol_type = other DNA
tgagcacgtttgaacaactgcaccagaacaaggatgaggtgtttgagcgaggggtgatcaacgtcttcaggggac

SEQ ID NO: 511118 - DNA, 75 bp, synthetic construct
  source 1..75: mol_type = other DNA
cttccattaacgcttcgtcctctgctcagtaacggcttattggtcgggattttaggtcacgtatccaaagggttg

SEQ ID NO: 511119 - DNA, 75 bp, synthetic construct
  source 1..75: mol_type = other DNA
tccgcagcagggcgcggggaatacgcgttatcgtcgcagctttgtggcgaccggatttatgacgctgataaccgt

SEQ ID NO: 511120 - DNA, 75 bp, synthetic construct
  source 1..75: mol_type = other DNA
ttgctcaggcattctgcggtcatcgtcgcgcaattatggaagggccggggggcctgtggtggggaaccatcctca

SEQ ID NO: 511121 - DNA, 75 bp, synthetic construct
  source 1..75: mol_type = other DNA
atggagaaaccggaaaccgcaatgaaagccatcacacgcaatcttgatcgcgaactctggcgtgatctgatgcaa

SEQ ID NO: 511122 - DNA, 75 bp, synthetic construct
  source 1..75: mol_type = other DNA
gctggtagatggctttctggcacagattcactgcctgccatgtgtaccgattaatgaggtagcaaaagagaaact

SEQ ID NO: 511123 - DNA, 75 bp, synthetic construct
  source 1..75: mol_type = other DNA
ggcctgtggtggggaaccatccttactatcacccttggcgaagcatcgcgcgggacaccgatcaacgatatcgct

SEQ ID NO: 511124 - DNA, 75 bp, synthetic construct
  source 1..75: mol_type = other DNA
gcacatcacgttcaggaaaccagaactggttgacaggctgaacgatattattgcgaaatactatccaaatgtatt

SEQ ID NO: 511125 - DNA, 75 bp, synthetic construct
  source 1..75: mol_type = other DNA
accggtggggatttcatcttatcaccgggcaacaggcagatcgacttgccgacctggaaagaatgctgcatctgt

SEQ ID NO: 511126 - DNA, 75 bp, synthetic construct
  source 1..75: mol_type = other DNA
ggggtgatcaacgtcttcagagggttgagctggaattacaaaaccaattgcccctgcaaatttggcagtaaaatt

SEQ ID NO: 511127 - DNA, 75 bp, synthetic construct
  source 1..75: mol_type = other DNA
cgctgctgcaaatcgacacacttatccggcaactggcagaaatctcagtactgacagaaagtattggaggtaaaa

SEQ ID NO: 511128 - DNA, 75 bp, synthetic construct
  source 1..75: mol_type = other DNA
gcaaagtgtgctatgaagatgagatgttcaacatcagatactttaagaagggctccgcacacatcacgttcagga

SEQ ID NO: 511129 - DNA, 75 bp, synthetic construct
  source 1..75: mol_type = other DNA
tgcattcgcactgcgccacaatctggtgcacctggcagaacgtgcgggcatgaatgtgcagattctgcggaacaa

SEQ ID NO: 511130 - DNA, 75 bp, synthetic construct
  source 1..75: mol_type = other DNA
aaaaggacgtatccggaacgaaagaaccctctccggtggtacagaaaactgcccgccctgcaacggcacgtacag

SEQ ID NO: 511131 - DNA, 75 bp, synthetic construct
  source 1..75: mol_type = other DNA
aacgcgccggcgttcacttctgcgaggtgtggcagtgagttctctgactttgctggttatggtgacgggcgtggc

SEQ ID NO: 511132 - DNA, 75 bp, synthetic construct
  source 1..75: mol_type = other DNA
cggaactggtcaacggacatacggacgttatctgctcaactagtatccgccacattctggctgtacgaaagagtg

SEQ ID NO: 511133 - DNA, 75 bp, synthetic construct
  source 1..75: mol_type = other DNA
tgggggtttcatcttatcaccgggcaacaggcagatcgacttgccgatctggaaagaatgctacacctgctcagc

SEQ ID NO: 511134 - DNA, 75 bp, synthetic construct
  source 1..75: mol_type = other DNA
caacgttcagggatgctttccttaatggatgcacaggcccatgatacatggtacaggtcacgaagtacgataatt

SEQ ID NO: 511135 - DNA, 75 bp, synthetic construct
  source 1..75: mol_type = other DNA
accggtgggggggcatcttatcaccgggcaacaggcagatcgacttgccgatctggaaagaatgctacacctgtt

SEQ ID NO: 511136 - DNA, 75 bp, synthetic construct
  source 1..75: mol_type = other DNA
gaaggtgagagtgtggccggctggacactgattcatgccggtcacgaacaggcgacgttccgggtgaacggacgt

SEQ ID NO: 511137 - DNA, 75 bp, synthetic construct
  source 1..75: mol_type = other DNA
ataaagtacgtatatcagaagaccgcctttctcgcctgttgtatacagatgacgatgatgagatcaacactcgcc

SEQ ID NO: 511138 - DNA, 75 bp, synthetic construct
  source 1..75: mol_type = other DNA
ttcctgttccgttaagccggataataatagcggtgctgtgactccggttgatccaactccggaaacaccggtaac

SEQ ID NO: 511139 - DNA, 75 bp, synthetic construct
  source 1..75: mol_type = other DNA
agagttatcggttatatgcgacatagtgaagaggatatgtcgcctaatgataattccctgcatatgcagcgtgcg

SEQ ID NO: 511140 - DNA, 75 bp, synthetic construct
  source 1..75: mol_type = other DNA
gtttatttaggggcgtttccacgacatattccggcacagaatgcggttctggacgtcacctttgaattccctcgc

SEQ ID NO: 511141 - DNA, 75 bp, synthetic construct
  source 1..75: mol_type = other DNA
agccggtgagcaaaattactgctggtgtttatttaggggcgtttccacgacatattccggcacagaatgcggttc

SEQ ID NO: 511142 - DNA, 75 bp, synthetic construct
  source 1..75: mol_type = other DNA
ttattattagtcgtctgttttcctttctgtgttttgtgctgtttaccctttttctattatctgcattatttccat

SEQ ID NO: 511143 - DNA, 75 bp, synthetic construct
  source 1..75: mol_type = other DNA
ttcgcgatctggaacagactggtgacactgtaacgcttcacgtatcccacaccaaaaccatcacgaccgccgccg

SEQ ID NO: 511144 - DNA, 75 bp, synthetic construct
  source 1..75: mol_type = other DNA
gggaagctgccgacactggcaccgccgttactgcgccagctggctgccatcgggaataacctgaatcagacggcg

SEQ ID NO: 511145 - DNA, 75 bp, synthetic construct
  source 1..75: mol_type = other DNA
gccggttgcccgttccgggaaactgccgacactggcaccgccgttactgcgtcagctggccgccatcggaaataa

SEQ ID NO: 511146 - DNA, 75 bp, synthetic construct
  source 1..75: mol_type = other DNA
ggccaaaatggccatactcagtcttttgcacactgagtatggccaaaatggccatactcagtgtgcaaaagactg

SEQ ID NO: 511147 - DNA, 75 bp, synthetic construct
  source 1..75: mol_type = other DNA
catgcggcgcatccggcgcgaagcggcaacggaaaaaggcgagcgaacaggccaggctataccgttgcggtggga

SEQ ID NO: 511148 - DNA, 75 bp, synthetic construct
  source 1..75: mol_type = other DNA
cattcctgggcgcggtggtgtaactcgcgccagcgcccctggttcccgattacgccggaaatggcccgcgagtat

SEQ ID NO: 511149 - DNA, 75 bp, synthetic construct
  source 1..75: mol_type = other DNA
gcatctccggcctttaaggttaaattgtatgtgccgctggcacgtcctgggctggcgttatggcatcgtctgcgt

SEQ ID NO: 511150 - DNA, 75 bp, synthetic construct
  source 1..75: mol_type = other DNA
atgaccggcgataagcccggagacattcattcatccggctggactctggctgcaaaacgtgggcgggatgcagga

SEQ ID NO: 511151 - DNA, 75 bp, synthetic construct
  source 1..75: mol_type = other DNA
gaaaaaacgcacgggatgcggggatgggaatgcctggttgacggggtggcggatattgacgtcagcatgacgggt

SEQ ID NO: 511152 - DNA, 75 bp, synthetic construct
  source 1..75: mol_type = other DNA
gcaacggggcgaaatataaccccacgacgttttcaccggtggatgcgcagacggtggaacaactgaagatgacgg

SEQ ID NO: 511153 - DNA, 75 bp, synthetic construct
  source 1..75: mol_type = other DNA
gatttggcagggctggtggtgaaagagttctttctaagctggcaactgaattgatgaattatggacatgatgtaa

SEQ ID NO: 511154 - DNA, 75 bp, synthetic construct
  source 1..75: mol_type = other DNA
gtcgtcagatggtgcggtgagagcgagggcttttattctgagtgcgtttcactgaagcgggaattaactgacgtc

SEQ ID NO: 511155 - DNA, 75 bp, synthetic construct
  source 1..75: mol_type = other DNA
ggacaaccgccttccagtgacaacgtggaggcgctggagcagcagtattattcccagtgcctgcagacgctgatt

SEQ ID NO: 511156 - DNA, 75 bp, synthetic construct
  source 1..75: mol_type = other DNA
ccaagttctgataacgttgaagcacttgaacaacaatattactcacagtgcctgcaggtgctgattgagtctatc

SEQ ID NO: 511157 - DNA, 75 bp, synthetic construct
  source 1..75: mol_type = other DNA
gatttacagcgcacatttgaggggaaaatagccgcgcaggcacaaacgtttgaagaaaaactggcgtccctgtct

SEQ ID NO: 511158 - DNA, 75 bp, synthetic construct
  source 1..75: mol_type = other DNA
ggcgatggtggatgacgctgtgggggccattccggtaccgcgtgatggtcgtgattatgatccggatgtactgca

SEQ ID NO: 511159 - DNA, 75 bp, synthetic construct
  source 1..75: mol_type = other DNA
aagcatgtgacggtggatgaggtgcgtccggttctgcaggcgatggtggatgacgctgtgggggccattccggta

SEQ ID NO: 511160 - DNA, 75 bp, synthetic construct
  source 1..75: mol_type = other DNA
ttcgtgcactgggagaagaattctccacggtgctggcggatttacagcgcacatttgaggggaagatggcctcgc

SEQ ID NO: 511161 - DNA, 75 bp, synthetic construct
  source 1..75: mol_type = other DNA
gcggtgttctcttgcattacgctgatagccagtgacatttcaaagatgtcgccagccattcaggccaaagattct

SEQ ID NO: 511162 - DNA, 75 bp, synthetic construct
  source 1..75: mol_type = other DNA
ccgttccgggaagctgccgacactggcaccgccgttactgcgccagctggctgccatcgggaataacctgaatca

SEQ ID NO: 511163 - DNA, 75 bp, synthetic construct
  source 1..75: mol_type = other DNA
catcagcctctactccatcggacgtgcggtgctggcaaacctgaccgccggacgcacggtgcagggagcgagtac

SEQ ID NO: 511164 - DNA, 75 bp, synthetic construct
  source 1..75: mol_type = other DNA
cgatgtcgatttaccagcgttatctggcgaaccagacgccaacgccgctgaatcttgtaccgccggaagatattg

SEQ ID NO: 511165 - DNA, 75 bp, synthetic construct
  source 1..75: mol_type = other DNA
gaccatgcagcaggttgtacaacgcggtacgggtcgtcagcttggggcgaaatatccaaatctgcatctggcagg

SEQ ID NO: 511166 - DNA, 75 bp, synthetic construct
  source 1..75: mol_type = other DNA
ctcttgagcatgacgaaatccttgtcgcctttcattttccgccacagccgaaagaacacgcgggcagcgcgcatt

SEQ ID NO: 511167 - DNA, 75 bp, synthetic construct
  source 1..75: mol_type = other DNA
gtcctgcaagatgtcgccccgcgttcttcatggcgggccagtaaaccagtaaagagtttcgtctgcatctcatcc

SEQ ID NO: 511168 - DNA, 75 bp, synthetic construct
  source 1..75: mol_type = other DNA
atctgcactgatagcagaggcaacgaatgtaatagcgccgcttcaggatgcggttgatttagatatggcaacaga

SEQ ID NO: 511169 - DNA, 75 bp, synthetic construct
  source 1..75: mol_type = other DNA
accaacaacaacgttgatacctggtttgcgggcattgacggcagcacggtgaccatcacctgggtaggccgtgat

SEQ ID NO: 511170 - DNA, 75 bp, synthetic construct
  source 1..75: mol_type = other DNA
gatcagctaaatccagttccggctatgttactgggagcgctgaacctgacgccaattgaagtggcgcaagcgttc

SEQ ID NO: 511171 - DNA, 75 bp, synthetic construct
  source 1..75: mol_type = other DNA
gacgtacagtgcaaggggcgagtacgctgacccagcaactggtgaaaaacctgttcctgtccagcgagcgttctt

SEQ ID NO: 511172 - DNA, 75 bp, synthetic construct
  source 1..75: mol_type = other DNA
tgtttgtgccgcgcagtggattcccggatctgctggtggataccttgctggcgacggaagaccgtcatttctacg

SEQ ID NO: 511173 - DNA, 75 bp, synthetic construct
  source 1..75: mol_type = other DNA
actaagttgtacggtgccagcggggcgatgtcgatttaccagcgttatttggctaaccagacgccaacgccgctg

SEQ ID NO: 511174 - DNA, 75 bp, synthetic construct
  source 1..75: mol_type = other DNA
aagggcaaagggcgtaagcctcgtggcaaacgcggctggctatggctgctgctaaaactggctatcgtttttgcc

SEQ ID NO: 511175 - DNA, 75 bp, synthetic construct
  source 1..75: mol_type = other DNA
atgggcgaaagcggcggtactgcgacgatgcttgggccggtgacggtaacgaatgacgtaacagcttctggtatc

SEQ ID NO: 511176 - DNA, 75 bp, synthetic construct
  source 1..75: mol_type = other DNA
aagacgggacgagtccatcatttgctatctgacttagagcttgctgtttttctcagtcttgagtgggagagcagc

SEQ ID NO: 511177 - DNA, 75 bp, synthetic construct
  source 1..75: mol_type = other DNA
agcacacggtaatttcatcacctttcaagatgcagatgatctttctcatccggagagaatacaaagacaagttga

SEQ ID NO: 511178 - DNA, 75 bp, synthetic construct
  source 1..75: mol_type = other DNA
tgaagtcctatcgtatcttacaaaaggtaaaactaaacttaaggagtttaatgccagagcagaaaaaagcccgta

SEQ ID NO: 511179 - DNA, 75 bp, synthetic construct
  source 1..75: mol_type = other DNA
atgaaaaaattagaagatgttggtgtactggtagcgcgtattttaatgccgattctgtttattacggccggctgg

SEQ ID NO: 511180 - DNA, 75 bp, synthetic construct
  source 1..75: mol_type = other DNA
tattatttttcaaaaaaaccagggatttctatcattaaactctgtaaagagattgaggtgatgctgccaacttac

SEQ ID NO: 511181 - DNA, 75 bp, synthetic construct
  source 1..75: mol_type = other DNA
tattgagttgttcaactggggcggttttcatggattgcatcaggcagcaatccatcaggatggtaccgccgttat

SEQ ID NO: 511182 - DNA, 75 bp, synthetic construct
  source 1..75: mol_type = other DNA
tgacttcgtttactacggcggttatcacccggaaatggggcagatcctgcgtcaggcgcgcgcggcggggctgaa

SEQ ID NO: 511183 - DNA, 75 bp, synthetic construct
  source 1..75: mol_type = other DNA
caggcggttgcggatatcaatgctaaaggtggtatcaaaggcaacaaactgcaaatcgtaaaatatgacgatgcc

SEQ ID NO: 511184 - DNA, 75 bp, synthetic construct
  source 1..75: mol_type = other DNA
tcgataagcagctcagagctgccaataaagtcactaacgtgctggatacagaactcacatcagcccgtgccgcgg

SEQ ID NO: 511185 - DNA, 75 bp, synthetic construct
  source 1..75: mol_type = other DNA
atctgacccgcccggattctgacgccagtgtagcgaaagcaaaacttgatgaggctcaaacggttgaatctgaac

SEQ ID NO: 511186 - DNA, 75 bp, synthetic construct
  source 1..75: mol_type = other DNA
aatggcgcggtgcgattgagcgtgctgtcgggagtaacaggctgcgtattctggttgcgcctgaatcggcacagg

SEQ ID NO: 511187 - DNA, 75 bp, synthetic construct
  source 1..75: mol_type = other DNA
gcgtgtatcctggacgggtaaacagctgcttgcagagcgtttccctgacacgtcgcgcctgctgctggaagactg

SEQ ID NO: 511188 - DNA, 75 bp, synthetic construct
  source 1..75: mol_type = other DNA
aggaacgtcagcgttatgcagggaataaataccggatgaaaccctctcttaaccgtgaattttatatccggtttg

SEQ ID NO: 511189 - DNA, 75 bp, synthetic construct
  source 1..75: mol_type = other DNA
tggaatgtattctgaaccgttataagcctgcatggcagacgtttatttacgtgtatgcaaacagtcacaaagagg

SEQ ID NO: 511190 - DNA, 75 bp, synthetic construct
  source 1..75: mol_type = other DNA
ctgcgtatttatgaaggcggtgcgctggaatgtattctgaatcgttataagcctgcatggcagacgtttatttac

SEQ ID NO: 511191 - DNA, 75 bp, synthetic construct
  source 1..75: mol_type = other DNA
atgatgcgcgacatcaaaaaaccaaaagagaaaaagataccagccccaatcaggcccatcgcacggtcaacaaga

SEQ ID NO: 511192 - DNA, 75 bp, synthetic construct
  source 1..75: mol_type = other DNA
gtgctcgcggtattcctacgatgggtagtggtcgaatcttccagataccggaagagacgattaagtgtcagccgt

SEQ ID NO: 511193 - DNA, 75 bp, synthetic construct
  source 1..75: mol_type = other DNA
taaatcagcaacagaaatcattgctgtttccgggccgcgctgctgggtgggatttgattattcgcgtggcgtgga

SEQ ID NO: 511194 - DNA, 75 bp, synthetic construct
  source 1..75: mol_type = other DNA
gatctgccgttccataccgctaacggtacgctggactggaaaccgctggcgctggaagactggtcattctatgtt

SEQ ID NO: 511195 - DNA, 75 bp, synthetic construct
  source 1..75: mol_type = other DNA
cagccataatgggcgttgggattacggcaccagcgaactgaaatactacggtgagaaagtcgagaacaaaaaccc

SEQ ID NO: 511196 - DNA, 75 bp, synthetic construct
  source 1..75: mol_type = other DNA
gattctgtttcctcatcttcgtgctgaaggcggtggatttattcccctgaaaattggcataaacaatgatatttc

SEQ ID NO: 511197 - DNA, 75 bp, synthetic construct
  source 1..75: mol_type = other DNA
ggcatttcaatctgctacttcaaaccatactcgcaaggccgcgctcgctggcagggtgacacaatccacggcgtg

SEQ ID NO: 511198 - DNA, 75 bp, synthetic construct
  source 1..75: mol_type = other DNA
gaacgtgggattccggttgtcgcgtcaaacagcgatctggaaatggttcattacctgtacgccggatttgaagcc

SEQ ID NO: 511199 - DNA, 75 bp, synthetic construct
  source 1..75: mol_type = other DNA
tggaatgtattctgaatcgttataagcctgcatggcagacgtttatttacgtgtatgcaaacagccacgaaaagg

SEQ ID NO: 511200 - DNA, 75 bp, synthetic construct
  source 1..75: mol_type = other DNA
ggcggctggggccaattttataaccgggatcgttgaatgggacatgagtatgtttaacgacacgccggattataa

SEQ ID NO: 511201 - DNA, 75 bp, synthetic construct
  source 1..75: mol_type = other DNA
agaaaggcaatgctaacgtagtgttctttgatggcatcaccgccggggaaaaagatttctcgacgctggtggcac

SEQ ID NO: 511202 - DNA, 75 bp, synthetic construct
  source 1..75: mol_type = other DNA
gcggatatcaacgctaaaggcggcattaaaggcaacaaactgcaaatcgtaaaatatgacgatgcctgtgacccg

SEQ ID NO: 511203 - DNA, 75 bp, synthetic construct
  source 1..75: mol_type = other DNA
ctccaggatactgacacaatatacagagcactactggacatgcgccgcgccgcagaacatggcccacaaaaaacg

SEQ ID NO: 511204 - DNA, 75 bp, synthetic construct
  source 1..75: mol_type = other DNA
accggatatgtaccggatatgtcaccgcacacggttgccgctcagcctcctgttgcagccactccaatcccgcag

SEQ ID NO: 511205 - DNA, 75 bp, synthetic construct
  source 1..75: mol_type = other DNA
tgggggcgatttttgggctgatattcctcgtgttgctggtgattaccggcttactgtggatgcccgtggtgttgc

SEQ ID NO: 511206 - DNA, 75 bp, synthetic construct
  source 1..75: mol_type = other DNA
gactcgcttacggaatctactaaagccacaaggaggctcatccgtcgatcaaatcattgatgaactacggcgtgt

SEQ ID NO: 511207 - DNA, 75 bp, synthetic construct
  source 1..75: mol_type = other DNA
cgggccacgttttcccacttcgcgcgcaggcaggtggtgtactgacgcgtggcggtcatactgaagcaactattg

SEQ ID NO: 511208 - DNA, 75 bp, synthetic construct
  source 1..75: mol_type = other DNA
ttcgccacggtagcggtattgtttgcctgtgcattactgaagatcgccgtaaacaactcgatctgccaatgatgg

SEQ ID NO: 511209 - DNA, 75 bp, synthetic construct
  source 1..75: mol_type = other DNA
gtcaggcacgcgcggcaggacttaaaactcagtttatggggccagagggcgtagcgaacgtctcgctgtctaata

SEQ ID NO: 511210 - DNA, 75 bp, synthetic construct
  source 1..75: mol_type = other DNA
cttgcccttccctacttaaaatgcgcgatctgtatcttctccaatacagcgagaagagaaagctaacgacgctat

SEQ ID NO: 511211 - DNA, 75 bp, synthetic construct
  source 1..75: mol_type = other DNA
acgcaatcgctatcacgatgcaccacaggacaatccttggcgcggtcatgcgctcgaagcaaaaagcagcaaggt

SEQ ID NO: 511212 - DNA, 75 bp, synthetic construct
  source 1..75: mol_type = other DNA
cgttacggttgattctactattcaggaacaccgcgatcgtggagatacctataacggtcaattcttcaccagtgg

SEQ ID NO: 511213 - DNA, 75 bp, synthetic construct
  source 1..75: mol_type = other DNA
cgctgccaacatgccgaacagactgcacaaaatgcgccattaaacctgcaaacgctggaagccatcagcgaatct

SEQ ID NO: 511214 - DNA, 75 bp, synthetic construct
  source 1..75: mol_type = other DNA
cgcgctgcgaatcggctccgcgacaacatttactcagctcattgaagatcccgtaatccaacgcaatctcccggc

SEQ ID NO: 511215 - DNA, 75 bp, synthetic construct
  source 1..75: mol_type = other DNA
ttggtacgcctttcgaacgtgttgaaaatgcactggttgcgctgcgcgaaggacgcggtgtaatggtgcttgatg

SEQ ID NO: 511216 - DNA, 75 bp, synthetic construct
  source 1..75: mol_type = other DNA
tgtcgatgaagagcatccgcacatcgttgtgaagtctgatgccgataaacaggcgctggagttgctggtgaaagc

SEQ ID NO: 511217 - DNA, 75 bp, synthetic construct
  source 1..75: mol_type = other DNA
tgccgagtacgcaagatgttcacccattagggccgcagtcggcgaaaattttttgtgagtttcacagaaatatta

SEQ ID NO: 511218 - DNA, 75 bp, synthetic construct
  source 1..75: mol_type = other DNA
ttggtacgcctttcgaacgtgttgaaaatgcactggctgcgctgcgtgaaggacgcggtgtgatggtgcttgatg

SEQ ID NO: 511219 - DNA, 75 bp, synthetic construct
  source 1..75: mol_type = other DNA
gcggtgctggaagcgtaccagcgccatcttcgcagctaccgcaaggccgacgggaacacgctggcggtgggcggg

SEQ ID NO: 511220 - DNA, 75 bp, synthetic construct
  source 1..75: mol_type = other DNA
gttgcagattaaagtcaacgatgaaggtatcattgaagacgcgcgttttaaaacttacggctgcggttccgctat

SEQ ID NO: 511221 - DNA, 75 bp, synthetic construct
  source 1..75: mol_type = other DNA
acgcagatcggcggggaaaccatccgggagaaagcgcggatacagaaaccgggtgcctgtcacatcttccggcac

SEQ ID NO: 511222 - DNA, 75 bp, synthetic construct
  source 1..75: mol_type = other DNA
caccggttttaccgtgaccattgaagcggctgaaggggtgactaccggtgtttctgccgctgaccgtattacgac

SEQ ID NO: 511223 - DNA, 75 bp, synthetic construct
  source 1..75: mol_type = other DNA
acggcgcatctgacggtaataaggcaatcagtgaaacagagcatgatgcggtgaaagcgatgttcaggggggata

SEQ ID NO: 511224 - DNA, 75 bp, synthetic construct
  source 1..75: mol_type = other DNA
atgcggctgcgtcttatgcagacggatgcgcatgggatacgcagggaaacgcgccggggggatattgcccgcctc

SEQ ID NO: 511225 - DNA, 75 bp, synthetic construct
  source 1..75: mol_type = other DNA
tcaaggctggcgacgtcagcgaaagtgcggataacggtagaatttttacgccagtattttgccgagcactacccg

SEQ ID NO: 511226 - DNA, 75 bp, synthetic construct
  source 1..75: mol_type = other DNA
ggcgtggaaaccgagctgaaaattccgttcaacgatgaatggaaactgtcactcaactacacctacaacgatggt

SEQ ID NO: 511227 - DNA, 75 bp, synthetic construct
  source 1..75: mol_type = other DNA
aagtggtccgtggcccgatgtcgtcgctgtacggttccgatgcgctcggcggtgtcgtcaacatcatcaccaaga

SEQ ID NO: 511228 - DNA, 75 bp, synthetic construct
  source 1..75: mol_type = other DNA
acggcgattaatcagtttctcacggttggcggtgaatggcgtcacgacaaacttagcgatgcggtgaacctgacc

SEQ ID NO: 511229 - DNA, 75 bp, synthetic construct
  source 1..75: mol_type = other DNA
ctggacgccgaatcaaaatcacgattttaccgccggttacggtttcgaccgtcaggatcgtgattccgactcgct

SEQ ID NO: 511230 - DNA, 75 bp, synthetic construct
  source 1..75: mol_type = other DNA
caatgacttcgatctgaactggatcccggttgattccatcgaacgtattgaagtggtacgtggcccgatgtcctc

SEQ ID NO: 511231 - DNA, 75 bp, synthetic construct
  source 1..75: mol_type = other DNA
atgaaagcctacggcagcctggcgaaacgtgaaaaggatgacccgcaaaactcaaccaccaccgataccggagaa

SEQ ID NO: 511232 - DNA, 75 bp, synthetic construct
  source 1..75: mol_type = other DNA
tgaaaccctgccggtcaattgggaatctgattacgctgatcgtaggcattctgtgcgtatcagtaatgttcttta

SEQ ID NO: 511233 - DNA, 75 bp, synthetic construct
  source 1..75: mol_type = other DNA
gtggagtttcgcgctctacggcacagccgttggtgcaggcagctcttccttcctattcagttaggttcggcaggg

SEQ ID NO: 511234 - DNA, 75 bp, synthetic construct
  source 1..75: mol_type = other DNA
cgtgagcgtgctattctttgtctttagctgcctgttatcaattccaccttcatatattgaaacggcaaaagagga

SEQ ID NO: 511235 - DNA, 75 bp, synthetic construct
  source 1..75: mol_type = other DNA
caacgatgaatggaaactgtcattcaactacacctacaacgatggtcgtgatgtcagcaacggcgaaaacaaacc

SEQ ID NO: 511236 - DNA, 75 bp, synthetic construct
  source 1..75: mol_type = other DNA
ggcccgctcattgccatgatacttttcatcatgcctacgctgtcaacgtatctcatcccggcgcttaaaccctgg

SEQ ID NO: 511237 - DNA, 75 bp, synthetic construct
  source 1..75: mol_type = other DNA
gtaacaggctgcccgaacggttgtggtcgcgcgatgctggcggaagtgggcctggtgggtaaagcgccgggtcgc

SEQ ID NO: 511238 - DNA, 75 bp, synthetic construct
  source 1..75: mol_type = other DNA
cggtagcggaagccgttgtgacgactcagcgcgactggggtaatcgtaccgatcgtaaaaatgccaaaaccaaat

SEQ ID NO: 511239 - DNA, 75 bp, synthetic construct
  source 1..75: mol_type = other DNA
aggccaggatgattgcagacccgcagttgttcatcggactgctcagtcagcgtctggttcagctgatatgtcccc

SEQ ID NO: 511240 - DNA, 75 bp, synthetic construct
  source 1..75: mol_type = other DNA
gaacggcaagctggtaggcttcaatctgctggtgggcggtgggctgtctatcgaacacggtaacaaaaaaaccta

SEQ ID NO: 511241 - DNA, 75 bp, synthetic construct
  source 1..75: mol_type = other DNA
ggagctgttgcgaagcgcttcaatgtttctcgcatgactatttatcgctacacgacaaaaggcaaccattcagag

SEQ ID NO: 511242 - DNA, 75 bp, synthetic construct
  source 1..75: mol_type = other DNA
cagctgctcgcgcaaggggccgtgtagggggaagaaaaccgtcactttcggaagatgatattaagcaaatgaaaa

SEQ ID NO: 511243 - DNA, 75 bp, synthetic construct
  source 1..75: mol_type = other DNA
cgctgtttatcgaaaatggccgaattcttgattatccgggacgtccgctgaaaaccggcctgttggagatcgcaa

SEQ ID NO: 511244 - DNA, 75 bp, synthetic construct
  source 1..75: mol_type = other DNA
ggcattgatgataactggcacctgacgctgtttatcgaaaatggtcgcatccttgattatccggggcgtccgctg

SEQ ID NO: 511245 - DNA, 75 bp, synthetic construct
  source 1..75: mol_type = other DNA
accgatgaagagccgatactcggtcagacctatctgccgcgtaagttcaaaaccacggtggtgataccgccgcag

SEQ ID NO: 511246 - DNA, 75 bp, synthetic construct
  source 1..75: mol_type = other DNA
ccggtgccattcagaccgccgtcatggataccgcgcagggctgggtggactccatcaaatcggcactgcgtcttg

SEQ ID NO: 511247 - DNA, 75 bp, synthetic construct
  source 1..75: mol_type = other DNA
ccggggtgcctcaggatgcacgtctttcagagcagtatctgaaactggccggtctgtttggtgcacgctactccc

SEQ ID NO: 511248 - DNA, 75 bp, synthetic construct
  source 1..75: mol_type = other DNA
tcagcgcgactggggtaaccgaaccgatcgtaaaaatgccaaaaccaaatacacgctggagcgcgtgggggttga

SEQ ID NO: 511249 - DNA, 75 bp, synthetic construct
  source 1..75: mol_type = other DNA
aactacctgcgcggcacgattgctgaagatttaaacgatggcctgaccggcgggtttaagggcgataacttcctg

SEQ ID NO: 511250 - DNA, 75 bp, synthetic construct
  source 1..75: mol_type = other DNA
tatatcgaccgccatctggtgcatgaagtgacgtcaccgcaggcgtttgatggtctgcgcacccacggacgcccg

SEQ ID NO: 511251 - DNA, 75 bp, synthetic construct
  source 1..75: mol_type = other DNA
gcatctggtcagcccggcaatggcggccgccgctgccgtgaccggacatttcgccgacattcgcaacatcaaata

SEQ ID NO: 511252 - DNA, 75 bp, synthetic construct
  source 1..75: mol_type = other DNA
gtgtacgaagccgaaaacgaaaccccgctgttatatatcgaccgccacctggtgcatgaagtgacctcaccgcag

SEQ ID NO: 511253 - DNA, 75 bp, synthetic construct
  source 1..75: mol_type = other DNA
gttgctggccccgtttttcttcttcacctatggatctcttaatcagttcaccgcggttcaggaccttaacagcca

SEQ ID NO: 511254 - DNA, 75 bp, synthetic construct
  source 1..75: mol_type = other DNA
ggtgaaatggcgcgcatccagatgcaggagctgatcaaaaactgcaaagaatttggcgtcgaactgtatgacctg

SEQ ID NO: 511255 - DNA, 75 bp, synthetic construct
  source 1..75: mol_type = other DNA
cgtttgccgatccggttgaacgcgcgtcggcagaaaaagcgctggcctatatggggctgaaaccgggtattccgc

SEQ ID NO: 511256 - DNA, 75 bp, synthetic construct
  source 1..75: mol_type = other DNA
cccgtgcttttcgcgtaaagtttaacggtagtaataactatctttatagtcttgttaccacagaagaacaaagcg

SEQ ID NO: 511257 - DNA, 75 bp, synthetic construct
  source 1..75: mol_type = other DNA
gctcaagggcagaggagaatgtattgtcatcattgttccagaacatttatcactctggatcatgtaaatacaacg

SEQ ID NO: 511258 - DNA, 75 bp, synthetic construct
  source 1..75: mol_type = other DNA
gccggtgtgccggaaagcgagaaagcgaagatcgagaagatcgccaaagagagcgggttaatgaatgccgtcacg

SEQ ID NO: 511259 - DNA, 75 bp, synthetic construct
  source 1..75: mol_type = other DNA
tgacagaagtggctatcgacaaagtgtttatcggttcctgtactaactcgcgtattgaagatttacgcgcggcag

SEQ ID NO: 511260 - DNA, 75 bp, synthetic construct
  source 1..75: mol_type = other DNA
cgcgccaggcgtacaagcgctggtggttcccggctccggtccggttaaagcccaggcggaagcggaaggtctgga

SEQ ID NO: 511261 - DNA, 75 bp, synthetic construct
  source 1..75: mol_type = other DNA
ctatcattttcctgcatattcttcattagaatataaaggaacctttggttcaataaatgcgggttatgcagactg

SEQ ID NO: 511262 - DNA, 75 bp, synthetic construct
  source 1..75: mol_type = other DNA
cgaacccttacgagtcgcagctgcacgcggaagcctatgaatgggcgaagaaaatctctgaacatctgctgccgc

SEQ ID NO: 511263 - DNA, 75 bp, synthetic construct
  source 1..75: mol_type = other DNA
ttttatcttcgggccactgttacaatacaacattttagtaggatcgattgttggtggtatttatctagggaaggt

SEQ ID NO: 511264 - DNA, 75 bp, synthetic construct
  source 1..75: mol_type = other DNA
agcaaaggcgaggcactggtgcttttcaccacagataacgaactgacgcgcgataagttgcaacagtatgcccgc

SEQ ID NO: 511265 - DNA, 75 bp, synthetic construct
  source 1..75: mol_type = other DNA
cccgtcagtttctcgataaaggcaaactctggcatttgccggaacagcttacccaggtacgctgggtctatctgg

SEQ ID NO: 511266 - DNA, 75 bp, synthetic construct
  source 1..75: mol_type = other DNA
gcgcgaacacccatcaatcaaactttgctctttgacgcacatatgtgacgagttagccgctgagcttcgcagagg

SEQ ID NO: 511267 - DNA, 75 bp, synthetic construct
  source 1..75: mol_type = other DNA
cgctgggtaaactgaatactatcagcatgatcttcatcatgggctctacctgggttgtcgcctacgccaacccga

SEQ ID NO: 511268 - DNA, 75 bp, synthetic construct
  source 1..75: mol_type = other DNA
gaatggtttgattctgaagttcggttataaaggtgacaaaaccaaagtgtcgctgggtaaactgaatactctcag

SEQ ID NO: 511269 - DNA, 75 bp, synthetic construct
  source 1..75: mol_type = other DNA
cgttacgggtgacacccaggcactgaagggcgagcgcgttctaatcacgcctaatcacgtctcttttattgatgg

SEQ ID NO: 511270 - DNA, 75 bp, synthetic construct
  source 1..75: mol_type = other DNA
aagcggttatcgtggcgcagtttctctctgcgtttggcgataatgccctactgtttgccactctggcgttactga

SEQ ID NO: 511271 - DNA, 75 bp, synthetic construct
  source 1..75: mol_type = other DNA
aagatttaaaagcggacgtcaccactgccgacaaagtgtggatcttcgcgcatctgctggtgccgcgcctcgcac

SEQ ID NO: 511272 - DNA, 75 bp, synthetic construct
  source 1..75: mol_type = other DNA
ctggttaaacgccgcttgttcccgacaattcatctgcatattttgccgccaacacaagtgcagatgccagatgcg

SEQ ID NO: 511273 - DNA, 75 bp, synthetic construct
  source 1..75: mol_type = other DNA
gatgtcaattttacccctgacacctatcgtaaattacttaccaaaacgctgtttgtcgggcgcattcttgaaaaa

SEQ ID NO: 511274 - DNA, 75 bp, synthetic construct
  source 1..75: mol_type = other DNA
gtttgttggtcgcatcctcgaaaaatacagtgttgaaggagagcgcatcggcttaatgctgcccaatgcgggcat

SEQ ID NO: 511275 - DNA, 75 bp, synthetic construct
  source 1..75: mol_type = other DNA
atgaatttagaaaagatctatcattggcgtgtgtttatacaactaaccgtaatatagatcgtgaaggtaatttga

SEQ ID NO: 511276 - DNA, 75 bp, synthetic construct
  source 1..75: mol_type = other DNA
cggcttgacggtggtggttgtgatgctcttcattgcgtggcgacgcaatcatttcctcaacgctacgctctcggt

SEQ ID NO: 511277 - DNA, 75 bp, synthetic construct
  source 1..75: mol_type = other DNA
atttcctcaacgctacgctctcggttattgggcttaacgcggcgctggtttcgctctggtttgtcggccaggcgg

SEQ ID NO: 511278 - DNA, 75 bp, synthetic construct
  source 1..75: mol_type = other DNA
gtaacctgatggcactgagccagaccaacattaaacgtctgctcggctactcgtctatctctcacctcggctatc

SEQ ID NO: 511279 - DNA, 75 bp, synthetic construct
  source 1..75: mol_type = other DNA
catctccagggaaaaatcaacagcggacaggttgatccgctagcggcccattacatctctcccatcgacgaggac

SEQ ID NO: 511280 - DNA, 75 bp, synthetic construct
  source 1..75: mol_type = other DNA
agcgattcgcgtggtgctggcgattatcgcctttgcctccatcatcttcggtaacctgatggcgttgagccagac

SEQ ID NO: 511281 - DNA, 75 bp, synthetic construct
  source 1..75: mol_type = other DNA
tgtcgtttgtcgcactgggtaaaaacctcggcgacggtatgctcaacgagccgctgttgctggcaggtttcggcc

SEQ ID NO: 511282 - DNA, 75 bp, synthetic construct
  source 1..75: mol_type = other DNA
gataacattaacgaattcgaggtaaaaagaaatatagaatgggatcctgctactaggattatgtgttcaaattcc

SEQ ID NO: 511283 - DNA, 75 bp, synthetic construct
  source 1..75: mol_type = other DNA
ggttatataaaaaaggtgagtatcataaatcattatcattatttgaaaaggccggagagatttatgatgctagtt

SEQ ID NO: 511284 - DNA, 75 bp, synthetic construct
  source 1..75: mol_type = other DNA
atttatataaaaacaaaaattatcgtcaagctttatctctttttgagaaggttgctgaaatttatgatgttagtt

SEQ ID NO: 511285 - DNA, 75 bp, synthetic construct
  source 1..75: mol_type = other DNA
gatgcgctggcaagtaagcacctggctggagcggcaatcgacgtattcccaacagaacctgcaaccaatagtgat

SEQ ID NO: 511286 - DNA, 75 bp, synthetic construct
  source 1..75: mol_type = other DNA
ggcggattttgtcgctaaacgtcttgctccggcaggtaatgactccaacttattgatagtgttttatgttcagat

SEQ ID NO: 511287 - DNA, 75 bp, synthetic construct
  source 1..75: mol_type = other DNA
aatgttgatagtcaaggaaagttgattgaaaatggttataactggccagaattctcgcgagagaaacttaccaca

SEQ ID NO: 511288 - DNA, 75 bp, synthetic construct
  source 1..75: mol_type = other DNA
tcagatgagtaacatcgtcatgacgtatggcgaaactgaagcgatgaaagcagccagggcgaaatatccagggct

SEQ ID NO: 511289 - DNA, 75 bp, synthetic construct
  source 1..75: mol_type = other DNA
gctgaatggcgacaatacagacgaagataaacagcctaaccagggtaaagaactggctggcgcaacggacaatga

SEQ ID NO: 511290 - DNA, 75 bp, synthetic construct
  source 1..75: mol_type = other DNA
taataatagtaattacactagtcatctgacgatgtttagagaatttgcaagtgctgagttaactaaaagaagtag

SEQ ID NO: 511291 - DNA, 75 bp, synthetic construct
  source 1..75: mol_type = other DNA
agagtcgcccggtgatgggcgatcatgccacggatgtgaacggacaggtgttattacagctttcaacacagacgg

SEQ ID NO: 511292 - DNA, 75 bp, synthetic construct
  source 1..75: mol_type = other DNA
cgtgttcatcacccggtcagtctgaagagtcgcccggtgatgggcgatcatgccacggatgtgaacggacaggtg

SEQ ID NO: 511293 - DNA, 75 bp, synthetic construct
  source 1..75: mol_type = other DNA
gtgctcagcaaatctctcgagcgaaaccgacaactggcagagtacgctgaccgggccgccgaagccggacgagtc

SEQ ID NO: 511294 - DNA, 75 bp, synthetic construct
  source 1..75: mol_type = other DNA
tggttctcgctaattaaatgtcccgttgaaatgagaaatctttcaaagcgaataattcaataccagattgggctg

SEQ ID NO: 511295 - DNA, 75 bp, synthetic construct
  source 1..75: mol_type = other DNA
aagataaccatatgtgcaatttaggcgatgatcttttttacaagatcttcgaacccggagcaatttatgatttac

SEQ ID NO: 511296 - DNA, 75 bp, synthetic construct
  source 1..75: mol_type = other DNA
atgaatatcgaagaatttgtgagtgaggataaccatatgtgcaatttatgcggagatcggttttacaagatcttt

SEQ ID NO: 511297 - DNA, 75 bp, synthetic construct
  source 1..75: mol_type = other DNA
ctctccctggcgctgaagtcaggtaacttcggcgatatccagttctttgcccgtgcccagcaggagtttcgtcat

SEQ ID NO: 511298 - DNA, 75 bp, synthetic construct
  source 1..75: mol_type = other DNA
cgatcagttttatgtttatgagacatggttctcgctaattaaatgtcctattgagatgaaaagtctttcaaagcg

SEQ ID NO: 511299 - DNA, 75 bp, synthetic construct
  source 1..75: mol_type = other DNA
ctgataatgaatttaacagaaagattgtttactggttaagccagtatttagtagggaatctaagagaaccgttag

SEQ ID NO: 511300 - DNA, 75 bp, synthetic construct
  source 1..75: mol_type = other DNA
gttacgacagaatactaccattggacagatagatggtgacatgcctggttcaagagtaaaaattggtaataacgt

SEQ ID NO: 511301 - DNA, 75 bp, synthetic construct
  source 1..75: mol_type = other DNA
gtgctccgctttccgcgctacgttcagtcatcgcagaagacggcaaggtgttgtatcagagcttcccgcaggcgg

SEQ ID NO: 511302 - DNA, 75 bp, synthetic construct
  source 1..75: mol_type = other DNA
tcaatatggagaacaaccgtcagttcggtttcttccgtcttgatccgcgcctgatcaccatgatttcttcgccaa

SEQ ID NO: 511303 - DNA, 75 bp, synthetic construct
  source 1..75: mol_type = other DNA
ttcgtatcgccaacatcgatgtaagcgatctgtctgttcctgcctctgctgcaaacatcgtcactcagatggtta

SEQ ID NO: 511304 - DNA, 75 bp, synthetic construct
  source 1..75: mol_type = other DNA
cgctttgatgctgttttcatcgtagggcagcgtcacgctaacgataactttttggttctggatgtgaaggaggtg

SEQ ID NO: 511305 - DNA, 75 bp, synthetic construct
  source 1..75: mol_type = other DNA
ggacaccgaaccaccattcgttctggtttgccttcagctacctggcgtttgctgaactatggcgtacaaccgagc

SEQ ID NO: 511306 - DNA, 75 bp, synthetic construct
  source 1..75: mol_type = other DNA
gggactgtcctcccgctattccagcctgtctgcgggtaatgctcagaacatcattgatgctggtggcacgggtac

SEQ ID NO: 511307 - DNA, 75 bp, synthetic construct
  source 1..75: mol_type = other DNA
tgccggtattaagaacacatatcctgatgaaatgctgaaagagttggttgaacgcacgccaggttatcatggatg

SEQ ID NO: 511308 - DNA, 75 bp, synthetic construct
  source 1..75: mol_type = other DNA
tgataacgcgtgatttcttgatgaatgccgattgtaaaacggcatttggtgccattgaagaatcactcttatggt

SEQ ID NO: 511309 - DNA, 75 bp, synthetic construct
  source 1..75: mol_type = other DNA
actgccagaagagacgctggagcaggaactaaccctattgtggaagcgcgagatgattaccggctgttatctgcc

SEQ ID NO: 511310 - DNA, 75 bp, synthetic construct
  source 1..75: mol_type = other DNA
tcgacctgcaatctctggataaagcttctctggctctgtccgtcaaagagactgagggcgaatggtggaccactt

SEQ ID NO: 511311 - DNA, 75 bp, synthetic construct
  source 1..75: mol_type = other DNA
gtgtggggagaaaacacggttcacggtattttcccgaaaggtcagaaagcaggattacagactcagaatctgggc

SEQ ID NO: 511312 - DNA, 75 bp, synthetic construct
  source 1..75: mol_type = other DNA
aagaaaaccatatgtgcaatttatgcggagatcttttttacaagatctttgaccaagaagtgatttatgacttac

SEQ ID NO: 511313 - DNA, 75 bp, synthetic construct
  source 1..75: mol_type = other DNA
catgatatccccagtcaggtattcggttgggaaacggcgatcccttttcttccctggactattgttccttactgg

SEQ ID NO: 511314 - DNA, 75 bp, synthetic construct
  source 1..75: mol_type = other DNA
tccattgcgcattgggattatcgcgcagtgcgctggtagtggcggcatggctgttatgttacggacactgtaaac

SEQ ID NO: 511315 - DNA, 75 bp, synthetic construct
  source 1..75: mol_type = other DNA
ttccggaagagggggagctccgacaggccgtggcgatgctggaaacattacgcgaagagcaaggcagcgttctgg

SEQ ID NO: 511316 - DNA, 75 bp, synthetic construct
  source 1..75: mol_type = other DNA
gggatgtggctgtctatgcgttggttttgccttcgcctggagccggtgagcaaaattactgctggtgtttattta

SEQ ID NO: 511317 - DNA, 75 bp, synthetic construct
  source 1..75: mol_type = other DNA
cttattctggcaacggtaatggcctgctgcggtttttttctctacccgctgaagtttagttttatccgtcctgaa

SEQ ID NO: 511318 - DNA, 75 bp, synthetic construct
  source 1..75: mol_type = other DNA
gttgggaaacggcgatcccttttcttccctggactattgttccttactggagtctggatcttttatatggatttt

SEQ ID NO: 511319 - DNA, 75 bp, synthetic construct
  source 1..75: mol_type = other DNA
ggtttgggcgagaagggggattccccgatacgcaaatcgtcgcgttatttgttctgtttatggtggcaggcacgg

SEQ ID NO: 511320 - DNA, 75 bp, synthetic construct
  source 1..75: mol_type = other DNA
gcaacagatgcgacgcagcaacttatcacgatgaaaccgggcgaaacatatagttatacagatacgttgattgca

SEQ ID NO: 511321 - DNA, 75 bp, synthetic construct
  source 1..75: mol_type = other DNA
gggattatcgcgcagtgcgctggtagtggcggcatggctgttatgttacggacactgtaaaaccgttgatgaagc

SEQ ID NO: 511322 - DNA, 75 bp, synthetic construct
  source 1..75: mol_type = other DNA
ctttatccgatcattgatacgctgttacggggagacgcgccgcaacttcttaactgggctatggccttcagcgtc

SEQ ID NO: 511323 - DNA, 75 bp, synthetic construct
  source 1..75: mol_type = other DNA
gcttactgctggtattgatgctgaattcaggcatgcggtttgtgctgcctcttctggcaccgctgttgttggatc

SEQ ID NO: 511324 - DNA, 75 bp, synthetic construct
  source 1..75: mol_type = other DNA
aaactaccgtcaccaaactgttaatgcgctatgccgatccgcagcaagggcagatttctattggcggcgtcgata

SEQ ID NO: 511325 - DNA, 75 bp, synthetic construct
  source 1..75: mol_type = other DNA
ttgttgctggccccgtttttcttctttacatatggatttcttaatcagttcaccgcggttcaggaccttaacagc

SEQ ID NO: 511326 - DNA, 75 bp, synthetic construct
  source 1..75: mol_type = other DNA
tcgcactgatgccagaatgttaggcatcagtgcaccgttacgtatgtccggcgatctgcagggcactccaggcat

SEQ ID NO: 511327 - DNA, 75 bp, synthetic construct
  source 1..75: mol_type = other DNA
caattaggctatgtctataaccgttttgccgccaatctacgttcgcaaaaatcactgactatcggcgtggtgatt

SEQ ID NO: 511328 - DNA, 75 bp, synthetic construct
  source 1..75: mol_type = other DNA
agcgggtaacattaaccgatgttgcgcgtgcggctggcgtttcgaaatcgactgtatcgctggttctcaacgaca

SEQ ID NO: 511329 - DNA, 75 bp, synthetic construct
  source 1..75: mol_type = other DNA
aaatgcatattgataccgatgaagccaacgccgcaggggctgatagccctgacgtttttgccacactggtgtcag

SEQ ID NO: 511330 - DNA, 75 bp, synthetic construct
  source 1..75: mol_type = other DNA
atgacactgattaacctaaaagatctcgaagcccatctttggcatgcagcccatatcatcaccgggcctattgat

SEQ ID NO: 511331 - DNA, 75 bp, synthetic construct
  source 1..75: mol_type = other DNA
atgacactgattaacctaaaagatctcgaggcccatctatggcatgcagcccatattattacagggcccattgat

SEQ ID NO: 511332 - DNA, 75 bp, synthetic construct
  source 1..75: mol_type = other DNA
tcgccattttgaactggttagagcactgactgaagcatattctataaatattcaacactaccttgatcacgagtg

SEQ ID NO: 511333 - DNA, 75 bp, synthetic construct
  source 1..75: mol_type = other DNA
gtggcgatgctggaaacattacgcgaagagcaaggcagcgttctggtccattgcgcgttgggattatcgcgcagt

SEQ ID NO: 511334 - DNA, 75 bp, synthetic construct
  source 1..75: mol_type = other DNA
atcaaaatagcactgccatatgtcgtaggcgcgtgttcgtgcatagtattgatgacgctaatgatgatgaatcag

SEQ ID NO: 511335 - DNA, 75 bp, synthetic construct
  source 1..75: mol_type = other DNA
aaatgcatattgataccgatgaggccaacgccgcaggggctgatagccctgacgtttttgccacactggtgtcaa

SEQ ID NO: 511336 - DNA, 75 bp, synthetic construct
  source 1..75: mol_type = other DNA
aaatgcatattgataccgacgaggccaacgccgcaggcgctgataatcctgacgtttttgccacactggtgtcgc

SEQ ID NO: 511337 - DNA, 75 bp, synthetic construct
  source 1..75: mol_type = other DNA
agtttcagaaggaagtcgataataccactgatctattggacgatattttaagcattctcgcgctgcttgaggctg

SEQ ID NO: 511338 - DNA, 75 bp, synthetic construct
  source 1..75: mol_type = other DNA
gctgaaatcaaaactatcttcacttcccgccagttcctcgacaaaggcaaactttggcatctgccggaacaactc

SEQ ID NO: 511339 - DNA, 75 bp, synthetic construct
  source 1..75: mol_type = other DNA
gcctgtcgtttctatcaacgtaccgatggcggcgaaacccggtacggtagggcgtattctaccaggtatggacgc

SEQ ID NO: 511340 - DNA, 75 bp, synthetic construct
  source 1..75: mol_type = other DNA
gttcaacgttgactacctcggtggtcagattggtactttcgccatcaacttctcccgcccggcgggtcaggtaat

SEQ ID NO: 511341 - DNA, 75 bp, synthetic construct
  source 1..75: mol_type = other DNA
agtgaaggcgcacacgatcaggtatacgaaacagtgcgtcgctatgggcatgagagtggcgagatttggcaccgg

SEQ ID NO: 511342 - DNA, 75 bp, synthetic construct
  source 1..75: mol_type = other DNA
gacctacgttgcgtaaatatggttgccgatctgtggcatgcgcctgcgccgaaaaatggtcaggccgttggcacc

SEQ ID NO: 511343 - DNA, 75 bp, synthetic construct
  source 1..75: mol_type = other DNA
cgagctggattacaacattttccgcggcctggcgtttgcttccggcaacccgatttacggtctgatccttaacgg

SEQ ID NO: 511344 - DNA, 75 bp, synthetic construct
  source 1..75: mol_type = other DNA
tgggatgtggagttgcgtgagatccctatgcgccccggtcagttgtttatggacccgaaacgcatgattgaagcc

SEQ ID NO: 511345 - DNA, 75 bp, synthetic construct
  source 1..75: mol_type = other DNA
taaaatatagtggcagtagctatccatttccgaccaccagtgaaacgccgcgggttgtttataattcgagaacgg

SEQ ID NO: 511346 - DNA, 75 bp, synthetic construct
  source 1..75: mol_type = other DNA
gggtcggtgcgattagcggagctggaagcggaagtgttgcaacgggtgatgcagcgtggtgaatctgaaactcgc

SEQ ID NO: 511347 - DNA, 75 bp, synthetic construct
  source 1..75: mol_type = other DNA
attgggactttcgccatcaacttctcccgcccggcgggtcaggtgattgcacagtattatgaattcctgcgcctc

SEQ ID NO: 511348 - DNA, 75 bp, synthetic construct
  source 1..75: mol_type = other DNA
ccgtatgagttcatctgtaccggtcgcccggacgaaggcatcccggcggtttgcttcaaactgaaagatggtgaa

SEQ ID NO: 511349 - DNA, 75 bp, synthetic construct
  source 1..75: mol_type = other DNA
agattaagtactatgtcgggaataagctgactacgtcgaaagaagagatcattcagtgggctacgcagaagcagc

SEQ ID NO: 511350 - DNA, 75 bp, synthetic construct
  source 1..75: mol_type = other DNA
ctgcacgaaatgcgcgatgatgttgcatttcagattatcaatgatgaattatatcttgatggcaacgctcgtcag

SEQ ID NO: 511351 - DNA, 75 bp, synthetic construct
  source 1..75: mol_type = other DNA
cgctgttgcagattcaggaaatggcggcgaaatacggcttcgacatctcccgtccggcgcagaatgcgcaggaag

SEQ ID NO: 511352 - DNA, 75 bp, synthetic construct
  source 1..75: mol_type = other DNA
gaccaaaaactccttccgctatttgcacaccctgcacactatggggccggcaccggaacctaacctgaccattct

SEQ ID NO: 511353 - DNA, 75 bp, synthetic construct
  source 1..75: mol_type = other DNA
cctggcgaaaacgctgctgtacgcaatcaacggcggaatggacgagaagctgaagattcaggttggcccgaaaac

SEQ ID NO: 511354 - DNA, 75 bp, synthetic construct
  source 1..75: mol_type = other DNA
cggtgaagccaccgacatcgtggtgatgcgcattatgtgtcgtcgcggcttcgaaatggactttgctgaactgtt

SEQ ID NO: 511355 - DNA, 75 bp, synthetic construct
  source 1..75: mol_type = other DNA
tgtgcagtatatcagcgcgctgaatatcatccattacatgcacgataagtacagctatgaagcctcgctgatggc

SEQ ID NO: 511356 - DNA, 75 bp, synthetic construct
  source 1..75: mol_type = other DNA
agtctcgcctggaaaaaggtcaggatcttgaagcgaccatccgtttgcgtgaagaactggcggagcaccgtcatg

SEQ ID NO: 511357 - DNA, 75 bp, synthetic construct
  source 1..75: mol_type = other DNA
cgtccggcgcaaaatgcgcaggaagcggtgcaatggctctatttcgcctacctggcggcggtgaaatcgcaaaac

SEQ ID NO: 511358 - DNA, 75 bp, synthetic construct
  source 1..75: mol_type = other DNA
tccattaacaaaaactggatcgacaaagaagaatatccgcaatccgcagccatcgacctgcgttgcgtaaatatg

SEQ ID NO: 511359 - DNA, 75 bp, synthetic construct
  source 1..75: mol_type = other DNA
aactgaaagatggtgaagatccgggatacaccctgtacgacctctctgaacgtctgcgtctgcgcggctggcagg

SEQ ID NO: 511360 - DNA, 75 bp, synthetic construct
  source 1..75: mol_type = other DNA
gatcggcgggatggggctggatggtcgcactctggtgactaaaaactccttccgttatctgcacaccctgcacac

SEQ ID NO: 511361 - DNA, 75 bp, synthetic construct
  source 1..75: mol_type = other DNA
cctgcggcgctgggcaaagaagatccagtacgtaaaacgaaccttgtcggcctgctggatgggtatttccaccac

SEQ ID NO: 511362 - DNA, 75 bp, synthetic construct
  source 1..75: mol_type = other DNA
gtgactaccgccgcgtggcgctgtatggcatcagttatctggtgcgtgaacgcgaactgcaatttgccgatctcc

SEQ ID NO: 511363 - DNA, 75 bp, synthetic construct
  source 1..75: mol_type = other DNA
ggatatcccccgtccgcgccggttagggtcggtgcgattagcggagctggaagcggaagtgttgcagcgggtgat

SEQ ID NO: 511364 - DNA, 75 bp, synthetic construct
  source 1..75: mol_type = other DNA
tggtcgtcccttacaattaaaaagtacggaaattattcgacgcttgtcgcaggaattaaacggtcgcttaccgat

SEQ ID NO: 511365 - DNA, 75 bp, synthetic construct
  source 1..75: mol_type = other DNA
tcggtaccgtcacgccacgtccacagccaggtaatgacaagccgcgtctctttcgtctggtagatgccgaaggtt

SEQ ID NO: 511366 - DNA, 75 bp, synthetic construct
  source 1..75: mol_type = other DNA
ccgaataccccaggattacgtactttgcaatatggcgaagcactggatgatttattaacggcaattaaaaataag

SEQ ID NO: 511367 - DNA, 75 bp, synthetic construct
  source 1..75: mol_type = other DNA
caaaccctgggcaagaccctgaataaactggcgtcggtgatgacgctgacccgccctgatgccgacgtttctgtc

SEQ ID NO: 511368 - DNA, 75 bp, synthetic construct
  source 1..75: mol_type = other DNA
tccggtgcgcccgtatgtttctgcggctctgcctcatgcggtacgtcgctttgaatttatggtgatgccgggaga

SEQ ID NO: 511369 - DNA, 75 bp, synthetic construct
  source 1..75: mol_type = other DNA
tacaatatggcgaagcactggatgatttattaactgcaattaaaaataagcaaaatgatttacaggcgatccacc

SEQ ID NO: 511370 - DNA, 75 bp, synthetic construct
  source 1..75: mol_type = other DNA
ggtttgaggaagctgtattgctggagacggcggcagatctgcgctttgcgccggaatttgtcgctcgccatattg

SEQ ID NO: 511371 - DNA, 75 bp, synthetic construct
  source 1..75: mol_type = other DNA
gggccgcagaaagaattggtctgacacttcaacgctgccggtggctttcagctgatgtcattatggtgctggttg

SEQ ID NO: 511372 - DNA, 75 bp, synthetic construct
  source 1..75: mol_type = other DNA
tgatgagcaatggcgaacgaggatgtttggttctcgataaagaaacgcagttgcctgtttattatcaaaatctct

SEQ ID NO: 511373 - DNA, 75 bp, synthetic construct
  source 1..75: mol_type = other DNA
cgccgtttttgctggcggaaatactggcctggccctgttttaccctggtggagcgtttcacactcgacgcgccat

SEQ ID NO: 511374 - DNA, 75 bp, synthetic construct
  source 1..75: mol_type = other DNA
acatgggttgcgctgttgccgggttcgcttgcctgcggtgattgccgtgcgtcagtgcggtgaagtggccttgcc

SEQ ID NO: 511375 - DNA, 75 bp, synthetic construct
  source 1..75: mol_type = other DNA
cgctactgcgaagtttactcggtgctgatgaacaggctgccgccgcgctgctgttggcgcagagaaaaaacggta

SEQ ID NO: 511376 - DNA, 75 bp, synthetic construct
  source 1..75: mol_type = other DNA
agtcctcgacgaatgtttactactgtatccaaagcggcattgatggcgatcgggcagggcgtcaggagggcagca

SEQ ID NO: 511377 - DNA, 75 bp, synthetic construct
  source 1..75: mol_type = other DNA
atacggcattcagcgaagctgtcgttaatggcatctggcacaaagtcggctggggatcgctgctgtttattgtgg

SEQ ID NO: 511378 - DNA, 75 bp, synthetic construct
  source 1..75: mol_type = other DNA
acttatccgcagcgtgctggactccgggggctttgccgtggtgttcgacatgggggatggctacaagtctttgtg

SEQ ID NO: 511379 - DNA, 75 bp, synthetic construct
  source 1..75: mol_type = other DNA
aataatcctgaagacgcatggccaattatcactgaaagcaaaatcagcactatgtggatgacagcggaaaaagaa

SEQ ID NO: 511380 - DNA, 75 bp, synthetic construct
  source 1..75: mol_type = other DNA
taaacctagttaacgaagatgggttcttttttcttgatcaatgtcgtgaagttcgcaataacttttcggctgccc

SEQ ID NO: 511381 - DNA, 75 bp, synthetic construct
  source 1..75: mol_type = other DNA
ttccgtagcgattcgctaccacttatttaaagataagacgtccttttcagagtgcaaatttcacaaccacttatt

SEQ ID NO: 511382 - DNA, 75 bp, synthetic construct
  source 1..75: mol_type = other DNA
gttacataaaatacctgaaggactttgatgacaaagttcccaatagcgaagatcctacatacaacaatcctaagg

SEQ ID NO: 511383 - DNA, 75 bp, synthetic construct
  source 1..75: mol_type = other DNA
aaaatgggtctggcaatggaattaattatgctgccgctggtgcaacgattgatggaaggaaagaaaatcgagtaa

SEQ ID NO: 511384 - DNA, 75 bp, synthetic construct
  source 1..75: mol_type = other DNA
gaccaccaccaccagcctcgcgtttcgtaaaatattcgcgcagttaaatctgcatgcatccgaggtggaaggcga

SEQ ID NO: 511385 - DNA, 75 bp, synthetic construct
  source 1..75: mol_type = other DNA
gccgacgacgcgctcaattctgagtgggtaagccacggtgcaatctggaataacccaaccgtacagcaatatcag

SEQ ID NO: 511386 - DNA, 75 bp, synthetic construct
  source 1..75: mol_type = other DNA
aaacttatcaaaaaggccagtccgcgccgttggtcaaaagtcgaggcactgataacacgagctgatggtaaaccc

SEQ ID NO: 511387 - DNA, 75 bp, synthetic construct
  source 1..75: mol_type = other DNA
gttcccgagtcagacccacgccccgcactcaatatcaaccctgtaaatgatttcgacgacgtatccgacgatacg

SEQ ID NO: 511388 - DNA, 75 bp, synthetic construct
  source 1..75: mol_type = other DNA
gactaccagcgcgatgacgatatggcgctgtggagttctgccgacctgaaatattccattacttacgacatgtga

SEQ ID NO: 511389 - DNA, 75 bp, synthetic construct
  source 1..75: mol_type = other DNA
tgtctctggagtacatcatcctgacctttattgccctcaacggcagccggatgtggatcaacagcgcacgcgaaa

SEQ ID NO: 511390 - DNA, 75 bp, synthetic construct
  source 1..75: mol_type = other DNA
cagtcagcatgaagccgagttgaaaattcgctggctgccactgccgaaggcattaacctggttggctgtttgcgt

SEQ ID NO: 511391 - DNA, 75 bp, synthetic construct
  source 1..75: mol_type = other DNA
tgctgtgtattggccttgccagtctggagaagatcagcaactacttctttggcctgatcaacgtcaccttgtttg

SEQ ID NO: 511392 - DNA, 75 bp, synthetic construct
  source 1..75: mol_type = other DNA
tattatgcattcctgcgcctcggtcgtgaaggctataccaaagtacagaacgcctcttaccaggttgccgcttat

SEQ ID NO: 511393 - DNA, 75 bp, synthetic construct
  source 1..75: mol_type = other DNA
cttctcccgcccggcaggtcaggtgattgcacagtactatgaattcctgcgccttggtcgtgaaggctataccaa

SEQ ID NO: 511394 - DNA, 75 bp, synthetic construct
  source 1..75: mol_type = other DNA
atgcctggttcattacgtaaaatgccggtctggttaccaatagtcatattgctcgttgccatggcgtctattcag

SEQ ID NO: 511395 - DNA, 75 bp, synthetic construct
  source 1..75: mol_type = other DNA
ccgaaaccgtcaattttgatcacattcgtcatcactacttccgcagccacaaaaccattaacccgacgggaatta

SEQ ID NO: 511396 - DNA, 75 bp, synthetic construct
  source 1..75: mol_type = other DNA
ccgtgctgtgggacaaaaagaatcacaccattgtcagcaacgaatcagcggaaatcatccgcatgttcaatactg

SEQ ID NO: 511397 - DNA, 75 bp, synthetic construct
  source 1..75: mol_type = other DNA
tcagctttatctccacgccgatccgcactatagcggacgtgtcactgttcccgtgctatgggacaaaaagaacca

SEQ ID NO: 511398 - DNA, 75 bp, synthetic construct
  source 1..75: mol_type = other DNA
acgcctcttaccaggttgccgcttatctggcggatgaaatcgccaaactggggccgtatgagttcatctgtacgg

SEQ ID NO: 511399 - DNA, 75 bp, synthetic construct
  source 1..75: mol_type = other DNA
ttcaacgttgactacctgggtggtcaaattggtacttttgccatcaacttctcccgcccggcgggtcaggtaatt

SEQ ID NO: 511400 - DNA, 75 bp, synthetic construct
  source 1..75: mol_type = other DNA
cgtttatttccgtttccgtagtgaacccgctgatgctggaaaacggctggacctttgatgacagttttccgggag

SEQ ID NO: 511401 - DNA, 75 bp, synthetic construct
  source 1..75: mol_type = other DNA
ttcctgcgcctcggtcgtgaaggctataccaaagtacagaacgcttcctaccaggttgccgcttatctggcggat

SEQ ID NO: 511402 - DNA, 75 bp, synthetic construct
  source 1..75: mol_type = other DNA
cgtacccaacattaaaattgccgccgcgcactcactatccctgagcgtattacccaaactggtgaattcactgac

SEQ ID NO: 511403 - DNA, 75 bp, synthetic construct
  source 1..75: mol_type = other DNA
ggcctggcctgcgctgttcctcatttttgctgtggtgggtggtattcgcgctaacattttcaccccaacagaagc

SEQ ID NO: 511404 - DNA, 75 bp, synthetic construct
  source 1..75: mol_type = other DNA
acgcaaagcccatcattgctggcaattccgttttttatcttgctcggcacactaatgagctacaccggcattgcc

SEQ ID NO: 511405 - DNA, 75 bp, synthetic construct
  source 1..75: mol_type = other DNA
cctcaataagccaacagtggtatatgcgttggctgaaatcatttatcgactttgttcctctcgacccgacgcaac

SEQ ID NO: 511406 - DNA, 75 bp, synthetic construct
  source 1..75: mol_type = other DNA
tgatccggtgcattttggcatcatcatgatcctcaacttatcgttaggaacgttatcaccgcctgtcggaacggt

SEQ ID NO: 511407 - DNA, 75 bp, synthetic construct
  source 1..75: mol_type = other DNA
ctggccaaaaccgaaagaagtgtcagtggcgctggtgcaggcctggccagcactgttcttaattgttgcggttat

SEQ ID NO: 511408 - DNA, 75 bp, synthetic construct
  source 1..75: mol_type = other DNA
acctggccactttctgccagacctgggacgacgaaaacgtccacaagttgatggatttatccattaacaaaaact

SEQ ID NO: 511409 - DNA, 75 bp, synthetic construct
  source 1..75: mol_type = other DNA
tgcacgaaatgcgtgatgatgtcgcattccagattatcaatgacgaattatatcttgatggcaacgctcgtcaga

SEQ ID NO: 511410 - DNA, 75 bp, synthetic construct
  source 1..75: mol_type = other DNA
gtgaaggctataccaaagtacagaacgcttcctaccaggttgctgcttatctggcggatgaaatcgccaaactgg

SEQ ID NO: 511411 - DNA, 75 bp, synthetic construct
  source 1..75: mol_type = other DNA
tctgaacgtctgcgtctgcgcggctggcaggttccggccttcactctcggcggtgaagccaccgacatcgtggtg

SEQ ID NO: 511412 - DNA, 75 bp, synthetic construct
  source 1..75: mol_type = other DNA
ccactaaaatctggattgaaaatctcagcaaagacaaattgatcccgagtctgaaagagagcctgcaaaaattgc

SEQ ID NO: 511413 - DNA, 75 bp, synthetic construct
  source 1..75: mol_type = other DNA
agccgcagtaggtcaggcgattgcagaaagtggcgtgccacgtcatgaactctacatcaccactaaaatctggat

SEQ ID NO: 511414 - DNA, 75 bp, synthetic construct
  source 1..75: mol_type = other DNA
gttggcgcaagcgtatggaagctgcaggcaaaccaacggataaaccaaacctggtgtgcggtccggtacaaatct

SEQ ID NO: 511415 - DNA, 75 bp, synthetic construct
  source 1..75: mol_type = other DNA
tgatcgcttcgctggcgaccttcgctaccgtgtgggtgtggattatgatcctactgtcgcagatagccttccgtc

SEQ ID NO: 511416 - DNA, 75 bp, synthetic construct
  source 1..75: mol_type = other DNA
atggtgatgtcgttacaaatggtgatgtttgcctatggtgggatcgaaattatcgggattaccgccggggaagcg

SEQ ID NO: 511417 - DNA, 75 bp, synthetic construct
  source 1..75: mol_type = other DNA
cggtgctggtgatgactaccgcgctattgtttgcggtatatctgaactacatcatgccggaaaatgtcttcctgg

SEQ ID NO: 511418 - DNA, 75 bp, synthetic construct
  source 1..75: mol_type = other DNA
acctggccactttctgccagacctgggacgacgagaatgtccataaattgatggatttttcaataaagaaaaact

SEQ ID NO: 511419 - DNA, 75 bp, synthetic construct
  source 1..75: mol_type = other DNA
acctggccactttctgccagacctgggacgacgagaaagtccataaattgatggatttttctataaagaaaaact

SEQ ID NO: 511420 - DNA, 75 bp, synthetic construct
  source 1..75: mol_type = other DNA
gtcattatgtctatctacccgtggaatcaggttggcactgccggtagcccgtttgtgctgacgttccagcatatg

SEQ ID NO: 511421 - DNA, 75 bp, synthetic construct
  source 1..75: mol_type = other DNA
acgacctctctgaacgtctgcgtctgcgcggctggcaggttccggccttcactctcggcggtgaagccaccgaca

SEQ ID NO: 511422 - DNA, 75 bp, synthetic construct
  source 1..75: mol_type = other DNA
tgaaatcgccaaactggggccgtatgagttcatctgtacgggtcgcccggacgaaggcatcccggcggtttgctt

SEQ ID NO: 511423 - DNA, 75 bp, synthetic construct
  source 1..75: mol_type = other DNA
gccatcaacttctcccgcccggcgggtcaggtaattgcacagtactatgaattcctgcgcctcggtcgtgaaggc

SEQ ID NO: 511424 - DNA, 75 bp, synthetic construct
  source 1..75: mol_type = other DNA
tgattttcctgctctttattatcgggttgattggttatcacccggatacgcgtatctcgctgtatgtcggtttcg

SEQ ID NO: 511425 - DNA, 75 bp, synthetic construct
  source 1..75: mol_type = other DNA
tggttctcgttctttaaagtcgccaccattatcatcatgattgttgccggtttcggcatcatctgggggattggc

SEQ ID NO: 511426 - DNA, 75 bp, synthetic construct
  source 1..75: mol_type = other DNA
gcacaccgctattgctcaatgcggtaagcaaacattacgcagaaaatatcgttctgaatcaacttgatctacata

SEQ ID NO: 511427 - DNA, 75 bp, synthetic construct
  source 1..75: mol_type = other DNA
acctggccactttctgccagacctgggacgacgagaacgtccataaattgatggatttgtcgataaagaaaaact

SEQ ID NO: 511428 - DNA, 75 bp, synthetic construct
  source 1..75: mol_type = other DNA
gctccgaactactcgattcacgttttggcgcgaagccgatttcgactatcgcagaatcaaaacgatttccgctgc

SEQ ID NO: 511429 - DNA, 75 bp, synthetic construct
  source 1..75: mol_type = other DNA
gctccgaactactcgattcacgttttggcgcaaagccgatttcgactatcgcagaatcaaaacggtttccgctgc

SEQ ID NO: 511430 - DNA, 75 bp, synthetic construct
  source 1..75: mol_type = other DNA
gatccgaactactcgattcacgttttggcgccaagccgatttcgactatcgcagaatcaaaacgctttccgctgc

SEQ ID NO: 511431 - DNA, 75 bp, synthetic construct
  source 1..75: mol_type = other DNA
ggttatctggcgtgatgaagaagcgctgccgcaggaactggtgtttaacgttgactacctcggcggtcagattgg

SEQ ID NO: 511432 - DNA, 75 bp, synthetic construct
  source 1..75: mol_type = other DNA
ggcataaattcgcccgctactgggatgtggagctgcgtgagatccctatgcgccccggtcagttgtttatggacc

SEQ ID NO: 511433 - DNA, 75 bp, synthetic construct
  source 1..75: mol_type = other DNA
tgccgcgtgtgaaatcgatcagtgcttcaggccataaattcggtctggctccgctgggctgcggctgggttatct

SEQ ID NO: 511434 - DNA, 75 bp, synthetic construct
  source 1..75: mol_type = other DNA
gcacagtactatgaattcctgcgcctcggtcgtgaaggctatacaaaagtacagaacgcatccaaccgcacgttc

SEQ ID NO: 511435 - DNA, 75 bp, synthetic construct
  source 1..75: mol_type = other DNA
acctggccactttctgccagacctgggacgacgagaaggtccataaattgatggatttgtccataaagaaaaact

SEQ ID NO: 511436 - DNA, 75 bp, synthetic construct
  source 1..75: mol_type = other DNA
acctggccactttctgccagacctgggacgacgagaaggtccataaattgatggatttctcgataaagaaaaact

SEQ ID NO: 511437 - DNA, 75 bp, synthetic construct
  source 1..75: mol_type = other DNA
gcacagtactatgaattcctgcgcctcggtcgtgaaggctatacaaaagtacagaacgcgtcctatcgcacgttc

SEQ ID NO: 511438 - DNA, 75 bp, synthetic construct
  source 1..75: mol_type = other DNA
gcacagtactatgaattcctgcgcctcggtcgtgaaggctatacaaaagtacagaacgcctcccagcgcacgttc

SEQ ID NO: 511439 - DNA, 75 bp, synthetic construct
  source 1..75: mol_type = other DNA
gcacagtactatgaattcctgcgcctcggtcgtgaaggctatacaaaagtacagaacgcttccgatcgcacgttc

SEQ ID NO: 511440 - DNA, 75 bp, synthetic construct
  source 1..75: mol_type = other DNA
ttttctgcaactggatgcggagttgctccgtgatggtgagcagataagtgatgccatacacaacggcgtctggac

SEQ ID NO: 511441 - DNA, 75 bp, synthetic construct
  source 1..75: mol_type = other DNA
agacctgggacgacgaaaacgtccataaattgatggatttgtcgatcaataaaaactggatcgacaaagaagaat

SEQ ID NO: 511442 - DNA, 75 bp, synthetic construct
  source 1..75: mol_type = other DNA
ggtcggaactactcgattcacgttttggtgctaaggccatttcgactatcgcagaatcaaaacgctttccgctgc

SEQ ID NO: 511443 - DNA, 75 bp, synthetic construct
  source 1..75: mol_type = other DNA
gctccgaactactcgattcacgttttggtgctaaggccatttcgactatcgcagaatcaaaacgctttccgctgc

SEQ ID NO: 511444 - DNA, 75 bp, synthetic construct
  source 1..75: mol_type = other DNA
tccgctcagaactactcgattcacgttttggtgccaagtcaatttctactatcgctgactcaaaacgatttccgc

SEQ ID NO: 511445 - DNA, 75 bp, synthetic construct
  source 1..75: mol_type = other DNA
tccgctcagaactactcgattcacgttttggtgccaagacaatttcgactatcgctgactcaaaacgatttccgc

SEQ ID NO: 511446 - DNA, 75 bp, synthetic construct
  source 1..75: mol_type = other DNA
atggaccagaagctgttaacggatttccgctcagaactactcgattcacgttttggtgcgaagtctatttccact

SEQ ID NO: 511447 - DNA, 75 bp, synthetic construct
  source 1..75: mol_type = other DNA
acctggccactttctgccagacctgggacgacgagaacgtccataaattgatggatttgtcgatgaaaaaaaact

SEQ ID NO: 511448 - DNA, 75 bp, synthetic construct
  source 1..75: mol_type = other DNA
acctggccactttctgccagacctgggacgacgagaacgtccataaattgatggatttctcgatcaaaaaaaact

SEQ ID NO: 511449 - DNA, 75 bp, synthetic construct
  source 1..75: mol_type = other DNA
acctggccactttctgccagacctgggacgacgagaacgtccataaattgatggatttatcgataaaaaaaaact

SEQ ID NO: 511450 - DNA, 75 bp, synthetic construct
  source 1..75: mol_type = other DNA
gttctgaactactcgattcacgttttggtgctaaggccatttcgactatcgcagaatcaaaacgctttccgctgc

SEQ ID NO: 511451 - DNA, 75 bp, synthetic construct
  source 1..75: mol_type = other DNA
gatcagaactactcgattcacgttttggtgctaaggccatttcgactatcgcagaatcaaaacgctttccgctgc

SEQ ID NO: 511452 - DNA, 75 bp, synthetic construct
  source 1..75: mol_type = other DNA
acctggccactttctgccagacctgggacgacgagaaggtccataaattgatggatttctcgatgaaaaaaaact

SEQ ID NO: 511453 - DNA, 75 bp, synthetic construct
  source 1..75: mol_type = other DNA
tccgctcagaactactcgattcacgttttggtgccaagcccatttcgactatcgctgactcaaaacgatttccgc

SEQ ID NO: 511454 - DNA, 75 bp, synthetic construct
  source 1..75: mol_type = other DNA
gattcgcgcgctggaagacatcattcatcatgaaattccatcggaggttgaaattaggcgagtatataccatgca

SEQ ID NO: 511455 - DNA, 75 bp, synthetic construct
  source 1..75: mol_type = other DNA
ttcatacgcgctcaacgcctttctggaataaacaaactgcacctgccggaatattcgaacgtcatcttgataaag

SEQ ID NO: 511456 - DNA, 75 bp, synthetic construct
  source 1..75: mol_type = other DNA
tttctcgacggtaacgcccgtcagaacctggcgactttctgccagacctgggacgacgaaaatgttcataagctg

SEQ ID NO: 511457 - DNA, 75 bp, synthetic construct
  source 1..75: mol_type = other DNA
gcagagcagccactgccagatattcttggtgttctacaggaaaaaacgggcctgacaagacgcagtttatgcacc

SEQ ID NO: 511458 - DNA, 75 bp, synthetic construct
  source 1..75: mol_type = other DNA
gagaacagtggtcacacaattgatgaccatttcgaggagatcctcgatatggtcaaaattggctcaaatgccaaa

SEQ ID NO: 511459 - DNA, 75 bp, synthetic construct
  source 1..75: mol_type = other DNA
tgcggtcgcgcagtttcgtggacagcagattaatagtaattatggagaaggctttgttattcacaaaatgatcct

SEQ ID NO: 511460 - DNA, 75 bp, synthetic construct
  source 1..75: mol_type = other DNA
tccgctcagaactactcgattcacgttttggtgccaaggcgatttcgactatcgctgactcaaaacgatttccgc

SEQ ID NO: 511461 - DNA, 75 bp, synthetic construct
  source 1..75: mol_type = other DNA
tccgctcagaactactcgattcacgttttggtgccaaggccatttccactatcgctgactcaaaacgatttccgc

SEQ ID NO: 511462 - DNA, 75 bp, synthetic construct
  source 1..75: mol_type = other DNA
tccgctcagaactactcgattcacgttttggtgccaaggcaatttcaactatcgctgactcaaaacgatttccgc

SEQ ID NO: 511463 - DNA, 75 bp, synthetic construct
  source 1..75: mol_type = other DNA
atggataagaagcaagtaacggatttaaggtcggaactactcgattcacgttttggcgcgaagtccatttctact

SEQ ID NO: 511464 - DNA, 75 bp, synthetic construct
  source 1..75: mol_type = other DNA
atggataagaagcaagtaacggatttaaggtcggaactactcgattcacgttttggcgccaagtctatttcaact

SEQ ID NO: 511465 - DNA, 75 bp, synthetic construct
  source 1..75: mol_type = other DNA
atggataagaagcaagtaacggatttaaggtcggaactactcgattcacgttttggcgcaaagtctatttccact

SEQ ID NO: 511466 - DNA, 75 bp, synthetic construct
  source 1..75: mol_type = other DNA
acctggccactttctgccagacctgggacgacgagaatgtccataaattgatggatttctcgattaaaaaaaact

SEQ ID NO: 511467 - DNA, 75 bp, synthetic construct
  source 1..75: mol_type = other DNA
atattcctgccgcgccgatgtgcgagaagaaccgggcttatgcgcacaaggtcaaagaggcactggaaaaaggca

SEQ ID NO: 511468 - DNA, 75 bp, synthetic construct
  source 1..75: mol_type = other DNA
acaggatccgccgccgcccaccaggcacgacgtctaaaggtctgggtgcacacactgattctggggcgctggaac

SEQ ID NO: 511469 - DNA, 75 bp, synthetic construct
  source 1..75: mol_type = other DNA
ggcacaaatgcaggcgcgacaaagtgacaatatggcggcggtgcaatctttccttaaccgcctgtggaagtctga

SEQ ID NO: 511470 - DNA, 75 bp, synthetic construct
  source 1..75: mol_type = other DNA
actgtcggtgaaatcatttatgcgccgggcgagtatatgttgattgaccatattgcgccgccaggaatgaaagcc

SEQ ID NO: 511471 - DNA, 75 bp, synthetic construct
  source 1..75: mol_type = other DNA
agccgatcctcaacgttgaagttatccgcaaaaatatggacgagcctcgggagttatggacgtatgattgccgga

SEQ ID NO: 511472 - DNA, 75 bp, synthetic construct
  source 1..75: mol_type = other DNA
aatgtcgacgattacgatccgtgggatgctgcataccgtactgatgttgaagagtacacggtggataacaccaca

SEQ ID NO: 511473 - DNA, 75 bp, synthetic construct
  source 1..75: mol_type = other DNA
cgtttttgccaatgttttcaacggtaattttgatgattatgatccgtgggatgctgcgcatcgtaccgatgtaga

SEQ ID NO: 511474 - DNA, 75 bp, synthetic construct
  source 1..75: mol_type = other DNA
acaaactgggaaggacgctttacgcttgccgacctcaacattcacggtaagcgagcgttgggcatggatgtttga

SEQ ID NO: 511475 - DNA, 75 bp, synthetic construct
  source 1..75: mol_type = other DNA
gttaccaggacagggattattgcatgtggtgccaatcccggaagcgatggcgtatgttttattgcgcccactgct

SEQ ID NO: 511476 - DNA, 75 bp, synthetic construct
  source 1..75: mol_type = other DNA
agattatgaaacaaactggcaaggccgatttacactggaagatctgaacgttcacggtaaacgcgcgctgggcat

SEQ ID NO: 511477 - DNA, 75 bp, synthetic construct
  source 1..75: mol_type = other DNA
agattatgaagcaaactgggaaggccgctttacgctggaggatctgaacgttcacggtaaacgcgcgctgggcat

SEQ ID NO: 511478 - DNA, 75 bp, synthetic construct
  source 1..75: mol_type = other DNA
agaatacaccgtcgataacaccaccaaatgttcggtgttccgcacgttccagggctggacggcactttccgatat

SEQ ID NO: 511479 - DNA, 75 bp, synthetic construct
  source 1..75: mol_type = other DNA
cgggcgagtatatgttgattgaccatattgcgccgccaggaatgaaagccagctatttttccgcccagtctttag

SEQ ID NO: 511480 - DNA, 75 bp, synthetic construct
  source 1..75: mol_type = other DNA
atggtgaagatccgggatacaccctgtacgacctctctgaacgtctgcgtctgcgcggctggcaggttccggcct

SEQ ID NO: 511481 - DNA, 75 bp, synthetic construct
  source 1..75: mol_type = other DNA
aaaggcggtgaagtgattcgcgcgaagctggtgattggtgccgacggcgcaaattcgcaggtgcggcagatggcg

SEQ ID NO: 511482 - DNA, 75 bp, synthetic construct
  source 1..75: mol_type = other DNA
gcaaccaggcccgctgatgtttaccgaccacggcgatatggtttatacactgtttgtcggcatgatcttctgtta

SEQ ID NO: 511483 - DNA, 75 bp, synthetic construct
  source 1..75: mol_type = other DNA
acctggccactttctgccagacctgggacgacgagaaagtccataaattgatggatttctcgataaaaaaaaact

SEQ ID NO: 511484 - DNA, 75 bp, synthetic construct
  source 1..75: mol_type = other DNA
tgcgacgaaaacaccatcggcgtggtgccgaccttcggcgtgacttacaccggtaattatgaattcccgcaaccg

SEQ ID NO: 511485 - DNA, 75 bp, synthetic construct
  source 1..75: mol_type = other DNA
atggataagaagcaagtaatggatttaaggtcggaactactcgattcacgttttggtgcgaagtctatttccact

SEQ ID NO: 511486 - DNA, 75 bp, synthetic construct
  source 1..75: mol_type = other DNA
ccggttatgcaggcacgcaacaatacatggaagcgatgggtgtcccgggctttatgctgccgctggtgatcctgc

SEQ ID NO: 511487 - DNA, 75 bp, synthetic construct
  source 1..75: mol_type = other DNA
tggactataacctgcagtacagccattacaacggcacggtccggaaccagctggcggcagaccaggcgcagcagc

SEQ ID NO: 511488 - DNA, 75 bp, synthetic construct
  source 1..75: mol_type = other DNA
agcctgccgccttcctcgctgtttgtcatcttagcgttggtgatcattgctgcgtgggtgctgatgttaaaagga

SEQ ID NO: 511489 - DNA, 75 bp, synthetic construct
  source 1..75: mol_type = other DNA
tatggggccaatggcggaaagtaattttcgccgtgcgctgtcgctttctggtggttcactcgactttctgtatac

SEQ ID NO: 511490 - DNA, 75 bp, synthetic construct
  source 1..75: mol_type = other DNA
aaagccatgctggcgcatcccgaactggactataacctgcagtacagccattacaacggcacggtccggaaccag

SEQ ID NO: 511491 - DNA, 75 bp, synthetic construct
  source 1..75: mol_type = other DNA
agacggcaacaaagcgggcgctgtacgaagctattctgtatcccggcgtggataattttgtgaaatatttccggc

SEQ ID NO: 511492 - DNA, 75 bp, synthetic construct
  source 1..75: mol_type = other DNA
attgattctttaatgagagccaaggatataatcaaagataatgaaagtttgcagaaggaattttctaataagttt

SEQ ID NO: 511493 - DNA, 75 bp, synthetic construct
  source 1..75: mol_type = other DNA
atttttaatattcagcctgactatgacttaaatgtgatggaaagtgggcaaacattagacgatataacattaaag

SEQ ID NO: 511494 - DNA, 75 bp, synthetic construct
  source 1..75: mol_type = other DNA
tgcgcggcgggcaaagcggcgtcattggtttgatcgtccgtgatttatctgcgccgttttacgccgaattaacgg

SEQ ID NO: 511495 - DNA, 75 bp, synthetic construct
  source 1..75: mol_type = other DNA
gcaggcgctggtgaaagcgatgcccgcctggctgacccacggctttgaagtggctggcggcattctgcctgccgt

SEQ ID NO: 511496 - DNA, 75 bp, synthetic construct
  source 1..75: mol_type = other DNA
tggctggcggtattttacctgccgtcggttttggtctgctgctgcgagtgatgttcaaagcgcaatacatccctt

SEQ ID NO: 511497 - DNA, 75 bp, synthetic construct
  source 1..75: mol_type = other DNA
tcatgcaggcattcatggacatggcaaacgccgagaagaaagaagagcgccgccgtaaaagagcggaagcaaaaa

SEQ ID NO: 511498 - DNA, 75 bp, synthetic construct
  source 1..75: mol_type = other DNA
ggcaggcgcgcaggattgtgtactggcgctggaaaacgaatctaacccgcataacctgggcggcatgatgcgtag

SEQ ID NO: 511499 - DNA, 75 bp, synthetic construct
  source 1..75: mol_type = other DNA
aagttttatcgacccggaagtgttgcgtcgccaacgtgcggaagaaacccgcgtctacggcgaaaacgcgtgcca

SEQ ID NO: 511500 - DNA, 75 bp, synthetic construct
  source 1..75: mol_type = other DNA
ggcgggttacaccgtagtgaccacttccagcgagcagggtaaaccgctgttcaaaaccagtctgccagagaaaat

SEQ ID NO: 511501 - DNA, 75 bp, synthetic construct
  source 1..75: mol_type = other DNA
ggtttggtttattgagagcagggaggcaaagtggcgaaagcggagtggatcgttatttcgagcagcaggtttcgc

SEQ ID NO: 511502 - DNA, 75 bp, synthetic construct
  source 1..75: mol_type = other DNA
gaagattatgatctcaatattagaataatcaaagcgcactcaaaaattattttcataaatgatgaattgactatt

SEQ ID NO: 511503 - DNA, 75 bp, synthetic construct
  source 1..75: mol_type = other DNA
tgatggtactggcaacgttgccgggctgaatatctctgtcgcaaccggcgttcttcttggcgaatggtggcgtca

SEQ ID NO: 511504 - DNA, 75 bp, synthetic construct
  source 1..75: mol_type = other DNA
ctttcgcttcgtcatctactctggcccgtcagattgaagcgggagcgcctgcggatctgtttatctctgccgatc

SEQ ID NO: 511505 - DNA, 75 bp, synthetic construct
  source 1..75: mol_type = other DNA
tacagccagatcttccgccagccggttggtcgccatgtgatccgttattgcgacagcgtggtctgtcacatcaac

SEQ ID NO: 511506 - DNA, 75 bp, synthetic construct
  source 1..75: mol_type = other DNA
tctctgcctggggtatggcaaaagccgggcgttcggctgtggtctgatgttaatcaaacccggagcagaggcgtg

SEQ ID NO: 511507 - DNA, 75 bp, synthetic construct
  source 1..75: mol_type = other DNA
atgtacctctcaagaataaccttacataccggccagctttcgcctgcgcagttgctgcatttggtggatcgcggt

SEQ ID NO: 511508 - DNA, 75 bp, synthetic construct
  source 1..75: mol_type = other DNA
attcagatcacccaaaacctgcaattttttctgtttttcatagtagtaaatttaatcctatgggttggaacaaaa

SEQ ID NO: 511509 - DNA, 75 bp, synthetic construct
  source 1..75: mol_type = other DNA
aaaaggagatgtaaccgcagtgatttgccagatgatcaggcgatactgaatggcgttaaccggatcgctaacggg

SEQ ID NO: 511510 - DNA, 75 bp, synthetic construct
  source 1..75: mol_type = other DNA
cggatcgctatcgggaaagggtggcagtcattaactcaggaggatatacgtaaacacagcgatgatatctatgtg

SEQ ID NO: 511511 - DNA, 75 bp, synthetic construct
  source 1..75: mol_type = other DNA
ctttcgcttcgtcatctactctcgcccgtcagattgaagcgggtgcgcctgcggatctgtttatttctgccgatc

SEQ ID NO: 511512 - DNA, 75 bp, synthetic construct
  source 1..75: mol_type = other DNA
agcaaaggggtaaaagtggtcgccaccttcccggaagattcgcataaaaaagtggaatatccggttgctgttgtg

SEQ ID NO: 511513 - DNA, 75 bp, synthetic construct
  source 1..75: mol_type = other DNA
agaaatggatggattatgcggttgataaaaaagcgatcgatacggctacgcgtcagacactgctcggcaatagcc

SEQ ID NO: 511514 - DNA, 75 bp, synthetic construct
  source 1..75: mol_type = other DNA
tagaagatgttggtgtactggtagcgcgtattttaatgccgattctgtttattacggcaggctggggaaaaatta

SEQ ID NO: 511515 - DNA, 75 bp, synthetic construct
  source 1..75: mol_type = other DNA
taagaaagggatcgatacgactacgcgccagacattactcggcaatagtcttgttgtggtggccccgaaaaccag

SEQ ID NO: 511516 - DNA, 75 bp, synthetic construct
  source 1..75: mol_type = other DNA
tgttgctggcaatgcactggcggacgaagggaaaatcacggtttttgcggcagcatcgctgacgaacgcaatgca

SEQ ID NO: 511517 - DNA, 75 bp, synthetic construct
  source 1..75: mol_type = other DNA
ccgcagtgatgatgattctgataaacgtacccacaacccgcgtaccgggaaagggggcgggcgtccaggaaaatc

SEQ ID NO: 511518 - DNA, 75 bp, synthetic construct
  source 1..75: mol_type = other DNA
aacttcggctaagtcagtttatgaatacgttccaaaagattctgaagtcgaaagtcgtttcgctcaagaactcga

SEQ ID NO: 511519 - DNA, 75 bp, synthetic construct
  source 1..75: mol_type = other DNA
aaaactggtcagtattaacaataagaagaatagcattagcgcgactgttattgttgatatagccgataaaaaagg

SEQ ID NO: 511520 - DNA, 75 bp, synthetic construct
  source 1..75: mol_type = other DNA
aagctcattttgaatcattaactccgttaaatgaaaatccagctaaatatgcatgcgcgataaaatatgaatatt

SEQ ID NO: 511521 - DNA, 75 bp, synthetic construct
  source 1..75: mol_type = other DNA
agcattactgctgaacgctatggacgtatgacagccgtgttcccggacaagctgtgttacgccctgctgtgtgcc

SEQ ID NO: 511522 - DNA, 75 bp, synthetic construct
  source 1..75: mol_type = other DNA
catgaagggcaccaacggtgagccgctgggcatccgcccgaccacccttgtggtggggccgaaaaaccgtgcgga

SEQ ID NO: 511523 - DNA, 75 bp, synthetic construct
  source 1..75: mol_type = other DNA
gaagcgcatcattgacgccatgctggtaaacggcggcgattccaacatctggtacaaggatgtggatatcgtggt

SEQ ID NO: 511524 - DNA, 75 bp, synthetic construct
  source 1..75: mol_type = other DNA
actttatctcactcaaagatcagatgagtaatcctgcgagatatatgcgtgctacaaatataaatgaagttttaa

SEQ ID NO: 511525 - DNA, 75 bp, synthetic construct
  source 1..75: mol_type = other DNA
gtgcatgacggtatgacacttgatgacgaaacggggcgtgatatttatcagggatacaggataagtgagatccgc

SEQ ID NO: 511526 - DNA, 75 bp, synthetic construct
  source 1..75: mol_type = other DNA
acagccatgattttactgtcgagatggaaacagggacaggtaagacgtatgtttatcttcgcaccatgcttgagt

SEQ ID NO: 511527 - DNA, 75 bp, synthetic construct
  source 1..75: mol_type = other DNA
atcagggaagatttctaaaagcttgtcgaaagctctccatgaaaacacatttattctcatggaaaagtatttatc

SEQ ID NO: 511528 - DNA, 75 bp, synthetic construct
  source 1..75: mol_type = other DNA
atttcagtgctttaaaagaagaaaacactaatgcagcaaaatatatcagagcgacaaatcttacagaagtaataa

SEQ ID NO: 511529 - DNA, 75 bp, synthetic construct
  source 1..75: mol_type = other DNA
tatgttcctaaagattctgaagtcgaaagccgtttcgctcaggaactcgaagaacaggatgaagttaagctttat

SEQ ID NO: 511530 - DNA, 75 bp, synthetic construct
  source 1..75: mol_type = other DNA
aatgcagcttaattcattgattaacggtgcgctggactcaatgatgaagcaattccaggtggaagaggagcggaa

SEQ ID NO: 511531 - DNA, 75 bp, synthetic construct
  source 1..75: mol_type = other DNA
ccggcgtcaggaaaagatgcaggctggcagtggtataacgagaaaataaatccgaaggaaaaagaaaataaacca

SEQ ID NO: 511532 - DNA, 75 bp, synthetic construct
  source 1..75: mol_type = other DNA
cggcagaccaggcgcagcagcgacaggccattgcgaaactggctgaacactacggcatcatgttcttttaccggg

SEQ ID NO: 511533 - DNA, 75 bp, synthetic construct
  source 1..75: mol_type = other DNA
gccattctgtatcccggcgtggataattttgtgaaatatttccggctgcagaattactggactcagcaggccggg

SEQ ID NO: 511534 - DNA, 75 bp, synthetic construct
  source 1..75: mol_type = other DNA
acaactgaaattcattgctgacgccttgaatcttcgtcaaatcgatttggctcatgtgtaccagatcgacagaca

SEQ ID NO: 511535 - DNA, 75 bp, synthetic construct
  source 1..75: mol_type = other DNA
cacaactccggcaggttcgtcgcgccatcagagaggcagaacttccgccggcaaaggccagaaagctgctggttc

SEQ ID NO: 511536 - DNA, 75 bp, synthetic construct
  source 1..75: mol_type = other DNA
cagtgttcgcccgttatcatacggctttatttcgctggatgacctggcaaaacaattcctgaacgtttctgaaga

SEQ ID NO: 511537 - DNA, 75 bp, synthetic construct
  source 1..75: mol_type = other DNA
ctggcgggtgtgaacgtgatgacaatggactacggtaacgcgatttgtcagtctgcaaataccgaaggccagaac

SEQ ID NO: 511538 - DNA, 75 bp, synthetic construct
  source 1..75: mol_type = other DNA
agtacggtaacccgactacctgtgaaattgataacggcggcgtcattgttgcggatggtttccaggccagcaaag

SEQ ID NO: 511539 - DNA, 75 bp, synthetic construct
  source 1..75: mol_type = other DNA
gggaaagagaaagagtgcgccagcgtgcgtattcctcaccagcaccatcacgttcacgtgattatggtatgagcc

SEQ ID NO: 511540 - DNA, 75 bp, synthetic construct
  source 1..75: mol_type = other DNA
ggccagggcattcctgggggccagcggcgaggaattccgacgcatggtggaagcacagttacgcacgctgagcta

SEQ ID NO: 511541 - DNA, 75 bp, synthetic construct
  source 1..75: mol_type = other DNA
cccgcgcatttctgggagtcagcaacgctgaatttgcccgcattctggaggcgcaattgcgcagcctgcattacg

SEQ ID NO: 511542 - DNA, 75 bp, synthetic construct
  source 1..75: mol_type = other DNA
tgtctccggaattccacggcctgactaaagaacaggcaccgaagtacgcatttagcgaaatcttcgcgccgttta

SEQ ID NO: 511543 - DNA, 75 bp, synthetic construct
  source 1..75: mol_type = other DNA
gttattcaaaccgggcagcaggtggggatgttaacttttcagcagagttatcagcagcgggtgggggaaggacgt

SEQ ID NO: 511544 - DNA, 75 bp, synthetic construct
  source 1..75: mol_type = other DNA
ttagtgtaaagcataacgtctcggatctacacctgtgcagcgcctggccagcacgatggcgcattcgagggagaa

SEQ ID NO: 511545 - DNA, 75 bp, synthetic construct
  source 1..75: mol_type = other DNA
tcagacagcccggagttccgcacactgtatccggaaaacatctgtatttttggtgttgtcactcacgtgatacac

SEQ ID NO: 511546 - DNA, 75 bp, synthetic construct
  source 1..75: mol_type = other DNA
tggtgctggcaacattacatacgcgtggtgccgcgcaggcagttgagcgactggtggattcatttccggcgcagg

SEQ ID NO: 511547 - DNA, 75 bp, synthetic construct
  source 1..75: mol_type = other DNA
gttattcaaaccgggcaacaagtggggatgttaacttttcagcagagttatcagcagcgggtggaggaagggcgt

SEQ ID NO: 511548 - DNA, 75 bp, synthetic construct
  source 1..75: mol_type = other DNA
cgacggtattaccggaactactcaataacgagaatggactgattctggtgacgggggcgacggggagcggcaaat

SEQ ID NO: 511549 - DNA, 75 bp, synthetic construct
  source 1..75: mol_type = other DNA
attagtaaccggcggttctggccttgcgataggtctggcccggcagtgggcgcaagaaaacggtaaccaggcacg

SEQ ID NO: 511550 - DNA, 75 bp, synthetic construct
  source 1..75: mol_type = other DNA
gcgattggcctggcccgcagtgggcgcaagaaaacggtaaccaggctcgcgaagcagggcatccgctcgctgggc

SEQ ID NO: 511551 - DNA, 75 bp, synthetic construct
  source 1..75: mol_type = other DNA
ttatgcacacgaactggcagagtgggttctgggccaggaaagtgtacttgctccactggtttttgccaccgccag

SEQ ID NO: 511552 - DNA, 75 bp, synthetic construct
  source 1..75: mol_type = other DNA
gcggagacagcatggccgacggcagtctgtacaatggcgatctgctggttgtggacagtgctgaaaagccgcggc

SEQ ID NO: 511553 - DNA, 75 bp, synthetic construct
  source 1..75: mol_type = other DNA
atgacgcggattgccagttcattctttcagcgcggctatgcaaccggttcggctggcaatctgtcgctgctttta

SEQ ID NO: 511554 - DNA, 75 bp, synthetic construct
  source 1..75: mol_type = other DNA
aaatctggcaacttcggtgatgacgctttttttcacgagcccaaagagagtttttatcatgagcgatttcgcaaa

SEQ ID NO: 511555 - DNA, 75 bp, synthetic construct
  source 1..75: mol_type = other DNA
gtagccttgccctgatcatgggttttggcgcaatgctgggcaaaatgctggcagactgcggtggcgcacaacgta

SEQ ID NO: 511556 - DNA, 75 bp, synthetic construct
  source 1..75: mol_type = other DNA
gacgctggaatcggtcacgctgcccgcggatctggtcggctggttggacggtcgttcctcgctggcgcgtctggg

SEQ ID NO: 511557 - DNA, 75 bp, synthetic construct
  source 1..75: mol_type = other DNA
aagcctggctggacgaagggcgactgtcgattaacccgcgtccgccgattgagcgtatcaatggtgccaccgttg

SEQ ID NO: 511558 - DNA, 75 bp, synthetic construct
  source 1..75: mol_type = other DNA
ggcgcgaccttacaaccgccgtgaagatgcgaaatatcgcaaccagcagggcgcggtagccagccgaatcgataa

SEQ ID NO: 511559 - DNA, 75 bp, synthetic construct
  source 1..75: mol_type = other DNA
atacccgcaaggatatattgcatgttacttaggacatgaacgtgctgctgttcccaacagtatattcacttgttt

SEQ ID NO: 511560 - DNA, 75 bp, synthetic construct
  source 1..75: mol_type = other DNA
gatacataaaaaagaatggattataaccacctttcttcaaggaggacagggaaacctttctggagaaataatcaa

SEQ ID NO: 511561 - DNA, 75 bp, synthetic construct
  source 1..75: mol_type = other DNA
gctttgagccgctttccggcccggcggcgcgaccttacaatcgccgtgaagatgcgaaatatcgcaaccagcagg

SEQ ID NO: 511562 - DNA, 75 bp, synthetic construct
  source 1..75: mol_type = other DNA
gtgacccacggcttcctgccaccgcatccgggtccgactgcgattgccaccattttcaatgccgatatgggtaaa

SEQ ID NO: 511563 - DNA, 75 bp, synthetic construct
  source 1..75: mol_type = other DNA
aaagccggtgtcggcgggacgctcggtagccttgccctgatcatgggttttggcgcgatgctgggcaaaatgctg

SEQ ID NO: 511564 - DNA, 75 bp, synthetic construct
  source 1..75: mol_type = other DNA
atgatgctgttgatcatcggtggtggcggtgcgttcaagcaggtgctggtagacagcggcgtggacaaatacatt

SEQ ID NO: 511565 - DNA, 75 bp, synthetic construct
  source 1..75: mol_type = other DNA
taccttccggggccacacggcagcgtttatcgatctgagcggtcctaaagacgaagtgagcgcggcccttgatcg

SEQ ID NO: 511566 - DNA, 75 bp, synthetic construct
  source 1..75: mol_type = other DNA
gcctccatgatgcacgaaaccaatatttccccgctgctgatggcctggtctattgccgccgtactgcgtatcgcg

SEQ ID NO: 511567 - DNA, 75 bp, synthetic construct
  source 1..75: mol_type = other DNA
caatggatcaaattaacgacacgctggtttcttcgatcaaaatcatcgccatgatgctgctaatcatcggtggtg

SEQ ID NO: 511568 - DNA, 75 bp, synthetic construct
  source 1..75: mol_type = other DNA
agggagaagccttgcgcgatgccccactggtaacgggtggttctggtctggcgattggcctggcccggcagtggg

SEQ ID NO: 511569 - DNA, 75 bp, synthetic construct
  source 1..75: mol_type = other DNA
tcgcggcactgatttttggtatcagtggtttccctgtcctgagtggcaactgccgccggtattgcgtgcagttgt

SEQ ID NO: 511570 - DNA, 75 bp, synthetic construct
  source 1..75: mol_type = other DNA
tatccggcgaatatccgcaaggtgatctacacaaccaacgcgatagaatcagtccaccgcaagttcaggaaactg

SEQ ID NO: 511571 - DNA, 75 bp, synthetic construct
  source 1..75: mol_type = other DNA
cactcattacggtcaaatcactcatctacaaagtcgacgtatattccctgcgccaggcctcgtgctgtatggcga

SEQ ID NO: 511572 - DNA, 75 bp, synthetic construct
  source 1..75: mol_type = other DNA
aactgcaaaacggcgcaagaagcggaagcactggcgcggcagggccaacagttgatggcggagattcatgctttg

SEQ ID NO: 511573 - DNA, 75 bp, synthetic construct
  source 1..75: mol_type = other DNA
taaggtacgatgcctttcctcgtttcgaactgattgatatgtacaaattgcatagcttgcaggatatatatgaca

SEQ ID NO: 511574 - DNA, 75 bp, synthetic construct
  source 1..75: mol_type = other DNA
aagttcgtgccgttcatggtcaacttaatgatggcggctttgatagccagcgttatgccattgcccagcatcagc

SEQ ID NO: 511575 - DNA, 75 bp, synthetic construct
  source 1..75: mol_type = other DNA
ggcgttgtctgcctgggatatgcgatatcgctgtcgaaaaaaatcaagcaattacgtaattcgaataaacagtaa

SEQ ID NO: 511576 - DNA, 75 bp, synthetic construct
  source 1..75: mol_type = other DNA
gtataacagtgctgcccgcccgctgacgatgtcagagatggtggtgatgttcggttatgtctaccgccagtcgag

SEQ ID NO: 511577 - DNA, 75 bp, synthetic construct
  source 1..75: mol_type = other DNA
tactgaaggaacacagtgtgatactggcgagggagtttttcctgccggagaaccgccgttatatcccggactttg

SEQ ID NO: 511578 - DNA, 75 bp, synthetic construct
  source 1..75: mol_type = other DNA
cattcgcggtgggcaagtttttctgcctgggtgctggatccactggcaaatgccattaattggtggaatctgctg

SEQ ID NO: 511579 - DNA, 75 bp, synthetic construct
  source 1..75: mol_type = other DNA
cgccgaagctcgggcgtttggcgaactggcgatgacgccgcaatcgcaggcgctgcgtagtatcttttttgccag

SEQ ID NO: 511580 - DNA, 75 bp, synthetic construct
  source 1..75: mol_type = other DNA
ccacatttcctctttctgggctaagtaaattatatcaacaagctaaaaacgatggatgcttaaagcgcggcgatt

SEQ ID NO: 511581 - DNA, 75 bp, synthetic construct
  source 1..75: mol_type = other DNA
atgcccagcaaagtcggcaagtggaactcttttaataaaaaagcatcctacgagtttaataaaagcattggtgct

SEQ ID NO: 511582 - DNA, 75 bp, synthetic construct
  source 1..75: mol_type = other DNA
caccatataaaacaccttcctgttgttggggatatccagattatacagatttcctgttattggggaatgacggaa

SEQ ID NO: 511583 - DNA, 75 bp, synthetic construct
  source 1..75: mol_type = other DNA
aatcgacgcactggtgatcagcctgaaaacgcgctcctgtccggtggttgaagccacacagcaatcgctggcggc

SEQ ID NO: 511584 - DNA, 75 bp, synthetic construct
  source 1..75: mol_type = other DNA
tgtgatatgggtttcatgtatggatcaccagatagtgccggtagtttaggcctgttgctaaggtcgtcgaataat

SEQ ID NO: 511585 - DNA, 75 bp, synthetic construct
  source 1..75: mol_type = other DNA
atgaatatgagatggtttttattatttgtatcgttagtttcagcaggaacatttgcaaaaattgatcctctacaa

SEQ ID NO: 511586 - DNA, 75 bp, synthetic construct
  source 1..75: mol_type = other DNA
aatatggttcccgttttaccccttgcgagcgtttacttgagatgagtgagcatggggaaagtttttggaaaacaa

SEQ ID NO: 511587 - DNA, 75 bp, synthetic construct
  source 1..75: mol_type = other DNA
caactacccggcgacagaacgcattcttgaggttatcgaaacaggattagcgcagggctccagtagcggttatga

SEQ ID NO: 511588 - DNA, 75 bp, synthetic construct
  source 1..75: mol_type = other DNA
tattctggcggggccgttaggtcgtgcgctgctgttcaaaatggtcggcaagaaaacagaacacaaaactcaggg

SEQ ID NO: 511589 - DNA, 75 bp, synthetic construct
  source 1..75: mol_type = other DNA
gattgctgagcggtgcgtgatgttaatgctgaatgaagccgtacgttgtctggacgaacaggttattcgcagcgt

SEQ ID NO: 511590 - DNA, 75 bp, synthetic construct
  source 1..75: mol_type = other DNA
atggcgcttgcctggggggcgggctggaactggcactggcgtgtcatggccgcgtctgcagtgacgatcctaaaa

SEQ ID NO: 511591 - DNA, 75 bp, synthetic construct
  source 1..75: mol_type = other DNA
cgcaggggaccagcagtggctatgacgccgaagctcgggcgtttggtgaactggcgatgacgccgcaatcgcagg

SEQ ID NO: 511592 - DNA, 75 bp, synthetic construct
  source 1..75: mol_type = other DNA
ggaaaatgtgctgcaatactacagagaaaaccaccagcagccaaatatagcaggatcacgaaatctcacggataa

SEQ ID NO: 511593 - DNA, 75 bp, synthetic construct
  source 1..75: mol_type = other DNA
caatactaatttcactggtacagaaggttctaatattctatttaaccatgcatggttgttcaatacgatatttat

SEQ ID NO: 511594 - DNA, 75 bp, synthetic construct
  source 1..75: mol_type = other DNA
gataacaataacgagactgaaactatctcgttgacaaacttacaatgggaaaatgtgctgcaatactatagagaa

SEQ ID NO: 511595 - DNA, 75 bp, synthetic construct
  source 1..75: mol_type = other DNA
accgcactgtttaccgctggctttacactgttgacggcatttttatttcacagcaactttgccgaaggcatgaac

SEQ ID NO: 511596 - DNA, 75 bp, synthetic construct
  source 1..75: mol_type = other DNA
ggcagcggtagaagggcagaaggcagatctggagcagaaaattaacgctgttgcatcggaagcggattctcttta

SEQ ID NO: 511597 - DNA, 75 bp, synthetic construct
  source 1..75: mol_type = other DNA
gtaacagttttaatcaagcccgtttaaagaaagaagtgaatagcagtttttccattccgggtttaacgtcttatc

SEQ ID NO: 511598 - DNA, 75 bp, synthetic construct
  source 1..75: mol_type = other DNA
aataatatttctgtctacgtattgcctaccttagtcagacaaatcaatcccattaaagatttccaatcaatccta

SEQ ID NO: 511599 - DNA, 75 bp, synthetic construct
  source 1..75: mol_type = other DNA
gaataaactatactttgataagttaaataataaaacaatagtggtaattatcgcaatgttgctatatatgttatg

SEQ ID NO: 511600 - DNA, 75 bp, synthetic construct
  source 1..75: mol_type = other DNA
acagcaaaacctgaaaccgcaatggacgccgttcttacaggatatggagaagaagctgggcgtgaaggtcaacgc

SEQ ID NO: 511601 - DNA, 75 bp, synthetic construct
  source 1..75: mol_type = other DNA
caaaagaaatggtttaaatgagtttgaaattaacgatctaaaaataatatttaatcgacaagatgataatgaaag

SEQ ID NO: 511602 - DNA, 75 bp, synthetic construct
  source 1..75: mol_type = other DNA
aagctgatgaaatcggtggggcacaaattcatgtaagagaccttgctcgtcgtttacacaatgatggtaataaag

SEQ ID NO: 511603 - DNA, 75 bp, synthetic construct
  source 1..75: mol_type = other DNA
cctgaaattgaaatggtttgtgataataaaaaaattgaatcttatcctacaatcaagctcatatcagttgctcgt

SEQ ID NO: 511604 - DNA, 75 bp, synthetic construct
  source 1..75: mol_type = other DNA
tatattcaacagcatgatgaaagaaatctggcaaaaaagattataatgaattggatgataaaggggctttgttcg

SEQ ID NO: 511605 - DNA, 75 bp, synthetic construct
  source 1..75: mol_type = other DNA
taatgcaaacttttcgaatgcaaaattctacaatactaattgtactggtgcaaattgttcgaatatcctatttga

SEQ ID NO: 511606 - DNA, 75 bp, synthetic construct
  source 1..75: mol_type = other DNA
tttaatcaagcccgtttaaaagaagttgtaaatataagattttccattccgggtttaacgtcttatcagccaacg

SEQ ID NO: 511607 - DNA, 75 bp, synthetic construct
  source 1..75: mol_type = other DNA
acaaaagaatttataaaaagcatcaatttattaattgaaaaaatagactcatactttaagaaaattaatgaatct

SEQ ID NO: 511608 - DNA, 75 bp, synthetic construct
  source 1..75: mol_type = other DNA
aaaaatatataccacagtacttaggtaaagagtctaaaaataataagagtgcaagttataaactagaatatttgt

SEQ ID NO: 511609 - DNA, 75 bp, synthetic construct
  source 1..75: mol_type = other DNA
acacggataaaatgattcgctacatctccgacctcctgattgaaggaaacggattcggtgacatccataactcaa

SEQ ID NO: 511610 - DNA, 75 bp, synthetic construct
  source 1..75: mol_type = other DNA
atgttatgtattaaattcgaatatttgacagataaaatgattaagcatgtatcagacttgctcatcaaagaagat

SEQ ID NO: 511611 - DNA, 75 bp, synthetic construct
  source 1..75: mol_type = other DNA
atggaacagttcaatatcaataaaggggtgacgattaagccggggcttgacgtgcttcccccgccggtgactgat

SEQ ID NO: 511612 - DNA, 75 bp, synthetic construct
  source 1..75: mol_type = other DNA
gacaataactggtgggcactcacgcgcgttgacggatcgccttgccagtatcaaaaatcgcatgcatatggacgg

SEQ ID NO: 511613 - DNA, 75 bp, synthetic construct
  source 1..75: mol_type = other DNA
atggaacagttcaatatcaataaaggggtgacgatcaagcctgggcttgacgtgcttcccccgccagtgactgat

SEQ ID NO: 511614 - DNA, 75 bp, synthetic construct
  source 1..75: mol_type = other DNA
tcagtattcgagcactgggggcttggtactgacgggtacatctatctgatcgatatgattcgcggtaaatgggag

SEQ ID NO: 511615 - DNA, 75 bp, synthetic construct
  source 1..75: mol_type = other DNA
ttgatgacctgcgatacactcttcaggaaaaatcctacgaggcttgtgctgctgaattaattcctgatgaggaag

SEQ ID NO: 511616 - DNA, 75 bp, synthetic construct
  source 1..75: mol_type = other DNA
gctgaagattacagaaagaaagctagaaatagtcgtattttggctggattgtttggtgttatagctattgttgct

SEQ ID NO: 511617 - DNA, 75 bp, synthetic construct
  source 1..75: mol_type = other DNA
gaagacgaaatatgcctgttttatttatatagaaagaacaatatacaatcacgataatccacctgatgaaacacc

SEQ ID NO: 511618 - DNA, 75 bp, synthetic construct
  source 1..75: mol_type = other DNA
atggataagaagcaagtaacggatttaaggtcggaactactcgattcacgttttggggctaagtcaatttcaact

SEQ ID NO: 511619 - DNA, 75 bp, synthetic construct
  source 1..75: mol_type = other DNA
atggataagaagcaagtaacggatttaaggtcggaactactcgattcacgttttggtgctaagtctatttcgact

SEQ ID NO: 511620 - DNA, 75 bp, synthetic construct
  source 1..75: mol_type = other DNA
atggataagaagcaagtaacggatttaaggtcggaactactcgattcacgttttggagctaagtcaatttcgact

SEQ ID NO: 511621 - DNA, 75 bp, synthetic construct
  source 1..75: mol_type = other DNA
gctccgctgggctgcggctgggttatctggcgtgatgaagaagcgctgccgcaggaactggtgttcaacgttgac

SEQ ID NO: 511622 - DNA, 75 bp, synthetic construct
  source 1..75: mol_type = other DNA
atggataagaagcaagtaacggatttaaggtcggaactactcgattcacgttttggggctaagtcgatttcgact

SEQ ID NO: 511623 - DNA, 75 bp, synthetic construct
  source 1..75: mol_type = other DNA
atggataagaagcaagtaacggatttaaggtcggaactactcgattcacgttttggggctaagtccatttccact

SEQ ID NO: 511624 - DNA, 75 bp, synthetic construct
  source 1..75: mol_type = other DNA
cctcagttgttgtaatggaagcctgtgcgggtgcacactttatggctcgctgtatctctgattttgggcatgaaa

SEQ ID NO: 511625 - DNA, 75 bp, synthetic construct
  source 1..75: mol_type = other DNA
ttaaagcatgggaattctgagtatccatttgcgactttggaattagaatcggtcaagcggaagttcaatggagtt

SEQ ID NO: 511626 - DNA, 75 bp, synthetic construct
  source 1..75: mol_type = other DNA
ttgctaacttacatggaaaatggctaaaaaatcgcattgctgttggcgcacgtgctaatggcgcactgcaagtca

SEQ ID NO: 511627 - DNA, 75 bp, synthetic construct
  source 1..75: mol_type = other DNA
caacaagaagcattcgaatgtggttacctgcgctctggcaaataaactggctcgaattgcctgggcaatcactac

SEQ ID NO: 511628 - DNA, 75 bp, synthetic construct
  source 1..75: mol_type = other DNA
ttgtcgcctgcgctctggcaaataaactggcccgaatagcctgggcaatcactgttctgcaaaaagaatatcagg

SEQ ID NO: 511629 - DNA, 75 bp, synthetic construct
  source 1..75: mol_type = other DNA
tcaaaagtaataagaatgattttgttgatgcagaagccatatgcgaagcggcttcacgaccatcaatgcgttttg

SEQ ID NO: 511630 - DNA, 75 bp, synthetic construct
  source 1..75: mol_type = other DNA
gctgttctcagtaactgcgccacaagaatcgtacttcctgcaccggagaaattcggttctgagtcattgccggac

SEQ ID NO: 511631 - DNA, 75 bp, synthetic construct
  source 1..75: mol_type = other DNA
tggaagcgcctgtggaaccgcaatcgacacaactggctgtgtctgacgctgccgcggttacgcttcctgcaacgg

SEQ ID NO: 511632 - DNA, 75 bp, synthetic construct
  source 1..75: mol_type = other DNA
cccatgtgctggcgctaatttgcagcgccgggctatgtgccgcttccggtacgttgtatgtgaaaagtcgcacgg

SEQ ID NO: 511633 - DNA, 75 bp, synthetic construct
  source 1..75: mol_type = other DNA
cccgccagcgtgttcaatcaacatcacctgaacaacgtcaggttttcgggagaaagttcaggagagccgcccaca

SEQ ID NO: 511634 - DNA, 75 bp, synthetic construct
  source 1..75: mol_type = other DNA
ggttggaaaagggtatgactttgacagtgtcaatggcaaggtgcatgttcgcgaacataaacgacactaccgtcg

SEQ ID NO: 511635 - DNA, 75 bp, synthetic construct
  source 1..75: mol_type = other DNA
cgccggtttgtacgcgcagcgccttgctgagcatggctatattactgttaccgccgatgcagcttatcagggggc

SEQ ID NO: 511636 - DNA, 75 bp, synthetic construct
  source 1..75: mol_type = other DNA
aaaaggacgccgctcgccagcgttatcagtctgcctcacctgagcagcgccaggcggcccgcgagaaaatgcaga

SEQ ID NO: 511637 - DNA, 75 bp, synthetic construct
  source 1..75: mol_type = other DNA
gctttcacaagtgttaatggcatcaacctatccgacaaacgttgcgcaagcagtgcaatggtcgcacgataatcc

SEQ ID NO: 511638 - DNA, 75 bp, synthetic construct
  source 1..75: mol_type = other DNA
gattcggctatagcatgggcgttgctaccacgtacgcactattcagcagcatcgactgggatgacgacgatcatg

SEQ ID NO: 511639 - DNA, 75 bp, synthetic construct
  source 1..75: mol_type = other DNA
gaatcgtacttcctgcactgaaggaattcggttctgaatcattgccgcacaattttaatatggcagctgtcggtg

SEQ ID NO: 511640 - DNA, 75 bp, synthetic construct
  source 1..75: mol_type = other DNA
ccgcattcagcactgcacaaatagatcaatgggtcgcgcccgtcgcgctgtatcccgacgccctactttcgcagg

SEQ ID NO: 511641 - DNA, 75 bp, synthetic construct
  source 1..75: mol_type = other DNA
agcagcgaagagaggcggcgcgtcagcgtattcagtccgcgtcacccgaacagcgccaggcggtacgcgagaaaa

SEQ ID NO: 511642 - DNA, 75 bp, synthetic construct
  source 1..75: mol_type = other DNA
cattacggcaacgaagaaagctgtaccggtaaaacaggctgtcacggctcccgtcatacaatccaataccgtttc

SEQ ID NO: 511643 - DNA, 75 bp, synthetic construct
  source 1..75: mol_type = other DNA
gcaactggtcagctggttggcgtgaatccggcgctgctggtgctggcgacggctgcgggttccaacaccctcacc

SEQ ID NO: 511644 - DNA, 75 bp, synthetic construct
  source 1..75: mol_type = other DNA
gcaaccggtcaattggttggtgtaaatccggcgctgctggttctggcaactgccgcgggttccaacaccctcacc

SEQ ID NO: 511645 - DNA, 75 bp, synthetic construct
  source 1..75: mol_type = other DNA
ccgctggtgatcgtgattgcagccgaagctaaaatcccgttcctgaaactggctattccggcagtagcggctgcc

SEQ ID NO: 511646 - DNA, 75 bp, synthetic construct
  source 1..75: mol_type = other DNA
cccggcactgtcaggcctgattaccacgatggttacgcagggctatgagtatcgtcgtgatgacgatatggcgtt

SEQ ID NO: 511647 - DNA, 75 bp, synthetic construct
  source 1..75: mol_type = other DNA
tctgacggatgcagagtataccggtgaagagctggatgcagatacctggcgggccacactgcatattgaagtgtt

SEQ ID NO: 511648 - DNA, 75 bp, synthetic construct
  source 1..75: mol_type = other DNA
tgacaatcccaagcgtaatctgcgcaggcctgattctgccgaagttcctcggtaatcttgagcgcccaacgccat

SEQ ID NO: 511649 - DNA, 75 bp, synthetic construct
  source 1..75: mol_type = other DNA
gaagagctggatgcagatacctggcgggccacactgcatattgaggtgtttttaccggcgcaggtgccggattca

SEQ ID NO: 511650 - DNA, 75 bp, synthetic construct
  source 1..75: mol_type = other DNA
gtggtcatgacatgcagtgggtgatgaacgcttttgaaagcgcggtgaagagtattgcaatggtgattctgatca

SEQ ID NO: 511651 - DNA, 75 bp, synthetic construct
  source 1..75: mol_type = other DNA
gaccatcatcgacaccggcattggtgacaccatcggcatgttgatgtcgcatggtaatatttcgccgtatatcat

SEQ ID NO: 511652 - DNA, 75 bp, synthetic construct
  source 1..75: mol_type = other DNA
ggcatggctgatcaccgtactgattcgtctggcgacgggtcagggtgtggtttcagcgatgaccgccgccgggat

SEQ ID NO: 511653 - DNA, 75 bp, synthetic construct
  source 1..75: mol_type = other DNA
gagcttgatcagtggatggaaagccggatttatccggcgatgaatgcgatcccggcactggctggactgattacc

SEQ ID NO: 511654 - DNA, 75 bp, synthetic construct
  source 1..75: mol_type = other DNA
cgcctttaacctgcgtagtctgaaatccgtagcgaacttcaacaccgtcatcgtggtgttgcaggtagtgctgat

SEQ ID NO: 511655 - DNA, 75 bp, synthetic construct
  source 1..75: mol_type = other DNA
attaacttcgacctggtgatggcaacggcgctgattaacttcggtgcgctggtggcgttcaccttcgtgaacctg

SEQ ID NO: 511656 - DNA, 75 bp, synthetic construct
  source 1..75: mol_type = other DNA
agtatggtggccagtggctatgactaccgacgcgacgatgatgcgggcctgtggagttcagccgatctgacgtat

SEQ ID NO: 511657 - DNA, 75 bp, synthetic construct
  source 1..75: mol_type = other DNA
gggccacactgcatattgaggtgtttttaccggcacaggtaccggattcagagcttgatctgtggatggaaagcc

SEQ ID NO: 511658 - DNA, 75 bp, synthetic construct
  source 1..75: mol_type = other DNA
atcggtctgatttacctggcttgcgtcaccaagagtttccgtaacccggttccgcagtacgaagacgtagcgtaa

SEQ ID NO: 511659 - DNA, 75 bp, synthetic construct
  source 1..75: mol_type = other DNA
ttctccacctatttcctgcagctctacttcccggatatctctcgcttcaaagatccggacgcctcacagcctgaa

SEQ ID NO: 511660 - DNA, 75 bp, synthetic construct
  source 1..75: mol_type = other DNA
agccgcgatcgtggtgatttacgccagagcaatggtgaaaccgcgccgaatgacgaggctatcaacaacatgctg

SEQ ID NO: 511661 - DNA, 75 bp, synthetic construct
  source 1..75: mol_type = other DNA
tgcgttggagtttgttgtctctggctatttccgccaccttgccgatgagtgcttttgccactgaaacaatgaccg

SEQ ID NO: 511662 - DNA, 75 bp, synthetic construct
  source 1..75: mol_type = other DNA
ggctacaaagatgttgatgccgacaaatggtcatctcgtgcggggatgactatcaacccgactaactggctgatg

SEQ ID NO: 511663 - DNA, 75 bp, synthetic construct
  source 1..75: mol_type = other DNA
ttccttcgaagcgccaatgatggtcagcgttatcgacacttccgcccctgaaaaccaaacggccacttcagccac

SEQ ID NO: 511664 - DNA, 75 bp, synthetic construct
  source 1..75: mol_type = other DNA
cccattgcccatagtggcttctctgtcggttgggtcggtacgtttgccgatcgctcaacacatgtcagcagcagt

SEQ ID NO: 511665 - DNA, 75 bp, synthetic construct
  source 1..75: mol_type = other DNA
gaagtccgtattaatgcgcaaaacacggggagttccagcgaatatcgggaacagacgacaaaaggcggtaagctg

SEQ ID NO: 511666 - DNA, 75 bp, synthetic construct
  source 1..75: mol_type = other DNA
atgcattttttcctgcaaggaatgacacttaaacagttgattcatatgctaatcatcctgatcatattgattatt

SEQ ID NO: 511667 - DNA, 75 bp, synthetic construct
  source 1..75: mol_type = other DNA
ctgccgatcaaactggcgattgttggtcgtccaaacgtcggtaagtctacactcactaaccgtatcctgggtgaa

SEQ ID NO: 511668 - DNA, 75 bp, synthetic construct
  source 1..75: mol_type = other DNA
gaataaaactgacggactggatccggatcaagcaatcgttgatttttattcacttggtttaggtgaaatctaccc

SEQ ID NO: 511669 - DNA, 75 bp, synthetic construct
  source 1..75: mol_type = other DNA
ttagcattatcgtgcgttatttcttcgcttcaggtagtgcctatattgttgctatgttgccggtatttgccatgt

SEQ ID NO: 511670 - DNA, 75 bp, synthetic construct
  source 1..75: mol_type = other DNA
cattttatctctgcattacacggcagcggcgttggtaacctgtttgagtcagtacgtgaagcgtatgacagttcc

SEQ ID NO: 511671 - DNA, 75 bp, synthetic construct
  source 1..75: mol_type = other DNA
acccgtcgtgtgggaacgtctatgctgacacgtattatgaccatggcagttgaagatcaccagccgccgctggta

SEQ ID NO: 511672 - DNA, 75 bp, synthetic construct
  source 1..75: mol_type = other DNA
gagtttatctgtattgataccggcgggattgacggtacagaagacggtgtagaaactcgcatggcggaacagtcg

SEQ ID NO: 511673 - DNA, 75 bp, synthetic construct
  source 1..75: mol_type = other DNA
catggttactcactatggcggcgcggcaggtccggtcatctttggcgtgggttacaacgatattaaatcctggtg

SEQ ID NO: 511674 - DNA, 75 bp, synthetic construct
  source 1..75: mol_type = other DNA
gcaggattaagcgaactggcgtgggtgctttttggtatttacctggcggccattgtggggctggttatcaagcct

SEQ ID NO: 511675 - DNA, 75 bp, synthetic construct
  source 1..75: mol_type = other DNA
gtggcggatgcgcggcgatattcgtgaaattctggcggcgctggaaagcgttggtgaaaccaaatgtatttgtcg

SEQ ID NO: 511676 - DNA, 75 bp, synthetic construct
  source 1..75: mol_type = other DNA
aggtattatcggtttaagctcattattatcgaaagtgaaattcttcgaatggttggctgaagtctttaaaaataa

SEQ ID NO: 511677 - DNA, 75 bp, synthetic construct
  source 1..75: mol_type = other DNA
gccgccggattgccgggcatcattatgctgctggtcaccccgctggtgatttacaccatgtatccaccagaaatt

SEQ ID NO: 511678 - DNA, 75 bp, synthetic construct
  source 1..75: mol_type = other DNA
gtactgacgatattaactttcctggtacatatcaccctcggtgtatggtggtggaatatgctgatcggctggaac

SEQ ID NO: 511679 - DNA, 75 bp, synthetic construct
  source 1..75: mol_type = other DNA
gtggtgttggtaacttgtttgaatcagtacgtgaagcgtatgacagctccaccgtcgtgtggggacctctatgct

SEQ ID NO: 511680 - DNA, 75 bp, synthetic construct
  source 1..75: mol_type = other DNA
acgcgtgctcgcctggctgcatatttccttacatcattcattgttggagtgcttggcgccgggtttgttggttca

SEQ ID NO: 511681 - DNA, 75 bp, synthetic construct
  source 1..75: mol_type = other DNA
gtaaacagccaggatctcggtagcatctttggaatgctttcccgcttacgtggagggggttcaaatggtaagcag

SEQ ID NO: 511682 - DNA, 75 bp, synthetic construct
  source 1..75: mol_type = other DNA
ctcgaagaaattaagtgaaggtacgctgttaagtctcgataaccaaatcgacgccaccactggcaccatcaaagt

SEQ ID NO: 511683 - DNA, 75 bp, synthetic construct
  source 1..75: mol_type = other DNA
acccgtagagcaaggatctccggggcaaaaaacggcggctctccttgcatttatcctttcatatggcaatgagcc

SEQ ID NO: 511684 - DNA, 75 bp, synthetic construct
  source 1..75: mol_type = other DNA
cggcaattcatatgtacagatcaatgtcattccgtttggaaacaagattacggttgaggaagaattccgtaacct

SEQ ID NO: 511685 - DNA, 75 bp, synthetic construct
  source 1..75: mol_type = other DNA
cgtcttaagctggtaggctacttcatcacctcattcatcttcggcgttatcggcgctccactgcttggctcttac

SEQ ID NO: 511686 - DNA, 75 bp, synthetic construct
  source 1..75: mol_type = other DNA
tagcgcctgttcaggcagcgactgccgtggaacaggcggttccgcgttatctcaccgggcttggcaccatcaccg

SEQ ID NO: 511687 - DNA, 75 bp, synthetic construct
  source 1..75: mol_type = other DNA
atggagtaaacttggctgaaaggtcaatagtgctcccgatttttgaatataaaaatataacccaatcgcaaaaca

SEQ ID NO: 511688 - DNA, 75 bp, synthetic construct
  source 1..75: mol_type = other DNA
aaacaaaactgatggtttagatccagaccaggcagtcgttgatttctattcgctcggtttaggcgaaatctaccc

SEQ ID NO: 511689 - DNA, 75 bp, synthetic construct
  source 1..75: mol_type = other DNA
actcgactggagccggattactgcgccagtcgatggtcgcgttggcctgaagcaggttgatgtcggtaaccaaat

SEQ ID NO: 511690 - DNA, 75 bp, synthetic construct
  source 1..75: mol_type = other DNA
agcacaagcccagggccaactggcaaaagataaagccacgcttgccaacgcccgccgtgacctggcgcgttatca

SEQ ID NO: 511691 - DNA, 75 bp, synthetic construct
  source 1..75: mol_type = other DNA
aggaagagaaactcttaacgatgaaaggcagttataaatcccgttgggtaatcgtaatcgtggtggttatcgccg

SEQ ID NO: 511692 - DNA, 75 bp, synthetic construct
  source 1..75: mol_type = other DNA
ggatgcggaacgtatggaagggaccgcaggggggaacagcgtttccaccctgatgcagaatgccggcgtcaagat

SEQ ID NO: 511693 - DNA, 75 bp, synthetic construct
  source 1..75: mol_type = other DNA
accgaaacctacggccacatttttgctcaggatgccggtgatatcgatctgcgggacagtattcatagtgaccgt

SEQ ID NO: 511694 - DNA, 75 bp, synthetic construct
  source 1..75: mol_type = other DNA
agggcggggatgccagtgccagcgactggtaaaagtggttgatatcgatgagcaaatttacgcgcgcctgccaat

SEQ ID NO: 511695 - DNA, 75 bp, synthetic construct
  source 1..75: mol_type = other DNA
tactgttaccggtcgctgaaaataataaatcgcagacaataaataatgatcatccccagaaatcatgtggagcac

SEQ ID NO: 511696 - DNA, 75 bp, synthetic construct
  source 1..75: mol_type = other DNA
cgaattgaagggcagacctccgccaccaacaccgccacactgatgcagaacgccggcaccaaattcgccggacgc

SEQ ID NO: 511697 - DNA, 75 bp, synthetic construct
  source 1..75: mol_type = other DNA
tgccggtactgacgctggcgcgacgccctcagcagacgaggcctcatccggtgaggaccacgacgaactcttcga

SEQ ID NO: 511698 - DNA, 75 bp, synthetic construct
  source 1..75: mol_type = other DNA
attatgcaaataaacaccggagcgtggcttaatcttataagtcattcatttttcgatggtaataatgaaaaggca

SEQ ID NO: 511699 - DNA, 75 bp, synthetic construct
  source 1..75: mol_type = other DNA
caccacttcccgttgtgcctcttaaaactggtcctgatggccggggttatgttctctgtggcattggaagtgagg

SEQ ID NO: 511700 - DNA, 75 bp, synthetic construct
  source 1..75: mol_type = other DNA
cggcagcgatgccgaaaaactgattatgttcgaaatcatcaacacccgttacgaaaagcttaagccgacgatcct

SEQ ID NO: 511701 - DNA, 75 bp, synthetic construct
  source 1..75: mol_type = other DNA
ctgaggaagacgccgcgtattccagccgttccgcttacggagctgaatcgcgagcagaagtggcagatgatgttg

SEQ ID NO: 511702 - DNA, 75 bp, synthetic construct
  source 1..75: mol_type = other DNA
atgtgtgaaggatatgttgaaaaaccactctatttgttaatcgccgaatggatgatggctgaaaaccggtgggtg

SEQ ID NO: 511703 - DNA, 75 bp, synthetic construct
  source 1..75: mol_type = other DNA
gaagttgctgaaattagctgcgaagtgaaaatgatccccaataagttggaggggcgagggtgccagtgtcagcgc

SEQ ID NO: 511704 - DNA, 75 bp, synthetic construct
  source 1..75: mol_type = other DNA
ttcatcctggcgagttcttttctattttccggggagaaaccgtaccatcagcatcattcttcatccctgacgatg

SEQ ID NO: 511705 - DNA, 75 bp, synthetic construct
  source 1..75: mol_type = other DNA
agcttcagatgttctttattcgtctttcggtaaaaatgtattaataccattgcaattaaaagacgattctaaccg

SEQ ID NO: 511706 - DNA, 75 bp, synthetic construct
  source 1..75: mol_type = other DNA
cgacgtgatgccggaggaagagtccgcggagatgggggcgctttcgggcagccagttgtcactggtggtgttttc

SEQ ID NO: 511707 - DNA, 75 bp, synthetic construct
  source 1..75: mol_type = other DNA
cggtccggcgcaacgtccggcggggttagacctgaaaaactgcgccatgaagatgacgcgtaataacgaagaggt

SEQ ID NO: 511708 - DNA, 75 bp, synthetic construct
  source 1..75: mol_type = other DNA
tgcctgtgaaggatgtgtgaggtttattgatataccctgtcatatcatcagcgactatctgtatatcagactgag

SEQ ID NO: 511709 - DNA, 75 bp, synthetic construct
  source 1..75: mol_type = other DNA
caccggcctttagtattgtgtcatggatagctctcgttggtggtatcgttacctatctgttagggctatggaatg

SEQ ID NO: 511710 - DNA, 75 bp, synthetic construct
  source 1..75: mol_type = other DNA
cattatttacatttctaaaggaaaaagagcagaaaggtcaactattcaataaagaggctatactcacagccaccg

SEQ ID NO: 511711 - DNA, 75 bp, synthetic construct
  source 1..75: mol_type = other DNA
aaagttgcaggaagtaatgaagagcgagcttgaaaaacacaacgtcaagcccactccggtatatttacgatgggt

SEQ ID NO: 511712 - DNA, 75 bp, synthetic construct
  source 1..75: mol_type = other DNA
atggaatttatagatttaccaacgccattacaggaaatggcatcgaatatagttcgttcacaactggctactctt

SEQ ID NO: 511713 - DNA, 75 bp, synthetic construct
  source 1..75: mol_type = other DNA
ttttggctgtcacatagcaccgcagtttctccagtcatgccagagaaaccaaaagcaattacccctgtattattg

SEQ ID NO: 511714 - DNA, 75 bp, synthetic construct
  source 1..75: mol_type = other DNA
tggcggcggatttacgccgcgccgcagagcagggcgaagcgattgcgccgctgcgcgatctgattggtatcgaaa

SEQ ID NO: 511715 - DNA, 75 bp, synthetic construct
  source 1..75: mol_type = other DNA
gtgtggatcactattgcaccgttcgtgacacctgtggatagcaaactggaacgaaacacgctcactgctcttctg

SEQ ID NO: 511716 - DNA, 75 bp, synthetic construct
  source 1..75: mol_type = other DNA
gcctgaaattgcaattttccctgccagacagtattaccgtatttggcgatcgcgatcgtttaatgcagttgttca

SEQ ID NO: 511717 - DNA, 75 bp, synthetic construct
  source 1..75: mol_type = other DNA
gcgccgttaagtggaacggaaacaaccctgcctgcgccaccgcgcggcgtcgtgcagcgacgtttaacctttacc

SEQ ID NO: 511718 - DNA, 75 bp, synthetic construct
  source 1..75: mol_type = other DNA
tccaggttctaacaatctggggacgttgtgcgtaccaatggatgcgcaaattctaatcaatgatggacaacatcg

SEQ ID NO: 511719 - DNA, 75 bp, synthetic construct
  source 1..75: mol_type = other DNA
gcacagcgcacgctaaataaatcgcgcattcccgagatggtacgttatttgttggaaaaccctaaagattatgtg

SEQ ID NO: 511720 - DNA, 75 bp, synthetic construct
  source 1..75: mol_type = other DNA
gcagaaacaatccggatcttatcaaacgtgcgatgcagcacggcaagttgagcaaaaccagtacggcgatccagc

SEQ ID NO: 511721 - DNA, 75 bp, synthetic construct
  source 1..75: mol_type = other DNA
gaagcctggttggcgcttaaacgtacggatataaggagtccggttactggctatattgcccagcggagtgttcag

SEQ ID NO: 511722 - DNA, 75 bp, synthetic construct
  source 1..75: mol_type = other DNA
ttgcctttttatgccagacaagggacaaactttgtcgttaacggcagtttgattctggcgtttttttatttggtg

SEQ ID NO: 511723 - DNA, 75 bp, synthetic construct
  source 1..75: mol_type = other DNA
gacgctcgcccggagctggggcaggataacatacctgtgctgttttttgtcgatgaaggattaaaacgcagccaa

SEQ ID NO: 511724 - DNA, 75 bp, synthetic construct
  source 1..75: mol_type = other DNA
tatttcacaagcgaatgcatcatggacaaccaaaaaacgctcacatgtactagttcattttctttctgcatgttt

SEQ ID NO: 511725 - DNA, 75 bp, synthetic construct
  source 1..75: mol_type = other DNA
ctccccttgtagatactgtgactgtaaaagttgccaacataactaaatatgatgatcatcaggtagaaattcgcg

SEQ ID NO: 511726 - DNA, 75 bp, synthetic construct
  source 1..75: mol_type = other DNA
ttttaaagacttaaaagacaaaaaactaggaaatataatagaaataattgaagataagtgtgatgcaataaaagt

SEQ ID NO: 511727 - DNA, 75 bp, synthetic construct
  source 1..75: mol_type = other DNA
tcacctgcaatgcgctaaaaaacgcactctcaattccgcttactcctgaagaacaggagcttgaagcccaaatgg

SEQ ID NO: 511728 - DNA, 75 bp, synthetic construct
  source 1..75: mol_type = other DNA
acgacgcgccgaaccgcctctggcagatggattttaagggccactttccttttggcggtggacgctgccatccgc

SEQ ID NO: 511729 - DNA, 75 bp, synthetic construct
  source 1..75: mol_type = other DNA
taagcgctggctcgaggaccaggggcacaccatgcccgccttcagcaccgtccataacctgatggcccgccatgg

SEQ ID NO: 511730 - DNA, 75 bp, synthetic construct
  source 1..75: mol_type = other DNA
tcttgatccaaaagaactcatggaacatcccttgcgtattggtttatcgatgacagcaactattgatacgaagaa

SEQ ID NO: 511731 - DNA, 75 bp, synthetic construct
  source 1..75: mol_type = other DNA
atcctgatgaaacatggcattacgatttccatcaccgtcgcggggtgattgctgaaggcggcaaggtgagcaatc

SEQ ID NO: 511732 - DNA, 75 bp, synthetic construct
  source 1..75: mol_type = other DNA
tctgcattcattggtgagcgtgttattgacaggatgaatgatggcggcggatgcacccttgcgtttacatgggat

SEQ ID NO: 511733 - DNA, 75 bp, synthetic construct
  source 1..75: mol_type = other DNA
gtgatgctgaaaagctaatcatgttcgaaattatcaacaccagatatgaatacatgaagccaacaatcctgatta

SEQ ID NO: 511734 - DNA, 75 bp, synthetic construct
  source 1..75: mol_type = other DNA
ggcagtcatgtacatgtttttagcccaaacggtgaaagggtgagctttacctataatgaccatgtaatgcatgaa

SEQ ID NO: 511735 - DNA, 75 bp, synthetic construct
  source 1..75: mol_type = other DNA
atcctgatgaaacatggtattacgatttccatcaccgccgtggcgtgattgttgaaagtggaaaggtgagtaatc

SEQ ID NO: 511736 - DNA, 75 bp, synthetic construct
  source 1..75: mol_type = other DNA
gtcttctcgccggatggtcaatggctggcgtggatggaaggtggccagctgtggatcaccgaaactgatcgctaa

SEQ ID NO: 511737 - DNA, 75 bp, synthetic construct
  source 1..75: mol_type = other DNA
agttttaagcaacgtattcgctggctgtgtgagtatttaaaagaagatacaaaaattaaaaaagataagttagag

SEQ ID NO: 511738 - DNA, 75 bp, synthetic construct
  source 1..75: mol_type = other DNA
ttcagcgtgtaccggttgaagtttctctggatccaaaagaactcatggaacaccctttgcgcattggtttatcga

SEQ ID NO: 511739 - DNA, 75 bp, synthetic construct
  source 1..75: mol_type = other DNA
cgtatccagtatcaacaatctttagaagattataatcgtcgtgtgccgctagcaaagcagggggttatttcaaaa

SEQ ID NO: 511740 - DNA, 75 bp, synthetic construct
  source 1..75: mol_type = other DNA
gatgaggttggcgtgcagttcggcagtgatgctgaaaagctaatcatgttcgaaattatcaacaccagatatgaa

SEQ ID NO: 511741 - DNA, 75 bp, synthetic construct
  source 1..75: mol_type = other DNA
gtgatgcttcaggtcagaaaggttgaccggagcagggcgacgccccgcagcgccgcgaggagcggtgaactgttc

SEQ ID NO: 511742 - DNA, 75 bp, synthetic construct
  source 1..75: mol_type = other DNA
tctagggcacagagataagaattatctatcaaaattaaaattagctattaaaaaaattaggaaaaatgggatctt

SEQ ID NO: 511743 - DNA, 75 bp, synthetic construct
  source 1..75: mol_type = other DNA
gtggtggcgaagagctggaaacactgtgcaatgcaggcattccgttctcggtggttccgggtattaccgcagctt

SEQ ID NO: 511744 - DNA, 75 bp, synthetic construct
  source 1..75: mol_type = other DNA
cagagcgtgcgcttaattaccggacacttaaaaactggtggtgagctggattgggaaaatctggcggcagaaaaa

SEQ ID NO: 511745 - DNA, 75 bp, synthetic construct
  source 1..75: mol_type = other DNA
attagcgtttattccgcagtttaccgcatgggcagatgcaggcatgttaaccctcgtcgaagggccatttgatga

SEQ ID NO: 511746 - DNA, 75 bp, synthetic construct
  source 1..75: mol_type = other DNA
actcgaatcactgctgccgttgcatctgggccaggtagcgaaatacgccgggcaattacgcgggcgagtgaaaca

SEQ ID NO: 511747 - DNA, 75 bp, synthetic construct
  source 1..75: mol_type = other DNA
ggcgaaatgccggtggcaattgtcgaaaacggaacagcagtcacgcagcgcgtgattgacggtacgctcacacaa

SEQ ID NO: 511748 - DNA, 75 bp, synthetic construct
  source 1..75: mol_type = other DNA
ctgggccaggtagcgaaatacgccgggcagttacgcggtcgggtaaaacaacagttcgccacgatgggtgaacgc

SEQ ID NO: 511749 - DNA, 75 bp, synthetic construct
  source 1..75: mol_type = other DNA
tagcaacattatgtattgcatttcttttatttattgcaaccacctgtactgcttttgctaactcttaccaggaat

SEQ ID NO: 511750 - DNA, 75 bp, synthetic construct
  source 1..75: mol_type = other DNA
acctgtcaaacagttgccctggctcaagacctgggtaatgtcagcggcaaccaggtaacgcttgggaacagctat

SEQ ID NO: 511751 - DNA, 75 bp, synthetic construct
  source 1..75: mol_type = other DNA
ccgcagaggaactggatttgtatcttccagcacagagtggcgcagataaccatacggggaatgctggtaacaaat

SEQ ID NO: 511752 - DNA, 75 bp, synthetic construct
  source 1..75: mol_type = other DNA
ctcggtgaacttgcgcagcaaatgaacagcccgtctttgattattattggtcgggtcgttggcctgcgcgataaa

SEQ ID NO: 511753 - DNA, 75 bp, synthetic construct
  source 1..75: mol_type = other DNA
gtggtggcgaagagctggaaacactgtgcaacgcgggtattccgttctcggtggttccgggtattaccgcagctt

SEQ ID NO: 511754 - DNA, 75 bp, synthetic construct
  source 1..75: mol_type = other DNA
ctggttgctctgcctattcgggtattccgctaacacatcgcgattacgcccagagcgtgcgcttaatcaccgggc

SEQ ID NO: 511755 - DNA, 75 bp, synthetic construct
  source 1..75: mol_type = other DNA
tgccagcgtcgcggtgagtgggacaaaaccggggatattctggctgaggcggcgcttggcttacagcgggcgcag

SEQ ID NO: 511756 - DNA, 75 bp, synthetic construct
  source 1..75: mol_type = other DNA
aacacctgcgccagccacagtggacaggtattacaagcgacatggcattggtggcggagttctgctggcgcaccg

SEQ ID NO: 511757 - DNA, 75 bp, synthetic construct
  source 1..75: mol_type = other DNA
tttttgtggcgagaggccgctatcatggacaacatgctctttcaagctgcatatagatccgaaagaaaaggcact

SEQ ID NO: 511758 - DNA, 75 bp, synthetic construct
  source 1..75: mol_type = other DNA
ttgatggctaatacgtggcgctttgtgcgttaccctgaaaaggatgatgacggcatgaataaagaaagtgaaatc

SEQ ID NO: 511759 - DNA, 75 bp, synthetic construct
  source 1..75: mol_type = other DNA
ctaaatcagcccctaactattatctgctctttaaaacaaccgataccagctactgcggcgggatggtctggctgg

SEQ ID NO: 511760 - DNA, 75 bp, synthetic construct
  source 1..75: mol_type = other DNA
ctgcgcgttacagtctgcgagcaatgtcaccctcacctttctgctgcggctggcgattctgctgcaggcactgcc

SEQ ID NO: 511761 - DNA, 75 bp, synthetic construct
  source 1..75: mol_type = other DNA
ccgtgcgtcgcaccggtctgctcggctggatagcattacttcccggcgtgctggttggcttttgcctcggcgcgt

SEQ ID NO: 511762 - DNA, 75 bp, synthetic construct
  source 1..75: mol_type = other DNA
tcaagatctccggcgattacgcttatggttggctgcgcacagaaaccggcgttcaccgtctggtgcgtaagagcc

SEQ ID NO: 511763 - DNA, 75 bp, synthetic construct
  source 1..75: mol_type = other DNA
gtgattggtgaagacgcggcaaaagagattgactttaaccatgacaatgatttttcgtgcgattatcgcaacatg

SEQ ID NO: 511764 - DNA, 75 bp, synthetic construct
  source 1..75: mol_type = other DNA
agaagttacggaatggatggcaggagaaaagcctccatgcggagtatggcttgagcttctagatcctgtcgatgg

SEQ ID NO: 511765 - DNA, 75 bp, synthetic construct
  source 1..75: mol_type = other DNA
agtgttattatcctgatggttatctagttgggattgtaatgtttaaatttgtcggtgataaattcggcgtgtaca

SEQ ID NO: 511766 - DNA, 75 bp, synthetic construct
  source 1..75: mol_type = other DNA
gttcaccgcctggtgcgtaagagcccgtttgactccggcggtcgtcgccacacgtcgttcagctctgcgtttgtt

SEQ ID NO: 511767 - DNA, 75 bp, synthetic construct
  source 1..75: mol_type = other DNA
cttgagcgtatgtatctgcgctgggcagaatcgcgtggtttcaaaactgaaattatcgaagagtcggaaggtgaa

SEQ ID NO: 511768 - DNA, 75 bp, synthetic construct
  source 1..75: mol_type = other DNA
agagcactgctgaaggggactatcacatgaagataagctctactcagcttagtctggtgtcgcaaatggtcgagg

SEQ ID NO: 511769 - DNA, 75 bp, synthetic construct
  source 1..75: mol_type = other DNA
gctggaaaatctacgtcaaaaacggtctggtcacctgggaaacccagcagactgactatccgcgtacccgtccgg

SEQ ID NO: 511770 - DNA, 75 bp, synthetic construct
  source 1..75: mol_type = other DNA
tgtatgaggttttgagcagggatatggattcggctaagctggacgcatggattgctgaaccaccgttgacacggc

SEQ ID NO: 511771 - DNA, 75 bp, synthetic construct
  source 1..75: mol_type = other DNA
atattgattcggctaagctggacgcatggattgctggactatctctgagtgcgctggagggagcgaaggaaatct

SEQ ID NO: 511772 - DNA, 75 bp, synthetic construct
  source 1..75: mol_type = other DNA
atgctcaagtacctgctggggacggagcacggtatccagggcaaagacctggggcagcagggcggcgtgaagccg

SEQ ID NO: 511773 - DNA, 75 bp, synthetic construct
  source 1..75: mol_type = other DNA
tgctgattttctgcggttgtgtcggtcagagcgggggcggctgggcgcactatgtaggtcaggaaaaactgcgtc

SEQ ID NO: 511774 - DNA, 75 bp, synthetic construct
  source 1..75: mol_type = other DNA
atgaagtatgttgatgggtttgttgttgctgttcctgccgaaaataaggatgcctaccgggaaatggccgcaaag

SEQ ID NO: 511775 - DNA, 75 bp, synthetic construct
  source 1..75: mol_type = other DNA
attatcagcacgacttatattcagcaaaccgggctttccccggtgcatgacagcgtatttattgaagataaaaat

SEQ ID NO: 511776 - DNA, 75 bp, synthetic construct
  source 1..75: mol_type = other DNA
gatcagctaaaagatggggcgacagtggcgattccgaatgatccgaccaaccttgggcgggcgctgttacttttg

SEQ ID NO: 511777 - DNA, 75 bp, synthetic construct
  source 1..75: mol_type = other DNA
tgtatgaggttttgagcagggatattgattcggctaagctggacgcatggattgctgaaccaccgctgacaccgc

SEQ ID NO: 511778 - DNA, 75 bp, synthetic construct
  source 1..75: mol_type = other DNA
tctgcaacaaaatgacggaaaagtacctgatatccgcagccaggagacactaccaaaagaagaaaatcgccagga

SEQ ID NO: 511779 - DNA, 75 bp, synthetic construct
  source 1..75: mol_type = other DNA
tttcacgttgctttataaccagggatgtccgggcgagtttgtaaatgcacttgtggaaaaggaggccacttatct

SEQ ID NO: 511780 - DNA, 75 bp, synthetic construct
  source 1..75: mol_type = other DNA
cgccatttgcagataatggagctggaaggggcacaattaccgcgagtgctggatgatccgaaagtggatgtggca

SEQ ID NO: 511781 - DNA, 75 bp, synthetic construct
  source 1..75: mol_type = other DNA
cttgccatcgtcattgatgattttgggtatcgcccgcacaacgaaaaccaggtgctggcgatgccctccgctatc

SEQ ID NO: 511782 - DNA, 75 bp, synthetic construct
  source 1..75: mol_type = other DNA
gggatgatggttggtcgctttatcggctcaattattgggaaaaaagcggaaattctcggcgggctggtgctgatc

SEQ ID NO: 511783 - DNA, 75 bp, synthetic construct
  source 1..75: mol_type = other DNA
tgaacgcgaaaacccatcgcggcttgttgttcatgtttgctgggggcgatgatgtgttttatggataccccggtc

SEQ ID NO: 511784 - DNA, 75 bp, synthetic construct
  source 1..75: mol_type = other DNA
atgcgcaccaatataaaccaaggaagaatccagtcgttggcggtcatgattgtcatgctcattaacaatgaccaa

SEQ ID NO: 511785 - DNA, 75 bp, synthetic construct
  source 1..75: mol_type = other DNA
agagaaatgctgaaggggattatcacatgaagataagctctactcagcttagtctggcgtcacaaatggtcgagg

SEQ ID NO: 511786 - DNA, 75 bp, synthetic construct
  source 1..75: mol_type = other DNA
tgattattgagggttttcgtggtggagacgatgaggatgaagaaccgcgtcgtcgtcacggtttctggttgctgg

SEQ ID NO: 511787 - DNA, 75 bp, synthetic construct
  source 1..75: mol_type = other DNA
gctcaattattgggaaaaaagcggaaattctcggcgggctggtactgatcggcatcggcgtccagatcctctgga

SEQ ID NO: 511788 - DNA, 75 bp, synthetic construct
  source 1..75: mol_type = other DNA
cttcggcgcgttggtagcgtttaccttcgttaacctgtcggtgttcaaccacttctggcggcgcaaaggaatgaa

SEQ ID NO: 511789 - DNA, 75 bp, synthetic construct
  source 1..75: mol_type = other DNA
caaaccgaagaaaccgctggaacctgtttatgctaatcgcttctttgaagtattaagcgaaagcatcagccagag

SEQ ID NO: 511790 - DNA, 75 bp, synthetic construct
  source 1..75: mol_type = other DNA
ccgccagacattacgctggtgaaagccagcagcttgctgaatgaaccgcaggttgatacgtctacaccgccgaaa

SEQ ID NO: 511791 - DNA, 75 bp, synthetic construct
  source 1..75: mol_type = other DNA
gaccatcggcctctgcgccattgcattgggcgtactgtttcaaagtggtgtgccgatgccgctggcgattctcct

SEQ ID NO: 511792 - DNA, 75 bp, synthetic construct
  source 1..75: mol_type = other DNA
ttgtacttggcacaattagataatagtattcataggcatccagaagtattttattattcaagatttgtagatgat

SEQ ID NO: 511793 - DNA, 75 bp, synthetic construct
  source 1..75: mol_type = other DNA
cttcctgacggcggtatacggcggcgttatctttatcgcggcgtcgttctttatgcagctgttctttcccgatat

SEQ ID NO: 511794 - DNA, 75 bp, synthetic construct
  source 1..75: mol_type = other DNA
agaacgctgtttctgacacagaccacactgaaaaatgcgggtttccttccccggaggagactgcagacagagcgc

SEQ ID NO: 511795 - DNA, 75 bp, synthetic construct
  source 1..75: mol_type = other DNA
acatctgtacccctggatccccgacctgatggagtcagggctgggaggcccgcaggtcagaaacctgcttgcgtt

SEQ ID NO: 511796 - DNA, 75 bp, synthetic construct
  source 1..75: mol_type = other DNA
cgcaggtcagaaacctgcttgcgttacgtcaggacgcagagcgtgtctggggacagttctcgctggcgtccggca

SEQ ID NO: 511797 - DNA, 75 bp, synthetic construct
  source 1..75: mol_type = other DNA
tggagctggatccaaaagagcggaaccgtcgtcaccattttggtgagccggaaccggtggtggtgccgccttcag

SEQ ID NO: 511798 - DNA, 75 bp, synthetic construct
  source 1..75: mol_type = other DNA
ggactgccggttgatgcctccagtatcagcaggatggagaacgccctgaaatatctgtacccctggatccccgac

SEQ ID NO: 511799 - DNA, 75 bp, synthetic construct
  source 1..75: mol_type = other DNA
ccggaggagactgcagacagagcgccttcttctgccgggaaagtccggcgttcagagatacagccggatatgtac

SEQ ID NO: 511800 - DNA, 75 bp, synthetic construct
  source 1..75: mol_type = other DNA
atcagcgtttctaccgtattcatgtgcttttcaagccatggccgggacggcttcagtgcgtcattggtcacctgg

SEQ ID NO: 511801 - DNA, 75 bp, synthetic construct
  source 1..75: mol_type = other DNA
tcggcggttctgcacagcaggatgtgccagttcttgatgatgaaaatgccataaaactgctgaggctgatgcgtg

SEQ ID NO: 511802 - DNA, 75 bp, synthetic construct
  source 1..75: mol_type = other DNA
caccgtattactgaagccatggttgctgacaaaccgtggattgaagacgtgctcccacactactacggtagtgaa

SEQ ID NO: 511803 - DNA, 75 bp, synthetic construct
  source 1..75: mol_type = other DNA
cactgaaaaaggtgggcttccttccctggataagagtaccgataaggcgtcttcttctgctgaaaaagtcctgcg

SEQ ID NO: 511804 - DNA, 75 bp, synthetic construct
  source 1..75: mol_type = other DNA
ccgttaccagatactgacggaactctggaaagaaacaggggatccgcgtttttaccgtattcatgtgctgtttaa

SEQ ID NO: 511805 - DNA, 75 bp, synthetic construct
  source 1..75: mol_type = other DNA
atccataacgcccggatgatttatgaggagtcgatgcagcgaaccgtgacgatcagggaactggcgtcactgctg

SEQ ID NO: 511806 - DNA, 75 bp, synthetic construct
  source 1..75: mol_type = other DNA
atgaaaaaagcgggtcttctttttttggtgatgatagttatcgccgttgtggctgccggtattggttactggaaa

SEQ ID NO: 511807 - DNA, 75 bp, synthetic construct
  source 1..75: mol_type = other DNA
tgcggatgggggtgaatccggaaatcaacgccctggcaacattgatcctcggcgcggtcggaattgtcggattta

SEQ ID NO: 511808 - DNA, 75 bp, synthetic construct
  source 1..75: mol_type = other DNA
gttgctcttgctcatgcgatcggctggcctgccgatcgcggtatgttaactatctggctggcgcacgtgactttc

SEQ ID NO: 511809 - DNA, 75 bp, synthetic construct
  source 1..75: mol_type = other DNA
acagtggttgacgacacacctggcgaagtcgccttcgtgcatactcctctttcgatcgcaatgtataacgatgaa

SEQ ID NO: 511810 - DNA, 75 bp, synthetic construct
  source 1..75: mol_type = other DNA
ttctttgatcatcagggcgatgcgttactgaaagtttatgccaccgacaataccgatatggcggcatggagcgag

SEQ ID NO: 511811 - DNA, 75 bp, synthetic construct
  source 1..75: mol_type = other DNA
atgaaccactacacacgctggcttgagttaaaagaacaaaatcccggaaagtacgcgcgtgacatcgcagggtta

SEQ ID NO: 511812 - DNA, 75 bp, synthetic construct
  source 1..75: mol_type = other DNA
tgtttttcgtcattacgctaccgatgatcatgcccgcgatcatttctggctggttactggcttttactctgtcgc

SEQ ID NO: 511813 - DNA, 75 bp, synthetic construct
  source 1..75: mol_type = other DNA
cgcatctgggggcagtttgcagtcgcggcggaaaacgatgtggattttgatcgcgtgtttggtgaatgttgcggc

SEQ ID NO: 511814 - DNA, 75 bp, synthetic construct
  source 1..75: mol_type = other DNA
caactcgtttgtattactggcgacacagcgtaatctgctgacgctgaatcgtgcttcagccgaggagattcagga

SEQ ID NO: 511815 - DNA, 75 bp, synthetic construct
  source 1..75: mol_type = other DNA
atgatagttatcgccgttgtggctgccggtattggttactggaaattaaccggtgaagagtcggatacattacgt

SEQ ID NO: 511816 - DNA, 75 bp, synthetic construct
  source 1..75: mol_type = other DNA
gggggctgccggagcttttcaccggtggcccgggtgagggggaagcacctgtacttacagatgaagatgctctga

SEQ ID NO: 511817 - DNA, 75 bp, synthetic construct
  source 1..75: mol_type = other DNA
caatacacgttatcagatcctgtcagaactgtggcaggagaccggagaagaccggtttttccgtgttcatgtgtt

SEQ ID NO: 511818 - DNA, 75 bp, synthetic construct
  source 1..75: mol_type = other DNA
tgctgaacaggatgatatcgaatctctgcagaatgaggcgtttcacctcgcatgggagctggcgtcacatacagg

SEQ ID NO: 511819 - DNA, 75 bp, synthetic construct
  source 1..75: mol_type = other DNA
aatacaagcacgtggtgttaagcctcgtgctccagaaactcatcagcgataagtttgaagcacgccgcaaaaaat

SEQ ID NO: 511820 - DNA, 75 bp, synthetic construct
  source 1..75: mol_type = other DNA
acgccgtggttttctcgccggatggtcaatggttggcgtggatggaggacggtcagttgtggatcaccgaaactg

SEQ ID NO: 511821 - DNA, 75 bp, synthetic construct
  source 1..75: mol_type = other DNA
aacacgaaaaacggcgtgaacgccgacatcggggcatacaccgacctcgatgacaactggacgctgggtctggtt

SEQ ID NO: 511822 - DNA, 75 bp, synthetic construct
  source 1..75: mol_type = other DNA
ctggcaaacccggcgctgctgacaaaagccggtcctgacgatgatttcagccttctgcttccgtccgtcggtgcg

SEQ ID NO: 511823 - DNA, 75 bp, synthetic construct
  source 1..75: mol_type = other DNA
gtacatatcgatgtatccggcctggtcgggaccgaccatgattacggtgcaatagcacaactccagttcactttc

SEQ ID NO: 511824 - DNA, 75 bp, synthetic construct
  source 1..75: mol_type = other DNA
cgttggtatctctccatttgacgtcgtacatatcgatgtttccggcctggtaggaactgaccacgattacggtgc

SEQ ID NO: 511825 - DNA, 75 bp, synthetic construct
  source 1..75: mol_type = other DNA
tcgatgcaatggatattaccgcgccatatacgccaggagcgctgcgcggcggcagtcatgtacatgtctttagcc

SEQ ID NO: 511826 - DNA, 75 bp, synthetic construct
  source 1..75: mol_type = other DNA
tatcagtgctgcaatccttgatccagcaactggtcagctggttggcgtgaatccggcgctgctggtactggcgac

SEQ ID NO: 511827 - DNA, 75 bp, synthetic construct
  source 1..75: mol_type = other DNA
agtaaaagacacgttgaaaacctggggtctgctggagctggtcaactccgtggttgggctgattattgtgctgat

SEQ ID NO: 511828 - DNA, 75 bp, synthetic construct
  source 1..75: mol_type = other DNA
aagaaaggccagaaagtcagcgtcaccggaacggtaaacaatttcgaagtccgtggattcgctaccgtcaacaat

SEQ ID NO: 511829 - DNA, 75 bp, synthetic construct
  source 1..75: mol_type = other DNA
actgaactggaaacggccggacaaaagtggtctctgggcttcacaccaaaattccagcgtgttgacctgtttaac

SEQ ID NO: 511830 - DNA, 75 bp, synthetic construct
  source 1..75: mol_type = other DNA
caattgtccgatccgggtaatatcagtgacaacgcagacaaaatcagtgatgactggaaagcctttgatcgtgcc

SEQ ID NO: 511831 - DNA, 75 bp, synthetic construct
  source 1..75: mol_type = other DNA
ttgaggggaaaaatgataaattaactctttttagaaaaatagagagaagtaatgatctcgcattacagatccgat

SEQ ID NO: 511832 - DNA, 75 bp, synthetic construct
  source 1..75: mol_type = other DNA
gtgctggctcactccatgctcgccgccatcccggataactctattaggctgtttgacaagcacttttacaatgca

SEQ ID NO: 511833 - DNA, 75 bp, synthetic construct
  source 1..75: mol_type = other DNA
ggtgttaactgtacaggctcctgcagctggaaaatctacgttaaaaacggtctggttacctgggaaagccaacag

SEQ ID NO: 511834 - DNA, 75 bp, synthetic construct
  source 1..75: mol_type = other DNA
ggtgttaactgtacaggctcctgcagctggaaaatctacgttaaaaatggtctggtaacctgggaaaaccaacag

SEQ ID NO: 511835 - DNA, 75 bp, synthetic construct
  source 1..75: mol_type = other DNA
ggtgttaactgtacaggctcctgcagctggaaaatctacgttaaaaaaggtctggtaacctgggaaatccaacag

SEQ ID NO: 511836 - DNA, 75 bp, synthetic construct
  source 1..75: mol_type = other DNA
atcttgcacatcatatgagcttatgccaaatgaacttgttaaggtcgttagagctgcacaagaagcaaactttgg

SEQ ID NO: 511837 - DNA, 75 bp, synthetic construct
  source 1..75: mol_type = other DNA
attcaagcgcatttccttccgcaatgcaaattcgaaaaatgttgcttcgatcgttagagttgatagatgcactcg

SEQ ID NO: 511838 - DNA, 75 bp, synthetic construct
  source 1..75: mol_type = other DNA
ggtgttaactgtacaggctcctgcagctggaaaatctacgttaaaaagggtctggttacctgggaaacccaacag

SEQ ID NO: 511839 - DNA, 75 bp, synthetic construct
  source 1..75: mol_type = other DNA
ccttataccccggcctggggcgagcaaattaccggcgttccgcgccagtatattgaaaccatcgcccgtgaattt

SEQ ID NO: 511840 - DNA, 75 bp, synthetic construct
  source 1..75: mol_type = other DNA
tccggcgatgtcgatggtttcttacgccgccggaacacgctatctgtcgctgttaggtggcacctgtttaagctt

SEQ ID NO: 511841 - DNA, 75 bp, synthetic construct
  source 1..75: mol_type = other DNA
tgaacggctccgcgtacatcgactgaacagtcagcagctgccgcgcgcaaatgcgcccgaatataataaacccgg

SEQ ID NO: 511842 - DNA, 75 bp, synthetic construct
  source 1..75: mol_type = other DNA
gaagattcgctttcgcgatattcaggcgcagccgcgtaaaattatctccagccccacatggtctggaaagcgatc

SEQ ID NO: 511843 - DNA, 75 bp, synthetic construct
  source 1..75: mol_type = other DNA
cggcgattgaaggcaagctcgatctgctggtgacgctcgacttccgcatgtccagtacctgcctgttctccgata

SEQ ID NO: 511844 - DNA, 75 bp, synthetic construct
  source 1..75: mol_type = other DNA
cctgaaagccgaagccgacaaggccggattgtcacccgccgaatttaccgcccaggcactgaagtcaggcgaatt

SEQ ID NO: 511845 - DNA, 75 bp, synthetic construct
  source 1..75: mol_type = other DNA
gttttgcactgctggggtgggttggggcagagatggcaagcgggcttgacccattctggcgtcccgatgtagtgc

SEQ ID NO: 511846 - DNA, 75 bp, synthetic construct
  source 1..75: mol_type = other DNA
tgggccaggcgcggtaatgaatttgtgacggtgaaatcgctgaatgaacagggccagcctgtgggcgtggagata

SEQ ID NO: 511847 - DNA, 75 bp, synthetic construct
  source 1..75: mol_type = other DNA
tactggggcgtgcacatgccactggcgaagtggacgatagcaaatttaacgtgcttggcggttcgattgcttacg

SEQ ID NO: 511848 - DNA, 75 bp, synthetic construct
  source 1..75: mol_type = other DNA
ttcgccgtcgcggcggtggatttggtttagtgaccgcctgtgccgcaggtgggcttggtgcagcaatggttctgg

SEQ ID NO: 511849 - DNA, 75 bp, synthetic construct
  source 1..75: mol_type = other DNA
ccaaacgcagtttcttttccggtcttttctccatgggacgcgacaaacaggaaaacgatatgaacgaaaagcagt

SEQ ID NO: 511850 - DNA, 75 bp, synthetic construct
  source 1..75: mol_type = other DNA
taatagcttttctgtccgccagctcaaccattacatccattatttgcaggaaaccgggcaaccgagcagtgaata

SEQ ID NO: 511851 - DNA, 75 bp, synthetic construct
  source 1..75: mol_type = other DNA
aaaccggacaaccgggcagcgaataccgccttgcactgtgggaaaagctggggcaacccatcttaactctggcga

SEQ ID NO: 511852 - DNA, 75 bp, synthetic construct
  source 1..75: mol_type = other DNA
gcccgccaggcgacggcttttcatggcattcccgcggttgatttagggaagatggtggtaggcgaactgctggca

SEQ ID NO: 511853 - DNA, 75 bp, synthetic construct
  source 1..75: mol_type = other DNA
cctggattatttcattagtgaagctgttacatgctattgaggttccactttgtgtcatatccgtcttcaaataca

SEQ ID NO: 511854 - DNA, 75 bp, synthetic construct
  source 1..75: mol_type = other DNA
tttatgatttacgtttatgaaccgttactgcaaagcaatttttctgtaggtctaattctgggggcgctctttttt

SEQ ID NO: 511855 - DNA, 75 bp, synthetic construct
  source 1..75: mol_type = other DNA
accagtttccaggctgtggcaaacgttgccgaaagcctgatggcgggaactattcgcgcggggattgccggtggg

SEQ ID NO: 511856 - DNA, 75 bp, synthetic construct
  source 1..75: mol_type = other DNA
cccgccagggcgatcgtatcgccattgttagcggattacgcacgccttttgctcgccaggcgacggcttttcatg

SEQ ID NO: 511857 - DNA, 75 bp, synthetic construct
  source 1..75: mol_type = other DNA
cgcatcagcgtgccgctcaggcatggtcagacggtaaactcaaagaagaggtgatgactgcctttatccctcctt

SEQ ID NO: 511858 - DNA, 75 bp, synthetic construct
  source 1..75: mol_type = other DNA
ttgcttatcgtagagttttggaaaacatcccttattttaatgtgtcttttaatacttatgtagtatcattaatat

SEQ ID NO: 511859 - DNA, 75 bp, synthetic construct
  source 1..75: mol_type = other DNA
agattgccagccatccggaagtcatcttctgtacctttggcgacgccatgcgcgtgccggggaaacagggatcgc

SEQ ID NO: 511860 - DNA, 75 bp, synthetic construct
  source 1..75: mol_type = other DNA
ttttcatcgtccgctggtggtggctggtttcgaaccccttgatctactgcaaggcgtggtcatgctggtggagca

SEQ ID NO: 511861 - DNA, 75 bp, synthetic construct
  source 1..75: mol_type = other DNA
aacaggcaaaagcccgcgatgtgcagaatttttacttcttctgccagcacattacgctcatcccaacactgcgca

SEQ ID NO: 511862 - DNA, 75 bp, synthetic construct
  source 1..75: mol_type = other DNA
gccgcgatatatccccggcgaccaggttacagtagatgaacacgtcaggattacgttgtctggaggcattagata

SEQ ID NO: 511863 - DNA, 75 bp, synthetic construct
  source 1..75: mol_type = other DNA
aaaacgtcgagtttatccacggtccgggttgcccggtgtgcgtgctgccgatgggcagaatcgatacctgcgtgg

SEQ ID NO: 511864 - DNA, 75 bp, synthetic construct
  source 1..75: mol_type = other DNA
cttcggcttagggtttgaaaccaccatgccgaccaccgccatcactctgcaacaggcgaaagcccgcgatgtgca

SEQ ID NO: 511865 - DNA, 75 bp, synthetic construct
  source 1..75: mol_type = other DNA
gaacgggacatattaaaaaaagccactgtagattcaatctgtcaatgcaacacccctttcaattatctctttcgg

SEQ ID NO: 511866 - DNA, 75 bp, synthetic construct
  source 1..75: mol_type = other DNA
ctggcccgcctgctggagcagcactacgggctgaatcttaatgacacaccattcaacaatgaaaaggtgattcag

SEQ ID NO: 511867 - DNA, 75 bp, synthetic construct
  source 1..75: mol_type = other DNA
gatttccggggcggttcagatgactttttgacacggggacttggcaaacaggggcgaccatgtatgtcagatatg

SEQ ID NO: 511868 - DNA, 75 bp, synthetic construct
  source 1..75: mol_type = other DNA
ctctgcggattatggaagtgtgtggcggtcatacccacgccatttttaaattcggcctcgaccagttgctgccgg

SEQ ID NO: 511869 - DNA, 75 bp, synthetic construct
  source 1..75: mol_type = other DNA
tttgtttgcgaagatggtgtggttgctgtagctgatgcgctacggattaagcagaacaacaaatcgcgaaaagaa

SEQ ID NO: 511870 - DNA, 75 bp, synthetic construct
  source 1..75: mol_type = other DNA
agtttaaaattgaagcagtcaaacaggttgttgatcgcggttattctgttgccagcgttgcaacacgtctcgata

SEQ ID NO: 511871 - DNA, 75 bp, synthetic construct
  source 1..75: mol_type = other DNA
cgggtattgtctgcctgatgttgctatttggcattttcttcctgagtaaaaaacgcgagcaaatagttatggaaa

SEQ ID NO: 511872 - DNA, 75 bp, synthetic construct
  source 1..75: mol_type = other DNA
ttcgacggacacagcgtcagcaccgattttatggataacagggaacagcccggcatgcaagaaagggagtcattc

SEQ ID NO: 511873 - DNA, 75 bp, synthetic construct
  source 1..75: mol_type = other DNA
aaaatctaccgagagtttctctccgtcggcatggcgcagatgctgatgcaactgatcattgcggtcggcatagtg

SEQ ID NO: 511874 - DNA, 75 bp, synthetic construct
  source 1..75: mol_type = other DNA
cccaacatactgtatttgccgatataaccgattttgaacacaacgtagtgccattaaaaagtaatatgtgggtga

SEQ ID NO: 511875 - DNA, 75 bp, synthetic construct
  source 1..75: mol_type = other DNA
gtttacaggtgccaacgtcaaaaggtgcgctgctggcgaaagatttacgcgttaataacagcattcatattctgt

SEQ ID NO: 511876 - DNA, 75 bp, synthetic construct
  source 1..75: mol_type = other DNA
agcagaaaatgcattactcaggaagaaatggatgagttatatgctctgtctgaaagattgaaagaaaagtgcgcc

SEQ ID NO: 511877 - DNA, 75 bp, synthetic construct
  source 1..75: mol_type = other DNA
gggcagtgttcgcccgttatcatacggctttatttcgcaggacgacctggcaaaacagttcctgaacgtttctga

SEQ ID NO: 511878 - DNA, 75 bp, synthetic construct
  source 1..75: mol_type = other DNA
ctttttatcccttttagcagaacaagaatctcctcattttcagaacttgtttttatttttcgccaatatgttatt

SEQ ID NO: 511879 - DNA, 75 bp, synthetic construct
  source 1..75: mol_type = other DNA
tcagggcggatatcaggctccgacaggctgcgtggtcacctttgttgatggcggcgaaaaaatggagttcatcaa

SEQ ID NO: 511880 - DNA, 75 bp, synthetic construct
  source 1..75: mol_type = other DNA
aggttcgtttggttttcttgttcattaagtcacctgttttgtgttgtggtgagaatatcacctttcatcaggtgg

SEQ ID NO: 511881 - DNA, 75 bp, synthetic construct
  source 1..75: mol_type = other DNA
gccgctaaaaacccggcagcagttcttttcggacataaataacaacgtttctaagccatcagcgaccatcaatat

SEQ ID NO: 511882 - DNA, 75 bp, synthetic construct
  source 1..75: mol_type = other DNA
catattgaacccctgcatccggatcaccataccgctgcagattacttacgccagtttgatttgcttgtcctgaat

SEQ ID NO: 511883 - DNA, 75 bp, synthetic construct
  source 1..75: mol_type = other DNA
cggatcaccataccgctgcagattacttacgccagtttgatttgcttgtcctgaattttatctctcgcggtaatt

SEQ ID NO: 511884 - DNA, 75 bp, synthetic construct
  source 1..75: mol_type = other DNA
tacagccatctggcgagtaacaatttgctgaaccgcgttctttcccgctactgtatattgctgcacgaaccggtc

SEQ ID NO: 511885 - DNA, 75 bp, synthetic construct
  source 1..75: mol_type = other DNA
ggagtagccaacagctcggcacctcgggtggtatcgttaactcaagcttcgataataacaatctggtcatcccga

SEQ ID NO: 511886 - DNA, 75 bp, synthetic construct
  source 1..75: mol_type = other DNA
tatccgctggatgagctacaaggatgcgcaggggggggatccaaaagagctggcaacgaaggtgaccagttacac

SEQ ID NO: 511887 - DNA, 75 bp, synthetic construct
  source 1..75: mol_type = other DNA
atgaataaaaaacaattagccattctcgaaaaggcatgggatgcacaaatatcatacgctttgaaagaacaggca

SEQ ID NO: 511888 - DNA, 75 bp, synthetic construct
  source 1..75: mol_type = other DNA
gtgtatgagtttcatcttggtcttgaccggaccgtttatgaaccgttactgcaaagcaatttttctgtaggttta

SEQ ID NO: 511889 - DNA, 75 bp, synthetic construct
  source 1..75: mol_type = other DNA
tctcgctatttggcgctgtatttatgatgatcaacatgcgttttaaagataaggatcaccagtgcgtagcggcgg

SEQ ID NO: 511890 - DNA, 75 bp, synthetic construct
  source 1..75: mol_type = other DNA
tcgaaaaggcatgggatgcacaaatatcatgcgctttgaaagaacaggcactaccaataatccagaccaaatcga

SEQ ID NO: 511891 - DNA, 75 bp, synthetic construct
  source 1..75: mol_type = other DNA
atgcaccgcgcgctggtacagcgtaaaaatctcgcctttgccgcacagtttgaatcctccttcgaaccgatttgc

SEQ ID NO: 511892 - DNA, 75 bp, synthetic construct
  source 1..75: mol_type = other DNA
tacagccatctggcgagtaacaatttgctgaaccgcgttctttcacgctattgcatattgctgcacgaaccagtc

SEQ ID NO: 511893 - DNA, 75 bp, synthetic construct
  source 1..75: mol_type = other DNA
cggtggtgccatttttacgccgttgggcgctgttatatcactgccggattatcgaagtcggtacgcaaacgggta

SEQ ID NO: 511894 - DNA, 75 bp, synthetic construct
  source 1..75: mol_type = other DNA
tccctttgcgccgaccagcgattacgagcaactgtcattctcaaagagttgttatttcgggatcgacattaaaaa

SEQ ID NO: 511895 - DNA, 75 bp, synthetic construct
  source 1..75: mol_type = other DNA
gacgacaaaacactggaaattcatacgaaatacatcaacctgccaatggttcctattccatcatggtgtactcat

SEQ ID NO: 511896 - DNA, 75 bp, synthetic construct
  source 1..75: mol_type = other DNA
tattaatgcgccacaacgaagcgttgctgggtgcggccttgtgtgatgaccgtctgtttgatttgctcaaagatc

SEQ ID NO: 511897 - DNA, 75 bp, synthetic construct
  source 1..75: mol_type = other DNA
cggcgattgaaggcaagctcgacctgctggtgacgctcgacttccgcatgtccagcacctgcctgttctccgata

SEQ ID NO: 511898 - DNA, 75 bp, synthetic construct
  source 1..75: mol_type = other DNA
caatcatccgcgtaatttgtttgtctggcgctctaacctgcttggctcctccggcaaaggccacgagtatatgca

SEQ ID NO: 511899 - DNA, 75 bp, synthetic construct
  source 1..75: mol_type = other DNA
atatgctgatcttctgcggttgtgtcgggcaaagcggcggcggctgggcgcactatgtcggtcaggaaaaactgc

SEQ ID NO: 511900 - DNA, 75 bp, synthetic construct
  source 1..75: mol_type = other DNA
tatgactcacaatgggcggcaatttgttccattgctccaaagattggctgtacgccggagactctgcgtgtctgg

SEQ ID NO: 511901 - DNA, 75 bp, synthetic construct
  source 1..75: mol_type = other DNA
aaattaccggcgtgccgcgccagtatattgaaaccatcgcccgtgaatttgccgataccgcccataaaacacatg

SEQ ID NO: 511902 - DNA, 75 bp, synthetic construct
  source 1..75: mol_type = other DNA
acagctatcgccagcgttggcagttcgacaaaatcgtgcgttccacccacggcgttaactgtacaggctcctgta

SEQ ID NO: 511903 - DNA, 75 bp, synthetic construct
  source 1..75: mol_type = other DNA
ccgcgatagagggaaagctcgacctgctggtaacgctcgatttccgtatgtccagcacctgcctgttttccgata

SEQ ID NO: 511904 - DNA, 75 bp, synthetic construct
  source 1..75: mol_type = other DNA
cgactggcgcaaaggcgaatgcgacctgatcccaggtaaaaccgcgccgaatattgtggcggtggagcgcgacta

SEQ ID NO: 511905 - DNA, 75 bp, synthetic construct
  source 1..75: mol_type = other DNA
ctcaagcaacacagcgatccggtactggcgtgggcatcgattatgaatgatccgcaaaagtgcatgagttacaag

SEQ ID NO: 511906 - DNA, 75 bp, synthetic construct
  source 1..75: mol_type = other DNA
tattgaaaccatcgcccgcgaatttgccgataccgcccataaaacgcatgggcgctcaatgattatcctcggtgc

SEQ ID NO: 511907 - DNA, 75 bp, synthetic construct
  source 1..75: mol_type = other DNA
agcgtgatggcccggcgcaggggcgtccgctgattgacaccgccattgacgcttcagaagtgattctggcactgg

SEQ ID NO: 511908 - DNA, 75 bp, synthetic construct
  source 1..75: mol_type = other DNA
ctggatcagcgaaaccgatgcccgtgaactgactattgttgataacgactgggtggaggtctttaacgccaacgg

SEQ ID NO: 511909 - DNA, 75 bp, synthetic construct
  source 1..75: mol_type = other DNA
ggagggctcaccaccgctgaacgtcagcgtctgaaagagctggaacgtgaaaatcgtgaactgcgccgcagtaac

SEQ ID NO: 511910 - DNA, 75 bp, synthetic construct
  source 1..75: mol_type = other DNA
ctcaccaccgctgaacgtcagcgtctgaaagagctggaacgtgaaaatcgtgaactgcgccgcagtaacgatatc

SEQ ID NO: 511911 - DNA, 75 bp, synthetic construct
  source 1..75: mol_type = other DNA
ggcttccgcttattttgcgaaggcggagttcgaccgcctctggaaaaaatatgccctgctggataagctgcgtga

SEQ ID NO: 511912 - DNA, 75 bp, synthetic construct
  source 1..75: mol_type = other DNA
ccgaagtccgtcaacgggcagtccgtatggttcaggaaagtcagagcgaatatgactcacaatgggcgacaattt

SEQ ID NO: 511913 - DNA, 75 bp, synthetic construct
  source 1..75: mol_type = other DNA
gttccattgctccaaagaatggctgtacgcccgagactctgcgtgtctgggttcgccagaatgagcgggataccg

SEQ ID NO: 511914 - DNA, 75 bp, synthetic construct
  source 1..75: mol_type = other DNA
gttccattgctccaaagaatggctgtacgccagagactctgcgtgtctgggttcgccagcatgagcgggataccg

SEQ ID NO: 511915 - DNA, 75 bp, synthetic construct
  source 1..75: mol_type = other DNA
atggttctggaaagtcagggcgaatatgactcacaatgggcagcaatttgctccattgctccaaagactggctgt

SEQ ID NO: 511916 - DNA, 75 bp, synthetic construct
  source 1..75: mol_type = other DNA
ccgaagtccgtcaacgggcagttcgtatggttctggaaagtcagggcgaatatgactcacaatgggcggcaattt

SEQ ID NO: 511917 - DNA, 75 bp, synthetic construct
  source 1..75: mol_type = other DNA
aacggcatcctgaaaggttacatgcaggataaactcaacgcgcgcttaatgggtatgaagccgactggcaatggt

SEQ ID NO: 511918 - DNA, 75 bp, synthetic construct
  source 1..75: mol_type = other DNA
agaagatggcaaacgcgaacgcggtgccagtggcggcggcggtcgttttggttatgagttcttccttgccgatct

SEQ ID NO: 511919 - DNA, 75 bp, synthetic construct
  source 1..75: mol_type = other DNA
ccaaagattggctgtacgccggagactctgcgtgtctgggttcgccagcatgagcgggataccgggggcggtgat

SEQ ID NO: 511920 - DNA, 75 bp, synthetic construct
  source 1..75: mol_type = other DNA
tacacgtttttcccccgaggtccgtcaacgggcagttcgtatggttctggaaagtcagggcgaatatgactcaca

SEQ ID NO: 511921 - DNA, 75 bp, synthetic construct
  source 1..75: mol_type = other DNA
ggaggggcggtgggggcctctccacgtctgaacgccagcgtgtgaaagagctggaacgtgaaaatcgggaaatgc

SEQ ID NO: 511922 - DNA, 75 bp, synthetic construct
  source 1..75: mol_type = other DNA
tggcgtgggaatcgattatgcatgacccgcaaaagtgcttaagctacaaacaggtgcgcggacgcggcgggttta

SEQ ID NO: 511923 - DNA, 75 bp, synthetic construct
  source 1..75: mol_type = other DNA
tcgagcgtgtgctatttctgtttctgaatgattttattgaacaatttccaatgatcaaccttggcgttcccatca

SEQ ID NO: 511924 - DNA, 75 bp, synthetic construct
  source 1..75: mol_type = other DNA
cccttttagcagaacaagaatctcctcattttcaggactttttttttatttttcgccaatatgttattgcactat

SEQ ID NO: 511925 - DNA, 75 bp, synthetic construct
  source 1..75: mol_type = other DNA
tgataccggcattattaagtgaagataaaagtatccatcgtatggcacgcaagattttaaaactttttgtaaaaa

SEQ ID NO: 511926 - DNA, 75 bp, synthetic construct
  source 1..75: mol_type = other DNA
aaaagaggatttattgcaaagcctgatggattcattaggttctaacaaacatgtactacccgaagtctgcatctg

SEQ ID NO: 511927 - DNA, 75 bp, synthetic construct
  source 1..75: mol_type = other DNA
ataacggacagcgaattaaaagaggatttattgcaaagccctgatgaatcccctaatgatttttatcaaaatcat

SEQ ID NO: 511928 - DNA, 75 bp, synthetic construct
  source 1..75: mol_type = other DNA
tcattttcaggacttgtttttatttttcgccaatatgttattgcactatcaccaatttatgaatcccaatgaaag

SEQ ID NO: 511929 - DNA, 75 bp, synthetic construct
  source 1..75: mol_type = other DNA
gatcaggatttcaaatctgatttcactgatggggatttaaacgctatttttggtatgccttggtataaacgtgga

SEQ ID NO: 511930 - DNA, 75 bp, synthetic construct
  source 1..75: mol_type = other DNA
aaatttctcgacagcagaaattatctggttaagtctcgccgtagttatcgcagccctagcaatgagtttcctggt

SEQ ID NO: 511931 - DNA, 75 bp, synthetic construct
  source 1..75: mol_type = other DNA
tccgcgatatatccccggcaaccaagctacagtagatgaacacgtgaggcttgcgtacactgaagggattcaata

SEQ ID NO: 511932 - DNA, 75 bp, synthetic construct
  source 1..75: mol_type = other DNA
attacatatctcttcctgatgattttcccgtacgtaatattgcaccgcaggtaaaagaagttttaaaggatttta

SEQ ID NO: 511933 - DNA, 75 bp, synthetic construct
  source 1..75: mol_type = other DNA
ggcgaagtgttaatgcaggcggagtttgctacccgttttttacagcgactgcggctgtggggtgtgtcatgcgcc

SEQ ID NO: 511934 - DNA, 75 bp, synthetic construct
  source 1..75: mol_type = other DNA
ctcaccaccgctgaacgtcagcgtctgaaagagctggagcgtgaaaatcgtgaactgcgccgcagtagcgatatc

SEQ ID NO: 511935 - DNA, 75 bp, synthetic construct
  source 1..75: mol_type = other DNA
ataccgccaaacggcttcccggaaaaagcacttaacttcctgacaccgcaccagaaatggggcattcactctacc

SEQ ID NO: 511936 - DNA, 75 bp, synthetic construct
  source 1..75: mol_type = other DNA
actactctgaagtggccaaattgtgcgaccagtggctggcaccgaaacaaggcactgatagcgccctggcgatgg

SEQ ID NO: 511937 - DNA, 75 bp, synthetic construct
  source 1..75: mol_type = other DNA
ggattatctcccaccgaatttaccgctcaggcgctgaaatcaggtgagctacgcatggcctgcgaacaaccggat

SEQ ID NO: 511938 - DNA, 75 bp, synthetic construct
  source 1..75: mol_type = other DNA
aactggtggtgccgaacggttcgattggttttcgctggggagaaaaaggcaaatggaatctggaatctattgccg

SEQ ID NO: 511939 - DNA, 75 bp, synthetic construct
  source 1..75: mol_type = other DNA
tggcttatcgcccgcctatcgacacccgcagtgtcagtgaaatgcgccagatcccgccaaacggcttcccggaaa

SEQ ID NO: 511940 - DNA, 75 bp, synthetic construct
  source 1..75: mol_type = other DNA
tgcatccgtttattcatccgctttctgcggcggtcgatccggcgtgggaatcacgcagcgactgggaaatctaca

SEQ ID NO: 511941 - DNA, 75 bp, synthetic construct
  source 1..75: mol_type = other DNA
tgagcagtacgggtcggaccgctatgcagcgaactgcatattgccccgtcaacgtattaccactgtcagcaacag

SEQ ID NO: 511942 - DNA, 75 bp, synthetic construct
  source 1..75: mol_type = other DNA
tacaccggagactctgcgtgtctggggacgccagcatgagcgggataccggaggcggtgatggcgggctcaccac

SEQ ID NO: 511943 - DNA, 75 bp, synthetic construct
  source 1..75: mol_type = other DNA
tatgactcacaatgggcggcaatttttagccatgaaaacgtaatcaactcggtgaaccaattcaaaaaatatact

SEQ ID NO: 511944 - DNA, 75 bp, synthetic construct
  source 1..75: mol_type = other DNA
cgcatgggctggctaccttctgcgccgcagttggggcgtaatccgctcacgttgaaagccgaagccgacaaggcc

SEQ ID NO: 511945 - DNA, 75 bp, synthetic construct
  source 1..75: mol_type = other DNA
ggcctttgcgctggactggaaccgtccgccacgccagatgaacagcacctcgtttttctacaatcattccagcca

SEQ ID NO: 511946 - DNA, 75 bp, synthetic construct
  source 1..75: mol_type = other DNA
tatgactcacaatgggcggcaatttgttccattgccccaaagattggctgtacgccggagaccctgcgtgtctgg

SEQ ID NO: 511947 - DNA, 75 bp, synthetic construct
  source 1..75: mol_type = other DNA
gcttgtttattaagatccgcgaacgcggcgacctactaccggatattgacgaatacgcgactaatatgtggggtg

SEQ ID NO: 511948 - DNA, 75 bp, synthetic construct
  source 1..75: mol_type = other DNA
cttacccgccatcgaataatcgctattaccgacattcgcgcggttttcactatatcagcaaagtggggaaggaat

SEQ ID NO: 511949 - DNA, 75 bp, synthetic construct
  source 1..75: mol_type = other DNA
ttaccggaacggcaggttcttctgctattgtggatggtaacactatctggcttattggtggagaacggaaaccag

SEQ ID NO: 511950 - DNA, 75 bp, synthetic construct
  source 1..75: mol_type = other DNA
atatcttgccgactggcaatcatcatttatgccgcaccgccggataacaggaccagggatctcgataatatccca

SEQ ID NO: 511951 - DNA, 75 bp, synthetic construct
  source 1..75: mol_type = other DNA
atgaatgaatatacttttagcctgccttacccgccatcgaataaccgctattaccgacattcgcgtggttttcac

SEQ ID NO: 511952 - DNA, 75 bp, synthetic construct
  source 1..75: mol_type = other DNA
cttacccgccatcgaataataggtattaccggcattcacgaggttttcattatatcagtaaagtggggaaagaat

SEQ ID NO: 511953 - DNA, 75 bp, synthetic construct
  source 1..75: mol_type = other DNA
gatgtgatcccatcagtatggggaacgccgctttactatcgcctgcccggcttcgaaacggactggaataccgat

SEQ ID NO: 511954 - DNA, 75 bp, synthetic construct
  source 1..75: mol_type = other DNA
caggaaataattgatgcttgccgggtatgggcgaacgagtgggataagaagaacggtggagttgaaaatctttac

SEQ ID NO: 511955 - DNA, 75 bp, synthetic construct
  source 1..75: mol_type = other DNA
ctggtggcggaaatcaacaagctgcttgatgatggggcagttgattacaataagctggtggatcagtttgaggaa

SEQ ID NO: 511956 - DNA, 75 bp, synthetic construct
  source 1..75: mol_type = other DNA
acggagaaataatgttatcacgcgaacttgccgaaatttactgtaacgtgaataacggtaaaaaattgggtgatg

SEQ ID NO: 511957 - DNA, 75 bp, synthetic construct
  source 1..75: mol_type = other DNA
tgctacgtgtggagcgggcgctggaaagatgtgtgaagcaacagccgccacaaaaggtgtatgactcggtggtgt

SEQ ID NO: 511958 - DNA, 75 bp, synthetic construct
  source 1..75: mol_type = other DNA
cattggtaatacatctggtgtcattccaggcaaaaccattacggaacgacaggcagcggaagggctgatctccaa

SEQ ID NO: 511959 - DNA, 75 bp, synthetic construct
  source 1..75: mol_type = other DNA
cttacccgccatcgaacaataaatattaccggcattcgcgcggtttccactatataagcaaggaaggtaaggaat

SEQ ID NO: 511960 - DNA, 75 bp, synthetic construct
  source 1..75: mol_type = other DNA
cagattatcaataatggagttataaaaagtctatcagcacgggtgtcggatattcttgcggatggaataatcaca

SEQ ID NO: 511961 - DNA, 75 bp, synthetic construct
  source 1..75: mol_type = other DNA
ccatttagcaggcgatctggtaggttttgacgctattggcagcggtcatcaccctagcttcgcccaggcgctgga

SEQ ID NO: 511962 - DNA, 75 bp, synthetic construct
  source 1..75: mol_type = other DNA
aaggcgatgagcaaattactggcttccatttagcaggcgatctggtaggttttgacgctattggcagtggccatc

SEQ ID NO: 511963 - DNA, 75 bp, synthetic construct
  source 1..75: mol_type = other DNA
atgcaacacagcattaaagacttatggttgtatccctttccggagatcgatgtggttcatactcaggagccactg

SEQ ID NO: 511964 - DNA, 75 bp, synthetic construct
  source 1..75: mol_type = other DNA
tctccagtcacggaaggaaaatagaaaaagcagtctcatatagagatgatgaaggggctaagttaaaaatcattt

SEQ ID NO: 511965 - DNA, 75 bp, synthetic construct
  source 1..75: mol_type = other DNA
atttgctaacttgattagcatcattgatggaatcattgcagatggagttgtccgtgaagaggaggttctttactt

SEQ ID NO: 511966 - DNA, 75 bp, synthetic construct
  source 1..75: mol_type = other DNA
cgcatccctgcagatttatatattgtttatgaaacacagcaggtgacgcccgcgatggttaagctgttggctgca

SEQ ID NO: 511967 - DNA, 75 bp, synthetic construct
  source 1..75: mol_type = other DNA
accgacaggttttaccagcttacggttgcatgaatcggcgtttctggtggcgatgcctgaagagcatcatctctc

SEQ ID NO: 511968 - DNA, 75 bp, synthetic construct
  source 1..75: mol_type = other DNA
aacttgttcgcaccttccctaataatgtattggctcgggttgaacaaataggtcggggagaagcagggcggattg

SEQ ID NO: 511969 - DNA, 75 bp, synthetic construct
  source 1..75: mol_type = other DNA
gtaaaatgccgaatctgcgtcagcagatgatgcgtctgatgagcggtgaaatcaaaggcgatcaggacatgatcc

SEQ ID NO: 511970 - DNA, 75 bp, synthetic construct
  source 1..75: mol_type = other DNA
cctgtatctcttgccggtcatgtttcttttatccataatggtcatgcggtatctactggtggtgtaaatgagaat

SEQ ID NO: 511971 - DNA, 75 bp, synthetic construct
  source 1..75: mol_type = other DNA
attttccaccgttccgctggaagcgctacgtgacgagtattttgttacaatgccgcccgtgtacactgactggga

SEQ ID NO: 511972 - DNA, 75 bp, synthetic construct
  source 1..75: mol_type = other DNA
tgtatcagcgacagttgaaagcctgggggatgctgttaatcaatttgccgcgaatatgcgtaatgagatcggcaa

SEQ ID NO: 511973 - DNA, 75 bp, synthetic construct
  source 1..75: mol_type = other DNA
ttgggctttctcgtttctcgccgttatgaagagcgacaggagcaagagctgcttcaggagctgccctggctacaa

SEQ ID NO: 511974 - DNA, 75 bp, synthetic construct
  source 1..75: mol_type = other DNA
tctcgtcgttatgaagagcgacaagagccaggagctaccctggctacaaatgcgctttcagaaccgggccaactt

SEQ ID NO: 511975 - DNA, 75 bp, synthetic construct
  source 1..75: mol_type = other DNA
gaatatctttattcaatcagaaatcatcgttataccgccacgatgcttcagcatattgctgaagatcgtggtgaa

SEQ ID NO: 511976 - DNA, 75 bp, synthetic construct
  source 1..75: mol_type = other DNA
cagcgtcgatatcaccgcgccaacggtatttggtcacaccaaaaataacctctccggctccatcgacgccaaccg

SEQ ID NO: 511977 - DNA, 75 bp, synthetic construct
  source 1..75: mol_type = other DNA
tatctcctatgccggacgtggcgcgttaagcgacgccaatgccgcaggctggctgacgcggttgtttaaccatcc

SEQ ID NO: 511978 - DNA, 75 bp, synthetic construct
  source 1..75: mol_type = other DNA
cgctgcttccactccttagcgggtgtgaatcacaggccattctggtcaaaaaagacgacgcatactttgcgccac

SEQ ID NO: 511979 - DNA, 75 bp, synthetic construct
  source 1..75: mol_type = other DNA
attaaaaaggatattaaatggatgcaagaccaggcgagtgcacatggattacttgaccatcccacgctcagacaa

SEQ ID NO: 511980 - DNA, 75 bp, synthetic construct
  source 1..75: mol_type = other DNA
tacgctagagaatggcccggacgatacgctgacaattcatcctgccacattccccctcgaaaacgtctcccgctg

SEQ ID NO: 511981 - DNA, 75 bp, synthetic construct
  source 1..75: mol_type = other DNA
gttttgcactgctcggatgggttggagcggagatggcaagcgggcttgacccattctggcgccccgatgttgtgc

SEQ ID NO: 511982 - DNA, 75 bp, synthetic construct
  source 1..75: mol_type = other DNA
tttgcaacatcaggaaactgccaacagcaacaaagtagcaatcatcaaaatcatcctgaatacgatgattcaatt

SEQ ID NO: 511983 - DNA, 75 bp, synthetic construct
  source 1..75: mol_type = other DNA
catcaacgtatcggctatctggcttccagtcatggcattgaagatgatgcaatgcgcaaagcagggtggatgagc

SEQ ID NO: 511984 - DNA, 75 bp, synthetic construct
  source 1..75: mol_type = other DNA
ttagtgcgtcgccattctgtcgcaacacgccagaatgcggcggcgatcactaactcaacaaatcaggcgatgtaa

SEQ ID NO: 511985 - DNA, 75 bp, synthetic construct
  source 1..75: mol_type = other DNA
cgaaaaccgaagcgccgcctccggcagacgggcgtgccgggggcgtgtttgaaactggctacaactggtcgctga

SEQ ID NO: 511986 - DNA, 75 bp, synthetic construct
  source 1..75: mol_type = other DNA
gtgtggccgccgtgctggcgctggcggcactggtgcctgactttcgtctgcttaacacctcgcccgaggggctgg

SEQ ID NO: 511987 - DNA, 75 bp, synthetic construct
  source 1..75: mol_type = other DNA
ggtgtttgtgaatggtgagcgtaatgccggggtcgaaaaccgccgctttcgtgagcgcacctactgcctgaaggg

SEQ ID NO: 511988 - DNA, 75 bp, synthetic construct
  source 1..75: mol_type = other DNA
ctattcgacgtgcttttgtactgtggtcccgtccttcactgtggcggtttgtgcaacgtcaggctatggcaatgg

SEQ ID NO: 511989 - DNA, 75 bp, synthetic construct
  source 1..75: mol_type = other DNA
tacatcaagcgtcatcagtggtggcaggcatgcgaccagctcacccgttgggtgtacgtcaacggggagcgtagt

SEQ ID NO: 511990 - DNA, 75 bp, synthetic construct
  source 1..75: mol_type = other DNA
ggtgtatgtgaagggtgtccgaaaccgggggctggaaaaccgacgcgatcgggagtgggcttactgcgtgaaggg

SEQ ID NO: 511991 - DNA, 75 bp, synthetic construct
  source 1..75: mol_type = other DNA
ctgtgtgccggtggatatgccaccgcgcgtctatgacacgctggtcagttttgcctttaacgtgggaaccggcgc

SEQ ID NO: 511992 - DNA, 75 bp, synthetic construct
  source 1..75: mol_type = other DNA
catctcctatgccggacgcggcgcgttaagcgatgccaacgccgcaggctggttgacgcggctgtttaaccatcc

SEQ ID NO: 511993 - DNA, 75 bp, synthetic construct
  source 1..75: mol_type = other DNA
cgctgcttcccctgcttagcgggtgtgaatcgcaggccattctggtcaaaaaagacgacgcatactttgcgccac

SEQ ID NO: 511994 - DNA, 75 bp, synthetic construct
  source 1..75: mol_type = other DNA
ggtgcagcccaacggcatcctggaaattcgcggcgagaaatggctgaccctcaaccagggcgatgagtacatccg

SEQ ID NO: 511995 - DNA, 75 bp, synthetic construct
  source 1..75: mol_type = other DNA
gtaaaaggatacggagataaggcttctgactggtttaaccgttcgttgctcaaagaacggttaggttttgaaaaa

SEQ ID NO: 511996 - DNA, 75 bp, synthetic construct
  source 1..75: mol_type = other DNA
ttatccgacctacaagagcacataactcactgtatttaaacaggcagaacgtgaaaaattatctctggctggtgg

SEQ ID NO: 511997 - DNA, 75 bp, synthetic construct
  source 1..75: mol_type = other DNA
catctcctatgccggacgcggcgcgttaagcgacgccaacgccgcaggctggctgacgcggctgtttaaccatcc

SEQ ID NO: 511998 - DNA, 75 bp, synthetic construct
  source 1..75: mol_type = other DNA
cgttaatggattacggcggattaagtctcgcggaagcctgcgagcgggtagtaatggaaaaactccctgcgcttg

SEQ ID NO: 511999 - DNA, 75 bp, synthetic construct
  source 1..75: mol_type = other DNA
tgtgtttatggtttatgaccaaatcgaaggctgccgatccagccaaaggttatcgtgatcgtcagggcgagacgc

SEQ ID NO: 512000 - DNA, 75 bp, synthetic construct
  source 1..75: mol_type = other DNA
cggttatcgctggacccaggcggtgctggtggtgctgatgaccttaccgcgcacactggtcgaactttcgccgtt

SEQ ID NO: 512001 - DNA, 75 bp, synthetic construct
  source 1..75: mol_type = other DNA
aagtcttcatccgcgcgctggcggcatatgacatcgccgcgttaatggattacggcggattaagtctcgcggaag

SEQ ID NO: 512002 - DNA, 75 bp, synthetic construct
  source 1..75: mol_type = other DNA
tacggcgggttaagtttgtcggaggcctgtgagcgggtggtgatggaaaaacttccggcattgggcggcagcggt

SEQ ID NO: 512003 - DNA, 75 bp, synthetic construct
  source 1..75: mol_type = other DNA
gcgacagtcctttagttggcgcgggttgctatgccaataacgccagcgttgctgtttcatgtaccggaacgggcg

SEQ ID NO: 512004 - DNA, 75 bp, synthetic construct
  source 1..75: mol_type = other DNA
acctttaccccttatgttgaatatgattatctcgataaacagggagtatataaaggaagggataatattgctgaa

SEQ ID NO: 512005 - DNA, 75 bp, synthetic construct
  source 1..75: mol_type = other DNA
tattcctggtattcagacgcaatggatgtctgcaggaagccagtataatccttatctgaaactttcttatcaggt

SEQ ID NO: 512006 - DNA, 75 bp, synthetic construct
  source 1..75: mol_type = other DNA
ctgttgttctggttgttggtgatgcggtggcgcttgcactctctgaattgaaaaaatttactcgtgctgatttcg

SEQ ID NO: 512007 - DNA, 75 bp, synthetic construct
  source 1..75: mol_type = other DNA
gtctttcagctaacctcggcgaacgcccggcagacaccttctttagcgaccagcacccggacctgaaagccgact

SEQ ID NO: 512008 - DNA, 75 bp, synthetic construct
  source 1..75: mol_type = other DNA
cctggaatacaattcacaacaatgaaaatgaattgtttgcactcaattataataaaatagatataaataaaacat

SEQ ID NO: 512009 - DNA, 75 bp, synthetic construct
  source 1..75: mol_type = other DNA
tggggattactggccctcgcgcttaattatatccccaatattggttcggtcctggcggctattccccctatcgcc

SEQ ID NO: 512010 - DNA, 75 bp, synthetic construct
  source 1..75: mol_type = other DNA
aaaatgggcaccgtgggtgccgtggcgttggatttagacggcaatctggcggcagccacgtccacgggcggaatg

SEQ ID NO: 512011 - DNA, 75 bp, synthetic construct
  source 1..75: mol_type = other DNA
aagcgttcagtttagattaaagtaccccattaagactggaaaaaataaagagttcatggaatttttggtggtaat

SEQ ID NO: 512012 - DNA, 75 bp, synthetic construct
  source 1..75: mol_type = other DNA
atcttattttaaggcatacgacttccaaaaaatctcaaaaagcaagaaatgagggagttgcaattgaccattgca

SEQ ID NO: 512013 - DNA, 75 bp, synthetic construct
  source 1..75: mol_type = other DNA
gcccctttcagtacaatgaaagaagaatataccttatattcggaggatgctcgtgcagcggcaaagcatggtttg

SEQ ID NO: 512014 - DNA, 75 bp, synthetic construct
  source 1..75: mol_type = other DNA
gtggaaatacaaggtctgggaatgcctaatataccaattggacaaccaatagactacatggttcctccctttgga

SEQ ID NO: 512015 - DNA, 75 bp, synthetic construct
  source 1..75: mol_type = other DNA
tattaacaaccatgctgtaaaagtgaatttcagagacagccaattgtcgtgtatggcaactactggaaacacctg

SEQ ID NO: 512016 - DNA, 75 bp, synthetic construct
  source 1..75: mol_type = other DNA
acgtaaatacctactccgttataccgggaagcaaaaaaccgattagtggcaattcacaatatatagcagaaattg

SEQ ID NO: 512017 - DNA, 75 bp, synthetic construct
  source 1..75: mol_type = other DNA
gctaccgtttaacaccgaaggaatgtatcgcgcctggggctacgcaggcgatacgccaaccaccggtatctaccg

SEQ ID NO: 512018 - DNA, 75 bp, synthetic construct
  source 1..75: mol_type = other DNA
gattttttccacgcctttgcgttatgaacaactgatggcggcgcgtgaggaaggggaaatgatcctcgaccatag

SEQ ID NO: 512019 - DNA, 75 bp, synthetic construct
  source 1..75: mol_type = other DNA
agtcatctgcgcaatccgattcttgctgcccgtctggtgatggagcaaagcccgcatgtgatgatgattggcgaa

SEQ ID NO: 512020 - DNA, 75 bp, synthetic construct
  source 1..75: mol_type = other DNA
aactggacgctgataaaagtgtacatttgagcgctattgcaggttttcaacgcgatagagtttcagaacagcgcc

SEQ ID NO: 512021 - DNA, 75 bp, synthetic construct
  source 1..75: mol_type = other DNA
gaaagccggtgctgtggcgggcgtcagtcatctgcgtaatccggttcttgccgcccgtctggtgatggaacaaag

SEQ ID NO: 512022 - DNA, 75 bp, synthetic construct
  source 1..75: mol_type = other DNA
acggcggcgcaggcgcaattagccgcgcacagatgagtctgcaacaggaattacgctacattgaggcactgtctg

SEQ ID NO: 512023 - DNA, 75 bp, synthetic construct
  source 1..75: mol_type = other DNA
gattccccactttctgaagtcgctaatttaattaaagtattacaatcttgtcagggtaaagttgtttttattggt

SEQ ID NO: 512024 - DNA, 75 bp, synthetic construct
  source 1..75: mol_type = other DNA
gtgaatccagtcatcacgtttgtccgcgttgttctgggtactggcaccgtgcgtgacaacgaatcgctgtcgctc

SEQ ID NO: 512025 - DNA, 75 bp, synthetic construct
  source 1..75: mol_type = other DNA
gccagctgaacctgccgcgcctgttgtagccccagcaccgaaagctgcaccggcaacaccagcaactcctgcaca

SEQ ID NO: 512026 - DNA, 75 bp, synthetic construct
  source 1..75: mol_type = other DNA
gccatcgacatcaactccgcacgcgcaacccgcggcggtgatatcgaagaaaccgcgtttaacactaacctggaa

SEQ ID NO: 512027 - DNA, 75 bp, synthetic construct
  source 1..75: mol_type = other DNA
ttcagctatcttgccagcgtcctgtgtcagcatccggcggaaactattgccaggttaacagggtatgaagcgttt

SEQ ID NO: 512028 - DNA, 75 bp, synthetic construct
  source 1..75: mol_type = other DNA
tgccggatgtgccgccagcaccaaccccagctgaacctgccgcgcctgttgtagccccagcacctaaagctgcaa

SEQ ID NO: 512029 - DNA, 75 bp, synthetic construct
  source 1..75: mol_type = other DNA
ccgagtctggaagctgcttttgtcgattacggcgctgaacgtcacggtttcctcccactaaaagaaattgcccgc

SEQ ID NO: 512030 - DNA, 75 bp, synthetic construct
  source 1..75: mol_type = other DNA
taatccaacaatcatttatcgtccctacagttttatggccaaaataagcgccgttgagcgcggacatttcctgac

SEQ ID NO: 512031 - DNA, 75 bp, synthetic construct
  source 1..75: mol_type = other DNA
gtatctgcacgagttcaggaactggaaaacctgactatcagtgaattaccaccgctgcgattgggctttctcgtt

SEQ ID NO: 512032 - DNA, 75 bp, synthetic construct
  source 1..75: mol_type = other DNA
caatccaaccattatttatcgtccctacagttttatggccaaaatcagcgccgtggagcgcggacattttctgac

SEQ ID NO: 512033 - DNA, 75 bp, synthetic construct
  source 1..75: mol_type = other DNA
aaaggtgccgcaggtggtcatacggcaacgcatcatgcctctgccgctcctgcgcgtccgcaacctgttgagtaa

SEQ ID NO: 512034 - DNA, 75 bp, synthetic construct
  source 1..75: mol_type = other DNA
aggaagaacgtgtacgtccggttcagccgcgtcgtaaacagcgtcagctcaatcagaaagtgcgttacgagcaaa

SEQ ID NO: 512035 - DNA, 75 bp, synthetic construct
  source 1..75: mol_type = other DNA
gagtcggccttccagcgtgaagtccgtctgccatccggtggttccatcgttatcgacagcaccgaggcattaacc

SEQ ID NO: 512036 - DNA, 75 bp, synthetic construct
  source 1..75: mol_type = other DNA
aacagagactggatgccataaatcaattgcgtgtggatcgcgcgcttgctgctatggggcctgcattccaacagg

SEQ ID NO: 512037 - DNA, 75 bp, synthetic construct
  source 1..75: mol_type = other DNA
tatggccgtgtccctgaaattaattctaaaggtgatgttattcctgctggcgacatcttcttgcgtgttggtagg

SEQ ID NO: 512038 - DNA, 75 bp, synthetic construct
  source 1..75: mol_type = other DNA
attttcttcagcaacagctacaaatcaccgcgcaggatcgtgtgtggcatgtgaagcgcgtgcgctatcgcaagc

SEQ ID NO: 512039 - DNA, 75 bp, synthetic construct
  source 1..75: mol_type = other DNA
acaaagcggtgctgaaaacactgttgctggaagcttattcctgggaatatccagacccacgcctgctggcgaaag

SEQ ID NO: 512040 - DNA, 75 bp, synthetic construct
  source 1..75: mol_type = other DNA
ttattaaacattttatgcgcaacgaacataaagtagttgaagagattatcgattctcccctttcggaagttgctg

SEQ ID NO: 512041 - DNA, 75 bp, synthetic construct
  source 1..75: mol_type = other DNA
aaatgcgtcaaagaaaaaagatgaagagaaagttagcttggataatttaagtgttattgaagagtctaaactaga

SEQ ID NO: 512042 - DNA, 75 bp, synthetic construct
  source 1..75: mol_type = other DNA
gcgcctgaaactgagtctggttggatctatgtcgttgtgactgcgtacacacgaaggacggcgcacggtactttg

SEQ ID NO: 512043 - DNA, 75 bp, synthetic construct
  source 1..75: mol_type = other DNA
ctaacccagttagtgaaagagtgggaatgggacgatgctcgtctggcaatgctcgataaccgcgctaactggaag

SEQ ID NO: 512044 - DNA, 75 bp, synthetic construct
  source 1..75: mol_type = other DNA
gcttccaattactggtgtatacaccatgggcagcacctcgtccgtagggcaaagttgttcctctgacctggatat

SEQ ID NO: 512045 - DNA, 75 bp, synthetic construct
  source 1..75: mol_type = other DNA
gctgaatgtatcggtacagaaactggaaaatgccatcgagttttatggcgctatttcgcataacaaactgcacgg

SEQ ID NO: 512046 - DNA, 75 bp, synthetic construct
  source 1..75: mol_type = other DNA
ttaccgaatatttgacggcgattgaagatttcacccgtctggatttggtgcgccgctgcttttatttaaaagtgt

SEQ ID NO: 512047 - DNA, 75 bp, synthetic construct
  source 1..75: mol_type = other DNA
atcaacttcaacctgccgcagttctatcagattgtgaaggttgatggtcgtgaacaggtgattccgttccgcacc

SEQ ID NO: 512048 - DNA, 75 bp, synthetic construct
  source 1..75: mol_type = other DNA
aatgtctgtacaggaaccgccaaaaggcgagcttccgattactggcgtatacaccatgggcagcacctcgtccgt

SEQ ID NO: 512049 - DNA, 75 bp, synthetic construct
  source 1..75: mol_type = other DNA
cggcaggaccgtaattgctgaagtgatagaacctgataaccgcttatttcagattctgaaaacacgcggcaaagt

SEQ ID NO: 512050 - DNA, 75 bp, synthetic construct
  source 1..75: mol_type = other DNA
ttcatcggcaatgcgacttgaccctgatgccatcatggaaggggaaatgcgcgatcttatctcgatgatgtcaac

SEQ ID NO: 512051 - DNA, 75 bp, synthetic construct
  source 1..75: mol_type = other DNA
agcatcttcttcgccgtatcaatgaaggcctggtggaccctcttgaagccgacagaatcatccctctggacgaag

SEQ ID NO: 512052 - DNA, 75 bp, synthetic construct
  source 1..75: mol_type = other DNA
ccggtgatgtgcgtcagctgcttgagcagatggtgaaagaggctgtaagccatatccctgctccgcgtgacggtc

SEQ ID NO: 512053 - DNA, 75 bp, synthetic construct
  source 1..75: mol_type = other DNA
aactcagctctgggtataccggagcgaatgattacgatgggtatgaatgccgatcttatttgcgatgcgcaatta

SEQ ID NO: 512054 - DNA, 75 bp, synthetic construct
  source 1..75: mol_type = other DNA
gtagtctcgttgtcggagttacaggaggcaggtcaggatgagaaaaacagaggcccgaaagaacgaattattcat

SEQ ID NO: 512055 - DNA, 75 bp, synthetic construct
  source 1..75: mol_type = other DNA
tggtggtgtacaacattccagccctgagtggggtaaaactgaccctggatcagatcaacacacttgttacgttgc

SEQ ID NO: 512056 - DNA, 75 bp, synthetic construct
  source 1..75: mol_type = other DNA
tccagaaaagtacttagataaatatgacgagtatttaccagagtcccttcttgcgaaagggtatggtgcaaaggc

SEQ ID NO: 512057 - DNA, 75 bp, synthetic construct
  source 1..75: mol_type = other DNA
agcggcgaaatggttgttggggcagagggggagaaactgactaaccattacactttttatgccgtgttcaataca

SEQ ID NO: 512058 - DNA, 75 bp, synthetic construct
  source 1..75: mol_type = other DNA
agcaacgactggatgcgaaggttaacctggcgggcggcatcaatgaggatttttaccttgcacagcttgctgccc

SEQ ID NO: 512059 - DNA, 75 bp, synthetic construct
  source 1..75: mol_type = other DNA
ctgccggatgaatgtattcccgcagggacacagacccttcgccagcgtcagcaacggctggatgcgaaggttaac

SEQ ID NO: 512060 - DNA, 75 bp, synthetic construct
  source 1..75: mol_type = other DNA
ctggcaggtcaacatgccagccgccaccaacaccacctggatgacatgtggcgatccctgtgattccgcgctgcg

SEQ ID NO: 512061 - DNA, 75 bp, synthetic construct
  source 1..75: mol_type = other DNA
cggcactgttgccgcccggtccggcgtggtcagccagcgatccggcgattgccggtgcggcaccgtcattaaccc

SEQ ID NO: 512062 - DNA, 75 bp, synthetic construct
  source 1..75: mol_type = other DNA
ggcagacttttgacaaatctgcttacccgaaacttgcagtggcttatccgtcaggcgttattcctgatatgcgtg

SEQ ID NO: 512063 - DNA, 75 bp, synthetic construct
  source 1..75: mol_type = other DNA
cagtgggagctgcactattgcttgtcatgccagtagccgtatggatttctggttggcgttggcaacctggagaac

SEQ ID NO: 512064 - DNA, 75 bp, synthetic construct
  source 1..75: mol_type = other DNA
gcgaaatgtctgtttaccttgcgctttattatctccgggaactgcaccgacagcatattgtggagcctgaccgca

SEQ ID NO: 512065 - DNA, 75 bp, synthetic construct
  source 1..75: mol_type = other DNA
atgcgtttacaacctgattgttatgaaaaaattatccgttttatggaagagcgtaatgcaaccgtatcgccgctg

SEQ ID NO: 512066 - DNA, 75 bp, synthetic construct
  source 1..75: mol_type = other DNA
gtacggatttggggacgaaaaccacatcgtcgtttgattacggcactaaatccacgaataacaccggggcgcata

SEQ ID NO: 512067 - DNA, 75 bp, synthetic construct
  source 1..75: mol_type = other DNA
cggaatcacagccggaaccgaaaaaaggaggcgcgaaaacgaaaggccgtggacgtaaggccgcgcagccggagc

SEQ ID NO: 512068 - DNA, 75 bp, synthetic construct
  source 1..75: mol_type = other DNA
atgacggaacgggaactgtccattattcgtgcactgggagaagaattctccacggtgctggcggatttacagcgc

SEQ ID NO: 512069 - DNA, 75 bp, synthetic construct
  source 1..75: mol_type = other DNA
aagtcgtttggcaatttccatcatgacgtgacaaccgttctgcaaaactactttcattactgcgctctgaaaatg

SEQ ID NO: 512070 - DNA, 75 bp, synthetic construct
  source 1..75: mol_type = other DNA
gaccgggcaggaccgctataccaccgaagtcactgttaacgctcgcggcacgatgcaaatgctggggcgcgctca

SEQ ID NO: 512071 - DNA, 75 bp, synthetic construct
  source 1..75: mol_type = other DNA
cagccacagagtgctgacgcgacgaaaaaaggtggcgcgaaaacgaaaggccgtggacgtaaggccgcgcagcca

SEQ ID NO: 512072 - DNA, 75 bp, synthetic construct
  source 1..75: mol_type = other DNA
ccgtggacgtaaggccgcgcagccagagcctcagccgcaaccgccggagggggaggattacgggttttcagacga

SEQ ID NO: 512073 - DNA, 75 bp, synthetic construct
  source 1..75: mol_type = other DNA
tacgtccctgcttatacgttgtggctttaaagccagttcatttgcaggtgtgatagaggtagaggactcaggcgt

SEQ ID NO: 512074 - DNA, 75 bp, synthetic construct
  source 1..75: mol_type = other DNA
ggcggtatacaacaaagctgaatatcgagagcaaagagcatcaatgctacaggattgggctgatatgatagatga

SEQ ID NO: 512075 - DNA, 75 bp, synthetic construct
  source 1..75: mol_type = other DNA
aattttagtgaggcattatggacgataccaaaggagaggatgaaacgacgtaatccacatttggtttttctttcc

SEQ ID NO: 512076 - DNA, 75 bp, synthetic construct
  source 1..75: mol_type = other DNA
agcagtggtccgatatgattgattcctggattaacggggagcatacggatctgattccgttctccccgtcgaagt

SEQ ID NO: 512077 - DNA, 75 bp, synthetic construct
  source 1..75: mol_type = other DNA
gtgcttaccgatacaaaattaaaaaacctcaagccacaggacaaactgtacaaagtttccgatcgtgacgggctg

SEQ ID NO: 512078 - DNA, 75 bp, synthetic construct
  source 1..75: mol_type = other DNA
acctcaaaccgcaggacaaactgtataaggtttctgatcgtgacgggctgtacgtcgctgtacttacctccggat

SEQ ID NO: 512079 - DNA, 75 bp, synthetic construct
  source 1..75: mol_type = other DNA
cgatggtgcgtaaaggcgaattgcttaacgcgccgtggagcgagattaattttaatgcctgcctttgggcgattg

SEQ ID NO: 512080 - DNA, 75 bp, synthetic construct
  source 1..75: mol_type = other DNA
ctttgaagacgttctccggtggatcggattatgttctgccgtcgcgttacgattctgacgtgcccatgagcagtg

SEQ ID NO: 512081 - DNA, 75 bp, synthetic construct
  source 1..75: mol_type = other DNA
gtgcttaccgatacaaaattaaaaaacctcaagccgcaggacaaactgtacaaggtttccgatcgtgacgggctg

SEQ ID NO: 512082 - DNA, 75 bp, synthetic construct
  source 1..75: mol_type = other DNA
agaactgattgctgcaaagaagctgcttaaagcaggccagtcaccggctgcggctaaacgtgacggtatcaaaaa

SEQ ID NO: 512083 - DNA, 75 bp, synthetic construct
  source 1..75: mol_type = other DNA
attgagcgcggtcagaaggtggagaatccagctgatctggtacggcctgcaagcatagcgaaatttgagcctcga

SEQ ID NO: 512084 - DNA, 75 bp, synthetic construct
  source 1..75: mol_type = other DNA
agctgtttataacaaggcagaatatcgcgagcagagggctgagatgctacaagattgggcgaatatgattgatga

SEQ ID NO: 512085 - DNA, 75 bp, synthetic construct
  source 1..75: mol_type = other DNA
cacgcagattgccacggcgcgggcaagagcagccgtgtaccgtgctcagcaggcagtggcggcagcccgcgggac

SEQ ID NO: 512086 - DNA, 75 bp, synthetic construct
  source 1..75: mol_type = other DNA
ctggattgacggggagcatacggatctgattccgttctccccgtcgaagtttgagaagtggatggcgggtaataa

SEQ ID NO: 512087 - DNA, 75 bp, synthetic construct
  source 1..75: mol_type = other DNA
tctctgtccagagatctgcgtgaaacgctggaacagaggcttcaacaaggcaacttacccaccaccgccatctgt

SEQ ID NO: 512088 - DNA, 75 bp, synthetic construct
  source 1..75: mol_type = other DNA
ctataaatctctaggacgcataggtgaagtacacattaaagacaataaattaagtgatatgaattttgtgggtgt

SEQ ID NO: 512089 - DNA, 75 bp, synthetic construct
  source 1..75: mol_type = other DNA
atacaattgttgaacaagcgaagtataatttactttcatggaatgatttttataatactcatgcgtcaatatggg

SEQ ID NO: 512090 - DNA, 75 bp, synthetic construct
  source 1..75: mol_type = other DNA
cacaaagcaaaaagaagaaggctcggacgaaccctgctggcattttactgattacacctgagtcacttgagtctt

SEQ ID NO: 512091 - DNA, 75 bp, synthetic construct
  source 1..75: mol_type = other DNA
ttacgaaaggatttggggaaaaggcgtatgacattgaaggcactcatacttggttgaagcagcaccttcagcaaa

SEQ ID NO: 512092 - DNA, 75 bp, synthetic construct
  source 1..75: mol_type = other DNA
atcacacctgaatcacttgagtctttgctcataaactcattgggttggctcaaacaggcgttttcttctgtggca

SEQ ID NO: 512093 - DNA, 75 bp, synthetic construct
  source 1..75: mol_type = other DNA
aaacaataaagaaaaacaaattatctgtcattagtttaaatagcaacatcaaaaatgatattgtattgtccggag

SEQ ID NO: 512094 - DNA, 75 bp, synthetic construct
  source 1..75: mol_type = other DNA
ggcttaacttttaaagaggggataaatagtttatctgaagcactcgagcacatgaatatagatgcaattatgtct

SEQ ID NO: 512095 - DNA, 75 bp, synthetic construct
  source 1..75: mol_type = other DNA
ttaaaacaaatgttctttcagttaataacttcaaagaatcaaagataaatagtgatactgtggaagttacagtaa

SEQ ID NO: 512096 - DNA, 75 bp, synthetic construct
  source 1..75: mol_type = other DNA
acaacatcgaaaattctattatatcaggtcatgaatcatttgagataatacgaagccatcaacatgagtggggag

SEQ ID NO: 512097 - DNA, 75 bp, synthetic construct
  source 1..75: mol_type = other DNA
tacgcagattgccacggcgcgggcaagcgcagccgtgtaccgtgcgcagcaggcagtggcggcagcccgcgggac

SEQ ID NO: 512098 - DNA, 75 bp, synthetic construct
  source 1..75: mol_type = other DNA
tgagtgttggtgttaatgatattacaccggatgatgaaagctcatgggctgtcagaaataatgatattaataaaa

SEQ ID NO: 512099 - DNA, 75 bp, synthetic construct
  source 1..75: mol_type = other DNA
caggaaaacagtgaaaaactggcggccgatatgatgatcagtcagaaacgcatgggcggcctgcaggccgtgcgt

SEQ ID NO: 512100 - DNA, 75 bp, synthetic construct
  source 1..75: mol_type = other DNA
caggaaaacagtgaaaaactggcggccgatatgatcatcagtcagaaacgcatggggggcctgcaggccgtgcgt

SEQ ID NO: 512101 - DNA, 75 bp, synthetic construct
  source 1..75: mol_type = other DNA
caggaaaacagtgaaaaactggccgccgatatgatgatcagtcagaaacgcatggggggcctgcaggccgtgcgt

SEQ ID NO: 512102 - DNA, 75 bp, synthetic construct
  source 1..75: mol_type = other DNA
cctcaaaaacaccatcatacactaaatcagtaagttggcagcatcacctaggaaaacaggccggaaatgtcggtc

SEQ ID NO: 512103 - DNA, 75 bp, synthetic construct
  source 1..75: mol_type = other DNA
atgtctctctatcaacacatgcttgttttttatgcggttatggcagcaatcgcatttcttatcacttggtttctt

SEQ ID NO: 512104 - DNA, 75 bp, synthetic construct
  source 1..75: mol_type = other DNA
gcaggagaaacacgaggacagaacgcatcagtcctgcgatgtaaattgtggatggtttagcccactgacgacaga

SEQ ID NO: 512105 - DNA, 75 bp, synthetic construct
  source 1..75: mol_type = other DNA
caaaggctggctgcagaaaatccgtgaggagcaccggatcacgtcatgggcagcaccaccatgggcggtgaaacc

SEQ ID NO: 512106 - DNA, 75 bp, synthetic construct
  source 1..75: mol_type = other DNA
actaccgctgcgcggctctggttgaaaacatcgagtacggtgatttcagtaccccagcaccagataccggagagt

SEQ ID NO: 512107 - DNA, 75 bp, synthetic construct
  source 1..75: mol_type = other DNA
cgcgactgactatgcgctgaaattccagaaagcccaggatgcactaaagcatgcagtcttactgcacaaaaacac

SEQ ID NO: 512108 - DNA, 75 bp, synthetic construct
  source 1..75: mol_type = other DNA
caggaaaacagtgaaaaactggctgccgatatgataatcagtcagaaacgcatgggtggcctgcaggccgtgcgt

SEQ ID NO: 512109 - DNA, 75 bp, synthetic construct
  source 1..75: mol_type = other DNA
caggaaaacagtgaaaaactggcagccgatatgattatcagtcagaaacgcatgggtggcctgcaggccgtgcgt

SEQ ID NO: 512110 - DNA, 75 bp, synthetic construct
  source 1..75: mol_type = other DNA
aacgcagattgccacggcgcgggcaagcgcagccgtgtaccgtgctcagcaggcagtggcggcagcccgcgggac

SEQ ID NO: 512111 - DNA, 75 bp, synthetic construct
  source 1..75: mol_type = other DNA
aaaccgccaaaacccaaaaaggagaaaagcagcagccgtgaaggtgattatatggaaggtgcggcaggcaatgtg

SEQ ID NO: 512112 - DNA, 75 bp, synthetic construct
  source 1..75: mol_type = other DNA
cctggcagatcgcggagcctacacgggcgtaattgccagctggttgcatacccgtgaacccgcgaagaaagaaag

SEQ ID NO: 512113 - DNA, 75 bp, synthetic construct
  source 1..75: mol_type = other DNA
accatcggggaagtggtgaaggaaatagccgcgcggcacaagctgaagatggcactgggtaaagagctgtcggat

SEQ ID NO: 512114 - DNA, 75 bp, synthetic construct
  source 1..75: mol_type = other DNA
tgctgatcacccgtttggataacttgtccatctactggcaggaagatacccgccgccgttcagttatcgacaacc

SEQ ID NO: 512115 - DNA, 75 bp, synthetic construct
  source 1..75: mol_type = other DNA
ggaaatgctgggcgcaatcaccacggtaaaaagcggtaatctgttattcatcatgcccggaggtggcgtgaacgc

SEQ ID NO: 512116 - DNA, 75 bp, synthetic construct
  source 1..75: mol_type = other DNA
aaacttatcagaacgagcaggcagcaagacgtgcagcggcggcaaagtggcagcagctacaacgcggagccgcat

SEQ ID NO: 512117 - DNA, 75 bp, synthetic construct
  source 1..75: mol_type = other DNA
ggcgaggtgtcggtaaaaatgggaaaactgttgtttctcaaagcggggcagggggtgacggccagcggtaaaaaa

SEQ ID NO: 512118 - DNA, 75 bp, synthetic construct
  source 1..75: mol_type = other DNA
tcagtcagagcacagaccccgtgaaaatgccggattttgatattctcgcggagggggaaacgctgtccggcgtgg

SEQ ID NO: 512119 - DNA, 75 bp, synthetic construct
  source 1..75: mol_type = other DNA
ggattattgcaaaagccgagcacaccattgataacagcggctttaccacacagcttgagcttgaagcaaaaatcc

SEQ ID NO: 512120 - DNA, 75 bp, synthetic construct
  source 1..75: mol_type = other DNA
caagaaagatagccataacgccacagttaacctttggtggtgcacaactggttgatatcgacgccaatcagccac

SEQ ID NO: 512121 - DNA, 75 bp, synthetic construct
  source 1..75: mol_type = other DNA
agccgtctgtgcagcagacgctggaagaccatatccagcagtccgccgctttcctgacgctgattaacgtcacgc

SEQ ID NO: 512122 - DNA, 75 bp, synthetic construct
  source 1..75: mol_type = other DNA
ttaacgcctacctgcagcaactggcgcgcctgaacggtgtggaggttgaagaactctccagcaaattcaccgtgg

SEQ ID NO: 512123 - DNA, 75 bp, synthetic construct
  source 1..75: mol_type = other DNA
cttacaacatcatgggctggcgctatcaggggatcgttaaggcgctgaaagaaggcgatatccagaccgcgcaga

SEQ ID NO: 512124 - DNA, 75 bp, synthetic construct
  source 1..75: mol_type = other DNA
gtattatatcctcccgtataaaaattgaaatcacatatagtagcgacgagtttggtttttcaaataaaaaaactt

SEQ ID NO: 512125 - DNA, 75 bp, synthetic construct
  source 1..75: mol_type = other DNA
taatactcttttctaaaccggttccgactgctgtgtttgtcaccataatattgctttgtgcttattttaaagcac

SEQ ID NO: 512126 - DNA, 75 bp, synthetic construct
  source 1..75: mol_type = other DNA
gacgccggtatgtttctaatatgttacatattatcggggacattgttccagacaacaatctgttttattcaatag

SEQ ID NO: 512127 - DNA, 75 bp, synthetic construct
  source 1..75: mol_type = other DNA
gcctggctatgctggacgtggttctggaaatggatcaagcagttcagtcaaagcctaaggctatcaggactttgc

SEQ ID NO: 512128 - DNA, 75 bp, synthetic construct
  source 1..75: mol_type = other DNA
caacggtagagcaatttaaaaaatttgagttttatgtaaaaagtgagttatcttcgtctaagtcaattttcgatg

SEQ ID NO: 512129 - DNA, 75 bp, synthetic construct
  source 1..75: mol_type = other DNA
tttaagcaatatggatataattaataatattattgttccacaaaaaacaataaagaaaaataaattatctgtcgt

SEQ ID NO: 512130 - DNA, 75 bp, synthetic construct
  source 1..75: mol_type = other DNA
aaataaaatttgggaaactaattctgttcgcatccctggcaacgcagttacttttttttgcgcatgccatgtggc

SEQ ID NO: 512131 - DNA, 75 bp, synthetic construct
  source 1..75: mol_type = other DNA
taagatcccggcgagtccagctcgatataactcagcagaccctggctaaacgccttggggtgagtagagtgtccg

SEQ ID NO: 512132 - DNA, 75 bp, synthetic construct
  source 1..75: mol_type = other DNA
atttgtgcgcgttattgcggggaggcggtattccgcgccattacgtttggcaatgccttcaatgtggatttatgg

SEQ ID NO: 512133 - DNA, 75 bp, synthetic construct
  source 1..75: mol_type = other DNA
gttatgaaaaaatcatccgttttatggaagagcgaaatgcatccgtatcaccgctgaaaacgcgtgaaatcgcgg

SEQ ID NO: 512134 - DNA, 75 bp, synthetic construct
  source 1..75: mol_type = other DNA
atttgtgcacgttactgtggtgaatcgatattctgtgccattgtgtatggtaatgcgtttgatgtggatttatgg

SEQ ID NO: 512135 - DNA, 75 bp, synthetic construct
  source 1..75: mol_type = other DNA
tgcaaacgtttctaatgaagcattcggactggtagttcgcggggagtctatgactaaccctcatggtctgccatc

SEQ ID NO: 512136 - DNA, 75 bp, synthetic construct
  source 1..75: mol_type = other DNA
tgttcaggccggggtatggactgatacctatgcatgctcaaggcttactgatgtgatttcatggactcaaaccac

SEQ ID NO: 512137 - DNA, 75 bp, synthetic construct
  source 1..75: mol_type = other DNA
tacaattccgtaatggaaaaaaatgtgtttctccgagaggttatatcatgtgttctacgaagtaaaaaagtagat

SEQ ID NO: 512138 - DNA, 75 bp, synthetic construct
  source 1..75: mol_type = other DNA
tttaactactgttttaaaactttcaccagacattcaaaatgactttaaatctacagtagagaaaaacaaaaaaga

SEQ ID NO: 512139 - DNA, 75 bp, synthetic construct
  source 1..75: mol_type = other DNA
ctagagcatacaattttgcatgcacaaaactctcagatgcaggtgaacccgatattttcggttggggagataagg

SEQ ID NO: 512140 - DNA, 75 bp, synthetic construct
  source 1..75: mol_type = other DNA
tgtttagcggtagtgtctattttccttcccgtgatgatgaaaatagttcatcccccagtccaactctacctacga

SEQ ID NO: 512141 - DNA, 75 bp, synthetic construct
  source 1..75: mol_type = other DNA
gtaagggcggtgattatgagcctcgatgcactggtgatggatgcgaccaacaacctgattgagccgtggtatcag

SEQ ID NO: 512142 - DNA, 75 bp, synthetic construct
  source 1..75: mol_type = other DNA
taatcattaccgcgctttccatgattaccgcttacggtctttctgacagtaataaagagaagtacgaattattct

SEQ ID NO: 512143 - DNA, 75 bp, synthetic construct
  source 1..75: mol_type = other DNA
gaagtcgtggtgaacgttggcggcaccatgcagatgctgggtggtcgtcagggtggtggcgctccggcaggtggc

SEQ ID NO: 512144 - DNA, 75 bp, synthetic construct
  source 1..75: mol_type = other DNA
aatgctatgactgttgcttcagtggttaaaccatatgactttagcaatcttggtgccataaatagtatagataaa

SEQ ID NO: 512145 - DNA, 75 bp, synthetic construct
  source 1..75: mol_type = other DNA
agaatattatgggcatcagttaacaaatgctatgactgttgcttcagtggttaaaccatatgactttagcaatct

SEQ ID NO: 512146 - DNA, 75 bp, synthetic construct
  source 1..75: mol_type = other DNA
aaatataaatatttatcgctgagtgaaatacatagaactttaacaaatagtacttcatttgcagatatttctata

SEQ ID NO: 512147 - DNA, 75 bp, synthetic construct
  source 1..75: mol_type = other DNA
tgatatagatacaagagttattggcttaacttttaaagaggggataaatagtttatctgaagcactcgaacacat

SEQ ID NO: 512148 - DNA, 75 bp, synthetic construct
  source 1..75: mol_type = other DNA
atattatggggcatttcgtgcctgtcagttttatttatgacatcggaggggttattaatggtaacagaataagtg

SEQ ID NO: 512149 - DNA, 75 bp, synthetic construct
  source 1..75: mol_type = other DNA
tgagcataacgcaaaagggtataaatgcggttgttggtactaaactgggatatgataagattcgtggtaataatc

SEQ ID NO: 512150 - DNA, 75 bp, synthetic construct
  source 1..75: mol_type = other DNA
ggtgggtggtggagcagatgtcagagctgacggccatgacggcctcgtttgtgctggcaacaccgacggagacgg

SEQ ID NO: 512151 - DNA, 75 bp, synthetic construct
  source 1..75: mol_type = other DNA
atgcaggatattcatgaagagagcctgaacgaggcggtaaaatcagcgcagtccgcccgcgtggtgctgtgggaa

SEQ ID NO: 512152 - DNA, 75 bp, synthetic construct
  source 1..75: mol_type = other DNA
tgaacagaaatattgctgccagaaacgccgcccagaatgtgctgaacagtacaacggcggtgggctcacgtctga

SEQ ID NO: 512153 - DNA, 75 bp, synthetic construct
  source 1..75: mol_type = other DNA
tcgccctcggtgaagactacgaaatggaaattaatgagtcgcgcaccgtcctgaaaacggaagacaacagctact

SEQ ID NO: 512154 - DNA, 75 bp, synthetic construct
  source 1..75: mol_type = other DNA
ttgagcggactggatgcggcaatggcagtggctattcagcatggttcgttcattgaagatgataaacaacacgtc

SEQ ID NO: 512155 - DNA, 75 bp, synthetic construct
  source 1..75: mol_type = other DNA
aaggacagatgcagcaagtgcatgcgcgggtgtgagatgcgcggcatggtggctaattttggcggtttcctttcc

SEQ ID NO: 512156 - DNA, 75 bp, synthetic construct
  source 1..75: mol_type = other DNA
aagggcgttatcccaaacatgtctggccggacgacccggcaaacacagcaccaacgcgacgaacgaaaaagtatt

SEQ ID NO: 512157 - DNA, 75 bp, synthetic construct
  source 1..75: mol_type = other DNA
atgctacaatgtggcgcgaagaatgttaaccctctggagcgttttgtgtcgtcgttgcccgttgctgccgtttta

SEQ ID NO: 512158 - DNA, 75 bp, synthetic construct
  source 1..75: mol_type = other DNA
gttacggatgctgggggcactggacggtgaacggcttagtgtgcacgggcaaaaaatggcggcgctgggtaacga

SEQ ID NO: 512159 - DNA, 75 bp, synthetic construct
  source 1..75: mol_type = other DNA
tgaacagaaatattgctgccagaaccgcagcccagaatgtgctgaacagtacaacggcggtgggctcacgtctga

SEQ ID NO: 512160 - DNA, 75 bp, synthetic construct
  source 1..75: mol_type = other DNA
ccactttctatttctatcttcgagcaggctgacgaagccggtgtcgggatgccatacagtgatgaggaaaactca

SEQ ID NO: 512161 - DNA, 75 bp, synthetic construct
  source 1..75: mol_type = other DNA
gacgcagattgccacggcgcgggcaagtgcagccgtgtaccgtgcccagcaggcagtggcggcagcccgcgggac

SEQ ID NO: 512162 - DNA, 75 bp, synthetic construct
  source 1..75: mol_type = other DNA
cggacagcgtcgtaagcgtgcagcaagaaccgtattgacggggatgtgttattcagtcggcagtgctacgcgcca

SEQ ID NO: 512163 - DNA, 75 bp, synthetic construct
  source 1..75: mol_type = other DNA
ccttttggctgggcggaagaaaacttagccgaagtcgagcaacataaacggcaaaaacataccgtcccctggcgt

SEQ ID NO: 512164 - DNA, 75 bp, synthetic construct
  source 1..75: mol_type = other DNA
cacacagagacgtttgatttagcggtaatagccaccggtcacgtctggcctgatgaagaagaagcaacccgaacg

SEQ ID NO: 512165 - DNA, 75 bp, synthetic construct
  source 1..75: mol_type = other DNA
cggtgcagggcggtgagcggtattttttctgcaatgagctgaatgaaaaaggggagccggtgacctggcaggggc

SEQ ID NO: 512166 - DNA, 75 bp, synthetic construct
  source 1..75: mol_type = other DNA
acacgaccataaacggttcagtaaaggccttgcccgggttttcatcgataattatgcggcaatcccttcagagtc

SEQ ID NO: 512167 - DNA, 75 bp, synthetic construct
  source 1..75: mol_type = other DNA
cctgtgggagagggccggggtgagggcatcagcgcgcacgttcaccctcaccctaaccctctccctcaagggaga

SEQ ID NO: 512168 - DNA, 75 bp, synthetic construct
  source 1..75: mol_type = other DNA
cagagcgtgagctggccctgtcctgactgaaaggggacgaaaaagagcggggccgtctggggtatgcggcggatg

SEQ ID NO: 512169 - DNA, 75 bp, synthetic construct
  source 1..75: mol_type = other DNA
gacccggagcaggaggcgatcagccgctggcgcatcgagcagtgcagcgaactgagcgcggtcagtgcctccttt

SEQ ID NO: 512170 - DNA, 75 bp, synthetic construct
  source 1..75: mol_type = other DNA
atcgacctgacggtgcagggcggtgagcggtattttttctgtaatgagctcaatgaaaaaggggagccggtgacc

SEQ ID NO: 512171 - DNA, 75 bp, synthetic construct
  source 1..75: mol_type = other DNA
cagagcgtgagctggccctgtccagactgaagggggacgaaaaagagcggggccgactggggtatgcggcggatg

SEQ ID NO: 512172 - DNA, 75 bp, synthetic construct
  source 1..75: mol_type = other DNA
cggaaggacagatgcagtaaatgcatgcgcgggtgtgagatgcgcggcatggcggccaattttggcggtttcctt

SEQ ID NO: 512173 - DNA, 75 bp, synthetic construct
  source 1..75: mol_type = other DNA
tgaatgagtcggttaaatcagagcagtcaccgcgggtggtactctgggaaattgacctgacggtgcagggtggtg

SEQ ID NO: 512174 - DNA, 75 bp, synthetic construct
  source 1..75: mol_type = other DNA
atgatcactcactatgatataaaaacggagacacagaaactaaaggatgtactctctgtagagggtgttaatatc

SEQ ID NO: 512175 - DNA, 75 bp, synthetic construct
  source 1..75: mol_type = other DNA
cagagcgtgagctggccctgtcctgactgaatggggacgaaaaagagcggggccgactggggtatgcggcggatg

SEQ ID NO: 512176 - DNA, 75 bp, synthetic construct
  source 1..75: mol_type = other DNA
atgcaggatatacaacaggaaacactgaatgagtgtacaaaagcggagcaatccgcactggtcgtgctctgggaa

SEQ ID NO: 512177 - DNA, 75 bp, synthetic construct
  source 1..75: mol_type = other DNA
agaggatttgcagagcctggtgggtgccacggtggtccgtcgccgggtgtatgcgcgttttctggatgcggtgaa

SEQ ID NO: 512178 - DNA, 75 bp, synthetic construct
  source 1..75: mol_type = other DNA
gaatgaaaaagggagccggttacctggcaggggcgtgaatatcaggcgtacccgattgagggcagcggctttgag

SEQ ID NO: 512179 - DNA, 75 bp, synthetic construct
  source 1..75: mol_type = other DNA
cagagcgtgagctggccctgtccagactgaaaggggacgaaaaagagcggggccggctggggtatgcggcggatg

SEQ ID NO: 512180 - DNA, 75 bp, synthetic construct
  source 1..75: mol_type = other DNA
gctgacagccatgacggcctcgtttgtgctggctacaccgaccgagacggagggggcgctgtttcccggtcgaat

SEQ ID NO: 512181 - DNA, 75 bp, synthetic construct
  source 1..75: mol_type = other DNA
gctgacagccatgacggcctcgtttgtgctggctacaccgaccgagacggaaggggcgctgtttcccggtcggat

SEQ ID NO: 512182 - DNA, 75 bp, synthetic construct
  source 1..75: mol_type = other DNA
agggcagccgtgtaccgtgctcagcaggccgtggcggcagcccgcgggacggagatgcagattgctgcagaagcc

SEQ ID NO: 512183 - DNA, 75 bp, synthetic construct
  source 1..75: mol_type = other DNA
tgcatgcgcgggtgtgagatgcgcggcatggtggctaatttcggcggtttcctttccattaataaactttcgcag

SEQ ID NO: 512184 - DNA, 75 bp, synthetic construct
  source 1..75: mol_type = other DNA
gctgacagccatgacggcctcgtttgtgctggcgacaccgaccgagacggagggggcgctgtttcccggtcgtat

SEQ ID NO: 512185 - DNA, 75 bp, synthetic construct
  source 1..75: mol_type = other DNA
cagagcgtgagctggccctgtccagactgaatggggacgaaaaagagcggggccgtctggggtatgcggcggatg

SEQ ID NO: 512186 - DNA, 75 bp, synthetic construct
  source 1..75: mol_type = other DNA
atgcaggatattcacgaagaaagtctgaacgagtcggttaaatcagagcagtcaccgcgggtggtgctctgggaa

SEQ ID NO: 512187 - DNA, 75 bp, synthetic construct
  source 1..75: mol_type = other DNA
gaatgaaaaaggggaggcggttacctggcagggcggcaatatcaggcatacccgattgacggcagtggctttgag

SEQ ID NO: 512188 - DNA, 75 bp, synthetic construct
  source 1..75: mol_type = other DNA
gctgacagccatgacggcctcgtttgtgctggcaacaccgaccgagacggaaggggcgctgtttcccggtcgtat

SEQ ID NO: 512189 - DNA, 75 bp, synthetic construct
  source 1..75: mol_type = other DNA
gccacggtggttcgtcgccgggtgtatgcgcgttttctggatgcggtgaattttgtggcaggcaatccggaggct

SEQ ID NO: 512190 - DNA, 75 bp, synthetic construct
  source 1..75: mol_type = other DNA
aagggcagcagtgcctggccgtcgctgacggtgtcgaatctgttgggtctggtcaccggcatggcggaggacctg

SEQ ID NO: 512191 - DNA, 75 bp, synthetic construct
  source 1..75: mol_type = other DNA
aagggcagcagtgcctggccgtcgctgacggtgtcgaatctgttcggtctggtcaccgggatggcggaggacctg

SEQ ID NO: 512192 - DNA, 75 bp, synthetic construct
  source 1..75: mol_type = other DNA
ttatgctggcgaatacctgtatgtggacctaccgctctgatgagtgtggttacacgggcggggcagtggcggatg

SEQ ID NO: 512193 - DNA, 75 bp, synthetic construct
  source 1..75: mol_type = other DNA
gatcagccgctggcgcatcgagcagtgcagcgaactgagcgcggtcagtgcttcctttgtgctctccacaccgac

SEQ ID NO: 512194 - DNA, 75 bp, synthetic construct
  source 1..75: mol_type = other DNA
atcgttatttcttctgtaatgagcagaacgaaaaaggtgaagcagtcacctggcaggggcggcagtatcaggcct

SEQ ID NO: 512195 - DNA, 75 bp, synthetic construct
  source 1..75: mol_type = other DNA
aagggcagcagtgcctgaccgtcgctgacggtgtcgaatctgttaggtctggtcaccggcatggcggaggacctg

SEQ ID NO: 512196 - DNA, 75 bp, synthetic construct
  source 1..75: mol_type = other DNA
attgacctgacggtgcagggtggtgagcggtattttttctgtaatgagctgaatgaaaaaggggagccggtcacc

SEQ ID NO: 512197 - DNA, 75 bp, synthetic construct
  source 1..75: mol_type = other DNA
aagggcagcagtgcctgcccgtcgctgacggtgtcgaatctgttcggtctggtcaccggcatggcggaggacctg

SEQ ID NO: 512198 - DNA, 75 bp, synthetic construct
  source 1..75: mol_type = other DNA
aagggcagcagtgcctgtccgtcgctgacggtgtcgaatctgtttggtctggtcaccggcatggcggaggacctg

SEQ ID NO: 512199 - DNA, 75 bp, synthetic construct
  source 1..75: mol_type = other DNA
aagggcagcagtgcctgaccgtcgctgacggtgtcgaatctgttcggtctggtcaccggaatggcggaggacctg

SEQ ID NO: 512200 - DNA, 75 bp, synthetic construct
  source 1..75: mol_type = other DNA
ccagacattaacgctgctggagaaactcaacgaactggacgcagatgaacaggccgatatttgtgaatcacttca

SEQ ID NO: 512201 - DNA, 75 bp, synthetic construct
  source 1..75: mol_type = other DNA
aggcagatatctgtgaatcgcttcacgaccacgccgatgagctttatcgcagctgcctcgcacgcttcggggatg

SEQ ID NO: 512202 - DNA, 75 bp, synthetic construct
  source 1..75: mol_type = other DNA
aacattgtcgagagaggggcaccggcgacagctgtgcacgccagagagattgtattgcaagtctatcgctgggct

SEQ ID NO: 512203 - DNA, 75 bp, synthetic construct
  source 1..75: mol_type = other DNA
tcaggtgttcgcttcagtatgccgttgcccgatatcaatgggtttatgtcgtctgctaaaaatgcgatcggagcc

SEQ ID NO: 512204 - DNA, 75 bp, synthetic construct
  source 1..75: mol_type = other DNA
aggctgacatctgcgaagcgcttcacgatcacgctgacgagctttaccgcagctgcctcgcacgcttcggggata

SEQ ID NO: 512205 - DNA, 75 bp, synthetic construct
  source 1..75: mol_type = other DNA
gcaagatggggttgtcatatgtgatcaccggaacgaaaggcgccatcagcttcactcaggagcgcatggccgagc

SEQ ID NO: 512206 - DNA, 75 bp, synthetic construct
  source 1..75: mol_type = other DNA
ttggcaccgggtatattggcaaggcgcatgccattgcctatgcccaggcaccgatggtgttcaatctgcgcggca

SEQ ID NO: 512207 - DNA, 75 bp, synthetic construct
  source 1..75: mol_type = other DNA
aggctgacatctgcgaagcgcttcacgaccacgctgacgagctttatcgcagctgcctcgcacgcttcggggatg

SEQ ID NO: 512208 - DNA, 75 bp, synthetic construct
  source 1..75: mol_type = other DNA
gtgactaaacaggaaaaaacagcccttaacatggcgcgctttatcagaaaccagacattaacgctgctggaaaag

SEQ ID NO: 512209 - DNA, 75 bp, synthetic construct
  source 1..75: mol_type = other DNA
aaaacccgacggcgcagctggcgaaagagattatcgcccgcggtgaaataggcgaggtgatccacttctacggca

SEQ ID NO: 512210 - DNA, 75 bp, synthetic construct
  source 1..75: mol_type = other DNA
tggcaggggcggcaatatcaggcgtacccgattgagggcagcggctttgagatgaacggaaagggcagcagtgcc

SEQ ID NO: 512211 - DNA, 75 bp, synthetic construct
  source 1..75: mol_type = other DNA
agcgggattttttctgtaatgagctgaatgaaaaaggggagccggtcacctggcaggggcgtaagtatgaggcat

SEQ ID NO: 512212 - DNA, 75 bp, synthetic construct
  source 1..75: mol_type = other DNA
ttttgtggcaggcaatcctgaggcagaccctgagcaggagctgacggaccggtgggtggtggagcagatgtcatc

SEQ ID NO: 512213 - DNA, 75 bp, synthetic construct
  source 1..75: mol_type = other DNA
agcaggcaggaaaagccacgcattcgctgggtctgaaaagtgcagcagcccgccaggagataggcgttctgatag

SEQ ID NO: 512214 - DNA, 75 bp, synthetic construct
  source 1..75: mol_type = other DNA
ttcccggccgaccctgacggtttctaacctgtacggtatggtcaccgggatggcggaagagctgcagagtctggt

SEQ ID NO: 512215 - DNA, 75 bp, synthetic construct
  source 1..75: mol_type = other DNA
ttcccgtccgaccctgacggtttctaacctgaacggtatggtcaccgggatggcggaagagctgcagagtctggt

SEQ ID NO: 512216 - DNA, 75 bp, synthetic construct
  source 1..75: mol_type = other DNA
ttcccgacctaccctgacggtttctaacctgcacggtatggtcaccgggatggcggaagagctgcagagtctggt

SEQ ID NO: 512217 - DNA, 75 bp, synthetic construct
  source 1..75: mol_type = other DNA
ggaacggtggtccggcgtaaggtttacgcccgttttctggatgcggtgaattttgtggacgggcaatcgaggcgg

SEQ ID NO: 512218 - DNA, 75 bp, synthetic construct
  source 1..75: mol_type = other DNA
gtactgtccacgccgacggaaacggacggcgctgtttttccggggcgcatcatgctgaccaacacctgtacctgg

SEQ ID NO: 512219 - DNA, 75 bp, synthetic construct
  source 1..75: mol_type = other DNA
cgtccgcgcatttcagtggacgccaccttatgactggaaactgatgcaggatatccggcaggaaacactgaatga

SEQ ID NO: 512220 - DNA, 75 bp, synthetic construct
  source 1..75: mol_type = other DNA
acccgattgacggcagcggttttgagatgaacgggaagggcagcagtgcccgcccgtcactgacggtgtccaatc

SEQ ID NO: 512221 - DNA, 75 bp, synthetic construct
  source 1..75: mol_type = other DNA
atgcaggatatacagcaggaaacactgaatgagtgtacaaaagcggagcaatccgcgctggtcgtgctctgggaa

SEQ ID NO: 512222 - DNA, 75 bp, synthetic construct
  source 1..75: mol_type = other DNA
tggcaggggcggcagtatcaggcataccccattcaggggacgggatttgaactgaacggtaagggcagtgctgcc

SEQ ID NO: 512223 - DNA, 75 bp, synthetic construct
  source 1..75: mol_type = other DNA
tatcaggcgtacccgattgaggggagtggctttgagatgaacgggaagggcagcagtgccagaccatcgctgacg

SEQ ID NO: 512224 - DNA, 75 bp, synthetic construct
  source 1..75: mol_type = other DNA
agcggtattttttctgtaatgagctgaatgaaaaaggggaggcggtcacctggcaggggcggcaatatcaggcat

SEQ ID NO: 512225 - DNA, 75 bp, synthetic construct
  source 1..75: mol_type = other DNA
acggggcgctgtttcccggtcgcatcatgctggcgaacacctgtatgtgggattaccggggagaggagtgcggtt

SEQ ID NO: 512226 - DNA, 75 bp, synthetic construct
  source 1..75: mol_type = other DNA
cgtttgtgctggcgacaccgacggagacggacggagcgctgtttcccggtcgcattatgctggcgaatacctgta

SEQ ID NO: 512227 - DNA, 75 bp, synthetic construct
  source 1..75: mol_type = other DNA
ccagtgccttcagtgccccctgctcatgttcacctgctgtcgtggcactgtcttccgcccggctgaccagttgct

SEQ ID NO: 512228 - DNA, 75 bp, synthetic construct
  source 1..75: mol_type = other DNA
tgggggccacggtggtccgccgccgggtgtatgcccgttttctggatgcggtgaatttcgttgcgggcaatccgg

SEQ ID NO: 512229 - DNA, 75 bp, synthetic construct
  source 1..75: mol_type = other DNA
ggctgactgccatgacggcctcgtttgtgctggccacaccgaccgagacggacggggcgctgtttcccggtcgta

SEQ ID NO: 512230 - DNA, 75 bp, synthetic construct
  source 1..75: mol_type = other DNA
tactggcttgatcttaattacgggaaaaagaaaaaagtcagcgtgaaacgccgcaaaccgccaaaacccaaaaag

SEQ ID NO: 512231 - DNA, 75 bp, synthetic construct
  source 1..75: mol_type = other DNA
tggttttcgaaaatttagcttggtcgaacaaggtgaatatttttattctgttaccttgcctagagtaaaaaaagc

SEQ ID NO: 512232 - DNA, 75 bp, synthetic construct
  source 1..75: mol_type = other DNA
tgttgatacttcattatttgattccaagttcaaagagaaatttatcaacaatatcgctgatgttgacacaaatgt

SEQ ID NO: 512233 - DNA, 75 bp, synthetic construct
  source 1..75: mol_type = other DNA
gagaaacaactgcgcatgattcaatgtttgcgtgctgttgcgctggaactcatcacttttttggcacagattgag

SEQ ID NO: 512234 - DNA, 75 bp, synthetic construct
  source 1..75: mol_type = other DNA
aataaaagcggctgggcgctgggtacgctctccacaggcggcgttagcggcgcgttgctcggcccaatggctggc

SEQ ID NO: 512235 - DNA, 75 bp, synthetic construct
  source 1..75: mol_type = other DNA
ctttatcaaaagaaaaccttattgcattggcagagttgaaaaaaggaaaacttattaatgaagccaacgagcaca

SEQ ID NO: 512236 - DNA, 75 bp, synthetic construct
  source 1..75: mol_type = other DNA
gatatgtcgaatgccgtcacctttatggtgaaactggtcattcgcttcgcaccgatcggtatttttggtctggtt

SEQ ID NO: 512237 - DNA, 75 bp, synthetic construct
  source 1..75: mol_type = other DNA
ccctgcatttgtccagtagcgcaggcgatatttcgccgccgtcaggtattgtggaagtgatgcgcggactggtaa

SEQ ID NO: 512238 - DNA, 75 bp, synthetic construct
  source 1..75: mol_type = other DNA
gcgttcgaggaaccagataatttcaatgaaatctggaacacgattaaacttgggtactggacgaaacaatcatga

SEQ ID NO: 512239 - DNA, 75 bp, synthetic construct
  source 1..75: mol_type = other DNA
ttcaacaattctggcagataaaacagttcaacagcattgggttgatcttgctaaacgtgcgccaacagaaaaaaa

SEQ ID NO: 512240 - DNA, 75 bp, synthetic construct
  source 1..75: mol_type = other DNA
aaaaacaagccatcttgggttgacgacaactatgataaaattcccggttcagacaattatgagcaggaaaattac

SEQ ID NO: 512241 - DNA, 75 bp, synthetic construct
  source 1..75: mol_type = other DNA
tgttgacgctggctgcggttaatacgctgggtattccggtcgatctgcccacggcgctgctgttgagcgtagtgg

SEQ ID NO: 512242 - DNA, 75 bp, synthetic construct
  source 1..75: mol_type = other DNA
aagtgccggatagtctcctgcctccccctggtgtgaaagtaatacagttttacatctgggcggataaggatcttg

SEQ ID NO: 512243 - DNA, 75 bp, synthetic construct
  source 1..75: mol_type = other DNA
aacagcgcgaacaggcagaacgcgagcgactcatcaataacgcgcgtagccgtatcgctgcgccgtctcgtttta

SEQ ID NO: 512244 - DNA, 75 bp, synthetic construct
  source 1..75: mol_type = other DNA
cgtccgctaccgtaagtctgacgaccttgggcaaacctggggcgagattgccaccctgctcgataaacccggcac

SEQ ID NO: 512245 - DNA, 75 bp, synthetic construct
  source 1..75: mol_type = other DNA
aacctgggtaatgaatgagcgctatctgggcgctcgtgaagagccttcatcttttgcttcctacggtacatgggc

SEQ ID NO: 512246 - DNA, 75 bp, synthetic construct
  source 1..75: mol_type = other DNA
tgatgattaaatgtgaacacaatattcttatcgtggggaattcttactcccgaattgataatttttttaaggggt

SEQ ID NO: 512247 - DNA, 75 bp, synthetic construct
  source 1..75: mol_type = other DNA
tcttattgttgggaattctgcctcccacattgataagttttttaaggagtattctataccaagttctaaatatta

SEQ ID NO: 512248 - DNA, 75 bp, synthetic construct
  source 1..75: mol_type = other DNA
tgatttcacccagattaacagtgattcagatgtagagaaaaatgagaatgttgtctcctttatcagggatgcaat

SEQ ID NO: 512249 - DNA, 75 bp, synthetic construct
  source 1..75: mol_type = other DNA
cggaaaacgtttcatggtagcgaataacgcagagctggagcgtagctacctggctgcgcgcggtcacagtgaaaa

SEQ ID NO: 512250 - DNA, 75 bp, synthetic construct
  source 1..75: mol_type = other DNA
cactttacgctggaggctaatcccgataccggtgcgccgactaaagtattagcgcccgatacggcaggtaaattt

SEQ ID NO: 512251 - DNA, 75 bp, synthetic construct
  source 1..75: mol_type = other DNA
tgatgtattggcagagtactacaagctgagcaagacccagacttgtaagaagatcctgactgatttctttgggat

SEQ ID NO: 512252 - DNA, 75 bp, synthetic construct
  source 1..75: mol_type = other DNA
cactttacgcttgagggtaatccggataccggtgcgccgactaaagtattggcacccgatacggcagggaaattt

SEQ ID NO: 512253 - DNA, 75 bp, synthetic construct
  source 1..75: mol_type = other DNA
gcaaagttggcgcggcgtgctgccgtgtgccgattgcgaaggaatcgaaacctctctgttcctcgaaaaagacgg

SEQ ID NO: 512254 - DNA, 75 bp, synthetic construct
  source 1..75: mol_type = other DNA
cactttacgcttgaggctaatccggataccggtgcgccaaccaaagtattagcgcccgatacggcaggtaaattt

SEQ ID NO: 512255 - DNA, 75 bp, synthetic construct
  source 1..75: mol_type = other DNA
aagatccttttttgtccgactcgattgttgggtggggggtaataaggtgttctccatggtgtttatttggtgtat

SEQ ID NO: 512256 - DNA, 75 bp, synthetic construct
  source 1..75: mol_type = other DNA
gcacagggcaatttatcgtttcggcacttgaaggcgagatcaaacgccgccagcgtcgcaaggccaaagagcagg

SEQ ID NO: 512257 - DNA, 75 bp, synthetic construct
  source 1..75: mol_type = other DNA
tgggaactgaagcgatgaaagtcgcgctggcactggcagccccgctgttgctggtggcgctggtcacgggcctta

SEQ ID NO: 512258 - DNA, 75 bp, synthetic construct
  source 1..75: mol_type = other DNA
ggtgtccacatccccgcgatgaaaaataccgccctcgggcaggtactccgcacgctggaactgaaacgcgcattt

SEQ ID NO: 512259 - DNA, 75 bp, synthetic construct
  source 1..75: mol_type = other DNA
gcactgcgcaatttatcgttacagccatgcgaggcgagatcaaacgccgccagcgccgtaaggccaaagaatcag

SEQ ID NO: 512260 - DNA, 75 bp, synthetic construct
  source 1..75: mol_type = other DNA
gagcaacttaaagaacctggcgaaagtaccgctggttttttagttactgccgcaaaaggcgagatcaaacgccgc

SEQ ID NO: 512261 - DNA, 75 bp, synthetic construct
  source 1..75: mol_type = other DNA
tgccgcgatattaatcgtgcttggctttttcacccgtccgctggcggtgctgtttattttctacacgctgggtac

SEQ ID NO: 512262 - DNA, 75 bp, synthetic construct
  source 1..75: mol_type = other DNA
tgcacggcgggggcattgcgtcggcgctggatgtcgccgccggtctggtgtgcgtgggaagtaccttaaccccgc

SEQ ID NO: 512263 - DNA, 75 bp, synthetic construct
  source 1..75: mol_type = other DNA
gcaggcaataaagtcgccgtcgcccgcgttgaattacacaatgaagaacagctttatattgccagtgccacctat

SEQ ID NO: 512264 - DNA, 75 bp, synthetic construct
  source 1..75: mol_type = other DNA
aagccctgaaattagtgggtgagatgtttgtttatcacatgccgtttaaccgcgcattggggatggaactggagc

SEQ ID NO: 512265 - DNA, 75 bp, synthetic construct
  source 1..75: mol_type = other DNA
gtaccggatgggtattttattgtttttaatgaaattgcaggtttgatggttgatttgattaccgcgggtctcgta

SEQ ID NO: 512266 - DNA, 75 bp, synthetic construct
  source 1..75: mol_type = other DNA
aatactatcgtgaactagcacgtgttggtctccgcgattatatttatggtgcgttacattaccagccagaagatc

SEQ ID NO: 512267 - DNA, 75 bp, synthetic construct
  source 1..75: mol_type = other DNA
cagggctattggctggcggacaaacggcggcgttgcaaattattgataattttaataatcgtgcattacctaacc

SEQ ID NO: 512268 - DNA, 75 bp, synthetic construct
  source 1..75: mol_type = other DNA
tcatccccgtttcagacgcgaagacatccccgccatgaaaaacacggctttcgggcaggtgctccgcacactcga

SEQ ID NO: 512269 - DNA, 75 bp, synthetic construct
  source 1..75: mol_type = other DNA
cgttacggttcgccagctgcaaaatgccattggtgcagtcgctaccacgccgactaaatacttccacgctaactc

SEQ ID NO: 512270 - DNA, 75 bp, synthetic construct
  source 1..75: mol_type = other DNA
cccctgaaattaataggttgttagaaaataaaagagttacaggggttgttacatttgttaatccttactcatatt

SEQ ID NO: 512271 - DNA, 75 bp, synthetic construct
  source 1..75: mol_type = other DNA
tgccaacgcgcagggtaaagatagtgttgcgattggttctggttccattgctgccgctgacaacagcgtcgcgct

SEQ ID NO: 512272 - DNA, 75 bp, synthetic construct
  source 1..75: mol_type = other DNA
tgcggctggctacttatcccggccgacacaccaccactttattttctgcactcactcatccctcctgccgtctgc

SEQ ID NO: 512273 - DNA, 75 bp, synthetic construct
  source 1..75: mol_type = other DNA
tcgtcaccaccggtagcaccaagtacttcaagaccaataccgatggtgtagatgccagcgcgcagggtaaagata

SEQ ID NO: 512274 - DNA, 75 bp, synthetic construct
  source 1..75: mol_type = other DNA
ttgtccgccagccctgaattcggtgatatctgtcacccatttctcacagggagcttccgctttgaactgtcgctg

SEQ ID NO: 512275 - DNA, 75 bp, synthetic construct
  source 1..75: mol_type = other DNA
tctctgtgggttcttctaccaaccagcgccgtatcaccaacgttgctgccggtgttaatgccaccgatgcggtta

SEQ ID NO: 512276 - DNA, 75 bp, synthetic construct
  source 1..75: mol_type = other DNA
atggataagtatctggcgctggacagggcactcaacgaaattcttaccccagttcctacgccgttctcgacatta

SEQ ID NO: 512277 - DNA, 75 bp, synthetic construct
  source 1..75: mol_type = other DNA
tgctgaaagccttcgggcgacacattgcccggagttttcgccgggggcgtggtgtacacatccccgccatgaaaa

SEQ ID NO: 512278 - DNA, 75 bp, synthetic construct
  source 1..75: mol_type = other DNA
cactggcagtcggtgaagactcgctggcaatgggcgcgaaaaccatcgttaatggtaatgcgggtattggtatcg

SEQ ID NO: 512279 - DNA, 75 bp, synthetic construct
  source 1..75: mol_type = other DNA
acgtaccaacgacagcggcttagcgttcaacgatgccagcgcttcaggtattggcgctacagctgtaggttataa

SEQ ID NO: 512280 - DNA, 75 bp, synthetic construct
  source 1..75: mol_type = other DNA
agttaaacgcaaccaatattctggttacgcaaaatagccaaatgattaaccagcttgctggtaacactagcgaaa

SEQ ID NO: 512281 - DNA, 75 bp, synthetic construct
  source 1..75: mol_type = other DNA
tgaaccgcctgctgacaccgctgatgcgtcgtgtgcgtctgatgcttgcgcgtgccgttgttaacgtgattaacg

SEQ ID NO: 512282 - DNA, 75 bp, synthetic construct
  source 1..75: mol_type = other DNA
ctttacgggcaatgtgacggtggataagaacctgcatgttaagggtaatttcgcgcttgatggtacaggtaaatc

SEQ ID NO: 512283 - DNA, 75 bp, synthetic construct
  source 1..75: mol_type = other DNA
aaaaacctgcatatcaaaggtaatctgaccattgatggcacaggaaaatcacagggtacgttcacgatgtccgag

SEQ ID NO: 512284 - DNA, 75 bp, synthetic construct
  source 1..75: mol_type = other DNA
cgccagcgtttgctggcagcactggatgaagtgatcagcgaaaagctggatccggcgcaccatatcgacgccgta

SEQ ID NO: 512285 - DNA, 75 bp, synthetic construct
  source 1..75: mol_type = other DNA
ttgatcattgtaaggccagccgccgcgtttcggcctattttggtgaacaactcggcacgccatcagtgatgaaca

SEQ ID NO: 512286 - DNA, 75 bp, synthetic construct
  source 1..75: mol_type = other DNA
ctggaaatttacgccgatgaaggtgttcaggtggatacaccggaagccacctttacgggcaatgtcacggtggat

SEQ ID NO: 512287 - DNA, 75 bp, synthetic construct
  source 1..75: mol_type = other DNA
ttgacaggaaaggtgactggcgaatgaaatgggcgacttacatcccggggcatcctgacgctaatgatgggtggg

SEQ ID NO: 512288 - DNA, 75 bp, synthetic construct
  source 1..75: mol_type = other DNA
cgggtacttatttggtcgaaggcgatgcatcttcggcttcttacttcctggcagcagcagcaatcaaaggcggca

SEQ ID NO: 512289 - DNA, 75 bp, synthetic construct
  source 1..75: mol_type = other DNA
gtgacgattcttgatccaaaatgtaccgctaaaacttttccagactatttcgagcaattggcgcggattagccag

SEQ ID NO: 512290 - DNA, 75 bp, synthetic construct
  source 1..75: mol_type = other DNA
aaatgcagaatgtgcagttcaccggcatggacggcgaaacgtttgatgatgtggagcgcccccagcagtacggcc

SEQ ID NO: 512291 - DNA, 75 bp, synthetic construct
  source 1..75: mol_type = other DNA
atgaaagtatgaccgttgacacacccagaaccacgtttaccggcgacgttgagatccagaaaggtctgggcgtta

SEQ ID NO: 512292 - DNA, 75 bp, synthetic construct
  source 1..75: mol_type = other DNA
acgggggtgtatcaccatgaggggcaccggatacggttaacaaaggatggccgcattattgtgacatgcaaaatg

SEQ ID NO: 512293 - DNA, 75 bp, synthetic construct
  source 1..75: mol_type = other DNA
ccaacgtcacgataccccaacgggtagcgaatggctggagagcgtgcgggcttatgagaaagcgattttgagcca

SEQ ID NO: 512294 - DNA, 75 bp, synthetic construct
  source 1..75: mol_type = other DNA
gagcacattgctgatgaagtgatggtgatgtacctgggccgctgcgtggagaagggaacgaaggaccaaatcttc

SEQ ID NO: 512295 - DNA, 75 bp, synthetic construct
  source 1..75: mol_type = other DNA
aagagggaaaagggttactacctaccgcgctggatataaccgagaatcctcgtcatttgcagattatggaactcg

SEQ ID NO: 512296 - DNA, 75 bp, synthetic construct
  source 1..75: mol_type = other DNA
atgatgctgggtgcggtactgcaaattaccaacgtttttggtaatccgttcctacatgatttcgcccgtaacccg

SEQ ID NO: 512297 - DNA, 75 bp, synthetic construct
  source 1..75: mol_type = other DNA
tcgccgtatgtgaatattctggtggcacgggaagataataagaatgcagaaaacgtgaaggaatttctgcaatct

SEQ ID NO: 512298 - DNA, 75 bp, synthetic construct
  source 1..75: mol_type = other DNA
aggatctgctcaagcacgatccgcaggcgcagaagctgcgtcggcagaaaatccagatcgtcttccagaatccct

SEQ ID NO: 512299 - DNA, 75 bp, synthetic construct
  source 1..75: mol_type = other DNA
ctgaatctgatgatggatttgcagcaggaactggggctttcttatgtctttatctcccacgacctgtcggtggtg

SEQ ID NO: 512300 - DNA, 75 bp, synthetic construct
  source 1..75: mol_type = other DNA
tgtggcgaacagcaccgggctgaaaactgactggcgcggatataccgttgtcccctatgccacttcttatcggga

SEQ ID NO: 512301 - DNA, 75 bp, synthetic construct
  source 1..75: mol_type = other DNA
gctaaagatggctttctcttcgcactggaactggctccgtcagtgattctctctctgggaattatctcgattacc

SEQ ID NO: 512302 - DNA, 75 bp, synthetic construct
  source 1..75: mol_type = other DNA
gtctggtattcagcttgtacagtgggttatctatagcagcaaatccaacacctagttctttaactagtaaagccg

SEQ ID NO: 512303 - DNA, 75 bp, synthetic construct
  source 1..75: mol_type = other DNA
ggggctgaatacggcttctgtctccggtatgaatctgctggcggatgatgcctgcgtgccattaacctccatgat

SEQ ID NO: 512304 - DNA, 75 bp, synthetic construct
  source 1..75: mol_type = other DNA
cccggctgacgctgggtgatggttatacccagggcgatattttcgatggtattaactttcgcggcgcacaattgg

SEQ ID NO: 512305 - DNA, 75 bp, synthetic construct
  source 1..75: mol_type = other DNA
aaaatgcagtagtcaacgtggttcccaccaaaggggcgttggttctggcggagttcaatgcccatgcgggagcaa

SEQ ID NO: 512306 - DNA, 75 bp, synthetic construct
  source 1..75: mol_type = other DNA
ctgtaaaagtgaccggcattggacgcaacagtatgcagggtgatattcgctttgctgatgtgctggaaaaaatgg

SEQ ID NO: 512307 - DNA, 75 bp, synthetic construct
  source 1..75: mol_type = other DNA
aacaaggtttgcaaatggcaggagtgccaaatcaggtgtccagcgccctttccggtgcgctacttatcgtcgttg

SEQ ID NO: 512308 - DNA, 75 bp, synthetic construct
  source 1..75: mol_type = other DNA
gtaatgtgttggtgccatcttatgtgaaatttaattttagagggcataagaaatgctctagaatatttaatgagc

SEQ ID NO: 512309 - DNA, 75 bp, synthetic construct
  source 1..75: mol_type = other DNA
gcattgccgcgtgggtcattggtacacgcaatatgaaaaaagccctgctgcgtgcgttgctggaacctaccgctg

SEQ ID NO: 512310 - DNA, 75 bp, synthetic construct
  source 1..75: mol_type = other DNA
tgaacgtcctgctgttcagcaccagcgactttatctgcattggcattgtcgccctgcctttaaccatggtgatcg

SEQ ID NO: 512311 - DNA, 75 bp, synthetic construct
  source 1..75: mol_type = other DNA
agtaacagcttccagactaacggcgtgctgctcgatgatgaatggtgtgcatttctggcagaaaatcattttctt

SEQ ID NO: 512312 - DNA, 75 bp, synthetic construct
  source 1..75: mol_type = other DNA
tctatgattttctgtgtgatgcaggcgttgagtttatccagtttattccggtggtcgagcgcctggctgatgaaa

SEQ ID NO: 512313 - DNA, 75 bp, synthetic construct
  source 1..75: mol_type = other DNA
ggaaaacaactgatagtcgcagtaagagaacaggatatgaaaaaaatggaagcagagtctggaaggatcataaaa

SEQ ID NO: 512314 - DNA, 75 bp, synthetic construct
  source 1..75: mol_type = other DNA
tcttattgttgggaatacttactcccgggttgataatttttttaatgggtattctgtaccagattctaaatatta

SEQ ID NO: 512315 - DNA, 75 bp, synthetic construct
  source 1..75: mol_type = other DNA
ccagatgcagatagaaatgatcatgctgtctcctttatcagagatgcaatgaatagtgaagaacacataattatt

SEQ ID NO: 512316 - DNA, 75 bp, synthetic construct
  source 1..75: mol_type = other DNA
gtgatattggttgtctggagattcagggggccagtctattcccatgccgacgacagtattcgccagttctggatt

SEQ ID NO: 512317 - DNA, 75 bp, synthetic construct
  source 1..75: mol_type = other DNA
ctgggttgaatgggcgaaagccaatcagctcggtctggattttaacccctcctgtttttcgcatccgctaagcgc

SEQ ID NO: 512318 - DNA, 75 bp, synthetic construct
  source 1..75: mol_type = other DNA
catcaggcggtgaatgccggatgcgctttgcttatccggcctacaaatccggaacgcgtaggcctgataagacgc

SEQ ID NO: 512319 - DNA, 75 bp, synthetic construct
  source 1..75: mol_type = other DNA
atgcaatacatcaagatccatgcgctggataacgtcgcggttgctttagctgatttggctgaaggcacagaagtc

SEQ ID NO: 512320 - DNA, 75 bp, synthetic construct
  source 1..75: mol_type = other DNA
ctgtaaaagtgaccggtattggacgtaacagtatgcagggtgatattcgctttgctgatgtgctggaaaaaatgg

SEQ ID NO: 512321 - DNA, 75 bp, synthetic construct
  source 1..75: mol_type = other DNA
tcagcactatcaaaaatttgtcgtaaaaggcgggcagtcttatcagtcaccggggacttatttggtagaaggcga

SEQ ID NO: 512322 - DNA, 75 bp, synthetic construct
  source 1..75: mol_type = other DNA
ggcactggtcggctttttatttatggctctggttggggcattgttaggcagcattgcctggtacactcggcctcg

SEQ ID NO: 512323 - DNA, 75 bp, synthetic construct
  source 1..75: mol_type = other DNA
tgaaccgcgaatgaaagaacgcccgattggtcatctggtggatgcgctgcgccagggcggggcgaagatcactta

SEQ ID NO: 512324 - DNA, 75 bp, synthetic construct
  source 1..75: mol_type = other DNA
ttatatttcctgcacgcgtggtgaactgaacgctattgatatggatatgaaccatattcctgatgcggcgatgac

SEQ ID NO: 512325 - DNA, 75 bp, synthetic construct
  source 1..75: mol_type = other DNA
aaaggcaccacaacgctgcgtaatatttataactggcgcgttaaagagacggatcgtctttttgcgatggcgact

SEQ ID NO: 512326 - DNA, 75 bp, synthetic construct
  source 1..75: mol_type = other DNA
cagtgcagttacacccggcgaaagtgcaggaaggcgttgatatcgccatcgaaaatgatgtgattgtcgctatcg

SEQ ID NO: 512327 - DNA, 75 bp, synthetic construct
  source 1..75: mol_type = other DNA
ggagcgtggttaacgaacgtcgtgaagaatactatcaggagattggtgagaaaaaagcgcgtaagttgaaaatga

SEQ ID NO: 512328 - DNA, 75 bp, synthetic construct
  source 1..75: mol_type = other DNA
tcttcagccacacttacggctgttcgcagttgggcgacgatcacattaatacccgcaccatgctgcaaaacatgg

SEQ ID NO: 512329 - DNA, 75 bp, synthetic construct
  source 1..75: mol_type = other DNA
gaagaccgtcagtttaacttcgattgcgattccatttatgcgcaagccagaaaagccgctgccagtatgtggcgt

SEQ ID NO: 512330 - DNA, 75 bp, synthetic construct
  source 1..75: mol_type = other DNA
aagagatgaaatttgccttctttaaacatcgcgatgcgggtggcccgctgtggcctgacagttttgccaaagccc

SEQ ID NO: 512331 - DNA, 75 bp, synthetic construct
  source 1..75: mol_type = other DNA
tgacgccagctacaaagagatgcatggccggattgtgatgcctggtattgtctgctcacacaaccatttttactc

SEQ ID NO: 512332 - DNA, 75 bp, synthetic construct
  source 1..75: mol_type = other DNA
atgcagtatgcgaaacctgtcactctgtacgttgaagagtgtgaccgtctctcctttctgccttacctgtttggc

SEQ ID NO: 512333 - DNA, 75 bp, synthetic construct
  source 1..75: mol_type = other DNA
atgcaatatgtgaaacctgtcactctgaatgttgaagaatgcgaccgcctcttctttctgccttacctgtttggc

SEQ ID NO: 512334 - DNA, 75 bp, synthetic construct
  source 1..75: mol_type = other DNA
ttgggtcactgaaactgtcactcagccctggggcgttattacgcatctgattttattcggctggttcctttggtg

SEQ ID NO: 512335 - DNA, 75 bp, synthetic construct
  source 1..75: mol_type = other DNA
aggttaagcgtcaggttgtttgtgacaggatgcgtaatgccatgtacccggcctggtactggcttacagtactgg

SEQ ID NO: 512336 - DNA, 75 bp, synthetic construct
  source 1..75: mol_type = other DNA
tccgctgacgtgggatgagaaaggtgatctgaaaggctttgagttcggcgtatttgactggcacgccaacggcac

SEQ ID NO: 512337 - DNA, 75 bp, synthetic construct
  source 1..75: mol_type = other DNA
gctttaccggatgcgcgatgcgcagttgtggcgtcacatcgaatttcaccccgaatgcaacgcgatttacgcggc

SEQ ID NO: 512338 - DNA, 75 bp, synthetic construct
  source 1..75: mol_type = other DNA
tgaccgtttccacatggtgaacggtgcaaactggtttgaccgtaccgtgagtgctgatgccgcaggcatcatcct

SEQ ID NO: 512339 - DNA, 75 bp, synthetic construct
  source 1..75: mol_type = other DNA
ttaccggatgcgcgatgcgcagttgtggcgtcacatcgaatttcaccctgaatgcaacgcgatttacgcggctct

SEQ ID NO: 512340 - DNA, 75 bp, synthetic construct
  source 1..75: mol_type = other DNA
gcggttacatgatgccggatggcgaccgttttcatctggttaacggtgaaaactggtttgaccgcacggtcagcg

SEQ ID NO: 512341 - DNA, 75 bp, synthetic construct
  source 1..75: mol_type = other DNA
ccctggggcgtcattacgcacctgattttattcggctggtttctctggtgtctgcgttttcgcatcaaagcggca

SEQ ID NO: 512342 - DNA, 75 bp, synthetic construct
  source 1..75: mol_type = other DNA
cgttaaccattgctatcttgctggtctgggcaacgggagtcatgggaagccgcctgctgctcgggatgcattggc

SEQ ID NO: 512343 - DNA, 75 bp, synthetic construct
  source 1..75: mol_type = other DNA
ttgtggctgtaccacgacagcggggatgcagggttgacacacctgtacaggatgcgcgatgcgcagttgtggagc

SEQ ID NO: 512344 - DNA, 75 bp, synthetic construct
  source 1..75: mol_type = other DNA
cgtaaggcgaggggccacaccggaagactatctttttcactacaaacgttttgttgtgcctgtgtcagaagcaaa

SEQ ID NO: 512345 - DNA, 75 bp, synthetic construct
  source 1..75: mol_type = other DNA
atgacttcgatcccaacgctggcgcttaatggtgaggctatccagctgaaaaatatgcgcgtgaccgtctcgcag

SEQ ID NO: 512346 - DNA, 75 bp, synthetic construct
  source 1..75: mol_type = other DNA
gatgctggagttacaagagaaacaaggcatctcttatatctatgtgactcaacatatcggaatgatgaagcacat

SEQ ID NO: 512347 - DNA, 75 bp, synthetic construct
  source 1..75: mol_type = other DNA
gtaatttaagcaaaacgttccgctaccggaccgggtggtttcgtcgtcaaacggtggaagcggtaaaacccttga

SEQ ID NO: 512348 - DNA, 75 bp, synthetic construct
  source 1..75: mol_type = other DNA
gcttaacgcgatccaggccgccacgcaggaaacaaacgagaagttcgcacagttgccgcgcacatccggcatggc

SEQ ID NO: 512349 - DNA, 75 bp, synthetic construct
  source 1..75: mol_type = other DNA
aaaaaaacagactgccggtagtgcgggacaggccggtggccagtctgccggagaagatgaagaaaaactgacgtg

SEQ ID NO: 512350 - DNA, 75 bp, synthetic construct
  source 1..75: mol_type = other DNA
agccgtgaattttcgtgaggcgacattcagcggaatgcttgatgccccgcagcaggacgggaaaatggcctggct

SEQ ID NO: 512351 - DNA, 75 bp, synthetic construct
  source 1..75: mol_type = other DNA
acgctatcgccggtatggcaaaaatcaacgttaaaataaatgacgcgggcagcgcaaaaaaaatgaaaacaccat

SEQ ID NO: 512352 - DNA, 75 bp, synthetic construct
  source 1..75: mol_type = other DNA
gcgctgggtctgtataccgacacacgaacggtcagtgaggtttgtaaggagaaagagaacagggaagaagagacg

SEQ ID NO: 512353 - DNA, 75 bp, synthetic construct
  source 1..75: mol_type = other DNA
gagaaggagtgattgaactgcaactggaggggagtaaaacacaccgtgagtggtgtgtgccgatcgtggcaccac

SEQ ID NO: 512354 - DNA, 75 bp, synthetic construct
  source 1..75: mol_type = other DNA
ggtacacaccagaaaatcattgatatggctatgaacggcgtcggttgccgtgccaccgcacgactaatgggcgtg

SEQ ID NO: 512355 - DNA, 75 bp, synthetic construct
  source 1..75: mol_type = other DNA
taagctcaaaggatttaaagaagctcatgtcatgaatcaggtacctgggtgcgaaggatatgttgcaaaaacgca

SEQ ID NO: 512356 - DNA, 75 bp, synthetic construct
  source 1..75: mol_type = other DNA
ttgtcggcagcggttgctggtttaatatttgcaagagttatttcgattttagtctctgcctattatgtcaggaat

SEQ ID NO: 512357 - DNA, 75 bp, synthetic construct
  source 1..75: mol_type = other DNA
gagcgaacgccttaaggaccaggcagccttttatgccgaatcggatgtgcagcgtgcggactggcagaaagggct

SEQ ID NO: 512358 - DNA, 75 bp, synthetic construct
  source 1..75: mol_type = other DNA
cttgcctgtcgtcgtcgcgggttaattgttctaaccgaccgttatcctcaggaccaaattcctggcgcttacgat

SEQ ID NO: 512359 - DNA, 75 bp, synthetic construct
  source 1..75: mol_type = other DNA
cacggcgagagcttaccggagaggctcaggcagagcgagaagcagcaaaagcgcatgatgaagatgctttctcct

SEQ ID NO: 512360 - DNA, 75 bp, synthetic construct
  source 1..75: mol_type = other DNA
caggctcaggcctttcaaagaatgctggacaagatcgaccctctggctgcggcgctaagaaatcttgaacaatag

SEQ ID NO: 512361 - DNA, 75 bp, synthetic construct
  source 1..75: mol_type = other DNA
gcgaaaaaaatgatgccggaatatgaaggcggattctggcacttcatccgcctgccggacggtggcggttacatg

SEQ ID NO: 512362 - DNA, 75 bp, synthetic construct
  source 1..75: mol_type = other DNA
caggattttctgtatgtcgaagcgtctgtgtgcgcgctggcgaaaaaaatgatgccggaatatgaaggcggattc

SEQ ID NO: 512363 - DNA, 75 bp, synthetic construct
  source 1..75: mol_type = other DNA
ttgccgttattggtagcgatggttcaggcaagtcaacggtgtgtgaacatctcattaccgttgtcgaaaaatatg

SEQ ID NO: 512364 - DNA, 75 bp, synthetic construct
  source 1..75: mol_type = other DNA
acgggggtacgcgcttactggcttgatcttaattacgggaaaaagaaaaaagtcagcgtgaaacgccgcaaaccg

SEQ ID NO: 512365 - DNA, 75 bp, synthetic construct
  source 1..75: mol_type = other DNA
gggcaaaaacgccactggtaaaccactgccagtgatcactatcacacgcaaggacggcgacagtcaccgctttac

SEQ ID NO: 512366 - DNA, 75 bp, synthetic construct
  source 1..75: mol_type = other DNA
cggcgcaccggacgtactcagcctccgcgcccgcagcgccgatttccgcgattcgctgaacgttaaacgggaaca

SEQ ID NO: 512367 - DNA, 75 bp, synthetic construct
  source 1..75: mol_type = other DNA
gttgatatcgatgccaatcaaccgctggaacaagtgctggttgatgcggaaaaagcgataatggattttatgacc

SEQ ID NO: 512368 - DNA, 75 bp, synthetic construct
  source 1..75: mol_type = other DNA
atgctgggcgcaatcaccacggtaaaaagcggtaatctgttattcatcatgccaggcggtggcgtgaacgcacag

SEQ ID NO: 512369 - DNA, 75 bp, synthetic construct
  source 1..75: mol_type = other DNA
ggcatgatgtgactgtggagcgggttgtgtctgctatcgcaaaacggtatgacctgacgccgcaaatcagcgatc

SEQ ID NO: 512370 - DNA, 75 bp, synthetic construct
  source 1..75: mol_type = other DNA
gatagatgcgcgctcagccaggggactggtggatctgatcgacagcagggttgtgtcaattatgcagtcatcgcg

SEQ ID NO: 512371 - DNA, 75 bp, synthetic construct
  source 1..75: mol_type = other DNA
atgcaatatgcgaaacctgtcaccctgaacgttgaagagtgcgaccgcctttcttttctgccttacctgtttggc

SEQ ID NO: 512372 - DNA, 75 bp, synthetic construct
  source 1..75: mol_type = other DNA
accgtttccacatggtgaacggtgcaaactggtttgaccgtaccgtgagtgctgatgccgcaggcatcattctga

SEQ ID NO: 512373 - DNA, 75 bp, synthetic construct
  source 1..75: mol_type = other DNA
atggatgcccggatatgagggcggcttctggcatttcatccgcctgccggaagggggcggatacatgatgccaga

SEQ ID NO: 512374 - DNA, 75 bp, synthetic construct
  source 1..75: mol_type = other DNA
ccggacggtggcggttacatgatgccggatggcgaccgttttcatctggttaacggtgaaaactggtttgaccgc

SEQ ID NO: 512375 - DNA, 75 bp, synthetic construct
  source 1..75: mol_type = other DNA
gctttctttcgctgcctgaatggcagtcgccggatttcgctgaccgatctccgcttttttgctcctgcgctgacg

SEQ ID NO: 512376 - DNA, 75 bp, synthetic construct
  source 1..75: mol_type = other DNA
gatgcgcgatgcgcagttgtggcgtcacatcgaatttcaccctgaatgcaacgcgatttacgcggcactggactg

SEQ ID NO: 512377 - DNA, 75 bp, synthetic construct
  source 1..75: mol_type = other DNA
gcggagccgcatcattctccatcacgctggcgcgtggacgtgcagaactctaccccgaaatgcatggcacggtaa

SEQ ID NO: 512378 - DNA, 75 bp, synthetic construct
  source 1..75: mol_type = other DNA
atgcagtatgcgaaacctgtcaccctgaatgttgaagagtgcgaccgcctttcttttctgccttacctgtttggt

SEQ ID NO: 512379 - DNA, 75 bp, synthetic construct
  source 1..75: mol_type = other DNA
cggcaatgtcgcttcctgaagcgtcagataatgaggaaaagacgcgacaggcactgaaggagcaaaacaggttaa

SEQ ID NO: 512380 - DNA, 75 bp, synthetic construct
  source 1..75: mol_type = other DNA
tcctgaatgttgaggagtccgaccgcctgtcttttatgccgtacctgttcggcacggatttcatgctcgcggaat

SEQ ID NO: 512381 - DNA, 75 bp, synthetic construct
  source 1..75: mol_type = other DNA
gtttttaagcggcctggtggcgctttacccgttggtctggctgtgtgcgctggtgggaacggtggcgctgtttta

SEQ ID NO: 512382 - DNA, 75 bp, synthetic construct
  source 1..75: mol_type = other DNA
ttgccctcgttcgccatcacacgcagcagcggcgatcgccatcagttccgcattgctgaccgcgaagcgtatacg

SEQ ID NO: 512383 - DNA, 75 bp, synthetic construct
  source 1..75: mol_type = other DNA
accattgatcttcgcgtcgattatctgcgcccaggcagaggcgagcgttttactgctaccagtagcctgttgcgt

SEQ ID NO: 512384 - DNA, 75 bp, synthetic construct
  source 1..75: mol_type = other DNA
tgcgcctggacaaatatccactcaacgtgctgattgttgacgatattaaaccgtataaagagcgcaaagtggcaa

SEQ ID NO: 512385 - DNA, 75 bp, synthetic construct
  source 1..75: mol_type = other DNA
taatcgtgaaatcagcgtctacagtgaatacgatgaattcctgaaactggcgcataacccggaaatgcgctttgt

SEQ ID NO: 512386 - DNA, 75 bp, synthetic construct
  source 1..75: mol_type = other DNA
gagtgtgttattttttctgcaaacaagttttctttacgtgtgattgcagaaggtgttgagaataaatggcagtat

SEQ ID NO: 512387 - DNA, 75 bp, synthetic construct
  source 1..75: mol_type = other DNA
gaaaaacttattggttcagaattctggatgactattaaaggttacgaaaaactatctgtacttgttcgtaccact

SEQ ID NO: 512388 - DNA, 75 bp, synthetic construct
  source 1..75: mol_type = other DNA
cagttaccagaaatgacacgtgaagatgtggaggattacgcccctggtggcatgaaattcaaccagcacggacca

SEQ ID NO: 512389 - DNA, 75 bp, synthetic construct
  source 1..75: mol_type = other DNA
ctggagtgggcctgagtggattgatgaacatatcacaataacttcgagaccagaaaaaacatcttttggtgcagt

SEQ ID NO: 512390 - DNA, 75 bp, synthetic construct
  source 1..75: mol_type = other DNA
tggcatttgaatttcgtgctatgagttggagtgggcctgaatgggttgatgaacatatcacaatcgcttcgaaac

SEQ ID NO: 512391 - DNA, 75 bp, synthetic construct
  source 1..75: mol_type = other DNA
aaggaagataccagctatggcgattttattatcaacaactggttacatttctctggtttattaatgactgccagg

SEQ ID NO: 512392 - DNA, 75 bp, synthetic construct
  source 1..75: mol_type = other DNA
actaagtttcgtaatgcacacgacacgccatttaaacaatggagtggttcaagttattcccctgtggattacaag

SEQ ID NO: 512393 - DNA, 75 bp, synthetic construct
  source 1..75: mol_type = other DNA
ttgctgtggtttattgagttttgtatcagcaaacatgatgaccgtatgtttcgtattatatggctggctatcatg

SEQ ID NO: 512394 - DNA, 75 bp, synthetic construct
  source 1..75: mol_type = other DNA
atttttaatattcaacttgtggccagacatatttatcaattagctgaaagagatgaatttcagtcctccttacca

SEQ ID NO: 512395 - DNA, 75 bp, synthetic construct
  source 1..75: mol_type = other DNA
gtcagttccccgtcccggatgggactggaaatgctgcgccgacagattgccagcgtgggctgcatcaaaggcccg

SEQ ID NO: 512396 - DNA, 75 bp, synthetic construct
  source 1..75: mol_type = other DNA
gcggaatggcactggtcgtggtgctggtattgctggcggttatgatgctggtgaccatcacgctttccagtcgga

SEQ ID NO: 512397 - DNA, 75 bp, synthetic construct
  source 1..75: mol_type = other DNA
gtctgggccgtgaagacagcgaatatctcgcccgctcggtgcctttctacgccgccaatcaaccgctggccgata

SEQ ID NO: 512398 - DNA, 75 bp, synthetic construct
  source 1..75: mol_type = other DNA
ctcgttttttcccactgccgcaggggcaaattgccgtcaccctgcgtgacgcacaggcctgctttaacctgaatg

SEQ ID NO: 512399 - DNA, 75 bp, synthetic construct
  source 1..75: mol_type = other DNA
ggcctttaaaaatcagccaatgatggtgggtaactgggcgcaaagcattttgcacggcggggtcattgcgtcggc

SEQ ID NO: 512400 - DNA, 75 bp, synthetic construct
  source 1..75: mol_type = other DNA
atgtctgccgtactgaccgctgaacaagccctgaaattagtgggtgagatgtttgtttatcacatgccatttaac

SEQ ID NO: 512401 - DNA, 75 bp, synthetic construct
  source 1..75: mol_type = other DNA
gctggatgtcgccgccggtctggtgtgcgtgggaagtaccttaacccgccacgaaaccatcagtgaagatgaact

SEQ ID NO: 512402 - DNA, 75 bp, synthetic construct
  source 1..75: mol_type = other DNA
tacgccgctaatcaaccgctggctgatatcagcgagatgcgcgtggtgcagggaatggacgccgggctttatcaa

SEQ ID NO: 512403 - DNA, 75 bp, synthetic construct
  source 1..75: mol_type = other DNA
ttgcctgcccggtttgcaacggcaaactttggtataaccaggaaaaacaagaactgatttgcaaactggataacc

SEQ ID NO: 512404 - DNA, 75 bp, synthetic construct
  source 1..75: mol_type = other DNA
gataaaaaaaacagtatgttaatgagttatatttttaacggttataaatttcacttattaccagtagaatcaata

SEQ ID NO: 512405 - DNA, 75 bp, synthetic construct
  source 1..75: mol_type = other DNA
agtttaaagaacaaagaaataaaagaactaactgaatggttatataaaaaaggcgaggataaaaaaactcgtgta

SEQ ID NO: 512406 - DNA, 75 bp, synthetic construct
  source 1..75: mol_type = other DNA
aagtcatcctatcatcaattctaagagtttaaagaacaaagaaataaaagaactaactgaatggttatataaaaa

SEQ ID NO: 512407 - DNA, 75 bp, synthetic construct
  source 1..75: mol_type = other DNA
attggcagtcgtagggatcatatcaagcgtaacctagacgctttagcggtgtatgaaatcattaaaaaaatgatt

SEQ ID NO: 512408 - DNA, 75 bp, synthetic construct
  source 1..75: mol_type = other DNA
atatgaacaataaacttggttttaacctttcactcggctctggaatagaagaccataaggagcggtgcttttgta

SEQ ID NO: 512409 - DNA, 75 bp, synthetic construct
  source 1..75: mol_type = other DNA
actatggcaaggcctggctatctcactgaagaacacgtcagctaccgaaggtcaattacttaaccttgtcggcac

SEQ ID NO: 512410 - DNA, 75 bp, synthetic construct
  source 1..75: mol_type = other DNA
ggccagttccgcgccgaaatgctggacggcaagatcacggctgaaaggatggttaacgcaatacaggcggctacg

SEQ ID NO: 512411 - DNA, 75 bp, synthetic construct
  source 1..75: mol_type = other DNA
aggcagaagccaacgacggcaagatcaccggattcgacaagccagttgataagcctaaaaagggtaagaagactg

SEQ ID NO: 512412 - DNA, 75 bp, synthetic construct
  source 1..75: mol_type = other DNA
cagagatctcccggtcaaagagggcggcaactccgaagattgtctttatagcggactttatctgaacagggataa

SEQ ID NO: 512413 - DNA, 75 bp, synthetic construct
  source 1..75: mol_type = other DNA
tggttctaatatgctctcagcaatcagactacaagaacagatcaagaaaattgttggaggctatcaaaaacgagg

SEQ ID NO: 512414 - DNA, 75 bp, synthetic construct
  source 1..75: mol_type = other DNA
gacgttagctacacgagcagttgatcgtcatccagttgtatttgatttcgcttcaacagatctaattcgttttgc

SEQ ID NO: 512415 - DNA, 75 bp, synthetic construct
  source 1..75: mol_type = other DNA
acaaatgggagcaaatagtaagcccgatggatcagctaaagggcgaagtagaccctattcagcaggttcaaaatg

SEQ ID NO: 512416 - DNA, 75 bp, synthetic construct
  source 1..75: mol_type = other DNA
gccaggtgctcaacctggtcagcacgctgcaaaaacttggtaacttgggcggcgtgtctgcggaacaactatcaa

SEQ ID NO: 512417 - DNA, 75 bp, synthetic construct
  source 1..75: mol_type = other DNA
ttgctaacttaggtagcaatatcctcggcaatattggtagcagactttcagatatagccgctgactggatagcag

SEQ ID NO: 512418 - DNA, 75 bp, synthetic construct
  source 1..75: mol_type = other DNA
taagcgcaaggaagaactaaatagcaacaatgagaagaaattcggccctacagtcggtaaagtcatgacttttgc

SEQ ID NO: 512419 - DNA, 75 bp, synthetic construct
  source 1..75: mol_type = other DNA
atcttttcggcgtgtcagatggcgtagtctcagctatcgacttaatcacaaaaggcgttaaggggttaggtgagg

SEQ ID NO: 512420 - DNA, 75 bp, synthetic construct
  source 1..75: mol_type = other DNA
gctatggcaaggtcttgccatctcactgaagaacacgtcagctacggaagggcaattacttaacctggttggcac

SEQ ID NO: 512421 - DNA, 75 bp, synthetic construct
  source 1..75: mol_type = other DNA
cactggggctggagtatggcccggattcactggatgaagaatatcttgaagttatgaaactgtatcagtttccgg

SEQ ID NO: 512422 - DNA, 75 bp, synthetic construct
  source 1..75: mol_type = other DNA
atgaaaaaatttaattttgctgctctacttccggggtttttggcactcaataattctgtatgggcaagtgatttg

SEQ ID NO: 512423 - DNA, 75 bp, synthetic construct
  source 1..75: mol_type = other DNA
accgcactgcgctatggcccggcgggtgtggcgggctgggcgataaaatcagttgctcgccgaccgctgaaaatg

SEQ ID NO: 512424 - DNA, 75 bp, synthetic construct
  source 1..75: mol_type = other DNA
acagcgtcttttccttaacgcaccgggttcacttcagggcggtggcgatgtgagtctgaacagccggagtgatat

SEQ ID NO: 512425 - DNA, 75 bp, synthetic construct
  source 1..75: mol_type = other DNA
gtacaaatagaaaacttggatttaatatttcaattggttctggtatggaaaaatataaagagcgtcgatttcgta

SEQ ID NO: 512426 - DNA, 75 bp, synthetic construct
  source 1..75: mol_type = other DNA
gctgcgtgggatctcaaactatgttggcgagttccttacgttggagcaggctaaagagcagaccatcggttgggt

SEQ ID NO: 512427 - DNA, 75 bp, synthetic construct
  source 1..75: mol_type = other DNA
atgcttccatcagaaacgatgatctggcagcctgagttcacagataaaacactctccaggaaaaccggggcggtt

SEQ ID NO: 512428 - DNA, 75 bp, synthetic construct
  source 1..75: mol_type = other DNA
aaaatggcgacggtacggtgcctctgcgtgccgggcaaatcgttcacgcgaatattcaggagcgtctggcagtac

SEQ ID NO: 512429 - DNA, 75 bp, synthetic construct
  source 1..75: mol_type = other DNA
gtacattaacattccccagagatctgccggtcggagaggacggtaagaaagaaaattgtctttatagcgagcttt

SEQ ID NO: 512430 - DNA, 75 bp, synthetic construct
  source 1..75: mol_type = other DNA
agactaagtgaagaagtcgagaagattattaagcggtatcaagagcagaaaatgaagtgccataaggttattctg

SEQ ID NO: 512431 - DNA, 75 bp, synthetic construct
  source 1..75: mol_type = other DNA
acgcagatgaaatacctgatggacagcgcggcagcacaacagaaagcgctcggactgacctttggtgtgtcgctg

SEQ ID NO: 512432 - DNA, 75 bp, synthetic construct
  source 1..75: mol_type = other DNA
cggcccggattcactggatgaagaatgtcttgaagtcatgaaactgtatcagtttccggttcatgttgtgggcta

SEQ ID NO: 512433 - DNA, 75 bp, synthetic construct
  source 1..75: mol_type = other DNA
tagacaaccggggaagtattccgctgtcatcagggatacaggagcaggtctcagctatccgcccctacccctcat

SEQ ID NO: 512434 - DNA, 75 bp, synthetic construct
  source 1..75: mol_type = other DNA
gttccattgctccaaagattggctgtacgcctgagactctgcgtgtctgggttcgccagcatgagcgggataccg

SEQ ID NO: 512435 - DNA, 75 bp, synthetic construct
  source 1..75: mol_type = other DNA
gcgcaaaataaaggcttgcagattggtcagcgagtcgggattggctggacggcacgtagctgtggtcactgtgat

SEQ ID NO: 512436 - DNA, 75 bp, synthetic construct
  source 1..75: mol_type = other DNA
ggtggcgctcgggagcgccgcgcaggataaaggtttgcaggtcggtcagcgtgtcgggattggctggacggcgcg

SEQ ID NO: 512437 - DNA, 75 bp, synthetic construct
  source 1..75: mol_type = other DNA
gtcagcgtgtcgggattggctggacggcgcgtagctgcggtcactgcgacgcctgtattagcggtaatcagatca

SEQ ID NO: 512438 - DNA, 75 bp, synthetic construct
  source 1..75: mol_type = other DNA
acattccggacattctccaagcgctcattttttccgatcagaacgtctcagggctggtggctggtgctgaccctc

SEQ ID NO: 512439 - DNA, 75 bp, synthetic construct
  source 1..75: mol_type = other DNA
gttcgcaagagtgtgttcaaacagtacaaaatcattgaaggactggtcaaaaaggcgagcaccatttacatctcc

SEQ ID NO: 512440 - DNA, 75 bp, synthetic construct
  source 1..75: mol_type = other DNA
tcagtgtctttcaggaggtggtaatggaaatggaggcggtaataaagcgggttccagtaattgctcaggaagtaa

SEQ ID NO: 512441 - DNA, 75 bp, synthetic construct
  source 1..75: mol_type = other DNA
ggagaaagccattaccgccctgaccggacaaagcgtcgatcaaaaatggtttgtagtttacggcgactctccaca

SEQ ID NO: 512442 - DNA, 75 bp, synthetic construct
  source 1..75: mol_type = other DNA
tggaaaacggcgcaagcggcgtactggtgccggttgaaggggttaaaagtagcgcgttgttgcaggaaacagcca

SEQ ID NO: 512443 - DNA, 75 bp, synthetic construct
  source 1..75: mol_type = other DNA
tggaaaacggcgaaagcggcgtactggtgccggttgaaggggttaaaagtagcgcgttgatgcaggaaatcgcca

SEQ ID NO: 512444 - DNA, 75 bp, synthetic construct
  source 1..75: mol_type = other DNA
ccgaattgttcccgatgtcgaaaattaacgacgccatcaagcatgtgcgcgacggtaaggcgcgttaccgcgtgg

SEQ ID NO: 512445 - DNA, 75 bp, synthetic construct
  source 1..75: mol_type = other DNA
gggggtgatattgctgattgtggcggtgttccgctctttacgcccgttgctgctttgcgtgatttccatcggcat

SEQ ID NO: 512446 - DNA, 75 bp, synthetic construct
  source 1..75: mol_type = other DNA
gtggcgttgctgatcctgctgccgcaatcacggctgaacagtagcgtgctggctatgttacccaaacagacgatg

SEQ ID NO: 512447 - DNA, 75 bp, synthetic construct
  source 1..75: mol_type = other DNA
gcgagttcgagttcaccaaaacctccatcgaggtgcagtgtgggcgtcacctctttgcgtccgctggtaagacac

SEQ ID NO: 512448 - DNA, 75 bp, synthetic construct
  source 1..75: mol_type = other DNA
atttaccggctgataatgaaaacgggatcagataacttccgcgcgtcctcaattcagggaattatgaagcgtatc

SEQ ID NO: 512449 - DNA, 75 bp, synthetic construct
  source 1..75: mol_type = other DNA
gtcgggcaaatttctccggctctctctcttgatggttcctgcaattcggagggagatcgcgtttcaaccgaaaca

SEQ ID NO: 512450 - DNA, 75 bp, synthetic construct
  source 1..75: mol_type = other DNA
actgttacccgtcttcctcccctgagctatccggtaagttgctggcgcttcttactgagtcgccggaagcatggc

SEQ ID NO: 512451 - DNA, 75 bp, synthetic construct
  source 1..75: mol_type = other DNA
aaccattccggtaggtttaactaaatccatcaaagaagagttgggcatcgataacgtcttcttctcgccagagtt

SEQ ID NO: 512452 - DNA, 75 bp, synthetic construct
  source 1..75: mol_type = other DNA
gcacgacgcgtaccgcaatgccgactacgtgatcattgccacgccgaccgattacgatcccaagactaaccactt

SEQ ID NO: 512453 - DNA, 75 bp, synthetic construct
  source 1..75: mol_type = other DNA
cgagcgtttcgcagacctgctgaaagaaggcgcgattaagcaggatatcccgaccctgtttaccgactccactga

SEQ ID NO: 512454 - DNA, 75 bp, synthetic construct
  source 1..75: mol_type = other DNA
agatccaacgcaggccagtggtggagtgcttgattatgctgtagttggaaactcagtgagttttgtgcttcccct

SEQ ID NO: 512455 - DNA, 75 bp, synthetic construct
  source 1..75: mol_type = other DNA
cactgctgaccacgaagtgttttttggccctgatggacactctgggctgtgtaaaatttgccgttctgaatttaa

SEQ ID NO: 512456 - DNA, 75 bp, synthetic construct
  source 1..75: mol_type = other DNA
gcacttcaccgaagccacattgcttgccgcgatggagaacattgcccggttcgtgactgaggagaagttcaaaca

SEQ ID NO: 512457 - DNA, 75 bp, synthetic construct
  source 1..75: mol_type = other DNA
cgccggtatacggtaataccggtgatctcgaggcccgtctgcagaagaacgggagtgttcgtttccgtgaccgtc

SEQ ID NO: 512458 - DNA, 75 bp, synthetic construct
  source 1..75: mol_type = other DNA
gggctatcgcaattacatggatagtaacacttacagagatggaactcagccagttcaggatagtgagaatcgctg

SEQ ID NO: 512459 - DNA, 75 bp, synthetic construct
  source 1..75: mol_type = other DNA
ctaaagccgtatatcagcatagcgcgaacgctaatccacatctcgcgcccggcacgggcgttcagaacactattt

SEQ ID NO: 512460 - DNA, 75 bp, synthetic construct
  source 1..75: mol_type = other DNA
gatcctctcccagctttattctgcgttctccggggtaagcggtaaggagctgcaaaacgatccgctgatgttaat

SEQ ID NO: 512461 - DNA, 75 bp, synthetic construct
  source 1..75: mol_type = other DNA
acacggtagttactgacactgtgaaagaaaccagtgagcgtggcgtaaaacttacccaaccaattgagcgaggcg

SEQ ID NO: 512462 - DNA, 75 bp, synthetic construct
  source 1..75: mol_type = other DNA
atgaaagagacgaaaaacatcgataacgaaaacacggtcgttgctgacactgtgaaagaaaccagtgagcgtggc

SEQ ID NO: 512463 - DNA, 75 bp, synthetic construct
  source 1..75: mol_type = other DNA
taaaggttgaattgcagcccatagctgaggaattacatggcgattatgtgaacgataaagcgtttaagcgccgct

SEQ ID NO: 512464 - DNA, 75 bp, synthetic construct
  source 1..75: mol_type = other DNA
atgattaacgtcattcgtttaataaacacatttgaaatgcatgcgaccatagtgaaaaataaaatcacgcaaaga

SEQ ID NO: 512465 - DNA, 75 bp, synthetic construct
  source 1..75: mol_type = other DNA
gatgatgtttatcgtccagtagacagaccgacagacccctacgcgcaagctggagagtcaataggcggttatctt

SEQ ID NO: 512466 - DNA, 75 bp, synthetic construct
  source 1..75: mol_type = other DNA
aataaaacatctgcacagagagcgaccactgcggcaacagaaacatcaccattctccggtgatgccgctgcagca

SEQ ID NO: 512467 - DNA, 75 bp, synthetic construct
  source 1..75: mol_type = other DNA
tggccgtgtccggtctggtatgtctttcgctgagctgtattcagcccgcagcagcggcatcctccgttcaggtcg

SEQ ID NO: 512468 - DNA, 75 bp, synthetic construct
  source 1..75: mol_type = other DNA
tgtgccgatggtttctgcccagtctgctcggtctggttctgtgcgtgccagtaccgaatacttacgcagccaccg

SEQ ID NO: 512469 - DNA, 75 bp, synthetic construct
  source 1..75: mol_type = other DNA
acaattgataccgcacagcaggaaattcgtctgatgggttattccttcacctctccggatgtggccagcgctctt

SEQ ID NO: 512470 - DNA, 75 bp, synthetic construct
  source 1..75: mol_type = other DNA
ttcagctatggttaaatacactctggcatgagaaagatcagtatctgaatacgcttatcccttccgataagcgag

SEQ ID NO: 512471 - DNA, 75 bp, synthetic construct
  source 1..75: mol_type = other DNA
aattacccgacccgatcaagaaggaacttaataaaaagctgaccgaaagttcattcagcggttacgttcagctta

SEQ ID NO: 512472 - DNA, 75 bp, synthetic construct
  source 1..75: mol_type = other DNA
acttcagccgggcggcggcgcgcagtaactccgaaaatgctctggtcatccgggattatcctgttctggcaaata

SEQ ID NO: 512473 - DNA, 75 bp, synthetic construct
  source 1..75: mol_type = other DNA
cagctgggtatttcagaaatgggtcgcattgcaagggatcttacacatttcattatcaatagtttgcaagactga

SEQ ID NO: 512474 - DNA, 75 bp, synthetic construct
  source 1..75: mol_type = other DNA
ggggctagtctgcctggtcatggcggcggcgttgctgatcctgctgccacaatcacgactgaacagtagcgtgct

SEQ ID NO: 512475 - DNA, 75 bp, synthetic construct
  source 1..75: mol_type = other DNA
ccagtaaacgccccgcgctgttatgggggctagtctgcctggtcatggcggcggcgttgctgatcctgctgccac

SEQ ID NO: 512476 - DNA, 75 bp, synthetic construct
  source 1..75: mol_type = other DNA
tgtgctggtgagcggtattttcaccgccttcctgctttcgccgctggctatgcccgataaaaagagaacaaaaaa

SEQ ID NO: 512477 - DNA, 75 bp, synthetic construct
  source 1..75: mol_type = other DNA
gggcagagcgtcgatcaaaaatggtttgtggtttacggcgattcgccacagcaaacattgcggcgactggagaaa

SEQ ID NO: 512478 - DNA, 75 bp, synthetic construct
  source 1..75: mol_type = other DNA
ccaccctgggcgtggcaacgctgctgggggtgatattgctgattgtggcggtgttccgctctttgcgcccgttgc

SEQ ID NO: 512479 - DNA, 75 bp, synthetic construct
  source 1..75: mol_type = other DNA
agcaggcgtggggagcgtttttctggcagcaccgcaacggcctgattgaccccgacacccgcgcccgcctgcaaa

SEQ ID NO: 512480 - DNA, 75 bp, synthetic construct
  source 1..75: mol_type = other DNA
ttttacagcgattacgccagtcaacaggcgaagcaggatatctcaaccctgggcgtggcaacgctgctgggggtg

SEQ ID NO: 512481 - DNA, 75 bp, synthetic construct
  source 1..75: mol_type = other DNA
aaaatcgcatcattgcataatctttcgctcgaaaatcatgtagcaaaacaatactcagcgtccatggggcgcaag

SEQ ID NO: 512482 - DNA, 75 bp, synthetic construct
  source 1..75: mol_type = other DNA
atttttcgcaaacacaccggtttaacgccagctgcgtggaagcgacgttacagcaaggaacatatcaattcgtag

SEQ ID NO: 512483 - DNA, 75 bp, synthetic construct
  source 1..75: mol_type = other DNA
gtgctggcgatgagcgggcaggcggtgaatctcttttcgctgctggcgctggtgctggtgcttggcatcggtatc

SEQ ID NO: 512484 - DNA, 75 bp, synthetic construct
  source 1..75: mol_type = other DNA
tactgcgtgaaaacgacggtcgccgcgtaccggtcacgctgtttaccaaaggtggcggacagtggctggaagcga

SEQ ID NO: 512485 - DNA, 75 bp, synthetic construct
  source 1..75: mol_type = other DNA
gggcagagcgtcgatcaaaaatggttcgtggtttacggcgactccccacagcaaacattacggcgactggagaaa

SEQ ID NO: 512486 - DNA, 75 bp, synthetic construct
  source 1..75: mol_type = other DNA
tgagttacatggtgctcatggttttttacttcagaactttttctcacctcattccaaccgaagagtcgatcaatg

SEQ ID NO: 512487 - DNA, 75 bp, synthetic construct
  source 1..75: mol_type = other DNA
aatttacactcggtaaaggtgtgactctgcgcaaccgtattgttatggcacccatgacgacgtgggcgggtaata

SEQ ID NO: 512488 - DNA, 75 bp, synthetic construct
  source 1..75: mol_type = other DNA
tcacgtttaaaaatggcctcaggatgcgtaaccgcgtcgttatggcaccgatgaccacctggtccgctaatgaca

SEQ ID NO: 512489 - DNA, 75 bp, synthetic construct
  source 1..75: mol_type = other DNA
atgacgctaacacctgaacagcgtcaactggcgcaaaactggaatcaggggaatgggaaaaccggcccctatgtg

SEQ ID NO: 512490 - DNA, 75 bp, synthetic construct
  source 1..75: mol_type = other DNA
caggagtagagcgccaggtacgtaacctgctgtggaaagggaaatcgcaggcagagttttaccgcggcatggagt

SEQ ID NO: 512491 - DNA, 75 bp, synthetic construct
  source 1..75: mol_type = other DNA
gtgtcacagggcttctgtttaaacggtactagttatgttattcttctggtgtggtttttttcattaattgtatcc

SEQ ID NO: 512492 - DNA, 75 bp, synthetic construct
  source 1..75: mol_type = other DNA
atgaaaatcaccatttccggtactggctatgtaggcttgtcaaacgggcttctaatcgcacaaaatcatgaggtt

SEQ ID NO: 512493 - DNA, 75 bp, synthetic construct
  source 1..75: mol_type = other DNA
aagccgacgtcattatctctaaccgaatggcagaagagcttaaggatgtggcagataaggtctacacccgcgatc

SEQ ID NO: 512494 - DNA, 75 bp, synthetic construct
  source 1..75: mol_type = other DNA
caacaatccgtcgtttggttatggtggttattgtttgccgaaagataccaagcagttactggcgaactatcagtc

SEQ ID NO: 512495 - DNA, 75 bp, synthetic construct
  source 1..75: mol_type = other DNA
atggatgttattctagaattgttaaagcttattgatctgtttatgaacgcctcattgaccactcaaatactggca

SEQ ID NO: 512496 - DNA, 75 bp, synthetic construct
  source 1..75: mol_type = other DNA
gcctgcggcgcccgttcttttcccccgccttctctgtttatgacctgtcagaaatcacatcaccttccctttgat

SEQ ID NO: 512497 - DNA, 75 bp, synthetic construct
  source 1..75: mol_type = other DNA
atttatcgtctgattatgaagagcggttcagataacttccgtgcgtcttccattcaggggattatgaagcgtatc

SEQ ID NO: 512498 - DNA, 75 bp, synthetic construct
  source 1..75: mol_type = other DNA
atgtttataccacttttgttacgtgcagatatgcgcataacgcctttctttcatcttctcagacaatgtctgttt

SEQ ID NO: 512499 - DNA, 75 bp, synthetic construct
  source 1..75: mol_type = other DNA
ttgttatacctgtagatataggttggagtgatgtaggttcttggagtgcactatgggaagttggcaataaagata

SEQ ID NO: 512500 - DNA, 75 bp, synthetic construct
  source 1..75: mol_type = other DNA
aatttctgcattaatttcaattaaggatggagccgatcctcttttgttagtaatgccgtcagatcatataatcaa

SEQ ID NO: 512501 - DNA, 75 bp, synthetic construct
  source 1..75: mol_type = other DNA
atgtaagcagacatatactaatgctaaaaaagatttggagtttatcagattacctcatgatgactttattaagtg

SEQ ID NO: 512502 - DNA, 75 bp, synthetic construct
  source 1..75: mol_type = other DNA
aaagaaaagccatcattagaaaaagcgcaggaatatttagatagtaaaaactatttatggaatagtggtatgttt

SEQ ID NO: 512503 - DNA, 75 bp, synthetic construct
  source 1..75: mol_type = other DNA
gaagaatatagttgacgaactcaaggaaaaagaacgtcatgaatattatttccattcggagggatatcggccttg

SEQ ID NO: 512504 - DNA, 75 bp, synthetic construct
  source 1..75: mol_type = other DNA
gattctcataattgttttatcatcgctgagacatccttagttactactattggtcttaataatcttattattatt

SEQ ID NO: 512505 - DNA, 75 bp, synthetic construct
  source 1..75: mol_type = other DNA
aacagggtaagcttgttacgtttggtattgttccaacatccccagagactggctatggttacattaagtcaggtg

SEQ ID NO: 512506 - DNA, 75 bp, synthetic construct
  source 1..75: mol_type = other DNA
aaagcggcaatgccattcgtggtgatgtattggttgaagatgctacagatagttatctttattcgcagcatagac

SEQ ID NO: 512507 - DNA, 75 bp, synthetic construct
  source 1..75: mol_type = other DNA
tggcatgctgcctgccgtatggcggagcaactgaccaccctgcgttatcggtttggtctgcagggtgatggaatc

SEQ ID NO: 512508 - DNA, 75 bp, synthetic construct
  source 1..75: mol_type = other DNA
gataggataactgcacaaaaatatatcgaaagtcataattatttatggaatagcggcatgtttatgtttcatgct

SEQ ID NO: 512509 - DNA, 75 bp, synthetic construct
  source 1..75: mol_type = other DNA
ctggcgaaaaaacagctactcaaattcattatcatcgtgctgagcattggattgttgtatcaggaacggcaaaag

SEQ ID NO: 512510 - DNA, 75 bp, synthetic construct
  source 1..75: mol_type = other DNA
caggtgaaacatgtgattgtattacctggtcacattactgctaagcagattcattaccatcgtactgaacattgg

SEQ ID NO: 512511 - DNA, 75 bp, synthetic construct
  source 1..75: mol_type = other DNA
agaacgttttgcggcgttattacaggaaggcgcgattaagcaaaatatcccgaccctgttcaccgattcaaccga

SEQ ID NO: 512512 - DNA, 75 bp, synthetic construct
  source 1..75: mol_type = other DNA
aatacctatctggcgatgagagtggcttattttaacgagctcgatagctacgctgaagccctgggattaaattcc

SEQ ID NO: 512513 - DNA, 75 bp, synthetic construct
  source 1..75: mol_type = other DNA
aaggcgaaaggtgtggaagtcatcatctatgaacctgtcatgacgcaagagctattttttaactcccgcctggaa

SEQ ID NO: 512514 - DNA, 75 bp, synthetic construct
  source 1..75: mol_type = other DNA
atgaaaatcaccatttccggtaccggatatgttggcctgtctaacggtctgcttatcgcgcaaaaccatgaagtt

SEQ ID NO: 512515 - DNA, 75 bp, synthetic construct
  source 1..75: mol_type = other DNA
ccagtgaaatcgcagcattgattccggtgcttaagcgtcttcacgtgccgttaatctgcattaccggtcgtccgg

SEQ ID NO: 512516 - DNA, 75 bp, synthetic construct
  source 1..75: mol_type = other DNA
gaaggcgctgttaagaaagatgtaccagtgctttttactgatagcaccgaggctgaagccatcaaactctttgcc

SEQ ID NO: 512517 - DNA, 75 bp, synthetic construct
  source 1..75: mol_type = other DNA
aaaatataattttctcacctgaatttttacgcgaagggcgagctctttatgacaatctacatccttcacgaattg

SEQ ID NO: 512518 - DNA, 75 bp, synthetic construct
  source 1..75: mol_type = other DNA
gacaatctgcatccgtcgcgtattgtcatcggtgagcgctccgcgcgtgccgaacgtttcgctgatctgctgaaa

SEQ ID NO: 512519 - DNA, 75 bp, synthetic construct
  source 1..75: mol_type = other DNA
gttatgttggtttatcgaacggggtcctgattgcgcaaaaccacgaagtagtggccctggatatcgtacaggcca

SEQ ID NO: 512520 - DNA, 75 bp, synthetic construct
  source 1..75: mol_type = other DNA
ccaccctgtttaccaactccaccgaagcggaagcaatcaaactgttcgctaacacttatctggcgctgcgcgttg

SEQ ID NO: 512521 - DNA, 75 bp, synthetic construct
  source 1..75: mol_type = other DNA
ttgctgcaaaaactgaccgaaggcgcgtcgattctcgggctgtttgtaatgggcgtactggtgactaaatggaca

SEQ ID NO: 512522 - DNA, 75 bp, synthetic construct
  source 1..75: mol_type = other DNA
aaggcgaaaggcgttgaagtgattatctacgagccggtgatgaaagaagactccttcttcaactctcgcctggaa

SEQ ID NO: 512523 - DNA, 75 bp, synthetic construct
  source 1..75: mol_type = other DNA
agcagttgctgtccaactatgaatcggtaccgaataacttaatcggtgcgatcgtcgaagctaatcgcactcgta

SEQ ID NO: 512524 - DNA, 75 bp, synthetic construct
  source 1..75: mol_type = other DNA
gcatccgggcggcgcactaggtcgtaaacttctgttacgggtcagcgatattatgcatacgggcgatgagatccc

SEQ ID NO: 512525 - DNA, 75 bp, synthetic construct
  source 1..75: mol_type = other DNA
gatatagatggagaagatgcttttatccggattggttctatcgcgatggtgcgagtactacttgatgcaatgaag

SEQ ID NO: 512526 - DNA, 75 bp, synthetic construct
  source 1..75: mol_type = other DNA
cgccgtgcgcggtcggcaccgggtgaaaaccccggttatcagaccggacgcctggctcgttcgattggttacatg

SEQ ID NO: 512527 - DNA, 75 bp, synthetic construct
  source 1..75: mol_type = other DNA
gcagggcgattacctggtgggtacggatgaaaacgtgctggtacttaatcgcacttatgccaaccggagcaacgc

SEQ ID NO: 512528 - DNA, 75 bp, synthetic construct
  source 1..75: mol_type = other DNA
atgaaaaacattgcggcagccggggttcttgaacgtattcgcagacttgcaccacagggggcggttccaccgtac

SEQ ID NO: 512529 - DNA, 75 bp, synthetic construct
  source 1..75: mol_type = other DNA
tcgtgcggtacagctgaactctctgtctggcttctgcctgactaaactggacgttctggatggcctgaaagaggt

SEQ ID NO: 512530 - DNA, 75 bp, synthetic construct
  source 1..75: mol_type = other DNA
gttatggaatgctcagaaagctggtaaaaatatactttttgagggagctcaaggaacttttctagacatagacca

SEQ ID NO: 512531 - DNA, 75 bp, synthetic construct
  source 1..75: mol_type = other DNA
gttatgtcggtctttctaatgcggtattactggctcaacaccatcaggtgcttgccctagatgtagtaccggaaa

SEQ ID NO: 512532 - DNA, 75 bp, synthetic construct
  source 1..75: mol_type = other DNA
caacaatccctcctttggatatggcggctactgcctgccgaaggataccaagcagctactagcgaactaccagtc

SEQ ID NO: 512533 - DNA, 75 bp, synthetic construct
  source 1..75: mol_type = other DNA
agccgaagccatcaagctgttcgctaacacctactggcgttacgtgtggcctactttaacgagctggatagctat

SEQ ID NO: 512534 - DNA, 75 bp, synthetic construct
  source 1..75: mol_type = other DNA
agaacgttttgctgcgttgttacaggaaggcgcgattaagcaaaatatcccgaccctgtttaccgactccactga

SEQ ID NO: 512535 - DNA, 75 bp, synthetic construct
  source 1..75: mol_type = other DNA
aaaatgtgatcttttcgcctgagtttttgcgtgaaggtaaagcactttatgataacttacacccatcacgcattg

SEQ ID NO: 512536 - DNA, 75 bp, synthetic construct
  source 1..75: mol_type = other DNA
agaacgtttcgctgctctgttacaggaaggcgcgattaagcaaaatatcccgatgctgtttaccgactccactga

SEQ ID NO: 512537 - DNA, 75 bp, synthetic construct
  source 1..75: mol_type = other DNA
ttataaatgctgctacctcaatagataacaaaacagcttcaatgtcctacgatgcagacctagaagataccccgc

SEQ ID NO: 512538 - DNA, 75 bp, synthetic construct
  source 1..75: mol_type = other DNA
acaaccccgaccacttagaagctctgcgaagcgacatatcgataaaagaccaacctgcggctcctgctcctgctc

SEQ ID NO: 512539 - DNA, 75 bp, synthetic construct
  source 1..75: mol_type = other DNA
atcttataagcacacggatcatcagtgaactcgaaatcgctcacggtctgacagtgaccaagacagcaccttcca

SEQ ID NO: 512540 - DNA, 75 bp, synthetic construct
  source 1..75: mol_type = other DNA
gacaagaatggggttctctgaaacgcatctcagatgctacatcctacatgacgacgaaaacggccagcacatcca

SEQ ID NO: 512541 - DNA, 75 bp, synthetic construct
  source 1..75: mol_type = other DNA
ctaacaagaaccaaaggaccgaaagcatctccagcagcgccctcacctaaaccgaagctcaaaaaatcccgtaat

SEQ ID NO: 512542 - DNA, 75 bp, synthetic construct
  source 1..75: mol_type = other DNA
cttagagccgttcatactcattgatacaatccaaacgatggaatctaatgcaacagattttttttgggcagtgaa

SEQ ID NO: 512543 - DNA, 75 bp, synthetic construct
  source 1..75: mol_type = other DNA
tgaagaagctatttttaccacgcaaagtcgcgatccgctggctcctctcagtgaagcacaaaccttactcactgt

SEQ ID NO: 512544 - DNA, 75 bp, synthetic construct
  source 1..75: mol_type = other DNA
ggaaagtaacaacggggaaagccaggaacttcctctctcagtcacactacatctgcagactcagcaatatggggc

SEQ ID NO: 512545 - DNA, 75 bp, synthetic construct
  source 1..75: mol_type = other DNA
aaagcactggcggggcagtttgatctcattatcaatactgtgaacgtcagcctcgactggcagccttattttgag

SEQ ID NO: 512546 - DNA, 75 bp, synthetic construct
  source 1..75: mol_type = other DNA
ggggtaataactttgctggtgtggtccaatatgcattgaagccaggttcacatcataaaagtgatccaatcgtca

SEQ ID NO: 512547 - DNA, 75 bp, synthetic construct
  source 1..75: mol_type = other DNA
gagctaattgaaactaatcatgatcatcagatagaagctatagttactaggtttaatacttttactggaaatggt

SEQ ID NO: 512548 - DNA, 75 bp, synthetic construct
  source 1..75: mol_type = other DNA
gcctgtattagcggtaatcagatcaactgcgagcaaggcgcggtgccgacgattatgaatcgcggtggctttgcc

SEQ ID NO: 512549 - DNA, 75 bp, synthetic construct
  source 1..75: mol_type = other DNA
gactatatgaagcgtatgggcttctctgatacgcatctacgcgcttatgtcctacatgatgataaagatggacaa

SEQ ID NO: 512550 - DNA, 75 bp, synthetic construct
  source 1..75: mol_type = other DNA
atgtcattagtgcgttctcaacaatgcacagtctggtcatcggacagatcaagacggatgagaaatccaatgaga

SEQ ID NO: 512551 - DNA, 75 bp, synthetic construct
  source 1..75: mol_type = other DNA
aaaaaagcgcatagcagaactggaagctgaacctgtaagccaaacttgcaagttgaacgagccatcgggcaactc

SEQ ID NO: 512552 - DNA, 75 bp, synthetic construct
  source 1..75: mol_type = other DNA
gccagtaccggtagtacctgctgcattacctgagaacgacgatgaggacgggcatgacattgattatcttgagcc

SEQ ID NO: 512553 - DNA, 75 bp, synthetic construct
  source 1..75: mol_type = other DNA
atgaatacaatcgcctccgctacgctcccgcatcatgtacacgctccacgctacgatcgccagcagttgcaatca

SEQ ID NO: 512554 - DNA, 75 bp, synthetic construct
  source 1..75: mol_type = other DNA
atgggaaaacgctccggcactcttatgataagagtcgtcgcaggggagcgattcatgtcattagtgtgtcctcaa

SEQ ID NO: 512555 - DNA, 75 bp, synthetic construct
  source 1..75: mol_type = other DNA
tgccattcttcagatgataaagacgtcattgcaattgatggaaaaacgctccggcactcttatgacaagagtcgc

SEQ ID NO: 512556 - DNA, 75 bp, synthetic construct
  source 1..75: mol_type = other DNA
aaaacctgattagtacacgcattatccaacagcttgaacacgactattcgctactaagaaccaaaggccctaaaa

SEQ ID NO: 512557 - DNA, 75 bp, synthetic construct
  source 1..75: mol_type = other DNA
tatgggtttctcggaaacacatctaaaatgctatgttctacatgatgatattagcggtcaacatatccacattat

SEQ ID NO: 512558 - DNA, 75 bp, synthetic construct
  source 1..75: mol_type = other DNA
ctgaaaccacgacagaatacgttaaccgccccatagaagcacttatcctcgataaacgagctgctggtcaggacg

SEQ ID NO: 512559 - DNA, 75 bp, synthetic construct
  source 1..75: mol_type = other DNA
gggattctgtgctgtggtgatgcgcagtggaatatcgattcttctaaggcagcgttggcatcagctggcagcgtc

SEQ ID NO: 512560 - DNA, 75 bp, synthetic construct
  source 1..75: mol_type = other DNA
cgcacgactttatcgaacatacagaggcgtttggctacgaagcttcaaacgggattctgtgctgtggtgatgcgc

SEQ ID NO: 512561 - DNA, 75 bp, synthetic construct
  source 1..75: mol_type = other DNA
gccgaacctgtaagccaagcttacaacttgccagaattaatcgaaggcatggaagtttccattgatgtaagtact

SEQ ID NO: 512562 - DNA, 75 bp, synthetic construct
  source 1..75: mol_type = other DNA
tggttgggaaggggttcactggcttgacagtgaaaaaccagaacaggcgcgtgacgaagtattacaggttgttgg

SEQ ID NO: 512563 - DNA, 75 bp, synthetic construct
  source 1..75: mol_type = other DNA
gcaactggactcccgttgcggcgtgaaaaaagaaaagcagcagctggagcgcagactgcgcaatgacagccgcta

SEQ ID NO: 512564 - DNA, 75 bp, synthetic construct
  source 1..75: mol_type = other DNA
tgatgtacgtgatgctctggcgcatcgatgccggtgactatgccggtgcgctggaaatcgggcgccatgcgctgc

SEQ ID NO: 512565 - DNA, 75 bp, synthetic construct
  source 1..75: mol_type = other DNA
cgacgccggtgattatgccggtgcgctggaaatcggacgccatgcactgctccatggctgggtgatgccgctggg

SEQ ID NO: 512566 - DNA, 75 bp, synthetic construct
  source 1..75: mol_type = other DNA
acggtcaaaaaagcggaaatcaaagtggagctgttgccgaagtacgccgcctgggcggagggtgttctggctgcc

SEQ ID NO: 512567 - DNA, 75 bp, synthetic construct
  source 1..75: mol_type = other DNA
atatgccggaccagtcacgggcacgtctgcataaagcgattggcactgtcctgagtgaaagcaatccggcttccg

SEQ ID NO: 512568 - DNA, 75 bp, synthetic construct
  source 1..75: mol_type = other DNA
taaccgcaacgtgcagaccgtgctggctgaggaaatggcagacgcggcgcagagcgcaatgcttgccgccaccgg

SEQ ID NO: 512569 - DNA, 75 bp, synthetic construct
  source 1..75: mol_type = other DNA
gcgggtactgggggtgccagagtggaagcgttcggtgatgtaccacgctgtacggatgtttggtaaagggcggta

SEQ ID NO: 512570 - DNA, 75 bp, synthetic construct
  source 1..75: mol_type = other DNA
ttgacaatatgacctacaaccagcaggaaaagaagaaacctgctggtgtagagatttatttcaccagcagacaga

SEQ ID NO: 512571 - DNA, 75 bp, synthetic construct
  source 1..75: mol_type = other DNA
tctgcataaagcgattggcgcggtcctgagtgaaagcaatccggcttccgcccttaatcatctcaaccatgcgtt

SEQ ID NO: 512572 - DNA, 75 bp, synthetic construct
  source 1..75: mol_type = other DNA
atatgccggaccagtcacgggcgcgtttgcataaagcgattggcgcggtcctgagtgaaagcaatccggcgtctg

SEQ ID NO: 512573 - DNA, 75 bp, synthetic construct
  source 1..75: mol_type = other DNA
cggcggagcctgatgtacttcgcagtacggttgtttggtaaagggaagtaccggtcaggcagtatggtaaggccg

SEQ ID NO: 512574 - DNA, 75 bp, synthetic construct
  source 1..75: mol_type = other DNA
tgctggagatgctggacgattatcgctggcgactggtggagccgtttgagttctggctgacggacgagccggaag

SEQ ID NO: 512575 - DNA, 75 bp, synthetic construct
  source 1..75: mol_type = other DNA
gcgctttgattcgatgacttttgatgcctttaccaaggggcttctggaccggtttcgtccggctttacctgagcc

SEQ ID NO: 512576 - DNA, 75 bp, synthetic construct
  source 1..75: mol_type = other DNA
gaaggtcagaaagtgtccttcaccatcgaaagcggtgctaaaggcccggcagctggtaacgtaaccagcctgtaa

SEQ ID NO: 512577 - DNA, 75 bp, synthetic construct
  source 1..75: mol_type = other DNA
acatggctgtgtaagggaagcgatgattatcacttccgcgctctccattcaggaccctcgtgaacgcccgatgga

SEQ ID NO: 512578 - DNA, 75 bp, synthetic construct
  source 1..75: mol_type = other DNA
cgctcgaacaaaagcaagcgatgtggaacggtcttcgccgtttactgctgctgaatattccatcgccgattaagt

SEQ ID NO: 512579 - DNA, 75 bp, synthetic construct
  source 1..75: mol_type = other DNA
ccgcacgctgaacgaaaatcagaaagttgaattttctattgagcaggggcaacgtggccccgcggcagcgaacgt

SEQ ID NO: 512580 - DNA, 75 bp, synthetic construct
  source 1..75: mol_type = other DNA
aaccactgttgatgcaccatatcactgctaccagccgcgttggggtaattggtattggcgggctggggcatatcg

SEQ ID NO: 512581 - DNA, 75 bp, synthetic construct
  source 1..75: mol_type = other DNA
cgatatggcgctgtggcagcaggtggagaaaagcgtactgctggctccttactggctggatggtcactgcctttc

SEQ ID NO: 512582 - DNA, 75 bp, synthetic construct
  source 1..75: mol_type = other DNA
tctgctcgaagaactgggcgcgatcaccacggatgaacaggccagcgcctataaactgacgccgctcggtcgcca

SEQ ID NO: 512583 - DNA, 75 bp, synthetic construct
  source 1..75: mol_type = other DNA
catcgtcgtttccacgataaagagtctgacttcctggcatttgttaatctgtggaattatctcggcgaacagcaa

SEQ ID NO: 512584 - DNA, 75 bp, synthetic construct
  source 1..75: mol_type = other DNA
gcgctgaaaggcaaagtgcaggaaacactgtctgcggtcgctgatgacggtatcgagcagagcggcctgcatatc

SEQ ID NO: 512585 - DNA, 75 bp, synthetic construct
  source 1..75: mol_type = other DNA
tgcgtttgagctatcagtttgagcccggcgcggatgctgacggtgtgactgtacatattccgctgccgttactta

SEQ ID NO: 512586 - DNA, 75 bp, synthetic construct
  source 1..75: mol_type = other DNA
gcgtccggagattacttatccggaaaatttaccggttagtcagaaaaaacaggacattctcgaagcgattcgcga

SEQ ID NO: 512587 - DNA, 75 bp, synthetic construct
  source 1..75: mol_type = other DNA
gaacgtagcctgaatatcgattttctgctcggctatttgaaagagctgttgccgcgtcgcccggatctgaaagtg

SEQ ID NO: 512588 - DNA, 75 bp, synthetic construct
  source 1..75: mol_type = other DNA
ttatactgaccagacaatttcggctattgagttcatattccacatctatagtggtcggctgatccaaaactacca

SEQ ID NO: 512589 - DNA, 75 bp, synthetic construct
  source 1..75: mol_type = other DNA
atgaactggcagatatccaagattgaagtctctagcttcaaagcattcaagcatatctacttggatcttggcaag

SEQ ID NO: 512590 - DNA, 75 bp, synthetic construct
  source 1..75: mol_type = other DNA
ttctgccactcaaagccacgataaaaactagggttcacaacgagacaattgatgccgacattgatcgtaacgagg

SEQ ID NO: 512591 - DNA, 75 bp, synthetic construct
  source 1..75: mol_type = other DNA
acgagaaccctttccctacctattcagtcgaagttcatagattgtatatagataccgtccaaaaaatcagcaccc

SEQ ID NO: 512592 - DNA, 75 bp, synthetic construct
  source 1..75: mol_type = other DNA
aataattaaacgaggagctaacgtaatcacactggaagaagcccaatccttaccgggctggagtgttggccgttt

SEQ ID NO: 512593 - DNA, 75 bp, synthetic construct
  source 1..75: mol_type = other DNA
actgatgtccaaccggggtgggacaaggagataatgttctctacgtattcgtcagtggaccatgcagcctaccag

SEQ ID NO: 512594 - DNA, 75 bp, synthetic construct
  source 1..75: mol_type = other DNA
tattaaaccttcgagtatcaatcgtgatttaacatgtattagcggcatgtttacagccctgattgaagcggagtt

SEQ ID NO: 512595 - DNA, 75 bp, synthetic construct
  source 1..75: mol_type = other DNA
ttgggatgacggtggtggcgaagacctgtatctcaaagaggtaacccactggatgccgctaccagaaccgccgca

SEQ ID NO: 512596 - DNA, 75 bp, synthetic construct
  source 1..75: mol_type = other DNA
acttacaacttgccagaattaatcgaaggcatggaagtttccattgatgtaagcacttgtgatgttgatttaggt

SEQ ID NO: 512597 - DNA, 75 bp, synthetic construct
  source 1..75: mol_type = other DNA
ggaacataagaagtctcatcccgacgagcagttttgccctctctgtggcgctgactgggaagatcacaaatcaat

SEQ ID NO: 512598 - DNA, 75 bp, synthetic construct
  source 1..75: mol_type = other DNA
cctgtaagcgggtatcgtgatgaagaagagaggttggcctcattaatctcggagcgagtaaaagaagttgcggct

SEQ ID NO: 512599 - DNA, 75 bp, synthetic construct
  source 1..75: mol_type = other DNA
actcagagataattgcagcgattgaagaatcattggctaaacaaagctctgcatcagtttacattgacgatgcag

SEQ ID NO: 512600 - DNA, 75 bp, synthetic construct
  source 1..75: mol_type = other DNA
ggatgaggtgaacatagcatcactgaccgacttgcttcgctgtgagctaaaacattgccagctcatcgtgtcgtc

SEQ ID NO: 512601 - DNA, 75 bp, synthetic construct
  source 1..75: mol_type = other DNA
cggattcgaagatattcccgtgaatcaactctctgccgggcaacaacgccgcgttgcgctggcgcgtctgtggct

SEQ ID NO: 512602 - DNA, 75 bp, synthetic construct
  source 1..75: mol_type = other DNA
tgaaaagaacaacatcaagcccactgattgttgtttaagaaccgtaatgaacgttatttattactcgatgttccg

SEQ ID NO: 512603 - DNA, 75 bp, synthetic construct
  source 1..75: mol_type = other DNA
ccgatactcccgcccctcgtgaactcagtcaggatgtgcaggcgctgatcaacaatggtctggattttctggata

SEQ ID NO: 512604 - DNA, 75 bp, synthetic construct
  source 1..75: mol_type = other DNA
attaattctgcacagcaggaaatccggctgatgggctattcctttacctcacccgaagtcgccggcgcgcttgtc

SEQ ID NO: 512605 - DNA, 75 bp, synthetic construct
  source 1..75: mol_type = other DNA
gttttattttatgcctgaaaatgttatcagtgacattatcagtgaatggcagagaagtgatgtgtcagacaggat

SEQ ID NO: 512606 - DNA, 75 bp, synthetic construct
  source 1..75: mol_type = other DNA
agagaagtgatgtgtcagacaggttcagcgttatcaggctatatctgggaacaacttttttatgcacctgggcgg

SEQ ID NO: 512607 - DNA, 75 bp, synthetic construct
  source 1..75: mol_type = other DNA
cacatgaccgcaaagccggttcagctgatggctgagctggttaaaccgctgacaccggatgcgcacgtccttgat

SEQ ID NO: 512608 - DNA, 75 bp, synthetic construct
  source 1..75: mol_type = other DNA
tgatggccgagctggttaaaccgctggcaccggatgcgcacgttctcgatccgtttatgggaagcggcaccaccg

SEQ ID NO: 512609 - DNA, 75 bp, synthetic construct
  source 1..75: mol_type = other DNA
caacgttgtattgcggtgatgttcttgatgtgctgccggcgttatccgaacgttttgatgccgtcattaccgacc

SEQ ID NO: 512610 - DNA, 75 bp, synthetic construct
  source 1..75: mol_type = other DNA
tttcggcggaatgcccctgcggcccggatctggagtacgatccggaatacctgctgctgttcacccgcgccgcac

SEQ ID NO: 512611 - DNA, 75 bp, synthetic construct
  source 1..75: mol_type = other DNA
caatagatgtgcagcgccgcaatcggctgatgatcttacttctgttttatcttggcatccgaggtggtgaattat

SEQ ID NO: 512612 - DNA, 75 bp, synthetic construct
  source 1..75: mol_type = other DNA
tttttcaggccggtggtgtgctgtggcgtggtctggttgtctgggataaaacgcaggcttcccgtgcgccacaca

SEQ ID NO: 512613 - DNA, 75 bp, synthetic construct
  source 1..75: mol_type = other DNA
agaacttgatacagccaagaatggttacattctcctggttcaggacgcagagccaaacttcgatgtaaatggcaa

SEQ ID NO: 512614 - DNA, 75 bp, synthetic construct
  source 1..75: mol_type = other DNA
ccgcgacctcattgctcgcaatggtgagattgaagggcttcgaaaactggttgctgaacttgaggagacaaaatc

SEQ ID NO: 512615 - DNA, 75 bp, synthetic construct
  source 1..75: mol_type = other DNA
tgagcaggtaaaacgtgagaacccgccagtcgaaaccggagcatggaaagacgctgttgactgggtgctcaaaga

SEQ ID NO: 512616 - DNA, 75 bp, synthetic construct
  source 1..75: mol_type = other DNA
tgcgtgaaaaggcagagaaagcaacgtgtggtgtgtggtcgctcgaatatggagagggacgatttgatggtgatg

SEQ ID NO: 512617 - DNA, 75 bp, synthetic construct
  source 1..75: mol_type = other DNA
acgcgcagtggtgcgtagtgaacacagaatacaggtattacgtgcaatgctggtctgaaggtcaagggtggcttg

SEQ ID NO: 512618 - DNA, 75 bp, synthetic construct
  source 1..75: mol_type = other DNA
cgtcagcttaatattaaaacctgtcaatgtcggaactacgaacgccgcttcgagtttgaacctgactgcatcaaa

SEQ ID NO: 512619 - DNA, 75 bp, synthetic construct
  source 1..75: mol_type = other DNA
cagggcggcgactgggggatctgtgaaatcagcttgttcagcggcgatcaactgatgagccagctccgcgcacag

SEQ ID NO: 512620 - DNA, 75 bp, synthetic construct
  source 1..75: mol_type = other DNA
aaggtgcggacggcaatcaggcgataattgtcggtgccgttcacgaatgcctgaatgcaaaactggattccttag

SEQ ID NO: 512621 - DNA, 75 bp, synthetic construct
  source 1..75: mol_type = other DNA
cagggtttgcccatatcagtgattgcatgcatgaccgcgcatttcgccatgccgccagaacgttaatgctggatg

SEQ ID NO: 512622 - DNA, 75 bp, synthetic construct
  source 1..75: mol_type = other DNA
cttggcggcgactggggtatctgtgaaatcagcttgttcagcggcgatcaactaatgagccagcttcgcgcacag

SEQ ID NO: 512623 - DNA, 75 bp, synthetic construct
  source 1..75: mol_type = other DNA
ttgacccggccaccggtgcactcgacaccagcaatccgcggattattcacgatcttcaaaatcctgaagaacctc

SEQ ID NO: 512624 - DNA, 75 bp, synthetic construct
  source 1..75: mol_type = other DNA
tgtgcggtgttgatgatgccggaaatgctattgatgttcgcgatccgcttagcgataaaattcgcgacctggttg

SEQ ID NO: 512625 - DNA, 75 bp, synthetic construct
  source 1..75: mol_type = other DNA
cattccgcaagaggaacgcgccatgatcttcgaacccttttttcagggaagccaccagcgaaaaggggcggtgaa

SEQ ID NO: 512626 - DNA, 75 bp, synthetic construct
  source 1..75: mol_type = other DNA
cgcaagcgttacagcgaaatgctcgatgcccacgcaggcgtgctgccggacgataaactctaccaggcattgcgt

SEQ ID NO: 512627 - DNA, 75 bp, synthetic construct
  source 1..75: mol_type = other DNA
tcgcggtcgcgacggaaaacgcatccgcaggaaattcgaaagaaaagctgaagcactagcatttgagcgatacac

SEQ ID NO: 512628 - DNA, 75 bp, synthetic construct
  source 1..75: mol_type = other DNA
tcgtctggggccgcgttgcccgtatgcacaacgagaatgcattgtgacgccacgtttgacgggggcgaaaaatca

SEQ ID NO: 512629 - DNA, 75 bp, synthetic construct
  source 1..75: mol_type = other DNA
gcgcaacgtgaatgtattgtgacgccgcgtttgacgggcgtaaaaaatcatctctatgcctgtcatttcccgctg

SEQ ID NO: 512630 - DNA, 75 bp, synthetic construct
  source 1..75: mol_type = other DNA
gcctttgccaatgctaatgccgaaatggtacaggccacgcgcaccgtggtgttttcacgcgggcagcaactccag

SEQ ID NO: 512631 - DNA, 75 bp, synthetic construct
  source 1..75: mol_type = other DNA
aagccatatgctaacggcgttctaaccaggttgaaaaaaatcatcaaagaaatgaatgatccaagggttagccag

SEQ ID NO: 512632 - DNA, 75 bp, synthetic construct
  source 1..75: mol_type = other DNA
ttgaaagcagaaaatatcatccataaccgcgtcacgtttgttaaaacgaaaacaaaccacgcaccgtcccgatct

SEQ ID NO: 512633 - DNA, 75 bp, synthetic construct
  source 1..75: mol_type = other DNA
atgagcaaaagggctttgatggattatcgttccatgcgactacgtgatggtatcagtgccgcaacgataaaccgt

SEQ ID NO: 512634 - DNA, 75 bp, synthetic construct
  source 1..75: mol_type = other DNA
cagcaaactatgacctacgcacactttgcaccggatttcttacaagatgctgtgactcttaacccggtgtcagga

SEQ ID NO: 512635 - DNA, 75 bp, synthetic construct
  source 1..75: mol_type = other DNA
tggttggctaaaccgacagataagcggcatctgtcagaattaacaaaagtctggtgggatttgaagggcaagcat

SEQ ID NO: 512636 - DNA, 75 bp, synthetic construct
  source 1..75: mol_type = other DNA
acaatgacatatgcgcacttcgcccctgagtacctacaggacgcgataacgcttaatcctctacgtggtggtgtt

SEQ ID NO: 512637 - DNA, 75 bp, synthetic construct
  source 1..75: mol_type = other DNA
agaaactcctctcgatataatagaggttcgctcaggtgtttatcttgaagacgatgatgttgtgcgctttcaata

SEQ ID NO: 512638 - DNA, 75 bp, synthetic construct
  source 1..75: mol_type = other DNA
tgccaaagaaggcttcgcgtttaaacacgatcgcgagcaataccaattgttctgcgacagcttcccgttcgaaac

SEQ ID NO: 512639 - DNA, 75 bp, synthetic construct
  source 1..75: mol_type = other DNA
acacgctgatccgcaacctcgcggagctgcacattggtcagccggtggtgcatctggagcacggcgtcgggcgct

SEQ ID NO: 512640 - DNA, 75 bp, synthetic construct
  source 1..75: mol_type = other DNA
tggtggtccgggaggcgatcctgcgtgaaattttgcgcggaggacaggtttattatctctacaatgatgtggaaa

SEQ ID NO: 512641 - DNA, 75 bp, synthetic construct
  source 1..75: mol_type = other DNA
gcccgcacagttttctccacggtcatgcgctggtgatgaaaaaaggtcagcggttatctcgcgatgccttgcgta

SEQ ID NO: 512642 - DNA, 75 bp, synthetic construct
  source 1..75: mol_type = other DNA
cgccacgccgcccgcccgtcgtctggcagttaaaacgtttgtccgtgagtacgacagtctggtggtcagagaggc

SEQ ID NO: 512643 - DNA, 75 bp, synthetic construct
  source 1..75: mol_type = other DNA
ccaatgcggccgctattgccgccacaatcgctctggttgcgggtagacgagttcttctcagagctaaaaaactgg

SEQ ID NO: 512644 - DNA, 75 bp, synthetic construct
  source 1..75: mol_type = other DNA
cttatcgaagaaggactggccctgaaactggataacgggcgttttgcccctggagtccagctcttacaaatcgcc

SEQ ID NO: 512645 - DNA, 75 bp, synthetic construct
  source 1..75: mol_type = other DNA
atgcgcgaagctgtaccagcgcatttacccgtcagtgtgaaagtacggcttggctgggacagcggcgagaagaag

SEQ ID NO: 512646 - DNA, 75 bp, synthetic construct
  source 1..75: mol_type = other DNA
ggatctcaattgcggctgtccgtcaaaaaccgttaacggcagcggcggtggggcgacgttactcaaagatcctga

SEQ ID NO: 512647 - DNA, 75 bp, synthetic construct
  source 1..75: mol_type = other DNA
ccatgttgaccaggtaatggagcacggcgaatatgccacgcgcggcgcgttgctggatctcttcccgatggggag

SEQ ID NO: 512648 - DNA, 75 bp, synthetic construct
  source 1..75: mol_type = other DNA
acgggtgatgaatgatttccatcatcaacgtttcaacgtgctggtttgtacaaccattatcgaaaccgggatcga

SEQ ID NO: 512649 - DNA, 75 bp, synthetic construct
  source 1..75: mol_type = other DNA
aaagccggacgcgagccgtcgctggaagatctcaccagccagcaaacagaagtcgagctgcggatgccgtcgcta

SEQ ID NO: 512650 - DNA, 75 bp, synthetic construct
  source 1..75: mol_type = other DNA
ccaatgcgcccactgttgccaccacaatcgctctggctgcgggtggacgagctcttctcagagctgaaaaactgg

SEQ ID NO: 512651 - DNA, 75 bp, synthetic construct
  source 1..75: mol_type = other DNA
taagttattccttctgattaaccagtttgaaaaacaacagataaaaaaaggccgtgatatcaccagtgcgcggat

SEQ ID NO: 512652 - DNA, 75 bp, synthetic construct
  source 1..75: mol_type = other DNA
tcatgcgggccgcctgctcacatctccgtgaggggattttgcaaggtgcaatgctggtggttgattcatctcttc

SEQ ID NO: 512653 - DNA, 75 bp, synthetic construct
  source 1..75: mol_type = other DNA
acgcgctcattataattccagacccggaaatcagaacgcattgaagcatggtggctatggacgccgaatgcttct

SEQ ID NO: 512654 - DNA, 75 bp, synthetic construct
  source 1..75: mol_type = other DNA
atgagcttattcccggctcgctggcgcgtatgctgtgcgcggattggtggtatcgcaaattatggcagatgcgct

SEQ ID NO: 512655 - DNA, 75 bp, synthetic construct
  source 1..75: mol_type = other DNA
gcctgttatcggcaatccgcgtcttgatgctgtgctggctgcggcagatgccggttgctttgccacttacgtcat

SEQ ID NO: 512656 - DNA, 75 bp, synthetic construct
  source 1..75: mol_type = other DNA
atggttacgttttggggaaattatgaggggatctctcagtgcgcagcattgattctgatgagcttttggtttcgc

SEQ ID NO: 512657 - DNA, 75 bp, synthetic construct
  source 1..75: mol_type = other DNA
gggcaggtttattatctctacaatgatgtggaaaacatccagaaagccgccgaacggctggcagaactggtgcca

SEQ ID NO: 512658 - DNA, 75 bp, synthetic construct
  source 1..75: mol_type = other DNA
gaagctggaaggtaatgagaaaggcggcgtgatcgaatttgccgagaagaatcacgttaatccggcatggctgat

SEQ ID NO: 512659 - DNA, 75 bp, synthetic construct
  source 1..75: mol_type = other DNA
gcctgaagtttattcaggatttgagcgagcggaaaacgcgtatcgaatgggtacgccagtttatgcgtgaactgg

SEQ ID NO: 512660 - DNA, 75 bp, synthetic construct
  source 1..75: mol_type = other DNA
gtttgcaaaaatggtacgcaaaaaagaaaagtgcgtaccagcagaaagcctgccattactggccttacacaaaaa

SEQ ID NO: 512661 - DNA, 75 bp, synthetic construct
  source 1..75: mol_type = other DNA
gtcgcggcagagaatattggccggtggctgaccaagctggaagatgccgaaggggaccaggaaagaaaggtgttg

SEQ ID NO: 512662 - DNA, 75 bp, synthetic construct
  source 1..75: mol_type = other DNA
aacgcattatgcgtcttgatgaagccagcgaccgtgggcgttatctgatgattggcgctgcagagcatggttttg

SEQ ID NO: 512663 - DNA, 75 bp, synthetic construct
  source 1..75: mol_type = other DNA
tgatatcgataaagtaaaaacctgccttgcgctgggtgtcgatattaatacctgcgatcgtcagggtgatgctgc

SEQ ID NO: 512664 - DNA, 75 bp, synthetic construct
  source 1..75: mol_type = other DNA
acgagtctggcatcgcgcaggccactctcgcaggcgttgcctttggtgagaagacggttactgcatcactggcta

SEQ ID NO: 512665 - DNA, 75 bp, synthetic construct
  source 1..75: mol_type = other DNA
gctccagtcgttctgaccagcaataaagtcggtacatatacggtgactgcatcgttccataacggtgtaacaata

SEQ ID NO: 512666 - DNA, 75 bp, synthetic construct
  source 1..75: mol_type = other DNA
ataattacggcaacggtgtcccccagcatcaggtgaccctcagcgtttcaccaagtgaaggcgtgaccctcagta

SEQ ID NO: 512667 - DNA, 75 bp, synthetic construct
  source 1..75: mol_type = other DNA
taattacggcaacggtgtcccccagcatcaggtgaccctcagcgtttcaccaagtgaaggcgtgaccctcagtaa

SEQ ID NO: 512668 - DNA, 75 bp, synthetic construct
  source 1..75: mol_type = other DNA
ttatgcgggatgggaattaaactacgccgcttaactgcgggtatctgtctgataactcaacttgcgttccctatg

SEQ ID NO: 512669 - DNA, 75 bp, synthetic construct
  source 1..75: mol_type = other DNA
tcattgataataatggctttccggtgaaaggtgtgactgtgaacttcaccagcaacgcagcgacagccgaaatga

SEQ ID NO: 512670 - DNA, 75 bp, synthetic construct
  source 1..75: mol_type = other DNA
gaattggcaccgttactggattatcgggactggcgcaattttcaaaaggtactggcccgcgcgactcaagcgtgc

SEQ ID NO: 512671 - DNA, 75 bp, synthetic construct
  source 1..75: mol_type = other DNA
gtggactggatcgagactacgcgtaaccgggacggcacactgaaaagtgaaccggtcaaaatgcgcgcgctcgtc

SEQ ID NO: 512672 - DNA, 75 bp, synthetic construct
  source 1..75: mol_type = other DNA
gcatttttatccccggatgatccggccacaaaaaaagcgaatgaatatttgaatagttcgaaagaacgtaatcct

SEQ ID NO: 512673 - DNA, 75 bp, synthetic construct
  source 1..75: mol_type = other DNA
agtgaaagatccgtcgaatcatccggtggcgggaataacggtgaccttcaccatgccacaggacgttgcggcaaa

SEQ ID NO: 512674 - DNA, 75 bp, synthetic construct
  source 1..75: mol_type = other DNA
caacaaacggtgacctatgtgccgaacgtcgcgaatgccgaaatcacgctggcagcctcgaaggatccggtgatt

SEQ ID NO: 512675 - DNA, 75 bp, synthetic construct
  source 1..75: mol_type = other DNA
tccctgccatgtgttggagaggcgcccatttctgtttctgattgcggagaaggctgggcagacctgcttatccgc

SEQ ID NO: 512676 - DNA, 75 bp, synthetic construct
  source 1..75: mol_type = other DNA
ccgatcaaagtttctgaagggctggaatttgtgcagtcaggtaccaacgtgccctatgtgcaagttagtgcaatt

SEQ ID NO: 512677 - DNA, 75 bp, synthetic construct
  source 1..75: mol_type = other DNA
cgcagatttccgcaagatcgacaaagtgatggaaaaacagtttggctggcctatgggtccggcatatctgctgga

SEQ ID NO: 512678 - DNA, 75 bp, synthetic construct
  source 1..75: mol_type = other DNA
tgttgtgggcattgacaccgcgcatcacgcccaggctgtcatggcagcaggcttcccgcagcggatgcagaaaga

SEQ ID NO: 512679 - DNA, 75 bp, synthetic construct
  source 1..75: mol_type = other DNA
ggcgtcgctgtttttccggctgatacgtaaagcctgtcgtcagcgtcttgaggggcgggaattatgtcaaagctg

SEQ ID NO: 512680 - DNA, 75 bp, synthetic construct
  source 1..75: mol_type = other DNA
gcgaactggccaacgcgctggaacgcccggaaaacttctgcggaatgcactttttaacccggtacaccggatgcc

SEQ ID NO: 512681 - DNA, 75 bp, synthetic construct
  source 1..75: mol_type = other DNA
gaaaagctccgacgaaaccatcgcgaaagtcgtcgcctgggcgagcaagatgggcaaaaacgccgattgtggtta

SEQ ID NO: 512682 - DNA, 75 bp, synthetic construct
  source 1..75: mol_type = other DNA
caggctgtcatggcagcaggcttcccgcagcggatgcagaaagattaccgcgatgccatcgacgcgctgtttgat

SEQ ID NO: 512683 - DNA, 75 bp, synthetic construct
  source 1..75: mol_type = other DNA
atgaagaaattatccctttcactgatgctgaatgtgtcgctggcgctgatgctggcactgtccctgatttacccg

SEQ ID NO: 512684 - DNA, 75 bp, synthetic construct
  source 1..75: mol_type = other DNA
catataacgaccagcgcagcgtgattgcgctgctggcagatagcccacgcggttatgaaatgcttaacgatgcgg

SEQ ID NO: 512685 - DNA, 75 bp, synthetic construct
  source 1..75: mol_type = other DNA
tctcgcgattactgaatgccagtgcagatgttaattctgcgacgattaccagtctggagataccggaaggtcagg

SEQ ID NO: 512686 - DNA, 75 bp, synthetic construct
  source 1..75: mol_type = other DNA
ttctggcgacggttatctgtgtggttgccggtggtgtcggcgtgtatgccactgagtatgtactggaacgctacg

SEQ ID NO: 512687 - DNA, 75 bp, synthetic construct
  source 1..75: mol_type = other DNA
gacgtcgctgtttttccggctgatacgcacggcctgccgtcagcgtattgaggggcgggaaccatgtcaaagctg

SEQ ID NO: 512688 - DNA, 75 bp, synthetic construct
  source 1..75: mol_type = other DNA
ggcgtcggtgttcttccggctgatacgtacggcctgccgtcaacgtcttgaggagcgggaaccatgtcaaagctg

SEQ ID NO: 512689 - DNA, 75 bp, synthetic construct
  source 1..75: mol_type = other DNA
agcagaaaccctgcgactggatgtcataccgcctgcgtttgagcaactccgccggaaaagaaaccgccgtaaacc

SEQ ID NO: 512690 - DNA, 75 bp, synthetic construct
  source 1..75: mol_type = other DNA
tccccttgctgaaaatttgaaccagcaggagaaagataaatcagctgatggggacaccagaacggacattacccg

SEQ ID NO: 512691 - DNA, 75 bp, synthetic construct
  source 1..75: mol_type = other DNA
ggccgttgacgttcaggaggcggcagccgaccagggcgcttgcgccccttggactcggactcgtggcaataactg

SEQ ID NO: 512692 - DNA, 75 bp, synthetic construct
  source 1..75: mol_type = other DNA
tctgcatcgtgttcagcagttccgcttctttggtattccgggacgtcaggcttaccgtgaacttcgcttgctggc

SEQ ID NO: 512693 - DNA, 75 bp, synthetic construct
  source 1..75: mol_type = other DNA
tgggcaggccaaaggcttattcccgctatttgcgtgagacgattaagccatgtttggagcgactggagcatgtac

SEQ ID NO: 512694 - DNA, 75 bp, synthetic construct
  source 1..75: mol_type = other DNA
agttcactggcacctgttgtgttttatgcgcaaaaaagccgccgcgccatcactgcattactgcgtaagtttgcc

SEQ ID NO: 512695 - DNA, 75 bp, synthetic construct
  source 1..75: mol_type = other DNA
gtggtattggcgcgattgctccctggcgcagggagtgcaaggtgaagatctccagcaaatcgcccaccagcttgc

SEQ ID NO: 512696 - DNA, 75 bp, synthetic construct
  source 1..75: mol_type = other DNA
atccgcgcggcaaattacccctttattgccgacgatatggataatctggtgctacccgcgtcgctcaaaccactt

SEQ ID NO: 512697 - DNA, 75 bp, synthetic construct
  source 1..75: mol_type = other DNA
cggtactgtaatgatgtttctaccttcctgccacgccgttggtttacaaagtgaaagcggacttgagctgctgat

SEQ ID NO: 512698 - DNA, 75 bp, synthetic construct
  source 1..75: mol_type = other DNA
caccggacgttcgcacagcgaagccctgccctattatcagcaattgcagttaaccgagccgatgatttgctgtaa

SEQ ID NO: 512699 - DNA, 75 bp, synthetic construct
  source 1..75: mol_type = other DNA
gctacgactctggttttcacaacaaatattgcagccaaatatttatacgtacgatgattttgttttgcagattag

SEQ ID NO: 512700 - DNA, 75 bp, synthetic construct
  source 1..75: mol_type = other DNA
gattatgaatatcataaaatagtaaagagcagatattatatttcccatacgcctgaaaattttagcttttggagg

SEQ ID NO: 512701 - DNA, 75 bp, synthetic construct
  source 1..75: mol_type = other DNA
gcatgtacgcgacagccagctatctgcatcttttcgttttatggcaagccatgaagggctggacggtctgctgat

SEQ ID NO: 512702 - DNA, 75 bp, synthetic construct
  source 1..75: mol_type = other DNA
cctgtctatccttgtcgctgcgcatatgagcatgtgccttgatgccgcttgtggtgatttgtatgccaccgatga

SEQ ID NO: 512703 - DNA, 75 bp, synthetic construct
  source 1..75: mol_type = other DNA
cagcgttttaacccggacatggtcattatggcggacgtcagcgcccagcccacccacatcagcaagccgctgatg

SEQ ID NO: 512704 - DNA, 75 bp, synthetic construct
  source 1..75: mol_type = other DNA
tacctgcacagtatgagcaaaaaagagcgccgggaactggcagcaagattgcgcctggttaaaccgaaacggcgt

SEQ ID NO: 512705 - DNA, 75 bp, synthetic construct
  source 1..75: mol_type = other DNA
ggataattctgaccggtattggcgcttcgggtctggtggcgcaaaactttgcctggaagctgatgaagattggct

SEQ ID NO: 512706 - DNA, 75 bp, synthetic construct
  source 1..75: mol_type = other DNA
atgaacggcttacttcgtatccgtcagcgttaccaggggcttgcccagagtgataaaaaactggcggattatctg

SEQ ID NO: 512707 - DNA, 75 bp, synthetic construct
  source 1..75: mol_type = other DNA
tgccattctggctgctgctgatgctggtgttttgccacctacatcatgaagcagggcggcgtactggttccccgc

SEQ ID NO: 512708 - DNA, 75 bp, synthetic construct
  source 1..75: mol_type = other DNA
cacgtttccattccacgctaaataatggcaggcccaacccaacttggacaaatgcgacggtaagacaaagcagtg

SEQ ID NO: 512709 - DNA, 75 bp, synthetic construct
  source 1..75: mol_type = other DNA
ctatttacgtgagacgattaagcaatgtctggaacgactagagcatgtacgcgagagtcagctatccacttcttt

SEQ ID NO: 512710 - DNA, 75 bp, synthetic construct
  source 1..75: mol_type = other DNA
cctgtgttaaaggtctggagcttatcgctgaaatgcgcagtgactgtgccgttttctacaccatcacctgtccgt

SEQ ID NO: 512711 - DNA, 75 bp, synthetic construct
  source 1..75: mol_type = other DNA
ttctggcagatgtcagcgtccagcctacccacatcagcaagccgctgatgcaacgtatcgaatacttcagcagcc

SEQ ID NO: 512712 - DNA, 75 bp, synthetic construct
  source 1..75: mol_type = other DNA
aagcagggaggtgtactggttccccgtaaatatcacctcatcagaaccgcttatgaaattaacgaagagccgacc

SEQ ID NO: 512713 - DNA, 75 bp, synthetic construct
  source 1..75: mol_type = other DNA
ccgggcaaagctggcgcatgagcagcagcgttttaatccagatatggtcattctggcggacgtcaatgcccagcc

SEQ ID NO: 512714 - DNA, 75 bp, synthetic construct
  source 1..75: mol_type = other DNA
ggcggcaggtaaaacggtggattttgtaggtatcaacgtcctgctttccgattacgccgggtcggtgttgccgat

SEQ ID NO: 512715 - DNA, 75 bp, synthetic construct
  source 1..75: mol_type = other DNA
tataccagcactatgagcaggccagagaaaatttaatttcagaaaagcgcacgatgattgctgaatcattaagcc

SEQ ID NO: 512716 - DNA, 75 bp, synthetic construct
  source 1..75: mol_type = other DNA
agcaaaataacagaatcagaagaatcgctaaatggtgtcttgataaattaccaagtgattgtcagattgttggtg

SEQ ID NO: 512717 - DNA, 75 bp, synthetic construct
  source 1..75: mol_type = other DNA
ccctgcgtctggatgtcatcccacctgcgtttgagcaactccgtcggaaaagaaaccgccgtaaacccgtgccgt

SEQ ID NO: 512718 - DNA, 75 bp, synthetic construct
  source 1..75: mol_type = other DNA
tggagcttatcgcggaaatgtgcggtgactgcgccgttttctacactatcacctgtccgtcgcgtttccattcca

SEQ ID NO: 512719 - DNA, 75 bp, synthetic construct
  source 1..75: mol_type = other DNA
aaatgagtcaggatcaggtgaaacgcttgtctacccttgtcgctgcgcatatgagcatgtgccttgatgcagctt

SEQ ID NO: 512720 - DNA, 75 bp, synthetic construct
  source 1..75: mol_type = other DNA
gattaagccatgtctggaacgactggagcatgtacgcgacagtcagctatctgcatcttttcgctttatggcaag

SEQ ID NO: 512721 - DNA, 75 bp, synthetic construct
  source 1..75: mol_type = other DNA
aaatggtgtcttgataaattaccaagtgattgtcagattgtcggtgaagatggtaattattatctggttaggtaa

SEQ ID NO: 512722 - DNA, 75 bp, synthetic construct
  source 1..75: mol_type = other DNA
gtcttgatgcggcctgcggtgatctgtttgtcagcgacgatgttaaaccagaagaaatccgccaggcatgggaaa

SEQ ID NO: 512723 - DNA, 75 bp, synthetic construct
  source 1..75: mol_type = other DNA
aacaggcggatgcattgtgtgcctatctgaaatgcctggaggaactcgccgccgggaacaacgagtttttactgg

SEQ ID NO: 512724 - DNA, 75 bp, synthetic construct
  source 1..75: mol_type = other DNA
ttctggcagatgtcagcgcccagcctacccacatcagcaagccgctgatgcaacgtatcgaatacttcagtagcc

SEQ ID NO: 512725 - DNA, 75 bp, synthetic construct
  source 1..75: mol_type = other DNA
acagggtgacaaaaaagcaggtgcgccggtactggataacccgcgccttgatgccattctggctgctgctgatgc

SEQ ID NO: 512726 - DNA, 75 bp, synthetic construct
  source 1..75: mol_type = other DNA
atgagccatgctgatatgaacaactgcagcggctttaacgaggccgccgcagcattctcatggaacagcccgaaa

SEQ ID NO: 512727 - DNA, 75 bp, synthetic construct
  source 1..75: mol_type = other DNA
acccgcgcaaaggaacgccgacaagctacatcgcgaaatatatcagtaagaacattgacggtcgtggtctggctg

SEQ ID NO: 512728 - DNA, 75 bp, synthetic construct
  source 1..75: mol_type = other DNA
tatccttactgctcatgaagtcacgggactcattcgtgaaggcgcgacggtgtgcggcgttcatgtacgtaacca

SEQ ID NO: 512729 - DNA, 75 bp, synthetic construct
  source 1..75: mol_type = other DNA
ggcccgcgaatgtattagtgaaaaccagatcctgaaacgcattgcacgtcactgcgtagaaccaaccaacggcct

SEQ ID NO: 512730 - DNA, 75 bp, synthetic construct
  source 1..75: mol_type = other DNA
cgaccagggcgcttgcgccccttggactcgtggcaataactgtccccttactgaaaatttgaaccaacaagggaa

SEQ ID NO: 512731 - DNA, 75 bp, synthetic construct
  source 1..75: mol_type = other DNA
acgcgcaaattttcgcgcctcgcgtgccgacctgcatgatttttatccccagcatcaacgggatcagccataacc

SEQ ID NO: 512732 - DNA, 75 bp, synthetic construct
  source 1..75: mol_type = other DNA
gaagaaggcagccgcttcccgtatgtcttctggggcagtaaaaatatttttgggctggcgaatcctgacgacgtg

SEQ ID NO: 512733 - DNA, 75 bp, synthetic construct
  source 1..75: mol_type = other DNA
atgattacacattttcgtcaagccatagaagaaacgctgccctggctttcctcttttggcgctgacccaacgggt

SEQ ID NO: 512734 - DNA, 75 bp, synthetic construct
  source 1..75: mol_type = other DNA
aggtggatctgcttttacgtggcggcagcattccgtccggggccgggctgcgcattttctaccgcaaccagcggc

SEQ ID NO: 512735 - DNA, 75 bp, synthetic construct
  source 1..75: mol_type = other DNA
ggtaaacgccagcagcagcaacccggcgcatcgccgcaatgagatgatggcttgtgttaaaggtctggagcttat

SEQ ID NO: 512736 - DNA, 75 bp, synthetic construct
  source 1..75: mol_type = other DNA
atgagtaagctgattgtcccgcagtggccgctgccaaaaggtgttgcggcttgtagctctactcgtatcggcggc

SEQ ID NO: 512737 - DNA, 75 bp, synthetic construct
  source 1..75: mol_type = other DNA
aaatgagtcaggatcaggtgaagcgtctgtctacccttgtcgctgcgcatatgagcatgtgccttgatgccgctt

SEQ ID NO: 512738 - DNA, 75 bp, synthetic construct
  source 1..75: mol_type = other DNA
tgtctggaacgactggagcatgtacgcgactgtcagctatccacttcttttcgctttatggcaagccatgaaggg

SEQ ID NO: 512739 - DNA, 75 bp, synthetic construct
  source 1..75: mol_type = other DNA
cacgtttccattccacgctcaataacggcagaccaaacccaacttggacaaatgcgacggtaagacaaagcagcg

SEQ ID NO: 512740 - DNA, 75 bp, synthetic construct
  source 1..75: mol_type = other DNA
gacagccggtctacagccctcggatttgattattatcgctgccagaccctcaatggggaaaactacgtttgcaat

SEQ ID NO: 512741 - DNA, 75 bp, synthetic construct
  source 1..75: mol_type = other DNA
aggctttgattattacggcaagactctgaccgtaccagcgatgggagaagatagcttcaccctcagagaggtgat

SEQ ID NO: 512742 - DNA, 75 bp, synthetic construct
  source 1..75: mol_type = other DNA
tatcagcaggattgtgcgggactggtgcgctttgcggcgaacgaggcactgaaagttcacgacagcaaatggcta

SEQ ID NO: 512743 - DNA, 75 bp, synthetic construct
  source 1..75: mol_type = other DNA
tcgacctgcgcttgtgctctccgttcaagcctttaatcaactgggaatgacgctggtggcccccattacgcaggg

SEQ ID NO: 512744 - DNA, 75 bp, synthetic construct
  source 1..75: mol_type = other DNA
ttgcgttagccttagccgatcgctatttgctaaaacgcaaggacatcacgcatttagaacttggtgatgtggaaa

SEQ ID NO: 512745 - DNA, 75 bp, synthetic construct
  source 1..75: mol_type = other DNA
tcagcctggaaatgcctacggaacagctcatgatgcgctcactggcatcgctatcacgcgtcaaccagaccagca

SEQ ID NO: 512746 - DNA, 75 bp, synthetic construct
  source 1..75: mol_type = other DNA
cgaccctgtttactgattcaacagaagctgaagcaattaaactttttgctaatacctatctcgcgatgcgtgtgg

SEQ ID NO: 512747 - DNA, 75 bp, synthetic construct
  source 1..75: mol_type = other DNA
gataatctccatccgtcacgtattgtcatcggtgagcgttcagaacgtgcagaacgttttgctgcgttgttacag

SEQ ID NO: 512748 - DNA, 75 bp, synthetic construct
  source 1..75: mol_type = other DNA
tctacgagccagtgatgaaagaagactcattcttcaactctcgcctggaacgtgatctcgccaccttcaaacaac

SEQ ID NO: 512749 - DNA, 75 bp, synthetic construct
  source 1..75: mol_type = other DNA
caaatccccagttgatgacacaagcgactgaaccgaagaaagtgaccagcatgacgccctgtacgggcgtctttg

SEQ ID NO: 512750 - DNA, 75 bp, synthetic construct
  source 1..75: mol_type = other DNA
gaaggagcgattaagcaaaatatcccgaccctgtttaccgactccactgaagcagaagcgattaaactttttgca

SEQ ID NO: 512751 - DNA, 75 bp, synthetic construct
  source 1..75: mol_type = other DNA
atgaaaataacaatttcaggaacaggttatgttggtctttcaaatggtattctgattgcgcaaaatcacgaagtg

SEQ ID NO: 512752 - DNA, 75 bp, synthetic construct
  source 1..75: mol_type = other DNA
ggtgaatcaggtgcggatgatggatctacgcgcccggctggcaaagcgtattggtctggctgcggatgaggtggt

SEQ ID NO: 512753 - DNA, 75 bp, synthetic construct
  source 1..75: mol_type = other DNA
tcagctggcgaaaaactatatggccagcatcaggagcgctgatgtcgccaaactcagagatgaatggttgaaaat

SEQ ID NO: 512754 - DNA, 75 bp, synthetic construct
  source 1..75: mol_type = other DNA
ccagcaatcattcttctggcgttggagacagccatgcgccgtagcgagatcgcagaactacgctggcgctttatc

SEQ ID NO: 512755 - DNA, 75 bp, synthetic construct
  source 1..75: mol_type = other DNA
atggcgactatacgcaaacgtggtaactaccaatgggaagctcaaatccgtaaacgtggttttccctctcaaacc

SEQ ID NO: 512756 - DNA, 75 bp, synthetic construct
  source 1..75: mol_type = other DNA
atgtcgatttatttatcaaataaaagaatatggaaaatggaatctaaaagtaaaaatggcgactatgtaattcct

SEQ ID NO: 512757 - DNA, 75 bp, synthetic construct
  source 1..75: mol_type = other DNA
caaagcttactccactcgtgtgggtgcaggtcctttcccgaccgaactgtttgatgaaactggcgagttcctctg

SEQ ID NO: 512758 - DNA, 75 bp, synthetic construct
  source 1..75: mol_type = other DNA
tcggcgtgaaagatcgtagtggcctgccgcaggcggcactgaactacatcaagcgcattgaagagctgaccggtg

SEQ ID NO: 512759 - DNA, 75 bp, synthetic construct
  source 1..75: mol_type = other DNA
gccgaaaagctgcgccgtgccacgcctcattggatgcgtcacagtcatgccagccatgcgttggcccggggagct

SEQ ID NO: 512760 - DNA, 75 bp, synthetic construct
  source 1..75: mol_type = other DNA
ataagcatccgtgccaaggtggagcacccgtttcgcatcatcaagcggcagttcggcttcgtgaaagccagatac

SEQ ID NO: 512761 - DNA, 75 bp, synthetic construct
  source 1..75: mol_type = other DNA
ctacgcgcccggctggcaaagcgtattggtctggctgcggatgaggtggtggaagaggcgttattacgcttgcag

SEQ ID NO: 512762 - DNA, 75 bp, synthetic construct
  source 1..75: mol_type = other DNA
agtgacaaaagctttaaacgccattttcagcaatggctgaactcactgtggcatgaaaaagacaggcttctgacg

SEQ ID NO: 512763 - DNA, 75 bp, synthetic construct
  source 1..75: mol_type = other DNA
gcatttggttggcaaaggtggcaaaccaggtaaggtggccttgccgccgctcgcgtatacggcgctggaccaata

SEQ ID NO: 512764 - DNA, 75 bp, synthetic construct
  source 1..75: mol_type = other DNA
gtcgatgtatttgcatggcgatgagctcgagcgcgccaggcagatgcggcaggcttttggcgctcgtcacgtcaa

SEQ ID NO: 512765 - DNA, 75 bp, synthetic construct
  source 1..75: mol_type = other DNA
tgaaataagatccgtaacatcagatgaactttctaaaatgactgttgaagaagctgaagaagcacgcacagagag

SEQ ID NO: 512766 - DNA, 75 bp, synthetic construct
  source 1..75: mol_type = other DNA
cgcagtaaaatacacacaccgtctcaggctcaagaagcaattacccgctggtctgccacttgttgcgatccggca

SEQ ID NO: 512767 - DNA, 75 bp, synthetic construct
  source 1..75: mol_type = other DNA
cgcagaaaaatacacacaccgtctcaggctcaagaagcaattacccgctggtctgccacttgttgcgatccgtca

SEQ ID NO: 512768 - DNA, 75 bp, synthetic construct
  source 1..75: mol_type = other DNA
gtatttcgtatatacatacctcgctggtcagtattatcatagctaccctgttgagtctgccaaatggcccccgaa

SEQ ID NO: 512769 - DNA, 75 bp, synthetic construct
  source 1..75: mol_type = other DNA
acgggtaatcgccgcagtaaaatacacacaccgcctcaggctcaagaagcaattccccgctggactgccacttgt

SEQ ID NO: 512770 - DNA, 75 bp, synthetic construct
  source 1..75: mol_type = other DNA
cgcaggaaaatacacacaccgtctcaggctcaagaagcaattacccgctggcctgccacttgttgcgatccgcca

SEQ ID NO: 512771 - DNA, 75 bp, synthetic construct
  source 1..75: mol_type = other DNA
cgcagcaaaatacacacaccgtctcaggctcaagaagcaattacccgctggactgccacttgttgcgatccgaca

SEQ ID NO: 512772 - DNA, 75 bp, synthetic construct
  source 1..75: mol_type = other DNA
atgagtaatcgtaaatatttcggtaccgatgggattcgtggtcgtgtaggggatgcgccgatcacccctgatttt

SEQ ID NO: 512773 - DNA, 75 bp, synthetic construct
  source 1..75: mol_type = other DNA
tgcatgacctttgcagcggcatgaaaatgttcccgcaaatcctggttaacgtgcgttataccgcgggaagcggcg

SEQ ID NO: 512774 - DNA, 75 bp, synthetic construct
  source 1..75: mol_type = other DNA
atggcattaaattcttctctatcgacggcaccaaactgccggatgcggtagaagaggccatcgaagcggaaatgg

SEQ ID NO: 512775 - DNA, 75 bp, synthetic construct
  source 1..75: mol_type = other DNA
cacaccaagggacagtcagaaaaaccacatgatcagcagacagaacgcattctccaggagctgaatgagctgaaa

SEQ ID NO: 512776 - DNA, 75 bp, synthetic construct
  source 1..75: mol_type = other DNA
ggcacacactccaggacgcactgaaaatgacgggcagatcgcgttcacagttttaccgtgatatgcgcgcaggcc

SEQ ID NO: 512777 - DNA, 75 bp, synthetic construct
  source 1..75: mol_type = other DNA
acagttacagaatgagatagcccagctcaggcaggcactggaacaggaaaagaaacggggattctggtccagact

SEQ ID NO: 512778 - DNA, 75 bp, synthetic construct
  source 1..75: mol_type = other DNA
acgggtaatcgccgcagcaaaatacacacaccgtctcaggctcaagaagcaattccccgctggactgccacttgt

SEQ ID NO: 512779 - DNA, 75 bp, synthetic construct
  source 1..75: mol_type = other DNA
ggggacgatgtttcttgtactgccagctgtgtggctgggggcattatcctgggctggggtaagtatcggacaggt

SEQ ID NO: 512780 - DNA, 75 bp, synthetic construct
  source 1..75: mol_type = other DNA
ggctgaaaaagcgggttacggaggaagttgatgaagggctgtggctgcgtctttcggcagcgatgaagcttctgg

SEQ ID NO: 512781 - DNA, 75 bp, synthetic construct
  source 1..75: mol_type = other DNA
aatactgatggcgatttacatcatgataccgctgattctggcgtttgcggcatatgaactgtcgacgttaatcac

SEQ ID NO: 512782 - DNA, 75 bp, synthetic construct
  source 1..75: mol_type = other DNA
gctgcctttcaaaagggtactgaaactgctcagaatacaggcgggaaacttggagaagctgctggtaatgctatc

SEQ ID NO: 512783 - DNA, 75 bp, synthetic construct
  source 1..75: mol_type = other DNA
agtggatatattgcaaaaggctggaatgcgagggatgtcgggtggaggggcatcaaaccaacaggtaatggaacg

SEQ ID NO: 512784 - DNA, 75 bp, synthetic construct
  source 1..75: mol_type = other DNA
aggcaaggagtatgaagaagcggtgatacgccgtctggtcagtccggtgaatatgacagtgtcacatggtggcag

SEQ ID NO: 512785 - DNA, 75 bp, synthetic construct
  source 1..75: mol_type = other DNA
tactgtatacgaatatgcgacaaaaccctttgccataggatacagaatatctcctgaagaatccgcaaaaggtgg

SEQ ID NO: 512786 - DNA, 75 bp, synthetic construct
  source 1..75: mol_type = other DNA
tttctccttttatgctgacagaagaaataaaattacgtaatcgtatcgttatggcgcctatgacgacctggtctg

SEQ ID NO: 512787 - DNA, 75 bp, synthetic construct
  source 1..75: mol_type = other DNA
acgggtaatcgccgcaggaaaatacacacaccggctcaggctcaagaagcaatttcccgctggactgccacttgt

SEQ ID NO: 512788 - DNA, 75 bp, synthetic construct
  source 1..75: mol_type = other DNA
aaaggtataagtaccactggtcaattttcgcaacaagcgggaggtcaagcaggtaatattgctcaaagcggtgtg

SEQ ID NO: 512789 - DNA, 75 bp, synthetic construct
  source 1..75: mol_type = other DNA
atatgacaccacccgctcgaagcagtgcggcatgtcggtaccgcagcccgccgataccggctatcagccgattat

SEQ ID NO: 512790 - DNA, 75 bp, synthetic construct
  source 1..75: mol_type = other DNA
ttgcagattttccacgccggtaataaagccatcccggagcttgtgccaaataacgatgttattagtgccagcgca

SEQ ID NO: 512791 - DNA, 75 bp, synthetic construct
  source 1..75: mol_type = other DNA
tcccgctgaaactgtccggaaaaatctgtcaacgacggatgaaaagtgatccacttatatctccaccaacggccc

SEQ ID NO: 512792 - DNA, 75 bp, synthetic construct
  source 1..75: mol_type = other DNA
gatgaacgtgctgatggttccgtccctctgaaactgtccggaaaaatccacaaacagcttgaaagtattgcccga

SEQ ID NO: 512793 - DNA, 75 bp, synthetic construct
  source 1..75: mol_type = other DNA
atgatcaacccgtccggcaaacgccgatgtttacgctgctgcgtgatgagggattttcaagttcaccacaagggc

SEQ ID NO: 512794 - DNA, 75 bp, synthetic construct
  source 1..75: mol_type = other DNA
atgcgacagcaggcagaggtggttgcggctcaatataccagtgttgcgatagaggacgaccagggtacgcatttc

SEQ ID NO: 512795 - DNA, 75 bp, synthetic construct
  source 1..75: mol_type = other DNA
gtggttaaaaaagaaccacgggcatcttatttttttctgttccagctgtatacccgcattcacaatacatttttc

SEQ ID NO: 512796 - DNA, 75 bp, synthetic construct
  source 1..75: mol_type = other DNA
cgctttccccgggctaccacagtgattatgcccctcaacccattccggagatggacagttctgttgttgttcccc

SEQ ID NO: 512797 - DNA, 75 bp, synthetic construct
  source 1..75: mol_type = other DNA
aagcagtgatttccgaaaatattcctggcggttttccatcaatgcagacgctttgccgcagtatggaagattccg

SEQ ID NO: 512798 - DNA, 75 bp, synthetic construct
  source 1..75: mol_type = other DNA
tccgggcgaattatgcgaggtcgttttgtagaaggtctgggtggcgcgcaattcgctgaacgtctgactattgac

SEQ ID NO: 512799 - DNA, 75 bp, synthetic construct
  source 1..75: mol_type = other DNA
tggcagcatttcttggtggcgatcgcccggttacggtagtcaacccgcccgcaatgcgccatccgcagatacgaa

SEQ ID NO: 512800 - DNA, 75 bp, synthetic construct
  source 1..75: mol_type = other DNA
tgattgcaggtcagaagcacctggcctgcatggatgacgccgccaggctacgggacgccctcggtgtacagctgc

SEQ ID NO: 512801 - DNA, 75 bp, synthetic construct
  source 1..75: mol_type = other DNA
tgatctgctacgcgaactggggccaatgacgtttgaagatctggtacaacggcatacaggcagcggtgaagagat

SEQ ID NO: 512802 - DNA, 75 bp, synthetic construct
  source 1..75: mol_type = other DNA
tcaactcttccgcgaaggcggatacaacgccagcgaggcgcataagcgtaaaacctcgcgcatcctctatatttc

SEQ ID NO: 512803 - DNA, 75 bp, synthetic construct
  source 1..75: mol_type = other DNA
cccttcacatagcgccattattgccgagttcgccaacctggcaggggctaccgatgaatacatgatccgtcgctc

SEQ ID NO: 512804 - DNA, 75 bp, synthetic construct
  source 1..75: mol_type = other DNA
aaatggcgatttgaaaagaatcgtccctgtcagggagtgaagagacaatttatctttacgccgtcacgtccctga

SEQ ID NO: 512805 - DNA, 75 bp, synthetic construct
  source 1..75: mol_type = other DNA
agataaggcaacgtggaaacttcctgacactacggttgagttaagtaagatggtcattccagggatcatggccca

SEQ ID NO: 512806 - DNA, 75 bp, synthetic construct
  source 1..75: mol_type = other DNA
tctcgctggagatgccatcggaacagattatgatgcgttctctggcgtcgttgtcgcgcgttgaccagaccaaaa

SEQ ID NO: 512807 - DNA, 75 bp, synthetic construct
  source 1..75: mol_type = other DNA
ctacgtgatgatgatcctgagcgtaacgaagcagccgctaacggtgaagcagatccaacaacgactgggggaaac

SEQ ID NO: 512808 - DNA, 75 bp, synthetic construct
  source 1..75: mol_type = other DNA
gcgtgctgcgaactgtgccgccagccggtggcaaaaaagccggatacgctgactcacctgtcggcggaaaaaatg

SEQ ID NO: 512809 - DNA, 75 bp, synthetic construct
  source 1..75: mol_type = other DNA
gtccgaccacggcgattcagttaaccccggatttcgaaatgggggaatacaagcgccaggatctggtttacgaga

SEQ ID NO: 512810 - DNA, 63 bp, synthetic construct
  source 1..63: mol_type = other DNA
atgaactgctgggaaatattagctttacaaccaggtgcggaagaacgagatattaagcgtcgt

SEQ ID NO: 512811 - DNA, 75 bp, synthetic construct
  source 1..75: mol_type = other DNA
atcgacgagaatttacaggatgtaaatcagatccaactgtatcatggtgctccttatatctttacatttggggat

SEQ ID NO: 512812 - DNA, 75 bp, synthetic construct
  source 1..75: mol_type = other DNA
cagtgaccgatatgaggcgagtcctgatttcacagagtattccgctgtgtctaacataggatacggatttatcca

SEQ ID NO: 512813 - DNA, 75 bp, synthetic construct
  source 1..75: mol_type = other DNA
atgtgctcgacgccacggtggcgcgtattgagcaactgttccagcaaccgcacgatggtgtaaccggtgttaata

SEQ ID NO: 512814 - DNA, 75 bp, synthetic construct
  source 1..75: mol_type = other DNA
tacaaacaaaatgatgatgttacttttgagcatgttggcaaaaatatgttaaattattacatggatgttcttaaa

SEQ ID NO: 512815 - DNA, 75 bp, synthetic construct
  source 1..75: mol_type = other DNA
tcgtagcgaccctggtctggttgtgctgaacaagacatataacgatcttgagcgcccgatcctggttaaatatct

SEQ ID NO: 512816 - DNA, 75 bp, synthetic construct
  source 1..75: mol_type = other DNA
gcgaggcgaacatgcgctggtgattgcaccgaccggctccgggaaaacgctggcagcatttctctacgccctcga

SEQ ID NO: 512817 - DNA, 75 bp, synthetic construct
  source 1..75: mol_type = other DNA
tctctgacctggaacgcaccaatggaagccttcaccgaaaaagatcagttcttccacggcgttggcgttgacggt

SEQ ID NO: 512818 - DNA, 75 bp, synthetic construct
  source 1..75: mol_type = other DNA
aaagataaaggtgcttatattcgcttccgtttaacaatccgagacgtagcaactggcacagagaaacagcaatat

SEQ ID NO: 512819 - DNA, 75 bp, synthetic construct
  source 1..75: mol_type = other DNA
accgtattgaaccacaggtcgaaatggcatcgggtgaccgaaataataacccgcttaaattcgttgtaacgagct

SEQ ID NO: 512820 - DNA, 75 bp, synthetic construct
  source 1..75: mol_type = other DNA
gaggcgctgagggaaaccttgaagctatggaactcgcagcccgactgggccggcgatgagcgaaatgtagtgctt

SEQ ID NO: 512821 - DNA, 75 bp, synthetic construct
  source 1..75: mol_type = other DNA
aaagccgaagtacaaaactttctctgggctgatgtggtgatctggcagatgcctggctggtggatgggcgcaccg

SEQ ID NO: 512822 - DNA, 75 bp, synthetic construct
  source 1..75: mol_type = other DNA
ggtagattctggaaagctggcttagccgacgaactggcaaaaacagaaggctacgcagaattaggggcgaaagaa

SEQ ID NO: 512823 - DNA, 75 bp, synthetic construct
  source 1..75: mol_type = other DNA
tactctcactggcgaccagatccggggcaatggctttctggcccgggtgctattttgcgaacccggagcaaataa

SEQ ID NO: 512824 - DNA, 75 bp, synthetic construct
  source 1..75: mol_type = other DNA
ggaaaataaggattgatgataacctggttgtttatataggaaacacgattacaccatccgaactggcaaaaaaac

SEQ ID NO: 512825 - DNA, 75 bp, synthetic construct
  source 1..75: mol_type = other DNA
tctaaaaataaaaatggcgactatgtaattcctgactcagtaaagaattacgatggtgaacctctgtatatcttg

SEQ ID NO: 512826 - DNA, 75 bp, synthetic construct
  source 1..75: mol_type = other DNA
cctctctgaaaatgaagcactggcgaaatactttattactcagtatgtgaagcgtcgtgaagggtataactattt

SEQ ID NO: 512827 - DNA, 75 bp, synthetic construct
  source 1..75: mol_type = other DNA
gtggctgaacgtctgacttccgttaaaaaagaaaatctttctgaaaacgaagccattgcccgatattttatcacc

SEQ ID NO: 512828 - DNA, 75 bp, synthetic construct
  source 1..75: mol_type = other DNA
ctgagagcgtcccgggaaaggcgtgcaaaaggtgagcaacgcatccgcatgacattatcacacgcagcactgatg

SEQ ID NO: 512829 - DNA, 75 bp, synthetic construct
  source 1..75: mol_type = other DNA
gccaggaattgtttaatacctgtgcggcaaacggtggcagccagttggatcactctgcgttagggaaggtgcgaa

SEQ ID NO: 512830 - DNA, 75 bp, synthetic construct
  source 1..75: mol_type = other DNA
cgctgaaactgtccggaaaaatccacaaacagcttgaaagtattgcccgaagtcgtggcgaccccccccccaaaa

SEQ ID NO: 512831 - DNA, 75 bp, synthetic construct
  source 1..75: mol_type = other DNA
ccctgaaactgtccggaaaaatccacaaacagcatgaaagtattgcccgaagtcgtggcgacccccctcccaaaa

SEQ ID NO: 512832 - DNA, 75 bp, synthetic construct
  source 1..75: mol_type = other DNA
ctctgaaactgtccggaaaaatccacaaacagcgtgaaagtattgcccgaagtcgtggcgaccccccccccaaaa

SEQ ID NO: 512833 - DNA, 75 bp, synthetic construct
  source 1..75: mol_type = other DNA
gacctctttctgcgctatctccgggctcatgctctggtcacgtctgaacaactggctattagacgtcaactagtt

SEQ ID NO: 512834 - DNA, 75 bp, synthetic construct
  source 1..75: mol_type = other DNA
catctgggtgagcgatgaagtatttcgtcgtctgcgtttgcgctcgctgcaagccgccagagaagcgacgcgtcc

SEQ ID NO: 512835 - DNA, 75 bp, synthetic construct
  source 1..75: mol_type = other DNA
cgaacggtgccgtgatgaaattggcgactggcgtattattttgcactctccctatggaagacgggtgcatgaacc

SEQ ID NO: 512836 - DNA, 75 bp, synthetic construct
  source 1..75: mol_type = other DNA
tgcccagtggaattcagagtcggattggaagggtgacgagcggaacgtcgttcttgctcttgctcgcatttggta

SEQ ID NO: 512837 - DNA, 75 bp, synthetic construct
  source 1..75: mol_type = other DNA
ctgcgctccggcgcccgttacgtccaacgttaggcatcttcatgggtgaattctttcctgcacaaatttccgagc

SEQ ID NO: 512838 - DNA, 75 bp, synthetic construct
  source 1..75: mol_type = other DNA
catggcgagcgtatgattaaacgcacctttaatccgggcttcaaaatcgctctgcaccagaaagatctcaacctg

SEQ ID NO: 512839 - DNA, 75 bp, synthetic construct
  source 1..75: mol_type = other DNA
cactgaaactgtccggaaaaatccacaaacagcctgaaagtattgcccgaagtcgtggcgacccccctcccaaaa

SEQ ID NO: 512840 - DNA, 75 bp, synthetic construct
  source 1..75: mol_type = other DNA
tgaaaagtaatcccagacgaaacagagcgaagtttacgataattcccttcccggcactcagggttaaacagcata

SEQ ID NO: 512841 - DNA, 75 bp, synthetic construct
  source 1..75: mol_type = other DNA
acccgcattcacaatacatttttcccccaaaagcaacaactcccgttcactcccggtggcactcactgcccggaa

SEQ ID NO: 512842 - DNA, 75 bp, synthetic construct
  source 1..75: mol_type = other DNA
cagcagggcgggttcagcgcccagccgtgggactgggcattttatgctgaacaggtgcggcgggagaaattctgt

SEQ ID NO: 512843 - DNA, 75 bp, synthetic construct
  source 1..75: mol_type = other DNA
atgatggttatcagtggtttgttgagcagggcggattaacgcgtgaaaatgggctgcgttttcgcgaggcgatcc

SEQ ID NO: 512844 - DNA, 75 bp, synthetic construct
  source 1..75: mol_type = other DNA
tccccattttgatcagattgaaaatcaacactatcgcccggcattcgatgaggggatgcggcaaaagcgggttga

SEQ ID NO: 512845 - DNA, 75 bp, synthetic construct
  source 1..75: mol_type = other DNA
aaatgctctctcctcaggtctcaggtctgcgaatgcggcaagatcctgataacaaaccttcctatgcgtttggtg

SEQ ID NO: 512846 - DNA, 75 bp, synthetic construct
  source 1..75: mol_type = other DNA
tgcaaagcacactgccgtatctggctccccattttgatcaaattgccaatcgtcactatcgaccggcatttgatg

SEQ ID NO: 512847 - DNA, 75 bp, synthetic construct
  source 1..75: mol_type = other DNA
ggaaatttttgatcataatggcgtggggctggcgttattttacggtgatttcttcgcccgtgattcaaaaagcgg

SEQ ID NO: 512848 - DNA, 75 bp, synthetic construct
  source 1..75: mol_type = other DNA
tagttaataatttcaaccttgaatcttggcttcagggatttagacagtctgcattacaagcgaatctgaaattag

SEQ ID NO: 512849 - DNA, 75 bp, synthetic construct
  source 1..75: mol_type = other DNA
tgaaacagtggcacatccgctgtatccgtgaagccttttcccgttatggactcccgttgccggtcagcccgtccg

SEQ ID NO: 512850 - DNA, 75 bp, synthetic construct
  source 1..75: mol_type = other DNA
taatccatgtcgcccgtcgggagctacaactcgacgatgacacttaccgcgcctttctgatgcagaaaacgggca

SEQ ID NO: 512851 - DNA, 75 bp, synthetic construct
  source 1..75: mol_type = other DNA
ggtaacagcgaagatctggaacgcctttatcgacaatggcgcggtaaggcacctcagattatgccaatgctgcaa

SEQ ID NO: 512852 - DNA, 75 bp, synthetic construct
  source 1..75: mol_type = other DNA
agctaagtggcgtgctagctaagacatatggaagggttcatcaccgtctggttcgcactactgctgaagccatta

SEQ ID NO: 512853 - DNA, 75 bp, synthetic construct
  source 1..75: mol_type = other DNA
aaagcaaggggcctgacttacgccgtttttaaagataaaaaaaatatcggaaaggatgattttggttttccggta

SEQ ID NO: 512854 - DNA, 75 bp, synthetic construct
  source 1..75: mol_type = other DNA
gtcgcgcttctttatggtgaacgcgaggttggcggcgccatcatcagtgccggcatagtcgcagaagacatctga

SEQ ID NO: 512855 - DNA, 75 bp, synthetic construct
  source 1..75: mol_type = other DNA
gccatgagtgatgtggtgctggagaaagcctgtaaagatatggtgcatctctcgcccgatttggttatttcggtc

SEQ ID NO: 512856 - DNA, 75 bp, synthetic construct
  source 1..75: mol_type = other DNA
tcgccgtggggacgcctgaacattaatggcagtgtacagccgaatcagtacaattctgttaccgcaggctggtac

SEQ ID NO: 512857 - DNA, 75 bp, synthetic construct
  source 1..75: mol_type = other DNA
actctacctctccggtacatcacagcgagacagttattattctctgaatgccagttggaatggttcattcactgc

SEQ ID NO: 512858 - DNA, 75 bp, synthetic construct
  source 1..75: mol_type = other DNA
tgaactacgacgattgtcaggggcatccgatgtggtttgagaaaatcgaacgctcccacggtgggcccggctcgc

SEQ ID NO: 512859 - DNA, 75 bp, synthetic construct
  source 1..75: mol_type = other DNA
aaaattcaccggtccgatagaaaaggtaacggcgtttagcggtccgattgagatggtggcgcaatgcgaatatgt

SEQ ID NO: 512860 - DNA, 75 bp, synthetic construct
  source 1..75: mol_type = other DNA
ggcgaacagaacgcaaattattgctggctggtgcgtgcagcgtatgcagcacggtgaacagtgggcgtggatgat

SEQ ID NO: 512861 - DNA, 75 bp, synthetic construct
  source 1..75: mol_type = other DNA
gtgcgcggcagccgtttctatcaaaccttaatgctgctgccttacgccgtggcccccgccgttgccgccgtattg

SEQ ID NO: 512862 - DNA, 75 bp, synthetic construct
  source 1..75: mol_type = other DNA
gctcgcgctggctgccttatttgctggtcgcgccgcagctcatcatcaccgttatcttttttatctggcctgcgg

SEQ ID NO: 512863 - DNA, 75 bp, synthetic construct
  source 1..75: mol_type = other DNA
cggtttgattcaaactatcctgggcgcagtattagtgattgcatcgatctggatgccaggtctgagtatagctgc

SEQ ID NO: 512864 - DNA, 75 bp, synthetic construct
  source 1..75: mol_type = other DNA
atcgaaaactcggttatcaccaccaccttaaccgagggtgctattggctacgccaaacttgatacccgcaagggc

SEQ ID NO: 512865 - DNA, 75 bp, synthetic construct
  source 1..75: mol_type = other DNA
cgcttatcgctccggtgagtttcttcctgctggtagtgaacctggtgtatgccttcttcgacaccttcccggtga

SEQ ID NO: 512866 - DNA, 75 bp, synthetic construct
  source 1..75: mol_type = other DNA
cgcttatcgcgccggtgagtttcttcctgctggtggtgaacctggtgtacgccttcttcgacaccttcccggtga

SEQ ID NO: 512867 - DNA, 75 bp, synthetic construct
  source 1..75: mol_type = other DNA
cgatatcagcgacgccgcgctggacaaatacgttgagcgcctgacggccagacgtaatggcggtcagggggtttc

SEQ ID NO: 512868 - DNA, 75 bp, synthetic construct
  source 1..75: mol_type = other DNA
cacgctgttgcatgaggcgggctataacaccgactggatcgagaagtgccttgcgcacgaacagaagggcgttcg

SEQ ID NO: 512869 - DNA, 75 bp, synthetic construct
  source 1..75: mol_type = other DNA
atccgaaagtgaagtcaccggtaggggccagcgggctgatgcagattatgcctggtacggcgacccatacggtga

SEQ ID NO: 512870 - DNA, 75 bp, synthetic construct
  source 1..75: mol_type = other DNA
gaaacgaacatcaacattggcaccagctatctgcaatatgtttatcaacagttcggcaataaccgtattttctca

SEQ ID NO: 512871 - DNA, 75 bp, synthetic construct
  source 1..75: mol_type = other DNA
gaaaaggtagcagaatacctaagcgagttcagcggaaaacatttcctcgatgtatataattattattccaattga

SEQ ID NO: 512872 - DNA, 75 bp, synthetic construct
  source 1..75: mol_type = other DNA
gcataacgttagctgaagcacgtgagcgtctcaatgaagcgaagcgaatggttactgatggaaagtctccggcca

SEQ ID NO: 512873 - DNA, 75 bp, synthetic construct
  source 1..75: mol_type = other DNA
aatgaccgtggtcatggtttgtttaatcctgcggctgatattaagccttcatctatcgccatatttaaaccacga

SEQ ID NO: 512874 - DNA, 75 bp, synthetic construct
  source 1..75: mol_type = other DNA
cctgttagcttttagtccggaaaagccaggcacaaccgaagcgcaatgtaattactactatgcaaaatggaatac

SEQ ID NO: 512875 - DNA, 75 bp, synthetic construct
  source 1..75: mol_type = other DNA
gacgcttactaccgctatttcatgggggataaaccgacgttgatgagcgccacggaatggggacgtcgttactga

SEQ ID NO: 512876 - DNA, 75 bp, synthetic construct
  source 1..75: mol_type = other DNA
tggcgcgatgacgccattatgcgctcgcaatccacgtcgttgattgaacgccgtgtgcgaatggcacttggcacc

SEQ ID NO: 512877 - DNA, 75 bp, synthetic construct
  source 1..75: mol_type = other DNA
tttaacaaccactggtgggatctcagcgttcaggcgacgattgccgggaaactttgggatcatctggaagaacga

SEQ ID NO: 512878 - DNA, 75 bp, synthetic construct
  source 1..75: mol_type = other DNA
ggctggcgcgtctgccgatggaagcaaaagagaaagatgaatggcgttactggcagggcggatttattgctggaa

SEQ ID NO: 512879 - DNA, 75 bp, synthetic construct
  source 1..75: mol_type = other DNA
acggtgctggcagggcagatgcccgccgattaccagactgtttctacggcaattatttcactggcaaacaatccc

SEQ ID NO: 512880 - DNA, 75 bp, synthetic construct
  source 1..75: mol_type = other DNA
gaagcatctttagccaggggcagaatatctggtgcggaaaatatagtgaaaaatgatgcagctaatttctgtgtt

SEQ ID NO: 512881 - DNA, 75 bp, synthetic construct
  source 1..75: mol_type = other DNA
atattgagcgcttttattacaatgaagatttcgtagaaaaggatagcaatgatgttgtttgcgaaatttttattc

SEQ ID NO: 512882 - DNA, 75 bp, synthetic construct
  source 1..75: mol_type = other DNA
cgggaactgcgcggctatgatgcactgaccagtgcatatgcccgcgcacgaaacagcgggagaattgctgtatga

SEQ ID NO: 512883 - DNA, 75 bp, synthetic construct
  source 1..75: mol_type = other DNA
tgaaacagtggcacatccgctgtatccgtgaagccttttcccattatgggctcccgttgccggtcagcccgtccg

SEQ ID NO: 512884 - DNA, 75 bp, synthetic construct
  source 1..75: mol_type = other DNA
atgaaaaagatagctgctatatcattaattagtatttttcttatatctggttgtgctgtgcataatgatgaaaca

SEQ ID NO: 512885 - DNA, 75 bp, synthetic construct
  source 1..75: mol_type = other DNA
ccggatgttgaggattatcaggaacgcccggcgaatggttgggatatccgcgcagagggctatttacctgcctag

SEQ ID NO: 512886 - DNA, 75 bp, synthetic construct
  source 1..75: mol_type = other DNA
aatgactggatggcgggggtgaatacttttatcgatcatgatttatcccgtagtcatacccgcattggtgttggt

SEQ ID NO: 512887 - DNA, 75 bp, synthetic construct
  source 1..75: mol_type = other DNA
agggctttatgcctctttccgctatgaaggagattgggagtattatgcgaactgggtgcggaacctctatctgat

SEQ ID NO: 512888 - DNA, 75 bp, synthetic construct
  source 1..75: mol_type = other DNA
aaatctatgcttgatattgcactctctttgcattttgattcacagcagtcattcagccgcgaatttaaaaagtta

SEQ ID NO: 512889 - DNA, 75 bp, synthetic construct
  source 1..75: mol_type = other DNA
aacctaatttaccaccgctagaggagtttataccatatctggaaatcatttggcagaataagcaatttacaaata

SEQ ID NO: 512890 - DNA, 75 bp, synthetic construct
  source 1..75: mol_type = other DNA
gttcaaccttctggttccatattaatctcgatctgaacccgaatattattatcgaagggccatccactcagtgcc

SEQ ID NO: 512891 - DNA, 75 bp, synthetic construct
  source 1..75: mol_type = other DNA
tcgttccatagccagccgaatcgcggttcaactttctggttccacattaatctcgatctgaacccgaacattatt

SEQ ID NO: 512892 - DNA, 75 bp, synthetic construct
  source 1..75: mol_type = other DNA
gatgtaaccggtccgattcgcaacatggtgaataccgtcgaccgcatccgtcgcgggcaactcgacagccgggtg

SEQ ID NO: 512893 - DNA, 75 bp, synthetic construct
  source 1..75: mol_type = other DNA
taaccgactctttgtcacctccaattttcatcttgatccctcatcaatgcagctcggcagcaacgtgccatttcc

SEQ ID NO: 512894 - DNA, 75 bp, synthetic construct
  source 1..75: mol_type = other DNA
gaacgcgatcaatcgcgcttattccaggccttccgacaggctgatgccagtatttcccgccgtcatggtggcacc

SEQ ID NO: 512895 - DNA, 75 bp, synthetic construct
  source 1..75: mol_type = other DNA
acatgtggaactttgcgatagcgggcatcaggcggttgaacgggcgaaacagatgccgttcgatttgatcttaat

SEQ ID NO: 512896 - DNA, 75 bp, synthetic construct
  source 1..75: mol_type = other DNA
gtgagcttcatcgtatcgcggatgccctgcaggcggtgcagaaacgtaacttctggcagttacaggctgaaatca

SEQ ID NO: 512897 - DNA, 75 bp, synthetic construct
  source 1..75: mol_type = other DNA
gtgaccttcatcgtatcgcggatgccctgcaggcggtccagaaacgtaacttctggcagttacaggctgaaatca

SEQ ID NO: 512898 - DNA, 75 bp, synthetic construct
  source 1..75: mol_type = other DNA
gtgatcttcatcgtatcgcggatgccctgcaggcggttcagaaacgtaacttctggcagttacaggctgaaatca

SEQ ID NO: 512899 - DNA, 75 bp, synthetic construct
  source 1..75: mol_type = other DNA
gaaccatgttacgccctccccggctaatgagcagtcttctgattccagcatatcctcaaaaacttcacaaagagc

SEQ ID NO: 512900 - DNA, 75 bp, synthetic construct
  source 1..75: mol_type = other DNA
catcgtttggaatatatcaagtttagataaaaaagatatattatctatctcaagaatggtttatgctttttcgac

SEQ ID NO: 512901 - DNA, 75 bp, synthetic construct
  source 1..75: mol_type = other DNA
cggaacagtccgactggtcaggcaatgacagccgatgcggaagccgctgtcagcgaagccctgcgcgacctggcc

SEQ ID NO: 512902 - DNA, 75 bp, synthetic construct
  source 1..75: mol_type = other DNA
gttctcacggcaattggcgagaagtatggcaaaagcgtgggccaggtagttctgcgctggatctaccaacgaggc

SEQ ID NO: 512903 - DNA, 75 bp, synthetic construct
  source 1..75: mol_type = other DNA
cagtttcccataaactaaaattcacacgcccgacaatgcgtggtagtaaatcagaagaagacacgactaacaccc

SEQ ID NO: 512904 - DNA, 75 bp, synthetic construct
  source 1..75: mol_type = other DNA
tggccgataaacgccttggcactctgtttgctaatctgatgggagatttcagcttggaatatcctatccaggata

SEQ ID NO: 512905 - DNA, 75 bp, synthetic construct
  source 1..75: mol_type = other DNA
tgaaaaacttttcccaatactctccgcgctggaagttctacaaataaaaggagataagaagcgtccactctggca

SEQ ID NO: 512906 - DNA, 75 bp, synthetic construct
  source 1..75: mol_type = other DNA
ttgactggacggacagacattgccgctatttcttgcgtctgctttcccgcaatacgttgctgtataccgaaatgg

SEQ ID NO: 512907 - DNA, 75 bp, synthetic construct
  source 1..75: mol_type = other DNA
taacgacgcttataaccctgaccgtgggcgagactatgaagattcgcgcgacgacggctggcagcgtgaagtgag

SEQ ID NO: 512908 - DNA, 75 bp, synthetic construct
  source 1..75: mol_type = other DNA
ttgaggttggctaatgaaacgctttccgctatttcttttattcaccctgctcacgctgaccaccgtaccggccag

SEQ ID NO: 512909 - DNA, 75 bp, synthetic construct
  source 1..75: mol_type = other DNA
ctggaaagccagatttgcactgacttcattcaggttcgtggccgagcggggaaagtgctggtactgaaccaggat

SEQ ID NO: 512910 - DNA, 75 bp, synthetic construct
  source 1..75: mol_type = other DNA
ataaatttaattttgataaaaatgagtcaggtgactatatcgatagttttacacaagcagtatggggaggttatc

SEQ ID NO: 512911 - DNA, 75 bp, synthetic construct
  source 1..75: mol_type = other DNA
atgttaaaaaaacaactactatcaatatttgaagcactattatacataatgcttacttattggttaatagatgct

SEQ ID NO: 512912 - DNA, 75 bp, synthetic construct
  source 1..75: mol_type = other DNA
atactctgcgtttatatgcctttagctggtgtgcccagctagcgctcaatctggacaactggcaggacggcgagc

SEQ ID NO: 512913 - DNA, 75 bp, synthetic construct
  source 1..75: mol_type = other DNA
gttttatgaacgtatgggaaatgtggagcgaatgagtgacagtggagacgccgtgtatgtccgtaaaacagtatg

SEQ ID NO: 512914 - DNA, 75 bp, synthetic construct
  source 1..75: mol_type = other DNA
ctgaagaacaaccctatcttccctatctggtgacttgttttcagtctgatctggcgtttttggcagaacaccctc

SEQ ID NO: 512915 - DNA, 75 bp, synthetic construct
  source 1..75: mol_type = other DNA
gtgaacttcatcgtatcgcggatgccctgcaggcggtacagaaacgtaacttctggcagttacaggctgaaatca

SEQ ID NO: 512916 - DNA, 75 bp, synthetic construct
  source 1..75: mol_type = other DNA
gctgaggcgctgggttgggaagataaatattatctgatctctgcagcgagcgggctgggcgtgaaagacctctgc

SEQ ID NO: 512917 - DNA, 75 bp, synthetic construct
  source 1..75: mol_type = other DNA
tggtgacgtatggatggaagccgacgagaacctgaacacgcttatcgattatcgttttgaaaaatctttccgtgc

SEQ ID NO: 512918 - DNA, 75 bp, synthetic construct
  source 1..75: mol_type = other DNA
acagtgaaaagttgtatagcctggcaaaagagccaaaacggttgatcctaatcccggatggcgaacacattgatg

SEQ ID NO: 512919 - DNA, 75 bp, synthetic construct
  source 1..75: mol_type = other DNA
tcgttgttgccgatattccagggctgattgaaggcgctgcagaaggcgcaggtctgggcattcgcttcctgaagc

SEQ ID NO: 512920 - DNA, 75 bp, synthetic construct
  source 1..75: mol_type = other DNA
tggactgggcgtgaaagatctctgctgggatgtgatgacctttatcattgaaaacccggtcgtgcaggctgaaga

SEQ ID NO: 512921 - DNA, 75 bp, synthetic construct
  source 1..75: mol_type = other DNA
taatggttgcgtgagcttccgccgcgaaaagtatatcccgaaaggcggcccggatggcggcgacggcggtgatgg

SEQ ID NO: 512922 - DNA, 75 bp, synthetic construct
  source 1..75: mol_type = other DNA
atggcgcggctggatatcgccgaaaagcgcgtaccgcaggatggacgtattgcgctgctgctgggcggtcgggcg

SEQ ID NO: 512923 - DNA, 75 bp, synthetic construct
  source 1..75: mol_type = other DNA
atacacaagcacagtggatcaggtgacggcgtttagcggccccatcgaaatggtggcgcagtgcgaatatgttcc

SEQ ID NO: 512924 - DNA, 75 bp, synthetic construct
  source 1..75: mol_type = other DNA
catcgatccgatcgtgacgtcaactcacgagtatttggggcgtgagcatgtgaagcacattgcgattaacccgca

SEQ ID NO: 512925 - DNA, 75 bp, synthetic construct
  source 1..75: mol_type = other DNA
actgacgaagaaaaacgcctgctgggaattaccgacgcgcgtaccgtcacgctgtaccatccgcagggctgcccc

SEQ ID NO: 512926 - DNA, 75 bp, synthetic construct
  source 1..75: mol_type = other DNA
cttccgcctggggtgagcgcgtggtgctgcgactgctggacaaaaaccaggcccgcctgacgctggagcgtctgg

SEQ ID NO: 512927 - DNA, 75 bp, synthetic construct
  source 1..75: mol_type = other DNA
cgggggctgaacgcgccctttacgctgcggcaaatcgacgaggccgaatttgaacagcgactgaatgcggtctgg

SEQ ID NO: 512928 - DNA, 75 bp, synthetic construct
  source 1..75: mol_type = other DNA
agcagcttgaagagattgctgaagaggatgatgaggactgggacgaagacgacgaagaaggcgttgagttcattt

SEQ ID NO: 512929 - DNA, 75 bp, synthetic construct
  source 1..75: mol_type = other DNA
gtcaccggggacgttactgccatccgtacagcatggatatcaccgtcccccggaacagtccgactggtcaggcac

SEQ ID NO: 512930 - DNA, 75 bp, synthetic construct
  source 1..75: mol_type = other DNA
gtcaccggggacgttactgccatccgtacagcatggatatcactgttacccggaacagtccgactggtcaggcaa

SEQ ID NO: 512931 - DNA, 75 bp, synthetic construct
  source 1..75: mol_type = other DNA
tgtatacactgcatgagctatcctccaccgcacaggaaaaagcccgcgacgggtaccgtcagcatcatgctgaca

SEQ ID NO: 512932 - DNA, 75 bp, synthetic construct
  source 1..75: mol_type = other DNA
tattataatttaaatactattattgaagataaaaaacttataaatgaccctcttgaacaatgggattgtattttg

SEQ ID NO: 512933 - DNA, 75 bp, synthetic construct
  source 1..75: mol_type = other DNA
ttggttgatgggaagataaaggcttttaaatgggatgatgaggagcgtagatttcatataagttcatacttggat

SEQ ID NO: 512934 - DNA, 75 bp, synthetic construct
  source 1..75: mol_type = other DNA
ggaagagccgtgcatctggttcagcggattctgccgccagggggacggagcctgttttgaaggacgctggcactg

SEQ ID NO: 512935 - DNA, 75 bp, synthetic construct
  source 1..75: mol_type = other DNA
accgtcaactggaaaacgagtacgactggctgacctcagacgccgctgtggatgaggccctgctcatcaacgaat

SEQ ID NO: 512936 - DNA, 75 bp, synthetic construct
  source 1..75: mol_type = other DNA
gagaacctgaatacgcttatcgattatcgttttgaaaaatctttccgcgccgagcgtggtcagaatggcgcaagc

SEQ ID NO: 512937 - DNA, 75 bp, synthetic construct
  source 1..75: mol_type = other DNA
cgaaagtggcggattatccgtttaccactctggtaccaagtctgggtgtggtacgaatggacaacgaaaagagct

SEQ ID NO: 512938 - DNA, 75 bp, synthetic construct
  source 1..75: mol_type = other DNA
gggactatgaggttgaaaaccatatggaatgtcaaaaccgttctgataaatacatctggtctccccatgacgcct

SEQ ID NO: 512939 - DNA, 75 bp, synthetic construct
  source 1..75: mol_type = other DNA
ttgattgcggccagaaagtcagaggccttagcaaattattggtattacaatagcaatattaggggcgtgtatacg

SEQ ID NO: 512940 - DNA, 75 bp, synthetic construct
  source 1..75: mol_type = other DNA
tcaggacatgtacgctgccattgatggcttaatcgataagttggcacgccaactgactaaacataaagataaatt

SEQ ID NO: 512941 - DNA, 75 bp, synthetic construct
  source 1..75: mol_type = other DNA
gcaccgcccggtgtcgcggaatatgtgaacaacggaggaaaacatcatgcaatatgcgaaacctgtcactctgaa

SEQ ID NO: 512942 - DNA, 75 bp, synthetic construct
  source 1..75: mol_type = other DNA
gtccagtgggctggcctgcgatgtgctgcgtataccggatgaaccgccccgccggtggtttgaccgtggtgttct

SEQ ID NO: 512943 - DNA, 75 bp, synthetic construct
  source 1..75: mol_type = other DNA
atgacaggtacacgcatgtatggcattggtgatggcgttgatgaggaacacgttgatgcttattgttgccccttc

SEQ ID NO: 512944 - DNA, 75 bp, synthetic construct
  source 1..75: mol_type = other DNA
aaacaactaaatttttaattgagcattttgaaggtaaattacaggggattcgaacgactcttgatgatatacagg

SEQ ID NO: 512945 - DNA, 75 bp, synthetic construct
  source 1..75: mol_type = other DNA
atctttgataaagctggtctctcaatacgttacgaaattgtaaagaatgaacgcggtgtaaagtgcattcgcttc

SEQ ID NO: 512946 - DNA, 75 bp, synthetic construct
  source 1..75: mol_type = other DNA
gctggcgcagggctggcctgcgatgtgctgcgtatacctgatgaaccgtcccgtcgctggtttgaccgggatatt

SEQ ID NO: 512947 - DNA, 75 bp, synthetic construct
  source 1..75: mol_type = other DNA
cagggcgaaaatttattggtatagaaaccagtgatcattattttgaggtagcagcgcagcggcttcgggggacta

SEQ ID NO: 512948 - DNA, 75 bp, synthetic construct
  source 1..75: mol_type = other DNA
accgccagatacacggcctgatactccaaagccgacacctgaagttagcactgtacccttacaagtattatttgg

SEQ ID NO: 512949 - DNA, 75 bp, synthetic construct
  source 1..75: mol_type = other DNA
cctataacctgggtgtgaaacagcgtatgaaactggttacgctaatcatggagtgctatgaattagcaggaatag

SEQ ID NO: 512950 - DNA, 75 bp, synthetic construct
  source 1..75: mol_type = other DNA
agtcatcccgtacctttcatgccgggatactgactatgccgagtctggctgaattacggaaggccgtttgtagtc

SEQ ID NO: 512951 - DNA, 75 bp, synthetic construct
  source 1..75: mol_type = other DNA
attaccacaaccatttcggctacataagacaaagcccgcattttttgcgggcttgtatatcattactgatgtgga

SEQ ID NO: 512952 - DNA, 75 bp, synthetic construct
  source 1..75: mol_type = other DNA
cgggtgagaacatggacgcccgttcgtgggcttactggacacaattatggatggcacaggcactacgtgcagtca

SEQ ID NO: 512953 - DNA, 75 bp, synthetic construct
  source 1..75: mol_type = other DNA
agctaaacgcctgggcgttaagcgtttcggtggcgaatccgttctggcgggtagcatcatcgttcgtcaacgtgg

SEQ ID NO: 512954 - DNA, 75 bp, synthetic construct
  source 1..75: mol_type = other DNA
tgaaaccgacagctacacgggtgaaaaatcggtggtgtattcgcacgatggcaaggaaatggggaaactctatct

SEQ ID NO: 512955 - DNA, 75 bp, synthetic construct
  source 1..75: mol_type = other DNA
aaatcggtggtgtattcacacgatggtaaggaaatggggaaactttatctgccggtgaatcaggagaaaaatcca

SEQ ID NO: 512956 - DNA, 75 bp, synthetic construct
  source 1..75: mol_type = other DNA
tccaccaccgttcagcgatgtggtggcgcataaatccgacatcgtgcaggaatgggtaaaaaaggatgccttcgg

SEQ ID NO: 512957 - DNA, 75 bp, synthetic construct
  source 1..75: mol_type = other DNA
gctatcgccttgaccctggtaataccaaaaacggtatgggtgatctgtttgcggtagatactggttttaaaaatg

SEQ ID NO: 512958 - DNA, 75 bp, synthetic construct
  source 1..75: mol_type = other DNA
cagcgggactcttccgaggcgcgtcagttgatggaagatatcggctccgccgaggacttttttaccctcgcggag

SEQ ID NO: 512959 - DNA, 75 bp, synthetic construct
  source 1..75: mol_type = other DNA
agctttgacgtctatcaggacgacgttacatcgcaagatgcgcttatcgtcctggtcgatagcaaacgaactatg

SEQ ID NO: 512960 - DNA, 75 bp, synthetic construct
  source 1..75: mol_type = other DNA
tgccggtgatattgcgcaggcgctacggataggccagtacgtgctgcgccataaaatcccgatgcctgaccagta

SEQ ID NO: 512961 - DNA, 75 bp, synthetic construct
  source 1..75: mol_type = other DNA
taacccgtgatattgagcttctgcaacgtgcgcttaagaagtccgggcaacctgctgacggtgacggcgcagacg

SEQ ID NO: 512962 - DNA, 75 bp, synthetic construct
  source 1..75: mol_type = other DNA
cagccaaaagcgaagcgggaaaccaaaaagcccgccgctaaaagcaagccggcagcgaagaaaagaaccacgaca

SEQ ID NO: 512963 - DNA, 75 bp, synthetic construct
  source 1..75: mol_type = other DNA
aactgcttaaagaggttgcaaaagacgccctcaacagtgcacaggaggtaaaaactcttcatgaccgactggaga

SEQ ID NO: 512964 - DNA, 75 bp, synthetic construct
  source 1..75: mol_type = other DNA
ttacctctttctcaggaagtttagtctccaggattcccggggcggttcactttggcatgaaggcccacattggtg

SEQ ID NO: 512965 - DNA, 75 bp, synthetic construct
  source 1..75: mol_type = other DNA
tgaatatggtgttggagcgatcctgtcaacgcaggagattacccacttcaaaactggagagaataattacgcttc

SEQ ID NO: 512966 - DNA, 75 bp, synthetic construct
  source 1..75: mol_type = other DNA
cgatgcgcgtcatgagctaaagtatttagctatctggcaagcgtattgtgtcagcatccggcagaggttattgcc

SEQ ID NO: 512967 - DNA, 75 bp, synthetic construct
  source 1..75: mol_type = other DNA
cgctgttattactgaatacctttactccccgtgcgcaactcgcctcggcgcttaatttgccagaaacgtgggtag

SEQ ID NO: 512968 - DNA, 75 bp, synthetic construct
  source 1..75: mol_type = other DNA
caccacattaccgccgatgaagcacaacggatgttcccagtcagcggtcaattcgtgcaaggtcttatcgatatc

SEQ ID NO: 512969 - DNA, 75 bp, synthetic construct
  source 1..75: mol_type = other DNA
atctggcagaaacttttattgaatgggtcggtggcatcattcagcccggcgagcgctaccagttcaaatctcccg

SEQ ID NO: 512970 - DNA, 75 bp, synthetic construct
  source 1..75: mol_type = other DNA
cttaatttgccagaaacgtgggtcgcagagcgtctgccccggttaaaacagcgttatgaacgcacttgttgcctg

SEQ ID NO: 512971 - DNA, 75 bp, synthetic construct
  source 1..75: mol_type = other DNA
ttgggccatttcattgatgaaacagaagagaagcgcgttatcttgctggcgaacttgctacgcaaagatccgttt

SEQ ID NO: 512972 - DNA, 75 bp, synthetic construct
  source 1..75: mol_type = other DNA
gttccattgctccaaagagtggctgtacgcccgagactctgcgtgtctgggttcgccaggatgagcgggataccg

SEQ ID NO: 512973 - DNA, 75 bp, synthetic construct
  source 1..75: mol_type = other DNA
gttccattgctccaaagactggctgtacgcccgagactctgcgtgtctgggttcgccagcatgagcgggataccg

SEQ ID NO: 512974 - DNA, 75 bp, synthetic construct
  source 1..75: mol_type = other DNA
gttccattgctccaaagattggctgtacgcccgagactctgcgtgtctgggttcgccagtatgagcgggataccg

SEQ ID NO: 512975 - DNA, 75 bp, synthetic construct
  source 1..75: mol_type = other DNA
atcagttggaaatcttcgagcgccgcagcttttttcagttgctgcaaaagcacgataacgacgatcggctgctgg

SEQ ID NO: 512976 - DNA, 75 bp, synthetic construct
  source 1..75: mol_type = other DNA
accggaggcggtgatggcgggctcaccaccgctgaacgtcagcgtctgaaagagctggaacgtgaaaatcgtgaa

SEQ ID NO: 512977 - DNA, 75 bp, synthetic construct
  source 1..75: mol_type = other DNA
gttccattgctccaaagagtggctgtacgccggagactctgcgtgtctgggttcgccagcatgagcgggataccg

SEQ ID NO: 512978 - DNA, 75 bp, synthetic construct
  source 1..75: mol_type = other DNA
tgcttcgatctctcttataaagagacagcggagaatatcttacagatagaaatcccttattcactgctgccttcg

SEQ ID NO: 512979 - DNA, 75 bp, synthetic construct
  source 1..75: mol_type = other DNA
tgaaaaatatattcgctacaagcgcggagggaaattcaccgaaaaggcagagaatcgagttcgggaaggttttag

SEQ ID NO: 512980 - DNA, 75 bp, synthetic construct
  source 1..75: mol_type = other DNA
ggccgggcggttatgccctggtatttactgactggcgacaactaccagctttaaccgatgcgtttcaggccagtg

SEQ ID NO: 512981 - DNA, 75 bp, synthetic construct
  source 1..75: mol_type = other DNA
gaacagagtcagccttatgttgaaacgattcgctcggtgtttcgtaaggttgcccttggtgaaatcccccaaggt

SEQ ID NO: 512982 - DNA, 75 bp, synthetic construct
  source 1..75: mol_type = other DNA
tactgactggcgacaactaccagctttaaccgatgcgtttcaggccagtggctttacatggcgcggcatcattgc

SEQ ID NO: 512983 - DNA, 75 bp, synthetic construct
  source 1..75: mol_type = other DNA
ggtaacagcgaagatctggaacgcctgtaccgacaatggcgcggtaaggcacctcagattatgccgatgctgcaa

SEQ ID NO: 512984 - DNA, 75 bp, synthetic construct
  source 1..75: mol_type = other DNA
gaacttgcgaatgatatctatctgaacggggaattattcgcgcgggtagatgctgtctggcaacgccgtgaatcc

SEQ ID NO: 512985 - DNA, 75 bp, synthetic construct
  source 1..75: mol_type = other DNA
aggccagagagctattcctggggctggtagattattttaagcaggaaaaagatagcgcaatttcgatacatgtaa

SEQ ID NO: 512986 - DNA, 75 bp, synthetic construct
  source 1..75: mol_type = other DNA
gtgtccggcaacgtcgggctgagaatgaaagaaagcgatttatcgcgccatttacagggttatcagaaaggagcg

SEQ ID NO: 512987 - DNA, 75 bp, synthetic construct
  source 1..75: mol_type = other DNA
taagaccggggaaaataattatgcctcctatattttaacgtgggtaatccatcgtgtttccgagattaggaatgc

SEQ ID NO: 512988 - DNA, 75 bp, synthetic construct
  source 1..75: mol_type = other DNA
tcctggcgctgtccttggcgctcggaacatcactggcttatgcctcggatgacattcctattgttccggcaagcg

SEQ ID NO: 512989 - DNA, 75 bp, synthetic construct
  source 1..75: mol_type = other DNA
ctttaagcaactgctgaatcgctcttatgatagctctctctggaccacaattatcgaccctaaggtcacactcga

SEQ ID NO: 512990 - DNA, 75 bp, synthetic construct
  source 1..75: mol_type = other DNA
cggtgcgaggtgattaccgccagctaaccaaaatgattctggttgatgaagccgacaactttatgcgccaagact

SEQ ID NO: 512991 - DNA, 75 bp, synthetic construct
  source 1..75: mol_type = other DNA
cactaacacacttatgaataaatttttaggcaacgttgagcctgatggatcagtattcagcaaatatcaattact

SEQ ID NO: 512992 - DNA, 75 bp, synthetic construct
  source 1..75: mol_type = other DNA
ggtgacattgcaatatgtatccgatgggcaatataccaatcaaacaaacctcactcgtaaagcccgggaaaccat

SEQ ID NO: 512993 - DNA, 75 bp, synthetic construct
  source 1..75: mol_type = other DNA
gtcataccatgcagtctatgatatctttacccgtattgatgacattatgagtgtgcagtatcctgaatataaaaa

SEQ ID NO: 512994 - DNA, 75 bp, synthetic construct
  source 1..75: mol_type = other DNA
gtcttaagttttcatgctacaaaagtatttaatacttttgaaggtggtgcgattatttgccaggatgcaaaacta

SEQ ID NO: 512995 - DNA, 75 bp, synthetic construct
  source 1..75: mol_type = other DNA
tgcagcgtattgagcatcttgccctcctgaaacggcgtgcagaacaggcagaatccagcggcaacctgcaggtaa

SEQ ID NO: 512996 - DNA, 75 bp, synthetic construct
  source 1..75: mol_type = other DNA
atcttcgaagatattacggcaaagtgtgtttaaacgttgatacaccagcgcagggacttggcttgctggttgcac

SEQ ID NO: 512997 - DNA, 75 bp, synthetic construct
  source 1..75: mol_type = other DNA
tttcaggacaagggattacccgattatttccttggtatcagttatattggtgtcaaaggtgctggggagcgaacg

SEQ ID NO: 512998 - DNA, 75 bp, synthetic construct
  source 1..75: mol_type = other DNA
caaacctcacccgtaaagcccgggaaaccatggctctgaaacagcaggacaagttgacagataccactactgatg

SEQ ID NO: 512999 - DNA, 75 bp, synthetic construct
  source 1..75: mol_type = other DNA
gttattggttattaccggctttcgctccattgaagcgtttaatctcagacaggatgccctgtttaaacgccagat

SEQ ID NO: 513000 - DNA, 75 bp, synthetic construct
  source 1..75: mol_type = other DNA
acttttgacgatcgggatgatgtagccaggttcgtcgaggcgtcatttgctgacggtctatttaaagatgttgct

SEQ ID NO: 513001 - DNA, 75 bp, synthetic construct
  source 1..75: mol_type = other DNA
acatcgtaagcgtaaactgaccgccgtatgtagccatcagacgagaattggtaacttagacgcccatctgatata

SEQ ID NO: 513002 - DNA, 75 bp, synthetic construct
  source 1..75: mol_type = other DNA
ccaacctcacccgcaaagcccgggaaaccatggcgctgaaacagcagtacacgctggctgataccactaccgatg

SEQ ID NO: 513003 - DNA, 75 bp, synthetic construct
  source 1..75: mol_type = other DNA
gaattacttaagaaaaataatatcctatctcgaaagtatttttatccattaatcagtaatatgcctatgtatcga

SEQ ID NO: 513004 - DNA, 75 bp, synthetic construct
  source 1..75: mol_type = other DNA
taatgaatctggaacgaatattcagctggtagggtatcgctattcaaccagtggatatttcaacttcgctgatac

SEQ ID NO: 513005 - DNA, 75 bp, synthetic construct
  source 1..75: mol_type = other DNA
ttcaggttaagccgaaattcaccgactattacaatctcgcttataacaaacgcgggaaattacagctcaccgtta

SEQ ID NO: 513006 - DNA, 75 bp, synthetic construct
  source 1..75: mol_type = other DNA
caacccttgaaaatcggcgctcctggacgatcttcgttgatttttaaaaatgttgcgtcacgcgcgcaacttgcc

SEQ ID NO: 513007 - DNA, 75 bp, synthetic construct
  source 1..75: mol_type = other DNA
tcaggtaaacaagatccgctggcgtatttagagcgtatccgtctggcgatgaaagcgggtaacactggcctggta

SEQ ID NO: 513008 - DNA, 75 bp, synthetic construct
  source 1..75: mol_type = other DNA
gattcagtggtgcaaaaatcacggggccaaaaaacgaaaatattaaaacattaccggcgaagcgaaatgagcagg

SEQ ID NO: 513009 - DNA, 75 bp, synthetic construct
  source 1..75: mol_type = other DNA
gaatgtctgagtttgtggtgaataattcccctgaacaggcagatgacgccgggcctgcagagcctgtttctgcgg

SEQ ID NO: 513010 - DNA, 75 bp, synthetic construct
  source 1..75: mol_type = other DNA
gcagcaatgcctgacgaactgcaacagaaaatgcgtaatgccagcctgttcaataaagggtatgagatgagcgaa

SEQ ID NO: 513011 - DNA, 75 bp, synthetic construct
  source 1..75: mol_type = other DNA
ggaaaatcgccgatcagatggcaaaaacacctgaagcagcactcaactttatgcgggaaattgttccagcggcgc

SEQ ID NO: 513012 - DNA, 75 bp, synthetic construct
  source 1..75: mol_type = other DNA
gaaacagcaggcagaatccgacagtaaccggaagtttactgtggaagacgtcatcagaaccggcgcttttgtggt

SEQ ID NO: 513013 - DNA, 75 bp, synthetic construct
  source 1..75: mol_type = other DNA
gtagtggtaatgcgcaacaggaaaagcctcgctttttccagagcacgttacttcatggtctcccggctggctgga

SEQ ID NO: 513014 - DNA, 75 bp, synthetic construct
  source 1..75: mol_type = other DNA
tatcagtggtttgtcgagcagggtggtttgacgcgtgaaaacgggcagaaattccgcgaggcgattttatcgcgc

SEQ ID NO: 513015 - DNA, 75 bp, synthetic construct
  source 1..75: mol_type = other DNA
tagtatatccccagcggtggctgtggcaacactgatgattttaaagcgctggtaccactcactatttgaggtgac

SEQ ID NO: 513016 - DNA, 75 bp, synthetic construct
  source 1..75: mol_type = other DNA
ggggctggcagtcccctacaagatccggaaaatacaggtgctttgtctgtgcttgcgtttgaacatgagcctggg

SEQ ID NO: 513017 - DNA, 75 bp, synthetic construct
  source 1..75: mol_type = other DNA
atccttcggttttattgcgcgcaacttattcctctcatgaatgtgtagacagtgaggttcgcgctatttactaca

SEQ ID NO: 513018 - DNA, 75 bp, synthetic construct
  source 1..75: mol_type = other DNA
gcagcgcgttgtcctggctggcgcgccactggcactgctgcgacgcgggcttgcttcatcgggcaacgccgcagg

SEQ ID NO: 513019 - DNA, 75 bp, synthetic construct
  source 1..75: mol_type = other DNA
ttttagataagtcaaccagtgacacctatatgttcatcaagcgcctgtcagccaacgatactggtgcgacgggtg

SEQ ID NO: 513020 - DNA, 75 bp, synthetic construct
  source 1..75: mol_type = other DNA
atgtctgggtctgcaaggacctgaccgaggaagatattcttgaaccaattattggtgaagttatcccgggagcaa

SEQ ID NO: 513021 - DNA, 75 bp, synthetic construct
  source 1..75: mol_type = other DNA
gccgaaaatcaagagcgggaaagtcacttgagctacatcttgaacatcttttcgttgagcatggtctacgacact

SEQ ID NO: 513022 - DNA, 75 bp, synthetic construct
  source 1..75: mol_type = other DNA
cttcgagctgaaagttaccgaaacagaatcgcacaccgcctctatccactccgctgtgcagtacgacttgattgg

SEQ ID NO: 513023 - DNA, 75 bp, synthetic construct
  source 1..75: mol_type = other DNA
gtgtttgataatgggtttatggagggggatgccccttatgctaaatatctacgccgcattgcggccgataagacg

SEQ ID NO: 513024 - DNA, 75 bp, synthetic construct
  source 1..75: mol_type = other DNA
ttgccatccgcgagggcgtagccaagtcgttggaaatcacggccgagcactttcaggagacctatcacaagaagg

SEQ ID NO: 513025 - DNA, 75 bp, synthetic construct
  source 1..75: mol_type = other DNA
aacaaccactcgcgcaacattctcacggttgaagaccccatcgaatacatgattgaagggatcggtcagacgcag

SEQ ID NO: 513026 - DNA, 75 bp, synthetic construct
  source 1..75: mol_type = other DNA
gggcaatcacgcgtttgcaggatatgggcgtagagcctttcctgctctcttccagtctgacgggcgtgatggcgc

SEQ ID NO: 513027 - DNA, 75 bp, synthetic construct
  source 1..75: mol_type = other DNA
gtatctcggtgaagggactggcgggaaccaatgcctatctctatttacaatccatcgaaatctcaaacaaaaaac

SEQ ID NO: 513028 - DNA, 75 bp, synthetic construct
  source 1..75: mol_type = other DNA
tcttctgatgcataccatgacaaagcatttccggacgaaaaactccatatgcttgcggtaaaaacgacatgcaag

SEQ ID NO: 513029 - DNA, 75 bp, synthetic construct
  source 1..75: mol_type = other DNA
agaaattagtaaaccatcacgccttcacattagtaacattgcaatatgtttccgatgattgttataccaatcaga

SEQ ID NO: 513030 - DNA, 75 bp, synthetic construct
  source 1..75: mol_type = other DNA
tcttcctgctgaagaggtttatcagtcttggcagaatgacccacaggaattcaacagaatcactgacctcatcca

SEQ ID NO: 513031 - DNA, 75 bp, synthetic construct
  source 1..75: mol_type = other DNA
atgatgaaaaaggcgagggaataccgggatcaggaagaggcaaggcggctggaacatcgggtgcaaatcctgccg

SEQ ID NO: 513032 - DNA, 75 bp, synthetic construct
  source 1..75: mol_type = other DNA
tattgctgaaatttcagaccacttacaagccatgttgatggggcgtgttgatattactcaaaataaacattacca

SEQ ID NO: 513033 - DNA, 75 bp, synthetic construct
  source 1..75: mol_type = other DNA
gtcgtcaggggatggattattcgaagacatagccgctgcgttcgaggaaatcagtaaaaacgaagggccattaca

SEQ ID NO: 513034 - DNA, 75 bp, synthetic construct
  source 1..75: mol_type = other DNA
atccagcgtgtagaaaacggcactgaaaagatagcgctcaattgccttctgctactcatcatcacgggttttcgg

SEQ ID NO: 513035 - DNA, 75 bp, synthetic construct
  source 1..75: mol_type = other DNA
gcaggtctggcgctgttgagtaccattggcggcagtttgtatcaggcgctgcataatgagcgtgagcgcgacgcg

SEQ ID NO: 513036 - DNA, 75 bp, synthetic construct
  source 1..75: mol_type = other DNA
aagccttccgccagaaattgttagaagacggtatcgatcctacagaactactcgcttcagttggttcatcccagc

SEQ ID NO: 513037 - DNA, 75 bp, synthetic construct
  source 1..75: mol_type = other DNA
ggttgatacgctgcttgtcctgcagaagaagcaccggatacggtttgatgtctggcaggtcgttaaacgggatca

SEQ ID NO: 513038 - DNA, 75 bp, synthetic construct
  source 1..75: mol_type = other DNA
taaggctccttgttataacacccaactcactgagatagaagaaggattagaacgactgaaaataatgaagacgaa

SEQ ID NO: 513039 - DNA, 75 bp, synthetic construct
  source 1..75: mol_type = other DNA
ctaaaaccaaatcaactcgtgctcctcgtcctgctaaatacaaatatacagatgaaaacggtaatgagcagactt

SEQ ID NO: 513040 - DNA, 75 bp, synthetic construct
  source 1..75: mol_type = other DNA
gtgtcatggctgtcacattgcctgatcgcatattcgttatgctatagtagcgcccccaatttaccagatgctgaa

SEQ ID NO: 513041 - DNA, 75 bp, synthetic construct
  source 1..75: mol_type = other DNA
caatgcacagtctggtcatcggacagatcaagacggatgagaaatccaatgagattacagctatcccagaacttc

SEQ ID NO: 513042 - DNA, 75 bp, synthetic construct
  source 1..75: mol_type = other DNA
ttaataaagcctttgaggaaaaattcccactgaaagaattaaataatccagagcatgacagttacgcaattagtg

SEQ ID NO: 513043 - DNA, 75 bp, synthetic construct
  source 1..75: mol_type = other DNA
ctgccgcagatattcccgtggcgagcgataacccagtgcactatgcggatgccattcgttataatgctcgaacgc

SEQ ID NO: 513044 - DNA, 75 bp, synthetic construct
  source 1..75: mol_type = other DNA
aggatgggaagatatagaggattttggggaaacacatctcgattttttgaagcaatatggtgattttgaaaatgg

SEQ ID NO: 513045 - DNA, 75 bp, synthetic construct
  source 1..75: mol_type = other DNA
tttttaaaacaatacggtgattttgaaaatggtattcctgttcacgataccatcgccagagttgtatcctgtatc

SEQ ID NO: 513046 - DNA, 75 bp, synthetic construct
  source 1..75: mol_type = other DNA
tccagagcatgacagttacgcaattagtgaaaagagtcacggtagagaagaaatccgtcttcatattgtttgcga

SEQ ID NO: 513047 - DNA, 75 bp, synthetic construct
  source 1..75: mol_type = other DNA
ctggaaaacctcacgctaaccttttaccaggatcatattgagcatcgggtaattgccaggatcatgcaaaagatt

SEQ ID NO: 513048 - DNA, 75 bp, synthetic construct
  source 1..75: mol_type = other DNA
aggaaaatggggaactggaagcggacatcgcccaccactggcagcaaatttcaccgcttcactggcgtttctttt

SEQ ID NO: 513049 - DNA, 75 bp, synthetic construct
  source 1..75: mol_type = other DNA
tcgggcgcggcaaacgctcgcgtttaacgttcctctataccgggctggcgctacaacaacagcgggcagaggatc

SEQ ID NO: 513050 - DNA, 75 bp, synthetic construct
  source 1..75: mol_type = other DNA
gtgacgcaacccagtgctccggctccccaaatcgccatcgacagtcacgacgacaaagcctggcgcgacacgctg

SEQ ID NO: 513051 - DNA, 75 bp, synthetic construct
  source 1..75: mol_type = other DNA
aacagcaccaatcaactgaaaattcaggcattcgatgacttcttcggttatcgcgcattaatcgacgaagtaaat

SEQ ID NO: 513052 - DNA, 75 bp, synthetic construct
  source 1..75: mol_type = other DNA
agttcatccggctgtggcaatgctgcgagggtaaatcgcagaacacgacgctcaacgaactggcagagttattga

SEQ ID NO: 513053 - DNA, 75 bp, synthetic construct
  source 1..75: mol_type = other DNA
ggtattcaaggcaggattaagacgtaagatgcgaaaagcagccatggacagaaactatctcgcgtcagtccttgc

SEQ ID NO: 513054 - DNA, 75 bp, synthetic construct
  source 1..75: mol_type = other DNA
aaggcagggttaagacgtaagatgcgaaaagcagccatggacagaaactatctggcgtcagtccttgctgggagc

SEQ ID NO: 513055 - DNA, 75 bp, synthetic construct
  source 1..75: mol_type = other DNA
cggctaaagtctctaccgctatcccggcttcatttttatggctgcataactatttcacatgcatgattgatgaga

SEQ ID NO: 513056 - DNA, 75 bp, synthetic construct
  source 1..75: mol_type = other DNA
gcctggcaaccggagccacgccattactgacttatcgatatctggtagaaaaaatccaccagcagcacgttgata

SEQ ID NO: 513057 - DNA, 75 bp, synthetic construct
  source 1..75: mol_type = other DNA
ccagaaagatattgcagagaagatacaaaaacagggaggtgattatttattcgcggtaaaaggaaaccaggggcg

SEQ ID NO: 513058 - DNA, 75 bp, synthetic construct
  source 1..75: mol_type = other DNA
ggattttggggaaacacatctcgattttttgaagcaatatggtgattttgaaaatggtattcctgttcacgatac

SEQ ID NO: 513059 - DNA, 75 bp, synthetic construct
  source 1..75: mol_type = other DNA
tgaaaaaattatgcgtggcagtctcctttcggtccataatagcagaacaaaagaaagagccagaaatgacggtca

SEQ ID NO: 513060 - DNA, 75 bp, synthetic construct
  source 1..75: mol_type = other DNA
atggaacttaaaaaattgatggaacatatttctattatccccgattacagacaagcctggaaaatggaacataag

SEQ ID NO: 513061 - DNA, 75 bp, synthetic construct
  source 1..75: mol_type = other DNA
atggcaatggacttacgtaatcctgatgtatggcttgcacacttgctggaaaacctgccggaagagaagctgaca

SEQ ID NO: 513062 - DNA, 75 bp, synthetic construct
  source 1..75: mol_type = other DNA
cctttgaggaaaaatttccgctgaaagaattaaataatccagagcatgacagttacgcaatgagtgaaaagagtc

SEQ ID NO: 513063 - DNA, 75 bp, synthetic construct
  source 1..75: mol_type = other DNA
gtgaagctcgacgaatgggtggatctgccattaacgatgcctggcacctgcgaaactttcctgcaacagcatatc

SEQ ID NO: 513064 - DNA, 75 bp, synthetic construct
  source 1..75: mol_type = other DNA
caggatgcgacagaacgttttctcacggctaaagtctccaccgctatcccggcttcgtttttatggctgcacagt

SEQ ID NO: 513065 - DNA, 75 bp, synthetic construct
  source 1..75: mol_type = other DNA
cgtgggatcaccttaggcctgaaggatattctcaatgcccgcgaagttttgttactgataactggcgaaggaaaa

SEQ ID NO: 513066 - DNA, 75 bp, synthetic construct
  source 1..75: mol_type = other DNA
atcaggatcacagtgaacatcgggttattgccgggatcatgcaacggattctggcgacgcatcaggtgacgctta

SEQ ID NO: 513067 - DNA, 75 bp, synthetic construct
  source 1..75: mol_type = other DNA
cgtctggcgcgtatggtgctggaagcgcagaaacatggctgcgtgcgtgaggcgatgattatcacttccgcgctc

SEQ ID NO: 513068 - DNA, 75 bp, synthetic construct
  source 1..75: mol_type = other DNA
gtattaaatacgttatcgacccaggtacagcgcgtatcagccgctacagctatcgcaccaaagtgcagcgtttgc

SEQ ID NO: 513069 - DNA, 75 bp, synthetic construct
  source 1..75: mol_type = other DNA
ggtgtatcgcggttttgtcactggtaacggcttcaaacgactgggcgacacgctgcgttatttgcaggcgattga

SEQ ID NO: 513070 - DNA, 75 bp, synthetic construct
  source 1..75: mol_type = other DNA
ccggcttgccagcgcggatatggcgctgtggcagcaggtggagaaaagcgtactgctggctccttactggctgga

SEQ ID NO: 513071 - DNA, 75 bp, synthetic construct
  source 1..75: mol_type = other DNA
atggtgattttgaaaatggtattcctgttcacgatacattgccagagttgtatcctgtatcagtcctgcaaaatt

SEQ ID NO: 513072 - DNA, 75 bp, synthetic construct
  source 1..75: mol_type = other DNA
aaacgcacctacagcgaaccgcactgggaacgggcgcagggcgcggtgatggcaacggaaaaagtcactgtttac

SEQ ID NO: 513073 - DNA, 75 bp, synthetic construct
  source 1..75: mol_type = other DNA
ccggaaagctacgaacagaagcgtggcaactataaagtgaaggcgtggccagcgctagtggatgaacgcgacagc

SEQ ID NO: 513074 - DNA, 75 bp, synthetic construct
  source 1..75: mol_type = other DNA
aagtgtgccgcagcttattgataatttgttgtcagtgcgtaccaatatttcgactatttttattcgtactgcgtt

SEQ ID NO: 513075 - DNA, 75 bp, synthetic construct
  source 1..75: mol_type = other DNA
ttttgtgcctgcaccaaactacgccgaagcgtttttaggccgcgtcacaccgctggagttaccgttgctcgacag

SEQ ID NO: 513076 - DNA, 75 bp, synthetic construct
  source 1..75: mol_type = other DNA
acattaaagcgcagatgggcgggctggtgtatcgcggttttgtcactggcaacggttttaaacggttgggcgaca

SEQ ID NO: 513077 - DNA, 75 bp, synthetic construct
  source 1..75: mol_type = other DNA
atgacagaacaacaaaaattgacctttactgccttgcagcagcggctggattcgctgatgctgcgtgacagactg

SEQ ID NO: 513078 - DNA, 75 bp, synthetic construct
  source 1..75: mol_type = other DNA
cggcgcggatgctgacggtgtgactgtgcatatcccgctgccgttacttaaccaggttgaggagagtgggtttga

SEQ ID NO: 513079 - DNA, 75 bp, synthetic construct
  source 1..75: mol_type = other DNA
ccaatgccgatctggaaaaattagcggccagggcgaagcaagcccgtgagcaggcagaagaatatcgaagctggg

SEQ ID NO: 513080 - DNA, 75 bp, synthetic construct
  source 1..75: mol_type = other DNA
cagacgcgccgtattggcgttattaacaatgacagcattccgctgattattaatgatattgaacaggtttgtagc

SEQ ID NO: 513081 - DNA, 75 bp, synthetic construct
  source 1..75: mol_type = other DNA
atgagtgggatttatacgcccgtcagttccgcgcggctattcagagctatcggctaaaagacaacgtcgaggtcg

SEQ ID NO: 513082 - DNA, 75 bp, synthetic construct
  source 1..75: mol_type = other DNA
gtgtccacgggtggtatcaggagctcttacgtgagcacagtgaggctcgctggcctgaatatggctgcaagcgtc

SEQ ID NO: 513083 - DNA, 75 bp, synthetic construct
  source 1..75: mol_type = other DNA
actggcaagccgacgccgcccgctggcgcaatggcgaaatgaacctggcgaactggtgccagcaactggtcgcca

SEQ ID NO: 513084 - DNA, 75 bp, synthetic construct
  source 1..75: mol_type = other DNA
gcgcaatggcgagatgaacctggcgaactggtgccagcagttagtgaccagcaaagcgatggtgccattgatcca

SEQ ID NO: 513085 - DNA, 75 bp, synthetic construct
  source 1..75: mol_type = other DNA
cttgcgcctgctggcgctgtatgtggagcattactgggcggtggccgcgccgcagaatatggcgcataaaaaacg

SEQ ID NO: 513086 - DNA, 75 bp, synthetic construct
  source 1..75: mol_type = other DNA
aaaggaccgtgaagataacgtttcccgttataaaggattaccttcccgtaacctcggtgttgccattcgtgaata

SEQ ID NO: 513087 - DNA, 75 bp, synthetic construct
  source 1..75: mol_type = other DNA
actggatgaagcgcatacctatgtcgggtcgcaggccgctgaactggcgctccagctgcgtcgtgtgatgacagc

SEQ ID NO: 513088 - DNA, 75 bp, synthetic construct
  source 1..75: mol_type = other DNA
acaagcacaggctgaacagcttgaacaggcttatcaggctgcaaccggtgggaaagccgcgactatcctggtatc

SEQ ID NO: 513089 - DNA, 75 bp, synthetic construct
  source 1..75: mol_type = other DNA
ggtgagccgacaaaatatacattgcagttgcatttgcgctccattagtggattacaggcatggcacgaatggagt

SEQ ID NO: 513090 - DNA, 75 bp, synthetic construct
  source 1..75: mol_type = other DNA
atccaaaaacgtttctcttccgttagacgaaatagagcaaatacctgatctggatctaagagataaaaatgataa

SEQ ID NO: 513091 - DNA, 75 bp, synthetic construct
  source 1..75: mol_type = other DNA
tgatgaaggcaaagagggcgtcggaccagattcgttgccagggcgaggacgtcgactcattacctttacggatag

SEQ ID NO: 513092 - DNA, 75 bp, synthetic construct
  source 1..75: mol_type = other DNA
ctgacaaaactgtcgctgttttgttatatcgccaactatctggtgcgtaaaggcgacgaagtacgtaataacctg

SEQ ID NO: 513093 - DNA, 75 bp, synthetic construct
  source 1..75: mol_type = other DNA
tttgaaaatggtattcctgttcacgataccattgccagagttgtatcctgtatcagtcctgcaaaatttcacgag

SEQ ID NO: 513094 - DNA, 75 bp, synthetic construct
  source 1..75: mol_type = other DNA
gttgtatcctgtatcagtcctgcaaaatttcacgagtgctttattaactggatgcgtgactgccattcttcagat

SEQ ID NO: 513095 - DNA, 75 bp, synthetic construct
  source 1..75: mol_type = other DNA
taggtaactcggtacaaaaactggagtatctgccggaagcgcacactgactttattttcgccattatcggcgaag

SEQ ID NO: 513096 - DNA, 75 bp, synthetic construct
  source 1..75: mol_type = other DNA
aaatgccgcgccttccgggattcagcattctggcatggatttttacggcgctgaaaggctgggtgatgggctcgc

SEQ ID NO: 513097 - DNA, 75 bp, synthetic construct
  source 1..75: mol_type = other DNA
aacgatccctttttcttcgctaagcgtgatggcgtctacctgatcctggcgttcattctggcgatcattacgctg

SEQ ID NO: 513098 - DNA, 75 bp, synthetic construct
  source 1..75: mol_type = other DNA
gagtgctttattaactggatgcgtgactgccattcttcagatgataaagacgtcatcgcaattgatggaaaaacg

SEQ ID NO: 513099 - DNA, 75 bp, synthetic construct
  source 1..75: mol_type = other DNA
atagcagaacaaaagaaagaacccgaaatgacggtcagatattatatcagctctgctgatttaactgcagagaag

SEQ ID NO: 513100 - DNA, 75 bp, synthetic construct
  source 1..75: mol_type = other DNA
atattctactgttgactatttgtgccgtcatttctggtgcagaaggctgggaagatatagaggattttggggaaa

SEQ ID NO: 513101 - DNA, 75 bp, synthetic construct
  source 1..75: mol_type = other DNA
aaaatcatcacaactgatgcgatgggttgccagaaagatattgcagagaagatacaaaaacagggtggtgattac

SEQ ID NO: 513102 - DNA, 75 bp, synthetic construct
  source 1..75: mol_type = other DNA
acggcagagaagaaatccgtcttcatattgtttgcgatgtccctgatgaacttattgatttcacgtttgaatgga

SEQ ID NO: 513103 - DNA, 75 bp, synthetic construct
  source 1..75: mol_type = other DNA
cactcttatgacaagagtcgccgcaggggagcgattcatgtcattagtgcgttctcaacaatgcacagtctggtc

SEQ ID NO: 513104 - DNA, 75 bp, synthetic construct
  source 1..75: mol_type = other DNA
atattaaaggaaaaatcatcacaactgatgcgatggggtgccagaaagatattgcagagaagatacaaaaacagg

SEQ ID NO: 513105 - DNA, 75 bp, synthetic construct
  source 1..75: mol_type = other DNA
ttggctgaatccagccccgcatcagcgcttaaccacctcaaccatgcgctgcagctcgataaccactgtggcgtg

SEQ ID NO: 513106 - DNA, 75 bp, synthetic construct
  source 1..75: mol_type = other DNA
agagcgcaatgcttgccgccaccggctttgatgccgacctgttgctgcagacgctggagctgacagacggtctgg

SEQ ID NO: 513107 - DNA, 75 bp, synthetic construct
  source 1..75: mol_type = other DNA
ctcaatattccatcgccgatcaaatacttgcatgagaagttgccaaacaaagccaaacttgggctgtactttaac

SEQ ID NO: 513108 - DNA, 75 bp, synthetic construct
  source 1..75: mol_type = other DNA
tctgcataaagcgattggcgcggtcttgagtgaaagtaatccggcttccgcccttaatcatctcaaccatgcgtt

SEQ ID NO: 513109 - DNA, 75 bp, synthetic construct
  source 1..75: mol_type = other DNA
atatgccggaccagtcacgggcacgtctgcataaagcgattggcgcggtcctgagtgaaagcaatccggcgtccg

SEQ ID NO: 513110 - DNA, 75 bp, synthetic construct
  source 1..75: mol_type = other DNA
gaaacgcagcagaattattttcagggatacggcacattgctattaatcttttgacgaatgagcaggtattcgagg

SEQ ID NO: 513111 - DNA, 75 bp, synthetic construct
  source 1..75: mol_type = other DNA
aatttaccggttagtcagaaaaaacaggacattctcgaagcgattcgtgatcaccaggtggtgatcgtcgccggg

SEQ ID NO: 513112 - DNA, 75 bp, synthetic construct
  source 1..75: mol_type = other DNA
attcatgtcattagtgcgttctcaacaatgcacagtctggtcatcggacagatcaagacggatgataaatctaat

SEQ ID NO: 513113 - DNA, 75 bp, synthetic construct
  source 1..75: mol_type = other DNA
gtcattagtgcgttctcaacaatgcacagtctggtcatcggacagatcaagacggatgagaaatctaatgagatt

SEQ ID NO: 513114 - DNA, 75 bp, synthetic construct
  source 1..75: mol_type = other DNA
cgttgccgaagccggtacgccgtaattttgtacctgcgccaaactacgccgaagcatttttaggccgcgtcacgc

SEQ ID NO: 513115 - DNA, 75 bp, synthetic construct
  source 1..75: mol_type = other DNA
gcttgttcaaaaaaccgccgaagtgggtaatggtggcggaactggtagaaaccagtcgcctgtgggggcgcattg

SEQ ID NO: 513116 - DNA, 75 bp, synthetic construct
  source 1..75: mol_type = other DNA
cacgatggtcaagctgatgaccgacggtatactgctggcggagatccagcaagaccgcctgctgatgcagtacga

SEQ ID NO: 513117 - DNA, 75 bp, synthetic construct
  source 1..75: mol_type = other DNA
cggtcaataatagcagaacaaaagaaagagccagaaatgacggtcagatattatatcagttctgctgatttaacc

SEQ ID NO: 513118 - DNA, 75 bp, synthetic construct
  source 1..75: mol_type = other DNA
aataaagcctttgaggaaaaatttccgctgaaagaattaaataatccagagcatgacagttacgcaatgagtgaa

SEQ ID NO: 513119 - DNA, 75 bp, synthetic construct
  source 1..75: mol_type = other DNA
cgggcgatgtgttaaccaccatgtccggtcaaaccgttgaagtgctgaataccgacgctgaaggccgcctggtac

SEQ ID NO: 513120 - DNA, 75 bp, synthetic construct
  source 1..75: mol_type = other DNA
tatcgccggaaccgcctggcgttctggtaaagcaaaaggcgcaaccggtcgtccggtagcgttgctggcacagtt

SEQ ID NO: 513121 - DNA, 75 bp, synthetic construct
  source 1..75: mol_type = other DNA
aggtattcaaggcagggttaagacgtaagatgcgaaaagcagccatggacagaaactatctcgcgtcagtccttg

SEQ ID NO: 513122 - DNA, 75 bp, synthetic construct
  source 1..75: mol_type = other DNA
gcagtattttggtgcgcagcttatggaagaggctgggctgatacagcttgcacaacagcagtaccgaatactgtt

SEQ ID NO: 513123 - DNA, 75 bp, synthetic construct
  source 1..75: mol_type = other DNA
tgcaactttctatcaaatgcaggacaacggcaaacctgtcgaaggccacgcctcccagatgcactacgaactggc

SEQ ID NO: 513124 - DNA, 75 bp, synthetic construct
  source 1..75: mol_type = other DNA
cgtcgcctttctccgattgcagaacagctcgataaaatcagcgatgggtacatcagcgccctgctacgtcggggt

SEQ ID NO: 513125 - DNA, 75 bp, synthetic construct
  source 1..75: mol_type = other DNA
aactggatgcgtgactgccattcttcagatgataaagacgtcatcgcaattgatggaaaaacactccggcattct

SEQ ID NO: 513126 - DNA, 75 bp, synthetic construct
  source 1..75: mol_type = other DNA
tgccagaaagatattgcagagaagatacaaaaacagggaggtgattatttattcgctgtaaaaggaaatcaggtg

SEQ ID NO: 513127 - DNA, 75 bp, synthetic construct
  source 1..75: mol_type = other DNA
agctgcaactgccgattaacgttatcggcgttctggcagggtgcgaaaacatgccaggcggtcgtgcctatcgtc

SEQ ID NO: 513128 - DNA, 75 bp, synthetic construct
  source 1..75: mol_type = other DNA
cgtctgaacaatccggtgaccgcgcatggcgtttaccgctgggtgatgagtatcaggaacagctggagtccaatt

SEQ ID NO: 513129 - DNA, 75 bp, synthetic construct
  source 1..75: mol_type = other DNA
agctggctgacagctacagcaagaatgtcattacccgcgttatcggcgaacagcagatgaaagagctggggatgc

SEQ ID NO: 513130 - DNA, 75 bp, synthetic construct
  source 1..75: mol_type = other DNA
ctgttccgcaattagtgaaaagagtcacggcagagaagaaatccgtcttcatattgtttgcgatgtccctgatga

SEQ ID NO: 513131 - DNA, 75 bp, synthetic construct
  source 1..75: mol_type = other DNA
atgcgagattgccatacttcagatgataaagacgtcatcgcaattgatggaaaaacactccggcattcttatgac

SEQ ID NO: 513132 - DNA, 75 bp, synthetic construct
  source 1..75: mol_type = other DNA
aacaaaagaaagagctcgaaatgacggtcagatattatatcagttctgctgatttaaccgcagagaagttcgcca

SEQ ID NO: 513133 - DNA, 75 bp, synthetic construct
  source 1..75: mol_type = other DNA
gagccagaaatgacggtcagatattatatcagttctgctgatttaaccgcagaaaagttcgccacagcgatccga

SEQ ID NO: 513134 - DNA, 75 bp, synthetic construct
  source 1..75: mol_type = other DNA
acgtttgaatggaaagggctgaagaaattatgcgtggcagtctcctttcggtcaataatagcagaacaaaagaaa

SEQ ID NO: 513135 - DNA, 75 bp, synthetic construct
  source 1..75: mol_type = other DNA
atcggacagatcaggacggatgagaaatctaatgagattacagctatcccagaacttcttaacatgctggatatt

SEQ ID NO: 513136 - DNA, 75 bp, synthetic construct
  source 1..75: mol_type = other DNA
gtattcaaggcagggttaagacgtaagatgcgaaaagcagccatggacagaaactatctggcgtcagtccttgcg

SEQ ID NO: 513137 - DNA, 75 bp, synthetic construct
  source 1..75: mol_type = other DNA
ataaagcctttgaggaaaaatttccgctgaaagaattaaataatccagagcatgacagttacgcaatcagtgaaa

SEQ ID NO: 513138 - DNA, 75 bp, synthetic construct
  source 1..75: mol_type = other DNA
cagcagaattattttcagggatacggcacattgctattaatattttgacgaatgataaggtattcaaggcagggt

SEQ ID NO: 513139 - DNA, 75 bp, synthetic construct
  source 1..75: mol_type = other DNA
tatgcctgtccacgataccattgccagagttgtatcctgtatcagtcctgcaaaatttcacgagtgctttattaa

SEQ ID NO: 513140 - DNA, 75 bp, synthetic construct
  source 1..75: mol_type = other DNA
gaaagatattgcagagaagatacaaaaacagggaggtgattatttattcgctgtaaaaggaaaccaggggcggct

SEQ ID NO: 513141 - DNA, 75 bp, synthetic construct
  source 1..75: mol_type = other DNA
cattcttatgataagagtcgccgcaggggagcgattcatgtcattagtgcgttctcaacaatgcacagtctggtc

SEQ ID NO: 513142 - DNA, 75 bp, synthetic construct
  source 1..75: mol_type = other DNA
gcgtctggacgtggtaatgaatgaagacgactgcaaaataagaagaggaaacgccgcagaattattttcagggat

SEQ ID NO: 513143 - DNA, 75 bp, synthetic construct
  source 1..75: mol_type = other DNA
cggcgcgaaggaaagtgggaaattgccgattttatccgtcctggcagcggtagcttgcttaaacagattgaagcg

SEQ ID NO: 513144 - DNA, 75 bp, synthetic construct
  source 1..75: mol_type = other DNA
gtggcgcgaggaagcctataccctcgatgaactggcagattatctcgatttgagcgcctcagagcgtcgtagcat

SEQ ID NO: 513145 - DNA, 75 bp, synthetic construct
  source 1..75: mol_type = other DNA
ccccgcgccgaacatcaccgttaaaaatcctgtgaacggacacgctcacctgctctatgcactcaatatcgccgt

SEQ ID NO: 513146 - DNA, 75 bp, synthetic construct
  source 1..75: mol_type = other DNA
gaaccagcctcatgcgcagttctggctggtttttgacgttgaccgcgagggggctgcgattgactggagcgaccg

SEQ ID NO: 513147 - DNA, 75 bp, synthetic construct
  source 1..75: mol_type = other DNA
tgcaatgggcgcacggtaaaccactgaacgtgctgttgatgcccggccccgataacgccgggggcagtaaggaga

SEQ ID NO: 513148 - DNA, 75 bp, synthetic construct
  source 1..75: mol_type = other DNA
atgcgcgtactgctatttttacttctttcccttttcatgttgcctggtttttcggctgataacctgttgcgctgg

SEQ ID NO: 513149 - DNA, 75 bp, synthetic construct
  source 1..75: mol_type = other DNA
aggaacttcacgccggaaactttcgcacagtatgtggctaatacgcacacgccagaaatacaggccaagagaggc

SEQ ID NO: 513150 - DNA, 75 bp, synthetic construct
  source 1..75: mol_type = other DNA
tcgaactgtacaacgcatcgcttcccgttccgctttctccgcctgaatgtcgggctattggcaagagtattgcga

SEQ ID NO: 513151 - DNA, 75 bp, synthetic construct
  source 1..75: mol_type = other DNA
ggctgtttcctgtcgcgctttacgcgtaagtacaactgggcacacctggatatcgcgggtactgcgtggcgttct

SEQ ID NO: 513152 - DNA, 75 bp, synthetic construct
  source 1..75: mol_type = other DNA
tgaagccgtgggtgacgttagggatcagtcgtgccacatactatcgaaaactaaaatgtgatccagatctcgcaa

SEQ ID NO: 513153 - DNA, 75 bp, synthetic construct
  source 1..75: mol_type = other DNA
tttagcgccggtattgattcgtggaaagctgacccggaattaaataattttcgttatatgtggaacatcctgatg

SEQ ID NO: 513154 - DNA, 75 bp, synthetic construct
  source 1..75: mol_type = other DNA
tggtgaatgggtgtactcaaaaggctatagctgaaatgttaggtgtttccgatcgcactattcgaaactggaaaa

SEQ ID NO: 513155 - DNA, 75 bp, synthetic construct
  source 1..75: mol_type = other DNA
gggcatcaatcgactggagcgaccggaattgtccggcccctaacatcaccgtaaaaaatccccgtaacgggcacg

SEQ ID NO: 513156 - DNA, 75 bp, synthetic construct
  source 1..75: mol_type = other DNA
ctcttcttgcgcgctacatccagcagaaccagccacatgcgcagttctggctggtttttgacattgaccgcgagg

SEQ ID NO: 513157 - DNA, 75 bp, synthetic construct
  source 1..75: mol_type = other DNA
gaaccagccacatgcactgtactggcttccctttgacgtggaccggacaggggcatcaatcgactggagcgaccg

SEQ ID NO: 513158 - DNA, 75 bp, synthetic construct
  source 1..75: mol_type = other DNA
aactgccacctgttcgaaatgacgcgcaaatgggcttacagggcgattcgtcagggctggccagcgttctcacag

SEQ ID NO: 513159 - DNA, 75 bp, synthetic construct
  source 1..75: mol_type = other DNA
ccgccctatattattagcccgcaacagttgctgcgcctgaccgcagcggttaaccgtgcggtgcaggatgaaaca

SEQ ID NO: 513160 - DNA, 75 bp, synthetic construct
  source 1..75: mol_type = other DNA
cttcgtatctccggtaaagggcgtgcgcttcttgcacggtatatccagcagaaccagcctcatgcacagttctgg

SEQ ID NO: 513161 - DNA, 75 bp, synthetic construct
  source 1..75: mol_type = other DNA
ctcacctgctctacgcgctcaatatcgccgtgagaaccgcgccggacagctcggttaaggcgctgaaatacgccg

SEQ ID NO: 513162 - DNA, 75 bp, synthetic construct
  source 1..75: mol_type = other DNA
ccataaacacaatgaagcaaacggagaagaaaatcgcgacgggaccaacaacaattacagtaacaatcatggtaa

SEQ ID NO: 513163 - DNA, 75 bp, synthetic construct
  source 1..75: mol_type = other DNA
accgtagctattattggataagagaagacggcgattatcacaactggaccggttgcggcaacacgctcaatttga

SEQ ID NO: 513164 - DNA, 75 bp, synthetic construct
  source 1..75: mol_type = other DNA
tcgctggtgggaagaaggcgacggcaatgtccgttggctgaatcgatatgctcaatctttaagctcggatgagtg

SEQ ID NO: 513165 - DNA, 75 bp, synthetic construct
  source 1..75: mol_type = other DNA
gcgcctctgtttacggctattcagaattgcccggtactttcgcaagtgaagctgattgccgaaccgtgggatatc

SEQ ID NO: 513166 - DNA, 75 bp, synthetic construct
  source 1..75: mol_type = other DNA
aatgtccgttggctaaatcgatatgctcaacctttaagcacggatgagtggcaaaacgggccgaaacagctgcaa

SEQ ID NO: 513167 - DNA, 75 bp, synthetic construct
  source 1..75: mol_type = other DNA
ccgctcctcttggcgcgcattacgacggccagggcgttaacttcacgctcttctccgctcatgccgaacgggtag

SEQ ID NO: 513168 - DNA, 75 bp, synthetic construct
  source 1..75: mol_type = other DNA
ctgaaatatgccgcagcggttgaacgttcgctgtgtgagaaaatttgtgctgatgtgaactacagcggcctgatt

SEQ ID NO: 513169 - DNA, 75 bp, synthetic construct
  source 1..75: mol_type = other DNA
atgtcggttctggctgatggcgtgctggtagcgatggtgctggttgttctctggcctttactgcgcaaatctgaa

SEQ ID NO: 513170 - DNA, 75 bp, synthetic construct
  source 1..75: mol_type = other DNA
cattaattaacaatgcattaaatatacaaaaaacatcatattctctgaccaaaatggagcaggcagggaagttgt

SEQ ID NO: 513171 - DNA, 75 bp, synthetic construct
  source 1..75: mol_type = other DNA
gccagcattttctgaccttccgcaatggttatcatggcgatacctttggcgcgatgtcggtgtgcgatccggaca

SEQ ID NO: 513172 - DNA, 75 bp, synthetic construct
  source 1..75: mol_type = other DNA
atatcggtgctggcagatggtgtgctggtggcgatggcgctggtcgtgctccggcctttactgcgtaaatctgaa

SEQ ID NO: 513173 - DNA, 75 bp, synthetic construct
  source 1..75: mol_type = other DNA
cggtcccgatccctggtcggcggaatccgtcgaatttacggctaaggacggtactcgtctgcaaggctggtttat

SEQ ID NO: 513174 - DNA, 75 bp, synthetic construct
  source 1..75: mol_type = other DNA
atgtcggtgctggcagatggtgtgctggtggcgatggcgctggtcgtgctccggcctttattccggaacaaaaac

SEQ ID NO: 513175 - DNA, 75 bp, synthetic construct
  source 1..75: mol_type = other DNA
tcaatgctaggctcagactggaatcctaagacattacgcatcagtgaaatggacgccaccgatatgcatatttct

SEQ ID NO: 513176 - DNA, 75 bp, synthetic construct
  source 1..75: mol_type = other DNA
caggtggtctgcgagctggctacaaattcaattttgaaaacgcagacttctcaatcacgcctactgtctcgctta

SEQ ID NO: 513177 - DNA, 75 bp, synthetic construct
  source 1..75: mol_type = other DNA
ccggttcatggtggggcgttggcgcagatcttaatcgtggacaagccaaagccgattattaccgaaacggctata

SEQ ID NO: 513178 - DNA, 75 bp, synthetic construct
  source 1..75: mol_type = other DNA
gagactgggagaaccatttatcattacacttccagaaacagtcaggctggatgttgacatccatccactcaaaaa

SEQ ID NO: 513179 - DNA, 75 bp, synthetic construct
  source 1..75: mol_type = other DNA
taagaacggttttacccgtggtaacccccagacaggcacgcctgccaccgatctggatgatgactactttgacat

SEQ ID NO: 513180 - DNA, 75 bp, synthetic construct
  source 1..75: mol_type = other DNA
agtgggtgattgaagataacttcgttaacggtcgcccggactgggataaagtgggcgcacagttcgttgcagacg

SEQ ID NO: 513181 - DNA, 75 bp, synthetic construct
  source 1..75: mol_type = other DNA
gccaaattgcatcgggcattaggtgcaagagggcaaggtgatatcggcgtgagtttcccggacgtgaatgttacg

SEQ ID NO: 513182 - DNA, 75 bp, synthetic construct
  source 1..75: mol_type = other DNA
cgcagcagagatcagcgacttaacgtttgccatcgggctgatgaattgttttaaccgtctggccgtttccatgcg

SEQ ID NO: 513183 - DNA, 75 bp, synthetic construct
  source 1..75: mol_type = other DNA
ggacctgatcgaagagggcaacctggggctgatccgcgcggtagagaagtttgacccggaacgtggtttccgctt

SEQ ID NO: 513184 - DNA, 75 bp, synthetic construct
  source 1..75: mol_type = other DNA
atggcgaattgtcgtattctgttaacgccgttgaatgaacgtgacgaacagcgcggatattcgacacaggggttg

SEQ ID NO: 513185 - DNA, 75 bp, synthetic construct
  source 1..75: mol_type = other DNA
tggcttgatgccgtgattcagcgtgtcgaaatgtacaacgcatcgcttcccgttccgctttctccgcctgaatgt

SEQ ID NO: 513186 - DNA, 75 bp, synthetic construct
  source 1..75: mol_type = other DNA
aactaaaaaacagaaaaactaaacggaattatgattatgaacgcagggtttctgatatatattttgatctgtttt

SEQ ID NO: 513187 - DNA, 75 bp, synthetic construct
  source 1..75: mol_type = other DNA
cgcagcagaaatcagcgacttaacatttgccatcgggctgatgaattgctttaaccgcctggccgtttccatgcg

SEQ ID NO: 513188 - DNA, 75 bp, synthetic construct
  source 1..75: mol_type = other DNA
acgggggggctgaccgaagccctggcattggcgaccgaagcgcgcgcccaggggttcagactgatgttgggctgc

SEQ ID NO: 513189 - DNA, 75 bp, synthetic construct
  source 1..75: mol_type = other DNA
ctggaacaaccgcttcccgcacaggacgatgcggcgctggagaattttattcatccgttacccatttgcgctgat

SEQ ID NO: 513190 - DNA, 75 bp, synthetic construct
  source 1..75: mol_type = other DNA
aatttatcggtataacgcttcccgacaccattaccactgcacagacggttgtcatcggtacgcctgatcaaatgg

SEQ ID NO: 513191 - DNA, 75 bp, synthetic construct
  source 1..75: mol_type = other DNA
cttgacggaccgacctggctggcggtagatgtggaaccggcgcttcagttcacgacgggcgaattgcatctttag

SEQ ID NO: 513192 - DNA, 75 bp, synthetic construct
  source 1..75: mol_type = other DNA
gcgttcaacaccgacaagctgctgtggctgaaccatcactacattaacgcgctgccgccggagtatgttgctact

SEQ ID NO: 513193 - DNA, 75 bp, synthetic construct
  source 1..75: mol_type = other DNA
ttgtgcgttgtgggatctctgtgcgcgtaaacagcagcagacgttagctgaatttatcggcataacgcttcccga

SEQ ID NO: 513194 - DNA, 75 bp, synthetic construct
  source 1..75: mol_type = other DNA
gaagcgtttttaggccgcgtcacaccgctggaattgccgttgctcgacagccttgaacgagagcttcggcggatg

SEQ ID NO: 513195 - DNA, 75 bp, synthetic construct
  source 1..75: mol_type = other DNA
gtgctgccgttgtacgcgcgactttccaatagcgaacaaaaccgtgtcttccaggcgcacagcggacgccgcatt

SEQ ID NO: 513196 - DNA, 75 bp, synthetic construct
  source 1..75: mol_type = other DNA
atcatcgatgaagcccatgaacgtagcctgaacatcgatttcctgctgggctatctgaaagagctgttaccgcgt

SEQ ID NO: 513197 - DNA, 75 bp, synthetic construct
  source 1..75: mol_type = other DNA
caacgctggctatttaaaccgttaacccttcttctcctgctattgctggcctggcaggcaccaatgttcgacgcg

SEQ ID NO: 513198 - DNA, 75 bp, synthetic construct
  source 1..75: mol_type = other DNA
atgctttggtcgtttatcgctgtctgtctttccgcatggctatctgtggatgcatcgtatcgtgggccaacctgg

SEQ ID NO: 513199 - DNA, 75 bp, synthetic construct
  source 1..75: mol_type = other DNA
tttgcacaagtggttataacttacagaacaacaaggaacgagtactgattgaaaactgcgaaaaggtggctgatg

SEQ ID NO: 513200 - DNA, 75 bp, synthetic construct
  source 1..75: mol_type = other DNA
gcgaaagagattgaccatgcggcagggaaagtcctgctgcgtgaagcggaacgaccggaaattacttacccggac

SEQ ID NO: 513201 - DNA, 75 bp, synthetic construct
  source 1..75: mol_type = other DNA
ctcgtccattcaacattcaacaaggaggtaatgactccaacttactgatagtgttttatgttcagataatgcccg

SEQ ID NO: 513202 - DNA, 75 bp, synthetic construct
  source 1..75: mol_type = other DNA
tgccactgtcagccgccggatggcgttattcgctggctgaatgctcgactgaaggcgacaacggcaatctgcgcg

SEQ ID NO: 513203 - DNA, 75 bp, synthetic construct
  source 1..75: mol_type = other DNA
cgaagaagaattccatatcgccggcggcagtaccgacacgctgaccgccctgcggcgcgtccgtcagttgaccca

SEQ ID NO: 513204 - DNA, 75 bp, synthetic construct
  source 1..75: mol_type = other DNA
gcctacggcacggccattcagggattacgttccgctatgctggcccgcgtcggcgatgagcatatgggacgtttc

SEQ ID NO: 513205 - DNA, 75 bp, synthetic construct
  source 1..75: mol_type = other DNA
cagcgcatcagccacgatgtgatttccgcacgtcacttcgacagctggtggaaaaaagtcagccgcgaaacgcct

SEQ ID NO: 513206 - DNA, 75 bp, synthetic construct
  source 1..75: mol_type = other DNA
gaagagtatcgttggcctatctgcacgtttatcggcatgacgctggtgatggtgtggctggcaggtgaactgtgg

SEQ ID NO: 513207 - DNA, 75 bp, synthetic construct
  source 1..75: mol_type = other DNA
cgaaaaacatcgtcgcttccacgacaaagagtctgacttcctcgcgtttgtaaatctgtggaattatcttggcga

SEQ ID NO: 513208 - DNA, 75 bp, synthetic construct
  source 1..75: mol_type = other DNA
gatgggttgccagaaagatattgcagagaagatacaaaaacagggcggtgattatttattcgctgtaaaaggaaa

SEQ ID NO: 513209 - DNA, 75 bp, synthetic construct
  source 1..75: mol_type = other DNA
cgcaagggagcgattcatgtcattagtgcgttctcaacaatgcacagtctggttctcggacagattaagacggat

SEQ ID NO: 513210 - DNA, 75 bp, synthetic construct
  source 1..75: mol_type = other DNA
gtgcatatcccgctgccgctgcttaatcaggtagaagagagcgggtttgaatggcaaatccccggcctgcgtcgt

SEQ ID NO: 513211 - DNA, 75 bp, synthetic construct
  source 1..75: mol_type = other DNA
gggaacgggcgcagggcgcggtgatggcaacggaaaaagtcaccgtttacgggttgccgattgttgccgcgcgta

SEQ ID NO: 513212 - DNA, 75 bp, synthetic construct
  source 1..75: mol_type = other DNA
accaaagcggaaatgggctatgtattttcggccttcgcctggctttatacgctatgtcagatccccggcggttga

SEQ ID NO: 513213 - DNA, 75 bp, synthetic construct
  source 1..75: mol_type = other DNA
tccgtgcggataacgccattgctgcggcttgctactttgcaggacacttcctcatcgtccgctcgctgtatctct

SEQ ID NO: 513214 - DNA, 75 bp, synthetic construct
  source 1..75: mol_type = other DNA
tactgctggttctgggcgcgctgttactggcgattatctggacgcgtctggaagagtatcgttggcctatctgca

SEQ ID NO: 513215 - DNA, 75 bp, synthetic construct
  source 1..75: mol_type = other DNA
tccgtgcggataacgcgattgctgcggcctgctactttgccggtcacttcctcatcgtccgctcgctgtatctct

SEQ ID NO: 513216 - DNA, 75 bp, synthetic construct
  source 1..75: mol_type = other DNA
gaatgaagacgactgcaaaataagaagaggaaatgcagcagatttattttcagggatacggcacattgctattaa

SEQ ID NO: 513217 - DNA, 75 bp, synthetic construct
  source 1..75: mol_type = other DNA
tggagacttacaggcacagacagactggttcgccactggcgtggatattatcgcgactgactgggaggcattctg

SEQ ID NO: 513218 - DNA, 75 bp, synthetic construct
  source 1..75: mol_type = other DNA
tccgtgcggacaacgcgattgctgcggcctgctactttgccggtcatttcctcatcgtccgctcgctgtatctct

SEQ ID NO: 513219 - DNA, 75 bp, synthetic construct
  source 1..75: mol_type = other DNA
gccgctgtccaccctgaccggctcaggtaaacatccggctgccgcgcgcctgaatccggtatcccggggagcgca

SEQ ID NO: 513220 - DNA, 75 bp, synthetic construct
  source 1..75: mol_type = other DNA
gcctatcgttacctgtgcaacacgtccagccgtactgaccttaactatttacaaggtgtggatgggccgattggt

SEQ ID NO: 513221 - DNA, 75 bp, synthetic construct
  source 1..75: mol_type = other DNA
tcgccggagcgtcggcgctggtattaacgtcctatctggtgcgttgcaagccgggtgaaccgatgccggaagcga

SEQ ID NO: 513222 - DNA, 75 bp, synthetic construct
  source 1..75: mol_type = other DNA
gtacatgggcgggccggaaaaaatcatgaacactaacggagcgggggatggcgcactggcagcgttgctgcatga

SEQ ID NO: 513223 - DNA, 75 bp, synthetic construct
  source 1..75: mol_type = other DNA
aagcgttgaccggagagagcgatccgctgctggcatctgacaaggcgctggactgggtagatctggtgctgtgca

SEQ ID NO: 513224 - DNA, 75 bp, synthetic construct
  source 1..75: mol_type = other DNA
tgccgggcgctatcgcggaatttaaccagtatgagtttagccgcgccatgcgccataaagattgccagaacccgc

SEQ ID NO: 513225 - DNA, 75 bp, synthetic construct
  source 1..75: mol_type = other DNA
cgggcgagcgtacctttgctatcagcccaggacatatgaaccagttgcgggcggagagcattcctgaagatgtca

SEQ ID NO: 513226 - DNA, 75 bp, synthetic construct
  source 1..75: mol_type = other DNA
aaacctctggagtgcgtttttctcgcagactccggttccgtagcggtggaagtggcgatgaaaatggcgttgcaa

SEQ ID NO: 513227 - DNA, 75 bp, synthetic construct
  source 1..75: mol_type = other DNA
gttgcgagctaattttgtctgacggcagacgcctggttgacggtatgtcgtcctggtgggcggcgatccacggtt

SEQ ID NO: 513228 - DNA, 75 bp, synthetic construct
  source 1..75: mol_type = other DNA
ggcctgcgcagcagcaaacgccagcctggcgattctcgaatctggcgactggcagcatcaggtggcggctattga

SEQ ID NO: 513229 - DNA, 75 bp, synthetic construct
  source 1..75: mol_type = other DNA
gcacaattgattgaatggctggattctcaaggggcattcaatcacccatactggatgtgcaaatgttcatggtca

SEQ ID NO: 513230 - DNA, 75 bp, synthetic construct
  source 1..75: mol_type = other DNA
agcacagctgcgggtacaaacacgaccgccacaacgtcaacactggtgcaccgtccggttaccgaaacgccggta

SEQ ID NO: 513231 - DNA, 75 bp, synthetic construct
  source 1..75: mol_type = other DNA
gcggactgccttccctggttaatctcccggccacttctgctgcggtgattccgtcagcatcccgctccgctgcca

SEQ ID NO: 513232 - DNA, 75 bp, synthetic construct
  source 1..75: mol_type = other DNA
gcctaccgttacttgtgtaacacctccagtcgaaccgatcttaactatctgcaaggggtggacggcccgattggt

SEQ ID NO: 513233 - DNA, 75 bp, synthetic construct
  source 1..75: mol_type = other DNA
caatcaatacattgctaataatcacactgttgacattctattggctgatttatagtttatgtctcgaccatctgt

SEQ ID NO: 513234 - DNA, 75 bp, synthetic construct
  source 1..75: mol_type = other DNA
caggtgtgggggccaaacgcggtcgaacacagtcactatttgcgtatttatatgggacatctgcgacaaaaactg

SEQ ID NO: 513235 - DNA, 75 bp, synthetic construct
  source 1..75: mol_type = other DNA
aacattcaacattcaacattcaacattcaacattcaacaaggaaagaaacttgtcgctggcatggacgtcaacat

SEQ ID NO: 513236 - DNA, 75 bp, synthetic construct
  source 1..75: mol_type = other DNA
aatcagggaggcccgggaaatattcctcaccattaacagcgcgcctgaacacggctggacatgttatgaaccgcc

SEQ ID NO: 513237 - DNA, 75 bp, synthetic construct
  source 1..75: mol_type = other DNA
gaacttgtggccggattcagtgaggttgttgaggtgtacaactggcgttgtcgtaacggagatatcagggatggt

SEQ ID NO: 513238 - DNA, 75 bp, synthetic construct
  source 1..75: mol_type = other DNA
ttcagtgaggttgtggaggtgtacaactggcgttgtcgtaacggagatatcagtgctgattatcgccattcgtga

SEQ ID NO: 513239 - DNA, 75 bp, synthetic construct
  source 1..75: mol_type = other DNA
gctaaccgcgtcagttatcaggttttgaaccagcattcaccacgcttaacacgcgggctgccggagcgtgaagac

SEQ ID NO: 513240 - DNA, 75 bp, synthetic construct
  source 1..75: mol_type = other DNA
actaacgtgccaaattccagcaagcataaattcacctggctgacttattcgtcgttagcgcaggtgtgtaaatat

SEQ ID NO: 513241 - DNA, 75 bp, synthetic construct
  source 1..75: mol_type = other DNA
gcaaggggtggacggcccgattggtcgttgctttacgctgattggtgagtctggcgaacgtacctttgctatcag

SEQ ID NO: 513242 - DNA, 75 bp, synthetic construct
  source 1..75: mol_type = other DNA
acaatctctgtgtcgactatccgggttcccgggtcgttaacaatatcagttttacattaggcaatgagcgtctgg

SEQ ID NO: 513243 - DNA, 75 bp, synthetic construct
  source 1..75: mol_type = other DNA
aagcgatgcgacaaactgaggctgatgccagcgtgatttatgtgcctgcaccgtttgtgctggattctgttgttg

SEQ ID NO: 513244 - DNA, 75 bp, synthetic construct
  source 1..75: mol_type = other DNA
aggctcaatcgacgaggtggggttaaccttgcaatcggaactacaattgcgttaacagggatattattccttgct

SEQ ID NO: 513245 - DNA, 75 bp, synthetic construct
  source 1..75: mol_type = other DNA
gcctccggtggtaacacgttcaacggaaaaggcggggccaatgccagcaatacctttagcggcacgttgacggtg

SEQ ID NO: 513246 - DNA, 75 bp, synthetic construct
  source 1..75: mol_type = other DNA
ggggcgttccggtcgcctgctggacgatccacatctcgggcatgtgaaccagtttaatgattatgttgatgacct

SEQ ID NO: 513247 - DNA, 75 bp, synthetic construct
  source 1..75: mol_type = other DNA
tgaagaggaacgcgtggtggataatcgcatgcacgaccgtttttgtgaactacgcaccgctgcgggccatcctgt

SEQ ID NO: 513248 - DNA, 75 bp, synthetic construct
  source 1..75: mol_type = other DNA
gtgttgcaggagaacgtcagcgccagcaaaagctcctctgcgaatgccagccgtgacggtaaaactaattttggc

SEQ ID NO: 513249 - DNA, 75 bp, synthetic construct
  source 1..75: mol_type = other DNA
gcaatctgcatgtggtgggtgaaaaacagatcgccattaatcagggcactgaatttattcgtttttctggtgttg

SEQ ID NO: 513250 - DNA, 75 bp, synthetic construct
  source 1..75: mol_type = other DNA
tggcaatagtttcaacggtaaaggcggtgctaatgccagcaatacctttagcggcacattaacagtgacggtcga

SEQ ID NO: 513251 - DNA, 75 bp, synthetic construct
  source 1..75: mol_type = other DNA
aaataaatctgacgcaagagctaatcttgggttaggaaccgttgcaacaaaaaacgtgggaaatagtgctgggca

SEQ ID NO: 513252 - DNA, 75 bp, synthetic construct
  source 1..75: mol_type = other DNA
gcaggctggttaaagtgcgacgggcgcgcctttacaaaagaacaatatcctgttctggccagagtctacccgacc

SEQ ID NO: 513253 - DNA, 75 bp, synthetic construct
  source 1..75: mol_type = other DNA
aaaacgtgggaaatagtgctgggcaaatacctgatatgtcttactggtcttccgtatcgggtggcgttaatttcc

SEQ ID NO: 513254 - DNA, 75 bp, synthetic construct
  source 1..75: mol_type = other DNA
tgaagaggaacgcgtggtggataaccgcatgcacgaccgtttttgtgaactccgcaccgccgcgggccatcctgt

SEQ ID NO: 513255 - DNA, 75 bp, synthetic construct
  source 1..75: mol_type = other DNA
gggacgttccggtcgcctgttagccgatccgcatctcgggcatgttaatcgctttaatgattatgttgatgatct

SEQ ID NO: 513256 - DNA, 75 bp, synthetic construct
  source 1..75: mol_type = other DNA
taatcgtctcatcccggaaagtttcagtggtgaaatcatctggatgcatcccgaaaaccgcccttatctgcgcgc

SEQ ID NO: 513257 - DNA, 75 bp, synthetic construct
  source 1..75: mol_type = other DNA
aaatgacttctccatctcgctgccggtagaccgactctcttttctgctggcggttgccacgctgaacggcgagcg

SEQ ID NO: 513258 - DNA, 75 bp, synthetic construct
  source 1..75: mol_type = other DNA
aataaattgcctgatttacgcggtgagtttattaggggctgggatgacgggcgtggtattgatgctgtacgtgcc

SEQ ID NO: 513259 - DNA, 75 bp, synthetic construct
  source 1..75: mol_type = other DNA
tggccgggcttgttactgcggcagacaggtttccgtattttacggggaatgacgttgccagtttggcaaccctga

SEQ ID NO: 513260 - DNA, 75 bp, synthetic construct
  source 1..75: mol_type = other DNA
cggttataaccaggacccagtgaaatttatttccagagcaggcgtacccggtatcggtgcttcatttttcgcatt

SEQ ID NO: 513261 - DNA, 75 bp, synthetic construct
  source 1..75: mol_type = other DNA
cagcgatcctgtcatagcaatgtcagacaatggtatgcaggctactattctgacctctatcagaagcgggtatgc

SEQ ID NO: 513262 - DNA, 75 bp, synthetic construct
  source 1..75: mol_type = other DNA
actgcagcagatcggttgccttattttaccggagcagaccgcgcagcactgacaacccttacagctattggtcgc

SEQ ID NO: 513263 - DNA, 75 bp, synthetic construct
  source 1..75: mol_type = other DNA
gcagtgacatcaacagcacgtctgaaatactggccgccacaccgaaagcggtcaaggctgcatacgatctggcaa

SEQ ID NO: 513264 - DNA, 75 bp, synthetic construct
  source 1..75: mol_type = other DNA
ttacgtcagtcggtccaaacctattttgatgacccgtgggcgctgacttacgccaatgccgatcgtctgctggat

SEQ ID NO: 513265 - DNA, 75 bp, synthetic construct
  source 1..75: mol_type = other DNA
cgtgtacaaaaccagacaagtaccgctggatcttggtctggtggtacgcgaatatctggcgcagtatccacgtgc

SEQ ID NO: 513266 - DNA, 75 bp, synthetic construct
  source 1..75: mol_type = other DNA
cgaaaccatcggcgtgcgcgccaacaacgcgatcaacgacatggttcgtcaacgtctgctgaaccgctttaccag

SEQ ID NO: 513267 - DNA, 75 bp, synthetic construct
  source 1..75: mol_type = other DNA
cgggtcggttcagacgtcacgttgctggagatggcgccaacgttcttgcctgcactggaagctcgcctgtcgaac

SEQ ID NO: 513268 - DNA, 75 bp, synthetic construct
  source 1..75: mol_type = other DNA
cgcctgacaatgggcatcggcttgctgtttaagaaaaataaagtgaagtacctgtgcggcctcgcaacgttagaa

SEQ ID NO: 513269 - DNA, 75 bp, synthetic construct
  source 1..75: mol_type = other DNA
tctatgcagttgtcgatcgttgcaggcgaactgaagcgtgcggcggatgcggcagaagagggcggtgatgagttt

SEQ ID NO: 513270 - DNA, 75 bp, synthetic construct
  source 1..75: mol_type = other DNA
cgaaaaggccttgttcaactcagtagcgccaccaacagcacctctgaaacgctggccgccacaccgaaagcggtt

SEQ ID NO: 513271 - DNA, 75 bp, synthetic construct
  source 1..75: mol_type = other DNA
accgttgccggtgatgaacacgccgcacgcctttctcttgttcgcgattacgtcctctcgtttgctggccgtctg

SEQ ID NO: 513272 - DNA, 75 bp, synthetic construct
  source 1..75: mol_type = other DNA
ttttttctggcttgcatcctgcagtcatttccaggtatagttttcccgctgccgcaaaatcggctgccgggcgta

SEQ ID NO: 513273 - DNA, 75 bp, synthetic construct
  source 1..75: mol_type = other DNA
gccaccagtgaaattggcgtttccggtggtagcaataaccgctacttattggaggctgccatcatggctacaatc

SEQ ID NO: 513274 - DNA, 75 bp, synthetic construct
  source 1..75: mol_type = other DNA
cggactttatccgcgccctgaaccgcctgcgcgacgtggccgataccgcctttgccagcggcgatgccgggatac

SEQ ID NO: 513275 - DNA, 75 bp, synthetic construct
  source 1..75: mol_type = other DNA
cgctatccgttcaaagcctcacagaacgatgcctccctccccctgctggcgcagtacctgcgcgatgacgggcgc

SEQ ID NO: 513276 - DNA, 75 bp, synthetic construct
  source 1..75: mol_type = other DNA
atgatgagcgtacttagcgtggtgtcgcaaacgcatctggtcgctattgcgccgcgttggttggctgaagagttc

SEQ ID NO: 513277 - DNA, 75 bp, synthetic construct
  source 1..75: mol_type = other DNA
tccagttgccctgcttatttatgccgttcttgcaattagcctatttacttctttttttgcagaaactttaataac

SEQ ID NO: 513278 - DNA, 75 bp, synthetic construct
  source 1..75: mol_type = other DNA
tcattacatcattcgggctttttattgcactttatctggtcaaatgtaactttacatcacctctgtctttacatt

SEQ ID NO: 513279 - DNA, 75 bp, synthetic construct
  source 1..75: mol_type = other DNA
aaaataaggatgttgcggaatgactctaatttaggtgtggcggaaagtagaaatgttggaataaaagcagcaaca

SEQ ID NO: 513280 - DNA, 75 bp, synthetic construct
  source 1..75: mol_type = other DNA
cattttccgggctgtggtgtttatgtgtacaccgtggctctttcgagataatggcagtccgggcggggcagcctt

SEQ ID NO: 513281 - DNA, 75 bp, synthetic construct
  source 1..75: mol_type = other DNA
tgctccgcaccgttgccggtgatgagcacgccgcacgcctttctctcgttcgcgattacgttctctcgtttgctg

SEQ ID NO: 513282 - DNA, 75 bp, synthetic construct
  source 1..75: mol_type = other DNA
aactaaatataaatggtgaatctggtgaatatacattcagatttttgattgcaattctatataaagtaggcctgt

SEQ ID NO: 513283 - DNA, 75 bp, synthetic construct
  source 1..75: mol_type = other DNA
tcccgcaaatcctcacctctctggccgccctgattacggccgtaaccggcctaatcaaagcgctacgcgacaaag

SEQ ID NO: 513284 - DNA, 75 bp, synthetic construct
  source 1..75: mol_type = other DNA
cacattgcgtatgaacgtttgttgaccggtattcacaacgaagacaccattgagcagtatcacgcgcatggtcgt

SEQ ID NO: 513285 - DNA, 75 bp, synthetic construct
  source 1..75: mol_type = other DNA
ctattcagtgtggcgcatttcataacaccactggcggcctgacctatttcaacacgacgccgctgggtcgcgccg

SEQ ID NO: 513286 - DNA, 75 bp, synthetic construct
  source 1..75: mol_type = other DNA
atggtatccactaagatatattttaactggaataagttattcgtgtttttagctgtggccttatactggttatgg

SEQ ID NO: 513287 - DNA, 75 bp, synthetic construct
  source 1..75: mol_type = other DNA
gactctctgcaacgctgggttgccagccagatcactggtgaagttaccctggagctgcgccgtgggaacgattat

SEQ ID NO: 513288 - DNA, 75 bp, synthetic construct
  source 1..75: mol_type = other DNA
aaatgatgctggaagctaaccgcatcggcggtcgtcacggcctaggcatgagcgaccagattgaaaaccgtatca

SEQ ID NO: 513289 - DNA, 75 bp, synthetic construct
  source 1..75: mol_type = other DNA
cagttgggccgtctgctgtaccaggggcgttggtttgactcccaggcgctgatgctgcgtgactctctgcaacgc

SEQ ID NO: 513290 - DNA, 75 bp, synthetic construct
  source 1..75: mol_type = other DNA
gtagaaggtggcagtgtctttataacaactgtaaaagatgcgcctataggtatcatgttgtccgaagaaggggtt

SEQ ID NO: 513291 - DNA, 75 bp, synthetic construct
  source 1..75: mol_type = other DNA
tcacggtgccgccgggtggaaacattgttctccctgtttcattaggtttacaaaaccgtatccagacgactttta

SEQ ID NO: 513292 - DNA, 75 bp, synthetic construct
  source 1..75: mol_type = other DNA
agcgagtgcttcttcaccagcggttcggtcaatgaccgattccctgttgaacaataccccttctgaggggcctgg

SEQ ID NO: 513293 - DNA, 75 bp, synthetic construct
  source 1..75: mol_type = other DNA
tctcgtattcctgcgccagagcagtcaccatgtaactttaatatgtatgcaaagctcggtcagagactggttggc

SEQ ID NO: 513294 - DNA, 75 bp, synthetic construct
  source 1..75: mol_type = other DNA
ctttcgatgcgtcagatcgtgttgcagaaaccataaaaaacatcatcaaagagcaggctattaacaccggtaatg

SEQ ID NO: 513295 - DNA, 75 bp, synthetic construct
  source 1..75: mol_type = other DNA
aacgacgtaattattactggccacggccgccgtgaggctgcaatttttgctggacttgagcgcgtaccggttatt

SEQ ID NO: 513296 - DNA, 75 bp, synthetic construct
  source 1..75: mol_type = other DNA
attaccaagtgactcgcgagatacagggcagattgaacaggattgcgattattgggtggggatccatcgtgaagg

SEQ ID NO: 513297 - DNA, 75 bp, synthetic construct
  source 1..75: mol_type = other DNA
cgggttgtgggtatcaggctgggtaataaacagacttatgcgccgcaaacagacagcactacatgggcagtggat

SEQ ID NO: 513298 - DNA, 75 bp, synthetic construct
  source 1..75: mol_type = other DNA
aaaaacaagcccacaacagcaagcctgacagtaaatggctgggagcgtgatgaagtaaccggtcgtttgcggcaa

SEQ ID NO: 513299 - DNA, 75 bp, synthetic construct
  source 1..75: mol_type = other DNA
gggaccgcccggggtggatggtaaaaccggaccacagggaccacaagggccaaccggaaggctggtacccgggga

SEQ ID NO: 513300 - DNA, 75 bp, synthetic construct
  source 1..75: mol_type = other DNA
cgccgcatatattgatctgatgccagaaggaatgcaaggaggaaagaactcgatgtttaactttattactctttt

SEQ ID NO: 513301 - DNA, 75 bp, synthetic construct
  source 1..75: mol_type = other DNA
tgctgaagaagccagacgtatggctgagaatgcacgaggacctaaaggcgatacagggccaaaaggtgatgctgg

SEQ ID NO: 513302 - DNA, 75 bp, synthetic construct
  source 1..75: mol_type = other DNA
tcattaatcctggtcacgccggtgaatggtctgccgtcttccggcgtggcagataccctgacaggtggatttgat

SEQ ID NO: 513303 - DNA, 75 bp, synthetic construct
  source 1..75: mol_type = other DNA
agccatcagttgcttgccccggcggacaatatcaccattgcgaaaaatgaactggcggttctggggacgatttca

SEQ ID NO: 513304 - DNA, 75 bp, synthetic construct
  source 1..75: mol_type = other DNA
atggcggacagtgaatttcagcgcccgacgctggcagaaaatatcagtatgctccgtaacgatttattcgccagg

SEQ ID NO: 513305 - DNA, 75 bp, synthetic construct
  source 1..75: mol_type = other DNA
tttcatatccgcgtgacgccggacacaccggaaatacgggctgccatcaccgccgagttgcgttcgttcctgctg

SEQ ID NO: 513306 - DNA, 75 bp, synthetic construct
  source 1..75: mol_type = other DNA
ggtcggtaacgctgacgacggtacggcattaatcctggtcacgccggtgaatggtctgccgtcttccggtgttgc

SEQ ID NO: 513307 - DNA, 75 bp, synthetic construct
  source 1..75: mol_type = other DNA
atgcgctgggaaggtgtcagcgatggcctgaaggtgactgccgggagtgttattcagcgcgatgacctggttcag

SEQ ID NO: 513308 - DNA, 75 bp, synthetic construct
  source 1..75: mol_type = other DNA
gtgcggcaggcccggcaggcccacagggaccgaaaggagaaacaggtgcggcaggcccggtgggggcaaccggac

SEQ ID NO: 513309 - DNA, 75 bp, synthetic construct
  source 1..75: mol_type = other DNA
agccatcagttgcttgcaccggtggacaatatctccattgcgaaaaatgagctggcggttctggggacgatttca

SEQ ID NO: 513310 - DNA, 75 bp, synthetic construct
  source 1..75: mol_type = other DNA
cgccgagttgcgttcgttcctgctgcgtgatggttatccgcagggagaactgaaggtgtcgcgtatcagtgaggc

SEQ ID NO: 513311 - DNA, 75 bp, synthetic construct
  source 1..75: mol_type = other DNA
agcaccggtggtgtcctgcgcgtgccgatcgcctgctcaagtgcaggcgcggtcggtaacgctgacgacggtacg

SEQ ID NO: 513312 - DNA, 75 bp, synthetic construct
  source 1..75: mol_type = other DNA
tctatccggaagcattaaaagatgtatatatcagcgccggttcatggcctgaaaatggcgctgatgttgatgatg

SEQ ID NO: 513313 - DNA, 75 bp, synthetic construct
  source 1..75: mol_type = other DNA
tttcgctcttacatcggattcattggtgctacacacagtcatgaggctaggtttgcagaggccaagagcttttca

SEQ ID NO: 513314 - DNA, 75 bp, synthetic construct
  source 1..75: mol_type = other DNA
ggaaacggcggcaagacaacatatcgggccactggccccggtggcaggctctgatttgtatgtgttcaggccggt

SEQ ID NO: 513315 - DNA, 75 bp, synthetic construct
  source 1..75: mol_type = other DNA
aggtgaaaggggtccagcgggggcacagggtgttccggggccggttggtccggcaggtcctgcgggtaaaacggg

SEQ ID NO: 513316 - DNA, 75 bp, synthetic construct
  source 1..75: mol_type = other DNA
ccaaaggctgtgaaagcggtaatggcagaagtgcaggcagcaaaaacgaaggcagaagaggcagcaacccgggca

SEQ ID NO: 513317 - DNA, 75 bp, synthetic construct
  source 1..75: mol_type = other DNA
gccccgcaggtcctgcgggtcccgcaggcagtgtcgccagtgttccggatgccagcacatcacagaaaggtgttg

SEQ ID NO: 513318 - DNA, 75 bp, synthetic construct
  source 1..75: mol_type = other DNA
tggcatacaatcctgaagataatcagggtgcccgctggttgttgggctcagaactgttacgaacaggtgatcatg

SEQ ID NO: 513319 - DNA, 75 bp, synthetic construct
  source 1..75: mol_type = other DNA
ctccgtgggctgcagggggcgacaggacctgcgggagcagtggggcccgcaggcccacagggaccggctggtgca

SEQ ID NO: 513320 - DNA, 75 bp, synthetic construct
  source 1..75: mol_type = other DNA
acagggaccacaagggccaaccggaaggctggtacccggggaaatttacagcatcggaacatacattattgccgc

SEQ ID NO: 513321 - DNA, 75 bp, synthetic construct
  source 1..75: mol_type = other DNA
ctgttgcctgcagcgtgacaggtatgaccgggaatatggatgatggcgaggcgctttcactggttacgccggtta

SEQ ID NO: 513322 - DNA, 75 bp, synthetic construct
  source 1..75: mol_type = other DNA
gtggtggtggataccattccggtggagctaaaaagttcctatatggtctggagctggtttatctatgtgctctca

SEQ ID NO: 513323 - DNA, 75 bp, synthetic construct
  source 1..75: mol_type = other DNA
atgaagaaactattgattagattaatacctgatgcaatatatgaggctctagaaaaggcagctttgcattcagaa

SEQ ID NO: 513324 - DNA, 75 bp, synthetic construct
  source 1..75: mol_type = other DNA
atgaagaaactattgattcgattaatacctgatgcaatatatgaggctctggaaaagacagctctgcattctgaa

SEQ ID NO: 513325 - DNA, 75 bp, synthetic construct
  source 1..75: mol_type = other DNA
gtggcccgctggtgctgagctttgcggcactggaagattattaccaggagcaggggcgcgactgggagcgttacg

SEQ ID NO: 513326 - DNA, 75 bp, synthetic construct
  source 1..75: mol_type = other DNA
acgcccgtcgcctgaccgagcttgccggtgcggtactggaacgcagtaagcgctatccgcaacgttttgcactga

SEQ ID NO: 513327 - DNA, 75 bp, synthetic construct
  source 1..75: mol_type = other DNA
gggttgatactttacgccctgggcaaggtgtagggctggcggtagcccgcgaaatcaccgagcaatatgagggta

SEQ ID NO: 513328 - DNA, 75 bp, synthetic construct
  source 1..75: mol_type = other DNA
gtggtacgcaattctgggtggaacaaacagtcgcgcaaaagccgaattaaacggagcattctttaacataacccg

SEQ ID NO: 513329 - DNA, 75 bp, synthetic construct
  source 1..75: mol_type = other DNA
caaggctgcatacgatctggcaaacggaaaacaaccggcagatgccacgctcactgctctggcaggacttgccac

SEQ ID NO: 513330 - DNA, 75 bp, synthetic construct
  source 1..75: mol_type = other DNA
tcgcaaggttgataccgggcgtgcgctactttcatttcaggaagggactatcgtatccggttttgatgataatga

SEQ ID NO: 513331 - DNA, 75 bp, synthetic construct
  source 1..75: mol_type = other DNA
ggtataccggccccggccggaggatgctggacaaggctcccccctggtcactgtatcagaccttacacggggtga

SEQ ID NO: 513332 - DNA, 75 bp, synthetic construct
  source 1..75: mol_type = other DNA
gcggaaatattgccgacgcccttttccaggtggccagaaccgttaaagcccggcgggaaatgacatccagcctca

SEQ ID NO: 513333 - DNA, 75 bp, synthetic construct
  source 1..75: mol_type = other DNA
catcaggcatgtattttctggcgaaggaatgcatcgcgtccaccaaatccagcggcatgttatccggtgctctgc

SEQ ID NO: 513334 - DNA, 75 bp, synthetic construct
  source 1..75: mol_type = other DNA
actggataacgctcagttctttacccgcatgggtcagcggctgattaaagtgctggatcaaccaacgcaggatgg

SEQ ID NO: 513335 - DNA, 75 bp, synthetic construct
  source 1..75: mol_type = other DNA
gtggtaagttttacggcaatggaacattacgaggtatgaataatgcggctattgctaactggagagaacaacttt

SEQ ID NO: 513336 - DNA, 75 bp, synthetic construct
  source 1..75: mol_type = other DNA
cccatgtggaaagttaatgttcccctgaaaaatttaagcacctcaaatcacgaactttgcgagcgatggatgctg

SEQ ID NO: 513337 - DNA, 75 bp, synthetic construct
  source 1..75: mol_type = other DNA
acgacactccgggcctgtcactggcgcacatcgttagcgaaagccgccgaatcaaacgcgagaagggccgcgtag

SEQ ID NO: 513338 - DNA, 75 bp, synthetic construct
  source 1..75: mol_type = other DNA
attgaaaatctggaaatatggcgtgcccgcgttatggaacgttattactacattccacaggggggcgcaggtaat

SEQ ID NO: 513339 - DNA, 75 bp, synthetic construct
  source 1..75: mol_type = other DNA
gcaaacatcgttgcctatgcaatgcaggttcgcgaaaccgcaatggaacgctacgccatcaaccgcatgactgaa

SEQ ID NO: 513340 - DNA, 75 bp, synthetic construct
  source 1..75: mol_type = other DNA
acgacactcctggcctgtccctggcgcatatcgttaccgaatgccgtcgaattaagcgcgagaaaggctgcgtag

SEQ ID NO: 513341 - DNA, 75 bp, synthetic construct
  source 1..75: mol_type = other DNA
taagcgcctgctttcgttggtgtggttgtccgtgcaggcggtcgcagcagcaaataaacgcgaggattttaagga

SEQ ID NO: 513342 - DNA, 75 bp, synthetic construct
  source 1..75: mol_type = other DNA
gaagcgcaaccgctgctgattttaggcatgggtaagctgggcggtggggagctgaatttctcatcagatatcgat

SEQ ID NO: 513343 - DNA, 75 bp, synthetic construct
  source 1..75: mol_type = other DNA
ctgtacacgtgaagacgctgctgtaacgctgtcgcgtattacggccttgctggtggggattgttacccgcaccac

SEQ ID NO: 513344 - DNA, 75 bp, synthetic construct
  source 1..75: mol_type = other DNA
gcaatttacgacacagaccagcaggccgccgccgcagaacgccgcgggcgcgagcagcagccgaaaaagaaaggg

SEQ ID NO: 513345 - DNA, 75 bp, synthetic construct
  source 1..75: mol_type = other DNA
acggcatgagcgctacgcagaagtacgaggccattcagggtattttcacccagctcgcagaccattcaaaaaccg

SEQ ID NO: 513346 - DNA, 75 bp, synthetic construct
  source 1..75: mol_type = other DNA
cacaacagccattacgcccaatcaactggtgcagtcgtcttctgaaaatgacaatcgtgccaccggctccaggtc

SEQ ID NO: 513347 - DNA, 75 bp, synthetic construct
  source 1..75: mol_type = other DNA
gtgacccaacgtgcgcgatgcacgggttgccaccgctgtgaaatctcttgtaccaacttcaacgatggctcagta

SEQ ID NO: 513348 - DNA, 75 bp, synthetic construct
  source 1..75: mol_type = other DNA
gattgccaatacgattttgttcctcgcctctgatctcgccagccatatcaccctacaggatattgtggtcgatgg

SEQ ID NO: 513349 - DNA, 75 bp, synthetic construct
  source 1..75: mol_type = other DNA
atggatttcagcggtaaaaatgtctgggtaactggcgcagggaaaggtatcggctacgccacggcgctggcgttt

SEQ ID NO: 513350 - DNA, 75 bp, synthetic construct
  source 1..75: mol_type = other DNA
aaaggtattacagaaaggcggggaggattacgcaacagaatccctgcacagtgatacatggcttccggcctcgtt

SEQ ID NO: 513351 - DNA, 75 bp, synthetic construct
  source 1..75: mol_type = other DNA
ataaagatagactgtctcgtggtacttatgaggcagtaaaaatatcccatctcctgtcaggagtgcttgaagata

SEQ ID NO: 513352 - DNA, 75 bp, synthetic construct
  source 1..75: mol_type = other DNA
tactgttaaatctgtctcaggactcactcttaaagatgatgagggaaaggaggatttgcagggttattcagtagt

SEQ ID NO: 513353 - DNA, 75 bp, synthetic construct
  source 1..75: mol_type = other DNA
cacacacgccgcgtattggtatgagtgcttacggtgcgtcgaaagcggcgctgaaaagcctggcgttgagcgtcg

SEQ ID NO: 513354 - DNA, 75 bp, synthetic construct
  source 1..75: mol_type = other DNA
tggaagagtggcaggcgatgggcgtaatgaactatgaaatggaatctgcaactctgctgaccatgtgtgcaagtc

SEQ ID NO: 513355 - DNA, 75 bp, synthetic construct
  source 1..75: mol_type = other DNA
attgccgttgaagagctggcacagctgggcattcgcaccttcctgcgtatcggtacaacgggcgctattcagccg

SEQ ID NO: 513356 - DNA, 75 bp, synthetic construct
  source 1..75: mol_type = other DNA
taaagaggactggcagcagacttttgcggttaacgtcggcggtgcgtttaacctgttccagcaaaccatgaacca

SEQ ID NO: 513357 - DNA, 75 bp, synthetic construct
  source 1..75: mol_type = other DNA
ttccgtgggtggttttcagcctgatttcatcggtgtcagcggacgtgatgggcgggcaggcggagtcctcagtgt

SEQ ID NO: 513358 - DNA, 75 bp, synthetic construct
  source 1..75: mol_type = other DNA
gtttcgccgtcagcggggcggggcgattgtcactgtggcgtccgacgccgcacacacgccgcgtattggtatgag

SEQ ID NO: 513359 - DNA, 75 bp, synthetic construct
  source 1..75: mol_type = other DNA
ccagtgaatctcagaagctcgatgttaaatggtggtgttgccgatggtgataccattttatggtggttgcggcag

SEQ ID NO: 513360 - DNA, 75 bp, synthetic construct
  source 1..75: mol_type = other DNA
caccagcgcggtattcgtattctctttgatgtggtgatgaaccataccggttatgccacgctggcggatatgcag

SEQ ID NO: 513361 - DNA, 75 bp, synthetic construct
  source 1..75: mol_type = other DNA
gcaaatagacacccgctccggcacgccaacattgatgatttcgatccaaaacactgccgaaccaatagcaaacca

SEQ ID NO: 513362 - DNA, 75 bp, synthetic construct
  source 1..75: mol_type = other DNA
tgtggggatgggtattaagcgtagagatgccgcagattcggctttcttcacgcccaataatactgacaaatttga

SEQ ID NO: 513363 - DNA, 75 bp, synthetic construct
  source 1..75: mol_type = other DNA
attaaaggcgcggagtgttttcgtgatagccccctgcttgtcgaaactgttaaacagttccaccgttccgggcgt

SEQ ID NO: 513364 - DNA, 75 bp, synthetic construct
  source 1..75: mol_type = other DNA
ggcttcccgacgctgaaagataaaattcccgcagaacaatggcaagacaagcgcgtcgtctgggacgcacgcgta

SEQ ID NO: 513365 - DNA, 75 bp, synthetic construct
  source 1..75: mol_type = other DNA
gtgccaccttcccggaaggtgcgcctgtccgtgattattacagccaacaaatcgcgacagtgaaaaacggccaaa

SEQ ID NO: 513366 - DNA, 75 bp, synthetic construct
  source 1..75: mol_type = other DNA
agcgggacgccggaggagattttgtccgaagcgctgctgtgggacgttttccgggtgaaaaccaaaatcgagatc

SEQ ID NO: 513367 - DNA, 75 bp, synthetic construct
  source 1..75: mol_type = other DNA
agggaaaggcaaaggaatacccggtgccattactgacgtttttggttccggcgtgatacctgtttatgtggtcaa

SEQ ID NO: 513368 - DNA, 75 bp, synthetic construct
  source 1..75: mol_type = other DNA
tttattacttgccatgcatgtaatttaaaaaaattgaaagtatggggaaatggagcaacgttcgataatgtaatt

SEQ ID NO: 513369 - DNA, 75 bp, synthetic construct
  source 1..75: mol_type = other DNA
atgactctgaggtgtctgttaaacccgtggcgattcaatggttattcaaagatttttaccacacttacaggaaca

SEQ ID NO: 513370 - DNA, 75 bp, synthetic construct
  source 1..75: mol_type = other DNA
ccgattgcagcaatggttactcaaagatttttaccacacttacaggaacaacggtttccggtaagttaattgtta

SEQ ID NO: 513371 - DNA, 75 bp, synthetic construct
  source 1..75: mol_type = other DNA
ccctgcgtgaaacaaccgcagggcagggacagattggtaattttaaagccaaagctacgtttagtttcacctacc

SEQ ID NO: 513372 - DNA, 75 bp, synthetic construct
  source 1..75: mol_type = other DNA
tggcggtaaacgtctacccggcaacatcgcggatgccaaagttaaccattgtggtggtggataccattccggtgg

SEQ ID NO: 513373 - DNA, 75 bp, synthetic construct
  source 1..75: mol_type = other DNA
acggtgaatatcgatcgcagcaccgggcaattagctaatggtggcaacagccgcgaagagtatttcatcgaaggt

SEQ ID NO: 513374 - DNA, 75 bp, synthetic construct
  source 1..75: mol_type = other DNA
atgccgcaactggagcaggctaatcagacattagtggcgaagactggcgcgccagagtacgcaccgcacgtcatc

SEQ ID NO: 513375 - DNA, 75 bp, synthetic construct
  source 1..75: mol_type = other DNA
acaagattaccgatacgctgaaggcgctgccgacctatggtccgctgctgcctgccgcagtcaccagcgccaatc

SEQ ID NO: 513376 - DNA, 75 bp, synthetic construct
  source 1..75: mol_type = other DNA
agcaaagacgtgttcgtacacttctctgctatccagggtaatggtttcaaaactctggctgaaggtcagaacgtt

SEQ ID NO: 513377 - DNA, 75 bp, synthetic construct
  source 1..75: mol_type = other DNA
gataaggcgcgccagcttttcgataccgcgtttcaggtctgccagcttattgatggcgttcgactgtgtacgcag

SEQ ID NO: 513378 - DNA, 75 bp, synthetic construct
  source 1..75: mol_type = other DNA
gctctggatgcaggaaatccaatcccggaggctctgcaatctcgtgccgagttgcgtcaaaaagtacgtaatagt

SEQ ID NO: 513379 - DNA, 75 bp, synthetic construct
  source 1..75: mol_type = other DNA
ggggtttatgcaatattattaataatgaagaagtgtgttatttttaaacaaataaggcttaagaaaaaggggggg

SEQ ID NO: 513380 - DNA, 75 bp, synthetic construct
  source 1..75: mol_type = other DNA
aatgtaatgattaaacggaaatttgatgattgtcccgaaggtgctattggctggggaaaaacagtagatgaggca

SEQ ID NO: 513381 - DNA, 75 bp, synthetic construct
  source 1..75: mol_type = other DNA
ttagtaatctttccattatctttcatcttaatatttttaaatctgactgtcttacctattcatacgcactaaaaa

SEQ ID NO: 513382 - DNA, 75 bp, synthetic construct
  source 1..75: mol_type = other DNA
tcctcgagctttatctgaacaagatttacctcggttaccgcgcctatggtgtcggtgctgcggcacaagtctatt

SEQ ID NO: 513383 - DNA, 75 bp, synthetic construct
  source 1..75: mol_type = other DNA
gcctgactttcatccgtatacatctattaccataaatgtcttaactcaaaataataaaaaacaaaaaatcagagt

SEQ ID NO: 513384 - DNA, 75 bp, synthetic construct
  source 1..75: mol_type = other DNA
atccagcgcgaccatcttgttatctgcaacggcggcggtggtgtaccagttgtggaaaaggctaacggctatcgc

SEQ ID NO: 513385 - DNA, 75 bp, synthetic construct
  source 1..75: mol_type = other DNA
ccctccgggaacgactggtaatgatgcaggcccaacttgaaggtgctcagcaatacataaccgagcagtgtttaa

SEQ ID NO: 513386 - DNA, 75 bp, synthetic construct
  source 1..75: mol_type = other DNA
ttattatgcaacatactcaccattatggggacaatatccggaagcattgctgtttgtaaactggctctataacca

SEQ ID NO: 513387 - DNA, 75 bp, synthetic construct
  source 1..75: mol_type = other DNA
gaatgccccgcgtaaggcactgaacgccgctcttaaaggactggcggcaggtaatcgtctcatcccggaaagttt

SEQ ID NO: 513388 - DNA, 75 bp, synthetic construct
  source 1..75: mol_type = other DNA
atgcaatcactgaataccgttacggatcgcttctccctggtagagaaaatccgcaaacacacacctcagaacaat

SEQ ID NO: 513389 - DNA, 75 bp, synthetic construct
  source 1..75: mol_type = other DNA
cctggcgattacctgctcgcgcggcgtgaagctactggcggatgcgccgctggtcgaagtggctgatggcgaata

SEQ ID NO: 513390 - DNA, 75 bp, synthetic construct
  source 1..75: mol_type = other DNA
ttacggcgacattcgcgccaccgcgcagaagtggctggaagaggtggagattcccgccaaccggatcgacgacct

SEQ ID NO: 513391 - DNA, 75 bp, synthetic construct
  source 1..75: mol_type = other DNA
gagtgggttaaccgaccgcgtgctcgacgacccgcaccatccgtatacacaactgctggtgtcatcggttttgca

SEQ ID NO: 513392 - DNA, 75 bp, synthetic construct
  source 1..75: mol_type = other DNA
gttcgcggcggtatcaaagtcaccactgccagcgtcgccagcgatggcaacctggccattacctgctcgcgcggc

SEQ ID NO: 513393 - DNA, 75 bp, synthetic construct
  source 1..75: mol_type = other DNA
gctgaacgggattatttcactctcagagagcggttgatgctgatgcagaagcagctggaagtggcgcaggaatat

SEQ ID NO: 513394 - DNA, 75 bp, synthetic construct
  source 1..75: mol_type = other DNA
cagcctccccccgactggcagacaccgctgaacgggattatttcaccctccgggaacgactggtaatgatgcagg

SEQ ID NO: 513395 - DNA, 75 bp, synthetic construct
  source 1..75: mol_type = other DNA
cgcggctacggatcttgttcaccacttttcagcaatgaagaatcagcaggctattttcgagtcagcacagcgtga

SEQ ID NO: 513396 - DNA, 75 bp, synthetic construct
  source 1..75: mol_type = other DNA
ttttatcagcgcagaacagcgccgggcgctctgccgtatgcagtctgaagatgatgcccgcatagtggctgcgat

SEQ ID NO: 513397 - DNA, 75 bp, synthetic construct
  source 1..75: mol_type = other DNA
gccgggcgatgcactataacaaaacgaaaagcctgaacttgccggaagtctctgttgtgatggtagatgggaagg

SEQ ID NO: 513398 - DNA, 75 bp, synthetic construct
  source 1..75: mol_type = other DNA
gagaactggttagcggcgaaggggaaaaacagcctgtctataatccggcaacgggggaagttttactggagattg

SEQ ID NO: 513399 - DNA, 75 bp, synthetic construct
  source 1..75: mol_type = other DNA
atcatcagccataccgcgccgtcgattaagcgtactcatatggaacttggtggcaaagcgccagtgattgttttt

SEQ ID NO: 513400 - DNA, 75 bp, synthetic construct
  source 1..75: mol_type = other DNA
atgcaacataagttactgattaacggagaactggttagcggcgaaggggaaaaacagcctgtctataatccggca

SEQ ID NO: 513401 - DNA, 75 bp, synthetic construct
  source 1..75: mol_type = other DNA
gatatagttgggttagttaatacgacaatagactcgctaaatagaccgtttttgtatgccattcgagaaatatta

SEQ ID NO: 513402 - DNA, 75 bp, synthetic construct
  source 1..75: mol_type = other DNA
aaaaatcaaccgttattgttaaaaacccgactcacattgcgatttgcctatactataaacttggggagactccat

SEQ ID NO: 513403 - DNA, 75 bp, synthetic construct
  source 1..75: mol_type = other DNA
aagtgcggatggtgtcgctgacgggctctatcgccaccggcgagcacatcatcagccataccgcgccgtccataa

SEQ ID NO: 513404 - DNA, 75 bp, synthetic construct
  source 1..75: mol_type = other DNA
ctaacctatgaagaggcaaagagagaagtattaaattatcacattgaacaatctaaaaatcaaaataaaaaaggc

SEQ ID NO: 513405 - DNA, 75 bp, synthetic construct
  source 1..75: mol_type = other DNA
ggcggaaatcatggtaaagcagccatgatcgaatgtaaggacaaaatccacatttgccttaattgcgttgatgtc

SEQ ID NO: 513406 - DNA, 75 bp, synthetic construct
  source 1..75: mol_type = other DNA
atggtctgttcaacattcaaccctctaacgttacagaaataccagccagaccctgaagatttatgctcactgtgt

SEQ ID NO: 513407 - DNA, 75 bp, synthetic construct
  source 1..75: mol_type = other DNA
gccacagcttttcgtcatggctttgctacaaacacttacatcgcggaaatgctgtgcggaaatttgcatccattt

SEQ ID NO: 513408 - DNA, 75 bp, synthetic construct
  source 1..75: mol_type = other DNA
atgaaacatctgataattgttttttcgcttttaacattagcgggctgcaccgtaactcgtcaggctcaattgagc

SEQ ID NO: 513409 - DNA, 75 bp, synthetic construct
  source 1..75: mol_type = other DNA
acaacccataaaggacagatgccttgcggcggtggctataattgctaatcaaaacaaaggaaaagagcatcttta

SEQ ID NO: 513410 - DNA, 75 bp, synthetic construct
  source 1..75: mol_type = other DNA
aagattccagcgccagccaggagaaagtacagacctttgtcgatgcctataacaccttgattgatacggttgatt

SEQ ID NO: 513411 - DNA, 75 bp, synthetic construct
  source 1..75: mol_type = other DNA
ccgctactggcaccttcgaactgacgatgggcgacagtaccatggatatcgatctggcggcagcggatcagaacg

SEQ ID NO: 513412 - DNA, 75 bp, synthetic construct
  source 1..75: mol_type = other DNA
ccagttcaacgacgcgatgaagagcgatcccgacggcctgacctctattttcgttggcgacaacagcatggtggc

SEQ ID NO: 513413 - DNA, 75 bp, synthetic construct
  source 1..75: mol_type = other DNA
ccagttcagcgacgaaatggcgaaaaatcctgacggtctgacctctattttcgttggcgacaacagcatggtggc

SEQ ID NO: 513414 - DNA, 75 bp, synthetic construct
  source 1..75: mol_type = other DNA
gatctcaccacctttaacattagcgaagattccagcgccaccgaagacaaagtgcagacctttgtcgatgcctat

SEQ ID NO: 513415 - DNA, 75 bp, synthetic construct
  source 1..75: mol_type = other DNA
caccaccacgattatgctcacctccgatagcaccggggcgcagagcgcgttttcggtgagcgtaacggggcatga

SEQ ID NO: 513416 - DNA, 75 bp, synthetic construct
  source 1..75: mol_type = other DNA
ataacgctaactacgaccgttatctcgaggagtacaccaatacgttggttgaggtgtacaccatgaaagccagta

SEQ ID NO: 513417 - DNA, 75 bp, synthetic construct
  source 1..75: mol_type = other DNA
ttcagtatgggcgacgacgccttttccgccaccggcacttttgaactgacgatgggcgacagcaccatggatatc

SEQ ID NO: 513418 - DNA, 75 bp, synthetic construct
  source 1..75: mol_type = other DNA
cgccagcaacgatagcaccagcgcgcccgttgccacggatgtttcctccgctcaggacgcgattattcatctcgg

SEQ ID NO: 513419 - DNA, 75 bp, synthetic construct
  source 1..75: mol_type = other DNA
gcagcggcctggactcgctcagctcggcgttaagcgatttccagagcgccgttgacgcgctgaacagcgataccg

SEQ ID NO: 513420 - DNA, 75 bp, synthetic construct
  source 1..75: mol_type = other DNA
gcgacggttttatcgacgccagtgaactggtgaatgcgattaacgactccgatgacaatccgggcgtgtcggctg

SEQ ID NO: 513421 - DNA, 75 bp, synthetic construct
  source 1..75: mol_type = other DNA
tacacggactccagcaacggcatcatcaccctgcgccagcagaacattgacgatcagatgagcaaaattcaggac

SEQ ID NO: 513422 - DNA, 75 bp, synthetic construct
  source 1..75: mol_type = other DNA
acggccacttacagattgactccgaccagttcaacgacgaaatggcgaaaaatcctgacggtctgacctctattt

SEQ ID NO: 513423 - DNA, 75 bp, synthetic construct
  source 1..75: mol_type = other DNA
tgatttttggtgacaatagctgggaaagtgatgacggtgactatatggctgcattttcagttgatattctctcgc

SEQ ID NO: 513424 - DNA, 75 bp, synthetic construct
  source 1..75: mol_type = other DNA
agcaaacagccttgtatggttatgggattatgccaaccgctcacaggcattattccgcgaactgtatccggcgct

SEQ ID NO: 513425 - DNA, 75 bp, synthetic construct
  source 1..75: mol_type = other DNA
agtaagcgactatcaggcaagttgcgagcaacgctatccaaagcttagcgatatggctaattgccttgatgccag

SEQ ID NO: 513426 - DNA, 75 bp, synthetic construct
  source 1..75: mol_type = other DNA
gaacaacgctatccaaagcttagcgatatggctaattgccttgatgccagcgtgaagaacgactcacgcatggca

SEQ ID NO: 513427 - DNA, 75 bp, synthetic construct
  source 1..75: mol_type = other DNA
tggtctttacccggttctttcctggttgacctggccgatgtctgtgggtaaatggacgcttgaagggatcgaaac

SEQ ID NO: 513428 - DNA, 75 bp, synthetic construct
  source 1..75: mol_type = other DNA
aatggcggtgaactcaaaccacaagaaaacccgaatgcgcaagcgattcaggatgatttaaaagatatcgattct

SEQ ID NO: 513429 - DNA, 75 bp, synthetic construct
  source 1..75: mol_type = other DNA
ggattgggcttcacagtttacgaaaatgaagcagcggtttaaaacctccattgtgaaaatcacaatgcagcttcc

SEQ ID NO: 513430 - DNA, 75 bp, synthetic construct
  source 1..75: mol_type = other DNA
aaagaaaagatgaaggcgttgctcttgctgtgcaactttcccgatatctcggattgagaacagaagaaaccgtgc

SEQ ID NO: 513431 - DNA, 75 bp, synthetic construct
  source 1..75: mol_type = other DNA
atgaaactctcaacctgctgtgccgcgcttctgctcgccctcgccctcgcctcacccgcggtactcgccgcgccg

SEQ ID NO: 513432 - DNA, 75 bp, synthetic construct
  source 1..75: mol_type = other DNA
actgattgaaaaaagtgaattaaaatccgcactaaaccattatatcaacgtattacggcgtaatggcggattgac

SEQ ID NO: 513433 - DNA, 75 bp, synthetic construct
  source 1..75: mol_type = other DNA
cgcttctgctggctggatgcgcaaaagtaagtgactaccaagcaagttgcgaacaacgctatcaaaagcttagcg

SEQ ID NO: 513434 - DNA, 75 bp, synthetic construct
  source 1..75: mol_type = other DNA
aggctgaatggagtttacaggatttgcttttttataatgtctggccatgcagtaaaaccggacaggttttattat

SEQ ID NO: 513435 - DNA, 75 bp, synthetic construct
  source 1..75: mol_type = other DNA
aggtgtcaataacttcgcgcgtctggccgacgaaatggcaggcattattcaacgcgatgagtgccgtctgggaat

SEQ ID NO: 513436 - DNA, 75 bp, synthetic construct
  source 1..75: mol_type = other DNA
ggtctgctgcgtcagtcgtccgatccttatattatggtgcgtgaagcgtacttccagcgtcatgatttcatcgct

SEQ ID NO: 513437 - DNA, 75 bp, synthetic construct
  source 1..75: mol_type = other DNA
tcgacgccgatgaagaacaaattaaagctgccgctgaggttggcgcaccgtttatcgagatccacaccggttgtt

SEQ ID NO: 513438 - DNA, 75 bp, synthetic construct
  source 1..75: mol_type = other DNA
ttgagacgaagccacatttttgctgcctggtaccggaaaagcgtcaggaagtaacaaccgaaggcggcctggacg

SEQ ID NO: 513439 - DNA, 75 bp, synthetic construct
  source 1..75: mol_type = other DNA
ttttaatcaatcacacactagatgttgatattaatgagccagacggaccaacgaatcgttccgcatggatgagac

SEQ ID NO: 513440 - DNA, 75 bp, synthetic construct
  source 1..75: mol_type = other DNA
ctctatacccgcaccaccagcggtaatgtttctgcccactctcaaccaacccatgatagtggccctgccgaaccg

SEQ ID NO: 513441 - DNA, 75 bp, synthetic construct
  source 1..75: mol_type = other DNA
attctctacacccgcaccaccagcggtaatgtttctgcccacacccagccaacccatgataatgagcctgctgaa

SEQ ID NO: 513442 - DNA, 75 bp, synthetic construct
  source 1..75: mol_type = other DNA
cctggtaccagaaaagcgtcaggaagtaacaaccgaaggcggcctggacgttgcagggcagcgtgacaaaatgcg

SEQ ID NO: 513443 - DNA, 75 bp, synthetic construct
  source 1..75: mol_type = other DNA
aagctactctgccttcctttgaagaagttaaatggatggctgttcagcatcaaccctgagaaagttcgtgctgac

SEQ ID NO: 513444 - DNA, 75 bp, synthetic construct
  source 1..75: mol_type = other DNA
accgccatggctgcaggagttgcatatgttgcgatgaagccaatcgttgaaaacctcggaatgagctggggtact

SEQ ID NO: 513445 - DNA, 75 bp, synthetic construct
  source 1..75: mol_type = other DNA
ttgatattaatgagccagacggaccaacgaatctttccgcatgggtaaggcttaagaacaaagaattacctcctt

SEQ ID NO: 513446 - DNA, 75 bp, synthetic construct
  source 1..75: mol_type = other DNA
tattccggaagatgctacgactacggtcatgagttttcgtatgttatcggaatggcgagagacgttttaatcaac

SEQ ID NO: 513447 - DNA, 75 bp, synthetic construct
  source 1..75: mol_type = other DNA
atgaatagtatagcaattttagaagcagtgaacacctcttacgtgcctttcaatggtcagcagattatcaccgcc

SEQ ID NO: 513448 - DNA, 75 bp, synthetic construct
  source 1..75: mol_type = other DNA
atgaatagtatagcaattttagaagcagtaaacacctcttacgtacctttcaatggtcagcagattatcaccgcc

SEQ ID NO: 513449 - DNA, 75 bp, synthetic construct
  source 1..75: mol_type = other DNA
aaacgctgggggctgataaaaatggtaatcctgcgtggattgatatcccgccactctccgctgaacaacagatta

SEQ ID NO: 513450 - DNA, 75 bp, synthetic construct
  source 1..75: mol_type = other DNA
agatgctgcgtacttacaatattgcttggtggggcaataactactatgacgttaacgagctgggccacatcagcg

SEQ ID NO: 513451 - DNA, 75 bp, synthetic construct
  source 1..75: mol_type = other DNA
atcaaagttaaccagcatcgccgcgtgattgagtcgctgattcactctggcgaaccgctggggctggaagccggg

SEQ ID NO: 513452 - DNA, 75 bp, synthetic construct
  source 1..75: mol_type = other DNA
ctggtggggcaataactactacgacgtgaatgagctgggccacatcagtgtctgcccggacccggacgtcccgga

SEQ ID NO: 513453 - DNA, 75 bp, synthetic construct
  source 1..75: mol_type = other DNA
tgaaactgtcgaaggaaaaatgcgaccaggttaacgccatcgaacgtgataaggcgctggcatgggtggaacgta

SEQ ID NO: 513454 - DNA, 75 bp, synthetic construct
  source 1..75: mol_type = other DNA
tacggcctgtcggctgccgttctggcactgattgccgtcggtgcgcccgcgcctgatattctcgaccagtttctg

SEQ ID NO: 513455 - DNA, 75 bp, synthetic construct
  source 1..75: mol_type = other DNA
gcgaatattcgcgatatcgcgacaggcgttcgtgaatccgcgcgtttctatgttgagctgcacaagctgggcgtc

SEQ ID NO: 513456 - DNA, 75 bp, synthetic construct
  source 1..75: mol_type = other DNA
atctgccgtggtgccacccgggtggatggtaagcctgtcgtccccggcatgaagttgtcgaaggaaaaatgcgac

SEQ ID NO: 513457 - DNA, 75 bp, synthetic construct
  source 1..75: mol_type = other DNA
gctggataccgatcagttcgaagaaatcggtactctggcgaagtgttcaccgccgatccgcgatctggaaaacca

SEQ ID NO: 513458 - DNA, 75 bp, synthetic construct
  source 1..75: mol_type = other DNA
atcttacgtggtgatgtgatttacgacatcgaacagggcttccctgttgcgccgaaaggtcaatttatccttaaa

SEQ ID NO: 513459 - DNA, 75 bp, synthetic construct
  source 1..75: mol_type = other DNA
aagccggacgtctcgacagcctgcaactgctgcacttccatctcggttcgcagatggcgaatattcgcgatatcg

SEQ ID NO: 513460 - DNA, 75 bp, synthetic construct
  source 1..75: mol_type = other DNA
atgctgagctgcaacaacagttcctggaagagttcgaggcaggtttgtacggttatacctatcttgaagatgaat

SEQ ID NO: 513461 - DNA, 75 bp, synthetic construct
  source 1..75: mol_type = other DNA
gatactcttccggcacctttagcctgcaagaacgtgcatgggcggaacagctctatctgagcatgtgccatgaag

SEQ ID NO: 513462 - DNA, 75 bp, synthetic construct
  source 1..75: mol_type = other DNA
atgcggatgcggaaatcggcggctggttgcaggagcggttgcagttaattcacgcctccagcctgacggcgctga

SEQ ID NO: 513463 - DNA, 75 bp, synthetic construct
  source 1..75: mol_type = other DNA
tggagggtgtgagacataatccttacaaagacatagttggtgtatggactgtatgttacgggcatacaggaaaag

SEQ ID NO: 513464 - DNA, 75 bp, synthetic construct
  source 1..75: mol_type = other DNA
tgggtgctggtaatttcagaacatcgacgcttcttcgcaaaataaaccagggcgatatcaaaggtgtcaacgacg

SEQ ID NO: 513465 - DNA, 75 bp, synthetic construct
  source 1..75: mol_type = other DNA
cggaatcgctcaaataactgttacgggcaggtatcgcggcgtgaccaggagagcgcgctggcgtgctggggaatc

SEQ ID NO: 513466 - DNA, 75 bp, synthetic construct
  source 1..75: mol_type = other DNA
tgattgatactcgaaaactttatagtcaaagctgggatgcaggtcttcgctacgctggtgaaacactgcaatctc

SEQ ID NO: 513467 - DNA, 75 bp, synthetic construct
  source 1..75: mol_type = other DNA
aaccacagtcagacagagacggttttttaagtaaaacattctatggcaaacttgaacataacttatctgatacgt

SEQ ID NO: 513468 - DNA, 75 bp, synthetic construct
  source 1..75: mol_type = other DNA
tacgctggtgaaacactgcaatctcaacttgtttccagttatagccatagtaaagattacaactacgatccacat

SEQ ID NO: 513469 - DNA, 75 bp, synthetic construct
  source 1..75: mol_type = other DNA
ttgtcggcggggcaatggcgcaccgacgcaaattcggcggtggtcgcggtgaggcggtagcaaaagcggtgggca

SEQ ID NO: 513470 - DNA, 75 bp, synthetic construct
  source 1..75: mol_type = other DNA
aaagcgcccggactacgcgccgccgctggcgaatgtcgccacgccaaacgcggtagtgaccaaagggcatcgctt

SEQ ID NO: 513471 - DNA, 75 bp, synthetic construct
  source 1..75: mol_type = other DNA
gcgtaatccagtcgttgccgcgctgctcgacgacggcctggcgcgtggttatgcggatgcggaaatcggcggctg

SEQ ID NO: 513472 - DNA, 75 bp, synthetic construct
  source 1..75: mol_type = other DNA
tgtcggctgccgttctggcgctgattgccgcaggtgcttctgcgcctgaaatcctcgaccagtttctggatgaga

SEQ ID NO: 513473 - DNA, 75 bp, synthetic construct
  source 1..75: mol_type = other DNA
gaggcggtggcgaaagcggtgggcattaaaggcgattatttgccggatgtcgtcgatgctaccgcagggctgggg

SEQ ID NO: 513474 - DNA, 75 bp, synthetic construct
  source 1..75: mol_type = other DNA
caggcgccggagacggcgccttatctgttctggcggctcgctgggggctggagcacgatgaagacaacctgatgg

SEQ ID NO: 513475 - DNA, 75 bp, synthetic construct
  source 1..75: mol_type = other DNA
agccacgcaagcaccttaaaatcaccatcatacactaaatcagtaagttggcagcattacccaaaagaagttatg

SEQ ID NO: 513476 - DNA, 75 bp, synthetic construct
  source 1..75: mol_type = other DNA
atctgtcgtggtgccacaatggtggatggtaagcccgtcataccgggaatgaagctgtcgaaggaagaatgcgac

SEQ ID NO: 513477 - DNA, 75 bp, synthetic construct
  source 1..75: mol_type = other DNA
gacaaattaacccgtacatcaaagtcgatattgtcaacgccaagattattggccgtttttcgccatttttaatgt

SEQ ID NO: 513478 - DNA, 75 bp, synthetic construct
  source 1..75: mol_type = other DNA
actggcccaagtggtaacgatggtctggaaggtgtcagctacataccatataaagatattgttggtgtatggact

SEQ ID NO: 513479 - DNA, 75 bp, synthetic construct
  source 1..75: mol_type = other DNA
ggcgatatcaaaggcgcatgtgatcagctacggcgctggacatacgctggcggtaagcaatggaaagggctgatg

SEQ ID NO: 513480 - DNA, 75 bp, synthetic construct
  source 1..75: mol_type = other DNA
cgtattcgttcaaacaactgttacggtcagatatcccgtcgtgaccaggagagcgcgctggcgtgctggggaatc

SEQ ID NO: 513481 - DNA, 75 bp, synthetic construct
  source 1..75: mol_type = other DNA
tggacatacgctggcggtaagcaatggaaagggctgatgactcgccgcgagattgagcgtgaagtctgtttgtgg

SEQ ID NO: 513482 - DNA, 75 bp, synthetic construct
  source 1..75: mol_type = other DNA
aaccagggtgattcgaaaggcgcatgcgaacaactgcggcgctggatctatgctggtgacaaacagtggaagggt

SEQ ID NO: 513483 - DNA, 75 bp, synthetic construct
  source 1..75: mol_type = other DNA
actggttatgattcttcactggaaggccattctagattgcctgatatcaaatcagttattgcgattgctgagatt

SEQ ID NO: 513484 - DNA, 75 bp, synthetic construct
  source 1..75: mol_type = other DNA
tatcggctgtcgttctggcgctgattgccgcaggggcttctgcgcctgaaatcctcgaccagtttctggatgaaa

SEQ ID NO: 513485 - DNA, 75 bp, synthetic construct
  source 1..75: mol_type = other DNA
caaagacatagttggtgtatggactgtatgtcacgggcatacaggaaaagacatcattcccggtaaaacgtatac

SEQ ID NO: 513486 - DNA, 75 bp, synthetic construct
  source 1..75: mol_type = other DNA
cgccaagggcaaacagtggaaaggactggtaactcgccgcgagattgagcgcgaagtttgtctctggagtcaaaa

SEQ ID NO: 513487 - DNA, 75 bp, synthetic construct
  source 1..75: mol_type = other DNA
gtgaccagttgcgccgctggacctacgccaagggcaaacagtggaaaggactggtaactcgccgcgagattgagc

SEQ ID NO: 513488 - DNA, 75 bp, synthetic construct
  source 1..75: mol_type = other DNA
gtatgtcacggacacaccggaaaagacatcatgcctggtaaaacgtataccgaagcagaatgcaaagctctcctg

SEQ ID NO: 513489 - DNA, 75 bp, synthetic construct
  source 1..75: mol_type = other DNA
gtccctataacattggccccggtaagtgtttcccgtcgacgttttataagcggctgaatgcaggtgatcgtaaag

SEQ ID NO: 513490 - DNA, 75 bp, synthetic construct
  source 1..75: mol_type = other DNA
gaaactgacgaaggaaaaatgtgctcaggttaatgccattgaacgcgataaggcgctggcatgggtggagcgcaa

SEQ ID NO: 513491 - DNA, 75 bp, synthetic construct
  source 1..75: mol_type = other DNA
gatatatgacggcggtaaagactgccggaaccgctcaaataactgttacgggcaggtgtcgcggcgtgaccagga

SEQ ID NO: 513492 - DNA, 75 bp, synthetic construct
  source 1..75: mol_type = other DNA
atgaacgcaaaaatcagatacggcctgtcggctgccgttctggcgctgattgccgctggtgcgtctgcgcctgaa

SEQ ID NO: 513493 - DNA, 75 bp, synthetic construct
  source 1..75: mol_type = other DNA
attctcgaccagtttctggatgaaaaggaaggcaagcacaccacagcataccgtgatggtgcaggtatctggacc

SEQ ID NO: 513494 - DNA, 75 bp, synthetic construct
  source 1..75: mol_type = other DNA
gcgcatgcgaggcgattcgctggtggataaaggacggtggacgtgattgccgcattcgttcaaataattgttacg

SEQ ID NO: 513495 - DNA, 75 bp, synthetic construct
  source 1..75: mol_type = other DNA
cggggagctaccacggttgacggcaagccggtagttcagggtatgaagttgtcagctgagaaatgtgcccaggtg

SEQ ID NO: 513496 - DNA, 75 bp, synthetic construct
  source 1..75: mol_type = other DNA
accaaaggccagaagaatggctgctatggtcaggttgagagacgggaccaggaaagcgcgctggcgtgttggggg

SEQ ID NO: 513497 - DNA, 75 bp, synthetic construct
  source 1..75: mol_type = other DNA
gacgcttcttcgcaaaataaaccagggtgatatcaaaggcgcatgtgatcagctacggcgctggacatacgctgg

SEQ ID NO: 513498 - DNA, 75 bp, synthetic construct
  source 1..75: mol_type = other DNA
gaagttgtcgaaggaaaaatgcgaccgggttaacgccattgagcgtgataaggcgctggcatgggtggcgaaaaa

SEQ ID NO: 513499 - DNA, 75 bp, synthetic construct
  source 1..75: mol_type = other DNA
gaaaaatgcgaccgggttaatgccatcgaacgtgacaaggcgctggcatgggtggagaaaaacatcaaagtgccg

SEQ ID NO: 513500 - DNA, 75 bp, synthetic construct
  source 1..75: mol_type = other DNA
ggtaccactgaccgaaccgcagaaagcggggattgcctcattctgcccgtacaacattggtcctggtaaatgctt

SEQ ID NO: 513501 - DNA, 75 bp, synthetic construct
  source 1..75: mol_type = other DNA
tgaagaatataagcagaagaattcagagtttaaatttctaaaagtgagtttgtatggcgtcaactctattaagca

SEQ ID NO: 513502 - DNA, 75 bp, synthetic construct
  source 1..75: mol_type = other DNA
acacagcagcacaggaaggggccacccggggctattcgctggccaaatcagcggcgcagtcctggtctgactatg

SEQ ID NO: 513503 - DNA, 75 bp, synthetic construct
  source 1..75: mol_type = other DNA
ttttttatgcggatgccatcggtcatccggccaccacccttatcggcggcagtatcccggggtattcctgtgaca

SEQ ID NO: 513504 - DNA, 75 bp, synthetic construct
  source 1..75: mol_type = other DNA
cgtgtggatgcactggacggtatccaggtaccggaagtgaacgatcaggacggtaacggcaaggcggatgcagag

SEQ ID NO: 513505 - DNA, 75 bp, synthetic construct
  source 1..75: mol_type = other DNA
gaagcggcagtggcagcggccacggcggcagtggaagcagcggaagcagcggaccaggccgcgaaggacaagctg

SEQ ID NO: 513506 - DNA, 75 bp, synthetic construct
  source 1..75: mol_type = other DNA
tgttaattttctcgatagagtaccggggagggaaccttaactacgaggaattcgattcaatcagcaatgttaatt

SEQ ID NO: 513507 - DNA, 75 bp, synthetic construct
  source 1..75: mol_type = other DNA
gtcgtttctgggaacgggcctttccggtattgctgaaggtggcggtgcgaatgagcagaaacgcaccgagcggaa

SEQ ID NO: 513508 - DNA, 75 bp, synthetic construct
  source 1..75: mol_type = other DNA
tctatccgcgcagcggttttgtcaaccagcaggacggggataaagcggcggctgtggtggcgcagcgcgtggcag

SEQ ID NO: 513509 - DNA, 75 bp, synthetic construct
  source 1..75: mol_type = other DNA
agccggggcaatatgtggggcaatctctatccgcgcagcggttttgtcacccagcaggacggggataaagcggca

SEQ ID NO: 513510 - DNA, 75 bp, synthetic construct
  source 1..75: mol_type = other DNA
cagctggcgggtcagtggtatctgttactggctgtactgtacgccctttggctgtaaggtccggacgtccgtgaa

SEQ ID NO: 513511 - DNA, 75 bp, synthetic construct
  source 1..75: mol_type = other DNA
gctggtcagtcagactgccggaggggtggagaattctattacgaaaggcctggcggggttgagtgccggtggggg

SEQ ID NO: 513512 - DNA, 75 bp, synthetic construct
  source 1..75: mol_type = other DNA
cgggaaatcggcagtcaggccgcagcgaacatgtggggcaacgtctatccccgttcgggatttatcagccagacc

SEQ ID NO: 513513 - DNA, 75 bp, synthetic construct
  source 1..75: mol_type = other DNA
ggaagctcttccgaccaggtaccggcagtggatgaaaacggcaacggcaagccggatgcagaggaagcagcagag

SEQ ID NO: 513514 - DNA, 75 bp, synthetic construct
  source 1..75: mol_type = other DNA
ggtcgaagtggtggcgatggcggaagaagaaggcaactgtagattcaattggtcaacgcaacagttatgtgaaaa

SEQ ID NO: 513515 - DNA, 75 bp, synthetic construct
  source 1..75: mol_type = other DNA
ttgatatcatcagcgatatgccgacatatggatatcgtcgtatctgggccattcccagacggcaatcccgtaacg

SEQ ID NO: 513516 - DNA, 75 bp, synthetic construct
  source 1..75: mol_type = other DNA
atggatagcgcatgcgcccttgttaccttcggacaaggaagaacccaggtaaaccgtattctggacgtgtcgcgt

SEQ ID NO: 513517 - DNA, 75 bp, synthetic construct
  source 1..75: mol_type = other DNA
gggagataagctgaaaaatgctaagaagcagaaaatgattctggcaacgaaagataaaattggaatagatagttg

SEQ ID NO: 513518 - DNA, 75 bp, synthetic construct
  source 1..75: mol_type = other DNA
agggcagaagatagttgttacttgcgaaaagatgcagttattcgttcgtgccccgtcaggtagtaactgtacttt

SEQ ID NO: 513519 - DNA, 75 bp, synthetic construct
  source 1..75: mol_type = other DNA
ggtgattcgaaatctgaagatgtagttgtaaagcaggcaacacagaggatgaagaaagatacagagagttacgct

SEQ ID NO: 513520 - DNA, 75 bp, synthetic construct
  source 1..75: mol_type = other DNA
gctgcggtggacgcgctgccggatggtcaggagaagagcgagctgcagaaccgactggatgcggttgacggcatc

SEQ ID NO: 513521 - DNA, 75 bp, synthetic construct
  source 1..75: mol_type = other DNA
caggatctggttgcggcggcggaaggcaagcagacggaagcagaaaatgcgctgacggaagccaacaaagacggt

SEQ ID NO: 513522 - DNA, 75 bp, synthetic construct
  source 1..75: mol_type = other DNA
aaagttgacggtatcgatgtaccggcagtggatgaaaaacggcaacggcaagccggatgcagaggaagcagcaga

SEQ ID NO: 513523 - DNA, 75 bp, synthetic construct
  source 1..75: mol_type = other DNA
tttggctgcaggtggtggtggcggcagcaagcacagacatgaaaaccatgaggcagatacaacagcaccatcagc

SEQ ID NO: 513524 - DNA, 75 bp, synthetic construct
  source 1..75: mol_type = other DNA
atggactgttgcgatcgtgaagccatagactgggcgcaagcacgggagtttatggcaaggctacagtgcaggatg

SEQ ID NO: 513525 - DNA, 75 bp, synthetic construct
  source 1..75: mol_type = other DNA
cgaaaaactgcgtgttacgttcgtcatggactgttgcgatcgtgaagccatagactgggcgcaagcacgggagtt

SEQ ID NO: 513526 - DNA, 75 bp, synthetic construct
  source 1..75: mol_type = other DNA
atgacccgacaatcacatcgccggcgtctggcgggggcattgttactcggttgttcactggtgccggtggcggaa

SEQ ID NO: 513527 - DNA, 75 bp, synthetic construct
  source 1..75: mol_type = other DNA
atggggaccagctttattgccggaaatttatcggcgtttccaattgcggctcttatcaactaccccggaagtgcg

SEQ ID NO: 513528 - DNA, 75 bp, synthetic construct
  source 1..75: mol_type = other DNA
tatttcagtgacgctttgaaactggatgcccagcttgattactccattggtggtcaggatttgtcagaaatcttt

SEQ ID NO: 513529 - DNA, 75 bp, synthetic construct
  source 1..75: mol_type = other DNA
tactgccagtgccgaaagtgatgaacgactgggacgtactaatgcgctccatcaggcatatgatgaaaatggcgg

SEQ ID NO: 513530 - DNA, 75 bp, synthetic construct
  source 1..75: mol_type = other DNA
tgctggcattaacccgtgcctggacattggtgcggtttgttgaaagtggattactgcaactttccagctgcaact

SEQ ID NO: 513531 - DNA, 75 bp, synthetic construct
  source 1..75: mol_type = other DNA
aagcccgggatattcaactggcaatggagttgatcacccttggcgctcgtttgcagatgctggaaagtgaaacac

SEQ ID NO: 513532 - DNA, 75 bp, synthetic construct
  source 1..75: mol_type = other DNA
cacaggttaaacatgtcgttgtgattctgatttggctaaatgctttatttatgcctatttggtccgcctcatggg

SEQ ID NO: 513533 - DNA, 75 bp, synthetic construct
  source 1..75: mol_type = other DNA
agccacgggataatatgttctctgtaaatggtgcgggaagtccacaagaatacctggcaatgcagcaaaaacaat

SEQ ID NO: 513534 - DNA, 75 bp, synthetic construct
  source 1..75: mol_type = other DNA
gggaccgaggaggaccgggactggactatcaacacactgagtctgacgctcgctgaaaacggtttttcggttcgg

SEQ ID NO: 513535 - DNA, 75 bp, synthetic construct
  source 1..75: mol_type = other DNA
tacctatactagggggtttgatgctgttgcctatggcagtacagggatgcaaccacagtcagacagagacggttt

SEQ ID NO: 513536 - DNA, 75 bp, synthetic construct
  source 1..75: mol_type = other DNA
cctcggtcacaaacaacgtgtatcaggcgtttgtggatatgtcgaaccgtaatacagcaacgaccacgcgcttta

SEQ ID NO: 513537 - DNA, 75 bp, synthetic construct
  source 1..75: mol_type = other DNA
ttccacagaacgaaccgcaggtgatcccccaaccacacaacaacgcccccaacgtaaaccaaccacaaccggcac

SEQ ID NO: 513538 - DNA, 75 bp, synthetic construct
  source 1..75: mol_type = other DNA
aaccgttatcgggacactgttctactttggtctggtgacacaaaaaggaacaattcatatttacgataagagtcg

SEQ ID NO: 513539 - DNA, 75 bp, synthetic construct
  source 1..75: mol_type = other DNA
gagaaagcgtgtgctgcgctggcggcggagaatgcacttgctcgtaaagcagttcaggcattctgcgatgttgtt

SEQ ID NO: 513540 - DNA, 75 bp, synthetic construct
  source 1..75: mol_type = other DNA
gcgctccgggtttgtcagccagactgatgatgacaaagcgtctgcggtggtggcgcagcgtgtggcggacattat

SEQ ID NO: 513541 - DNA, 75 bp, synthetic construct
  source 1..75: mol_type = other DNA
cccctggacagagatggcttttgtcagtcagacggcggacgggctggaaaatgctgttactggtgctttgtcagg

SEQ ID NO: 513542 - DNA, 75 bp, synthetic construct
  source 1..75: mol_type = other DNA
gctactgataataacgaggcttttgcgctgtggcagccctacagctgctgcaagcgtatggggcagagattccag

SEQ ID NO: 513543 - DNA, 75 bp, synthetic construct
  source 1..75: mol_type = other DNA
tacaaacccggatgccagcgtgatgtactcttcgcttaacccgtcagcgaatccatttactggtctgtttgccgc

SEQ ID NO: 513544 - DNA, 75 bp, synthetic construct
  source 1..75: mol_type = other DNA
tctggtcagtcaggcatccggcggtgtggagaacaccatcagcagcgggattgtggggttatctgccggcggggg

SEQ ID NO: 513545 - DNA, 75 bp, synthetic construct
  source 1..75: mol_type = other DNA
gcgacgggtactggccaccgggagaagccacggaaaacaccggcactaagaaccataaatggcagcgtctggcac

SEQ ID NO: 513546 - DNA, 75 bp, synthetic construct
  source 1..75: mol_type = other DNA
ccgggctgagtgccggcgggggaaatccggcggatatgaaaatacaggggaagcgccgttcagcaattcgtttca

SEQ ID NO: 513547 - DNA, 75 bp, synthetic construct
  source 1..75: mol_type = other DNA
ccaggcagcggagaacggtaatgccgcctttgcactgtggcagccctacagttgctgcaaaaagcgcgggcagcg

SEQ ID NO: 513548 - DNA, 75 bp, synthetic construct
  source 1..75: mol_type = other DNA
ttatcaataagtctttgcgtgaagttttcgacgttacacgcatgattttgtcagcgaaagaagagttggctaatg

SEQ ID NO: 513549 - DNA, 75 bp, synthetic construct
  source 1..75: mol_type = other DNA
aacgcgcagcggtcagtcacatgtttatattccgctgactgccagctcacacgacggctactggcctccaaaccc

SEQ ID NO: 513550 - DNA, 75 bp, synthetic construct
  source 1..75: mol_type = other DNA
ccctttggctgctcggtgcgtacatcggtgaaggtacgccatttccgcccggacctggtagtctcagtctacagc

SEQ ID NO: 513551 - DNA, 75 bp, synthetic construct
  source 1..75: mol_type = other DNA
ccagcgcggcggcaccggactgtatcagctggcgtgtcagcgggatttgttactggctttactgcagcacgtttg

SEQ ID NO: 513552 - DNA, 75 bp, synthetic construct
  source 1..75: mol_type = other DNA
ggatcaaatcatggcgccatcgactacggctgcggcaacctctgtcgccacggatgacgttcatcctgaagtgac

SEQ ID NO: 513553 - DNA, 75 bp, synthetic construct
  source 1..75: mol_type = other DNA
ggctggtggcgttatcgcctgaaaggatcgaccttgttaggtcatgatcctgccgatccgctgaaacagcctgtg

SEQ ID NO: 513554 - DNA, 75 bp, synthetic construct
  source 1..75: mol_type = other DNA
ggctggtggcgctatcgtctgaaaggatcaactttgttaggtcacgatcctgccgatccgctgaaaaagcccgtt

SEQ ID NO: 513555 - DNA, 75 bp, synthetic construct
  source 1..75: mol_type = other DNA
tgttgccaaatgtggcgattagtcttgaccgtactgaaggtgccacgctggagttttacgaagctgaggcgaaaa

SEQ ID NO: 513556 - DNA, 75 bp, synthetic construct
  source 1..75: mol_type = other DNA
atgaataaaaaatatgaactggttgttaaggggataaataattaccgggataaggttactgttactgtgaagccg

SEQ ID NO: 513557 - DNA, 75 bp, synthetic construct
  source 1..75: mol_type = other DNA
gtgggatacgccgtggcagccgattcgtgaatcagccgcactgctgcgctactggcgtgcggacctggcccgcga

SEQ ID NO: 513558 - DNA, 75 bp, synthetic construct
  source 1..75: mol_type = other DNA
gcaactgggcgatttgatcaccttactgtatctcttcgccatcgcgcgtttcttctttgccatttccggtctgga

SEQ ID NO: 513559 - DNA, 75 bp, synthetic construct
  source 1..75: mol_type = other DNA
gtgctggcgctctgtgcctgcgcattcgccacctttatcgaaatgggcaaactgccgttcgacctggcggaagcc

SEQ ID NO: 513560 - DNA, 75 bp, synthetic construct
  source 1..75: mol_type = other DNA
ggtgggctgctgctggcgctggtgattgccatcgtcaaactggtggtcggcgtcctggttatcgcgctgttcgaa

SEQ ID NO: 513561 - DNA, 75 bp, synthetic construct
  source 1..75: mol_type = other DNA
tgccgatccgctgaaacaacccgttgaagcggaaaaaattaaagatttctatcagaaatggtacaccccggatgc

SEQ ID NO: 513562 - DNA, 75 bp, synthetic construct
  source 1..75: mol_type = other DNA
ggaagcagcacaggcacgttcattgtggcaacaggggatcgaccctaagcgtccaatgccgccggtgatcgtctc

SEQ ID NO: 513563 - DNA, 75 bp, synthetic construct
  source 1..75: mol_type = other DNA
tacagcgccggatacgcaaactatccgcgatctggtgctggcgccgatgatgcgcggtgacattaaccagtcatc

SEQ ID NO: 513564 - DNA, 75 bp, synthetic construct
  source 1..75: mol_type = other DNA
gggatatgagcgccggtcagcttaaacgcggcgactatcagttaattgtaaaatacggtgaatttcttaacgaac

SEQ ID NO: 513565 - DNA, 75 bp, synthetic construct
  source 1..75: mol_type = other DNA
ccgccaagcgacagagtgccaggtttgcgcgagattgtggctcaccccaattacataattttgtaccgggtgaca

SEQ ID NO: 513566 - DNA, 75 bp, synthetic construct
  source 1..75: mol_type = other DNA
atagatgcggcagagcgtttatggcagcgattaagaggttgcgtactgccgttatccgaacatccgtatttatac

SEQ ID NO: 513567 - DNA, 75 bp, synthetic construct
  source 1..75: mol_type = other DNA
aactagttatattgctcgtttcgacatagatgcggctgaacgcttatggcagcgattaaggggttgtgtgctgcc

SEQ ID NO: 513568 - DNA, 75 bp, synthetic construct
  source 1..75: mol_type = other DNA
ggtggtggggctgttgccatagcgtctgtgctcatcactggtccgagtggtgacgatggcctggaaggtgtcagc

SEQ ID NO: 513569 - DNA, 75 bp, synthetic construct
  source 1..75: mol_type = other DNA
tctattacaaaaatcgcgacaaaaaaccggtagtagcggttatctacacacacagtcatgtcgatcactacggtg

SEQ ID NO: 513570 - DNA, 75 bp, synthetic construct
  source 1..75: mol_type = other DNA
cggacaaaaagaaactattgacgggttgacctatgatttcttgatggcgccaggctctgaagcgccttctgaaat

SEQ ID NO: 513571 - DNA, 75 bp, synthetic construct
  source 1..75: mol_type = other DNA
agatgcccgagtcccgccggaactcaccgaagaggtgatgtgctatcagcaaagccagctcctctccacgccgca

SEQ ID NO: 513572 - DNA, 75 bp, synthetic construct
  source 1..75: mol_type = other DNA
atgcgcattttcgatcatatctggcgctttgataccgggatgcgtagccgcctgctcagacgctggcggcgataa

SEQ ID NO: 513573 - DNA, 75 bp, synthetic construct
  source 1..75: mol_type = other DNA
aagtgaaagagttgcagcgggtacatcagcatcgctttcatgccgtggcgatgtctgcacatggcaaacccggca

SEQ ID NO: 513574 - DNA, 75 bp, synthetic construct
  source 1..75: mol_type = other DNA
ctacataatcctatacagggtagctacttcaagcattgaaattgtaagcgtggtacatgctcgtcagcaatatcc

SEQ ID NO: 513575 - DNA, 75 bp, synthetic construct
  source 1..75: mol_type = other DNA
ggttatcccgacaggctactcgtttaaccttgatggaacatcgatatacctgacgatggcggcggtatttatcgc

SEQ ID NO: 513576 - DNA, 75 bp, synthetic construct
  source 1..75: mol_type = other DNA
gaaattggtgggtatccgtcactgttgttgccatatgtggcgattagtcttgaccgtactgaaggtgccacgctg

SEQ ID NO: 513577 - DNA, 75 bp, synthetic construct
  source 1..75: mol_type = other DNA
aacagcatggcccgtctgcgtcttgatattacaccacgcattacctgggccgggtttggctttgcatttttagcg

SEQ ID NO: 513578 - DNA, 75 bp, synthetic construct
  source 1..75: mol_type = other DNA
gttgataatgaagttataactgaaaatggtttcgatgagcaagataaacatatgtatattgaaactctcattaat

SEQ ID NO: 513579 - DNA, 75 bp, synthetic construct
  source 1..75: mol_type = other DNA
atattgagtttcatttcaatattacttctaattaaatcagttaaaatgcaattaactgcgaatgaatgtttaatt

SEQ ID NO: 513580 - DNA, 75 bp, synthetic construct
  source 1..75: mol_type = other DNA
ccggatgaagagtatgtttgtggggcagatactgccgaagggctggagcacggagaccgctcatcgctggatatc

SEQ ID NO: 513581 - DNA, 75 bp, synthetic construct
  source 1..75: mol_type = other DNA
ctataacgcattcgtttcgctggagaaagtggaaggcggcagcggtgaatcattcctgaaaaacgcagcacgtca

SEQ ID NO: 513582 - DNA, 75 bp, synthetic construct
  source 1..75: mol_type = other DNA
ctgccgacgtggtgggaatacaaggaacgcattaacagtaagaccatagcaagaagaatccatcctgatcgcata

SEQ ID NO: 513583 - DNA, 75 bp, synthetic construct
  source 1..75: mol_type = other DNA
gcagtgatgctgcggtggctgatttcagccttttaccggaagagaacgggataccggagcgaacggacgaagaac

SEQ ID NO: 513584 - DNA, 75 bp, synthetic construct
  source 1..75: mol_type = other DNA
aaaactaaaatcgaagtacaactaagaacagaactccaacatgcttgggcaacaagtctggagataatagataca

SEQ ID NO: 513585 - DNA, 75 bp, synthetic construct
  source 1..75: mol_type = other DNA
tccggatcatacaacactgggaatggttatttcgcaacttatataatcgccaccggtgatgccgtattgctagaa

SEQ ID NO: 513586 - DNA, 75 bp, synthetic construct
  source 1..75: mol_type = other DNA
cgaaagagctgcgaaccggtacacttaatgccgtctctgatgagtgcattatttttgatgaatccactgctgaag

SEQ ID NO: 513587 - DNA, 75 bp, synthetic construct
  source 1..75: mol_type = other DNA
gggcagactggcggcggatgctgtcggagatgtcggccacggagctgggtgagtggggcgattatttccggatgc

SEQ ID NO: 513588 - DNA, 75 bp, synthetic construct
  source 1..75: mol_type = other DNA
aggatgccaccagtatcagcggtaaattacgcatcgacatcccgccaggaatcgcgaaaagcctgttactgccgc

SEQ ID NO: 513589 - DNA, 75 bp, synthetic construct
  source 1..75: mol_type = other DNA
aaacccggataaagaaaactatggcctgccgacatggtgggaatacaaggagcgcatcaacagtaagactatagc

SEQ ID NO: 513590 - DNA, 75 bp, synthetic construct
  source 1..75: mol_type = other DNA
gtttacggtgactgtgcgatcaacccggatccgaccgcagaacagctggcagaaatcgcgattcagtccgctgat

SEQ ID NO: 513591 - DNA, 75 bp, synthetic construct
  source 1..75: mol_type = other DNA
caccggtacttctggtgcaggtagcgacgtagaaaaagttcgcgaagcaactcgtctggcgcaggaaaaacgtcc

SEQ ID NO: 513592 - DNA, 75 bp, synthetic construct
  source 1..75: mol_type = other DNA
ccacaaacacttacatcgcagaaatgctgtgcggaaatctgcatccatttccacttgctgtgtggcatgacttct

SEQ ID NO: 513593 - DNA, 75 bp, synthetic construct
  source 1..75: mol_type = other DNA
tcgtcttcgttatgtctcagggcactgatactccggaacagttgaaagagcgtatcgaactgactcgcaacagct

SEQ ID NO: 513594 - DNA, 75 bp, synthetic construct
  source 1..75: mol_type = other DNA
tgaaccgctgaaaatgagttacgttgaaggtctgctttccagcaataaaaaagatgtgctgatggaagagatcgt

SEQ ID NO: 513595 - DNA, 75 bp, synthetic construct
  source 1..75: mol_type = other DNA
agaaatcgcaattcagtccgcagattccgccgctgctttcggtatcgaaccgcgcgtagcaatgctttcctactc

SEQ ID NO: 513596 - DNA, 75 bp, synthetic construct
  source 1..75: mol_type = other DNA
acgcgaaaaattcaatgaagcggcagaggatataaataaaggtaatgatgtgatgatggcattacagggggctac

SEQ ID NO: 513597 - DNA, 75 bp, synthetic construct
  source 1..75: mol_type = other DNA
gggccaacgcaggaagtagaactggacgacgaggaaaacgacaatgaaggtgaagaaaataatcaggcgaatacc

SEQ ID NO: 513598 - DNA, 75 bp, synthetic construct
  source 1..75: mol_type = other DNA
atatcagtgctatgggatgaccttaacgctatgaccaaagccgaactactggaagcggcacacaagatggcgcaa

SEQ ID NO: 513599 - DNA, 75 bp, synthetic construct
  source 1..75: mol_type = other DNA
ttaaaatctgcgcgggcggtatggctggaacaacagtagcagcattgggctttgccccaaagcaagcactggctc

SEQ ID NO: 513600 - DNA, 75 bp, synthetic construct
  source 1..75: mol_type = other DNA
ttaaccctgaacttctacgacgagcacaacctgaaaagatattgtgccggttggccagcacttaccgaagtatgg

SEQ ID NO: 513601 - DNA, 75 bp, synthetic construct
  source 1..75: mol_type = other DNA
cgtttatgacgcgaaaggctccatgaatgcacaggaaggctgctttgatgatcagctcatgagctacatgattgc

SEQ ID NO: 513602 - DNA, 75 bp, synthetic construct
  source 1..75: mol_type = other DNA
ccgcgatggttccggcaactggaccatctgtcggggggccacgatggtggatggaaaacccgtttttcccggtat

SEQ ID NO: 513603 - DNA, 75 bp, synthetic construct
  source 1..75: mol_type = other DNA
gcagagactgccgtatccgttcaaataattgctacggtcaggtctcacggcgtgaccaggagagcgcgctggcgt

SEQ ID NO: 513604 - DNA, 75 bp, synthetic construct
  source 1..75: mol_type = other DNA
gcagagactgccgtatccgctcaaataattgctacggtcaggtatcccggcgagatcaggaaagtgcgctggcgt

SEQ ID NO: 513605 - DNA, 75 bp, synthetic construct
  source 1..75: mol_type = other DNA
tctggcatatgcatttctggagcagaataccccgcgtaaggcactgaacgccgctcttaaaggactggcggcagg

SEQ ID NO: 513606 - DNA, 75 bp, synthetic construct
  source 1..75: mol_type = other DNA
caaagatattgttggtgtatggactgtatgttacggacacaccggaaaagacatcatgctaggtaaaacgtatac

SEQ ID NO: 513607 - DNA, 75 bp, synthetic construct
  source 1..75: mol_type = other DNA
atgactttattgatgtacacgctcacttggcatacgtatttctggagcagaatgccccgcgtaaggcgctgaatg

SEQ ID NO: 513608 - DNA, 75 bp, synthetic construct
  source 1..75: mol_type = other DNA
attcgctggtggattaaggatggcggacgcgattgccgcattcgttcaaataactgttacggtcaggttattcgt

SEQ ID NO: 513609 - DNA, 75 bp, synthetic construct
  source 1..75: mol_type = other DNA
cgactcagaatggtgtgcaggttgatgacgatggcaaagtttacgccacctacagcaacggcgagcgcatgttgc

SEQ ID NO: 513610 - DNA, 75 bp, synthetic construct
  source 1..75: mol_type = other DNA
actttgcaaaccggtacggtcaccgatatccagatcaaaaccggcaatatcccggcgcaggccagcagcagcctg

SEQ ID NO: 513611 - DNA, 75 bp, synthetic construct
  source 1..75: mol_type = other DNA
tggcatgggcgatttacgacggcgtagtacccaacccaacaattactgtcgtcaaagaagggctcggtgtattcc

SEQ ID NO: 513612 - DNA, 75 bp, synthetic construct
  source 1..75: mol_type = other DNA
gggtgttgatgcgctcactcatgctattgaggggtatattacccgtggcgcgtgggcgctaaccgatgcactgca

SEQ ID NO: 513613 - DNA, 75 bp, synthetic construct
  source 1..75: mol_type = other DNA
cgcatacgttcaaataactgctatggacaggttattcgtcgtgaccaggaaagcgcgttagcctgttgggggata

SEQ ID NO: 513614 - DNA, 75 bp, synthetic construct
  source 1..75: mol_type = other DNA
atgaacaacagattacgttttgaagtgaacgataaccaagggcgtttcgtatttccggatacctggtttggccca

SEQ ID NO: 513615 - DNA, 75 bp, synthetic construct
  source 1..75: mol_type = other DNA
atagcgtaatagcggcgataagtggcggggctattgctatagcatctgtgttaatcactggaccaagtggtaacg

SEQ ID NO: 513616 - DNA, 75 bp, synthetic construct
  source 1..75: mol_type = other DNA
atgcgaccgggttaacgctatcgaacgggataaggcgctggcatgggtggagcgtaatataaaagttccactgac

SEQ ID NO: 513617 - DNA, 75 bp, synthetic construct
  source 1..75: mol_type = other DNA
aatttccgcagaggaagtagaacagttgattaaactcattgcaaaacttgagcataatatcactgagttacaggc

SEQ ID NO: 513618 - DNA, 75 bp, synthetic construct
  source 1..75: mol_type = other DNA
ggcagagactgccgtatccgctcaaataattgctacggtcaggtatcccggcgagaccaggaaagtgcactggcg

SEQ ID NO: 513619 - DNA, 75 bp, synthetic construct
  source 1..75: mol_type = other DNA
cggctgaatgctggtgatcgaaaaggcgcctgcgaggcgattcgctggtggattaaggatggtggcagagactgc

SEQ ID NO: 513620 - DNA, 75 bp, synthetic construct
  source 1..75: mol_type = other DNA
atgctcggtaaaacgtataccaaagcagaatgcaaagcactcctgaataaagaccttgccactgtcgccagacaa

SEQ ID NO: 513621 - DNA, 75 bp, synthetic construct
  source 1..75: mol_type = other DNA
cgctaactttattgaaaagaacgagcagggcgtaacggtaaaccgttggctttctaccggtatgctgtgtgcttc

SEQ ID NO: 513622 - DNA, 75 bp, synthetic construct
  source 1..75: mol_type = other DNA
ttaaaatctgcgcgggcggtatggctggaacaacagtagcggcattgggctttgccccgaagcaagcactggctc

SEQ ID NO: 513623 - DNA, 75 bp, synthetic construct
  source 1..75: mol_type = other DNA
tgctgcacatgaatatatagcatcagtattcttaacatcagaagatagagtgttaatattgtccccgacatatga

SEQ ID NO: 513624 - DNA, 75 bp, synthetic construct
  source 1..75: mol_type = other DNA
gacggaaaaggcggagccgctgattagcgaaatggaagctgtgattaacaaaacccgggcggaaattttgcatgg

SEQ ID NO: 513625 - DNA, 75 bp, synthetic construct
  source 1..75: mol_type = other DNA
tttctaccggtatgctgtgtgcctccggtgccagcaacgaaaccgggatgctgacacagaaatttgcccgctccc

SEQ ID NO: 513626 - DNA, 75 bp, synthetic construct
  source 1..75: mol_type = other DNA
cagggcgtaacggtaaaccgttggctttctaccggtatgctgtgtgcttccggtgccagcaacgaaaccgggatg

SEQ ID NO: 513627 - DNA, 75 bp, synthetic construct
  source 1..75: mol_type = other DNA
cgaacactcggtatgccagtatttcaccaaaaccagcgacaacacctgggaagtgcagtacaccttcgacggtca

SEQ ID NO: 513628 - DNA, 75 bp, synthetic construct
  source 1..75: mol_type = other DNA
ccaatgcattgcttaatcggctggagaaaaagcttattgctcgcggctgtccgaaaattcagatcaatgtaccgg

SEQ ID NO: 513629 - DNA, 75 bp, synthetic construct
  source 1..75: mol_type = other DNA
ctgatttcgaagaggtgatcaccctttgggaacgttgcgatttgttgcgtccgtggaacgatcctgagatggaca

SEQ ID NO: 513630 - DNA, 75 bp, synthetic construct
  source 1..75: mol_type = other DNA
gtatgaacgactggggtatgaacacgccgatgtgctgagtctgggtaagcgtttgattgaagatgaagagtactg

SEQ ID NO: 513631 - DNA, 75 bp, synthetic construct
  source 1..75: mol_type = other DNA
tactgcaggcgcatctgcgcctgacattctcgaccagtttctggatgaaaaagaaggtaaccacaccacagcata

SEQ ID NO: 513632 - DNA, 75 bp, synthetic construct
  source 1..75: mol_type = other DNA
ttgatgcatacgacacagatgaaatcagcgaaacaagttatatcaacaaactcagacgccttgcccgacaggagc

SEQ ID NO: 513633 - DNA, 75 bp, synthetic construct
  source 1..75: mol_type = other DNA
tctggcatatgcatttctggagcagaatgccccgcgtaaggcactgaacgccactcttaaaggactggcggcagg

SEQ ID NO: 513634 - DNA, 75 bp, synthetic construct
  source 1..75: mol_type = other DNA
aagcctctgacgccgatgcgactatcaccctctcccgcgatgtcctgaataaaatcatcctgaaggaagagacat

SEQ ID NO: 513635 - DNA, 75 bp, synthetic construct
  source 1..75: mol_type = other DNA
ccgaaaaccggccttatttgcgcgcgctttatgcagcaattctcgcagatgtgcacttacagcgtcatcaggatg

SEQ ID NO: 513636 - DNA, 75 bp, synthetic construct
  source 1..75: mol_type = other DNA
cgctgactaacctggtcggtaacggcgtagcgaccattgtcgttgctaagtgggtgaaagaactggaccacaaaa

SEQ ID NO: 513637 - DNA, 75 bp, synthetic construct
  source 1..75: mol_type = other DNA
ctggaagatctgctggagggcaagccggttgtcattattgaagatggcgaactggcctggtcgaaactcaataac

SEQ ID NO: 513638 - DNA, 75 bp, synthetic construct
  source 1..75: mol_type = other DNA
ttttgttcctcaaaatgaccggaagacgcggtgtgcggcagatgtcgctgtttgaagtgttaatcattctcacgc

SEQ ID NO: 513639 - DNA, 75 bp, synthetic construct
  source 1..75: mol_type = other DNA
ttcctctcatcgcagcagaagcgcccaaagaggcctccgctgccacccaacaagcgaataacgcactttatagtc

SEQ ID NO: 513640 - DNA, 75 bp, synthetic construct
  source 1..75: mol_type = other DNA
ggcatacaatcctgaagacaatcagggagcacgctggctactgggaccggaactgttacgtactggcgaccatga

SEQ ID NO: 513641 - DNA, 75 bp, synthetic construct
  source 1..75: mol_type = other DNA
gcactggcgcaggcggcgcttgatgacgtttgtaccggtggcaacccgcgcgaagcaacgcttgaggatattgta

SEQ ID NO: 513642 - DNA, 75 bp, synthetic construct
  source 1..75: mol_type = other DNA
aagcgctggcatgggtggagaaaaacatcagagtgccactgaccgaaccccagaaagcggggatcgcgtcattct

SEQ ID NO: 513643 - DNA, 75 bp, synthetic construct
  source 1..75: mol_type = other DNA
agagactgccgtatccgctcaaacaactgttacggccagatatcccgtcgtgaccaggagagcgcgctggcgtgc

SEQ ID NO: 513644 - DNA, 75 bp, synthetic construct
  source 1..75: mol_type = other DNA
atggtaaacctgtcgttccgggcatgaagttgtcgaaggaaaaatgcgaccgggttaacgccattgagcgtgata

SEQ ID NO: 513645 - DNA, 75 bp, synthetic construct
  source 1..75: mol_type = other DNA
cgtatccgctcaaacaactgctacggtcaggtatcccgtcgtgaccaggaaagtgcgctggcgtgctggggcatc

SEQ ID NO: 513646 - DNA, 75 bp, synthetic construct
  source 1..75: mol_type = other DNA
atgagcaggaaattccgctatggtttatcagcggtcgttctggcgctgattgctgtgggtgcttctgcgcctgaa

SEQ ID NO: 513647 - DNA, 75 bp, synthetic construct
  source 1..75: mol_type = other DNA
atggctaacagaatgattctgaacgaaacggcatggtttgggcggggcgcaattggcgctttaaccgatgaggtg

SEQ ID NO: 513648 - DNA, 75 bp, synthetic construct
  source 1..75: mol_type = other DNA
ctgactttattgatatacacgcccatctggcatatgcatttctggagcagaataccccgcgtaaggcactgaacg

SEQ ID NO: 513649 - DNA, 75 bp, synthetic construct
  source 1..75: mol_type = other DNA
cgtattcgttccaataactgctacggtcaggtatcccggcgagaccaggagagtgcgctggcctgctgggggagc

SEQ ID NO: 513650 - DNA, 75 bp, synthetic construct
  source 1..75: mol_type = other DNA
gctgaacggtattgcgggtctggaccacgaagacatggcggaagacatgactccgctctaccaggcgattgttga

SEQ ID NO: 513651 - DNA, 75 bp, synthetic construct
  source 1..75: mol_type = other DNA
ctccaacaatccggtacgttcgactctcgtgccgaaacccaagagcgtgtgatggactccaacgatttggagaaa

SEQ ID NO: 513652 - DNA, 75 bp, synthetic construct
  source 1..75: mol_type = other DNA
gtgtttcccgtcgacgttttacagacgaattaatgcaggtgatcgcaggggagcatgcgaagcgattcgctggtg

SEQ ID NO: 513653 - DNA, 75 bp, synthetic construct
  source 1..75: mol_type = other DNA
cgtcaagcaaccagacttagccatgaattaccaagcgataaatattgcgctttgcttgctgtaatgtgcgcaaag

SEQ ID NO: 513654 - DNA, 75 bp, synthetic construct
  source 1..75: mol_type = other DNA
ttgcagaagcgagggtcaccagaaatacaaccagaaggttttttatttactgcgaagtcttgatgaaattaactc

SEQ ID NO: 513655 - DNA, 75 bp, synthetic construct
  source 1..75: mol_type = other DNA
gacacccccaccagctacgaagtcccaacctttagcaaatccgaacgtaagaacattgaagcggtcattcgtagc

SEQ ID NO: 513656 - DNA, 75 bp, synthetic construct
  source 1..75: mol_type = other DNA
ctcaccgctcgccgctttgttgagatactcacgcccatcaagacacgtggcaacctggaaacactgaaacgcgtt

SEQ ID NO: 513657 - DNA, 75 bp, synthetic construct
  source 1..75: mol_type = other DNA
cctggctgatgccagaaaacgccgtagcgagtacagagcgttaatcagtgccggaactgacccgcagggccatga

SEQ ID NO: 513658 - DNA, 75 bp, synthetic construct
  source 1..75: mol_type = other DNA
ttaagggtgttaataagaaagttgcagctttatctttttccgctgcttctgctcttgctgtatctccgtcttttg

SEQ ID NO: 513659 - DNA, 75 bp, synthetic construct
  source 1..75: mol_type = other DNA
atgccaaccagaaagagcacaaagaacagcatcaaaaattatctggctaactttgattcttacggacaactacca

SEQ ID NO: 513660 - DNA, 75 bp, synthetic construct
  source 1..75: mol_type = other DNA
aagcacaataacaaattgtcttcagcgtcaagcgacccgattaagccatgagctaccaagcgataaatattgcgc

SEQ ID NO: 513661 - DNA, 75 bp, synthetic construct
  source 1..75: mol_type = other DNA
atgaacgacagagaatttagagcgatgcttcaggcatcaagagaacgcaacaagcacaactcctacagctacaca

SEQ ID NO: 513662 - DNA, 75 bp, synthetic construct
  source 1..75: mol_type = other DNA
atgaacgacagagaatttagagcgatgcttcaggcatcgagacaacgtaacagacacaactcctgcgcttacaca

SEQ ID NO: 513663 - DNA, 75 bp, synthetic construct
  source 1..75: mol_type = other DNA
ctttgacagctacgaacaattaccaagtaagcttgatgatattttcattggattctgtagaggtgaaggtcaccc

SEQ ID NO: 513664 - DNA, 75 bp, synthetic construct
  source 1..75: mol_type = other DNA
attacaccgaggagtcgttatatgtcaaccagaaagagcacccagaacactattaaaaattatctggctaacttt

SEQ ID NO: 513665 - DNA, 75 bp, synthetic construct
  source 1..75: mol_type = other DNA
ccatcacggagatcaaaaatgcacgaccaggagaaaaagaatacaccctgcaggatggcggaggattgtttcttc

SEQ ID NO: 513666 - DNA, 75 bp, synthetic construct
  source 1..75: mol_type = other DNA
cgaatttctctcctggacgggtcagtaactgatgtcaaggtcgggcaaagtattcctggtacttcttataaggtg

SEQ ID NO: 513667 - DNA, 75 bp, synthetic construct
  source 1..75: mol_type = other DNA
gaagaaggcagccgcttcccgtatgtcttctggggcagtaaaaatatctttgggctggcgaaccctgacgacgtg

SEQ ID NO: 513668 - DNA, 75 bp, synthetic construct
  source 1..75: mol_type = other DNA
atagttttgtcgatgcgatgaaggcttgcggatttactctgccgaacgccccactaactccgcgtcaggatatta

SEQ ID NO: 513669 - DNA, 75 bp, synthetic construct
  source 1..75: mol_type = other DNA
cactggaaacatccgctattgaagaacgttttcatctggagaataacgaaggcgcagcgttgctgttcagcggcg

SEQ ID NO: 513670 - DNA, 75 bp, synthetic construct
  source 1..75: mol_type = other DNA
agcatgttccggcgcttttgcaacgccctggctggtatcgggcgtggcctgcgttaatgcaggatatttcccgtg

SEQ ID NO: 513671 - DNA, 75 bp, synthetic construct
  source 1..75: mol_type = other DNA
attgagtatgagaggaagaaaagttacttttggcgaccttgccatcccggaggacagttctctcgaaacaaaaac

SEQ ID NO: 513672 - DNA, 75 bp, synthetic construct
  source 1..75: mol_type = other DNA
tgagatgcgcttcaacccgcgtcgtagcatcgatccgaaggcgcaggctgtacatggtatctctctggaagaact

SEQ ID NO: 513673 - DNA, 75 bp, synthetic construct
  source 1..75: mol_type = other DNA
atgaccacgattgtcggtggcgtcgatattgagtccacggggctggacttcacatccggccacaaaattatcgaa

SEQ ID NO: 513674 - DNA, 75 bp, synthetic construct
  source 1..75: mol_type = other DNA
tctcttcttccgatatttggatagcccacaacggcgaagcgttcgatattccgtttattaggcatgagctgaaaa

SEQ ID NO: 513675 - DNA, 75 bp, synthetic construct
  source 1..75: mol_type = other DNA
cgggcactgtctgggggcgaaaggaattaatctgctgatgagtacattgcagaaccgtctggtcgatcatggtta

SEQ ID NO: 513676 - DNA, 75 bp, synthetic construct
  source 1..75: mol_type = other DNA
accaggggaaaaggaatacaccctgcaggatggcggaggattatttcttctggtgaaaccctccggatcaaaaat

SEQ ID NO: 513677 - DNA, 75 bp, synthetic construct
  source 1..75: mol_type = other DNA
aagatgcgcagggatcacgttatcccgctttccggtcaggctatggcggtgctggaggccatgaaaccaatcagc

SEQ ID NO: 513678 - DNA, 75 bp, synthetic construct
  source 1..75: mol_type = other DNA
gcgtatcgaaaaagaactcactcggacgagcgcacggttttgcctgtgatacccagggcacgctgttcttcgatg

SEQ ID NO: 513679 - DNA, 75 bp, synthetic construct
  source 1..75: mol_type = other DNA
gacgataataccattgatggttttatgtatttaaaaattgagcacggtacaataacagatgttacaccatcaatc

SEQ ID NO: 513680 - DNA, 75 bp, synthetic construct
  source 1..75: mol_type = other DNA
tactgtatttgaaaaacatgaatatctaataaaactattcaaactttatggattcattcttcatggcacaaaaaa

SEQ ID NO: 513681 - DNA, 75 bp, synthetic construct
  source 1..75: mol_type = other DNA
atttgcgatttggatgcagacacaactcaacaaagcagtacaaaacaccttcgttaagagattgatgccagagct

SEQ ID NO: 513682 - DNA, 75 bp, synthetic construct
  source 1..75: mol_type = other DNA
atccgcgtaaactggaagccgacttgtgggcgcgcgaggccgttttctctaccggtctgggctttagttttgcca

SEQ ID NO: 513683 - DNA, 75 bp, synthetic construct
  source 1..75: mol_type = other DNA
atgattttaacgtgtaacgaatcgaaattaggctgttttgaagaaggcgcacagtatacggctgaaaaaccgatg

SEQ ID NO: 513684 - DNA, 75 bp, synthetic construct
  source 1..75: mol_type = other DNA
ttaatcaagtagatttttctgatgttttttttgactctttaaaatccgattatgctcatgggtttattgattggt

SEQ ID NO: 513685 - DNA, 75 bp, synthetic construct
  source 1..75: mol_type = other DNA
atggaactgaccagccatctgctgacggctgcagccttcggcacgatgaagaacagcgaaaatgagcttgctgag

SEQ ID NO: 513686 - DNA, 75 bp, synthetic construct
  source 1..75: mol_type = other DNA
gaccgtgacgcgcaaaggaaaagtctgccatctgctgacgtcgatgacggacgccatgcgcttccccggaggaga

SEQ ID NO: 513687 - DNA, 75 bp, synthetic construct
  source 1..75: mol_type = other DNA
cggtgccgcgctatgactatcgctttggcattaatcagccgggtaaatggcgtgaaatcctcaacactgattcca

SEQ ID NO: 513688 - DNA, 75 bp, synthetic construct
  source 1..75: mol_type = other DNA
gggaacacgatttttcgaacactgcgcgatcgcgtctccgtgaaaatgattcatccgctacccaaaaccgccagc

SEQ ID NO: 513689 - DNA, 75 bp, synthetic construct
  source 1..75: mol_type = other DNA
aagggccttcccgagagtggtaaaggagaggccctggaaataccccacagccccgaaaaagagtaatgccagtca

SEQ ID NO: 513690 - DNA, 75 bp, synthetic construct
  source 1..75: mol_type = other DNA
ttgtgaaattaccgacgagaaggggaagggccttcccgagagtggtaaaggagaggccctggaaataccccacag

SEQ ID NO: 513691 - DNA, 75 bp, synthetic construct
  source 1..75: mol_type = other DNA
aatagcacctgcagaatttactctacttggcgaagatcctctggtaacggagttttatagctttgatgctctcta

SEQ ID NO: 513692 - DNA, 75 bp, synthetic construct
  source 1..75: mol_type = other DNA
aaacgagctctggcgaatgattcggcatggcaccgtttaagtgaaagagagtttactcatctgcaaacgctgtta

SEQ ID NO: 513693 - DNA, 75 bp, synthetic construct
  source 1..75: mol_type = other DNA
ttgaggttggcaatatcagccttacgaccagtgaaccagactttgagtttgacccgtatattttggaggaatttt

SEQ ID NO: 513694 - DNA, 75 bp, synthetic construct
  source 1..75: mol_type = other DNA
tttaaaaactttcttgatgggctttgattcttacgagcaactgccagcaaaaattgaagatttaattatcggcac

SEQ ID NO: 513695 - DNA, 75 bp, synthetic construct
  source 1..75: mol_type = other DNA
ttacaaagatggcgcggaaattttaatcgatcgcggctgggatatggcaacgggagagagagattttgacgatcc

SEQ ID NO: 513696 - DNA, 75 bp, synthetic construct
  source 1..75: mol_type = other DNA
ccggtgctgtggaagtatctttatcgctatgcgaaaaaacatcaggcgcgtggtaatggctttggttacggaatg

SEQ ID NO: 513697 - DNA, 75 bp, synthetic construct
  source 1..75: mol_type = other DNA
cacatcactttaatgaagacatccgcgacatcaccctgagccataaagagggcgtgagtgatgctgccgcggcgg

SEQ ID NO: 513698 - DNA, 75 bp, synthetic construct
  source 1..75: mol_type = other DNA
attacaccgagggaacgttatatgccaaccagaaagagcacgaagaacagcatcaaaaattatttgaataacttc

SEQ ID NO: 513699 - DNA, 75 bp, synthetic construct
  source 1..75: mol_type = other DNA
atgcaggtgaaggtgtctcagaggggagtggacgtgcgtcagaatgctgtaattgatattttacttattattgtc

SEQ ID NO: 513700 - DNA, 75 bp, synthetic construct
  source 1..75: mol_type = other DNA
gatgattcacttccgccctggctgtggaaaaccggcggatataccgggttcagcaacaaaatcagtgagctgacc

SEQ ID NO: 513701 - DNA, 75 bp, synthetic construct
  source 1..75: mol_type = other DNA
tttaaaaactttcttgatgagctttgattcttacgagcaactaccatcacgaattgaagatgtaattatcggcac

SEQ ID NO: 513702 - DNA, 75 bp, synthetic construct
  source 1..75: mol_type = other DNA
taaagaatcttgatgaaattaactcagccaccgtgacaaatcatcttcagcgtcaagcaaccagacttagccatg

SEQ ID NO: 513703 - DNA, 75 bp, synthetic construct
  source 1..75: mol_type = other DNA
attacaccgagggaacgttatatgtcaaccagaaagagcacccagaacagcatcaaaaattatctggctagtttt

SEQ ID NO: 513704 - DNA, 75 bp, synthetic construct
  source 1..75: mol_type = other DNA
gataatcagtcactgacgctcgcgtttgggctgacagaggcaggcctggagatcgccagagaggtttatcacaaa

SEQ ID NO: 513705 - DNA, 75 bp, synthetic construct
  source 1..75: mol_type = other DNA
atgtttaaaaaaatcgttagttttctggctgtacctgcattaatggctgtttctggcgcgactttcgctgcagaa

SEQ ID NO: 513706 - DNA, 75 bp, synthetic construct
  source 1..75: mol_type = other DNA
catccccgaaaaatcgccagaggctcttcaaccgtctttattgacggcctgcccgccgccagaaccggtgatgct

SEQ ID NO: 513707 - DNA, 75 bp, synthetic construct
  source 1..75: mol_type = other DNA
tacatcgggcgcgatgaacttgaggcatgtggtgaggcgtttctggcgcaggttcgccagcaggcggaaaaactg

SEQ ID NO: 513708 - DNA, 75 bp, synthetic construct
  source 1..75: mol_type = other DNA
tccccgccctacaatctggatatgacaaagggtagctttattaatgccctccataggattagaagtgatttaaaa

SEQ ID NO: 513709 - DNA, 75 bp, synthetic construct
  source 1..75: mol_type = other DNA
catttaaatcattcagcgatacgccctttgctagaagtaacagcgttatcataagtcagttgatagatgaaattg

SEQ ID NO: 513710 - DNA, 75 bp, synthetic construct
  source 1..75: mol_type = other DNA
ccatcagcgcacaaaaaaacagtgcgatgcgtcggctggcaattcacagcaacgctgagatgtatgcatggataa

SEQ ID NO: 513711 - DNA, 75 bp, synthetic construct
  source 1..75: mol_type = other DNA
attctcactctttcagagcgcaaggtactgcggctattaggtaaaggatggggcatcaaccagatagcttcatag

SEQ ID NO: 513712 - DNA, 75 bp, synthetic construct
  source 1..75: mol_type = other DNA
tccctgcctggaacaacggaatgaaacttgcatatgaaagccgtccgaaagcgattagggaagggtggctaatgt

SEQ ID NO: 513713 - DNA, 75 bp, synthetic construct
  source 1..75: mol_type = other DNA
gcaatgagtgaaaagagtcacggtacccggcatgacggttattatgagaccgccatcaccgccgggtcatccacc

SEQ ID NO: 513714 - DNA, 75 bp, synthetic construct
  source 1..75: mol_type = other DNA
ggctgtcttgcaccgtcacggtggtctgcaaatggccgatcaggatgtatttgtgaacgtggtcggcggcgtgaa

SEQ ID NO: 513715 - DNA, 75 bp, synthetic construct
  source 1..75: mol_type = other DNA
ctgtatgtcaccggcgaagagtcgctgcaacaggtggcaatgcgcgctcatcgccttggcctgccgactgacaat

SEQ ID NO: 513716 - DNA, 75 bp, synthetic construct
  source 1..75: mol_type = other DNA
cgcgtggtacggggaacgaaaccaactatgtaatgcaaaaatttgcgcgcgccgttattggtaccaataacgttg

SEQ ID NO: 513717 - DNA, 75 bp, synthetic construct
  source 1..75: mol_type = other DNA
tgaacgcctgccatccaatatccagggacgagctcaggttaaagcgtgggtggttgataacttctcgcaaatgaa

SEQ ID NO: 513718 - DNA, 75 bp, synthetic construct
  source 1..75: mol_type = other DNA
gccggtcgcagactggtgacattagaacaaaagtggctcaggatgcaggcacagcaggagaatatttctgggcaa

SEQ ID NO: 513719 - DNA, 75 bp, synthetic construct
  source 1..75: mol_type = other DNA
cagcctcattggactcatgaatttactcacaattgcgtggaaaaagttaagtctctgtttccccatcttcgcgca

SEQ ID NO: 513720 - DNA, 75 bp, synthetic construct
  source 1..75: mol_type = other DNA
attaaatcattattggccgataatatccctggagtttcaacaaaataagccaggacgggaaattctattgcaatc

SEQ ID NO: 513721 - DNA, 75 bp, synthetic construct
  source 1..75: mol_type = other DNA
atgggtaaaaaagacagtaatcaccagattatttatcggggccaggtgctggaacggtttacccctggcggctgg

SEQ ID NO: 513722 - DNA, 75 bp, synthetic construct
  source 1..75: mol_type = other DNA
ctagatgccacgcgctttagccgtcatgagggttatgaggtgttagatttgattaattcctttcaggccaaagga

SEQ ID NO: 513723 - DNA, 75 bp, synthetic construct
  source 1..75: mol_type = other DNA
caccggctggacgcgcaactgcaatattcaaagtgacagcgcgttgcagcaagcctgcgaagatgtcttccgctt

SEQ ID NO: 513724 - DNA, 75 bp, synthetic construct
  source 1..75: mol_type = other DNA
gaggcatgtggtgaggcgtttctggcgcaggttcgccagcaggcagaaaaactggtcagggagatggcggcatga

SEQ ID NO: 513725 - DNA, 75 bp, synthetic construct
  source 1..75: mol_type = other DNA
cggaagatgcagaccatattgcttttattcgcgggcgtattggttttgaactgccagcctggtttatcccgaagg

SEQ ID NO: 513726 - DNA, 75 bp, synthetic construct
  source 1..75: mol_type = other DNA
gccagacgctggctggcagtaagggaaaaacagaagctaaagatgaaaaccatgcaggaacagaccgcgtcaacc

SEQ ID NO: 513727 - DNA, 75 bp, synthetic construct
  source 1..75: mol_type = other DNA
gaattacaggatgaacatccagagcagccgtcaatggatgagctggcgcagactatccgcaaacaactccaggcg

SEQ ID NO: 513728 - DNA, 75 bp, synthetic construct
  source 1..75: mol_type = other DNA
gaattgcaggatgaacatccagagcaaccgtcaatggatgaactagcgcagactatccgcaaacaactccaggcg

SEQ ID NO: 513729 - DNA, 75 bp, synthetic construct
  source 1..75: mol_type = other DNA
aatggcgtatgagagtcgtcccaaggaaattagggaagggtggttaatgtggttgggtctgggcaatccatcata

SEQ ID NO: 513730 - DNA, 75 bp, synthetic construct
  source 1..75: mol_type = other DNA
tttctgtgccggcagctgaagtgccccgttcggttgctgcgctcacccccgatccaggttttgtctggactgaac

SEQ ID NO: 513731 - DNA, 75 bp, synthetic construct
  source 1..75: mol_type = other DNA
tgccagccgtctggaggcctggcaggcactgcaggtgtttctgaaacgttatccggccagacgcattgatgtcgg

SEQ ID NO: 513732 - DNA, 75 bp, synthetic construct
  source 1..75: mol_type = other DNA
ggatgcggatttccgcctcccgtccgttgcacgtccctggccgtggaccatcaatgtggctggtaagggctaccg

SEQ ID NO: 513733 - DNA, 75 bp, synthetic construct
  source 1..75: mol_type = other DNA
caatttttggtggttatgataatttgatagatccaaaagaaattgataagtcggttgattatatctgtttcacag

SEQ ID NO: 513734 - DNA, 75 bp, synthetic construct
  source 1..75: mol_type = other DNA
tattttcttctccgggaaatacagtagtcttcggacaaccctgtgcagggaaaacaaatctgacagcagagttaa

SEQ ID NO: 513735 - DNA, 75 bp, synthetic construct
  source 1..75: mol_type = other DNA
cgattgccggtgtgatgaaaaaacgggatgcggatttccgccttccgtccgttgcacgtccctggccgtggacca

SEQ ID NO: 513736 - DNA, 75 bp, synthetic construct
  source 1..75: mol_type = other DNA
gctcacatctatgctgaaatcgttggctacggcgcaacctctgatggtgcagacatggttgctccgtctggcgaa

SEQ ID NO: 513737 - DNA, 75 bp, synthetic construct
  source 1..75: mol_type = other DNA
aaaattcacggtgtaaactactccatcagctccgcgtgtgcgacttccgcacactgtatcggtaacgcagtagag

SEQ ID NO: 513738 - DNA, 75 bp, synthetic construct
  source 1..75: mol_type = other DNA
aggacagtttgcgcgagtgcttgagggaaagagtccactgactaattttgagtttaagttcattcgccctgcaca

SEQ ID NO: 513739 - DNA, 75 bp, synthetic construct
  source 1..75: mol_type = other DNA
gcgacactgacgggcggtacacaacccgttcccgctcatttaccggcagtcagtacagatcgggctgtatcgttt

SEQ ID NO: 513740 - DNA, 75 bp, synthetic construct
  source 1..75: mol_type = other DNA
tttacagacgacatcccccagacgtattgatgtggggattgcacaggtgaactggggctggaacgggcatcactt

SEQ ID NO: 513741 - DNA, 75 bp, synthetic construct
  source 1..75: mol_type = other DNA
ggtgcggttcgctgcatgaagatggcgatgcacggcgttgataccccaatcgactacctgaactctcacggtact

SEQ ID NO: 513742 - DNA, 75 bp, synthetic construct
  source 1..75: mol_type = other DNA
cctacgcagccgccaaaaacacatgatgaattacttcgtgaggcagagaatgaaagacagtgtctgctggatagt

SEQ ID NO: 513743 - DNA, 75 bp, synthetic construct
  source 1..75: mol_type = other DNA
cacatcagtaaactaaaagctaaagcgcctatttattttgttagccgcaaagaaagtatcaaaaatcttcttgag

SEQ ID NO: 513744 - DNA, 75 bp, synthetic construct
  source 1..75: mol_type = other DNA
gaatttcttttgtcgatcgtagcgaagttttaacccatatcggtaatgagatgctcgcgaaaggtgtggttcatg

SEQ ID NO: 513745 - DNA, 75 bp, synthetic construct
  source 1..75: mol_type = other DNA
gtattctggcgtttctgttactcaccagttctgcagcggcgctggctgcaccgcaggtgattaccgtcagtcgtt

SEQ ID NO: 513746 - DNA, 75 bp, synthetic construct
  source 1..75: mol_type = other DNA
catatccttgatgaagaagcgattaaacttctggagaaattagatgccgagagaattattgtattggcaccttat

SEQ ID NO: 513747 - DNA, 75 bp, synthetic construct
  source 1..75: mol_type = other DNA
gtgttaatagacgtattagttcacgaagggtaaagttcttacaggcgtttactatattgaacaacgattcggaca

SEQ ID NO: 513748 - DNA, 75 bp, synthetic construct
  source 1..75: mol_type = other DNA
catatacttgatgaagaggcgattaagtttcttgaaacattagatgcagagagaattattgtcctggccccctat

SEQ ID NO: 513749 - DNA, 75 bp, synthetic construct
  source 1..75: mol_type = other DNA
accgattagcgctttcgcttgataaaagagaggagatatccagaggagtggtaacaaaactcagtatcagggaca

SEQ ID NO: 513750 - DNA, 75 bp, synthetic construct
  source 1..75: mol_type = other DNA
atttcattttcttcgggtctgttatggtactttctgattgttattcatgggctaacgagcagtttggacatgccc

SEQ ID NO: 513751 - DNA, 75 bp, synthetic construct
  source 1..75: mol_type = other DNA
cgcaggcattataagcgatacctctcttgccagagagtctgcgagtgatcacgaaatggtaacatctacaagcct

SEQ ID NO: 513752 - DNA, 75 bp, synthetic construct
  source 1..75: mol_type = other DNA
ggcaatgctctgtatgtcattaaccccagcactctggtacagtatcctttgaatgatgccgcacaaaaggaggtg

SEQ ID NO: 513753 - DNA, 75 bp, synthetic construct
  source 1..75: mol_type = other DNA
ccatttcggtgattcagattgatgatcctaacaatcccggcgaaaaaatgagtctggcaccgtttatagaacgag

SEQ ID NO: 513754 - DNA, 75 bp, synthetic construct
  source 1..75: mol_type = other DNA
ctatctcagtgatccagattgatgatcctaacaaaccaggtgaaaaaatgagtctggcaccgtttattgaaagag

SEQ ID NO: 513755 - DNA, 75 bp, synthetic construct
  source 1..75: mol_type = other DNA
cattattcattgctggcctcgctgcattcagtacgtcttcgctggcggcacaatcattacgtttcggttatgaaa

SEQ ID NO: 513756 - DNA, 75 bp, synthetic construct
  source 1..75: mol_type = other DNA
tactggttgccgctatatggggaatgcaccagaagacgcagcgccttgaagacaataatcaggtgcttgtgcgtg

SEQ ID NO: 513757 - DNA, 75 bp, synthetic construct
  source 1..75: mol_type = other DNA
ctcatttcacaaatcagcaaggcggccacgaatgaaaaacagcagaacatgcagcacagcgaggaacagcagagc

SEQ ID NO: 513758 - DNA, 75 bp, synthetic construct
  source 1..75: mol_type = other DNA
acgcgcataaaacgctcgacggcaaagtcggtgatgatctgaaagcctcacttgaaggtaaaggactgaaagtac

SEQ ID NO: 513759 - DNA, 75 bp, synthetic construct
  source 1..75: mol_type = other DNA
gcgcaaattggtcgccgaaaatcagcaaaaaatcatcgacggcatgaaagacgctggcgtggaagtcatcaccga

SEQ ID NO: 513760 - DNA, 75 bp, synthetic construct
  source 1..75: mol_type = other DNA
ctatctctgactcaccatgcctattccccgcttctggtagtgatcaacaaagcgaaatttgatggcttaagcccg

SEQ ID NO: 513761 - DNA, 75 bp, synthetic construct
  source 1..75: mol_type = other DNA
cttcgttctcatgctaacaataagattaaacagaatcgcatctacggccctgctgtctacaacatagaaagcatc

SEQ ID NO: 513762 - DNA, 75 bp, synthetic construct
  source 1..75: mol_type = other DNA
gaaagaacgctatttttcagcaggttctcatgcctgtctatattcataatccgacagcaattcagcaatgtgtgg

SEQ ID NO: 513763 - DNA, 75 bp, synthetic construct
  source 1..75: mol_type = other DNA
tgaaagcctgattgcgaaacccattaagaatttagatggaacaaacagctatcgctataagcagctttttatatc

SEQ ID NO: 513764 - DNA, 75 bp, synthetic construct
  source 1..75: mol_type = other DNA
gccgaaagtctgaaccgcttctggcgaccgctcatgatagcgctgctgtgtgcggtactgctgttacggggtgtc

SEQ ID NO: 513765 - DNA, 75 bp, synthetic construct
  source 1..75: mol_type = other DNA
gtgacaactttgatatccactggctggactcggacgtggttttcctcggcggaaccgggggcggtatctatgacg

SEQ ID NO: 513766 - DNA, 75 bp, synthetic construct
  source 1..75: mol_type = other DNA
tgattgagcctaccctgccaattcaggagttgttgaatgagacggctctccagatgtgggtgaaggaaggtatac

SEQ ID NO: 513767 - DNA, 75 bp, synthetic construct
  source 1..75: mol_type = other DNA
tacattcctggtgaatggatcagcgtctggcaggttgaactgcctgatgtcgcccgcaagcagataccgactatt

SEQ ID NO: 513768 - DNA, 75 bp, synthetic construct
  source 1..75: mol_type = other DNA
ttccaccatggagctgaaagttaagactttaagatatttcaatgaattagaagcagaaaatatcaaaggtctgta

SEQ ID NO: 513769 - DNA, 75 bp, synthetic construct
  source 1..75: mol_type = other DNA
ggtcatgttccacgcccagctcaatgagcaggatttaccgctttcgctaaccgtggtcggcattgcaccggaaga

SEQ ID NO: 513770 - DNA, 75 bp, synthetic construct
  source 1..75: mol_type = other DNA
gcggagaaacagttcttaacgctattcccggagcagaagcggattgtgaatttacgctctcaggtgacgatggcg

SEQ ID NO: 513771 - DNA, 75 bp, synthetic construct
  source 1..75: mol_type = other DNA
aggcggcagtccggcagacaaccacggccccgcgagctgcggcgcagcctgcacaggcgacagacaccgcaccgg

SEQ ID NO: 513772 - DNA, 75 bp, synthetic construct
  source 1..75: mol_type = other DNA
cgatggacaacaaccagcccggagaagccgtccccccgaccggaggcactgaccttcaggcactgacccgcgctc

SEQ ID NO: 513773 - DNA, 75 bp, synthetic construct
  source 1..75: mol_type = other DNA
atgagtaagcatcacaacgacgacaccggcgactttgacatcccgggcatactccctgatcccgccacagacaca

SEQ ID NO: 513774 - DNA, 75 bp, synthetic construct
  source 1..75: mol_type = other DNA
gtgagttccatacttgagatttttttcccgctttgcgcctccgacaccatccgctggcagcgccgtacacccgat

SEQ ID NO: 513775 - DNA, 75 bp, synthetic construct
  source 1..75: mol_type = other DNA
ctggtgcgattgaggatataacggcgttgtttgaatatctggccgagaatgcatctctttgggatgcaaggaacg

SEQ ID NO: 513776 - DNA, 75 bp, synthetic construct
  source 1..75: mol_type = other DNA
gcgtgacgttatggagcgtcagcgaacaggtggcgcaaagccgtgcccaggtggagaaacagttcttaacgttgt

SEQ ID NO: 513777 - DNA, 75 bp, synthetic construct
  source 1..75: mol_type = other DNA
acaaactgcgtagtgcactggcaaccgattatgttgtgcaacaggacgcattacagaaagagggtgatgcggttt

SEQ ID NO: 513778 - DNA, 75 bp, synthetic construct
  source 1..75: mol_type = other DNA
gtgagttccatgcttgagatttttttcccgctttgcgccaccgaccccatccgctggcagcgccgtaccgccgac

SEQ ID NO: 513779 - DNA, 75 bp, synthetic construct
  source 1..75: mol_type = other DNA
tcccgctttgcgccgctgatcccatccgttggcagcgccgtacacccgacgtggagcacggtatctggcctgacg

SEQ ID NO: 513780 - DNA, 75 bp, synthetic construct
  source 1..75: mol_type = other DNA
cgaattttccgcgctttggaaacggggcgcattccacataactacgtggacccaaattttactattcgtggtgac

SEQ ID NO: 513781 - DNA, 75 bp, synthetic construct
  source 1..75: mol_type = other DNA
aatttagcgggggctctggccggagcttctgcaccggaactggcgcatctgctgaaatcaacagaaaaagacccg

SEQ ID NO: 513782 - DNA, 75 bp, synthetic construct
  source 1..75: mol_type = other DNA
ataaatgggaaaaaatcagtgatgaacagagtgcagaaatcgatcagaagctgaaagacaatccgctggaagccc

SEQ ID NO: 513783 - DNA, 75 bp, synthetic construct
  source 1..75: mol_type = other DNA
gggcgcacagccgcctaacgtgattatcggtactatcgtcggcacggcgtttgccattactactggcgtgaaacc

SEQ ID NO: 513784 - DNA, 75 bp, synthetic construct
  source 1..75: mol_type = other DNA
gcctgagcagcggcgaacctgtggcgtgggaaaaggacgcgttcctgaaaaaagttaaggctggtacgagggctt

SEQ ID NO: 513785 - DNA, 75 bp, synthetic construct
  source 1..75: mol_type = other DNA
gaaacaggcagagtcacgtctccaggccctgcgggatttactggcagaaggcctgagcagcggcgaacctgtggc

SEQ ID NO: 513786 - DNA, 75 bp, synthetic construct
  source 1..75: mol_type = other DNA
cggcaaacattttctgccgcagcaccgtgaacgcatcgtgctggtgggctttcgtcgcgatctgaatttgaaagc

SEQ ID NO: 513787 - DNA, 75 bp, synthetic construct
  source 1..75: mol_type = other DNA
tagtgcgtatcatcaatgcccgtcgtccggcgatttttgtgctcgaaaacgtcaaaaacctgaaaagccacgacc

SEQ ID NO: 513788 - DNA, 75 bp, synthetic construct
  source 1..75: mol_type = other DNA
agcatgccacgtaagcgaaacaaaaacggggtttaccttaccgaaatcggtacggatatccaacagcgtatggaa

SEQ ID NO: 513789 - DNA, 75 bp, synthetic construct
  source 1..75: mol_type = other DNA
gatggttgaggcgaaatatatcctgacgccggtgctgtggaagtacctctatcgatatgcgaaaaaacatcaggc

SEQ ID NO: 513790 - DNA, 75 bp, synthetic construct
  source 1..75: mol_type = other DNA
cggtaaacatttcctgccgcagcaccgtgaacgcatcgtgctggtgggttttcgtcgcgatctgaatctgaaagc

SEQ ID NO: 513791 - DNA, 75 bp, synthetic construct
  source 1..75: mol_type = other DNA
gcttgatgggctttgaagcaccccatgaagcaaaatttcgtattccggtttctgacactcaggcctatcgccagt

SEQ ID NO: 513792 - DNA, 75 bp, synthetic construct
  source 1..75: mol_type = other DNA
cgatgtcgcagtcggtgtcgccgtacctttcgctgtcgcagtacagatggggattaccttcctgttctcggtgat

SEQ ID NO: 513793 - DNA, 75 bp, synthetic construct
  source 1..75: mol_type = other DNA
ccgggacggcatcactgccggaaagcataccttcggagatccggcgtacagttttgaagaactcgtagctgaaat

SEQ ID NO: 513794 - DNA, 75 bp, synthetic construct
  source 1..75: mol_type = other DNA
ctaccggacacgcttcacggctgaaccgggacggcatcactgccggaaagcataccttcggagatccggcgtaca

SEQ ID NO: 513795 - DNA, 75 bp, synthetic construct
  source 1..75: mol_type = other DNA
ccgctggctgacgttccatcaggtcagcgcgctcggcgggcaagtgcgccggggggagaaatcctctctggcggt

SEQ ID NO: 513796 - DNA, 75 bp, synthetic construct
  source 1..75: mol_type = other DNA
actggcgctgcttctcgtcggtatggcatgtcatttgaatagcgaacatttgcagatgatggtactggcaggcgc

SEQ ID NO: 513797 - DNA, 75 bp, synthetic construct
  source 1..75: mol_type = other DNA
aaatgatttttgcggacactcgtctgacccttgtatcacttgtggttattgtcggatgtttctttttctcctggt

SEQ ID NO: 513798 - DNA, 75 bp, synthetic construct
  source 1..75: mol_type = other DNA
gtttcgaagagctcgttgccgaaatgggatctgcatttctctgcgcccatgtcggcattcaggcgaaactacagc

SEQ ID NO: 513799 - DNA, 75 bp, synthetic construct
  source 1..75: mol_type = other DNA
gcgttatgtcagggcctttccaaactgctgattgtggatgtcgccttgaatcgcggtcaggataatccgcaacta

SEQ ID NO: 513800 - DNA, 75 bp, synthetic construct
  source 1..75: mol_type = other DNA
ggtttgtcccactattgtggttggtatccccatagaacagggcaagatatagttgttcatcatgttcactcataa

SEQ ID NO: 513801 - DNA, 75 bp, synthetic construct
  source 1..75: mol_type = other DNA
attccatcttctggattgtgctcgctcaaaggaactgggcattgaggtaatggaatttatccatgaatatgctct

SEQ ID NO: 513802 - DNA, 75 bp, synthetic construct
  source 1..75: mol_type = other DNA
atgcgtagcgccgctgtaattaacaacggcctacggagatatgtcgcttacttgaatctgtttgtagagtgttgg

SEQ ID NO: 513803 - DNA, 75 bp, synthetic construct
  source 1..75: mol_type = other DNA
aaccattttatgacacaccacttattggctcatggcgagccatggcgtattcacccggtggagtcggtgatattg

SEQ ID NO: 513804 - DNA, 75 bp, synthetic construct
  source 1..75: mol_type = other DNA
ataaaaaatggctccatacgttgggtaatttaacgttaactggctataactcaagctacagcgaccgtccatttg

SEQ ID NO: 513805 - DNA, 75 bp, synthetic construct
  source 1..75: mol_type = other DNA
gggaaatcgaactgggatacagggagataaaacagacgatgcaactgagcaggctgacgctgagaagtaaaaagc

SEQ ID NO: 513806 - DNA, 75 bp, synthetic construct
  source 1..75: mol_type = other DNA
atgcctatttcgtttcagcatcaactgttaaattatctggttgccaacgagaatactgagcttttttgtccccaa

SEQ ID NO: 513807 - DNA, 75 bp, synthetic construct
  source 1..75: mol_type = other DNA
gctgtggggtgtcttactggcttataatctggtgagatatcagatgattaaaatggcggaaagtggcgcagtaga

SEQ ID NO: 513808 - DNA, 75 bp, synthetic construct
  source 1..75: mol_type = other DNA
ctgagcaggctgacgctgagaagtaaaaaccggagcttgtggagcaagagctgtggggtgtcttactggcttata

SEQ ID NO: 513809 - DNA, 75 bp, synthetic construct
  source 1..75: mol_type = other DNA
gaagtttttggtaattactatggcacttcgcgtgaggccattgagcaagtactggcgaccggtgtcgatgttttt

SEQ ID NO: 513810 - DNA, 75 bp, synthetic construct
  source 1..75: mol_type = other DNA
gtgagatatcagatgattaaaatggcggaacatctgaaaggttactggccgaatcaactgagtttctcagaatca

SEQ ID NO: 513811 - DNA, 75 bp, synthetic construct
  source 1..75: mol_type = other DNA
ccaatatcatggttgaagggtcgattattggttatgaaagtaacgtgaaatcaggcggtgtcggagcgagatatt

SEQ ID NO: 513812 - DNA, 75 bp, synthetic construct
  source 1..75: mol_type = other DNA
gtctcggtatacaatatccaggatgaaactggacaatttaaaccctatccggcaagtaacttctccaccgcagtt

SEQ ID NO: 513813 - DNA, 75 bp, synthetic construct
  source 1..75: mol_type = other DNA
tatcggttatgaaagcaatgtcaaatctggcggggttggggcaagatattttgggatcggtgccgacacgcaata

SEQ ID NO: 513814 - DNA, 75 bp, synthetic construct
  source 1..75: mol_type = other DNA
cttgcaagtatgggacaacttgtgaaattaccgacaagaagggaaagagccttcccgagagtggtaaagaagagg

SEQ ID NO: 513815 - DNA, 75 bp, synthetic construct
  source 1..75: mol_type = other DNA
aagtctgccatctgctgacgtcgatgacggacgccatgcgcttccccggaggagaaatgggggatctgtacagtc

SEQ ID NO: 513816 - DNA, 75 bp, synthetic construct
  source 1..75: mol_type = other DNA
ctgctgaccgtgacgcgcaaaggaaaagtctgccatctgctgacgtcgatgacggacgccatgcgcttccccgga

SEQ ID NO: 513817 - DNA, 75 bp, synthetic construct
  source 1..75: mol_type = other DNA
gacctgactctggctgcagcaatcgccggtggttgtgaatttgttgttgtaccggaagtcgaattcagccgtgaa

SEQ ID NO: 513818 - DNA, 75 bp, synthetic construct
  source 1..75: mol_type = other DNA
cagtatcatcacgataaactcaccttcggcatgctttacaactacactgaaaacttcgtcttgccgttgtcgcac

SEQ ID NO: 513819 - DNA, 75 bp, synthetic construct
  source 1..75: mol_type = other DNA
caaccgcattcttggcgagcaggtgccaggtgcggtgagcatggcggaagagtcgaccgactttgccggcgtttc

SEQ ID NO: 513820 - DNA, 75 bp, synthetic construct
  source 1..75: mol_type = other DNA
cagcctaccggcatgtatgcgccgacccgtcgcttcgggacgcgcgatgatttccgctatttcgtgaatgccgcg

SEQ ID NO: 513821 - DNA, 75 bp, synthetic construct
  source 1..75: mol_type = other DNA
tggctgttgtctggcatggtcagcagaacctgattgatgatccttaccgttttggtcctttaatccaggaaatgg

SEQ ID NO: 513822 - DNA, 75 bp, synthetic construct
  source 1..75: mol_type = other DNA
gagtttggtggacgcgagaatctggaagcgattgaatttttacgcaataccaaccgtattatcggtgagcaagtt

SEQ ID NO: 513823 - DNA, 75 bp, synthetic construct
  source 1..75: mol_type = other DNA
atgcctggctgttatctgaaggtactcacctgcgcccgtatgaaaccttaggcgcacacgcagataccatggatg

SEQ ID NO: 513824 - DNA, 75 bp, synthetic construct
  source 1..75: mol_type = other DNA
tgtcaaagcactggcagatatgggtatcgacagcctgcttatcccggaagagcacggcgggctggacgcaggttt

SEQ ID NO: 513825 - DNA, 75 bp, synthetic construct
  source 1..75: mol_type = other DNA
tgagtttctcagaatcatgcggaatggtgatgagaatgctgatgacattgcagggcgcttcaccgggacgtatac

SEQ ID NO: 513826 - DNA, 75 bp, synthetic construct
  source 1..75: mol_type = other DNA
accatcgataacgatatcaaaggcactgactacaccatcggtttcttcactgcgctgagcactgttgtagaagct

SEQ ID NO: 513827 - DNA, 75 bp, synthetic construct
  source 1..75: mol_type = other DNA
ctgggctccaaacgcccgtcgggtctcggtggttgggcaattcaactactgggacggtcgccgtcacccgatgcg

SEQ ID NO: 513828 - DNA, 75 bp, synthetic construct
  source 1..75: mol_type = other DNA
ttggcatggcgcttgagcgtaaagaacctcttcaccagattgcgaatcgcctggacatcatgctgccgggcaatc

SEQ ID NO: 513829 - DNA, 75 bp, synthetic construct
  source 1..75: mol_type = other DNA
ggacgagaaagacatgttcggtcgcgaaggtaacggctttaaccgcgtcaaagaagagttcgaccatgaacgttt

SEQ ID NO: 513830 - DNA, 75 bp, synthetic construct
  source 1..75: mol_type = other DNA
ggatttgcagaacaaagcagaacggcagaatgacattctggtgaaataccgccatatgtcggttccaccggaatc

SEQ ID NO: 513831 - DNA, 75 bp, synthetic construct
  source 1..75: mol_type = other DNA
atgattagctggttgcctatttatctgctgacggtgaaacatttttctaaagaacaaatgagcgtcgcgttttta

SEQ ID NO: 513832 - DNA, 75 bp, synthetic construct
  source 1..75: mol_type = other DNA
gacagacggtaaaagcaccagaaaacatgagtgcctttcagattttctgcacttatgtattacgcaataaaaatg

SEQ ID NO: 513833 - DNA, 75 bp, synthetic construct
  source 1..75: mol_type = other DNA
agaacaaatgagcgtcgcgtttttattttttgaatgggccgcaatcccttccacgctacttgccggttggttgtc

SEQ ID NO: 513834 - DNA, 75 bp, synthetic construct
  source 1..75: mol_type = other DNA
ctgcccgccttactggaagaagagctgaaccaggatatcgatgaactgcatttcgccccgttgaaaatcgaccag

SEQ ID NO: 513835 - DNA, 75 bp, synthetic construct
  source 1..75: mol_type = other DNA
atgagtcaggaaatcacactacaacaggcagcagaacgcgcccaccaaatcgaagttatttgcgcactggcagag

SEQ ID NO: 513836 - DNA, 75 bp, synthetic construct
  source 1..75: mol_type = other DNA
ccgctgaacgtgcgcaccaaacagagattatttgccgccttcttgaggtatacccgaacaaaattacagatgctg

SEQ ID NO: 513837 - DNA, 75 bp, synthetic construct
  source 1..75: mol_type = other DNA
agtgataaatgggaaagtgactatacgggtaacttaacgattaatgaaaggcccagtgcacgatggggaagctgg

SEQ ID NO: 513838 - DNA, 75 bp, synthetic construct
  source 1..75: mol_type = other DNA
cttcgagaaaactgtcgtctttgcactgattcaaactgaagaagcactaaatcgtcgccagataaatcaggcgtt

SEQ ID NO: 513839 - DNA, 75 bp, synthetic construct
  source 1..75: mol_type = other DNA
cgaggtatagatgcactttaccatgccggagagataaaaggccgtcaggatgtgattcaggcgctcactgaggcg

SEQ ID NO: 513840 - DNA, 75 bp, synthetic construct
  source 1..75: mol_type = other DNA
gctgaaaaccattgcaggtgaattgtgttccgttcctcacgaaccaaccttctatcgacagattgaggtgtactg

SEQ ID NO: 513841 - DNA, 75 bp, synthetic construct
  source 1..75: mol_type = other DNA
agaggcacatcgtgagcaggaacgggcggcgcagcatcagaaaacgctggagctggaacgatctcagcgacagcg

SEQ ID NO: 513842 - DNA, 75 bp, synthetic construct
  source 1..75: mol_type = other DNA
gtggtggcaggggcagcagatactcgacaattacacgatcatccgggagcagaagagcacgcaggccatgctgtc

SEQ ID NO: 513843 - DNA, 75 bp, synthetic construct
  source 1..75: mol_type = other DNA
accaacagcatatgcgcaacattgcgcagtggttgcaggcaaacggcatcacccgcgccaccgttgcaccggact

SEQ ID NO: 513844 - DNA, 75 bp, synthetic construct
  source 1..75: mol_type = other DNA
accgttgatgaagttcctccatccggagatcgtcaccgttgatccaggctacgcagaagccgggcgccaggcggc

SEQ ID NO: 513845 - DNA, 75 bp, synthetic construct
  source 1..75: mol_type = other DNA
acgccgaagctggacgccaggcggcctgccaattgatcgcacaggtaaccgggcgcagcgaaccgcaacaaatca

SEQ ID NO: 513846 - DNA, 75 bp, synthetic construct
  source 1..75: mol_type = other DNA
ctgcatcccgttgccgctctgccagggcttgctatgaagcaaggctatgagaacgtagcaaaagtgattacgcct

SEQ ID NO: 513847 - DNA, 75 bp, synthetic construct
  source 1..75: mol_type = other DNA
ccaacaggcatggatctttctcaagatatcggcacaattatgcgtgataaagctgggctaccggtcatgagcgga

SEQ ID NO: 513848 - DNA, 75 bp, synthetic construct
  source 1..75: mol_type = other DNA
tctggagcgtggcctttggaaaacggaaacatgctgggatggaaacgaccgtgagcagctaggcaaagaggctct

SEQ ID NO: 513849 - DNA, 75 bp, synthetic construct
  source 1..75: mol_type = other DNA
gcctgccagttgatcgcgcaggtaaccggacgcagcgaaccgcaacaaatcatcatccccgccaacctgtcctga

SEQ ID NO: 513850 - DNA, 75 bp, synthetic construct
  source 1..75: mol_type = other DNA
tcaaacaaacagcatggatggggcatctggagcgtggcctttggaaaacggaaacacgctgggatggaaacgacc

SEQ ID NO: 513851 - DNA, 75 bp, synthetic construct
  source 1..75: mol_type = other DNA
tcagctaccgaaaacagtgggcgcgctggcgggtgatgattctgccgatattgctgattctggttgcgctggcag

SEQ ID NO: 513852 - DNA, 75 bp, synthetic construct
  source 1..75: mol_type = other DNA
cgtcactttccgacatcgaaatgcgtggtttcacctttgatcaaaaacgccagacgcttcacctccagttgcggg

SEQ ID NO: 513853 - DNA, 75 bp, synthetic construct
  source 1..75: mol_type = other DNA
gttccagtgtatggcgaatggtcattcgctggtgacaaggagtgctacgagggtgtggtaaggctgacgaaagac

SEQ ID NO: 513854 - DNA, 75 bp, synthetic construct
  source 1..75: mol_type = other DNA
atatttgcgacgatgtataacgcctacacacagcgatattgtactttacaggttacaagtcaatgtcggtgtata

SEQ ID NO: 513855 - DNA, 75 bp, synthetic construct
  source 1..75: mol_type = other DNA
cgagagtggtaaaggagaggccctggaaataccccacagccccgaaaaagagccagtcagttgcttaactgactg

SEQ ID NO: 513856 - DNA, 75 bp, synthetic construct
  source 1..75: mol_type = other DNA
gtgagtgatgaagtcgatgaagcatattcagtgacagaacagatgaccatgacaggaataaaccagatacgccag

SEQ ID NO: 513857 - DNA, 75 bp, synthetic construct
  source 1..75: mol_type = other DNA
acgttattgttggtggtgaactgtttactgattactccgatcatcctcacaaacttgtcacgctaaacccgaaac

SEQ ID NO: 513858 - DNA, 75 bp, synthetic construct
  source 1..75: mol_type = other DNA
gaaattcctttacctattgtggatgaagtcctctacatcgatcgtattccgctcggcatgctggcagcaattgaa

SEQ ID NO: 513859 - DNA, 75 bp, synthetic construct
  source 1..75: mol_type = other DNA
aaaagctgtctaacaacgaacttgaacagggcgtgattgaaaccatcatcgatcgcgatgacctgtttgccatcc

SEQ ID NO: 513860 - DNA, 75 bp, synthetic construct
  source 1..75: mol_type = other DNA
aagcttttctcgatatgttggcgtggtcagaaggaactgataacggatggcagaagaccagaaatcatggttatg

SEQ ID NO: 513861 - DNA, 75 bp, synthetic construct
  source 1..75: mol_type = other DNA
aaacttgtcactctaaacccaaaacttaaatcaacagccgctggacgctatcagcttctttcacgctggtgggat

SEQ ID NO: 513862 - DNA, 75 bp, synthetic construct
  source 1..75: mol_type = other DNA
aagctttccttgatatggtggcctggtcagaaggaacggataacgggcgacaaccgacacgtaaccacggttatg

SEQ ID NO: 513863 - DNA, 75 bp, synthetic construct
  source 1..75: mol_type = other DNA
tcaaatcaacagccgctggacgttaccagcttctttcacgctggtgggatgcctaccgcaagcaacttggcctga

SEQ ID NO: 513864 - DNA, 75 bp, synthetic construct
  source 1..75: mol_type = other DNA
tgtactgctgcgctcgttgtttaatcgtggcatcgaaagcccgcaggtgctggaagaacacggtatcagcgtcta

SEQ ID NO: 513865 - DNA, 75 bp, synthetic construct
  source 1..75: mol_type = other DNA
tgctgttcactttattaaagatggcccaaaagatgattatgtgtacaaagtacaaagaataacaccggaaaatgg

SEQ ID NO: 513866 - DNA, 75 bp, synthetic construct
  source 1..75: mol_type = other DNA
tttgttacgtcgcgtacagtctacagaaggtgtgaaccctccagagaatactacattaaactctttatcaggtgt

SEQ ID NO: 513867 - DNA, 75 bp, synthetic construct
  source 1..75: mol_type = other DNA
atgtcgtcatcattatcaggtataacattcactacttctttgacaagccatgcgtcatggaataagttgacccga

SEQ ID NO: 513868 - DNA, 75 bp, synthetic construct
  source 1..75: mol_type = other DNA
gcctaccgtaaacagcttggactgaaagatttctccccgaaaagccaggatgcggtggcgttacagcagattaaa

SEQ ID NO: 513869 - DNA, 75 bp, synthetic construct
  source 1..75: mol_type = other DNA
atgcaaaatcttaatcctcagcgtaaagctttcctcgatatggtggcatggtcagaaggaacggataacggacgg

SEQ ID NO: 513870 - DNA, 75 bp, synthetic construct
  source 1..75: mol_type = other DNA
ttcctgcgcgatcatccggcggtaaaagccccggtgattgagatgattaaccatccgcagaatccttacgtcaaa

SEQ ID NO: 513871 - DNA, 75 bp, synthetic construct
  source 1..75: mol_type = other DNA
caaccagttacgctttgactttgaatacatgaacccgatgccgggcggttcggtgaataactgtattaccttcca

SEQ ID NO: 513872 - DNA, 75 bp, synthetic construct
  source 1..75: mol_type = other DNA
aaacttgtcatgctgaacccaaaactcaaatcaactgccgccggacgttaccagcttctttcccgttggtgggat

SEQ ID NO: 513873 - DNA, 75 bp, synthetic construct
  source 1..75: mol_type = other DNA
aagacttctctccgaaaagccaggacgcagtggcattgcagcagattaaagagcgtggtgctttaccgatgattg

SEQ ID NO: 513874 - DNA, 75 bp, synthetic construct
  source 1..75: mol_type = other DNA
aagctttccttgatatggtggcgtggtcagaaggaacagataacagacggcagaaaaccagaaatcacggttatg

SEQ ID NO: 513875 - DNA, 75 bp, synthetic construct
  source 1..75: mol_type = other DNA
tttcccggcgattaatctgaccgtaaccgacgatggcagcgctattcaggggaaagatgccgatatcatgattat

SEQ ID NO: 513876 - DNA, 75 bp, synthetic construct
  source 1..75: mol_type = other DNA
cttttggtgaactgaaaacctatgaagagcaattacagtccagcgggctggagcccgcggcaattaacatttcgc

SEQ ID NO: 513877 - DNA, 75 bp, synthetic construct
  source 1..75: mol_type = other DNA
aatgacctgtcacacttcccggtgccattctttgatccgcgtgataaccgcaccaacaccttgccgatggtcttt

SEQ ID NO: 513878 - DNA, 75 bp, synthetic construct
  source 1..75: mol_type = other DNA
aacgccaatgcgccagacgccattccccggcattgtgccggacgaaaacgaccgtgcggcagaaactcagtcaac

SEQ ID NO: 513879 - DNA, 75 bp, synthetic construct
  source 1..75: mol_type = other DNA
gtgctgcgtggcatcaacccgaacggcagtattgagtttggtatgcgcagcgacgaagtggtaacgaaggcgatg

SEQ ID NO: 513880 - DNA, 75 bp, synthetic construct
  source 1..75: mol_type = other DNA
gtttggttccgtcgcggtgatccgcgaatcgggcattaacagcctgcgggtgggtgatatctattacgtcggtca

SEQ ID NO: 513881 - DNA, 75 bp, synthetic construct
  source 1..75: mol_type = other DNA
agacatttctgacaagtgaacatgcgtcatggaacaggttcaacagaaggcttcatatacccaatgaagatatcg

SEQ ID NO: 513882 - DNA, 75 bp, synthetic construct
  source 1..75: mol_type = other DNA
tatggcaccttaatgagtgttttcccgccgaagagcacgattcagaggatattgtgctagagcgtggatatttct

SEQ ID NO: 513883 - DNA, 75 bp, synthetic construct
  source 1..75: mol_type = other DNA
aatgaccgctgttattatgattggcgctccggtaggaatatttattgcggcattaattattgatcattttcctcg

SEQ ID NO: 513884 - DNA, 75 bp, synthetic construct
  source 1..75: mol_type = other DNA
ccctcgccctggccggtatttgtcaggcggcacgcctggtacaacagcttgctcaccaggggcattgtgatgctg

SEQ ID NO: 513885 - DNA, 75 bp, synthetic construct
  source 1..75: mol_type = other DNA
tggataaacttaaggtgccgggcagctatattgccaaaggttacactgccgatgaacatgccgggctatttactg

SEQ ID NO: 513886 - DNA, 75 bp, synthetic construct
  source 1..75: mol_type = other DNA
accgaatgaccgagacctgttgtttaaaggctggtatcagctggccattgctcaccctgagttaaatggcattct

SEQ ID NO: 513887 - DNA, 75 bp, synthetic construct
  source 1..75: mol_type = other DNA
atgacccgcgcaactgctccggtagctccaaggcggaggtgctggaaaatatcaaaaacaatttcgacgcgtttc

SEQ ID NO: 513888 - DNA, 75 bp, synthetic construct
  source 1..75: mol_type = other DNA
cagtctgatgctttacgaacagtttggaaatttgaaattcaaatacaggaacagggagagggtactgcgtcgata

SEQ ID NO: 513889 - DNA, 75 bp, synthetic construct
  source 1..75: mol_type = other DNA
cggaacaacgtgattgaatgcgatcatggcaaactgaaacggataatcggcgccacgctgggatttaaatccatg

SEQ ID NO: 513890 - DNA, 75 bp, synthetic construct
  source 1..75: mol_type = other DNA
cgatcactccacgatttaccgctgggttcagcgttatgcgcctgaaatggaaaaacggctgcgggccgtcgacag

SEQ ID NO: 513891 - DNA, 75 bp, synthetic construct
  source 1..75: mol_type = other DNA
ttgacccagctggcagctaccatcgcgcaccgggtgtgtcggcacctgacgcgcaaaggctggctcgaaggggag

SEQ ID NO: 513892 - DNA, 75 bp, synthetic construct
  source 1..75: mol_type = other DNA
gccagaacgcaccgaaaggtcacttcttcctgcatccacgagctcgttcaccgcactatattgtgatgaacgata

SEQ ID NO: 513893 - DNA, 75 bp, synthetic construct
  source 1..75: mol_type = other DNA
gtcagggatatcctgaccaccccgctggcaagccgggttatgcgacgggaatatggcagccttgtgcctgatttg

SEQ ID NO: 513894 - DNA, 75 bp, synthetic construct
  source 1..75: mol_type = other DNA
atcaaaaacaatttcgacgcgtttcttgctctgacaccagaaacaaaagcagaacggatgtaccgacgcgatata

SEQ ID NO: 513895 - DNA, 75 bp, synthetic construct
  source 1..75: mol_type = other DNA
tgacatctgcgcttcagggagtggaaaaactgctgctgatctcttccagcgaagtggggcaacgtgccccgcagc

SEQ ID NO: 513896 - DNA, 75 bp, synthetic construct
  source 1..75: mol_type = other DNA
acgttgacacagttagcggcagagctgaccaaacagagcggcaaacaggttacctatcaaaatctgagcgaaacc

SEQ ID NO: 513897 - DNA, 75 bp, synthetic construct
  source 1..75: mol_type = other DNA
aagccggtcacgaaggcaaggtttacgaactggcgggcgatagtgcctggacgctgacacagttagcggcagaac

SEQ ID NO: 513898 - DNA, 75 bp, synthetic construct
  source 1..75: mol_type = other DNA
gtcagaaggaacggataacgggcgacaaccgacacgtaaccacggttatgacgttattgtcggtggcgaactctt

SEQ ID NO: 513899 - DNA, 75 bp, synthetic construct
  source 1..75: mol_type = other DNA
atgctaaatcttaatcctcagcgtaaagctttcctcgatatgttggcgtggtcagaaggaacggataacgggcga

SEQ ID NO: 513900 - DNA, 75 bp, synthetic construct
  source 1..75: mol_type = other DNA
gatttcgccgcggcactgaaaagcgtcggactgcctgatggactggcggatatgctggcggattctgacgttggc

SEQ ID NO: 513901 - DNA, 75 bp, synthetic construct
  source 1..75: mol_type = other DNA
gaaagtgtgcaccgggcgctggcgcgatctgaacctgtgtgtggtggtggtcgcagctctgtttgcactgaagat

SEQ ID NO: 513902 - DNA, 75 bp, synthetic construct
  source 1..75: mol_type = other DNA
atgccagcgcctttgtatggtgcggatgacccgcgccgctgttccggcaaatcagtatcggaggtgctggataaa

SEQ ID NO: 513903 - DNA, 75 bp, synthetic construct
  source 1..75: mol_type = other DNA
acagcaaaacgctcagcacgctgattggccgcccgacaacaacattagccgaaagcgtaaacgcgctttttaatg

SEQ ID NO: 513904 - DNA, 75 bp, synthetic construct
  source 1..75: mol_type = other DNA
ggtggctggcgtgaaatttatcgcctacaccagcctgttacatgcggacacctccccgctcggcctggctgctga

SEQ ID NO: 513905 - DNA, 75 bp, synthetic construct
  source 1..75: mol_type = other DNA
tgaccaaacagagcggaaaatccgttacctatcaaaatctgagcgaaaccgatttcgctgcggcgctgaaaagcg

SEQ ID NO: 513906 - DNA, 75 bp, synthetic construct
  source 1..75: mol_type = other DNA
atattacacagtatggtactcaaaaaacggcaattgtagtgcagagacagtcgcaaatggctattcgcgtgacac

SEQ ID NO: 513907 - DNA, 75 bp, synthetic construct
  source 1..75: mol_type = other DNA
aaagaagtagcgcttgaagatatagagccagcaatagtattaattttgccggatagaagagattttgaaactgag

SEQ ID NO: 513908 - DNA, 75 bp, synthetic construct
  source 1..75: mol_type = other DNA
gtgcttgcctttcttttcataatgacctttattttctcagttatttcaagacattatggtaataggatggttaca

SEQ ID NO: 513909 - DNA, 75 bp, synthetic construct
  source 1..75: mol_type = other DNA
gcctgccaggtgaacgatcgcagcgtggatgacgttatcgcccaggtgaagcagattgttggtgatatgccggtc

SEQ ID NO: 513910 - DNA, 75 bp, synthetic construct
  source 1..75: mol_type = other DNA
tggaccctgcatttgcgccgggaaccggtacgccagtgattggcggcctgacctccgatcgcgccattaaactgg

SEQ ID NO: 513911 - DNA, 75 bp, synthetic construct
  source 1..75: mol_type = other DNA
tatccaggacaataatcgtattctccgctgggacagaaactatgcctctcgtgcaaaaaatcactggcgaaaggt

SEQ ID NO: 513912 - DNA, 75 bp, synthetic construct
  source 1..75: mol_type = other DNA
tgtatcaccaaatctaccggacctggtattaagtgtgggtcagatgaatactccagttcggtctaatcccgaaat

SEQ ID NO: 513913 - DNA, 75 bp, synthetic construct
  source 1..75: mol_type = other DNA
gataatgaagttttaattaaagtggatgcagcgggaatttgtggttctgacatcggtgcatttcgtggtactaac

SEQ ID NO: 513914 - DNA, 75 bp, synthetic construct
  source 1..75: mol_type = other DNA
tcggtgatcctctatttcctcgcacgtaaattgttgccgccagaaacggaagctgttgaagggggagcgaggcca

SEQ ID NO: 513915 - DNA, 75 bp, synthetic construct
  source 1..75: mol_type = other DNA
ctgcgtctgccgctgttctacaatctgtcgcccgtcaatcaacgcacggtaattgcgaccttgctgaactacttc

SEQ ID NO: 513916 - DNA, 75 bp, synthetic construct
  source 1..75: mol_type = other DNA
agggcactaaccgcagccagttcttccgtggtcaggtcgataaatatacctggcgcgatattggctccagctatt

SEQ ID NO: 513917 - DNA, 75 bp, synthetic construct
  source 1..75: mol_type = other DNA
cgacaaaacgcgcgttatcgtgccggtccattacgcgggcgtggcctgcgaaatggacaccattatggcgttggc

SEQ ID NO: 513918 - DNA, 75 bp, synthetic construct
  source 1..75: mol_type = other DNA
gctccggcatacgatcagtcggaaatcaccgctctggcagcggcaacgctggcgctggaaatgctgtatattcag

SEQ ID NO: 513919 - DNA, 75 bp, synthetic construct
  source 1..75: mol_type = other DNA
tcacctacgcactggacgaaatcattgaaaccgttcagaaccttacgcctatggcgtccaaggtaaacaaataca

SEQ ID NO: 513920 - DNA, 75 bp, synthetic construct
  source 1..75: mol_type = other DNA
gtgatcgatggtactcacatcgaaatcacgccgaagccgattgcactggatgacgcgtcactgacaaaagaagag

SEQ ID NO: 513921 - DNA, 75 bp, synthetic construct
  source 1..75: mol_type = other DNA
aacccctttgttaaggggttacttgccgctaaaaccgatatccaggggcaaagcccccacactctgcttatgaag

SEQ ID NO: 513922 - DNA, 75 bp, synthetic construct
  source 1..75: mol_type = other DNA
atggcaacagttaaccagttggtacgcaaaccacgtgctcgcaaagttgcgaaaagcaacgtgcctgcgctggaa

SEQ ID NO: 513923 - DNA, 75 bp, synthetic construct
  source 1..75: mol_type = other DNA
gcatgcccgcaaaaacgtggcgtatgtactcgtgtatatacaaccactcctaaaaaaccgaactccgcgctgcgt

SEQ ID NO: 513924 - DNA, 75 bp, synthetic construct
  source 1..75: mol_type = other DNA
taccgtaaatcaggccgtgacctggtgaacaaggatatcttcggtcagattcctgaagaagcgtatcgcaacggt

SEQ ID NO: 513925 - DNA, 75 bp, synthetic construct
  source 1..75: mol_type = other DNA
cactgcttattgtgtgcggcactgtcacggctgcagataacccgagctggcagaacgcacgaaccccacaggctg

SEQ ID NO: 513926 - DNA, 75 bp, synthetic construct
  source 1..75: mol_type = other DNA
tccgccctataacgctgcgcccggtcactttgacgtgcagttcaacggcaatatggtgtccgtcacccccctacg

SEQ ID NO: 513927 - DNA, 75 bp, synthetic construct
  source 1..75: mol_type = other DNA
ctaacgccggtggcggtggccgtggagctggcggtggtggcaatcagcctggtggtcaaaaaggcgctacaggtg

SEQ ID NO: 513928 - DNA, 75 bp, synthetic construct
  source 1..75: mol_type = other DNA
gcactcaggctaccctgatgttaggagctattttgagcgatacagttgtactcagctcaccgacgacgaccgttc

SEQ ID NO: 513929 - DNA, 75 bp, synthetic construct
  source 1..75: mol_type = other DNA
atgcgaagctcggctaagcaagaagaactagttaaagcatttaaagcattacttaaagaagagaaatttagctcc

SEQ ID NO: 513930 - DNA, 75 bp, synthetic construct
  source 1..75: mol_type = other DNA
atatgagtatagcagggatgcgtataattctggttttatcccattaagagatttacaggaaaaaaaagatgctat

SEQ ID NO: 513931 - DNA, 75 bp, synthetic construct
  source 1..75: mol_type = other DNA
aattacacagtattgataccacctctgtcacccttgccggactggcgattatgttgctgccaggcatcggtgtaa

SEQ ID NO: 513932 - DNA, 75 bp, synthetic construct
  source 1..75: mol_type = other DNA
aggtaacattagatgaaatttacgataagataaaagagttttacaagctggatagagaaacaattaataacatga

SEQ ID NO: 513933 - DNA, 75 bp, synthetic construct
  source 1..75: mol_type = other DNA
gccaattgatgtttttaagttcttagaaacaaaaatgctacatattagtaatggggtggcagaaaacttttctcg

SEQ ID NO: 513934 - DNA, 75 bp, synthetic construct
  source 1..75: mol_type = other DNA
aatatgttctgtaataagccatattatcctctcgcattctgaatctgaacgcgccaactatttaagctatgtcaa

SEQ ID NO: 513935 - DNA, 75 bp, synthetic construct
  source 1..75: mol_type = other DNA
tcagttacaagcgaaatggcattaacgatctaaaagaattaccatctttcctgaaattggatcctgattatgata

SEQ ID NO: 513936 - DNA, 75 bp, synthetic construct
  source 1..75: mol_type = other DNA
atcagagagatagagagcttttctttaaagactcacgctctacttttgcacaaaaatggtaccaaacgcgtaaaa

SEQ ID NO: 513937 - DNA, 75 bp, synthetic construct
  source 1..75: mol_type = other DNA
ccacttgctatgtggcatgacttctccggctctctggatacggcagaagattactatgcaacatactcaccatta

SEQ ID NO: 513938 - DNA, 75 bp, synthetic construct
  source 1..75: mol_type = other DNA
atgttattgttggtggtgaactgtttactgattactccgatcaccctcgcaaacttgtcacgctaaaccccaaac

SEQ ID NO: 513939 - DNA, 75 bp, synthetic construct
  source 1..75: mol_type = other DNA
gatggatttattaacctacaagttcttgataatgaaattgaatacgccggaattcgcttaattccaactcactgt

SEQ ID NO: 513940 - DNA, 75 bp, synthetic construct
  source 1..75: mol_type = other DNA
cattttggacaaacccgaaaagaaatccatgagtatgtagatcttaataagattactgaccaggtaatgactcca

SEQ ID NO: 513941 - DNA, 75 bp, synthetic construct
  source 1..75: mol_type = other DNA
gtggcgtatacgcggccatatcaagaatgataagggagatatctggacaaaagcagcaaattatcattcaaaaac

SEQ ID NO: 513942 - DNA, 75 bp, synthetic construct
  source 1..75: mol_type = other DNA
gatgtatcccttgttccgttagttaataatagtctatttaagactgtaataccctctaaaatatttgaatgcatg

SEQ ID NO: 513943 - DNA, 75 bp, synthetic construct
  source 1..75: mol_type = other DNA
cctcactgcaaggtgaatcacaacaaagatatgaatctgccagcaatgaacttcaggtaatttatcgtgagaatt

SEQ ID NO: 513944 - DNA, 75 bp, synthetic construct
  source 1..75: mol_type = other DNA
gctcgctcaatcgtccggcaggcaccaccatccaggacatgatcaaactcgagcagaaaatgctgccggaactgc

SEQ ID NO: 513945 - DNA, 75 bp, synthetic construct
  source 1..75: mol_type = other DNA
tacatttgttagctgtgatacgtatagcaacgttttggcatattattcgcttgcttccagcgccgttgaaacgta

SEQ ID NO: 513946 - DNA, 75 bp, synthetic construct
  source 1..75: mol_type = other DNA
ctgcagcagtctccccccgaaagcagtcatgctttagatgtgcaaaaattacgtaacccgacagtgacattctgg

SEQ ID NO: 513947 - DNA, 75 bp, synthetic construct
  source 1..75: mol_type = other DNA
aactcgttatggtttacatgataagtttgtagctggatatgttggaactcatggattggcacatgggcttgagcg

SEQ ID NO: 513948 - DNA, 75 bp, synthetic construct
  source 1..75: mol_type = other DNA
acgaagcagcataaacagctgtcttcaggccttaaatagtatccataaaaaagggcttaacctgcccgggattat

SEQ ID NO: 513949 - DNA, 75 bp, synthetic construct
  source 1..75: mol_type = other DNA
aatacgctgctgaaaaatcataatatgccttaccgacctacccgtccccgatcgggaaaaatggaaagcccatta

SEQ ID NO: 513950 - DNA, 75 bp, synthetic construct
  source 1..75: mol_type = other DNA
gcgacacacacgctacagaaccgccaaaaaatgacgggacagcagcaacaccatctacgccggatcaacttattg

SEQ ID NO: 513951 - DNA, 75 bp, synthetic construct
  source 1..75: mol_type = other DNA
atatgccacccggctggaagcttcggagtaaggggaatgagctatctgaacttcttaaaaggcataacctaccct

SEQ ID NO: 513952 - DNA, 75 bp, synthetic construct
  source 1..75: mol_type = other DNA
gccgtaaatttccatgatacaggctatatgccacccggctggaagcttcggagtaaggggaatgagctatctgaa

SEQ ID NO: 513953 - DNA, 75 bp, synthetic construct
  source 1..75: mol_type = other DNA
ggtgtcaacaacgggttaaaagtgatccacttttcatcatcaccaacggttcaatattgatccaccgttttactc

SEQ ID NO: 513954 - DNA, 75 bp, synthetic construct
  source 1..75: mol_type = other DNA
aatccccgttataccgaaagtggcgcagtagactgtgacgttttttttgacgacagggaccaggcagttccctac

SEQ ID NO: 513955 - DNA, 75 bp, synthetic construct
  source 1..75: mol_type = other DNA
gtgatgcctttaatcgcgcaggaaagagtgactcacgtcgccctggttccggcgctggcgcaattatgggtgcag

SEQ ID NO: 513956 - DNA, 75 bp, synthetic construct
  source 1..75: mol_type = other DNA
gcaggaaacgggctgttgccggagcattttttctggacggatgcggataatcaggatgtcactctgacgccggaa

SEQ ID NO: 513957 - DNA, 75 bp, synthetic construct
  source 1..75: mol_type = other DNA
aaaggtatcttgaaaccggagatgttgactgcatggtcgtgttttcaggtatggaaatgccacttccatacacag

SEQ ID NO: 513958 - DNA, 75 bp, synthetic construct
  source 1..75: mol_type = other DNA
aacgatgagatttatcgccgtcagcgggagatgaaagaggagctgagcagtctgaaggatttgaattcggttagg

SEQ ID NO: 513959 - DNA, 75 bp, synthetic construct
  source 1..75: mol_type = other DNA
gcccgcctgtccccggtggtcatgctggcaaaatctgtcgcggcacaaacacatatggtgtggagcgatgccgat

SEQ ID NO: 513960 - DNA, 75 bp, synthetic construct
  source 1..75: mol_type = other DNA
tcagaaacgcgcattatcttgaaaatggtgcggttgactgcgaggtgttatttgaaggtgaaacggagttcgtcc

SEQ ID NO: 513961 - DNA, 75 bp, synthetic construct
  source 1..75: mol_type = other DNA
cgctatcggcatggtgcatctgtcgcgttttgctgaagatctgattttctttaacaccggcgaagcggggtttgt

SEQ ID NO: 513962 - DNA, 75 bp, synthetic construct
  source 1..75: mol_type = other DNA
gtccccgttataccgaatccggtgcgattgactgcgatgttctgtttgagggaatggaagcccctgttccctaca

SEQ ID NO: 513963 - DNA, 75 bp, synthetic construct
  source 1..75: mol_type = other DNA
aggcatggcgcgacagtcaggaaaacattgagtttattttcacgtttgatggccgtcgttttgatggcggaaaaa

SEQ ID NO: 513964 - DNA, 75 bp, synthetic construct
  source 1..75: mol_type = other DNA
attgttaacgcgcggcccttataccatttcgggctattaccgcgcccctgcccacaacgcgcaggcctttaccgc

SEQ ID NO: 513965 - DNA, 75 bp, synthetic construct
  source 1..75: mol_type = other DNA
tcagcgggagatgaaagaggaactgaataatcttgatgatttacgctcaatccgagcgtttgacgttacgcaata

SEQ ID NO: 513966 - DNA, 75 bp, synthetic construct
  source 1..75: mol_type = other DNA
ggtcgatcactcgatgatggcgaacccacgccgcgtggcagtggggctggaacaaaaccgtctggcaatcctgct

SEQ ID NO: 513967 - DNA, 75 bp, synthetic construct
  source 1..75: mol_type = other DNA
atgaaaatcagagcggtaaaaggcatcagaaacgcgcattaccttgaatatggtgcggttgactgcgaggtgtta

SEQ ID NO: 513968 - DNA, 75 bp, synthetic construct
  source 1..75: mol_type = other DNA
gttatgacatggagtgatgctgataatcagcaggtgaaactgtcgatgacggaactggaggagctggctgcagct

SEQ ID NO: 513969 - DNA, 75 bp, synthetic construct
  source 1..75: mol_type = other DNA
gtcgttcacgttcgaatggaacggtcacacctggaacgcaggccccgactcactagcccgtctttatccggtggt

SEQ ID NO: 513970 - DNA, 75 bp, synthetic construct
  source 1..75: mol_type = other DNA
tcagcgacagatgaaggacgtgctggatgggctggaggatttacgctcaatcagagaaatgacggttagcagtga

SEQ ID NO: 513971 - DNA, 75 bp, synthetic construct
  source 1..75: mol_type = other DNA
gcagcgggagatgaaagaagaactgaataacttggatgatttgcgctcaattagagcgattgcaattagcagtaa

SEQ ID NO: 513972 - DNA, 75 bp, synthetic construct
  source 1..75: mol_type = other DNA
gcagcaatggcgcaggcgcagctcgatcgcaatgacgagatttatcgacgtcagcgggagatgaaggaagaactg

SEQ ID NO: 513973 - DNA, 75 bp, synthetic construct
  source 1..75: mol_type = other DNA
ctcaatatgttgtcggaaaccagcatcgaacagatctgcctgattgccgaagaagagcaaccgaagctgatggtg

SEQ ID NO: 513974 - DNA, 75 bp, synthetic construct
  source 1..75: mol_type = other DNA
tcaccgaggtgcgtcttgctgcgtcgccaacggtggcgcgtaacgagcgtctcagtggctatgccggtagcgccg

SEQ ID NO: 513975 - DNA, 75 bp, synthetic construct
  source 1..75: mol_type = other DNA
agcaaaaccgtctggcaatcctgctggcggtgcttcaccgtcacggtgggttgcaaatggccgatcaggatgtgt

SEQ ID NO: 513976 - DNA, 75 bp, synthetic construct
  source 1..75: mol_type = other DNA
gcgaaatcgccccgttcaccgtcacgccggaacttatcgcagcggcaaaagatgccaaaaaacgggaaatcgagg

SEQ ID NO: 513977 - DNA, 75 bp, synthetic construct
  source 1..75: mol_type = other DNA
gtgaaatcgccccgttcaccgtcacgcctgaacttatcgcagcggcaaaagatgccagaaagcgggaaatcgagg

SEQ ID NO: 513978 - DNA, 75 bp, synthetic construct
  source 1..75: mol_type = other DNA
ggctgtcttgcaccgtcacggtggtctgcaaatggccgatcaggatgtgtttgtgaacgtggtcggcggcgtaaa

SEQ ID NO: 513979 - DNA, 75 bp, synthetic construct
  source 1..75: mol_type = other DNA
ctgcaaagcggcaaatggggcgagattgccccgttcaccgcatcacctgaacttatcgcagcagcaaaggacgcc

SEQ ID NO: 513980 - DNA, 75 bp, synthetic construct
  source 1..75: mol_type = other DNA
ccggaagatgcggaccatatttcttttattcgcgggcgtattggttttgaactgcctgactggtttatcccgaag

SEQ ID NO: 513981 - DNA, 75 bp, synthetic construct
  source 1..75: mol_type = other DNA
ccggaagatgccgatcatattgcttttattcgcgggcgtattggttttgaactgcctgactggtttatcccgaag

SEQ ID NO: 513982 - DNA, 75 bp, synthetic construct
  source 1..75: mol_type = other DNA
ttggaatagttggacggaacttaactcagatatctttgccgatgaaataactcactggatgccgctaccagaacc

SEQ ID NO: 513983 - DNA, 75 bp, synthetic construct
  source 1..75: mol_type = other DNA
tcacggacatctgccgtcgctttgccaaccgtccgccaaaacggttgattttcgacaggcagctgcgagaagcca

SEQ ID NO: 513984 - DNA, 75 bp, synthetic construct
  source 1..75: mol_type = other DNA
gcaccaccattgaactggtgaatgccggagatcagaccatcctgagcggtgctgcggtggtggtcggcagtatgg

SEQ ID NO: 513985 - DNA, 75 bp, synthetic construct
  source 1..75: mol_type = other DNA
gtgagcgaatgccaaacgaagaagatgttttggtttattgttcagacacaaaagagcagatggtagggtttcaca

SEQ ID NO: 513986 - DNA, 75 bp, synthetic construct
  source 1..75: mol_type = other DNA
atcagtgagcagcccggaatcggctgggtttattcagacggggggtttactgcaccacccactcaggaacgttct

SEQ ID NO: 513987 - DNA, 75 bp, synthetic construct
  source 1..75: mol_type = other DNA
cacgacagttcctctttcccgaaagaagtgaaggaccactgggcctttaaagcctatgcgcgcccgattgacgaa

SEQ ID NO: 513988 - DNA, 75 bp, synthetic construct
  source 1..75: mol_type = other DNA
ttttattcctgcaatccgcaattatcatcccacagaactatactttttgggtcaacacgtaacgctttacaggtg

SEQ ID NO: 513989 - DNA, 75 bp, synthetic construct
  source 1..75: mol_type = other DNA
gacagagatgattatacacagggtttatttctgggttatagccgcgacatcacagactcaagccaattatcattc

SEQ ID NO: 513990 - DNA, 75 bp, synthetic construct
  source 1..75: mol_type = other DNA
ctgctcggccacggtcactttggtaaagcacgcccggcatacctggcagttactaccattgccttcctctactgc

SEQ ID NO: 513991 - DNA, 75 bp, synthetic construct
  source 1..75: mol_type = other DNA
acagtgccggataatcagcagctcattaatatttctgatatcagtgagcagcccggaatcggctgggcgtattca

SEQ ID NO: 513992 - DNA, 75 bp, synthetic construct
  source 1..75: mol_type = other DNA
ctgctgttttctgataacgccgtgaacaatattgcctggcaactcggttttaaggatccagcttattttgcgcgc

SEQ ID NO: 513993 - DNA, 75 bp, synthetic construct
  source 1..75: mol_type = other DNA
cgtgcacggttcgatccgtggctggttgccgaagccgaaaaagaaggtgtcgaatgcatccctggtgcgacggtg

SEQ ID NO: 513994 - DNA, 75 bp, synthetic construct
  source 1..75: mol_type = other DNA
cggcggtgaatcctggagtgtattacgtgcacggttcgatccgtggctggttgccgaagccgaaaaagaaggtgt

SEQ ID NO: 513995 - DNA, 75 bp, synthetic construct
  source 1..75: mol_type = other DNA
atccctggtttgtggttagtgcctggactgatgttgactggtttgttggtgctggttgctcgcgacttctctttg

SEQ ID NO: 513996 - DNA, 75 bp, synthetic construct
  source 1..75: mol_type = other DNA
gcgaagggcgtaccgttccgcgaggcgcaccatatcgtgggtgaagcggtggtggaagccattcgtcagggtaaa

SEQ ID NO: 513997 - DNA, 75 bp, synthetic construct
  source 1..75: mol_type = other DNA
ggagctttctgaccgcgtgacttccggttcatcattaatgccgcagaagaaaaacccggatgcgctggagctgat

SEQ ID NO: 513998 - DNA, 75 bp, synthetic construct
  source 1..75: mol_type = other DNA
tcagaaacgcgcattatctcgaaaatggcgcggttgactgcgaggtgttatttgaaggtgaaacggaattcgtcc

SEQ ID NO: 513999 - DNA, 75 bp, synthetic construct
  source 1..75: mol_type = other DNA
actgagggtgttttcctcttgccaaaagtatccgcagatgcggttactgccggggcgcaggtgtatctgaaggac

SEQ ID NO: 514000 - DNA, 75 bp, synthetic construct
  source 1..75: mol_type = other DNA
attcctggtttgtggttagtgcccggactcatgctaatgggcctgttgatgctggtcgcacgcgacttctccttg

SEQ ID NO: 514001 - DNA, 75 bp, synthetic construct
  source 1..75: mol_type = other DNA
attttcgccagctactccgcacagcgttatctgaccgaagcggcaaatgggacattagctcttgatgttgtgctg

SEQ ID NO: 514002 - DNA, 75 bp, synthetic construct
  source 1..75: mol_type = other DNA
tgacgacaacgaacagatctaccgtaatctgcaattacatctgaatccgctggatcaaagccctaacgtcaaacg

SEQ ID NO: 514003 - DNA, 75 bp, synthetic construct
  source 1..75: mol_type = other DNA
aaagctgttctttaccttgcaataccgttaagtatttttgtcaccgttttgtcgatgtatggtcggccgtgggct

SEQ ID NO: 514004 - DNA, 75 bp, synthetic construct
  source 1..75: mol_type = other DNA
taataaaaaaattgaactcaacaataaatgtatttggagaaccaagcaaaaatcttgcaatgttaattgaggaag

SEQ ID NO: 514005 - DNA, 75 bp, synthetic construct
  source 1..75: mol_type = other DNA
ggggcagcaaaagcgttatttgccgatccccagcagcctcgcacccgccagttcctcgagaagtttctgctgcaa

SEQ ID NO: 514006 - DNA, 75 bp, synthetic construct
  source 1..75: mol_type = other DNA
ggctcagcaaaagcattatttgctaatccacagcagccccgtactcgccagtttctcgagaaatttctgctgaaa

SEQ ID NO: 514007 - DNA, 75 bp, synthetic construct
  source 1..75: mol_type = other DNA
atggtgttattaagaaagctagcagttattatggatatgggtataaccactatggttataactacggagaagata

SEQ ID NO: 514008 - DNA, 75 bp, synthetic construct
  source 1..75: mol_type = other DNA
gcaacagctggcagaggtggcgattgccggtttccagccgcagtttaataaatgggtagagttactgaccgatcc

SEQ ID NO: 514009 - DNA, 75 bp, synthetic construct
  source 1..75: mol_type = other DNA
ggatcaagggagaatagtggagcaaggctcagcaaaagcattatttgctaatccacagcagccccgtactcgcca

SEQ ID NO: 514010 - DNA, 75 bp, synthetic construct
  source 1..75: mol_type = other DNA
tggtgaagaaattccacggtcagacggtattgcatggtatcgatctggaggtcaaaactggcgaagtcgtggcga

SEQ ID NO: 514011 - DNA, 75 bp, synthetic construct
  source 1..75: mol_type = other DNA
tagaacgggtgctggagcaaagcggggaagccccggtctacgggccaaacctgcgcgcctcctgccgtcgtctgg

SEQ ID NO: 514012 - DNA, 75 bp, synthetic construct
  source 1..75: mol_type = other DNA
ggccatagcacaccctcttctgctggcagaacaggaccgcctccgggcagaacagcgcgcggcggaagttgtcgt

SEQ ID NO: 514013 - DNA, 75 bp, synthetic construct
  source 1..75: mol_type = other DNA
tgacgtatcaggcctgtcgtggggattttgtggtgcgtctcgacggcagcacctgtctgcagttatggaataaag

SEQ ID NO: 514014 - DNA, 75 bp, synthetic construct
  source 1..75: mol_type = other DNA
gatctggcggtggagctgaacggcatgacgtatcaggcctgccgtggggattttgtggtacgtctcgacggcagc

SEQ ID NO: 514015 - DNA, 75 bp, synthetic construct
  source 1..75: mol_type = other DNA
gctggcagaacaggaccgcctccgggcagaacagcgcgcggcagaagtcgtcgtactgccgctggtcccggcatc

SEQ ID NO: 514016 - DNA, 75 bp, synthetic construct
  source 1..75: mol_type = other DNA
cgatccgctggaagtggcgcagtggctgcaggcctgtcacgattcaggaatggaggttcgtgtgcaggttaatga

SEQ ID NO: 514017 - DNA, 75 bp, synthetic construct
  source 1..75: mol_type = other DNA
tccatttcattgcaaatattccggtcaaaggcactcgctggctatatagcagtaaaccttatgcgcttgcaacgc

SEQ ID NO: 514018 - DNA, 75 bp, synthetic construct
  source 1..75: mol_type = other DNA
cggtgaaagtgcacattcgtaatctgctgcgtaaactcaatgttcgctcacgagtggcggccaccattttgttcc

SEQ ID NO: 514019 - DNA, 75 bp, synthetic construct
  source 1..75: mol_type = other DNA
ctggatatcgacgtgatcttgttggatctcaatatgaaaggtatgagtggccttgatacgctcaatgccttgcgc

SEQ ID NO: 514020 - DNA, 75 bp, synthetic construct
  source 1..75: mol_type = other DNA
cacatggatgaaacctacgtgaaggtcaatggccgctgggcgtatctgtaccgggccgaggtggtagatgcatag

SEQ ID NO: 514021 - DNA, 75 bp, synthetic construct
  source 1..75: mol_type = other DNA
ggcaaactgaaacggataatcaacgccacgctgggatttaaatccatgaagacggcttacgccaccatcaaaggt

SEQ ID NO: 514022 - DNA, 75 bp, synthetic construct
  source 1..75: mol_type = other DNA
gtgcccgtctgacgttgaacaccgacagattaagtaccggaacaacgtgattgaatgcgatcatggcaaactgaa

SEQ ID NO: 514023 - DNA, 75 bp, synthetic construct
  source 1..75: mol_type = other DNA
cagcgatgtctttgcgctgatagacgcaggcgcagacggttatctgttgaaagacagcgacccggaagtgttgct

SEQ ID NO: 514024 - DNA, 75 bp, synthetic construct
  source 1..75: mol_type = other DNA
atctacttacatgacacgcctaatcacaatctgttcaagcgtgatacgcgtgcgttgagctctggctgtgtgagg

SEQ ID NO: 514025 - DNA, 75 bp, synthetic construct
  source 1..75: mol_type = other DNA
atgttgcttaacatgatgtgtggtcgtcggctttcggcaataagtttttgtctggccgtaacattcgctccactg

SEQ ID NO: 514026 - DNA, 75 bp, synthetic construct
  source 1..75: mol_type = other DNA
agcaggctccaggcccacggaactcgctggggcgctataaattcaatatgccgagttcagaggccatttatttgc

SEQ ID NO: 514027 - DNA, 75 bp, synthetic construct
  source 1..75: mol_type = other DNA
cttgctgccatccgagctttcaacaggcatcatggttaatattccggcctattcgctggtctattaccagaatgg

SEQ ID NO: 514028 - DNA, 75 bp, synthetic construct
  source 1..75: mol_type = other DNA
tgagtccgtccgccgttgccgtcgaaacagcagaaactaagccgatggacaggcaaactacggctcgcagtaaac

SEQ ID NO: 514029 - DNA, 75 bp, synthetic construct
  source 1..75: mol_type = other DNA
cgggccgaaaattgcgctccctggcgatgaaacacccgcagatgcagtcgtgagtccgtccgccgttgccgtcga

SEQ ID NO: 514030 - DNA, 75 bp, synthetic construct
  source 1..75: mol_type = other DNA
ctgcgcgcttcctgccgtcgtctggaggatgccggctggctgcgtaccctgcgcgctccgaacctgcaactggca

SEQ ID NO: 514031 - DNA, 75 bp, synthetic construct
  source 1..75: mol_type = other DNA
ccgtggcacagcctctgctgcaggcagaacaggaccgcctccgggcagaacagcgtgcggcagaagtcgtcgtac

SEQ ID NO: 514032 - DNA, 75 bp, synthetic construct
  source 1..75: mol_type = other DNA
gccggtcagctattaccagcaagatatcaaagacgtcatcgacgacctggctaatcgtggattcattaaggtagc

SEQ ID NO: 514033 - DNA, 75 bp, synthetic construct
  source 1..75: mol_type = other DNA
tttcctttttctgcttacgccgccattgagcatattcccgtgattgaagtggagtttgtccatctagcggggctg

SEQ ID NO: 514034 - DNA, 75 bp, synthetic construct
  source 1..75: mol_type = other DNA
agcttcaggctgcttatcaagagcgattatccaaatatcagcaacgtgttaaggctctcaaggttcctggctatc

SEQ ID NO: 514035 - DNA, 75 bp, synthetic construct
  source 1..75: mol_type = other DNA
ggtttcgatgaagaaatctaccagcaacgcatggctaagtgggcagaggataacggcaagtaccagcaacaggag

SEQ ID NO: 514036 - DNA, 75 bp, synthetic construct
  source 1..75: mol_type = other DNA
cgatccgctggaagttgcgctgtggctgcaggcctgtcacgatgcaggaatggaggttcgtgtgcagataaatga

SEQ ID NO: 514037 - DNA, 75 bp, synthetic construct
  source 1..75: mol_type = other DNA
gttcgaatggaacggtcatacctggaacggtggtcctgactcgatggcccgtctttatcctgtggtaatggctgc

SEQ ID NO: 514038 - DNA, 75 bp, synthetic construct
  source 1..75: mol_type = other DNA
ccagcgggagatgaaggatgaactgaataatctggatgatttacgctcaatcagagagatggtgattagcagtaa

SEQ ID NO: 514039 - DNA, 75 bp, synthetic construct
  source 1..75: mol_type = other DNA
atcgcaatgatgaaatttatcgccgtcagcgagagatgaaggatgaactgaataatctggatgatttgaagtcgg

SEQ ID NO: 514040 - DNA, 75 bp, synthetic construct
  source 1..75: mol_type = other DNA
ggaggtactgcctaatcgcaatcgcccaatgactgcgctgccgacgcttattcgccatacgcccgggcaaaaaga

SEQ ID NO: 514041 - DNA, 75 bp, synthetic construct
  source 1..75: mol_type = other DNA
cgggacgctgatgaaaggctgtattacgccacagcagatatttccggtgtcgtcgatgtggggctacctggcgaa

SEQ ID NO: 514042 - DNA, 75 bp, synthetic construct
  source 1..75: mol_type = other DNA
acgttcgaatggaacggtcgtacctggaatgctggccccgactcaatggctcgtctttatccggtggtaatggcc

SEQ ID NO: 514043 - DNA, 75 bp, synthetic construct
  source 1..75: mol_type = other DNA
ccgggccccgtgctgacgcgggacctggaacgggtgctggaacgaagcggggaggccccggtctacgggccaaac

SEQ ID NO: 514044 - DNA, 75 bp, synthetic construct
  source 1..75: mol_type = other DNA
aaaaacggcctggccccgtgctgacgcgggacatagaacgggtgctggagcgaagtggggaagccccggtctacg

SEQ ID NO: 514045 - DNA, 75 bp, synthetic construct
  source 1..75: mol_type = other DNA
cactgcagcggagagtgctgattgtgctagctgcccttgatgaaaaacggccgggccccgtgctaacgcgggaca

SEQ ID NO: 514046 - DNA, 75 bp, synthetic construct
  source 1..75: mol_type = other DNA
ctggcagtcgaactgacggacgccggccggaccgtggcacagcctctgctgctggcagagcaggaccgcctccgg

SEQ ID NO: 514047 - DNA, 75 bp, synthetic construct
  source 1..75: mol_type = other DNA
cactgcagcggagagtgctgattgtgctggctgcccttgatgaaaaacggccgggacccgtactgacgcgggaca

SEQ ID NO: 514048 - DNA, 75 bp, synthetic construct
  source 1..75: mol_type = other DNA
cactgcagcggagagtgctgattgtgctggctgcccttgatgaaaaacggccaggccccgtgctaacgcgggaca

SEQ ID NO: 514049 - DNA, 75 bp, synthetic construct
  source 1..75: mol_type = other DNA
gtcggctgggccgtggccccccctcttctgctggcagaacaggaccgcctccgggcagaacaacgcgcggcggaa

SEQ ID NO: 514050 - DNA, 75 bp, synthetic construct
  source 1..75: mol_type = other DNA
accgcctccgggcagaacagcgcgcggcggaagtcgtcgtactgccgctggtcccggcagcagatctgcccgcag

SEQ ID NO: 514051 - DNA, 75 bp, synthetic construct
  source 1..75: mol_type = other DNA
gcgcgccacgaatctgcagctggctgtcgagctgacggacgccggccgggccgtggcacagcctctgctgctggc

SEQ ID NO: 514052 - DNA, 75 bp, synthetic construct
  source 1..75: mol_type = other DNA
tggtacgccgggagggcgatccgctggaagtggcgcagtggctgcaggcctgtcacgatgcaggaatggaggttc

SEQ ID NO: 514053 - DNA, 75 bp, synthetic construct
  source 1..75: mol_type = other DNA
cgtcgccgctgcaacgacgggtgctgattgtgctggctgcccttgatgaaaaacggccaggccccgtgctgactc

SEQ ID NO: 514054 - DNA, 75 bp, synthetic construct
  source 1..75: mol_type = other DNA
ggagggcgatccgctggaagtagctcagtggctgcaggcctgtcacgatgcaggaatagaagttcgtgtacaggt

SEQ ID NO: 514055 - DNA, 75 bp, synthetic construct
  source 1..75: mol_type = other DNA
cagggtggtacgccgggagggcgatccgctggaagtggcgcagtggctgcaggcctgtcacgatgcaggaatgga

SEQ ID NO: 514056 - DNA, 75 bp, synthetic construct
  source 1..75: mol_type = other DNA
catactttttctgggtgaatccgttaaggcataaaataactcagagctggaaaggttatgaaccttcactcgaag

SEQ ID NO: 514057 - DNA, 75 bp, synthetic construct
  source 1..75: mol_type = other DNA
attttgcgcaggccggctttaatatcatgaacggtctgccggcaaccagtacggccccggtgccggccggccagt

SEQ ID NO: 514058 - DNA, 75 bp, synthetic construct
  source 1..75: mol_type = other DNA
gaaatggacacaactgcgtgccggttatcgtcagaacatggcgaacaacagtggcagcgcattcacggcaggtgt

SEQ ID NO: 514059 - DNA, 75 bp, synthetic construct
  source 1..75: mol_type = other DNA
ctatccagtgggtgtccgaactgactgacgagctgatggcgaaaatccgcagccatgaatactgccggtcgatgg

SEQ ID NO: 514060 - DNA, 75 bp, synthetic construct
  source 1..75: mol_type = other DNA
aggcgcagaattttaaaggaaattcaggacgtagctggattggtggtcagaaacggggaggtgcagggcaaccag

SEQ ID NO: 514061 - DNA, 75 bp, synthetic construct
  source 1..75: mol_type = other DNA
agtacaaaaccagtgaagaggctgcggaagcggtcgttaaagtgctgggcgacagggccattcgtacctgttctg

SEQ ID NO: 514062 - DNA, 75 bp, synthetic construct
  source 1..75: mol_type = other DNA
ctggcgttctggtgggatgctttgcgctgagccttccggcacaggcggttttcgatctggataacgacgtgatca

SEQ ID NO: 514063 - DNA, 75 bp, synthetic construct
  source 1..75: mol_type = other DNA
aacttgcagtggcttatccgtcaggcgttattcctgatatgcgtggctggacgattaagggcaagcccgccagtg

SEQ ID NO: 514064 - DNA, 75 bp, synthetic construct
  source 1..75: mol_type = other DNA
cgcatgtggctgcttttgccagaagggcaacggatacatatgccgatgcggatggtggcgttccctggaatgccg

SEQ ID NO: 514065 - DNA, 75 bp, synthetic construct
  source 1..75: mol_type = other DNA
tgcaaaaagaacagcactttggcgaagagatctatgtgacgcgtaaaggtgcggtgtctgcgcgtgctggtcaat

SEQ ID NO: 514066 - DNA, 75 bp, synthetic construct
  source 1..75: mol_type = other DNA
tgaaacttcagcgcatcgattttttcataaaactggtagcggcgagcgagtgcagcgacgaagaaaagcggctgg

SEQ ID NO: 514067 - DNA, 75 bp, synthetic construct
  source 1..75: mol_type = other DNA
gcagtgcgacggcagcatctcagagcaaaactactgctgaatccgctgcgacccgtgcggaagctgctgctgatc

SEQ ID NO: 514068 - DNA, 75 bp, synthetic construct
  source 1..75: mol_type = other DNA
gctattgataacgcaaccggcgaactggttattggaaccaaactgtctgcaagtctgaacggtaacgcattgaca

SEQ ID NO: 514069 - DNA, 75 bp, synthetic construct
  source 1..75: mol_type = other DNA
cggtccggcagtctgacggtaacggccggagtgattaaggcgctgcaacgggatccggataatgctgcactgacc

SEQ ID NO: 514070 - DNA, 75 bp, synthetic construct
  source 1..75: mol_type = other DNA
atgtatgaggagagtgtgacatttttcatgaaagtaaaacaggtgataacctcctttcgtaagggggattcacag

SEQ ID NO: 514071 - DNA, 75 bp, synthetic construct
  source 1..75: mol_type = other DNA
actggcgttcattatacctgttttgattggcccgcggatacccgttccccttcttacgtctccttttgttataag

SEQ ID NO: 514072 - DNA, 75 bp, synthetic construct
  source 1..75: mol_type = other DNA
cgagagctggtagcaaatatcaatcaggcacggaaagagagttatcagaagctcgctgaaagccataatatccca

SEQ ID NO: 514073 - DNA, 75 bp, synthetic construct
  source 1..75: mol_type = other DNA
aagtttctccttctgacagcaacccgtggcgtgtttttgttgactggaccggaaccaaagagcgcgtaggtacgc

SEQ ID NO: 514074 - DNA, 75 bp, synthetic construct
  source 1..75: mol_type = other DNA
atgtatgaggagggtgtgacatttttcatgagagtaaaacaggtgataacctcctttcgtaaggggcattcacag

SEQ ID NO: 514075 - DNA, 75 bp, synthetic construct
  source 1..75: mol_type = other DNA
atgtatgaggagtgtgtgacatttttcatgacagtaaaacaggtgataacctcctttcgtaaggggtattcacag

SEQ ID NO: 514076 - DNA, 75 bp, synthetic construct
  source 1..75: mol_type = other DNA
agcccgttcctgcgagccgagcaaacactggaagaagtaggggattgtctgaacctgccttccagtgcagaagtt

SEQ ID NO: 514077 - DNA, 75 bp, synthetic construct
  source 1..75: mol_type = other DNA
cgttgttttgtctgttatgtcggagtgcgatggcgttaaccctggtcgatgctcgcacacaaggacgggttggtg

SEQ ID NO: 514078 - DNA, 75 bp, synthetic construct
  source 1..75: mol_type = other DNA
cagatgttagtcaaaaggattaatgaatcgcgtaataagagctatcaacaactcgccatgaaaaataatctgccg

SEQ ID NO: 514079 - DNA, 75 bp, synthetic construct
  source 1..75: mol_type = other DNA
ccagcgtaacgcttgatgaaagcggaaaaggccaattcaactggcaaatgagcccttgtaatttgaagatggcaa

SEQ ID NO: 514080 - DNA, 75 bp, synthetic construct
  source 1..75: mol_type = other DNA
tggcgaactggctaaaaggtcaaaaagtggaaatcgaacgcgttctggtgagcccgttcctgcgagccgagcaaa

SEQ ID NO: 514081 - DNA, 75 bp, synthetic construct
  source 1..75: mol_type = other DNA
ctgccggagttaacgccctgcggcgatgttggtctggtcagtgcctatttgcaggcgttgaccaatgaaggtgtt

SEQ ID NO: 514082 - DNA, 75 bp, synthetic construct
  source 1..75: mol_type = other DNA
gtaatggggataaagtcagcgatgacgatccgcattaccacaccgaccacctccactggtggtggaacaactaac

SEQ ID NO: 514083 - DNA, 75 bp, synthetic construct
  source 1..75: mol_type = other DNA
gttcggcggcgtcatcggcatcatctgcgtctgcttcaaaagatgaggcgaccagacaagcgtcagcagcgaaga

SEQ ID NO: 514084 - DNA, 75 bp, synthetic construct
  source 1..75: mol_type = other DNA
cacatcgtcgtttgattacggaaccaaatccacgaataacaccggggcgcatacccatagtattagcgggactgc

SEQ ID NO: 514085 - DNA, 75 bp, synthetic construct
  source 1..75: mol_type = other DNA
tgttagcggtacggctgcttcagccggtgcacatacccattcgatgacatttgtttcaggtggttccagtggtgc

SEQ ID NO: 514086 - DNA, 75 bp, synthetic construct
  source 1..75: mol_type = other DNA
ggtagtacagctcagcagtgcgaccaacagcacttccgagtcacaggcggcaacgccaaaagccgttaaggccgc

SEQ ID NO: 514087 - DNA, 75 bp, synthetic construct
  source 1..75: mol_type = other DNA
accttctgcccgtaaggtgaatggtaaggcgctttcagctgatataacactgacgccgaaagatattggtacgct

SEQ ID NO: 514088 - DNA, 75 bp, synthetic construct
  source 1..75: mol_type = other DNA
caacgacagcacagaaagggatagttcagcttagcaacgcgaccaacagcacatctgaaatgctggcggcaacgc

SEQ ID NO: 514089 - DNA, 75 bp, synthetic construct
  source 1..75: mol_type = other DNA
ggcaggcctcagccagtgccaccgccgccggaaaatcggcggaaagcgcgtcgtcatcggcaacaacagctaccg

SEQ ID NO: 514090 - DNA, 75 bp, synthetic construct
  source 1..75: mol_type = other DNA
tagcggtgctgaactggggaaacccgtcaccatcggtaataacgtctggattggcggacgcgcggtcattaaccc

SEQ ID NO: 514091 - DNA, 75 bp, synthetic construct
  source 1..75: mol_type = other DNA
agttgaccagctccagctgaccccaggttttcaacgtgtcttttaccgacaggtcaaagtaacctttgaacagcc

SEQ ID NO: 514092 - DNA, 75 bp, synthetic construct
  source 1..75: mol_type = other DNA
agcgtacagccgtcggattaacgaatttcgcctggatcaacacatccggcgatacatatgatatttacgttgaga

SEQ ID NO: 514093 - DNA, 75 bp, synthetic construct
  source 1..75: mol_type = other DNA
gcaacttattacaccattcgaataacaacagccacgacgacaagtgtctctggcgcactcactaatgcggaattt

SEQ ID NO: 514094 - DNA, 75 bp, synthetic construct
  source 1..75: mol_type = other DNA
acgtcggctccccacagcaggcaggtatttcagaactggttctacgagcaggcaatggaaaccccaaagggatta

SEQ ID NO: 514095 - DNA, 75 bp, synthetic construct
  source 1..75: mol_type = other DNA
cagcggttttcggcagaacaactttctcactggctgaaaccgcgtcgcccgacttcgcataaaggcgatcacggg

SEQ ID NO: 514096 - DNA, 75 bp, synthetic construct
  source 1..75: mol_type = other DNA
aggtctgttctaccgttcctcaagagatggctatggttttgaggaagactgggcagaagtttatacctcgaaaaa

SEQ ID NO: 514097 - DNA, 75 bp, synthetic construct
  source 1..75: mol_type = other DNA
tcagccggtgcacatacccattcgatgacatttgtttcaggtggttccagtggtgctccgggaagtggatcacct

SEQ ID NO: 514098 - DNA, 75 bp, synthetic construct
  source 1..75: mol_type = other DNA
atgccgcttcctcggcaacggcggcaggaaattccgcgaaggcggcaaagacgtctgagacaaacgctaagtcct

SEQ ID NO: 514099 - DNA, 75 bp, synthetic construct
  source 1..75: mol_type = other DNA
aaaagaggcagcgaaatcttcagaaacgaatgcatcctcgagcgccagcagcgcagcttcctcggcaacggcgac

SEQ ID NO: 514100 - DNA, 75 bp, synthetic construct
  source 1..75: mol_type = other DNA
ccacagcaggcaggcatttcagaactggttctacgagcaggcaatggaaagcccaaaggaattaccgggactttg

SEQ ID NO: 514101 - DNA, 75 bp, synthetic construct
  source 1..75: mol_type = other DNA
tcatcggcatcatctgcgtctgcttcaaaagatgaggcgaccagacaggcgtcagcagcaaagggcagcgccacg

SEQ ID NO: 514102 - DNA, 75 bp, synthetic construct
  source 1..75: mol_type = other DNA
aaattgaaagtgaccgcttacattgcgccaaacgtctggtacaacgttatggcggcgtagcggtgctgaaaggtg

SEQ ID NO: 514103 - DNA, 75 bp, synthetic construct
  source 1..75: mol_type = other DNA
gcggtcggcattgaggtcacgttgttggcccaggagagcgacaaaccgttgccggaagaggccgcgctggcacgc

SEQ ID NO: 514104 - DNA, 75 bp, synthetic construct
  source 1..75: mol_type = other DNA
ccggaagaggccgcgctggcacgcgaagcatggttaaacgcgggaggcgagatccatgcttcgaatattgtctgg

SEQ ID NO: 514105 - DNA, 75 bp, synthetic construct
  source 1..75: mol_type = other DNA
cggcaggaaattccgcgaaggcggcaaagacgtccgagacgaacgccaggtcttctgaaacggcagcgggacaga

SEQ ID NO: 514106 - DNA, 75 bp, synthetic construct
  source 1..75: mol_type = other DNA
tggactctcttaccgaaagcctggaatgggccgatgtggtggtgattggtcccggtctgggccagcaagagtggg

SEQ ID NO: 514107 - DNA, 75 bp, synthetic construct
  source 1..75: mol_type = other DNA
gcgggaggcgagatccatgcttcgaatattgtctggcccgaatcggtagatctgattgttgatgcgctgctcggt

SEQ ID NO: 514108 - DNA, 75 bp, synthetic construct
  source 1..75: mol_type = other DNA
cgcaccccgaccaccaccgtgattgaaatggtcgttaacgatactgatggtgcgcaaacactccagcagttgctg

SEQ ID NO: 514109 - DNA, 75 bp, synthetic construct
  source 1..75: mol_type = other DNA
aggtaatgctaaagcgattggcgagttacagcaggcgcagattgtgatccagatgggtagtagcctgaccggaaa

SEQ ID NO: 514110 - DNA, 75 bp, synthetic construct
  source 1..75: mol_type = other DNA
gcgctggcgttattacgtcaggtttccgcgccgctggtattaattgtggtgaacaacaacggcgggcaaattttc

SEQ ID NO: 514111 - DNA, 75 bp, synthetic construct
  source 1..75: mol_type = other DNA
tatccccgcacgttggctggtttctaccatcgaccacgctctcggtacgcttcatgcgggcggagtccatatcaa

SEQ ID NO: 514112 - DNA, 75 bp, synthetic construct
  source 1..75: mol_type = other DNA
tgtacagcaaccgtggggccagcggtatcgacggactgctttcgaccgccgccggcgttcagcgggcaagcggca

SEQ ID NO: 514113 - DNA, 75 bp, synthetic construct
  source 1..75: mol_type = other DNA
atgtcagtaagcgaatttaaccgacgctgggcggcggtcattctggaagcattaacgcgtcacggcgtcagacac

SEQ ID NO: 514114 - DNA, 75 bp, synthetic construct
  source 1..75: mol_type = other DNA
agggaaacgttttggtcgaccacctgtgttaaatgaagaacagaaacaggtggtattcgaacgaattaagtcagg

SEQ ID NO: 514115 - DNA, 75 bp, synthetic construct
  source 1..75: mol_type = other DNA
atataaacggaactgagacactttggtatattaaaggcacagccagtatgaaccagcaaataaaacgctcaccta

SEQ ID NO: 514116 - DNA, 75 bp, synthetic construct
  source 1..75: mol_type = other DNA
acagttttcgacattctaccgccagcgttcgaattgtttgaaagagaaaagtacaaaataaaatcagtagaatca

SEQ ID NO: 514117 - DNA, 75 bp, synthetic construct
  source 1..75: mol_type = other DNA
gggccagcatggacctggatgacaactggacactgggtctggtcgcacaaaacctgctcccccgcagtattgaga

SEQ ID NO: 514118 - DNA, 75 bp, synthetic construct
  source 1..75: mol_type = other DNA
cccggatttatccggctgcttgatcgcatggaaaatggtgatgtgctgattgttactaaactcgaccgactgggg

SEQ ID NO: 514119 - DNA, 75 bp, synthetic construct
  source 1..75: mol_type = other DNA
gtggcaggacgataagccgtggctgcgtgaagcgcctcgtctggaaagtgaaaaacagcgcgactggttcttctg

SEQ ID NO: 514120 - DNA, 75 bp, synthetic construct
  source 1..75: mol_type = other DNA
ggggtgagcgttgagaaatcttccagcagcttcctgatggttgtcggcgttatcaacaccgacggcaccatgacg

SEQ ID NO: 514121 - DNA, 75 bp, synthetic construct
  source 1..75: mol_type = other DNA
ggacggggatgtcctatcaggaacgtctctccggcaaccaggcaccttcactgtacgcgattttgaaccgccccg

SEQ ID NO: 514122 - DNA, 75 bp, synthetic construct
  source 1..75: mol_type = other DNA
ctgcctacgggggttggctacgactggacggggatgtcctatcaggaacgcctctccggtaaccaggcaccttcg

SEQ ID NO: 514123 - DNA, 75 bp, synthetic construct
  source 1..75: mol_type = other DNA
gaatatgaatggtatcgataacctgatgtacatgtcctctaacagtgactccacgggtaccgtgcagatcaccct

SEQ ID NO: 514124 - DNA, 75 bp, synthetic construct
  source 1..75: mol_type = other DNA
tgagaaactgactcaggcgcgtaaccagctactgggtgaagcagcgaagcatcctgatctgctgaccagcgtgcg

SEQ ID NO: 514125 - DNA, 75 bp, synthetic construct
  source 1..75: mol_type = other DNA
cgcggctaatggtcagatggtgccattctcggcgttctcctcttcccgttgggaatacggttcgccgcgtctgga

SEQ ID NO: 514126 - DNA, 75 bp, synthetic construct
  source 1..75: mol_type = other DNA
cgcgccaacctgatggaaaaactgggcgtcagtaacgacgttgaactggcgcgccgcatgtttgatggctggtga

SEQ ID NO: 514127 - DNA, 75 bp, synthetic construct
  source 1..75: mol_type = other DNA
cttaagcatcagcgccattgcccgagagtttagtactacccgtcaaaccatacttcgggtaaaagccggatctaa

SEQ ID NO: 514128 - DNA, 75 bp, synthetic construct
  source 1..75: mol_type = other DNA
agtgcaggttttaacatcaaatctcagcaaataatcgaagaacacattagcggctcagcagcaaccagtgagcgt

SEQ ID NO: 514129 - DNA, 75 bp, synthetic construct
  source 1..75: mol_type = other DNA
gggtctccacactggaacagacgaccgaaaatcaacatcgggaaatcgaaagcgcgggttttaacgtcagaccac

SEQ ID NO: 514130 - DNA, 75 bp, synthetic construct
  source 1..75: mol_type = other DNA
gggtatcaactcttgaacagacaacagaaaaccagcgtcgtgaaattgaagcggctggttttgccgtcagacccc

SEQ ID NO: 514131 - DNA, 75 bp, synthetic construct
  source 1..75: mol_type = other DNA
tggttcggttgctgccagcgaacgccccggatttatccggctgcttgatcgcatggaaaatggtgatgtgctgat

SEQ ID NO: 514132 - DNA, 75 bp, synthetic construct
  source 1..75: mol_type = other DNA
ccgggacatgacatacatccatatcccgctaagttcatcccgcaacttccgcatggtttaatctcacgtctgagc

SEQ ID NO: 514133 - DNA, 75 bp, synthetic construct
  source 1..75: mol_type = other DNA
cgtctgcatcggttgattttgcagatgaaccgcgcgctggggatgttcgaggcgcaaagcaaactctggcggctg

SEQ ID NO: 514134 - DNA, 75 bp, synthetic construct
  source 1..75: mol_type = other DNA
aattttaccatcaggtaattggagaggcttaccgacataaggtgctgtttgttatcagtcagtcggataaggctg

SEQ ID NO: 514135 - DNA, 75 bp, synthetic construct
  source 1..75: mol_type = other DNA
cttaaccagtccgacaaaatcgaacccagccacgaatgggataccgtaaccagcacgccttcagcacagcaacgg

SEQ ID NO: 514136 - DNA, 75 bp, synthetic construct
  source 1..75: mol_type = other DNA
aggcttcccacaatcaggtgctggtgtttactctgcaatcattgaccgacctgatgtttaattcggtgtttgcca

SEQ ID NO: 514137 - DNA, 75 bp, synthetic construct
  source 1..75: mol_type = other DNA
gaagaccatcccgccgttggcgatccctgaacgtttgaatgcgcattgtgaagagctgtatgagcttatcgcctc

SEQ ID NO: 514138 - DNA, 75 bp, synthetic construct
  source 1..75: mol_type = other DNA
caaccactgcgaacagggcaaaattgtcattccgcagatgcgttatgaaccgtccattgacaacgaagagcagca

SEQ ID NO: 514139 - DNA, 75 bp, synthetic construct
  source 1..75: mol_type = other DNA
tcgctctgtaacgaactcttccggggtgaggtctcccccgtcagtgatgtgaacgcctgtacccgtgaagtgctg

SEQ ID NO: 514140 - DNA, 75 bp, synthetic construct
  source 1..75: mol_type = other DNA
gttgcacgcacggttctgcgtgccgtccgtgactcggtggtctctgttgcccgcgctgtatggaactggattttc

SEQ ID NO: 514141 - DNA, 75 bp, synthetic construct
  source 1..75: mol_type = other DNA
gggacatcagcaggtgctgtttgtggtgacgcaggccgacaaagcagagccctgccatgaatgggatatggcagg

SEQ ID NO: 514142 - DNA, 75 bp, synthetic construct
  source 1..75: mol_type = other DNA
agcactggatggggcattgaggagatggtggcagccatgatgcgctgtctgcctgaccgcgccaccagcccggtg

SEQ ID NO: 514143 - DNA, 75 bp, synthetic construct
  source 1..75: mol_type = other DNA
tcccgatacgcttcgccagctaatttttgaacgtattcagaacctcacccactacgagccgatgataggcatcat

SEQ ID NO: 514144 - DNA, 75 bp, synthetic construct
  source 1..75: mol_type = other DNA
gggtgtaggtgaaaacgggcgacgggatcatgagtatcgggccctgtaccgtcgaatgctgccgaagctggactt

SEQ ID NO: 514145 - DNA, 75 bp, synthetic construct
  source 1..75: mol_type = other DNA
cgtgtacaggacaccagcccactgatccatctgttcagcacacagccaagaacgctttacgatcttctcgacgtt

SEQ ID NO: 514146 - DNA, 75 bp, synthetic construct
  source 1..75: mol_type = other DNA
gacgaaaattcttccgtcgtcaccctctcctgcgcattacgcacgttaacaccgtctctgcgccgccatcatgtc

SEQ ID NO: 514147 - DNA, 75 bp, synthetic construct
  source 1..75: mol_type = other DNA
tgaagccagcgaaaaatatctctttgcaatggccaacttgctgcgctggcatcctaaagatgcaattctccggtc

SEQ ID NO: 514148 - DNA, 75 bp, synthetic construct
  source 1..75: mol_type = other DNA
gtgaaacggtctaccgctggaacagcgccgctaacgaacgtgacgtggtattgctaaccggagatcaacccggct

SEQ ID NO: 514149 - DNA, 75 bp, synthetic construct
  source 1..75: mol_type = other DNA
ctggcaaacatgtatatggtccacgataccataacacctgttttcctttctctcgcaccgaaagaacgctggaca

SEQ ID NO: 514150 - DNA, 75 bp, synthetic construct
  source 1..75: mol_type = other DNA
agtcacttgcaatggcaatgaaaagttgcggttatgacttcccatcgaaattatgcattaacaaactattacttc

SEQ ID NO: 514151 - DNA, 75 bp, synthetic construct
  source 1..75: mol_type = other DNA
ggatgaattacgggcgatgacagagtcattacctgaaaatgcatctacgcaacaatatcccacagaatacgtgca

SEQ ID NO: 514152 - DNA, 75 bp, synthetic construct
  source 1..75: mol_type = other DNA
tcgctctgcaatgaactcttccggggtgaggtctcccccgtcagtaatgtgaacgcctgtacccgtgacgtgctg

SEQ ID NO: 514153 - DNA, 75 bp, synthetic construct
  source 1..75: mol_type = other DNA
agttctggcatggggtaatgcaaccctaccagcagcaggtgctgtttgtgctgaaccaggccgacaaaatcgaac

SEQ ID NO: 514154 - DNA, 75 bp, synthetic construct
  source 1..75: mol_type = other DNA
gcaggctgattttgttgtgataacccgctgttatgaaaaatgctcgccgccagtgagaacaacaaagagatttcg

SEQ ID NO: 514155 - DNA, 75 bp, synthetic construct
  source 1..75: mol_type = other DNA
cagaacctgaaacccaggcgttgtgccagctcattcatcgtatccaacccgcctggatagtctcttttcacgatc

SEQ ID NO: 514156 - DNA, 75 bp, synthetic construct
  source 1..75: mol_type = other DNA
ttacaggcaaaaggtactgtttgtgattaaccaggccgacaaaatcgaaccctgctatgaatgggataccctcac

SEQ ID NO: 514157 - DNA, 75 bp, synthetic construct
  source 1..75: mol_type = other DNA
gggaagtctccgccgtcagtgatgtgaacgcctgcacccgcgacgtactgcgcttccggctgcgcagtggtcgtc

SEQ ID NO: 514158 - DNA, 75 bp, synthetic construct
  source 1..75: mol_type = other DNA
aacaccatgcgttttttccccgacttaaccgcgtttcaacaagtctaccctgatggcaattttattgactggaag

SEQ ID NO: 514159 - DNA, 75 bp, synthetic construct
  source 1..75: mol_type = other DNA
agaaaaaggcacgtaagttaaaaatgaaaaagatcctcaaattgatggagaaggataggatatcaccagaggatc

SEQ ID NO: 514160 - DNA, 75 bp, synthetic construct
  source 1..75: mol_type = other DNA
ataaaagcacgtaagttgagaatgaaaagagcacaaagattacttgagaaaatgacatgtgatcgtgtttcacca

SEQ ID NO: 514161 - DNA, 75 bp, synthetic construct
  source 1..75: mol_type = other DNA
atgatgccaagcatcatgacctgctgatctgcctaaagtctctttatcctgatgaacctggcttgactgtatcaa

SEQ ID NO: 514162 - DNA, 75 bp, synthetic construct
  source 1..75: mol_type = other DNA
aacaccatgcgttttttcggtaatgactccaacttattgatagtgttttatgttcagataatgcccgatgacttt

SEQ ID NO: 514163 - DNA, 75 bp, synthetic construct
  source 1..75: mol_type = other DNA
atgactattgatgaatgcgcgacctggattgcccagaccggtgacagtgaaagctggcgtcagtgggaaaatggc

SEQ ID NO: 514164 - DNA, 75 bp, synthetic construct
  source 1..75: mol_type = other DNA
tcacgcgtcgtgataactcaagctggggttattcgagaaatggacaaaacggtgatagtggcggaggtggcgaaa

SEQ ID NO: 514165 - DNA, 75 bp, synthetic construct
  source 1..75: mol_type = other DNA
ggtcagtgcctgaccctgcccgcggcgaccttttgccagccgaagggcgaaatgttgacgagaacaactactggc

SEQ ID NO: 514166 - DNA, 75 bp, synthetic construct
  source 1..75: mol_type = other DNA
atgtttgtcaaacctgttaaagggcggtcagttcctgaccctgcccgcggcgaccttttgcccgccgaagggcga

SEQ ID NO: 514167 - DNA, 75 bp, synthetic construct
  source 1..75: mol_type = other DNA
ttatggggaaaacgcaacgaacgtgcgcgcatgttatctggcgggatgaagcgccgtttaatgattgcccgtgcg

SEQ ID NO: 514168 - DNA, 75 bp, synthetic construct
  source 1..75: mol_type = other DNA
gggccttgccgccggagggaaagatgaaggtcagcctggcccgcgcagccatctccctggagcctatgcagccta

SEQ ID NO: 514169 - DNA, 75 bp, synthetic construct
  source 1..75: mol_type = other DNA
cgttggcttaatgtacgccgcctctatccccaccagtctgattatcgcattactggaattgcgtcacttataccg

SEQ ID NO: 514170 - DNA, 75 bp, synthetic construct
  source 1..75: mol_type = other DNA
ttacctgcgaactaccagaaattacgcagcgtaccgtcaattccccacaagaagagctgtcacgaattgagtcag

SEQ ID NO: 514171 - DNA, 75 bp, synthetic construct
  source 1..75: mol_type = other DNA
gcgctgcaggtgacacaaattgatgtcagtgcagatgaaaaggcaggaatggtgaacgtgcagcgactggagttt

SEQ ID NO: 514172 - DNA, 75 bp, synthetic construct
  source 1..75: mol_type = other DNA
ggatattacgtcctcatctggcagccgttgagcgaacggatagaacaacaggagacgatgttgcagcagctggtg

SEQ ID NO: 514173 - DNA, 75 bp, synthetic construct
  source 1..75: mol_type = other DNA
ggagacgatgttgcagcagctcgtggcgatgaacgcgcgactgaagagcactgcgccggatattattgcggcgcg

SEQ ID NO: 514174 - DNA, 75 bp, synthetic construct
  source 1..75: mol_type = other DNA
aatgccaatccttcctgccgtgcagaaaaaaaatctggcggtggtcggtgcgggacctgctgggctggcgtttgc

SEQ ID NO: 514175 - DNA, 75 bp, synthetic construct
  source 1..75: mol_type = other DNA
cagtttatgctcttctttgcgctttagaggaagacctccgttcaatagttgtaagttacatcttgaagccagaag

SEQ ID NO: 514176 - DNA, 75 bp, synthetic construct
  source 1..75: mol_type = other DNA
attttcagcaatggcgtgaacgccagttaagccgtggtgaacactggctggctcaacatctcgcggggcgttcgc

SEQ ID NO: 514177 - DNA, 75 bp, synthetic construct
  source 1..75: mol_type = other DNA
cgcgcacttctccgggccgggaaagaatacccaacgttgcaaattatgctgccgatggtttcaacgctcgaggag

SEQ ID NO: 514178 - DNA, 75 bp, synthetic construct
  source 1..75: mol_type = other DNA
tgacaagccattaccttcgtaccctttacccgcagaggacaacccgttcctgggacttcgcggtatccggttgtg

SEQ ID NO: 514179 - DNA, 75 bp, synthetic construct
  source 1..75: mol_type = other DNA
atgatgcttgaagatccagagattaaccggcaattacagcaacgtctggcaaagggcaaacaggcggaattcgca

SEQ ID NO: 514180 - DNA, 75 bp, synthetic construct
  source 1..75: mol_type = other DNA
agcggtggtgttcctgtttagcgccggatattacgtcctcatctggcagcctttgagcgaacggatagaacaaca

SEQ ID NO: 514181 - DNA, 75 bp, synthetic construct
  source 1..75: mol_type = other DNA
ccgcgccggatattatcgcagcgcgaaaatccgccacgacagcacctgcgcaggtatcgcgggtcatcagtgaca

SEQ ID NO: 514182 - DNA, 75 bp, synthetic construct
  source 1..75: mol_type = other DNA
gtcagtatgtgcggcgaaatggctggagatatccagcaaacagcacgactgctcaccatggggattgataagctc

SEQ ID NO: 514183 - DNA, 75 bp, synthetic construct
  source 1..75: mol_type = other DNA
gcgctgcgagtgacacaaattgatgtcagcgcaggtgagaagccagggatggtgaatgtgcagcgactggagttt

SEQ ID NO: 514184 - DNA, 75 bp, synthetic construct
  source 1..75: mol_type = other DNA
tcctgaaattaacgatatcgaaaccacagccaccgacgctttcttggctgaagtacgggcgcagggggtggatgc

SEQ ID NO: 514185 - DNA, 75 bp, synthetic construct
  source 1..75: mol_type = other DNA
caggttcatcatgaatggggtgcagatgggttatatcaaggtgccagcagcggaaacagatccagacattgagac

SEQ ID NO: 514186 - DNA, 75 bp, synthetic construct
  source 1..75: mol_type = other DNA
catgaaggcaacaggaaatatgccagccaccgacgctttcttggctgaagtacgggcgcaggcgtttaatgacct

SEQ ID NO: 514187 - DNA, 75 bp, synthetic construct
  source 1..75: mol_type = other DNA
tttgatgtttacagtaaatatttttctaaaaaatataattgtgagcacattaaccccgaacgcacatccttaaaa

SEQ ID NO: 514188 - DNA, 75 bp, synthetic construct
  source 1..75: mol_type = other DNA
atagtgaagaatatatctctagaatcattaaactagaggaattaaaatcatatttatccgatagtgtctataatg

SEQ ID NO: 514189 - DNA, 75 bp, synthetic construct
  source 1..75: mol_type = other DNA
acttggtgccatcgagaatggcagggcgtttgcagaccgtttagagaattaccagttcgagtgtgaaggcggaaa

SEQ ID NO: 514190 - DNA, 75 bp, synthetic construct
  source 1..75: mol_type = other DNA
aattgaacgcaaagcaatccgcaagttcattaacagcattgaacacatcctgcgtgacaagttgtcaccgtatga

SEQ ID NO: 514191 - DNA, 75 bp, synthetic construct
  source 1..75: mol_type = other DNA
caataaaggaaatttcaggtctattacgagggaaattacagtaacatcaaccagacagaggccatataagaaaat

SEQ ID NO: 514192 - DNA, 75 bp, synthetic construct
  source 1..75: mol_type = other DNA
ttgcagtggactgctcatctccttcctcaacagcaaaagaaattgaagctcttaaatatatgattacagtaatat

SEQ ID NO: 514193 - DNA, 75 bp, synthetic construct
  source 1..75: mol_type = other DNA
cggcgatgaccgaagatcaccagaaagcgactgagtcaattaagcaggctgatgcggctgttaagttggcacacg

SEQ ID NO: 514194 - DNA, 75 bp, synthetic construct
  source 1..75: mol_type = other DNA
atgcggggcttaaggcgatatgtgatgaccgtcgcaggttcatcatgaatggggtgcagatgggttatatcaagg

SEQ ID NO: 514195 - DNA, 75 bp, synthetic construct
  source 1..75: mol_type = other DNA
gcgctggccgaagaccaccagaaagcgattgaatcaattaagcaggctgatgcggctgttaagttggcacacgag

SEQ ID NO: 514196 - DNA, 75 bp, synthetic construct
  source 1..75: mol_type = other DNA
atccgtggtcgtgacaacagagcacgcactacaaaaccggagaatgtggataccctttatttcacagtagacgac

SEQ ID NO: 514197 - DNA, 75 bp, synthetic construct
  source 1..75: mol_type = other DNA
cccctgatggttacgatattaatctggcgctgccttgctcgccggggaaactcatttttcgcgaaagtacgaatc

SEQ ID NO: 514198 - DNA, 75 bp, synthetic construct
  source 1..75: mol_type = other DNA
gtgaaccctatatcgaaattatttgtatggattcagaaactgaaattcagaaagcagattaaagggcgttgcgat

SEQ ID NO: 514199 - DNA, 75 bp, synthetic construct
  source 1..75: mol_type = other DNA
gttgtcggaacaaacctcacctaagcacgggcatattgtgaagtttaccaaccaatatgggagctacgatgagtc

SEQ ID NO: 514200 - DNA, 75 bp, synthetic construct
  source 1..75: mol_type = other DNA
atgttagtcaatgcgatggcgtttatgccgactattgcgttatcgaacagcgtctcttattcctgtcttgcctag

SEQ ID NO: 514201 - DNA, 75 bp, synthetic construct
  source 1..75: mol_type = other DNA
atgtcgaaactcccgtcaccaaagattaatatcagaaacctgaatcctgatatctattctgttcttaaaaaagaa

SEQ ID NO: 514202 - DNA, 75 bp, synthetic construct
  source 1..75: mol_type = other DNA
cccctgatggttacgatattaatctggcgcttctatttgcgccgggaaggctcatttttcgtgaaagtactaatc

SEQ ID NO: 514203 - DNA, 75 bp, synthetic construct
  source 1..75: mol_type = other DNA
atcgtggacgactgttaccgcgtggacttcacaccacacggtctggccctgtacaccctgacaccacacggcgac

SEQ ID NO: 514204 - DNA, 75 bp, synthetic construct
  source 1..75: mol_type = other DNA
cggcctccgtatttgcggcaatgctggcgcatcgtaccgctggcgggtgtgcctcgctgagtgaatacaccactg

SEQ ID NO: 514205 - DNA, 75 bp, synthetic construct
  source 1..75: mol_type = other DNA
gcctcgctgattgaatactccgctgaatttaaccgcctttccgccctcttctcacaggagtggcagcgcgtgacg

SEQ ID NO: 514206 - DNA, 75 bp, synthetic construct
  source 1..75: mol_type = other DNA
ggcgcctttcctttggggttctctatatcgggcggatcgtggccggcatcaccggggcgactggggcggtagccg

SEQ ID NO: 514207 - DNA, 75 bp, synthetic construct
  source 1..75: mol_type = other DNA
aaaacacgctagatagatggattaaagaatcaggggcacaaccaccaaagcctgataaatactcttcgtttgagc

SEQ ID NO: 514208 - DNA, 75 bp, synthetic construct
  source 1..75: mol_type = other DNA
gtggctatcgctgcaagttacaccatgcatctctactgtgattgtcgccagtgtacaaatggtaaatatcaaacg

SEQ ID NO: 514209 - DNA, 75 bp, synthetic construct
  source 1..75: mol_type = other DNA
atttccgtgggcagctggtgacagttgtcgggccaatcaccggtacggttgacggaaaaatcggcaacacgccct

SEQ ID NO: 514210 - DNA, 75 bp, synthetic construct
  source 1..75: mol_type = other DNA
ccagcaagggaaaacccgcctggaaattgctaccgtaccgctggacagcggagccagaccgacgctgggagaacc

SEQ ID NO: 514211 - DNA, 75 bp, synthetic construct
  source 1..75: mol_type = other DNA
ggcacgtaaagatgggtggcgaataagcgccgacaaaacgcgtgcttttgcgccagggcataaatttttgaggag

SEQ ID NO: 514212 - DNA, 75 bp, synthetic construct
  source 1..75: mol_type = other DNA
ggcgcgcaaggatggctggcgaataagcgccgacaaaacgcgtgcttttgcgccaggtcataaaattttgaggat

SEQ ID NO: 514213 - DNA, 75 bp, synthetic construct
  source 1..75: mol_type = other DNA
gtgtacggaaggtgtatatcaagtgccagacttcggagagtatatcggtacgtcatgggctggttgtgcaaaaga

SEQ ID NO: 514214 - DNA, 75 bp, synthetic construct
  source 1..75: mol_type = other DNA
ccatcatttgtcagtgccggccggttgatgaccgaacgggagcagcgctttctgaggcggctggacagggtgacc

SEQ ID NO: 514215 - DNA, 75 bp, synthetic construct
  source 1..75: mol_type = other DNA
ggatcgcacagcgatgcattaacgcacgttgccaatggtcaaattattatttgcgcacgcaaagaagaaaaaatt

SEQ ID NO: 514216 - DNA, 75 bp, synthetic construct
  source 1..75: mol_type = other DNA
atttccgtggacaactggttacggtagtcgggccaatcactggtgcggttgacggcaaaatcggcaatacgccct

SEQ ID NO: 514217 - DNA, 75 bp, synthetic construct
  source 1..75: mol_type = other DNA
ccagcaagggaaaacccgcctggaaattgctaccgtaccgctggacagcggagccagaccaactttgggagaacc

SEQ ID NO: 514218 - DNA, 75 bp, synthetic construct
  source 1..75: mol_type = other DNA
tgggtgcttttttacttatgcaatctgcgtttgccgatacggcccgaccagaaatcgggaaatatgtctttggct

SEQ ID NO: 514219 - DNA, 75 bp, synthetic construct
  source 1..75: mol_type = other DNA
ggcgcgcaaggatggctggcgaataagcaaagacaaaacgcgtgcttttgcgccagggcataaaattttgaggag

SEQ ID NO: 514220 - DNA, 75 bp, synthetic construct
  source 1..75: mol_type = other DNA
tcacgccggaatctgtaaaagcccagcatcaggctctgttgcgttatttcgatacaacaacccgccctcagatga

SEQ ID NO: 514221 - DNA, 75 bp, synthetic construct
  source 1..75: mol_type = other DNA
tgattttatcatccgaaaattggttcctctccataaacgaagcatatttgcattaacgcgctacgataatgatta

SEQ ID NO: 514222 - DNA, 75 bp, synthetic construct
  source 1..75: mol_type = other DNA
tatattcaatggcaagacagatacattagtagattatagttcttttaattttgaaagttataagcaaactctcaa

SEQ ID NO: 514223 - DNA, 75 bp, synthetic construct
  source 1..75: mol_type = other DNA
acgaaacgccagacagcgaaacgttagacactgctgacgcgctcgaacaaaaagagatgccggaagaactgccgc

SEQ ID NO: 514224 - DNA, 75 bp, synthetic construct
  source 1..75: mol_type = other DNA
actggacagtagaactcaacagcgacagcattccgcgtctgcaaatcaaccagcactacgcctcgatgtgcaata

SEQ ID NO: 514225 - DNA, 75 bp, synthetic construct
  source 1..75: mol_type = other DNA
gcgaaacgcaagacagtgaaacgctggacaccgccgacgcgctcgaacaaaaagagatgccggaagagctgccgc

SEQ ID NO: 514226 - DNA, 75 bp, synthetic construct
  source 1..75: mol_type = other DNA
ggtcgctaacctggcgaaaaacggcgaagggatgctgataacggcagacggcgttccagcccagcgcgatgaaaa

SEQ ID NO: 514227 - DNA, 75 bp, synthetic construct
  source 1..75: mol_type = other DNA
gacgtgaccgcgacgatggatatcgaccgcctgaagctggtggatattccggtcgctaacctggcgaaaaacggc

SEQ ID NO: 514228 - DNA, 75 bp, synthetic construct
  source 1..75: mol_type = other DNA
tgcatctctactgtgattgtcgccagtgtacaaatggtaaatatcaatcaccagacttcggtgagtatatcggta

SEQ ID NO: 514229 - DNA, 75 bp, synthetic construct
  source 1..75: mol_type = other DNA
cgagcagcagattagcgccaacaacctggcgaacgtcaacaccaacggttttcgcgccgatatggcaatggcgac

SEQ ID NO: 514230 - DNA, 75 bp, synthetic construct
  source 1..75: mol_type = other DNA
accaggggcaactgaccatcgacggcaatctggtgctgggggataacgggccgatcattctgccgccgaacgcca

SEQ ID NO: 514231 - DNA, 75 bp, synthetic construct
  source 1..75: mol_type = other DNA
gctgtcggtgacgcccgatgacggcgacgtgaccgcgacgatggatatcgaccgcctgaagctggtggatatccc

SEQ ID NO: 514232 - DNA, 75 bp, synthetic construct
  source 1..75: mol_type = other DNA
tcaattcgtggcattagctctcgcctggttagtattttcattgaccggcagcactcctgtctcagtcattacgtt

SEQ ID NO: 514233 - DNA, 75 bp, synthetic construct
  source 1..75: mol_type = other DNA
actaaccgcgatctgaaaaaaatggtcgccgaccgagagttccgtagcgatctctattaccgcctgaacgtattc

SEQ ID NO: 514234 - DNA, 75 bp, synthetic construct
  source 1..75: mol_type = other DNA
ggagtggccgggcaacgtgcgcgagctggaaaacgtcattgagcgtgctgttctactgacgcgtggcaacgtgct

SEQ ID NO: 514235 - DNA, 75 bp, synthetic construct
  source 1..75: mol_type = other DNA
attttcgtggacaattggtcacggtagttggaccaatcaccggtgcggttgacggcaaaatcggcaacacgccct

SEQ ID NO: 514236 - DNA, 75 bp, synthetic construct
  source 1..75: mol_type = other DNA
tgcaagccaggtgaggtctgcgcgattccgcaggtgcgcgccacctacaagctgattttctggatcgtggccgtg

SEQ ID NO: 514237 - DNA, 75 bp, synthetic construct
  source 1..75: mol_type = other DNA
gcgagctacttacaagctcattttctggatcgtggccgcgctggtcctggtctcgctcggatttccctacgtcat

SEQ ID NO: 514238 - DNA, 75 bp, synthetic construct
  source 1..75: mol_type = other DNA
aactcaacatctactccactcactatcttgataaacagcatcccgcccacgaacagagcgaagtcgatgaagccg

SEQ ID NO: 514239 - DNA, 75 bp, synthetic construct
  source 1..75: mol_type = other DNA
gcggcggaagggcatatttttggtggctgtgaatttattcgttatgacgatcgcccctggagcgaaaaagagttc

SEQ ID NO: 514240 - DNA, 75 bp, synthetic construct
  source 1..75: mol_type = other DNA
cgcgaccattatcaacaccggcattggctggcatgaagcacgtattccgaccattgccacgcccgtgccgcgcgg

SEQ ID NO: 514241 - DNA, 75 bp, synthetic construct
  source 1..75: mol_type = other DNA
ctggaaaacgtcattgagcgcgcggtattgctaacacgcggcaacgtgctgcagctgtcattgccagatattgtt

SEQ ID NO: 514242 - DNA, 75 bp, synthetic construct
  source 1..75: mol_type = other DNA
aaatcattcagactgacgtacgtttaatcgccgcaactaaccgcgatctgaaaaaaatggtcgctgaccgtgaat

SEQ ID NO: 514243 - DNA, 75 bp, synthetic construct
  source 1..75: mol_type = other DNA
tttggtcatgagcgtggtgcttttaccggtgccagcgcccagcgtatcggtcgttttgaactggcggataaaagc

SEQ ID NO: 514244 - DNA, 75 bp, synthetic construct
  source 1..75: mol_type = other DNA
cctgaatccggggatttaccgcaggtgcagtctgatgcggcggtgttcgggcgcaaccagaagggctttatatga

SEQ ID NO: 514245 - DNA, 75 bp, synthetic construct
  source 1..75: mol_type = other DNA
cattcgctggcggcaaaagaggtattaacgccggaagattttcagggtgagaattacatcagcctttcccgtact

SEQ ID NO: 514246 - DNA, 75 bp, synthetic construct
  source 1..75: mol_type = other DNA
tgaaaaagtgattgggctgaaattgtttgagcgcgtacgtggacgattacatcctaccgtgcaagggctgcggct

SEQ ID NO: 514247 - DNA, 75 bp, synthetic construct
  source 1..75: mol_type = other DNA
tgaaatagaaacctatatggatggcgtgcatttgatatgcaccactgcagggtggatcgtagttttggcaatatt

SEQ ID NO: 514248 - DNA, 75 bp, synthetic construct
  source 1..75: mol_type = other DNA
ccggatcgcgccgcattcgaccaatgggtcgcaaaagcgaaacagtcgccgaacaccatgtctgacatggctgcg

SEQ ID NO: 514249 - DNA, 75 bp, synthetic construct
  source 1..75: mol_type = other DNA
gtttgggatggttgtcattatttgcaggcactgtattgctcagtggctgtaattctgcgctgttagatcccaaag

SEQ ID NO: 514250 - DNA, 75 bp, synthetic construct
  source 1..75: mol_type = other DNA
gtgtgaaaccgttcctcagtcaccaattccgaagccattgtggttgaaggttggtcgctggggcgatggttcgct

SEQ ID NO: 514251 - DNA, 75 bp, synthetic construct
  source 1..75: mol_type = other DNA
acgccggtacgcatgggaagaccgccatcccgtaggtcgaacgatttacgagggcggatacatcaaaatacagcc

SEQ ID NO: 514252 - DNA, 75 bp, synthetic construct
  source 1..75: mol_type = other DNA
atgctgaaagcgctattcgtgcagccaacattgcaaagcagcgaggaagctcaaatcgcgtcattaagacgaaag

SEQ ID NO: 514253 - DNA, 75 bp, synthetic construct
  source 1..75: mol_type = other DNA
gatagtaatgataattactatgataaagatgttactaagtggaagtgtggcaattttgtaaattctacggacaat

SEQ ID NO: 514254 - DNA, 75 bp, synthetic construct
  source 1..75: mol_type = other DNA
tgttgaagtggaaaatggcattgcatttgggagatttgtactattccccgatttgaatgagagtggaggactgga

SEQ ID NO: 514255 - DNA, 75 bp, synthetic construct
  source 1..75: mol_type = other DNA
ttgaaggtactaattaaagatcatgaagcattagaagattcaagaaagactggcggcactttggcggcagagcat

SEQ ID NO: 514256 - DNA, 75 bp, synthetic construct
  source 1..75: mol_type = other DNA
cagcaatgcaacaggcatccgaacaggacgatattgtaaattcacctaattacgaggacattgcagtagttgaat

SEQ ID NO: 514257 - DNA, 75 bp, synthetic construct
  source 1..75: mol_type = other DNA
aaccggcggcaggactgtttatcttcagtcagcaggataacgaaccggtggcgctggtgactaaatttgcaggtg

SEQ ID NO: 514258 - DNA, 75 bp, synthetic construct
  source 1..75: mol_type = other DNA
gcgcgctggccatgaactggctggcgaaatatatggcgacaatgcctccagttgttttgcctgcgcctgcgggcg

SEQ ID NO: 514259 - DNA, 75 bp, synthetic construct
  source 1..75: mol_type = other DNA
ctgacgctgcacaaaggggcgaattatatttcgctgacgcagaacattcagcaatctggcttgttaagcgcagaa

SEQ ID NO: 514260 - DNA, 75 bp, synthetic construct
  source 1..75: mol_type = other DNA
caattgctggaaaaagcgcgtaatgaaatgggcgaactggcctatatggtgccggtgaaagaactgacgggaacg

SEQ ID NO: 514261 - DNA, 75 bp, synthetic construct
  source 1..75: mol_type = other DNA
caaagtagcgaaacgccgcaggagattttccgtaacaatcttgatgcgttagtcgatgaaccgtggggtggggtg

SEQ ID NO: 514262 - DNA, 75 bp, synthetic construct
  source 1..75: mol_type = other DNA
gcgcgttggccatgaactggctggcgaaatatatggcgacgatgcctccagttgtgttgcctgcgcctgcgggcg

SEQ ID NO: 514263 - DNA, 75 bp, synthetic construct
  source 1..75: mol_type = other DNA
tatcgtattcctgacccgatggcatttttgcgccagcagaaaaatctgcatcgcattgtggtgcaaccgcaatat

SEQ ID NO: 514264 - DNA, 75 bp, synthetic construct
  source 1..75: mol_type = other DNA
caagacgttggaatacccttagcggcggtgagcgtcagttagcgttgatcgcccgcgcgttggtccaacagccgc

SEQ ID NO: 514265 - DNA, 75 bp, synthetic construct
  source 1..75: mol_type = other DNA
taccagtgtggcacttaccagatgcactcgttgcaggaagcgcaggatattgcacgtagcatcctggaacgtggt

SEQ ID NO: 514266 - DNA, 75 bp, synthetic construct
  source 1..75: mol_type = other DNA
gcggcgtatcgtgtcaccaccaccaaagagatcctcattgaacgtggtctggtacattacactttgagcaccgcc

SEQ ID NO: 514267 - DNA, 75 bp, synthetic construct
  source 1..75: mol_type = other DNA
caaagtagtgaaacgccgcaggagattttccgcaacaatcttgatgcgttagtcgatgaaccgtggggtggggtg

SEQ ID NO: 514268 - DNA, 75 bp, synthetic construct
  source 1..75: mol_type = other DNA
cgaagcggtcagcggcaaactgcaactgctctacccggatggcgagccggtaaaagatgcccgcgtgcagttaag

SEQ ID NO: 514269 - DNA, 75 bp, synthetic construct
  source 1..75: mol_type = other DNA
tgttattgctggtctgcccgctaatgcatcttttccacggccacggagggcatggagatcatcaacatcacggaa

SEQ ID NO: 514270 - DNA, 75 bp, synthetic construct
  source 1..75: mol_type = other DNA
ttactgccgatgcatcaactaatgataataatggcaaaacacgaggtgtaaatgttggagctggaggctctttta

SEQ ID NO: 514271 - DNA, 75 bp, synthetic construct
  source 1..75: mol_type = other DNA
ggaaccatacaacccaaaaatgggatgttgtttcagaattgacgagttgtagaaaaaaatgtaaatcaactcgcc

SEQ ID NO: 514272 - DNA, 75 bp, synthetic construct
  source 1..75: mol_type = other DNA
cccagatcacgtggatgaatgtaagagccagtgagcatacggagaagaatggcacgaaagttcagctcagcggag

SEQ ID NO: 514273 - DNA, 75 bp, synthetic construct
  source 1..75: mol_type = other DNA
ggaacagtcaggtctggcgttaccagcgtgccggcgggcgggccgttattctggaggtcagtggacgctggatgg

SEQ ID NO: 514274 - DNA, 75 bp, synthetic construct
  source 1..75: mol_type = other DNA
tggctggatgtcgcaaagcgtgactggagtgacgacatgctgcaggcttgccacttatctcgtgaccagatgccc

SEQ ID NO: 514275 - DNA, 75 bp, synthetic construct
  source 1..75: mol_type = other DNA
ctgcagatggcaaatgataatgtgcttggcgctacaggtagcctgaacgttgccagcaatgccgtcttcagaaca

SEQ ID NO: 514276 - DNA, 75 bp, synthetic construct
  source 1..75: mol_type = other DNA
agggactgttgattaacagcggcaacattgatttcactaccggtacagataatatcggcgtctgggttgataatg

SEQ ID NO: 514277 - DNA, 75 bp, synthetic construct
  source 1..75: mol_type = other DNA
tggaaagaatacagtgggcgtccgggttgaggagggggctgttggtaccaacagcggaaatattacagttcagga

SEQ ID NO: 514278 - DNA, 75 bp, synthetic construct
  source 1..75: mol_type = other DNA
tcatgttattcgcagaatatgtcgatgaagcaaccaaatgacgaaaacgatcataaaaacgcagaaatgcatgac

SEQ ID NO: 514279 - DNA, 75 bp, synthetic construct
  source 1..75: mol_type = other DNA
ttcaggtcaccatgccagatgaagtgattaatgatattccggctgttgatacccgtaagaatttgctggagcagg

SEQ ID NO: 514280 - DNA, 75 bp, synthetic construct
  source 1..75: mol_type = other DNA
tggcggtcttgggttcaatggcggaacgctgatttttggttccgttatgccgggcgataccattgccagcaacag

SEQ ID NO: 514281 - DNA, 75 bp, synthetic construct
  source 1..75: mol_type = other DNA
aagaacaccttcaccattaaaggcgaaggggcaacctggaacctgctggatggcgggcagggagattctgattcc

SEQ ID NO: 514282 - DNA, 75 bp, synthetic construct
  source 1..75: mol_type = other DNA
tgcacgtagcattctggagcgcgacgtgcgtatcaacagcaatgaggaactggcgctgccgaaagagaagttgca

SEQ ID NO: 514283 - DNA, 75 bp, synthetic construct
  source 1..75: mol_type = other DNA
tgcaggaaattatcgaactggcgctggtggcagccgtaccgcgtcagacagaagtgaaccgcgaaagcagtttac

SEQ ID NO: 514284 - DNA, 75 bp, synthetic construct
  source 1..75: mol_type = other DNA
aggctgtaaaacgctctcctccattttcctgatgctgccacagtacagtggccccgcattgggctttgccgattg

SEQ ID NO: 514285 - DNA, 75 bp, synthetic construct
  source 1..75: mol_type = other DNA
gatagatccgcatggcaacctcgcaatgcgggaagaatttgctcatcgctggctggcccgtgcgggcgaaaaaac

SEQ ID NO: 514286 - DNA, 75 bp, synthetic construct
  source 1..75: mol_type = other DNA
gcgcggcgctgtgcttttttatcgccagagtgatgggccgcgaagtggtggaaaagttaacgggtaaaacggtac

SEQ ID NO: 514287 - DNA, 75 bp, synthetic construct
  source 1..75: mol_type = other DNA
ggcgtttgccgccgtggaccaacagggtatagaacgctttattcagtcttacggcgcactggcggcagttgtctc

SEQ ID NO: 514288 - DNA, 75 bp, synthetic construct
  source 1..75: mol_type = other DNA
tcgatggcgagttgcagtttgacgccgccttcgtgccggaagtggcggcgcaaaaagcgcctgccagcccgctac

SEQ ID NO: 514289 - DNA, 75 bp, synthetic construct
  source 1..75: mol_type = other DNA
ataaatctaaaggctcgatcagcggttacagtaccggtttatacggaacgtggcagcagaatgacggcaatgaca

SEQ ID NO: 514290 - DNA, 75 bp, synthetic construct
  source 1..75: mol_type = other DNA
ccactgacaaattgattgtcacgggtaacacttccggcgataccggcgtggtggtgaataacgtccggggccagg

SEQ ID NO: 514291 - DNA, 75 bp, synthetic construct
  source 1..75: mol_type = other DNA
gggattgtatgtcactggcggtgcaacagcgaccctgaaacaggggatatccgttgatcttgtgggtgacggggc

SEQ ID NO: 514292 - DNA, 75 bp, synthetic construct
  source 1..75: mol_type = other DNA
atgctgtcattttccagcaacggcagcgcccgccacccctgcgttgctaacgttcagcaggcgacagaaataatc

SEQ ID NO: 514293 - DNA, 75 bp, synthetic construct
  source 1..75: mol_type = other DNA
caattctcggcaagcggtaacgtcggtggctacaacctcggcatatatgccacatggtttgccgatgcgcaacat

SEQ ID NO: 514294 - DNA, 75 bp, synthetic construct
  source 1..75: mol_type = other DNA
gacggagccacaaatattgctgaagtcaaaacgggggttcagggtaaattgtcagacaacctgaatatctggggc

SEQ ID NO: 514295 - DNA, 75 bp, synthetic construct
  source 1..75: mol_type = other DNA
cggattggttttctttgcgatatccgccaggtgatcttcaaccctaatttgttcccttatgagaacatggaaggc

SEQ ID NO: 514296 - DNA, 75 bp, synthetic construct
  source 1..75: mol_type = other DNA
tttcgcgcggtcgtaagattaaagaagttatctggggacttatccttgggagcaccgtcggttgctggttcttct

SEQ ID NO: 514297 - DNA, 75 bp, synthetic construct
  source 1..75: mol_type = other DNA
ggtttacaacgtctgagcaaaatggtcggctggggcgcgttcctgctgccattgctggttttgattgtcgatcca

SEQ ID NO: 514298 - DNA, 75 bp, synthetic construct
  source 1..75: mol_type = other DNA
atgaatattgaaaaccaagctagactagacctaggacaagactacatagccatccttccaggctgcgcccagtct

SEQ ID NO: 514299 - DNA, 75 bp, synthetic construct
  source 1..75: mol_type = other DNA
cttattcaccgatccgcttggcgatggttcatttacccgcaactggaccgttttctactggctgtggtggatctc

SEQ ID NO: 514300 - DNA, 75 bp, synthetic construct
  source 1..75: mol_type = other DNA
ttcatgtgcggaaaaacaaaggtctgagcctttccggcattattgccgcgattaccggcgttcgcccgcaaggcc

SEQ ID NO: 514301 - DNA, 75 bp, synthetic construct
  source 1..75: mol_type = other DNA
gtgcctgtgtgcgttgcggtcagtgtgttcaggcttgcccttacgacaccttaaaactggcgacgctggcctctg

SEQ ID NO: 514302 - DNA, 75 bp, synthetic construct
  source 1..75: mol_type = other DNA
atggtcgccgccgctttctgcgcgatgtcgttcgcacagcaggcgggctggctgccgtgggtgtggcgctggggt

SEQ ID NO: 514303 - DNA, 75 bp, synthetic construct
  source 1..75: mol_type = other DNA
cttatgagaacatggaaggcaagattgatcgcccggaagagtatgccgatattgccactaagtgtgtgaccaact

SEQ ID NO: 514304 - DNA, 75 bp, synthetic construct
  source 1..75: mol_type = other DNA
gcacccgtttcgcatcatcaagcggccgttcggcttcgtgaaagccagatacagggggttgctgaaaaacgataa

SEQ ID NO: 514305 - DNA, 75 bp, synthetic construct
  source 1..75: mol_type = other DNA
gcacccgtttcgcatcatcaagcggctgttcggcttcgtgaaagccagatacagggggctgctgaaaaacgataa

SEQ ID NO: 514306 - DNA, 75 bp, synthetic construct
  source 1..75: mol_type = other DNA
ttacgctgaatacggtgctggcggatgtcgacccgaacagcgtgactggctgggatggcaaaacgctgaccaaag

SEQ ID NO: 514307 - DNA, 75 bp, synthetic construct
  source 1..75: mol_type = other DNA
aaaaaaattgggcggaacgtgatgctgccgcattatcacaagaggtaaatgctcaatttgctgctcgaataattg

SEQ ID NO: 514308 - DNA, 75 bp, synthetic construct
  source 1..75: mol_type = other DNA
ggtggaaagccgccacggtttcagcgcttctcattgcctcattcgccgcaggtagtgtgtggacggaacgagcat

SEQ ID NO: 514309 - DNA, 75 bp, synthetic construct
  source 1..75: mol_type = other DNA
aacgctcagatagctgctcgtatgattgaacaagggcgagtgatcgctcgtgatgaggctgttaaaaatgcacaa

SEQ ID NO: 514310 - DNA, 75 bp, synthetic construct
  source 1..75: mol_type = other DNA
gctgacgcgcgtgccaatggccttagcgaagcgatgcttgaccgtctggcgttaacgcccgcgcgcctgaaaggc

SEQ ID NO: 514311 - DNA, 75 bp, synthetic construct
  source 1..75: mol_type = other DNA
atgcaatccattaacttccgtaccgcgcgcggcaaccttagcgaagtgctcaataatgttgaagcaggggaagag

SEQ ID NO: 514312 - DNA, 75 bp, synthetic construct
  source 1..75: mol_type = other DNA
atgaaactattctcgcgcgaatgcagcgtcgggctgggcattttatgccggtagcgttactaaaaagtcagtttg

SEQ ID NO: 514313 - DNA, 75 bp, synthetic construct
  source 1..75: mol_type = other DNA
ctattttgctgctggtggccgtcgcattcatcgctggtgatgtatggagtagccgcggttgggaaaaaaagtggg

SEQ ID NO: 514314 - DNA, 75 bp, synthetic construct
  source 1..75: mol_type = other DNA
cggaagcgtctggagtaaccgaggttgggaaaaaaagtgggcggaacgtgacagcgcggaatcatcgcaaacagc

SEQ ID NO: 514315 - DNA, 75 bp, synthetic construct
  source 1..75: mol_type = other DNA
ggtggcgctggtttgcataaactgtgccgcgaacagtcgacgatcccggtgatcacaggtggtataggcgtatgc

SEQ ID NO: 514316 - DNA, 75 bp, synthetic construct
  source 1..75: mol_type = other DNA
gatttatgaagcgcgcccgaacgtgacggttgatgttgcttccctgtgcctgaaaaccggtaacgcggtgatcct

SEQ ID NO: 514317 - DNA, 75 bp, synthetic construct
  source 1..75: mol_type = other DNA
cgaagcaagcctcgtataaattagcgcaactctccagccgcgaaaaaaatcgtgtgctggaaaaaatcgccgatg

SEQ ID NO: 514318 - DNA, 75 bp, synthetic construct
  source 1..75: mol_type = other DNA
aatcgctgacgaacgctaccgcgccgggatgacgtgtgagcggatttacgactcggtgagagagtcaaacaataa

SEQ ID NO: 514319 - DNA, 75 bp, synthetic construct
  source 1..75: mol_type = other DNA
gagcaaatggcagactacaacgcgctggggatcaccgtgcgttatcttgctttccctcgccaggggctggagagc

SEQ ID NO: 514320 - DNA, 75 bp, synthetic construct
  source 1..75: mol_type = other DNA
ggcgggccagacagagcgctgtgtcattatcctcgtgagcattatctctactgggcgcgggaatttccggaacag

SEQ ID NO: 514321 - DNA, 75 bp, synthetic construct
  source 1..75: mol_type = other DNA
gggcttcagttattgcaactgtgccgaaccagacactaccgttcgccgttgtggtgaaatcatggggtactgtct

SEQ ID NO: 514322 - DNA, 75 bp, synthetic construct
  source 1..75: mol_type = other DNA
tgtgggacccaatgatggtattttttatgcgctcaggcaggattatgaaaagatagtatcaatatgggatgagat

SEQ ID NO: 514323 - DNA, 75 bp, synthetic construct
  source 1..75: mol_type = other DNA
ggcgggccagacagggcgctgtgtcactatcctcgtgaacattatctttattgggcgcgggaattcccggagcag

SEQ ID NO: 514324 - DNA, 75 bp, synthetic construct
  source 1..75: mol_type = other DNA
caggcaaggttcgggaatatccggaaagccgtccaagtgcgattgcgaaaatccaggtcgatggcgagttgatgt

SEQ ID NO: 514325 - DNA, 75 bp, synthetic construct
  source 1..75: mol_type = other DNA
attatcctcgtgagcattatctctactgggcgcgggaatttccggaacaggcggagttgtttgttgcgcctgcgt

SEQ ID NO: 514326 - DNA, 75 bp, synthetic construct
  source 1..75: mol_type = other DNA
cggataagccgcccaccccggcgacggtcgaggccttcgaggctgcgggtggagaacatatcacatggcgagccg

SEQ ID NO: 514327 - DNA, 75 bp, synthetic construct
  source 1..75: mol_type = other DNA
cggataagccgcccaccccggcgacagtcgaggccttcgaggccgcgggtggagaatatatcacctggcgagccg

SEQ ID NO: 514328 - DNA, 75 bp, synthetic construct
  source 1..75: mol_type = other DNA
gccgatggcacaatccccccttctgcagtggatactgactcacttacgtcaagagcctacggtcgtgcggctgtg

SEQ ID NO: 514329 - DNA, 75 bp, synthetic construct
  source 1..75: mol_type = other DNA
aagagacattgataaatttaaagagaaattccctcgtacaggtaacttgcttctaagtacaattactgatgatat

SEQ ID NO: 514330 - DNA, 75 bp, synthetic construct
  source 1..75: mol_type = other DNA
cctggtgctgccggtgggcatttccgatgatattcaaagtacggtccgggccgaccccgaagcctttctggcgcg

SEQ ID NO: 514331 - DNA, 75 bp, synthetic construct
  source 1..75: mol_type = other DNA
ggcagcagcgccggttgaatggccccccttattccctagaaatacgacaattattggggatcgcttctcgtcatc

SEQ ID NO: 514332 - DNA, 75 bp, synthetic construct
  source 1..75: mol_type = other DNA
actaacgctgcaacggtagcggtgattcaggacgccctgaaatcctgcggcttaccggcgggtgccgtgcaggcg

SEQ ID NO: 514333 - DNA, 75 bp, synthetic construct
  source 1..75: mol_type = other DNA
caggacagttctgccggtcctgaaaaaaaattccgtttgcggttgcgtaactgtgagctggcgggagcaggcaat

SEQ ID NO: 514334 - DNA, 75 bp, synthetic construct
  source 1..75: mol_type = other DNA
gggcaggtgattgctccggcctgcacactggccatggaagatacctggcaggcgattgatatgggggagaccccg

SEQ ID NO: 514335 - DNA, 75 bp, synthetic construct
  source 1..75: mol_type = other DNA
ggacaggtgattgctccggcctgctcgttggttatggaagatacatatcaggcaatcgacatggggataacgcca

SEQ ID NO: 514336 - DNA, 75 bp, synthetic construct
  source 1..75: mol_type = other DNA
gtatctgatttatcgctactgggggcccatttccggcttctttaaacggctgtgggcgcaggtcacggtagcgtt

SEQ ID NO: 514337 - DNA, 75 bp, synthetic construct
  source 1..75: mol_type = other DNA
taagggaaaaggtgatgcatttattaagcagtggcaggaagctggcgcaagcggtgacggcgaagcacagcaaaa

SEQ ID NO: 514338 - DNA, 75 bp, synthetic construct
  source 1..75: mol_type = other DNA
gcttacgggatatcgccgtcacaggcaaccttaatgataaacaggaagtggctattggtaatgccatccgtcagg

SEQ ID NO: 514339 - DNA, 75 bp, synthetic construct
  source 1..75: mol_type = other DNA
gaaaagcgaaagtaaatgatgcaactaacccgtggcgtttaaagcgtaccgcgacagctgctgaaattagtcagt

SEQ ID NO: 514340 - DNA, 75 bp, synthetic construct
  source 1..75: mol_type = other DNA
tgcgcgtaatatcctggaacgtgacgtacgcatcaacagcaacgaagagttggcgctgccgaaagaaaagttgca

SEQ ID NO: 514341 - DNA, 75 bp, synthetic construct
  source 1..75: mol_type = other DNA
atgaaaaacgaaattaaagatctgcaaataggtattcagcgcgacgagcatgatttagagacggtccgacaaatc

SEQ ID NO: 514342 - DNA, 75 bp, synthetic construct
  source 1..75: mol_type = other DNA
caaatcttgtctggtgtgcaatggttcaggctaccccgtcccccttttttcccccgtctggaatcactctgccgg

SEQ ID NO: 514343 - DNA, 75 bp, synthetic construct
  source 1..75: mol_type = other DNA
tggaacatgacggcgtttgtcttcaccgtgttaatcatcgccatcctggttgtaggctccatttggatcatgtgg

SEQ ID NO: 514344 - DNA, 75 bp, synthetic construct
  source 1..75: mol_type = other DNA
ggcctacaaaagcggcatgtcggtgatgggctgggaagtgacttcagcggtgacgctgatcttcctcgcgctaat

SEQ ID NO: 514345 - DNA, 75 bp, synthetic construct
  source 1..75: mol_type = other DNA
gggctgggataaatacctttccagtaagcaggaaatgaatgctccggctgcaatgtctaccctggataaggatgc

SEQ ID NO: 514346 - DNA, 75 bp, synthetic construct
  source 1..75: mol_type = other DNA
atacgatttatagtatcgatgaggatgaattggaaaaagccatagagttaggtttggattcaagaactaaatcag

SEQ ID NO: 514347 - DNA, 75 bp, synthetic construct
  source 1..75: mol_type = other DNA
aaaacatgcacgcccgattactggaacatgccagtttactctggcggcctgaaacaaccgatgccattcgtgcag

SEQ ID NO: 514348 - DNA, 75 bp, synthetic construct
  source 1..75: mol_type = other DNA
atggctgttaaccagcaaggccagcagcagaaagcgccgccgcagcagcagaataataacgggaataatgttcct

SEQ ID NO: 514349 - DNA, 75 bp, synthetic construct
  source 1..75: mol_type = other DNA
atgctggaacaaatgggcattgccgcaaagcaagcctcgtataaattagcgcaactctccagccgcgaaaaaaat

SEQ ID NO: 514350 - DNA, 75 bp, synthetic construct
  source 1..75: mol_type = other DNA
ccgccattggcgcagaatttaatgcctggaaatgggcacagctgcgcgccggttaccgtcagaatctggccggta

SEQ ID NO: 514351 - DNA, 75 bp, synthetic construct
  source 1..75: mol_type = other DNA
gtggttgctgttaaagccgaagagtatgacgatgagtttctgtcattagatttgaacgtcaaaatcgtcagcgat

SEQ ID NO: 514352 - DNA, 75 bp, synthetic construct
  source 1..75: mol_type = other DNA
ctgtcacaaccaaaaccattgccgccgataacccccggtgtcgcagtccctgctgttcctgaactgccgaaaagt

SEQ ID NO: 514353 - DNA, 75 bp, synthetic construct
  source 1..75: mol_type = other DNA
agcgtctggcggtatccaggtcagctttaatcctcagtttttcctcaatggtaaggaaaccgcagcgcctgccgg

SEQ ID NO: 514354 - DNA, 75 bp, synthetic construct
  source 1..75: mol_type = other DNA
agcaaagttctggcgggcagcctcgttcgcggttttatgattgctgcacgtgcccttctctggattggccgggcg

SEQ ID NO: 514355 - DNA, 75 bp, synthetic construct
  source 1..75: mol_type = other DNA
catacgctggccgattttgtcggtttcctgattcttggcgggttgtcgatcattgccgctatcacctacaccgtg

SEQ ID NO: 514356 - DNA, 75 bp, synthetic construct
  source 1..75: mol_type = other DNA
atggggctgaaggccccatttttattggcgcgtattatgactgaacaacaaattagccgaactcaggcgtggctg

SEQ ID NO: 514357 - DNA, 75 bp, synthetic construct
  source 1..75: mol_type = other DNA
ctcaggcgtggctggaaagtttacgacctaaaaccctccccctcgcctttgctgcaattatcgtcgggacggcgc

SEQ ID NO: 514358 - DNA, 75 bp, synthetic construct
  source 1..75: mol_type = other DNA
aagactggcgcagacagttaccagatggaaatccgtattccattcattgcagaaacagggcaaaccctgaaagaa

SEQ ID NO: 514359 - DNA, 75 bp, synthetic construct
  source 1..75: mol_type = other DNA
cgcgctaatctgatggacaaactgggcgtcagtaacgatgttgaactggctcgccgcatgtttgatggctggtga

SEQ ID NO: 514360 - DNA, 75 bp, synthetic construct
  source 1..75: mol_type = other DNA
gcggtgaaagagattgccgccgaactgggcttgtcaccgaaaacggtacacgtccatcgcgccaatctgatggaa

SEQ ID NO: 514361 - DNA, 75 bp, synthetic construct
  source 1..75: mol_type = other DNA
atactcgctcgtgacaaatgagattacggagtttgaagccgaatatttcatttgtcagattcgtcagaatctaga

SEQ ID NO: 514362 - DNA, 75 bp, synthetic construct
  source 1..75: mol_type = other DNA
caacaaaatcattcgtgagcatgaggatacactcgcagggattgaagccaccggcgtcacgcagcgtaatggcgt

SEQ ID NO: 514363 - DNA, 75 bp, synthetic construct
  source 1..75: mol_type = other DNA
gatacgctcgcagggattgaagccaccggcgtcacgcagcgtaatggcgtgctggtatttaccggcgactacttt

SEQ ID NO: 514364 - DNA, 75 bp, synthetic construct
  source 1..75: mol_type = other DNA
tctcggtgaacgactgcgacgcgggcaatatttcgcgattctgattgctgccgttggtttattgctggtgttgca

SEQ ID NO: 514365 - DNA, 75 bp, synthetic construct
  source 1..75: mol_type = other DNA
atgaaaagtgccatgctggcaatcctctccggtgttagttggggggcgagcgcgattgtcgcgaaacgcctatac

SEQ ID NO: 514366 - DNA, 75 bp, synthetic construct
  source 1..75: mol_type = other DNA
tgtttctcgatccggttaaagtcactattttgacaccggggatggacgagcagggcaatatgagcgaggagggga

SEQ ID NO: 514367 - DNA, 75 bp, synthetic construct
  source 1..75: mol_type = other DNA
tagtcaattcggaggtgatgtaattattgatgcaggtaatgatcgaaaggtatacgaaaatatttcatattcgtg

SEQ ID NO: 514368 - DNA, 75 bp, synthetic construct
  source 1..75: mol_type = other DNA
gattagatactggtccaataattagctctttagcatgcgaaattagtgagttagatacagcttggactttattta

SEQ ID NO: 514369 - DNA, 75 bp, synthetic construct
  source 1..75: mol_type = other DNA
tggactagaaaaaaatcacagccgtcgagcttgcaaccatgtgaactttacactgtctcccatcatatgctacgt

SEQ ID NO: 514370 - DNA, 75 bp, synthetic construct
  source 1..75: mol_type = other DNA
ctgggagacagaggaactacatgaagcgggagtaattcgtggcctgatggagaattccgttccccgtcgttatag

SEQ ID NO: 514371 - DNA, 75 bp, synthetic construct
  source 1..75: mol_type = other DNA
cccgtattgataatcgtctggttcatggccaggttggcgttacctggacatccaccatcggcgcaaatttgctgg

SEQ ID NO: 514372 - DNA, 75 bp, synthetic construct
  source 1..75: mol_type = other DNA
gttttattaaacgacgcggcgtgaatgtttttattcaggacgtccctggctctcaaaaagagcaaattcctgact

SEQ ID NO: 514373 - DNA, 75 bp, synthetic construct
  source 1..75: mol_type = other DNA
aaaaactattaacgtcatcggcaaagctgcgccgcatcagaaaatatttctgatttgccgtacgccgcagacggt

SEQ ID NO: 514374 - DNA, 75 bp, synthetic construct
  source 1..75: mol_type = other DNA
caccgcgtcctgaaggacagcagtcaggcgggttttagccacgttctggtgattgaggaggcccacagtctgccc

SEQ ID NO: 514375 - DNA, 75 bp, synthetic construct
  source 1..75: mol_type = other DNA
acattttgggctgttccgcgacccgttcgctgatgaagtcatgcagagcgcggacgatgtattcaccacgccgga

SEQ ID NO: 514376 - DNA, 75 bp, synthetic construct
  source 1..75: mol_type = other DNA
gtgtcacaccggtcttctttttttcctgaaggtatccccgtgaacacaacagaacatcccgtgcgccagttactc

SEQ ID NO: 514377 - DNA, 75 bp, synthetic construct
  source 1..75: mol_type = other DNA
acttgtgtacaggatggcttttgtgcatgccgtgacagttatggaggcgtatctcatgtattgcgccagggcgct

SEQ ID NO: 514378 - DNA, 75 bp, synthetic construct
  source 1..75: mol_type = other DNA
ctgccgccacacttgagcggcgcttcaccctcattagagagttggaactgtcaaaagtctggtatcaaattctac

SEQ ID NO: 514379 - DNA, 75 bp, synthetic construct
  source 1..75: mol_type = other DNA
aatgaccggcacaaggtcatagccagcctggatctggtgacaaacagatactgggaatccgaggaactacttgaa

SEQ ID NO: 514380 - DNA, 75 bp, synthetic construct
  source 1..75: mol_type = other DNA
cgccggacacccgcgtggcaaccgcctacatccttaaccgcgtagaagacggcgaatatggcgtagccatcgcct

SEQ ID NO: 514381 - DNA, 75 bp, synthetic construct
  source 1..75: mol_type = other DNA
gcattatccgtggattgtgcagctcagtggggcgctggccgtgacggtgcggtgtcccccgtaaccggccgcgcg

SEQ ID NO: 514382 - DNA, 75 bp, synthetic construct
  source 1..75: mol_type = other DNA
aggatctggaagctgaacggtttgatgaatggcttgaggagaattacccggatgttaatcccaactctgaagaat

SEQ ID NO: 514383 - DNA, 75 bp, synthetic construct
  source 1..75: mol_type = other DNA
aggctcttgattgtgatgtttttacggtggataaggatcttgttttaggtatgctactagggaaggtgcgaataa

SEQ ID NO: 514384 - DNA, 75 bp, synthetic construct
  source 1..75: mol_type = other DNA
aacgaagagagcaaggccatccgtcgcgccacgaacggcgtgaacctgcgccgtgaacttatcgctgcccgtctg

SEQ ID NO: 514385 - DNA, 75 bp, synthetic construct
  source 1..75: mol_type = other DNA
cttcggctacaccctgcgtcgtaaggggatgcctgttgcagacaaatacgacggggccggcggcaaggtgaagta

SEQ ID NO: 514386 - DNA, 75 bp, synthetic construct
  source 1..75: mol_type = other DNA
aggacagcgtgccggcggatatctggggagacaacctgatgctgcactacgtcggcaagccgcagccgggggcgg

SEQ ID NO: 514387 - DNA, 75 bp, synthetic construct
  source 1..75: mol_type = other DNA
cttaataacatagccgagtatgaacagaatctgatgcattacgcgctgtcacagctggaatctgtaccggatctc

SEQ ID NO: 514388 - DNA, 75 bp, synthetic construct
  source 1..75: mol_type = other DNA
cgtcatcggtgctcctgtttccctgccatccatgaaagcggcaatggataaaaacagcgtgccggcggatatctg

SEQ ID NO: 514389 - DNA, 75 bp, synthetic construct
  source 1..75: mol_type = other DNA
tccgcctttgttgagtacgacaccgagcgtgccgtgggggctgacagtaacgtcctggtacgtgagaagaccggc

SEQ ID NO: 514390 - DNA, 75 bp, synthetic construct
  source 1..75: mol_type = other DNA
gcgtcgttaaccctattctgaccaccgttgcgcgtggttataagaacgcggcgtttatcggggagaagattttcc

SEQ ID NO: 514391 - DNA, 75 bp, synthetic construct
  source 1..75: mol_type = other DNA
tgatccagaaattgtcttctttgcagacaaactggacgcttatacagatcagccagagtttcgcatgatcgctcc

SEQ ID NO: 514392 - DNA, 75 bp, synthetic construct
  source 1..75: mol_type = other DNA
attgatacaaggacttgccgcgccgatgcacgatctctctcgtggttgtagcgtgcaggaaattatcgagctggc

SEQ ID NO: 514393 - DNA, 75 bp, synthetic construct
  source 1..75: mol_type = other DNA
ccggtatggaagcggtccgtacggccacggggctgcgtcctaacctgatgaccatgggtgccagcgtgatggcgc

SEQ ID NO: 514394 - DNA, 75 bp, synthetic construct
  source 1..75: mol_type = other DNA
catcgtccgttaaagcactggcagctgctgaacgctgggtcggtggtaaaggtgatccaattggcattattgaag

SEQ ID NO: 514395 - DNA, 75 bp, synthetic construct
  source 1..75: mol_type = other DNA
agccagagtttcgcatgatcgctcccgatggcactacgtttgttactcgtttctccagtgccgaactaaattatg

SEQ ID NO: 514396 - DNA, 75 bp, synthetic construct
  source 1..75: mol_type = other DNA
gcggtgtcgaggggcttaaaattgcaaacagtcgtggacatttgattattcttccctggatggggcagatgattt

SEQ ID NO: 514397 - DNA, 75 bp, synthetic construct
  source 1..75: mol_type = other DNA
ttagatgaacaaggattaccaactgccaaaagcaccgcggtgtttaatatgttcaaacacctggcccatgtgctt

SEQ ID NO: 514398 - DNA, 75 bp, synthetic construct
  source 1..75: mol_type = other DNA
tccgggttgcccgtaaatcagcagtcacaggtgcaacagcctccacagcaaacagcacaggaacaaggtcagcag

SEQ ID NO: 514399 - DNA, 75 bp, synthetic construct
  source 1..75: mol_type = other DNA
ccgggccccgtgctgacgcgggacctggaacgggtgctggagcgaagcggggaagccccggtctacgggccaaac

SEQ ID NO: 514400 - DNA, 75 bp, synthetic construct
  source 1..75: mol_type = other DNA
atgaatacagatgataaaagcggagaaccaagaacagaaaaaacaattaagcaaaaaatagcatcagcgcagatg

SEQ ID NO: 514401 - DNA, 75 bp, synthetic construct
  source 1..75: mol_type = other DNA
agcgtgatgagccagcgcagaacaaggtaaccgtcagtgccgataagttcgaagttaaacctggtgttgatacca

SEQ ID NO: 514402 - DNA, 75 bp, synthetic construct
  source 1..75: mol_type = other DNA
gtcaatacgcgttttggtaagcagcaatattgcgcttcgatgacgcttggcgttgagattaatacctcagttgca

SEQ ID NO: 514403 - DNA, 75 bp, synthetic construct
  source 1..75: mol_type = other DNA
aaataaaagagactgaaataataaaaagcattaatgatacacaattcaacaaaagaattatggatgaaaataaaa

SEQ ID NO: 514404 - DNA, 75 bp, synthetic construct
  source 1..75: mol_type = other DNA
gacctgaaagatgtcaacgtcggcaatatgcatttctcggaagggaaaaagcaaatcagcagtaaagtttatgtc

SEQ ID NO: 514405 - DNA, 75 bp, synthetic construct
  source 1..75: mol_type = other DNA
ttggcattcgtttctttactatcgaaaaaaccattaacgtcatcggcaaagctgcaccgcatcagaagatcttcc

SEQ ID NO: 514406 - DNA, 75 bp, synthetic construct
  source 1..75: mol_type = other DNA
ggcgcggtacgaccggagatatggtgcagagacacctcttcagatattactccatgcatgtagcaggcaatgcag

SEQ ID NO: 514407 - DNA, 75 bp, synthetic construct
  source 1..75: mol_type = other DNA
tggcaattgctttttatgacaacccggcgcggtacgaccagcgatatggtgcagagacacctcattagatattac

SEQ ID NO: 514408 - DNA, 75 bp, synthetic construct
  source 1..75: mol_type = other DNA
tgctcgatgctgttcgtgggttgttcggacggacgctgcgggatgtaaaaacgcatcccggcacctggtctgatg

SEQ ID NO: 514409 - DNA, 75 bp, synthetic construct
  source 1..75: mol_type = other DNA
ggtcttactggtgcgttatggcgacggacatcggttggatttactaattttgcatgggtgaatacatccggtgat

SEQ ID NO: 514410 - DNA, 75 bp, synthetic construct
  source 1..75: mol_type = other DNA
tcctgttgtagctgaattaggtgatgattcaggatggcatttctatagccagcgaaatacagataactcggtaat

SEQ ID NO: 514411 - DNA, 75 bp, synthetic construct
  source 1..75: mol_type = other DNA
aatccaaaaggtattactggtgcattatggcgacggacctcggttggatttactaattttgcatgggtgaataca

SEQ ID NO: 514412 - DNA, 75 bp, synthetic construct
  source 1..75: mol_type = other DNA
aattacgccacaggtgttaatattcagtgggattataccagtaacgccagcgtaacgattcatacatcaccaact

SEQ ID NO: 514413 - DNA, 75 bp, synthetic construct
  source 1..75: mol_type = other DNA
gccactaacagcacgtctgaaacgctggctgcgacaccaaaagctgttaaggcggtaatggatgaaacgaacaag

SEQ ID NO: 514414 - DNA, 75 bp, synthetic construct
  source 1..75: mol_type = other DNA
catgattgcgtcactgattattggaccgttgctgacaccgctaaatacattacaggcattattagcgggtttgtt

SEQ ID NO: 514415 - DNA, 75 bp, synthetic construct
  source 1..75: mol_type = other DNA
ttttctgcataccgtgagtgccattttttgtggctggataatgaccgttttcaccttgagtcatgccgcctggtt

SEQ ID NO: 514416 - DNA, 75 bp, synthetic construct
  source 1..75: mol_type = other DNA
ttaaccgagtcaaacgatattgcacagtatttaggtaatgactccaacttattgatagtgttttatgttcagata

SEQ ID NO: 514417 - DNA, 75 bp, synthetic construct
  source 1..75: mol_type = other DNA
ggccgtgaccagcaatggcatccacatattcatctgtcgaccactgccggtggtgtgacgtcaggtcatacctgg

SEQ ID NO: 514418 - DNA, 75 bp, synthetic construct
  source 1..75: mol_type = other DNA
ggatacagtatctgctgagtcttgtccccgacagcccgtggcagcatattgtgttcacgcttccgtgccagtact

SEQ ID NO: 514419 - DNA, 75 bp, synthetic construct
  source 1..75: mol_type = other DNA
atggaattcttttattgtggcgggaaactgccacgcaaaagcgtcatgctgacctttgatgacggctacctggat

SEQ ID NO: 514420 - DNA, 75 bp, synthetic construct
  source 1..75: mol_type = other DNA
ttgcctgatttacgtggtgagtttattcgtggctgggatgacggacgtggagtggataacggaaggggattattg

SEQ ID NO: 514421 - DNA, 75 bp, synthetic construct
  source 1..75: mol_type = other DNA
agtactgggatgctgcgaccggcgcgtacagaacggtacaggtatatgacaatgacgctttttctcagcgggctg

SEQ ID NO: 514422 - DNA, 75 bp, synthetic construct
  source 1..75: mol_type = other DNA
tataggtattgcggaggataaaactgcgactcattcggctgtggggtctgttgcgattgaagtacaaaatggtgc

SEQ ID NO: 514423 - DNA, 75 bp, synthetic construct
  source 1..75: mol_type = other DNA
attgcccgtctgactaacgagcgatgggttgatgttgaaccatccttgcgggagtttttttgtgataacggcgac

SEQ ID NO: 514424 - DNA, 75 bp, synthetic construct
  source 1..75: mol_type = other DNA
ccacgaccattaataacaccggtaatctggtcctcagtggggggaataatgccaaccgtactaccgggattaaag

SEQ ID NO: 514425 - DNA, 75 bp, synthetic construct
  source 1..75: mol_type = other DNA
ttacagatggcaaatgataatgtacttggcgcaacaggtaatctgaacgtcgccagcaatgccgtcttcagaaca

SEQ ID NO: 514426 - DNA, 75 bp, synthetic construct
  source 1..75: mol_type = other DNA
actggtgaatgcagcgggtaccgtcaccggtactggcgggcaactgcaactggtggatgaaaacgggcaggctat

SEQ ID NO: 514427 - DNA, 75 bp, synthetic construct
  source 1..75: mol_type = other DNA
atgtctgaaatcacagtctcccgtccggaagtggtcaacgggcatacggacgttatctgctccacctcagtcagc

SEQ ID NO: 514428 - DNA, 75 bp, synthetic construct
  source 1..75: mol_type = other DNA
cactgctgcaaatcgacacacttatccggcaactggctgaaatatcagcaatgacagaaagtattggaggtaaac

SEQ ID NO: 514429 - DNA, 75 bp, synthetic construct
  source 1..75: mol_type = other DNA
cagcctgcatttgctttagggcaaacaggaagcagggttgcaaatgataaagctgttggctggaactggaatagc

SEQ ID NO: 514430 - DNA, 75 bp, synthetic construct
  source 1..75: mol_type = other DNA
cggtattggtaaggcgctgatgcagtatgtgcagcagcgctatccccatctgatgctggaggtttatcaaaaaaa

SEQ ID NO: 514431 - DNA, 75 bp, synthetic construct
  source 1..75: mol_type = other DNA
tgcatatctagccaacgcgcaaaactgggtgtgggaagacaatggtgaatttctcggttttgtcagcattatgga

SEQ ID NO: 514432 - DNA, 75 bp, synthetic construct
  source 1..75: mol_type = other DNA
gtacactgttgccaatcgacacaattatccgtaagcgtaaactgaccgccgtatgtagccatcagacgagaattg

SEQ ID NO: 514433 - DNA, 75 bp, synthetic construct
  source 1..75: mol_type = other DNA
cacagtatttatggggaaaatcctgcggcagaagaaaagtggtccccaaagtcagcccgggaaaaacactggaag

SEQ ID NO: 514434 - DNA, 75 bp, synthetic construct
  source 1..75: mol_type = other DNA
ctgacggacattatggacgccagcgcagtggatgccatacgtgcccgcctgagcaatccgggaagtcatcgtaaa

SEQ ID NO: 514435 - DNA, 75 bp, synthetic construct
  source 1..75: mol_type = other DNA
tatcaaccgcgagaatgcgccggtcattgttatcgagccatacatcatcgccatggaagacaacgatgtgaaagg

SEQ ID NO: 514436 - DNA, 75 bp, synthetic construct
  source 1..75: mol_type = other DNA
atcataacgcgtggccccgcaccggccccggagaagtgcgccggcgtcttgcgtcctggctggaaagtcagggga

SEQ ID NO: 514437 - DNA, 75 bp, synthetic construct
  source 1..75: mol_type = other DNA
cgacatcgttgaccactacacctacgccttcatgggcgatggctgcatgatggaaggcatctcccacgaagtttg

SEQ ID NO: 514438 - DNA, 75 bp, synthetic construct
  source 1..75: mol_type = other DNA
ttctttaaactgtacgaggtggcagtcggttttttgcttccctcgtcagcgaagaaggcgcaggaggcgggcggc

SEQ ID NO: 514439 - DNA, 75 bp, synthetic construct
  source 1..75: mol_type = other DNA
acttatgtcaatgtgcccggaagacttctttaaactgtacgaggtggcagtcggttttttgcttccctcgtcagc

SEQ ID NO: 514440 - DNA, 75 bp, synthetic construct
  source 1..75: mol_type = other DNA
tgcgtttgcggtggacatgaaaccgtggaaaaacgtcaagatcgcgtcaattggcatcctgttcgcgatgattgg

SEQ ID NO: 514441 - DNA, 75 bp, synthetic construct
  source 1..75: mol_type = other DNA
gcgcaatggcagtggcagactccattaacggtattgggctggttattggcgggttgatggtgccgatatttggcc

SEQ ID NO: 514442 - DNA, 75 bp, synthetic construct
  source 1..75: mol_type = other DNA
aaattacagaaagcaggctggcgcacttatgtctgcccatggcctgagagggtgttcaatgaatccattgaacgg

SEQ ID NO: 514443 - DNA, 75 bp, synthetic construct
  source 1..75: mol_type = other DNA
gcgtcctggctggaaagtcaggggattgatacaacgaagagttttgatgctgtacagggcgcagccacgccccgt

SEQ ID NO: 514444 - DNA, 75 bp, synthetic construct
  source 1..75: mol_type = other DNA
ggtggcgagagctgtcgatgtttctgaggccacgctggcccagattgtgaatcataacgcgtggccccgcacccg

SEQ ID NO: 514445 - DNA, 75 bp, synthetic construct
  source 1..75: mol_type = other DNA
atcaccttgaagaatttctgacgttcaaactgcaacgggccggtaaacaactgacggacattatggacgccagcg

SEQ ID NO: 514446 - DNA, 75 bp, synthetic construct
  source 1..75: mol_type = other DNA
gcatttcataatggagattatgacctggcaaggagaaagcacttcacaaatctcattaccacaaaaattagctct

SEQ ID NO: 514447 - DNA, 75 bp, synthetic construct
  source 1..75: mol_type = other DNA
ggcgcagttctgacacgtatcagtgcgattatcgatagtgatgaagtttatgcttttctccgaaataatttacaa

SEQ ID NO: 514448 - DNA, 75 bp, synthetic construct
  source 1..75: mol_type = other DNA
gcataccaggtgctggatgcatggattgcccgtgtcagccgggaagagcgtgaggcactggaagccaggcaacag

SEQ ID NO: 514449 - DNA, 75 bp, synthetic construct
  source 1..75: mol_type = other DNA
tgaaagcgattggtgtttccaacttctatcctcatgtattagcaaatttttgtgaaactgtcagagtaaaaccaa

SEQ ID NO: 514450 - DNA, 75 bp, synthetic construct
  source 1..75: mol_type = other DNA
gcgtcactgattattggaccgttgctgacaccgctaaatacattacaggcattattagcgggtttgttaattggt

SEQ ID NO: 514451 - DNA, 75 bp, synthetic construct
  source 1..75: mol_type = other DNA
cttgacaggattgactcattaattttcaccgcccggtatttttttattttattcgctactgctgttactgaagga

SEQ ID NO: 514452 - DNA, 75 bp, synthetic construct
  source 1..75: mol_type = other DNA
cgctggcggtgagtctttgtgattatacagggaatatggtttccccctggctggaacacggcattgatgcagtca

SEQ ID NO: 514453 - DNA, 75 bp, synthetic construct
  source 1..75: mol_type = other DNA
gtggaacaccggtgcgcgcatttatgaagctatgaagcgctggcgcctccgtatctgtttgtgcagcttgcgacc

SEQ ID NO: 514454 - DNA, 75 bp, synthetic construct
  source 1..75: mol_type = other DNA
tcttattaacgtgtgcgctgttctctggacagttgatggcaggacacaaaggacatgaatttttgtgggtaaaaa

SEQ ID NO: 514455 - DNA, 75 bp, synthetic construct
  source 1..75: mol_type = other DNA
acctaaaaatgccaatgatagggtttggggtttttcaggttaccgataaagaagagtgtaaacagtcagtgttaa

SEQ ID NO: 514456 - DNA, 75 bp, synthetic construct
  source 1..75: mol_type = other DNA
tgttgaatcaggatattgcagcagcaggtattgaagcatcattaaaaaaatcgggactggaatacttcgatctct

SEQ ID NO: 514457 - DNA, 75 bp, synthetic construct
  source 1..75: mol_type = other DNA
tttcatatcgtcgcccgtcttgttcacagcaaaccctggatggctttttttctggcggagctgattgcggccatc

SEQ ID NO: 514458 - DNA, 75 bp, synthetic construct
  source 1..75: mol_type = other DNA
tctggacaatatggaggcctccgggttttaccgggtgcctctgtcctcggcacaggcaggcgatatcctgctgtg

SEQ ID NO: 514459 - DNA, 75 bp, synthetic construct
  source 1..75: mol_type = other DNA
aacaatttactgcgtcggcttaacgccctcaaacacgctgattttagccgtcatgcagctcgcattcgctgcccg

SEQ ID NO: 514460 - DNA, 75 bp, synthetic construct
  source 1..75: mol_type = other DNA
tggtaccagatacgtattcgcggtgaggacacggcaccggaggcggtgtacgcccgtcttcacgaacctctgggt

SEQ ID NO: 514461 - DNA, 75 bp, synthetic construct
  source 1..75: mol_type = other DNA
cgcgactggccggggccggaaagggtggactgcagattgtgctgggggcagcagccatcgtgggctctttcttca

SEQ ID NO: 514462 - DNA, 75 bp, synthetic construct
  source 1..75: mol_type = other DNA
ctggcgggagacacccgtcagcgatgagacgttacgggagctttatgccctgatgaaatgggggccgacatcagc

SEQ ID NO: 514463 - DNA, 75 bp, synthetic construct
  source 1..75: mol_type = other DNA
ggtgggaatgcagctggcgctagattatcccgcatcggtcactgcactggtcagcgttaacggctggctacgaat

SEQ ID NO: 514464 - DNA, 75 bp, synthetic construct
  source 1..75: mol_type = other DNA
agaggtattctgaaaaatggcaacgacgaacgcattctgtctggcgtcaccgccactggtccgcatctgccttca

SEQ ID NO: 514465 - DNA, 75 bp, synthetic construct
  source 1..75: mol_type = other DNA
cgcacacactccctctggcgtcaccaggcatggctcgcatctgcctttacggggatttccaacgatttggccgcc

SEQ ID NO: 514466 - DNA, 75 bp, synthetic construct
  source 1..75: mol_type = other DNA
tgctgctgtgctgttttggttcatcggtgccgaatcatgccgccatttactgtggtgacggcgagctgctgcacc

SEQ ID NO: 514467 - DNA, 75 bp, synthetic construct
  source 1..75: mol_type = other DNA
cgcacacactccctctggcgtcacccggcatggcacgcatctgcctttacggggattttcaacgatttggccgcc

SEQ ID NO: 514468 - DNA, 75 bp, synthetic construct
  source 1..75: mol_type = other DNA
cgcacacactccctctggcgtcaccaggcatggcccgcatctgcctttacggggattttcaacgatttggccgcc

SEQ ID NO: 514469 - DNA, 75 bp, synthetic construct
  source 1..75: mol_type = other DNA
cgccgtggcgattcacatcgggtatggctgtcctggtacgaacagtattttgtatggggaatgaccgcaggcata

SEQ ID NO: 514470 - DNA, 75 bp, synthetic construct
  source 1..75: mol_type = other DNA
ggtcagaatctctatcttgacaatatggaggcgactggtttttaccgtgtcgcactgacagaggcgcagcctggc

SEQ ID NO: 514471 - DNA, 75 bp, synthetic construct
  source 1..75: mol_type = other DNA
cgacggataacggtaaacagaacacgtatttttcgtcactggataacatgattgcccaggggaacccgatgccgg

SEQ ID NO: 514472 - DNA, 75 bp, synthetic construct
  source 1..75: mol_type = other DNA
gggaaaacagcagtatgccatccgacgtgtatcagcagttctgtctggcgccggtacaaaagctcctgatggcgg

SEQ ID NO: 514473 - DNA, 75 bp, synthetic construct
  source 1..75: mol_type = other DNA
cagatgaacgaaggctggtaccagatacgtattgccggtgaagacacggcaccggaggtggtgtacgcccgcctt

SEQ ID NO: 514474 - DNA, 75 bp, synthetic construct
  source 1..75: mol_type = other DNA
cagatgccgggattccgccgtcagatgaacgaaggctggtaccagatacgtattgccggtgatgacacggcaccg

SEQ ID NO: 514475 - DNA, 75 bp, synthetic construct
  source 1..75: mol_type = other DNA
gtacaaaagatgagtcagagcttacgttatcgaaccataccttctttgatgatgttgtactaactcctgaacagt

SEQ ID NO: 514476 - DNA, 75 bp, synthetic construct
  source 1..75: mol_type = other DNA
caagaacagtcagaatctgttaatcaaaggggataacctcgaagtattgaagcatatggttaatgcttattctga

SEQ ID NO: 514477 - DNA, 75 bp, synthetic construct
  source 1..75: mol_type = other DNA
agtgcaaaacaaagggagcttaatgaggcgctaaaaagttatgctaacaaaaaatctattgagttagatttagtg

SEQ ID NO: 514478 - DNA, 75 bp, synthetic construct
  source 1..75: mol_type = other DNA
tgaacacggcagcggaagccatccgtgccctgtcgctgcaggtgccgggattccgccgccagatgaacgaaggct

SEQ ID NO: 514479 - DNA, 75 bp, synthetic construct
  source 1..75: mol_type = other DNA
caacggataacggcagacagaacacgtacttttcctcactggataacatgattgcccaggggaacccgatgccgg

SEQ ID NO: 514480 - DNA, 75 bp, synthetic construct
  source 1..75: mol_type = other DNA
ggtgaaatgctggtgggttcacgacggatatcccaggacgtcagcacccgtgatgaaggcggtgacgggacggtg

SEQ ID NO: 514481 - DNA, 75 bp, synthetic construct
  source 1..75: mol_type = other DNA
aatcagcccccaatatactggcgcagcggtgcgctcctccccaatctgccaaaacaacggagaaagggggggagg

SEQ ID NO: 514482 - DNA, 75 bp, synthetic construct
  source 1..75: mol_type = other DNA
tttaagtttaccattagctcaaaatggtttaattgtttttaattatacgaaactgcacttattgggtatgttatc

SEQ ID NO: 514483 - DNA, 75 bp, synthetic construct
  source 1..75: mol_type = other DNA
cacatctttccgggcggcgctttgagcacggggtgacggactgttacacgctgttccgggatgcttaccatctgg

SEQ ID NO: 514484 - DNA, 75 bp, synthetic construct
  source 1..75: mol_type = other DNA
tggtggcgtaacggtcagaatctctatcttgacaatatggaggcgactggtttttaccgtgtcgcactgacagag

SEQ ID NO: 514485 - DNA, 75 bp, synthetic construct
  source 1..75: mol_type = other DNA
ctgaaatgccggattttcatcgcgaggatgactggtggcgcaacggccagaacctgtacctggacaatatggagg

SEQ ID NO: 514486 - DNA, 75 bp, synthetic construct
  source 1..75: mol_type = other DNA
tcaaactgctggggccggatgtaggctttgactccatcaacgaccgtccgatggcggaagagctgtctaagttgc

SEQ ID NO: 514487 - DNA, 75 bp, synthetic construct
  source 1..75: mol_type = other DNA
ctgaaatgccggattttcatcgcgaggatgactggtggcgcaacggccagaacctttacctggacaacctggcgg

SEQ ID NO: 514488 - DNA, 75 bp, synthetic construct
  source 1..75: mol_type = other DNA
tttctgccaccacgatgctgttttctctgggggccagcatgattctgggtggtgtggcccagatgctggccccga

SEQ ID NO: 514489 - DNA, 75 bp, synthetic construct
  source 1..75: mol_type = other DNA
gtgccctgtcgctgcaggtgccgggattccgcggtcagatgaacgaaggctggtatcagatacgtattgccggtg

SEQ ID NO: 514490 - DNA, 75 bp, synthetic construct
  source 1..75: mol_type = other DNA
gcagcgctgagtgccggcggtttttctgccaccacgatgctgttttcactgggtgccagcatgatactgggtggt

SEQ ID NO: 514491 - DNA, 75 bp, synthetic construct
  source 1..75: mol_type = other DNA
gcgcagaatatgctcgtcgtggctgggtacagcagtaccacatcggcgcactgcgtaataacaacctgcgtcagt

SEQ ID NO: 514492 - DNA, 75 bp, synthetic construct
  source 1..75: mol_type = other DNA
taatgtcagacgtgctacagcatttgctatttctgttatcaatgataaagcaacaattccactattgattaatct

SEQ ID NO: 514493 - DNA, 75 bp, synthetic construct
  source 1..75: mol_type = other DNA
tcacgacggatatcccaggacatcagcacccgtgatgagggcggagacgggaaagtggtggttatcgggcgggga

SEQ ID NO: 514494 - DNA, 75 bp, synthetic construct
  source 1..75: mol_type = other DNA
agggaacggtcatccacattgtgccgcgactggccggagccggaaaggggggactgcagattgtgctgggggcgg

SEQ ID NO: 514495 - DNA, 75 bp, synthetic construct
  source 1..75: mol_type = other DNA
aatgctggttggctcccggcgaatctcccaggacatcagcacccgtgatgaaggcgggggcggaaaggtcgtggt

SEQ ID NO: 514496 - DNA, 75 bp, synthetic construct
  source 1..75: mol_type = other DNA
atgctggccccgaaggcaaaaacaccggaatacagggcaacggataacggtaaacagaacacgtacttttcgtcg

SEQ ID NO: 514497 - DNA, 75 bp, synthetic construct
  source 1..75: mol_type = other DNA
agggaacggtcatccacattgtgccgcgactggccggggccggaaagggaggactgcagattgtgctgggggcgg

SEQ ID NO: 514498 - DNA, 75 bp, synthetic construct
  source 1..75: mol_type = other DNA
agggaacggtcatccacattgtgccgcgactggccggtgccggaaaggggggactgcagattgtgctgggggctg

SEQ ID NO: 514499 - DNA, 75 bp, synthetic construct
  source 1..75: mol_type = other DNA
agggaacggtcatccacattgtgccgcgactggccggtgccggaaagggtggactgcagattgtgctgggggcgg

SEQ ID NO: 514500 - DNA, 75 bp, synthetic construct
  source 1..75: mol_type = other DNA
tggcgttatggggttcagccctggcagccggtggtttttctgccaccacgatgctgttttcactgggggccagca

SEQ ID NO: 514501 - DNA, 75 bp, synthetic construct
  source 1..75: mol_type = other DNA
aaatggcaacgacgaacgcattctgtctggcgtcaccgccactggcacgcatctgccttcacggggatttacaac

SEQ ID NO: 514502 - DNA, 75 bp, synthetic construct
  source 1..75: mol_type = other DNA
ccgggcggcgctttgagcacggggtgacggactgttacacgctgttccgggatgcttaccatctggcggggattg

SEQ ID NO: 514503 - DNA, 75 bp, synthetic construct
  source 1..75: mol_type = other DNA
ccggcgtatctcccaggacatcagtacccgtgatgaaggcggtggcgggaaggtcgtggttatcgggcggcaggc

SEQ ID NO: 514504 - DNA, 75 bp, synthetic construct
  source 1..75: mol_type = other DNA
gaaatgctggttggctcccgccgtatatcccaggacatcagcacccgtgatgaaggcgggggcggaaaggtcgtg

SEQ ID NO: 514505 - DNA, 75 bp, synthetic construct
  source 1..75: mol_type = other DNA
ctcccggcgaatatcccaggacatcagtacccgtgatgaaggcggtgacgggaaggtggtggttatcgggcggca

SEQ ID NO: 514506 - DNA, 75 bp, synthetic construct
  source 1..75: mol_type = other DNA
agggaacggtcatccacattgtgccgcgactggccggggccggaaagggtggactgcagattgtgctgggggctg

SEQ ID NO: 514507 - DNA, 75 bp, synthetic construct
  source 1..75: mol_type = other DNA
tcgccagagcgatccatcaacttagcccgcgacgcgacaagccgctggtcaaaatcaactgcgctgccatccccg

SEQ ID NO: 514508 - DNA, 75 bp, synthetic construct
  source 1..75: mol_type = other DNA
ccgaaggcaaagacgccggagtacaaaagcacggataacggtaaacagaacacgtatttttcgtcactggacaac

SEQ ID NO: 514509 - DNA, 75 bp, synthetic construct
  source 1..75: mol_type = other DNA
atggcaacgacgaacgtattctgtctggcgtcaccgccactggtccgcatctgccttcacggggatttacaacga

SEQ ID NO: 514510 - DNA, 75 bp, synthetic construct
  source 1..75: mol_type = other DNA
atgttatttaatgcggagaatgagatcgaattgcttttgtatacagttgaggaggagcaattggttagttctgta

SEQ ID NO: 514511 - DNA, 75 bp, synthetic construct
  source 1..75: mol_type = other DNA
gctttcgcgacctcacgctgggagacaggctcgccgcgtctggaacgctataacggttattctgcggttgaaatt

SEQ ID NO: 514512 - DNA, 75 bp, synthetic construct
  source 1..75: mol_type = other DNA
aacgctgctggaagctatcgccctggttttcctcgttatgtatctgttcctgcaaaacttccgcgccacgctgat

SEQ ID NO: 514513 - DNA, 75 bp, synthetic construct
  source 1..75: mol_type = other DNA
tgccgaatcatgccgccatttactgtggcaacggtgagctgcttcaccatatacctgaacaactgagtaaacggg

SEQ ID NO: 514514 - DNA, 75 bp, synthetic construct
  source 1..75: mol_type = other DNA
gacggcgctttgagcacggggtgacggactgttacacgctgttccgggatgcctaccatctggcgggaattgata

SEQ ID NO: 514515 - DNA, 75 bp, synthetic construct
  source 1..75: mol_type = other DNA
agggaacggtcatccacattgtgccgcgactggccggggccggaaaggggggactgcagattgtgctgggggcag

SEQ ID NO: 514516 - DNA, 75 bp, synthetic construct
  source 1..75: mol_type = other DNA
cgcgactggccggggccggaaaaggtggactgcagattgtgctgggggcggcagccatcgtgggctctttcttca

SEQ ID NO: 514517 - DNA, 75 bp, synthetic construct
  source 1..75: mol_type = other DNA
gtggctggtctgccggggtgagattcataaattccgctgtgtgccgcatcttaccgggcggcgctttgagcacgg

SEQ ID NO: 514518 - DNA, 75 bp, synthetic construct
  source 1..75: mol_type = other DNA
ttcaggcagaaactgtatgagggatggtatcagttacgcattgcgggcagggatgtatctgaacaggagcttcat

SEQ ID NO: 514519 - DNA, 75 bp, synthetic construct
  source 1..75: mol_type = other DNA
tgcagataaagagtgccctgccctggtggctggtctgccggggggaaattcataaattccgctgtgtgccgcacc

SEQ ID NO: 514520 - DNA, 75 bp, synthetic construct
  source 1..75: mol_type = other DNA
tgcggagtcgtgcggcttcgtggtgagaacgccggagggggagcggtatatcccttgtgtgaatatctccgcaga

SEQ ID NO: 514521 - DNA, 75 bp, synthetic construct
  source 1..75: mol_type = other DNA
ggatgagtggtggcgcaacggtcagaacctgtacctggacaatatggaggcaacgggcttttaccgggtgcccct

SEQ ID NO: 514522 - DNA, 75 bp, synthetic construct
  source 1..75: mol_type = other DNA
atgcccggcggtgtgcgccagcggagtcgtgcggcttcgtgataagcaccccggagggcgaacggtaccagccct

SEQ ID NO: 514523 - DNA, 75 bp, synthetic construct
  source 1..75: mol_type = other DNA
ggtggtgtggcacagatgctggccccgaaggcaaagacgccggagtacaaaagtacggataacggtaaacagaac

SEQ ID NO: 514524 - DNA, 75 bp, synthetic construct
  source 1..75: mol_type = other DNA
gttggctcccggcgaatctcccaggacatcagtacccgtgatgaaggcggtggcggaaaggtcgtggttatcggg

SEQ ID NO: 514525 - DNA, 75 bp, synthetic construct
  source 1..75: mol_type = other DNA
cgggatgcataccatctggcgggaattgatatgccggattttgagcgtgaggatgactggtggcgcaacggtcag

SEQ ID NO: 514526 - DNA, 75 bp, synthetic construct
  source 1..75: mol_type = other DNA
gccggaggggtattttcgtatcgccccggaagactggctgcgggcagagatgcagggggagattgtggcactggt

SEQ ID NO: 514527 - DNA, 75 bp, synthetic construct
  source 1..75: mol_type = other DNA
gccggaggcgtattttcgtatcgcgccggaagactggctgcgggcagagatgcagggggagattgtggcactggt

SEQ ID NO: 514528 - DNA, 75 bp, synthetic construct
  source 1..75: mol_type = other DNA
cgctcactgctgactttgtccggtttggtcgcaatgccaaactggcggtgctggtggcgatggtggcctttttcc

SEQ ID NO: 514529 - DNA, 75 bp, synthetic construct
  source 1..75: mol_type = other DNA
tggctgagcgaggccgaccggcggctgcagataaaaagtgcactgttctggtggctggtctgccggggggaaatt

SEQ ID NO: 514530 - DNA, 75 bp, synthetic construct
  source 1..75: mol_type = other DNA
attaataaactttcgcagtaaatcccggtttatgacacagactgaatcagcgattctggcgcatgcccggcggtg

SEQ ID NO: 514531 - DNA, 75 bp, synthetic construct
  source 1..75: mol_type = other DNA
caggcgggcgatatcctgctgtgctgctttggcgcatcggtggccaatcatgccgccatatactgcggcaacggt

SEQ ID NO: 514532 - DNA, 75 bp, synthetic construct
  source 1..75: mol_type = other DNA
ctgacggccatgacggcctcgtttgtgctggcaacaccgacggagacggacggagcgctgtttcccggtcgcatt

SEQ ID NO: 514533 - DNA, 75 bp, synthetic construct
  source 1..75: mol_type = other DNA
tttcctcggcaactcgttgatgtttattttcggtgcagcgggcgctgcggcactggggatggcggatatctctga

SEQ ID NO: 514534 - DNA, 75 bp, synthetic construct
  source 1..75: mol_type = other DNA
gtggcccagatgctggccccgaaggcaaaaacaccggattaccgcgcaacggataacggcagacagaacacgtac

SEQ ID NO: 514535 - DNA, 75 bp, synthetic construct
  source 1..75: mol_type = other DNA
gtgaaaacgggggccgaagccatccgggcgctggccacacagctcccggcgtttcgccagaaactgaatgagggc

SEQ ID NO: 514536 - DNA, 75 bp, synthetic construct
  source 1..75: mol_type = other DNA
caaccgggctggatattaatttgctgattgccgtctccggtttactgatgaccgtcaccgtcttctttggcattt

SEQ ID NO: 514537 - DNA, 75 bp, synthetic construct
  source 1..75: mol_type = other DNA
gatttcttcctcgcagttctcatcggtaatcttctcctcggtatttacacttcatttcttggttacattggcgca

SEQ ID NO: 514538 - DNA, 75 bp, synthetic construct
  source 1..75: mol_type = other DNA
aagcaggaacaccagcctatgaaagagcgataaataacgctgcgaatgccatcagaccgctgtttgctactgagg

SEQ ID NO: 514539 - DNA, 75 bp, synthetic construct
  source 1..75: mol_type = other DNA
cgatttatcgtattctggaacaatttcagcaacaggaaaatatgctgccacctgatcaggctcactttcaggcat

SEQ ID NO: 514540 - DNA, 75 bp, synthetic construct
  source 1..75: mol_type = other DNA
atgcgactgaaccaacttattcatgtgaggataaaggatattaattttgaacgttcagaaataaacctcatcaga

SEQ ID NO: 514541 - DNA, 75 bp, synthetic construct
  source 1..75: mol_type = other DNA
cgctcaccgctgactttgtccggtttggtcgtaatgccaaactggcggtgctggtggcgatggtggcctttttcc

SEQ ID NO: 514542 - DNA, 75 bp, synthetic construct
  source 1..75: mol_type = other DNA
ccggcaccgccgccaccgacaagtggacaggcatccgggtctgccgggctaccgcccattgcgcaggcattaaaa

SEQ ID NO: 514543 - DNA, 75 bp, synthetic construct
  source 1..75: mol_type = other DNA
cgggggcatcccgacctttaccgcccattgcacaggcattaatagagcacttggctgcctatgagcaatcgaaga

SEQ ID NO: 514544 - DNA, 75 bp, synthetic construct
  source 1..75: mol_type = other DNA
aaagatcacttgactgcctatgaaaaatcgaaaggctctgaggttttaggttttaagcccgcccgcccggcaccg

SEQ ID NO: 514545 - DNA, 75 bp, synthetic construct
  source 1..75: mol_type = other DNA
tgaaatgaaacttaccactggctcacgcgttattgcgttgatcaaagcatcagcaatcctgattgctaccaaagc

SEQ ID NO: 514546 - DNA, 75 bp, synthetic construct
  source 1..75: mol_type = other DNA
tgagatgaaactcaccgctggctcgcgcgttattgcgttgatcaaggcatcagcaatcctgattgcgaccaaagc

SEQ ID NO: 514547 - DNA, 75 bp, synthetic construct
  source 1..75: mol_type = other DNA
ccaccaacaagcggccagacatctgggtctgctgggctaccgcccattgcacaggcattaaaaaatcatttagct

SEQ ID NO: 514548 - DNA, 75 bp, synthetic construct
  source 1..75: mol_type = other DNA
cgatttaccgtattctggaacaatttcagcaacaggaaaatatgttgccacctgatcagactcactttcaggttt

SEQ ID NO: 514549 - DNA, 75 bp, synthetic construct
  source 1..75: mol_type = other DNA
gaagcgcaaccgctgctgattttaggcatgggtaaactgggcggcggggagctgaatttttcctcagatatcgat

SEQ ID NO: 514550 - DNA, 75 bp, synthetic construct
  source 1..75: mol_type = other DNA
tccgccgttacatcgatttcagcgtgattcagtcgctgcgcaacatgaaaggaatgattgcccgtgaagtgcgtc

SEQ ID NO: 514551 - DNA, 75 bp, synthetic construct
  source 1..75: mol_type = other DNA
gtggatgcacggctgcgtccgtccggggcggcgggaatgctggtcacctcagcagaagcgtttgccgattatcag

SEQ ID NO: 514552 - DNA, 75 bp, synthetic construct
  source 1..75: mol_type = other DNA
ttttctgccaccacgatgctgttttctctgggggccagcatgattctgggtggtgtggctcagatgctggccccg

SEQ ID NO: 514553 - DNA, 75 bp, synthetic construct
  source 1..75: mol_type = other DNA
cgcatgggccagcggctgattaaagtgttggatcaaccgacgcaagatggctttgtctatcgcgtggatatgcgt

SEQ ID NO: 514554 - DNA, 75 bp, synthetic construct
  source 1..75: mol_type = other DNA
ttacgcatcgccgcagcggatatcgccggtacgctaccggtgatgaaagtgagcgatcacttaacctggctggca

SEQ ID NO: 514555 - DNA, 75 bp, synthetic construct
  source 1..75: mol_type = other DNA
ggtcagaatctctatcttgacaatatggaggcaacgggtttttaccgtgtcgcactgacagaggcgcagccgggc

SEQ ID NO: 514556 - DNA, 75 bp, synthetic construct
  source 1..75: mol_type = other DNA
gttgtcattgcttattcgaaagatgatgcagagctaaaatttacagaaatgacaggttttaatgagcattactat

SEQ ID NO: 514557 - DNA, 75 bp, synthetic construct
  source 1..75: mol_type = other DNA
tccgccgttacatcgatttcagcgtgatccagtcgctgcgcaacatgaaaggaatgattgcccgtgaagtgcgcc

SEQ ID NO: 514558 - DNA, 75 bp, synthetic construct
  source 1..75: mol_type = other DNA
cggtggtcggctacggcaagctgggcggctgggagttaggctacagttccgatcttgacctgatcttcctccatg

SEQ ID NO: 514559 - DNA, 75 bp, synthetic construct
  source 1..75: mol_type = other DNA
attaagcagaaaaccatctgacgtgaaacgaatctggagcgcattggatgataaagggaaagatgctatgcgtgc

SEQ ID NO: 514560 - DNA, 75 bp, synthetic construct
  source 1..75: mol_type = other DNA
tgataacaagagctactcaccgtgggacccgatcgagaaagacgagatgaaccgggtattcatattcggtaaggt

SEQ ID NO: 514561 - DNA, 75 bp, synthetic construct
  source 1..75: mol_type = other DNA
tggtgcatgcccggcggtgtgcgcctgcggagtcgtgcggcttcgtgataggcaccccggagggcgaacggtacc

SEQ ID NO: 514562 - DNA, 75 bp, synthetic construct
  source 1..75: mol_type = other DNA
ctcgactctaacccgaccaagttgatcgaggtggtgcatattggcaaacagatgctgatgacccgtggctcgctg

SEQ ID NO: 514563 - DNA, 75 bp, synthetic construct
  source 1..75: mol_type = other DNA
aactgagttaactgatatctttgctcttcccttaaatgagttatctgcaattacacgatttaaagaatcagatat

SEQ ID NO: 514564 - DNA, 75 bp, synthetic construct
  source 1..75: mol_type = other DNA
ggcgcaagtcaaagacgcgttaacgaagatgcgcgccgcagcgctggatgcgcaaaaagcgacgccgccgaagct

SEQ ID NO: 514565 - DNA, 75 bp, synthetic construct
  source 1..75: mol_type = other DNA
gaagtgaaaactgagcgttacgtgaattttttatccaattcgagaatgatgttgcagaaatatatgctcagcgat

SEQ ID NO: 514566 - DNA, 75 bp, synthetic construct
  source 1..75: mol_type = other DNA
ctggccgggtattatgccggtccatggcagctgctattcaacgcgtggtgtaacaatcgcgtccctaacacagcg

SEQ ID NO: 514567 - DNA, 75 bp, synthetic construct
  source 1..75: mol_type = other DNA
gtggaccaggcggtggttatctgttaggcaaagatgccagcagcatcgccgttggcgaagtaattagcgccgttg

SEQ ID NO: 514568 - DNA, 75 bp, synthetic construct
  source 1..75: mol_type = other DNA
aaatgttcaacggacgaaagcaggaacaaatccgcatcatcaacgtccgcggagacagcatgtctggcacgatag

SEQ ID NO: 514569 - DNA, 75 bp, synthetic construct
  source 1..75: mol_type = other DNA
cggaaaccattgtcacgctgcatgacaacaacggcgcggatcattatttgtcggcggaattagtgatggtggttg

SEQ ID NO: 514570 - DNA, 75 bp, synthetic construct
  source 1..75: mol_type = other DNA
gagaaagacgagatgaaccgggtgttcatcttcggtaaggttattgggagcatgccccagacgtacaggaaacat

SEQ ID NO: 514571 - DNA, 75 bp, synthetic construct
  source 1..75: mol_type = other DNA
gcgcgaatgtgattgccaccagcgggcgggcggttgaagcggcgggtgacgttgacgtcttgctgctggataaaa

SEQ ID NO: 514572 - DNA, 75 bp, synthetic construct
  source 1..75: mol_type = other DNA
tgcgtgagccgaaatatggcgctgcggcggacaaagttcctgccgatcaactgcgtaaaggtgacatcgtgctgg

SEQ ID NO: 514573 - DNA, 75 bp, synthetic construct
  source 1..75: mol_type = other DNA
caggaattgagataccggattttcatcgtgaggatgactggtggcgtaacggtcagaatctttacctggacaaca

SEQ ID NO: 514574 - DNA, 75 bp, synthetic construct
  source 1..75: mol_type = other DNA
gaacgacttttaatgtgagtcgccctgcaaccccaatgacccccactcgtccagcaccacagccaccgataagtg

SEQ ID NO: 514575 - DNA, 75 bp, synthetic construct
  source 1..75: mol_type = other DNA
ttttaccgggtgtctccgtcctgtgcacaggcaggcgatatcctgctgtgctgctttggttcatcggtacccaac

SEQ ID NO: 514576 - DNA, 75 bp, synthetic construct
  source 1..75: mol_type = other DNA
cggtgatgtttatcgtctggatcggcagtctgctgaccacctgtattagcatcgcgatggcaagcggcgcgatgc

SEQ ID NO: 514577 - DNA, 75 bp, synthetic construct
  source 1..75: mol_type = other DNA
atggttgtttttagtcaacaaccattttcgtttgatgaaataaaaccttggttgtacatttggtctatgaaaaca

SEQ ID NO: 514578 - DNA, 75 bp, synthetic construct
  source 1..75: mol_type = other DNA
ctggcgcgcgccgcgttccctcaccacattacgattgccgcccggatgacgaaacacccaccctgctggtggtgc

SEQ ID NO: 514579 - DNA, 75 bp, synthetic construct
  source 1..75: mol_type = other DNA
ccttaaaccagcccgccaggcgccaccgccaccgacaagtgggcagacatccgggccagccaagcctttaccacc

SEQ ID NO: 514580 - DNA, 75 bp, synthetic construct
  source 1..75: mol_type = other DNA
ttaaaatgggcggtgtgagcttgtgggatcttgcggttgcgtatccggtcacctctcacctgacagttcgtggta

SEQ ID NO: 514581 - DNA, 75 bp, synthetic construct
  source 1..75: mol_type = other DNA
gaagggaaagcgcggattaagggcgtcgaggcgaccgccaattttgataccggaccactgacgcatactgtgagt

SEQ ID NO: 514582 - DNA, 75 bp, synthetic construct
  source 1..75: mol_type = other DNA
gctttccacgatacgtttttacgtgtctgcggcgactggctggcacaatccccatgcccgattctggcttgcggc

SEQ ID NO: 514583 - DNA, 75 bp, synthetic construct
  source 1..75: mol_type = other DNA
ctgactggctggtgattgagtgtagcgttaaccccggcgagacatttctggatcggatgatcgcgatggtggaag

SEQ ID NO: 514584 - DNA, 75 bp, synthetic construct
  source 1..75: mol_type = other DNA
agcggagtcgtgcggcttcgtggtgagcacgccggagggggaaagatattttccctgcgtgaatatctccggtga

SEQ ID NO: 514585 - DNA, 75 bp, synthetic construct
  source 1..75: mol_type = other DNA
ctatgataaccgtaccaattatgacgcgtattattctccgggttcaccattggtcgatacccgtaaactctatag

SEQ ID NO: 514586 - DNA, 75 bp, synthetic construct
  source 1..75: mol_type = other DNA
aaaaaatacgaactggttgttaaagggataaataattacccggataagattactgttactgtggcactggaaatt

SEQ ID NO: 514587 - DNA, 75 bp, synthetic construct
  source 1..75: mol_type = other DNA
ccagtgctttacggtttgaacgaaacgcgtccaagccaggataaagatgacgagcaagaagtgttttacaccacg

SEQ ID NO: 514588 - DNA, 75 bp, synthetic construct
  source 1..75: mol_type = other DNA
gcgttagctcaggatcaggcagatggctatgtactgacggggcatccggtgatgttgcagggcggcgaatatgtg

SEQ ID NO: 514589 - DNA, 75 bp, synthetic construct
  source 1..75: mol_type = other DNA
acgaacgcattctgtctggcgtcaccgccactggcacacatctgccttcacggggatttacaacgatttggccgc

SEQ ID NO: 514590 - DNA, 75 bp, synthetic construct
  source 1..75: mol_type = other DNA
cgctggaccgtgttgaaggtgccacgctggagttttatgaggcagcagccagaaggagcatcagacaggtcttcc

SEQ ID NO: 514591 - DNA, 75 bp, synthetic construct
  source 1..75: mol_type = other DNA
gtggcacttgaaattggcgggcatccgtcgttgttgttgccagatgtggcgattagtcttgaccgtactgaaggt

SEQ ID NO: 514592 - DNA, 75 bp, synthetic construct
  source 1..75: mol_type = other DNA
tagcggtggcacgtctggtgcgattgccggtgcaggtcttgccagccttttgggaacttcaacgccttggggcgc

SEQ ID NO: 514593 - DNA, 75 bp, synthetic construct
  source 1..75: mol_type = other DNA
ggcgctcttcagggacaggcaaacgccgggcaaacatatgccaacaacatgagccagatttcacagcaaagcgcg

SEQ ID NO: 514594 - DNA, 75 bp, synthetic construct
  source 1..75: mol_type = other DNA
aagcaacaggtggattgggttccactgcaaccggtaatcagttagcaacaatcgcaccaacgcttggtcagcaat

SEQ ID NO: 514595 - DNA, 75 bp, synthetic construct
  source 1..75: mol_type = other DNA
gcgctttaccgtcgttctccagaatggagcgcctttggcattcgcccaccgctgcgtttgggtgagttctctata

SEQ ID NO: 514596 - DNA, 75 bp, synthetic construct
  source 1..75: mol_type = other DNA
cacgtccgagccaggataaagacgacgaacaagaggtgttctacaccaccgcgttagctcaggatcaggcagatg

SEQ ID NO: 514597 - DNA, 75 bp, synthetic construct
  source 1..75: mol_type = other DNA
tggcatgctgcctgccgtatggcggaacagctgaccaccctgcgttacaggtttggtctgcaggctgatgaagac

SEQ ID NO: 514598 - DNA, 75 bp, synthetic construct
  source 1..75: mol_type = other DNA
tggctgagcgaggccgaccggcggctgcagataaagagtgccctgccctggtggctggtctgccggggggacatt

SEQ ID NO: 514599 - DNA, 75 bp, synthetic construct
  source 1..75: mol_type = other DNA
ctgagtaaacgggagaggtattccgaaaaatggcaacgacgaacgcattcagcctggcgtcaccgccactggcac

SEQ ID NO: 514600 - DNA, 75 bp, synthetic construct
  source 1..75: mol_type = other DNA
tttttacctgaaatgcccacattgtggcgaggagcaggttctggtatttggtttcgacggcatcggatacggcct

SEQ ID NO: 514601 - DNA, 75 bp, synthetic construct
  source 1..75: mol_type = other DNA
tgccgggttatgtgaaggggatggtccgttgccggaaaagcgccccgtaattttagaggcgcaggatgtgttgat

SEQ ID NO: 514602 - DNA, 75 bp, synthetic construct
  source 1..75: mol_type = other DNA
gaatcagcgattctggcgcatgcccggcggtgtgtgcctgcggagtcgtgcggcttcgtggtgagaacgccggag

SEQ ID NO: 514603 - DNA, 75 bp, synthetic construct
  source 1..75: mol_type = other DNA
ggatttgacgccttagatatggggcttgccacgctggcccattatcgccatacaccatcgggtacggtccgaatt

SEQ ID NO: 514604 - DNA, 75 bp, synthetic construct
  source 1..75: mol_type = other DNA
atgaccttagaatggtggtttgcctacctgctgacatcgatcattttaagcctgtcgccaggctctggtgcaatc

SEQ ID NO: 514605 - DNA, 75 bp, synthetic construct
  source 1..75: mol_type = other DNA
tggctaatcatgctgccatttactgcggcaacggtgaactgcttcatcatatacctgagcaactgagtaaacggg

SEQ ID NO: 514606 - DNA, 75 bp, synthetic construct
  source 1..75: mol_type = other DNA
ggtgggtatccgtcactgttgttgccagatgtggcgattagtcttgaccgtactgaaggtgccacgctggagttt

SEQ ID NO: 514607 - DNA, 75 bp, synthetic construct
  source 1..75: mol_type = other DNA
gacatttgttccagcgcgcagtttttgtgaatcttaccaatcccaaaagtattgtgtttctggcggcgctatttc

SEQ ID NO: 514608 - DNA, 75 bp, synthetic construct
  source 1..75: mol_type = other DNA
ctcagtgattgcgtttgaagtgttgaagtgggcaggcgcggcttacttgatttggctgggaatacagcaatggcg

SEQ ID NO: 514609 - DNA, 75 bp, synthetic construct
  source 1..75: mol_type = other DNA
tcaggctcgatatcagagtctggcatcagcagaggcgacaggtggtcttggctcaacagcaacaggcaaccaact

SEQ ID NO: 514610 - DNA, 75 bp, synthetic construct
  source 1..75: mol_type = other DNA
ggatgactggtggcgcaacggtcagaacctttacctggacaatatggcggtcacaggcttttaccgggtgcccct

SEQ ID NO: 514611 - DNA, 75 bp, synthetic construct
  source 1..75: mol_type = other DNA
gagcgtcactggcagacctgggaatatccggacggaaccccggaatttgccgcacatatcaatgtgaatcaggaa

SEQ ID NO: 514612 - DNA, 75 bp, synthetic construct
  source 1..75: mol_type = other DNA
tgaccagcgtccgcaacctgtataccgatgcccagagtaattcaggagtcgcattgtacggtatctattttagtg

SEQ ID NO: 514613 - DNA, 75 bp, synthetic construct
  source 1..75: mol_type = other DNA
ggccggagcatcaatggcgttatggggttcagccctggcagccggtggtttttctgccaccacgatgctgttttc

SEQ ID NO: 514614 - DNA, 75 bp, synthetic construct
  source 1..75: mol_type = other DNA
taaagcaggaacgccagcctatgaaagagcattaagtaacgctgcaaatgccatcagaccgctgcttgccactga

SEQ ID NO: 514615 - DNA, 75 bp, synthetic construct
  source 1..75: mol_type = other DNA
gagataacagtaacctggttgatgaaaaagctgaacaagggagcaggcaagcctgtagtaatgttccagttcggc

SEQ ID NO: 514616 - DNA, 75 bp, synthetic construct
  source 1..75: mol_type = other DNA
gccttagtaagggcgacacagtggttatagcgaaattagatagaggtttcagagacacagccgattgcctgaata

SEQ ID NO: 514617 - DNA, 75 bp, synthetic construct
  source 1..75: mol_type = other DNA
tgggcggcagcaccaaaaaaggtatcgattgttctggtttcgtacaacgtacattccgtgaacaatttggcttag

SEQ ID NO: 514618 - DNA, 75 bp, synthetic construct
  source 1..75: mol_type = other DNA
gttagcatcaatcgcacctacactcggtcaaaactggctgtcaggtcagatgaacaactacaacaatctggcaaa

SEQ ID NO: 514619 - DNA, 75 bp, synthetic construct
  source 1..75: mol_type = other DNA
accgatgcgcagtatcaacagcttgcggcggttacgcgggcactgattgattgctatccggatatcgctaaaaac

SEQ ID NO: 514620 - DNA, 75 bp, synthetic construct
  source 1..75: mol_type = other DNA
acaatattagcctgccgccaggcgagtttggcggtccgtggatcgacgcattattcactggaactattgatccgc

SEQ ID NO: 514621 - DNA, 75 bp, synthetic construct
  source 1..75: mol_type = other DNA
atgattcagttcaaaccaacgcgaaacatcgacctgatagaagcagtcggaaatcaccctgacattattgccgga

SEQ ID NO: 514622 - DNA, 75 bp, synthetic construct
  source 1..75: mol_type = other DNA
ggcggaaaaaatccgcgatattatcggcccagaactggtgaccttacataacctcaaggacgactcccctaaatt

SEQ ID NO: 514623 - DNA, 75 bp, synthetic construct
  source 1..75: mol_type = other DNA
acaatattagcctgccgccaggcgagtttggcggtccgtggattgatgcattattcactggaactattgatccgc

SEQ ID NO: 514624 - DNA, 75 bp, synthetic construct
  source 1..75: mol_type = other DNA
ttgttcagtatgttccttttgataaacgcgcctggcatgcgggggtatctcagtaccagggacgcgaacgctgta

SEQ ID NO: 514625 - DNA, 75 bp, synthetic construct
  source 1..75: mol_type = other DNA
gcgcttcaggggcaggcaaatgccgggcaaacatatgccaacaacatgagccagatttcacagcaaagcgcggca

SEQ ID NO: 514626 - DNA, 75 bp, synthetic construct
  source 1..75: mol_type = other DNA
attgccccgactctcggtcagtcgtggttgtcgaaccagatgagcaactacaacaatctggcaaacatcggcctt

SEQ ID NO: 514627 - DNA, 75 bp, synthetic construct
  source 1..75: mol_type = other DNA
aaagcccaggcacgcgcaactgaaaagggtatcgaattgcagcgtgaaatgtggcaaacgaacatgcaaaacctt

SEQ ID NO: 514628 - DNA, 75 bp, synthetic construct
  source 1..75: mol_type = other DNA
actggtgccgctcttggttctattgttcccggtcttggtactggattaggcgccgcaatcggtggcggacttggc

SEQ ID NO: 514629 - DNA, 75 bp, synthetic construct
  source 1..75: mol_type = other DNA
ggcgcgctatcagagtctggcagcagcagaggcaacgggtggattaggctctacagcaacaggaaaccagttagc

SEQ ID NO: 514630 - DNA, 75 bp, synthetic construct
  source 1..75: mol_type = other DNA
gcgcttaaccagtattacaactcccagcagtacaaagaccttgcagggcaggcgcgctatcagagtctggcagca

SEQ ID NO: 514631 - DNA, 75 bp, synthetic construct
  source 1..75: mol_type = other DNA
tccggaagaattcggcaaagtaaccctgcgcgtaaacagtgacggctcggtggtacgcctgaaagatgtcgcacg

SEQ ID NO: 514632 - DNA, 75 bp, synthetic construct
  source 1..75: mol_type = other DNA
ctggttatattgcatcacatactatactgagtttgatagagcagggtaatgaagtaattattattgataatttat

SEQ ID NO: 514633 - DNA, 75 bp, synthetic construct
  source 1..75: mol_type = other DNA
atatatataatttgggcacaggcaaaggatattccgttcttgaattggtaaatatctttgaaacaataacaggaa

SEQ ID NO: 514634 - DNA, 75 bp, synthetic construct
  source 1..75: mol_type = other DNA
agatattttaatcctgttggtgctcatagttcgatgagcataggtgaagaccccagaggtatacctagcaattta

SEQ ID NO: 514635 - DNA, 75 bp, synthetic construct
  source 1..75: mol_type = other DNA
aaaataaaacaatatacaggtgatattttaaattcagaacttttaaatagaatttttggtgaaaataatataacc

SEQ ID NO: 514636 - DNA, 75 bp, synthetic construct
  source 1..75: mol_type = other DNA
tcatctccacaattggcagcggataaactaggatggaaagccactcttaatttagaggatatgctgcgcgattca

SEQ ID NO: 514637 - DNA, 75 bp, synthetic construct
  source 1..75: mol_type = other DNA
gctgatgtctctaaagcagaaagggttttaggctggaaagccaagtacaatattgaagatatgatggctcatacc

SEQ ID NO: 514638 - DNA, 75 bp, synthetic construct
  source 1..75: mol_type = other DNA
caggttatattggatctcatacggttacagagttacttaaggagggatatgaagttattgtaattgataatctta

SEQ ID NO: 514639 - DNA, 75 bp, synthetic construct
  source 1..75: mol_type = other DNA
cccattgaaatactatcaaaataacgtttctggtacattgtcattaatagatgcgatgggggaggcttgtgtaaa

SEQ ID NO: 514640 - DNA, 75 bp, synthetic construct
  source 1..75: mol_type = other DNA
acggaatattttgacgattacctgaaagcagtagcctgggcgcagctttttgccagcctcaaccgtgatgcgatg

SEQ ID NO: 514641 - DNA, 75 bp, synthetic construct
  source 1..75: mol_type = other DNA
tattttaatcctgtaggggcgcacccatcaggattaattggtgagtctcctattggtgttcctaataacttaatg

SEQ ID NO: 514642 - DNA, 75 bp, synthetic construct
  source 1..75: mol_type = other DNA
aatcctagcttagctttcaaagaattgaaatggaaagcaactaaaactttagatgatatggttaaagatgtttgg

SEQ ID NO: 514643 - DNA, 75 bp, synthetic construct
  source 1..75: mol_type = other DNA
caggatatattggctcacatacagtattgcaacttttaaatcataactatgatgttattgttattgataatttta

SEQ ID NO: 514644 - DNA, 75 bp, synthetic construct
  source 1..75: mol_type = other DNA
atgagttcaacaacaatcccaaccaaaagggttgggattgttgttgagaataatctgctgggtggcagtgaatcg

SEQ ID NO: 514645 - DNA, 75 bp, synthetic construct
  source 1..75: mol_type = other DNA
ctgtgtaaggttgaagcctgggcgatgaatattggctgccacctgactattccgcagagctgcgagttccagctg

SEQ ID NO: 514646 - DNA, 75 bp, synthetic construct
  source 1..75: mol_type = other DNA
tgggcgatgaatattggctgccacctgactattccacagagctgcgagttccagctgctgcgcgacaagcaggag

SEQ ID NO: 514647 - DNA, 75 bp, synthetic construct
  source 1..75: mol_type = other DNA
aaagatgctctcaaacacacttatctcggttatgaaaccaaagaactggttgatgtcgtatccggtgagatcacc

SEQ ID NO: 514648 - DNA, 75 bp, synthetic construct
  source 1..75: mol_type = other DNA
tcggttatgcaaccaaagaactggttgatgtcgtatccggtgagatcaccactattcagtcattacgccatacct

SEQ ID NO: 514649 - DNA, 75 bp, synthetic construct
  source 1..75: mol_type = other DNA
atcccgatggcgtataaagatattgatgcggtgatggcggcacaaagcgatctggtggaagttatctataccctg

SEQ ID NO: 514650 - DNA, 75 bp, synthetic construct
  source 1..75: mol_type = other DNA
tatacgcgagagcgtactgttgcccgggtctatgtctgaaatgcatttttttttactgataggtatttcttctat

SEQ ID NO: 514651 - DNA, 75 bp, synthetic construct
  source 1..75: mol_type = other DNA
aagccgtggcctgggcgcagctttttgccagccttaatcgagatgcaatgatggaaaacgtagtaacggcgttgc

SEQ ID NO: 514652 - DNA, 75 bp, synthetic construct
  source 1..75: mol_type = other DNA
agttacagtggcaggcgaaactttctttagaggatatgttgcgagatgcttggaattggcaaaaaaataatcctg

SEQ ID NO: 514653 - DNA, 75 bp, synthetic construct
  source 1..75: mol_type = other DNA
aaaagagcaggaaaagttcggtactggtagtgatatccagcgtggcattcaggcggcaacggccgcgcttcaggg

SEQ ID NO: 514654 - DNA, 75 bp, synthetic construct
  source 1..75: mol_type = other DNA
aactgcatcgcggtaacttcatcgctatcggccagcagatccagccttatctggagaacggaaaatgctttcgca

SEQ ID NO: 514655 - DNA, 75 bp, synthetic construct
  source 1..75: mol_type = other DNA
acgggcgtactaccgggcgttgtaaacgtgataaaggcgcatgggaaaatccgcctgttaacgtcgatgcgaaat

SEQ ID NO: 514656 - DNA, 75 bp, synthetic construct
  source 1..75: mol_type = other DNA
aactccatcgcggtaacttcgcgaccatcggccagcagattcagccattgctggatgccgggcaatgcttacgcc

SEQ ID NO: 514657 - DNA, 75 bp, synthetic construct
  source 1..75: mol_type = other DNA
acatcgaagtatatatcagaactgatgattagagatattgcaaaaaaatatagtgacactaattttttatgtctg

SEQ ID NO: 514658 - DNA, 75 bp, synthetic construct
  source 1..75: mol_type = other DNA
atgagatgtatcgctggcttggatttacgcaggacaagctcaatgacgtcgttctgacaccaccttatgttgcca

SEQ ID NO: 514659 - DNA, 75 bp, synthetic construct
  source 1..75: mol_type = other DNA
atggacatatataattctttgagtgatatagaagttgattgtatttgccaggaagtgatggctatatatgaacat

SEQ ID NO: 514660 - DNA, 75 bp, synthetic construct
  source 1..75: mol_type = other DNA
ctacgttgttgtcccaggctggtctgacgatgacgattcagcgcatcgcctcggtgaatttacccgtgatatggg

SEQ ID NO: 514661 - DNA, 75 bp, synthetic construct
  source 1..75: mol_type = other DNA
gaggataacacatacatcacttctaattacaaatattattacatcggtgctttattgtttgaaaattatatggac

SEQ ID NO: 514662 - DNA, 75 bp, synthetic construct
  source 1..75: mol_type = other DNA
gtattggcatcgaccgaatgattatgctgtttacaaacagtcatactattcgtgacgttattctcttcccggcga

SEQ ID NO: 514663 - DNA, 75 bp, synthetic construct
  source 1..75: mol_type = other DNA
gtgtcaccgctggcacgccgtaatgatgttaacccagaaatcaccgaccgttttgaattcttcatcggtggtcgt

SEQ ID NO: 514664 - DNA, 75 bp, synthetic construct
  source 1..75: mol_type = other DNA
tcgaccgcgtggagaactacgagtcaatgaacattgattacgtggtggaagactacgccgccggttgtctggtgg

SEQ ID NO: 514665 - DNA, 75 bp, synthetic construct
  source 1..75: mol_type = other DNA
acggcattgccgggctgctgatgctggcagtcagccaccggctgtaccgggcagaagacagagcggaacgtctgg

SEQ ID NO: 514666 - DNA, 75 bp, synthetic construct
  source 1..75: mol_type = other DNA
gcagtcatgatcatgcaagtgattatttcactattaacgccttgccaattgtgattggcgagaaatgctggctgg

SEQ ID NO: 514667 - DNA, 75 bp, synthetic construct
  source 1..75: mol_type = other DNA
ggttggcgtatctaaccaccgtacactggagttcgctaaatatctggcgaacaaagatgttaaggtgtggatccg

SEQ ID NO: 514668 - DNA, 75 bp, synthetic construct
  source 1..75: mol_type = other DNA
tttattcccccgagtataaaaaagaaacacagatagtttatcatttatcaattaacacatttaatcaaatcaaag

SEQ ID NO: 514669 - DNA, 75 bp, synthetic construct
  source 1..75: mol_type = other DNA
cctttgaatcctgtggaaccgtagacggcccaggtattcgctttatcacctttttccagggctgcctgatgcgct

SEQ ID NO: 514670 - DNA, 75 bp, synthetic construct
  source 1..75: mol_type = other DNA
gatgccggtgcaacggtacgttgggaaaagcggccttatgacggcaacagagagcataatttatatgttgaattt

SEQ ID NO: 514671 - DNA, 75 bp, synthetic construct
  source 1..75: mol_type = other DNA
aagcaagcatacgccacgtaatcgttcatgagctcttaaaagaatctaataaagacttcgatcactccaaaccat

SEQ ID NO: 514672 - DNA, 75 bp, synthetic construct
  source 1..75: mol_type = other DNA
cttttaatttaggtactggtcaaggttattctgttttagagattgtaaaaatgtttgagatagtcactaaaaaga

SEQ ID NO: 514673 - DNA, 75 bp, synthetic construct
  source 1..75: mol_type = other DNA
actgtttatgggagtaacagtatccctccccatacggaagatagacgaattggtgaaactacaaacccatatggg

SEQ ID NO: 514674 - DNA, 75 bp, synthetic construct
  source 1..75: mol_type = other DNA
ggaaccaaaggcaattctgcacattatggcgtttttaaagaggaaaaaacagaacaagggcctgtgccatcaata

SEQ ID NO: 514675 - DNA, 75 bp, synthetic construct
  source 1..75: mol_type = other DNA
tgacaaggggattgcttcagcaggtgcaacccgtaagttaccagatgaaataaggcgtttctttaagaaagaacc

SEQ ID NO: 514676 - DNA, 75 bp, synthetic construct
  source 1..75: mol_type = other DNA
gtttccgttatctattggttacaatgatcaaaaaaactaatggcgtaactattagtgaaaatttagagccagagg

SEQ ID NO: 514677 - DNA, 75 bp, synthetic construct
  source 1..75: mol_type = other DNA
tttgccacggactaccagcaactgtttgccgagaaaccgtcgctgacgctgcatcagcggatgcgggagttgggg

SEQ ID NO: 514678 - DNA, 75 bp, synthetic construct
  source 1..75: mol_type = other DNA
tgcaccatctttatcatgaacccttacccgaaaatctgaagctcacgccgaaggtcgaagtggataatgttcatc

SEQ ID NO: 514679 - DNA, 75 bp, synthetic construct
  source 1..75: mol_type = other DNA
cgtatccagtatatgcgcaaccatcaatgactggaaatgtaataattgaaactcaacacaatgaaaaagcatctc

SEQ ID NO: 514680 - DNA, 75 bp, synthetic construct
  source 1..75: mol_type = other DNA
cacggtgcgcgatcccggtgaaaaagccggaacgttgcgcccggaactcgcccgcgtatggggattgcctgagga

SEQ ID NO: 514681 - DNA, 75 bp, synthetic construct
  source 1..75: mol_type = other DNA
cggcaacagtgcgcaggcatatttacgctggtatcagaatgagcgccgtcaatacagcagttcatgggcatttac

SEQ ID NO: 514682 - DNA, 75 bp, synthetic construct
  source 1..75: mol_type = other DNA
attatctgaaaatgtctctacacaacattcagaagagtacgtgcaggcattacgtaataatcagctttctgccgc

SEQ ID NO: 514683 - DNA, 75 bp, synthetic construct
  source 1..75: mol_type = other DNA
tcgaacaggtgatggttaacatgatgatcgccaatgcagccagctcgataggctcattgttcggtggtgccgcat

SEQ ID NO: 514684 - DNA, 75 bp, synthetic construct
  source 1..75: mol_type = other DNA
ttatgcatctactgcggctattcctatcgttggtcccgctcttgcgcctgcagctatggcaacggcggcggcagt

SEQ ID NO: 514685 - DNA, 75 bp, synthetic construct
  source 1..75: mol_type = other DNA
atggtgcaacggaatccatctctgacaacctgaatgatcttgtgcacggggcggaggatttaggtgatttcttca

SEQ ID NO: 514686 - DNA, 75 bp, synthetic construct
  source 1..75: mol_type = other DNA
cggagcgccggtatacccgaattatcatgaatccgccgtttaatcgcggtgatgatatccgacatatccggcggg

SEQ ID NO: 514687 - DNA, 75 bp, synthetic construct
  source 1..75: mol_type = other DNA
aagtttcttttttagaacgacaattatccccgagggagaaaagtatctttatatataccaaggaaggaaaagata

SEQ ID NO: 514688 - DNA, 75 bp, synthetic construct
  source 1..75: mol_type = other DNA
ttgcagaatgtacgttagatcttggtaaatatacacattatgttggcgaattccaggtgtctggaacaataaaac

SEQ ID NO: 514689 - DNA, 75 bp, synthetic construct
  source 1..75: mol_type = other DNA
agttgcgtcactggcaagcaggaaaaggattatctgcgccgctttccggagtgccggacgtttgggcgcacgggc

SEQ ID NO: 514690 - DNA, 75 bp, synthetic construct
  source 1..75: mol_type = other DNA
catggccttctataacagcgacaaattcccccagtggcagcaaaaattatttattggcgcgctgaaagataaaga

SEQ ID NO: 514691 - DNA, 75 bp, synthetic construct
  source 1..75: mol_type = other DNA
cgcatctggttaagttattccgaagttggcgatgatggcaaagccggaactgctgtgggttatggccgcttaagt

SEQ ID NO: 514692 - DNA, 75 bp, synthetic construct
  source 1..75: mol_type = other DNA
taaacggtgtaaaaattgagattgctaccggtcttgcaaatgttgacctgtcaggattacagaatgcgatcactg

SEQ ID NO: 514693 - DNA, 75 bp, synthetic construct
  source 1..75: mol_type = other DNA
gcgccgcctcaacaatcttaaaactgatgtagaagatcagggattccttgccagctttaaccgaattggtatgga

SEQ ID NO: 514694 - DNA, 75 bp, synthetic construct
  source 1..75: mol_type = other DNA
ttgcagcacaaaaggcattagataaaatcttagtagatcaaactatcggtactaatgagcgtcaattagcagagt

SEQ ID NO: 514695 - DNA, 75 bp, synthetic construct
  source 1..75: mol_type = other DNA
gtctgggagccattgccgcggggaacattcacgtatacccaggtagcgaccgccattctcagaataaccgtctga

SEQ ID NO: 514696 - DNA, 75 bp, synthetic construct
  source 1..75: mol_type = other DNA
aatgccagtgcgaccctgatcccggccagcagtggcgaagatccgttctggcagggcagtgcacgtaccatcttt

SEQ ID NO: 514697 - DNA, 75 bp, synthetic construct
  source 1..75: mol_type = other DNA
taccgactttgccacgaattatttccgaggcgcgtaagtttggtggctgctttgtcctggggtttcagaacttcg

SEQ ID NO: 514698 - DNA, 75 bp, synthetic construct
  source 1..75: mol_type = other DNA
cgggacgtgcagacgagcctcgatcagacgattgaggatgaaattcaccgccgcagtgaagaagaacggcacagg

SEQ ID NO: 514699 - DNA, 75 bp, synthetic construct
  source 1..75: mol_type = other DNA
gcacttcgtaggcgagcagcgattgtcgaagaatttactcgccccgggctcacagaacgagaatcgctttttcgc

SEQ ID NO: 514700 - DNA, 75 bp, synthetic construct
  source 1..75: mol_type = other DNA
ccgtttagcccgtgatgcaaaactcgaagatgccattctttttaagctgagtaacaaagtgcgcggaacaggcaa

SEQ ID NO: 514701 - DNA, 75 bp, synthetic construct
  source 1..75: mol_type = other DNA
aaacacccctcttagcgaccgctcagaagctgctctaaccctctcacgtaaacagcgacagctagcaaatcaact

SEQ ID NO: 514702 - DNA, 75 bp, synthetic construct
  source 1..75: mol_type = other DNA
acccgtcaggagctggatcgctatggcatggcccgcaaaattgagttcactgtcagctttcagcgatgcaatgaa

SEQ ID NO: 514703 - DNA, 75 bp, synthetic construct
  source 1..75: mol_type = other DNA
gcgatatctaatcaatccgtcagccaatttatgttgaactgcgcttcgcagcgagctgcggaagtgattgaacag

SEQ ID NO: 514704 - DNA, 75 bp, synthetic construct
  source 1..75: mol_type = other DNA
agggcgcgcccctgtcgctgaaattcagggtagctcgcaactttttgtcaccccctccccggaatgtcgccggct

SEQ ID NO: 514705 - DNA, 75 bp, synthetic construct
  source 1..75: mol_type = other DNA
ctcagatggaagaaatctacggcccgaaagcggcggcggggctgtttgacctgctgaataccaagttcttcttcc

SEQ ID NO: 514706 - DNA, 75 bp, synthetic construct
  source 1..75: mol_type = other DNA
ctcacaccagacccgcgatatgacccgcagggaagaggtcaacatcaaccatgcgacagagaaaacgcatgactt

SEQ ID NO: 514707 - DNA, 75 bp, synthetic construct
  source 1..75: mol_type = other DNA
cgtgacgtacaaacgagtcttgatcagacgcttgaggatgaaattcggcgccgtagtgaagaagaacggcacaag

SEQ ID NO: 514708 - DNA, 75 bp, synthetic construct
  source 1..75: mol_type = other DNA
gtcgccgggaccgagcaacctgttttttactggaaagattcgcccgccgtgagcggcatggccttctataacagc

SEQ ID NO: 514709 - DNA, 75 bp, synthetic construct
  source 1..75: mol_type = other DNA
atgaagctgatcatgcctttcccccccagcgtgaacacgtactggcgacaccccaacaaaggggggtttgctggt

SEQ ID NO: 514710 - DNA, 75 bp, synthetic construct
  source 1..75: mol_type = other DNA
atgctggttgagtggggaccggttatcccgaaagggaaggtcgagatcactatcagtaagtatgagaaaccggcg

SEQ ID NO: 514711 - DNA, 75 bp, synthetic construct
  source 1..75: mol_type = other DNA
cgagtgtgaacacctactggcgagcccctaataaggggccgctggccggtcgccacttaatcagtgctgaaggcc

SEQ ID NO: 514712 - DNA, 75 bp, synthetic construct
  source 1..75: mol_type = other DNA
atgaagctgatcctgcctttcccacccagcgtgaacacgtactggcgacaccccaacaaaggggggtttgctggt

SEQ ID NO: 514713 - DNA, 75 bp, synthetic construct
  source 1..75: mol_type = other DNA
atgaagctgatcttgcctttcccccccagcgtgaacacgtactggcgacaccccaacaaaggggtgtttgctggt

SEQ ID NO: 514714 - DNA, 75 bp, synthetic construct
  source 1..75: mol_type = other DNA
atgaagctgatcatgcctttcccgcccagcgtgaacacgtactggcgacaccccaacaaaggggcgtttgctggt

SEQ ID NO: 514715 - DNA, 75 bp, synthetic construct
  source 1..75: mol_type = other DNA
cgtgatgaaccgactctggcggtggggatgcattttgtccttaccatgggcaaaccgttgaccgcgatgccgggg

SEQ ID NO: 514716 - DNA, 75 bp, synthetic construct
  source 1..75: mol_type = other DNA
gtgctgacttcagcgtcgttgaaatatgcgattgctgagcgtggttatcggttgggtagttatcttgatgtgtaa

SEQ ID NO: 514717 - DNA, 75 bp, synthetic construct
  source 1..75: mol_type = other DNA
cttccctcggttaacggaactggatgtgctgacttcagcgtcgttgaaatatgcgattgctgagcgtggttatcg

SEQ ID NO: 514718 - DNA, 75 bp, synthetic construct
  source 1..75: mol_type = other DNA
ggaagacgacagccagattaagcgcatgctggtggaatggggacccgtagtgccgaaaggtcgggtagagataac

SEQ ID NO: 514719 - DNA, 75 bp, synthetic construct
  source 1..75: mol_type = other DNA
ctcccgaagccatcgactgaactggcagcggttgaaatcactctgtacccgccggatgcgcgccgccgggatatc

SEQ ID NO: 514720 - DNA, 75 bp, synthetic construct
  source 1..75: mol_type = other DNA
gcttagtggctaacatcgcgctcatgttgttcgtggctctttgcatctgggtttggtttatctggccttttgtag

SEQ ID NO: 514721 - DNA, 75 bp, synthetic construct
  source 1..75: mol_type = other DNA
atgaagctgatcctgcctttcccgcccagcgtgaacacgtactggcgacaccccaacaaaggggagtttgctggt

SEQ ID NO: 514722 - DNA, 75 bp, synthetic construct
  source 1..75: mol_type = other DNA
aagttatagagctgccaacgagccttttatacacccttgctttgatgaaatagatcatgtaatacaaagggatga

SEQ ID NO: 514723 - DNA, 75 bp, synthetic construct
  source 1..75: mol_type = other DNA
gattttgatgaactagttgaagcaataattgctaagcatttaatgactgggcatgatactggctttggaaaattg

SEQ ID NO: 514724 - DNA, 75 bp, synthetic construct
  source 1..75: mol_type = other DNA
gcatcagctcagtgaccgtgatggaactggtatacggtgctgaaaaaagtcagtttccggagcgtaatctcgcga

SEQ ID NO: 514725 - DNA, 75 bp, synthetic construct
  source 1..75: mol_type = other DNA
tggttaagctattccgaagttggcgatgatggcaaagccggaactgccgtggggtatggtcgtttaagtgatgat

SEQ ID NO: 514726 - DNA, 75 bp, synthetic construct
  source 1..75: mol_type = other DNA
ctacggttaatttagttgatgcatttggtgaagaagcacctacagacttttttgactcacttattaaaaagtcat

SEQ ID NO: 514727 - DNA, 75 bp, synthetic construct
  source 1..75: mol_type = other DNA
ggatcaacaaaccacaattaccgaagaccaagcaaaggcatttaaaaagctggatgataatttagataaactatc

SEQ ID NO: 514728 - DNA, 75 bp, synthetic construct
  source 1..75: mol_type = other DNA
gacaactataacaaggcgctgtttgacgccctgacccacgcgggtgtgtgggaagacgacagacaggtgaaaaga

SEQ ID NO: 514729 - DNA, 75 bp, synthetic construct
  source 1..75: mol_type = other DNA
atgaagctgatcgtgcctttcccccccagcgtgaacacgtactggcgacaccccaacaaaggggagtttgctggt

SEQ ID NO: 514730 - DNA, 75 bp, synthetic construct
  source 1..75: mol_type = other DNA
atgaagctgatcgtgcctttcccacccagcgtgaacacgtactggcgacaccccaacaaaggggcgtttgctggt

SEQ ID NO: 514731 - DNA, 75 bp, synthetic construct
  source 1..75: mol_type = other DNA
tcccggaagggaaggtcgagatcactatcagtaagtacgagaaaacggcgggggcagccgcccggttaagaggag

SEQ ID NO: 514732 - DNA, 75 bp, synthetic construct
  source 1..75: mol_type = other DNA
ctgccgaaaccaacgtcggcacctgcttcagtggagatcgtgttgtttcctccggatagccgccagtatcaatat

SEQ ID NO: 514733 - DNA, 75 bp, synthetic construct
  source 1..75: mol_type = other DNA
ttgagcagttacgtcgtctgccgaaaccaacgtcggcacctgcttcagtggagatcgtgttgtttcctccggata

SEQ ID NO: 514734 - DNA, 75 bp, synthetic construct
  source 1..75: mol_type = other DNA
cagagcatctcgagaattcctccatccgttttcttaaagaagtggctatacgtaaaggtatacaaaatataacat

SEQ ID NO: 514735 - DNA, 75 bp, synthetic construct
  source 1..75: mol_type = other DNA
gaccgtctcatcggcaaactggagtatgacgcccgattactgcgggaaccggacacaaagcccctgggcgatgga

SEQ ID NO: 514736 - DNA, 75 bp, synthetic construct
  source 1..75: mol_type = other DNA
atgtcgattaagaagctcgaagatggtcgttatttgctggacatcaggccgaacggacgcaagggaaagcgcgtg

SEQ ID NO: 514737 - DNA, 75 bp, synthetic construct
  source 1..75: mol_type = other DNA
gggcagggcgaagaacaggttgcacgctggctggaagcggaaaacgatccgcgtctgaacgagattgtcagccat

SEQ ID NO: 514738 - DNA, 75 bp, synthetic construct
  source 1..75: mol_type = other DNA
gatgaacaaccggcagaaatcctgcacccggaaatggtgcagccgctgcgcgtaaaagtggatcgcgaagcgcgc

SEQ ID NO: 514739 - DNA, 75 bp, synthetic construct
  source 1..75: mol_type = other DNA
tcaaacgttctgcctacgtttaccgcgtggactgtggcggctgtaacggctgtgaaatcgaaatttttgccacgc

SEQ ID NO: 514740 - DNA, 75 bp, synthetic construct
  source 1..75: mol_type = other DNA
cccttatgcgctgaaagtgctggaaaacccgatgcgcgatatcaccgcgcgttacagtatgttgtgtcagtcgct

SEQ ID NO: 514741 - DNA, 75 bp, synthetic construct
  source 1..75: mol_type = other DNA
gcagggtgcgctaccccggcgacccgtcacgtctgctgcctgatgagggggcggaggtgccggatcgtgatttgt

SEQ ID NO: 514742 - DNA, 75 bp, synthetic construct
  source 1..75: mol_type = other DNA
tcagcgttcgctgccctgtcaggggggagcctttgcccaaagatggcgcggaggtacctgataatacgttctggc

SEQ ID NO: 514743 - DNA, 75 bp, synthetic construct
  source 1..75: mol_type = other DNA
ttgttgagaattttcattaaaaaatcgcctaaaactccaccggcagagatagagctggcatttcgtagacttgag

SEQ ID NO: 514744 - DNA, 75 bp, synthetic construct
  source 1..75: mol_type = other DNA
cacgagcatgggacaaaagagtttaatcatctgctcaaaaccatcagcggcataggtgatataccagtgagtcgg

SEQ ID NO: 514745 - DNA, 75 bp, synthetic construct
  source 1..75: mol_type = other DNA
aaggtttttatatgccccggactgctgaggagctgatgtccacactgcacgggaaacagtgcctgaaacaactgt

SEQ ID NO: 514746 - DNA, 75 bp, synthetic construct
  source 1..75: mol_type = other DNA
gatgagcaaccggcagagattctgcatccggatatggtgcagccgctgcgcgtgaaagtggatcgcgaagcgcgt

SEQ ID NO: 514747 - DNA, 75 bp, synthetic construct
  source 1..75: mol_type = other DNA
cattgaatttatccatgacgttcatgaacgtataagccccattaatgcaactcaattagcgaaatcacttgaacc

SEQ ID NO: 514748 - DNA, 75 bp, synthetic construct
  source 1..75: mol_type = other DNA
ttagaaattaaccacgcacacttacagttaatggagtcattattagctgaaggcaaacggcgcaatatttttaag

SEQ ID NO: 514749 - DNA, 75 bp, synthetic construct
  source 1..75: mol_type = other DNA
atattgggctggataaagccgcgtttcttcatgcatccgacatcatgccgcacaccgaatgtgtggcgggggaag

SEQ ID NO: 514750 - DNA, 75 bp, synthetic construct
  source 1..75: mol_type = other DNA
ctaaaagaaggaaggaacaagaagattttttaaagcagcgcctttccgaaaataacgatattttatctaatcttc

SEQ ID NO: 514751 - DNA, 75 bp, synthetic construct
  source 1..75: mol_type = other DNA
acggaattattcctgggtcgatgggggcgaaaagctttatcgtgcgtgggctgggaaatgaagagtctttctgct

SEQ ID NO: 514752 - DNA, 75 bp, synthetic construct
  source 1..75: mol_type = other DNA
atgatttttcagaaaaaaagcagctatttccagtcacaggtagataaaatcaggaaggaagcgtatgccggtgcc

SEQ ID NO: 514753 - DNA, 75 bp, synthetic construct
  source 1..75: mol_type = other DNA
tagttgcttcaaaatcgaggctggcgttacctcccgtaattcaggcggtgcgccttcagtttaaccctcttggtc

SEQ ID NO: 514754 - DNA, 75 bp, synthetic construct
  source 1..75: mol_type = other DNA
cattaacagaatatatagcaagtggcggggagatatctgacacggacagaaaaataatctcaggtcatgaaacat

SEQ ID NO: 514755 - DNA, 75 bp, synthetic construct
  source 1..75: mol_type = other DNA
aagaaaaagttaatattatcagcattgaagatccacctgagtatgaaattgacggcacggctcagttacctataa

SEQ ID NO: 514756 - DNA, 75 bp, synthetic construct
  source 1..75: mol_type = other DNA
caagatctgatggtgcaggtggtgaaagatccgcttggcactaaaggtgcgcgcctgaccaccgatatcacgctg

SEQ ID NO: 514757 - DNA, 75 bp, synthetic construct
  source 1..75: mol_type = other DNA
tcttcacgcttccgacatcatgccgcataccgaatgtgtggcgggtgaggaacaaaagcagttcacggtgcgcga

SEQ ID NO: 514758 - DNA, 75 bp, synthetic construct
  source 1..75: mol_type = other DNA
atgcatccaaatgtcagatttatgagagaggttgctttaagaaaaggaataagacatttaaaagaatttaatgtt

SEQ ID NO: 514759 - DNA, 75 bp, synthetic construct
  source 1..75: mol_type = other DNA
aggacggcacgtttaccgcgatgacgtataccagaagcaaaacgtttaaaacggaagctggcgcgcgtcgctggt

SEQ ID NO: 514760 - DNA, 75 bp, synthetic construct
  source 1..75: mol_type = other DNA
cggggcgttccgggcgtcgccccaagccaacggcgcgcaaggcgctggccggaaaccccggcaagcgagccctga

SEQ ID NO: 514761 - DNA, 75 bp, synthetic construct
  source 1..75: mol_type = other DNA
atgattatttactttttcccatttcaaatggaagaaaatgacgcttttcttgatgccgaagttaagtatcagaaa

SEQ ID NO: 514762 - DNA, 75 bp, synthetic construct
  source 1..75: mol_type = other DNA
taaaacaccagaaaagcagcagtaaaaaactgatcgtctacgaagctgatggtggtacccgtgaaagcgacaaaa

SEQ ID NO: 514763 - DNA, 75 bp, synthetic construct
  source 1..75: mol_type = other DNA
tgaactggtgggttttggtcagttatccgggccatggctgataactactgcccgccatgcgtttgaccgtaacag

SEQ ID NO: 514764 - DNA, 75 bp, synthetic construct
  source 1..75: mol_type = other DNA
aaccgcgtctacaaatccgcgaaggtaaaacaccagaagagcagcgataaaaagctgatcgtttatgaagctgat

SEQ ID NO: 514765 - DNA, 75 bp, synthetic construct
  source 1..75: mol_type = other DNA
atcaaaaatgagtccgataccattgaggtggagctggacgacaccgatggccgctggctggataagtggtatccg

SEQ ID NO: 514766 - DNA, 75 bp, synthetic construct
  source 1..75: mol_type = other DNA
ggcgatcactataacgctatgaaggatgggcctgtagcaagcaacacatacgatattataaaaattgctcgtgga

SEQ ID NO: 514767 - DNA, 75 bp, synthetic construct
  source 1..75: mol_type = other DNA
gctgtgggtatcggggtaatgggaggaatggtctctgcaacgttgctggcaatcttcttcgtaccggtgttcttt

SEQ ID NO: 514768 - DNA, 75 bp, synthetic construct
  source 1..75: mol_type = other DNA
ttgttgaagcgacactgatggcagtacgtatgcgtctgcgtcctatcctgatgacctctctcgcctttattctcg

SEQ ID NO: 514769 - DNA, 75 bp, synthetic construct
  source 1..75: mol_type = other DNA
aaaaagaactggttatctacactcacgacagccagcaaaagccgtctgcccgtggagtcggcaccagtgccgaca

SEQ ID NO: 514770 - DNA, 75 bp, synthetic construct
  source 1..75: mol_type = other DNA
ggacattggcgcagcacaggcaaaggccaacgctgcactcgacagccacaacgaatatcagcaaaccggaacgct

SEQ ID NO: 514771 - DNA, 75 bp, synthetic construct
  source 1..75: mol_type = other DNA
gagatgtctttggaatcgatagttgcacagctaaaaaatagcaaattaatactggattatctgaagaacggatat

SEQ ID NO: 514772 - DNA, 75 bp, synthetic construct
  source 1..75: mol_type = other DNA
cccgccatgcgtttgaccgtaacagcggctacaccacagagctggaagtggcacgggggccagtcacaagaggga

SEQ ID NO: 514773 - DNA, 75 bp, synthetic construct
  source 1..75: mol_type = other DNA
tctcaatatccatcttgataacaagagtgatggaagctgtttgacaaatacagaactttttgccgttagacgtca

SEQ ID NO: 514774 - DNA, 75 bp, synthetic construct
  source 1..75: mol_type = other DNA
gaactattcgcagtgaagcgccagatctctgagcttcgcataaatcttgttggtgcagatctatggggagaaaga

SEQ ID NO: 514775 - DNA, 75 bp, synthetic construct
  source 1..75: mol_type = other DNA
cttcgcttagcttccctggacaagcttcctttgtctgttcctgccatcaacatacaagcctggaaatcattagcc

SEQ ID NO: 514776 - DNA, 75 bp, synthetic construct
  source 1..75: mol_type = other DNA
atggctaacgcagatctggataaacagcctgattctgtatcttctgtactgaaagtttttggcattttgcaggcg

SEQ ID NO: 514777 - DNA, 75 bp, synthetic construct
  source 1..75: mol_type = other DNA
acaattggaagagcttcgcagaaaccttctaagtgacggtatatggagcctcccgaatgaagggtatgcggaaga

SEQ ID NO: 514778 - DNA, 75 bp, synthetic construct
  source 1..75: mol_type = other DNA
aaaagaggttcctataaaaaaggagaatggctcaggatggcttcgctgaataaacttcctttggtattaccagag

SEQ ID NO: 514779 - DNA, 75 bp, synthetic construct
  source 1..75: mol_type = other DNA
cttgacgggcgcgggacgtggatctgcagccagtgtggcaatggtgacggtctggatctggttaagctcgtaacc

SEQ ID NO: 514780 - DNA, 75 bp, synthetic construct
  source 1..75: mol_type = other DNA
tccgagatgagcagtacgggggcaatgctcggactcgaccccagcagccgccagcgtctgattggcctggcgggg

SEQ ID NO: 514781 - DNA, 75 bp, synthetic construct
  source 1..75: mol_type = other DNA
gttatgcagtgaaagtggtcagtgaccagctgattttttctcatctggccacattgcgcagtcaggagccggtca

SEQ ID NO: 514782 - DNA, 75 bp, synthetic construct
  source 1..75: mol_type = other DNA
gaaatcttcgctataaagcgtcagatatcagagcttcgctcatgcctcacagcttctgatttgccaagtggtaaa

SEQ ID NO: 514783 - DNA, 75 bp, synthetic construct
  source 1..75: mol_type = other DNA
cccgaaatgaccagcaagctggagcattacaccggacgccagccgattttcgatctctttgatgtcgaaaacgaa

SEQ ID NO: 514784 - DNA, 75 bp, synthetic construct
  source 1..75: mol_type = other DNA
agagattcgtcataacttgttaagaacagatttttggagcaaaccctatgaaggggatgcagaagatcaaaaggg

SEQ ID NO: 514785 - DNA, 75 bp, synthetic construct
  source 1..75: mol_type = other DNA
tgatttatatcgttttcttagatgattttgatgtgacttataatgacaaaaactacagcatagaaaaagaacagc

SEQ ID NO: 514786 - DNA, 75 bp, synthetic construct
  source 1..75: mol_type = other DNA
acactctttacactcgccgtgcgtggatggatcgtacaggctaatacggagaaaaatattctcagtttgttgctt

SEQ ID NO: 514787 - DNA, 75 bp, synthetic construct
  source 1..75: mol_type = other DNA
cgtggaatataactggctgagggaggcgatcccgtttttacaacaggaatccagatcggcgatgccgggagtgga

SEQ ID NO: 514788 - DNA, 75 bp, synthetic construct
  source 1..75: mol_type = other DNA
gaacaggttcgtgaatatattcgtaatgctgaacgtccagaaggtcagggagaagcgcctgccctttctggtgat

SEQ ID NO: 514789 - DNA, 75 bp, synthetic construct
  source 1..75: mol_type = other DNA
gtgggtgcgcgaagcagtgtttttaaatcgcttccggcaaatagagtttgccgggggaatcccgcagtggtgata

SEQ ID NO: 514790 - DNA, 75 bp, synthetic construct
  source 1..75: mol_type = other DNA
tcaactaatcatctataaagaaggaattagatataataagccagcaatttattttggtaaaattcaatctaatat

SEQ ID NO: 514791 - DNA, 75 bp, synthetic construct
  source 1..75: mol_type = other DNA
ctcagcgaggtgaaggatgccgtggaggaagtaaaaacacaggcagccggaaaggtggcagaggtctctgaagcg

SEQ ID NO: 514792 - DNA, 75 bp, synthetic construct
  source 1..75: mol_type = other DNA
ttaaatccttccgtacggccattacacaacgtcaggtttacgtgaaatcaattctggatggtgacagcgtgtttg

SEQ ID NO: 514793 - DNA, 75 bp, synthetic construct
  source 1..75: mol_type = other DNA
gaaaaagaaatttaccgtttgcggaaggcgcttcctttgcacgattttatcattattgatggtgctgcggcgatt

SEQ ID NO: 514794 - DNA, 75 bp, synthetic construct
  source 1..75: mol_type = other DNA
gggaattatcggttattcgttggcatgcgttaacgcaaggagcggcgaagctggaaatgccgacgggagagattt

SEQ ID NO: 514795 - DNA, 75 bp, synthetic construct
  source 1..75: mol_type = other DNA
aaagcggatgaaattacattctactgaaacgtcctgggttgccggacgttgtgaatcctacgacaaaaagactgg

SEQ ID NO: 514796 - DNA, 75 bp, synthetic construct
  source 1..75: mol_type = other DNA
gaattgttattacccgaaacggtccgcaggtaaaaaaactgcaccagacaaagcggatgtgggtcgtcggaaaaa

SEQ ID NO: 514797 - DNA, 75 bp, synthetic construct
  source 1..75: mol_type = other DNA
gcgccgcttgaagtgttgctggtgacactggcgaaagagatgacgccagttgaacaaaaacagtttacatccttg

SEQ ID NO: 514798 - DNA, 75 bp, synthetic construct
  source 1..75: mol_type = other DNA
atcggcagtggtagcgggctactggcgctaatgctggcgcaacgaactgatgacagcgtgatgattgatgcagtt

SEQ ID NO: 514799 - DNA, 75 bp, synthetic construct
  source 1..75: mol_type = other DNA
caccgcagcgggaacaggcacgctataccaccacgctggatcatcaatccttgctgacctgcgcggcagagtgca

SEQ ID NO: 514800 - DNA, 75 bp, synthetic construct
  source 1..75: mol_type = other DNA
atggcaacgcgccgtcagccgttaattcccggctggttaattccaggaataagcgccgctacgcttgtggtggcg

SEQ ID NO: 514801 - DNA, 75 bp, synthetic construct
  source 1..75: mol_type = other DNA
gcagtacaggcaacaatatttgcctggtcgccacaagtattgtatcgctggcgggcatttttattacgtttattc

SEQ ID NO: 514802 - DNA, 75 bp, synthetic construct
  source 1..75: mol_type = other DNA
atcggcactggtagtgggttgttggcgctgatgctggcgcaacgaaccgatgacagtgtgatgattgatgcggtc

SEQ ID NO: 514803 - DNA, 75 bp, synthetic construct
  source 1..75: mol_type = other DNA
atcggcagcggtagcggcttattggctttgatgctggcgcagcgcaccgatgatggcgtgataatcgatgcggtt

SEQ ID NO: 514804 - DNA, 75 bp, synthetic construct
  source 1..75: mol_type = other DNA
ctgccgatggcgagccgtttattacttcaggcactggaaaacattcccggcgaacaacgtcaacttgccgcccag

SEQ ID NO: 514805 - DNA, 75 bp, synthetic construct
  source 1..75: mol_type = other DNA
ctgttgctgccaccattactggcggtgatcgtcgatggggtaaatcgccagctaccggaagtgctgatgcaaccg

SEQ ID NO: 514806 - DNA, 75 bp, synthetic construct
  source 1..75: mol_type = other DNA
gctacagtatgttgtgtcagtcgctgggcattgaaggctggtcgcgcttaaaagtggtcgagctgcgcgccctga

SEQ ID NO: 514807 - DNA, 75 bp, synthetic construct
  source 1..75: mol_type = other DNA
ctgttgctgccaccgttactggcggtgctcgtcgatgggataaatcgccagttgccggaagtgctggcgcagccg

SEQ ID NO: 514808 - DNA, 75 bp, synthetic construct
  source 1..75: mol_type = other DNA
cttgggatgcgcggctggcattttttccgcttcgtcgaatggccgtggttacggcgacaaatcccgccagttgct

SEQ ID NO: 514809 - DNA, 75 bp, synthetic construct
  source 1..75: mol_type = other DNA
gattttggcgtggtggcgttgttcggtaacgatgatttccgcaccctgccgttttatctctaccagcaaattggc

SEQ ID NO: 514810 - DNA, 75 bp, synthetic construct
  source 1..75: mol_type = other DNA
gaaacatgcaaacgtactggagagcgctgcaatggacgtggcatcgctggataaagcccgccagttgatgcgcgt

SEQ ID NO: 514811 - DNA, 75 bp, synthetic construct
  source 1..75: mol_type = other DNA
agcgaaggcgatctgttgtttgccctttcgcaacatgccgttgcttttgcccagtcacagctacatcagcaaggt

SEQ ID NO: 514812 - DNA, 75 bp, synthetic construct
  source 1..75: mol_type = other DNA
ctgttaaaggtgttcatacgggttctcgcgtattcatgcagccggcttccgaaggtactggtatcattgccggtg

SEQ ID NO: 514813 - DNA, 75 bp, synthetic construct
  source 1..75: mol_type = other DNA
ctgaataacggcactctgcaacaccctgttaaaggtgttcacacgggttctcgcgtattcatgcagccggcttcc

SEQ ID NO: 514814 - DNA, 75 bp, synthetic construct
  source 1..75: mol_type = other DNA
tgtgtttccacatttttactgattattttggtgatgatgatcgtaagtattttgatgccctagcgttacagtata

SEQ ID NO: 514815 - DNA, 75 bp, synthetic construct
  source 1..75: mol_type = other DNA
gaactgacaaaaactttctatttggttgcggaatttcgattgcttcaatattaaagtataatgaaggaagtcggt

SEQ ID NO: 514816 - DNA, 75 bp, synthetic construct
  source 1..75: mol_type = other DNA
gaactgacaaaaactttctatttggttgcggaatttcgattgcttcaatattaaaatataatgaaggaagtcgat

SEQ ID NO: 514817 - DNA, 75 bp, synthetic construct
  source 1..75: mol_type = other DNA
aaattgaaagtgaccgcttacattacgcacaacgtctggtacaacgttatggtggtgtagcggtgctgaaaggtg

SEQ ID NO: 514818 - DNA, 75 bp, synthetic construct
  source 1..75: mol_type = other DNA
gctgaccgcgcgcccggaattgatggtatacgaactgactgcggaatccttagctgatagcctggaatgggccga

SEQ ID NO: 514819 - DNA, 75 bp, synthetic construct
  source 1..75: mol_type = other DNA
ttgactcgctggggctggataggtggctggcaactcaggaggcgaaaattcagcgcttttccgcatcgcaacttt

SEQ ID NO: 514820 - DNA, 75 bp, synthetic construct
  source 1..75: mol_type = other DNA
gctgagctgtgtgattattacaatgatgctgtgcgggcggtgattctggcaaggccggatgcaggcgcaagtctg

SEQ ID NO: 514821 - DNA, 75 bp, synthetic construct
  source 1..75: mol_type = other DNA
gctccctgttgtggtgatcgctgagtcagtaggctatgccagtgaatcatcttttcacaaggcgtttgtccgcga

SEQ ID NO: 514822 - DNA, 75 bp, synthetic construct
  source 1..75: mol_type = other DNA
acagtatcccgactggcacatgctgaggggaaaaccggaatgctttatcagcaacgacctgtccccgcgcgtatt

SEQ ID NO: 514823 - DNA, 75 bp, synthetic construct
  source 1..75: mol_type = other DNA
ttataatcataaagtagaaacagaaaatctttgtctggacatcgcttatggaactgacaaaaattttctatttgg

SEQ ID NO: 514824 - DNA, 75 bp, synthetic construct
  source 1..75: mol_type = other DNA
aggagagcgttgaaaccatgcgccaggcgctgcgggctgctaatgcgaaagcagagattatcgtgtacccggatg

SEQ ID NO: 514825 - DNA, 75 bp, synthetic construct
  source 1..75: mol_type = other DNA
gaactttggcgggatatgcgctgggcggtggcgcgtatccaggacaagccgcgctgcatcgtgagtcaaatctga

SEQ ID NO: 514826 - DNA, 75 bp, synthetic construct
  source 1..75: mol_type = other DNA
caccattgatgagctgtggcgggatatgcgctgggcggtggcgcgtatccaggacaagccgcgctgtatcgtgag

SEQ ID NO: 514827 - DNA, 75 bp, synthetic construct
  source 1..75: mol_type = other DNA
ataacccgcaactgaaagcggcagtagcgtggtatggcaaactgacgggcgacaaaacattaaattcaccgaaac

SEQ ID NO: 514828 - DNA, 75 bp, synthetic construct
  source 1..75: mol_type = other DNA
aacctgttgatatcgcaaccgatcttaacgcgccggttctcggcttatatggcggtcaggataacagcattccgc

SEQ ID NO: 514829 - DNA, 75 bp, synthetic construct
  source 1..75: mol_type = other DNA
atgacaacaacacaacaatccggatttgcacctgctgcatcacccctcgcctcaacaattgttcataccccggac

SEQ ID NO: 514830 - DNA, 75 bp, synthetic construct
  source 1..75: mol_type = other DNA
atattaatattgctgcgcttgggggatattatttgatcaaccagcatacgcttggcctggtttatcatatcagta

SEQ ID NO: 514831 - DNA, 75 bp, synthetic construct
  source 1..75: mol_type = other DNA
cttatcctgttagggaaagttaaattcattgatgctaaatacaatacgcaatttagtttaaattatgaattaaaa

SEQ ID NO: 514832 - DNA, 75 bp, synthetic construct
  source 1..75: mol_type = other DNA
ggatgtttcgctgatcggttatgataacgtgcgcaacgcccgctattttacgccggcgctgaccacgatccatca

SEQ ID NO: 514833 - DNA, 75 bp, synthetic construct
  source 1..75: mol_type = other DNA
actacgagcgcgccgtgtgtgcgatggcgaccgcgtcgctttatgagcgttaccgcggcgtggatgccagtgcga

SEQ ID NO: 514834 - DNA, 75 bp, synthetic construct
  source 1..75: mol_type = other DNA
tttggtaataaagaaaatttatttatcgaagtgctggaatatacctggaacgatattcgacaaaaagaaaaatcc

SEQ ID NO: 514835 - DNA, 75 bp, synthetic construct
  source 1..75: mol_type = other DNA
atgtatcttgataccagcaacgtacagagcctgaaggaaaagctgctgttatgcgcggttaatgaatttgccgaa

SEQ ID NO: 514836 - DNA, 75 bp, synthetic construct
  source 1..75: mol_type = other DNA
atgttaaaaaaatgcctctcgaccgcgtcaccaaggtctgtttctgtggcgatcatgacgatcttacgcgcttgc

SEQ ID NO: 514837 - DNA, 75 bp, synthetic construct
  source 1..75: mol_type = other DNA
attgacaaaagggccgcagagaaaatcagcgccagtcagtcagccggaagcaaacccgaagagccgctcatttag

SEQ ID NO: 514838 - DNA, 75 bp, synthetic construct
  source 1..75: mol_type = other DNA
gtgagtatgcatcaagtcgtcagcttttcaggtggacgaacatcagcttatctcgttcatctgatggaagcacag

SEQ ID NO: 514839 - DNA, 75 bp, synthetic construct
  source 1..75: mol_type = other DNA
atcatcattccgatgatcggcatggtgcagtcgctgaatgtttccgttgcctcagccctcattctttacgaagcc

SEQ ID NO: 514840 - DNA, 75 bp, synthetic construct
  source 1..75: mol_type = other DNA
cctttggcgatgcgatgaacgatcgtgaaatgttaggcagcgtcggcagcggctttattatgggcaatgcgatgc

SEQ ID NO: 514841 - DNA, 75 bp, synthetic construct
  source 1..75: mol_type = other DNA
ggtttaccgggaaagagatccctgcgttgttgcaggcatttgtctatagcggttttcgttatcagataatcgatg

SEQ ID NO: 514842 - DNA, 75 bp, synthetic construct
  source 1..75: mol_type = other DNA
tcatttttatggataccggctgtgaacatcctctgacgtatcgctttattcgtgaggttgtgaagttctggaacg

SEQ ID NO: 514843 - DNA, 75 bp, synthetic construct
  source 1..75: mol_type = other DNA
gaatcagcgcaacgagtgtgacgtgttaatcgtcgggcgcggcggcggttcgctggaagatttgtggagttttaa

SEQ ID NO: 514844 - DNA, 75 bp, synthetic construct
  source 1..75: mol_type = other DNA
tcggcttttacaacgcctgaatcaacaaaatccccaaccacgcattcaccgggtgcaaagccgcattcagcactt

SEQ ID NO: 514845 - DNA, 75 bp, synthetic construct
  source 1..75: mol_type = other DNA
ggtcatcgcagaacaggtaaagacgttatgtaccgtggtcacctgacgcttgacggaattgccagaatgtctgcc

SEQ ID NO: 514846 - DNA, 75 bp, synthetic construct
  source 1..75: mol_type = other DNA
ggttacaggcaaacacgtcagggatggtcatcgcagaacaggtaaagacattatgtaccgtggtcacctgacgct

SEQ ID NO: 514847 - DNA, 75 bp, synthetic construct
  source 1..75: mol_type = other DNA
acggttataactttgcggtaggtgaggtgatgcacattgcctatctcggcgatctttcggtgtatcacgttcgtc

SEQ ID NO: 514848 - DNA, 75 bp, synthetic construct
  source 1..75: mol_type = other DNA
atcaggatatcatcatcccgatggtcggtatggtgcagtcactgaacgtctccgtcgcctccgcccttattcttt

SEQ ID NO: 514849 - DNA, 75 bp, synthetic construct
  source 1..75: mol_type = other DNA
acggtgttctcagcaaacagttccgccacccagcgttaagggtaaatgaggtcagcatggatactatcgagctta

SEQ ID NO: 514850 - DNA, 75 bp, synthetic construct
  source 1..75: mol_type = other DNA
tgtgagccgcagtgttatcaatatcaacaaggtcaggaaggaagtgatgtcactgacccgggcatatttcgggga

SEQ ID NO: 514851 - DNA, 75 bp, synthetic construct
  source 1..75: mol_type = other DNA
cagcgcagcaggtttttagttccgctaccccagcgttaaggggaaatgaggtcagcatggatactatcgatcttg

SEQ ID NO: 514852 - DNA, 75 bp, synthetic construct
  source 1..75: mol_type = other DNA
atgcaaaaaatcgacctcggcaacaacgaatccctggtgtgcggcatgttacccaaccaggacggtacgttcacc

SEQ ID NO: 514853 - DNA, 75 bp, synthetic construct
  source 1..75: mol_type = other DNA
ggcgatggctggaagagtttttatcgtggcatggtggttaccgtgcctttttgtggcgaccgccgaaacataacc

SEQ ID NO: 514854 - DNA, 75 bp, synthetic construct
  source 1..75: mol_type = other DNA
tgggtcgcgaaggacataacgttaccaaagtcagtcgccgggatttacctttcgttattgctgaaggaaaacatg

SEQ ID NO: 514855 - DNA, 75 bp, synthetic construct
  source 1..75: mol_type = other DNA
agcccatttgaagtcagtattcgccttgatagtgccacggaaatcgctcgtgcaatggcagtgaaatggcaaacc

SEQ ID NO: 514856 - DNA, 75 bp, synthetic construct
  source 1..75: mol_type = other DNA
aacgcctgctgtttgaaggcggctatccggtgctggcgaaagtcgcaaaacgcaaaggtctgccctacccccacg

SEQ ID NO: 514857 - DNA, 75 bp, synthetic construct
  source 1..75: mol_type = other DNA
cccgggctgggaggatgacaggatacgagtctttgatccggaaacccccgagataacattaaataatcgcaggga

SEQ ID NO: 514858 - DNA, 75 bp, synthetic construct
  source 1..75: mol_type = other DNA
aacgcaaagaacagcaaatgctggaggaagaagacgcagaacaacgaaggtcccggtccggattatggggaaaga

SEQ ID NO: 514859 - DNA, 75 bp, synthetic construct
  source 1..75: mol_type = other DNA
aaggaagtgatgtcactgacccgggcatatttcggggagctgcaggcatccattgagcagaatattaaccagccc

SEQ ID NO: 514860 - DNA, 75 bp, synthetic construct
  source 1..75: mol_type = other DNA
aacggtttggtaacgcggtaacacacctcgaagcggttagcccgctgtcaacgctggcacgcggttatagcgtca

SEQ ID NO: 514861 - DNA, 75 bp, synthetic construct
  source 1..75: mol_type = other DNA
aacggttcgtctgctgcttgagcatgagatggggcaggtgtggatcagcggcgaaatctctaattttacacaacc

SEQ ID NO: 514862 - DNA, 75 bp, synthetic construct
  source 1..75: mol_type = other DNA
gtccttgtttgcatcaggatgatctcgctcgcttgttggcgttgagcgaaaccagccgaacgggaggcattcttg

SEQ ID NO: 514863 - DNA, 75 bp, synthetic construct
  source 1..75: mol_type = other DNA
ggaagatttggcactggccgagttttacctcacccgaaccatccatcaggagaaatgtaatgaacacatccccca

SEQ ID NO: 514864 - DNA, 75 bp, synthetic construct
  source 1..75: mol_type = other DNA
ggcagagcgcaagagagcgcagcgggagcgggaaagactgcggaagcagaacactgattgtcacgatgagtcacg

SEQ ID NO: 514865 - DNA, 75 bp, synthetic construct
  source 1..75: mol_type = other DNA
tttgccagcagcattccggtggtcagcgccgttgggcatgaaaccgatgtgacgattgccgactttgttgctgat

SEQ ID NO: 514866 - DNA, 75 bp, synthetic construct
  source 1..75: mol_type = other DNA
agtatgcagccggccggtgaaggattgctgcaacagaagtacgaacagcttaaagcgaagttgcaggctgaaggt

SEQ ID NO: 514867 - DNA, 75 bp, synthetic construct
  source 1..75: mol_type = other DNA
acggctgaccgggcgtcttcaggcgttaaatgaaagagttcctgagctcattactgacagtaaggcgttaaggga

SEQ ID NO: 514868 - DNA, 75 bp, synthetic construct
  source 1..75: mol_type = other DNA
cacccagatgaactcgaaagccgatgaggaagtccgtaaagagcttaatgccattgctgacgtatcagccggccg

SEQ ID NO: 514869 - DNA, 75 bp, synthetic construct
  source 1..75: mol_type = other DNA
cacccagatgaactccaaagccgatgaagaggtccgtaaagagcttaatgccattgctgacgtatcagccggccg

SEQ ID NO: 514870 - DNA, 75 bp, synthetic construct
  source 1..75: mol_type = other DNA
catcctcagttggtcgaaggccgtgcggataacattaaagtcacgcgcccggaagatttggcactggccgagttt

SEQ ID NO: 514871 - DNA, 75 bp, synthetic construct
  source 1..75: mol_type = other DNA
gatacccccggccctaatgaggccggacaaccgcagatggaagtgatgatgcgggatcaactgcagaaagcctct

SEQ ID NO: 514872 - DNA, 75 bp, synthetic construct
  source 1..75: mol_type = other DNA
cagtcgcatatcaccagcctgcttgcggatatccgggaaatcgcggactgtcaggagcagatgaccgctgatgtc

SEQ ID NO: 514873 - DNA, 75 bp, synthetic construct
  source 1..75: mol_type = other DNA
gcgggaagttttgcgaccagcgttgtcagggaacttatcaacacaacaggtgattatgcgcatattgctgagtaa

SEQ ID NO: 514874 - DNA, 75 bp, synthetic construct
  source 1..75: mol_type = other DNA
cattaaatttccgggaaaccgggttagaagagtttgtagagatagtcactttttatgtcatcaaccggttgcgcc

SEQ ID NO: 514875 - DNA, 75 bp, synthetic construct
  source 1..75: mol_type = other DNA
acgtcattaccgcgaagaacaggtgattgatgatgtaccgcagtggctgaaaagtacggtagaaaagatgcatga

SEQ ID NO: 514876 - DNA, 75 bp, synthetic construct
  source 1..75: mol_type = other DNA
gagcgaacccatcggaaaatttccgatgaccgatagctggtatccgtcacgggattttcgacgacgggctgcgtt

SEQ ID NO: 514877 - DNA, 75 bp, synthetic construct
  source 1..75: mol_type = other DNA
tcagcccagcaacggctggaaatggcgatggattactacctcgccaaccgcacgcgacgttttacgcagattcat

SEQ ID NO: 514878 - DNA, 75 bp, synthetic construct
  source 1..75: mol_type = other DNA
catgcttgaacgcctgcaaaaacggatgagctttgcgctggaaaatcagcttaagcgtgccgggcaacagcagca

SEQ ID NO: 514879 - DNA, 75 bp, synthetic construct
  source 1..75: mol_type = other DNA
ggtgaaatgctaaccacacgtctggaagacggctggatagaaagtgaagtaaaaaacatccagccggtaaaaaaa

SEQ ID NO: 514880 - DNA, 75 bp, synthetic construct
  source 1..75: mol_type = other DNA
tcatgggggaggtttattcgaaccgctggacctagaaaaacggggcagcaccttcgaagctctggattgcacaga

SEQ ID NO: 514881 - DNA, 75 bp, synthetic construct
  source 1..75: mol_type = other DNA
tgcagcacgtcagggcacaggtaaaaccagtcagcaagggggtaagccatgcagcatcaggtggcacggcatcac

SEQ ID NO: 514882 - DNA, 75 bp, synthetic construct
  source 1..75: mol_type = other DNA
cgtgccgggcaaggagatgcccgatctgagcgcctttcaactggaaggctgccaggtgctggagtatgcgcggca

SEQ ID NO: 514883 - DNA, 75 bp, synthetic construct
  source 1..75: mol_type = other DNA
tgatgagttgaaatgtaagaaaggttctgacaggagagatgcatattccattgagaatgtctcagaatataacgt

SEQ ID NO: 514884 - DNA, 75 bp, synthetic construct
  source 1..75: mol_type = other DNA
gtggccagttgaatatttcacgttcgaatgaaaagtattttgggtttaatactgataaatatactgtattttatt

SEQ ID NO: 514885 - DNA, 75 bp, synthetic construct
  source 1..75: mol_type = other DNA
tgctgccagaactgtctgcggaagccaacccgttccgtaatcgtctggccgagtccgaagccagcaacgatcaag

SEQ ID NO: 514886 - DNA, 75 bp, synthetic construct
  source 1..75: mol_type = other DNA
agacagcaggaattctataaagctatgaatgaaactcctcctgaacaaatagcttctctgcgtagaaaattccct

SEQ ID NO: 514887 - DNA, 75 bp, synthetic construct
  source 1..75: mol_type = other DNA
gacaattacaaccagcaatataacgttaatgtcggtaatggagggaagaaatcatcaatgcaacagccgcctact

SEQ ID NO: 514888 - DNA, 75 bp, synthetic construct
  source 1..75: mol_type = other DNA
atgaccggcggcgcaggtaacccggcaattggtgctgatgttcgcagccgattaacaggaaaagagcagcgccag

SEQ ID NO: 514889 - DNA, 75 bp, synthetic construct
  source 1..75: mol_type = other DNA
tctccatccacagtgatgataaagacgccttatcacttcacttacctggcggtaaaattcgccgggttagccaaa

SEQ ID NO: 514890 - DNA, 75 bp, synthetic construct
  source 1..75: mol_type = other DNA
gtacagaaactccgttcatgacgtgatgcagcaggaaaaagactggatcgcaccggaaggtgacaatatctgcac

SEQ ID NO: 514891 - DNA, 75 bp, synthetic construct
  source 1..75: mol_type = other DNA
gattgatgcttgtcgtgaaaacggcgttgccagtgggaatgaatgcgaaccgctgtggcgggtactgagttgcct

SEQ ID NO: 514892 - DNA, 75 bp, synthetic construct
  source 1..75: mol_type = other DNA
ccgacagttcctggttctgatgcggctaactttgaagcaaggctcgacacctttaaagctcaaacattccttcct

SEQ ID NO: 514893 - DNA, 75 bp, synthetic construct
  source 1..75: mol_type = other DNA
gccataacgtataccaaaagcaaaacgtttaaaaccgaagctggcgcacgtcgttggttgggaagacattcaggt

SEQ ID NO: 514894 - DNA, 75 bp, synthetic construct
  source 1..75: mol_type = other DNA
gtttcccaaccaggacggcacgttcaccgcgatgacgtataccaaaagcaaaacgtttaaaaccgaatctggcgc

SEQ ID NO: 514895 - DNA, 75 bp, synthetic construct
  source 1..75: mol_type = other DNA
ccgaagagtttgaggaagtccgtaaaggcatggggtatgtcgatgacgcccagcgggatgattttggcaatctgg

SEQ ID NO: 514896 - DNA, 75 bp, synthetic construct
  source 1..75: mol_type = other DNA
attctggtgggtttctggctggcatcggtacgcaaaatgagaatgcgccaaaggcaagcgacattaacgcaacgc

SEQ ID NO: 514897 - DNA, 75 bp, synthetic construct
  source 1..75: mol_type = other DNA
cgcggaaaacttgcagagacaatccgcagcaatcaggctggcgaggcgctaacagcacgaggccagaacatcacg

SEQ ID NO: 514898 - DNA, 75 bp, synthetic construct
  source 1..75: mol_type = other DNA
attgcctggtgatcccgcgtatcccgttagcgcccggcatggctccagcggttgcagcgggtctgctggatatta

SEQ ID NO: 514899 - DNA, 75 bp, synthetic construct
  source 1..75: mol_type = other DNA
gattgcgtcagagagattttggaaaaaaccgagacaagtaggcaatcaaatccggtagaatctaaagcgggttag

SEQ ID NO: 514900 - DNA, 75 bp, synthetic construct
  source 1..75: mol_type = other DNA
acacattaaacagctatttcaagggaggacaaacacaaccagcccccagagaaagtatccttatacgaatttctg

SEQ ID NO: 514901 - DNA, 75 bp, synthetic construct
  source 1..75: mol_type = other DNA
aggtgtagagacggttctgacactgctgaataaagaaaaccaggatttattacaactagaaggcaggaagcgcct

SEQ ID NO: 514902 - DNA, 75 bp, synthetic construct
  source 1..75: mol_type = other DNA
ttcacatattaaatatgaatgtaaaaaatattggatcattgtcatcccaatttcattatataccattttcgaaat

SEQ ID NO: 514903 - DNA, 75 bp, synthetic construct
  source 1..75: mol_type = other DNA
ggtatgtttaaggaaggattaacaacagtagcggccttgcaagggcgggtgagttgtaaaaacgagaaagaaact

SEQ ID NO: 514904 - DNA, 75 bp, synthetic construct
  source 1..75: mol_type = other DNA
tgaggaaagcgaagccggactgtaaattgccgggtaaggcgatggactacctgaagagaaacggactgataagcg

SEQ ID NO: 514905 - DNA, 75 bp, synthetic construct
  source 1..75: mol_type = other DNA
cggttatggtatgcccctttttcatcactgcctgttctgataagtattctgaacaggatagagtgcaggctatca

SEQ ID NO: 514906 - DNA, 75 bp, synthetic construct
  source 1..75: mol_type = other DNA
catggtattgtttacgtggctactgacagggagttaacgtcacaggagatacttgatgcggccaggaaatattta

SEQ ID NO: 514907 - DNA, 75 bp, synthetic construct
  source 1..75: mol_type = other DNA
gtttaaacgggtgatggactgcacatcaaaggtgcagatggactacatttgcctgcaatatcccggatatttgta

SEQ ID NO: 514908 - DNA, 75 bp, synthetic construct
  source 1..75: mol_type = other DNA
gttgaagatggttggtggaataaatcattacatacatcattgtctcctctttttaaaaatatatttctgggtaaa

SEQ ID NO: 514909 - DNA, 75 bp, synthetic construct
  source 1..75: mol_type = other DNA
attattcttgcagtcttcaggtaaaaaaacattacaggacttaatgaataatcctgcattgattaaacagttttt

SEQ ID NO: 514910 - DNA, 75 bp, synthetic construct
  source 1..75: mol_type = other DNA
gttgataaatacatagcaatgccggggcaggagataacactacatatagacagaagtgaaggggctaaatatata

SEQ ID NO: 514911 - DNA, 75 bp, synthetic construct
  source 1..75: mol_type = other DNA
acgaatctctggtatgtggcgtgttccccaaccaggatggaacattcaccgccatgacatataccaaaagcaaaa

SEQ ID NO: 514912 - DNA, 75 bp, synthetic construct
  source 1..75: mol_type = other DNA
tacgtttttactgcacccaatgagaaagtatctataaagaatgttggtaggatgattggtaatgcagtaccggta

SEQ ID NO: 514913 - DNA, 75 bp, synthetic construct
  source 1..75: mol_type = other DNA
tttcctctaacttatgaattttggccagctgaagtaaaagttgaactcaggaatgttgcacgactgattggtaat

SEQ ID NO: 514914 - DNA, 75 bp, synthetic construct
  source 1..75: mol_type = other DNA
atctgatattaatataaaaagaataatggcatcaaaacctggtggaacatggcgtgattggccagaagagctaag

SEQ ID NO: 514915 - DNA, 75 bp, synthetic construct
  source 1..75: mol_type = other DNA
gccatgacgtataccagaagtaaaacgtttaaaaccgaatctgacgcgcgtcgctggctggaaagaaattcaggt

SEQ ID NO: 514916 - DNA, 75 bp, synthetic construct
  source 1..75: mol_type = other DNA
gtcagcatggatactatcgatcttggcaacaacgaatctctggtgtacggcgtgtttcccaaccaggacggcacg

SEQ ID NO: 514917 - DNA, 75 bp, synthetic construct
  source 1..75: mol_type = other DNA
gatgattggtaatgcagtaccggtaaaactaggtgaggttataggtgagtcaattataactcacctaaaagagca

SEQ ID NO: 514918 - DNA, 75 bp, synthetic construct
  source 1..75: mol_type = other DNA
gattgtgctctgatcttttatatcgacaaatttggtgggcagtcgttatctgcagcgattgaaaaaagctttatc

SEQ ID NO: 514919 - DNA, 75 bp, synthetic construct
  source 1..75: mol_type = other DNA
tcccaaccaggatggaacgttcaccgccatgacttataccaaaagcaagacattcaaaactgaaacgggcgcacg

SEQ ID NO: 514920 - DNA, 75 bp, synthetic construct
  source 1..75: mol_type = other DNA
gcgatgacgtataccaaaagcaaaacgtttaaaaccgaaactggcgcgcgtcgctggctggaaagaaattcaggt

SEQ ID NO: 514921 - DNA, 75 bp, synthetic construct
  source 1..75: mol_type = other DNA
aaaaatcagtccaggagcctgtttaagattctgtgtaaatgccttgtctcagaagtgaccgtccaggcggtcacc

SEQ ID NO: 514922 - DNA, 75 bp, synthetic construct
  source 1..75: mol_type = other DNA
tggctaacgaactggccaaaaacctcaaaacccctgaagacctcagtcagtttgatcggctgctgaaaaagctct

SEQ ID NO: 514923 - DNA, 75 bp, synthetic construct
  source 1..75: mol_type = other DNA
ttcttcgactcgcaaaatgcccgtgggcgggatctggatcctcacgatctgcttaaagctttccatctacgtgaa

SEQ ID NO: 514924 - DNA, 75 bp, synthetic construct
  source 1..75: mol_type = other DNA
cgctaaatggtgtcttgataaattaccaagtgattgtcagattgttggtgaagatggcaattattatcttgtcag

SEQ ID NO: 514925 - DNA, 75 bp, synthetic construct
  source 1..75: mol_type = other DNA
atggatactatcgatcttggcaacaacgaatccctagtgtgtggcgtgtttcccaatcaggacggcacattcacc

SEQ ID NO: 514926 - DNA, 75 bp, synthetic construct
  source 1..75: mol_type = other DNA
aggggtgatcacctcaaaaaccggtgcggcactgcacgatattctgcatgtattaaaacgtcgcgatccttcatt

SEQ ID NO: 514927 - DNA, 75 bp, synthetic construct
  source 1..75: mol_type = other DNA
gcgccgtcggtcatgaaaccgatgtgactatcgccgactttgttgccgacctacgcgcaccaaccccctctgccg

SEQ ID NO: 514928 - DNA, 75 bp, synthetic construct
  source 1..75: mol_type = other DNA
gcgatgacgtataccagaagcaaaacgtttaaaacggaagctggcgcgcgtcgctggttagcaagaaactctgac

SEQ ID NO: 514929 - DNA, 75 bp, synthetic construct
  source 1..75: mol_type = other DNA
ccccaaccacgacggcacgtttaccgcgatgacgtataccagaagtaaaacgtttaaaaccgaagctggcgcgca

SEQ ID NO: 514930 - DNA, 75 bp, synthetic construct
  source 1..75: mol_type = other DNA
tgcagggagtggagtatttcggataatgccatgtataccgattttaactgtacctttgaagaggtcactcactga

SEQ ID NO: 514931 - DNA, 75 bp, synthetic construct
  source 1..75: mol_type = other DNA
atgtttattattcgcacaattagtcagggggccggtggcttaatatcaggattgggcggcaggctacaaagggag

SEQ ID NO: 514932 - DNA, 75 bp, synthetic construct
  source 1..75: mol_type = other DNA
acacatcctcaggataaaaagtggttaatggtctttcttggaaaagatggagtggttgaacaggcgctgaatatt

SEQ ID NO: 514933 - DNA, 75 bp, synthetic construct
  source 1..75: mol_type = other DNA
tcgccaatattgttatttatattgtccacattgtttatcaaagcctgtttgatataccgaaatatctaattctga

SEQ ID NO: 514934 - DNA, 75 bp, synthetic construct
  source 1..75: mol_type = other DNA
cggtgtgattacatccaaaaccggcgcggcgctgcacgatattttgcatgtgttaaaacgtcgagatccttctct

SEQ ID NO: 514935 - DNA, 75 bp, synthetic construct
  source 1..75: mol_type = other DNA
tttttaccgttagtcgcctgaatcaaacggttcgtctgctgcttgagcatgagatgggacaggtttggatcagcg

SEQ ID NO: 514936 - DNA, 75 bp, synthetic construct
  source 1..75: mol_type = other DNA
acgaatctctggtatacggcgtgtttcccaaccaggacggtacgttcaccgcgatgacgtataccaaaagcaaaa

SEQ ID NO: 514937 - DNA, 75 bp, synthetic construct
  source 1..75: mol_type = other DNA
gatgattctggtgatggtaaggcgcctgcggaaggtaatgggttaccggaccaatcaggaggggatgaacaaaat

SEQ ID NO: 514938 - DNA, 75 bp, synthetic construct
  source 1..75: mol_type = other DNA
aaggtcgtttccggaccaaccatgctgaaaaccgaaaatgcccggccagccagctggatttatgttgatgcccgc

SEQ ID NO: 514939 - DNA, 75 bp, synthetic construct
  source 1..75: mol_type = other DNA
gcgtgctggagtacctgaaccaggtacagggaaaactgcccgccggtgtgagttctgaaatcggtccggacgcca

SEQ ID NO: 514940 - DNA, 75 bp, synthetic construct
  source 1..75: mol_type = other DNA
gatagccaaaaaaatggggggtaaaggtcattttactaccccaatgatgcagcttcaggatccggatagaaccaa

SEQ ID NO: 514941 - DNA, 75 bp, synthetic construct
  source 1..75: mol_type = other DNA
tcttctgaagaatacattcagcaacgacctgaaattccgtcgctctcagcgttagtcgatgatattgcccgtaac

SEQ ID NO: 514942 - DNA, 75 bp, synthetic construct
  source 1..75: mol_type = other DNA
aacggacactttcgtaacagttgatgatacttctttattgtctattgaagtcagtaagctagttcatcaaatact

SEQ ID NO: 514943 - DNA, 75 bp, synthetic construct
  source 1..75: mol_type = other DNA
atgaaagcaagaagtgtgagagttgccggaattgaaattatcgatagtgttaaaacggtcgcttttgtttttact

SEQ ID NO: 514944 - DNA, 75 bp, synthetic construct
  source 1..75: mol_type = other DNA
acctctcggtcggttccatgatggggttgctaggtggcgtcgccgctatctgtgacgtctggttaggctggccgc

SEQ ID NO: 514945 - DNA, 75 bp, synthetic construct
  source 1..75: mol_type = other DNA
catttatgccatcggcggcaatctggaagcagcacgtctctccgggattaacgttgaacgcaccaaacttgccgt

SEQ ID NO: 514946 - DNA, 75 bp, synthetic construct
  source 1..75: mol_type = other DNA
actgaagaccatcccgaacgtggctgaggtagcctcggttggtggcgtggtgaagcagtaccagattcaggtcaa

SEQ ID NO: 514947 - DNA, 75 bp, synthetic construct
  source 1..75: mol_type = other DNA
gaagcagcaaattacgctgggcgatgttgccgatattaaggtcgtttccggaccaaccatgctgaaaaccgaaaa

SEQ ID NO: 514948 - DNA, 75 bp, synthetic construct
  source 1..75: mol_type = other DNA
gcggatagaggaaatgctgctgattgacgccagtgagcacccggaacctgaaacggaatcaaacccgtgggtcga

SEQ ID NO: 514949 - DNA, 75 bp, synthetic construct
  source 1..75: mol_type = other DNA
agttcctggactttccgctctggaaatcgacccgcaggaagccgccaaacaataccgctccagaatcgttgatcc

SEQ ID NO: 514950 - DNA, 75 bp, synthetic construct
  source 1..75: mol_type = other DNA
cccgttacgggatgacggtcggcgatgtccagatgttcgtctcctcagccatcggtggcgcgacggtaggcgaaa

SEQ ID NO: 514951 - DNA, 75 bp, synthetic construct
  source 1..75: mol_type = other DNA
ggacaaactcatcaaatccgtgcctgaagtggcgtctgtttttggcaaaaccggtaaggctgagaccgcaacgga

SEQ ID NO: 514952 - DNA, 75 bp, synthetic construct
  source 1..75: mol_type = other DNA
tgagcgtacctgaagtggcgcgggtatttggcaaaaccgggaaagcggaaaccgccaccgattctgctccgctgg

SEQ ID NO: 514953 - DNA, 75 bp, synthetic construct
  source 1..75: mol_type = other DNA
aggggctgaatgccaacattatgtcgctgggagggattgcaatagccgtcggagcgatggtggatgccgccatcg

SEQ ID NO: 514954 - DNA, 75 bp, synthetic construct
  source 1..75: mol_type = other DNA
ccggcgtgggctggatatttgagtatgctctggtcgatcgtagcggaaaacacgaccttgcggaactgcgctccc

SEQ ID NO: 514955 - DNA, 75 bp, synthetic construct
  source 1..75: mol_type = other DNA
tgtatatgtcatttttgaagacgggaccgatctctactgggcccgttctcgcgtgctggaatacctgaatcaggt

SEQ ID NO: 514956 - DNA, 75 bp, synthetic construct
  source 1..75: mol_type = other DNA
tatcaaaggtcttctgcctgatgacgttgttaacagtatcagcgagcaactttcaggagcctgtaccactgaaat

SEQ ID NO: 514957 - DNA, 75 bp, synthetic construct
  source 1..75: mol_type = other DNA
agcaatatgctcatgcggttgaggcattatccgatcctgaacgaactcgccttgtgctggtcgcgcgattgcaaa

SEQ ID NO: 514958 - DNA, 75 bp, synthetic construct
  source 1..75: mol_type = other DNA
tttacgttctccttgcacggaagagattgcggtgttccaggcgttctcacgcgtaatccgtgaagcaggcaaacg

SEQ ID NO: 514959 - DNA, 75 bp, synthetic construct
  source 1..75: mol_type = other DNA
atgattgaatggattattcgtcgctcggtggcgaaccgttttctggtgctgatgggcgcgttgtttctaagtatc

SEQ ID NO: 514960 - DNA, 75 bp, synthetic construct
  source 1..75: mol_type = other DNA
cgctagctcatcttccctctgatctttctggccttccaactgacacgctattccttcaaccggttaatatggtcg

SEQ ID NO: 514961 - DNA, 75 bp, synthetic construct
  source 1..75: mol_type = other DNA
atttgcaggccgaccttgaacgcgcagggattcatccctggggctggattatcaataacagcctttccattgccg

SEQ ID NO: 514962 - DNA, 75 bp, synthetic construct
  source 1..75: mol_type = other DNA
accacaatcgacaaacaccgttcggaaaaggatgcacaccacatctacctcactgacggcacttacttctgcgcc

SEQ ID NO: 514963 - DNA, 75 bp, synthetic construct
  source 1..75: mol_type = other DNA
gctgcgtcagcagggcactgccggtaatggtgcttctgcacctgcacaagggggctggggacagccgccgaagac

SEQ ID NO: 514964 - DNA, 75 bp, synthetic construct
  source 1..75: mol_type = other DNA
cctgacgcagattgccgactgtcaactggcgtgggataccattgagaacctgaaagcgaccgttgatcgcgtgcg

SEQ ID NO: 514965 - DNA, 75 bp, synthetic construct
  source 1..75: mol_type = other DNA
ttatcgtattcttcgtcgcgacattgtccattgcctgattgcaccaggcacaccgttgtcggaaaaagaagtttc

SEQ ID NO: 514966 - DNA, 75 bp, synthetic construct
  source 1..75: mol_type = other DNA
ctgccggtgcgccggcgggtaactcaccgtcaccggcttccgggaacggcgggggaatgccgatggattttgacg

SEQ ID NO: 514967 - DNA, 75 bp, synthetic construct
  source 1..75: mol_type = other DNA
ggatccggagattcgttatcttcccaatggcggagccgtggcgaacctgaccctggccaccagtgaatcctggcg

SEQ ID NO: 514968 - DNA, 75 bp, synthetic construct
  source 1..75: mol_type = other DNA
ctccaccaatggactttgacgatgatatcccctttatggggctcgggtatggcatggaacgacgaattattcatg

SEQ ID NO: 514969 - DNA, 75 bp, synthetic construct
  source 1..75: mol_type = other DNA
ggtgctgacgggacatggtgcaactatcgatacgacaacacctgccggtaaacttgtatttggtatttttgcagc

SEQ ID NO: 514970 - DNA, 75 bp, synthetic construct
  source 1..75: mol_type = other DNA
atgaagcttatatcgagttttgcccgcaggcatcgttagctggctggctggcggaatatccgcacctggcgattt

SEQ ID NO: 514971 - DNA, 75 bp, synthetic construct
  source 1..75: mol_type = other DNA
tatgtttgcagccccaacaacccgaccgggcaactgatcaatccgcaagattttcgcactctgctggagttaacc

SEQ ID NO: 514972 - DNA, 75 bp, synthetic construct
  source 1..75: mol_type = other DNA
caggcagagcacgttcgcgatgagttaaccgccaaagcgttagcggcccttgagcagggcggcgacgcgcaagcc

SEQ ID NO: 514973 - DNA, 75 bp, synthetic construct
  source 1..75: mol_type = other DNA
tgcggcttgtacgctggcgcggcagatctttgaatcgctctctacggtcacagtgttgctggtaggcgcgggcga

SEQ ID NO: 514974 - DNA, 75 bp, synthetic construct
  source 1..75: mol_type = other DNA
atcgaggcagcattggttcatgtagacaaaaatgaggtacgacgagcttacaatcgaagcgattatcttgagcaa

SEQ ID NO: 514975 - DNA, 75 bp, synthetic construct
  source 1..75: mol_type = other DNA
ctggtatcggagctacgcggggatatgcgcaggcagcaggaccagatgcgcgacgagctactgaaaagccagcgg

SEQ ID NO: 514976 - DNA, 75 bp, synthetic construct
  source 1..75: mol_type = other DNA
tgaggaccctcactgcacgattgatatcgagcggaaacggacgttcacaatgatgatccgcgagggcgtggcaac

SEQ ID NO: 514977 - DNA, 75 bp, synthetic construct
  source 1..75: mol_type = other DNA
atgaggcgcggaactcctggacgaacgcgctctggatcggcgctggtcgcatggcgattgatgggctgaaagagg

SEQ ID NO: 514978 - DNA, 75 bp, synthetic construct
  source 1..75: mol_type = other DNA
tatgccgcgacaatcgaatcagagctcgacagccagcaggcgtttgaatatatcgccggcgcgggtactgatatc

SEQ ID NO: 514979 - DNA, 75 bp, synthetic construct
  source 1..75: mol_type = other DNA
cactgacggcacttacttctgcgccaccaacgtggtgcaggtaaatcttatcagacaggtacaggagtcacgcag

SEQ ID NO: 514980 - DNA, 75 bp, synthetic construct
  source 1..75: mol_type = other DNA
ttcgctttacctccagagggcgcgaatacgaggtcgacgaacgcctgattaccactatcgacaaacaccgttcag

SEQ ID NO: 514981 - DNA, 75 bp, synthetic construct
  source 1..75: mol_type = other DNA
ttcgttttacctccagagggcgcgaatacgaagtcgacgaacgcctgattaccacaatcgacaaacaccgttcag

SEQ ID NO: 514982 - DNA, 75 bp, synthetic construct
  source 1..75: mol_type = other DNA
ccggttcgtgaagcctttattaaactggcggaaaacggtctgattcaaattcgtccgcagcgtggcagctacgtc

SEQ ID NO: 514983 - DNA, 75 bp, synthetic construct
  source 1..75: mol_type = other DNA
cggccgacaaaccaccgccgaaacctgacgtgaaggtctacaccctgccgcagaacgccacgctgaccggatcgg

SEQ ID NO: 514984 - DNA, 75 bp, synthetic construct
  source 1..75: mol_type = other DNA
ggattgctggataagctcgaccatctgatggccaagcgcccggacgatatcccgcccggcttaggcctgacaccc

SEQ ID NO: 514985 - DNA, 75 bp, synthetic construct
  source 1..75: mol_type = other DNA
caggtcagttactccagcgcgcgggccagcgcaaacgtgagctggcgttttttcatgggccgtcgacgttttatc

SEQ ID NO: 514986 - DNA, 75 bp, synthetic construct
  source 1..75: mol_type = other DNA
tcgaggtagcgtggactgaatacgccgaggaccctcactgcacgattgatatcgagcggaaacggacgttcacaa

SEQ ID NO: 514987 - DNA, 75 bp, synthetic construct
  source 1..75: mol_type = other DNA
atatcgaaggcgcggtgatctccggcagcgccaccggcgactggacgctctcctgcgtgcgcggcacgttaacgt

SEQ ID NO: 514988 - DNA, 75 bp, synthetic construct
  source 1..75: mol_type = other DNA
aggaagtgatgtcactgacccgggcatatttcggggagctgcaggcatccattgagcaggatattaaccagcccg

SEQ ID NO: 514989 - DNA, 75 bp, synthetic construct
  source 1..75: mol_type = other DNA
tcagtcagttacagacccggctcgcggtaaaaacaaatctgagtgcgcttatggaggaaagaacggagaccgtca

SEQ ID NO: 514990 - DNA, 75 bp, synthetic construct
  source 1..75: mol_type = other DNA
gtccgccaggaaatcgatgcctttttctgtacattcagggagaaagttgaacagctgcgtaacacgctgattcag

SEQ ID NO: 514991 - DNA, 75 bp, synthetic construct
  source 1..75: mol_type = other DNA
acggtaaaaatcagttttccggcagtcagccagttacagacccggctcgcggtacaaacaaatctgagcgcgctt

SEQ ID NO: 514992 - DNA, 75 bp, synthetic construct
  source 1..75: mol_type = other DNA
aaatcgatgcctttttctgcgcattcagggagaaagttgaacaactgcgtaacacgctgattcagagctctgaag

SEQ ID NO: 514993 - DNA, 75 bp, synthetic construct
  source 1..75: mol_type = other DNA
cggccctgtacgccacagaaaatattgccggacgcatcaatgcccgtctggaggatgaaggtttcactgtaaaaa

SEQ ID NO: 514994 - DNA, 75 bp, synthetic construct
  source 1..75: mol_type = other DNA
cccgtttgcaatttattaatcacactgaaagaaaagatcgccacgtctgaaggacagcaagtcgcacagaccctg

SEQ ID NO: 514995 - DNA, 75 bp, synthetic construct
  source 1..75: mol_type = other DNA
accagcctgcaccgtgaggctgaagcacagttccgaccagaactggaaaaaatcgtcaggggaattgaaacaggt

SEQ ID NO: 514996 - DNA, 75 bp, synthetic construct
  source 1..75: mol_type = other DNA
tgacccgggcatatttcggggaactgcaggcatccattgagcagaatattaaccagcccgtccgtcaggaaatcg

SEQ ID NO: 514997 - DNA, 75 bp, synthetic construct
  source 1..75: mol_type = other DNA
tccgggctgggaagattacaggaaacgagactttgacccgaaaaaccccgagataacactaaataatcgcaggga

SEQ ID NO: 514998 - DNA, 75 bp, synthetic construct
  source 1..75: mol_type = other DNA
gcgccttcaggcattaaatgaaagggttcccgagctgattactgacagtaaggcgttaagggaagaactggagac

SEQ ID NO: 514999 - DNA, 75 bp, synthetic construct
  source 1..75: mol_type = other DNA
actgtaaaaatcagttttccggcagtcagccagttacagacctggctcgctgtaaaaacaaatctgagtgcgctt

SEQ ID NO: 515000 - DNA, 75 bp, synthetic construct
  source 1..75: mol_type = other DNA
ggtaaaaacaaatctgagtgcgcttatggaggaaagaacggagacagtcacccgtcgccgtcggaaggatagctt

SEQ ID NO: 515001 - DNA, 75 bp, synthetic construct
  source 1..75: mol_type = other DNA
gagggcgatggctggttcattggttccattcatgacactgaagatggtcctgtttgtgtatggctgagaaataag

SEQ ID NO: 515002 - DNA, 75 bp, synthetic construct
  source 1..75: mol_type = other DNA
gagggcgatggatggtttattggttcaatacatgacaccgaagatggcccggtttgtgtctggttgcgaaataag

SEQ ID NO: 515003 - DNA, 75 bp, synthetic construct
  source 1..75: mol_type = other DNA
tagttcgtgacggatatggctactggacacatcctgaatatgaaaaattctgtgatggtcgggaatatatttcaa

SEQ ID NO: 515004 - DNA, 75 bp, synthetic construct
  source 1..75: mol_type = other DNA
cacccagatgaactcaaaagccgatgacgaggtccgtaaagagcttaatgccattgctgacgtatcagccggccg

SEQ ID NO: 515005 - DNA, 75 bp, synthetic construct
  source 1..75: mol_type = other DNA
cctgtttgtgctggtcaataaatttgatgaaaaagaccgtaatggcgatggggctgatgcagtctgtcagaaggt

SEQ ID NO: 515006 - DNA, 75 bp, synthetic construct
  source 1..75: mol_type = other DNA
gtgagtaaaattaaagaaatgccggtagttcgtgacgtatatggcttctggacgcatcctgaatatgaaaaattc

SEQ ID NO: 515007 - DNA, 75 bp, synthetic construct
  source 1..75: mol_type = other DNA
cgatcgcataagcgatacacaaaccgccgcccgcacgcaggcagaaaaattcaccctcggcgaacccggcgtggc

SEQ ID NO: 515008 - DNA, 75 bp, synthetic construct
  source 1..75: mol_type = other DNA
gacgcaaatcgaatcgaccgtgaccagcctgcaccgtgaggctgaagcacagttccggcctgagctggagaaaat

SEQ ID NO: 515009 - DNA, 75 bp, synthetic construct
  source 1..75: mol_type = other DNA
gatgagaaagaccgtaatggcgatggggcagataccgtacgccagaaggtaccggcaatgctgaacagcgatgtg

SEQ ID NO: 515010 - DNA, 75 bp, synthetic construct
  source 1..75: mol_type = other DNA
tggagtccaacccgtaatgcatgggttcgcaagattactccaaatgccctggctgatgcccgatatctgaaagaa

SEQ ID NO: 515011 - DNA, 75 bp, synthetic construct
  source 1..75: mol_type = other DNA
atgtcagccatacaagggatcgaaggggttatcagccagttacaggccacggcaatgagtgcgcgtgtccagcag

SEQ ID NO: 515012 - DNA, 75 bp, synthetic construct
  source 1..75: mol_type = other DNA
aggttttgtaacctgttgttaattacatccgatctcaccgcgtggggcatggatggggcaaactcactcaatttc

SEQ ID NO: 515013 - DNA, 75 bp, synthetic construct
  source 1..75: mol_type = other DNA
atgcgggatcaactgcagaaagcctctgcggtgctggcggtgatggactacacccagatgaactcgaaagccgat

SEQ ID NO: 515014 - DNA, 75 bp, synthetic construct
  source 1..75: mol_type = other DNA
taaaatcagtcaaaaagcatgactgtgtggaagtatcggataaaagctataaatgtaatgtgacggttgttgtca

SEQ ID NO: 515015 - DNA, 75 bp, synthetic construct
  source 1..75: mol_type = other DNA
aaatgcaatgtgacggctattgtcgataacgaaaagcgtactgctgctgtaacccttgtcaaaacggaagatggc

SEQ ID NO: 515016 - DNA, 75 bp, synthetic construct
  source 1..75: mol_type = other DNA
ttgctcaagggcaaaagcacatggtgcgaatctttctgattcatgctctatctttctgcgccgtcttttccgtgt

SEQ ID NO: 515017 - DNA, 75 bp, synthetic construct
  source 1..75: mol_type = other DNA
ggatggtcagggtggtatgccggagtggagcgtcacggataacgtccggtacagtgatttcagttgtacgattga

SEQ ID NO: 515018 - DNA, 75 bp, synthetic construct
  source 1..75: mol_type = other DNA
gaaggcttcttatgctctgaccggtcaggtaagtccgacgcccggtgctgtccagtcagtgataaatgtgacttt

SEQ ID NO: 515019 - DNA, 75 bp, synthetic construct
  source 1..75: mol_type = other DNA
agccgggagcggttttcctcacaattttggggctaaaactaatggccgtctagaatacaataactacacatatcc

SEQ ID NO: 515020 - DNA, 75 bp, synthetic construct
  source 1..75: mol_type = other DNA
ccggctggaccactcaaacgacaaatccggcgacagggaaaaaatgttctggaggcgcagcccgaaacttaagaa

SEQ ID NO: 515021 - DNA, 75 bp, synthetic construct
  source 1..75: mol_type = other DNA
ggacaaactaatcaaaacggtgcctgaagtggcctcagtttttggcaagaccggtaaggctgagaccgccacgga

SEQ ID NO: 515022 - DNA, 75 bp, synthetic construct
  source 1..75: mol_type = other DNA
ccttgaagagtttattgttgtagccattgtctgtgcgctgttcctttggcatgtccgatcagcactggtggcgat

SEQ ID NO: 515023 - DNA, 75 bp, synthetic construct
  source 1..75: mol_type = other DNA
ccagattgcatatgccggtaagaccagaatcgttcatccttataaattaactaatcagagaagtatatggtattt

SEQ ID NO: 515024 - DNA, 75 bp, synthetic construct
  source 1..75: mol_type = other DNA
gaaaataccggcttatttcagcaagagcaggaaaccagagcaaagaatcactgcacaaatctctggccaggttac

SEQ ID NO: 515025 - DNA, 75 bp, synthetic construct
  source 1..75: mol_type = other DNA
atgaaacgaattgcgtttgttttttctactgcgcctcatggtacaactgcaggccgggaaggtttagatgcttta

SEQ ID NO: 515026 - DNA, 75 bp, synthetic construct
  source 1..75: mol_type = other DNA
atgtcattcagccattcttccctctcctcacaagtaaaatcacatctgacgtttcttcctgaagaaattcgccag

SEQ ID NO: 515027 - DNA, 75 bp, synthetic construct
  source 1..75: mol_type = other DNA
accagcgcggtgtattcacatatccggggggaaaaccgctctgaacagacccagaaacatgcacaacagactttt

SEQ ID NO: 515028 - DNA, 75 bp, synthetic construct
  source 1..75: mol_type = other DNA
gctgatgaacgtgcgtatgctgctgatattgccatgcatcagtttttactgaatgaaggtgcagatccctcgcgt

SEQ ID NO: 515029 - DNA, 75 bp, synthetic construct
  source 1..75: mol_type = other DNA
cgtcagcaggaactctcactggcaacagtaacagcccgggtggccaccctgttcccttcatcatttccggtactc

SEQ ID NO: 515030 - DNA, 75 bp, synthetic construct
  source 1..75: mol_type = other DNA
tgcagattggtgaacgcagaatgacgctggtcgatctgcccggcattggtgaaacaccgcagcatgatcaggaat

SEQ ID NO: 515031 - DNA, 75 bp, synthetic construct
  source 1..75: mol_type = other DNA
tttaccgtcagttactgcccgaactggatctgattatctggatcctgcgtgctgatgaacgtgcgtatgctgccg

SEQ ID NO: 515032 - DNA, 75 bp, synthetic construct
  source 1..75: mol_type = other DNA
accagcgcagtttattcacatatcaggggggaaaaccgctctgaacaggcccggaaacacgcacaacagactttt

SEQ ID NO: 515033 - DNA, 75 bp, synthetic construct
  source 1..75: mol_type = other DNA
atgtcattcagccattcttccctctcctcccaagtcaaatcacatctgacgtttcttcctgaagaaattcgccag

SEQ ID NO: 515034 - DNA, 75 bp, synthetic construct
  source 1..75: mol_type = other DNA
atgtcattcagccattcttccctctcctcccaagttaaatcatatctgacgtttcttcctgaagaaattcgccag

SEQ ID NO: 515035 - DNA, 75 bp, synthetic construct
  source 1..75: mol_type = other DNA
atgtcattcagccattcttccctctcctcccaagtaaaatcaaatctgacgtttcttcctgaagaaattcgccag

SEQ ID NO: 515036 - DNA, 75 bp, synthetic construct
  source 1..75: mol_type = other DNA
cattatgggtaaatccggcaccggcaaaagcagtctgtgtaatgccatttttcagtcccgtatctgcgccacaca

SEQ ID NO: 515037 - DNA, 75 bp, synthetic construct
  source 1..75: mol_type = other DNA
atgtcattcagccattcttccctctcctcgcaagtgaaatcacatctgacgtttcttcctgaagaaattcgccag

SEQ ID NO: 515038 - DNA, 75 bp, synthetic construct
  source 1..75: mol_type = other DNA
atgtcattcagccattcttccctctcctcccaagtgaaatcagatctgacgtttcttcctgaagaaattcgccag

SEQ ID NO: 515039 - DNA, 75 bp, synthetic construct
  source 1..75: mol_type = other DNA
cttaataccgcctatttagatgctaataatgaaaaagatttcacggcagggattaacgcgctgtggaaacgtttc

SEQ ID NO: 515040 - DNA, 75 bp, synthetic construct
  source 1..75: mol_type = other DNA
tagcgtcatcagacatgcgataaagaaacggaaagtgttcccgatagatgaatcggtgaaaaaagtgatgaggct

SEQ ID NO: 515041 - DNA, 75 bp, synthetic construct
  source 1..75: mol_type = other DNA
atcctctcgttgtatgccaaagggatgaccacccgtgagatagccgctgcgttcaaagagctgtatgacgcagat

SEQ ID NO: 515042 - DNA, 75 bp, synthetic construct
  source 1..75: mol_type = other DNA
gacagtcgctacccgcagataagccggagctggcaggcaaactggaccaacctggcgatgttcttcgcttacccg

SEQ ID NO: 515043 - DNA, 75 bp, synthetic construct
  source 1..75: mol_type = other DNA
attaacaaagcggtgttcctcgcgcggggcatcaataccgacggtcagaaagagctgctgggtatgtggctggca

SEQ ID NO: 515044 - DNA, 75 bp, synthetic construct
  source 1..75: mol_type = other DNA
ctaaaactggccaccgcgttagagtttttccagtatcggttttctgattcgtttggtggtaacccaccattatat

SEQ ID NO: 515045 - DNA, 75 bp, synthetic construct
  source 1..75: mol_type = other DNA
tcacagaaatggacgatgccacttcaggactggcggatagccatgagtcgctttattatcgagttcggtgactga

SEQ ID NO: 515046 - DNA, 75 bp, synthetic construct
  source 1..75: mol_type = other DNA
ggacgatgccgttgaaggactggcgaatggcaatgagccgctttattatcgagttcggtgaccgcctggacggtc

SEQ ID NO: 515047 - DNA, 75 bp, synthetic construct
  source 1..75: mol_type = other DNA
ctgagcttgcacgctggaactatctaatatctaaggccaagctacccgaaatcggtaagctggttgatgatgcta

SEQ ID NO: 515048 - DNA, 75 bp, synthetic construct
  source 1..75: mol_type = other DNA
acggtcaggaatccaaccagaccacctggcgtctggcaaaaatgaacctggctatccggggtatcaattcagaac

SEQ ID NO: 515049 - DNA, 75 bp, synthetic construct
  source 1..75: mol_type = other DNA
actcggtgaaaaaagtggtgtggctggcaatccaggcggcttcacagaaatggacgatgccactgcgggactggc

SEQ ID NO: 515050 - DNA, 75 bp, synthetic construct
  source 1..75: mol_type = other DNA
atggacgaaaagaaacttatagcccttgcggctgaactggccaaaggccttaaaaccgaagccgacctcaaccag

SEQ ID NO: 515051 - DNA, 75 bp, synthetic construct
  source 1..75: mol_type = other DNA
attaacaaagcggggttcctcgcgctgggcatcaataccgacggtcagaaagagctgctgggtatgtggctggca

SEQ ID NO: 515052 - DNA, 75 bp, synthetic construct
  source 1..75: mol_type = other DNA
tatcccattgtttatcttgactgtattgtggttaaggttcgtcacggcgggagtgtcattaacaaagcggtgttc

SEQ ID NO: 515053 - DNA, 75 bp, synthetic construct
  source 1..75: mol_type = other DNA
tctacctacacgcgtatggcacctacggttcggcaaatcgggtgaatttccacgatgatatgttcctgtacggta

SEQ ID NO: 515054 - DNA, 75 bp, synthetic construct
  source 1..75: mol_type = other DNA
gctgagccttgtattatccctccagtgcagagaaaatcggccagttttctctgcctgcagtccgcatgccgtatc

SEQ ID NO: 515055 - DNA, 75 bp, synthetic construct
  source 1..75: mol_type = other DNA
gcgataaacagcgtctacccgcagactcacatccagctgtgcatcatccatatggtgcgtaacagcctgaaatac

SEQ ID NO: 515056 - DNA, 75 bp, synthetic construct
  source 1..75: mol_type = other DNA
gttttaaaaaaactcaatgatgcgacatcccgcagcgacgtgatgtcgaaacggtttgagtcgtatctgagcaat

SEQ ID NO: 515057 - DNA, 75 bp, synthetic construct
  source 1..75: mol_type = other DNA
ttgaaattgaaggaaaaaaaaacgcacaagcctgtatcacacttaagaatttattgcagtttcatataaattccc

SEQ ID NO: 515058 - DNA, 75 bp, synthetic construct
  source 1..75: mol_type = other DNA
cacaaagatgattttggatatctggaactggaaggcggcgctaactttagttggggagaaatgtacgggttcttc

SEQ ID NO: 515059 - DNA, 75 bp, synthetic construct
  source 1..75: mol_type = other DNA
aggtcagaaagaactgccaggtatgtggctggccgaaaatgaaggggcgaagttctggctcaatgtgctgactga

SEQ ID NO: 515060 - DNA, 75 bp, synthetic construct
  source 1..75: mol_type = other DNA
gacagtcgctatcctcatataagccgaagctggcaggctaactggccgaatcttgccacgttcttcgcttatgcg

SEQ ID NO: 515061 - DNA, 75 bp, synthetic construct
  source 1..75: mol_type = other DNA
gaaagagctgctgggtatgtggctggcagaaaatgaaggtgcaaagttctggctgggtgtactgactgagctgaa

SEQ ID NO: 515062 - DNA, 75 bp, synthetic construct
  source 1..75: mol_type = other DNA
tcactgagtggcaaaaccgacagctggatgcgctgtatcccattgtttatatggactgcattgtcgtcaaagtcc

SEQ ID NO: 515063 - DNA, 75 bp, synthetic construct
  source 1..75: mol_type = other DNA
gcaacagcctgcggttcgtggcgtggaaagactataaagcggtaacccgtgacctgaaacaggtttaccgcgcag

SEQ ID NO: 515064 - DNA, 75 bp, synthetic construct
  source 1..75: mol_type = other DNA
tggctaacgaactggccaaaaatctcaaaacccctgaagatctcagtcattttgatcgcctgctcaagaaaatca

SEQ ID NO: 515065 - DNA, 75 bp, synthetic construct
  source 1..75: mol_type = other DNA
gctttacggctcttaaagctgagtttgaagcgcaactggaagaagaggcgcgtctgaacagagccatcgttgata

SEQ ID NO: 515066 - DNA, 75 bp, synthetic construct
  source 1..75: mol_type = other DNA
gttctggcccccaaatccaaagctgacttcgcgtttgtattacatgcgctgaactatctttcggccaaaggtcgc

SEQ ID NO: 515067 - DNA, 75 bp, synthetic construct
  source 1..75: mol_type = other DNA
atgacaagtattcaacaacgagcagagttacaccgccagatatggcaaattgctaacgatgtcagaggttctgtc

SEQ ID NO: 515068 - DNA, 75 bp, synthetic construct
  source 1..75: mol_type = other DNA
gtatcttcgtcgctatagaaagctctgcctacggctatccgtccgaggccgacatcaaaggcctgttcgccgatt

SEQ ID NO: 515069 - DNA, 75 bp, synthetic construct
  source 1..75: mol_type = other DNA
gcaacgtttaagcgaagttgaaggcgtgaataaccgcctgcaactctctcgtctggagcgcgtttaccagtccga

SEQ ID NO: 515070 - DNA, 75 bp, synthetic construct
  source 1..75: mol_type = other DNA
ttctgcaggatgcgcaggccaacgcctacgccgtaccggcgtttaacatccacaacgccgaaacgatccaggcga

SEQ ID NO: 515071 - DNA, 75 bp, synthetic construct
  source 1..75: mol_type = other DNA
ggtgatgcctatgagttcctgatttctaactatgcggcaaatgccggtaagtcaggcggcgagttctttacaccg

SEQ ID NO: 515072 - DNA, 75 bp, synthetic construct
  source 1..75: mol_type = other DNA
gaacgtaagcggctcgccagaaccgtattgatatttactgagagctcagatcaaggggttccaggccggaaacct

SEQ ID NO: 515073 - DNA, 75 bp, synthetic construct
  source 1..75: mol_type = other DNA
cggcgctgacagccgaagctggcaggctaactggccgaatcttgccacgttcttcgcttatccaacggacatccg

SEQ ID NO: 515074 - DNA, 75 bp, synthetic construct
  source 1..75: mol_type = other DNA
caaaacctctgaagacctcagtcagtttgatcggctgctgaaaaagctcagcgttgaagccgctctcaatgctga

SEQ ID NO: 515075 - DNA, 75 bp, synthetic construct
  source 1..75: mol_type = other DNA
agtgagcagctatgtggaagcgaaagataaccgcgaaataatcaatattgctgagttgaatgcagagctgaaaac

SEQ ID NO: 515076 - DNA, 75 bp, synthetic construct
  source 1..75: mol_type = other DNA
tacagtttcacgcttggtagcgaaaaattcagcctgactaactggaatgaatacgaattcgaccgcgacgctaca

SEQ ID NO: 515077 - DNA, 75 bp, synthetic construct
  source 1..75: mol_type = other DNA
gaccgttatcacaggcgacggtccactggaactgcgtactccgcgcgatcgtgacggtaccttcgaaccacaacg

SEQ ID NO: 515078 - DNA, 75 bp, synthetic construct
  source 1..75: mol_type = other DNA
cacggtcagtaaaattgaccagttacgcaaggatatcgatgcgattgtggcagagattgagggtgacgaggcgca

SEQ ID NO: 515079 - DNA, 75 bp, synthetic construct
  source 1..75: mol_type = other DNA
taacacagttaaagacaaaaacagccgtcttgccgcggttctgaaaggcgttgaagggcttaacctggggaattt

SEQ ID NO: 515080 - DNA, 75 bp, synthetic construct
  source 1..75: mol_type = other DNA
gcgaaatctgtcgcgtttgagaccgttgtcgctaatgactataacctgtcggtgagcagctatgtggaagcgaaa

SEQ ID NO: 515081 - DNA, 75 bp, synthetic construct
  source 1..75: mol_type = other DNA
tttgtattacatgcgctgaactatctttcggccaaaggtcgtgctgcgattgtctgcttcccgggtattttttac

SEQ ID NO: 515082 - DNA, 75 bp, synthetic construct
  source 1..75: mol_type = other DNA
tcgccaaaaggtcaggctggcgttgtgctggcaaaaggggctttaacctctaaaagttcgggtgaaggtgatatt

SEQ ID NO: 515083 - DNA, 75 bp, synthetic construct
  source 1..75: mol_type = other DNA
aacagactagatctgcatggcagagaaatcactggatgggaagttgtaccagtaaaaacaccagctgaagctctt

SEQ ID NO: 515084 - DNA, 75 bp, synthetic construct
  source 1..75: mol_type = other DNA
gcatcttcgttgctatcgaaagttctgcttacggttacccttcagaagctgacatcaaaggtttgtttgctgatt

SEQ ID NO: 515085 - DNA, 75 bp, synthetic construct
  source 1..75: mol_type = other DNA
cgttgccgctaaagctaacaccaacgacaggctgaatgctgatttaaacagtatcttcgtcgctattgaaagctc

SEQ ID NO: 515086 - DNA, 75 bp, synthetic construct
  source 1..75: mol_type = other DNA
aactggctatgcacgggcagacccatgttaacaaaatctacgacccggcagcaggttccggttcgctgttgttgc

SEQ ID NO: 515087 - DNA, 75 bp, synthetic construct
  source 1..75: mol_type = other DNA
acctggcgcgtatgaacatgtttttgcacaatatcaactacgacaagtttgatatcaagctgggtaatacactga

SEQ ID NO: 515088 - DNA, 75 bp, synthetic construct
  source 1..75: mol_type = other DNA
cacggtcagcaaaatcaaccagttgcgtaaagatattgatgcgattgtggctgaaattgagggctgcgaggtgca

SEQ ID NO: 515089 - DNA, 75 bp, synthetic construct
  source 1..75: mol_type = other DNA
acctggcgcgtatgaacatgtttttgcacaacatcaactacgacaagtttgatatcaagctgggcaatacgctga

SEQ ID NO: 515090 - DNA, 75 bp, synthetic construct
  source 1..75: mol_type = other DNA
aacaatatcctgaccgatgcccatatcgaccagattatgcaggtatttgccagcaaggaagatgttgctcatctg

SEQ ID NO: 515091 - DNA, 75 bp, synthetic construct
  source 1..75: mol_type = other DNA
ttgaaatcaaagcgcggctgaattccggtatggaaaaattgctgcataaagacaccgtcttttgggtggtgaaac

SEQ ID NO: 515092 - DNA, 75 bp, synthetic construct
  source 1..75: mol_type = other DNA
cgaaagttatgaagcagaacgtaacgccgtaatgctggagtacatgaaagagaaggatgtcgccagcatgtcagg

SEQ ID NO: 515093 - DNA, 75 bp, synthetic construct
  source 1..75: mol_type = other DNA
cttgcaaagctggaacgtctggagagacagggacagtttttattaccgggattcgataaaggtattcaagcctga

SEQ ID NO: 515094 - DNA, 75 bp, synthetic construct
  source 1..75: mol_type = other DNA
cgggcgtcggcatgattggcgcgggcattgtgcatccaccttttgcctgcttcgagaaagccattcttggctggt

SEQ ID NO: 515095 - DNA, 75 bp, synthetic construct
  source 1..75: mol_type = other DNA
tccggcccgacgtggatggcgatgtgtaaagcggcgatggatgcggcgcatggcatcgaatacagcaccgtggtc

SEQ ID NO: 515096 - DNA, 75 bp, synthetic construct
  source 1..75: mol_type = other DNA
attaagaagcctcagctactggcgagaattgaacgccttgaacagcacgggcaaaccgtaatccccggactcact

SEQ ID NO: 515097 - DNA, 75 bp, synthetic construct
  source 1..75: mol_type = other DNA
ctcgtcagatctgctggctgcgttcggtatcaacctggatatgaatgccgataaatcgcgccaggcgctcgacga

SEQ ID NO: 515098 - DNA, 75 bp, synthetic construct
  source 1..75: mol_type = other DNA
ataaatcgcgccaggcgctggatgagttaggcgtatgtttcctctttgcgccgaaatatcacaccggattccgcc

SEQ ID NO: 515099 - DNA, 75 bp, synthetic construct
  source 1..75: mol_type = other DNA
acgcgatgccggttcgtcaacaactgaaaacccgaacgctattcaacgtactggggccattgattaatccggcac

SEQ ID NO: 515100 - DNA, 75 bp, synthetic construct
  source 1..75: mol_type = other DNA
gatttccggagagcgcatttttgcgttgccgaaaaaatcaatgagttagggattttcgacaagaagcagatttac

SEQ ID NO: 515101 - DNA, 75 bp, synthetic construct
  source 1..75: mol_type = other DNA
gtattcgcctgggtacagtaagtaaagttcctttctttgcgccgaatatgcgtcagacatttaatgatgattacc

SEQ ID NO: 515102 - DNA, 75 bp, synthetic construct
  source 1..75: mol_type = other DNA
ggctggctggattgtgcggcaccggtaccaaaccgccagacctgattgccaccattgcatgttctgcctgtcacg

SEQ ID NO: 515103 - DNA, 75 bp, synthetic construct
  source 1..75: mol_type = other DNA
cagcagggcaaaattcgtatggatcgcgatccgggtacgcagatcccgttagatagcaacgggcaactggttctg

SEQ ID NO: 515104 - DNA, 75 bp, synthetic construct
  source 1..75: mol_type = other DNA
aaaagcgtgggttgcggcacttgatttactacgccaacagttaaagaaatgtaccgtttcggcaatgcatgttta

SEQ ID NO: 515105 - DNA, 75 bp, synthetic construct
  source 1..75: mol_type = other DNA
gctggagatatactgggtatgtgggaaaagcgggtgctggccgggaagccgattccgcccgttcgaagggctctg

SEQ ID NO: 515106 - DNA, 75 bp, synthetic construct
  source 1..75: mol_type = other DNA
cgacgcaaggctgccgatgaactgacctgtatgacagcgcgaattaaccgtggtgagacgatacctgaaccagta

SEQ ID NO: 515107 - DNA, 75 bp, synthetic construct
  source 1..75: mol_type = other DNA
gccaactccgggagccgtgattatggcattcaggctctgctaaaaatgccagataacattccggccaccccctga

SEQ ID NO: 515108 - DNA, 75 bp, synthetic construct
  source 1..75: mol_type = other DNA
gtgaataaatcaatgttggcgggtatcgggattggtgtcgcggctgcgcttggcgtagcggcagtggccagtctg

SEQ ID NO: 515109 - DNA, 75 bp, synthetic construct
  source 1..75: mol_type = other DNA
ggttatgatgtgacctataagattggcgatcagcagggcaaaatccgcatggaccgcgatccgggtacgcagatc

SEQ ID NO: 515110 - DNA, 75 bp, synthetic construct
  source 1..75: mol_type = other DNA
agcagccattattgacggtatttgtcgctgatggcgcaggcagtgtctcgcagggtggcgaaggcgcgatgctcg

SEQ ID NO: 515111 - DNA, 75 bp, synthetic construct
  source 1..75: mol_type = other DNA
tgcgcttactgatgcggaattacggcgcaaggctgccgatgaactgacttgtatgaccacgcgaattaaccgtgg

SEQ ID NO: 515112 - DNA, 75 bp, synthetic construct
  source 1..75: mol_type = other DNA
ccattgccggtagcgcgttatcactcgttggttggcagtaacattccggcaggtttaaccatcaatgcccatttt

SEQ ID NO: 515113 - DNA, 75 bp, synthetic construct
  source 1..75: mol_type = other DNA
agcaacgagcctttagttatcaggaagatggcttcaaaaaaagtgtgctattacggcagattattgccatagccg

SEQ ID NO: 515114 - DNA, 75 bp, synthetic construct
  source 1..75: mol_type = other DNA
gcatctggcaaccaggctgccgaatccaatcgcagtaatgagtggaccggcaatcctgatattgataacgccatc

SEQ ID NO: 515115 - DNA, 75 bp, synthetic construct
  source 1..75: mol_type = other DNA
taattgtcgcgcatattttaacaataaaacaaatgatgcgattggcttagataataaggatataatatgtctgat

SEQ ID NO: 515116 - DNA, 75 bp, synthetic construct
  source 1..75: mol_type = other DNA
taccttattcgatactatgatgaacagattgagtgaagagcaaaatgaactcaaactcagattacaaatagctca

SEQ ID NO: 515117 - DNA, 75 bp, synthetic construct
  source 1..75: mol_type = other DNA
tgacggattacattgccgtcgatatttatctgcagtatctggaggccgtcatgaaggtggtcaatggttcactgg

SEQ ID NO: 515118 - DNA, 75 bp, synthetic construct
  source 1..75: mol_type = other DNA
ggcgggcaaaccagtgtgttttcggactgggttgcttcccgtcagggctgtacctccggaggcaaatacggctcc

SEQ ID NO: 515119 - DNA, 75 bp, synthetic construct
  source 1..75: mol_type = other DNA
cagcaaatccgctttatccgccagcaggtctcctcaaagatgagcgatcgtgtgctgggtaactaccagttcagc

SEQ ID NO: 515120 - DNA, 75 bp, synthetic construct
  source 1..75: mol_type = other DNA
tctgtttaagcgttatcacatctccccgcaggcggtcattcttgagatcaccgaggagcaggcgttttctaacgc

SEQ ID NO: 515121 - DNA, 75 bp, synthetic construct
  source 1..75: mol_type = other DNA
ttgatctcgatttctatccggatacgcctgcgataactggcattcgtgaatttaatggttaccagattatcccga

SEQ ID NO: 515122 - DNA, 75 bp, synthetic construct
  source 1..75: mol_type = other DNA
accggaagtgaccctgatcaccgcgaatgcggaaggaatagaaggtggtaaaaccaccattaaaagccgtagcgt

SEQ ID NO: 515123 - DNA, 75 bp, synthetic construct
  source 1..75: mol_type = other DNA
actggcagcaaggaggaatcatggctgatttgagaaaagcagcgcgtggtcgggaatgccaggtaagaatccctg

SEQ ID NO: 515124 - DNA, 75 bp, synthetic construct
  source 1..75: mol_type = other DNA
ctttggggaaattatgaggggatctctcagcgcaaagctattcctcaggcaagagtcagagcgtggaaaagcgga

SEQ ID NO: 515125 - DNA, 75 bp, synthetic construct
  source 1..75: mol_type = other DNA
ccgtcggcattattaatcaacaattactcgaaaaattaccggatggcgcgtatctcctcaacctggcgcgtggtg

SEQ ID NO: 515126 - DNA, 75 bp, synthetic construct
  source 1..75: mol_type = other DNA
gaaaattcgcggcgagcacccgaacgagatcgccggagcagcaaccgcgctactggaaaacgccgcgccgttccc

SEQ ID NO: 515127 - DNA, 75 bp, synthetic construct
  source 1..75: mol_type = other DNA
gttaggcgtctgtttcctctttgcgccgaaatatcacaccggattccgccacgcgatgccggttcgccagcaact

SEQ ID NO: 515128 - DNA, 75 bp, synthetic construct
  source 1..75: mol_type = other DNA
gcgccgttcccgcgcccggattatctgtttgctgatatcgtcggtactggcggtgacggcagcaacagtatcaat

SEQ ID NO: 515129 - DNA, 75 bp, synthetic construct
  source 1..75: mol_type = other DNA
aagcggtggcgtatatttcacgcactattgcgcagctcgaaagaggagaggcggttagcggacaggtcgaccgcg

SEQ ID NO: 515130 - DNA, 75 bp, synthetic construct
  source 1..75: mol_type = other DNA
taccggtatgggcgagcaaatgcaggaatatgcagtcagtcaggtacttcattggttccgacgttttgacgatta

SEQ ID NO: 515131 - DNA, 75 bp, synthetic construct
  source 1..75: mol_type = other DNA
tggcaacctctgcctgaatatcatcgggaagattttaccattggcattttgggcgcaggcgtgttgggcagtaaa

SEQ ID NO: 515132 - DNA, 75 bp, synthetic construct
  source 1..75: mol_type = other DNA
atttctcgcactattgcccagctcgaaaaaggggagagggtctgcgggcaagtcgaccgcgcacgcggctactaa

SEQ ID NO: 515133 - DNA, 75 bp, synthetic construct
  source 1..75: mol_type = other DNA
atgacctgctcgcggcgctggatagcggtaaagttaaagcggcgatgctggatgtttttaatcgtgaacctttac

SEQ ID NO: 515134 - DNA, 75 bp, synthetic construct
  source 1..75: mol_type = other DNA
acgcggctactaataaagcatcaggattcctgctatccttggcgggaattgaatacaggagagagttatgtatcc

SEQ ID NO: 515135 - DNA, 75 bp, synthetic construct
  source 1..75: mol_type = other DNA
tcgtcgcacggcggcaaacacactggattttattgattgtgttattgaagaaatgcctttcccgatacagcgctt

SEQ ID NO: 515136 - DNA, 75 bp, synthetic construct
  source 1..75: mol_type = other DNA
acgacttcatgcaatctcactggcagtggcaacgatccacaaagttctttgccagaataaggttaaacctgtcgt

SEQ ID NO: 515137 - DNA, 75 bp, synthetic construct
  source 1..75: mol_type = other DNA
gacctgaaggaactgctggcagaatggcagcattactataactgggaacgccctcatagcgctcacaacggtaaa

SEQ ID NO: 515138 - DNA, 75 bp, synthetic construct
  source 1..75: mol_type = other DNA
gcacaaccttgttcagcatctcaacactaaatcacacgatagtccttttactatcaccgaaatttatacggtgca

SEQ ID NO: 515139 - DNA, 75 bp, synthetic construct
  source 1..75: mol_type = other DNA
acgtctgaaagcttctcacaaagaggcactgaaagcctggtcagtcacaaccggtgacagtgaggatgaaatatt

SEQ ID NO: 515140 - DNA, 75 bp, synthetic construct
  source 1..75: mol_type = other DNA
atgaagcccaaaagtatcagggcggcacttcagttgatgttgccggaaatagaagaaatgctgtcactgggagtt

SEQ ID NO: 515141 - DNA, 75 bp, synthetic construct
  source 1..75: mol_type = other DNA
tgcagaaaatatcgacatggaggggagccgactggatgtgtgggcgcagcaatttttcagtctcgcatttcagta

SEQ ID NO: 515142 - DNA, 75 bp, synthetic construct
  source 1..75: mol_type = other DNA
tcgggcaactctccggaaactccggatggttgggttatggtgccgaaggaaccaactcaggccatgattaaagcg

SEQ ID NO: 515143 - DNA, 75 bp, synthetic construct
  source 1..75: mol_type = other DNA
atggaagtcatcgtcaaggaaaccgacagcattcaagcaatgtctgacagtgctgttttatcatatgtctatgaa

SEQ ID NO: 515144 - DNA, 75 bp, synthetic construct
  source 1..75: mol_type = other DNA
atggaaagccacagccgtcgccccaagcgttcaccatcaacgaaaaccggcacttgcgaagtcgctctgattctg

SEQ ID NO: 515145 - DNA, 75 bp, synthetic construct
  source 1..75: mol_type = other DNA
tatccacgaacggatatgaaagagattcggacaaaagccgatgaaaacgcggccggtagtcgtccgtacgttacg

SEQ ID NO: 515146 - DNA, 75 bp, synthetic construct
  source 1..75: mol_type = other DNA
agccgactggatgtgtgggcgcagcaatttttcagtctcgcatttcagtatggtgtggcacatgcgctggtggac

SEQ ID NO: 515147 - DNA, 75 bp, synthetic construct
  source 1..75: mol_type = other DNA
aaagcgtgagctggtcagctatctgaccgcgcagtttgccatgagcttacgccaggcctgcaggacattgtcgct

SEQ ID NO: 515148 - DNA, 75 bp, synthetic construct
  source 1..75: mol_type = other DNA
cgacacccgtcaccagggcacttttgatgtggcccgtgcaggctggtgtgctgactacaacgaaccaacttcctt

SEQ ID NO: 515149 - DNA, 75 bp, synthetic construct
  source 1..75: mol_type = other DNA
ccgatctgcataaaaagctggccattgccgcctcttcgctgtggaagaaaaacataggtgttaacgtcaaactgg

SEQ ID NO: 515150 - DNA, 75 bp, synthetic construct
  source 1..75: mol_type = other DNA
atcccgtttgcaaggcttccgtgtttttgacgttgacggtagattgctgctctatatccttattgcagccggtgc

SEQ ID NO: 515151 - DNA, 75 bp, synthetic construct
  source 1..75: mol_type = other DNA
aattattacaaatatctgctgaagtacgggaagctttaaaaaataaaaaaccggttgtagctcttgaatcaacta

SEQ ID NO: 515152 - DNA, 75 bp, synthetic construct
  source 1..75: mol_type = other DNA
ttaagcaaagaagaaattgaattactgggtcgtgaagggcataacgtgaccaaagttagtcgtcgcgatttacct

SEQ ID NO: 515153 - DNA, 75 bp, synthetic construct
  source 1..75: mol_type = other DNA
tgaaactgggtatggaccgcgatatcattgttaataaagtgaaagcgcagggcgacatgcccgcctatggttaca

SEQ ID NO: 515154 - DNA, 75 bp, synthetic construct
  source 1..75: mol_type = other DNA
tcaggctacaagtgcaaaatttgaacaggaattaaaagcagctattggcttaattgaaccattagccgatgccat

SEQ ID NO: 515155 - DNA, 75 bp, synthetic construct
  source 1..75: mol_type = other DNA
ctgcaggctgctgctgaacggtatccacgatatggttttccagagttgtttcagattctgcgacggcagggatac

SEQ ID NO: 515156 - DNA, 75 bp, synthetic construct
  source 1..75: mol_type = other DNA
cgcaatgggctgaagagcatggggtgatgatggagtttattaaaccgggtaaaccaacgcagaatacctttatcg

SEQ ID NO: 515157 - DNA, 75 bp, synthetic construct
  source 1..75: mol_type = other DNA
ccccaggtcaccgttattcgccgcagacccatttttacctgtttctttctcccaaattggcggctatcccacctg

SEQ ID NO: 515158 - DNA, 75 bp, synthetic construct
  source 1..75: mol_type = other DNA
ggttgaggatgatgcagaaaacagaaattgtattctgcaatgtctggcatggattggggatgacgttgttgttga

SEQ ID NO: 515159 - DNA, 75 bp, synthetic construct
  source 1..75: mol_type = other DNA
ccttagatcaccgttatttgccgcagacccatttttacctgtttctttctcacaaattggcgggcatccaacctg

SEQ ID NO: 515160 - DNA, 75 bp, synthetic construct
  source 1..75: mol_type = other DNA
gcgcattcgttctttatgcgcaatatcgagacggtgagttttttgatgttgtccgcaatggtgaggagttcttcg

SEQ ID NO: 515161 - DNA, 75 bp, synthetic construct
  source 1..75: mol_type = other DNA
gaatctgaattgctaccatttttacatggcctttgatggcgaaactgcttttcttggctcttcaccggaacggtt

SEQ ID NO: 515162 - DNA, 75 bp, synthetic construct
  source 1..75: mol_type = other DNA
tggcggtaaagccacgctacggctgacgctattcagtgaaaattcccttcagcacgatgcagttaaggcaaaaga

SEQ ID NO: 515163 - DNA, 75 bp, synthetic construct
  source 1..75: mol_type = other DNA
gaaaaaatcgctcttgcatcaaacggattattttctgccgatgcaatattaactattggcagaaataaaactacc

SEQ ID NO: 515164 - DNA, 75 bp, synthetic construct
  source 1..75: mol_type = other DNA
gcgagaacaacactggccggacaaaacgggctggacgcaattaatcgaactggcaacgaaaaccatcgccgaagg

SEQ ID NO: 515165 - DNA, 75 bp, synthetic construct
  source 1..75: mol_type = other DNA
gatctggcgcgacagtttatcgcccgtcacgaaccgttcacccgagaatggtacgccggttctgcgggctatctc

SEQ ID NO: 515166 - DNA, 75 bp, synthetic construct
  source 1..75: mol_type = other DNA
ggcgcagcagttaggagagtggctgatggcggatgataaaaaccagcgcgagaacatgctggtggtggaagatat

SEQ ID NO: 515167 - DNA, 75 bp, synthetic construct
  source 1..75: mol_type = other DNA
ggggcaggtaatcattactcttttgaatggtaatccagacgggagtggctctggcggtggtggtggaactggagg

SEQ ID NO: 515168 - DNA, 75 bp, synthetic construct
  source 1..75: mol_type = other DNA
gctgaccgcgtagaagaaggattgttgcgacaaagtaatctcgaaaaatttgatgttgtcatgcgatgcgaataa

SEQ ID NO: 515169 - DNA, 75 bp, synthetic construct
  source 1..75: mol_type = other DNA
taaggttgatcgggatgctatttttaatgcgttagagtctgttaattatgatgagttatctaagaatttaacgaa

SEQ ID NO: 515170 - DNA, 75 bp, synthetic construct
  source 1..75: mol_type = other DNA
attaataaacaaatgctaattggcaaaaccccaaaaaccctagctgatcttttctttattgaacagaaacgtata

SEQ ID NO: 515171 - DNA, 75 bp, synthetic construct
  source 1..75: mol_type = other DNA
ctacttacagattgggtattgagtatcttggtgcaaaaaaggctggatggcggatccattggctggcgccaagca

SEQ ID NO: 515172 - DNA, 75 bp, synthetic construct
  source 1..75: mol_type = other DNA
cagaagaaaaagcccgtaaagaagcggaagctgcggaaaaggcttttcaggaagcagaacaacgacgtaaagaga

SEQ ID NO: 515173 - DNA, 75 bp, synthetic construct
  source 1..75: mol_type = other DNA
caatctgaactgctatcatttttacatggcctttgatggcgaaaatgcttttcttggctcaacgcctgagcggct

SEQ ID NO: 515174 - DNA, 75 bp, synthetic construct
  source 1..75: mol_type = other DNA
tgtcgtgtgtaataatggttgctggattgatggtgaaggaatatacaacattcacaccattcatgcatcttatca

SEQ ID NO: 515175 - DNA, 75 bp, synthetic construct
  source 1..75: mol_type = other DNA
atggaccagacgatttcacctgcaaccggcgactacgaacgccgtcggatttttacccttcataacgcggtttat

SEQ ID NO: 515176 - DNA, 75 bp, synthetic construct
  source 1..75: mol_type = other DNA
ctgcgactggcgacaccgcttggcagttactgggcggatgcgtcgctggggtcacgcctgcacgagctgaagcgg

SEQ ID NO: 515177 - DNA, 75 bp, synthetic construct
  source 1..75: mol_type = other DNA
cccggaaaccgggcagccagcgaaaccgtcgcgcagctgcttcacaaatcaaaagccgcacaggcgactgagtaa

SEQ ID NO: 515178 - DNA, 75 bp, synthetic construct
  source 1..75: mol_type = other DNA
ctgtttttttattgctggcacacaatgagtgtgcagcaaaaaaagggggactaacgcttgaacaaagaatggcat

SEQ ID NO: 515179 - DNA, 75 bp, synthetic construct
  source 1..75: mol_type = other DNA
agtttaatatagatgctgccagtaaacccggtcagttagtaatgataagttccggggcgaacagtgagtcagtga

SEQ ID NO: 515180 - DNA, 75 bp, synthetic construct
  source 1..75: mol_type = other DNA
agaacatgttggtggtggaagatatctgccaacgattacaggccgatacccagacgctggatgttttaccgccgc

SEQ ID NO: 515181 - DNA, 75 bp, synthetic construct
  source 1..75: mol_type = other DNA
ttcttggctcttcaccggaacggttatggcggcggcgtgacaaagcgctgcgtactgaagcgctggcgggaacgg

SEQ ID NO: 515182 - DNA, 75 bp, synthetic construct
  source 1..75: mol_type = other DNA
atcgaactggcaacgaaaaccatcgccgaaggtgagctcgacaaagtggtgcttgctcgggcaactgacctgcat

SEQ ID NO: 515183 - DNA, 75 bp, synthetic construct
  source 1..75: mol_type = other DNA
caatcttcaggcattgctggcatggctgcgagagcaaattgatcaacaaacctctccggatggcgcgccagataa

SEQ ID NO: 515184 - DNA, 75 bp, synthetic construct
  source 1..75: mol_type = other DNA
aagtccctgccagggttacatttaaccaccacgcgagaacaacactggccggacaaaacgggctggacgcgatta

SEQ ID NO: 515185 - DNA, 75 bp, synthetic construct
  source 1..75: mol_type = other DNA
caatgatggctgccagccgtcgactgaatcttaactgttaccatttctacatgggctttgatggcgaaagcgcat

SEQ ID NO: 515186 - DNA, 75 bp, synthetic construct
  source 1..75: mol_type = other DNA
gcgggctttttggcgcggtttgtgcaaatgagcttaaaaaaagaaatgtcaaaattcttgtgatagataaacgca

SEQ ID NO: 515187 - DNA, 75 bp, synthetic construct
  source 1..75: mol_type = other DNA
gtggggcgttttgtcccgacgttgattctggtgatgatgcttatcgatcttggagcgtttgttggcacacaaggc

SEQ ID NO: 515188 - DNA, 75 bp, synthetic construct
  source 1..75: mol_type = other DNA
ctgtttattttggtggtagactcggagagtataaatattatgatatgcatcaagtgataaaagcagctttaaatt

SEQ ID NO: 515189 - DNA, 75 bp, synthetic construct
  source 1..75: mol_type = other DNA
acatttgacaataactatttcacagatcgcttccagggtatccctgttggtggatacactaaaatggttgagcgt

SEQ ID NO: 515190 - DNA, 75 bp, synthetic construct
  source 1..75: mol_type = other DNA
ctaattatcaggggaatgcagtggttaattacactgaaaaagaaataccatttacgcgaattatagaacataagc

SEQ ID NO: 515191 - DNA, 75 bp, synthetic construct
  source 1..75: mol_type = other DNA
tttaccatttaacatgaatactttttatcagttgtggggagtgaaaaaaccttcagaagctgccgctattataga

SEQ ID NO: 515192 - DNA, 75 bp, synthetic construct
  source 1..75: mol_type = other DNA
ctatcagttgaccgcagaagattttggcctgacgccctaccaccaggaacaactggcaggcggaacgccggaaga

SEQ ID NO: 515193 - DNA, 75 bp, synthetic construct
  source 1..75: mol_type = other DNA
ctggggccattgattaacccggcgcatccgccgctggcgttaataggtgtttatagcccggaactggtactgcct

SEQ ID NO: 515194 - DNA, 75 bp, synthetic construct
  source 1..75: mol_type = other DNA
ccagttccatccggaatccattctcaccacccagggcgctcgcttgctggaacaaacgctggcctgggcgcagca

SEQ ID NO: 515195 - DNA, 75 bp, synthetic construct
  source 1..75: mol_type = other DNA
agtcagccgtcagcaactggaagatggctccctgctcacgctgaatacccaaagcgcggcggatgtgcgttttga

SEQ ID NO: 515196 - DNA, 75 bp, synthetic construct
  source 1..75: mol_type = other DNA
ctaaagaattacccgcatctattattactcgcctacccgtgagaatgacttgggataataactatttctttgata

SEQ ID NO: 515197 - DNA, 75 bp, synthetic construct
  source 1..75: mol_type = other DNA
atgcgatgccggttcgccagcaactgaaaacccgcactctgttcaacgtgctgggaccattgattaacccggcgc

SEQ ID NO: 515198 - DNA, 75 bp, synthetic construct
  source 1..75: mol_type = other DNA
cttagcacataaggaagagtataatagttttagcggcaaaattatatacacaggtcctattgacgagtattttaa

SEQ ID NO: 515199 - DNA, 75 bp, synthetic construct
  source 1..75: mol_type = other DNA
ctttgccgatgatgaagacattttaatgctctacggcgacgtgccgctgatctctgtcgaaacactccagcgtct

SEQ ID NO: 515200 - DNA, 75 bp, synthetic construct
  source 1..75: mol_type = other DNA
aaaacaacttacgttgttatttggcatgaaagcgccggggctgggacgactgtgttttaccctggaagataaagg

SEQ ID NO: 515201 - DNA, 75 bp, synthetic construct
  source 1..75: mol_type = other DNA
gcgggtagtgaatcaaatcggcggtaaagaacgttacttctttggcaatattttgtggcagacccgggcgttgat

SEQ ID NO: 515202 - DNA, 75 bp, synthetic construct
  source 1..75: mol_type = other DNA
tgctgatgactgacgatggtcagtggtcgcaccgcattacttctccacgtcatcattgcgagaaaacctacctgg

SEQ ID NO: 515203 - DNA, 75 bp, synthetic construct
  source 1..75: mol_type = other DNA
gtcgcaccgcattacttctccgcgccatcattgcgagaagacctatctggtgacgctggaatcacccgtagctga

SEQ ID NO: 515204 - DNA, 75 bp, synthetic construct
  source 1..75: mol_type = other DNA
aggaatgtataaatatttcgatatgcataatgtaattgctgaagcattaagttgtgcaaataaaaatattaaata

SEQ ID NO: 515205 - DNA, 75 bp, synthetic construct
  source 1..75: mol_type = other DNA
agcggtaagcgccgctggttgatccccatccccctccccacccgctggatttcggtatggtttctcaatgtgatt

SEQ ID NO: 515206 - DNA, 75 bp, synthetic construct
  source 1..75: mol_type = other DNA
gcaactggcaaacgtcagttgccataaagtcgatctcagctggccggataaccttccggccctgttgcaggatat

SEQ ID NO: 515207 - DNA, 75 bp, synthetic construct
  source 1..75: mol_type = other DNA
gtgccagtggctacattggtcagcatctggtgcgcacactcagccagcaagggcatcagatcctggcggcggcac

SEQ ID NO: 515208 - DNA, 75 bp, synthetic construct
  source 1..75: mol_type = other DNA
ttgatgatccctgcacatctgtttatttttcgcggtatggcaaaacaaattgccagacttgcagaacaaagcaca

SEQ ID NO: 515209 - DNA, 75 bp, synthetic construct
  source 1..75: mol_type = other DNA
gcaggttcagcggcgttcgaagtcatgcgcgatatggtgtacaacctgccggtgttaaccccgccgcgttgggtc

SEQ ID NO: 515210 - DNA, 75 bp, synthetic construct
  source 1..75: mol_type = other DNA
ccggaaaaacaacttacgttgttatttggcatgaaagcgccggggctgggacgactgtgttttagcctggaagat

SEQ ID NO: 515211 - DNA, 75 bp, synthetic construct
  source 1..75: mol_type = other DNA
cagtgcttttgtcgctgctgcttgtggactgaaagttgcgaaacacggcaaccgcagcgtttccagtaaatccgg

SEQ ID NO: 515212 - DNA, 75 bp, synthetic construct
  source 1..75: mol_type = other DNA
acaaaatgcccagaccgcaattgaagttgaagaaactattcgtaaacagggcgctgtacctgccactatcgccat

SEQ ID NO: 515213 - DNA, 75 bp, synthetic construct
  source 1..75: mol_type = other DNA
gtagaagaaactattcgtcaacagggagccgtaccagccactatcgctattattggcggtgtgatgaaagtaggc

SEQ ID NO: 515214 - DNA, 75 bp, synthetic construct
  source 1..75: mol_type = other DNA
ggcttcaacgatgattattgcggcgcttgccggaattaaagtatttgccaccgggggaattggtggtgtgcatcg

SEQ ID NO: 515215 - DNA, 75 bp, synthetic construct
  source 1..75: mol_type = other DNA
gattattgcggcgattgccggaattaaagtatttgccactgggggaattggtggtgtgcatcgcggggcggaaca

SEQ ID NO: 515216 - DNA, 75 bp, synthetic construct
  source 1..75: mol_type = other DNA
cgaatccgatcccggaacagtttgcgatgccggaggaatctatcaatgcagccatagatcaagccgtcgccgaag

SEQ ID NO: 515217 - DNA, 75 bp, synthetic construct
  source 1..75: mol_type = other DNA
aacatccagctggtgttcaacaacgccattctggcgagcgaaattgccaaagaataccagcgtctcgcgggttaa

SEQ ID NO: 515218 - DNA, 75 bp, synthetic construct
  source 1..75: mol_type = other DNA
tcgacagcgccagtgaaattgcccgtgcaatggcggtgaaatggcaaagcgggctgaacggtggcctcgtggtag

SEQ ID NO: 515219 - DNA, 75 bp, synthetic construct
  source 1..75: mol_type = other DNA
cgcgttgctgagctgaccggcggtgacagcctgaaatccaacatccagctggtgttcaacaacgccattctggcg

SEQ ID NO: 515220 - DNA, 75 bp, synthetic construct
  source 1..75: mol_type = other DNA
caaagttagtcgtcgcgatttaccttttgttgttgccgccggaaaaaatggcgcaaccactgtggcttcaacgat

SEQ ID NO: 515221 - DNA, 75 bp, synthetic construct
  source 1..75: mol_type = other DNA
agttattacagatttccccggaagtgcaggatgctttaaaaaacaaaaaaccggttgtggcgctggagtcgacca

SEQ ID NO: 515222 - DNA, 75 bp, synthetic construct
  source 1..75: mol_type = other DNA
ccgaagagcagggcgttattggtaaagaaagtacaccgttcctgctggcgcgcgttgctgagctgaccggcggtg

SEQ ID NO: 515223 - DNA, 75 bp, synthetic construct
  source 1..75: mol_type = other DNA
gccatagatcaagccgtcgccgaagccgaagagcagggcgttattggtaaagaaagtacaccgttcctgctggcg

SEQ ID NO: 515224 - DNA, 75 bp, synthetic construct
  source 1..75: mol_type = other DNA
tttttcgtaaacagaaaactgtaagcaaatcgggaaaatggctcgcccgcctggcagtaagctgtctcgttctcg

SEQ ID NO: 515225 - DNA, 75 bp, synthetic construct
  source 1..75: mol_type = other DNA
ctggcgcatttcaccctcgataccgtttccggtgaaaccgaatggcgtagctcgtcgatgtctacccgcacggcg

SEQ ID NO: 515226 - DNA, 75 bp, synthetic construct
  source 1..75: mol_type = other DNA
aaaccgaatggcgtagctcgtcgatgtctacccgcacggcgcaaaattctgttaccgatttactgtttgttggcc

SEQ ID NO: 515227 - DNA, 75 bp, synthetic construct
  source 1..75: mol_type = other DNA
gcgctgagctacgagcgcgttctggcgttcgcgcagagcttcattggtcgcgtattcctgttcctgatgatcgtt

SEQ ID NO: 515228 - DNA, 75 bp, synthetic construct
  source 1..75: mol_type = other DNA
ataattatcaaggaaatgctgttataaattatactgaatcacatgtaccatacacaagaataatagaacacaaac

SEQ ID NO: 515229 - DNA, 75 bp, synthetic construct
  source 1..75: mol_type = other DNA
cttgtgcaactcaatgatgtcgagtcattgaaaatgattcagcgcagcagtgagctaacacaacgcctgaaatga

SEQ ID NO: 515230 - DNA, 75 bp, synthetic construct
  source 1..75: mol_type = other DNA
agccgacacgcacgtacaagccaccgtttcccaggcgctgaaaaaaggcgatgtacaaatcgctatctcttacag

SEQ ID NO: 515231 - DNA, 75 bp, synthetic construct
  source 1..75: mol_type = other DNA
cgatctgacccgcgatactggcggtttctactgccgtgaggttgtgaaacgaatgtttgaagtgtggtgtcattg

SEQ ID NO: 515232 - DNA, 75 bp, synthetic construct
  source 1..75: mol_type = other DNA
cgttgctctatcatttacaaacacttctgctggaacaccctgaactgcagttaatggaggcgaactatagccaga

SEQ ID NO: 515233 - DNA, 75 bp, synthetic construct
  source 1..75: mol_type = other DNA
gtgaattaacacagtcctggcttccgatggaaaaaacaggaaaagatccgctcagtggtgtatggacagtaagga

SEQ ID NO: 515234 - DNA, 75 bp, synthetic construct
  source 1..75: mol_type = other DNA
ggggctgtttccgggtgatgcactgagctacgagcgcgttctggcgttcgcgcagagcttcattggtcgcgtatt

SEQ ID NO: 515235 - DNA, 75 bp, synthetic construct
  source 1..75: mol_type = other DNA
tgcctgcgatgacccagtacattgacggtactggcccgctgtggaaaggtgctctgttcccgttcttgttcatta

SEQ ID NO: 515236 - DNA, 75 bp, synthetic construct
  source 1..75: mol_type = other DNA
ggatgacattgcaacctatcgtataccgctacagattgcactaaacaaggctaaacagattcagcaagagatgga

SEQ ID NO: 515237 - DNA, 75 bp, synthetic construct
  source 1..75: mol_type = other DNA
cagaaactggtgctcaacatgctctccaccgggctgatgattaaatccggcaaagtgttcggcaacctgatggtc

SEQ ID NO: 515238 - DNA, 75 bp, synthetic construct
  source 1..75: mol_type = other DNA
ctcccagggcggtgtacgcggtggtgcagctacgttgttctacccaatatggcatctggaagttgaaagcctgct

SEQ ID NO: 515239 - DNA, 75 bp, synthetic construct
  source 1..75: mol_type = other DNA
attcagaacgttgaccactgcaatacccatagcccgtttgatccggccatcgcgccagtgcgtcagtctaacctg

SEQ ID NO: 515240 - DNA, 75 bp, synthetic construct
  source 1..75: mol_type = other DNA
catggcttaacgcgcggggcgcttctcgattatcacagccgctataaactcgtctttctggcgcattcccagccg

SEQ ID NO: 515241 - DNA, 75 bp, synthetic construct
  source 1..75: mol_type = other DNA
gccgagtttgccattacaccgattgtaggtgccgaagtggtcactggttcttcgcgaatgaaagcaggcacagcg

SEQ ID NO: 515242 - DNA, 75 bp, synthetic construct
  source 1..75: mol_type = other DNA
tgccgtcggacggatcgtcgcagtcttcacgccctatggcgttgcggcattattaacacattatgggtcgattac

SEQ ID NO: 515243 - DNA, 75 bp, synthetic construct
  source 1..75: mol_type = other DNA
cggtggaaggcgcggaagatagccgggaaggcggtgttaatgatctgaaaaatatcggcttaaccgcgcaggatg

SEQ ID NO: 515244 - DNA, 75 bp, synthetic construct
  source 1..75: mol_type = other DNA
tctgctggcgatgttcgttgcggtgatcacgccagcgctattaatctgccaggcgctgggtttaccggcacaaga

SEQ ID NO: 515245 - DNA, 75 bp, synthetic construct
  source 1..75: mol_type = other DNA
atggagtctgctgctgccgctgatgctggtctttatgatcacttcgctggaaaccattggcgatatcacggcgac

SEQ ID NO: 515246 - DNA, 75 bp, synthetic construct
  source 1..75: mol_type = other DNA
gcagcgccaacaacctgacgcataaaaccttcgaagcgattcagtattacctgctgaaagcgtctaatgagctgg

SEQ ID NO: 515247 - DNA, 75 bp, synthetic construct
  source 1..75: mol_type = other DNA
gaaggcaaccgcgtgcgccatatggactacggggtacagatcaacaaactgatgtatacccgcctgctgaaaggt

SEQ ID NO: 515248 - DNA, 75 bp, synthetic construct
  source 1..75: mol_type = other DNA
ggcggtgaatatgccattcagcacgcggtggaaggcgcagaagatagccgggaaggtggtgttaacgatctaaaa

SEQ ID NO: 515249 - DNA, 75 bp, synthetic construct
  source 1..75: mol_type = other DNA
tcgattatcacagccgctataaactcgtctttctggcgcattcccagccggaataccgcaaacttggcccgttcg

SEQ ID NO: 515250 - DNA, 75 bp, synthetic construct
  source 1..75: mol_type = other DNA
atttactgatgaactcagtcgtttgctttttatttgccttggcctttttggtggtgcctataccgcggggcagaa

SEQ ID NO: 515251 - DNA, 75 bp, synthetic construct
  source 1..75: mol_type = other DNA
gtcagacacaaatcggcagaaaaagtaaaagcgttgctggccgaatggtatcgggaacgtgccagagatgtattt

SEQ ID NO: 515252 - DNA, 75 bp, synthetic construct
  source 1..75: mol_type = other DNA
ttcagagaacaacagacgcatatcgtcccgcgccagtacgtgagtggcgaaagccattactatcttggtaagcaa

SEQ ID NO: 515253 - DNA, 75 bp, synthetic construct
  source 1..75: mol_type = other DNA
tttttggtggggcatacaccgcagggcaaaaccggcatctggcgattgacctgctacctatgatgctgaaaggaa

SEQ ID NO: 515254 - DNA, 75 bp, synthetic construct
  source 1..75: mol_type = other DNA
attcattgctttccacattgaacattaccattttggcaattattgtgatgtgcgttacatggcaagtagtagcac

SEQ ID NO: 515255 - DNA, 75 bp, synthetic construct
  source 1..75: mol_type = other DNA
atcattatggtatatggtggtgggctattaacgatggatacattcgattcaggtcagacctcgcccgctttaggc

SEQ ID NO: 515256 - DNA, 75 bp, synthetic construct
  source 1..75: mol_type = other DNA
gggatccttggttccgcattcttttatgcctacgcgattgggcaaagtccctggggaacacttaccgatatatta

SEQ ID NO: 515257 - DNA, 75 bp, synthetic construct
  source 1..75: mol_type = other DNA
atgaatcaacaactttttgatgaaagcaccctaatccgtatcttcgcgcttcacgagttacaccgtcttaaagag

SEQ ID NO: 515258 - DNA, 75 bp, synthetic construct
  source 1..75: mol_type = other DNA
gcaccctaatccgtatcttcgcccttcatgagttacatcgactgaaagaacatggcttaacgcgcggggcgctca

SEQ ID NO: 515259 - DNA, 75 bp, synthetic construct
  source 1..75: mol_type = other DNA
atggctggttaaggcatcctcagaatgtatcgattatgtcttgctacatgagttatgccatgtggctgagcacaa

SEQ ID NO: 515260 - DNA, 75 bp, synthetic construct
  source 1..75: mol_type = other DNA
cctgaaacaccggagcacgaggtattgtctgcgctgaaaaaaagagggcgctggatataccagcaactgcgtgat

SEQ ID NO: 515261 - DNA, 75 bp, synthetic construct
  source 1..75: mol_type = other DNA
ctctctctttgcttttgcgggtggctaccatgccgctatcatcattcgagtattaatgggatttgttggggcggc

SEQ ID NO: 515262 - DNA, 75 bp, synthetic construct
  source 1..75: mol_type = other DNA
atgtttttagtatcattgttgagacgtattgcgtttagttactacgattataaagcttataatttcaatattgaa

SEQ ID NO: 515263 - DNA, 75 bp, synthetic construct
  source 1..75: mol_type = other DNA
tgaagatgatcgcaccggagcgtaaggagcgcttcacgtcagtcgatgagttcttgactgccatggctgaggtca

SEQ ID NO: 515264 - DNA, 75 bp, synthetic construct
  source 1..75: mol_type = other DNA
aagggatatggggtggaaggagatgctgccatatgaaagcatcgatcccttcttggtctccacacagcgggcagg

SEQ ID NO: 515265 - DNA, 75 bp, synthetic construct
  source 1..75: mol_type = other DNA
aacctgcaaacgaatctgaacgcaaggccatcggtttccttcgggatcatcttcctgatggctggttgatcttcc

SEQ ID NO: 515266 - DNA, 75 bp, synthetic construct
  source 1..75: mol_type = other DNA
agcgatatagatcatggggtggctatggctattgtcgattttgtttcagttagaaattggtcatatgaggattac

SEQ ID NO: 515267 - DNA, 75 bp, synthetic construct
  source 1..75: mol_type = other DNA
ccttctgccgaatggagcgtgaagtgaaatgccaacagatgtggccagtggtccaccccctgctgaacaaaacgc

SEQ ID NO: 515268 - DNA, 75 bp, synthetic construct
  source 1..75: mol_type = other DNA
gtggtatctaggctgggcttcgagccgaccaagcccaatagcaacccctttgtcacccatctgctgaccctctac

SEQ ID NO: 515269 - DNA, 75 bp, synthetic construct
  source 1..75: mol_type = other DNA
gtctgttaaaccgcagttttgaagtgggtctggcagaagtcagccagtatgaaggggttgagctgctggcctatt

SEQ ID NO: 515270 - DNA, 75 bp, synthetic construct
  source 1..75: mol_type = other DNA
gctggcctttgtacgccgccaaccgtttgttgccagcacgctgctgggcgcaacgacgatggaacagttgaaaac

SEQ ID NO: 515271 - DNA, 75 bp, synthetic construct
  source 1..75: mol_type = other DNA
tgtctggagtgaaacatggaaaatccggaagcaattagatactccggtacgtgaaaaggacgaaaatgaattctt

SEQ ID NO: 515272 - DNA, 75 bp, synthetic construct
  source 1..75: mol_type = other DNA
agattgataacatgggaaataatattaagaaagttctttttttcaatccgttaaagaaaattatgatccgtggga

SEQ ID NO: 515273 - DNA, 75 bp, synthetic construct
  source 1..75: mol_type = other DNA
tttgttgccagcactctgctgggcgcaaccacgatggagcagctgaaaactaacatcgaaagtttgcatctggag

SEQ ID NO: 515274 - DNA, 75 bp, synthetic construct
  source 1..75: mol_type = other DNA
taacgtcgaaagtttgcatctggagttgagcgaagacgtattagctgaaattgaagcggtgcatcaggtttatac

SEQ ID NO: 515275 - DNA, 75 bp, synthetic construct
  source 1..75: mol_type = other DNA
actttacaggcatggttatgcatgttctgcaactctgctccgtagagttctggcagaggacagtatcagtcgttc

SEQ ID NO: 515276 - DNA, 75 bp, synthetic construct
  source 1..75: mol_type = other DNA
gtgcatctgttgtcttctggctgtcctgagcatttgcctcaacggtgcatatggtgttgacgcgacaggactgtt

SEQ ID NO: 515277 - DNA, 75 bp, synthetic construct
  source 1..75: mol_type = other DNA
atgcgtgaagcgcaattcttgcgccggagccagttcgatgaaattcagtatggcagtgctgtactcaagcgcaac

SEQ ID NO: 515278 - DNA, 75 bp, synthetic construct
  source 1..75: mol_type = other DNA
cggaatttaatcgtcattacatgcgcaataacggaattgtggtttacctttgcgcgccggtatcggtgttggtta

SEQ ID NO: 515279 - DNA, 75 bp, synthetic construct
  source 1..75: mol_type = other DNA
ccgctactacgatccccccctcgcctttttggtatgcgcaccaatgtgtttcgccggatgcatcgcaaaattgtg

SEQ ID NO: 515280 - DNA, 75 bp, synthetic construct
  source 1..75: mol_type = other DNA
caccggatctcggtctggatgataacggttcgctgctgctggattttggcccacggcagttcaccgtcagctttg

SEQ ID NO: 515281 - DNA, 75 bp, synthetic construct
  source 1..75: mol_type = other DNA
aaagatattgacgggctgtacagcgccatgagctctgaatacaagcgtctgccgcatctgtataaccagctgtgg

SEQ ID NO: 515282 - DNA, 75 bp, synthetic construct
  source 1..75: mol_type = other DNA
cgaaccacaggatggaggctggatcggatggatgatcaaacctttgggtcgctggtcgttaatcatggaaatcga

SEQ ID NO: 515283 - DNA, 75 bp, synthetic construct
  source 1..75: mol_type = other DNA
accggatctcggtctggatgataacggttcgctgctgctggattttggcccacggcagttcaccgtcagctttga

SEQ ID NO: 515284 - DNA, 75 bp, synthetic construct
  source 1..75: mol_type = other DNA
tggcggagcttgaagatcggttagcaccggatctcggtctggatgataacggttcgctgctgctggattttggcc

SEQ ID NO: 515285 - DNA, 75 bp, synthetic construct
  source 1..75: mol_type = other DNA
aaataacgggatcgtggtttatttgtgtgcgccagtatcagtcctggttaaccgactgcaagctgcaccggaaga

SEQ ID NO: 515286 - DNA, 75 bp, synthetic construct
  source 1..75: mol_type = other DNA
aacgccagcgaactgacccgctgggcaggcagaaaatgcccgagcggccgggtcatggggctggcaaataaaggc

SEQ ID NO: 515287 - DNA, 75 bp, synthetic construct
  source 1..75: mol_type = other DNA
cagcttaacggcattgcccagaaactgaaattcaaagcattacaggagcgggcgaaagagaaaattgccgacatt

SEQ ID NO: 515288 - DNA, 75 bp, synthetic construct
  source 1..75: mol_type = other DNA
tcaaaacagcgaactgatttatcatcttgaagatcgtccgccgcttcctcaaaccttatttgccgcctgtcagca

SEQ ID NO: 515289 - DNA, 75 bp, synthetic construct
  source 1..75: mol_type = other DNA
gttgggctaacatccattggtggcggttatgcggccatgagcgataacacctttggtgcaccgaaaaatctgcta

SEQ ID NO: 515290 - DNA, 75 bp, synthetic construct
  source 1..75: mol_type = other DNA
agatgtttatacgtgcgaaattgtcggctacgccatgggagagcacatgacaaaagagctgacaggtaaagccct

SEQ ID NO: 515291 - DNA, 75 bp, synthetic construct
  source 1..75: mol_type = other DNA
cattgaagcgaaaagcccggcgggtcacggcaagaaagggccaaccattgacgaagggatatcccagagtatccg

SEQ ID NO: 515292 - DNA, 75 bp, synthetic construct
  source 1..75: mol_type = other DNA
acccgcttctttaccctgttcgacaaaaagaacggcaaaattgtcgcccgctatcagcaggtattcggtattaaa

SEQ ID NO: 515293 - DNA, 75 bp, synthetic construct
  source 1..75: mol_type = other DNA
taatacgggaatacattgagattttctacaatcgtcagcgtcgtcactctcgtctggggaatatctccccggcag

SEQ ID NO: 515294 - DNA, 75 bp, synthetic construct
  source 1..75: mol_type = other DNA
gaaggatatgattaaaaattacatagagcaaagaaaaactggaaaaaatgcggtaaatcttgggcagttatattt

SEQ ID NO: 515295 - DNA, 75 bp, synthetic construct
  source 1..75: mol_type = other DNA
gcgtggaacgcctatgaagcaagaaaaagtgcaaaggcagcactggaggccgttaggataactaccgattcattg

SEQ ID NO: 515296 - DNA, 75 bp, synthetic construct
  source 1..75: mol_type = other DNA
atgagctgcgtctggcaaagtgggagcatgttgacctttgatggcaagaccttgaaagatgatcgactgaggacc

SEQ ID NO: 515297 - DNA, 75 bp, synthetic construct
  source 1..75: mol_type = other DNA
attgtgaaatcatcccagtccactgctcaggttgaaggtgcgtaccgcctgatacgtaacccgtctgtgtccccg

SEQ ID NO: 515298 - DNA, 75 bp, synthetic construct
  source 1..75: mol_type = other DNA
tgtgccttccgaaaaaaacaggttaaatgacaggaatgatgtaatagctatggctgaagattacatcgagaaaag

SEQ ID NO: 515299 - DNA, 75 bp, synthetic construct
  source 1..75: mol_type = other DNA
tggttcgtcgtccgcaagttgcttcatcggtattaatgaactaccaaacaccattatctggtttaattgatgatt

SEQ ID NO: 515300 - DNA, 75 bp, synthetic construct
  source 1..75: mol_type = other DNA
ggatggcccggaagcggttgatttagtggtgttgctggcgattccccccaatgaagctgtctcttatacacaaat

SEQ ID NO: 515301 - DNA, 75 bp, synthetic construct
  source 1..75: mol_type = other DNA
tgatgattgctgtttcggcacattaccggaatttatcgaattgctgacctgttgcggctatcaggtcattcaggg

SEQ ID NO: 515302 - DNA, 75 bp, synthetic construct
  source 1..75: mol_type = other DNA
atggtgagtcactacgaaaacggcgtcgaggtatcccgcgaacggctgcgtgatgattgctgtttcggaacactg

SEQ ID NO: 515303 - DNA, 75 bp, synthetic construct
  source 1..75: mol_type = other DNA
tccaggaagaatacagcgccaaaattccggcactgacgttactgaccagcctcggctggacgtttttatctccga

SEQ ID NO: 515304 - DNA, 75 bp, synthetic construct
  source 1..75: mol_type = other DNA
tgatgattgctgtttcggcacattgccggaatttatcgaattgctgaccgattgcggttatcaggtaattcagag

SEQ ID NO: 515305 - DNA, 75 bp, synthetic construct
  source 1..75: mol_type = other DNA
tgatgatctgcattttaccggacgcatggtgagtcactacgaaaacggcgttgaagtatcccgagaacggctgcg

SEQ ID NO: 515306 - DNA, 75 bp, synthetic construct
  source 1..75: mol_type = other DNA
agtcagagggtgaaatgattcttagtattgcgtcggactatgcggaatatgtggcagagacgcgttactgtagtg

SEQ ID NO: 515307 - DNA, 75 bp, synthetic construct
  source 1..75: mol_type = other DNA
caggtaatcctgcctttactcaatgaatttgaggaagtgattagctggcagggagtgcgtgctcaggaatcgcca

SEQ ID NO: 515308 - DNA, 75 bp, synthetic construct
  source 1..75: mol_type = other DNA
gtgcgctggaaattctcaaaccaacgggtatcccgtttcttgatttgtgtctgtggaaggggcgtttcccatcaa

SEQ ID NO: 515309 - DNA, 75 bp, synthetic construct
  source 1..75: mol_type = other DNA
atgacaaaagagctgacaggtaaagccctgtttatggcgctcaggaaccagcgctcacctaccgggctaatccac

SEQ ID NO: 515310 - DNA, 75 bp, synthetic construct
  source 1..75: mol_type = other DNA
caaccaaggtccgtttctgcacgtttgagctgaaacatgagccagtgcggacgcaggtgattgtcccggctctgg

SEQ ID NO: 515311 - DNA, 75 bp, synthetic construct
  source 1..75: mol_type = other DNA
ctcggggcggtatgcagtttgacctgctggcaggcatgaatgataaagcggtgtgcagcagtgtatatgcaggag

SEQ ID NO: 515312 - DNA, 75 bp, synthetic construct
  source 1..75: mol_type = other DNA
tcgctgccagcactatcaacaccatcagtatttcaggtggcaaagatagtcttgcacaatggctaagagctattg

SEQ ID NO: 515313 - DNA, 75 bp, synthetic construct
  source 1..75: mol_type = other DNA
gactcaggactatcgcgacctttgatggcaagaccttgaaagatgatcgactgaggaccatcgcgacgtttgatg

SEQ ID NO: 515314 - DNA, 75 bp, synthetic construct
  source 1..75: mol_type = other DNA
gctacataaataatcctttgggcgtgaaaaccgatctggaatctaaagacgcggaaggaaaagtgaaggttgtta

SEQ ID NO: 515315 - DNA, 75 bp, synthetic construct
  source 1..75: mol_type = other DNA
atggcggcggtcgatgccaacacgcaccaggaagtgggcatcatgcagatcgtcaacctgtttgaagatgaagaa

SEQ ID NO: 515316 - DNA, 75 bp, synthetic construct
  source 1..75: mol_type = other DNA
gctaaagcgcgacagattgcaggaaagttaatgaatgagcctgcgcttcacgcgtggcgctcgcagcttatagcg

SEQ ID NO: 515317 - DNA, 75 bp, synthetic construct
  source 1..75: mol_type = other DNA
gttgattaatgagaattacccgcatctcaatgaaggaaaagataatcgcggtcttttatccttatcgcaagtgta

SEQ ID NO: 515318 - DNA, 75 bp, synthetic construct
  source 1..75: mol_type = other DNA
tacggcggatatgattccgccgttattattccctcggctcaagaatttatacaaccgccgcgccgagcgtctgcg

SEQ ID NO: 515319 - DNA, 75 bp, synthetic construct
  source 1..75: mol_type = other DNA
cacatgtccgcagcaaaatgtccggtttcacaaaaacttattgtgaccccaagacaggcgtttccatcattactg

SEQ ID NO: 515320 - DNA, 75 bp, synthetic construct
  source 1..75: mol_type = other DNA
tcctcagtaaggcgctgattctacatgacagcctgaagcagtgtcgtatcgttgtcgtgacagaccgcatagatc

SEQ ID NO: 515321 - DNA, 75 bp, synthetic construct
  source 1..75: mol_type = other DNA
atgaatcagctgtacacgccaaaattccaggaagaatacagtgccaaaattcctgcgctgacgttactgaccagc

SEQ ID NO: 515322 - DNA, 75 bp, synthetic construct
  source 1..75: mol_type = other DNA
tattgaagcgaaaagcccggcaggccacggcaagaaaggaccaaccattgacgaagggatatcccagagtatccg

SEQ ID NO: 515323 - DNA, 75 bp, synthetic construct
  source 1..75: mol_type = other DNA
tacaacaggcaatgagccgtctggtcaaagaaggcctgctggtccgggttgaacgcggtttctactcccggccaa

SEQ ID NO: 515324 - DNA, 75 bp, synthetic construct
  source 1..75: mol_type = other DNA
atggcggaagtgtacctgactcagccgatacagattgtggcgggcagccaggctgggagcaaatggatgagtgac

SEQ ID NO: 515325 - DNA, 75 bp, synthetic construct
  source 1..75: mol_type = other DNA
caccacgtcggcgttttctggcacaactcggcggcttaaccgtcgccgggatgctggggccgtcattgttaacgc

SEQ ID NO: 515326 - DNA, 75 bp, synthetic construct
  source 1..75: mol_type = other DNA
gataaaagttttattcagcaacaaatcacgcatcgctccttcgaaccgtttattcgtgcgatccaggcgcaaatt

SEQ ID NO: 515327 - DNA, 75 bp, synthetic construct
  source 1..75: mol_type = other DNA
cgctgatctatctcggttcggcggcgctgattgtacccattgcggtacgcctcggtctgggctcggtccttggtt

SEQ ID NO: 515328 - DNA, 75 bp, synthetic construct
  source 1..75: mol_type = other DNA
cggcgttaaaagtggcgggtgcgctggtgctggtggtattgctggggcgctatgtcacgcgtccggcgctgcgtt

SEQ ID NO: 515329 - DNA, 75 bp, synthetic construct
  source 1..75: mol_type = other DNA
gtttattatcggcctcgaactcgatccacaaaggctgtggaagctgcgtgcggcagtgttcggcggtggcgcatt

SEQ ID NO: 515330 - DNA, 75 bp, synthetic construct
  source 1..75: mol_type = other DNA
gcattgcagatggtgatttgcggcggcctgctggggctgttctgcatgttacttgggctgcgctggcaggtcgcg

SEQ ID NO: 515331 - DNA, 75 bp, synthetic construct
  source 1..75: mol_type = other DNA
actgcgggctgaactggctgccaccgtttgccatgcactgcacctttatttgtgacgacgaaaccctcgaaggca

SEQ ID NO: 515332 - DNA, 75 bp, synthetic construct
  source 1..75: mol_type = other DNA
tatgtcacgcgtccggcgctgcgttttgttgcccgctctggcttgcgggaagtgtttagtgccgtggcgttattc

SEQ ID NO: 515333 - DNA, 75 bp, synthetic construct
  source 1..75: mol_type = other DNA
gaatcacaccgtatggttttcatgccctacaaggatgcttatggcctgcagttcccgtaagtcaggtaacaacgc

SEQ ID NO: 515334 - DNA, 75 bp, synthetic construct
  source 1..75: mol_type = other DNA
ttggagaatctttatcattctgattgctatttcctgccgataagagataaccagcaagtccttgtcggcgttgag

SEQ ID NO: 515335 - DNA, 75 bp, synthetic construct
  source 1..75: mol_type = other DNA
gatttccatgctctccagggatgcctgtggcctgccgttcctataaatcagataacgacgttggttcagcgataa

SEQ ID NO: 515336 - DNA, 75 bp, synthetic construct
  source 1..75: mol_type = other DNA
aagtacactgcgcctggagccggccagttttgtggagcgccgtttacgtcagctgcattcggatgtgctgtattc

SEQ ID NO: 515337 - DNA, 75 bp, synthetic construct
  source 1..75: mol_type = other DNA
cgagctggcagaaaataatccgctgggtgattacctgcgctttgctgcgcttatcgcccacgcccaggaagtggt

SEQ ID NO: 515338 - DNA, 75 bp, synthetic construct
  source 1..75: mol_type = other DNA
tgtaaaagtcatgcctgaatctataccggcaggttatgaagttctacaagaactggatgagttagattctttatt

SEQ ID NO: 515339 - DNA, 75 bp, synthetic construct
  source 1..75: mol_type = other DNA
tgatacagcggtgctcgaaggcacggatgaagagtcagcgcgctcgttagccagccgttggcagaaagtggatga

SEQ ID NO: 515340 - DNA, 75 bp, synthetic construct
  source 1..75: mol_type = other DNA
cgatacggcggtgctggaaggcatcgatgaagagtctgcccgtctgttggcctgtcgttggcagaaagtggatga

SEQ ID NO: 515341 - DNA, 75 bp, synthetic construct
  source 1..75: mol_type = other DNA
gcgaaaatggctggctggagatcccgatcgaccagctggtgcccggcgatattataaaactggcggcgggggata

SEQ ID NO: 515342 - DNA, 75 bp, synthetic construct
  source 1..75: mol_type = other DNA
tcgagtcgctgcgcgctattccgtggatttttgcctggacgcaaaaccgcctgatgctccccgcctggctgggtg

SEQ ID NO: 515343 - DNA, 75 bp, synthetic construct
  source 1..75: mol_type = other DNA
ctaccgtggttatgtgcgtgaaaacaaagactttgttccatacttccgctccgccacgccggaacaggaactggg

SEQ ID NO: 515344 - DNA, 75 bp, synthetic construct
  source 1..75: mol_type = other DNA
aagttacttcccgtggctgattgcgattctggcaggatatatgacgttaacgcagttggtgaaagggttctatag

SEQ ID NO: 515345 - DNA, 75 bp, synthetic construct
  source 1..75: mol_type = other DNA
aggctgtctgcgataagctcggcattgaactgcacactgtcaactttgcagccgagtactgggacaacgtctttg

SEQ ID NO: 515346 - DNA, 75 bp, synthetic construct
  source 1..75: mol_type = other DNA
ggtacgtcgtcgataaagacgtcgagaataacattctggttgtcgcacagggtcatgaacatccacgtctgatgt

SEQ ID NO: 515347 - DNA, 75 bp, synthetic construct
  source 1..75: mol_type = other DNA
accggcactatgcgttgcacggtaaaaacccgctatcgccagaccgacatcccatgcaccgtcaaggcgctggac

SEQ ID NO: 515348 - DNA, 75 bp, synthetic construct
  source 1..75: mol_type = other DNA
atcagaccggacttaaaaacctgctcgatacagcggtgctcgaaggtacggatgaagagtcagcgcgctcgctgg

SEQ ID NO: 515349 - DNA, 75 bp, synthetic construct
  source 1..75: mol_type = other DNA
gcgatggtcagcaatacagcgacggttctgcgcgtaattaacgacaaaggcgaaaatggctggctggagatcccg

SEQ ID NO: 515350 - DNA, 75 bp, synthetic construct
  source 1..75: mol_type = other DNA
gcgcagcagacagtgaatacggcggtcccgccgtccttaagtgcgcattgcctgaaaatggcggtgatgcccgaa

SEQ ID NO: 515351 - DNA, 75 bp, synthetic construct
  source 1..75: mol_type = other DNA
gaagccatgtgccgcgattggccattcttctcgacgcgtctcggcatgctggagatggtcttcgccaaagcagac

SEQ ID NO: 515352 - DNA, 75 bp, synthetic construct
  source 1..75: mol_type = other DNA
cgttctttaacggcggtaaatacagcgacgagtggcatccgaatggccccggctggtttgcccaaaacctgtatc

SEQ ID NO: 515353 - DNA, 75 bp, synthetic construct
  source 1..75: mol_type = other DNA
ggggctgagcgattatcgccattttgttatttatccccgtctcgataaggcgctgaaggcacagaaaaataacga

SEQ ID NO: 515354 - DNA, 75 bp, synthetic construct
  source 1..75: mol_type = other DNA
atgtcgccttcctacgatgctgccgcctggaaccgtctggcaaagtgttatcgggacacgctacccggtgtggcg

SEQ ID NO: 515355 - DNA, 75 bp, synthetic construct
  source 1..75: mol_type = other DNA
cggcacgcagatgttgttgaggctattttgcactgtgccgaacgtcgacgcgatatttcagatggtggtgtagag

SEQ ID NO: 515356 - DNA, 75 bp, synthetic construct
  source 1..75: mol_type = other DNA
tcgcattaagggaaggcttggtcagcggcacgcagatgttgttgaggctattttgcactgtgccgaacgtcgacg

SEQ ID NO: 515357 - DNA, 75 bp, synthetic construct
  source 1..75: mol_type = other DNA
ccacaagtacagcttggcaagcccgagtaattctgtatcagccaagccagcgtcctaaggaggtgaagggacagt

SEQ ID NO: 515358 - DNA, 75 bp, synthetic construct
  source 1..75: mol_type = other DNA
cacccgccgcacactgatccacaaaatggtggaagtgaacgcctgcttaaaacagctcgacaacaaagatctcgc

SEQ ID NO: 515359 - DNA, 75 bp, synthetic construct
  source 1..75: mol_type = other DNA
caaactgccgttgggttcacgtccggcgaaacgtcgcccaaccggcggcgtcgagtcactacgcgccattccgtg

SEQ ID NO: 515360 - DNA, 75 bp, synthetic construct
  source 1..75: mol_type = other DNA
ccttacaaaatttgtcgaacgacgagctgctgcccgttgcacgtgcgtttagtcagttcctgaacctggccaaca

SEQ ID NO: 515361 - DNA, 75 bp, synthetic construct
  source 1..75: mol_type = other DNA
acgcctggccgcacaaagtcagtctcggcgtcgagtatcaacatacctttaaggcgattaatcaacgtaacggag

SEQ ID NO: 515362 - DNA, 75 bp, synthetic construct
  source 1..75: mol_type = other DNA
tatcgcgtgagctggcatcagaaggtggcgaacggacaaaccattgagccttacgctcacgttcaggacaacggc

SEQ ID NO: 515363 - DNA, 75 bp, synthetic construct
  source 1..75: mol_type = other DNA
gagagctggcgtcggattatggatgaactgtcggtcatctcttgcgatgtctatcgtggctacgtgcgtgaaaac

SEQ ID NO: 515364 - DNA, 75 bp, synthetic construct
  source 1..75: mol_type = other DNA
agacgacggtgaggaatattgcacggcggcagcggatctggctgatgcccaggctgtctgcgacaagctcggcat

SEQ ID NO: 515365 - DNA, 75 bp, synthetic construct
  source 1..75: mol_type = other DNA
cagtcgagatgatgcaggcacataaagataaaaaatcgtcatgtactgcaccggcggcattcgttgtgaaaaggc

SEQ ID NO: 515366 - DNA, 75 bp, synthetic construct
  source 1..75: mol_type = other DNA
atgccagtgttacacaaccgcatttccaacgacgcgttaaaagccaaaatgttggctgagagcgaaccgcgaacc

SEQ ID NO: 515367 - DNA, 75 bp, synthetic construct
  source 1..75: mol_type = other DNA
acagcgacgccgtcgggcaggacgtgaaaatggcaataagatctttaataagtctcgtggacgtctgaatacaac

SEQ ID NO: 515368 - DNA, 75 bp, synthetic construct
  source 1..75: mol_type = other DNA
gagaatggtaataaaatctttaataagtcccgtggacgtctgaacgcaacgttgagaatatcagagtcagagaaa

SEQ ID NO: 515369 - DNA, 75 bp, synthetic construct
  source 1..75: mol_type = other DNA
tccggcgtgtgccgagaaattcaacggttgttgtagtgagatttgcgatgaagagagcacgttaccggcagagga

SEQ ID NO: 515370 - DNA, 75 bp, synthetic construct
  source 1..75: mol_type = other DNA
cttacgcctgaatatcgcgttggatgatgacgggaaatccttctgggtactgcgcatgaaggtgcgcgatcgcat

SEQ ID NO: 515371 - DNA, 75 bp, synthetic construct
  source 1..75: mol_type = other DNA
caggaaggcttcccgacatatggtggtctggaaggcggcgcgatggagcgtctggcggtaggtctgtatgacggc

SEQ ID NO: 515372 - DNA, 75 bp, synthetic construct
  source 1..75: mol_type = other DNA
atgaacccgttcctgctggatagcgaagatgtgtttatcgatttactgaccgacagcggcaccggggcggtgacg

SEQ ID NO: 515373 - DNA, 75 bp, synthetic construct
  source 1..75: mol_type = other DNA
caggaaggcttcccgacatatggcggcctggaaggcggcgcgatggagcgtctggcggtaggtctgtatgacggc

SEQ ID NO: 515374 - DNA, 75 bp, synthetic construct
  source 1..75: mol_type = other DNA
atgcgtaaccactatgagtatgaagtggggcactttgaaaacgcgctcgaaattccggcagataccttccgtgag

SEQ ID NO: 515375 - DNA, 75 bp, synthetic construct
  source 1..75: mol_type = other DNA
ccgatatgctggcgatgtccgccaagaaagatgcgatggtgccgatgggcggcctgctgtgcatgaaagacgaca

SEQ ID NO: 515376 - DNA, 75 bp, synthetic construct
  source 1..75: mol_type = other DNA
atgggtggcctgctgtgcgtgaaagatgacagcttcttcgatgtctacaccgagtgcagaactctttgcgtggtg

SEQ ID NO: 515377 - DNA, 75 bp, synthetic construct
  source 1..75: mol_type = other DNA
atgagtatgaagtggggcactttgaaaacgcgctggaaattccggcagatacctttcgcgaacaactgccaaaag

SEQ ID NO: 515378 - DNA, 75 bp, synthetic construct
  source 1..75: mol_type = other DNA
ggggcataaacaggaagctgcgcggctacttggctgggggcgtaacaccctgacgcggaagttaaaagagctggg

SEQ ID NO: 515379 - DNA, 75 bp, synthetic construct
  source 1..75: mol_type = other DNA
tatcgcgctcaatatggcggctatcccgaaggatttgatcgaatcagaactgtttggtcacgagaaaggcgcgtt

SEQ ID NO: 515380 - DNA, 75 bp, synthetic construct
  source 1..75: mol_type = other DNA
actggcgagtaaaacgccggatgtactgctttcagatatccgtatgcccggaatggacggactggcgttgctcaa

SEQ ID NO: 515381 - DNA, 75 bp, synthetic construct
  source 1..75: mol_type = other DNA
ggggcataaacaggaagcggcgcggctgcttggctggggtcgcaacacactgacacgtaagttaaaagagctggg

SEQ ID NO: 515382 - DNA, 75 bp, synthetic construct
  source 1..75: mol_type = other DNA
gcgtagaagcgaagttgctgcatccggaaaccgaagccgctctgacgcgtctggcgtggccaggcaacgtgcgcc

SEQ ID NO: 515383 - DNA, 75 bp, synthetic construct
  source 1..75: mol_type = other DNA
ttacaggttgccgcgcgcgaactgggcgtagaagcgaagttgctgcatccggaaaccgaagccgctctgacgcgt

SEQ ID NO: 515384 - DNA, 75 bp, synthetic construct
  source 1..75: mol_type = other DNA
ttcttaacggtggtggtgaactattacgcgcctgcgaaggtgtttaaatttctgatcgacagctccggcgctatc

SEQ ID NO: 515385 - DNA, 75 bp, synthetic construct
  source 1..75: mol_type = other DNA
tcgcggtgatgctcccgcggtaatgggtaaaatcaaccgcagtaaaaccccgtatgtggcggtgttactctccac

SEQ ID NO: 515386 - DNA, 75 bp, synthetic construct
  source 1..75: mol_type = other DNA
ctggcgtatttctatcttctatttgtgctctatttttgtcgtcgtggcattaataccgtggaatatgccggggct

SEQ ID NO: 515387 - DNA, 75 bp, synthetic construct
  source 1..75: mol_type = other DNA
agttgggcaacgctgttagcacagtgggcagacagagcgctgcgttccggtcatcaaaacctgctttccgaagcg

SEQ ID NO: 515388 - DNA, 75 bp, synthetic construct
  source 1..75: mol_type = other DNA
ctggcgtggccaggcaacgtgcgccagctggaaaacacctgccgctggctaacggtgatggccgccgggcaggaa

SEQ ID NO: 515389 - DNA, 75 bp, synthetic construct
  source 1..75: mol_type = other DNA
ggttcttatcgctcggttctggaattgctcaatattccccatgcgaaattaatcatggactgcgtgatattactt

SEQ ID NO: 515390 - DNA, 75 bp, synthetic construct
  source 1..75: mol_type = other DNA
caaactatctattcatacaaacgacaacagaaagttttattgttgatgtatctgtaaaacagatcagtaatggct

SEQ ID NO: 515391 - DNA, 75 bp, synthetic construct
  source 1..75: mol_type = other DNA
tttccagcagagtgggtaattcaatgtgctctagaaaccgggatctcgcttctttggttggcaaccggacagggt

SEQ ID NO: 515392 - DNA, 75 bp, synthetic construct
  source 1..75: mol_type = other DNA
ttgcatacttataccattaaggagtgggaggggttgcaggatacgatctttgcctctcctccctgtcgtggagct

SEQ ID NO: 515393 - DNA, 75 bp, synthetic construct
  source 1..75: mol_type = other DNA
atgaaggttctactggagaatgtttatcattctgattgctattttctgccgataagagatagtcagcaaaatctt

SEQ ID NO: 515394 - DNA, 75 bp, synthetic construct
  source 1..75: mol_type = other DNA
ttctggtggttatttatgcgcaagatacgaaacgggtgctgatgttacagcggcgtgatgatcccgatttctggc

SEQ ID NO: 515395 - DNA, 75 bp, synthetic construct
  source 1..75: mol_type = other DNA
ccattgagaacggaacgctcgaagagatgggggatgttttccttgatcagactttgatacccggaaaagccgaat

SEQ ID NO: 515396 - DNA, 75 bp, synthetic construct
  source 1..75: mol_type = other DNA
tgcaaagcctgctggagctgcaacagagtgccggtagttcgtttgaatttatcgagagcgttaaatccgatctct

SEQ ID NO: 515397 - DNA, 75 bp, synthetic construct
  source 1..75: mol_type = other DNA
cgcgaccgtgtacatctggcgaatatcatgcgcaaaattcgcgtgatgccggacgtaattaaagtcacccgaaac

SEQ ID NO: 515398 - DNA, 75 bp, synthetic construct
  source 1..75: mol_type = other DNA
gaagcgggaatcccgtgccgcgtcagtggacgtgagaagcatctttattcgatctactgcaaaatggtgctcaaa

SEQ ID NO: 515399 - DNA, 75 bp, synthetic construct
  source 1..75: mol_type = other DNA
ccgccactttcaaccgagtggcgtatatcagggagaatgaccagtgaaggcagggcgtttgtgattcttgttaac

SEQ ID NO: 515400 - DNA, 75 bp, synthetic construct
  source 1..75: mol_type = other DNA
atttaattgttattgatgaagcatggcgaatcttcggtagcgataaggatatgacggctgagaagaaatcattta

SEQ ID NO: 515401 - DNA, 75 bp, synthetic construct
  source 1..75: mol_type = other DNA
caggaaaaagttatgaagccgtttgcaatgtcattattcctgcatttaccagcggccggagagttgtgacgaaca

SEQ ID NO: 515402 - DNA, 75 bp, synthetic construct
  source 1..75: mol_type = other DNA
ttgttgaattgcggattaatgaaaattatccacagcttaatgaggggaaagataattacaaccttttgcacttat

SEQ ID NO: 515403 - DNA, 75 bp, synthetic construct
  source 1..75: mol_type = other DNA
gaatcgtggtttcagtgccgtgaaagcgacgttgcccgacattgaacgtcagcatattggcaatatccttaaaaa

SEQ ID NO: 515404 - DNA, 75 bp, synthetic construct
  source 1..75: mol_type = other DNA
tcaacaaagtcgaacccatgaaccgtgcactgaaagaacttaacgcgcaaacgtggtttgctggtctgcgccgtg

SEQ ID NO: 515405 - DNA, 75 bp, synthetic construct
  source 1..75: mol_type = other DNA
tgaatgaactgccgaaggtagagcgcattctggctctggcacaaaccaacgctcaactggaaaaactggacgctg

SEQ ID NO: 515406 - DNA, 75 bp, synthetic construct
  source 1..75: mol_type = other DNA
atgacccactctctccccaaaaaacgccccgcacgggggattgatcttatcggcacctttgcttccgtggctgtt

SEQ ID NO: 515407 - DNA, 75 bp, synthetic construct
  source 1..75: mol_type = other DNA
tgagtacaatttccacggcggcacgaacagaaccgatctgacgggaaaatgcagttatgtggtgtcatgccagag

SEQ ID NO: 515408 - DNA, 75 bp, synthetic construct
  source 1..75: mol_type = other DNA
gctaaagccgtgggcctgccagagattcaggtcattcgcgatctgtttgaaggtctggtgaatcagaacgaaaaa

SEQ ID NO: 515409 - DNA, 75 bp, synthetic construct
  source 1..75: mol_type = other DNA
cgttatctcccggcgcaaccgggcaaaatcattaccgtcgatggcgatgaaattggtgagcaccaggggctgatg

SEQ ID NO: 515410 - DNA, 75 bp, synthetic construct
  source 1..75: mol_type = other DNA
tgacacaaaactggtcgactggttacaacaacgtctggggcttttagagcagcgagacacggcaatgttgcaccg

SEQ ID NO: 515411 - DNA, 75 bp, synthetic construct
  source 1..75: mol_type = other DNA
tattgctatcaattagcaacattaatacaacaaccggcgaaaagtgacacaacggcagaccaacatcaactgcaa

SEQ ID NO: 515412 - DNA, 75 bp, synthetic construct
  source 1..75: mol_type = other DNA
gccgaactggaaaaactggacgctgaaggccgcgtagcctgggcgctggataatctgcccggtgaatatgtactt

SEQ ID NO: 515413 - DNA, 75 bp, synthetic construct
  source 1..75: mol_type = other DNA
atgaaccgccaacgactggattctcccttggtttatgttggtgcgcataatgtatattatgttaaatttaatttg

SEQ ID NO: 515414 - DNA, 75 bp, synthetic construct
  source 1..75: mol_type = other DNA
gtatctgcaaaagcatggcctgaaatatcacccattatgggacgaaggatatttatcggtcggtgatacccatac

SEQ ID NO: 515415 - DNA, 75 bp, synthetic construct
  source 1..75: mol_type = other DNA
cagcgcctttattcgtctgaccgcccgtgaccgcgtacatctggcaaatatcatgcgcaaaatccgcgtgatgcc

SEQ ID NO: 515416 - DNA, 75 bp, synthetic construct
  source 1..75: mol_type = other DNA
ctaacgttgcccgtactcagagtcacgttgaagtgacgctggagagcggcgagatgctgacgggctgcgtgctgg

SEQ ID NO: 515417 - DNA, 75 bp, synthetic construct
  source 1..75: mol_type = other DNA
gcgctggggcaggttgtcgagttgcacaatgtcggacaacgactgtttgcgctgttgcgcaaagcgcctggcgta

SEQ ID NO: 515418 - DNA, 75 bp, synthetic construct
  source 1..75: mol_type = other DNA
ggagcgcggagaagacataggtgattacggcgtattgtgccgttatcagcagcgtcgacagagcgatcgcgaagc

SEQ ID NO: 515419 - DNA, 75 bp, synthetic construct
  source 1..75: mol_type = other DNA
ttcgccacagcagaacaggcggctgcatttttaggtgtcgttcccgttgaaaaatattccggcacctcggtcaga

SEQ ID NO: 515420 - DNA, 75 bp, synthetic construct
  source 1..75: mol_type = other DNA
gctgcgcgaaggcgtaaaaggcagcgttaaaacccgaaagcttcagaatgatattaatgctgtcaacgcggtaat

SEQ ID NO: 515421 - DNA, 75 bp, synthetic construct
  source 1..75: mol_type = other DNA
ggttggcgacttgggaaaattacccacgctggtaaacgcagtgcttatccgctggcgttaacccgcgccgccaga

SEQ ID NO: 515422 - DNA, 75 bp, synthetic construct
  source 1..75: mol_type = other DNA
tcctcgccgtcgaacagcaagttgccgctgaacgggcaaaatggcgcatccgataccatgctgcgcgccagcgcc

SEQ ID NO: 515423 - DNA, 75 bp, synthetic construct
  source 1..75: mol_type = other DNA
caatctacctgaaacaatggtcccaggcagatacgctatacaatgaagcacgccagcagaacacattaagcgcgg

SEQ ID NO: 515424 - DNA, 75 bp, synthetic construct
  source 1..75: mol_type = other DNA
tttgatgaacgagcggaagaaagagaagcgcgtcctggagctcgaacatgagcacatcatgcaggtaacgcagcc

SEQ ID NO: 515425 - DNA, 75 bp, synthetic construct
  source 1..75: mol_type = other DNA
cctattacccatcgtaccgtgctggtgggcaatgcggcgcaaactctgcacccgattgccgggcaagggttcaac

SEQ ID NO: 515426 - DNA, 75 bp, synthetic construct
  source 1..75: mol_type = other DNA
tagcagctgatggcacccattcagcgttagccaccgcgtgcggcgttgactggcagcaggagccttacgaacaac

SEQ ID NO: 515427 - DNA, 75 bp, synthetic construct
  source 1..75: mol_type = other DNA
ggctatttcccggttaagtcacggggcgctgccggtacatttgattgaagcgaccgcgccagagtcacatgctca

SEQ ID NO: 515428 - DNA, 75 bp, synthetic construct
  source 1..75: mol_type = other DNA
gctgccgcgcctgcaaaaagcgatcggtgatgagggcattctgtttgctcagaccatgagccgcgacgcgcaggg

SEQ ID NO: 515429 - DNA, 75 bp, synthetic construct
  source 1..75: mol_type = other DNA
tcccggatgagatttacgttttcacaccggaagggcgaattgtcgagctgcctgccggtgcaacgcccgtcgact

SEQ ID NO: 515430 - DNA, 75 bp, synthetic construct
  source 1..75: mol_type = other DNA
atcaagatgaagcgtctttcgagtgttctgctgatgatgtggaaattattgggcgcgcagtcaaagtaataaaga

SEQ ID NO: 515431 - DNA, 75 bp, synthetic construct
  source 1..75: mol_type = other DNA
atcaagatgaagcgtctttcgagtgctctgctgatgatgtggaagttattgggcgtgcagtcaaagtaataaaga

SEQ ID NO: 515432 - DNA, 75 bp, synthetic construct
  source 1..75: mol_type = other DNA
atcgagagcgttaaatccgatctcttcccggatgagatctacgttttcacaccggaagggcgcattgtcgaactg

SEQ ID NO: 515433 - DNA, 75 bp, synthetic construct
  source 1..75: mol_type = other DNA
caatgattccgatacctgttatcgcgtgctcggccagatgcacagcctgtataagccgcgtccaggtcgcgtgaa

SEQ ID NO: 515434 - DNA, 75 bp, synthetic construct
  source 1..75: mol_type = other DNA
gtcgaccgccagccttacccgctgtcgcagccgcttaccagcggtcaaaccgttgaaattattaccgcacctggc

SEQ ID NO: 515435 - DNA, 75 bp, synthetic construct
  source 1..75: mol_type = other DNA
cttggtaaatttgttcctgcaatcggaacaactatgtttggcggtcccctcatcggcgctgctacagccttcagt

SEQ ID NO: 515436 - DNA, 75 bp, synthetic construct
  source 1..75: mol_type = other DNA
ggtctcgcgcagtctgccgtcggattcagcaagcgcctgattagcgatccggcatttaccgcagacgtggcaccg

SEQ ID NO: 515437 - DNA, 75 bp, synthetic construct
  source 1..75: mol_type = other DNA
cgctgatacgccctggcattttaagggaacgacataccatggttggtggcaaaatcagtggcagcgctgggagca

SEQ ID NO: 515438 - DNA, 75 bp, synthetic construct
  source 1..75: mol_type = other DNA
acaactaagcaggcattaagcgagcacctgaatgtctcaaaaagcactatggcaaacagagtgttacgtgacagc

SEQ ID NO: 515439 - DNA, 75 bp, synthetic construct
  source 1..75: mol_type = other DNA
aaaaaaatatcaattccgtgaactccagcaaggttgtacctctttctgaactagtatctcctgaaattgacaagg

SEQ ID NO: 515440 - DNA, 75 bp, synthetic construct
  source 1..75: mol_type = other DNA
agcagcctgctcgatggtgactcatccaacgctttatttgttaaaacagctaatgatagctttgtagtggatacg

SEQ ID NO: 515441 - DNA, 75 bp, synthetic construct
  source 1..75: mol_type = other DNA
ggataaagataaaatcaggggcaatgccccattgttgactggcgcaggcaaaatcagcctggcgttgttttgcga

SEQ ID NO: 515442 - DNA, 75 bp, synthetic construct
  source 1..75: mol_type = other DNA
atccccgcaggtccctgggccggggccagactgcatgcggcccgtatcacccttgtcggcgatggtgttgaaatc

SEQ ID NO: 515443 - DNA, 75 bp, synthetic construct
  source 1..75: mol_type = other DNA
agtccggcaaaaaaggcgttgtactggtcgtcgctgcgctggtactcatcgccggcataagctacgtcgtgatgg

SEQ ID NO: 515444 - DNA, 75 bp, synthetic construct
  source 1..75: mol_type = other DNA
aagcagctgctggcccgtttgcgaaatacgacaccggccacactgacggtggccaccgtccccggcggggaaagc

SEQ ID NO: 515445 - DNA, 75 bp, synthetic construct
  source 1..75: mol_type = other DNA
ggcggcttcaacagtgaaacagtacaggacgtcatgctgggagcggtggaacgccgcttcggcaacgatcttccg

SEQ ID NO: 515446 - DNA, 75 bp, synthetic construct
  source 1..75: mol_type = other DNA
aattgccggaatacactatcgagcagatagaaagaattatttacaataaaaatacaaccattgaagaatatgttg

SEQ ID NO: 515447 - DNA, 75 bp, synthetic construct
  source 1..75: mol_type = other DNA
caataacacggaagatcgcctggtgatcttcaccgaaagtattaaaacgctggagttcctcgaacagcaactgcg

SEQ ID NO: 515448 - DNA, 75 bp, synthetic construct
  source 1..75: mol_type = other DNA
aggtcgcgagtttacccataccgaacagcgcgtcatcaaccgcatgttgaaactggcgcttgaaggctatagcga

SEQ ID NO: 515449 - DNA, 75 bp, synthetic construct
  source 1..75: mol_type = other DNA
gccgtggataacctgtttggcggcgatggacgcttcccaaccaaagtggaaggtcgcgagtttacccataccgaa

SEQ ID NO: 515450 - DNA, 75 bp, synthetic construct
  source 1..75: mol_type = other DNA
ttctcatcgttaattgctccaggaggtgaaggtgccggaaaaccaggaatcacaaacacaaacggtggttacgga

SEQ ID NO: 515451 - DNA, 75 bp, synthetic construct
  source 1..75: mol_type = other DNA
acattatcgacgcaaacaatgagaattacattcagcatcccttttcctaaaaaagtggactgcgccatgcttacc

SEQ ID NO: 515452 - DNA, 75 bp, synthetic construct
  source 1..75: mol_type = other DNA
tgcaggtgaaatttaccaatatcaccacctctccgaacgatatcgtggttaacacacctttccatgtcgaaattg

SEQ ID NO: 515453 - DNA, 75 bp, synthetic construct
  source 1..75: mol_type = other DNA
cagaaattgacgcactgctgaataacgacaatgaggtcaaagacgaaccaactgtcgctttttccgccgaaagtg

SEQ ID NO: 515454 - DNA, 75 bp, synthetic construct
  source 1..75: mol_type = other DNA
agtggagtggctgacggataatggttcatgctaccgggctaatgaaacacgacagtttgcccggatgttgggtct

SEQ ID NO: 515455 - DNA, 75 bp, synthetic construct
  source 1..75: mol_type = other DNA
taacgaatggcatccgcatagtcgctgggttatcgctcgccacgggaatatctgcggcagcaggcttgtaatggg

SEQ ID NO: 515456 - DNA, 75 bp, synthetic construct
  source 1..75: mol_type = other DNA
acatcagtatcatgcccaaaccagacgggttaacggcagcaaagaaccttgcagaggcgttcgagcattataacg

SEQ ID NO: 515457 - DNA, 75 bp, synthetic construct
  source 1..75: mol_type = other DNA
ggcttttttgcctttgcaactgcctgccggaatcattatctcactgattggtggaccattttttttgctactgct

SEQ ID NO: 515458 - DNA, 75 bp, synthetic construct
  source 1..75: mol_type = other DNA
tcgctctgcttggtcatcaggttgcaaccgggttaggggtgaatagttctcgcctggcgttgttacgtgtcgccg

SEQ ID NO: 515459 - DNA, 75 bp, synthetic construct
  source 1..75: mol_type = other DNA
gccggaatcattatctcactgattggtggaccattctttttgctactgctctggcagcgcaggaacagtttttaa

SEQ ID NO: 515460 - DNA, 75 bp, synthetic construct
  source 1..75: mol_type = other DNA
agtggagtggctgacggataatggttcatgctaccgggctaatgaaacacggcagtttgcccggatgctggggct

SEQ ID NO: 515461 - DNA, 75 bp, synthetic construct
  source 1..75: mol_type = other DNA
agtggagtggctgacggataatggttcatgctaccgggctaatgaaacacgccagtttgcccggatggtggggct

SEQ ID NO: 515462 - DNA, 75 bp, synthetic construct
  source 1..75: mol_type = other DNA
agtggagtggctgacggataatggttcatgctaccgggctaatgaaacacgtcagtttgcccggatgatgggtct

SEQ ID NO: 515463 - DNA, 75 bp, synthetic construct
  source 1..75: mol_type = other DNA
gtggctgacggataatggttcatgctaccgggctaatgaaacacgccagttcgcccggatgttgggacttgaacc

SEQ ID NO: 515464 - DNA, 75 bp, synthetic construct
  source 1..75: mol_type = other DNA
agtccggagagtaacggcatagcagagagcttcgtgaaaacgataaagcgtgactacatcagtatcatgcccaaa

SEQ ID NO: 515465 - DNA, 75 bp, synthetic construct
  source 1..75: mol_type = other DNA
agtggagtggctgacggataatggttcatgctaccgggctaatgaaacacggcagtttgcccggatggtgggcct

SEQ ID NO: 515466 - DNA, 75 bp, synthetic construct
  source 1..75: mol_type = other DNA
tcatcgttaattgctccaggaggtgaaggtgccggaaaaccaggaatcacaaacacaaacggtggttacggaggc

SEQ ID NO: 515467 - DNA, 75 bp, synthetic construct
  source 1..75: mol_type = other DNA
aatcagggaaagtaaccttgaaaggaaaaggtactgcagtaattaatgttacatctggtgataagcaaacagtaa

SEQ ID NO: 515468 - DNA, 75 bp, synthetic construct
  source 1..75: mol_type = other DNA
cagtacgcagaagattcaattgatcgttaagagcaaatacggtctggatcgtatcgtctgggatgatagtgcatt

SEQ ID NO: 515469 - DNA, 75 bp, synthetic construct
  source 1..75: mol_type = other DNA
ctctaaatcattgactacttggattaaacaatcctcttctgaactctcatcaggtgtatcaagtacatatgattt

SEQ ID NO: 515470 - DNA, 75 bp, synthetic construct
  source 1..75: mol_type = other DNA
attctgccgcccttgccagtaggcaagggcggtgttcgcacgtatttaaaaccgactggttccagcatcccctat

SEQ ID NO: 515471 - DNA, 75 bp, synthetic construct
  source 1..75: mol_type = other DNA
attctgaagtcgatccgaccattaagcgggggcggcgttcacacgtatttaaaaccgactggttccagcatcccc

SEQ ID NO: 515472 - DNA, 75 bp, synthetic construct
  source 1..75: mol_type = other DNA
agacgtgggtatgagtttaggaaagccctcagcctcgattatcgtcactggataatctacgtcagactcccttat

SEQ ID NO: 515473 - DNA, 75 bp, synthetic construct
  source 1..75: mol_type = other DNA
ttgcaagtacatacgatctgattaagaaaaatccgcttactaataaagtagatataaataatcctaatgcttatg

SEQ ID NO: 515474 - DNA, 75 bp, synthetic construct
  source 1..75: mol_type = other DNA
gtattattaccttaaaggaaaagggggaggctgttattaaggttgtatctggggataagcaaacggcgacataca

SEQ ID NO: 515475 - DNA, 75 bp, synthetic construct
  source 1..75: mol_type = other DNA
gcatttatacagttctgaaagcgaaatgatgaaggctgcgcctggtcagcagatcattttgccactcaaaaaact

SEQ ID NO: 515476 - DNA, 75 bp, synthetic construct
  source 1..75: mol_type = other DNA
tgtcactggttctctgccaaataactggctgcagtatgggaaggttaagctacaggctgcgggaggcaatgggaa

SEQ ID NO: 515477 - DNA, 75 bp, synthetic construct
  source 1..75: mol_type = other DNA
gatctgataaagaagaatccccgacagaatgttgatgtgaaaagtcaaaatgtctattcggtttgcgttgaataa

SEQ ID NO: 515478 - DNA, 75 bp, synthetic construct
  source 1..75: mol_type = other DNA
tgaaaaagaatggtgtagctcaggctaatgcccctgtaacatttagtattgtatccgggactgcaactcttgggg

SEQ ID NO: 515479 - DNA, 75 bp, synthetic construct
  source 1..75: mol_type = other DNA
atctcagtcagactgccttactctgaacgcccaccgcgtccgtcccgcacattccagcaacggatctggaggtaa

SEQ ID NO: 515480 - DNA, 75 bp, synthetic construct
  source 1..75: mol_type = other DNA
tatcaacggcttaaagttagtcgttatcatgtctggccttgtcggtagtgcatggtatataggtaaggttgttcc

SEQ ID NO: 515481 - DNA, 75 bp, synthetic construct
  source 1..75: mol_type = other DNA
atggttacttggccttctaatctttactcagcaggtttttggtcaggggattggtgctctggtgccgaaaataat

SEQ ID NO: 515482 - DNA, 75 bp, synthetic construct
  source 1..75: mol_type = other DNA
tttgtcggtattgagccgaaagtcattcctttgccagatgagtataaagttgtacgccagtatgggccgttcaac

SEQ ID NO: 515483 - DNA, 75 bp, synthetic construct
  source 1..75: mol_type = other DNA
cgctgaatatgctctatatcgaccagcaaaacagcagccagattattgctgaacaggtgatccctgaaaacgagg

SEQ ID NO: 515484 - DNA, 75 bp, synthetic construct
  source 1..75: mol_type = other DNA
cacttcggagcaaaaagacaccggtaatcctctgtcggtcatcccgaaatatactattaataactcgcttaactg

SEQ ID NO: 515485 - DNA, 75 bp, synthetic construct
  source 1..75: mol_type = other DNA
gtgaatgctggttttcttcctctgattcttcaggcagatcagaaatacaggatatctgccattaccgcgcggctg

SEQ ID NO: 515486 - DNA, 75 bp, synthetic construct
  source 1..75: mol_type = other DNA
tatcgtcactggataatctccgtcaggcttccttactccgaacgcccaccgcgtccgtcccgcacattccagcaa

SEQ ID NO: 515487 - DNA, 75 bp, synthetic construct
  source 1..75: mol_type = other DNA
gttcacagataaaacactctccaggaaacccggggcggttcaaagagaccaggcgggggagaaatccctcgccac

SEQ ID NO: 515488 - DNA, 75 bp, synthetic construct
  source 1..75: mol_type = other DNA
gggtatgagtttaagaaagcccttagcctcgactaccgtcactggataatctacgtcaggctcctttattccgaa

SEQ ID NO: 515489 - DNA, 75 bp, synthetic construct
  source 1..75: mol_type = other DNA
ctttgacattaatcccggagagtaaaccgggtaatggtaaagcgattggttttgtcggtattgagccgaaagtca

SEQ ID NO: 515490 - DNA, 75 bp, synthetic construct
  source 1..75: mol_type = other DNA
gctctgacgggtttgagttccgctgtgataacggagaaaaactgcgggtcacgttcgtgctggactgctgtgacc

SEQ ID NO: 515491 - DNA, 75 bp, synthetic construct
  source 1..75: mol_type = other DNA
tatggtctcatgtcatctcgtaacaaagttgacctttgtccaactccatttgacaaagaaaatcgtataaggctc

SEQ ID NO: 515492 - DNA, 75 bp, synthetic construct
  source 1..75: mol_type = other DNA
aggatcgccgatgcaagcgcaagcctgatgatactgaagcgctggcccgtatccataccgttatcggcgatctgc

SEQ ID NO: 515493 - DNA, 75 bp, synthetic construct
  source 1..75: mol_type = other DNA
agtgcaacgaatgcgtagatcgcttgctaagggctggacacgccgaaaggctgaacgaaacagagaatcaagaat

SEQ ID NO: 515494 - DNA, 75 bp, synthetic construct
  source 1..75: mol_type = other DNA
tgaatcaattgagccagcgatgcgatgcctggcaatgccaaatatggggaaccggtggtcggctgcgcttgatgt

SEQ ID NO: 515495 - DNA, 75 bp, synthetic construct
  source 1..75: mol_type = other DNA
ttattgcaattcatgatgcgaatataagccgctacggcggcctgccaggcatgtcagattcgggaagagctgagg

SEQ ID NO: 515496 - DNA, 75 bp, synthetic construct
  source 1..75: mol_type = other DNA
tggtggctacagcgagagggcatatattcaatgatgccaataagcgtaccgcgctaaacagcgcgctgctatttc

SEQ ID NO: 515497 - DNA, 75 bp, synthetic construct
  source 1..75: mol_type = other DNA
caggtggatatgacagtgaaaccgtacaggaggtcatgctgggtgcagtggagcgtcgcttcggtaacagcctgc

SEQ ID NO: 515498 - DNA, 75 bp, synthetic construct
  source 1..75: mol_type = other DNA
cggcggtaacgctgatggttgatccgtcgctggtgatggcaacggtagattatgtggactccagtattgaagagc

SEQ ID NO: 515499 - DNA, 75 bp, synthetic construct
  source 1..75: mol_type = other DNA
agcaccagtactaccgaagcggccacgcccggcgcagtgaaggcggcgtatgacctggcgaacgggaaagcggct

SEQ ID NO: 515500 - DNA, 75 bp, synthetic construct
  source 1..75: mol_type = other DNA
tgattgttgattacttaaacgtggcaccaggccagcatttttcagtaaagatcggagctggaggtaatggaggtc

SEQ ID NO: 515501 - DNA, 75 bp, synthetic construct
  source 1..75: mol_type = other DNA
cgcaaaaagggattgtgaagcttagtaatgcgacggatagcaacagtacgacggaggcggctacgccaagtgcgg

SEQ ID NO: 515502 - DNA, 75 bp, synthetic construct
  source 1..75: mol_type = other DNA
gctccagtgccagtaaccgggggtatctaggtgactgggttcttaataatggatcgaatggttcttctggtatcg

SEQ ID NO: 515503 - DNA, 75 bp, synthetic construct
  source 1..75: mol_type = other DNA
ttcgatgaccgggagtaatgggtacgccggaggaaactcaattttcttaacgctcacttctgttggtggtagcgg

SEQ ID NO: 515504 - DNA, 75 bp, synthetic construct
  source 1..75: mol_type = other DNA
gtaagcaaattggtgccaggaccgctattgctgtgttatgccgtcaggaaatggtagtgcttaaacagagaatgc

SEQ ID NO: 515505 - DNA, 75 bp, synthetic construct
  source 1..75: mol_type = other DNA
caacaaatgaccagaacacaggtttacaaagaaatgcgctggaatgtgcaggatgtgagcagatttttgaagaca

SEQ ID NO: 515506 - DNA, 75 bp, synthetic construct
  source 1..75: mol_type = other DNA
gcgggtgggagaaatactgttggttgatgccagtgagaccccggagccggaaacggtttctaatccctgggttga

SEQ ID NO: 515507 - DNA, 75 bp, synthetic construct
  source 1..75: mol_type = other DNA
ggttgacccgatctcggttatcgacatcaaacgcatcattgagcacctgcgcgacagcggcctgggtgtgctgat

SEQ ID NO: 515508 - DNA, 75 bp, synthetic construct
  source 1..75: mol_type = other DNA
aaacaaccttctttaagcggctgtttgcgtatcaccatcggcacccgcgaagagagccagcgcgttattgacgct

SEQ ID NO: 515509 - DNA, 75 bp, synthetic construct
  source 1..75: mol_type = other DNA
gaacaggtgctggtcagccgtggcgcggacgaaggtattgaactactgattcgcgctttttgcgaaccgggtaaa

SEQ ID NO: 515510 - DNA, 75 bp, synthetic construct
  source 1..75: mol_type = other DNA
aatgaaaaagcgaatgaagctgcattaaggttgcaggaacgattaaatacaacaataaggaggaagggtgaaaat

SEQ ID NO: 515511 - DNA, 75 bp, synthetic construct
  source 1..75: mol_type = other DNA
cgaacgcgccattgctgcggcgcaaaccaaacttccgccagcgtttgaacggccaggggcaaagcatattttgtt

SEQ ID NO: 515512 - DNA, 75 bp, synthetic construct
  source 1..75: mol_type = other DNA
tcctcaatgcgccgcaagaatatctgctggcggggatcggtgacacgctggcgaaatggtatgaagcggtggtgc

SEQ ID NO: 515513 - DNA, 75 bp, synthetic construct
  source 1..75: mol_type = other DNA
atctgtatcttctgtcgccgacacgttacgtagattgtatggttccgcggagtagattaatggcacgtaaataca

SEQ ID NO: 515514 - DNA, 75 bp, synthetic construct
  source 1..75: mol_type = other DNA
aacccgtttctgcgatgggggcggcaactggcctgcatgtttatcagacattcggcgctgaagcgtatcgtaagt

SEQ ID NO: 515515 - DNA, 75 bp, synthetic construct
  source 1..75: mol_type = other DNA
gcgaaatggtatgaagcggtggtgctggctccacaaccagaaaccttgccgctaaccgtgcgtctggggatcaat

SEQ ID NO: 515516 - DNA, 75 bp, synthetic construct
  source 1..75: mol_type = other DNA
tgttaaacagtagcgaacaggcgctgagcgatcagcaaaatcagcagttaacgcaatcattttgcgatgtggtgg

SEQ ID NO: 515517 - DNA, 75 bp, synthetic construct
  source 1..75: mol_type = other DNA
gaagctgcaacaccaagtgcggttaaggcggtgtatgaccttgctaatggcaaggcttcggcaagtcatacgcac

SEQ ID NO: 515518 - DNA, 75 bp, synthetic construct
  source 1..75: mol_type = other DNA
tggcggcagcagtcagggcttcggctacacggcgcgggcattacttgaacgacgtgttacttccaactggtttgt

SEQ ID NO: 515519 - DNA, 75 bp, synthetic construct
  source 1..75: mol_type = other DNA
aagttcggttaggcgaagcgacccatcgtgaagacctggtgcagcagtcgttgtatcggctggaacttattgatc

SEQ ID NO: 515520 - DNA, 75 bp, synthetic construct
  source 1..75: mol_type = other DNA
ctgacggggtcgagttccgctgtgataacggagagagactgcgtgtcacattcgcgctggactgctgtgaccgtg

SEQ ID NO: 515521 - DNA, 75 bp, synthetic construct
  source 1..75: mol_type = other DNA
cgcttcggcaacgatcttccgtcgtctccagtggagtggctgacggataatggttcatgctaccgggctaatgaa

SEQ ID NO: 515522 - DNA, 75 bp, synthetic construct
  source 1..75: mol_type = other DNA
gggttcgagttctgctgtgataacggagagagactgcgtgtcacgttcgcgctggactgctgtgatcgtgaggca

SEQ ID NO: 515523 - DNA, 75 bp, synthetic construct
  source 1..75: mol_type = other DNA
tattatcagcagaccttgcgtatggacagcggcaacactaacgccgtgcgcgggctggcaaatatttaccgccag

SEQ ID NO: 515524 - DNA, 75 bp, synthetic construct
  source 1..75: mol_type = other DNA
cgcgtccgtactgaaacggatattggcgccagcgccgtttctgttgcgtttgccgcttgtacgctggcgcgacag

SEQ ID NO: 515525 - DNA, 75 bp, synthetic construct
  source 1..75: mol_type = other DNA
ggttatcgctcgccacgggaatatctacggcagcaagccagtaatgggttaagtgataacaggtgtctggaaata

SEQ ID NO: 515526 - DNA, 75 bp, synthetic construct
  source 1..75: mol_type = other DNA
cgttcgagcattataacgaatggcatccgcatagtgcactgggttatcgctcgccacgggaatatctgcggcagc

SEQ ID NO: 515527 - DNA, 75 bp, synthetic construct
  source 1..75: mol_type = other DNA
gtggaagtgttagcacgtatccttgatatcatcagcgatatgccgacatatggctatcgtcgtgtctgggccatt

SEQ ID NO: 515528 - DNA, 75 bp, synthetic construct
  source 1..75: mol_type = other DNA
acgagcacaaattttggcagatgaagttggcgcggaagtgattgcattgagcgacatcgatgaacgtctgcgtga

SEQ ID NO: 515529 - DNA, 75 bp, synthetic construct
  source 1..75: mol_type = other DNA
gtgatatcgacgagcgtctgcgcgaagccgatatcatcattagttcaactgcaagcccgttaccgattatcggta

SEQ ID NO: 515530 - DNA, 75 bp, synthetic construct
  source 1..75: mol_type = other DNA
gtgcactgggttatcgctcgccacgggaatatctacggcagcaagccagtaatgggttaagtgataacaggtgtc

SEQ ID NO: 515531 - DNA, 75 bp, synthetic construct
  source 1..75: mol_type = other DNA
ggttatcgctcgccacgggaatatctgcggcagcaggccagtaatgggttaagtgataacaggtgtctggaaata

SEQ ID NO: 515532 - DNA, 75 bp, synthetic construct
  source 1..75: mol_type = other DNA
gcttcgagttcggctgcgacaacggcgaaaaactgcgggtaacgttcgcgctggactgctgcgaccgtgaggcca

SEQ ID NO: 515533 - DNA, 75 bp, synthetic construct
  source 1..75: mol_type = other DNA
tgggcagtcactacgggcggcttcgacagtgaaacagtacaggacgtcatgctgggagcggtggaacgccgcttc

SEQ ID NO: 515534 - DNA, 75 bp, synthetic construct
  source 1..75: mol_type = other DNA
atggcaagtgaattttttacaatattaaccagcgcaggcaaatcaaaaattgcctctgcgctggcggagcaaaaa

SEQ ID NO: 515535 - DNA, 75 bp, synthetic construct
  source 1..75: mol_type = other DNA
atagtcagtttggtagtttttctttagattatcgaatatctgctgattatgactcattattacgatatattttaa

SEQ ID NO: 515536 - DNA, 75 bp, synthetic construct
  source 1..75: mol_type = other DNA
aattgtacaagagtttcaaaaatcatttgtgaacccgatcatggcatttatgatgctctgaataaaggtatgcaa

SEQ ID NO: 515537 - DNA, 75 bp, synthetic construct
  source 1..75: mol_type = other DNA
agtttcgctgtgataacggagaaaaactgcgagtcacgttcgcgctggactgctgtgaccgtgaggcactgcact

SEQ ID NO: 515538 - DNA, 75 bp, synthetic construct
  source 1..75: mol_type = other DNA
agtccggagagtaacggaatagcagagagcttcgtgaaaacgataaagcgtgactacataagtatcatgcccaaa

SEQ ID NO: 515539 - DNA, 75 bp, synthetic construct
  source 1..75: mol_type = other DNA
ctgggttatcgctcgccacgggaatatctgcggcagcgggccagtaatgggttaagtgataacaggtatctggaa

SEQ ID NO: 515540 - DNA, 75 bp, synthetic construct
  source 1..75: mol_type = other DNA
caacgagcttccggcgtctccagtagagtggctgacggataatggttcatgctaccgggctaatgaaacacggca

SEQ ID NO: 515541 - DNA, 75 bp, synthetic construct
  source 1..75: mol_type = other DNA
tgctaccgggctaatgaaacacgccagttcgcccggatgttgggacttgaaccgaagaacacggcggtgcggagt

SEQ ID NO: 515542 - DNA, 75 bp, synthetic construct
  source 1..75: mol_type = other DNA
gcaacgaaaaagtgattctttgcgatcgcggtgctaacttcggctatgacaacctggttgtcgatatgctgggct

SEQ ID NO: 515543 - DNA, 75 bp, synthetic construct
  source 1..75: mol_type = other DNA
acgattaccgggtcatacaggagcagtctggtctgaaaacatcaatgtcgcgtaaaggtaacttgttcttcgaaa

SEQ ID NO: 515544 - DNA, 75 bp, synthetic construct
  source 1..75: mol_type = other DNA
ctgcgcatacgattaccgggtcatacaggagcagtttggtctgaaaacatcaatgtcgcgtaaaggtaactgtta

SEQ ID NO: 515545 - DNA, 75 bp, synthetic construct
  source 1..75: mol_type = other DNA
ccgggctaatccaccactctgatcgaggttcacagtactgcgcatacgattaccgggtcatacaggagcagtttg

SEQ ID NO: 515546 - DNA, 75 bp, synthetic construct
  source 1..75: mol_type = other DNA
tcatcgttggtcgtgaccgactggcacgtcttcgtaaggagctgaggctacgctgtaagcagaaacgcaagttca

SEQ ID NO: 515547 - DNA, 75 bp, synthetic construct
  source 1..75: mol_type = other DNA
aatctgccagttgcgccaaatctgctgaaccagacgttcgctcctacagcaccaaatcaggtctgggtggcggac

SEQ ID NO: 515548 - DNA, 75 bp, synthetic construct
  source 1..75: mol_type = other DNA
gaatttactggagaaacagcccgcagatctttctgcgctgcgtttctttctttgcggtggcaccacgatccccaa

SEQ ID NO: 515549 - DNA, 75 bp, synthetic construct
  source 1..75: mol_type = other DNA
gaattaaccgccgtgccctggatgaagaaggctggtattacagcggcgatctctgccgtatggatgaggctggct

SEQ ID NO: 515550 - DNA, 75 bp, synthetic construct
  source 1..75: mol_type = other DNA
ttaaggtggcacatatccgcactcgcgaaacatatggaacccggcggctccagacggagctggcagagaatggca

SEQ ID NO: 515551 - DNA, 75 bp, synthetic construct
  source 1..75: mol_type = other DNA
atgcatcccacaggcccgcaactcgggcctgatgttctgtttcgagagtccaaaatgaaagtgacattaacgttt

SEQ ID NO: 515552 - DNA, 75 bp, synthetic construct
  source 1..75: mol_type = other DNA
aaacgggtcgcgaaatataaataccctgaacatatcgtgataactgaaaagttaccccgcactgcatccggtaaa

SEQ ID NO: 515553 - DNA, 75 bp, synthetic construct
  source 1..75: mol_type = other DNA
cagcgcccacctgccgggctaatccaccactctgatcgaggttcacagtactgcgcatacgattaccgggtcata

SEQ ID NO: 515554 - DNA, 75 bp, synthetic construct
  source 1..75: mol_type = other DNA
acgcgttaatcgaacaatggcgacaacaatttcccattgaagcgatgtgtcaggtatttggtgtatccaggagcg

SEQ ID NO: 515555 - DNA, 75 bp, synthetic construct
  source 1..75: mol_type = other DNA
cgcgtctttctggtatcaacgtcaataaaatcaaaattatcgtctattctctttgtggtctgctggcatcactgg

SEQ ID NO: 515556 - DNA, 75 bp, synthetic construct
  source 1..75: mol_type = other DNA
ctgcaattggcgcggtaaccggggtgattgtagcgaaaggccgcgtccaggcgtttatcgctaccctggtgatga

SEQ ID NO: 515557 - DNA, 75 bp, synthetic construct
  source 1..75: mol_type = other DNA
tctttaagcggctgtttgcgcatcactatcggcactcgtgcagagagccagcgcgtgattgacgctttgaaagcg

SEQ ID NO: 515558 - DNA, 75 bp, synthetic construct
  source 1..75: mol_type = other DNA
attaaagcctcaagcagcgtatttaaatctttatgggatcaaggcattatcttacgtgaccagaataaacaacct

SEQ ID NO: 515559 - DNA, 75 bp, synthetic construct
  source 1..75: mol_type = other DNA
agcgcccacctgccgggctaatccaccactctgatcgaggttcacagtactgcgcatacgattaccgggtcatac

SEQ ID NO: 515560 - DNA, 75 bp, synthetic construct
  source 1..75: mol_type = other DNA
aacgcctcgctgaacacacagcggcgcgtggcgctggcgcaggcgcagcttggcgataccgcagcagcgcagcgg

SEQ ID NO: 515561 - DNA, 75 bp, synthetic construct
  source 1..75: mol_type = other DNA
tgggccaggcgtattctcagaaaggcgatcgcgccaatgcggtggcgaatctggaaaaagccctcgccctggatc

SEQ ID NO: 515562 - DNA, 75 bp, synthetic construct
  source 1..75: mol_type = other DNA
aaacaatctggcgctattgctgtttagtagcgatcgccgtgacgaaggttttgccgtcctggaacagatggcgaa

SEQ ID NO: 515563 - DNA, 75 bp, synthetic construct
  source 1..75: mol_type = other DNA
gcgcagttgctgcatctatcgtcggcattgaagtcaatgcgctggtggctgtcgctgccgctctcgcgttaggtg

SEQ ID NO: 515564 - DNA, 75 bp, synthetic construct
  source 1..75: mol_type = other DNA
gtctggtctgaaaacatcaatgtcgcgtaaaggtaactgttacgacaacgctccgatggaaagcttctggggaac

SEQ ID NO: 515565 - DNA, 75 bp, synthetic construct
  source 1..75: mol_type = other DNA
aatcgaacgccgggcgcgagggggcttctaaaatctggtacgggcagataaaagatatgcccgtcagcgacgcca

SEQ ID NO: 515566 - DNA, 75 bp, synthetic construct
  source 1..75: mol_type = other DNA
atgtttatacgtgcgaaattgtcggctacgccatgggagagcgcatgacaaaagagctgactgaggtgtactggc

SEQ ID NO: 515567 - DNA, 75 bp, synthetic construct
  source 1..75: mol_type = other DNA
tattaacacattatgggtcgatcacggtgtttatggtgcttggtgtcatgttattgctctgtgcgctggttctct

SEQ ID NO: 515568 - DNA, 75 bp, synthetic construct
  source 1..75: mol_type = other DNA
taagcaatggatggtcaaataatttcctcaatgccgcctttacctcggcattaatgtttggttatttcatcggct

SEQ ID NO: 515569 - DNA, 75 bp, synthetic construct
  source 1..75: mol_type = other DNA
aagaagctccagcagtggcagaaaatagcaattgctgcttgtgagcagtgtggtcgtaaccgggtgccggaaatc

SEQ ID NO: 515570 - DNA, 75 bp, synthetic construct
  source 1..75: mol_type = other DNA
ggatcctcatgcgcgtaaagcatggtaccagtcagaacgtgaccgactgaaatttgagcaggaaaccggtctgct

SEQ ID NO: 515571 - DNA, 75 bp, synthetic construct
  source 1..75: mol_type = other DNA
tgctgttgggagaatggtggcggtcttcactccgtatggcgttgcggcattactaacacattatggttcgatcac

SEQ ID NO: 515572 - DNA, 75 bp, synthetic construct
  source 1..75: mol_type = other DNA
ccggtttcattatcgtatatttggtattataagctttagtctgttattaacagggtttttgagttactccggtaa

SEQ ID NO: 515573 - DNA, 75 bp, synthetic construct
  source 1..75: mol_type = other DNA
ctacatcgaagataacgattttgatatggtctcacacgatataatgttaaatggcggttttgattcatgggatcg

SEQ ID NO: 515574 - DNA, 75 bp, synthetic construct
  source 1..75: mol_type = other DNA
atgtgacctttgtagttttgatgaacaaggtccggcctgcgtgcggatgtgcccgactaaagccctgcatctggt

SEQ ID NO: 515575 - DNA, 75 bp, synthetic construct
  source 1..75: mol_type = other DNA
aaatcaaaggatatcgtgccgccgcctcaaaatggtttaacgaaaactactttggcaaagtcctcggttttaccc

SEQ ID NO: 515576 - DNA, 75 bp, synthetic construct
  source 1..75: mol_type = other DNA
aaccatatcggacgtgtgctgcgtatgggacctggacaggcgttgcaattgtttgacggcagcaaccaggtcttt

SEQ ID NO: 515577 - DNA, 75 bp, synthetic construct
  source 1..75: mol_type = other DNA
gtttgacggcagcaaccaggtctttgacgccgaaattaccagcgccagcaaaaaaagcgtggaagtgaaggtgct

SEQ ID NO: 515578 - DNA, 75 bp, synthetic construct
  source 1..75: mol_type = other DNA
gctatcaatttactgatatcctgttgggacctcgcgttttgcgtacagagacaactgcgctcaccgccattaccg

SEQ ID NO: 515579 - DNA, 75 bp, synthetic construct
  source 1..75: mol_type = other DNA
tggactgcatcacaactgaatgaagtacagattgtggttgatgagatccgcgacacactggaaaaggcagtcatt

SEQ ID NO: 515580 - DNA, 75 bp, synthetic construct
  source 1..75: mol_type = other DNA
tattcagatcgcaataaacaaagttcatcccaaaactcacaacattcatactccttataacgattataagattcg

SEQ ID NO: 515581 - DNA, 75 bp, synthetic construct
  source 1..75: mol_type = other DNA
gcgctgaaaattttacgccagcggaatgcacagcaggcccgtaaagaggccaacattctgcatggcgataaagtc

SEQ ID NO: 515582 - DNA, 75 bp, synthetic construct
  source 1..75: mol_type = other DNA
cggaagcgattaaacagcgattcggctcagctgcacacgttaagcgtccaggagatcgcccccctccgatgcgtg

SEQ ID NO: 515583 - DNA, 75 bp, synthetic construct
  source 1..75: mol_type = other DNA
ctacgccatgggagagcgcatgacaaaagagctgacaggtaaagccctgtttaataggcgctcaggagccagcgc

SEQ ID NO: 515584 - DNA, 75 bp, synthetic construct
  source 1..75: mol_type = other DNA
gcggatgaaactggcgctgccgaatgccgcctttgtggcattcaccggcacgccgctgctgaaaaaagataaaac

SEQ ID NO: 515585 - DNA, 75 bp, synthetic construct
  source 1..75: mol_type = other DNA
aaagacgacaaagatatgccggaacagaacgaaccgatgcaggacgagaacgaagcggcaatggcaatgctactg

SEQ ID NO: 515586 - DNA, 75 bp, synthetic construct
  source 1..75: mol_type = other DNA
ggaaatggtattcgccaaagcagatctgtggctggcggaatactatgaccaacgcctggtagacaaagcactgtg

SEQ ID NO: 515587 - DNA, 75 bp, synthetic construct
  source 1..75: mol_type = other DNA
gccgttaggtaaagagttacgcaatctgcaagaagaagacatcaaagtggtgctggcgattgccaacgattccca

SEQ ID NO: 515588 - DNA, 75 bp, synthetic construct
  source 1..75: mol_type = other DNA
ccgctacgccggaacaagaactgggcaaactgccgttgggttcacgtccggcgaaacgtcgcccgaccggcggcg

SEQ ID NO: 515589 - DNA, 75 bp, synthetic construct
  source 1..75: mol_type = other DNA
ttccgggcctgaaacctgacagcgtgacaaaagaaggcacgatcatttatcgcgtcggggaaagtgctatccgtg

SEQ ID NO: 515590 - DNA, 75 bp, synthetic construct
  source 1..75: mol_type = other DNA
gaagcggcaatggcaatgctactggagcaaatgagccaggagtcacaggacgaagcacctccgctgatgccggaa

SEQ ID NO: 515591 - DNA, 75 bp, synthetic construct
  source 1..75: mol_type = other DNA
gaaaggaaatggattcgttattactggtcccgatggccttgctgtaaaagccagctctgtagatcgctcactatc

SEQ ID NO: 515592 - DNA, 75 bp, synthetic construct
  source 1..75: mol_type = other DNA
tccaggaagaatacagcgccaaaatcccggcgctgacgttactgaccagcctcggctggacgtttttatccccga

SEQ ID NO: 515593 - DNA, 75 bp, synthetic construct
  source 1..75: mol_type = other DNA
acttgctcggcgtaccaggaatgccagtcactgcaaaaggtatccgtcaggcgttacagcgttttgcccatgggc

SEQ ID NO: 515594 - DNA, 75 bp, synthetic construct
  source 1..75: mol_type = other DNA
ttatgaagaggattacgacgaagattataaacgcgatttctggctgggtttgcagaaacttgcagccatacagga

SEQ ID NO: 515595 - DNA, 75 bp, synthetic construct
  source 1..75: mol_type = other DNA
atgacgttttgtgaaacggggtacgctttcctgaaagccttactgcgaacccggctggggcttaaaaaaaccgac

SEQ ID NO: 515596 - DNA, 75 bp, synthetic construct
  source 1..75: mol_type = other DNA
tccaggaagaatacagcgccaaaatcccggcgttgacgctactgtccagccttggctggtcgtttttatctccga

SEQ ID NO: 515597 - DNA, 75 bp, synthetic construct
  source 1..75: mol_type = other DNA
aagaacgtgaacatgcagcaaacagacgctctgaatgtatccgtaaggcggcacgcccaccagcaactacagaca

SEQ ID NO: 515598 - DNA, 75 bp, synthetic construct
  source 1..75: mol_type = other DNA
gtgatcaaaaaattcgtagtggatggttattacttgcctggttaaccacgccagaattgtatcgggtgttaaaaa

SEQ ID NO: 515599 - DNA, 75 bp, synthetic construct
  source 1..75: mol_type = other DNA
ccacatcgatttcaaaaataccacgctgttgttgacgactaacgcgggggcggaacttatcagccagctctgtga

SEQ ID NO: 515600 - DNA, 75 bp, synthetic construct
  source 1..75: mol_type = other DNA
tggcgctgtcgctgcacactccaccagcaaatatccagtttctgcgtcaacggcttaaagccgccgaaatggagc

SEQ ID NO: 515601 - DNA, 75 bp, synthetic construct
  source 1..75: mol_type = other DNA
ccatcatggacagaacttatcgaggctattcgtgaaggtgtggaatggtacaacaaccgcccacattctgagctg

SEQ ID NO: 515602 - DNA, 75 bp, synthetic construct
  source 1..75: mol_type = other DNA
cggagcgcctgcaacaagccgcagttaatgccaatgcaaagcgtggtgccaatcgcaccatcagtcgtgacccgc

SEQ ID NO: 515603 - DNA, 75 bp, synthetic construct
  source 1..75: mol_type = other DNA
tggaaagcgacggtaatctcgggcgactgaaagccatcaactttcttgttgaaaaagcccgtaaaggtgaattac

SEQ ID NO: 515604 - DNA, 75 bp, synthetic construct
  source 1..75: mol_type = other DNA
ggatgttgggacttgaaccgaagaccacggcggtgcggagtccggagagtaacggtatagcagagagcttcgtga

SEQ ID NO: 515605 - DNA, 75 bp, synthetic construct
  source 1..75: mol_type = other DNA
cagcttgagggattcacgcgccgcgactggtcaaaaatgccggtgaattatgtctggattggtgacggtcacggc

SEQ ID NO: 515606 - DNA, 75 bp, synthetic construct
  source 1..75: mol_type = other DNA
gcattgtggcaatggttgagacggcgaacgccaaaaagggaaacagccgcgcgttgagtgaaatcacgctgaaac

SEQ ID NO: 515607 - DNA, 75 bp, synthetic construct
  source 1..75: mol_type = other DNA
agtggcagaggcacgaatagcgatcgtcagcgaggtgctgaaaatcgcgcaacaacccggctttagttgcgctaa

SEQ ID NO: 515608 - DNA, 75 bp, synthetic construct
  source 1..75: mol_type = other DNA
tcgatcgtcgtcactggataatctccgccaggctcccttattccgaacgcccaccgcgtccgtcccgcacattcc

SEQ ID NO: 515609 - DNA, 75 bp, synthetic construct
  source 1..75: mol_type = other DNA
ccccccatgcactgaagaacaggccgagtggctaattcagtgctaccgcagacacggatacgagattaagaaagc

SEQ ID NO: 515610 - DNA, 75 bp, synthetic construct
  source 1..75: mol_type = other DNA
aggcatcctcaacgcacccgcacttaacccgcttcggcgggttttgttttttctggtcgttctggtttacaatcc

SEQ ID NO: 515611 - DNA, 75 bp, synthetic construct
  source 1..75: mol_type = other DNA
ggatgttggggcttgaaccgaagatcacggcggtgcggagtccggagagtaacggaatagcagagagcttcgtga

SEQ ID NO: 515612 - DNA, 75 bp, synthetic construct
  source 1..75: mol_type = other DNA
ggatgttgggtcttgaaccgaagagcacggcggtgcggagtccggagagtaacggcatagcagagagcttcgtga

SEQ ID NO: 515613 - DNA, 75 bp, synthetic construct
  source 1..75: mol_type = other DNA
ggatgttgggtcttgaaccgaagaccacggcggtgcggagtccggagagtaacgggatagcagagagcttcgtga

SEQ ID NO: 515614 - DNA, 75 bp, synthetic construct
  source 1..75: mol_type = other DNA
tgatgcacgaatcgcgatcgtcagcgaagttctgaaagtcgcgcaacaacctggtttcagctgtgcgaaggctat

SEQ ID NO: 515615 - DNA, 75 bp, synthetic construct
  source 1..75: mol_type = other DNA
aaaccgaacggtaaacattacagcccggcggaatacagaaaaaaaagcctggcagaagaggacacggaaattgaa

SEQ ID NO: 515616 - DNA, 75 bp, synthetic construct
  source 1..75: mol_type = other DNA
cgaatttctggcgcagtatcgccagtcaaacggccgaccaatgaccgaggcttacgaggattttgtcgctgaatg

SEQ ID NO: 515617 - DNA, 75 bp, synthetic construct
  source 1..75: mol_type = other DNA
ggatccggcgctgatgcccgattcagcagggctaaaagaggcgttaatgccggagttacgcaaacacttcccagc

SEQ ID NO: 515618 - DNA, 75 bp, synthetic construct
  source 1..75: mol_type = other DNA
tgttccgtaccgatgtgctgcgtaaattcggtttttcggaccgtaccaaagttgaagatctcgatctcacctgga

SEQ ID NO: 515619 - DNA, 75 bp, synthetic construct
  source 1..75: mol_type = other DNA
cagtcatagtgctgtgtttgacggtgctgggatttacgcttctggtcggagactcgctgtgtgagtttaccgtaa

SEQ ID NO: 515620 - DNA, 75 bp, synthetic construct
  source 1..75: mol_type = other DNA
tctgagtttggtgaaaaaaatattcagtgtaatggtattggtccaggctacattgctacacctcaaacagcaccg

SEQ ID NO: 515621 - DNA, 75 bp, synthetic construct
  source 1..75: mol_type = other DNA
ccgccgcagccgtcacacggatgatacggatgtgcttcgccgtatacaccatgttatcggagagctacccacata

SEQ ID NO: 515622 - DNA, 75 bp, synthetic construct
  source 1..75: mol_type = other DNA
ggcaacggcggcggatagccccgacctgattgcccaagcgaaaaaagagggcagcgtgacctttaacgtctggta

SEQ ID NO: 515623 - DNA, 75 bp, synthetic construct
  source 1..75: mol_type = other DNA
gctctatgaggaacgtattcctgatcttgaggtaaacgaccgggcaatagatgcatggtttgatcgtattaccga

SEQ ID NO: 515624 - DNA, 75 bp, synthetic construct
  source 1..75: mol_type = other DNA
tggattgtgggctacgcggtctgtatgcgcctgcataaaaggctgttatttagccgcttcggtatcttcagtata

SEQ ID NO: 515625 - DNA, 75 bp, synthetic construct
  source 1..75: mol_type = other DNA
tgcgtctgcataaaaggcttttatttagccgtttcggcatcttcagtattttccctatgctgttggtcgtgctct

SEQ ID NO: 515626 - DNA, 75 bp, synthetic construct
  source 1..75: mol_type = other DNA
cgtcggcggcattccttccacagcgttaaaaggcgcaggtttgctgcctcatattcgcgccacggtaaaactgcc

SEQ ID NO: 515627 - DNA, 75 bp, synthetic construct
  source 1..75: mol_type = other DNA
atgaaaacctggatatttatatgtatggccgtagcaatattgctatggttcctgagtacgttaaggcgtaagccc

SEQ ID NO: 515628 - DNA, 75 bp, synthetic construct
  source 1..75: mol_type = other DNA
tctcaatgctgttgctgctggtgaagacgttgttcctgcttctgaactggccgctgcgataaagcagattaatca

SEQ ID NO: 515629 - DNA, 75 bp, synthetic construct
  source 1..75: mol_type = other DNA
aaaggggcaggtctgctgccacatatccgcgccaccgtaaagttgccgatgattgttatgaagcgcacgctacag

SEQ ID NO: 515630 - DNA, 75 bp, synthetic construct
  source 1..75: mol_type = other DNA
gacggataatggttcatgctaccgggccaatgaaacacgacagttggccgggatgttgggccttgaaccgaagat

SEQ ID NO: 515631 - DNA, 75 bp, synthetic construct
  source 1..75: mol_type = other DNA
gtgaaacaagatttggcacgcatcgagcaatttcttgatgccctgtggctggaaaaaaatctggcagaaaatacg

SEQ ID NO: 515632 - DNA, 75 bp, synthetic construct
  source 1..75: mol_type = other DNA
agcagtttcttgatgccctgtggcttgaaaaaaatctggcagaaaatactttgaacgcttaccggcgcgatctgt

SEQ ID NO: 515633 - DNA, 75 bp, synthetic construct
  source 1..75: mol_type = other DNA
acaatttggatggtagtcccttcttcgcatggaggcaatataaacatgctgacgaaatatgcccttgtggcagtc

SEQ ID NO: 515634 - DNA, 75 bp, synthetic construct
  source 1..75: mol_type = other DNA
acggtggaacccggtttgtggttggctggagtcttgatcttgcggagaacgtgttcgctgttgccggggcgatac

SEQ ID NO: 515635 - DNA, 75 bp, synthetic construct
  source 1..75: mol_type = other DNA
aggaaactggcctcatctgagcatttcaggcgcaaacgtgcgggttcaaaaaccattgaatacagcatcgactgc

SEQ ID NO: 515636 - DNA, 75 bp, synthetic construct
  source 1..75: mol_type = other DNA
atatcagcttgcgtcagggggtggtgcgggtaataggtaaaggcaacaaagagcgactggtgccgttaggtgaag

SEQ ID NO: 515637 - DNA, 75 bp, synthetic construct
  source 1..75: mol_type = other DNA
tgccggaattgaagaggaaggtattaaggcgcgggtgattcgctgctttaaatcctctgacgtggcctttgtcgc

SEQ ID NO: 515638 - DNA, 75 bp, synthetic construct
  source 1..75: mol_type = other DNA
agaggcgttcgagcattataacgaatggcatccgcatagtgcgctgggttatcgctcgccacgggaatatctgcg

SEQ ID NO: 515639 - DNA, 75 bp, synthetic construct
  source 1..75: mol_type = other DNA
gacggataatggttcatgctaccgggcgaatgaaacacgacagttggcctggatgttgggccttgaaccgaagac

SEQ ID NO: 515640 - DNA, 75 bp, synthetic construct
  source 1..75: mol_type = other DNA
ccgaacaatttggatggtagtcccttcttcgcatggaggcaatataaacatgctgacgaaatatgcccttgcggc

SEQ ID NO: 515641 - DNA, 75 bp, synthetic construct
  source 1..75: mol_type = other DNA
gccattttgcatattaaagagacgaagtacgtggtcactggcaaaaaaccgcaagaactgcgcgtgacgttttaa

SEQ ID NO: 515642 - DNA, 75 bp, synthetic construct
  source 1..75: mol_type = other DNA
gcgaagcgtgaatccccgcagccagtaccaacactcaatgatcaaatggcgcgacctaaatatcaggctaaatct

SEQ ID NO: 515643 - DNA, 75 bp, synthetic construct
  source 1..75: mol_type = other DNA
ctgactgcccgtggtgtgcgctggataatcaaggcgttatctattttattgatctcggcgaagaggtcattacca

SEQ ID NO: 515644 - DNA, 75 bp, synthetic construct
  source 1..75: mol_type = other DNA
tatggaagcgatttacctggccggctgatacggaagcacctggcgccagtttaagctgggtaagcactcaggccg

SEQ ID NO: 515645 - DNA, 75 bp, synthetic construct
  source 1..75: mol_type = other DNA
tggatggctggaataatgcattttccgggcgttatccgtttaaaaatgtcagcagcgatgcttcgcttcccctgc

SEQ ID NO: 515646 - DNA, 75 bp, synthetic construct
  source 1..75: mol_type = other DNA
aaagaaatccgccgggaattgcgtaaccttcatgggcgttgctggcaccgaagaattcgtattctgctggttacc

SEQ ID NO: 515647 - DNA, 75 bp, synthetic construct
  source 1..75: mol_type = other DNA
gctcaggttgttcgtaaccatggtgtggaacttcctatagtcaaaactgaaaatggatggaagcttgttggagaa

SEQ ID NO: 515648 - DNA, 75 bp, synthetic construct
  source 1..75: mol_type = other DNA
agcattggatatgtttggtttattcaatgttactcagatggcattagaaatacccagttccgtctctggtgtttc

SEQ ID NO: 515649 - DNA, 75 bp, synthetic construct
  source 1..75: mol_type = other DNA
gtggcatgcaagagaaggagccatcttccctaataaagcagatattgaacatgccacaggtgctgatatacgcgc

SEQ ID NO: 515650 - DNA, 75 bp, synthetic construct
  source 1..75: mol_type = other DNA
gactatcctcgtatatggtggcatgcaagagaaggagccattttccccaataaagaagatattgcccgtgcaaca

SEQ ID NO: 515651 - DNA, 75 bp, synthetic construct
  source 1..75: mol_type = other DNA
aagcaatggcttaccacatcataatccatcaaatcatgttgatatctttgatataatccaagaaacaagagtcta

SEQ ID NO: 515652 - DNA, 75 bp, synthetic construct
  source 1..75: mol_type = other DNA
gttcgtaaccatggtgtggaacttcctatagtcaaaactgaaaatggatggaagcttgttggagaaacgcctctt

SEQ ID NO: 515653 - DNA, 75 bp, synthetic construct
  source 1..75: mol_type = other DNA
tgcgggggaaaatggcaaaagccgcctatgaccagctcagactgtatctgatgctggcgcaaccgcaacatatgg

SEQ ID NO: 515654 - DNA, 75 bp, synthetic construct
  source 1..75: mol_type = other DNA
gacattcaaccctgcgtttctgaaagccatcaataccctgagtgaaatagcggatgtggcgttcaccacaggtaa

SEQ ID NO: 515655 - DNA, 75 bp, synthetic construct
  source 1..75: mol_type = other DNA
gttacgccgtctgcgttaccggcctgctgatggcattgtctgggtaacttccggactgagtgaaacattatccgc

SEQ ID NO: 515656 - DNA, 75 bp, synthetic construct
  source 1..75: mol_type = other DNA
tggttgggcaagcagcggggcatgccatacagtataatacccccggattaaagccagacactattttatggtggg

SEQ ID NO: 515657 - DNA, 75 bp, synthetic construct
  source 1..75: mol_type = other DNA
agtgggatgccgttccggtacttgatgctggtggtcttgatgcgttccagcgttttgtgaagcgtctgcccgaag

SEQ ID NO: 515658 - DNA, 75 bp, synthetic construct
  source 1..75: mol_type = other DNA
gcatgcgagggctttttcggacgattgaagaccgaactaatctacccgaggaattggcagcacgtgacgctgaaa

SEQ ID NO: 515659 - DNA, 75 bp, synthetic construct
  source 1..75: mol_type = other DNA
cgcccgctctcgcctcgagaagcagcaagccgtcattgcactgaacctgcgcgtaggttcggcaaaggatgtggc

SEQ ID NO: 515660 - DNA, 75 bp, synthetic construct
  source 1..75: mol_type = other DNA
aagcgcagcgtgaaagtctggccaccctgaaaggtgaatttatcgatggcaaatatatgcgcgtacatcgcacca

SEQ ID NO: 515661 - DNA, 75 bp, synthetic construct
  source 1..75: mol_type = other DNA
caggtagaagccggcaagttgattatcggcccctggtatacccagaccgataccacgattgtttctgcggaatcc

SEQ ID NO: 515662 - DNA, 75 bp, synthetic construct
  source 1..75: mol_type = other DNA
tgtgttccgacgctgtccgacatcgtcaacatcaaccccaacgaggccagcaaaaccacgaaaaaattaaattca

SEQ ID NO: 515663 - DNA, 75 bp, synthetic construct
  source 1..75: mol_type = other DNA
tcagcacagtaattaacaaatcagctaaagccggtttatccggcgtaattatccacgccgttcatgaaattaagg

SEQ ID NO: 515664 - DNA, 75 bp, synthetic construct
  source 1..75: mol_type = other DNA
tctggtactgacagtttactgcctgcatcaacgttaccttaatcgcactatgcctgtcggtttaccgggactggc

SEQ ID NO: 515665 - DNA, 75 bp, synthetic construct
  source 1..75: mol_type = other DNA
atgaaacaagcaaatcaagatagaggtacgctgctgctggcgttggttgctggcttatcgatcaatggtacgttt

SEQ ID NO: 515666 - DNA, 75 bp, synthetic construct
  source 1..75: mol_type = other DNA
cggcagctgggataccccaccaagaactcgctgaaggcctggttggcagaattcgaacggaatcaggatcttcgc

SEQ ID NO: 515667 - DNA, 75 bp, synthetic construct
  source 1..75: mol_type = other DNA
gagccgtgaggttgtacctgaagcttgggcgccggatgagcgccacactacggcagctgggataccccaccaaga

SEQ ID NO: 515668 - DNA, 75 bp, synthetic construct
  source 1..75: mol_type = other DNA
gtttgaaattgaaaaacactctatgcactatttttatatgatttttgatattgaacgctatataaatgactgcag

SEQ ID NO: 515669 - DNA, 75 bp, synthetic construct
  source 1..75: mol_type = other DNA
gccgaaggtgaaatcgaaatgagcacccgcagttttaaccagctcggggaagcggccgctcaggcgggatcgtgg

SEQ ID NO: 515670 - DNA, 75 bp, synthetic construct
  source 1..75: mol_type = other DNA
acaaaccagttgaacatcagcaactccctgattcatggttcaatcacttcaatgctgcctatgggtgaaagcagt

SEQ ID NO: 515671 - DNA, 75 bp, synthetic construct
  source 1..75: mol_type = other DNA
atcgctaaacagaaagagcgcccaccagccagcaaaacgcggaaaagcgcggtaaaaataaaatctcgtggcttg

SEQ ID NO: 515672 - DNA, 75 bp, synthetic construct
  source 1..75: mol_type = other DNA
ctgaagcgggggaagggccgcttgtattgctgaaactccgcaattttgttctgccggaaacggttttcgaactct

SEQ ID NO: 515673 - DNA, 75 bp, synthetic construct
  source 1..75: mol_type = other DNA
aaccggtaactacaaagttcgtatcgacaacgcaactggcgctggcgctatcgctgattacaaagataaagaaat

SEQ ID NO: 515674 - DNA, 75 bp, synthetic construct
  source 1..75: mol_type = other DNA
atcagttcgatactgaagctttccgtacagataaactggaactgactagcggcaacatcgctgaccacaacggca

SEQ ID NO: 515675 - DNA, 75 bp, synthetic construct
  source 1..75: mol_type = other DNA
atggtggccagaatgacgtagcactgtcattcactgacaatgctggctcaaattattccatgaaaaacaatgtaa

SEQ ID NO: 515676 - DNA, 75 bp, synthetic construct
  source 1..75: mol_type = other DNA
tttccgccggtgtgatggtgtgtggctcgctggtcattattattaacgtgatttctgatattttgggtgctatgg

SEQ ID NO: 515677 - DNA, 75 bp, synthetic construct
  source 1..75: mol_type = other DNA
atgattatcttcaccttacgccgcattttgttattgattgtcaccttgttcctgctgaccttcgttggcttcagc

SEQ ID NO: 515678 - DNA, 75 bp, synthetic construct
  source 1..75: mol_type = other DNA
tccagtctgacgggcgtgatggcgcagcgactggtccgcacgctgtgctccgactgccgtcaggccgcgcctgcc

SEQ ID NO: 515679 - DNA, 75 bp, synthetic construct
  source 1..75: mol_type = other DNA
cgtttcagggcgtttcgatttgctctatgaagtgaaacctgttactggctttgcgttgattgatgcctggctttc

SEQ ID NO: 515680 - DNA, 75 bp, synthetic construct
  source 1..75: mol_type = other DNA
tttccgccggtgtgatggtgtgtggttcgctggtcattattgttaatgtgatttctgatattttgggtgctatgg

SEQ ID NO: 515681 - DNA, 75 bp, synthetic construct
  source 1..75: mol_type = other DNA
ctgatccattgggattttggtgtttccagcattaacggtcagccgattgccgaacagttaaaagaagtctttccg

SEQ ID NO: 515682 - DNA, 75 bp, synthetic construct
  source 1..75: mol_type = other DNA
cttgagctactctcacttcaacaacgacctgtctgcaaccatgagcaacggtacttacgttgacggtagcaccaa

SEQ ID NO: 515683 - DNA, 75 bp, synthetic construct
  source 1..75: mol_type = other DNA
cagtaaaccatcagactaatcgcacacatcacctcacgcagactgaacagcctcccgttcaaatacctgcatccg

SEQ ID NO: 515684 - DNA, 75 bp, synthetic construct
  source 1..75: mol_type = other DNA
aatttttacaccatgtgctgcacaggtagtggaagaggctgtccctttagtagctgatggtggggccgctcgtcc

SEQ ID NO: 515685 - DNA, 75 bp, synthetic construct
  source 1..75: mol_type = other DNA
tgctattgcgaatacagaatcaaatggcacttatcaggattattgccgaaaaaaaggattggacatccacccagc

SEQ ID NO: 515686 - DNA, 75 bp, synthetic construct
  source 1..75: mol_type = other DNA
attccctctgcatgatgaaataggttttaattttaaagaccttcctggcccgttaaaaaatgcattaagcaacag

SEQ ID NO: 515687 - DNA, 75 bp, synthetic construct
  source 1..75: mol_type = other DNA
ttaccaatgcggcagcgaatgcggttggcgcagcagggggatttgcggtatccagactccccggagtagacccaa

SEQ ID NO: 515688 - DNA, 75 bp, synthetic construct
  source 1..75: mol_type = other DNA
atacagcagcatgcgccagagtgtggtgaaagagcggctttattgagtttaataaaagatgaaggtctgctctca

SEQ ID NO: 515689 - DNA, 75 bp, synthetic construct
  source 1..75: mol_type = other DNA
gcgttgatgaacaccctgaacgtgcaggggcgcaccgggcagactggtgaagcaatttcagattcattggtgaaa

SEQ ID NO: 515690 - DNA, 75 bp, synthetic construct
  source 1..75: mol_type = other DNA
attacagcattacgcctgaaaaagttaatgagaaaggtgaagttacatcaccacagatttataacggctacactt

SEQ ID NO: 515691 - DNA, 75 bp, synthetic construct
  source 1..75: mol_type = other DNA
accaagaacttcagcgcctataccgatgctaactacctcggtggtggtgacgtagatcaagactggtccgcgaac

SEQ ID NO: 515692 - DNA, 75 bp, synthetic construct
  source 1..75: mol_type = other DNA
atcgcgtttcacctctcagcaccagcatgattaaatcatacgctcatcgtctgagagacgttcttcagatatcaa

SEQ ID NO: 515693 - DNA, 75 bp, synthetic construct
  source 1..75: mol_type = other DNA
tctctgttaaaactaaaaaaaggggatgatatatatgcagtgtgctcaggtgctaattttagcttagtgccaatt

SEQ ID NO: 515694 - DNA, 75 bp, synthetic construct
  source 1..75: mol_type = other DNA
tttgtctggatttgcttcgaaagcaatgaacaatcaatttggttatcatttgccatctgagttggttaatgattt

SEQ ID NO: 515695 - DNA, 75 bp, synthetic construct
  source 1..75: mol_type = other DNA
atacattcggaacaagatttcatgtgaatatggcctctgttcttagtggtgttcctgcattatggctaaggaagg

SEQ ID NO: 515696 - DNA, 75 bp, synthetic construct
  source 1..75: mol_type = other DNA
caacacttcttggtgtaagaggtgagtttacaaaacaggtgatagaaaagtgtaccaatataaataatgtgttcg

SEQ ID NO: 515697 - DNA, 75 bp, synthetic construct
  source 1..75: mol_type = other DNA
gacagatatcagtaatatgacacacgatgaaatggcagctaaatggatggaggatcctgcttttaaagcagaata

SEQ ID NO: 515698 - DNA, 75 bp, synthetic construct
  source 1..75: mol_type = other DNA
aatggttgtggtgggcgatagagtgggcgcatttggtgcctaccgtgacggctgcgaaattattggccgcgctgc

SEQ ID NO: 515699 - DNA, 75 bp, synthetic construct
  source 1..75: mol_type = other DNA
gaacgtcgaattaaagctattggtactgtcacgggtgcaaactacgggcgtcttatgcgtgagggatttacagcg

SEQ ID NO: 515700 - DNA, 75 bp, synthetic construct
  source 1..75: mol_type = other DNA
ttttcagggaagcagcggtggagaaccgcgttatctggaagatccaacaatgcgagtaaaagacttcagcattgt

SEQ ID NO: 515701 - DNA, 75 bp, synthetic construct
  source 1..75: mol_type = other DNA
ttgtggcaggtctgtgacaacggtgattatcaggccggacgccccctgcaaagcgtcggctgcctgctgccggaa

SEQ ID NO: 515702 - DNA, 75 bp, synthetic construct
  source 1..75: mol_type = other DNA
ccgtccgttcccgtgcccgtgtggccatccacaccaccggcggtcgtgtaacggggcaacatcaccgtttacctg

SEQ ID NO: 515703 - DNA, 75 bp, synthetic construct
  source 1..75: mol_type = other DNA
agtccgaacgccgcgctgatgtataaaattacccctaacacaatggcctacgttagctatgccgattcgctggag

SEQ ID NO: 515704 - DNA, 75 bp, synthetic construct
  source 1..75: mol_type = other DNA
tgtttttattaaggatgctttttttgaagaagccttacagggaatgggacagcgcacagaatatgagcctgtctt

SEQ ID NO: 515705 - DNA, 75 bp, synthetic construct
  source 1..75: mol_type = other DNA
aatgtgaaaaaagctttgaaaattgtttctgcgtttcgatgggcagcaacaaaactgacaattacagcgccgcta

SEQ ID NO: 515706 - DNA, 75 bp, synthetic construct
  source 1..75: mol_type = other DNA
aatttagtttgctactccagcgactaaccccaaaatggcgtgtctttgcccctacagcagaacactgcggtggta

SEQ ID NO: 515707 - DNA, 75 bp, synthetic construct
  source 1..75: mol_type = other DNA
ctcaaaacataaagagctggtcgtggttgaaggttattcacattacgacctgtatgataagccagaacctgtgaa

SEQ ID NO: 515708 - DNA, 75 bp, synthetic construct
  source 1..75: mol_type = other DNA
ggaatgactcgtgtggcgctgctgggtacgcgttacaccatggaacaggatttttatcgcgggcggctgacggaa

SEQ ID NO: 515709 - DNA, 75 bp, synthetic construct
  source 1..75: mol_type = other DNA
gcccgctgggaacgaaatcctggatcgaaacaccatattccagcaccactgttactaaagagatgattgaaaatc

SEQ ID NO: 515710 - DNA, 75 bp, synthetic construct
  source 1..75: mol_type = other DNA
aacacagtcttgagcagctatctcgcatctcgtcagagttcgaaccatcaagccaaaagcgcaggaaaatgtcta

SEQ ID NO: 515711 - DNA, 75 bp, synthetic construct
  source 1..75: mol_type = other DNA
atacgatgcacaaagtggcggatgccattgagtctcgttgctctctgcctttcttacacattgcggatgccaccg

SEQ ID NO: 515712 - DNA, 75 bp, synthetic construct
  source 1..75: mol_type = other DNA
ggtttactggtgccagaagagcgcagtgttttgcctgtgtttgataccgcggcgatccatgccgaggatgctgtc

SEQ ID NO: 515713 - DNA, 75 bp, synthetic construct
  source 1..75: mol_type = other DNA
attgtgttatgtaccaatacgatgcacaaagtggcggatgccattgagtctcgttgctctctgcctttcttacac

SEQ ID NO: 515714 - DNA, 75 bp, synthetic construct
  source 1..75: mol_type = other DNA
aaatcgatcgcattaagttgcagcagtacgcttcctgaacgctacctggttaagatcgaccctcaggcgtttaag

SEQ ID NO: 515715 - DNA, 75 bp, synthetic construct
  source 1..75: mol_type = other DNA
cctgaaattcttcagttgctgaactctgtaaaagaacacattgcagagctggaccaggagattgctgttttctgt

SEQ ID NO: 515716 - DNA, 75 bp, synthetic construct
  source 1..75: mol_type = other DNA
caatggcgcaacaaagaacagacgaagctaacggcgcaaaacttcgcgtagatgatttactcccttcttctccgg

SEQ ID NO: 515717 - DNA, 75 bp, synthetic construct
  source 1..75: mol_type = other DNA
ggtaactcgcttccctgctctgctttatccgctgggtaactggatctgcctgctgtttatggcggcggtactggt

SEQ ID NO: 515718 - DNA, 75 bp, synthetic construct
  source 1..75: mol_type = other DNA
gcctgttaatggcgctggtggtatctgcactggtgatcaactgggcgatgattagcctggcgcatatgaaattcc

SEQ ID NO: 515719 - DNA, 75 bp, synthetic construct
  source 1..75: mol_type = other DNA
tgtttgttcaaaccgttgaccctggatgtactgaaaacacatttaagtcagttacaccaagttgcgcatattgca

SEQ ID NO: 515720 - DNA, 75 bp, synthetic construct
  source 1..75: mol_type = other DNA
cagctatagctggggtacaacaaatatgtatcacccggatgcgatagatgagcagggcgatggcaaaatccgcac

SEQ ID NO: 515721 - DNA, 75 bp, synthetic construct
  source 1..75: mol_type = other DNA
taaagaatttcagcagcatattactactcttctggcaaatcaggttttacaaaaaataactgaggcagtggttat

SEQ ID NO: 515722 - DNA, 75 bp, synthetic construct
  source 1..75: mol_type = other DNA
attcttgagtgcaagaaagcctcgccgtcaaaaggcgtgatccgtgatgatttcgatccggcacgcattgccgcc

SEQ ID NO: 515723 - DNA, 75 bp, synthetic construct
  source 1..75: mol_type = other DNA
attctggagtgtaaaaaagcgtcgccgtcaaaaggcgtgatccgtgatgatttcgatccggcacgcattgccgcc

SEQ ID NO: 515724 - DNA, 75 bp, synthetic construct
  source 1..75: mol_type = other DNA
ccaatcctctgatagacaaaaaataggttgctacgctttaaagttagctaataagcataaaaaaggttggtttgc

SEQ ID NO: 515725 - DNA, 75 bp, synthetic construct
  source 1..75: mol_type = other DNA
ccgactgcggcatttgtggtaattctctatcctgtttcgcaacagtttggactggcaggcctgctggttgcgacg

SEQ ID NO: 515726 - DNA, 75 bp, synthetic construct
  source 1..75: mol_type = other DNA
gcagaatccaggggctttcatcccgttgaaatacggtttatccgtaagaataatgaatggtattttgattatgtc

SEQ ID NO: 515727 - DNA, 75 bp, synthetic construct
  source 1..75: mol_type = other DNA
ccgcatatcgatacccgtgtactggacggtaaacgcgtggtgctgttcgggccatttgctaccttctcaaccaaa

SEQ ID NO: 515728 - DNA, 75 bp, synthetic construct
  source 1..75: mol_type = other DNA
taccgttccgcatatgagctttgtctggggcgaggataacgttaatttcctgcgcgcccgttacgccgcgttgca

SEQ ID NO: 515729 - DNA, 75 bp, synthetic construct
  source 1..75: mol_type = other DNA
tttgtctttatcggcgcgggcggtgcggcgctgaagctgttacaggaatcggggattccggaagcgaaagactac

SEQ ID NO: 515730 - DNA, 75 bp, synthetic construct
  source 1..75: mol_type = other DNA
gaatttgctggaaaaagtgtttagcgatcgtgtatccagtccgcaatggcaggccacgctgaaatcaatagttcc

SEQ ID NO: 515731 - DNA, 75 bp, synthetic construct
  source 1..75: mol_type = other DNA
aaaaagaggactggcgtttgtggcaagcggggcagcgcgtgcagattatcaagcgtgatgccgataaaggtggcg

SEQ ID NO: 515732 - DNA, 75 bp, synthetic construct
  source 1..75: mol_type = other DNA
tccgcgcgaaatttgtctttattggcgcgggcggtgcggcgttgaagttgttgcaggagtccgggatcccggaag

SEQ ID NO: 515733 - DNA, 75 bp, synthetic construct
  source 1..75: mol_type = other DNA
tgtggtaagtgaacttaagaacaatcgattcaatccatttcaaaagctcttagaatatgtatctaaaggaattga

SEQ ID NO: 515734 - DNA, 75 bp, synthetic construct
  source 1..75: mol_type = other DNA
tatgtgaaacgctggaacatcttattcgcgagaaggatgtcccaggaacagaaaaatacatcagcgacattgaca

SEQ ID NO: 515735 - DNA, 75 bp, synthetic construct
  source 1..75: mol_type = other DNA
cagaagccctgatctttggttctcacgacaactcaacgcttgagatgacccaacgaatgtctacttatctggaca

SEQ ID NO: 515736 - DNA, 75 bp, synthetic construct
  source 1..75: mol_type = other DNA
taccagattgtcgacattactcatgctatacaaaagcgcgtcgatacctggcgttacgtgacctggcagatctac

SEQ ID NO: 515737 - DNA, 75 bp, synthetic construct
  source 1..75: mol_type = other DNA
gcagctatttgatggtggcgggctttgtctctgataacccagacaccacacaggacgatatctcggactatgtgg

SEQ ID NO: 515738 - DNA, 75 bp, synthetic construct
  source 1..75: mol_type = other DNA
tatcagattgttgatatcactcacgcgattcaaaagcgggtggatacctggcgttacatgacctggcaaatctat

SEQ ID NO: 515739 - DNA, 75 bp, synthetic construct
  source 1..75: mol_type = other DNA
cctgctggttcacgatcaggaatcgaaccgcacggtcataagtaacaaaattgccgatcatttgctgccgcattt

SEQ ID NO: 515740 - DNA, 75 bp, synthetic construct
  source 1..75: mol_type = other DNA
caccgtttgcggaagggaaaaatggtctgttccagcatcctgttctcacggcaattggcgagaagtatggcaaaa

SEQ ID NO: 515741 - DNA, 75 bp, synthetic construct
  source 1..75: mol_type = other DNA
gatcttccagcgaggcatcgtttcgctggcaaaatcggtgcgcaaagaacgcatggcagagaacatcaacattct

SEQ ID NO: 515742 - DNA, 75 bp, synthetic construct
  source 1..75: mol_type = other DNA
tattctctgaaagaaaagaagatatagaaaaatattttgattttgttaaattcattattgatgagaggccatcat

SEQ ID NO: 515743 - DNA, 75 bp, synthetic construct
  source 1..75: mol_type = other DNA
ctattaatgacctgatcccgccggggatgccgctggatagcttccgtcttgagccagaagcgggcgcaacgggta

SEQ ID NO: 515744 - DNA, 75 bp, synthetic construct
  source 1..75: mol_type = other DNA
agcgatgatgagtctggcgtacgggaaattgggcctggtcaattgtgcgtcaacttcaatatgagcaacgctatg

SEQ ID NO: 515745 - DNA, 75 bp, synthetic construct
  source 1..75: mol_type = other DNA
ggatagcgtcagtatccactttaacagtacgaagattgaaatctcctcggcactcaactctaccgatatgcgcct

SEQ ID NO: 515746 - DNA, 75 bp, synthetic construct
  source 1..75: mol_type = other DNA
aagcacagcgccagtcactgattgatgcagcaatggcttccattagtctgattcagctgaaattacaggccgggc

SEQ ID NO: 515747 - DNA, 75 bp, synthetic construct
  source 1..75: mol_type = other DNA
aactggctaaatgtttattttggcaacctggtcggcgcactgctgtttgtacttttaatgtggctttccggcgag

SEQ ID NO: 515748 - DNA, 75 bp, synthetic construct
  source 1..75: mol_type = other DNA
ttaaaatttatttttatttggataatcaaatatttactccgtatttgcataaaaaccatgcgagttacgggccta

SEQ ID NO: 515749 - DNA, 75 bp, synthetic construct
  source 1..75: mol_type = other DNA
atcgccgtagtagaggcggcagaagcacagcggcagtttctgattgatactgcaatggcttccattggtctgatc

SEQ ID NO: 515750 - DNA, 75 bp, synthetic construct
  source 1..75: mol_type = other DNA
acgacttcatgtgctgagtggtccatggcgtgaccggatcctgaacgttgtcgggctgcccgtgccggatgcgac

SEQ ID NO: 515751 - DNA, 75 bp, synthetic construct
  source 1..75: mol_type = other DNA
gattgatgcagcaatggcttccattagtctgattcaactgaaattgcaggccggacggaagttgacgcaggcaga

SEQ ID NO: 515752 - DNA, 75 bp, synthetic construct
  source 1..75: mol_type = other DNA
atcaaacaggcggcggatatcgtcaaccgcttccagggcaatcagcaggtgatcctcgaccagatgcgcgagcgc

SEQ ID NO: 515753 - DNA, 75 bp, synthetic construct
  source 1..75: mol_type = other DNA
cctgagcgaaaacatggcgcggctttccggcgtcaaaaccagcatggcgcgcaaagtgatcaataacttctttga

SEQ ID NO: 515754 - DNA, 75 bp, synthetic construct
  source 1..75: mol_type = other DNA
atgagcgaattgacaacaaataagagcaacagctacctggaacaggcggcgatcctgctactgtgtctgggcgaa

SEQ ID NO: 515755 - DNA, 75 bp, synthetic construct
  source 1..75: mol_type = other DNA
ctgccggagaaatgacggaagaatgggtgtcatgcgggaaaattcatgcggatatccggggcaggagcagccggg

SEQ ID NO: 515756 - DNA, 75 bp, synthetic construct
  source 1..75: mol_type = other DNA
cgatggaagactgggcggtggcgctgaaaggcaccgaagccctgctgcgccgttcgatttacgcggtaatgccaa

SEQ ID NO: 515757 - DNA, 75 bp, synthetic construct
  source 1..75: mol_type = other DNA
aggatgagatgtacgacttctttatcctcagccgccagaacgaagaggtgcgtcgacgtctgcttgacgaagtgc

SEQ ID NO: 515758 - DNA, 75 bp, synthetic construct
  source 1..75: mol_type = other DNA
cacagcgccagtcgctgattgatgctgcaatggcttccatcagtctgattcaactgaaattacaggccgggcgga

SEQ ID NO: 515759 - DNA, 75 bp, synthetic construct
  source 1..75: mol_type = other DNA
caaatcatgctctaaatatcactcatgcaaaggaagtaaatacagcgataaaaaactggctgcaaaacaatcata

SEQ ID NO: 515760 - DNA, 75 bp, synthetic construct
  source 1..75: mol_type = other DNA
aaaaaattgagccattctcgctctatgacatcgttgatgacattttaaacgtcgcagactcactacaactggata

SEQ ID NO: 515761 - DNA, 75 bp, synthetic construct
  source 1..75: mol_type = other DNA
ggatggtgagaaatgggtgacagatactgaggcacagcatagtgccgcagtagacgcggcagaagcacagcgcca

SEQ ID NO: 515762 - DNA, 75 bp, synthetic construct
  source 1..75: mol_type = other DNA
acttcgccatcctcctgcagggagtcgcgttatcgcgagtaaggattttggcttcgctttagattttttcttttg

SEQ ID NO: 515763 - DNA, 75 bp, synthetic construct
  source 1..75: mol_type = other DNA
accattgtatgaaactgtctaaaaaaacccatagagaaaaaatgatcttacccagcaatagtggacacgcggcta

SEQ ID NO: 515764 - DNA, 75 bp, synthetic construct
  source 1..75: mol_type = other DNA
ctcatcatgcattaaacataactcacccaaatgaggtaaatatcgctataaaaaactggttacacaaaaccaaat

SEQ ID NO: 515765 - DNA, 75 bp, synthetic construct
  source 1..75: mol_type = other DNA
cctatatgggtggcgcgtacgtgttgatcagcgacaccgacggtaaaatcattaaagcctacgacgggctttgtt

SEQ ID NO: 515766 - DNA, 75 bp, synthetic construct
  source 1..75: mol_type = other DNA
tgggtgcgcttttgctggttaccagtgccgcctgggccgcaccagccaccgcgggttcgaccaatacctcgggaa

SEQ ID NO: 515767 - DNA, 75 bp, synthetic construct
  source 1..75: mol_type = other DNA
cacagcgccagtcactgattaatgcagcaatggcttccattagtctgattcagctgaaattacaggccggacgga

SEQ ID NO: 515768 - DNA, 75 bp, synthetic construct
  source 1..75: mol_type = other DNA
atgaatatattaatactggtgtaagtatgcccgcctgttccactggtattgacccgggcgaatacattccgggga

SEQ ID NO: 515769 - DNA, 75 bp, synthetic construct
  source 1..75: mol_type = other DNA
cacagcgccagtcactgattgatgcagcaatggcttccattagtctgattcagctgaaattacaggccgggcgga

SEQ ID NO: 515770 - DNA, 75 bp, synthetic construct
  source 1..75: mol_type = other DNA
cctatatgggcggtgcatatgtgctgatcaatgataccgacggaaaaatcattaaagcctacgacggtgagattt

SEQ ID NO: 515771 - DNA, 75 bp, synthetic construct
  source 1..75: mol_type = other DNA
gcaacagctacctggaacaggcggcgatcctgctgctgtgtctgggcgaagaagcggcggcgacggtgatgcaaa

SEQ ID NO: 515772 - DNA, 75 bp, synthetic construct
  source 1..75: mol_type = other DNA
ctggttactaattctgttcggttttttgctggtagtagcgaacaaactgctaatgcgtcgctcaacctggcttat

SEQ ID NO: 515773 - DNA, 75 bp, synthetic construct
  source 1..75: mol_type = other DNA
catcaattctgcgcagtggcgaggagataaaagcgcggaagtcattcatcaactggcgacgctactcaaagccgg

SEQ ID NO: 515774 - DNA, 75 bp, synthetic construct
  source 1..75: mol_type = other DNA
gtcagaggtatttccgccgctctatcaggcgatgatccgcacgggtgaactgaccggtaagctggatgaatgctg

SEQ ID NO: 515775 - DNA, 75 bp, synthetic construct
  source 1..75: mol_type = other DNA
ccagcgcgttctgcccgacaggaatattcaccggaatttgaacaggcctggcaggaatatcccaaacgtgctggt

SEQ ID NO: 515776 - DNA, 75 bp, synthetic construct
  source 1..75: mol_type = other DNA
acgcgggtgtgtgggaagacgacagacaggtgaaaagaatgctggtggagtggggaccggttatcccgaaaggga

SEQ ID NO: 515777 - DNA, 75 bp, synthetic construct
  source 1..75: mol_type = other DNA
gatggcgtgaagcggtatgccgcctgggtacgtgctacaggaaataccggcacacagttcgtgaagcaggctgcg

SEQ ID NO: 515778 - DNA, 75 bp, synthetic construct
  source 1..75: mol_type = other DNA
cgagggcgtttttgttctcgaccccaaaaacgacgagtgggcaccgcacctgtataaaaaagcgtgcgcggacgc

SEQ ID NO: 515779 - DNA, 75 bp, synthetic construct
  source 1..75: mol_type = other DNA
tcattgaagatattacagcggaacatctggaagagcttttcgttgcgggattcagtctcgctgaaaaaggggaag

SEQ ID NO: 515780 - DNA, 75 bp, synthetic construct
  source 1..75: mol_type = other DNA
ccctagattacattgatttgaaaaaaggggttttcattggcttagacaaagacgaccaaccgcaatatataacaa

SEQ ID NO: 515781 - DNA, 75 bp, synthetic construct
  source 1..75: mol_type = other DNA
aaagaggtttttgatgaaggtggttgttgctacattattggttcaactcgcaatcaaaagataatttctgcacaa

SEQ ID NO: 515782 - DNA, 75 bp, synthetic construct
  source 1..75: mol_type = other DNA
catattgaattgctgtcatttgaaaatcctcaatctgaacaaccacaaaccgaaatcaatgaacaaaataagcca

SEQ ID NO: 515783 - DNA, 75 bp, synthetic construct
  source 1..75: mol_type = other DNA
aacatcgaacttctttcatttgagtataaacaagccacaccagaaaaaaatgaaagtcaggaacataagccatca

SEQ ID NO: 515784 - DNA, 75 bp, synthetic construct
  source 1..75: mol_type = other DNA
cggtatttcagtacaccgcgccgattgcgaacaactggcggaactgcgctcccatgcgccagaacgcattgttga

SEQ ID NO: 515785 - DNA, 75 bp, synthetic construct
  source 1..75: mol_type = other DNA
atatcgctgcccagccggcaaaccgctacgcagtgaatggcgcgccttcacccagcaaaggtcgcgggtaactaa

SEQ ID NO: 515786 - DNA, 75 bp, synthetic construct
  source 1..75: mol_type = other DNA
cccgggggttggcatgctaacggccacttatgtggtagcagcagtgggtaatgcccgacaattcagtaccgcaaa

SEQ ID NO: 515787 - DNA, 75 bp, synthetic construct
  source 1..75: mol_type = other DNA
gtcagaaccagcatctacagacagtctaaacatatccgggaacttgaagaacaagttaaacaggtagaagaagct

SEQ ID NO: 515788 - DNA, 75 bp, synthetic construct
  source 1..75: mol_type = other DNA
tagttacgctcaccaagcaaaatagcgcccctggcgaatggaaaacagagatcatagaacattctccctctgtgc

SEQ ID NO: 515789 - DNA, 75 bp, synthetic construct
  source 1..75: mol_type = other DNA
caacaattcttttaaactcaatatgctctttcttcattttattatttttgcataatcactctcttgaggatcttc

SEQ ID NO: 515790 - DNA, 75 bp, synthetic construct
  source 1..75: mol_type = other DNA
tgctgggtaatattatcggcggtgcagtgctggtgagtatgtgttatcgggctatttatttacgtcaggaatcct

SEQ ID NO: 515791 - DNA, 75 bp, synthetic construct
  source 1..75: mol_type = other DNA
ggtggcaattccaagtcagcagccttcaaagcctggaaagcccgtatcagggagggaataaaaccggagaccatg

SEQ ID NO: 515792 - DNA, 75 bp, synthetic construct
  source 1..75: mol_type = other DNA
atgaacctgatgttggtggatctgctgacgcagatccacaggtcagtcatcgcgcaaaaaacaaaatcgactggc

SEQ ID NO: 515793 - DNA, 75 bp, synthetic construct
  source 1..75: mol_type = other DNA
acccagggacgcggtatttcagtgcatcgtgcagactgtgagcaactggcagaactgcgttcacacgcgccggaa

SEQ ID NO: 515794 - DNA, 75 bp, synthetic construct
  source 1..75: mol_type = other DNA
gctggccgcgcagccagaagtggtggcgattggtgaatgtggtctcgactttaaccgcaacttttcgacgccgga

SEQ ID NO: 515795 - DNA, 75 bp, synthetic construct
  source 1..75: mol_type = other DNA
gcgcgcttttgacgcgggagttaatgggctactcatcaccggcactaacctgcgtgaaagccagcaggcgcaaaa

SEQ ID NO: 515796 - DNA, 75 bp, synthetic construct
  source 1..75: mol_type = other DNA
ggcattaccggttgggtttgcgacgaacgacgtggactggaactgcgggaactgttgccgttgattccggcggag

SEQ ID NO: 515797 - DNA, 75 bp, synthetic construct
  source 1..75: mol_type = other DNA
atgagtgaagacctgaagcaaaatttaatcgctctcctggaagagcaattcattcgctccgatgacaaagtcgtt

SEQ ID NO: 515798 - DNA, 75 bp, synthetic construct
  source 1..75: mol_type = other DNA
caggaataatttcattggtattttctgttcatgccagcgataagcagaatataaaaagggacccaataccttatt

SEQ ID NO: 515799 - DNA, 75 bp, synthetic construct
  source 1..75: mol_type = other DNA
gtcggcacagcagctgctttcacgacaaaacccggtcgtggaagaaacgtggtgggagaatttacttgcagcact

SEQ ID NO: 515800 - DNA, 75 bp, synthetic construct
  source 1..75: mol_type = other DNA
tgatgacattcctaaacctgacttgtcatatatacagtcggcttgtaaaaaaatatcaccagtacttaaaaaggg

SEQ ID NO: 515801 - DNA, 75 bp, synthetic construct
  source 1..75: mol_type = other DNA
ccgacttgggttattaataaaataaaagttgcaattgctgattttttgcaaaaaaatccaagaaaaacaactaaa

SEQ ID NO: 515802 - DNA, 75 bp, synthetic construct
  source 1..75: mol_type = other DNA
gatgtcaggttttgtcctgctcagggacggtaagcaccctcttcgatatagcgagaacggaattgacgttattcg

SEQ ID NO: 515803 - DNA, 75 bp, synthetic construct
  source 1..75: mol_type = other DNA
ggtcggcctcgctcagccagggcagaccaccagggtggctgtgaaccagtgccacaatctccccctgcatctctg

SEQ ID NO: 515804 - DNA, 75 bp, synthetic construct
  source 1..75: mol_type = other DNA
ttccccccggcagaccagccaccagggcagtgcgctttttatctgcagccgccggtcagcctcgctcagccaggg

SEQ ID NO: 515805 - DNA, 75 bp, synthetic construct
  source 1..75: mol_type = other DNA
aatacgaaaatacgcctccggctctgcggagatattcacgcagggctggtaccgttcgccctccggggtgcttat

SEQ ID NO: 515806 - DNA, 75 bp, synthetic construct
  source 1..75: mol_type = other DNA
acagagagcttacgaaaatgattgagtcggcacagcagctgctttcacgacaaaacccggtcgtggaagaaacat

SEQ ID NO: 515807 - DNA, 75 bp, synthetic construct
  source 1..75: mol_type = other DNA
acatggtgggaaaatttactggcagcactgaccgaactccgcgaacgccggaacaacgaaggagccgccaaatga

SEQ ID NO: 515808 - DNA, 75 bp, synthetic construct
  source 1..75: mol_type = other DNA
tttgcgtgaaagccctgcgatgctcattacgcaaaaaatcgctgaaatgcattcgggcgttatgatggcagtaga

SEQ ID NO: 515809 - DNA, 75 bp, synthetic construct
  source 1..75: mol_type = other DNA
tatcaacaatgtaaagcaggtaagtgtggccttgatggagatgagggtggtcatttaatagtcagtatttttaat

SEQ ID NO: 515810 - DNA, 75 bp, synthetic construct
  source 1..75: mol_type = other DNA
ctggccgcagcctgatggacaaagcgttcattatggtgctgccggtcgcgatgtttgttgccagcggttttgagc

SEQ ID NO: 515811 - DNA, 75 bp, synthetic construct
  source 1..75: mol_type = other DNA
atgccccgctttacatatatttgcattaataaaataattgtaattataaggttaaatatcggtaatttgtattta

SEQ ID NO: 515812 - DNA, 75 bp, synthetic construct
  source 1..75: mol_type = other DNA
cactctcccctgcattgcctgctacatgcatggagtaatatctgaagaggtgtctctgcaccatatctccggtcg

SEQ ID NO: 515813 - DNA, 75 bp, synthetic construct
  source 1..75: mol_type = other DNA
ccgctgtacgccaacaccattaccgttactaacggtggtgtgctggatgtaaacaccaacatgaatgacatctcc

SEQ ID NO: 515814 - DNA, 75 bp, synthetic construct
  source 1..75: mol_type = other DNA
gttactgatttcacgcattaaagttatggctcggctggatattgccgaaaaacgcgttccccaagatggtcgcat

SEQ ID NO: 515815 - DNA, 75 bp, synthetic construct
  source 1..75: mol_type = other DNA
tcaatttatcccacacgcattcaagctgtacttaagagtattctggatggacaaaaatattatttgagagatgca

SEQ ID NO: 515816 - DNA, 75 bp, synthetic construct
  source 1..75: mol_type = other DNA
aaaagattttttaaccatttgagattcgttttagagcaaattgaagggcaggtatgtttttctgatctctttgct

SEQ ID NO: 515817 - DNA, 75 bp, synthetic construct
  source 1..75: mol_type = other DNA
aggtgatgtttctccgagtcaaacgtttacgattaatgtacaaggatgcccgactctgagagatcccctcataat

SEQ ID NO: 515818 - DNA, 75 bp, synthetic construct
  source 1..75: mol_type = other DNA
acgtttatcggcgcatcaatcggttttatgggcgcagagaaagcacgcgacaaggttattgcggcctttaatcgc

SEQ ID NO: 515819 - DNA, 75 bp, synthetic construct
  source 1..75: mol_type = other DNA
cgcgatgaggtatttttcaatcaaacggttgaaaacgtgcagcggattattattgaggggattcgaccacgttaa

SEQ ID NO: 515820 - DNA, 75 bp, synthetic construct
  source 1..75: mol_type = other DNA
taatgccgggcgaagaagaggtggctgagaatcctcgtgcccgtagttcagttctgcgtatcgcagagaggacga

SEQ ID NO: 515821 - DNA, 75 bp, synthetic construct
  source 1..75: mol_type = other DNA
taaatggcggcatgattcggcaccgatgcgccaaagcagcacagcaggatatcgcctgcctgtgcagaggacagg

SEQ ID NO: 515822 - DNA, 75 bp, synthetic construct
  source 1..75: mol_type = other DNA
agaatgactcgcgctttatatcggcgtcacacgaatacatcgtttgctttgcgcgtagtatgaatgctcttaaag

SEQ ID NO: 515823 - DNA, 75 bp, synthetic construct
  source 1..75: mol_type = other DNA
ggaagcacatgtttttgattttccgaaggatgaaacgatcattcaggcactagtggaaatgaccacggcaggcga

SEQ ID NO: 515824 - DNA, 75 bp, synthetic construct
  source 1..75: mol_type = other DNA
gtgaatatgcatcctaatggctggtcatttgccccggagcgcatgaaggagttgcttgcagatgagcgcattcga

SEQ ID NO: 515825 - DNA, 75 bp, synthetic construct
  source 1..75: mol_type = other DNA
taaaggacttgaattattgaaacttgatccagagtcacttaagcaatcgcttggagataaacttgtcgatgcaac

SEQ ID NO: 515826 - DNA, 75 bp, synthetic construct
  source 1..75: mol_type = other DNA
atttggcgatgaaaacttttgtggcgaaatagtctggaaaaatagtagtaaaaatgaccagaaatatgtctcaat

SEQ ID NO: 515827 - DNA, 75 bp, synthetic construct
  source 1..75: mol_type = other DNA
ttattaaaagatttatttaaagcaattggtgtatcagaaaaagatatagtccttgatttctttgcaggttctgca

SEQ ID NO: 515828 - DNA, 75 bp, synthetic construct
  source 1..75: mol_type = other DNA
tttcggtgaggataagctcatcgcttcgtttatttggaagagcaggcagaacaaagataaccgttcaaaaaatgg

SEQ ID NO: 515829 - DNA, 75 bp, synthetic construct
  source 1..75: mol_type = other DNA
tcattcgacgggaaaaaccgaagattcgtaatggttcaacttccccagcattgcgatgaaacttcagaagcctcg

SEQ ID NO: 515830 - DNA, 75 bp, synthetic construct
  source 1..75: mol_type = other DNA
gatcctgcaaccggaatcaactacggatgcccgccaatggggtggcgttacgaccgaaatacgatggcgaagttg

SEQ ID NO: 515831 - DNA, 75 bp, synthetic construct
  source 1..75: mol_type = other DNA
ccgacatgacgcagcaaaacatagagaaaattcaggcgttgtttccgaactgcgtgacggaatcaagaggagcta

SEQ ID NO: 515832 - DNA, 75 bp, synthetic construct
  source 1..75: mol_type = other DNA
atcgcattcggagagctgcaaaaaaaattagagaagaattttcagaaatattggctacaagaaatacggaacttg

SEQ ID NO: 515833 - DNA, 75 bp, synthetic construct
  source 1..75: mol_type = other DNA
cggtgcccccatcccgcaggcccgtcgggaagccattcctggcgtgcgcttatgcattcactgccaacaggagaa

SEQ ID NO: 515834 - DNA, 75 bp, synthetic construct
  source 1..75: mol_type = other DNA
atattgcctgaaagcgtcggttggcgcgccgccggatatcctcggcccgttggggcagaactggggattaccgcc

SEQ ID NO: 515835 - DNA, 75 bp, synthetic construct
  source 1..75: mol_type = other DNA
gtggctacgcagactgaagttgccaggcatttgagtctgaccgatcgccagcttcgcagattgcagaaattaccg

SEQ ID NO: 515836 - DNA, 75 bp, synthetic construct
  source 1..75: mol_type = other DNA
tagggcagaactggggattgccaccgatggatccgcatatcatcactgcgcgcgcttatgaaccgtttatcgagc

SEQ ID NO: 515837 - DNA, 75 bp, synthetic construct
  source 1..75: mol_type = other DNA
tagagattgtcggtaagctgcgcagcagcggtgtgtactcctacaaagtgctctatttcgaaaacgaccacgaga

SEQ ID NO: 515838 - DNA, 75 bp, synthetic construct
  source 1..75: mol_type = other DNA
cgatatgcggatgacaaactgggcgaagatttttaccaggatgcgataatctactccatcaaatttaacttctga

SEQ ID NO: 515839 - DNA, 75 bp, synthetic construct
  source 1..75: mol_type = other DNA
gggaagttttttatgacgttaaaaccgtactggagatagatcgcgagcggcgacaacacaatcagagaacacctg

SEQ ID NO: 515840 - DNA, 75 bp, synthetic construct
  source 1..75: mol_type = other DNA
aaagggcgcaaatcagtgtgcgcgggctggggataaattaccggatttactcgatgaatatatcagagcaacaac

SEQ ID NO: 515841 - DNA, 75 bp, synthetic construct
  source 1..75: mol_type = other DNA
acaagcacgggatgctgactgggtcgattattctaccgtcaccgccttgaaaatgacggcgttgcgaatggcatg

SEQ ID NO: 515842 - DNA, 75 bp, synthetic construct
  source 1..75: mol_type = other DNA
gtattgcctgaaagcgtcggttggcgcgccgccggatatcctcggcccgttggggcagaactggggattgccgcc

SEQ ID NO: 515843 - DNA, 75 bp, synthetic construct
  source 1..75: mol_type = other DNA
gttctggcaggcagcgtttgacgcgctacatgcacaacaagtgaaagaggacgaaatgcgctggggttggccagc

SEQ ID NO: 515844 - DNA, 75 bp, synthetic construct
  source 1..75: mol_type = other DNA
ccaaaacgtgccgggcataaggcatcactaatgtcgatgacaccgacgcttaatcgtggcttgcaacgttatatc

SEQ ID NO: 515845 - DNA, 75 bp, synthetic construct
  source 1..75: mol_type = other DNA
atggcggttgcggcgacacatgacctgcctacgctacgcggttactgggagagcggggatctaacgctgggcaaa

SEQ ID NO: 515846 - DNA, 75 bp, synthetic construct
  source 1..75: mol_type = other DNA
actgtggggagcttgcgttcagctttataccctgcgatcggaaaaaaactggggcatcggtgattttggcgatct

SEQ ID NO: 515847 - DNA, 75 bp, synthetic construct
  source 1..75: mol_type = other DNA
ggcgattggcttacagcgggcgggtgcagagggcattgtgttatgtaccaatacgatgcacaaagtggcagatgt

SEQ ID NO: 515848 - DNA, 75 bp, synthetic construct
  source 1..75: mol_type = other DNA
gcttatttttattggtctctattatggcatgcaatgtttttgcattttccatttctggtggtggaagtgagagga

SEQ ID NO: 515849 - DNA, 75 bp, synthetic construct
  source 1..75: mol_type = other DNA
gccgctaacgagtcggcacacttcatgcgtttttatgtgccctgtccgcactgtggggaggagcagtatctgaaa

SEQ ID NO: 515850 - DNA, 75 bp, synthetic construct
  source 1..75: mol_type = other DNA
tttggcgatgatgcgacaacctttggcctgaaatgggagaagggcaaaccggagacggtgtattacctgtgtgaa

SEQ ID NO: 515851 - DNA, 75 bp, synthetic construct
  source 1..75: mol_type = other DNA
ggcgattacattcgccaacgccgcctgttactggccgccgttgagttgcgcaccaccgagcgtccgatttttgat

SEQ ID NO: 515852 - DNA, 75 bp, synthetic construct
  source 1..75: mol_type = other DNA
acatcggggggatcgatggcgaaatcgtttatcagaggtcaaaaaaacacggtgttttccgagtgctgccggtaa

SEQ ID NO: 515853 - DNA, 75 bp, synthetic construct
  source 1..75: mol_type = other DNA
aggagcagtatctgaagtttggcgatgatgcgacgtcgtttggcctgaaatgggagaagggtaaaccggaaacgg

SEQ ID NO: 515854 - DNA, 75 bp, synthetic construct
  source 1..75: mol_type = other DNA
accattaaacctcacagaagaaaccacgcccacttatccgacaaaggcgagttatcttattcatcctgtgcgata

SEQ ID NO: 515855 - DNA, 75 bp, synthetic construct
  source 1..75: mol_type = other DNA
tgcaggaccgaccatcagatactgctgcaagcgcaggtgcacacgcacatactgtcggtattggtgctcatacgc

SEQ ID NO: 515856 - DNA, 75 bp, synthetic construct
  source 1..75: mol_type = other DNA
tacggttaacccggcggcgcaggatgatccgaagagtcctattgctggtatgcctgtgctggaagtgtggaaagc

SEQ ID NO: 515857 - DNA, 75 bp, synthetic construct
  source 1..75: mol_type = other DNA
ggtcaatattcacctgacggaagtgttcctcggtatcttcatcggggcggtaacgttcacgggttcggtggtggc

SEQ ID NO: 515858 - DNA, 75 bp, synthetic construct
  source 1..75: mol_type = other DNA
cggcattgatcccaccatcgtctacaaccgctcaaaaaaacatggtctgtttcgtgtgatccctataaagggtgc

SEQ ID NO: 515859 - DNA, 75 bp, synthetic construct
  source 1..75: mol_type = other DNA
gatggataaggttgtgccttacacggcaacggtgcctgtccgggtggtttatctgacggcgggcattgactcgca

SEQ ID NO: 515860 - DNA, 75 bp, synthetic construct
  source 1..75: mol_type = other DNA
ggcacacgtgttgttcgattgatggcgcgtggagggcgttatgaaatagccggacacgcacttaccggattaagg

SEQ ID NO: 515861 - DNA, 75 bp, synthetic construct
  source 1..75: mol_type = other DNA
gggttgagcttcgctattattattgcagctctcatagtgaactttattgtttcttttataactgaaaaagcaaaa

SEQ ID NO: 515862 - DNA, 75 bp, synthetic construct
  source 1..75: mol_type = other DNA
taataggccgttcagaaggtgagcgtcaggccactctgaaaattgcccgtaccatgctgcagaacggcattgacc

SEQ ID NO: 515863 - DNA, 75 bp, synthetic construct
  source 1..75: mol_type = other DNA
acgtcgcgccacgatattgagcatatcgatctcaacgcgccggaagacgagatccgccagttgctggagcgaaat

SEQ ID NO: 515864 - DNA, 75 bp, synthetic construct
  source 1..75: mol_type = other DNA
cctgttgatgatcggctttagcctggtggcggaaggtttcggtttcgtcattccaaaaggttatctgtatgccgc

SEQ ID NO: 515865 - DNA, 75 bp, synthetic construct
  source 1..75: mol_type = other DNA
aattatggtaattttgactcacgttatgtgagagatgtccgacttggtacacgtgttgttcagactatgcaaaaa

SEQ ID NO: 515866 - DNA, 75 bp, synthetic construct
  source 1..75: mol_type = other DNA
cgaagaagcccagcgtccgggcgagtatatgaccgcgtttgaagatgagcacggcacttacatcatgaactcgaa

SEQ ID NO: 515867 - DNA, 75 bp, synthetic construct
  source 1..75: mol_type = other DNA
ttacgctttcgcttatggcgcagatgctgtttatgcgggacaaccgcgttattccctgcgtgtgcgcaacaacga

SEQ ID NO: 515868 - DNA, 75 bp, synthetic construct
  source 1..75: mol_type = other DNA
tggagatcgagatcttcgttcacggcgcgctgtgcatggcctactccggtcgctgcctgctctctggctatatca

SEQ ID NO: 515869 - DNA, 75 bp, synthetic construct
  source 1..75: mol_type = other DNA
atgagaacccaggtacaggctttacggaagaaaaaaaatacattggatcaaatatttaaatctcctgttcctcaa

SEQ ID NO: 515870 - DNA, 75 bp, synthetic construct
  source 1..75: mol_type = other DNA
aaattcgcagccagatatctgactatgcagaccgactatccaggtatcgcgcgtctgtttttgtttgcgaattca

SEQ ID NO: 515871 - DNA, 75 bp, synthetic construct
  source 1..75: mol_type = other DNA
tgtcgaaatcggcggtcgcactacgcctgactgcgcgtccgattctggacatcgcgctgcaataccgcttcgact

SEQ ID NO: 515872 - DNA, 75 bp, synthetic construct
  source 1..75: mol_type = other DNA
acgttgcaggtggaaagccatcgcgtgcagaaggtgcagattattccgctgcgtaaggatggcgagatggagtac

SEQ ID NO: 515873 - DNA, 75 bp, synthetic construct
  source 1..75: mol_type = other DNA
ccaaagaggccatcaaagagttcaacgaaagccgtaaagggctggaagtggacgttatgaacgaagtgttatctt

SEQ ID NO: 515874 - DNA, 75 bp, synthetic construct
  source 1..75: mol_type = other DNA
taaaccgcacggcgttgcaacgatacgttttacaacggttcgccgtgtgcgcagcaatccggttgatgatcagcc

SEQ ID NO: 515875 - DNA, 75 bp, synthetic construct
  source 1..75: mol_type = other DNA
taaaatcctcaacgacagtactggagtcggatgtacctgcatcctggcagggatcttcccgctatgaaccccgtc

SEQ ID NO: 515876 - DNA, 75 bp, synthetic construct
  source 1..75: mol_type = other DNA
ttttcagccgacggactcagctgctgaagattttatgaagtctcacgtggaagcaacaattcgtgatgttccttg

SEQ ID NO: 515877 - DNA, 75 bp, synthetic construct
  source 1..75: mol_type = other DNA
ctggctggatgcgctgaaagatcctaacggcctgaaaacctttgtgaacaccacgctgggcgagacctacgaaga

SEQ ID NO: 515878 - DNA, 75 bp, synthetic construct
  source 1..75: mol_type = other DNA
caacgccccggaagaagagatccgccggttactggagcgaaatcagcacacgcgtctggtcgttaccgacggtga

SEQ ID NO: 515879 - DNA, 75 bp, synthetic construct
  source 1..75: mol_type = other DNA
accggcgacgttttctttccgctaaccagacgctgcgccagcgaactaccgaagcggtaatgcgcctgttaagcg

SEQ ID NO: 515880 - DNA, 75 bp, synthetic construct
  source 1..75: mol_type = other DNA
gattggtttctcggtgatgatcgaggcgctcaatcagttagccatctttaaccggcgacgttttctttccgctaa

SEQ ID NO: 515881 - DNA, 75 bp, synthetic construct
  source 1..75: mol_type = other DNA
cttggtattgtcggtgaagttgatggcgatgatccggcagtattcagaccaatacaaaaatacatcaatggcaca

SEQ ID NO: 515882 - DNA, 75 bp, synthetic construct
  source 1..75: mol_type = other DNA
tatctacagtcaatgcactgaggatatttaattcatcttttggtgctatttttcgccgttctgaagaaaacctgt

SEQ ID NO: 515883 - DNA, 75 bp, synthetic construct
  source 1..75: mol_type = other DNA
atggaatggattgccgatccgtcaatctgggcaggtcttgtcacgctggtggttatcgaactggtgttgggtatc

SEQ ID NO: 515884 - DNA, 75 bp, synthetic construct
  source 1..75: mol_type = other DNA
cgttaacgtttcgccaggtattggttcatttcaggcaaaaaaaaaaaaaaaaaaatatgcctggcatgatacagt

SEQ ID NO: 515885 - DNA, 75 bp, synthetic construct
  source 1..75: mol_type = other DNA
cgaagtgcgcagcctgcaaagtattaacacctctctggaggccgatctgcgtgaagtgaccacgcggatggaagc

SEQ ID NO: 515886 - DNA, 75 bp, synthetic construct
  source 1..75: mol_type = other DNA
cgactgcggtcggttccggagcagccgaatgatgaagcttatcaacgcgatgatgaatataatcagcagtcgcgc

SEQ ID NO: 515887 - DNA, 75 bp, synthetic construct
  source 1..75: mol_type = other DNA
ctgcatccattcctgaccatgatgttttgctcgccggtttcccatgccagccgttcagtattgccggtgtcagca

SEQ ID NO: 515888 - DNA, 75 bp, synthetic construct
  source 1..75: mol_type = other DNA
cataatgcagtcggcaaacagactgtagttgtctgtgagggggcgttcgatgttatgggggttaaacgagctatt

SEQ ID NO: 515889 - DNA, 75 bp, synthetic construct
  source 1..75: mol_type = other DNA
aggtcgtgctggccagcaaggttgaactcgaagggccagtagctctccctcgacattacgaactccccattgacg

SEQ ID NO: 515890 - DNA, 75 bp, synthetic construct
  source 1..75: mol_type = other DNA
ttgccggtgatgaacacgctgcacgtcgttcccttgttcgcgattacgtcctctcgttcgctggccgcctgccgg

SEQ ID NO: 515891 - DNA, 75 bp, synthetic construct
  source 1..75: mol_type = other DNA
cgctatcaatcgaggactacctgtcctgcccatgcgatcgtctgctgacggaaatcatcattaaagatccgtatc

SEQ ID NO: 515892 - DNA, 75 bp, synthetic construct
  source 1..75: mol_type = other DNA
ctactctcgccatgtacggaatcagtccaccattggtggcgaaatcgccgcccaacaggaagagtccgtactgct

SEQ ID NO: 515893 - DNA, 75 bp, synthetic construct
  source 1..75: mol_type = other DNA
cgcgaaagcgcgctacaggaacatatcgcgtcggtgcgtaaccatatccgtttgctgggacgcaaagattatcaa

SEQ ID NO: 515894 - DNA, 75 bp, synthetic construct
  source 1..75: mol_type = other DNA
aacacctctctggaggccgatctgcgtgaagtaaccacgcggatggaagccgcacagcaacatgctgacgataaa

SEQ ID NO: 515895 - DNA, 75 bp, synthetic construct
  source 1..75: mol_type = other DNA
gctgtttacttcttcctttccctgttgcgatgtttgtcggttgcctgtttccaggcatcgatgatcgttttactg

SEQ ID NO: 515896 - DNA, 75 bp, synthetic construct
  source 1..75: mol_type = other DNA
gctggactgaaagcgtcaagcgccaggtggtgaaggatgctttttatattcatcagcataaagggaccaccagtg

SEQ ID NO: 515897 - DNA, 75 bp, synthetic construct
  source 1..75: mol_type = other DNA
cagggaagtaaaaatacaaggcttcttaagcctatggaatatgaaatgctgctgctcattgctggtacgcatcca

SEQ ID NO: 515898 - DNA, 75 bp, synthetic construct
  source 1..75: mol_type = other DNA
tgggcgttttcggtcgacagatgggatgaaaagtggccggaagcgacaaaacgcgccgttatccgcgatgcctat

SEQ ID NO: 515899 - DNA, 75 bp, synthetic construct
  source 1..75: mol_type = other DNA
ggctgattgctgatgccaaacctgcaagccgtcaccttattggcctgaacattacccgggacattcccggctacc

SEQ ID NO: 515900 - DNA, 75 bp, synthetic construct
  source 1..75: mol_type = other DNA
aggttgcgtgaaccacatgtggaccatcagttgtctgcaactgcatccaaaagcgatcatggtgtgcgatgaacc

SEQ ID NO: 515901 - DNA, 75 bp, synthetic construct
  source 1..75: mol_type = other DNA
gaggcaatgtatcaggaaatggaacggctgattgctgatgccaaacctgcaagccgccaccttattggcctgaac

SEQ ID NO: 515902 - DNA, 75 bp, synthetic construct
  source 1..75: mol_type = other DNA
tgggcgttttctgtcgaccgctgggatgagaactggccggaggaaacgaagcgcgccgtcatccgtgatgcgtac

SEQ ID NO: 515903 - DNA, 75 bp, synthetic construct
  source 1..75: mol_type = other DNA
cggcgtgctggagaccggtatcaccgaggaaatgtattacgaaatggaaaggctgattgccgatgcaaagccagc

SEQ ID NO: 515904 - DNA, 75 bp, synthetic construct
  source 1..75: mol_type = other DNA
taggtgcaatccggcgtgtggtggagccgctcggctatctcattaacgtaaaggaatggtgggagacaaacgacc

SEQ ID NO: 515905 - DNA, 75 bp, synthetic construct
  source 1..75: mol_type = other DNA
tgatctggatacggcatcttctcaactggcagatgacgtttacgaagtggtactgcgtgttaccgtaacggcctc

SEQ ID NO: 515906 - DNA, 75 bp, synthetic construct
  source 1..75: mol_type = other DNA
tgactttccagatccagcgtatttataccaaggatatttctttcgaagcgccgaacgcgccgcacgttttccaga

SEQ ID NO: 515907 - DNA, 75 bp, synthetic construct
  source 1..75: mol_type = other DNA
ttactcccgtcatattcgtaaccagtccactatcggtggtgaaatcgcagctctgcaggaagagtccgtgttact

SEQ ID NO: 515908 - DNA, 75 bp, synthetic construct
  source 1..75: mol_type = other DNA
acgatattctgtttgtagctcgtttacaaggtgaatgggcgtcaagatattatccatgcggtgattggctaaact

SEQ ID NO: 515909 - DNA, 75 bp, synthetic construct
  source 1..75: mol_type = other DNA
tttgcgggagcgtgccggaaagtctgaccagacagacgccggtaccggtgctgccgcaacacatgatatgggctg

SEQ ID NO: 515910 - DNA, 75 bp, synthetic construct
  source 1..75: mol_type = other DNA
ttgaactcgtacgccagagtgggcgcgagacgttacgacaactggaaactaaaactggggcagcaggagctggac

SEQ ID NO: 515911 - DNA, 75 bp, synthetic construct
  source 1..75: mol_type = other DNA
ttgattcacttcttgccagcctgctggaggaagaaggcacccgtaacaataacaagaccctggcggattacgcgc

SEQ ID NO: 515912 - DNA, 75 bp, synthetic construct
  source 1..75: mol_type = other DNA
ctgggaaaacggctggcgtgatgttaccaactcacgcgcaccggttaaaacacccgccgatctgaaaggtctgaa

SEQ ID NO: 515913 - DNA, 75 bp, synthetic construct
  source 1..75: mol_type = other DNA
gcagaacgtgattgtctttaaacgttcgatgaacactggctatgctggtgtgcaaaaccctgctgttcaagcagt

SEQ ID NO: 515914 - DNA, 75 bp, synthetic construct
  source 1..75: mol_type = other DNA
tgcaaaacccattgttcttcaaagagaacacacacatgctgtttggcgacgctaaagccagcgtggatgcgattc

SEQ ID NO: 515915 - DNA, 75 bp, synthetic construct
  source 1..75: mol_type = other DNA
gcactgggtactcaggtccgcgacatgtttgtaaaagatgttccgcagggtgctgatctactgaaagccgtggat

SEQ ID NO: 515916 - DNA, 75 bp, synthetic construct
  source 1..75: mol_type = other DNA
gcgcaaactggttgctgaagatcagcaaaaaatcatcgacggtatgaaagacgccggtgtagaagtcatcaccga

SEQ ID NO: 515917 - DNA, 75 bp, synthetic construct
  source 1..75: mol_type = other DNA
taactttgcgggactctcacccgtgataaacctgctggatgtacctttcctgttccgcgataccgcccacgcgca

SEQ ID NO: 515918 - DNA, 75 bp, synthetic construct
  source 1..75: mol_type = other DNA
ctgaaaagaccattgccaatgacccccgttgaatgggcggatgccaattactatctcccaaaagaatccgcatac

SEQ ID NO: 515919 - DNA, 75 bp, synthetic construct
  source 1..75: mol_type = other DNA
tgctggcattggggataattaatgaaccgctacggatgcaaaacgatgactttggctggggcgtggtgattttgc

SEQ ID NO: 515920 - DNA, 75 bp, synthetic construct
  source 1..75: mol_type = other DNA
ggaacccgcttttttactggcgcttgatcgccagccggagctgatcaccgaagcattaaagaacaacataatgct

SEQ ID NO: 515921 - DNA, 75 bp, synthetic construct
  source 1..75: mol_type = other DNA
aattggctggctgtttgccagttatcaacatgcgcagcaaaaagccgagcaattagctgaacgtgaagagatggt

SEQ ID NO: 515922 - DNA, 75 bp, synthetic construct
  source 1..75: mol_type = other DNA
ctgcccatgcgatcgcctgctaaccgaaattatcattaaagatccgtatcgcacctgtgcgacccgcaaaattag

SEQ ID NO: 515923 - DNA, 75 bp, synthetic construct
  source 1..75: mol_type = other DNA
accctgaatttgtctttgtgtttgcggctgtccgtcgcgcagaccgtcatccccgtatctgcatgcttcgcaccg

SEQ ID NO: 515924 - DNA, 75 bp, synthetic construct
  source 1..75: mol_type = other DNA
atggctacaacccttaccccctcacaccctgaatttgtctttgtgtttgcggctgtccgtcgtgcagaccgtcat

SEQ ID NO: 515925 - DNA, 75 bp, synthetic construct
  source 1..75: mol_type = other DNA
gaggtgatggcggagcggaaagagcattattcagcgcccgttcctgaccgtgtggcttatcatcagttaatctgg

SEQ ID NO: 515926 - DNA, 75 bp, synthetic construct
  source 1..75: mol_type = other DNA
cccgcgcaagcgatatagttacagttcccattaagaataatctttataatcttccttttacggttctttgtgagg

SEQ ID NO: 515927 - DNA, 75 bp, synthetic construct
  source 1..75: mol_type = other DNA
cgcagcgaagcggctttgcaactccctgttcggccggtctggtagccagtccattcttgtctatgtctttggtca

SEQ ID NO: 515928 - DNA, 75 bp, synthetic construct
  source 1..75: mol_type = other DNA
ggtgacaccctccgggttcaggcagacaaactgagtaccgcagcgggcgcacagcttcagagcggtaaaaatctc

SEQ ID NO: 515929 - DNA, 75 bp, synthetic construct
  source 1..75: mol_type = other DNA
gctgaaaatgtcacccttaccaccacgggtgatatcacactgaaaggccgcagcattgccgggaaaacactcact

SEQ ID NO: 515930 - DNA, 75 bp, synthetic construct
  source 1..75: mol_type = other DNA
acggcctgaaagtcaccgccactgacctgaccagcaccggcagtattaaaagtggcagcacactcgatatcagcg

SEQ ID NO: 515931 - DNA, 75 bp, synthetic construct
  source 1..75: mol_type = other DNA
tatcgaaaccacccgcggtgatatcaccatcagaaccggacatttactgaatcagcgggagggcataaatgagac

SEQ ID NO: 515932 - DNA, 75 bp, synthetic construct
  source 1..75: mol_type = other DNA
aacctctcgctgtttgccagcaccatccggaaccatcacggcgatatgctggcgggtgacagcctggtgatgcag

SEQ ID NO: 515933 - DNA, 75 bp, synthetic construct
  source 1..75: mol_type = other DNA
cttgcaggtacgcaggcagcacaacagaccatggcggtgaacgccagtgaaaagctcacccacagcgggaaaagc

SEQ ID NO: 515934 - DNA, 75 bp, synthetic construct
  source 1..75: mol_type = other DNA
tgcagcaacagccgaacggtgttgatctggaagggctggcgcgtcatcgcggttcggcgtttggtcgcacgttac

SEQ ID NO: 515935 - DNA, 75 bp, synthetic construct
  source 1..75: mol_type = other DNA
caggaatattgcgaatacctgcatcacggactttcggctattaagcgtcggctggggctacagcgatataacgaa

SEQ ID NO: 515936 - DNA, 75 bp, synthetic construct
  source 1..75: mol_type = other DNA
gatagccggagagcatattccaatcgttccagtgtatggtgaatggtcattcgctggtgacaaggagtgctacga

SEQ ID NO: 515937 - DNA, 75 bp, synthetic construct
  source 1..75: mol_type = other DNA
cgcagggacagaatctcaccgtgcaggcggacaactgggcgaacagtggctccgtgctggcaaccggtaacctta

SEQ ID NO: 515938 - DNA, 75 bp, synthetic construct
  source 1..75: mol_type = other DNA
tctgttgcagggcgccggtgcactggcgcttgcaggcgacaccctctcacagggccgtaacggacgctggctgac

SEQ ID NO: 515939 - DNA, 75 bp, synthetic construct
  source 1..75: mol_type = other DNA
tctggaagggctggcgcgccatcgcggttctgcttttggtcgcacgttacaaccacaacttagccaggcgagttt

SEQ ID NO: 515940 - DNA, 75 bp, synthetic construct
  source 1..75: mol_type = other DNA
agtggctccgtgctggcaaccggtaaccttactgcttcggcaaccggtcagttgaccagtaccggcgatatcatg

SEQ ID NO: 515941 - DNA, 75 bp, synthetic construct
  source 1..75: mol_type = other DNA
gtgacagctacggactttacccgcccgctgccttttgggccgtggctcgctttgagcggagtgtgccattttttg

SEQ ID NO: 515942 - DNA, 75 bp, synthetic construct
  source 1..75: mol_type = other DNA
ggatggtaacgctcagttattacgatggctggtatcacaaagcaccagagctgcataaaagcgtcggtattctgt

SEQ ID NO: 515943 - DNA, 75 bp, synthetic construct
  source 1..75: mol_type = other DNA
tgccctgcatttttggctcgcgtggagcgtcgtagtactgtccgttatgcacggatttatggccctgaagcatca

SEQ ID NO: 515944 - DNA, 75 bp, synthetic construct
  source 1..75: mol_type = other DNA
tggtaaagcgttaccggcgcagcagcctggacgcactgacatcggataaaaccgattcgggcgaaccggatgaca

SEQ ID NO: 515945 - DNA, 75 bp, synthetic construct
  source 1..75: mol_type = other DNA
ttctgatcatgcgtcagctaggtgaaatggtggtcgaagaaccggtagcaggctccttcagccactttgcttata

SEQ ID NO: 515946 - DNA, 75 bp, synthetic construct
  source 1..75: mol_type = other DNA
cacgagctgggcgacacctttgtggcaaacgcgctaaatatcgtggtactgacggcagcgctctccgtgtacaac

SEQ ID NO: 515947 - DNA, 75 bp, synthetic construct
  source 1..75: mol_type = other DNA
agggcttgatagttcccggcagtgaactgaccagcaacagtagtactctgagcggtagcacaccccagaccatcg

SEQ ID NO: 515948 - DNA, 75 bp, synthetic construct
  source 1..75: mol_type = other DNA
gccggaactgaccagcagcggtgtgcttgttggttccgccctgaatacacagtcacagaccctgaccaacagcgg

SEQ ID NO: 515949 - DNA, 75 bp, synthetic construct
  source 1..75: mol_type = other DNA
gcgccccgtcgctcagcctcagtgcgccggaactgaccagcagcggtgtgcttgttggttccgccctgaatacac

SEQ ID NO: 515950 - DNA, 75 bp, synthetic construct
  source 1..75: mol_type = other DNA
gatgactctgatactacagccccatcgtcaccagcactgaaggcagaggatgacggttctgtttctgttgagctg

SEQ ID NO: 515951 - DNA, 75 bp, synthetic construct
  source 1..75: mol_type = other DNA
aagtactgcaactttagactttacaggtcgtgtaacttccagcctctgtcaggtggatacaaattctgtgaatca

SEQ ID NO: 515952 - DNA, 75 bp, synthetic construct
  source 1..75: mol_type = other DNA
tatgaaagctactggcaatgcaggaaatgtgaaagctggtgttgttgacgccacaggtattatgactatcaaggc

SEQ ID NO: 515953 - DNA, 75 bp, synthetic construct
  source 1..75: mol_type = other DNA
aaatatctgaaacagttgcaaaaaatacaggttctaatcctggacgatctggggctggaacagttaagtaacgcc

SEQ ID NO: 515954 - DNA, 75 bp, synthetic construct
  source 1..75: mol_type = other DNA
tgacaacgcaactcgtaaccggtagcaccgacggtcatctggcctggctggtgccgttacttgaagaatattacg

SEQ ID NO: 515955 - DNA, 75 bp, synthetic construct
  source 1..75: mol_type = other DNA
tgcccgccgctatcaacctgccgttaatgaataacgatgaacgcgccgccgttggcacctgctacaaacagcaag

SEQ ID NO: 515956 - DNA, 75 bp, synthetic construct
  source 1..75: mol_type = other DNA
acccgatgtatcgctatcagcttgagaaaaaagctgaaaaagttgtctttcgcggtgagtgggcggaagtggcgg

SEQ ID NO: 515957 - DNA, 75 bp, synthetic construct
  source 1..75: mol_type = other DNA
acttgcaggcctcgatattatgaagagtaaagttgacgctcatccatattatgatggtctaggaaagggtatcaa

SEQ ID NO: 515958 - DNA, 75 bp, synthetic construct
  source 1..75: mol_type = other DNA
attctctggaacctattgatgaaagaacccctattctttttcagtggtttgaagcaaggccagagcgatacgaaa

SEQ ID NO: 515959 - DNA, 75 bp, synthetic construct
  source 1..75: mol_type = other DNA
acataattataatcatttttgtgactttattgagtttaaccaccctaatataatcatgaacacaagtcagtatac

SEQ ID NO: 515960 - DNA, 75 bp, synthetic construct
  source 1..75: mol_type = other DNA
ccaacatcagtacctcttggattacttgtgttacctgatgctgaaacatggtttgaccggatagatattacccgg

SEQ ID NO: 515961 - DNA, 75 bp, synthetic construct
  source 1..75: mol_type = other DNA
tcctttctcttgatatggctcctgaacaaaaggaatgggatgatacttcccataaatgtacaggtattctttcaa

SEQ ID NO: 515962 - DNA, 75 bp, synthetic construct
  source 1..75: mol_type = other DNA
ctgaatcgtgttacagataaaaaagatgtcaaaaaaggactaatgactcatatcccttcgacagatatctggatg

SEQ ID NO: 515963 - DNA, 75 bp, synthetic construct
  source 1..75: mol_type = other DNA
aagctcgatgagaagcaggctaaagaagtgttgaaacagcacttcgaaaaatcggacaaggagcagtggggatgg

SEQ ID NO: 515964 - DNA, 75 bp, synthetic construct
  source 1..75: mol_type = other DNA
aggatgcagtaatacttcctggcgtaaaagtgaagtcctcgcagtgccattgcaaccgactttacagcaggaagt

SEQ ID NO: 515965 - DNA, 75 bp, synthetic construct
  source 1..75: mol_type = other DNA
cagttatacagagactatccggatatcgtatgggctggtcgctctaatactgtactggccgggcagagcctcggt

SEQ ID NO: 515966 - DNA, 75 bp, synthetic construct
  source 1..75: mol_type = other DNA
tcggcgcggcgttcctgtctctgcacccgacgcagtacgcagaagtgctggtgaaacgtatgcaggcggcgggcg

SEQ ID NO: 515967 - DNA, 75 bp, synthetic construct
  source 1..75: mol_type = other DNA
ctcagctacccgatcagattggcgcgaaaggcgagaaagttcaggctaagtatccggttgatctaaaactggttg

SEQ ID NO: 515968 - DNA, 75 bp, synthetic construct
  source 1..75: mol_type = other DNA
tcactcttgaccgccaggcaacgaaaggtgaagtggtgagccacattgcttctgataacgtactgggcggcaaaa

SEQ ID NO: 515969 - DNA, 75 bp, synthetic construct
  source 1..75: mol_type = other DNA
tggtttccgctgttgcgctaagcgccaccgtcagtgcgaatgcgatggcaaaagacaccatcgcgctggtggtct

SEQ ID NO: 515970 - DNA, 75 bp, synthetic construct
  source 1..75: mol_type = other DNA
tgagaaaaaatgctggcctgaaaaaatatcaggcaactctggaagggctgagttatccggcctcaagaagtctgc

SEQ ID NO: 515971 - DNA, 75 bp, synthetic construct
  source 1..75: mol_type = other DNA
aaaaagaaggggttgcattgcttactatcacggacaaacaattaaaagttgctcgtctggaagaggacaaaaaac

SEQ ID NO: 515972 - DNA, 75 bp, synthetic construct
  source 1..75: mol_type = other DNA
tgtcgttcaacgccgatatcgttgctcgttcaccgaagaagaaacctaccttcttccctgagcaaatcgaaggct

SEQ ID NO: 515973 - DNA, 75 bp, synthetic construct
  source 1..75: mol_type = other DNA
ctgattggtggcacctggtacggcggcgaaatgaagaaagggatgttctcaatgatgaactacctgctgccgctg

SEQ ID NO: 515974 - DNA, 75 bp, synthetic construct
  source 1..75: mol_type = other DNA
ccgtgcgtttcatcaccgaagtggcctggcaggcgcatttcgtcaagaacatgtttattcgcccgagtgatgaag

SEQ ID NO: 515975 - DNA, 75 bp, synthetic construct
  source 1..75: mol_type = other DNA
cgcaggcgtatctggttaacactggctggaacggcactggcaaacgtatctcgattaaagatacccgcgctatta

SEQ ID NO: 515976 - DNA, 75 bp, synthetic construct
  source 1..75: mol_type = other DNA
acctgaagaagatctctcgcaaggaagaaaatttttattgggagggcacaaagtagttgaagtggcggccttgaa

SEQ ID NO: 515977 - DNA, 75 bp, synthetic construct
  source 1..75: mol_type = other DNA
gttgccgccggtggggttcgccattgtaacgctggtggtctgtatgctggcagcgtgggaatggggacagcttag

SEQ ID NO: 515978 - DNA, 75 bp, synthetic construct
  source 1..75: mol_type = other DNA
gccaaagtgattattaactcgcgtaccggttcagtggtgatgaatcgtgaagtgaccctcgatagctgcgcggtg

SEQ ID NO: 515979 - DNA, 75 bp, synthetic construct
  source 1..75: mol_type = other DNA
gtgattaaatttctctctgcattaattcttctactggttaccacggtggctcaggctgagcgtattcgcgatctc

SEQ ID NO: 515980 - DNA, 75 bp, synthetic construct
  source 1..75: mol_type = other DNA
ttcttctactggttacgacggcggctcaggctgagcgtattcgcgatctcaccagtgttcagggggtaaggcaaa

SEQ ID NO: 515981 - DNA, 75 bp, synthetic construct
  source 1..75: mol_type = other DNA
ccgtgggtatttcctgagaaactcttcaagtgcaaattttttatctcttgtatgcgatgcctttgactcgtcgtc

SEQ ID NO: 515982 - DNA, 75 bp, synthetic construct
  source 1..75: mol_type = other DNA
ttctcgcaacacatccgaccacttaagcaaaaaagcggcatatactgaggctatcccttataaaacggggatcgg

SEQ ID NO: 515983 - DNA, 75 bp, synthetic construct
  source 1..75: mol_type = other DNA
tttttcttgcctggtttcaatgatgtcacgtatcagtcgctggcgttgtagtgcgctgatattcggggtaacggg

SEQ ID NO: 515984 - DNA, 75 bp, synthetic construct
  source 1..75: mol_type = other DNA
tgaccagcggcaacatcgctgaccataacggtaacgtagtatccggtgtgttcaatatccatagcagcgattacg

SEQ ID NO: 515985 - DNA, 75 bp, synthetic construct
  source 1..75: mol_type = other DNA
gattcagggggccagtctagagctaatgatgtagctctgtatttcagtgatagtgcggcttcaaattactccatg

SEQ ID NO: 515986 - DNA, 75 bp, synthetic construct
  source 1..75: mol_type = other DNA
atgctgcctggcggttattatgatcgttttgatgcagatggtaataatctgggtggatatgatttttacactgat

SEQ ID NO: 515987 - DNA, 75 bp, synthetic construct
  source 1..75: mol_type = other DNA
gtgtataagtcgatcatcacctgcacgcagatactgaaagaccgcgagaagatagccggagagcatatcccaatc

SEQ ID NO: 515988 - DNA, 75 bp, synthetic construct
  source 1..75: mol_type = other DNA
acaagacaccgttggcactcgtctgaccaactctcgtcatggcctggctgataacggcggcgcatgggtaagcta

SEQ ID NO: 515989 - DNA, 75 bp, synthetic construct
  source 1..75: mol_type = other DNA
atggtaactctgcggaacctagtgattactctggtaagggcggagctaatgatgtagctctgtatttcagtgata

SEQ ID NO: 515990 - DNA, 75 bp, synthetic construct
  source 1..75: mol_type = other DNA
ttctggttggttttattgctggttattttgttaatgtcgtggcctatcacctctcgcctttggaggataaaacag

SEQ ID NO: 515991 - DNA, 75 bp, synthetic construct
  source 1..75: mol_type = other DNA
caacatagtcgccagatacaaccgactcccggatatggcacgcgccgacatcgacctgctggctgctgatatcgc

SEQ ID NO: 515992 - DNA, 75 bp, synthetic construct
  source 1..75: mol_type = other DNA
aaatctttgcggcagccccatcgcatcaggcgcaagacagtaaaatccttaggcgtgttgcggctttagctcaaa

SEQ ID NO: 515993 - DNA, 75 bp, synthetic construct
  source 1..75: mol_type = other DNA
taatttcattcgtggtgaacttgccaacattaatgaccacggattcggcgagcttaaaacgctgtacacctggta

SEQ ID NO: 515994 - DNA, 75 bp, synthetic construct
  source 1..75: mol_type = other DNA
gcctgacccgcgtgatcctctctcgcgagctgtcgctggaagagattgaagagatccgcaatcaggtgccggata

SEQ ID NO: 515995 - DNA, 75 bp, synthetic construct
  source 1..75: mol_type = other DNA
gtgaagccctgcacctaatggcgggtggcaaatgctgctttgaagggaaatggcttagaggaacagccaatggtg

SEQ ID NO: 515996 - DNA, 75 bp, synthetic construct
  source 1..75: mol_type = other DNA
gggatcgggttgcaaaaaaatatgttggcgcggatgaaatcgcaccggctatcgccaagatgtttaacgatgggt

SEQ ID NO: 515997 - DNA, 75 bp, synthetic construct
  source 1..75: mol_type = other DNA
gtggtcattttgatacccagctcatgcaatatctggcgtcacgcatggtcaacatagtcgccagatataaccgcc

SEQ ID NO: 515998 - DNA, 75 bp, synthetic construct
  source 1..75: mol_type = other DNA
atgcgggtaagcgttaactttgcttacccgtggaacgctccacggtcagcaatagccagcccatatcttacctat

SEQ ID NO: 515999 - DNA, 75 bp, synthetic construct
  source 1..75: mol_type = other DNA
gtcgcccgatataaccgtctcccggatatgtcgcgcgctgatgttgacctgttggccgctgatattgctaatttc

SEQ ID NO: 516000 - DNA, 75 bp, synthetic construct
  source 1..75: mol_type = other DNA
attcgcgctgaactggctgacattgatgacaccggatttagcgagcttaaaacgctgtacacctggtatatgcgc

SEQ ID NO: 516001 - DNA, 75 bp, synthetic construct
  source 1..75: mol_type = other DNA
ttgcagtcggcaacgtcagcaagaaaaaaaacacctacgcgagtaaaaactgcgtgactgactggcgtgaacaaa

SEQ ID NO: 516002 - DNA, 75 bp, synthetic construct
  source 1..75: mol_type = other DNA
aaaaatacgacggttcggtcgctaaccctgcgatacgccgctgcgagctgatgacccgtatccgtggttttgaaa

SEQ ID NO: 516003 - DNA, 75 bp, synthetic construct
  source 1..75: mol_type = other DNA
tgaatattgctaactccaccattgatgatgactatgaagcactttacttcactgattactacaaagatggcgatg

SEQ ID NO: 516004 - DNA, 75 bp, synthetic construct
  source 1..75: mol_type = other DNA
ggtactgatcgcctggatctgaccctgaacaatggcagcaagtgggtcggtgcggcaatgtctgcgcatcagatt

SEQ ID NO: 516005 - DNA, 75 bp, synthetic construct
  source 1..75: mol_type = other DNA
actgttaaagattctaccgtgacctctggttcatggactgatgaaggtactactggttggtttggtaatacaggt

SEQ ID NO: 516006 - DNA, 75 bp, synthetic construct
  source 1..75: mol_type = other DNA
ttaaataacggtagtaaatgggtaggggcagcacaatctgttcatcaaactggttctattgatgttgatggagat

SEQ ID NO: 516007 - DNA, 75 bp, synthetic construct
  source 1..75: mol_type = other DNA
ctcggtggccagtttttgttgaccacttcaatcgcagctaacagcctgtggccttcatcaactgttggtgtagaa

SEQ ID NO: 516008 - DNA, 75 bp, synthetic construct
  source 1..75: mol_type = other DNA
atcgactgttggcgttgagaacgatgattcagcatacaacgaatatgagcatattattggtaacgaagtttacca

SEQ ID NO: 516009 - DNA, 75 bp, synthetic construct
  source 1..75: mol_type = other DNA
gcactattcacggtatgatttattccgagtgcatgaccaaagacggttgtacagatcgcgcgaatgattactatc

SEQ ID NO: 516010 - DNA, 75 bp, synthetic construct
  source 1..75: mol_type = other DNA
cctgattgagtatattccggtttccgtcaccttaggtttcacctcgggtatcgggatcaccatcggtaccatgca

SEQ ID NO: 516011 - DNA, 75 bp, synthetic construct
  source 1..75: mol_type = other DNA
gtatcaaagtattttacaaaggcgagaaatgcatctggactctcatttgatggaaacccgccaacattccatgaa

SEQ ID NO: 516012 - DNA, 75 bp, synthetic construct
  source 1..75: mol_type = other DNA
caacgtcttctcgggcataaatcagattcaatggcggcgcgttacagggacagtcgcgggcgggagtgggacaaa

SEQ ID NO: 516013 - DNA, 75 bp, synthetic construct
  source 1..75: mol_type = other DNA
ccgtgggatctgcctgattcagaattcacgctaacctgggattctattcgcacactgctgcctgcggcattctca

SEQ ID NO: 516014 - DNA, 75 bp, synthetic construct
  source 1..75: mol_type = other DNA
ggcgctgccgaccattaatgtgggtgatgctgccattggcattgtgacgctaggtattctggttttctggccgcg

SEQ ID NO: 516015 - DNA, 75 bp, synthetic construct
  source 1..75: mol_type = other DNA
aactggtgctgccgtgggatctgcctaattcagaattcacgctaacctgggattctattcgcacactgctgcctg

SEQ ID NO: 516016 - DNA, 75 bp, synthetic construct
  source 1..75: mol_type = other DNA
tactgttcgtgctgatggtcgcctttatactggtgaatacttacaactggaaagaactgccgttgctggcgcatc

SEQ ID NO: 516017 - DNA, 75 bp, synthetic construct
  source 1..75: mol_type = other DNA
atgttaagtattaaagatttacacgtcagcgtggaagataaagctattctgcgtggattaagcctcgacgttcgt

SEQ ID NO: 516018 - DNA, 75 bp, synthetic construct
  source 1..75: mol_type = other DNA
atgatttgacgtcatttatagtaaatcatcttggcatcactgatgtaggagcaagactcaatggccgtgcagtgt

SEQ ID NO: 516019 - DNA, 75 bp, synthetic construct
  source 1..75: mol_type = other DNA
atctttcccaggggcgtcgtgattatgaaactgaacatttcaatgccactcgcggtcagggtgcggtctggtata

SEQ ID NO: 516020 - DNA, 75 bp, synthetic construct
  source 1..75: mol_type = other DNA
tgacagttaataatggttctcaggttaatgtttcggaatctaaattaacttcagatactatcgatttaactaacg

SEQ ID NO: 516021 - DNA, 75 bp, synthetic construct
  source 1..75: mol_type = other DNA
caactctagtgaaccgagtgattataccggtccgggagatgttgcaatgtccttcactgattcaggttccgacta

SEQ ID NO: 516022 - DNA, 75 bp, synthetic construct
  source 1..75: mol_type = other DNA
atcgtggtcaggacgcgctcgaccgctttgattttcaggatttgatggaagaaaaaatcgccctgctgaagatgc

SEQ ID NO: 516023 - DNA, 75 bp, synthetic construct
  source 1..75: mol_type = other DNA
cacaactacctgaaagagctgcatatggaacagccgggcgactactgcattacttataacggcgcgttggtacag

SEQ ID NO: 516024 - DNA, 75 bp, synthetic construct
  source 1..75: mol_type = other DNA
tcgcggctttgtttgtcagctcgccgactcgttgaatttcccgcaggatgcgctgattctgggtggtgatcatct

SEQ ID NO: 516025 - DNA, 75 bp, synthetic construct
  source 1..75: mol_type = other DNA
tcctatcagataacatcctatccaacagaaaatacatcatgtggtgccggggtattttcagtatttggatatcaa

SEQ ID NO: 516026 - DNA, 75 bp, synthetic construct
  source 1..75: mol_type = other DNA
cacggttcactgtgcgaaatacggatgagcttctggggagcggagtttgcggcgttcttacagtgtaagcagtaa

SEQ ID NO: 516027 - DNA, 75 bp, synthetic construct
  source 1..75: mol_type = other DNA
atggctattaaactcattgctatcgatatggatggcccccttctgctccccgatcccaccattccccccgccgtt

SEQ ID NO: 516028 - DNA, 75 bp, synthetic construct
  source 1..75: mol_type = other DNA
gtggcgaactttgtcactaaatccaaccttgaagatggcgtggcgtttgcaatcgaaaagtatgtgctgaattaa

SEQ ID NO: 516029 - DNA, 75 bp, synthetic construct
  source 1..75: mol_type = other DNA
gcacttcatgacactgcaagggaacggcagaagcagaagtttctggagggattttttattgatgttgcctctatt

SEQ ID NO: 516030 - DNA, 75 bp, synthetic construct
  source 1..75: mol_type = other DNA
agaccccgcatatccctttcaggagcatttgttgatgcaactctgtattcgcgcaaataaaaggatgcaggataa

SEQ ID NO: 516031 - DNA, 75 bp, synthetic construct
  source 1..75: mol_type = other DNA
aatatagttactggcgaatatagtgcggtcagtaaaattatcaccgaaaaggaaactctctatccatccgataag

SEQ ID NO: 516032 - DNA, 75 bp, synthetic construct
  source 1..75: mol_type = other DNA
gagtcattgtctgtcaccttcagagataagccagaaactgcagtttaccagaactaatattacccgcattacaga

SEQ ID NO: 516033 - DNA, 75 bp, synthetic construct
  source 1..75: mol_type = other DNA
catctggatcagacgtggatgtttctggccgggcggggcgcgtttccgctgtttgccctggtgtgggggctgaat

SEQ ID NO: 516034 - DNA, 75 bp, synthetic construct
  source 1..75: mol_type = other DNA
catctgaaggtatgttttttattcagaggctcactcttgcacaaagcatgtatctgaaagaaatctggggttatc

SEQ ID NO: 516035 - DNA, 75 bp, synthetic construct
  source 1..75: mol_type = other DNA
tttatgatgaggaaggaacgccaagtctcgaggcccgtctacctgctatacatgcaagacaactgatcgctgttt

SEQ ID NO: 516036 - DNA, 75 bp, synthetic construct
  source 1..75: mol_type = other DNA
ctttcatctccgctattcttcccaagggatttgcaaacattaacacatgcgtcgctacggcctttgagtcaacta

SEQ ID NO: 516037 - DNA, 75 bp, synthetic construct
  source 1..75: mol_type = other DNA
tgcttcatttgcgcacaaaaattactctgaacaggttccggggattaagtttgatagtgctcttgaggcaggctc

SEQ ID NO: 516038 - DNA, 75 bp, synthetic construct
  source 1..75: mol_type = other DNA
tagttgtaacaggcgttctggctgcgcttatggcagggaatgttgcgttggcatctgatgtgcctactgaagtga

SEQ ID NO: 516039 - DNA, 75 bp, synthetic construct
  source 1..75: mol_type = other DNA
tgttgtgggtacggaaccatgaaccgcagcattttgcgcgtattgcgacggtgttactgccgaaagactatttgc

SEQ ID NO: 516040 - DNA, 75 bp, synthetic construct
  source 1..75: mol_type = other DNA
aaattaaattacaggacaagatagaccgtcagttagaggaaatcggcggctatgaatatgagggaacatatgaaa

SEQ ID NO: 516041 - DNA, 75 bp, synthetic construct
  source 1..75: mol_type = other DNA
ggcccatgatgaacaggaactgtttgaaatcattaataaaaaattactggcgcatcttgatgatgtcagctcata

SEQ ID NO: 516042 - DNA, 75 bp, synthetic construct
  source 1..75: mol_type = other DNA
aaagccagcgagacgctggaagttgaggttatcgatacctggcaggccgatgcggtacgcgatacccgcaccctt

SEQ ID NO: 516043 - DNA, 75 bp, synthetic construct
  source 1..75: mol_type = other DNA
ggctggcagcagcgccagaacgaattaaccgagctgcaaaaccgtattcaacagctgacgccgattctggacaca

SEQ ID NO: 516044 - DNA, 75 bp, synthetic construct
  source 1..75: mol_type = other DNA
tggcttgccacccaggaagagcatgaaaagcaactgcaattactcaatcagcgtcatgaattacaggagcaaatt

SEQ ID NO: 516045 - DNA, 75 bp, synthetic construct
  source 1..75: mol_type = other DNA
tatatctgaatttctgggggtgtatggaataaatcactcagtatatatggttctcaccacattattcgcagcgga

SEQ ID NO: 516046 - DNA, 75 bp, synthetic construct
  source 1..75: mol_type = other DNA
cgaagaaatccgaagcttatcaacaaaaattgtgggaaaaaattgacgctgacacacgtgctcaggcgaaagcta

SEQ ID NO: 516047 - DNA, 75 bp, synthetic construct
  source 1..75: mol_type = other DNA
tttatcagcttatgtagcgggtactcgcagtttctatgcgaaaaaaccgattactaagccagaagatcttaaagg

SEQ ID NO: 516048 - DNA, 75 bp, synthetic construct
  source 1..75: mol_type = other DNA
ccggcaaaaacttaatgcccttccggctatctctttagctttaaccggcgatgaagttgctgtcgcacaagcgca

SEQ ID NO: 516049 - DNA, 75 bp, synthetic construct
  source 1..75: mol_type = other DNA
gtttcggcacgctggatagcgaaacgctggataccgcccttgatgcgctggatgccctgaacgccagtggtaaaa

SEQ ID NO: 516050 - DNA, 75 bp, synthetic construct
  source 1..75: mol_type = other DNA
gcacgggcgctatttgttacagcgcaaagccagcgaggcgctggaagtcgaggttgtcgatacctggcaggcaga

SEQ ID NO: 516051 - DNA, 75 bp, synthetic construct
  source 1..75: mol_type = other DNA
gtctggcacaacccgcacgaaatcttcgtccgcactgggaacgtattgcagaacacaatacggcgctggcgcata

SEQ ID NO: 516052 - DNA, 75 bp, synthetic construct
  source 1..75: mol_type = other DNA
agcttcagcgggatgaaaacgaagcacaaagcctccggcaagatgagcaagcacttactcaggaatggcagacac

SEQ ID NO: 516053 - DNA, 75 bp, synthetic construct
  source 1..75: mol_type = other DNA
aaattgctccccagcaaaaacggctggcgcagttacaagccactatccagagcgtcacgcaggaacagacgcaac

SEQ ID NO: 516054 - DNA, 75 bp, synthetic construct
  source 1..75: mol_type = other DNA
ggcgcttaggggcgcagaaaggcgtgtcaggtttcctgcacccggaagggatttatgatgacccgaaaggcgggc

SEQ ID NO: 516055 - DNA, 75 bp, synthetic construct
  source 1..75: mol_type = other DNA
tctggaacttcccggcctgacggaaatcgccgtcaatcgtccgggggagttatttactaaaatcaatggaatgtg

SEQ ID NO: 516056 - DNA, 75 bp, synthetic construct
  source 1..75: mol_type = other DNA
agttttctgcgctggatgtactggtcaaagccgatttattaacagtaaaagataccctggttgatgacgttattg

SEQ ID NO: 516057 - DNA, 75 bp, synthetic construct
  source 1..75: mol_type = other DNA
agagaatatctttgttgatcagtcctttagtaataaagagcaggcgatccagttcctgtgcggtaacctcggtgt

SEQ ID NO: 516058 - DNA, 75 bp, synthetic construct
  source 1..75: mol_type = other DNA
acgggttccggtaaaacaacttatatgaagagtcttatcgatttcataccattgaatacacggctgattacgatt

SEQ ID NO: 516059 - DNA, 75 bp, synthetic construct
  source 1..75: mol_type = other DNA
acggggtccggtaaaacaacgtatatgaagagtcttatcgatttcataccgttgaatacgcgtctgattactatt

SEQ ID NO: 516060 - DNA, 75 bp, synthetic construct
  source 1..75: mol_type = other DNA
caatcactatacgtaaaccatcgacacggcagataacacataaagaatatgtggcgaacggtttttatgattatg

SEQ ID NO: 516061 - DNA, 75 bp, synthetic construct
  source 1..75: mol_type = other DNA
caatcgttatcagatgcgtatagcgattattcagtgctgctattgatagcagctgaaagcgagatatccgtacca

SEQ ID NO: 516062 - DNA, 75 bp, synthetic construct
  source 1..75: mol_type = other DNA
caatattgctaatgacggaacacagaatgaacttacacggcttgtagctgaaccggtcaaaacgctttcaaggct

SEQ ID NO: 516063 - DNA, 75 bp, synthetic construct
  source 1..75: mol_type = other DNA
ggtcagtaaacgcagtgattgcctatctgaggacattgtttatccacggagcaaaggcagcggcgctgctgacta

SEQ ID NO: 516064 - DNA, 75 bp, synthetic construct
  source 1..75: mol_type = other DNA
aagcgcgatggcctgcgtcatgcagagacgattacgctgggtatcatggtggaagtgccgtcggtgtgctacatc

SEQ ID NO: 516065 - DNA, 75 bp, synthetic construct
  source 1..75: mol_type = other DNA
gcctcgcgatcttgagaccggcctgtttttgaaaaccaaaaaaggcgctagaggggcaacttttacacccaaaag

SEQ ID NO: 516066 - DNA, 75 bp, synthetic construct
  source 1..75: mol_type = other DNA
ggctggaacgtattgagttactggcaaaaatttccaatattgatgaggcttcatcgaaagaaaaaagggtggcct

SEQ ID NO: 516067 - DNA, 75 bp, synthetic construct
  source 1..75: mol_type = other DNA
agaacgtgtacaggtcgtttttcctcctgcatgtgagagaaatactatttcaatcaccatacgtaaaccatcgac

SEQ ID NO: 516068 - DNA, 75 bp, synthetic construct
  source 1..75: mol_type = other DNA
caccgggtgtaagtcacattaatacttgcctgggctcagcatttaacaatactcaaacattgctcgattattttt

SEQ ID NO: 516069 - DNA, 75 bp, synthetic construct
  source 1..75: mol_type = other DNA
ggcgccttggggcgcagaaaggtgtgtcagggttcctgcacccggaagggatttatgatgacccgaaaggagggc

SEQ ID NO: 516070 - DNA, 75 bp, synthetic construct
  source 1..75: mol_type = other DNA
cctacaaaaaagccaaagatccgagctggcttaacagcgagccggtcgaactggcgatgaacacgccgcgtgaag

SEQ ID NO: 516071 - DNA, 75 bp, synthetic construct
  source 1..75: mol_type = other DNA
gttggcacatactaattcatgtagaagttatgtgttttctaaggaatatgaaaatgagttggttagttttgcatc

SEQ ID NO: 516072 - DNA, 75 bp, synthetic construct
  source 1..75: mol_type = other DNA
gccgccgtcaggcgctggtagaaattgacgtactggtggcgcaggctctgggtttaaccctcgaagaactgctta

SEQ ID NO: 516073 - DNA, 75 bp, synthetic construct
  source 1..75: mol_type = other DNA
atcctgctacaacccagacttcaacacccagtgctggagccgcgatctcccacaactttcacaagatttcttcgc

SEQ ID NO: 516074 - DNA, 75 bp, synthetic construct
  source 1..75: mol_type = other DNA
ggaaagtgattgtcgttgaaccggaaaaacaacttacgttgttatttggcatgaaagcgccggggctgggacgac

SEQ ID NO: 516075 - DNA, 75 bp, synthetic construct
  source 1..75: mol_type = other DNA
gcgttatttctttggcaatattttgtggcagacacgggcgttgatggaccgcgcgatcggtcataagctggcgaa

SEQ ID NO: 516076 - DNA, 75 bp, synthetic construct
  source 1..75: mol_type = other DNA
acggaaatcgccatcaaccgtccaggtgaactgtacacaaaaatcaacggcgtgtgggagcaacatgccgttcct

SEQ ID NO: 516077 - DNA, 75 bp, synthetic construct
  source 1..75: mol_type = other DNA
tgggtgatggactactggtgtgcactatggttctggccaatcgacaaagcgaatgaactgccggaccgcggtatg

SEQ ID NO: 516078 - DNA, 75 bp, synthetic construct
  source 1..75: mol_type = other DNA
ttcaagtattgcacatgatggttctggtccggtaactgggataaaaaatgactcaaaggtaaattccggtggatg

SEQ ID NO: 516079 - DNA, 75 bp, synthetic construct
  source 1..75: mol_type = other DNA
aacattcgcctgaaaacaagaatcaagcgaatgatgagaagctgaaacacgttatcgccttactactggaagatg

SEQ ID NO: 516080 - DNA, 75 bp, synthetic construct
  source 1..75: mol_type = other DNA
cgacccattatgcatcggtcatgtcggcagaatatgcccggaagttagagaaagaagatcgccaggagcaactcg

SEQ ID NO: 516081 - DNA, 75 bp, synthetic construct
  source 1..75: mol_type = other DNA
atgcatctggacgattaattgtcgatattggtgattacaacatgcggtatatgggagcagttaatcttaatgttt

SEQ ID NO: 516082 - DNA, 75 bp, synthetic construct
  source 1..75: mol_type = other DNA
gtaacttcattataaaaaatggtgaggttcgaattattgatctctccggaaaacgtgcttcagcgcagcgtaaag

SEQ ID NO: 516083 - DNA, 75 bp, synthetic construct
  source 1..75: mol_type = other DNA
taaaattctctacgcgaccctgaagggtaaaaataacgaggccaaatccgatgagccccaacggggccattttta

SEQ ID NO: 516084 - DNA, 75 bp, synthetic construct
  source 1..75: mol_type = other DNA
acccgcgtttgcgtttaacgctgcgtccggggatgaacgttgcctatctggcgtttaacaccgccaaaccgccgc

SEQ ID NO: 516085 - DNA, 75 bp, synthetic construct
  source 1..75: mol_type = other DNA
tgcaggcctatcggtacgatatcaaaggtctggtacttagcccgtttggtaacgcctcctttgctggggtgtatc

SEQ ID NO: 516086 - DNA, 75 bp, synthetic construct
  source 1..75: mol_type = other DNA
gaaacacagcaagactctattgttaaattcagagaactaaacagacagctttcacagctttctgatgcaagacaa

SEQ ID NO: 516087 - DNA, 75 bp, synthetic construct
  source 1..75: mol_type = other DNA
attaatttctaaggctgttgtcacgaacggtgcaatagtgatccacacccaacgcctgaaatcagatccaggggg

SEQ ID NO: 516088 - DNA, 75 bp, synthetic construct
  source 1..75: mol_type = other DNA
taacgctattaatgaacttctaaacatcggagttattaacaaaagcgaccttaaaaaatttgctgataatccagc

SEQ ID NO: 516089 - DNA, 75 bp, synthetic construct
  source 1..75: mol_type = other DNA
cgatgatttgatgcttacgtcaaaatattggcaacgttccgttaaagatgtacaagaaagtattaatcagcaaaa

SEQ ID NO: 516090 - DNA, 75 bp, synthetic construct
  source 1..75: mol_type = other DNA
tgaaatctctcgatccaaaagtaacggaagagtttttgaaaaacctttctaatctcactccgtattttacgaagc

SEQ ID NO: 516091 - DNA, 75 bp, synthetic construct
  source 1..75: mol_type = other DNA
ttaagaacacagtaacatttagtgtagataaagacagcttgaaaaaagcgaaagactctattacaggcttaaaag

SEQ ID NO: 516092 - DNA, 75 bp, synthetic construct
  source 1..75: mol_type = other DNA
acagtggagccagcatcgtgcgggcgctggcttcgggcgacgtgcaaatcggcaacctcggttccagcccgttag

SEQ ID NO: 516093 - DNA, 75 bp, synthetic construct
  source 1..75: mol_type = other DNA
atgggaaagagtaagaaaaaccgcactgcgtcgacgaaccagaaccagaataaaagccagacttcagccgaagca

SEQ ID NO: 516094 - DNA, 75 bp, synthetic construct
  source 1..75: mol_type = other DNA
cccgacgcggattagacctggatacctactggtttgtgcaatacggtatgacaccccagccgtatcagttcacga

SEQ ID NO: 516095 - DNA, 75 bp, synthetic construct
  source 1..75: mol_type = other DNA
ggcattaaaattatcccgctcagtgaagtggcgacgaaggacgatttttttaatatcaaaaaagcaagtgctgaa

SEQ ID NO: 516096 - DNA, 75 bp, synthetic construct
  source 1..75: mol_type = other DNA
cgtaatattctggcctcgacatttatcccgcatccgtggctttcccagcaggatttcagccgctttgcgctggat

SEQ ID NO: 516097 - DNA, 75 bp, synthetic construct
  source 1..75: mol_type = other DNA
cgctggtatgagccgcccgtcagctttgacggactggcgcgcaccttccgcgctgccgttcatcatagttccccg

SEQ ID NO: 516098 - DNA, 75 bp, synthetic construct
  source 1..75: mol_type = other DNA
ctgcctggctgaatgagtcggccacgctgttccgccgcaagtattacgaaaatggcgcacatgccggatacatca

SEQ ID NO: 516099 - DNA, 75 bp, synthetic construct
  source 1..75: mol_type = other DNA
ggattccataatgattccacgccccgttatgacaaatctgccgccgatcttgcctggcaaaggacgctgaaatgg

SEQ ID NO: 516100 - DNA, 75 bp, synthetic construct
  source 1..75: mol_type = other DNA
gatagcctttcacaacgtgaccgccaggcctttgccgcggagctggagaagtggtggctggaagtgcaacgtagt

SEQ ID NO: 516101 - DNA, 75 bp, synthetic construct
  source 1..75: mol_type = other DNA
gctggcttcgggcgacgtgcaaatcggcaacctcggttccagcccgttagccggttgcaaccagccaacaggtgc

SEQ ID NO: 516102 - DNA, 75 bp, synthetic construct
  source 1..75: mol_type = other DNA
tatgcctaataatgttggggggtttggggatgtggagaaagcaagtaaagtgtttgtacgaaacgaacttatacc

SEQ ID NO: 516103 - DNA, 75 bp, synthetic construct
  source 1..75: mol_type = other DNA
cgtattgatgccgcgttccaggacgaagttgccgccagcgaaggtttcctcaaacagcccgtcgggaaagattac

SEQ ID NO: 516104 - DNA, 75 bp, synthetic construct
  source 1..75: mol_type = other DNA
tgccgggttctggcaaatcttatgaagtggttaagtctgttattattccggctgttgcatccggccgaaggattg

SEQ ID NO: 516105 - DNA, 75 bp, synthetic construct
  source 1..75: mol_type = other DNA
aacgaaggaatgaagcagaatctttctaatctcactcctgatcaatataaaggcgctggcaccggaacaactaag

SEQ ID NO: 516106 - DNA, 75 bp, synthetic construct
  source 1..75: mol_type = other DNA
gcttttgtcacacagtacatacgtaccaaaaagaaactggctaaagtgggcaactcactgattggtttgatgttc

SEQ ID NO: 516107 - DNA, 75 bp, synthetic construct
  source 1..75: mol_type = other DNA
aacacctgaaaggcggcgaaaaactccgcgcgtggttcggatatgaatttattgctactgacttttatttcgggc

SEQ ID NO: 516108 - DNA, 75 bp, synthetic construct
  source 1..75: mol_type = other DNA
ccgggacaggatgacggtacgcaggcccgtcgccagccggtccgttacagcgcgcccctgccggtgttactgacc

SEQ ID NO: 516109 - DNA, 75 bp, synthetic construct
  source 1..75: mol_type = other DNA
tttgcgccatataatacaaagagtgatgtggatgcgctggtgaatgccgttgaccgcgcgctggaattattggtg

SEQ ID NO: 516110 - DNA, 75 bp, synthetic construct
  source 1..75: mol_type = other DNA
cggcgctggaatggctggcagattacgatagcaaccaggccgaaagctggagccgtagcttagcaacgctggcgg

SEQ ID NO: 516111 - DNA, 75 bp, synthetic construct
  source 1..75: mol_type = other DNA
gtagcggtgtcgctacatctacgcttgctgctgatgaagtgaagtcagtatgtgctgaatatggtattacggcat

SEQ ID NO: 516112 - DNA, 75 bp, synthetic construct
  source 1..75: mol_type = other DNA
tgtatcacaaaaggtaacggccttcgccgtggcgactatagcggcataggatgttgcggggtggtttatgactaa

SEQ ID NO: 516113 - DNA, 75 bp, synthetic construct
  source 1..75: mol_type = other DNA
gaactaatattacccgcattacagattttttagaaaaaaccggatatgtaaaaaggacggatagcagggaggatc

SEQ ID NO: 516114 - DNA, 75 bp, synthetic construct
  source 1..75: mol_type = other DNA
agaccccgcatatccctttcgggaacatttgttgatgcaactctgtattcgcgcaaataaaaggatgcaggataa

SEQ ID NO: 516115 - DNA, 75 bp, synthetic construct
  source 1..75: mol_type = other DNA
gattcccgccggcactgaacggtaagctgcgggtacagagtaccggtggtgccgtgtacctgaaggcggacagtg

SEQ ID NO: 516116 - DNA, 75 bp, synthetic construct
  source 1..75: mol_type = other DNA
gttactgatatccccgtttgtgctgcatgctgacgaactgatgaagtgggagcgtattccgttatccgtacccct

SEQ ID NO: 516117 - DNA, 75 bp, synthetic construct
  source 1..75: mol_type = other DNA
aaaggtggtacccggcggggatgacggctcgcaggccctccgtcagccggtgaagtatgcagagcctttacccgt

SEQ ID NO: 516118 - DNA, 75 bp, synthetic construct
  source 1..75: mol_type = other DNA
gatttgttgccagaactgattactccccgtagtcggattctggcgttgggccagatgtcgaacgtcactggcggt

SEQ ID NO: 516119 - DNA, 75 bp, synthetic construct
  source 1..75: mol_type = other DNA
aaaaataaccacgacggatgaattaataaaattcatggctgaacaattcacatattgcgcgtgtgagctaaaaaa

SEQ ID NO: 516120 - DNA, 75 bp, synthetic construct
  source 1..75: mol_type = other DNA
atgtattgtctggtattaatgttcaggatacagggtctaactctgccgataatatagcgggcgtttattacagac

SEQ ID NO: 516121 - DNA, 75 bp, synthetic construct
  source 1..75: mol_type = other DNA
aacaccttcgcactttctggaaaaaattcaatttcaatgagtcccgttggcgggcctatctggaatttatcggtg

SEQ ID NO: 516122 - DNA, 75 bp, synthetic construct
  source 1..75: mol_type = other DNA
atggccagtgaaatgcaacgcagaatggcccgtctggcactgtccggcagcaaccgtatccgcttctatgaggtg

SEQ ID NO: 516123 - DNA, 75 bp, synthetic construct
  source 1..75: mol_type = other DNA
gaagacataaaccgcagtattatcaatatacgcgatgctgctgataccaatgtacagaccgggcagaataatttg

SEQ ID NO: 516124 - DNA, 75 bp, synthetic construct
  source 1..75: mol_type = other DNA
gccagctggttacgtcagcattcagattatgatggcggtttctggaattactggattattccgcagggcaccgga

SEQ ID NO: 516125 - DNA, 75 bp, synthetic construct
  source 1..75: mol_type = other DNA
aattgcaatcagtgaaggcggctatttctgcgaaatcaaataatttgacaacagtagtgaataatagccagctcg

SEQ ID NO: 516126 - DNA, 75 bp, synthetic construct
  source 1..75: mol_type = other DNA
ttcaagactcacgaaatggtatttccgtaagtgatattgacatcacccaaaatttgggtgctggtgacctgcaaa

SEQ ID NO: 516127 - DNA, 75 bp, synthetic construct
  source 1..75: mol_type = other DNA
gatttgttgccggaactgattactcctcgtagtcggattctggcgttgggtcagatgtcgaacgtgactggcggt

SEQ ID NO: 516128 - DNA, 75 bp, synthetic construct
  source 1..75: mol_type = other DNA
tgataatgacacgggctttaaacaaaatggcgatggtaatctggatgtttatgctaataacgtccatgttatgcg

SEQ ID NO: 516129 - DNA, 75 bp, synthetic construct
  source 1..75: mol_type = other DNA
tactatttcagaatattcaaccgtacatttcagcagatatctttcctggaaaaatactcagaatcagcggcacga

SEQ ID NO: 516130 - DNA, 75 bp, synthetic construct
  source 1..75: mol_type = other DNA
ttcagctaaagcgaataacctgacaacggtagtgaataatagccagctcgaaattcagcaaatgtcgaatacatt

SEQ ID NO: 516131 - DNA, 75 bp, synthetic construct
  source 1..75: mol_type = other DNA
tggtgattccggtgctgttctatcacggtgagcgcagcccgtacccgtacagcatgaactggctggactgttttg

SEQ ID NO: 516132 - DNA, 75 bp, synthetic construct
  source 1..75: mol_type = other DNA
ctggttggcaaatggtggcggctggttcttcaatctcgactatgacaaagaagtgctggctaaggctctggttca

SEQ ID NO: 516133 - DNA, 75 bp, synthetic construct
  source 1..75: mol_type = other DNA
tatatcgataccggcgcagtgttctgcggaaatctcacattgattcaggtacagggagaaggcgcgtgggcataa

SEQ ID NO: 516134 - DNA, 75 bp, synthetic construct
  source 1..75: mol_type = other DNA
ggagctgctggacaaactcccgcaggtcatggtggaaatttcagacgagcaggtgcgtgttctgattcattacat

SEQ ID NO: 516135 - DNA, 75 bp, synthetic construct
  source 1..75: mol_type = other DNA
ctgacgttacaactttgggttcctaccagctctcaggcctggaaccccagtccgctgaaaaccgcagagctgatt

SEQ ID NO: 516136 - DNA, 75 bp, synthetic construct
  source 1..75: mol_type = other DNA
atgaacgatattgcgcataacctggcacaggtccgggacaaaatctcagcggctgcaacgagttgcggccgttct

SEQ ID NO: 516137 - DNA, 75 bp, synthetic construct
  source 1..75: mol_type = other DNA
accacaacgcccacgccgcatgatgccgcgttccggtcgttcctggcgaatcccgacgtcgccagagattttctg

SEQ ID NO: 516138 - DNA, 75 bp, synthetic construct
  source 1..75: mol_type = other DNA
tgagcgtctgccgcagcatgaggataaactgatgactatcgcagaacgtcttgagcaaaaaggtcgccaggaagg

SEQ ID NO: 516139 - DNA, 75 bp, synthetic construct
  source 1..75: mol_type = other DNA
tcatcgagcaccagagcaccgaaaatctgtacatgccttttcgcatgttacgctacagtgtggcggcgatgcaga

SEQ ID NO: 516140 - DNA, 75 bp, synthetic construct
  source 1..75: mol_type = other DNA
attggtgcggtgaaatacgcggatctctccaaaaaccgcaccaccgactacatcttcgactgggacaacatgctg

SEQ ID NO: 516141 - DNA, 75 bp, synthetic construct
  source 1..75: mol_type = other DNA
cgccagaaaaacagaccattgtggttgactactccgcgccaaacgtggcgaaagagatgcacgtcggtcatctgc

SEQ ID NO: 516142 - DNA, 75 bp, synthetic construct
  source 1..75: mol_type = other DNA
acccgcgatgacgtgatgggtgaaagtctctacaacccaatgctgccgggtatcgtggcggacctgaaagccaaa

SEQ ID NO: 516143 - DNA, 75 bp, synthetic construct
  source 1..75: mol_type = other DNA
gtcttcaggagctgggtgagcaactgaaccgcgatgtcagtttgacggggacgaaagaagaactggcgcttcgtg

SEQ ID NO: 516144 - DNA, 75 bp, synthetic construct
  source 1..75: mol_type = other DNA
gcgtccgaccgtctcggtattgctacaccagaaaaacagactattgtcgttgactattccgcgccgaacgtggcg

SEQ ID NO: 516145 - DNA, 75 bp, synthetic construct
  source 1..75: mol_type = other DNA
acccagacatgccagccgacgagctggaaaaactggctaacgcggtgggtatcggcgcggtgaaatatgcggatc

SEQ ID NO: 516146 - DNA, 75 bp, synthetic construct
  source 1..75: mol_type = other DNA
tgccaaccaaatgtatatcgataccggagtagtgttctgcggaaacctcacattgattcaggtacagggagaagg

SEQ ID NO: 516147 - DNA, 75 bp, synthetic construct
  source 1..75: mol_type = other DNA
cgccagaaaaacagaccattgtggttgactactctgcgccaaacgtggcgaaagagatgcacgtcggtcacctgc

SEQ ID NO: 516148 - DNA, 75 bp, synthetic construct
  source 1..75: mol_type = other DNA
aacgaagaagtgcgtaacagccgtctgaaactggcacaactgacggcgaagacgctgaaactgggtctggatacg

SEQ ID NO: 516149 - DNA, 75 bp, synthetic construct
  source 1..75: mol_type = other DNA
acccgtgatgacgtgatgggcgaaagcctctacaacccgatgctgccaggaattgtggcggatctcaaagccaaa

SEQ ID NO: 516150 - DNA, 75 bp, synthetic construct
  source 1..75: mol_type = other DNA
gcgtcagcttcagaaaatggggatgacacctgagcagattaagcaggccaccggactttccgaagctgaactgaa

SEQ ID NO: 516151 - DNA, 75 bp, synthetic construct
  source 1..75: mol_type = other DNA
ctctaaaccgtgtgcaggctctggcgaagatcgcagaaatcaaagctaagtttgggctgaaaggagcgatgaaat

SEQ ID NO: 516152 - DNA, 75 bp, synthetic construct
  source 1..75: mol_type = other DNA
tgcgggcctggctggatgagccgccgctggcgtgaacgtagcgcacaggtgacggcactggatctctctccgctt

SEQ ID NO: 516153 - DNA, 75 bp, synthetic construct
  source 1..75: mol_type = other DNA
gctggcgcagaatatcagcgcgcggcattaattagtgccctgcaaacgctgtacccggaatgtgcgatttacgat

SEQ ID NO: 516154 - DNA, 75 bp, synthetic construct
  source 1..75: mol_type = other DNA
aaaatggttagcacgcggcgcttattcgccagcttcgcaaatccgggcgcgcgtctggacgtttgacccgtctga

SEQ ID NO: 516155 - DNA, 75 bp, synthetic construct
  source 1..75: mol_type = other DNA
ctggaccagcgtgacagccgcctggctacccgccgctacgttgaaaataaacgcgtactgaactgtttctcctat

SEQ ID NO: 516156 - DNA, 75 bp, synthetic construct
  source 1..75: mol_type = other DNA
caggcgtggcaggcggtggacgagcgtccgcatgctaatcgctttttaccgccagatgaaatcgaacagtcgctg

SEQ ID NO: 516157 - DNA, 75 bp, synthetic construct
  source 1..75: mol_type = other DNA
cgcattactggttggttaccaacctgtaccagaacatgcgggccaatgcgctgactgacgcggaattacggcgca

SEQ ID NO: 516158 - DNA, 75 bp, synthetic construct
  source 1..75: mol_type = other DNA
atttgcagaatgagacggtcgtcccttccataagccctatttcgctttcacttaacccctggtcgatcaattccc

SEQ ID NO: 516159 - DNA, 75 bp, synthetic construct
  source 1..75: mol_type = other DNA
aaaatgatgttcgcgcctacagctcagataaagaggaaaccctgatccgccagttgatgactcaggcgacagcgg

SEQ ID NO: 516160 - DNA, 75 bp, synthetic construct
  source 1..75: mol_type = other DNA
tgccttgaggccagcacggatctaattaagaataattttgaaccagccctgatggcgacaaggaacttctttgaa

SEQ ID NO: 516161 - DNA, 75 bp, synthetic construct
  source 1..75: mol_type = other DNA
gtgagtaagaagaaaaacaccacaacgcccacgccgcatgatgccgcgttccggtcgttcctggcgaatcccgac

SEQ ID NO: 516162 - DNA, 75 bp, synthetic construct
  source 1..75: mol_type = other DNA
gcctgctggccgccgtaccgcagatttgtaccattctcgggatgatctactggagccgtcactcagatcgccgcc

SEQ ID NO: 516163 - DNA, 75 bp, synthetic construct
  source 1..75: mol_type = other DNA
atgacagccgaggtgttgcatgttggaattacaccaggcggtatttactacattgaaacactggacggttaccgg

SEQ ID NO: 516164 - DNA, 75 bp, synthetic construct
  source 1..75: mol_type = other DNA
caatgaaatcatgaaccatcgccggatggccgcactgacgctgctgatgaagcatatccgccatcgtgacatgat

SEQ ID NO: 516165 - DNA, 75 bp, synthetic construct
  source 1..75: mol_type = other DNA
tcatcgagcaccagagcaccgaaaatctgtacatgcctttccgcatgttacgttacagtgtggcggcgatgcaga

SEQ ID NO: 516166 - DNA, 75 bp, synthetic construct
  source 1..75: mol_type = other DNA
gacgttgttcgtgaactgatggaggaaaagcacgccagccgtcaggtgacagtcccggcggtgatgctggaaaaa

SEQ ID NO: 516167 - DNA, 75 bp, synthetic construct
  source 1..75: mol_type = other DNA
ggttgaacagcacggcccgtactttgtgctcgcgccaggcctggcaatgccgcacggacgcccggaagagggcgt

SEQ ID NO: 516168 - DNA, 75 bp, synthetic construct
  source 1..75: mol_type = other DNA
gccggacagtgaatgcgtttttgccgtggtgctgacccgcggggatgtgcgccacatagcccgggactggaacct

SEQ ID NO: 516169 - DNA, 75 bp, synthetic construct
  source 1..75: mol_type = other DNA
cactgatcaccatcccgaacgacaaactgctgaaagttctgggccgcggcatctccctgctggatgcgttcggcg

SEQ ID NO: 516170 - DNA, 75 bp, synthetic construct
  source 1..75: mol_type = other DNA
gccggacagtgaatgcgtttttgccgtggtgctgactcgtggggatgtgcgtcacatagcccaggactggagtct

SEQ ID NO: 516171 - DNA, 75 bp, synthetic construct
  source 1..75: mol_type = other DNA
gccggacagtgaatgcgtttttgccgtggtgctgacccgtggggatgtgcgctacatagcccaggactggaacct

SEQ ID NO: 516172 - DNA, 75 bp, synthetic construct
  source 1..75: mol_type = other DNA
ccgctaacccagcgaattaccgttgagatgctgaacaacagtggggcgcaggtcgttgcggtaggaaatgccgcg

SEQ ID NO: 516173 - DNA, 75 bp, synthetic construct
  source 1..75: mol_type = other DNA
atgaatatggcgcgccagttgagcgaagccagcgcctgggaacttttcgccgcgcagaacctgaccagtgccgat

SEQ ID NO: 516174 - DNA, 75 bp, synthetic construct
  source 1..75: mol_type = other DNA
ggattttgatctgccggatgtcgacggcattacacttgcccgacaactggcgcagcactatccgtcgctggtttt

SEQ ID NO: 516175 - DNA, 75 bp, synthetic construct
  source 1..75: mol_type = other DNA
acggcaattgccgatgatatgccgtgcgcgttaatgggcgatccacgacgtattcgtcaggttattataaccaac

SEQ ID NO: 516176 - DNA, 75 bp, synthetic construct
  source 1..75: mol_type = other DNA
ggattttgatctgccggatatcgacggcattacgcttgcccggcaactggcacagcaatatccgtcactggtttt

SEQ ID NO: 516177 - DNA, 75 bp, synthetic construct
  source 1..75: mol_type = other DNA
gatcttgagtatgttaaccagatgaatgaactgcgccttagcgccctgcgggtgcagcaaatggtgatgaatctg

SEQ ID NO: 516178 - DNA, 75 bp, synthetic construct
  source 1..75: mol_type = other DNA
ctggcaagcaaaggtcaggcaagttcttcaagatgccaggttctttattcgcatcgaggtaggtgtctatgcact

SEQ ID NO: 516179 - DNA, 75 bp, synthetic construct
  source 1..75: mol_type = other DNA
gagggcgtgactcaatcagtcacccgatacatatatcactacaacgcagtgaatggttctgactctatgtctgga

SEQ ID NO: 516180 - DNA, 75 bp, synthetic construct
  source 1..75: mol_type = other DNA
ttcaaatttctggccggaccagaaaccgtgctggcactgctggatgaacgggaaagaaaccagcaatacatcaaa

SEQ ID NO: 516181 - DNA, 75 bp, synthetic construct
  source 1..75: mol_type = other DNA
gtacaatcgttgtcagatgcatatagcgattattcagtgctgttattgattgctgaaaacggggcatccatacca

SEQ ID NO: 516182 - DNA, 75 bp, synthetic construct
  source 1..75: mol_type = other DNA
ctgaactttctccaattaattatgatcttaaaaatccgtttcgtctacgagcaaagacgaagacagtagcggata

SEQ ID NO: 516183 - DNA, 75 bp, synthetic construct
  source 1..75: mol_type = other DNA
caacaagtaccgaggcaactgctctggcttcatcataaaagactttattgagtcctacatgaggaggccgaatgg

SEQ ID NO: 516184 - DNA, 75 bp, synthetic construct
  source 1..75: mol_type = other DNA
ggagagagaacgggggcgacggtgacgcattagtcagggaagaacgagaaaaaatgaaagtaatgaaacaggcgc

SEQ ID NO: 516185 - DNA, 75 bp, synthetic construct
  source 1..75: mol_type = other DNA
gtctgcgcggactgatggcaatccctgcgcctgagtcagaatatgtaaggcagtttgaagttgcacgccaaatgg

SEQ ID NO: 516186 - DNA, 75 bp, synthetic construct
  source 1..75: mol_type = other DNA
ggttctggtgtggcgagcggtgaagatcgtgcggaagaagctgctgaaatggctatctcttctccgctgctggaa

SEQ ID NO: 516187 - DNA, 75 bp, synthetic construct
  source 1..75: mol_type = other DNA
tgcgtgaggcggcagaacgtgcaattccggcaatggaacgcctgttaatgttgccagttgatgaggacctgataa

SEQ ID NO: 516188 - DNA, 75 bp, synthetic construct
  source 1..75: mol_type = other DNA
acgaggatgcaggcgagtttgcgatgagtgagcagcggctgatcgcccgcgttgaggtctggggggcggaggtgc

SEQ ID NO: 516189 - DNA, 75 bp, synthetic construct
  source 1..75: mol_type = other DNA
atgctgcgcgacacgccggtgctggcagccatcagcggcgacccgaaggcaaaaaacagcaaccagaccattctt

SEQ ID NO: 516190 - DNA, 75 bp, synthetic construct
  source 1..75: mol_type = other DNA
cggcaatgagccatgagatccgcacaccgctgtacggtattctcggcaccgcgcaactgctggcggataatcccg

SEQ ID NO: 516191 - DNA, 75 bp, synthetic construct
  source 1..75: mol_type = other DNA
tgcgctgatctcttccggcaccacaccgaagatgctggcgaacgaaggtcaggcgtgctttatcggctacggcgg

SEQ ID NO: 516192 - DNA, 75 bp, synthetic construct
  source 1..75: mol_type = other DNA
taccctgaccgcaggctggcagaaagcgtttagcccggatgcgaaagtcggcttcctggccattgctaataagtt

SEQ ID NO: 516193 - DNA, 75 bp, synthetic construct
  source 1..75: mol_type = other DNA
ccgctggcgctgtttatggggatctacctgcgctatctgcgtccgggtcgcattggcgaagtatcggtcatcggt

SEQ ID NO: 516194 - DNA, 75 bp, synthetic construct
  source 1..75: mol_type = other DNA
ccaggcaatgatcgacagcggcaatattccgtcgcagtatactgagtcacaactggcgcaactggtgttcaacaa

SEQ ID NO: 516195 - DNA, 75 bp, synthetic construct
  source 1..75: mol_type = other DNA
cgcaaatgggctacctgccggggatgatctggctgctcgccggggtggttctcgccggtgcggtgcaggatttca

SEQ ID NO: 516196 - DNA, 75 bp, synthetic construct
  source 1..75: mol_type = other DNA
ttcccgttcctgtttatcaccatcgcttgtggcgcggtgtctggcttccatgcgctgatctcttccggtaccacg

SEQ ID NO: 516197 - DNA, 75 bp, synthetic construct
  source 1..75: mol_type = other DNA
ttactaccaggcgattctggatgcggttgaacagcacggcccgtactttgtgctcgcacccggcctggcaatgcc

SEQ ID NO: 516198 - DNA, 75 bp, synthetic construct
  source 1..75: mol_type = other DNA
cgctgaaaaagccgctggaatttaaccacgacgacaacgatccggtggatatcctcatcaccatggcggcggtcg

SEQ ID NO: 516199 - DNA, 75 bp, synthetic construct
  source 1..75: mol_type = other DNA
cccccgcatgctgatatccgtgacagcggttttgtctattgcgtcagcgggcaagtcaacacctttaacccatcc

SEQ ID NO: 516200 - DNA, 75 bp, synthetic construct
  source 1..75: mol_type = other DNA
tatgacgccagcggtgcgccataacgacgggctggactatgtgccgacggacaagaaagtgctgttcggtcacca

SEQ ID NO: 516201 - DNA, 75 bp, synthetic construct
  source 1..75: mol_type = other DNA
atgaaacccactttatatactgctactggtgagtgcgttacgccaggccgtgaactgggcaaaggcggtgaaggt

SEQ ID NO: 516202 - DNA, 75 bp, synthetic construct
  source 1..75: mol_type = other DNA
gtgcggcagatattgcacagcgtgtggcagagctggaagaggagcttgatgacacggatgacgctgccgatcagg

SEQ ID NO: 516203 - DNA, 75 bp, synthetic construct
  source 1..75: mol_type = other DNA
ccggcggtgatgctggaaaaagtgatggcgctggcaggcagtgaaatgaagcgcctgtatgccgtcgggagtgag

SEQ ID NO: 516204 - DNA, 75 bp, synthetic construct
  source 1..75: mol_type = other DNA
atgcagcggctggacgatgcctttgagcatggtgcggatgtcagcattgttcacgacgttgttcgtgaactgatg

SEQ ID NO: 516205 - DNA, 75 bp, synthetic construct
  source 1..75: mol_type = other DNA
atgcaacggctggacgatgcttttgagcatggtgcggatgtcagcattgttcacgacgttgtccgtgaactgatg

SEQ ID NO: 516206 - DNA, 75 bp, synthetic construct
  source 1..75: mol_type = other DNA
cacagcaatatccgtcgctggttttgattggctttagcgcccatgtcatcgacgaaacgttgcgccagcgtacca

SEQ ID NO: 516207 - DNA, 75 bp, synthetic construct
  source 1..75: mol_type = other DNA
atggtgcggatgtcagcgttgttcacgacgttgttcgtgaactgatggaagaaaagcgcgccagccgtcaggtga

SEQ ID NO: 516208 - DNA, 75 bp, synthetic construct
  source 1..75: mol_type = other DNA
gacaaacttgcctttatggctgcgacagctgatgcgcagttgctgaattatgtcgcctggccgcaggcaacgctt

SEQ ID NO: 516209 - DNA, 75 bp, synthetic construct
  source 1..75: mol_type = other DNA
gctcaaaagtttgctgcacctggatgctttgcgtgcaaaggaacctcgagtaggcagcctggcggctgcggcttg

SEQ ID NO: 516210 - DNA, 75 bp, synthetic construct
  source 1..75: mol_type = other DNA
atgcagcgactggacgatgcttttgaacatggtgcggatgtcagcattgttcatgacgttgttcgtgaactgatg

SEQ ID NO: 516211 - DNA, 75 bp, synthetic construct
  source 1..75: mol_type = other DNA
gacagacgatgagctggaaaccgtcatgcaacggctggacgatgcttttgagcatggtgcggatgtcagcattgt

SEQ ID NO: 516212 - DNA, 75 bp, synthetic construct
  source 1..75: mol_type = other DNA
atttatggcctgccggaatacctgtccgccatcccttccgccttgctgaatgagtccgctactctgttccgccgg

SEQ ID NO: 516213 - DNA, 75 bp, synthetic construct
  source 1..75: mol_type = other DNA
aaagccatggtggtgagttaactaacttatcactagaggctgccatcatggctactatccctaccctttctcacc

SEQ ID NO: 516214 - DNA, 75 bp, synthetic construct
  source 1..75: mol_type = other DNA
aatgattcacggggacggacgcaccctagttatccgtctcgacgaacacggcaatatcaaattcactgaaaccgt

SEQ ID NO: 516215 - DNA, 75 bp, synthetic construct
  source 1..75: mol_type = other DNA
accatgttgttcaaaaaatagaggccctcgaatgttctgaacgctttttaaccagcaacttttcgcgggttaaat

SEQ ID NO: 516216 - DNA, 75 bp, synthetic construct
  source 1..75: mol_type = other DNA
cgcgccacgacatccagaaaaatgccgacggcagctggacggcaaatggccacatgccgctggaagatctggtgc

SEQ ID NO: 516217 - DNA, 75 bp, synthetic construct
  source 1..75: mol_type = other DNA
gcggagctgaaaacccgcggttacgacaatgcgggtctgtacgatccggcaggcgtcggtggtacacacgtcatg

SEQ ID NO: 516218 - DNA, 75 bp, synthetic construct
  source 1..75: mol_type = other DNA
cgtctcaccacccatgagattgctacctctggtggtgagttaatgaaattcatcatggaggctgccatcatggct

SEQ ID NO: 516219 - DNA, 75 bp, synthetic construct
  source 1..75: mol_type = other DNA
cgcataaccgcgctcaggcggtttttttatgcgtaatgcacagccacattcagattatggtggggcgtgcagggc

SEQ ID NO: 516220 - DNA, 75 bp, synthetic construct
  source 1..75: mol_type = other DNA
cctcgaatgttctgaacgctttttaaccagcaacttttcgcgggttaaattcgagcaccgtggcaatacctacaa

SEQ ID NO: 516221 - DNA, 75 bp, synthetic construct
  source 1..75: mol_type = other DNA
ctaccacagacaaaataattcctggtgatggtcgcactctcgttgttcacttcgacgaacgcggcaatatcaaat

SEQ ID NO: 516222 - DNA, 75 bp, synthetic construct
  source 1..75: mol_type = other DNA
ttaattttaagcccgtcacctataccgacgccaaaggcgaaaaacgcccaatgtaccaaatcaccaaaaacggct

SEQ ID NO: 516223 - DNA, 75 bp, synthetic construct
  source 1..75: mol_type = other DNA
aatgtaccaaatcaccaaaaacggcttcgttttcctggtgatgggcttcactggcaaaaaagccgccgcattcaa

SEQ ID NO: 516224 - DNA, 75 bp, synthetic construct
  source 1..75: mol_type = other DNA
agccgcaaggctggccggtttcggtagtcaccggttgtagcaaccctgtgcgtctcaccacccatgagattgcta

SEQ ID NO: 516225 - DNA, 75 bp, synthetic construct
  source 1..75: mol_type = other DNA
ccattgttatcctgtgtctgagcttcctgttgatgattggctttagcctggtggcggaaggctttggcctcgtca

SEQ ID NO: 516226 - DNA, 75 bp, synthetic construct
  source 1..75: mol_type = other DNA
agacggattacgcaaacgcctcgacagttattttgatgtgctggaaaaagcgtcagtaaccaaagagattttgct

SEQ ID NO: 516227 - DNA, 75 bp, synthetic construct
  source 1..75: mol_type = other DNA
tcattacggcaattatgatccctttatggagtttgatattcagatcagccaaattgtcccttctatggggtatcg

SEQ ID NO: 516228 - DNA, 75 bp, synthetic construct
  source 1..75: mol_type = other DNA
acatcgaatcgatctggaaaaaaacagaaccaatcagaaactctgtactaaaaaccttaatgaaaggtaaagttg

SEQ ID NO: 516229 - DNA, 75 bp, synthetic construct
  source 1..75: mol_type = other DNA
cacatggtgcaaatcaaaaccccggatctgggcagtattcacaacatcgtcgatgcggttctttactgcaacagc

SEQ ID NO: 516230 - DNA, 75 bp, synthetic construct
  source 1..75: mol_type = other DNA
tatcacaggcgctgcttgatgctaccgcgctggcaaccggccgtctgaaaactgaagtggtctgtgatgaatggc

SEQ ID NO: 516231 - DNA, 75 bp, synthetic construct
  source 1..75: mol_type = other DNA
acaagctgtgatgcgaccgtcgcgtttagcaggaaggtgatgacgtgtacagaaaccatgatgaatgaacgcttt

SEQ ID NO: 516232 - DNA, 75 bp, synthetic construct
  source 1..75: mol_type = other DNA
tcatttttatcgagttctggcgcggcgtaccgctgattaccgtattgtttatgtcttcggtcatgctgcctttgt

SEQ ID NO: 516233 - DNA, 75 bp, synthetic construct
  source 1..75: mol_type = other DNA
atgaaggcgaagtcggctgcgatatcgaagtgattcgcccgcgcgccaactggcgctggctggcgaacgccgtgt

SEQ ID NO: 516234 - DNA, 75 bp, synthetic construct
  source 1..75: mol_type = other DNA
atgccgattgtgcgtatcttatcggtcatttttatcgagttctggcgcggcgtaccgctgattaccgtattgttt

SEQ ID NO: 516235 - DNA, 75 bp, synthetic construct
  source 1..75: mol_type = other DNA
cggcagctatgtgtttgtgcagcgctgggaacacaacctgaagcaactcaaccgtatgagcgttcacgatcagga

SEQ ID NO: 516236 - DNA, 75 bp, synthetic construct
  source 1..75: mol_type = other DNA
tgggaacataacctgaagcagcttaaccgtatgagcgttcatgatcaggagatgatgatcggtcgtactaaagaa

SEQ ID NO: 516237 - DNA, 75 bp, synthetic construct
  source 1..75: mol_type = other DNA
cgctgtcactacgtctgttgcgatcgccgagttctttggcaaacgccacgacaatgttattcaaaaaataaaatt

SEQ ID NO: 516238 - DNA, 75 bp, synthetic construct
  source 1..75: mol_type = other DNA
gcctcccctgcccggaaccctgtgtggaagaggccattgaagggcttcgacgggacatgctggggctgggcctga

SEQ ID NO: 516239 - DNA, 75 bp, synthetic construct
  source 1..75: mol_type = other DNA
gcagttcttccttggggaccggaaatcggctgtttccctgatgaataacctcaacctctcctgcagactcaaaag

SEQ ID NO: 516240 - DNA, 75 bp, synthetic construct
  source 1..75: mol_type = other DNA
tgatatgggacgaacctcagccagaccgcgatcgcagacgtcagataaggacccgctggtcactcacggatgacg

SEQ ID NO: 516241 - DNA, 75 bp, synthetic construct
  source 1..75: mol_type = other DNA
acatacaaccatgctcgttaccttgaaggaagacgagaaatgatgcaatggtacgctgactaccttgatgctatt

SEQ ID NO: 516242 - DNA, 75 bp, synthetic construct
  source 1..75: mol_type = other DNA
ttgattgttaaacactcaattaaatataattccgtaaccagtaagaaattaactaccgcttctccagcggacaag

SEQ ID NO: 516243 - DNA, 75 bp, synthetic construct
  source 1..75: mol_type = other DNA
cgaaacatcaacaaaattttcttttgcggacataagccgggtgtaagccaggctcagctaaaatcagaaatactg

SEQ ID NO: 516244 - DNA, 75 bp, synthetic construct
  source 1..75: mol_type = other DNA
cactgtcaccggcgatcgcccccgttctggctgacggagacagcaacagactcttccacggacaaaaacgtcccg

SEQ ID NO: 516245 - DNA, 75 bp, synthetic construct
  source 1..75: mol_type = other DNA
atccgcaacatgcagctcgatgttgcgtccacacgccagtgcttcatggcgcaactggggcaaccactgaccagc

SEQ ID NO: 516246 - DNA, 75 bp, synthetic construct
  source 1..75: mol_type = other DNA
aaaaggatggcggttctggttgcctttgtccttgcatgggaaacgctggcgctggatgatgcactggacgttctg

SEQ ID NO: 516247 - DNA, 75 bp, synthetic construct
  source 1..75: mol_type = other DNA
agcggcagggagtcaggtacgcattgatattatggcaagcctcggtgattacacgctggctgaaggccagaaact

SEQ ID NO: 516248 - DNA, 75 bp, synthetic construct
  source 1..75: mol_type = other DNA
gctctctattactgataaacgtcagcaggagattgccttctccgacaagctgtatgccgcggattctcgtttgat

SEQ ID NO: 516249 - DNA, 75 bp, synthetic construct
  source 1..75: mol_type = other DNA
cgcgggattgcgatggtgttccagaactacgcgctctatccgcatatgagcgtagaggagaacatgcgtgggggc

SEQ ID NO: 516250 - DNA, 75 bp, synthetic construct
  source 1..75: mol_type = other DNA
tacacacgttatgtacgtgctgcaccatgctgacaagccaaatctgtatcatggcttgccggagaacccggaaat

SEQ ID NO: 516251 - DNA, 75 bp, synthetic construct
  source 1..75: mol_type = other DNA
ttcccagcgcctggcgcaatatggcatcagtctcgccgaagtaaaaagcgcgctggatgcttcaaaccaggaagc

SEQ ID NO: 516252 - DNA, 75 bp, synthetic construct
  source 1..75: mol_type = other DNA
tgcactggtggatcgcagcggtaagcacgatcttgccgatttacgctcattgcaggactggtttctcaaatatga

SEQ ID NO: 516253 - DNA, 75 bp, synthetic construct
  source 1..75: mol_type = other DNA
aagcgatgactgtggcggtgattatcgcgggtctgctgccgattctgtggggaacgggggcaggttcagaggtga

SEQ ID NO: 516254 - DNA, 75 bp, synthetic construct
  source 1..75: mol_type = other DNA
aaaaacggctgcgctggtactggtactggcgtaacccttccgatctttgcccgtggcacatggatgaaacctacg

SEQ ID NO: 516255 - DNA, 75 bp, synthetic construct
  source 1..75: mol_type = other DNA
cgaagtgattcgcccacgcgcaaactggcgctggctggcaaacgcggtattcagtctcggggaacacgctgaaat

SEQ ID NO: 516256 - DNA, 75 bp, synthetic construct
  source 1..75: mol_type = other DNA
ttctgttgaagtagggccagcgctgtttatcagcttgctgattattacgttgtcgtttatcccgatcttcaccct

SEQ ID NO: 516257 - DNA, 75 bp, synthetic construct
  source 1..75: mol_type = other DNA
ggaactggggcggggtcagaagtgatgagcaggatcgccgcgccgatgattggcgggatgatcaccgcaccttta

SEQ ID NO: 516258 - DNA, 75 bp, synthetic construct
  source 1..75: mol_type = other DNA
gcggtgggcggggcgatggttggcgaaacggtggaagggattgcccgttatccaattaatctgcgttatccgcaa

SEQ ID NO: 516259 - DNA, 75 bp, synthetic construct
  source 1..75: mol_type = other DNA
aaagcagtaacccgctcaatcgctttttgattcgtgtttatcatccgctgttgctgaaagtactgcactggccga

SEQ ID NO: 516260 - DNA, 75 bp, synthetic construct
  source 1..75: mol_type = other DNA
ctggaaacgctgaaaagcagtctgccggaaggcgtggagatagttacaacatacgatcgcagccagctcattgac

SEQ ID NO: 516261 - DNA, 75 bp, synthetic construct
  source 1..75: mol_type = other DNA
cgccagtggatgcgctgccggatctctccgatgtgcaggtgattattaaaaccagctatcccggtcaggctccgc

SEQ ID NO: 516262 - DNA, 75 bp, synthetic construct
  source 1..75: mol_type = other DNA
cggttgttgagcatgtcacgggtaaaaaagctgttatttctgaaacggccaccaaacccgaacacactaaaccgc

SEQ ID NO: 516263 - DNA, 75 bp, synthetic construct
  source 1..75: mol_type = other DNA
ggttataaggcaaaagaaacgctcgatatcatgcaaggtctttacgaaactcataagcttttgacctatccgcga

SEQ ID NO: 516264 - DNA, 75 bp, synthetic construct
  source 1..75: mol_type = other DNA
gccgataatatagcaggcgtttattacagacccgttcaaaagtatataaatggcacctggtataatgtagcgagc

SEQ ID NO: 516265 - DNA, 75 bp, synthetic construct
  source 1..75: mol_type = other DNA
cagatgaacttttaaaaactcttgaggagaaaaaacagaagtacaatgcaatttacgaagagttagcacgaaaga

SEQ ID NO: 516266 - DNA, 75 bp, synthetic construct
  source 1..75: mol_type = other DNA
atgagactttttattgcagaaaaaccctctttagcaaaagcgatttttgaagggctgggtggtaacccaaatacg

SEQ ID NO: 516267 - DNA, 75 bp, synthetic construct
  source 1..75: mol_type = other DNA
gaaactggcggcaaataccgggcttatctccatcgaaaaagaaaaggggtattcggagctggtatggaaaaccac

SEQ ID NO: 516268 - DNA, 75 bp, synthetic construct
  source 1..75: mol_type = other DNA
ttcttgccgaagcctggcggtgggatgaacctgttaatcacctcagtggatggtgataaaactgctggcgctgcg

SEQ ID NO: 516269 - DNA, 75 bp, synthetic construct
  source 1..75: mol_type = other DNA
tctacatataaaccagcaaataacacctcgacatggacgcatcaggcaccatcaggctgcgtttatactggcatt

SEQ ID NO: 516270 - DNA, 75 bp, synthetic construct
  source 1..75: mol_type = other DNA
tgggtgaatacatccggtgatacctatgatgtttatgttgaaataggtaattacgccacaggtgttaatattcag

SEQ ID NO: 516271 - DNA, 75 bp, synthetic construct
  source 1..75: mol_type = other DNA
taagctattcactcttgcaagtgcaaataactctgcccgtaatgcatcatttaacttgtggggaaattcgtcaag

SEQ ID NO: 516272 - DNA, 75 bp, synthetic construct
  source 1..75: mol_type = other DNA
ccggcggcggaaagcacaaacgtacagacgattctggattttaaagatgggcgtggttattactgctcgcatccg

SEQ ID NO: 516273 - DNA, 75 bp, synthetic construct
  source 1..75: mol_type = other DNA
gtaatgaccctaactttgcgacaacaatgacaaatgcgctggcaggcaaacagcctctggatgcaactttaaccg

SEQ ID NO: 516274 - DNA, 75 bp, synthetic construct
  source 1..75: mol_type = other DNA
atctgattgaagatatcacgcccgatgagctggaagaattgtttgttgcaggtttcagcctggcagaaaaagggc

SEQ ID NO: 516275 - DNA, 75 bp, synthetic construct
  source 1..75: mol_type = other DNA
ctgcgaaaacagcaataccagttaaatctgattgaagatatcacgcccgatgagctggaagaattgtttgttgca

SEQ ID NO: 516276 - DNA, 75 bp, synthetic construct
  source 1..75: mol_type = other DNA
gcttaaccgtttcgtcggtggcgatgcagcaaatcgtcgccatttgccgggctatcgatctctccgccaaagtgc

SEQ ID NO: 516277 - DNA, 75 bp, synthetic construct
  source 1..75: mol_type = other DNA
aagcgtcagctaaaaaccttttcggtttcccctgatattgccgcagcggtagcccccgtgaagatcatgctggat

SEQ ID NO: 516278 - DNA, 75 bp, synthetic construct
  source 1..75: mol_type = other DNA
tgacagcaatatgatcctgaacctgcccgattttgtcagctttatctttacgacaaaaacgctaccttctgcctc

SEQ ID NO: 516279 - DNA, 75 bp, synthetic construct
  source 1..75: mol_type = other DNA
atgattttaaataagcttgccgcttcactgtcgccgatagtgaacgggatgctggcgctgctcgcttttgtgcaa

SEQ ID NO: 516280 - DNA, 75 bp, synthetic construct
  source 1..75: mol_type = other DNA
atcagcataaacaaatcttacgcatcctgaaaattaatgatgtactaccgaaagataaagaatcgctgttctgga

SEQ ID NO: 516281 - DNA, 75 bp, synthetic construct
  source 1..75: mol_type = other DNA
gtaaggttgtctgtgaaagatatggagttaatgctggttatttgagtgtatgtgtcggacgcttgcttagagtgg

SEQ ID NO: 516282 - DNA, 75 bp, synthetic construct
  source 1..75: mol_type = other DNA
tgaacgacatggagttaatgcaggttatttgagtgtgtgtatcagacgcttacttcaagtagaaaaagcagcgtc

SEQ ID NO: 516283 - DNA, 75 bp, synthetic construct
  source 1..75: mol_type = other DNA
ctaatcaaagcattaaccggtgtttaccacgccgatcgcggcaccatctggctggaagaccaggctatctcaccg

SEQ ID NO: 516284 - DNA, 75 bp, synthetic construct
  source 1..75: mol_type = other DNA
cttttttgttctattccggtttctggctgccgatgtatttttccagccgcggaaagctgaccaataccgcagacc

SEQ ID NO: 516285 - DNA, 75 bp, synthetic construct
  source 1..75: mol_type = other DNA
gaatatcagctttatggaagccgttcatgcccgctcttacagctctattttctcgacgctgtgccagacaaaaga

SEQ ID NO: 516286 - DNA, 75 bp, synthetic construct
  source 1..75: mol_type = other DNA
cggttacttacccatcatccgagtcgttggctctggtggccgatgtgcaataccacgaaccatatctgtcagccg

SEQ ID NO: 516287 - DNA, 75 bp, synthetic construct
  source 1..75: mol_type = other DNA
ttccggcacgggacgctccgcttcaatggtaagcgtcgtctcagcaccgtctggcagatcctgaaattcctgaga

SEQ ID NO: 516288 - DNA, 75 bp, synthetic construct
  source 1..75: mol_type = other DNA
gaaggcgtaacgattaccaatctgcgtaatctgtttttcacccctgcagggatcaaagaagagaatatccagaag

SEQ ID NO: 516289 - DNA, 75 bp, synthetic construct
  source 1..75: mol_type = other DNA
tagctgcgcggcacaaactgaagatggcactgggtaaagacctgtcagataaactcgtggaacatatagaccaga

SEQ ID NO: 516290 - DNA, 75 bp, synthetic construct
  source 1..75: mol_type = other DNA
attttcgggaaaccctgaatccccgccgtgaaaaatcttggcacaagaccaccgtcggggaagtggtaaaggaaa

SEQ ID NO: 516291 - DNA, 75 bp, synthetic construct
  source 1..75: mol_type = other DNA
atacccgcgaacccgcgaagaaagaaagcactacggtgaagcgtaagcgcaggactaagaagcagaagaaagagc

SEQ ID NO: 516292 - DNA, 75 bp, synthetic construct
  source 1..75: mol_type = other DNA
ggtgaaggaaatagccgcgcggcacaaactgaagatggcactgggtaaagacttgtcggataaacccgtggagca

SEQ ID NO: 516293 - DNA, 75 bp, synthetic construct
  source 1..75: mol_type = other DNA
gcaacggtatcggtgaaggcagggaaactgttgtttctgaaagccggtagtgcgatgacggccagcggcaaaccc

SEQ ID NO: 516294 - DNA, 75 bp, synthetic construct
  source 1..75: mol_type = other DNA
ccggtgccagccttgcaccggcttttatgctgacgctgaacagtcaggacattaccagcaacttcagcgaccggc

SEQ ID NO: 516295 - DNA, 75 bp, synthetic construct
  source 1..75: mol_type = other DNA
atctgggcagtattcacaacatcgtcgatgcagttctttattgcaacagccacaacatggaagcgtaccagggcg

SEQ ID NO: 516296 - DNA, 75 bp, synthetic construct
  source 1..75: mol_type = other DNA
ccgtgaaaaatcgtggcacaagaccactgtcggggaagtggtgaaggaaatagccgcgcgtcacaagctgaagat

SEQ ID NO: 516297 - DNA, 75 bp, synthetic construct
  source 1..75: mol_type = other DNA
ctgccggttatcaccatcactcgcaaagccggtgacggtcatcggttcacccttgctgatcgtggtgcctatacc

SEQ ID NO: 516298 - DNA, 75 bp, synthetic construct
  source 1..75: mol_type = other DNA
cagtgtcgctccgtcactggccggaattaaaatcccgcacatcgaccagtcgcaggagtctgatgcgaaatttct

SEQ ID NO: 516299 - DNA, 75 bp, synthetic construct
  source 1..75: mol_type = other DNA
tagctgtgcggcacaaactgaagatggcactgggtaaagacctgtcagataaacccgtggaacatatagaccaga

SEQ ID NO: 516300 - DNA, 75 bp, synthetic construct
  source 1..75: mol_type = other DNA
cctggcagatcgaggagcttacacgggcgtaattgccagttggttgcatacccgtgaacccgagaagaaagaaag

SEQ ID NO: 516301 - DNA, 75 bp, synthetic construct
  source 1..75: mol_type = other DNA
taccgtaagcccggataatggttttacgaccagtctggagcttgaagtgaggattgatgatttcgaaatggaatg

SEQ ID NO: 516302 - DNA, 75 bp, synthetic construct
  source 1..75: mol_type = other DNA
gttgcgtcattctcgttacaactggcggaagggcggccagatctctacacggaaatgcctgtgaaagtcagtggc

SEQ ID NO: 516303 - DNA, 75 bp, synthetic construct
  source 1..75: mol_type = other DNA
aattccctttcgcggcaaagagggagaaggcgtaacgattaccaatctgcgtaatctgtttttcacccctgcggg

SEQ ID NO: 516304 - DNA, 75 bp, synthetic construct
  source 1..75: mol_type = other DNA
caacgtgcctgagctgctcccgataactcttgatgccgaagatgttgtccctacaacctcccccggtcacaacct

SEQ ID NO: 516305 - DNA, 75 bp, synthetic construct
  source 1..75: mol_type = other DNA
ggcgaaaaggctgccctaattatcctcccgaatttaaacagcagcacgttgctgcctcctgtgaacccgggatat

SEQ ID NO: 516306 - DNA, 75 bp, synthetic construct
  source 1..75: mol_type = other DNA
ccggggctttgaagcagaccagcttgatctggaactggacgacgccgacggaaaaatcgcgctgccgcgccgtgg

SEQ ID NO: 516307 - DNA, 75 bp, synthetic construct
  source 1..75: mol_type = other DNA
aggacggcgacagtcaccgatttaccctggcagatcgcggagcctacatgggcgtaattgccagctggttgcata

SEQ ID NO: 516308 - DNA, 75 bp, synthetic construct
  source 1..75: mol_type = other DNA
aatggaccattacgactctgacgcataccgtcagcccggataacggttttacgaccagtctggagcttgaactga

SEQ ID NO: 516309 - DNA, 75 bp, synthetic construct
  source 1..75: mol_type = other DNA
acagttggggaagtggtgaaggaaatagccgcgcgtcacaagctgaagatggcactgggtaaagacctgtcggat

SEQ ID NO: 516310 - DNA, 75 bp, synthetic construct
  source 1..75: mol_type = other DNA
aggacggcgacagtcaccgctttaccttggcagatcgcggagcctatacgggcgtaattgccagttggttgcata

SEQ ID NO: 516311 - DNA, 75 bp, synthetic construct
  source 1..75: mol_type = other DNA
cagggtaaaagcgccagcggtaaaccactaccggttatcactatcacacgtaaggacggcgacagtcaccgcttt

SEQ ID NO: 516312 - DNA, 75 bp, synthetic construct
  source 1..75: mol_type = other DNA
gataacagctcttgcgcctgttacaaatccaatgtttgcaaaagttgcggcagttggagctggtatcggtatggc

SEQ ID NO: 516313 - DNA, 75 bp, synthetic construct
  source 1..75: mol_type = other DNA
ctatctagaagggaaaaataaagctccagcggatgaagacatatctgatgtattaagaaagtttaacgaggatgg

SEQ ID NO: 516314 - DNA, 75 bp, synthetic construct
  source 1..75: mol_type = other DNA
aaagcacttaatttggctccagatcagcacggagaacagatttttaagcagatacttaaaggttgctcatctgtg

SEQ ID NO: 516315 - DNA, 75 bp, synthetic construct
  source 1..75: mol_type = other DNA
agtcggaatgatggtcaccagcggtgagcaccacggcacactgcaatcttttcgtacgctttcagaaaccggtat

SEQ ID NO: 516316 - DNA, 75 bp, synthetic construct
  source 1..75: mol_type = other DNA
tgaaaaacaccttaaccgtttcatagagggcaaatgtgtcagtgatatcaaactgattcacgatcaaatgctcaa

SEQ ID NO: 516317 - DNA, 75 bp, synthetic construct
  source 1..75: mol_type = other DNA
aaaatcgacaacgactttgaaccaaagctgattcagaccgtgcgcggcgtgggttacatgctcgaggtgccggat

SEQ ID NO: 516318 - DNA, 75 bp, synthetic construct
  source 1..75: mol_type = other DNA
taaacagaatcgtatttactaccgcaagccacgcagtgaaatgggtgtgacttgctcaggccgccagaaaatgaa

SEQ ID NO: 516319 - DNA, 75 bp, synthetic construct
  source 1..75: mol_type = other DNA
ggaagtatttgcctgccaaacgtagccatttacgcggcaggctaccggaaatcaaaacaactgacggcgaggtaa

SEQ ID NO: 516320 - DNA, 75 bp, synthetic construct
  source 1..75: mol_type = other DNA
attctggcagtactaccgctgaaatatcgcggccacctggttgagcaggatagcttcatggctcgactggttgaa

SEQ ID NO: 516321 - DNA, 75 bp, synthetic construct
  source 1..75: mol_type = other DNA
gtgctgcaagcggctatccacgggcagggagtcgcattggcgaataatgtgatggcgcaatcggaaatcgaggcc

SEQ ID NO: 516322 - DNA, 75 bp, synthetic construct
  source 1..75: mol_type = other DNA
aactttatgccgaatatttgttgccggtgtgttctccgctactgttaaccggcgaaaaacccttgaagacgccag

SEQ ID NO: 516323 - DNA, 75 bp, synthetic construct
  source 1..75: mol_type = other DNA
ctgacgataacgccagaaatcgccgcagagcacgcagacaggctcaacgtgagcaggcaatgcaggacgcttctc

SEQ ID NO: 516324 - DNA, 75 bp, synthetic construct
  source 1..75: mol_type = other DNA
cataaatcagtgcttgataaacccggttttggcgtcgaactcaatcgtgactgcaatttgaaacgcccctacagc

SEQ ID NO: 516325 - DNA, 75 bp, synthetic construct
  source 1..75: mol_type = other DNA
ctgcaaaatgtcgaccttgccccagagttaacctcactcagcatggatgctctaaaagctcgatggtctcaactt

SEQ ID NO: 516326 - DNA, 75 bp, synthetic construct
  source 1..75: mol_type = other DNA
aagctggaatgttactcccatgccaaatacggacgtatgcgtgcaggttcttcggacaatcgaagcacacggagg

SEQ ID NO: 516327 - DNA, 75 bp, synthetic construct
  source 1..75: mol_type = other DNA
cctatcgtcggatcaatattatattgatagtacaagattctatctatgccaatatttttgctgggtacatcaatt

SEQ ID NO: 516328 - DNA, 75 bp, synthetic construct
  source 1..75: mol_type = other DNA
tttgcgccatataatacaaagagtgatgtagatgcgctggtgaatgccgttgaccgcgcactggaattattggtg

SEQ ID NO: 516329 - DNA, 75 bp, synthetic construct
  source 1..75: mol_type = other DNA
atgatctggcagcctgagttcacagataaaacactctccaggaaacccggggcggttcattatgaatctgcgact

SEQ ID NO: 516330 - DNA, 75 bp, synthetic construct
  source 1..75: mol_type = other DNA
tgttgataaagacacgctccagaaagccagcgatattgtctacaaggcatatacagcggatatgaaaaaagcagt

SEQ ID NO: 516331 - DNA, 75 bp, synthetic construct
  source 1..75: mol_type = other DNA
cataaatcagtgcttgataaacccggtttcggcgtcgaactcaatcgtgactgtaatttgaaacgcccctacagc

SEQ ID NO: 516332 - DNA, 75 bp, synthetic construct
  source 1..75: mol_type = other DNA
gcaaaagagatgggctttatcggtggcaaaatgccgacgcactgggggccacatgatggtgatgcggggatccgc

SEQ ID NO: 516333 - DNA, 75 bp, synthetic construct
  source 1..75: mol_type = other DNA
tgcgtgaaaaatgcggtgaagatttctggttaatgctcgactgctggatgagtcaggacgtgaactatgccacca

SEQ ID NO: 516334 - DNA, 75 bp, synthetic construct
  source 1..75: mol_type = other DNA
ccaactgaaagcaacgcacaccgattctgtttcctccgaacaggtcgataacgttcgccggatgttgctggcgat

SEQ ID NO: 516335 - DNA, 75 bp, synthetic construct
  source 1..75: mol_type = other DNA
atccgtctcaatcagatggtgaacttcctgcaatcgcaatttaataagccgagtgccgaagagcaggacgccgcc

SEQ ID NO: 516336 - DNA, 75 bp, synthetic construct
  source 1..75: mol_type = other DNA
atggttgcggtaagaagtgcacatatcaataaggctggtgaatttgatccgcaaaaatggatcgcaagtctgggt

SEQ ID NO: 516337 - DNA, 75 bp, synthetic construct
  source 1..75: mol_type = other DNA
atcgcggttacctggttgagcaggatagcttcatggctaggttggctgaaatggaaaaggaactcagtgaggcaa

SEQ ID NO: 516338 - DNA, 75 bp, synthetic construct
  source 1..75: mol_type = other DNA
aatgcctaataatgtcggggggtttggggatgtggagaaggcggcaaatgtgtttgtgcgaaatgaattattacc

SEQ ID NO: 516339 - DNA, 75 bp, synthetic construct
  source 1..75: mol_type = other DNA
ctgcgtcgacaaaccagatccagcataaaagtcaaactacagccgaagcattcagcttcggtgatcccgttcctg

SEQ ID NO: 516340 - DNA, 75 bp, synthetic construct
  source 1..75: mol_type = other DNA
aaggatgggcttcagattatcccgttgtcagaagtggcggcgaaggatgagttcctgaatatcaagaacgtgagc

SEQ ID NO: 516341 - DNA, 75 bp, synthetic construct
  source 1..75: mol_type = other DNA
cgccacgctgttccgccgaaagtattacattaacggcagtcatgcaggcttcatcatgtacatgaccgatgccgc

SEQ ID NO: 516342 - DNA, 75 bp, synthetic construct
  source 1..75: mol_type = other DNA
ttccgtcagctctgctcaacgagtccgccacgttgttccgccgtaagtattacattaacggcagccatgcaggct

SEQ ID NO: 516343 - DNA, 75 bp, synthetic construct
  source 1..75: mol_type = other DNA
ctatgtggaatgcgtacagatggatcgctggtatgagccaccagtgagtttcgacggactggcgcgaaccttccg

SEQ ID NO: 516344 - DNA, 75 bp, synthetic construct
  source 1..75: mol_type = other DNA
tgctgccgtgcatcacagctcaccgatttacgtcaaacgtaatattctggcttcaacgtttatcccgcacccgtg

SEQ ID NO: 516345 - DNA, 75 bp, synthetic construct
  source 1..75: mol_type = other DNA
cgcaacgagctaacgttcctccaagagcgatgtaaagaaattaactgttgggttggcgaagatgtatttcgcttt

SEQ ID NO: 516346 - DNA, 75 bp, synthetic construct
  source 1..75: mol_type = other DNA
tcccactgtcagaggtggcggcaaaggatgagtttttgaatatcaagaatgtgagccgggatgacatgatggcgg

SEQ ID NO: 516347 - DNA, 75 bp, synthetic construct
  source 1..75: mol_type = other DNA
cgctggtatgagccacccgtcagttttgacggactggcacgcaccttccgcgctgccgtgcatcacagctccccg

SEQ ID NO: 516348 - DNA, 75 bp, synthetic construct
  source 1..75: mol_type = other DNA
ccgattgcagtaaagtgcaacattctgaccagtacctatatccctcatccgctgcttagccagcaggctttttcg

SEQ ID NO: 516349 - DNA, 75 bp, synthetic construct
  source 1..75: mol_type = other DNA
gtaggtcgcgacagcaaagtggtactgattgatagcgactcctttcagattaacgccaatggcacactgcattta

SEQ ID NO: 516350 - DNA, 75 bp, synthetic construct
  source 1..75: mol_type = other DNA
tttgcgctggattttctggtgttcggtaatgcgtttctggaaaagcgttacagcaccaccggtaaggtcatcaga

SEQ ID NO: 516351 - DNA, 75 bp, synthetic construct
  source 1..75: mol_type = other DNA
catcactgcaccgctgaattggttccggcagatccacagaataccgcgcacgctgggctgtggataggcaagagc

SEQ ID NO: 516352 - DNA, 75 bp, synthetic construct
  source 1..75: mol_type = other DNA
ctcacacacaggtccgaacggtgcaagccagtcttaccgctatgttgatttcaataaaaaatggagggcggcttg

SEQ ID NO: 516353 - DNA, 75 bp, synthetic construct
  source 1..75: mol_type = other DNA
ctggtggagcaggcaaatagcgttaatgaatgccttgatgctaactatccggcctccactgcaacattaattcag

SEQ ID NO: 516354 - DNA, 75 bp, synthetic construct
  source 1..75: mol_type = other DNA
ataatttctggctggggttgattcctggcattccggcggtgctggcgtttttgttgagcggtcggcgggctacgt

SEQ ID NO: 516355 - DNA, 75 bp, synthetic construct
  source 1..75: mol_type = other DNA
cagacagacaagcggtaatggcgaaaataaccgccaaacgtcatcggctggaatctgcattgacagtgggcgcgg

SEQ ID NO: 516356 - DNA, 75 bp, synthetic construct
  source 1..75: mol_type = other DNA
cagtcctaccgctatgtcgatttcaacaagaaactgaaagcggcgcggacgttgctttattccgttgacaagtac

SEQ ID NO: 516357 - DNA, 75 bp, synthetic construct
  source 1..75: mol_type = other DNA
ttaccggtctggcaaaaagcctgcgtgctgccgtgcatcacagctccccgatttacgtcaaacgtaatattctgg

SEQ ID NO: 516358 - DNA, 75 bp, synthetic construct
  source 1..75: mol_type = other DNA
ctggaaacctcaccggcaaaatatacccgccgtggtgtggaggaggatgtttactggtgggtgccgtccttcaac

SEQ ID NO: 516359 - DNA, 75 bp, synthetic construct
  source 1..75: mol_type = other DNA
gccgtgcaggatcgcaacgatatcgaaatgcttcgcgaaaacatggtcaagtcgaaaggccgcaacaactttaaa

SEQ ID NO: 516360 - DNA, 75 bp, synthetic construct
  source 1..75: mol_type = other DNA
ctcgcagactgggccgaacggtgcgatccagtcctaccgctatgtcgattttaataaaagatggaaggcagcttg

SEQ ID NO: 516361 - DNA, 75 bp, synthetic construct
  source 1..75: mol_type = other DNA
tgccggatacatcatgtacgtcactgatgccgtgcaggatcgcaacgatatcgaaatgcttcgcgaaaacatggt

SEQ ID NO: 516362 - DNA, 75 bp, synthetic construct
  source 1..75: mol_type = other DNA
ctgctgaccctaccgcagcaccggcgtttgctggcatttggatcgggaagggcggctgtatgtgcggggataagt

SEQ ID NO: 516363 - DNA, 75 bp, synthetic construct
  source 1..75: mol_type = other DNA
tcattggaaggaacaacgggaaagaatgtaacgctaaattatacttccagcagacagcatactactgcctgcagg

SEQ ID NO: 516364 - DNA, 75 bp, synthetic construct
  source 1..75: mol_type = other DNA
gatgtcctggccctttctgaaagcgagaattcagccagtaccacaacaaatgaaccgccccgggtttcctggaga

SEQ ID NO: 516365 - DNA, 75 bp, synthetic construct
  source 1..75: mol_type = other DNA
tggtgattgattgcagtcacccgccgcgcgaggatgcaccgcgtaatcactgtgatttaaataccgtgcttgcgc

SEQ ID NO: 516366 - DNA, 75 bp, synthetic construct
  source 1..75: mol_type = other DNA
aaaaccctcggtgggtgcaagaagttgagagccgtggggggatgacccgtaaggaatgggctgactttgtggatc

SEQ ID NO: 516367 - DNA, 75 bp, synthetic construct
  source 1..75: mol_type = other DNA
tgccaatgaaaaggcggcgagcgagaagataaaaaaacatagcgatatggcaagaaccgcattgttggcagggct

SEQ ID NO: 516368 - DNA, 75 bp, synthetic construct
  source 1..75: mol_type = other DNA
gattcaactggcgatgttgttgttaatggcggtaatttcgttgcaaaaaatgaaaaaggtagtgcgacagggtga

SEQ ID NO: 516369 - DNA, 75 bp, synthetic construct
  source 1..75: mol_type = other DNA
aaaatcgacaatgattttgaaccaaagttgattcagaccgtgcgcggcgtgggttacatgcttgaggtgccggat

SEQ ID NO: 516370 - DNA, 75 bp, synthetic construct
  source 1..75: mol_type = other DNA
cgaagtgctgccccgctcgcttatcgcctcgcaggtgtgggacatgaatttcgacagcgacactaacgctattga

SEQ ID NO: 516371 - DNA, 75 bp, synthetic construct
  source 1..75: mol_type = other DNA
aaaatcgacaacgactttgaaccaaagctgattcaaaccgtgcgcggcgtgggttacatgcttgaggtacctgat

SEQ ID NO: 516372 - DNA, 75 bp, synthetic construct
  source 1..75: mol_type = other DNA
ccccagaggggcgaggggaccgattgtgctcgatattgaatattgcgctcgttttctccctctccccattggggt

SEQ ID NO: 516373 - DNA, 75 bp, synthetic construct
  source 1..75: mol_type = other DNA
agaaaaaaatcctgaaacttgaagaagagcaagacagaaagctgaagaagaccgaaaaagattcgctgaaggatg

SEQ ID NO: 516374 - DNA, 75 bp, synthetic construct
  source 1..75: mol_type = other DNA
tcttcatctatcgtctttcacgcgaagttaactgggataccgcagaagtaaatgcagcccttagcaagtttgtgt

SEQ ID NO: 516375 - DNA, 75 bp, synthetic construct
  source 1..75: mol_type = other DNA
ttttattgtctcttttcttcaatatctggttttgggatcactatatgcgtgtcattccgttatcagcggataaaa

SEQ ID NO: 516376 - DNA, 75 bp, synthetic construct
  source 1..75: mol_type = other DNA
ccgtaccggcgatccagagaaagcagaaaactatgcgtgcgttaaagaactacgcgacgcattaactttttgcaa

SEQ ID NO: 516377 - DNA, 75 bp, synthetic construct
  source 1..75: mol_type = other DNA
tcattcagataaaaaacctggttaagaacagtgtcgacgatcttaaattagaaaatattagtgtcgttatcaagt

SEQ ID NO: 516378 - DNA, 75 bp, synthetic construct
  source 1..75: mol_type = other DNA
caagaaaatgcaaaaataaactatctcaaagaacaagatatcgaaaggttgttaagtaaaatccctggtgtcatc

SEQ ID NO: 516379 - DNA, 75 bp, synthetic construct
  source 1..75: mol_type = other DNA
tacgtcagcactatcagtatcgtgaatttgcctggccctggacatttcgcggcactgttgcaaagttagcgatga

SEQ ID NO: 516380 - DNA, 75 bp, synthetic construct
  source 1..75: mol_type = other DNA
tttgcagacagatgctcagggggcgtggtttgagcacgatttacatgccctgagcgcgcaacagaaggcggcctg

SEQ ID NO: 516381 - DNA, 75 bp, synthetic construct
  source 1..75: mol_type = other DNA
cattgccatgtaagaggaaatgaaaaattgtttgttgatgtttatgccaaatttatagaaccattagttattaaa

SEQ ID NO: 516382 - DNA, 75 bp, synthetic construct
  source 1..75: mol_type = other DNA
aaaaagaaacaaactcaggatgacaagaagcaaaaaattaaaccgaagatgtattttgcaggtggaggtatccaa

SEQ ID NO: 516383 - DNA, 75 bp, synthetic construct
  source 1..75: mol_type = other DNA
ataataagactgtatttgggggataacatgacgacagcaaccagcctgaacgaactgcagcagcaaatccgcgat

SEQ ID NO: 516384 - DNA, 75 bp, synthetic construct
  source 1..75: mol_type = other DNA
ccttactgcaggacgacatccgcagtcgctatgacagtctcagcaaacgtcttaaacaagttgctcagtatattc

SEQ ID NO: 516385 - DNA, 75 bp, synthetic construct
  source 1..75: mol_type = other DNA
agttgcatgtaaagagcaattgtatacaggattaacggaaaaagaagccaatcagatgcaagcattgttgttatc

SEQ ID NO: 516386 - DNA, 75 bp, synthetic construct
  source 1..75: mol_type = other DNA
ccagaggttaacttagcaccatcggtcattcagataaaaaacctggttaagaatagtgtcgacgatctcaaatta

SEQ ID NO: 516387 - DNA, 75 bp, synthetic construct
  source 1..75: mol_type = other DNA
ctcttggtattgaagaggctattaaagaggctgttaaaacatctgacttagatgaccttgatagtgaagctacta

SEQ ID NO: 516388 - DNA, 75 bp, synthetic construct
  source 1..75: mol_type = other DNA
gcgcggggcggcggtgattatcgaaagtcagtttcaggttgccgacctgatggtcgatctcgtcagccgcaaagt

SEQ ID NO: 516389 - DNA, 75 bp, synthetic construct
  source 1..75: mol_type = other DNA
atcgccagcgaattgaaacggaaacgctggcacgcttcggtaaagaagatagctcacagcgtgccggaaaagtcc

SEQ ID NO: 516390 - DNA, 75 bp, synthetic construct
  source 1..75: mol_type = other DNA
acagcggcaagatccggagatggcaaacgtgattttagtcaccgatgacgaaagttgcgggtattcggctacgga

SEQ ID NO: 516391 - DNA, 75 bp, synthetic construct
  source 1..75: mol_type = other DNA
cacaattcccgcaagtcggaaccggtcctttccgcttaacacaattcactccagaactggtgcgactggaaagcc

SEQ ID NO: 516392 - DNA, 75 bp, synthetic construct
  source 1..75: mol_type = other DNA
ataatctcgcacataaagcgtatcaggcactaatagaagatttcgacctaacaaaacggactaaaatattagagt

SEQ ID NO: 516393 - DNA, 75 bp, synthetic construct
  source 1..75: mol_type = other DNA
atcaaattgtatgaagccaaaaaccgtttattcagttcaatcaaccgcacgctgggcgaggggattgcgcaactg

SEQ ID NO: 516394 - DNA, 75 bp, synthetic construct
  source 1..75: mol_type = other DNA
cgcccgacgtgaggggcaacatttgatgctggagatcgaagacaatgccggtttgtatcaaccggtaaccaatgc

SEQ ID NO: 516395 - DNA, 75 bp, synthetic construct
  source 1..75: mol_type = other DNA
cacccacaactcaaggttccggaaggcgcaagaaagaattacgaaaagatctctcattcaacgctgggctactgg

SEQ ID NO: 516396 - DNA, 75 bp, synthetic construct
  source 1..75: mol_type = other DNA
cccaatggatattaaaggttactggcagaaaactttagttcaggctcaaaacgccttaaccgtctttcctctaaa

SEQ ID NO: 516397 - DNA, 75 bp, synthetic construct
  source 1..75: mol_type = other DNA
ccgacgggtatcggcgtgctgtatggcaaaccagaactgctggaagcaatgtcgccctggctcggcggtggcaaa

SEQ ID NO: 516398 - DNA, 75 bp, synthetic construct
  source 1..75: mol_type = other DNA
atgttttcgacgctccagcattttcacatctgcaatcgacactgaacgcagtgcaagtaatgcctgatgaggaaa

SEQ ID NO: 516399 - DNA, 75 bp, synthetic construct
  source 1..75: mol_type = other DNA
tgggcgacagattaattggcgaagcaccggaatatactctggagcaatggctgcgctgcgatccgctgtggccac

SEQ ID NO: 516400 - DNA, 75 bp, synthetic construct
  source 1..75: mol_type = other DNA
agagtgcgccaaagctggtggaaaaagcatcgggatgagttttctttactagaaggggatgagttcaggcagtgg

SEQ ID NO: 516401 - DNA, 75 bp, synthetic construct
  source 1..75: mol_type = other DNA
ataaagataaagataaagataaagatatttttaaaattgttatggttggacgattatgtgaccaaaaaaatccat

SEQ ID NO: 516402 - DNA, 75 bp, synthetic construct
  source 1..75: mol_type = other DNA
gcgatggctttactgcgcaccccgtcaggcgatggctactatatcaacctgcataacacactggcagataaggac

SEQ ID NO: 516403 - DNA, 75 bp, synthetic construct
  source 1..75: mol_type = other DNA
gtatcgaatgtaaattttgtcgaactggcatcattccataatttctaccaggggaaacgcgataaaaactgctgg

SEQ ID NO: 516404 - DNA, 75 bp, synthetic construct
  source 1..75: mol_type = other DNA
cacgccctgctatgtatgtgggtgttcctgtcgtccctcttactgtggttgcaggggcgttatttctggcggggg

SEQ ID NO: 516405 - DNA, 75 bp, synthetic construct
  source 1..75: mol_type = other DNA
atggggctgcgagtgtgcggcctgcgccagagcgcggcgctcggcgtagtgaagtttaacgacgcaatcaccctg

SEQ ID NO: 516406 - DNA, 75 bp, synthetic construct
  source 1..75: mol_type = other DNA
ttactggaaacggcgcacagccgggtggcgtggctatctgacaccgcaggcctgccggaaaaaacgctgaaattt

SEQ ID NO: 516407 - DNA, 75 bp, synthetic construct
  source 1..75: mol_type = other DNA
tgaatcaggttatccgctcgccacgggtgattctgacccatatcaaccaccagtttgaggcggggtttgatggga

SEQ ID NO: 516408 - DNA, 75 bp, synthetic construct
  source 1..75: mol_type = other DNA
ttgagtcgatgcttcagcattaccgccctgaaagattggggatgtacgaagataacggtgttgtattttcgtcac

SEQ ID NO: 516409 - DNA, 75 bp, synthetic construct
  source 1..75: mol_type = other DNA
cccgtaatacgctttcacccgttgagtcagcctgtcatgccttactggattttattgcccgggaagtttttgaga

SEQ ID NO: 516410 - DNA, 75 bp, synthetic construct
  source 1..75: mol_type = other DNA
aactggagcatcacatcaccagacttggagatgaatgcaacgatgttaatcgcagaagcgcagagattacccgca

SEQ ID NO: 516411 - DNA, 75 bp, synthetic construct
  source 1..75: mol_type = other DNA
gtcaaggggtgttgatactgaaggtgttgccgttaaacgtgatggcgtgtacctgcttattgaaggtagccgcag

SEQ ID NO: 516412 - DNA, 75 bp, synthetic construct
  source 1..75: mol_type = other DNA
ccggtgttgattatcgactgcgtacgctcactcaggcgcacctgtggctttcgccactcaacgatgaaacccgga

SEQ ID NO: 516413 - DNA, 75 bp, synthetic construct
  source 1..75: mol_type = other DNA
gaccgctggcgacaatgggcgctgagaatcagacgcttgctgtctcttttaccaccttgtgtgtcgatgcccgca

SEQ ID NO: 516414 - DNA, 75 bp, synthetic construct
  source 1..75: mol_type = other DNA
acttccatggaaaaaacgtgggatgacgacctcttgccgctctgttcccagatatttcgccgctacattcgggcg

SEQ ID NO: 516415 - DNA, 75 bp, synthetic construct
  source 1..75: mol_type = other DNA
agaaagccaatgagaaatcaggctgtactaactatctgccgacactcatcaccaccagcgatgacctgatgaaac

SEQ ID NO: 516416 - DNA, 75 bp, synthetic construct
  source 1..75: mol_type = other DNA
aaccagtatggcctgaacccatggaccaaagagatttacgcattcccagataaaggcgggattgtcccggtcgtc

SEQ ID NO: 516417 - DNA, 75 bp, synthetic construct
  source 1..75: mol_type = other DNA
tttgatgtgcccgtcatgacgcggttgatggagagtgaagcgcggcgtttcattgcgctggtggatgaattttac

SEQ ID NO: 516418 - DNA, 75 bp, synthetic construct
  source 1..75: mol_type = other DNA
ctggaaattattgctgatcgctttaaagcagaaactgacgtgctctgttttgacgaattttttgtttctgatatt

SEQ ID NO: 516419 - DNA, 75 bp, synthetic construct
  source 1..75: mol_type = other DNA
atgcaaagcgttaccccaacatcgcaatacctgaaggcgctcaatgaaggcagccatcaacccgacgacgttcaa

SEQ ID NO: 516420 - DNA, 75 bp, synthetic construct
  source 1..75: mol_type = other DNA
gcaccggtaattcagcccattcgccacaatggaaaaatcatcggcgaagttcagttaaccgctcgcgacagttca

SEQ ID NO: 516421 - DNA, 75 bp, synthetic construct
  source 1..75: mol_type = other DNA
attagccattttatctggttttcgctcgctgtcctgaccgcatgcattctgctggcatcaggcatcgcaattacc

SEQ ID NO: 516422 - DNA, 75 bp, synthetic construct
  source 1..75: mol_type = other DNA
attacacccgtaaggatccaggcgatactttcagtaatttcataagccactggctcttccctgcccccatcattc

SEQ ID NO: 516423 - DNA, 75 bp, synthetic construct
  source 1..75: mol_type = other DNA
attgcatcctggcactacaccgcacgggaaccaggagatacattcagtaattttattagccattggctctttccg

SEQ ID NO: 516424 - DNA, 75 bp, synthetic construct
  source 1..75: mol_type = other DNA
ctcacccgccatttgcataacggactggtggaggcgctaaaaaacattactgatgtagttcatgatgtgcgatcc

SEQ ID NO: 516425 - DNA, 75 bp, synthetic construct
  source 1..75: mol_type = other DNA
tcgacgaactgaacgccaccagcgataacacaatggtggcgcatctgggaattgtgtatacccgtctgggcgatg

SEQ ID NO: 516426 - DNA, 75 bp, synthetic construct
  source 1..75: mol_type = other DNA
ggcaaaaccagagctgggaaatcgtcgttttcgatgaacaggggcggcgttgttgcacctgtcgactgggaacgg

SEQ ID NO: 516427 - DNA, 75 bp, synthetic construct
  source 1..75: mol_type = other DNA
agaagtgcgagataaccagcaaaacattctggcatcctggcattacaccagtaaggctccgggcgagacattcag

SEQ ID NO: 516428 - DNA, 75 bp, synthetic construct
  source 1..75: mol_type = other DNA
gacaaaatcagagctgggagattgtcgttttcgatgaacagggacggcgttgctgcacctgtcggctgggtacgg

SEQ ID NO: 516429 - DNA, 75 bp, synthetic construct
  source 1..75: mol_type = other DNA
catcgtcagaactgacacatgtcgaagcagtgaaagctcttggattcctgaaacaaaaagccactgaacagaagg

SEQ ID NO: 516430 - DNA, 75 bp, synthetic construct
  source 1..75: mol_type = other DNA
tacggtggtgattgccgacggcgtgactggttcggggttgattaagcagggcgacagcgtgaatgtggaaggggt

SEQ ID NO: 516431 - DNA, 75 bp, synthetic construct
  source 1..75: mol_type = other DNA
taatgaacatcagcggcaacaatgccgtggcgatggaaggtgataaaaacgcacagctggttaacaacggcgtta

SEQ ID NO: 516432 - DNA, 75 bp, synthetic construct
  source 1..75: mol_type = other DNA
gagcgatgtggattctttcacttattattatcgcgtagcgttatccaccattagtattgattctggtgcgaaggc

SEQ ID NO: 516433 - DNA, 75 bp, synthetic construct
  source 1..75: mol_type = other DNA
ttccagaacaaagataatacttaaaggttatcaggcaaggttgttttatagagagcagacaataaatagtaaaaa

SEQ ID NO: 516434 - DNA, 75 bp, synthetic construct
  source 1..75: mol_type = other DNA
cgcgtcaccaggtctggcagattgaaatcttcgatgagaaagggcgtttgtgctgttcgtcacgattgacgaccg

SEQ ID NO: 516435 - DNA, 75 bp, synthetic construct
  source 1..75: mol_type = other DNA
gcattctataacgatggcactgggcttattatcaactatggcacaatttgtacctttggcgtttgccagggggcc

SEQ ID NO: 516436 - DNA, 75 bp, synthetic construct
  source 1..75: mol_type = other DNA
atggaaataagctttacccgcgtggcattgctggctgccgcgctcttctttgttggttgcgatcaaaaaccacaa

SEQ ID NO: 516437 - DNA, 75 bp, synthetic construct
  source 1..75: mol_type = other DNA
aagtttgtcgccgtggccggtaagtgaagcgatggccgatatcgtcaccacctcgctgcgcattggcgcgaagac

SEQ ID NO: 516438 - DNA, 75 bp, synthetic construct
  source 1..75: mol_type = other DNA
tcaccaacaatatctgcaaaaagatctgccggatttatatgtcgatctctccactgtcggcgaaggctatgcggc

SEQ ID NO: 516439 - DNA, 75 bp, synthetic construct
  source 1..75: mol_type = other DNA
agcgaaggggcaaaaacctttgaaccgcgcgaagggctgaaaatcaccccgtacgccggagtgaaactgcgtcac

SEQ ID NO: 516440 - DNA, 75 bp, synthetic construct
  source 1..75: mol_type = other DNA
gtgcattacaccgactacacgttgccggacatgccaaacacttacaccacttcacctttcagtgaaacgactgat

SEQ ID NO: 516441 - DNA, 75 bp, synthetic construct
  source 1..75: mol_type = other DNA
accctgaactcatcacccatactctggatctcatcgagtgtcttgacgccggtggctactcgtatgccagcatca

SEQ ID NO: 516442 - DNA, 75 bp, synthetic construct
  source 1..75: mol_type = other DNA
tgcccaaccactcaaggtttctctgaaagcgctacgcgtttcctctctcagggcaaaatgcctgcgttcctcggc

SEQ ID NO: 516443 - DNA, 75 bp, synthetic construct
  source 1..75: mol_type = other DNA
ggatttacaagagccgcaaagcgtggaagatgtgctgagcgtagatgctactgcgcgtgaaatcgccagaaaaga

SEQ ID NO: 516444 - DNA, 75 bp, synthetic construct
  source 1..75: mol_type = other DNA
gatgctacagcaacagggtagccgcaccgaagtcttaagtggtcagcaggcagcttgtgatatggcagcgcttga

SEQ ID NO: 516445 - DNA, 75 bp, synthetic construct
  source 1..75: mol_type = other DNA
cattaaatgccgcaaacgaaatcaccgttgcagcatttcttgcgcaacaaatccgctttacggatatcgctgcgt

SEQ ID NO: 516446 - DNA, 75 bp, synthetic construct
  source 1..75: mol_type = other DNA
gggagaaatatcaacgcatgttgaatgtctggcatgcttgccctcgtcagtatcatctgagtgctaacgaaatta

SEQ ID NO: 516447 - DNA, 75 bp, synthetic construct
  source 1..75: mol_type = other DNA
gcgcgttatctcggttatgtacgctttatggttaatgttgaagggcgttacacccattttgatgccgggactcac

SEQ ID NO: 516448 - DNA, 75 bp, synthetic construct
  source 1..75: mol_type = other DNA
gcaattgcttcaggaaggggaattgccgccgctgcacaatatgaactggaaggactgactgccaaatcaatattt

SEQ ID NO: 516449 - DNA, 75 bp, synthetic construct
  source 1..75: mol_type = other DNA
ctgctgttgccgtttggtctgcatcacattctggtggcattaattcgctttaccgacgcaggcggcacgcaggaa

SEQ ID NO: 516450 - DNA, 75 bp, synthetic construct
  source 1..75: mol_type = other DNA
ccttgtcggtctggtgattccattagtctggccgattttcgccatgggtattagcggcttaggccatatgatcaa

SEQ ID NO: 516451 - DNA, 75 bp, synthetic construct
  source 1..75: mol_type = other DNA
cgcgatagcgaagttgccagctcaatcgaaaaagccgttgccggtgcgccgggtaaatcaggttacaacgttcct

SEQ ID NO: 516452 - DNA, 75 bp, synthetic construct
  source 1..75: mol_type = other DNA
atccaaactggtcgatgggacgtaaaatctccgtcgattcggcgaccatgatgaacaaaggtctcgagtacattg

SEQ ID NO: 516453 - DNA, 75 bp, synthetic construct
  source 1..75: mol_type = other DNA
agagcattcttgggatccagtcgatcgacaccgggatcctcggtgcggtgatcgccggtattatcgtctggatgc

SEQ ID NO: 516454 - DNA, 75 bp, synthetic construct
  source 1..75: mol_type = other DNA
gcttgtcggtctggtgattccgttagtctggccgatttttgccatgggtattagcggcttaggtcatatgatcaa

SEQ ID NO: 516455 - DNA, 75 bp, synthetic construct
  source 1..75: mol_type = other DNA
tgggaaataaagaagataagtacctaaaaaacaaagcggcactcgataatacgccaggaattgaagatttaacca

SEQ ID NO: 516456 - DNA, 75 bp, synthetic construct
  source 1..75: mol_type = other DNA
gtctgaaccaacctttgccgctaccgaacagatgatgacgcaccctaaaatcgtcgttctggcaattactggcgg

SEQ ID NO: 516457 - DNA, 75 bp, synthetic construct
  source 1..75: mol_type = other DNA
tgccaatgctgcccattgtgaaggtcaaggattttgacagcgctctcgccctggcgctgaaagtggaagacggct

SEQ ID NO: 516458 - DNA, 75 bp, synthetic construct
  source 1..75: mol_type = other DNA
ggcagcaatgtggtctttgcaacccgtgtgacagccagccaggatgtgatgctcggcctggacgccctgcgactg

SEQ ID NO: 516459 - DNA, 75 bp, synthetic construct
  source 1..75: mol_type = other DNA
tggtctacgaaaaaacctatacggctgaactttcgtccattccaggcacccccatcgaggctggccccttcgata

SEQ ID NO: 516460 - DNA, 75 bp, synthetic construct
  source 1..75: mol_type = other DNA
ttatccgcaatatcctgcgcgaacaactgatgcccattgcgtcacaaatgcaaagaaacgcaattttccagactg

SEQ ID NO: 516461 - DNA, 75 bp, synthetic construct
  source 1..75: mol_type = other DNA
tggatcaacggtatgaatgcctggccggttgcccgcctgctggatctgtggtggttttctgtggggatgacggaa

SEQ ID NO: 516462 - DNA, 75 bp, synthetic construct
  source 1..75: mol_type = other DNA
cattgcagagtgagccggcatcccgggaaaaaaatacaggcagcagagcgcgtggcagacgacggagaaaaaagt

SEQ ID NO: 516463 - DNA, 75 bp, synthetic construct
  source 1..75: mol_type = other DNA
tgccggacagtgatgggcgtgattggtgctgcgcttcacgcggcccggaggaagcagaaaacatactggatcaac

SEQ ID NO: 516464 - DNA, 75 bp, synthetic construct
  source 1..75: mol_type = other DNA
cgaaaaaacctatactgctgaactttcgtccattgcaggcgcccccatcgaggctgggcccttcgatacagtggt

SEQ ID NO: 516465 - DNA, 75 bp, synthetic construct
  source 1..75: mol_type = other DNA
tggtctacgaaaaaacctatacggctgaactttcgtccattccaggcacccccatcgaggctggcccccttcgat

SEQ ID NO: 516466 - DNA, 75 bp, synthetic construct
  source 1..75: mol_type = other DNA
gatgccagtccggtgatcagcgacctggtcctgcgtcaccgtggaacgctggtgatggtgggcgatccgcatcag

SEQ ID NO: 516467 - DNA, 75 bp, synthetic construct
  source 1..75: mol_type = other DNA
aggggattttccgcctggccgggaaaaactggacggaagagtttgaagccttccgggcagcgctgcgccccgtgg

SEQ ID NO: 516468 - DNA, 75 bp, synthetic construct
  source 1..75: mol_type = other DNA
tacggttattaaacatcagcaacagcgcagtgcggtgacctgccaccattgcgaagatgcgccctgtgcccgtag

SEQ ID NO: 516469 - DNA, 75 bp, synthetic construct
  source 1..75: mol_type = other DNA
gaactggtgaaagccggaaacatcgacgccgccgtcgagctttctcaccagaccaacaccctgccggaaattacc

SEQ ID NO: 516470 - DNA, 75 bp, synthetic construct
  source 1..75: mol_type = other DNA
tgggtactggagggcatttttgttgcgatagtcatgtactgttgttcaatttgtaagttccccagaataagtctt

SEQ ID NO: 516471 - DNA, 75 bp, synthetic construct
  source 1..75: mol_type = other DNA
gcgcggcgagccggataaactggcaattgaagcgcgtaaaactggctttgatgagatttatctaccgtttcgtgc

SEQ ID NO: 516472 - DNA, 75 bp, synthetic construct
  source 1..75: mol_type = other DNA
gcaactggtcaccgactccacattatccggcatggagaaatcccgccgcttacgcaccgctcgtcaggaacatca

SEQ ID NO: 516473 - DNA, 75 bp, synthetic construct
  source 1..75: mol_type = other DNA
cagcctgagttcacagataaaacactctccaggaaacccggggcggttcactccggcatggcgaaatcccgccgc

SEQ ID NO: 516474 - DNA, 75 bp, synthetic construct
  source 1..75: mol_type = other DNA
gcgctatgatgacccgttctggcaggcgttctatccgccgaacggctggcgctgccgttgtggcgtgattgccct

SEQ ID NO: 516475 - DNA, 75 bp, synthetic construct
  source 1..75: mol_type = other DNA
acttcaagcgtgagtaccaactgcaggacggcgatattgacgagacaccaccgtcggaacgccagaataacatgc

SEQ ID NO: 516476 - DNA, 75 bp, synthetic construct
  source 1..75: mol_type = other DNA
aacagatggaaaacgttgatgatcgcccctactggaaatataccgctatacaggataaccgtacccgtaagactc

SEQ ID NO: 516477 - DNA, 75 bp, synthetic construct
  source 1..75: mol_type = other DNA
attttaatgtcactaacttggatgtgcgggtcagaatcagttgtccctcagttatcgcgctattcattacgcaag

SEQ ID NO: 516478 - DNA, 75 bp, synthetic construct
  source 1..75: mol_type = other DNA
tgataaccgaagatgaaatcagggcgctgcaattttctgcacaggacattgcagaaatagagcacgttatccttt

SEQ ID NO: 516479 - DNA, 75 bp, synthetic construct
  source 1..75: mol_type = other DNA
gcattctatccgccaaacggctggcgttgccgttgtggtgtgattgccctgagtgcggcagatgtacgtgcccga

SEQ ID NO: 516480 - DNA, 75 bp, synthetic construct
  source 1..75: mol_type = other DNA
ctgggttgaatacaccattaagcgctatattaccgctgatgacgctgtcaccaaaggaacgcctggtattaaact

SEQ ID NO: 516481 - DNA, 75 bp, synthetic construct
  source 1..75: mol_type = other DNA
acgatcccaatgtcctacaaggacaaagaaagccagtatgtgtcacagtttctcagccaggggtacacctttctg

SEQ ID NO: 516482 - DNA, 75 bp, synthetic construct
  source 1..75: mol_type = other DNA
aaaaagtatcggatgaaaatcaaaccgcctccataagcataaaatctaaagctaaggcaaacaagcgactggcaa

SEQ ID NO: 516483 - DNA, 75 bp, synthetic construct
  source 1..75: mol_type = other DNA
tgcacatgcgctggcaagactgattgccgatgttaaagccacaactgattgccagtgtgtggtgctcggcggcag

SEQ ID NO: 516484 - DNA, 75 bp, synthetic construct
  source 1..75: mol_type = other DNA
aatgaatcatgtacatgccggatttaccgcaacgaccgcaatcatccgatctgcgttaccgactggatggatgaa

SEQ ID NO: 516485 - DNA, 75 bp, synthetic construct
  source 1..75: mol_type = other DNA
aatgaatcatgtacatgccggatttaccgcaaagaccgaaatcatccgatctgcgttaccgactggatggatgaa

SEQ ID NO: 516486 - DNA, 75 bp, synthetic construct
  source 1..75: mol_type = other DNA
catcgtcagaactgacacaggtcgaagcagtgaaagctcttggattcctgaaacataaagctactgatcagaagg

SEQ ID NO: 516487 - DNA, 75 bp, synthetic construct
  source 1..75: mol_type = other DNA
gccaaccagtacggccttaatccatggacgaaagaaatttacgccttccctgataagcagaacggcatcgttccg

SEQ ID NO: 516488 - DNA, 75 bp, synthetic construct
  source 1..75: mol_type = other DNA
cgcacgtacgcttgcaaggctgatcgctgatattaaagccacaactgattgccagtgcgtggtggtcggtggcag

SEQ ID NO: 516489 - DNA, 75 bp, synthetic construct
  source 1..75: mol_type = other DNA
aatgaatcttgtacatgccggatttaccgcaatgaccggaatcatccgatctgcgttaccgactggatggatgaa

SEQ ID NO: 516490 - DNA, 75 bp, synthetic construct
  source 1..75: mol_type = other DNA
ccgtctgacgggcaataatttgttgaacctcggctggtatcaggatgtacaggcgtcgttgaaggcttatgacat

SEQ ID NO: 516491 - DNA, 75 bp, synthetic construct
  source 1..75: mol_type = other DNA
acgtctggcggcgtgcttcctcgactcaatggcaactgtcgggcagtcagctactggctacggccttaattatca

SEQ ID NO: 516492 - DNA, 75 bp, synthetic construct
  source 1..75: mol_type = other DNA
ggtattaccccacgtcgctggatcaaacagtgcaacccggcactggcggctctgttggataaatcactggaaaaa

SEQ ID NO: 516493 - DNA, 75 bp, synthetic construct
  source 1..75: mol_type = other DNA
ctgtctcgaccattctgagcaaattcaccaaagcaacaccggatgaagctcccgccacgtcagaagcagcgcggg

SEQ ID NO: 516494 - DNA, 75 bp, synthetic construct
  source 1..75: mol_type = other DNA
cgcccgttacgctaccgatgataataatcatgaaggcgcgctgaatgtgattcaggcggtgctggataacacatc

SEQ ID NO: 516495 - DNA, 75 bp, synthetic construct
  source 1..75: mol_type = other DNA
tcacgcactgggttgagatgctgataaccgcaccggatttgacgccgtcatgttgtcagcaaatccatcagtggt

SEQ ID NO: 516496 - DNA, 75 bp, synthetic construct
  source 1..75: mol_type = other DNA
cttgacctgtatcatatgcaggaagaagcaccgggtatggtattctggcacaacgacggctggacaatcttccgc

SEQ ID NO: 516497 - DNA, 75 bp, synthetic construct
  source 1..75: mol_type = other DNA
aatgaatcgtgtacatgccggatttaccgcaaagaccggaatcatccgatctgcgttaccgactggatggatgaa

SEQ ID NO: 516498 - DNA, 75 bp, synthetic construct
  source 1..75: mol_type = other DNA
gataagcatgccttcgaccagatgctgcacagtatcggcaaacagggcggcgatccgtatctggtgatggcggat

SEQ ID NO: 516499 - DNA, 75 bp, synthetic construct
  source 1..75: mol_type = other DNA
tgaactatcaatatggtttgtttcgccagtcttttgtcgatggcaaacaggttgaagcgccggatgactggcatc

SEQ ID NO: 516500 - DNA, 75 bp, synthetic construct
  source 1..75: mol_type = other DNA
acggcaggagcttactggcgcggcgacagcaacaacaaaatgttgcagcgtatttacggtactgcgtgggcagac

SEQ ID NO: 516501 - DNA, 75 bp, synthetic construct
  source 1..75: mol_type = other DNA
accagtcatttgattgcggaacacatcatcgagctggcgcacagcctggggttaaaaacgatcgctgaaggcgtc

SEQ ID NO: 516502 - DNA, 75 bp, synthetic construct
  source 1..75: mol_type = other DNA
cgaaagaaggtgtgcagatccagaacgaaaaccagacgctggcttcgatcaccttccagaactacttccgtctgt

SEQ ID NO: 516503 - DNA, 75 bp, synthetic construct
  source 1..75: mol_type = other DNA
gcaggtggtctgcatatcatcggtacagaacgtcacgaatctcgtcgtatcgataaccagctacgcggtcgttct

SEQ ID NO: 516504 - DNA, 75 bp, synthetic construct
  source 1..75: mol_type = other DNA
tgaagcgcgtaaaaaatacggcaaagcaatcgaagaacgttacggatacacattcccccaaacgcagcacgccgc

SEQ ID NO: 516505 - DNA, 75 bp, synthetic construct
  source 1..75: mol_type = other DNA
gcttgaggaagccgatccggctattcgccatatcattgagcgtaaaatacagacagcacgcgaagcgatggcgag

SEQ ID NO: 516506 - DNA, 75 bp, synthetic construct
  source 1..75: mol_type = other DNA
gctgacaacaaacatcgaaggcagcaatgccctttctcgctttagagttggcgcacatggcgcattcgttttcgc

SEQ ID NO: 516507 - DNA, 75 bp, synthetic construct
  source 1..75: mol_type = other DNA
cgtgcacgtctggaaaaaggcgaagtgctggaaaatctgatcccggaagctttcgccgtggtgcgtgaggcaagt

SEQ ID NO: 516508 - DNA, 75 bp, synthetic construct
  source 1..75: mol_type = other DNA
aactggggatgaaaccaggcgaagccattgagcacccgtgggtgactaaagcgattgctaacgcccaacgtaaag

SEQ ID NO: 516509 - DNA, 75 bp, synthetic construct
  source 1..75: mol_type = other DNA
caaccgtccgttgttcgaatttctcggtatgactgtcggcatcaacttgccaggtatgcctgcgccagccaaacg

SEQ ID NO: 516510 - DNA, 75 bp, synthetic construct
  source 1..75: mol_type = other DNA
cctgcgccggatgcgcaaagtcgtcaacatcatcaatgccatggaaccggagatggaaaaactctccgacgaaga

SEQ ID NO: 516511 - DNA, 75 bp, synthetic construct
  source 1..75: mol_type = other DNA
acctgcgtcaggggatccacctgcgtggttacgcgcagaaagatccgaagcaggaatacaaacgtgaatccttcg

SEQ ID NO: 516512 - DNA, 75 bp, synthetic construct
  source 1..75: mol_type = other DNA
aagcgtgtctttgggatgcgtcacttcgacgttcagttgctcggcggcatggttcttaatgaacgctgtatcgcg

SEQ ID NO: 516513 - DNA, 75 bp, synthetic construct
  source 1..75: mol_type = other DNA
tgatgcgcgcaagaaatatggcaaagagattgaagaacgatacggatacaccttcaaccaaacactgtctgcaac

SEQ ID NO: 516514 - DNA, 75 bp, synthetic construct
  source 1..75: mol_type = other DNA
accggactggctatggagatcccgcccggctggtgtctgaaactctatccgcgatccggattgggctgcaaaaaa

SEQ ID NO: 516515 - DNA, 75 bp, synthetic construct
  source 1..75: mol_type = other DNA
taatctggaggtgctgacccgttcccgttttacatctggtcatttaccatcggatgcgagaatccaggatatttt

SEQ ID NO: 516516 - DNA, 75 bp, synthetic construct
  source 1..75: mol_type = other DNA
ttgccagacggaaagtgaatacactgatactggtacaccggactgaattgctgaagcagtggcaggagcgtctcg

SEQ ID NO: 516517 - DNA, 75 bp, synthetic construct
  source 1..75: mol_type = other DNA
aggcatttttgagcgtgttgaaccggtatcgctggtagaagttgatgaactcgatgaaacagagcgaggtgctgg

SEQ ID NO: 516518 - DNA, 75 bp, synthetic construct
  source 1..75: mol_type = other DNA
atgattaacgtaaaagtgaagcgcctgcatcctggtgcaaaactgccgttctatgccaccgcaggatcggcagca

SEQ ID NO: 516519 - DNA, 75 bp, synthetic construct
  source 1..75: mol_type = other DNA
atggattttgaggctgttgaaataaaaccatgcgtcgatagcaatggtgcaatttcctcaagctggtgggtgtat

SEQ ID NO: 516520 - DNA, 75 bp, synthetic construct
  source 1..75: mol_type = other DNA
gctgagactactttttgagtataaccatctaatcgccagcaaagcagaagcctcattcacctttaatacaaaatt

SEQ ID NO: 516521 - DNA, 75 bp, synthetic construct
  source 1..75: mol_type = other DNA
ttattcacgatggcgatctagactttgagcttcagctagacagtagtgacgacttcgctatttataaaaatggaa

SEQ ID NO: 516522 - DNA, 75 bp, synthetic construct
  source 1..75: mol_type = other DNA
gactactttttgagtacaaccatctaatcgccagcaaagcggaagcctcattcacctttaatacaaaattcacaa

SEQ ID NO: 516523 - DNA, 75 bp, synthetic construct
  source 1..75: mol_type = other DNA
gtcgcgttttatcaaacgaactttacgtaagaatgtgctggagtacatcaagtataccgaacgtaaagcgatcac

SEQ ID NO: 516524 - DNA, 75 bp, synthetic construct
  source 1..75: mol_type = other DNA
gacattgaagatgagatcgccgacaagcgggatgaactcatcagtgcccttgaagagcggatgaagcaaaagacg

SEQ ID NO: 516525 - DNA, 75 bp, synthetic construct
  source 1..75: mol_type = other DNA
ccaggctatttcggtggagcctatattcaaccatctcccacactaccttgacagcgaaaatcgattctacgtacc

SEQ ID NO: 516526 - DNA, 75 bp, synthetic construct
  source 1..75: mol_type = other DNA
ctgagcaaagtccaggtacgtatgcctgaagaggttgaggagctggaacaacagcgtcgtatggaagccgagcgt

SEQ ID NO: 516527 - DNA, 75 bp, synthetic construct
  source 1..75: mol_type = other DNA
aaacaaagtccatacattgacggttgttgctgagaatgttaacggtatatccaaaacctattcaatcgattttac

SEQ ID NO: 516528 - DNA, 75 bp, synthetic construct
  source 1..75: mol_type = other DNA
aaacctgctgcaatgtcgctcacacttgctcctgatggtagcttctctccaatgacaaaagttactttagatgat

SEQ ID NO: 516529 - DNA, 75 bp, synthetic construct
  source 1..75: mol_type = other DNA
attacaacttcaagactgtagctcctgtagctcctgtgattacttctataaaaggttcaatgagcaacggttctt

SEQ ID NO: 516530 - DNA, 75 bp, synthetic construct
  source 1..75: mol_type = other DNA
atttattgaactatatccctattgacccagagcttgcggattatcaatcaatttatctgatacgaaagagtgtgg

SEQ ID NO: 516531 - DNA, 75 bp, synthetic construct
  source 1..75: mol_type = other DNA
cagacggcgaggcatccattcgcaccaaagaggccgaactggtgatgcgctttgtggaaaaagcccgcaagatcc

SEQ ID NO: 516532 - DNA, 75 bp, synthetic construct
  source 1..75: mol_type = other DNA
ttttgtactcaaacgtgagacatcaacaacaagtatcagggtgtataaaggggccaacctcgaaggtgggctgtc

SEQ ID NO: 516533 - DNA, 75 bp, synthetic construct
  source 1..75: mol_type = other DNA
gagtcccggccacacgcggaatacagggcggcatagaacaatacatgctgacggttcctatggtcgtgttacgtc

SEQ ID NO: 516534 - DNA, 75 bp, synthetic construct
  source 1..75: mol_type = other DNA
cgtccgcttgctttacagaagctgcttgatgagggccatttcatggaagatttcctcattgacaaactgcaacca

SEQ ID NO: 516535 - DNA, 75 bp, synthetic construct
  source 1..75: mol_type = other DNA
ataaccatgaagacagtatgtgcgcatctttacaatgcgatggagaaaaatggtctgcggggtgtcagtgttaaa

SEQ ID NO: 516536 - DNA, 75 bp, synthetic construct
  source 1..75: mol_type = other DNA
acaatgtccctgatgggttggagttctattttaaaggacgtaccccgggtctaactggattctttaataaaacag

SEQ ID NO: 516537 - DNA, 75 bp, synthetic construct
  source 1..75: mol_type = other DNA
taagcaggacataaaagtaattgcttatgatgatagtggagactttgcaacacagcacgtgacagttttcggacc

SEQ ID NO: 516538 - DNA, 75 bp, synthetic construct
  source 1..75: mol_type = other DNA
acagggttcttcaataaaacaggcgataacctgctcgactatcaggtctatatgataaacggcaagggctctaaa

SEQ ID NO: 516539 - DNA, 75 bp, synthetic construct
  source 1..75: mol_type = other DNA
gataagttaaatatctggatttggggagcggtcaatttctctaatgtggttacggtagataatcaaggaaatatt

SEQ ID NO: 516540 - DNA, 75 bp, synthetic construct
  source 1..75: mol_type = other DNA
ggttctacggtaaaatgggtgaatatagtgcagaacaaatcagaaacggtgccacaccggttccttttgatattt

SEQ ID NO: 516541 - DNA, 75 bp, synthetic construct
  source 1..75: mol_type = other DNA
tgtaggtggtatttatcagacccttacaattgaattctatacagatacaaactttgatccaacagtaactcaaca

SEQ ID NO: 516542 - DNA, 75 bp, synthetic construct
  source 1..75: mol_type = other DNA
tgagcatagttattttatcaaaatcgatttcgatctgctcaatgtcaagttgactaatccggtaatgctgccaac

SEQ ID NO: 516543 - DNA, 75 bp, synthetic construct
  source 1..75: mol_type = other DNA
gtacacgttgttaccgtcaacgactacctggcgcaacgtgacgccgaaaacaaccgtccgctgtttgaattcctc

SEQ ID NO: 516544 - DNA, 75 bp, synthetic construct
  source 1..75: mol_type = other DNA
aacatcatcaatgccatggaaccggagatggaaaaactctccgacgaagaactgaaagggaaaaccgcagagttt

SEQ ID NO: 516545 - DNA, 75 bp, synthetic construct
  source 1..75: mol_type = other DNA
gctgccgggttacttcaggttcgtctgccagaacgggtgcgtctgtggtcagtctctgggggaagtgcgtgttcc

SEQ ID NO: 516546 - DNA, 75 bp, synthetic construct
  source 1..75: mol_type = other DNA
cctaaagttccggtacatgctgtactgacggcgacaaatccgctgatccgttttatcggtagtgatgatatgacg

SEQ ID NO: 516547 - DNA, 75 bp, synthetic construct
  source 1..75: mol_type = other DNA
tttaatgatgacatgcatgcacaagtatatgatatacaagtatcaggcagttatatgggaccgtcatatttcacg

SEQ ID NO: 516548 - DNA, 75 bp, synthetic construct
  source 1..75: mol_type = other DNA
atgctaatttggatgattatgttgcatgggccggaggttttactgagcgagctaacgacaagcgaattgctattg

SEQ ID NO: 516549 - DNA, 75 bp, synthetic construct
  source 1..75: mol_type = other DNA
cggaagatgacggtataacgtatccacttcatttccaggctacattaaaacaagacgggaatattgctattgaac

SEQ ID NO: 516550 - DNA, 75 bp, synthetic construct
  source 1..75: mol_type = other DNA
ggtattgattgaaggattagcaaacagtaaaagtgccctcatgatactgaaacctaatgattcaacttctgttta

SEQ ID NO: 516551 - DNA, 75 bp, synthetic construct
  source 1..75: mol_type = other DNA
ctcaattatgcttcgtcattcccttgtgtactgcttcttgacgaatttgatgcgattgctaaaaaaagggatgat

SEQ ID NO: 516552 - DNA, 75 bp, synthetic construct
  source 1..75: mol_type = other DNA
gagtttcgtaatggcgaaatgaaaatggttaactaccagctgattccggtgaacctgaagaagaaagtgacctgg

SEQ ID NO: 516553 - DNA, 75 bp, synthetic construct
  source 1..75: mol_type = other DNA
attcgcgggcaatatccgtcgcctgatggcagagcagcatcaggggctgggggcggcgatcatcagcaatatgga

SEQ ID NO: 516554 - DNA, 75 bp, synthetic construct
  source 1..75: mol_type = other DNA
ttactcgggctgctgggttatctgctttccgttttttgttggtataaaacgctacataaacttgcgctaagcaaa

SEQ ID NO: 516555 - DNA, 75 bp, synthetic construct
  source 1..75: mol_type = other DNA
gagtttcgcaatggcgaaatgaaaatggtcaattaccagttgattccggtgaacctgaagaaaaaagtgacctgg

SEQ ID NO: 516556 - DNA, 75 bp, synthetic construct
  source 1..75: mol_type = other DNA
tcaccgacattgaatttcgtaaacctgccgacgaagcgaagctggtgattcaggaactgcaacagacagaaaagc

SEQ ID NO: 516557 - DNA, 75 bp, synthetic construct
  source 1..75: mol_type = other DNA
aagccagatcaacaaaacggcatctggattgtgcaggcgcatgagtggggcaaatacgtgggacgggctgatttt

SEQ ID NO: 516558 - DNA, 75 bp, synthetic construct
  source 1..75: mol_type = other DNA
gttaaagccgtgcgcttttatgaacaggtaaagcgtgaaaatccgccagccgaaacaggagcatggaaagacgct

SEQ ID NO: 516559 - DNA, 75 bp, synthetic construct
  source 1..75: mol_type = other DNA
gctgtgctgtcattctgggtaaagccgacaatccactagcatccagtaatcaggttggcgaattaacaatgtggg

SEQ ID NO: 516560 - DNA, 75 bp, synthetic construct
  source 1..75: mol_type = other DNA
cgatccctatgtggaacgcctgttcgaaggctttgcttttttaatgggccgcctgcgcgaaaagctggacgacga

SEQ ID NO: 516561 - DNA, 75 bp, synthetic construct
  source 1..75: mol_type = other DNA
ttggtgcagagatcgcaggcttcgttggtatgtcgatgtcaattatgcgagcgggacagaatatagcaatatcta

SEQ ID NO: 516562 - DNA, 75 bp, synthetic construct
  source 1..75: mol_type = other DNA
aggtaaagcgtgagaatccgccagtcgaaacaggagcatggaaggatgctgttgactgggtgctcagagaggcct

SEQ ID NO: 516563 - DNA, 75 bp, synthetic construct
  source 1..75: mol_type = other DNA
atcctggaaatccagccgagagcacatattgccgggaaaaagcgacaataatccagcatcaggcgatcaggtaag

SEQ ID NO: 516564 - DNA, 75 bp, synthetic construct
  source 1..75: mol_type = other DNA
ccgccgcatgctgcaggcattgcaacagacgagagcaggtatttttgaccagttggaaaactgccagcatacttt

SEQ ID NO: 516565 - DNA, 75 bp, synthetic construct
  source 1..75: mol_type = other DNA
cactggtagccaagagaatatcactggactcagcgttatgggcgatggcaatagcgtaactgtaactgacggtat

SEQ ID NO: 516566 - DNA, 75 bp, synthetic construct
  source 1..75: mol_type = other DNA
aagaacctaccatcacgccatatagcgccaatgcttctgtttcctccagcagcaccaacgatctcaccggctacg

SEQ ID NO: 516567 - DNA, 75 bp, synthetic construct
  source 1..75: mol_type = other DNA
cggacgatggcggaaatgtcactccaccggacgatggtggaaatgtcacaccgccggacgatggcggaaatgtca

SEQ ID NO: 516568 - DNA, 75 bp, synthetic construct
  source 1..75: mol_type = other DNA
gggaagggctggcggtttatatgatcaccaaagaaggcgatagctttaaaacctggatgtcaccacagtttaaaa

SEQ ID NO: 516569 - DNA, 75 bp, synthetic construct
  source 1..75: mol_type = other DNA
cctggcattgacgccaaacgcagtgctgaacttaaagagaagattcagacccagctggacgctgacgatcagctg

SEQ ID NO: 516570 - DNA, 75 bp, synthetic construct
  source 1..75: mol_type = other DNA
tcctggaaggcgggccgaacctgagctacagcaagagccagcgtacggcgagccttgccggggcaggcagccagc

SEQ ID NO: 516571 - DNA, 75 bp, synthetic construct
  source 1..75: mol_type = other DNA
atggggctttttgatgacgttgtcggtgcctttctgaaaggcgatgcggggaaatatcaggcgattttgagctgg

SEQ ID NO: 516572 - DNA, 75 bp, synthetic construct
  source 1..75: mol_type = other DNA
tggataccagtacggcttccagtttactggcagaacaattgccgaagattattgatgcactctcaccgcaaggtg

SEQ ID NO: 516573 - DNA, 75 bp, synthetic construct
  source 1..75: mol_type = other DNA
atggggctttttgatgaagttgtcggtgcctttctgaaaggcgatgcggggaaatatcaggctattttaagttgg

SEQ ID NO: 516574 - DNA, 75 bp, synthetic construct
  source 1..75: mol_type = other DNA
tcgacggtgacaaggccatcgtcaataacgaaggcgagagcaccatcaccaacggtggcaccggcacccagatta

SEQ ID NO: 516575 - DNA, 75 bp, synthetic construct
  source 1..75: mol_type = other DNA
gttaaaaataatggcatctgaaaaaggaaatattgacgattttcaacaatcggtcatgctgcaactgattagtga

SEQ ID NO: 516576 - DNA, 75 bp, synthetic construct
  source 1..75: mol_type = other DNA
gcgccgtgttggctggtatgaagatgaggtgcaggcctggttgaaagaacgcgaggaagaagcgcgcggaacggc

SEQ ID NO: 516577 - DNA, 75 bp, synthetic construct
  source 1..75: mol_type = other DNA
ttctggttgcgtctgccggggcaggatcgccggacgcttgacgcacacttttccccgttgggctttgaggataat

SEQ ID NO: 516578 - DNA, 75 bp, synthetic construct
  source 1..75: mol_type = other DNA
aaagccagcgactgcggcgcacgtattgacctggcattgctgccgttttctgatgcgctttctcaccatgttgaa

SEQ ID NO: 516579 - DNA, 75 bp, synthetic construct
  source 1..75: mol_type = other DNA
atgatgaaaaaaaacatttacctgactattgaagttcggccaccaatggatgcatgcattgccagcgcggacaat

SEQ ID NO: 516580 - DNA, 75 bp, synthetic construct
  source 1..75: mol_type = other DNA
agatccgtgacaaccagaagcgtgtcctgctgctggacaacctgagcgattacattaagcctgggatgagcgtag

SEQ ID NO: 516581 - DNA, 75 bp, synthetic construct
  source 1..75: mol_type = other DNA
cttattactggtttacttgcaaaagcaacagaccctagagtaaaccctcttgctttacaagctaatgcccccgta

SEQ ID NO: 516582 - DNA, 75 bp, synthetic construct
  source 1..75: mol_type = other DNA
cgctgcgacaaaaggtgtttcactaagctttagtgacgtcatgacattcacaacaacatgttatgcgttatcgcc

SEQ ID NO: 516583 - DNA, 75 bp, synthetic construct
  source 1..75: mol_type = other DNA
gctggcgattttgcaaaaccgtttgcaggttgccgatgctaaagatgcggagtatttaatcaaacgtcatctccg

SEQ ID NO: 516584 - DNA, 75 bp, synthetic construct
  source 1..75: mol_type = other DNA
aaacgctgaagccgaacactcagacgctgtacaagtccgttgtgtacaacacgatgtacacagaattcccggacg

SEQ ID NO: 516585 - DNA, 75 bp, synthetic construct
  source 1..75: mol_type = other DNA
ctggttgtggacgggtacacggacaagataacgcattaccggaagccaacggaaaaggaacgacaggaactggcg

SEQ ID NO: 516586 - DNA, 75 bp, synthetic construct
  source 1..75: mol_type = other DNA
tgacggcaacaccaatccgacgggatggtctgcaccccattatttttatgtactgtggtgccattcgccatactg

SEQ ID NO: 516587 - DNA, 75 bp, synthetic construct
  source 1..75: mol_type = other DNA
agaacacggaaggtgagtactcatcgctgggaggccgcctgaacgaaggcacagagcatgaagttgttattcagg

SEQ ID NO: 516588 - DNA, 75 bp, synthetic construct
  source 1..75: mol_type = other DNA
tctggtactgactgaacgtacagatcatctggatgagatagcatcagtgatgaattcactgaaattgtctccctt

SEQ ID NO: 516589 - DNA, 75 bp, synthetic construct
  source 1..75: mol_type = other DNA
tatgccgatgaactggaatcatggagtgaagccgggctaaacgccctggctgaatgggaaaaatcagaccatcaa

SEQ ID NO: 516590 - DNA, 75 bp, synthetic construct
  source 1..75: mol_type = other DNA
gcaaagtcattaaagctcaactggcgcatgccaacggcggatctgtgcgttggatttataaccatgctcagtatc

SEQ ID NO: 516591 - DNA, 75 bp, synthetic construct
  source 1..75: mol_type = other DNA
ctccggtcagtagccagttgcatctgatgctaacgaaacgccagtcggcgttgtatatgcgcctgcccggtcaga

SEQ ID NO: 516592 - DNA, 75 bp, synthetic construct
  source 1..75: mol_type = other DNA
ccggtttatccgccgacagaagatcgttttcactggcgggtgatgagtcatctggggacaggatttcttaacatg

SEQ ID NO: 516593 - DNA, 75 bp, synthetic construct
  source 1..75: mol_type = other DNA
attgctggaatatttcacctttcgggaaaaatttatgtttgttcatctgaacggactggagaatatttctttgcc

SEQ ID NO: 516594 - DNA, 75 bp, synthetic construct
  source 1..75: mol_type = other DNA
tctgccggagctgactgaagggctggtcagcctgctgtggcctcactacctgcgaactatcccgtcactttccgt

SEQ ID NO: 516595 - DNA, 75 bp, synthetic construct
  source 1..75: mol_type = other DNA
gacaatgactgcctgtggaagaaagccgatactgccttcagtggttaccagttgctgctggagtatttcagcttc

SEQ ID NO: 516596 - DNA, 75 bp, synthetic construct
  source 1..75: mol_type = other DNA
gctggataacgagtacctgctcaggccgctgcgtcttcaggatggtcacaccgaaatttacagcgtcgataacat

SEQ ID NO: 516597 - DNA, 75 bp, synthetic construct
  source 1..75: mol_type = other DNA
gattaatggttattacaacgtttatcgacctcacacgaacaacgatggaccgccttgcttacatgaagaaaagtg

SEQ ID NO: 516598 - DNA, 75 bp, synthetic construct
  source 1..75: mol_type = other DNA
atgagttgcagagggaatggcctggataattcgccgatggaaagagtctttcgcagccttaaaaatgaatggctt

SEQ ID NO: 516599 - DNA, 75 bp, synthetic construct
  source 1..75: mol_type = other DNA
atgttggccctaacgaatagcggttgcttaaacgaatccgactctcacattatcaggggtataaaaatggaaact

SEQ ID NO: 516600 - DNA, 75 bp, synthetic construct
  source 1..75: mol_type = other DNA
gcagctgatggtctctccttccactgccgtttcgatcccacgcgcattgcgctgaatgatgtgcaactcctgctg

SEQ ID NO: 516601 - DNA, 75 bp, synthetic construct
  source 1..75: mol_type = other DNA
gttattacaacatttatcgacctcacacgaacaacgatggtttaccgacttgcttacatgaagaaaagtggaaac

SEQ ID NO: 516602 - DNA, 75 bp, synthetic construct
  source 1..75: mol_type = other DNA
gaatggcttccgaaaggtggttatggtgattttagccatgcggtacgcgatataaaccagtggattaatggttat

SEQ ID NO: 516603 - DNA, 75 bp, synthetic construct
  source 1..75: mol_type = other DNA
gcgaagatgcgccctgtgcccgtagctgccccaatggcgcaatcagccatgttgatgacagcattcaggtcaatc

SEQ ID NO: 516604 - DNA, 75 bp, synthetic construct
  source 1..75: mol_type = other DNA
cgggcgatgatgccgatgcaaaaatgtttcctcttaataaacccgtgctgatcactgatgtgctgactgccagcg

SEQ ID NO: 516605 - DNA, 75 bp, synthetic construct
  source 1..75: mol_type = other DNA
caactcggcgtcattgccgaaaagctgcgcgcgtttgcttacgtggcagcgaacggctgcaacacaatcgccgaa

SEQ ID NO: 516606 - DNA, 75 bp, synthetic construct
  source 1..75: mol_type = other DNA
aatcgtacccccggaaggcggcacggccccaacgcaggatcaactggttattggcggtactgacccagataccgg

SEQ ID NO: 516607 - DNA, 75 bp, synthetic construct
  source 1..75: mol_type = other DNA
gtggaaccgcatgagaagacagcaattaacgacgagctgtacctctcaatttcgaagctccaggagcatgcagca

SEQ ID NO: 516608 - DNA, 75 bp, synthetic construct
  source 1..75: mol_type = other DNA
agaaccctcatcgttataacccaacatttctgtctctccctgaatatcaaggacaagaaggtcggcacaaatgcg

SEQ ID NO: 516609 - DNA, 75 bp, synthetic construct
  source 1..75: mol_type = other DNA
cttactggaggcataatcagaaaccctgttggaagtggttttaatgtaaataattgggttatatcaggagtaaaa

SEQ ID NO: 516610 - DNA, 75 bp, synthetic construct
  source 1..75: mol_type = other DNA
cagccgctgtggctggagtggcactatcgtaacaacgaaggcgaatggctgccgttggtgaatgaccgcccgacc

SEQ ID NO: 516611 - DNA, 75 bp, synthetic construct
  source 1..75: mol_type = other DNA
atgaaaacgctgaaaaactggaccctgcacaaacagtctgcccaccacgttgaactgctggtcgatggccagcat

SEQ ID NO: 516612 - DNA, 75 bp, synthetic construct
  source 1..75: mol_type = other DNA
gcggtttttcaatgctgaaatcaatcacaccatattaatgcatcgtccacatccggaaagttatatcaaaggtgg

SEQ ID NO: 516613 - DNA, 75 bp, synthetic construct
  source 1..75: mol_type = other DNA
attacccgcgtggctaacatgctgggcaaggcaggtaaaaccggcaccctgtttaccaccctgaaagcgatttca

SEQ ID NO: 516614 - DNA, 75 bp, synthetic construct
  source 1..75: mol_type = other DNA
gccagataacgaaactggctgggacgatttctacaacggcgaatggttcagtggcggtcagtggatcaccctcga

SEQ ID NO: 516615 - DNA, 75 bp, synthetic construct
  source 1..75: mol_type = other DNA
acgaaggttctaacctcgactttactaatccgcagaccatccagtggtggcaggaaggcgtgaccacacagcttc

SEQ ID NO: 516616 - DNA, 75 bp, synthetic construct
  source 1..75: mol_type = other DNA
tgattgagaaatcgctggcggtcgataacgtctttgtctggctgatgttgttcagctatttctctgttccggcgg

SEQ ID NO: 516617 - DNA, 75 bp, synthetic construct
  source 1..75: mol_type = other DNA
tttgccaaatcggcatttgatgagttttctactcccgccgcgcgcaaatatttcgtcgacaagaaagaggccagc

SEQ ID NO: 516618 - DNA, 75 bp, synthetic construct
  source 1..75: mol_type = other DNA
ggtgtttgtgccgctggtgaacattgatgacattgacaatggtgacattaatcagcggctgatggagtcaataga

SEQ ID NO: 516619 - DNA, 75 bp, synthetic construct
  source 1..75: mol_type = other DNA
atgaatactgtcggcacgccgttgttatggggcggattcgctgtcgttgtcgccattatgctggctatcgacctg

SEQ ID NO: 516620 - DNA, 75 bp, synthetic construct
  source 1..75: mol_type = other DNA
gcgtggcactaagagagccggtgaccgccgaagaactggcgtcattcattgcctactggcaggcggaaggcaaag

SEQ ID NO: 516621 - DNA, 75 bp, synthetic construct
  source 1..75: mol_type = other DNA
ctggtctacaaaatcttctgcgctccagaaaagagtaacgcccgcgagtgtgcagctccgggcgtcgtggcgttt

SEQ ID NO: 516622 - DNA, 75 bp, synthetic construct
  source 1..75: mol_type = other DNA
atggctacgcaaacaaactgctgttgccgcgtttttgccaaatcggcattcgatgagttttctactcccgccgcg

SEQ ID NO: 516623 - DNA, 75 bp, synthetic construct
  source 1..75: mol_type = other DNA
gtttgcaatcctcggcctgcgtgcgatgtatttcctgctggctggcgtcgcggagcgtttctcgatgctcaaata

SEQ ID NO: 516624 - DNA, 75 bp, synthetic construct
  source 1..75: mol_type = other DNA
cgttcattgtgctgacctcaaacctgtttgcgatcctcggcctgcgtgcgatgtatttcctgctggcgggcgtag

SEQ ID NO: 516625 - DNA, 75 bp, synthetic construct
  source 1..75: mol_type = other DNA
tatgccacgccgctgatgctggtgttgattctggtggagttgagcgacgtgattttcgccgtggatagcattccg

SEQ ID NO: 516626 - DNA, 75 bp, synthetic construct
  source 1..75: mol_type = other DNA
ctcgctgggcgtggtgtttggcattctggtgatgacgtttattatcaacgcctgggtgaattatcagcatgataa

SEQ ID NO: 516627 - DNA, 75 bp, synthetic construct
  source 1..75: mol_type = other DNA
tatggggcggattcgctgtcgttgtcgctgttatgctggctatcgacctgttgttgcaggggcgtcggggtgcgc

SEQ ID NO: 516628 - DNA, 75 bp, synthetic construct
  source 1..75: mol_type = other DNA
gattttcgccgtggatagcattccggctatcttcgccgtgaccaccgatccgtttattgtgctgacctcaaacct

SEQ ID NO: 516629 - DNA, 75 bp, synthetic construct
  source 1..75: mol_type = other DNA
ctgttgcaggatcacccacgctataacgaagtggcagaaagaggactgttcatccgtgattcagaaacagatgaa

SEQ ID NO: 516630 - DNA, 75 bp, synthetic construct
  source 1..75: mol_type = other DNA
gaacggcgcagagctggccgccgcactggcaccggagctgatggggattaagaaccagcctgagatgataaaaaa

SEQ ID NO: 516631 - DNA, 75 bp, synthetic construct
  source 1..75: mol_type = other DNA
tcttccgcccgtgaaaccgctatgcgcgtggcggcaggggcgattgccaaaaaatatctcgccgagaaatttggc

SEQ ID NO: 516632 - DNA, 75 bp, synthetic construct
  source 1..75: mol_type = other DNA
aaccgcatggctgaaccgtagagccgaactggccgctgccgagcaggaatatcaggaattattgctggatgacaa

SEQ ID NO: 516633 - DNA, 75 bp, synthetic construct
  source 1..75: mol_type = other DNA
cggcaaaaagagcgtctggtagcggaaggcgcagggtttgcagagctgttaagcagtctgcaaaccccggagatt

SEQ ID NO: 516634 - DNA, 75 bp, synthetic construct
  source 1..75: mol_type = other DNA
cggcacagtactggcggccgcactggcaccggagctgatgggctacagtgagctgacggccattgcccgaaactg

SEQ ID NO: 516635 - DNA, 75 bp, synthetic construct
  source 1..75: mol_type = other DNA
ggctgaccgcaggaaatgaaattaattattccgcacaggacaacgacattttaacggccatcggatacaggcctg

SEQ ID NO: 516636 - DNA, 75 bp, synthetic construct
  source 1..75: mol_type = other DNA
caaagactggtcgcaggtcgagcaaaatccgtttttctgcccggacccggacaaaatcgacgcgttagatgaact

SEQ ID NO: 516637 - DNA, 75 bp, synthetic construct
  source 1..75: mol_type = other DNA
tgatgagcatcaacgcggtgaaaggcgtggaaattggcgacggttttgacgtggtggcgctgcgtggcagccaga

SEQ ID NO: 516638 - DNA, 75 bp, synthetic construct
  source 1..75: mol_type = other DNA
aaagcagaaactgtaaaacgcagcagtagcaaactaagctataaattgcagcgcgaattggagcaactgccgcaa

SEQ ID NO: 516639 - DNA, 75 bp, synthetic construct
  source 1..75: mol_type = other DNA
gatgcgcgcgctgaaaaaagagggcgactccatcggcgcgaaagtcaccgttgttgccagtggcgttcctgccgg

SEQ ID NO: 516640 - DNA, 75 bp, synthetic construct
  source 1..75: mol_type = other DNA
gcgcgattaccgcggcggcggtcgttcttccgctcgcgaaaccgccatgcgcgttgcagcaggggcgattgccaa

SEQ ID NO: 516641 - DNA, 75 bp, synthetic construct
  source 1..75: mol_type = other DNA
gtggtggcgctgcgtggcagccagaaccgcgacgaaatcaccaaagacggtttccagagcaaccatgcgggcggc

SEQ ID NO: 516642 - DNA, 75 bp, synthetic construct
  source 1..75: mol_type = other DNA
ttcgtaccgccgacaataagctttataccgggatcaccacggacgtcgaacgccgctatcagcagcatcaaagcg

SEQ ID NO: 516643 - DNA, 75 bp, synthetic construct
  source 1..75: mol_type = other DNA
aacacccgcatgggtctggggatgagcctctccgggctgtataacctcggtcacgacgtcggcggtttctccggt

SEQ ID NO: 516644 - DNA, 75 bp, synthetic construct
  source 1..75: mol_type = other DNA
tacaccgatgcgccggacgcacaaaatcagttgatgaactttatccgcctgtgtgaagaacatgcaattccctgc

SEQ ID NO: 516645 - DNA, 75 bp, synthetic construct
  source 1..75: mol_type = other DNA
tgataggggttaacctgccagataaaaggactgagtttacacaacgtctcttgttgacgcgcaaaatttcgggtt

SEQ ID NO: 516646 - DNA, 75 bp, synthetic construct
  source 1..75: mol_type = other DNA
aattgagttaagaataaacactcatggagattatcgccctgcatgggaaacattgaaagtgataattcctcaggg

SEQ ID NO: 516647 - DNA, 75 bp, synthetic construct
  source 1..75: mol_type = other DNA
catggaaaacattgaaagtggtagttcctcagggtgaaagtcgtcaactactgattaacggcattgaagcttacg

SEQ ID NO: 516648 - DNA, 75 bp, synthetic construct
  source 1..75: mol_type = other DNA
tcaccggtgttccggcagacaaaatcatcaaattggctcgtgaaatcggtagtaccaaaccggcgtttatcagcc

SEQ ID NO: 516649 - DNA, 75 bp, synthetic construct
  source 1..75: mol_type = other DNA
ctatcaacaggctgtgcgatcaacaatggtcctttcactgactgagctgatttccaaaatcagcttaaaaaaagc

SEQ ID NO: 516650 - DNA, 75 bp, synthetic construct
  source 1..75: mol_type = other DNA
gaacgtctggtagcggaaggctcagggtttgcagagctgataagcagcctgcaaaccccaaagattaaaagcgat

SEQ ID NO: 516651 - DNA, 75 bp, synthetic construct
  source 1..75: mol_type = other DNA
gagcgtctggtagcggaaggtgcagtgtttgcagaactgttgaacagcctgcaaaccccggagattaaaagcgat

SEQ ID NO: 516652 - DNA, 75 bp, synthetic construct
  source 1..75: mol_type = other DNA
gcttgccaaagatccggcgttaccgccttacgacgaactgaaaaaaatgggtatctataagcgtaaagatcccaa

SEQ ID NO: 516653 - DNA, 75 bp, synthetic construct
  source 1..75: mol_type = other DNA
atgcggaactgctgatggcattgcgtgaagaactaaatcacgacggcaacgagtacgcctttaccgacgacgaaa

SEQ ID NO: 516654 - DNA, 75 bp, synthetic construct
  source 1..75: mol_type = other DNA
gagtacgcgtttaccgacgacgaaatccttggaccctttggtgaactgcattgcgtggggggggttaccaccccc

SEQ ID NO: 516655 - DNA, 75 bp, synthetic construct
  source 1..75: mol_type = other DNA
tcgctaaacatttcggcaccacccaggtgctgtacgatatcaatctgaaaattgatgccggtgaagtggtcgtga

SEQ ID NO: 516656 - DNA, 75 bp, synthetic construct
  source 1..75: mol_type = other DNA
tgattatggttttaggggtagtggtactggtatctggattcattaaggtactatatgtaggctttttcgtgtttc

SEQ ID NO: 516657 - DNA, 75 bp, synthetic construct
  source 1..75: mol_type = other DNA
ctaacaccgttctggcaagcgaatataagatgcaactacctgatgagaaacgactcgcggatgaactcgttcgaa

SEQ ID NO: 516658 - DNA, 75 bp, synthetic construct
  source 1..75: mol_type = other DNA
gtctcctggcgattagataacgggctggcacatattggggtggtgtcagatgcttcgcccgcgacggtacgccgc

SEQ ID NO: 516659 - DNA, 75 bp, synthetic construct
  source 1..75: mol_type = other DNA
ctccttaaaatctcccgccgttccaccaaccgtggtacaaatccaggccaacaccaaccttgccatcgcagacgg

SEQ ID NO: 516660 - DNA, 75 bp, synthetic construct
  source 1..75: mol_type = other DNA
gcccgctcatagcaaagcgaaaatttggaagcgaattagataatgcttataagcgagtaaaaccaatagaaaaat

SEQ ID NO: 516661 - DNA, 75 bp, synthetic construct
  source 1..75: mol_type = other DNA
gtgccgcctgcgcctgcactgaaagaggtcgcagtagtgaatccaacgccaacgccactctcacttaaagaacgt

SEQ ID NO: 516662 - DNA, 75 bp, synthetic construct
  source 1..75: mol_type = other DNA
tgaccggcagcaacgtaaactccagacctggattggcgtgcctggcgtggaccagagccgtattgaagcattaat

SEQ ID NO: 516663 - DNA, 75 bp, synthetic construct
  source 1..75: mol_type = other DNA
tttcttccgtaatgtcagtgaattactggatgttttcgagcgcggcgaagtccgcactgagctgttgaaagaact

SEQ ID NO: 516664 - DNA, 75 bp, synthetic construct
  source 1..75: mol_type = other DNA
cgttacgccgcagaacccacctgcgataactggcatgggccagacgcctggcccacgttgtggatcacccgttaa

SEQ ID NO: 516665 - DNA, 75 bp, synthetic construct
  source 1..75: mol_type = other DNA
gaccccactttctcgtgaagaacgtaacgatttgctggattacggtaactggcggatgaatggtctgcgctgttc

SEQ ID NO: 516666 - DNA, 75 bp, synthetic construct
  source 1..75: mol_type = other DNA
gagtggcttaaaagcagcgttgttgtttattgatgcccagcaaaagcgcctcggcagtgaaaccgcgtggatcaa

SEQ ID NO: 516667 - DNA, 75 bp, synthetic construct
  source 1..75: mol_type = other DNA
cccgcaagaacgcggcgtatgttccgatgtggtgatccgcgcattgcgcagccagaaggtcgatttgcagaaact

SEQ ID NO: 516668 - DNA, 75 bp, synthetic construct
  source 1..75: mol_type = other DNA
taacatcgacctgttgacggagatgcttctggagcctcagttaccgcaaattagtagcgccagcctgaccgtggc

SEQ ID NO: 516669 - DNA, 75 bp, synthetic construct
  source 1..75: mol_type = other DNA
cagcatcaagtccgatatgaaagatgcgctgcgcgaagagactcaattctggctggtgacgccaaaagcatcgtt

SEQ ID NO: 516670 - DNA, 75 bp, synthetic construct
  source 1..75: mol_type = other DNA
ggttaatctcccatcttgatgatgacaccatcgccagagcacaggctgcatttgcccgcacggattccgtggggc

SEQ ID NO: 516671 - DNA, 75 bp, synthetic construct
  source 1..75: mol_type = other DNA
aaaattcagggtattggcgctggttttatcccggctaatcttgatctcaagctggtcgacaaagtcattggcatc

SEQ ID NO: 516672 - DNA, 75 bp, synthetic construct
  source 1..75: mol_type = other DNA
cacgtcgtctgatggaagaagaaggtattcttgcaggtatctcttctggagcagctgttgctgcggcgttgaaac

SEQ ID NO: 516673 - DNA, 75 bp, synthetic construct
  source 1..75: mol_type = other DNA
gattaaaggtagcccagtgctgatccagtggtatcccttgtcatcacatagcggtgatggcgttctggagatgat

SEQ ID NO: 516674 - DNA, 75 bp, synthetic construct
  source 1..75: mol_type = other DNA
ggccgcatgcgcactggcctacggtggtgcggtcgttgccaatatctacattcccaaactggcggcggcgcgtcc

SEQ ID NO: 516675 - DNA, 75 bp, synthetic construct
  source 1..75: mol_type = other DNA
atgctggggattggccggatcacggctatgaaagatggtggggtggtgcagtctatccagtaccagactccgctg

SEQ ID NO: 516676 - DNA, 75 bp, synthetic construct
  source 1..75: mol_type = other DNA
atgaaagcttcactggcgttattcagtcttctgacggtatttaccagttactccttaaaatctcccgccgttcca

SEQ ID NO: 516677 - DNA, 75 bp, synthetic construct
  source 1..75: mol_type = other DNA
ggccaattgaaataacatactacacatggcttgatagggattttgtatcaaatagtggaggttctcatcacgcag

SEQ ID NO: 516678 - DNA, 75 bp, synthetic construct
  source 1..75: mol_type = other DNA
ggaaacggtagtctacaaccagtgggggctgaatatccatctgaccgagtcgggcattttcattgatgccaaagg

SEQ ID NO: 516679 - DNA, 75 bp, synthetic construct
  source 1..75: mol_type = other DNA
cgacccgcatcgcgggcatgctgggcattggtcgtattaccagccagaaagatagcggggtggtacaggaagtgc

SEQ ID NO: 516680 - DNA, 75 bp, synthetic construct
  source 1..75: mol_type = other DNA
gaattgtctgcgctgcagcggtttgattatataaagtttgtttcagacgcagaacaacaggagacaacgaagcat

SEQ ID NO: 516681 - DNA, 75 bp, synthetic construct
  source 1..75: mol_type = other DNA
ataaaaatgatgatcaacgcttttggtgataaccgcaattttcgcgtgcaattatatctttttactccggtatcg

SEQ ID NO: 516682 - DNA, 75 bp, synthetic construct
  source 1..75: mol_type = other DNA
cgggcaaaagtaacattaccgatgcattggctttttttggtgccgtagtgaaaaccggggcgacacaagcaatcc

SEQ ID NO: 516683 - DNA, 75 bp, synthetic construct
  source 1..75: mol_type = other DNA
ctcatccagccatgccagaacaaggattgtgaccagaaatggtacgttttcaatggaaagacgaaaccagtttgt

SEQ ID NO: 516684 - DNA, 75 bp, synthetic construct
  source 1..75: mol_type = other DNA
tatgccaataaagtggcgtttattgacactgattttgtcactacccaggcgttctgcaaaaagtacgaagggcgt

SEQ ID NO: 516685 - DNA, 75 bp, synthetic construct
  source 1..75: mol_type = other DNA
acactgattttgtcactacccaggcgttctgcaaaaagtacgaagggcgtgagcatccgttcgtgcaggcgctga

SEQ ID NO: 516686 - DNA, 75 bp, synthetic construct
  source 1..75: mol_type = other DNA
tgttgtattcggtaagttttacccgctgcataccggacatatctaccttatccagcgtgcctgtagtcaggttga

SEQ ID NO: 516687 - DNA, 75 bp, synthetic construct
  source 1..75: mol_type = other DNA
gtggtacgtgaaagctgtcagaaaaactatcgcggcgttgccgggggttacgctgaagctgctgagtggctggat

SEQ ID NO: 516688 - DNA, 75 bp, synthetic construct
  source 1..75: mol_type = other DNA
ccaatcaaccggacgaggctaatatgtgggtatctccgaaagatgtatttgatgacgatacattcaagctacata

SEQ ID NO: 516689 - DNA, 75 bp, synthetic construct
  source 1..75: mol_type = other DNA
ttccttttgttaagaaaactcgcggtttatcgccggaagagtaccaacaacgaatcatcgctaaactggaacctg

SEQ ID NO: 516690 - DNA, 75 bp, synthetic construct
  source 1..75: mol_type = other DNA
cgtacaccattatggggccctacctgaaacctctcttcgaccgggcttttattgacgggttgcatgatccgtcga

SEQ ID NO: 516691 - DNA, 75 bp, synthetic construct
  source 1..75: mol_type = other DNA
ttggagtcattaccgctggaacttaccgataatcaaggcgaaaatcttaccttcgtattaacgctacatgacggt

SEQ ID NO: 516692 - DNA, 75 bp, synthetic construct
  source 1..75: mol_type = other DNA
acgttaaaggctgcaagtgaagagattcagcaattagtagatgatttagcaaaaagtgctatttcctctaaatga

SEQ ID NO: 516693 - DNA, 75 bp, synthetic construct
  source 1..75: mol_type = other DNA
tgccctggtccacttacgtccgtttgctttctgttaaaaaagctgatgctcgcagcttttatgagaaagagacac

SEQ ID NO: 516694 - DNA, 75 bp, synthetic construct
  source 1..75: mol_type = other DNA
aatataacggtgtgtccgtcacgctttccgaactgtctgcgctgcagtgctttgattatatgaggtttgtttcag

SEQ ID NO: 516695 - DNA, 75 bp, synthetic construct
  source 1..75: mol_type = other DNA
acgaaccgggtgctttatctttcaggtatgctggataaccggcacgatgccgatcctgaacaaccgggaaagcag

SEQ ID NO: 516696 - DNA, 75 bp, synthetic construct
  source 1..75: mol_type = other DNA
tcacagactcactggccgcgctgaattgttccgttgttccggcgcatccgtggataaacggtctggggcaacaga

SEQ ID NO: 516697 - DNA, 75 bp, synthetic construct
  source 1..75: mol_type = other DNA
ttgattcaggtgaatgaaaactcccccgaagaagccgagaagctcgtcgcagctgcgagggagtcaggtatttca

SEQ ID NO: 516698 - DNA, 75 bp, synthetic construct
  source 1..75: mol_type = other DNA
gtatgtgtgggtgaaaatggacattggtgagatttcagttgaggcttctgaactacgcgtcaaagggatgcgctc

SEQ ID NO: 516699 - DNA, 75 bp, synthetic construct
  source 1..75: mol_type = other DNA
aacctggcaggttgttgtcgagatagacggtcagcaaggggtaataatgactgaccgcgcgccagacgaagtggg

SEQ ID NO: 516700 - DNA, 75 bp, synthetic construct
  source 1..75: mol_type = other DNA
caagtgaatataagatgcaactacctgatgaaaaacgactcgtggatgaactcgttcgaacacaggcggtgctag

SEQ ID NO: 516701 - DNA, 75 bp, synthetic construct
  source 1..75: mol_type = other DNA
atgaaaaagagacgctccgctgtggttggtctgtccgccagctagagcggcaaattgcgacccaattttatgagc

SEQ ID NO: 516702 - DNA, 75 bp, synthetic construct
  source 1..75: mol_type = other DNA
taagatgcaactacctgatgaaaaacgactcgcggatgaactcgttcgaacacaggcggtgctagaggaaggcta

SEQ ID NO: 516703 - DNA, 75 bp, synthetic construct
  source 1..75: mol_type = other DNA
aataacgcccaaccactgagtcaggatcaatgcctgcgcgcactgcatcacttacgtgttcagtccatcagcaaa

SEQ ID NO: 516704 - DNA, 75 bp, synthetic construct
  source 1..75: mol_type = other DNA
gctgatgaagcaagagccagaggattagcctgtgaggctgcgtatgatgcggttaagtccggggggaataagtaa

SEQ ID NO: 516705 - DNA, 75 bp, synthetic construct
  source 1..75: mol_type = other DNA
tttgattgggatgccgggaaagtgctgattttcccagcacagccactgaccacgctaacaccagaacagattact

SEQ ID NO: 516706 - DNA, 75 bp, synthetic construct
  source 1..75: mol_type = other DNA
ggaggccagtcgcgtgacgctggcggaggagaactcgtggctgaagatgctcatagaagatcatgctggttgtac

SEQ ID NO: 516707 - DNA, 75 bp, synthetic construct
  source 1..75: mol_type = other DNA
gtgatgcggcagttgcagtagaaacagaacctatgcatcaaaattttgtggcgtttcgtatggcgttcacgccat

SEQ ID NO: 516708 - DNA, 75 bp, synthetic construct
  source 1..75: mol_type = other DNA
aattacttaaacagagtccaatagagatttacccggcacgcattcccaaagcccctgatttctggcatccggcaa

SEQ ID NO: 516709 - DNA, 75 bp, synthetic construct
  source 1..75: mol_type = other DNA
caattgacctgcctgcggatgctctgattggcattgcccacccgttagaaatgacagcagaaatgcgcagtgaat

SEQ ID NO: 516710 - DNA, 75 bp, synthetic construct
  source 1..75: mol_type = other DNA
cccggttgcgcgccgatgacgatcaactgaaagcgcccgaggcactggcccgactaaaagggctaaaaaaagata

SEQ ID NO: 516711 - DNA, 75 bp, synthetic construct
  source 1..75: mol_type = other DNA
ccggcacgctggtgcaccggctgggggggatgcgcataagcgctaacttaagggttgaaccatctgaagaatgcg

SEQ ID NO: 516712 - DNA, 75 bp, synthetic construct
  source 1..75: mol_type = other DNA
gaggaaaaaaccaaagcacaggctgcgccagaggcgcagccaaccagccagatggccgcaaacatcagagcgtta

SEQ ID NO: 516713 - DNA, 75 bp, synthetic construct
  source 1..75: mol_type = other DNA
gccagaaggatgcggaccttcagtctcagtatcagaccggggatatcagtgaggatttttacagacaggcacggg

SEQ ID NO: 516714 - DNA, 75 bp, synthetic construct
  source 1..75: mol_type = other DNA
gctgaagacttcggattcaatcatgcaatagaacggatgaggagacagatacctgaaaccccagccaccgatgct

SEQ ID NO: 516715 - DNA, 75 bp, synthetic construct
  source 1..75: mol_type = other DNA
aacggtattgcggtactgccggtgaccggcacgctggtggcaccggctgggggggatgcggccattttccggaat

SEQ ID NO: 516716 - DNA, 75 bp, synthetic construct
  source 1..75: mol_type = other DNA
actggcgtacgctgttacaaacgctgatggcatcgcagccacaactggcagaagaggtgatgccgtggttaagta

SEQ ID NO: 516717 - DNA, 75 bp, synthetic construct
  source 1..75: mol_type = other DNA
cgccttatcaagaataatcagcctgttaccgatgacgctctggaaattatcggcgaaatgctgcgctttacccag

SEQ ID NO: 516718 - DNA, 75 bp, synthetic construct
  source 1..75: mol_type = other DNA
cgattaatatgggggggttatccggcaaatgaaccgcgtcgtttactcaacgccttttgtactgcacccattttg

SEQ ID NO: 516719 - DNA, 75 bp, synthetic construct
  source 1..75: mol_type = other DNA
agtgtctggaatctgtatttattggcactgcttccgcgtgagatggcagtgactttctggctgcgtatcaatgag

SEQ ID NO: 516720 - DNA, 75 bp, synthetic construct
  source 1..75: mol_type = other DNA
gctttcctggctgaagtacgggcgcagggcgtggagatgtttgcggagtgtgcatacacgcttgaacatcatgat

SEQ ID NO: 516721 - DNA, 75 bp, synthetic construct
  source 1..75: mol_type = other DNA
cattactccccgcgcagagtagaggaaatcaacaatggctggcactccacggaagcaaaatcagccgaacaggcg

SEQ ID NO: 516722 - DNA, 75 bp, synthetic construct
  source 1..75: mol_type = other DNA
gtggacgagttgtattacaggaactggggttttggggatgatgtatggctgtttctgaattatatactccccgga

SEQ ID NO: 516723 - DNA, 75 bp, synthetic construct
  source 1..75: mol_type = other DNA
taccatggcggctctgatctgtatcgagaaaaatgatagccagcagttacttgatgaaatcgtgcaaaaatatgg

SEQ ID NO: 516724 - DNA, 75 bp, synthetic construct
  source 1..75: mol_type = other DNA
caatagagatttacccggcacgtattccaaaagctcctgatttctggcatccgacaatgtggtccaggccgcgac

SEQ ID NO: 516725 - DNA, 75 bp, synthetic construct
  source 1..75: mol_type = other DNA
gtggctaaatacagtaaaaacttcccccatgcgacgctcgccgcactggcagaactgctggcgttaaaagccccc

SEQ ID NO: 516726 - DNA, 75 bp, synthetic construct
  source 1..75: mol_type = other DNA
ggcaaatctgcccgtgctgtcagtggcctgaacatccttaccctgatgaataatgatatggcgctgatacagctg

SEQ ID NO: 516727 - DNA, 75 bp, synthetic construct
  source 1..75: mol_type = other DNA
atggacaaggaattaccgtggctggctgataaagcccaactggaactgaaatataaaaagggtaaaacgccgctc

SEQ ID NO: 516728 - DNA, 75 bp, synthetic construct
  source 1..75: mol_type = other DNA
gatgtatggcctgccctggagcaattacttaaactgggtccaatagaaatttacccggcacgtattccaaaagct

SEQ ID NO: 516729 - DNA, 75 bp, synthetic construct
  source 1..75: mol_type = other DNA
atgccgggaagtgacccgaaaaccaatggtgacctgagcgcagatatccgccgccttgagggcgcgctgatcgcc

SEQ ID NO: 516730 - DNA, 75 bp, synthetic construct
  source 1..75: mol_type = other DNA
cgtcgtttgcgcgatcgcggggccgacgtccgtgtggtaatgaccgaagcggcaaaagcctttatcactccactt

SEQ ID NO: 516731 - DNA, 75 bp, synthetic construct
  source 1..75: mol_type = other DNA
gattaccgcaggcccgacgcgtgaaccactcgatccggtgcgttacatctccaatcacagctccggcaagatggg

SEQ ID NO: 516732 - DNA, 75 bp, synthetic construct
  source 1..75: mol_type = other DNA
ggagataaagtcttaccgcttgagcgcaaagagctccttggccaattattactcgacgagatcgtgacccgttat

SEQ ID NO: 516733 - DNA, 75 bp, synthetic construct
  source 1..75: mol_type = other DNA
ttgcaatttgactacatcattattggtgccggctcagccggaaacgttctcgctacccgtctgactgaagatccg

SEQ ID NO: 516734 - DNA, 75 bp, synthetic construct
  source 1..75: mol_type = other DNA
ccttgccgaaggcgaagaagctctcagcttcggtgagtttaaacaggcgctttccagttcgacaaaatctatcta

SEQ ID NO: 516735 - DNA, 75 bp, synthetic construct
  source 1..75: mol_type = other DNA
ggcagccgaagcggcaatgggccacattgagctgggtaaatgggctgatttagtgattcttgccccagccacggc

SEQ ID NO: 516736 - DNA, 75 bp, synthetic construct
  source 1..75: mol_type = other DNA
caccctgccggaaattaccggacgcgtttgtccgcaagaccgtttgtgtgaaggtgcctgtactattcgcgatga

SEQ ID NO: 516737 - DNA, 75 bp, synthetic construct
  source 1..75: mol_type = other DNA
gcgcggcgagccggataaactggcaattgaagcgcgcaaaaccggctttgatgaaatttatctgccattccgcac

SEQ ID NO: 516738 - DNA, 75 bp, synthetic construct
  source 1..75: mol_type = other DNA
ctgtgtggtggcctgtccgtttggcaccatgcagattgtcctgacacccgtcacagcgggtaaagtgaaagccac

SEQ ID NO: 516739 - DNA, 75 bp, synthetic construct
  source 1..75: mol_type = other DNA
aggcttacgaagaatacttcgaaggccttgccgaaggcgaagaagccctcagcttcagcgaatttaaacaggcgc

SEQ ID NO: 516740 - DNA, 75 bp, synthetic construct
  source 1..75: mol_type = other DNA
aacgtgcggactggcagaaaggactgcaggagggggtcagcaactgggtggacagcgcatcagattacgcttcac

SEQ ID NO: 516741 - DNA, 75 bp, synthetic construct
  source 1..75: mol_type = other DNA
cttcgaaggtcttgccgaaggcgaagaagctctcagcttcaacgaatttaaacaggcgctttccagttcggcaaa

SEQ ID NO: 516742 - DNA, 75 bp, synthetic construct
  source 1..75: mol_type = other DNA
cgcatggagtgcggacgcggcaaaggtctgggcggttcatcgctgatcaatggtatgtgctacatccgtggcaat

SEQ ID NO: 516743 - DNA, 75 bp, synthetic construct
  source 1..75: mol_type = other DNA
atcggtgcggagtggctgtttggcggcactggcgttggtgccagcaaccactttgaagcaggcggatttattcgc

SEQ ID NO: 516744 - DNA, 75 bp, synthetic construct
  source 1..75: mol_type = other DNA
gtcaccagtggcgcgggttttatcgacctgattattcccggcctgcataaagcaaatggtatttcgcggttgtta

SEQ ID NO: 516745 - DNA, 75 bp, synthetic construct
  source 1..75: mol_type = other DNA
gtcaccagcggttttggctttatcgatttgattattcctggcttacataaagcaaacggcatatcgcgtttatta

SEQ ID NO: 516746 - DNA, 75 bp, synthetic construct
  source 1..75: mol_type = other DNA
ataccgtggccgcgaaatcagccccggtgtcgaatgccagacggatgagcagctcgatgagttcgtgcgtaacca

SEQ ID NO: 516747 - DNA, 75 bp, synthetic construct
  source 1..75: mol_type = other DNA
ctttgaagcaggtggatttattcgcagccgtgaggaatttgcgtggccgaatattcagtaccatttcctgccagt

SEQ ID NO: 516748 - DNA, 75 bp, synthetic construct
  source 1..75: mol_type = other DNA
aagaacccggtctggagaactggagttatctcgactgcctgccctactaccgcaaggccgagacgcgcgatgtgg

SEQ ID NO: 516749 - DNA, 75 bp, synthetic construct
  source 1..75: mol_type = other DNA
tgtctatatcgcacctaaactattaggcagcgacgcccgcggattatgcacgctgccagggcttgagaaattagc

SEQ ID NO: 516750 - DNA, 75 bp, synthetic construct
  source 1..75: mol_type = other DNA
tcggcccgatggaccgcaccgtcacgccgcagggccgtcgcgccagcaccgcgcggggttatctcgatcaggcca

SEQ ID NO: 516751 - DNA, 75 bp, synthetic construct
  source 1..75: mol_type = other DNA
cttccgtacccaaatgcccgctgcgctggcgttcccgctacagggtaaacgctataactgggcctatgagaccga

SEQ ID NO: 516752 - DNA, 75 bp, synthetic construct
  source 1..75: mol_type = other DNA
tcttgccgaaggcgaagaaactctcagcttcaacgaatttaaacaggcgctttccagttcggcaaaatctaacgg

SEQ ID NO: 516753 - DNA, 75 bp, synthetic construct
  source 1..75: mol_type = other DNA
cagcagcgccacggtgctggcggatgatcctgccttaacggtgcgttggtctgaactggatgaacaaactcaggc

SEQ ID NO: 516754 - DNA, 75 bp, synthetic construct
  source 1..75: mol_type = other DNA
cgctgccagggcttgagaaattagccgacgccccccaatttaaattcaaagagatacgtcatgtaggcccggatg

SEQ ID NO: 516755 - DNA, 75 bp, synthetic construct
  source 1..75: mol_type = other DNA
ggctaatctgttgttctgtgtgctggtggtatgggcgcgcgggaatgtgtcaaaaatcctttcattactgaggta

SEQ ID NO: 516756 - DNA, 75 bp, synthetic construct
  source 1..75: mol_type = other DNA
ttttaacctgctgttctgcgtgctggtgatacgcgcacgcgggaacgtcacaaaaatctttgtattacgaaggcg

SEQ ID NO: 516757 - DNA, 75 bp, synthetic construct
  source 1..75: mol_type = other DNA
gattaatctggtgttctgcgtgctggttgttcgtgcgcgcggtaatgtttcaaaaatttttgccttactgagtgg

SEQ ID NO: 516758 - DNA, 75 bp, synthetic construct
  source 1..75: mol_type = other DNA
gacgatgacgggctgcatgtagtgatcaacggcgaaacgcaggtattagcagtggacaatgtggtgatctgcgca

SEQ ID NO: 516759 - DNA, 75 bp, synthetic construct
  source 1..75: mol_type = other DNA
ggctgcgatgtggctatggagctggacgcacgacgggcaattgcccagggaacacggctggcgctggagatttaa

SEQ ID NO: 516760 - DNA, 75 bp, synthetic construct
  source 1..75: mol_type = other DNA
cgcggtgagtcgagatataaaccgctgatgtcgtggctggcctggctgttgatgctgctttatgcttttgcaccg

SEQ ID NO: 516761 - DNA, 75 bp, synthetic construct
  source 1..75: mol_type = other DNA
cctgaatgcgataacctgcgcacaaactggcttaacgtgctgcagcgtaatacccaggataacaaagattactgg

SEQ ID NO: 516762 - DNA, 75 bp, synthetic construct
  source 1..75: mol_type = other DNA
aaagtgtggatcagggtgttgggacaaccagttttaaactcttgggtggcgcactgaatggaagtgcttcccgaa

SEQ ID NO: 516763 - DNA, 75 bp, synthetic construct
  source 1..75: mol_type = other DNA
ggtgttgcgttaccagtccaggaaacggctgcacaggaagaaattaaaacagaagcggtggaggacattgtgaag

SEQ ID NO: 516764 - DNA, 75 bp, synthetic construct
  source 1..75: mol_type = other DNA
atgccagataacctttctgaattactgaacgtggcgttatgtacggtcatcgtgctgacgctttttttttaccgc

SEQ ID NO: 516765 - DNA, 75 bp, synthetic construct
  source 1..75: mol_type = other DNA
aatctgctgttctgcgtgttggtgattcgcgcacgcgggaacgtttcaaaaatctttgtattacgaaggcgctga

SEQ ID NO: 516766 - DNA, 75 bp, synthetic construct
  source 1..75: mol_type = other DNA
ttttaatctgttgttctgcgtgctggtaataagcgcacgcgggaacgtcgcaagaatctttccattgttgaggtg

SEQ ID NO: 516767 - DNA, 75 bp, synthetic construct
  source 1..75: mol_type = other DNA
tacgaaacgctgcgctattaccgccggatgatcgaagtgacgggcgtgacgctgaaactcaatcacaccgtgacg

SEQ ID NO: 516768 - DNA, 75 bp, synthetic construct
  source 1..75: mol_type = other DNA
acgccacgtgctgggttatttgcaggacttcctgttccatccgaaacgggcgatgacgccggtacgtgcgctttc

SEQ ID NO: 516769 - DNA, 75 bp, synthetic construct
  source 1..75: mol_type = other DNA
ggagcttgatcccgataaaacggtgatggataacctcgctgaaggtaaacaggaggtgatggttaacggtaagcc

SEQ ID NO: 516770 - DNA, 75 bp, synthetic construct
  source 1..75: mol_type = other DNA
tcttcgaaggtggtggcaaaattggccgttatgttggcggttatcatgatgcccgtggtcagcaagaacagtatg

SEQ ID NO: 516771 - DNA, 75 bp, synthetic construct
  source 1..75: mol_type = other DNA
gggacgcgcgctggtgagcaatccgcgcgtgttactgcttgacgaaccgacgaaccacctggatatcgaaaccat

SEQ ID NO: 516772 - DNA, 75 bp, synthetic construct
  source 1..75: mol_type = other DNA
ccgcgtaacgttgagggtagcgtttatgatttcgttgccgaaggcattgaagaacaagcggaatacctgaaacgc

SEQ ID NO: 516773 - DNA, 75 bp, synthetic construct
  source 1..75: mol_type = other DNA
gctgctgcggagcaggagctggagcaggcttttgaacgctgggagtatcttgaagcgttaaaaaatggtggctga

SEQ ID NO: 516774 - DNA, 75 bp, synthetic construct
  source 1..75: mol_type = other DNA
cgcggcggcgcgtggtcatcaggtaacgttgtttgatgcacatagcgagatcggcgggcagtttaatatcgccaa

SEQ ID NO: 516775 - DNA, 75 bp, synthetic construct
  source 1..75: mol_type = other DNA
gccgcgcactccgcccatcgacgggatcgatcatccgaaggtattgagttatctcgatgtactgcgcgacaaagc

SEQ ID NO: 516776 - DNA, 75 bp, synthetic construct
  source 1..75: mol_type = other DNA
tcaacggcgaaacgcaggtattcgccgttgatcatgtggtgatctgcgcgggacaagagccaaaccgcacgctgg

SEQ ID NO: 516777 - DNA, 75 bp, synthetic construct
  source 1..75: mol_type = other DNA
gcggtgcgcgaacgcgtcggcaacgacttcattattatctaccggttgtcgatgctcgacctggtcgaaggcggc

SEQ ID NO: 516778 - DNA, 75 bp, synthetic construct
  source 1..75: mol_type = other DNA
cgtttcgttcctcacgaactcacccatgaagagatcctgcaactgatcgacgatttcgcccgctgcgcgcaactg

SEQ ID NO: 516779 - DNA, 75 bp, synthetic construct
  source 1..75: mol_type = other DNA
tgcctttagctgggtcacgcgcaaactgaaaggtcacgtctcgctgccgctggtgaccaccaaccggattaacga

SEQ ID NO: 516780 - DNA, 75 bp, synthetic construct
  source 1..75: mol_type = other DNA
tcgctggcaatggcaatcagcaaagggcgtctgattcgcgtgaatcaggatggtaaatttcgttactgcataccg

SEQ ID NO: 516781 - DNA, 75 bp, synthetic construct
  source 1..75: mol_type = other DNA
gaatacagaactattaatgcgccagatgttaacgcggctattattcctaaagaaagtactttacgcttagtacca

SEQ ID NO: 516782 - DNA, 75 bp, synthetic construct
  source 1..75: mol_type = other DNA
ttttatgccaataccaggagtttccacagcaaaaataaatggtttcctgaataaagttctctttaacgtagccaa

SEQ ID NO: 516783 - DNA, 75 bp, synthetic construct
  source 1..75: mol_type = other DNA
tcaggttcgcgacatgtttgttaaagatgtgccgcagggagctgatctgctgaaagccgtggatgaggtgcaata

SEQ ID NO: 516784 - DNA, 75 bp, synthetic construct
  source 1..75: mol_type = other DNA
ctgtatctgctggggcctgtgggtgggggtaaatcatcgcttgctgagcgactgaaatcattaatgcagctcgta

SEQ ID NO: 516785 - DNA, 75 bp, synthetic construct
  source 1..75: mol_type = other DNA
tcgtactgcgagccagagcgaataacagcggacgcaatccgaactggaccagctatgaaaaactgcgcacggtta

SEQ ID NO: 516786 - DNA, 75 bp, synthetic construct
  source 1..75: mol_type = other DNA
caaaagggactcgttcattcatatgattctgggaatattgtagttactctccaagatgtacaactttatccttta

SEQ ID NO: 516787 - DNA, 75 bp, synthetic construct
  source 1..75: mol_type = other DNA
cacgctaacaccagaacagattactgatatcactgatagtgtgcgcaaaggtcagtcctggcacgcatatcagga

SEQ ID NO: 516788 - DNA, 75 bp, synthetic construct
  source 1..75: mol_type = other DNA
tgcaggactggatgatgccgataccgtgacgcttaaggaagtgacagaagcattgttgcattgtgcggaacagat

SEQ ID NO: 516789 - DNA, 75 bp, synthetic construct
  source 1..75: mol_type = other DNA
gcagcattggttcaacaccttcagttgaggttcagtcaattcacgctggttttgattgggattccgggaaagtgc

SEQ ID NO: 516790 - DNA, 75 bp, synthetic construct
  source 1..75: mol_type = other DNA
acgagggcgatataacttacactagttatactcatgaatcggcacctggtatcagtgtgttaattgaagataaga

SEQ ID NO: 516791 - DNA, 75 bp, synthetic construct
  source 1..75: mol_type = other DNA
acggatgcgaacggtaacggcaaggcagacacagccgagcaggccgtggccagagtcttttatgagaaagcattc

SEQ ID NO: 516792 - DNA, 75 bp, synthetic construct
  source 1..75: mol_type = other DNA
tgaagttcttaatcaaaatggtgtttctggcttcagtgttgataagaattatggtggagaattccgatacactta

SEQ ID NO: 516793 - DNA, 75 bp, synthetic construct
  source 1..75: mol_type = other DNA
atgaatatattcgatcactatcgccagcgatatgaagctgccaagcacgaagagttcacactgcaggagtttctt

SEQ ID NO: 516794 - DNA, 75 bp, synthetic construct
  source 1..75: mol_type = other DNA
tattcagacacagtcagcaggtgctcatacccactcgctgtctggtactgcagcaagttctggcgcacatgcaca

SEQ ID NO: 516795 - DNA, 75 bp, synthetic construct
  source 1..75: mol_type = other DNA
agggactggaaacccgcgccatgctggagattattatccagcaggccactgttccggtggttgtcgatgctggca

SEQ ID NO: 516796 - DNA, 75 bp, synthetic construct
  source 1..75: mol_type = other DNA
ggcgctggaaatgggggccgacgccgtattagtaaatacagcgattgccgtcgcggacgatcccatcaacatggc

SEQ ID NO: 516797 - DNA, 75 bp, synthetic construct
  source 1..75: mol_type = other DNA
tggtaaagcctttcctcagccagcaggtgttgcgttaccagtccaggaaacgacgacacaggaagaaatgaaaac

SEQ ID NO: 516798 - DNA, 75 bp, synthetic construct
  source 1..75: mol_type = other DNA
tgccgggatattctccgggatattaccgccaccagagaacagcagcggtgagtgggtggaagacgtggtgccggg

SEQ ID NO: 516799 - DNA, 75 bp, synthetic construct
  source 1..75: mol_type = other DNA
gctgattaacgcgattgaacagcatggtcctcagtcggctgacgaactggcgttaatgttcgggattacctcccg

SEQ ID NO: 516800 - DNA, 75 bp, synthetic construct
  source 1..75: mol_type = other DNA
cgagaaattgctaaatcacagtgaactaacacatgccccatgcgcgcccggcacgctggaaacactgtcacgctt

SEQ ID NO: 516801 - DNA, 75 bp, synthetic construct
  source 1..75: mol_type = other DNA
gttaaccgccacccaggaaggtaactacaacgggacggaaggtatctccgccctgccgttcaacgggattattct

SEQ ID NO: 516802 - DNA, 75 bp, synthetic construct
  source 1..75: mol_type = other DNA
gctggaaacgctgtcacgtttttctattctttcgcgtctgaaagagccagaaaactccagcatttattcaaagat

SEQ ID NO: 516803 - DNA, 75 bp, synthetic construct
  source 1..75: mol_type = other DNA
tgggggccgacgcggtgttagtgaatacggcgattgccgtcgcggacgatcccgtcaacatggcgaaggcatttc

SEQ ID NO: 516804 - DNA, 75 bp, synthetic construct
  source 1..75: mol_type = other DNA
aagatcctctctcgcgtgttcaacttcgaccacgtggaagtggcagcaaaccctgttcatctgttctacgtcctg

SEQ ID NO: 516805 - DNA, 75 bp, synthetic construct
  source 1..75: mol_type = other DNA
aagatcctctctcgcgtgttcaacttcgatcacgtggaagtggcggctaacccggtccatctgttctacgttctt

SEQ ID NO: 516806 - DNA, 75 bp, synthetic construct
  source 1..75: mol_type = other DNA
cgaaggtgtttgcactggatgtggctgcacggcaccgggtgcagttttcgatgcctgagtccgatgctgtcacaa

SEQ ID NO: 516807 - DNA, 75 bp, synthetic construct
  source 1..75: mol_type = other DNA
cgccattcctatgcgatgcatatgctgtatgccggtataccgctgaaggtcctgcagagtctgatggggcataag

SEQ ID NO: 516808 - DNA, 75 bp, synthetic construct
  source 1..75: mol_type = other DNA
ccgccgctgccgctgatggtgtgacgttctctgtcccggtcacgccacatacgttccgccattcctatacgatgc

SEQ ID NO: 516809 - DNA, 75 bp, synthetic construct
  source 1..75: mol_type = other DNA
tggatgtggctgcccggcaccgggtgcagtttgcgatgccggagtctgatgcggttgcgatgctgaaacaattat

SEQ ID NO: 516810 - DNA, 75 bp, synthetic construct
  source 1..75: mol_type = other DNA
ttccggtcacaccacatacgttccgccattcctatgcgatgcacatgctgtatgctggtataccgctgaaagttc

SEQ ID NO: 516811 - DNA, 75 bp, synthetic construct
  source 1..75: mol_type = other DNA
cactggagcgcagaaacaaacgaaccggaagaatggagaaggcgcgcatctggggaatcaccgaccgcacagttc

SEQ ID NO: 516812 - DNA, 75 bp, synthetic construct
  source 1..75: mol_type = other DNA
gtggctgcacggcaccgggtgcagttttcgatgcctgagtccgatgcggtgtctatgctcaaaagaattccataa

SEQ ID NO: 516813 - DNA, 75 bp, synthetic construct
  source 1..75: mol_type = other DNA
tggaacggcgtaataaacgaaccggcaggacagagaaagcgcggatctgggaagtgacggacagaacggtcagga

SEQ ID NO: 516814 - DNA, 75 bp, synthetic construct
  source 1..75: mol_type = other DNA
cgtaataaacgaacaggcaggacagagaaagcgcggatctgggaagtgacggacagaacggtcaggacctggatt

SEQ ID NO: 516815 - DNA, 75 bp, synthetic construct
  source 1..75: mol_type = other DNA
gaaggtgtttgcgctggatgtggctgcacggcaccgggtgcagttttcgatgcctgagtccgatgcggtcacaat

SEQ ID NO: 516816 - DNA, 75 bp, synthetic construct
  source 1..75: mol_type = other DNA
gtcctgcagagcctgatggggcataagtccatcagctcaacggaggtctacacgaaggtgtttgcactggatgtg

SEQ ID NO: 516817 - DNA, 75 bp, synthetic construct
  source 1..75: mol_type = other DNA
ctcccgctgctgctgacggtgtgacgttctctgttccggtcacaccacatacgttccgccattcctatgcgatgc

SEQ ID NO: 516818 - DNA, 75 bp, synthetic construct
  source 1..75: mol_type = other DNA
caggacagagaaagcgcggatctgggaagtgacggacagaacggtcaggacctggattggggaggcggttgccac

SEQ ID NO: 516819 - DNA, 75 bp, synthetic construct
  source 1..75: mol_type = other DNA
attttaggcgccaatatttttcgtgatttctttgccggtatccgcgatatcgtcggcggtcgttcaggggcttac

SEQ ID NO: 516820 - DNA, 75 bp, synthetic construct
  source 1..75: mol_type = other DNA
ttgaaggtcagaccatcgttgaatattgcggtgtggtgacgggcgaagcgattttaggcgccaatatttttcgtg

SEQ ID NO: 516821 - DNA, 75 bp, synthetic construct
  source 1..75: mol_type = other DNA
ccccggcagatctgaatattctgttcaaaacgccgattgccgaccgctggcgcgaggcggcaaaactgattggtg

SEQ ID NO: 516822 - DNA, 75 bp, synthetic construct
  source 1..75: mol_type = other DNA
cgatatccatctttcccgccatgccgctgaactgaaaagcgttttctgccagccgttgggcgatcgctaccgtga

SEQ ID NO: 516823 - DNA, 75 bp, synthetic construct
  source 1..75: mol_type = other DNA
ccgccgatctcgcctcccgcgtgcagccgctgttcagcaccgatttttatcgcgaaaaatggctggtggcggtcg

SEQ ID NO: 516824 - DNA, 75 bp, synthetic construct
  source 1..75: mol_type = other DNA
tgatcaggggtttgcctcaaataatacgggattatcaggaacagtagggagtcgggatcagttcaattatggtgt

SEQ ID NO: 516825 - DNA, 75 bp, synthetic construct
  source 1..75: mol_type = other DNA
ttgaaagctggccaaaacatctgcgtaacaaagccagtggttttctgatttcaggcttctcggtgggtgccgtcg

SEQ ID NO: 516826 - DNA, 75 bp, synthetic construct
  source 1..75: mol_type = other DNA
atgagtactacaacccagaatatcccgtggtatcgccatctcaaccgtgcacaatggcgggcattttccgctgcc

SEQ ID NO: 516827 - DNA, 75 bp, synthetic construct
  source 1..75: mol_type = other DNA
aactgattggcggttatttcgataccgaccagcgtgcagcgggcctgggctttacctacaacgttggcgcattgg

SEQ ID NO: 516828 - DNA, 75 bp, synthetic construct
  source 1..75: mol_type = other DNA
gtgatttttggtcaggtcctgaccgccggaagcggacaaaacccggcacgacaatcggcgctcaaagccgggtta

SEQ ID NO: 516829 - DNA, 75 bp, synthetic construct
  source 1..75: mol_type = other DNA
taaaagtgtggcgcttgccgcccaggcaattcaggcaggtcaggcgcaaagcattgtggcggggggtatggaaaa

SEQ ID NO: 516830 - DNA, 75 bp, synthetic construct
  source 1..75: mol_type = other DNA
taacaaagccagtggttttctgatttcaggcttctcggtgggtgccgtcgttgccgctcaggtctacagcctggt

SEQ ID NO: 516831 - DNA, 75 bp, synthetic construct
  source 1..75: mol_type = other DNA
agtctgatggggcataagtccatcagctcaacggaggtctacacgaaggtgtttgcactggatgtggctgcacgg

SEQ ID NO: 516832 - DNA, 75 bp, synthetic construct
  source 1..75: mol_type = other DNA
tgggaagtgacggacagaacggtcaggacctggattggggaggcggttgccgccgctgccgctgatggtgtgacg

SEQ ID NO: 516833 - DNA, 75 bp, synthetic construct
  source 1..75: mol_type = other DNA
gaacaaacagactattcaggtgattgttggcgcgaaagcagaatccatcggcgatgcgatgaagaaagtcgttgc

SEQ ID NO: 516834 - DNA, 75 bp, synthetic construct
  source 1..75: mol_type = other DNA
tggccccacccgctataaaagttggtcgctactggatgattgaaccgccccgggtttcctggagagtgttttatc

SEQ ID NO: 516835 - DNA, 75 bp, synthetic construct
  source 1..75: mol_type = other DNA
cgccaccagcggtcgcaccttcgagaccattaacccggccaacggtaacgtgctggcgaccgtgcaggccgccgg

SEQ ID NO: 516836 - DNA, 75 bp, synthetic construct
  source 1..75: mol_type = other DNA
cctggattggggaagcggttgccgccgctgccgctgatggtgtgacgttctctgttccggtcacgccacatacgt

SEQ ID NO: 516837 - DNA, 75 bp, synthetic construct
  source 1..75: mol_type = other DNA
caatgttctggcgtctggagcaaggccctgctgcggcgattggtttaagcctggttatcggtatcgtgatggcgg

SEQ ID NO: 516838 - DNA, 75 bp, synthetic construct
  source 1..75: mol_type = other DNA
caacagatgcactgccgcctattgaacaacaattttatgagacctccagcaagggcaaaattccgttgttacaac

SEQ ID NO: 516839 - DNA, 75 bp, synthetic construct
  source 1..75: mol_type = other DNA
ggtggtcaaccgttcggtatgcagcgtgattcgttgcaacatgcgccgcatattatcgtggcaacgccgggtcgt

SEQ ID NO: 516840 - DNA, 75 bp, synthetic construct
  source 1..75: mol_type = other DNA
acaacaattttatgagacttctgcccagggcaaaattccattattgaaacgactattaagtctgcatcagccatc

SEQ ID NO: 516841 - DNA, 75 bp, synthetic construct
  source 1..75: mol_type = other DNA
attctggagtgcaaaaaagcgtcgccgtcaaaaggcgtgatccgtgatgatttcgatccggcacgcattgctgcc

SEQ ID NO: 516842 - DNA, 75 bp, synthetic construct
  source 1..75: mol_type = other DNA
ggagcggacaacgtttcgactggtcactattaaatggtcaatcgcttggcaacgttctgctggcgggggggctta

SEQ ID NO: 516843 - DNA, 75 bp, synthetic construct
  source 1..75: mol_type = other DNA
cgatgtggtggacaaagctaaggtgttatcgctggcggcagtgcaactgcatggtaatgaagatcagctgtatat

SEQ ID NO: 516844 - DNA, 75 bp, synthetic construct
  source 1..75: mol_type = other DNA
agccagatcccgttgcgtgagacgtcatttgtttatacccgccgcgaaccgctgggcgtggtggcggggattggc

SEQ ID NO: 516845 - DNA, 75 bp, synthetic construct
  source 1..75: mol_type = other DNA
acgtatcaagccaggtttccagcgtcagaagcggcagtgaaacgctggcaaaaggcaccgatgaacttaacgaac

SEQ ID NO: 516846 - DNA, 75 bp, synthetic construct
  source 1..75: mol_type = other DNA
ctggcgaccatgctctggtttgccgccgcaccagtggtgaattatttcctctgtgcgttagtgatgctgtcagga

SEQ ID NO: 516847 - DNA, 75 bp, synthetic construct
  source 1..75: mol_type = other DNA
gcccagattagccattcaacgctggaacaggccgatgggctttccagcctgacccgtgcagtggatgagcttaac

SEQ ID NO: 516848 - DNA, 75 bp, synthetic construct
  source 1..75: mol_type = other DNA
tgaaggtggcgaccggagagcgtaatagtgttgagcatctgaatcgcagcgatgagctggggctgacattacgcg

SEQ ID NO: 516849 - DNA, 75 bp, synthetic construct
  source 1..75: mol_type = other DNA
acgtcacccagttgatcgcccagattagccattcaacgctggaacaggccgatgggctttccagcctgacccgtg

SEQ ID NO: 516850 - DNA, 75 bp, synthetic construct
  source 1..75: mol_type = other DNA
ctgccccggtggtgacgtatatcctctgtgcgttagtggtattgttggcaagcgcctgttttgaatggcagattg

SEQ ID NO: 516851 - DNA, 75 bp, synthetic construct
  source 1..75: mol_type = other DNA
cgacgccggaaaagcatattcagaaacctcaaccgtcgatatcgttaccggcgcagatgtactggagtattacgc

SEQ ID NO: 516852 - DNA, 75 bp, synthetic construct
  source 1..75: mol_type = other DNA
gtgatgacgctccagagttacacccaggtgaagtccatccaggttgagatggctaaattccagtccatattctaa

SEQ ID NO: 516853 - DNA, 75 bp, synthetic construct
  source 1..75: mol_type = other DNA
atggcgaacttcttcagctccggtcaggtgtgtaccaatggcacccgcgtcttcgttccggcgaaatgcaaagcc

SEQ ID NO: 516854 - DNA, 75 bp, synthetic construct
  source 1..75: mol_type = other DNA
agtgatggcgctgatgtttatcgtgctggcggccatgctttggtttgttgctgccccggtggtgacgtatttcct

SEQ ID NO: 516855 - DNA, 75 bp, synthetic construct
  source 1..75: mol_type = other DNA
aggtgtttgcactggatgtggctgcacggcaccgggtgcagtttttgatgcctgagtctgatgctattgcgatgc

SEQ ID NO: 516856 - DNA, 75 bp, synthetic construct
  source 1..75: mol_type = other DNA
gctgggtgtggtggcggggattggcgcatggaactacccgatccagattgccctgtggaaatccgccccggcgct

SEQ ID NO: 516857 - DNA, 75 bp, synthetic construct
  source 1..75: mol_type = other DNA
atcctgcactgatgggcattgccccggtgtatgcaacccgccgttgcctggagcgtgttggctggcaactggccg

SEQ ID NO: 516858 - DNA, 75 bp, synthetic construct
  source 1..75: mol_type = other DNA
tgagcgaagccaaagcacgagcgttgaatttacccgtgctggcccgcattcgcgcatttgccagcgttggtgtag

SEQ ID NO: 516859 - DNA, 75 bp, synthetic construct
  source 1..75: mol_type = other DNA
tcaccgccgaaaatctggcgcgcgaatatggtatcagccgccagttacaagatgcctacgcacttagttcgcagc

SEQ ID NO: 516860 - DNA, 75 bp, synthetic construct
  source 1..75: mol_type = other DNA
ggacgcccgtgaagccataatgctgctggccccgggatccgtcagtgaaatgcaggactatattccggaaaaccg

SEQ ID NO: 516861 - DNA, 75 bp, synthetic construct
  source 1..75: mol_type = other DNA
acgctttgtatcggcgggggccagggcgtggcattgaccattgaacgtgacgaagagctctgcatttcctcctta

SEQ ID NO: 516862 - DNA, 75 bp, synthetic construct
  source 1..75: mol_type = other DNA
cccaacagcgtttcggcaattaccattaatgatgtttgtggttccgggctaaaagctctgcatcttgctactcag

SEQ ID NO: 516863 - DNA, 75 bp, synthetic construct
  source 1..75: mol_type = other DNA
cctgttccgtggccctcagccacacccccaaccggttggctgaaatgtaacggtgcagcattttcttctgaaatg

SEQ ID NO: 516864 - DNA, 75 bp, synthetic construct
  source 1..75: mol_type = other DNA
cctgttccgtggccctcagccacacctccaacgggatggctgaaatgtaacggtgcagcattttcttctgaaatg

SEQ ID NO: 516865 - DNA, 75 bp, synthetic construct
  source 1..75: mol_type = other DNA
cctgttccgtggccctcagccacacctccaacagggtggctgaaatgtaacggtgcagcattttcttctgaaatg

SEQ ID NO: 516866 - DNA, 75 bp, synthetic construct
  source 1..75: mol_type = other DNA
caggcagcgccccggagacgctggatacgcttaaagagctggcggatgccctcggtaacgatccgaattttgcga

SEQ ID NO: 516867 - DNA, 75 bp, synthetic construct
  source 1..75: mol_type = other DNA
gggcctgacggaatttctaaccgtcagggtaaacagctggccagccgcacgctgtacctgaagcagcaggttgaa

SEQ ID NO: 516868 - DNA, 75 bp, synthetic construct
  source 1..75: mol_type = other DNA
cctgttccgtggccctcagccacaccgccaacgggttggctgaaatgtaacggtgcagcattttcttctgaaatg

SEQ ID NO: 516869 - DNA, 75 bp, synthetic construct
  source 1..75: mol_type = other DNA
gcaggtggtgcttcaggatgggcgtttgttcggtagccctatcgacattcttaatcgcgccgcccccgttgcgct

SEQ ID NO: 516870 - DNA, 75 bp, synthetic construct
  source 1..75: mol_type = other DNA
accaccgatgccatgggcaccattcagcgcgttctggagaaggtcaacaatctgccgcaggataaacgcctgtca

SEQ ID NO: 516871 - DNA, 75 bp, synthetic construct
  source 1..75: mol_type = other DNA
gcgcgagaggtggcgcgccagcttgatgagcgtgaccgccggatcagggcgaaggcccggagtaactacagcgat

SEQ ID NO: 516872 - DNA, 75 bp, synthetic construct
  source 1..75: mol_type = other DNA
ccacgcagattattatccaggcgcagccagggcagaatgcgcaggacattgcgcgagaggtggcgcgccagcttg

SEQ ID NO: 516873 - DNA, 75 bp, synthetic construct
  source 1..75: mol_type = other DNA
gggcagttcggcattgtcggtgaaaacgggcctgaaattgttaacggcccggcaaacgtgaccagccggagaaat

SEQ ID NO: 516874 - DNA, 75 bp, synthetic construct
  source 1..75: mol_type = other DNA
cgccagctaaaactgacagcgggcaatgatgcgctcggttccatgcagaaagaatccgacatcaacaaagactca

SEQ ID NO: 516875 - DNA, 75 bp, synthetic construct
  source 1..75: mol_type = other DNA
agcagtaactcgaaccagcagcgcgttgtcctggctggctggcgcgccactggcactgctgcgacgcgggcttgc

SEQ ID NO: 516876 - DNA, 75 bp, synthetic construct
  source 1..75: mol_type = other DNA
ggtgattggcggcggatcgctgatgggcgggcgctttaacctgctactttcggtggtgggggcgctgattattca

SEQ ID NO: 516877 - DNA, 75 bp, synthetic construct
  source 1..75: mol_type = other DNA
gcactattgctggtgctgctggtcgatagcctggtggccccgcatttctggcaggtggtgcttcaggatgggcgt

SEQ ID NO: 516878 - DNA, 75 bp, synthetic construct
  source 1..75: mol_type = other DNA
caatattcgggcggcgaaaaatgccggcgtaaacacgcggatcatcgttatgctcacctacatgttgagcggatt

SEQ ID NO: 516879 - DNA, 75 bp, synthetic construct
  source 1..75: mol_type = other DNA
agtgaacagtgacggcaaagtggtgctgccgccaggcgggttcccggcttacgcagggatgtacgacacgggggg

SEQ ID NO: 516880 - DNA, 75 bp, synthetic construct
  source 1..75: mol_type = other DNA
agtgggaagacggcatctaccagattgaggtctctgaccccgttctgggcgggcctgacggaatttctaaccgtc

SEQ ID NO: 516881 - DNA, 75 bp, synthetic construct
  source 1..75: mol_type = other DNA
acccaggattaaacaaacctaaaacagctacagaaacacgtccacgcaacgttgcttttaattacatcgtaagag

SEQ ID NO: 516882 - DNA, 75 bp, synthetic construct
  source 1..75: mol_type = other DNA
cctgttccgtggccctcagccacaccaccaacaggttggctgaaatgtaacggtgcagcattttcttctgaaatg

SEQ ID NO: 516883 - DNA, 75 bp, synthetic construct
  source 1..75: mol_type = other DNA
agatctgaaaaatggaacaatgatgatcagaagaaatttagcaaaagatcgttttacggtaccgaaaacacaggc

SEQ ID NO: 516884 - DNA, 75 bp, synthetic construct
  source 1..75: mol_type = other DNA
agggaaaatctgggggttcctgacacgacaaaaaacaggcgcgttgcaggtgagctgcgcgcctctgtttgttat

SEQ ID NO: 516885 - DNA, 75 bp, synthetic construct
  source 1..75: mol_type = other DNA
tgctgttctgtgggctgggcatcacttgtatgccccatactcaggcggcagttcccgtggaaggaaaggactata

SEQ ID NO: 516886 - DNA, 75 bp, synthetic construct
  source 1..75: mol_type = other DNA
gcagtaaagacgggaactttcaactatgcatcacagtttccaaactcccctaaccttcagcgatttggtgaggtg

SEQ ID NO: 516887 - DNA, 75 bp, synthetic construct
  source 1..75: mol_type = other DNA
tgagctacgcgcctctgtttgttacgcaataaaaactggtgttttcgactatgcaaaacagtttccctcctcacg

SEQ ID NO: 516888 - DNA, 75 bp, synthetic construct
  source 1..75: mol_type = other DNA
agaaacaaaaatgtacctttgtttttcaacctgaagtgtcagcgaaagtaaaaattatggtgaccattttaccgt

SEQ ID NO: 516889 - DNA, 75 bp, synthetic construct
  source 1..75: mol_type = other DNA
cctggtatatacaggcactgcgtcccgatggttcgccattaacttttggctatgacgtactggatctccaggaaa

SEQ ID NO: 516890 - DNA, 75 bp, synthetic construct
  source 1..75: mol_type = other DNA
ttagatgccaaagcgcagggaaaaatcagcgattcttttaaacgctttgccgatatccatctttcccgccatgct

SEQ ID NO: 516891 - DNA, 75 bp, synthetic construct
  source 1..75: mol_type = other DNA
gatgctgttcggtggcattgtgccgcgtaaagcgagcactcacttacgtgatttgctgactcaatgcgaagcgac

SEQ ID NO: 516892 - DNA, 75 bp, synthetic construct
  source 1..75: mol_type = other DNA
tatgttttcgataacggccagggcggaagcgggcaacgtttcgactggtcactgttaaacggtcaatcgcttggc

SEQ ID NO: 516893 - DNA, 75 bp, synthetic construct
  source 1..75: mol_type = other DNA
tgattggttcggcgttgatggcccatgacgatttgaacgccgccgtgcgccgggtgttgctgggtgagaataaag

SEQ ID NO: 516894 - DNA, 75 bp, synthetic construct
  source 1..75: mol_type = other DNA
tttcgatccggcacgcattgcctcgatttataagcattacgcttcggcaatttcggtgctgactgatgagaaata

SEQ ID NO: 516895 - DNA, 75 bp, synthetic construct
  source 1..75: mol_type = other DNA
gcagtggttcctcgataccacggagggaaccccgtggattcagtccgttctgggtaagcaaaaaccggataccta

SEQ ID NO: 516896 - DNA, 75 bp, synthetic construct
  source 1..75: mol_type = other DNA
gaggaccgttacgtttttcgcgataagagcggtgaaattaatgtcgttattcctgcggccgtcgttcgggtcact

SEQ ID NO: 516897 - DNA, 75 bp, synthetic construct
  source 1..75: mol_type = other DNA
gtgggtggtttttcagcctgatttcatcggtgtcggcggacgtggatggcgggcaggcgagtcctcagtgtcggt

SEQ ID NO: 516898 - DNA, 75 bp, synthetic construct
  source 1..75: mol_type = other DNA
tcgcctgtctgaatgaagtcgcgcagccgggcgttcacgaaacgctggatgagctgacaacacgtctggcagaag

SEQ ID NO: 516899 - DNA, 75 bp, synthetic construct
  source 1..75: mol_type = other DNA
ccaatatcagcccctggcagggatggctttttcttactgtcgcagtaataaccattgctgccggatgtatttcca

SEQ ID NO: 516900 - DNA, 75 bp, synthetic construct
  source 1..75: mol_type = other DNA
gatgaatgatgacgatgctgcggcgaaaaaagacgcagacgttgatcttcaggctgaaaagctctctcataaaga

SEQ ID NO: 516901 - DNA, 75 bp, synthetic construct
  source 1..75: mol_type = other DNA
gatgaatgacgacgatgctgcggcgaagaaaagcgcagatgttgatcttcaggctgaaaagctctctcataaaga

SEQ ID NO: 516902 - DNA, 75 bp, synthetic construct
  source 1..75: mol_type = other DNA
gcgtcaccgccacgcctgccggacatcatgacgaaagcaaagcctggctacattttggcaaatacgatcgctacg

SEQ ID NO: 516903 - DNA, 75 bp, synthetic construct
  source 1..75: mol_type = other DNA
gacatcttctccttcatttcgtttttacggcgaattaggggttggtggatatatggatttagagggtgagaataa

SEQ ID NO: 516904 - DNA, 75 bp, synthetic construct
  source 1..75: mol_type = other DNA
ctcgaaacgcggggcgttaaatccattctctctttcaatacgacagtgaacactacgacgcgccgcgtccagttc

SEQ ID NO: 516905 - DNA, 75 bp, synthetic construct
  source 1..75: mol_type = other DNA
gttggcggcatgttcggtattttctttaccgacgccgagtccgtgacgtgctatcaggatgtgatggcctgtgac

SEQ ID NO: 516906 - DNA, 75 bp, synthetic construct
  source 1..75: mol_type = other DNA
gtacgcaggggaaaactgcgccgtaatgtggtggtgctttcccggcgttcccgcgacggaggaatggagtcaggt

SEQ ID NO: 516907 - DNA, 75 bp, synthetic construct
  source 1..75: mol_type = other DNA
gaccgtgaatatgccaccgcacccgtttgtgcgcccggcgtttgatgtgcgcagtgaacaggcagctcaggtggc

SEQ ID NO: 516908 - DNA, 75 bp, synthetic construct
  source 1..75: mol_type = other DNA
ctgtgcaagaaccttttcttgctatgccgccacaactccctactgtaaccgatctcgcacgaagcggaataagac

SEQ ID NO: 516909 - DNA, 75 bp, synthetic construct
  source 1..75: mol_type = other DNA
ttattgtggttagtcgatgataaaagtggtaaacaatggttaagtcttattgatccaaaaggcatccgcaatctt

SEQ ID NO: 516910 - DNA, 75 bp, synthetic construct
  source 1..75: mol_type = other DNA
ggtaagacaaagatcggaaatagttggtatacccttttgattccagcttcagagcttgagattaagcaatatgca

SEQ ID NO: 516911 - DNA, 75 bp, synthetic construct
  source 1..75: mol_type = other DNA
ttaagtgatgataatgctgtatccacacagcaaaaaaccgcttatgcagcagctaatgtgcttgatatgggcggc

SEQ ID NO: 516912 - DNA, 75 bp, synthetic construct
  source 1..75: mol_type = other DNA
ctggataacatctgctctatcctgaacgatctgctgaatgtgaacaagaacaatacaaaaggcgatccggataat

SEQ ID NO: 516913 - DNA, 75 bp, synthetic construct
  source 1..75: mol_type = other DNA
cctgcgcctagaaatgaaaaaaattcggcttcctcagcagcatttaacaacgcgattgaagcaaagtcagtacga

SEQ ID NO: 516914 - DNA, 75 bp, synthetic construct
  source 1..75: mol_type = other DNA
cctgtcgaagcaacatttagatgaactggaaaactcaggatttacccaataccagttattcgataagagtaaatc

SEQ ID NO: 516915 - DNA, 75 bp, synthetic construct
  source 1..75: mol_type = other DNA
cgcaaggtaaaatatgctaatggaaaatctccagctcaaccagttttgaatgccgttccgacagcaacacaacag

SEQ ID NO: 516916 - DNA, 75 bp, synthetic construct
  source 1..75: mol_type = other DNA
cagcggatctgaatattggtggcagcaacgctaaaaaccgcaattaccggaataataacctcggcaaccttgttt

SEQ ID NO: 516917 - DNA, 75 bp, synthetic construct
  source 1..75: mol_type = other DNA
tagattataaaatcattagtgcgtttgattttgatcggctttatctcgccattcagaattataaactacaacgcg

SEQ ID NO: 516918 - DNA, 75 bp, synthetic construct
  source 1..75: mol_type = other DNA
cgctttgaaggcatccatgaagatggccaaagcttgttcttccatgagctgagtaactatttattcgaggtcgat

SEQ ID NO: 516919 - DNA, 75 bp, synthetic construct
  source 1..75: mol_type = other DNA
tgcgggtaatttttatccggatttcttattgtggttagtcgatgataaaagtggtaaacaatggctaagtcctga

SEQ ID NO: 516920 - DNA, 75 bp, synthetic construct
  source 1..75: mol_type = other DNA
tctgggtggaaacttgcccgcaatatctcctgctggacgaacgcagttacgatacagaagatggaatgaagttca

SEQ ID NO: 516921 - DNA, 75 bp, synthetic construct
  source 1..75: mol_type = other DNA
ccaaaacattcacggcaatggacctaccccatatagcgcatttggtcgttggtggcacgggacgcctgaatgggc

SEQ ID NO: 516922 - DNA, 75 bp, synthetic construct
  source 1..75: mol_type = other DNA
ttccactacaactggcggcgttactacgacccagcgaccgggcggtacattaccagcgaccctcttggcctgatc

SEQ ID NO: 516923 - DNA, 75 bp, synthetic construct
  source 1..75: mol_type = other DNA
ggtgggattaacacctatgcctatgcgctgagcaacccgataggcaatgcagatccaacaggggagtttgtgccg

SEQ ID NO: 516924 - DNA, 75 bp, synthetic construct
  source 1..75: mol_type = other DNA
gtatcccagtggccgtgaggtctcctacacccgtgactcagccggtgacgtcatcgaggtgacaacgacacaagc

SEQ ID NO: 516925 - DNA, 75 bp, synthetic construct
  source 1..75: mol_type = other DNA
cctcacctatgacgccagaggaagacttgtcagctccactgggccagaaggaaccacggtctacaactatgatgc

SEQ ID NO: 516926 - DNA, 75 bp, synthetic construct
  source 1..75: mol_type = other DNA
tgcaccgggtttgctctctgggctggtggacgagaacggcaaccgtttcgccacatggggatatgatactcaggg

SEQ ID NO: 516927 - DNA, 75 bp, synthetic construct
  source 1..75: mol_type = other DNA
ggcatcagcgatggtgcgattgacgtggtggcaaccgatcactgcaccttctcgatggcccagcgccagcaaatt

SEQ ID NO: 516928 - DNA, 75 bp, synthetic construct
  source 1..75: mol_type = other DNA
gcgggcggagtttattgccgcagggttaaccgcgccacgctatcacgccttgagtcgacctctggaatgcgaagc

SEQ ID NO: 516929 - DNA, 75 bp, synthetic construct
  source 1..75: mol_type = other DNA
ctgtcgtgaacgcagatggacaagcaaagcaggatttgttgattgaaagcgggattgttcgccagttgggcacca

SEQ ID NO: 516930 - DNA, 75 bp, synthetic construct
  source 1..75: mol_type = other DNA
tcgtatgcaattgctgttctccagcggcgtaatgaccggacgtatcacaccggaacgttttgttgagttaaccag

SEQ ID NO: 516931 - DNA, 75 bp, synthetic construct
  source 1..75: mol_type = other DNA
tcgtatgcagttgctgttctccagcggcgtaatgaccgggcgtatcacaccggagcgttttgttgaattaaccag

SEQ ID NO: 516932 - DNA, 75 bp, synthetic construct
  source 1..75: mol_type = other DNA
tcttctgctggacgaacgcagttacgatacagaagacggaatgaaatttatccttagcccaccgctgcgcaacgt

SEQ ID NO: 516933 - DNA, 75 bp, synthetic construct
  source 1..75: mol_type = other DNA
atgattccgctaaaaatgaaaaccgccaaccccgaaacgccggaaaagaggctatcagtgacgcctcaaaaacga

SEQ ID NO: 516934 - DNA, 75 bp, synthetic construct
  source 1..75: mol_type = other DNA
tgaagatatgcagatgagtgcagcacgaaatgtggctgtcaacgccgggggggatatcagtaccggaacaatggg

SEQ ID NO: 516935 - DNA, 75 bp, synthetic construct
  source 1..75: mol_type = other DNA
atggataaccggtcagcgttttttgacgggcagacccgttactttctggaaattaatggcagtgcagtaaagcct

SEQ ID NO: 516936 - DNA, 75 bp, synthetic construct
  source 1..75: mol_type = other DNA
gcaggaagttgcggagtctattcttgcggggattaaagcgtattttgccgatggggcgacgctggcgagaagggg

SEQ ID NO: 516937 - DNA, 75 bp, synthetic construct
  source 1..75: mol_type = other DNA
tcctgaggtggtggagcaggtgctgcgcaaacacgggctggagggcgctgattttgaattcaggctggaacgcgc

SEQ ID NO: 516938 - DNA, 75 bp, synthetic construct
  source 1..75: mol_type = other DNA
gtgatatcagtaccggaacaatgggcaacctgaccgcgctggccggagagaggctggggctttttgccaggagcg

SEQ ID NO: 516939 - DNA, 75 bp, synthetic construct
  source 1..75: mol_type = other DNA
tgaagatatgcagctggccgctggccgaaacctggcggttaacgcggggggggatatcagcaccggaacaatggg

SEQ ID NO: 516940 - DNA, 75 bp, synthetic construct
  source 1..75: mol_type = other DNA
agcgtgcgggtgttccccatttccaactggaccgaactggacatctggcagtacatccagctccacgacatcccc

SEQ ID NO: 516941 - DNA, 75 bp, synthetic construct
  source 1..75: mol_type = other DNA
aatgctgctgaccaccacgtccgaacgacaggggcgggccatcgaccacgaccaggccgcctccatggagaagaa

SEQ ID NO: 516942 - DNA, 75 bp, synthetic construct
  source 1..75: mol_type = other DNA
accatcgtggccaccagcgaacaggaagcacgccagcactccccggctggctgcgtgatggtattcgccgcccgt

SEQ ID NO: 516943 - DNA, 75 bp, synthetic construct
  source 1..75: mol_type = other DNA
gcaggaagttgcggagtctattcttgcagggattaaagcgtattttgccgatggagcgacgctggcgagaagggg

SEQ ID NO: 516944 - DNA, 75 bp, synthetic construct
  source 1..75: mol_type = other DNA
gtcagctgaaatataagcagttcgcgttgagtaacccggaacgcgtggtggtggatatcgaagatgtaaacctga

SEQ ID NO: 516945 - DNA, 75 bp, synthetic construct
  source 1..75: mol_type = other DNA
aaaaatcaggttgaacaggccgggtttgccgtgctgaaagcgcctgatattccctccattctggtcgaaacggcg

SEQ ID NO: 516946 - DNA, 75 bp, synthetic construct
  source 1..75: mol_type = other DNA
tgcggcaactggaggcggaaagcatccacattattcgcgaggtggctgcagaattctcaaatccggtgatgctct

SEQ ID NO: 516947 - DNA, 75 bp, synthetic construct
  source 1..75: mol_type = other DNA
tgggaataagttcggcttaagtgatctctggaaaaatcgagcaagcagaagaaataaaatcaatattggcgatca

SEQ ID NO: 516948 - DNA, 75 bp, synthetic construct
  source 1..75: mol_type = other DNA
tgttgtcaaaacatcgcagccgcagccgcgaccacgtgcgagcgcaactattaatgaccagtcgctggatgctct

SEQ ID NO: 516949 - DNA, 75 bp, synthetic construct
  source 1..75: mol_type = other DNA
cgtatcgcaataattgacgctattcaggaagcgagcacaaacgaacttaaagctcttgctgaggtaaaagacgcc

SEQ ID NO: 516950 - DNA, 75 bp, synthetic construct
  source 1..75: mol_type = other DNA
gctaattcagcccctcttgaaccacaatccccccaaagtctaaaaggcccgctgcgggatagtaatggacgtttt

SEQ ID NO: 516951 - DNA, 75 bp, synthetic construct
  source 1..75: mol_type = other DNA
tacaactatcatggtaaacatgagtttgtgaccctggaaggaatggaaaaagcggtgcaggtgatcgtgcgtatt

SEQ ID NO: 516952 - DNA, 75 bp, synthetic construct
  source 1..75: mol_type = other DNA
ggcgggcttttcgtctgcagcgccagcaccgaaaaccccacagcaggagcaggctctggcaatcagccaggctat

SEQ ID NO: 516953 - DNA, 75 bp, synthetic construct
  source 1..75: mol_type = other DNA
ggtgcggtgacctctgccacttcagtggcagggcgtgacagcatgatggtgatgcagagtgccctgctgacggga

SEQ ID NO: 516954 - DNA, 75 bp, synthetic construct
  source 1..75: mol_type = other DNA
cgaatgcaggggaaacggcaccagaatccacgggaaaatccagccctgttacgtctgcggctggattatgaatga

SEQ ID NO: 516955 - DNA, 75 bp, synthetic construct
  source 1..75: mol_type = other DNA
atgaacaggacaacaacagggctctgtctggctgcattgctggtgagctgcagcatgaacagtgtgctgcgggca

SEQ ID NO: 516956 - DNA, 75 bp, synthetic construct
  source 1..75: mol_type = other DNA
actttcaggtttcagtttcagtcgcttcttcgataagaaccgaaccaacacgtttaaaggcaccatcgagataat

SEQ ID NO: 516957 - DNA, 75 bp, synthetic construct
  source 1..75: mol_type = other DNA
aacgccgcaacaaaaactaagtcgtgaatgggttcaggcagcggggctacccttaactaaggtgatgcagataag

SEQ ID NO: 516958 - DNA, 75 bp, synthetic construct
  source 1..75: mol_type = other DNA
cgtaccgggatgctgacagtcagtggtgcgctgctgtcatccccgtgcacgctggagacgaatgaggtggagctg

SEQ ID NO: 516959 - DNA, 75 bp, synthetic construct
  source 1..75: mol_type = other DNA
ataaagatagcacaattgctaaaaacgacactgttttccctgttaacaatttctttgtcgttttaactcttgtgt

SEQ ID NO: 516960 - DNA, 75 bp, synthetic construct
  source 1..75: mol_type = other DNA
tgggcatatctggccggttttcttcggttttaaaggtggaaaaggcgttgccaccgcttttggtgcaatcgcccc

SEQ ID NO: 516961 - DNA, 75 bp, synthetic construct
  source 1..75: mol_type = other DNA
tccattgattatcgttcaagtggcgtaatttttaacgttcagccgcaaatccgggctgctacgattgaccttaat

SEQ ID NO: 516962 - DNA, 75 bp, synthetic construct
  source 1..75: mol_type = other DNA
cgctgggatcgctatcgttcagtctgacgttcgtggtgatcttgctgattggtctggatatgccatcccgcgttc

SEQ ID NO: 516963 - DNA, 75 bp, synthetic construct
  source 1..75: mol_type = other DNA
aatattgaaaagcaatgggtaaaatgggttcttaataatgattataataaaagtacgttacaacaactaaagtca

SEQ ID NO: 516964 - DNA, 75 bp, synthetic construct
  source 1..75: mol_type = other DNA
ttctttgtcgttttaactcttgtgtcttccctggctaactctttcggaatatttttttccacgatatctcattct

SEQ ID NO: 516965 - DNA, 75 bp, synthetic construct
  source 1..75: mol_type = other DNA
ccggatgaggacgatatgctgatgcggaaagcggcaggtctttctggtggtgtccgctttggggctgacgggaag

SEQ ID NO: 516966 - DNA, 75 bp, synthetic construct
  source 1..75: mol_type = other DNA
gcttgcccgagccaatccagttacttaatgccgaaaagatattgagtcagctggatgacggcagtgtagccgtgc

SEQ ID NO: 516967 - DNA, 75 bp, synthetic construct
  source 1..75: mol_type = other DNA
atgaaaaaagatattaaagaaatggaacggatgattgatatcattaatgcatgttctatggacataacttcatat

SEQ ID NO: 516968 - DNA, 75 bp, synthetic construct
  source 1..75: mol_type = other DNA
aattattttatatcataatagtggtatttatgattccacctgcattatcaaaaggcgttatactgaatctctcag

SEQ ID NO: 516969 - DNA, 75 bp, synthetic construct
  source 1..75: mol_type = other DNA
caggggcttctaataatttcaataggttaggtgattctcttgtttattatggcacacaaaaagatattgacatta

SEQ ID NO: 516970 - DNA, 75 bp, synthetic construct
  source 1..75: mol_type = other DNA
atggtgagcttgttactttttattcaggtggtgacaaatgaaacgtttaatatatatgtgcttgatgtttttagt

SEQ ID NO: 516971 - DNA, 75 bp, synthetic construct
  source 1..75: mol_type = other DNA
gattattccggtatttgcgattggcggcgcaaacgtctgggtgctcggtctgttactgttcttccagcaaatgct

SEQ ID NO: 516972 - DNA, 75 bp, synthetic construct
  source 1..75: mol_type = other DNA
ttcaccatgcgcattggcacctcgattatctctgccgccagcctgtcatttctcggcctcggtgcgcagccgccg

SEQ ID NO: 516973 - DNA, 75 bp, synthetic construct
  source 1..75: mol_type = other DNA
gattgggacgttgctgggtttgctggctggatattacgaaggctggtgggatcggctgatcatgcgtatttgcga

SEQ ID NO: 516974 - DNA, 75 bp, synthetic construct
  source 1..75: mol_type = other DNA
gtgatcgtgaagctcaatgactggccgtcaaaccgtgtgcatgaactgctgccctggaactgctcaactgtaaaa

SEQ ID NO: 516975 - DNA, 75 bp, synthetic construct
  source 1..75: mol_type = other DNA
agcggcaaaacggcggcgtttggcctggggttattacagcatgttgatgtcacattgtttcagactcaggcctta

SEQ ID NO: 516976 - DNA, 75 bp, synthetic construct
  source 1..75: mol_type = other DNA
gatcctttagcgattgagattgatacgtcagatgctttaccgcctattgaacaacaattttatgagacatccagc

SEQ ID NO: 516977 - DNA, 75 bp, synthetic construct
  source 1..75: mol_type = other DNA
accagagcgccgccgcaaaagcggttctcgacagaacattgccccatggctacatcattgcgcagcaggacaata

SEQ ID NO: 516978 - DNA, 75 bp, synthetic construct
  source 1..75: mol_type = other DNA
aacagccgaaagacaaaatgacagaagtcattatctttgcaggtagtgatgcctgggcatatgcgaaagagtgga

SEQ ID NO: 516979 - DNA, 75 bp, synthetic construct
  source 1..75: mol_type = other DNA
ggcgaggtgattggtgtgcctgaccgtcccgtagcattctgcggcggatctgccgccatcaaaggctatattgtc

SEQ ID NO: 516980 - DNA, 75 bp, synthetic construct
  source 1..75: mol_type = other DNA
gaacgtcagggtcgcgtgattgaccgcgaccaggcgggatccatggagctgaaaaaacgtcaggggtatttttaa

SEQ ID NO: 516981 - DNA, 75 bp, synthetic construct
  source 1..75: mol_type = other DNA
gtgctgcaggctgatgcctatgcaggttataacgtactgtacgaaacgggccgggtgaaggaagccgggtgcctg

SEQ ID NO: 516982 - DNA, 75 bp, synthetic construct
  source 1..75: mol_type = other DNA
ccgaaaatcagtacgcatattcagggccggacatcttgagccagtaatgatcaaggcgattggtcagaagctggc

SEQ ID NO: 516983 - DNA, 75 bp, synthetic construct
  source 1..75: mol_type = other DNA
caatttttattctcttttaaaatatattccacgggcgtcattagtgcgagcgccttgtggggtcttttgctgtta

SEQ ID NO: 516984 - DNA, 75 bp, synthetic construct
  source 1..75: mol_type = other DNA
agaaaccaaggcaacgtgattttgcttcagaggcattaaatgctttttcatccttagatatcaaggaagataatt

SEQ ID NO: 516985 - DNA, 75 bp, synthetic construct
  source 1..75: mol_type = other DNA
gctcgcgagcatggcctgacggtgaataaaatcagcctgaaacccggctctggcatcacgctgccgctgtttgcc

SEQ ID NO: 516986 - DNA, 75 bp, synthetic construct
  source 1..75: mol_type = other DNA
actgtttggccgcgagagcggcaccgggcatccgggcgtcagctattttaaccggggcggcggggtgctgtgctg

SEQ ID NO: 516987 - DNA, 75 bp, synthetic construct
  source 1..75: mol_type = other DNA
aagtaaagacggaggtgcctgcacaggcagtggcatcagcagcgtgtgtgcatgaaaccggtgccggtgacgccg

SEQ ID NO: 516988 - DNA, 75 bp, synthetic construct
  source 1..75: mol_type = other DNA
agcgtctggcactgaatgcggatgacctgcccgagacggacagcgaatctgaggatgatgagcagcgtgacattc

SEQ ID NO: 516989 - DNA, 75 bp, synthetic construct
  source 1..75: mol_type = other DNA
ggcacctgaccggggagcagaagcgcggtgacaaaaatatcaatgcgctgatggacctgtttccggaagggacga

SEQ ID NO: 516990 - DNA, 75 bp, synthetic construct
  source 1..75: mol_type = other DNA
gcagtctgggcagtgccggcgtgcagtgtgtccgccaggacgggaggcaggtgcatcagtggctgctgcgtcatt

SEQ ID NO: 516991 - DNA, 75 bp, synthetic construct
  source 1..75: mol_type = other DNA
tggcgaagcagattgaggcgctgttccgtgcggtgccgccaagtctctatctggcgctgggcatgacggagaagg

SEQ ID NO: 516992 - DNA, 75 bp, synthetic construct
  source 1..75: mol_type = other DNA
gtgtctgacgatgccaccggaggaagtgaacaacattgcacgctttaaatcactgacggaggagcagaaagcggt

SEQ ID NO: 516993 - DNA, 75 bp, synthetic construct
  source 1..75: mol_type = other DNA
ccggcaccgtcctggattagccgggaggatttgtaccggatggcctcaagagccgatccccgtgagaacgatgcg

SEQ ID NO: 516994 - DNA, 75 bp, synthetic construct
  source 1..75: mol_type = other DNA
cgtctttttattgctgaggctggtaactcgttcgggctgctggccgattattttgagagcctcgggctgagcgtc

SEQ ID NO: 516995 - DNA, 75 bp, synthetic construct
  source 1..75: mol_type = other DNA
atggcattcacactgtttaaatgtcgcaatgtcaccacgccatcagaaacggagacggcaggacagggttttgta

SEQ ID NO: 516996 - DNA, 75 bp, synthetic construct
  source 1..75: mol_type = other DNA
gtcaaaccggggagcggtgtgacactgccaccctttgcggatgcgcataagctggttgaagaagggcagaccctg

SEQ ID NO: 516997 - DNA, 75 bp, synthetic construct
  source 1..75: mol_type = other DNA
gtggtgggtgtgtctgacgatgccacagaaggaagtggaggcgattgcccgctttaagacgctcagtgaggagca

SEQ ID NO: 516998 - DNA, 75 bp, synthetic construct
  source 1..75: mol_type = other DNA
gattccgttgctgaacaactgaagtcagcaacaacagcagaagaacttcgcgcattgctgatgggcgaaaagcag

SEQ ID NO: 516999 - DNA, 75 bp, synthetic construct
  source 1..75: mol_type = other DNA
tccatccgggcgaaaaggccggagacaaagaagaggcgattcgccaggtcgctgcggcgctggtgcaggccggta

SEQ ID NO: 517000 - DNA, 75 bp, synthetic construct
  source 1..75: mol_type = other DNA
atgaaaatgcagcgcacctttaatcgctccggcattcgtccgctacatcaaaattgctccttcgagaactatcgc

SEQ ID NO: 517001 - DNA, 75 bp, synthetic construct
  source 1..75: mol_type = other DNA
accgctgttcagcaccgatttttatcgcgaaaaatggctggtggcggtcgatgacagccgaattgaaatcgctct

SEQ ID NO: 517002 - DNA, 75 bp, synthetic construct
  source 1..75: mol_type = other DNA
tcaggcgctgaacgctgcgcgtctgaaagaggcgggggcagttgacgccactttcgtcaccaaagccatcaatga

SEQ ID NO: 517003 - DNA, 75 bp, synthetic construct
  source 1..75: mol_type = other DNA
tggtgagtgtggcgatgaatgacgatcagcccatcgcggttctaagcgtctcgctgatttattgctcgacaataa

SEQ ID NO: 517004 - DNA, 75 bp, synthetic construct
  source 1..75: mol_type = other DNA
ggaaagcggcaggactttctggtggtgtccgctttggggctgacgggaaggaaatcgttacggtcagtgatgaca

SEQ ID NO: 517005 - DNA, 75 bp, synthetic construct
  source 1..75: mol_type = other DNA
tggcgaagcggatcgaagcgctgtttcgtgctgtgccgcccagtctcttcctggctctgggcatgacggaaaaag

SEQ ID NO: 517006 - DNA, 75 bp, synthetic construct
  source 1..75: mol_type = other DNA
cgccacggatgcagtgaactggacgccgcattccgggtggcggatgagcttgaccggaaacgggggttaccgccc

SEQ ID NO: 517007 - DNA, 75 bp, synthetic construct
  source 1..75: mol_type = other DNA
cgttaagcaaagcgcgccagtatgtcgaagagtttgacggcaacatcgccagctttatcttttctggtaagccag

SEQ ID NO: 517008 - DNA, 75 bp, synthetic construct
  source 1..75: mol_type = other DNA
gatcgacgagatcggtgtacagaccgaatcgaaatacgaaaaagtgatcatcaaccagatcgtcgatcgtcgttc

SEQ ID NO: 517009 - DNA, 75 bp, synthetic construct
  source 1..75: mol_type = other DNA
caagcagtgaaatgcacaataatttaacaattgattattatttagcactttcctctaccaaaggcagtggaatta

SEQ ID NO: 517010 - DNA, 75 bp, synthetic construct
  source 1..75: mol_type = other DNA
cgaaacaggaggcgcggctgaagcgactgggggaagctcagcgcaggatgaatgcagcgcgtgccagttatgccc

SEQ ID NO: 517011 - DNA, 75 bp, synthetic construct
  source 1..75: mol_type = other DNA
tgcaggcgttgtggggttggtttactgatctgctgacgcctgttaagtcgacctctgctgaactgcagagcgcag

SEQ ID NO: 517012 - DNA, 75 bp, synthetic construct
  source 1..75: mol_type = other DNA
cgcagaataccttcagcagcctgggcgaaacgctgcaccagccgctgatggatattctgtacacggtgaaaagcg

SEQ ID NO: 517013 - DNA, 75 bp, synthetic construct
  source 1..75: mol_type = other DNA
gcaaaccctgacgacagctgggaagaccagaaacgtgacctgctggccttcgccagcacggcagcaaaggcggca

SEQ ID NO: 517014 - DNA, 75 bp, synthetic construct
  source 1..75: mol_type = other DNA
gatggtgcgtgaattgtccattgccaccatgcaaagcaagagtttttttgaagggatgaatctgctgaaactcaa

SEQ ID NO: 517015 - DNA, 75 bp, synthetic construct
  source 1..75: mol_type = other DNA
gaggcaccgacgcagatcatcatccagacgcagccaggacaaagtgctcaggatattgcgcgggaggtggcacgc

SEQ ID NO: 517016 - DNA, 75 bp, synthetic construct
  source 1..75: mol_type = other DNA
ggcaaacaacctgccggaactacagcgccagctaaaactgactgcgggcaatgatgcgctcggttccatgcagaa

SEQ ID NO: 517017 - DNA, 75 bp, synthetic construct
  source 1..75: mol_type = other DNA
cttcgccagcacggcagcaaaggcggcaacagcctttgagttgcctgcggatgaactgtcagaaagtctggggaa

SEQ ID NO: 517018 - DNA, 75 bp, synthetic construct
  source 1..75: mol_type = other DNA
cgcaccacttgcactgctgcgacgcgggcttgcttcaacgggcagcgcagcgggtttacttactgcgccgttgtc

SEQ ID NO: 517019 - DNA, 75 bp, synthetic construct
  source 1..75: mol_type = other DNA
tggcagcactacgcggcgggctggctgccgcaggcacggtgctgcgagtactggcatccggtccgctggcgatgt

SEQ ID NO: 517020 - DNA, 75 bp, synthetic construct
  source 1..75: mol_type = other DNA
tttctcggtggcgtggttgaaggattcaaagcggcggcagctcccatcagtgctgcattcgaaccacttaagcct

SEQ ID NO: 517021 - DNA, 75 bp, synthetic construct
  source 1..75: mol_type = other DNA
aatcgcccagctctacaaaatccccacccgcaatattgaacagctcggcgatgcgctgaactatctggatgataa

SEQ ID NO: 517022 - DNA, 75 bp, synthetic construct
  source 1..75: mol_type = other DNA
cgccatgtcgaaaggtgcagacatcattgatgtcatgcaacgcctgggcggtgtggctgatcgtctggattatcg

SEQ ID NO: 517023 - DNA, 75 bp, synthetic construct
  source 1..75: mol_type = other DNA
agaatccgacattaacaaggactcactttctgcgcagtggttgctgatcaaaaccggagcgcagaacaccttcag

SEQ ID NO: 517024 - DNA, 75 bp, synthetic construct
  source 1..75: mol_type = other DNA
cctctggcgttggtctctatatggctggcgccgatggtgagggcggggcagaggtttattccgcagcgacaacgc

SEQ ID NO: 517025 - DNA, 75 bp, synthetic construct
  source 1..75: mol_type = other DNA
gacgtccggtgatggtgcgccggttccggacggcgtacaacgaagtcgcccgtaaaaacgcaaaatcaactctgt

SEQ ID NO: 517026 - DNA, 75 bp, synthetic construct
  source 1..75: mol_type = other DNA
ttggcttcgatccgtggagtgcgacgcagttcagccttgcgctggcagaagaaggattgccgctggtggaagtgc

SEQ ID NO: 517027 - DNA, 75 bp, synthetic construct
  source 1..75: mol_type = other DNA
tggcagggcagtgcctgggcagtacgggaaggcgacagtctgggaaacatcaccatcacccggattgacccgtcc

SEQ ID NO: 517028 - DNA, 75 bp, synthetic construct
  source 1..75: mol_type = other DNA
aactttgaagcacgagacaatgaaatctacgttgacccaaatctcactgataaggtgttaatcggagaagatggc

SEQ ID NO: 517029 - DNA, 75 bp, synthetic construct
  source 1..75: mol_type = other DNA
gctggtgaacgaagagacgggggaaaccgtcctgcgtaacgacggcagcggtcggccggtgatggttcggcgttt

SEQ ID NO: 517030 - DNA, 75 bp, synthetic construct
  source 1..75: mol_type = other DNA
cggctgttgtggctgcggttaccgtcggcctcggcaccttagcggtggcgctagctgcagtgctggggccgctgg

SEQ ID NO: 517031 - DNA, 75 bp, synthetic construct
  source 1..75: mol_type = other DNA
ctggctgcagtgctggggccgttggcagtgatccgtctgggattctctgtgctgggtatcaaaacgttatcttcc

SEQ ID NO: 517032 - DNA, 75 bp, synthetic construct
  source 1..75: mol_type = other DNA
cgcggctgaagcgactgggggaagctcagcgcaggatgaatgcagcgcgtgtcagttatgcccgttcgctggagg

SEQ ID NO: 517033 - DNA, 75 bp, synthetic construct
  source 1..75: mol_type = other DNA
gttaaagacgatacgttttttgccatcatctacaccttagatgaaggtgacgatccctttgatgaaaaagtctgg

SEQ ID NO: 517034 - DNA, 75 bp, synthetic construct
  source 1..75: mol_type = other DNA
cgggcacactgatgaaagtagccgctgttgtggctgctgttaccgtgggcctcggcaccctagctgtggtgttgg

SEQ ID NO: 517035 - DNA, 75 bp, synthetic construct
  source 1..75: mol_type = other DNA
ctggcatccggttcgctggcgatgctgcgcgttgccctgtatgccgtatcaggtctgttaggtgctctgctcagt

SEQ ID NO: 517036 - DNA, 75 bp, synthetic construct
  source 1..75: mol_type = other DNA
agaatccgacattaacaaggattcactttctgcgcagtggttgctggccaaaaccggagcgcagaacaccttcag

SEQ ID NO: 517037 - DNA, 75 bp, synthetic construct
  source 1..75: mol_type = other DNA
tgcagcattcgaaccacttaagcctgtatttcagtggattggcgataaagtacaggcgctgtggggctggtttac

SEQ ID NO: 517038 - DNA, 75 bp, synthetic construct
  source 1..75: mol_type = other DNA
gacgcgggcttgcttcatcgggcaacgcagcgggtttacttactgctccgttgtcgtctttgcgtcgcacggcat

SEQ ID NO: 517039 - DNA, 75 bp, synthetic construct
  source 1..75: mol_type = other DNA
gccatcgttgatgcgtatggcgacaaggcgttgattggcgcaggtacggtactgaaacctgaacaggtcgatgtg

SEQ ID NO: 517040 - DNA, 75 bp, synthetic construct
  source 1..75: mol_type = other DNA
ggggatatggctttgcggggatgtatgacagcggcggctatatcccgcgcgggcagttcggcattgtcggtgaaa

SEQ ID NO: 517041 - DNA, 75 bp, synthetic construct
  source 1..75: mol_type = other DNA
gcggcgaagcgatggtgagtcgtgcagccactgtgccgcccgttcaacggattgaggcaccgatgcagatcatca

SEQ ID NO: 517042 - DNA, 75 bp, synthetic construct
  source 1..75: mol_type = other DNA
cttaaagaatcagggattgataccagacaactcagtagtgcccagcgagaacttaagaaaaatgctgaagaaaca

SEQ ID NO: 517043 - DNA, 75 bp, synthetic construct
  source 1..75: mol_type = other DNA
ctgtataacgcggtagtgaccgcagctgataaagcctccgccaaccgtggcgtgctggtagtgatgaatgacacc

SEQ ID NO: 517044 - DNA, 75 bp, synthetic construct
  source 1..75: mol_type = other DNA
atgattcacctgttcaaaacctgcattattaccggcgtcattctggggttaacgtggtctgccccactccgggca

SEQ ID NO: 517045 - DNA, 75 bp, synthetic construct
  source 1..75: mol_type = other DNA
cagacgctggtgaacagaaaaatggaaacggaagcctttggtgacagtgatgccacgcgaaccacaaactcgttt

SEQ ID NO: 517046 - DNA, 75 bp, synthetic construct
  source 1..75: mol_type = other DNA
ttattttttacgctctcgccacaccggtattaacgctgagatcaacacagccggagaaaaacattcccctgttat

SEQ ID NO: 517047 - DNA, 75 bp, synthetic construct
  source 1..75: mol_type = other DNA
gactccatccggcgaatggaagacttctgccattattttatcggtggttgccgttatcctgctgacattcgccag

SEQ ID NO: 517048 - DNA, 75 bp, synthetic construct
  source 1..75: mol_type = other DNA
ctggaaacggagtgcgtggaaaatgtcgccacaaccgaaatcatcaaagcaactgaagaaagtaacggccatcgt

SEQ ID NO: 517049 - DNA, 75 bp, synthetic construct
  source 1..75: mol_type = other DNA
acgaaggatgcgatgggaactatccagcgcgtgctggagaaagtgaatgcgctgccgcaggataagcgactgtct

SEQ ID NO: 517050 - DNA, 75 bp, synthetic construct
  source 1..75: mol_type = other DNA
gttgctgtgatgtttatgaatcctctgtcggtactgcgcggtggactggtcgccgcaggcacggtgctgcgagta

SEQ ID NO: 517051 - DNA, 75 bp, synthetic construct
  source 1..75: mol_type = other DNA
aacgcgatggtgcgtgaattgtccattgcgaccatgcaaagcaagagtttctttgaaggaatgaatctgctgaaa

SEQ ID NO: 517052 - DNA, 75 bp, synthetic construct
  source 1..75: mol_type = other DNA
ggtgaatgcagacggtaaagtaatgatgccatcgggtgattttccgtcatggggatatggctttgcggggatgta

SEQ ID NO: 517053 - DNA, 75 bp, synthetic construct
  source 1..75: mol_type = other DNA
acggtgcggtggatttcgctgcactggttgaaggtggggcgcgcatgaatgtcgcaaaccctgacgacagctggg

SEQ ID NO: 517054 - DNA, 75 bp, synthetic construct
  source 1..75: mol_type = other DNA
ccgataggtcttgtggttactgcactggcgggtgtggcgctggttgtctggaaatactggcaacccatcaccgca

SEQ ID NO: 517055 - DNA, 75 bp, synthetic construct
  source 1..75: mol_type = other DNA
gccagcagagcttccaccgttgcatcctttggcgcttcccgcgaaaggcggtgaagcaattgtgagtcgcgcagc

SEQ ID NO: 517056 - DNA, 75 bp, synthetic construct
  source 1..75: mol_type = other DNA
ccccggcgaagcggtccgcctgcttggtacgaaaattcgcgggctggcaagtgctgcctttgcaccgttggttac

SEQ ID NO: 517057 - DNA, 75 bp, synthetic construct
  source 1..75: mol_type = other DNA
tgcaggcgctgtggggctggtttactgacctgctgacgcctgttaagtcgacctctgccgaactacagagcgcag

SEQ ID NO: 517058 - DNA, 75 bp, synthetic construct
  source 1..75: mol_type = other DNA
ctgctgtcaaaaaatcccgcgatgcaataaagcagcttgatcaggccgggagcagtctggacagcttccgaaagc

SEQ ID NO: 517059 - DNA, 75 bp, synthetic construct
  source 1..75: mol_type = other DNA
tggtctgttaggtgctctgctcagtccaataggtcttgtggttactgcactggcaggcgtggcgctggttgtctg

SEQ ID NO: 517060 - DNA, 75 bp, synthetic construct
  source 1..75: mol_type = other DNA
gattcaaagcggcggcaggtcccgtcagtgcagcattcgaaccgcttaagcccgtgttccagtggattggcgaca

SEQ ID NO: 517061 - DNA, 75 bp, synthetic construct
  source 1..75: mol_type = other DNA
cagtgatccgtctgggattctctgtgctgggtatcaaaacgttatcttccgttacggcagcagtaactcgaacca

SEQ ID NO: 517062 - DNA, 75 bp, synthetic construct
  source 1..75: mol_type = other DNA
ggtattcaacaagcacaaataacttagttttttataaaccaacccaactcggaccaacaggtgtgtcattatact

SEQ ID NO: 517063 - DNA, 75 bp, synthetic construct
  source 1..75: mol_type = other DNA
ggtatgcaacaagcacaaataacttagttttttataaacctacccaactcggaccaacaggtgtgtcattatact

SEQ ID NO: 517064 - DNA, 75 bp, synthetic construct
  source 1..75: mol_type = other DNA
gttaaagcaagacgggaatattgctatcgaaccaggagaatttaaagccaccagtactttccaggtaacctatcc

SEQ ID NO: 517065 - DNA, 75 bp, synthetic construct
  source 1..75: mol_type = other DNA
acgcaaaaatccgcaccctcaagccttctgataaaccctttaaagtctccgattctcacggtctgtatctgcggg

SEQ ID NO: 517066 - DNA, 75 bp, synthetic construct
  source 1..75: mol_type = other DNA
accgtgcgcatagcttatattcataaggcagagcacctggaagcccgcaaaacgatgatgcagtggtggtcggat

SEQ ID NO: 517067 - DNA, 75 bp, synthetic construct
  source 1..75: mol_type = other DNA
atatcggcgattctccaactcaatattttcggtggatccccgaaagtgaagccactctatattggtcttgtaaca

SEQ ID NO: 517068 - DNA, 75 bp, synthetic construct
  source 1..75: mol_type = other DNA
ctggtgttttatcgcccgaaatcgttgggtcctactggggtacaattatactgggagggtcaggatacagcttct

SEQ ID NO: 517069 - DNA, 75 bp, synthetic construct
  source 1..75: mol_type = other DNA
tttttagtattctttttttgtttagttctgtttgttacgcaaaaattgattttattgtgggtgccggcgcgactc

SEQ ID NO: 517070 - DNA, 75 bp, synthetic construct
  source 1..75: mol_type = other DNA
actccggactctcttatggcggacataaattattcaaaacatctgttaccggactttattacacattaaaaattt

SEQ ID NO: 517071 - DNA, 75 bp, synthetic construct
  source 1..75: mol_type = other DNA
gtcagtcaaattaaaaatggcgcaacgcctgtgccctttcagataacattgcaaaactgtattcgagtacaaaat

SEQ ID NO: 517072 - DNA, 75 bp, synthetic construct
  source 1..75: mol_type = other DNA
caggcgacattgaagcaagacgggaatagtacgattaaagcaggcgatttcgaagccaccggcagattccagatt

SEQ ID NO: 517073 - DNA, 75 bp, synthetic construct
  source 1..75: mol_type = other DNA
taccgttgaattttatacagatgccacgtttgcgcctacagcaacccaaaatatcacattactgagcacaagtga

SEQ ID NO: 517074 - DNA, 75 bp, synthetic construct
  source 1..75: mol_type = other DNA
gccaatgtgtgaaaacacggtcaataaggcactgcgggtgatgggttacgacacgaaggtgatgctgccaactta

SEQ ID NO: 517075 - DNA, 75 bp, synthetic construct
  source 1..75: mol_type = other DNA
ctcgccaggatgggctgtcagctcatcgttacgcccaatatccatagtgaagtgatccgccgtgcggtgggctac

SEQ ID NO: 517076 - DNA, 75 bp, synthetic construct
  source 1..75: mol_type = other DNA
gtacttgaatttcaggcaacattgcaacaagacggaaacgaagctatcaagggaggcgctttcgaggccaccagc

SEQ ID NO: 517077 - DNA, 75 bp, synthetic construct
  source 1..75: mol_type = other DNA
atggagtttttcaaaaagacggcacttgccgcactggttatgggttttagtggtgcagcattagcattaccgaat

SEQ ID NO: 517078 - DNA, 75 bp, synthetic construct
  source 1..75: mol_type = other DNA
acagatatctggaatatggcctgataagtatactgagcggacaccgggtcacgacaggccgtgagctgtttggtg

SEQ ID NO: 517079 - DNA, 75 bp, synthetic construct
  source 1..75: mol_type = other DNA
gtaaatatgcggccattggtggcataatgcaaagccttaccatcgaattttataccgatggcacatttgatccag

SEQ ID NO: 517080 - DNA, 75 bp, synthetic construct
  source 1..75: mol_type = other DNA
agcgggttggattaaagaccacttcaaattatttatatagttttaaatcctataacgctggtcgaaatattagca

SEQ ID NO: 517081 - DNA, 75 bp, synthetic construct
  source 1..75: mol_type = other DNA
acggtaccgacacgatggaagaaacagcttacttccttgacctgacggtgaaatgtgacaaaccggtggtgatgg

SEQ ID NO: 517082 - DNA, 75 bp, synthetic construct
  source 1..75: mol_type = other DNA
actgatatcaacccatcaggcatgtatattggcgattctacgagccaatcttttaactggcgtggcgaaagcgag

SEQ ID NO: 517083 - DNA, 75 bp, synthetic construct
  source 1..75: mol_type = other DNA
actgccgccaaaggcgttggcgtactcattgaaggtttagcaaccagtaaaaatccgctaatgacattaaaacct

SEQ ID NO: 517084 - DNA, 75 bp, synthetic construct
  source 1..75: mol_type = other DNA
acggtaccgacacgatggaagaaacggcttacttcctcgacctgacggtgaaatgagacaaaccggtggtgatgg

SEQ ID NO: 517085 - DNA, 75 bp, synthetic construct
  source 1..75: mol_type = other DNA
acggtaccgacacgatggaagaaaccgcttacttcctggacctgacggtgaaatgagacaaaccggtggtgatgg

SEQ ID NO: 517086 - DNA, 75 bp, synthetic construct
  source 1..75: mol_type = other DNA
acggtaccgacacgatggaagaaactgcttacttcctagacctgacggtgaaatgtgacaaaccggtggtgatgg

SEQ ID NO: 517087 - DNA, 75 bp, synthetic construct
  source 1..75: mol_type = other DNA
ggaccgctatcgatgacgttgggtatccacggttttgtcccgatggggcgagccttaacgcgttctggtgcgaaa

SEQ ID NO: 517088 - DNA, 75 bp, synthetic construct
  source 1..75: mol_type = other DNA
tatggggcccatgacttgatatttattggtgatcacgattcgcacaaacccatgagtgagaatacggtaaatagt

SEQ ID NO: 517089 - DNA, 75 bp, synthetic construct
  source 1..75: mol_type = other DNA
gatgcagtggtggtcggattatctggatacttgccgcaaaacctatataccgccctatattctggggagagagaa

SEQ ID NO: 517090 - DNA, 75 bp, synthetic construct
  source 1..75: mol_type = other DNA
cgggcggcatatgtgcataaagcagagcatctggaggccagaaaggccatgatgcagtggtggtcggattatctg

SEQ ID NO: 517091 - DNA, 75 bp, synthetic construct
  source 1..75: mol_type = other DNA
ctgacctgcgatgaacttctggccatcactgaccacacagaagatgcgcgtctgctggatggaatgctcgcgcag

SEQ ID NO: 517092 - DNA, 75 bp, synthetic construct
  source 1..75: mol_type = other DNA
cttttgacatcaccggcaaaggtattgctaacccgatagcaaccttctggactgcggtacagatgcttgaacatc

SEQ ID NO: 517093 - DNA, 75 bp, synthetic construct
  source 1..75: mol_type = other DNA
cgcatggcttatattcataaggcagagcacctagaagcccgcaaagcgatgatgcagtggtggtcggattatctg

SEQ ID NO: 517094 - DNA, 75 bp, synthetic construct
  source 1..75: mol_type = other DNA
gtgaatttttttaccaaacacatgaatgtgtgggtcactgccgagtctgcctggatggatatgattaagtgggag

SEQ ID NO: 517095 - DNA, 75 bp, synthetic construct
  source 1..75: mol_type = other DNA
gaaacacatgaatgtgtgggtcactgccgaatctgcctggatggacatgattaagtgggagaagtgcgaatacat

SEQ ID NO: 517096 - DNA, 75 bp, synthetic construct
  source 1..75: mol_type = other DNA
tgcagggcatgaaaatcatgtcggtggagaaaggcatggcctggatccgctggcagggcagtgcctgggcagtac

SEQ ID NO: 517097 - DNA, 75 bp, synthetic construct
  source 1..75: mol_type = other DNA
atcgatttcagacacaaaatctggaccatccctgccacccgtgaggccattgacaaagtacggttttcggggcgt

SEQ ID NO: 517098 - DNA, 75 bp, synthetic construct
  source 1..75: mol_type = other DNA
atggactcagggcaatggcctgtagtgccctggtggagtcggatctctggtcacgcgatacggtggagcggcaaa

SEQ ID NO: 517099 - DNA, 75 bp, synthetic construct
  source 1..75: mol_type = other DNA
tacggctgatggacgataaagggttgcagcagataaaggtggcccgccagcgcaaaacggcagcaggaaaagcgt

SEQ ID NO: 517100 - DNA, 75 bp, synthetic construct
  source 1..75: mol_type = other DNA
cccaatgcattgggtaagtttttaacacccagcgtagtttgtgttgacgaagatggtatggttttgacaggggag

SEQ ID NO: 517101 - DNA, 75 bp, synthetic construct
  source 1..75: mol_type = other DNA
tccagaaatattgcactgatgtgcggcagcggctgcgcgggcgcgcataaagagttagtagagtttgccgggaaa

SEQ ID NO: 517102 - DNA, 75 bp, synthetic construct
  source 1..75: mol_type = other DNA
atgaaacaaacggttgcagcttatatcgccaaaacactcgaatcggcaggcgtgaaacgcatctggggagtcaca

SEQ ID NO: 517103 - DNA, 75 bp, synthetic construct
  source 1..75: mol_type = other DNA
attaaagcgcccatcgttcatgccctgcgcgggaaagaacatgtcgagtatgacaatccctacgacgtgggaatg

SEQ ID NO: 517104 - DNA, 75 bp, synthetic construct
  source 1..75: mol_type = other DNA
ccggaacaggcgctgcgctgggcgctctctggcggtgaagattacgagttgtgtttcactgtgccggaactgaac

SEQ ID NO: 517105 - DNA, 75 bp, synthetic construct
  source 1..75: mol_type = other DNA
caggtggtcgccatgtgcggtgatggcggtttcagtatgttgatgggcgattttctctcagtggtacaaatgaag

SEQ ID NO: 517106 - DNA, 75 bp, synthetic construct
  source 1..75: mol_type = other DNA
cacagcaaggtggatatggcgctggtgggcgatatcaaatcaaccctgcgagcacttctgccattgctggaagaa

SEQ ID NO: 517107 - DNA, 75 bp, synthetic construct
  source 1..75: mol_type = other DNA
caaacgggacattagttttgaccgcacttatttaggctacgttccgcacatcagcggcttagtgaaatcactcta

SEQ ID NO: 517108 - DNA, 75 bp, synthetic construct
  source 1..75: mol_type = other DNA
acttactcaggctatgttccgcacatcagcggcttagtgaaatcactctacgagtcgctcaccaagaccacccgt

SEQ ID NO: 517109 - DNA, 75 bp, synthetic construct
  source 1..75: mol_type = other DNA
tacatcgaaatcattggggcatacccgtgagtcgggctattttgcgcccgttattgagcgtaacagaagtatcct

SEQ ID NO: 517110 - DNA, 75 bp, synthetic construct
  source 1..75: mol_type = other DNA
cccggcaacctgcacttaatcaacggcctgttcgattgtcatcgtaatcacgttccggtactggcgattgccgcc

SEQ ID NO: 517111 - DNA, 75 bp, synthetic construct
  source 1..75: mol_type = other DNA
aaagccgatcgcaagtttctggataaagcgctggaagattaccgcgatgcccgcaaagggctggacgatttagct

SEQ ID NO: 517112 - DNA, 75 bp, synthetic construct
  source 1..75: mol_type = other DNA
ttcccctaccgtgcgttctacccgaccgatgccaaaattattcagattgatatcaacccagccagcatcggcgca

SEQ ID NO: 517113 - DNA, 75 bp, synthetic construct
  source 1..75: mol_type = other DNA
aaactggtacaggccatgacgcaagcgctggacgtctcgccgctgttctttatcgcgggggatacccaacagcct

SEQ ID NO: 517114 - DNA, 75 bp, synthetic construct
  source 1..75: mol_type = other DNA
tgtgtgcacttgggtgggaggacatagatctgaaaaatggaacaatgatgatcaggagaaatttagcaaaagatc

SEQ ID NO: 517115 - DNA, 75 bp, synthetic construct
  source 1..75: mol_type = other DNA
gagaaaaccattgcagcacttcctgcctttgcaccgttctccggcgagattgcacaaatgagtgcaaatatccgc

SEQ ID NO: 517116 - DNA, 75 bp, synthetic construct
  source 1..75: mol_type = other DNA
actgtcgactgcctcaaaagcgaccccaaaatccgtgctggtttgtttaattcacacgataacattgctctctcg

SEQ ID NO: 517117 - DNA, 75 bp, synthetic construct
  source 1..75: mol_type = other DNA
tgtgcagcaacaggcgcaggcccgcgaggaagtggaagatgcggtggaagtccgtctgagcaaagacgaacaact

SEQ ID NO: 517118 - DNA, 75 bp, synthetic construct
  source 1..75: mol_type = other DNA
agactgggtgctgtccgccagccataaccgccaggaggagggtaaacagttaatgctcgacttcctcaggcagaa

SEQ ID NO: 517119 - DNA, 75 bp, synthetic construct
  source 1..75: mol_type = other DNA
agacgcagtctgggctgaacaactacgcccgcgtggtggagaaaggccagtacgacagtctggaaattccggcac

SEQ ID NO: 517120 - DNA, 75 bp, synthetic construct
  source 1..75: mol_type = other DNA
aaccaacccggcttttggcgctgatatctactggcgcgggcgcgtatgggtggatcagttctggtttggtctgaa

SEQ ID NO: 517121 - DNA, 75 bp, synthetic construct
  source 1..75: mol_type = other DNA
gctttaccagtaaggcgcatatcaacgggtcgacgacgctctataccacctattcccatctgctgaccgctcagg

SEQ ID NO: 517122 - DNA, 75 bp, synthetic construct
  source 1..75: mol_type = other DNA
tgcacaaatgagtgcaaatatccgcgcccgttatgaagcgtcgccgcgctctgccaatgctgaagcccttcgcca

SEQ ID NO: 517123 - DNA, 75 bp, synthetic construct
  source 1..75: mol_type = other DNA
gagaagacaattgcagctctgcctgcgttttctccgtttgctggtgagattgcccaaatgagcgccaatatccgt

SEQ ID NO: 517124 - DNA, 75 bp, synthetic construct
  source 1..75: mol_type = other DNA
atatcaggtgcataaatcattaccgatgcagactgaaatcaacggcaatcgctttaccagtaaggcgcatatcaa

SEQ ID NO: 517125 - DNA, 75 bp, synthetic construct
  source 1..75: mol_type = other DNA
gtgatgataagttacaggcgctggccaacgcggtaaacgaactggaaggccgtgtggccaaaattgaaaatcagc

SEQ ID NO: 517126 - DNA, 75 bp, synthetic construct
  source 1..75: mol_type = other DNA
tggggctaaaaatgacaatcgtccccggcagccagctttctcaactgccgccagggctggacagcactgagtttg

SEQ ID NO: 517127 - DNA, 75 bp, synthetic construct
  source 1..75: mol_type = other DNA
aattattcctcagcgatgaaggcgatgatgtggtgattgaagtcgccgatcagggctgcggcgttccagagtctc

SEQ ID NO: 517128 - DNA, 75 bp, synthetic construct
  source 1..75: mol_type = other DNA
ctccatgtgcgtgacatggcaatgaatcaggcaaaaattattgcctccaatgacagcatcatcacggcggttaaa

SEQ ID NO: 517129 - DNA, 75 bp, synthetic construct
  source 1..75: mol_type = other DNA
atgatttgctgggggccattatcagctttcgtagtaaagacgaaatttccaccctcaatgcgcaactgacgcaaa

SEQ ID NO: 517130 - DNA, 75 bp, synthetic construct
  source 1..75: mol_type = other DNA
tagggattctgatgttgctgtcgtggttcctggccgcgcatatccgtcggcagatgatgggcatggagccaaagc

SEQ ID NO: 517131 - DNA, 75 bp, synthetic construct
  source 1..75: mol_type = other DNA
cgtcagtacgcgtgctgatgaacccggtgagcatggcattgggttgtatcttattgccagctatgtaacgcgctg

SEQ ID NO: 517132 - DNA, 75 bp, synthetic construct
  source 1..75: mol_type = other DNA
gcccgttgttcagcgctgatgtaatgagcgaaatgattaaagatattgcagatgcagtagaacaggctaaggcaa

SEQ ID NO: 517133 - DNA, 75 bp, synthetic construct
  source 1..75: mol_type = other DNA
caatgtggtgaacgatctggaagcgcgagtggcgaaaattgaaactcaactgaatgacgttcagggtgatgttga

SEQ ID NO: 517134 - DNA, 75 bp, synthetic construct
  source 1..75: mol_type = other DNA
cgatggactagcgcgtttatatgtcagcctttgcccgaatatgcggctgattttcgccaaccatgaagatcagct

SEQ ID NO: 517135 - DNA, 75 bp, synthetic construct
  source 1..75: mol_type = other DNA
cacactgattaccgcaggcgtcatgatgtgggggcttggcgagccggtaggggcattgaccagcagcctgaccca

SEQ ID NO: 517136 - DNA, 75 bp, synthetic construct
  source 1..75: mol_type = other DNA
taaaaaggtttgcggctcgaatactgaaaaggtgtcttactccgttttgagcattagttccagcgagcaatacag

SEQ ID NO: 517137 - DNA, 75 bp, synthetic construct
  source 1..75: mol_type = other DNA
attgacaaaaatgatattacgccaaaagaaataaatttaatctcacaggacactaaatgtctttactctggcgtg

SEQ ID NO: 517138 - DNA, 75 bp, synthetic construct
  source 1..75: mol_type = other DNA
atggcgcatttcaatccggacatcgccaaagagaatatccgcgcggtcttctcctggcagatccagcctggcgac

SEQ ID NO: 517139 - DNA, 75 bp, synthetic construct
  source 1..75: mol_type = other DNA
cttgcatctggtccgctggcgatgctgcgcgttgccctgtatgccatatctggtctgttaagtgctctgctcagt

SEQ ID NO: 517140 - DNA, 75 bp, synthetic construct
  source 1..75: mol_type = other DNA
ggcaaatgtgaccagccggagaaatacagctgcactggctgccgttgttgccggaatgatgggcgttgctgccgc

SEQ ID NO: 517141 - DNA, 75 bp, synthetic construct
  source 1..75: mol_type = other DNA
atgcgctgaactatctggatgataacgcgatgtcgaaaggggcggacatcattgatgtgatgcaacgtctgggcg

SEQ ID NO: 517142 - DNA, 75 bp, synthetic construct
  source 1..75: mol_type = other DNA
gaaaaaacgccggtcagtattcgtgagctgtggaacccggatacctgtccggcaaatctgctgccgtggctggcg

SEQ ID NO: 517143 - DNA, 75 bp, synthetic construct
  source 1..75: mol_type = other DNA
aaggcgacggcacagcaacggaggcgttgcttaataccgttcgcgccgttctgaatgcagaggatacccgtccgg

SEQ ID NO: 517144 - DNA, 75 bp, synthetic construct
  source 1..75: mol_type = other DNA
accccggaggccattattgtcggaggggattatttcccggcctcggccattcatttaattgataacctgagagta

SEQ ID NO: 517145 - DNA, 75 bp, synthetic construct
  source 1..75: mol_type = other DNA
agcaacctgcgacggtgaatgcagacggcaaagtgatgatcccatcgggtggttttccctcatggggatatggct

SEQ ID NO: 517146 - DNA, 75 bp, synthetic construct
  source 1..75: mol_type = other DNA
agcaacctgcgacggtgaatgcagacggcaaagtgatgataccatcgggtggttttccatcatggggatatggct

SEQ ID NO: 517147 - DNA, 75 bp, synthetic construct
  source 1..75: mol_type = other DNA
agcaacctgcgacggtgaatgcagacggaaaagtgatgatcccatcgggtggttttccatcatggggatatggct

SEQ ID NO: 517148 - DNA, 75 bp, synthetic construct
  source 1..75: mol_type = other DNA
gttacggcagcagtaacacgaaccagcagcgcgttgtcctggctggctggcgctccactggcagtgctgcgacgc

SEQ ID NO: 517149 - DNA, 75 bp, synthetic construct
  source 1..75: mol_type = other DNA
agcaacctgcgacggtgaatgcagacgggaaagtgatgatcccatcgggtggttttccgtcatggggatatggct

SEQ ID NO: 517150 - DNA, 75 bp, synthetic construct
  source 1..75: mol_type = other DNA
agcaacctgcgacggtgaatgcagacggcaaagtgatgatgccatcgggtggttttccgtcatggggatatggct

SEQ ID NO: 517151 - DNA, 75 bp, synthetic construct
  source 1..75: mol_type = other DNA
gaagttcagccggaccagatgatcaacattagcggcagtctggataagaaaagcgcgccggtgatgctgccaact

SEQ ID NO: 517152 - DNA, 75 bp, synthetic construct
  source 1..75: mol_type = other DNA
caatttcgaccgcctgactgtctggcaggacggccaaaaagtcgacttcacactggaggcatacagtattcccgg

SEQ ID NO: 517153 - DNA, 75 bp, synthetic construct
  source 1..75: mol_type = other DNA
tgggctgaacaactacgcccgcgtggtggagaaaggccagtacgacagtctggaaattccggcacaggttgctgc

SEQ ID NO: 517154 - DNA, 75 bp, synthetic construct
  source 1..75: mol_type = other DNA
gtgcagactgaaatcaacggcaatcgctttaccagtaaggcacatatcaacggttcaacgacgctctataccacc

SEQ ID NO: 517155 - DNA, 75 bp, synthetic construct
  source 1..75: mol_type = other DNA
cgttttaatccgtttttcgatctcggcgcctggcatggtcacttgttgccagacggcccgaacaccatgggcggt

SEQ ID NO: 517156 - DNA, 75 bp, synthetic construct
  source 1..75: mol_type = other DNA
agcgtgcgtccgcaggatgtgggctttgtccccgacctgatagcgtggaaccttagccccgagcgtggcggcgat

SEQ ID NO: 517157 - DNA, 75 bp, synthetic construct
  source 1..75: mol_type = other DNA
gtgcagactgaaatcaacggtaatcgctttaccagtaaggcgcatatcaacggttcgacgacgctctacaccacc

SEQ ID NO: 517158 - DNA, 75 bp, synthetic construct
  source 1..75: mol_type = other DNA
gctggcggatgtggccgggactgatgatgcagtagatgtactgtgtctgtgccttgatattgccgaccaggacgg

SEQ ID NO: 517159 - DNA, 75 bp, synthetic construct
  source 1..75: mol_type = other DNA
aatatgccgactggcgacgtttttactgtacgcattattttcaggatacccaactggatatgcatttttccgggc

SEQ ID NO: 517160 - DNA, 75 bp, synthetic construct
  source 1..75: mol_type = other DNA
atggggagacccgactggcgcgccatgcttgccgggatgacatccaccgaatatgccgactggcgacatttttac

SEQ ID NO: 517161 - DNA, 75 bp, synthetic construct
  source 1..75: mol_type = other DNA
tatgttcgacccgactacccagttctactatgacgtacgtattgaagataaaccactggcgaacggctgcgcggg

SEQ ID NO: 517162 - DNA, 75 bp, synthetic construct
  source 1..75: mol_type = other DNA
atgccctgcaacagcgtgcttctcattgcctgtaataccattgccgaagaacaagcgacaaacagtgcttcaatc

SEQ ID NO: 517163 - DNA, 75 bp, synthetic construct
  source 1..75: mol_type = other DNA
tccgcaaagcggctggcggagtcaagaagatggaaaaccgtgatgcggtggaagcgactgtctggggcgcatatt

SEQ ID NO: 517164 - DNA, 75 bp, synthetic construct
  source 1..75: mol_type = other DNA
ttaagcagtcgattcgtaaaagcgattatgccatccgtctcggtggcgatgaattttgcatcattctggtcgatt

SEQ ID NO: 517165 - DNA, 75 bp, synthetic construct
  source 1..75: mol_type = other DNA
gttttctcaatgtcacgctaaccgataccgattcggggcgtgaagtggccaaattcagtgtgccacttcagaagc

SEQ ID NO: 517166 - DNA, 75 bp, synthetic construct
  source 1..75: mol_type = other DNA
attgcagggcgcattgctggtggtcgattcctcacttaccccggttgatggttctctgcttgtatgcgctctgga

SEQ ID NO: 517167 - DNA, 75 bp, synthetic construct
  source 1..75: mol_type = other DNA
tccgtttataccaaaatgtgtcgcgagaaaatattagtgatgcgatgactggactgtataatcgcaaaattttaa

SEQ ID NO: 517168 - DNA, 75 bp, synthetic construct
  source 1..75: mol_type = other DNA
gttttctcaatgtcacgctaaccgataccgattcggggcgcgacattatcatcaaccagagcgaagataatctgt

SEQ ID NO: 517169 - DNA, 75 bp, synthetic construct
  source 1..75: mol_type = other DNA
taccgattcggggcgcgacattatcatcaaccagagcgaagataatctgttccagtatgtcagttacgtccatga

SEQ ID NO: 517170 - DNA, 75 bp, synthetic construct
  source 1..75: mol_type = other DNA
gtatggggttgccgacaaactacaaaagcgccttggctatcagcaagatgccactgcgctgacccgcatgaagga

SEQ ID NO: 517171 - DNA, 75 bp, synthetic construct
  source 1..75: mol_type = other DNA
gataaactttcatttaatcatcgattgtatttatttacccggttaccgttatttattgttgtccatactcttaat

SEQ ID NO: 517172 - DNA, 75 bp, synthetic construct
  source 1..75: mol_type = other DNA
tacaaggatgagtggggcgataaatataaatcagaagttgatgttaaaagtcatgacatcatgcttggtgtgact

SEQ ID NO: 517173 - DNA, 75 bp, synthetic construct
  source 1..75: mol_type = other DNA
tgcactggcagtactgccgtgtttggcgtgatcactcacatcatcaacgacgcaagaagtggcgaatttgatgat

SEQ ID NO: 517174 - DNA, 75 bp, synthetic construct
  source 1..75: mol_type = other DNA
cggaagtatccacgtcagcatctggaggatttaagaaccggtaagaaggaagcattgccaaaggatgacgatgga

SEQ ID NO: 517175 - DNA, 75 bp, synthetic construct
  source 1..75: mol_type = other DNA
cgtattatgatttcagaaacagcagtgctttcactccgtgggtatcagccggactgggttatgcgcgggtacatc

SEQ ID NO: 517176 - DNA, 75 bp, synthetic construct
  source 1..75: mol_type = other DNA
caatgagtgcttatttgcgctatatcgtccagaaagcagactcctcctttctctacgacaagtatcaaaatcaga

SEQ ID NO: 517177 - DNA, 75 bp, synthetic construct
  source 1..75: mol_type = other DNA
cctgacggttaacgattctgcgcgcgtcaacgatgcaatgtgcaaacgtctgggcgcttctggtgtagtgaaact

SEQ ID NO: 517178 - DNA, 75 bp, synthetic construct
  source 1..75: mol_type = other DNA
tcccaatcatgatgttcggtctgccgggcgcggcgctggcaatgtacttcgctgcgccgaaagagcgtcgcccga

SEQ ID NO: 517179 - DNA, 75 bp, synthetic construct
  source 1..75: mol_type = other DNA
ggtgctggcagccatttttggttatgtctggccgccggtgcagcacgctatccatgcaggcggcgaatggatcgt

SEQ ID NO: 517180 - DNA, 75 bp, synthetic construct
  source 1..75: mol_type = other DNA
ttcacctgttcaaaacctgcattattactggcgtcattctggggttaacgtggtctgccccactccgggcacagg

SEQ ID NO: 517181 - DNA, 75 bp, synthetic construct
  source 1..75: mol_type = other DNA
ctgaagaagccaacagcaacactgaagaaggtctgactcaactggcaaccaactatattgctgcggttggcggca

SEQ ID NO: 517182 - DNA, 75 bp, synthetic construct
  source 1..75: mol_type = other DNA
ggcaaccaactatattgctgcggttggcggtactgacaacctgaaagcaattgacgcctgtattactcgtctgcg

SEQ ID NO: 517183 - DNA, 75 bp, synthetic construct
  source 1..75: mol_type = other DNA
gtggcgtactggtagtaatgaacgacactgttctggatggccgtgacgtcactaaaaccaacaccaccaacgtag

SEQ ID NO: 517184 - DNA, 75 bp, synthetic construct
  source 1..75: mol_type = other DNA
ctgcaacatatcgcgccgcagaaagagatcggcttctcttccggtatttacgcgatgaaagaaaacgatacgtta

SEQ ID NO: 517185 - DNA, 75 bp, synthetic construct
  source 1..75: mol_type = other DNA
accggtcgcaccgtattatcgagcatttaccaggatcagcgtactaaacagaacgtgatgagtttgctgacgccc

SEQ ID NO: 517186 - DNA, 75 bp, synthetic construct
  source 1..75: mol_type = other DNA
gctatcgactacgcgttgatgtataacctgccggccgccagccagaacgtctggatgctgctggtgatgggtgtt

SEQ ID NO: 517187 - DNA, 75 bp, synthetic construct
  source 1..75: mol_type = other DNA
ggtatcattaccggtctggtcggtggtgcagcctataaccgttggtccgatattaaactgccggacttcctgagc

SEQ ID NO: 517188 - DNA, 75 bp, synthetic construct
  source 1..75: mol_type = other DNA
cgcctgtagcaaaaccgcaggctgtaccaaacgcggtgtctatcgcggagctggtatcgccgattaccggtgatg

SEQ ID NO: 517189 - DNA, 75 bp, synthetic construct
  source 1..75: mol_type = other DNA
ttccggttcgtacagaactggagttttacgcgcgtggaaaagctgattcgaagtataacgtagataaagacagct

SEQ ID NO: 517190 - DNA, 75 bp, synthetic construct
  source 1..75: mol_type = other DNA
agccacatggtgatgtttgacctgccattcaacccggatctgctggagcagcgtattggtcgtctggatcgtatc

SEQ ID NO: 517191 - DNA, 75 bp, synthetic construct
  source 1..75: mol_type = other DNA
tccacgaaggcatgtcgattatcgaacgtgaccgcgctgccgcctggtttgctgaagaagacaccggcgcacagg

SEQ ID NO: 517192 - DNA, 75 bp, synthetic construct
  source 1..75: mol_type = other DNA
atctttatcatctgaatgctgatcggcttgaacagcttgccagaacggagcgggataagattgctgaactgaaac

SEQ ID NO: 517193 - DNA, 75 bp, synthetic construct
  source 1..75: mol_type = other DNA
ggtgccggacttccctggcctgtcggaagatggcatcaccatcacctttgatcgtgaagtggcgctggcgcgtga

SEQ ID NO: 517194 - DNA, 75 bp, synthetic construct
  source 1..75: mol_type = other DNA
gcattgattgatgccgcacgtaacgaagccgacgaaaaactgtctgccgagctgtctcgtctggaagcgctgcgc

SEQ ID NO: 517195 - DNA, 75 bp, synthetic construct
  source 1..75: mol_type = other DNA
gcccgtctgcgtctgctggacccgaaccgtttccacgatttcgcgcagttcgttgaagagcagaaaaattatcgt

SEQ ID NO: 517196 - DNA, 75 bp, synthetic construct
  source 1..75: mol_type = other DNA
tggcaggaatatcccaaacgtgctggtggcaattccaagtcagcagccttcaaagcctggaaagcccgaatcagg

SEQ ID NO: 517197 - DNA, 75 bp, synthetic construct
  source 1..75: mol_type = other DNA
cgtaaccccggatatcgctcttgacctcagctatcgctatattgatgcaggtgacagcagtgtgagttacaagga

SEQ ID NO: 517198 - DNA, 75 bp, synthetic construct
  source 1..75: mol_type = other DNA
tagttcggtttatgaagggctgattgcggtggatccgcacggttacattaccgccatcaatcgtaacgcaagaaa

SEQ ID NO: 517199 - DNA, 75 bp, synthetic construct
  source 1..75: mol_type = other DNA
ctgggtgcgtgtctctggaaataccggtacccagttcgtgaagcaggcgtcgacgttctttggacccgatcgtca

SEQ ID NO: 517200 - DNA, 75 bp, synthetic construct
  source 1..75: mol_type = other DNA
cagcgcgttctgccagacaggaatattcaccggaatttgaacaggcctggcaggaatatcccaaacgtgctggtg

SEQ ID NO: 517201 - DNA, 75 bp, synthetic construct
  source 1..75: mol_type = other DNA
aaaggtaaccgtaatacgtccaatctttatcatctgaatgctgatcggcttgagcagcttgccagaactgagcgg

SEQ ID NO: 517202 - DNA, 75 bp, synthetic construct
  source 1..75: mol_type = other DNA
ccgtcagcaggtaatggaaagcctggatcaggcaggctggcgtctggatgccctgcgtttgatcgttgtaacgca

SEQ ID NO: 517203 - DNA, 75 bp, synthetic construct
  source 1..75: mol_type = other DNA
aaaaaatcagacgttcactgtgccatacaccacacctattattgcgctgcgtgaaggatattttaaatacagtat

SEQ ID NO: 517204 - DNA, 75 bp, synthetic construct
  source 1..75: mol_type = other DNA
ggtcaggtggttactggcgtgatgacctgaagaatgaagtgtcagtcaacacactgatgctgaatacgtactatg

SEQ ID NO: 517205 - DNA, 75 bp, synthetic construct
  source 1..75: mol_type = other DNA
ttcagaccagcatttcctgtcaggagatgaggaagaaacgtcaaagtataaaggcggcgatgaccatgatacggt

SEQ ID NO: 517206 - DNA, 75 bp, synthetic construct
  source 1..75: mol_type = other DNA
tgtccgctatgacgtaaccccggatatcgctctggacctcagctatcgcggtgatgctgccaacttactgattta

SEQ ID NO: 517207 - DNA, 75 bp, synthetic construct
  source 1..75: mol_type = other DNA
aaggcggtgatggccatgatacggtattcagtggcggtatcgcggccggttatgatttttacccgcagttcagta

SEQ ID NO: 517208 - DNA, 75 bp, synthetic construct
  source 1..75: mol_type = other DNA
atatctgtcgatggaatatttgcacgtggacagaaaagagaacagagtacaaataatggatattcttggcgcgtg

SEQ ID NO: 517209 - DNA, 75 bp, synthetic construct
  source 1..75: mol_type = other DNA
tatgctgttggataaaaacggcaacaacctggcggcacaggtagagtttgaaacctttaaccgtcagcttaacgc

SEQ ID NO: 517210 - DNA, 75 bp, synthetic construct
  source 1..75: mol_type = other DNA
ttacaacccgttcgacaccgaacagctggtgatttgctcgctggattttgcccgtcgtagcaaacagcgtctgga

SEQ ID NO: 517211 - DNA, 75 bp, synthetic construct
  source 1..75: mol_type = other DNA
gctatccagttgcgcgtcacctcatcggcgaacggcgtgccgtcgttccatgccagattttccagccctggcagg

SEQ ID NO: 517212 - DNA, 75 bp, synthetic construct
  source 1..75: mol_type = other DNA
aggcgggaacttccgttttatctctttccaaccagcgttttgtcgcaggtgaaggagagtgggcggacagataca

SEQ ID NO: 517213 - DNA, 75 bp, synthetic construct
  source 1..75: mol_type = other DNA
ttcagaccagcgtttcctgtcaggagatgaggaagaaacatcaaagtataaaggcggcgatgaccatgatacggt

SEQ ID NO: 517214 - DNA, 75 bp, synthetic construct
  source 1..75: mol_type = other DNA
ggctctgctgacaacttcgcatggagcattggggccggtgttcgctatgacgtaaccccggatatcgctcttgac

SEQ ID NO: 517215 - DNA, 75 bp, synthetic construct
  source 1..75: mol_type = other DNA
ttatcccggctaacctcgatctcaagctggtcgataaagtcattggcatcaccaatgaagaagccatttctaccg

SEQ ID NO: 517216 - DNA, 75 bp, synthetic construct
  source 1..75: mol_type = other DNA
cgccctccacgctggcgcatggcgcttaccccttctggtctggcgaactgttcaacaaggggcgcagcagtatca

SEQ ID NO: 517217 - DNA, 75 bp, synthetic construct
  source 1..75: mol_type = other DNA
gtggaacaccggtgcgcgcattaatgaagcactggcgctgacgcggggggatttttcgctcacgcccccgtatcc

SEQ ID NO: 517218 - DNA, 75 bp, synthetic construct
  source 1..75: mol_type = other DNA
atgtcattacccatgttgcaagtcgcgctggacaaccagactatggatagcgcctacgaaaccactcgcctgatt

SEQ ID NO: 517219 - DNA, 75 bp, synthetic construct
  source 1..75: mol_type = other DNA
cgctaaaaaagccttcactctggcgcggcaggcgggcgtgatgaccgtgctggacggtgatattacgccgcagga

SEQ ID NO: 517220 - DNA, 75 bp, synthetic construct
  source 1..75: mol_type = other DNA
gatcacgcggctttctcagaaccgggactggtgcgcttaacgggcgtgaacgagatggcgagtgcgctaaaacaa

SEQ ID NO: 517221 - DNA, 75 bp, synthetic construct
  source 1..75: mol_type = other DNA
agatgatggtggccaccctgaaaattcccctcgaaagacgaaacaaacgtaagcgtcgtctgagtaccgtctggt

SEQ ID NO: 517222 - DNA, 75 bp, synthetic construct
  source 1..75: mol_type = other DNA
cgcagcagtggcgtgacgcaggcattcagcaggtggtttatcaccgcagccgtgacgcgcaggccgcaggcgtag

SEQ ID NO: 517223 - DNA, 75 bp, synthetic construct
  source 1..75: mol_type = other DNA
ggccgcaggcgtggcgtggggcgaagcggacatcaccgcgatcaaacgtctttccgatatgggcttcaaagtgac

SEQ ID NO: 517224 - DNA, 75 bp, synthetic construct
  source 1..75: mol_type = other DNA
gctggcttagtaaaggattttaactgtgaggacattatctcgcgcaaagaacagcgcaagacggatgccttcatt

SEQ ID NO: 517225 - DNA, 75 bp, synthetic construct
  source 1..75: mol_type = other DNA
cgattcatgtgtttatcgctgggcgtagtatccgtgatgccgcctctccggttgaagccgcgcgtcagttcaaac

SEQ ID NO: 517226 - DNA, 75 bp, synthetic construct
  source 1..75: mol_type = other DNA
aggcgtgcgtgcggttcgcgctctgaaagcgctctacccgcacaaaatcgtactggcagacgccaaaattgccga

SEQ ID NO: 517227 - DNA, 75 bp, synthetic construct
  source 1..75: mol_type = other DNA
cgtcactggtggcctggcgctggaagatctgccgctgttcaaaggcattccgattcacgtctttatcgcgggccg

SEQ ID NO: 517228 - DNA, 75 bp, synthetic construct
  source 1..75: mol_type = other DNA
ggcgcagagccataatggcgacctgtatgtcgacgaaattttctggatcccgaactttcagcggctgcgcaaagt

SEQ ID NO: 517229 - DNA, 75 bp, synthetic construct
  source 1..75: mol_type = other DNA
ctcaggctctcgctgatcaaagggcgtatatcacggcgtcttccgttaacgaactcttctggcattggcgttgaa

SEQ ID NO: 517230 - DNA, 75 bp, synthetic construct
  source 1..75: mol_type = other DNA
ctggatgtggctgcacggcaccgggtgcagtttgcgatgcctgagtccgatgcagtgtctatgctcaaaagaatt

SEQ ID NO: 517231 - DNA, 75 bp, synthetic construct
  source 1..75: mol_type = other DNA
actggatgtggctgcacggcaccgggtgcagttttcgatgcctgagtccgatgctgtcacaatgctgaaaaacag

SEQ ID NO: 517232 - DNA, 75 bp, synthetic construct
  source 1..75: mol_type = other DNA
taaccgcctcactgagttgtggcctgacttattcagccgggaagcaccgaagccgcttaaggtggggatattcga

SEQ ID NO: 517233 - DNA, 75 bp, synthetic construct
  source 1..75: mol_type = other DNA
agaaagaacctgtggtggccattgcgccatctttatccactacctctcagaccagagtcagtgccagctcctgca

SEQ ID NO: 517234 - DNA, 75 bp, synthetic construct
  source 1..75: mol_type = other DNA
tcgcccgggaacacgatatcaatgataacctcctgttcaaatggctcaggctctggcagaacgaagggcgtgttt

SEQ ID NO: 517235 - DNA, 75 bp, synthetic construct
  source 1..75: mol_type = other DNA
gctggatgtggctgcccggcaccgggggcagtttgcgatgccggagtctgatgcggttgcgatgctgaaacaatt

SEQ ID NO: 517236 - DNA, 75 bp, synthetic construct
  source 1..75: mol_type = other DNA
cggaagtctacacgaaggtttttgcgctggatgtggctgcccggcaccgggggcagtttgcgatgccggagtctg

SEQ ID NO: 517237 - DNA, 75 bp, synthetic construct
  source 1..75: mol_type = other DNA
gtttgtgcaactggcaaccctgaaacagcgcgcagaaaaagcggcccgcaatgccggcagactcccggccggcat

SEQ ID NO: 517238 - DNA, 75 bp, synthetic construct
  source 1..75: mol_type = other DNA
ctgtggaacaccggcgcgcgtattaatgaagcactggcgctgacgcggggggatttttcgctcacgcctccgtat

SEQ ID NO: 517239 - DNA, 75 bp, synthetic construct
  source 1..75: mol_type = other DNA
tggatgtggctgcacggcaccgggtgcagttttcgatgcctgagtccgatgctgtcacaatgctgaaaaacaggc

SEQ ID NO: 517240 - DNA, 75 bp, synthetic construct
  source 1..75: mol_type = other DNA
aaggtgtttgcgctggatgtggctgcacggcaccgggtgcagttttcgatgcctgagtccgatgcggtcacaatg

SEQ ID NO: 517241 - DNA, 75 bp, synthetic construct
  source 1..75: mol_type = other DNA
caacctggataacccggatgaaggttgcgatctggatttcgtaccgcacgaagcgcgtcaggttagcggaatgga

SEQ ID NO: 517242 - DNA, 75 bp, synthetic construct
  source 1..75: mol_type = other DNA
gccgcaatgccgtatacccagaaggacatcacggcaacgcggttctttcgcgttatcccattgaacattatgaaa

SEQ ID NO: 517243 - DNA, 75 bp, synthetic construct
  source 1..75: mol_type = other DNA
tgaccgtaatttgctgtgcggatatcaacaccgccaaaggcgcgctggacgtggcaaaagagtttaatggcgacg

SEQ ID NO: 517244 - DNA, 75 bp, synthetic construct
  source 1..75: mol_type = other DNA
ggccgcaggcgtggcgtggggcgaagctgacattaccgcgatcaaacgtctttccgatatgggcttcaaagtcac

SEQ ID NO: 517245 - DNA, 75 bp, synthetic construct
  source 1..75: mol_type = other DNA
gctacatcgggcagtaaaggccagaacgcaccgaaagatccacgcattggcagtaaaacccctattccattgggt

SEQ ID NO: 517246 - DNA, 75 bp, synthetic construct
  source 1..75: mol_type = other DNA
actcggcctctcttatgacgatgacgaagaagacgagaagcaagaagacatgatgcgtctgctgcggggcaacta

SEQ ID NO: 517247 - DNA, 75 bp, synthetic construct
  source 1..75: mol_type = other DNA
ttttcgacgagaatcacgcccgtgctattggattgcatccgggcagattaaaactcctcttcttcaccctgctgt

SEQ ID NO: 517248 - DNA, 75 bp, synthetic construct
  source 1..75: mol_type = other DNA
atgaccagaattgcatgcgtgggtatcacagttcaggacagaatttattctttgcccactctgccggagggcggc

SEQ ID NO: 517249 - DNA, 75 bp, synthetic construct
  source 1..75: mol_type = other DNA
cagtctctatttcgaaggcaagcgcaccgataacaatggcgggggaaatcgcttagatatcaaaacactgcatca

SEQ ID NO: 517250 - DNA, 75 bp, synthetic construct
  source 1..75: mol_type = other DNA
tcgccgcatgatgatgataagccgattttgctaccgggcgagtgggaagtgaacacgcgtcgcgaacggcaggag

SEQ ID NO: 517251 - DNA, 75 bp, synthetic construct
  source 1..75: mol_type = other DNA
cagcatggttgttaaccgatcattttccccgcctgctcataattgctgtaactattggcagtgtaaccagtttcc

SEQ ID NO: 517252 - DNA, 75 bp, synthetic construct
  source 1..75: mol_type = other DNA
aatgatgaaggtggccagatccgtcactggcatacctatattcatgacatgattggtaattttaaatccggctgt

SEQ ID NO: 517253 - DNA, 75 bp, synthetic construct
  source 1..75: mol_type = other DNA
tgctttcttcaagttacgataatcttctggaagaggtgggatttgtgaatcccgacggcgagcgtgtgctggtgg

SEQ ID NO: 517254 - DNA, 75 bp, synthetic construct
  source 1..75: mol_type = other DNA
accacatgctgcgcaccaaactgccgcgcggagtgccgttctgcatccatctgatgtccagccagcttgttggtg

SEQ ID NO: 517255 - DNA, 75 bp, synthetic construct
  source 1..75: mol_type = other DNA
gatggtgtgacgttctctgtcccggtcacgccacatacgttccgccattcctatgcgatgcacatgctgtatgcc

SEQ ID NO: 517256 - DNA, 75 bp, synthetic construct
  source 1..75: mol_type = other DNA
cacttgatgttgctgcgcggcatcgagttcagtttcagatgcccgaagcggatgcggtagccatgctgaaaggga

SEQ ID NO: 517257 - DNA, 75 bp, synthetic construct
  source 1..75: mol_type = other DNA
gcaggtcgcaacttattgctcgacctatgccgggtggaaaaggtccggcgcagttcgtgtatggggtaatggtat

SEQ ID NO: 517258 - DNA, 75 bp, synthetic construct
  source 1..75: mol_type = other DNA
acagcgcaagatggatgcctttattcaatatggaattgtcgctggcgttcaggccatgcaggattctggccttga

SEQ ID NO: 517259 - DNA, 75 bp, synthetic construct
  source 1..75: mol_type = other DNA
ggaatggaatatacgctgtgtaactccttcggcttcggtggcactaatggttctttgatctttaaaaagatctaa

SEQ ID NO: 517260 - DNA, 75 bp, synthetic construct
  source 1..75: mol_type = other DNA
atggtgccggtatgctggtactggaagagtacgaacacgcgaaaaaacgcggggcgaaaatttacgctgaactcg

SEQ ID NO: 517261 - DNA, 75 bp, synthetic construct
  source 1..75: mol_type = other DNA
tgcatgtggaaaactggcccgatacctcgcactacgagtttctcgccgacactatgtggagcgattttgcctacg

SEQ ID NO: 517262 - DNA, 75 bp, synthetic construct
  source 1..75: mol_type = other DNA
cgatattgtttgcctgcaggaagtgatgggcgcgcacgaagttcatccgctgcatgtggaaaactggcccgatac

SEQ ID NO: 517263 - DNA, 75 bp, synthetic construct
  source 1..75: mol_type = other DNA
cagcatggttgttaaccgatcgttttccccgcctgctcatgattgctgtaactattggcagtgtaaccagtttcc

SEQ ID NO: 517264 - DNA, 75 bp, synthetic construct
  source 1..75: mol_type = other DNA
gatttcaacggccaggtggagaaggtcgaatgcgagcactcaacagacggttcaaagacagctacggcgtcccag

SEQ ID NO: 517265 - DNA, 75 bp, synthetic construct
  source 1..75: mol_type = other DNA
tgtttgcactggatgtggctgcacggcaccgggtgcagtttttgatgcctgagtccgatgcggtcacaatgctga

SEQ ID NO: 517266 - DNA, 75 bp, synthetic construct
  source 1..75: mol_type = other DNA
gtaacccacagctttgcagagtgggctgtgggtgatttcaaccggcagaaggagacagtcctttgcgacaagtta

SEQ ID NO: 517267 - DNA, 75 bp, synthetic construct
  source 1..75: mol_type = other DNA
tgacgtgactggtaccatcgaactgccggaaggcgtagagatggtaatgccgggcgacaacatcaaaatggttgt

SEQ ID NO: 517268 - DNA, 75 bp, synthetic construct
  source 1..75: mol_type = other DNA
ggcgctagcattacctgacgcacggggtgatttcattcgtatctgggatgatgggcgcgggattgatgtcggacg

SEQ ID NO: 517269 - DNA, 75 bp, synthetic construct
  source 1..75: mol_type = other DNA
ttactcgcgatattggatctcgccgttcgtgacgttcatttcctgctggaaggtggacaaatgccatgcaaaacg

SEQ ID NO: 517270 - DNA, 75 bp, synthetic construct
  source 1..75: mol_type = other DNA
cgaggcgacacatgacgcgccgagcgtctttttttgtgccgttagccagactcacacttttttcagtgatgtggt

SEQ ID NO: 517271 - DNA, 75 bp, synthetic construct
  source 1..75: mol_type = other DNA
tgctcgcgtagtgactccacaaaaacattcgtccacgcgcgtgacgttaacgaaatgagcgcgatgtactgtgct

SEQ ID NO: 517272 - DNA, 75 bp, synthetic construct
  source 1..75: mol_type = other DNA
accgtactggctaaaacctacggcggtgctgctcgtgcattcgaccagatcgataacgcgccggaagaaaaggct

SEQ ID NO: 517273 - DNA, 75 bp, synthetic construct
  source 1..75: mol_type = other DNA
gtcacaccgtggcgacagcgccggatgcgtggtgctggcaccgccggtggtggccggtggcaaattcagaatact

SEQ ID NO: 517274 - DNA, 75 bp, synthetic construct
  source 1..75: mol_type = other DNA
cagtggtaccgcgcaggactggagcaccgtattcgtgacattctcaaatcccgccagattggcgcgacgttctat

SEQ ID NO: 517275 - DNA, 75 bp, synthetic construct
  source 1..75: mol_type = other DNA
tatcgcaatttggcggtaattatccagaagggtccggccattcgattgataatcacgatgggatatcagcacacc

SEQ ID NO: 517276 - DNA, 75 bp, synthetic construct
  source 1..75: mol_type = other DNA
agtatccggaactggcaaaagtttatccgacaaataaattgccagatttacgcggcgaattcattcgtgggtggg

SEQ ID NO: 517277 - DNA, 75 bp, synthetic construct
  source 1..75: mol_type = other DNA
cacgttattaagctttcaaagtgacgactttaaggcccacggtcataacttcgaatcctggcccgacagcggcaa

SEQ ID NO: 517278 - DNA, 75 bp, synthetic construct
  source 1..75: mol_type = other DNA
tgctgctcgtgcattcgaccagatcgataacgctccggaagaaaaagctcgtggtatcaccatcaacacttctca

SEQ ID NO: 517279 - DNA, 75 bp, synthetic construct
  source 1..75: mol_type = other DNA
tatcggccacgttgaccatggtaaaacgacgctgaccgctgcaatcacgaccgtactggctaaaacctacggcgg

SEQ ID NO: 517280 - DNA, 75 bp, synthetic construct
  source 1..75: mol_type = other DNA
tatcggccacgttgaccatggtaaaacgaccctgaccgctgcaatcaccaccgtactggctaaaacctacggcgg

SEQ ID NO: 517281 - DNA, 75 bp, synthetic construct
  source 1..75: mol_type = other DNA
tatcggccacgttgaccatggtaaaacgacactgaccgctgcaatcacaaccgtactggctaaaacctacggcgg

SEQ ID NO: 517282 - DNA, 75 bp, synthetic construct
  source 1..75: mol_type = other DNA
accgttgttaccggtcgtgtagaacgcggtatcatcaaagttggcgaagaagttgaaatcgttggtatcaaagag

SEQ ID NO: 517283 - DNA, 75 bp, synthetic construct
  source 1..75: mol_type = other DNA
ctcagtacgacttcccgggcgacgacactccgatcgttcgtggttctgctctgaaagcactggaaggcgacgcag

SEQ ID NO: 517284 - DNA, 75 bp, synthetic construct
  source 1..75: mol_type = other DNA
caaaaccgcacgttaacgtgggtactatcggccacgttgaccaaggtaaaacaacactgaccgctgcaatcacta

SEQ ID NO: 517285 - DNA, 75 bp, synthetic construct
  source 1..75: mol_type = other DNA
caaaaccgcacgttaacgtaggtactatcggccacgttgaccaaggtaaaacaacgctgaccgctgcaatcacta

SEQ ID NO: 517286 - DNA, 75 bp, synthetic construct
  source 1..75: mol_type = other DNA
tatcggccacgttgaccatggtaaaaccaccctgaccgctgcaatcacgaccgtactggctaaaacctacggcgg

SEQ ID NO: 517287 - DNA, 75 bp, synthetic construct
  source 1..75: mol_type = other DNA
ctctgtgcggacggtcagtggcggcagattgtcaccattgaggacgccctgaaaggcggctgcacactgttcgac

SEQ ID NO: 517288 - DNA, 75 bp, synthetic construct
  source 1..75: mol_type = other DNA
tatcggccacgttgaccatggtaaaacaacactgaccgctgcaatcacgaccgtactggctaaaacctacggcgg

SEQ ID NO: 517289 - DNA, 75 bp, synthetic construct
  source 1..75: mol_type = other DNA
cacaagcagtacccgttaatcgctaatgctctgaaagaaatggttgacgcgggactggtcggcgacgttcttaaa

SEQ ID NO: 517290 - DNA, 75 bp, synthetic construct
  source 1..75: mol_type = other DNA
ccgtcaggcactgattgatgctaacctgcgtctcggtctggcactggcggatgatgaaattgactatctgcaaga

SEQ ID NO: 517291 - DNA, 75 bp, synthetic construct
  source 1..75: mol_type = other DNA
aaacaccttcgaaaccacaccagatcacgttctctctgcatataaagataacgccgccgtgatggaaggttccga

SEQ ID NO: 517292 - DNA, 75 bp, synthetic construct
  source 1..75: mol_type = other DNA
tacgctgactcacgaacaatggcagcagattaccgctgaactacacgaccgcatgatggaaacggtcttttttgc

SEQ ID NO: 517293 - DNA, 75 bp, synthetic construct
  source 1..75: mol_type = other DNA
aaagactctatgtcgatgaaaacccgctggcaggaaggtaatgaagagcgcgaaatgacctccccgctgtcgctg

SEQ ID NO: 517294 - DNA, 75 bp, synthetic construct
  source 1..75: mol_type = other DNA
cgccccgcaaggcaaactcctgctggtgaccccgcgtcctggcaccatctctccctggtcttcgaaagcgaccga

SEQ ID NO: 517295 - DNA, 75 bp, synthetic construct
  source 1..75: mol_type = other DNA
actgctggcacgttttcaggctgccaggctcccggttcacaatatttacgccgagtatgtccattttgctgacct

SEQ ID NO: 517296 - DNA, 75 bp, synthetic construct
  source 1..75: mol_type = other DNA
ctggtgaccccgcgtcctggcaccatctctccctggtcttcgaaagcgaccgatattgcccataactgcgggcta

SEQ ID NO: 517297 - DNA, 75 bp, synthetic construct
  source 1..75: mol_type = other DNA
ttgccactggcgcacgtccgaaagttgccgtgctgcgtgagcagggcgtgaactcgcatgttgaaatggcggcag

SEQ ID NO: 517298 - DNA, 75 bp, synthetic construct
  source 1..75: mol_type = other DNA
acgacctgaaaggccagccatgtggggaagtgacaccacaggaacagcaggaggcagaaacacggctgatggtgc

SEQ ID NO: 517299 - DNA, 75 bp, synthetic construct
  source 1..75: mol_type = other DNA
aggaaccggcgcacatcctgatgaaagtagaaacccacaaccacccgacggcgatttctccgtggccgggcgcgg

SEQ ID NO: 517300 - DNA, 75 bp, synthetic construct
  source 1..75: mol_type = other DNA
gattaccgccaacgggcagactgtatttagcgaaagccgcaccacgttgcgtgtctggtgggcagaaactacctg

SEQ ID NO: 517301 - DNA, 75 bp, synthetic construct
  source 1..75: mol_type = other DNA
gtggccgggcgcggcgaccggttccggcggtgaaatccgcgatgaaggtgccaccgggcgcggcgcgaagccgaa

SEQ ID NO: 517302 - DNA, 75 bp, synthetic construct
  source 1..75: mol_type = other DNA
ccgctggatgtgctgctcggcaaaacgccgaaaatgacccgcaacgtacaaacgctgaaagcgaagggcgatgcg

SEQ ID NO: 517303 - DNA, 75 bp, synthetic construct
  source 1..75: mol_type = other DNA
tcaacaataatgttgtggtggttattgatgatcaacagcgggaaaaagtcgtcatggggcgaggaattggctttc

SEQ ID NO: 517304 - DNA, 75 bp, synthetic construct
  source 1..75: mol_type = other DNA
ccagccatgtggggaagtgacaccacaggaacagcaggaggcagaaacgcggctgatggcgctgaatgagaagca

SEQ ID NO: 517305 - DNA, 75 bp, synthetic construct
  source 1..75: mol_type = other DNA
gcagaaaacgacgcaggcggcgcaagagcaggataaaaccacatcggcgcataaagtgatacccgataatcagaa

SEQ ID NO: 517306 - DNA, 75 bp, synthetic construct
  source 1..75: mol_type = other DNA
gctcgtctcttcaatctgcagagtaaaaaacgtgcctggatagtcggcaaagagcattacgatttgggtaatgac

SEQ ID NO: 517307 - DNA, 75 bp, synthetic construct
  source 1..75: mol_type = other DNA
aacgaccagtttgaccgtattgtttcggttggaatgttcgaacatgtcgggccgaaaaattacgatacctatttc

SEQ ID NO: 517308 - DNA, 75 bp, synthetic construct
  source 1..75: mol_type = other DNA
ataaaaccccttaaggctggcgtgatacacgatatgttgcaggacgcgaaggcgcgggaactggcgattggtcat

SEQ ID NO: 517309 - DNA, 75 bp, synthetic construct
  source 1..75: mol_type = other DNA
cgttcagcgatgcctataactatatgaaaaacggtacgctactgcgtcaggtgatcaacaagctgaacgaaattg

SEQ ID NO: 517310 - DNA, 75 bp, synthetic construct
  source 1..75: mol_type = other DNA
ctattctgttcaacaaccgtgtacgcgatgaatttgcaaccttcttccatcgtccacaaacgttggcgctggggg

SEQ ID NO: 517311 - DNA, 75 bp, synthetic construct
  source 1..75: mol_type = other DNA
tgatgccgcacccggaacgtgttttccgtactgtcagcaactcctggcatccggaaaactggggcgaggatggcc

SEQ ID NO: 517312 - DNA, 75 bp, synthetic construct
  source 1..75: mol_type = other DNA
caggaacaacaggacgcagaaacgcggctggtggcgctgaatgagaagcgcaaacgtcagcgccgggcagcaaag

SEQ ID NO: 517313 - DNA, 75 bp, synthetic construct
  source 1..75: mol_type = other DNA
ttcctgcaactgattgtggaagtactggcgaaaaacggtcgcgcggcggtggtattgccggatggcacactattt

SEQ ID NO: 517314 - DNA, 75 bp, synthetic construct
  source 1..75: mol_type = other DNA
tttggtggcacggaagaagacggtattgagaagaactttccggcagaaatgcaaacccgcgaaacggcggatctg

SEQ ID NO: 517315 - DNA, 75 bp, synthetic construct
  source 1..75: mol_type = other DNA
gacaccagacccggcacagacaaaactgattaaccagaaacgcatcgcgtcgctgaatcttctgagtgttgaccc

SEQ ID NO: 517316 - DNA, 75 bp, synthetic construct
  source 1..75: mol_type = other DNA
acgctggacacactgaaagaaattgccgcagccattaacaatgacccgaaattcagcaccactattaacaatgcg

SEQ ID NO: 517317 - DNA, 75 bp, synthetic construct
  source 1..75: mol_type = other DNA
ggtaatacccacttcccgttcactgacctgaataatgtgcaaatcgctgatttggtgagtcggtttttgaaagag

SEQ ID NO: 517318 - DNA, 75 bp, synthetic construct
  source 1..75: mol_type = other DNA
ctatcgaattgccaccaactggagcaggcgcaggggctggttttagggttcgaccaaggaatattgcatttaact

SEQ ID NO: 517319 - DNA, 75 bp, synthetic construct
  source 1..75: mol_type = other DNA
tgaaggtgtacgtggttgacctgatggcaaaacatcttgctgcacaggacccacattcacagtacgcgccaaaag

SEQ ID NO: 517320 - DNA, 75 bp, synthetic construct
  source 1..75: mol_type = other DNA
ctatgcgctaaaaagttttgatccaacgggaggtcggttagtagttacggctgatgctttcggggaacttattac

SEQ ID NO: 517321 - DNA, 75 bp, synthetic construct
  source 1..75: mol_type = other DNA
acagtccgactctgacaggcatgcctaaaacgccaacacctccggcaggaaacaacagcaccctgattgccagca

SEQ ID NO: 517322 - DNA, 75 bp, synthetic construct
  source 1..75: mol_type = other DNA
attgctgtgggaaactgcccggagagctacaagccgaagctggcggagggcagcggacgcacgcagaccgtgcgt

SEQ ID NO: 517323 - DNA, 75 bp, synthetic construct
  source 1..75: mol_type = other DNA
tacgtttacccgcagttgtcagcaagctcgggatcgccagatcgaccatctatgactggctcaatgccaaatcgc

SEQ ID NO: 517324 - DNA, 75 bp, synthetic construct
  source 1..75: mol_type = other DNA
gactaaaatcccgattttgattatttacggcgataacataccggataaacctgtagccatgcccgcacaggacag

SEQ ID NO: 517325 - DNA, 75 bp, synthetic construct
  source 1..75: mol_type = other DNA
cttttgtgaaatcggcgattgcagcaatggtgggttctgcacctgcggcactggatacactgaacgaactggcgt

SEQ ID NO: 517326 - DNA, 75 bp, synthetic construct
  source 1..75: mol_type = other DNA
ctggcactgaaagcaccgctggcaagtccggccctgaccggaacgccaacggctcccactgctgttcagtcaacg

SEQ ID NO: 517327 - DNA, 75 bp, synthetic construct
  source 1..75: mol_type = other DNA
tgacagataactcagtgcaatcaggtgatgtgttatcttctctggttatgcgtgtggcgccccatggcggctttt

SEQ ID NO: 517328 - DNA, 75 bp, synthetic construct
  source 1..75: mol_type = other DNA
aataatactacgcagcttgcgaccaccgcgtttgttcaggcggcactgacagcccttattaatggtgcgccagcc

SEQ ID NO: 517329 - DNA, 75 bp, synthetic construct
  source 1..75: mol_type = other DNA
ttgcctgatttacgtggtgagttcattcgtggctgggatgacggaagaggaatagatactaaccgtagcttgctt

SEQ ID NO: 517330 - DNA, 75 bp, synthetic construct
  source 1..75: mol_type = other DNA
tctttatgatgatgaaggtgtactcattgcggtggcgaactgcccggaaacgtacaaaccgcagttgcaggaagg

SEQ ID NO: 517331 - DNA, 75 bp, synthetic construct
  source 1..75: mol_type = other DNA
ggttactgaactggctgtctttcgttttattgacggcaaaatgtggctcaccgaaattgccgacgggtgtgattt

SEQ ID NO: 517332 - DNA, 75 bp, synthetic construct
  source 1..75: mol_type = other DNA
ttgcgccgctgcaccatgccactcactgcgcaacatgcggtgcatatgctggttactgaactggctgtctttcgt

SEQ ID NO: 517333 - DNA, 75 bp, synthetic construct
  source 1..75: mol_type = other DNA
agtcagtgttatgtctgatgccgttcagtcagacccgtcgaatcctgccccgcaggttttgtctgtaaattttga

SEQ ID NO: 517334 - DNA, 75 bp, synthetic construct
  source 1..75: mol_type = other DNA
atgacaaacatgatctcatatcagggacttgttcgcaccttccctaaatattctacctatgatgatgcagtcggt

SEQ ID NO: 517335 - DNA, 75 bp, synthetic construct
  source 1..75: mol_type = other DNA
ttctgcaccttttaacattgagagttataaaacagcggaaggtcaatatgctattccgtttaaagcaaaatacct

SEQ ID NO: 517336 - DNA, 75 bp, synthetic construct
  source 1..75: mol_type = other DNA
ccgtttaaagcaaaatacctgaaactgacagataactcagtgaattcaggtgatgtgttatcttccctggttatg

SEQ ID NO: 517337 - DNA, 75 bp, synthetic construct
  source 1..75: mol_type = other DNA
agtggtgatgggtggatgaaattacccaacggtaaaatcctgcaatatggtcgtggtgcggttacgccgacatta

SEQ ID NO: 517338 - DNA, 75 bp, synthetic construct
  source 1..75: mol_type = other DNA
ggtttgggagaagcggcaaacggaatgtgggacaggggaaaatcagataccggacatggcctcgtttgccagtgg

SEQ ID NO: 517339 - DNA, 75 bp, synthetic construct
  source 1..75: mol_type = other DNA
tgccacaaatacaggagggagtctgatcccatcaccgacacttcattcacgagggagtatcggtaatactggcgg

SEQ ID NO: 517340 - DNA, 75 bp, synthetic construct
  source 1..75: mol_type = other DNA
tacgtttaccagacgttgttaacaaaataggcatcgccagatcgaccatctacgactggcttaatgctaagtcgc

SEQ ID NO: 517341 - DNA, 75 bp, synthetic construct
  source 1..75: mol_type = other DNA
ggtttgggagaagcggcaacgaggaacgtcggaacggataccgggcaagtaccagatatgagtagttttacaacg

SEQ ID NO: 517342 - DNA, 75 bp, synthetic construct
  source 1..75: mol_type = other DNA
cctgtcatcttttgtaccgtcgtaacgggcattgcgggcatggaaagcatgaaggcggtcggtcgtaccggcgca

SEQ ID NO: 517343 - DNA, 75 bp, synthetic construct
  source 1..75: mol_type = other DNA
gatcatattcactatatggagttatggactggtgaagggcttgccgcaaatagcgcccgtgcaggaacaaaccct

SEQ ID NO: 517344 - DNA, 75 bp, synthetic construct
  source 1..75: mol_type = other DNA
tgattctgggcgtactattttgtctgcgcagggtgatgcaataagaaatattaccggccagctggctgacgtcag

SEQ ID NO: 517345 - DNA, 75 bp, synthetic construct
  source 1..75: mol_type = other DNA
catcaaaatggcgaatggtctggccgatgctggctttaacctttccgctgcactgttcgtatcctgcgcggataa

SEQ ID NO: 517346 - DNA, 75 bp, synthetic construct
  source 1..75: mol_type = other DNA
taacaaagcctggtctggaattccggggacaggtgctcaggacgctggtgaatcagttttttatattgcagtagg

SEQ ID NO: 517347 - DNA, 75 bp, synthetic construct
  source 1..75: mol_type = other DNA
tgtggatagtgggcgaactctgctttcagcgcaaggagatgctattcgaaacattactggcggttttggtcagtt

SEQ ID NO: 517348 - DNA, 75 bp, synthetic construct
  source 1..75: mol_type = other DNA
gcccagctatgaccggaacacccaccgcacctactgcggcgcagacagtgaataatacgcagattgccacaacgg

SEQ ID NO: 517349 - DNA, 75 bp, synthetic construct
  source 1..75: mol_type = other DNA
gtaaacgaatggatagaaccaatcatgtcagttccggcgccggtgatggtagcccgcgaaacattgcatttaact

SEQ ID NO: 517350 - DNA, 75 bp, synthetic construct
  source 1..75: mol_type = other DNA
aatggtgggttctgcacctgcggcactggatacactgaacgaactggcagcggcgctggggaatgatccgaactt

SEQ ID NO: 517351 - DNA, 75 bp, synthetic construct
  source 1..75: mol_type = other DNA
ttccgccactccgccaacaggctggctgaaatgcaacggcgcggctttttctgctgaagaatacccggaactggc

SEQ ID NO: 517352 - DNA, 75 bp, synthetic construct
  source 1..75: mol_type = other DNA
aatcaccatactgaccccgacacagaatagttatcctgtcactatcggcgcaggtggggccggcggcgttggtgc

SEQ ID NO: 517353 - DNA, 75 bp, synthetic construct
  source 1..75: mol_type = other DNA
caaatggatattttgtcgggaatcagagaacaacagcatatgggataaatgaaacccgtccacggaatattgcat

SEQ ID NO: 517354 - DNA, 75 bp, synthetic construct
  source 1..75: mol_type = other DNA
gacagctggtccagtatggtgtttttgaagttcaacggcgcgaaattctctgccactgattatcctgtgctggcg

SEQ ID NO: 517355 - DNA, 75 bp, synthetic construct
  source 1..75: mol_type = other DNA
tgccacgacaatgcttaatgcgctggcaggtaaacaaccgctggacaatacgcttaccaatttgagtggaaagga

SEQ ID NO: 517356 - DNA, 75 bp, synthetic construct
  source 1..75: mol_type = other DNA
ctggcactgaaagcgccgctgtcgagtccggcacttaccggaacgccaacagcacctactgcggcgcagtcggtc

SEQ ID NO: 517357 - DNA, 75 bp, synthetic construct
  source 1..75: mol_type = other DNA
gatacaccacgttttcaagatcatacgctgatgctaaagttatttttgattacggataaggtcggtcatgttgaa

SEQ ID NO: 517358 - DNA, 75 bp, synthetic construct
  source 1..75: mol_type = other DNA
acatcaacgttggttagacattatccccatattatctatattaagttagaaaaaaactcaggtggggggatggca

SEQ ID NO: 517359 - DNA, 75 bp, synthetic construct
  source 1..75: mol_type = other DNA
gccaactgcgtatagacttaaataatggccttgatcatttgcttatggcccgtactagcaataagcagcgagcag

SEQ ID NO: 517360 - DNA, 75 bp, synthetic construct
  source 1..75: mol_type = other DNA
cggtgttgtgttttttactgatattcagggaacggttatgtgagctgaatattcacaggggaaatacagtggtgc

SEQ ID NO: 517361 - DNA, 75 bp, synthetic construct
  source 1..75: mol_type = other DNA
caggagcgccagctacaaacatattctcgagtcaaccaggtgggaaaggaattggtggggatgtgaatattgcag

SEQ ID NO: 517362 - DNA, 75 bp, synthetic construct
  source 1..75: mol_type = other DNA
acaggatttaccgctcaggtcatgatgaatattgctgtaaatacaaacacctcagacgctatgtttttagctata

SEQ ID NO: 517363 - DNA, 75 bp, synthetic construct
  source 1..75: mol_type = other DNA
tacaacgtgacgtcaatgatctgacccgtttttttgctaaatacaatatgggtggaatgaatgcttcatatttta

SEQ ID NO: 517364 - DNA, 75 bp, synthetic construct
  source 1..75: mol_type = other DNA
tgtagctggtcttctcacataccttggtttgggagaaggttcggcgttacccgttggtgtgcctgttccgtggcc

SEQ ID NO: 517365 - DNA, 75 bp, synthetic construct
  source 1..75: mol_type = other DNA
cgcttaccaatttgagtggaaaggatgtagctggtcttctcacataccttggtttgggagaaacgataaataaag

SEQ ID NO: 517366 - DNA, 75 bp, synthetic construct
  source 1..75: mol_type = other DNA
aaactcaaggatgaaggtctcaggttcagtaatttgttacttgaggaacggatgcgggttgctgtaaatatgtta

SEQ ID NO: 517367 - DNA, 75 bp, synthetic construct
  source 1..75: mol_type = other DNA
ttggtgcgattgctctacagttgcatatgagtgagagcttgttaaagaaaaaactcaaggatgaaggtctcaggt

SEQ ID NO: 517368 - DNA, 75 bp, synthetic construct
  source 1..75: mol_type = other DNA
gctcatccaacattcaaaataatcacttagcttatgatgataacgtcttcgtcagcatagaaccacctgaacgca

SEQ ID NO: 517369 - DNA, 75 bp, synthetic construct
  source 1..75: mol_type = other DNA
ttcacggtcgctcaatatcaatctaagctacgcccgggatgcagtggcattacgctataactgccataactggtc

SEQ ID NO: 517370 - DNA, 75 bp, synthetic construct
  source 1..75: mol_type = other DNA
aaactgaaaaatgaagggggcatgttcagtcgcttgttgctggaagagcggatgcgtgttgctgtcaatatgtta

SEQ ID NO: 517371 - DNA, 75 bp, synthetic construct
  source 1..75: mol_type = other DNA
aagtaggtcctactttatctctgtatttcaccgctattatggcttcccgccagacagatatgtatctatgcaagg

SEQ ID NO: 517372 - DNA, 75 bp, synthetic construct
  source 1..75: mol_type = other DNA
atcggggtgctcgccgtgtgcgccacggtgttgtgttttttactgatattcagggaacggttatgtgagctgaat

SEQ ID NO: 517373 - DNA, 75 bp, synthetic construct
  source 1..75: mol_type = other DNA
acatttgacctgccggatgagccaacaggcaatgccgcgccttcatggctgactgagccgacgccacagattaac

SEQ ID NO: 517374 - DNA, 75 bp, synthetic construct
  source 1..75: mol_type = other DNA
agttgctgacactggtgtcgggatatctggtgccgaaactggcgcgagaaattggcggcgaacccagcaaaacgc

SEQ ID NO: 517375 - DNA, 75 bp, synthetic construct
  source 1..75: mol_type = other DNA
caacagcgtctggacaaaacccgtcagcttaaacaggggatgatgcaggagttgttaaccgggaaaacccgctta

SEQ ID NO: 517376 - DNA, 75 bp, synthetic construct
  source 1..75: mol_type = other DNA
gttaaaaatcttaagtttgctattacaccaaactcccttgaacaaacggaaattgtcagaacattaaatgatatt

SEQ ID NO: 517377 - DNA, 75 bp, synthetic construct
  source 1..75: mol_type = other DNA
cctgttctataacctcgacagtcgttatgaggaactgagaagtttatctactggtgatggggggcgtggtgggtt

SEQ ID NO: 517378 - DNA, 75 bp, synthetic construct
  source 1..75: mol_type = other DNA
atggccttgccagccatgaagaaaagcgtgtttttagccagcttctggcaccgtatatcgcagaattgcaaaatg

SEQ ID NO: 517379 - DNA, 75 bp, synthetic construct
  source 1..75: mol_type = other DNA
gaacacgcgtcgcgaacggcaggagcaggggattccactggatgcgggaagctggcaggccatttgtgatgcggc

SEQ ID NO: 517380 - DNA, 75 bp, synthetic construct
  source 1..75: mol_type = other DNA
gggcgccagctcaggcggctaaacagtaagcggctccggcagcaggcccttgcatcagcggctggcgtgaaagaa

SEQ ID NO: 517381 - DNA, 75 bp, synthetic construct
  source 1..75: mol_type = other DNA
gcgcgccagctcaggcggctaaacagcaagcggctccggcagcaggcccatgcatcagcggctggcgtgaaagaa

SEQ ID NO: 517382 - DNA, 75 bp, synthetic construct
  source 1..75: mol_type = other DNA
gaccaatccggcggtaatgcaggagtcgccgttgggttcgctgttgacctttgccgaacataaaggctacgccct

SEQ ID NO: 517383 - DNA, 75 bp, synthetic construct
  source 1..75: mol_type = other DNA
cccgcgtcgcctggcataaaggcgtccccgtgccgccaggttgcctgattgacgttaacggcgtgccgacgacca

SEQ ID NO: 517384 - DNA, 75 bp, synthetic construct
  source 1..75: mol_type = other DNA
ggcggtaatgctggagtcaccgttaggagcgttgctggcctttgctgaacataaaggttacgccctggcggtgat

SEQ ID NO: 517385 - DNA, 75 bp, synthetic construct
  source 1..75: mol_type = other DNA
taccgtatccgactcgattttgggcttctgcgctaattgcaaagccgcatgtcctgatggctgacagcatcatcc

SEQ ID NO: 517386 - DNA, 75 bp, synthetic construct
  source 1..75: mol_type = other DNA
tcagtcgcttgttgctggaagagcggatgcgtgttgctgtcaatatgttatgttcccggcatggatatggacagg

SEQ ID NO: 517387 - DNA, 75 bp, synthetic construct
  source 1..75: mol_type = other DNA
aaactgaaaaatgaagggcacatgttcagtcgcttgttgctggaagagcggatgcgtgttgctgtaaatatgtta

SEQ ID NO: 517388 - DNA, 75 bp, synthetic construct
  source 1..75: mol_type = other DNA
gcgcgccagctcaggcggctaaacagaaagcggctccggcagcaggcccctgcatcagcggctggcgtgaaagaa

SEQ ID NO: 517389 - DNA, 75 bp, synthetic construct
  source 1..75: mol_type = other DNA
gtgcgccagctcaggcggctaaacagtaagcggctccggcagcaggcccgtgcatcagcggctggcgtgaaagaa

SEQ ID NO: 517390 - DNA, 75 bp, synthetic construct
  source 1..75: mol_type = other DNA
gagcgccagctcaggcggctaaacagcaagcggctccggcagcaggcccctgcatcagcggctggcgtgaaagaa

SEQ ID NO: 517391 - DNA, 75 bp, synthetic construct
  source 1..75: mol_type = other DNA
gactggttgctcacgcaactggaaaccatcccgcatatcaagcgtctgcgcattcacagccgtctgccgattgtg

SEQ ID NO: 517392 - DNA, 75 bp, synthetic construct
  source 1..75: mol_type = other DNA
tgtcgctggtactctcctggttcgaacaaaaagcgattgttattctgctgacgctgctttctttgggcgtgaaaa

SEQ ID NO: 517393 - DNA, 75 bp, synthetic construct
  source 1..75: mol_type = other DNA
tgcctgatcctgaccctcgcctgcggtaaatatcgctttaacaaacttgagtttggcgatatcgaaggtctgccg

SEQ ID NO: 517394 - DNA, 75 bp, synthetic construct
  source 1..75: mol_type = other DNA
gcaagggctttcggcctgggcggtaaaagcgcgtgaatacggcatcatcaaccacgatgtcgacagcttcgcgcc

SEQ ID NO: 517395 - DNA, 75 bp, synthetic construct
  source 1..75: mol_type = other DNA
gcttattatgcttccatcggaaacgatgatctggcagcctgagttcacagataaaacactctccaggaaacccgg

SEQ ID NO: 517396 - DNA, 75 bp, synthetic construct
  source 1..75: mol_type = other DNA
ttggccacctgaacagaggtgatatgctcacctcagaacaatacaggtgctccaatgaaaaaaagaaatttcagc

SEQ ID NO: 517397 - DNA, 75 bp, synthetic construct
  source 1..75: mol_type = other DNA
ccatattctgagcgtactgccggaatggccttccaaccaagttggcgaactcctgccatggaacgtagtactcac

SEQ ID NO: 517398 - DNA, 75 bp, synthetic construct
  source 1..75: mol_type = other DNA
cggcgctggggaatgatccgaactttgccacgacaatgctgaatgcgctggcaggtaaacaaccgctggacaata

SEQ ID NO: 517399 - DNA, 75 bp, synthetic construct
  source 1..75: mol_type = other DNA
cgcttaccaatttgagcggaaaggatgtatctggtcttctcacataccttggtttgggagaagcggcgaaaaggg

SEQ ID NO: 517400 - DNA, 75 bp, synthetic construct
  source 1..75: mol_type = other DNA
tatgtggatgacaaggcactggagctgaaggtgtacgtggatgatcagatggcaaaacatcttgccgcaccggac

SEQ ID NO: 517401 - DNA, 75 bp, synthetic construct
  source 1..75: mol_type = other DNA
ggctgcggtgtcaacgatctgccgttgtcgctggtgctctcctggtttgaacagaaagcgattgtcattctgctg

SEQ ID NO: 517402 - DNA, 75 bp, synthetic construct
  source 1..75: mol_type = other DNA
ggaaccccggggcggttcattctcgcttgccttctgtatttcaaaaagcatcattcaggtcattaaaagttattt

SEQ ID NO: 517403 - DNA, 75 bp, synthetic construct
  source 1..75: mol_type = other DNA
tttcccgctacctttccccgcgcgggtcgaatcaattacactgacaatggcagatatccaggagtctctgctttc

SEQ ID NO: 517404 - DNA, 75 bp, synthetic construct
  source 1..75: mol_type = other DNA
cattattggtatcggaggcacagccgcgcttgccgcaggaaatactcttattgacctaattcgtcaaattaatgg

SEQ ID NO: 517405 - DNA, 75 bp, synthetic construct
  source 1..75: mol_type = other DNA
ggtctgtcaactggaaagcacagcgcgtagcctgcgctccacatttgacctgccggatgagccaacaggcaatgc

SEQ ID NO: 517406 - DNA, 75 bp, synthetic construct
  source 1..75: mol_type = other DNA
aagaaatcgcgcctgcaacctccgccgccagacgaagaactgaaaaaattgcgggcggaagtgacggcattagcg

SEQ ID NO: 517407 - DNA, 75 bp, synthetic construct
  source 1..75: mol_type = other DNA
gccaaaacgctcagcgctgagcgttttgggaaaaaccaagttatatgaactgatggttctggatgacgaagaact

SEQ ID NO: 517408 - DNA, 75 bp, synthetic construct
  source 1..75: mol_type = other DNA
tctggtgcctaaactggcgcgagaaattggcggcgaacccagcaaaacgccgctggatctccagctacgccagca

SEQ ID NO: 517409 - DNA, 75 bp, synthetic construct
  source 1..75: mol_type = other DNA
tttgccctgcgtgtacctcgctcatttattgaacgcatggagaaaggcaatcctgatgatccacttttgcgtcag

SEQ ID NO: 517410 - DNA, 75 bp, synthetic construct
  source 1..75: mol_type = other DNA
gctgcaaatcttgctggtgaatcacatcaaccatgccaatgaggtagatgaaacattccgtcaggcgatggctaa

SEQ ID NO: 517411 - DNA, 75 bp, synthetic construct
  source 1..75: mol_type = other DNA
gatgccagcgcgatagatatcgccttaccagccaggaacgccgatgggacacaggatttaaagtttgctatcagc

SEQ ID NO: 517412 - DNA, 75 bp, synthetic construct
  source 1..75: mol_type = other DNA
ccagcagcggatcggaggttattcacgatacgctgcagatatcagcaggcgatgataactactggctaaccagtg

SEQ ID NO: 517413 - DNA, 75 bp, synthetic construct
  source 1..75: mol_type = other DNA
acgtttcaggctgcagctatgaccgtcgcgctgccagccagaaataaggatggcacgcaggatctgcagttcgtc

SEQ ID NO: 517414 - DNA, 75 bp, synthetic construct
  source 1..75: mol_type = other DNA
ttaaaagaaaatgaaccgcatggtgatttcacaaatattctggaaaacgacctcggattagcaccacaggtagct

SEQ ID NO: 517415 - DNA, 75 bp, synthetic construct
  source 1..75: mol_type = other DNA
agccctggaagctggactggttttacgaagtgcgtcatctttcgacgtcattagggctggtggaggcgggactgg

SEQ ID NO: 517416 - DNA, 75 bp, synthetic construct
  source 1..75: mol_type = other DNA
tcggctgtggttactgcattgccgggtgtccgtttaatattccgcgcctcaacaaagaggataaccgggtatata

SEQ ID NO: 517417 - DNA, 75 bp, synthetic construct
  source 1..75: mol_type = other DNA
caaaaccgcacgttaacgtgggtactatcggccacgttgaccatggtaaaaccacgctgaccgctgcaatcacga

SEQ ID NO: 517418 - DNA, 75 bp, synthetic construct
  source 1..75: mol_type = other DNA
acgtattgctgaaaactacgtctttgacgaggtattaggccttcatatttctcgaactaaatttgagaaaatgtc

SEQ ID NO: 517419 - DNA, 75 bp, synthetic construct
  source 1..75: mol_type = other DNA
taaacgtcttaaaaggaaacaggctactccacgtcaggagaatgtctttaaacgctttacagcccttttagttga

SEQ ID NO: 517420 - DNA, 75 bp, synthetic construct
  source 1..75: mol_type = other DNA
aaatccaaagtcggtaaggttgttgctggtaagaaaccatcggtcagtatttctgattctggaacaaatactatt

SEQ ID NO: 517421 - DNA, 75 bp, synthetic construct
  source 1..75: mol_type = other DNA
tttcttcaaagaaaaatttgtatgggctagatcaagcagagttaagcatgatcctgtcagtacagaacatgataa

SEQ ID NO: 517422 - DNA, 75 bp, synthetic construct
  source 1..75: mol_type = other DNA
aaaagtcagtaaggttgttgcttgtattccgccatcaatcagtatttctgattctggtacaaatactattctgaa

SEQ ID NO: 517423 - DNA, 75 bp, synthetic construct
  source 1..75: mol_type = other DNA
atgctcacgttatgttgacgttaaaaaccattggcccggaagggtttggtaaaaaagaaagaagctggaatgaca

SEQ ID NO: 517424 - DNA, 75 bp, synthetic construct
  source 1..75: mol_type = other DNA
ctgggtgtctatgtatcacgcgctgaccatgaacaacgagccagattcaacggtgatgataaagagttctctggt

SEQ ID NO: 517425 - DNA, 75 bp, synthetic construct
  source 1..75: mol_type = other DNA
attaacacctgatgaaatcaagcgtttcccaagccgtccgtgtaaggttgatacattcgatgctaaactaaaaag

SEQ ID NO: 517426 - DNA, 75 bp, synthetic construct
  source 1..75: mol_type = other DNA
ctgaaccagaagagattgttcttccagacttcccggctacaactaaactgatcttacccagcaatagtggacacg

SEQ ID NO: 517427 - DNA, 75 bp, synthetic construct
  source 1..75: mol_type = other DNA
agccggaagtcaatagaagcatagatctcacaccttcaatgccaccagaacacatgaggcaaggaagcgcgccaa

SEQ ID NO: 517428 - DNA, 75 bp, synthetic construct
  source 1..75: mol_type = other DNA
accactggaaatcgttgttgatgtcagaagctttacgattacacatcttgctgaacccgaagagattgttcttcc

SEQ ID NO: 517429 - DNA, 75 bp, synthetic construct
  source 1..75: mol_type = other DNA
ggcaaattcagaatacttgagcgtcaccagtggaaaggcatggactttgccacccaggcggaatccatccgcaaa

SEQ ID NO: 517430 - DNA, 75 bp, synthetic construct
  source 1..75: mol_type = other DNA
tgttccacggcaaactgaccagtattttacctgtcgtgccaggcggttcttatcaggcgcagggggtattgcaat

SEQ ID NO: 517431 - DNA, 75 bp, synthetic construct
  source 1..75: mol_type = other DNA
cgccgctgacctgaaaggactgctgaagcggctatccgggctggagacgctggcgttcagtgacggaacgccgtt

SEQ ID NO: 517432 - DNA, 75 bp, synthetic construct
  source 1..75: mol_type = other DNA
cgccatgacgctggatatcgcgatgggcggctctaccaacaccgttcttcacctgctggcggcggcgcaggaagc

SEQ ID NO: 517433 - DNA, 75 bp, synthetic construct
  source 1..75: mol_type = other DNA
ctgcgtgcctacgccagcctggcaaccagcgccgacaaaggtgcggtgcgcgataaatcgaaactggggggttaa

SEQ ID NO: 517434 - DNA, 75 bp, synthetic construct
  source 1..75: mol_type = other DNA
atggacgaatcaagaaagcagtttgaagaatggtttgaaaattacactggatgtgatcctaaaaataaaatatac

SEQ ID NO: 517435 - DNA, 75 bp, synthetic construct
  source 1..75: mol_type = other DNA
tataaaaaattaatcgaagctggatatctcatggacgtagaaggaaaatacatattgactgatgctggcatagcg

SEQ ID NO: 517436 - DNA, 75 bp, synthetic construct
  source 1..75: mol_type = other DNA
tcaataaactctccggagccgatgccggaattgtcagccagcttgcagaaaaattactgaccaccagaaccaaag

SEQ ID NO: 517437 - DNA, 75 bp, synthetic construct
  source 1..75: mol_type = other DNA
atgccggtaaacgcattgttgaattgaccaaacgttactacgagcaaaacgacgaaagtgcactgccgcgtaata

SEQ ID NO: 517438 - DNA, 75 bp, synthetic construct
  source 1..75: mol_type = other DNA
aaggaaatttaaaaaccgcattgataatatatcacctgaagaaatccgctcggctaaagataatcacaaacccaa

SEQ ID NO: 517439 - DNA, 75 bp, synthetic construct
  source 1..75: mol_type = other DNA
gaaagcggcgcttagccagactctaaataaggaagagcaggtgaaacttgcacatggtccaaaaggcgcatggca

SEQ ID NO: 517440 - DNA, 75 bp, synthetic construct
  source 1..75: mol_type = other DNA
cgcagctgtgtaaagttgcgccgagcacccaaaaataccatatggaagatgttcaccgggctggtggtgttatcg

SEQ ID NO: 517441 - DNA, 75 bp, synthetic construct
  source 1..75: mol_type = other DNA
ggccacgtctcaccggaagcggcaagtggcggcagcattggcctgattgaagacggcgacctgatcgccatcgac

SEQ ID NO: 517442 - DNA, 75 bp, synthetic construct
  source 1..75: mol_type = other DNA
gcattcgtaccacacaggcattctcgcaggattgccgctgggatacgctggacgacgatcgcgcaaatggctgta

SEQ ID NO: 517443 - DNA, 75 bp, synthetic construct
  source 1..75: mol_type = other DNA
atttaacaatggtgactataaattaacatctgatgagatcaagcgtttcccaagccgtcctaatcaggaacagcc

SEQ ID NO: 517444 - DNA, 75 bp, synthetic construct
  source 1..75: mol_type = other DNA
atgggcaaaaccgaccgcagcgccaacccttcgccgggcaacaaaaacggcgggctcgctaacgtggtaaagaaa

SEQ ID NO: 517445 - DNA, 75 bp, synthetic construct
  source 1..75: mol_type = other DNA
atgggcaaaaccgaccgcagcgccaacccttcgccgggcaacaaaaatggcgggctcgccaacgtggtaaagaaa

SEQ ID NO: 517446 - DNA, 75 bp, synthetic construct
  source 1..75: mol_type = other DNA
gtatgtcacgttctcgcgtttctgaacggggaacggcgctccattgaggaagttattctgatgaaaaatataaaa

SEQ ID NO: 517447 - DNA, 75 bp, synthetic construct
  source 1..75: mol_type = other DNA
acctggggcaacatcatcgtcgtggtgttgattatgctgatgacggcggcgctgaatttaggctcactcgccagc

SEQ ID NO: 517448 - DNA, 75 bp, synthetic construct
  source 1..75: mol_type = other DNA
gcgctttactggcgacggcttcagccatcaacgcaaacctgttcgccgtgtttaacatcatggacaacatgggca

SEQ ID NO: 517449 - DNA, 75 bp, synthetic construct
  source 1..75: mol_type = other DNA
actgtcgattggcatggtgctggcatttgccttcgtgaccaactattccggcatgtccaccacgctggcgctggt

SEQ ID NO: 517450 - DNA, 75 bp, synthetic construct
  source 1..75: mol_type = other DNA
cggatattggcgacagcaacgtttcagatctggatacgggtgatctgcttgttccgattaaaaatgcagaaacac

SEQ ID NO: 517451 - DNA, 75 bp, synthetic construct
  source 1..75: mol_type = other DNA
gaagcaggacatctgtgggcacggttttcgcacgctggcctgtagtgccttaattgagtcaggtttgtggtcaga

SEQ ID NO: 517452 - DNA, 75 bp, synthetic construct
  source 1..75: mol_type = other DNA
caatggtgggctgactaccttgatgcaagcagaaacggtatggtaaggccgtttgaatttgccacagatgctcgt

SEQ ID NO: 517453 - DNA, 75 bp, synthetic construct
  source 1..75: mol_type = other DNA
gttccggttaaaaaagcagaaacgctcggctatcttgaaattgccatgcggatcaagcaatacatcactgccatc

SEQ ID NO: 517454 - DNA, 75 bp, synthetic construct
  source 1..75: mol_type = other DNA
agctggaagaaatccccctgctacttgaacgtattgatgcctacaaaggccgtggacttaccacactggcgatta

SEQ ID NO: 517455 - DNA, 75 bp, synthetic construct
  source 1..75: mol_type = other DNA
gccagcactttgttcccctttgcaggcaggctcttaagatactgaaagagatccgtcagcttacctatgaagaag

SEQ ID NO: 517456 - DNA, 75 bp, synthetic construct
  source 1..75: mol_type = other DNA
gttgccagcgccacctttttgatctgctatctggcggtgtttgtggtggcgatccgcctgcgtcatgatattcac

SEQ ID NO: 517457 - DNA, 75 bp, synthetic construct
  source 1..75: mol_type = other DNA
aatagcacgaaggtacaaatgttcagatggaacaataagaaagaatatacaacttacaatgggagtattgttagg

SEQ ID NO: 517458 - DNA, 75 bp, synthetic construct
  source 1..75: mol_type = other DNA
aatacaacgttgcgctgattccggtcagtatggacggtgcccggagcgaggcactgccgcagacgcgtcctgaca

SEQ ID NO: 517459 - DNA, 75 bp, synthetic construct
  source 1..75: mol_type = other DNA
attcgtcagctggccagtcagtacgggctgtttttcttttaccgggggaatgatgcgctggatggtgagcttgca

SEQ ID NO: 517460 - DNA, 75 bp, synthetic construct
  source 1..75: mol_type = other DNA
catgcccgtacacgtattacagatgatcgcattggcgaaatatttgatttcagccacagaacagatcttcatggt

SEQ ID NO: 517461 - DNA, 75 bp, synthetic construct
  source 1..75: mol_type = other DNA
ctcgggcggatgattggtcatcccggcgagattggcgtcggcattatggcagcgttaatcggcggaccgttcttc

SEQ ID NO: 517462 - DNA, 75 bp, synthetic construct
  source 1..75: mol_type = other DNA
tagaatgctgcttggttatttcaaaatagaaaataaaaaacagatggatagtaatgttgatatatgtgatatttt

SEQ ID NO: 517463 - DNA, 75 bp, synthetic construct
  source 1..75: mol_type = other DNA
ggaaacaaacaacattcgattagatctctatagatttgataatcttgataaacttctacaaattattactcgcat

SEQ ID NO: 517464 - DNA, 75 bp, synthetic construct
  source 1..75: mol_type = other DNA
aaggcatataaaccaattatttcaaagaaaaaatataataaagctcaagaaataattcagctccgatccattcat

SEQ ID NO: 517465 - DNA, 75 bp, synthetic construct
  source 1..75: mol_type = other DNA
atatcaaagattatgctgaaaagaacaatatggaaatcgcttatacctacgatgatgcaggtaagagcggagtca

SEQ ID NO: 517466 - DNA, 75 bp, synthetic construct
  source 1..75: mol_type = other DNA
tcgaaagggattgctggcgtgccgggcgtgtcgtttgtggtgttgctggcaacgctgggtagcgtaggtattccg

SEQ ID NO: 517467 - DNA, 75 bp, synthetic construct
  source 1..75: mol_type = other DNA
aatgcgctggcggtgctggtgattgccaaatgggaacacaaatttgaccgtaagaaagcgctggcttatgagcgt

SEQ ID NO: 517468 - DNA, 75 bp, synthetic construct
  source 1..75: mol_type = other DNA
cgggaaaagcggttagccggacagctttcgtcgaacatcttggtcatgaagttgtacaacatcatccaaactgga

SEQ ID NO: 517469 - DNA, 75 bp, synthetic construct
  source 1..75: mol_type = other DNA
ggccggattaacacagcaccagcttctggtcttcctggctgtcatgcgcaaaacatatggctttaataaaaaaat

SEQ ID NO: 517470 - DNA, 75 bp, synthetic construct
  source 1..75: mol_type = other DNA
atggcgaaagccggtctgctggaacagaaccgactttcaggtgcaaatcgtaacgcactcattgcgggaggaatt

SEQ ID NO: 517471 - DNA, 75 bp, synthetic construct
  source 1..75: mol_type = other DNA
acccaactcgaaatcaaccgtaacaaacaacaggctggcgtgacagccggaaaaccaaaactcgacctgacaaac

SEQ ID NO: 517472 - DNA, 75 bp, synthetic construct
  source 1..75: mol_type = other DNA
gcccgtcggatgggcatcgagtggtatgtgctggttgatggcgatgaagccggtaaaaaatatgccgctacggta

SEQ ID NO: 517473 - DNA, 75 bp, synthetic construct
  source 1..75: mol_type = other DNA
ggcgttcgtatcgggttattttgctcggactatttgcgactttattgcaggcaaaaggcacgctacggctggata

SEQ ID NO: 517474 - DNA, 75 bp, synthetic construct
  source 1..75: mol_type = other DNA
atcattttgaccttccgcgaatcgctgccaggccggcatcgggtgcgccgctatcgtccgctggaagcgtgctgg

SEQ ID NO: 517475 - DNA, 75 bp, synthetic construct
  source 1..75: mol_type = other DNA
aatcaaagacattttgatgtaaagcatcaaagtgtctcaggatattcaaacattattcttattcatagaacaacc

SEQ ID NO: 517476 - DNA, 75 bp, synthetic construct
  source 1..75: mol_type = other DNA
ggttaaatttgcccgccgaatggggattgaatggcatgtactggtcgatggcgatgaagcagggaagaaatatgc

SEQ ID NO: 517477 - DNA, 75 bp, synthetic construct
  source 1..75: mol_type = other DNA
ttgaccaagaaactatgagttggttgattgacctgaacatgtcaggttttaatgtgcattttatgaattgctttg

SEQ ID NO: 517478 - DNA, 75 bp, synthetic construct
  source 1..75: mol_type = other DNA
tatcacaagcgaatgcaaccgacttgatttaagcccggagcaattattgaagctgaatgtattcttgacattaaa

SEQ ID NO: 517479 - DNA, 75 bp, synthetic construct
  source 1..75: mol_type = other DNA
ttaagcccggagcaattactgaagttgaatatattcttgacttatcagaatgaattaaacccttatggagaggta

SEQ ID NO: 517480 - DNA, 75 bp, synthetic construct
  source 1..75: mol_type = other DNA
tgcattacccaatatcaagagggctgaaagccgagcagatgcgggaactgctgaatggtcactacatcagccacc

SEQ ID NO: 517481 - DNA, 75 bp, synthetic construct
  source 1..75: mol_type = other DNA
taaacacaaaagacaaactaacaaaagacaatataaaaccttattcgtccgagaattctggcgaatcctctgacc

SEQ ID NO: 517482 - DNA, 75 bp, synthetic construct
  source 1..75: mol_type = other DNA
atgaacaattacccaatgcaaattatggttgaccaggaaaccatgaattggttgattgacctgaataggtcagga

SEQ ID NO: 517483 - DNA, 75 bp, synthetic construct
  source 1..75: mol_type = other DNA
tacaaaaagcgaatccggaactgttggcaaaagtcgatgccaacttcaaaaaggtcgataccattctggcgaaat

SEQ ID NO: 517484 - DNA, 75 bp, synthetic construct
  source 1..75: mol_type = other DNA
gaacaattcggcgtctggggtgaaaagtccttcatgggcaaaacctacgatggtattcatcgcatcagcttcctg

SEQ ID NO: 517485 - DNA, 75 bp, synthetic construct
  source 1..75: mol_type = other DNA
accgacttccagggagagcgtgttctggtttatttctacccgaaagccatgacccccggctgtaccgtacaggcc

SEQ ID NO: 517486 - DNA, 75 bp, synthetic construct
  source 1..75: mol_type = other DNA
ggttgaccaagaaactatgaattggttgattgacctgaacaggttaggatttaacgtgcatttcatgcattgctt

SEQ ID NO: 517487 - DNA, 75 bp, synthetic construct
  source 1..75: mol_type = other DNA
attgttgatctgctgcgtccacaactgcaaaaagccaatccggaactgttggcaaaagttgatgctaacttcaaa

SEQ ID NO: 517488 - DNA, 75 bp, synthetic construct
  source 1..75: mol_type = other DNA
tgtggtcgatttgcaaaaacgtatcagtgaactggctttcccgccatcaaaagtcgttggtggcgcagccgggct

SEQ ID NO: 517489 - DNA, 75 bp, synthetic construct
  source 1..75: mol_type = other DNA
tattcgtaacggcacggtgccaaatgttcccaatgtggaagtcaccgcgcgccagctcgatttcctcgcccgtga

SEQ ID NO: 517490 - DNA, 75 bp, synthetic construct
  source 1..75: mol_type = other DNA
ttcgagtctgcgcaagctgccatggccgaagaatctggttcaggcggtggaggcggttccggtggaggatttggc

SEQ ID NO: 517491 - DNA, 75 bp, synthetic construct
  source 1..75: mol_type = other DNA
agtagtaatggcacttatcgcgataaatatgctaataatgttagtttctgcatgggtgttgtgttatgcaggagt

SEQ ID NO: 517492 - DNA, 75 bp, synthetic construct
  source 1..75: mol_type = other DNA
atgattttaatcgtgggtataggtcaatctttcatcgaccagtattaccaggctatgggtgatggaacggtccag

SEQ ID NO: 517493 - DNA, 75 bp, synthetic construct
  source 1..75: mol_type = other DNA
aatatgctgataatgttagtgtctgcatgggtgatgtgttatgcaggtataatattacttgggttcggcgggtca

SEQ ID NO: 517494 - DNA, 75 bp, synthetic construct
  source 1..75: mol_type = other DNA
gacactggcaacgttgatgctttcggctctggtgcaggtgctagcagtgattcagcagcaggcggcggctccaat

SEQ ID NO: 517495 - DNA, 75 bp, synthetic construct
  source 1..75: mol_type = other DNA
acgagctggccgcatggcaagccatatgggaaatatcatggccaacggagctgctgagtaccagaaaatgaagcg

SEQ ID NO: 517496 - DNA, 75 bp, synthetic construct
  source 1..75: mol_type = other DNA
taattattgcgttagccgttatctggagtggtggtacatggtacactggcacgcaaattcagccgggtgtcgaaa

SEQ ID NO: 517497 - DNA, 75 bp, synthetic construct
  source 1..75: mol_type = other DNA
aaatttaatcagattaacattatcaatcacggggaagacgttgcccaaatcgatgctttcgttgcaaaaaccagg

SEQ ID NO: 517498 - DNA, 75 bp, synthetic construct
  source 1..75: mol_type = other DNA
cgttgcccaaatcgatgctttcgttgcaaaaaccaggctggatcgcgttaaagacaaagattatatcggtgatgc

SEQ ID NO: 517499 - DNA, 75 bp, synthetic construct
  source 1..75: mol_type = other DNA
taccccagcctgagccctgcggctgttgctggtaccacccggaagattgtcgctacgctgccgcgaagacgctat

SEQ ID NO: 517500 - DNA, 75 bp, synthetic construct
  source 1..75: mol_type = other DNA
acgtcgatgatggcgtgcaggatattcagaatgatgtcaatcaattagccgacagtctcgaatctgtattgaagt

SEQ ID NO: 517501 - DNA, 75 bp, synthetic construct
  source 1..75: mol_type = other DNA
ctgaccaggcggctgaatttgttgaacgtacgggctgtgactcattggctgtcgccatcggcaaccagcatgggg

SEQ ID NO: 517502 - DNA, 75 bp, synthetic construct
  source 1..75: mol_type = other DNA
tcacgcaaaaatatttaggcggtggcgtggtggattcgaacgcgatcaagattctggcactgccggaagacgacg

SEQ ID NO: 517503 - DNA, 75 bp, synthetic construct
  source 1..75: mol_type = other DNA
atcaggtcagaatggttggtctgatagacatgaggaaatattggatgctgcttcagtagatgactactatcaatt

SEQ ID NO: 517504 - DNA, 75 bp, synthetic construct
  source 1..75: mol_type = other DNA
cgcaagtggactttttgaatcattttctcgaaaagcagcaggtttgttaaaagaagttcctgttgtaaaaaactt

SEQ ID NO: 517505 - DNA, 75 bp, synthetic construct
  source 1..75: mol_type = other DNA
cactacgacacttgagtcaatgtcatttatgtcaattactaatgttattgtagtcatagatgacttagaaagacg

SEQ ID NO: 517506 - DNA, 75 bp, synthetic construct
  source 1..75: mol_type = other DNA
cctgatgtttatgggagtagaaaaatttggcaccagcatctctcagattcgtttagaaacaatggctgctattaa

SEQ ID NO: 517507 - DNA, 75 bp, synthetic construct
  source 1..75: mol_type = other DNA
atatcccggaaaaggttcaaatgtaataaccattcctaataagattaatgattttttcattgctaaaattatttt

SEQ ID NO: 517508 - DNA, 75 bp, synthetic construct
  source 1..75: mol_type = other DNA
aatcagaatgtgtctgggctgggagtaaagttttctaatacggataatgctttgtcagatgatgtaattatgtct

SEQ ID NO: 517509 - DNA, 75 bp, synthetic construct
  source 1..75: mol_type = other DNA
ggatgtgtatgaacgccctgataacgcctttctctgggagtcgttgttaacatttgcggagtattcgcaaccctg

SEQ ID NO: 517510 - DNA, 75 bp, synthetic construct
  source 1..75: mol_type = other DNA
atactgaaaccggtaagaacggtgacatatccgccttatcccgggctggtcagtcacggtgccggctcaacaact

SEQ ID NO: 517511 - DNA, 75 bp, synthetic construct
  source 1..75: mol_type = other DNA
tcggcaagccttctcgcccagcggcgctaaagatgatccgcaggatgccgagctggcattagagttaatgctgcg

SEQ ID NO: 517512 - DNA, 75 bp, synthetic construct
  source 1..75: mol_type = other DNA
ctggtaaaacccacacggacgacgcagtatccgccatatccggcgctggttcgtcaaggaacggggttgtcatct

SEQ ID NO: 517513 - DNA, 75 bp, synthetic construct
  source 1..75: mol_type = other DNA
gaaggtgttcgactgtgagatacggcactggtacagcgaacctgtccggggcatacagggttacaactgttatga

SEQ ID NO: 517514 - DNA, 75 bp, synthetic construct
  source 1..75: mol_type = other DNA
acgatgagggggaggtcgcggagcatgagcagccacaactctgtctgatcagggacacgcagccaggtgaacgcg

SEQ ID NO: 517515 - DNA, 75 bp, synthetic construct
  source 1..75: mol_type = other DNA
ttccgtactactgacgtgactggtaccatcgaactgccggaaggcgtagagatggtaatgccgggcgacaacatc

SEQ ID NO: 517516 - DNA, 75 bp, synthetic construct
  source 1..75: mol_type = other DNA
gtctggatgcatttgagcacacctgcccgaccggacgcactatttacgatagcgtatacaacgatctgattaact

SEQ ID NO: 517517 - DNA, 75 bp, synthetic construct
  source 1..75: mol_type = other DNA
gtagaacgcggtatcatcaaagttggtgaagaagttgaaatcgttggtatcaaagagtcgtataacttcgtataa

SEQ ID NO: 517518 - DNA, 75 bp, synthetic construct
  source 1..75: mol_type = other DNA
tttgttgacgacaaggcatcggtgttcccgttcgaggagctgcaacgctgcatggtcgacacgctggaagaatgg

SEQ ID NO: 517519 - DNA, 75 bp, synthetic construct
  source 1..75: mol_type = other DNA
actacgctgaccgctgcaatcaccaccgtactggctaaaacctacggcggtgctgctcgtgcattcgaccagatc

SEQ ID NO: 517520 - DNA, 75 bp, synthetic construct
  source 1..75: mol_type = other DNA
caaaaccgcacgttaacgtcggtactatcggccacgttgaccaaggtaaaaccaccctgaccgctgcaatcacta

SEQ ID NO: 517521 - DNA, 75 bp, synthetic construct
  source 1..75: mol_type = other DNA
aggtatatagcttcatcagtggccgctattacaagggatatgctaattcagatcgatgaggaattgattttagaa

SEQ ID NO: 517522 - DNA, 75 bp, synthetic construct
  source 1..75: mol_type = other DNA
cacgcggtaggggaagatagcgcaccggtgccttttgttattcatttacgggaatgtagcacggtggtgagtgaa

SEQ ID NO: 517523 - DNA, 75 bp, synthetic construct
  source 1..75: mol_type = other DNA
accactctgaccgctgcaatcacgaccgtactggctaaaacctacggcggtgctgctcgtgcattcgaccagatc

SEQ ID NO: 517524 - DNA, 75 bp, synthetic construct
  source 1..75: mol_type = other DNA
agggctatgtagtgtacgaagggcgtatccgggcggaagatcctgcccaggcgtaccgtgattcgttggcctggt

SEQ ID NO: 517525 - DNA, 75 bp, synthetic construct
  source 1..75: mol_type = other DNA
gccgataactatcagggttatgtggtgtatgaagggcgtatccgggcagaagatcctgcccaggcgtaccgtgat

SEQ ID NO: 517526 - DNA, 75 bp, synthetic construct
  source 1..75: mol_type = other DNA
ggggacgcgccagcgccgccgaacgcgtggaaatcgacgtcagtcataacgcccttgccggtgggcttctctgtg

SEQ ID NO: 517527 - DNA, 75 bp, synthetic construct
  source 1..75: mol_type = other DNA
ggacgaaggccgtgctggtgagaacgtaggtgtggtcaggtactggctaagccgggcaccatcaagccgcacacc

SEQ ID NO: 517528 - DNA, 75 bp, synthetic construct
  source 1..75: mol_type = other DNA
gcggtatcatcaaagttggtgaagaagttgaaaatcgttggtatcaaagagactcagaagtctacctgtactggc

SEQ ID NO: 517529 - DNA, 75 bp, synthetic construct
  source 1..75: mol_type = other DNA
ggcgacgacactccgatcgttcgtggttctgctctgaaagcgctggaaggcgacgcagagtgggaagcgaaaatc

SEQ ID NO: 517530 - DNA, 75 bp, synthetic construct
  source 1..75: mol_type = other DNA
tatcggccacgttgaccacggtaaaacaacgctgaccgctgcaatcactaccgtactggctaaaacctacggcgg

SEQ ID NO: 517531 - DNA, 75 bp, synthetic construct
  source 1..75: mol_type = other DNA
aattggtgttcgtcaggtggcgcattatctgtggaaccgttttggtagctcccaccgcgtgcgttttatcgccat

SEQ ID NO: 517532 - DNA, 75 bp, synthetic construct
  source 1..75: mol_type = other DNA
ggggtgatgagccgtctgcaggcgctctatctgcgcgagcagggctttaacaatgtgaaggtatatcgcccgtaa

SEQ ID NO: 517533 - DNA, 75 bp, synthetic construct
  source 1..75: mol_type = other DNA
gaaggccgtgctggtgagaacgtaggtgttctgctgcgtggtatcaaacgtgaagaaatcgaacgtggtcaggta

SEQ ID NO: 517534 - DNA, 75 bp, synthetic construct
  source 1..75: mol_type = other DNA
ctgctggacgaaggccgtgctggtgagaacgtaggtgttctgctgcgtggtatcaaacgtgaagaaatcgaacgt

SEQ ID NO: 517535 - DNA, 75 bp, synthetic construct
  source 1..75: mol_type = other DNA
agaatagcggcgcggattacctgatcgctattggtggtggttctccacaggatacttgtaaagcgattggcatta

SEQ ID NO: 517536 - DNA, 75 bp, synthetic construct
  source 1..75: mol_type = other DNA
gtggtatcaccatcaagcattcgaccagatcgataacgcgccggaagaaaaagctcgtggtatcaccatcaacac

SEQ ID NO: 517537 - DNA, 75 bp, synthetic construct
  source 1..75: mol_type = other DNA
ctaagccgggcaccatcaagccgcacaccaagttcgaatctgaagtgtacattctatccaaagatgaaggcggcc

SEQ ID NO: 517538 - DNA, 75 bp, synthetic construct
  source 1..75: mol_type = other DNA
gtgacgatggtggcgattttcatcctcggtcagcttctcaaacgtacgctgggcgggcaaacgggcgatacgctg

SEQ ID NO: 517539 - DNA, 75 bp, synthetic construct
  source 1..75: mol_type = other DNA
tatcggccacgttgaccacggtaaaacgactctgaccgctgcaatcaccaccgtactggctaaaacctacggcgg

SEQ ID NO: 517540 - DNA, 75 bp, synthetic construct
  source 1..75: mol_type = other DNA
tatcggccacgttgaccacggtaaaaccactctgaccgctgcaatcacgaccgtactggctaaaacctacggcgg

SEQ ID NO: 517541 - DNA, 75 bp, synthetic construct
  source 1..75: mol_type = other DNA
caaaaccgcacgttaacgtgggtactatcggccacgttgaccagggtaaaaccactctgaccgctgcaatcacga

SEQ ID NO: 517542 - DNA, 75 bp, synthetic construct
  source 1..75: mol_type = other DNA
gtgatgactttcggcatctctcaccataccgatgaaaccggcagcgatgcctggcgggaagatggactggtggcg

SEQ ID NO: 517543 - DNA, 75 bp, synthetic construct
  source 1..75: mol_type = other DNA
cggagtccataaaaaagagcttgccgttatgcggcaacacggtttatggttataaggcacctcataaaacgggtg

SEQ ID NO: 517544 - DNA, 75 bp, synthetic construct
  source 1..75: mol_type = other DNA
tatcggccacgttgaccagggtaaaacgactctgaccgctgcaatcacgaccgtactggctaaaacctacggcgg

SEQ ID NO: 517545 - DNA, 75 bp, synthetic construct
  source 1..75: mol_type = other DNA
cgttgaatacgacaccccgacccgtcactacgcgcacgtagactgcccggggcacgccgattatgttaaaaacat

SEQ ID NO: 517546 - DNA, 75 bp, synthetic construct
  source 1..75: mol_type = other DNA
aacggtagccagctttatgacttaagcagcaatatcgccacctacttcggcggcaatgcttctgtgaatactgac

SEQ ID NO: 517547 - DNA, 75 bp, synthetic construct
  source 1..75: mol_type = other DNA
tgccctggggcgtagcagtgtagctagcggtactgacagcctcgcatttggcagacaatcacttgccagcgcagc

SEQ ID NO: 517548 - DNA, 75 bp, synthetic construct
  source 1..75: mol_type = other DNA
tcgcagatggtgaaatttcagactccagttctgacgcagtaaacggctcacaactccacggcgtgagcagttatg

SEQ ID NO: 517549 - DNA, 75 bp, synthetic construct
  source 1..75: mol_type = other DNA
tttccagccgtgtgattgccaaaggttctcgtgacactagcgtaacgggaaatggcgtggtgattggttatgaca

SEQ ID NO: 517550 - DNA, 75 bp, synthetic construct
  source 1..75: mol_type = other DNA
gcaggaaacgaagcaatacaccgatcagcggatggttgagatggataacaaactgtctaaaactgaaagcaagtt

SEQ ID NO: 517551 - DNA, 75 bp, synthetic construct
  source 1..75: mol_type = other DNA
tgggataaggacaatggtgtcttcactgcagctcatggcaacaataccgccagcaaaatcaccaatatcctggac

SEQ ID NO: 517552 - DNA, 75 bp, synthetic construct
  source 1..75: mol_type = other DNA
ctgaaagcgctggaaggcgacgcagagtgggaagcgaaaatcctggaactggctggcttcctggattccttacat

SEQ ID NO: 517553 - DNA, 75 bp, synthetic construct
  source 1..75: mol_type = other DNA
gctaaaacctacggcggtgctgctcgcgcattcgaccagatcgataacgcgccggaagaaaaagctcgtggtatc

SEQ ID NO: 517554 - DNA, 75 bp, synthetic construct
  source 1..75: mol_type = other DNA
caggcggcgttcgctacgacaccaaagctgatggctctatcgactacagcaacatcactcttggtggtggcaacg

SEQ ID NO: 517555 - DNA, 75 bp, synthetic construct
  source 1..75: mol_type = other DNA
aagaagggcttggcaatgtgttcattggcaaaattgatgggcgacaaacctgcgtcacactcggcttagccgcta

SEQ ID NO: 517556 - DNA, 75 bp, synthetic construct
  source 1..75: mol_type = other DNA
cgtcagcccgcctcccgctttatggcaagttttatgggcgacgccaacctgttcccggcgaactttagcgaagag

SEQ ID NO: 517557 - DNA, 75 bp, synthetic construct
  source 1..75: mol_type = other DNA
gagagaagcataaaaagtatccaaacgtcacactggacaacctggacacatatattcagtccattcgcgggtctg

SEQ ID NO: 517558 - DNA, 75 bp, synthetic construct
  source 1..75: mol_type = other DNA
ctcctgagggggcagtcaagctcgttaacggttcgcagcagtccagcattgaaatagcactggatcgtgttccgg

SEQ ID NO: 517559 - DNA, 75 bp, synthetic construct
  source 1..75: mol_type = other DNA
catggacaaactgaaagacaaattcccgcagaccgaactgttccgcgtggaagacaaatttggctcctggccgga

SEQ ID NO: 517560 - DNA, 75 bp, synthetic construct
  source 1..75: mol_type = other DNA
aaacagtatgaagcgcagggcttcgaagtggtgattccaaaaaccaacattctggcggagttcccggtggcgtgg

SEQ ID NO: 517561 - DNA, 75 bp, synthetic construct
  source 1..75: mol_type = other DNA
cgggtcagcaaaacaggcgctggcgattttgcagggcttaaaagcagacgttgtcacttataaccaggtgaccga

SEQ ID NO: 517562 - DNA, 75 bp, synthetic construct
  source 1..75: mol_type = other DNA
agccataatgttagatagcaacagaacggagtcatatattttgcatgttaaagaatatctggcaaaacgctttga

SEQ ID NO: 517563 - DNA, 75 bp, synthetic construct
  source 1..75: mol_type = other DNA
gttcctgaaatccgccggaaaagtaactttgcgccagaatgtgggtttaagctatttaaataaatatctaaggaa

SEQ ID NO: 517564 - DNA, 75 bp, synthetic construct
  source 1..75: mol_type = other DNA
aggtgaggggctatgaatggacaccgaactatgcaggattaaccgcacgtcctgatgcgtttatttcaggggcag

SEQ ID NO: 517565 - DNA, 75 bp, synthetic construct
  source 1..75: mol_type = other DNA
aatagtgataagcactattctatgcccatactcaaaatatgctattgaacacatattttttaagttcataaagaa

SEQ ID NO: 517566 - DNA, 75 bp, synthetic construct
  source 1..75: mol_type = other DNA
aaaaaatcgaaattgcccggatagccgtgcaaatgtttgaatccacccgggcaaaaggcgtttcacttgagatct

SEQ ID NO: 517567 - DNA, 75 bp, synthetic construct
  source 1..75: mol_type = other DNA
tcaggctgagactcagggccgcagtgagaaagcaatcatcctgggtgaagtatatcggcacaatggcgcctggaa

SEQ ID NO: 517568 - DNA, 75 bp, synthetic construct
  source 1..75: mol_type = other DNA
tccacgactggaacgacctcgtgcgctccgacgtgaagctgattttcccgaacccgaaaacgtcgggtaacgcgc

SEQ ID NO: 517569 - DNA, 75 bp, synthetic construct
  source 1..75: mol_type = other DNA
aagaacacagtatgaaatgaagatgatagataaagaactgacacatgaggtagttcgtgcgagcaagataagatt

SEQ ID NO: 517570 - DNA, 75 bp, synthetic construct
  source 1..75: mol_type = other DNA
aatccaatcgtaatattgataacataatgactatgtttagctcggtatacaaaagtcttacaagcaatctactac

SEQ ID NO: 517571 - DNA, 75 bp, synthetic construct
  source 1..75: mol_type = other DNA
aatccaatcgtaatattgataacataatggctatgtttagctcagtatacaaaagcctgacaagcaatctactac

SEQ ID NO: 517572 - DNA, 75 bp, synthetic construct
  source 1..75: mol_type = other DNA
ccttgatcagcgtcgcctgatgcttcagtggtgggccgatttccttgatgctaacagcaatcatatggtcaggcc

SEQ ID NO: 517573 - DNA, 75 bp, synthetic construct
  source 1..75: mol_type = other DNA
agacgctgtagagcttcagatgagtcacaaggaaagcaatagcgtccgtgcggcttatacccataaagccaaaca

SEQ ID NO: 517574 - DNA, 75 bp, synthetic construct
  source 1..75: mol_type = other DNA
tggtctgaaattgatttcaaaagtaagttatgggtgatacccgaacagcgtgaagcaattgaaaacgtcaaacat

SEQ ID NO: 517575 - DNA, 75 bp, synthetic construct
  source 1..75: mol_type = other DNA
cagagcacaatatgaaatgaaagtaattgagaaagagttaatccatgaagttcgcgtgagaaccgtcagattata

SEQ ID NO: 517576 - DNA, 75 bp, synthetic construct
  source 1..75: mol_type = other DNA
tgtttgatgagccgttgagtaacctcgacgccaacctgcgtcgcagcatgcgcgacaagatccgcgagttgcaaa

SEQ ID NO: 517577 - DNA, 75 bp, synthetic construct
  source 1..75: mol_type = other DNA
actaccgcgtgaataacccggaagtcatggacaaactgaaagacaaattcccgcagaccgagctgtttcgcgtgg

SEQ ID NO: 517578 - DNA, 75 bp, synthetic construct
  source 1..75: mol_type = other DNA
atgaacaaaaacaattttaattcagtaatgacacttgaagaacagcttattgtcatcgtagataagtatatctcg

SEQ ID NO: 517579 - DNA, 75 bp, synthetic construct
  source 1..75: mol_type = other DNA
taatgacacttgaagaacagcttgttgtcatcgtagataagtatatctcgaaacgatatcagccgaacgataaaa

SEQ ID NO: 517580 - DNA, 75 bp, synthetic construct
  source 1..75: mol_type = other DNA
aatttactctggaagaacagcttatcgttatcgtagacaaatatatctctaagcgatatcagccacatgataaaa

SEQ ID NO: 517581 - DNA, 75 bp, synthetic construct
  source 1..75: mol_type = other DNA
gtgacatccctgagtgatgtgcgggtgaatttccccggtgctgaggagccggtaaaacgctggcagggtaatctg

SEQ ID NO: 517582 - DNA, 75 bp, synthetic construct
  source 1..75: mol_type = other DNA
gtcgcctgcgcaaatctcctgcgctgcgcgctatatttgaagagacaacacttagccttaacgacctggtgttgc

SEQ ID NO: 517583 - DNA, 75 bp, synthetic construct
  source 1..75: mol_type = other DNA
aacctatcagatgaacccgctgaaccgccgcgaagcgattcgtgaatccctgctcgatgaagcccagggcgcaga

SEQ ID NO: 517584 - DNA, 75 bp, synthetic construct
  source 1..75: mol_type = other DNA
aaacgttttatcgtccattctaacggtaatgtttgcctcgctggtgattaattttggtttagaattttataacga

SEQ ID NO: 517585 - DNA, 75 bp, synthetic construct
  source 1..75: mol_type = other DNA
aaacgttttatcatccgttctaacggtaatgtttgcctcacttgtgattaatttttgtttagagttttataacga

SEQ ID NO: 517586 - DNA, 75 bp, synthetic construct
  source 1..75: mol_type = other DNA
tattgtcttacatttccatttttacgccaaacctttaataactgggtacaaaacgttttatcatccgttctaacg

SEQ ID NO: 517587 - DNA, 75 bp, synthetic construct
  source 1..75: mol_type = other DNA
caaaaccgcacgttaacgtgggtactatcggccacgttgaccaaggtaaaactacactgaccgctgcaatcacga

SEQ ID NO: 517588 - DNA, 75 bp, synthetic construct
  source 1..75: mol_type = other DNA
caaaaccgcacgttaacgtaggtactatcggccacgttgaccagggtaaaactacactgaccgctgcaatcacga

SEQ ID NO: 517589 - DNA, 75 bp, synthetic construct
  source 1..75: mol_type = other DNA
tatcggccacgttgaccagggtaaaactacactgaccgctgcaatcacgaccgtactggctaaaacctacggcgg

SEQ ID NO: 517590 - DNA, 75 bp, synthetic construct
  source 1..75: mol_type = other DNA
tatcggccacgttgaccacggtaaaactacactgaccgctgcaatcaccaccgtactggctaaaacctacggcgg

SEQ ID NO: 517591 - DNA, 75 bp, synthetic construct
  source 1..75: mol_type = other DNA
caaagttggtgaagaagttgaaatcgttggtatcaaagagacggtcaggtactggctaagccgggcaccatcaag

SEQ ID NO: 517592 - DNA, 75 bp, synthetic construct
  source 1..75: mol_type = other DNA
cgtattgaggcccggggagagcttgcccgggggcaggtgcgttacggggaaatcacgttcacgatgcgccatctt

SEQ ID NO: 517593 - DNA, 75 bp, synthetic construct
  source 1..75: mol_type = other DNA
atcactgagtaatgtacgggtgaagttttccgatgctacagagaaagtaaaacgttggcagggaagcttgattcc

SEQ ID NO: 517594 - DNA, 75 bp, synthetic construct
  source 1..75: mol_type = other DNA
aaactctgattagagagataggatatcaaaatgtgaagcagttatcattctattggcagggagggcaatgtaaac

SEQ ID NO: 517595 - DNA, 75 bp, synthetic construct
  source 1..75: mol_type = other DNA
gggggtgacggaattcagcggcacgctgtatgtccctgaggtttcctggcagtggcagccccactctgtacggat

SEQ ID NO: 517596 - DNA, 75 bp, synthetic construct
  source 1..75: mol_type = other DNA
gtgctgaatattattcatcgtctgaagcccggtatgttgccggctctgttttttctgacctcagccagtgtgctg

SEQ ID NO: 517597 - DNA, 75 bp, synthetic construct
  source 1..75: mol_type = other DNA
tggagaggtgagtccgggggcagaacggcaggtaaaacgccagttatggcaggtgaacggctatgaatggagccc

SEQ ID NO: 517598 - DNA, 75 bp, synthetic construct
  source 1..75: mol_type = other DNA
agaaataccatttaatgagaatcaaacaagatttggctgttgtatcaactcttgttgatgtgatgaagaatattg

SEQ ID NO: 517599 - DNA, 75 bp, synthetic construct
  source 1..75: mol_type = other DNA
ttttgcattcccaacgaagaaacttgccattgagagtttattgcgccggaagaaataccatttaatgagaatcaa

SEQ ID NO: 517600 - DNA, 75 bp, synthetic construct
  source 1..75: mol_type = other DNA
atcgttcctcagatgtctgacagcgaacgaaatctaaaaattaaacgattccagaaacctacaagtggagctaat

SEQ ID NO: 517601 - DNA, 75 bp, synthetic construct
  source 1..75: mol_type = other DNA
taaacattggtttgggagaagcggcaaaacggaatgtgggcaacggggaaaaccaaatccctgatatgtctttct

SEQ ID NO: 517602 - DNA, 75 bp, synthetic construct
  source 1..75: mol_type = other DNA
gccacaccgatctgtgggatttccaggctaacgttgaaggctcgcagaaaattgtcgatctgctgcgtccacaac

SEQ ID NO: 517603 - DNA, 75 bp, synthetic construct
  source 1..75: mol_type = other DNA
gcatggttggttcctgcgcattggattgttaattttaaaccagcaccaaatcggtggttacaggaatggaaacaa

SEQ ID NO: 517604 - DNA, 75 bp, synthetic construct
  source 1..75: mol_type = other DNA
cagtactgctgtgggttatgaagctatagctgaaggccaatatagctctgccatcggttcaaaaacccatgcgat

SEQ ID NO: 517605 - DNA, 75 bp, synthetic construct
  source 1..75: mol_type = other DNA
cgaataccaccaatatcgccactaacacttccaatattgccactaacaccaccaacatctctaccctgactgaga

SEQ ID NO: 517606 - DNA, 75 bp, synthetic construct
  source 1..75: mol_type = other DNA
cgaagtcaatgctgacggcagcatcagtgcgccgacttacactatcgcaaacgcagattacgataatgtcggtga

SEQ ID NO: 517607 - DNA, 75 bp, synthetic construct
  source 1..75: mol_type = other DNA
tttagggcttgggcaacaacaactggttgaaattgccaaggcacttaataaacaggtgcgcttgttaattctcga

SEQ ID NO: 517608 - DNA, 75 bp, synthetic construct
  source 1..75: mol_type = other DNA
caacctacaaaatcggtgaaacaaattattataacgtcggcgatgcactggctgcgattaactcctcatttagca

SEQ ID NO: 517609 - DNA, 75 bp, synthetic construct
  source 1..75: mol_type = other DNA
cggcgcagtcactgcaaccagttccgatgccattaacggcagccagctttatgacttaagcagcaatatcgccac

SEQ ID NO: 517610 - DNA, 75 bp, synthetic construct
  source 1..75: mol_type = other DNA
tgccattgccttgggtagtaacagcaatgcatctggtgataacgccgttgcgctgggtagtacaagtcaggcata

SEQ ID NO: 517611 - DNA, 75 bp, synthetic construct
  source 1..75: mol_type = other DNA
aggacgatgccctgttgtgggatggttcttccttcagtgccaaacacggtactaagggcgataacagcaagatca

SEQ ID NO: 517612 - DNA, 75 bp, synthetic construct
  source 1..75: mol_type = other DNA
cattgctgatgcgctgggtggtgatgcagaagtcaacgctgacggttctatcactgcgccgacttacaccattgc

SEQ ID NO: 517613 - DNA, 75 bp, synthetic construct
  source 1..75: mol_type = other DNA
gcggttaacgtgggtcagttgaaagtcactgatgagcgcgtaacgcaaaatacccagagcattactaacctgaac

SEQ ID NO: 517614 - DNA, 75 bp, synthetic construct
  source 1..75: mol_type = other DNA
cgattacaacaacgtcggtgaagctctggatgcgcttgatgagaacgcgctgctgtgggatgcgaccgccaataa

SEQ ID NO: 517615 - DNA, 75 bp, synthetic construct
  source 1..75: mol_type = other DNA
aactgaaagcaagctgagtggtggtatcgcttctgcaatggcaatgaccggtctgccgcaggcttacacgccggg

SEQ ID NO: 517616 - DNA, 75 bp, synthetic construct
  source 1..75: mol_type = other DNA
tgaaacgtggcgaaatactgggtatcgccggactcgttggtgccggacgtaccgagactattcagtgcctgtttg

SEQ ID NO: 517617 - DNA, 75 bp, synthetic construct
  source 1..75: mol_type = other DNA
tagtcttgcgcttggtagtaataccaatgccaatggtattaactctgtcgcgctaggtgcagattccattgcgga

SEQ ID NO: 517618 - DNA, 75 bp, synthetic construct
  source 1..75: mol_type = other DNA
catcaacgtcgcggatggttctgaagcccatgacgctgttactgttcgccagttgcagaacgccattggtgcagt

SEQ ID NO: 517619 - DNA, 75 bp, synthetic construct
  source 1..75: mol_type = other DNA
gcaattgctattggtcagggcaacaaggctaatggcactgatgctatcgctctgggtaatgctagcctgtcgagc

SEQ ID NO: 517620 - DNA, 75 bp, synthetic construct
  source 1..75: mol_type = other DNA
taacgttacggcgggtgaactgacggagaccagtaccgatgccgttaacggttctcagttgaaaaccactaacga

SEQ ID NO: 517621 - DNA, 75 bp, synthetic construct
  source 1..75: mol_type = other DNA
ctgtctttaatgcaaatggctcagttaaaagcacctcggcgaaaaacatcattaccgacgtcgctgatggcacga

SEQ ID NO: 517622 - DNA, 75 bp, synthetic construct
  source 1..75: mol_type = other DNA
cattaatggctcacagctctatagcaccaataagtacatcgctgatgcgctgggtggtgatgcagaagtcaacgc

SEQ ID NO: 517623 - DNA, 75 bp, synthetic construct
  source 1..75: mol_type = other DNA
aaactcaacgaagtcaaagcgatttccgatacgatttgcgttattcgcgacggtcagcacattggtacgcgtgat

SEQ ID NO: 517624 - DNA, 75 bp, synthetic construct
  source 1..75: mol_type = other DNA
ttagccagcttgatgacgcggcagagcaaaaatgtattctggaatcaatccagcaactcaaagttaaaacgtcgt

SEQ ID NO: 517625 - DNA, 75 bp, synthetic construct
  source 1..75: mol_type = other DNA
tttatccatttcacctgatacccgcgttggcgatttagggcttgggcaacaacaactggttgaaattgccaaggc

SEQ ID NO: 517626 - DNA, 75 bp, synthetic construct
  source 1..75: mol_type = other DNA
aaatttaccggtggcattagccagcttgatgacgcggcagagcaaaaatgtattctggaatcaatccagcaactc

SEQ ID NO: 517627 - DNA, 75 bp, synthetic construct
  source 1..75: mol_type = other DNA
atcgttccggtaatggcagttggcaaaaatattaccctcgccgcactcaacaaatttaccagtggtattagccaa

SEQ ID NO: 517628 - DNA, 75 bp, synthetic construct
  source 1..75: mol_type = other DNA
gcaacaggaatgagcgaagacgatattatcactatgatggtagggcgagaattaacagcactttaccctaacgaa

SEQ ID NO: 517629 - DNA, 75 bp, synthetic construct
  source 1..75: mol_type = other DNA
cgataacgccatcgcgattgggaacaaaacgcaagccctgggagtgaattcgatggccctgggtaatgcaagtca

SEQ ID NO: 517630 - DNA, 75 bp, synthetic construct
  source 1..75: mol_type = other DNA
ggttgatgcttcggcattacctgcccttgcagaacaatttcacgttcaggggctggaaggttggttatttaccac

SEQ ID NO: 517631 - DNA, 75 bp, synthetic construct
  source 1..75: mol_type = other DNA
gacgacgaacgttctgatgcaatgtacccatctcgatcctgaagtgaaagccgaagcccgatgccaaaaaatacg

SEQ ID NO: 517632 - DNA, 75 bp, synthetic construct
  source 1..75: mol_type = other DNA
acctctatctggcttccggcaattctttttggtcatggcctgttgctggcgttaacgccggtcattgcccaacta

SEQ ID NO: 517633 - DNA, 75 bp, synthetic construct
  source 1..75: mol_type = other DNA
ttccggccgtggcagtgatgccccttgcggcgaaggttctcaaacaggtgatggttaataccggagggaacaaag

SEQ ID NO: 517634 - DNA, 75 bp, synthetic construct
  source 1..75: mol_type = other DNA
ctttggtggagtggttgataacaggtaatttaaatattagtttgaaagtgtccttgacccacgatattcagacag

SEQ ID NO: 517635 - DNA, 75 bp, synthetic construct
  source 1..75: mol_type = other DNA
atcaagcaggccattgagctgcaccgctatcgcggtacgccgtgggcagtgcgtcaggtactgaagattctggcg

SEQ ID NO: 517636 - DNA, 75 bp, synthetic construct
  source 1..75: mol_type = other DNA
tgagctgcgtctgccggcagagggtacacctgcggcatggcaggcgggggtgaatgtgacagtcacggtacagtg

SEQ ID NO: 517637 - DNA, 75 bp, synthetic construct
  source 1..75: mol_type = other DNA
gcaggttatcagtcaggggattcttgcggatggcagagtcaaaaatcttgccgctgcttatgcatcttctgtgtc

SEQ ID NO: 517638 - DNA, 75 bp, synthetic construct
  source 1..75: mol_type = other DNA
cttatttttgatttgcatgataaaggttcattaccatttcttgaggggcatctgttcgaagtggcagagcgcggt

SEQ ID NO: 517639 - DNA, 75 bp, synthetic construct
  source 1..75: mol_type = other DNA
atcatcggtctgacgtcggcggccatcatgatgatgttgcgtatgcgtttcctgcaacgtttgccgtcagcaacg

SEQ ID NO: 517640 - DNA, 75 bp, synthetic construct
  source 1..75: mol_type = other DNA
gttttatcgagaagaacaaacaaaaggcgctgcactggttgaacctgagctgtatggaagggtttgataccggtt

SEQ ID NO: 517641 - DNA, 75 bp, synthetic construct
  source 1..75: mol_type = other DNA
taaattatgaggatattacaagcaatatggccttctgctgtaaatggctgttattttttgcctgttctttttata

SEQ ID NO: 517642 - DNA, 75 bp, synthetic construct
  source 1..75: mol_type = other DNA
gtcaggccgtggcagtgatgccccttgcggcgaaggttctcaaacaggtgatggtgaataccggagggaacaaac

SEQ ID NO: 517643 - DNA, 75 bp, synthetic construct
  source 1..75: mol_type = other DNA
ggccgatcaatcaggcgtctatcacgaacgtggcggatggctgaaagggcatcatagtggtatgccatactgggc

SEQ ID NO: 517644 - DNA, 75 bp, synthetic construct
  source 1..75: mol_type = other DNA
acgggcagtcattttcatgttcccggtatcctcagcttgcccgtgcttatcccgggtgtaagctgccggatttgc

SEQ ID NO: 517645 - DNA, 75 bp, synthetic construct
  source 1..75: mol_type = other DNA
ctgactggcatgtcctggtcgccctggccgcatgcgcactggcctacggtggcgcggtcgttgccaatatctaca

SEQ ID NO: 517646 - DNA, 75 bp, synthetic construct
  source 1..75: mol_type = other DNA
gctaatagcactggctcactggcaataggtgctgacagtagcagttcgaacgataacgccatcgcgattgggaac

SEQ ID NO: 517647 - DNA, 75 bp, synthetic construct
  source 1..75: mol_type = other DNA
gcgctggaagcgatcgataccacgctggatgacgctctgttgtgggatgcaacagccaatgatggcaatggtgca

SEQ ID NO: 517648 - DNA, 75 bp, synthetic construct
  source 1..75: mol_type = other DNA
cacggttgtcaaatacctgcaaacagcccgggaaaatggactggttcatatcaacctggatgtgaatgtctttgg

SEQ ID NO: 517649 - DNA, 75 bp, synthetic construct
  source 1..75: mol_type = other DNA
agatccagcgtgcagtatcaatggatgaaaaggaaccactgacaatcgatcctgcagattcctctgtattaaccg

SEQ ID NO: 517650 - DNA, 75 bp, synthetic construct
  source 1..75: mol_type = other DNA
gttgattgaactcgcctttggtcgtgtgtttaaagagctggcagctaatatggtgcaggcttttactgttcgtgc

SEQ ID NO: 517651 - DNA, 75 bp, synthetic construct
  source 1..75: mol_type = other DNA
gtcgcaagactgaaagacggagggactcagtttgaagttatgacgcgcaaacagattgaactggtgcgcagccag

SEQ ID NO: 517652 - DNA, 75 bp, synthetic construct
  source 1..75: mol_type = other DNA
ctgactggcatgttcttgctgctctggctgcctgtgctctggcttatgctggcgcggtcgcggcaaatctgtaca

SEQ ID NO: 517653 - DNA, 75 bp, synthetic construct
  source 1..75: mol_type = other DNA
gtcaggctatcgaacttattcgtgctgcggttgaacgtggtgtcaccttcttcgataccgccgaagtgtatggtc

SEQ ID NO: 517654 - DNA, 75 bp, synthetic construct
  source 1..75: mol_type = other DNA
tatggtgatgaattgataaaggctgaatatataaaaatctcagataaactcaccaatcagaaccaacggaagcat

SEQ ID NO: 517655 - DNA, 75 bp, synthetic construct
  source 1..75: mol_type = other DNA
caatgccagccatgacggtaaagccagcatcatcactaatgtcgctaatggcagtattagtgaggacagtaccga

SEQ ID NO: 517656 - DNA, 75 bp, synthetic construct
  source 1..75: mol_type = other DNA
cactaatctggatactcgcgttactaatatcgaaaacggtattggcgacatcgtaaccaccggtagcaccaagta

SEQ ID NO: 517657 - DNA, 75 bp, synthetic construct
  source 1..75: mol_type = other DNA
aaactgaaagcaagctgagtggtggtatcgcttctgcaatggcgatgaccggtctgccgcaggcttacacgccgg

SEQ ID NO: 517658 - DNA, 75 bp, synthetic construct
  source 1..75: mol_type = other DNA
acagcattgcaatgggtaatggttctcagactacccgtggtgcgcagaccaactacactgcctacaacatggacg

SEQ ID NO: 517659 - DNA, 75 bp, synthetic construct
  source 1..75: mol_type = other DNA
tcataccttggcggtggtgctgatatcaacaatgcgggtgttctcatagccccgacctatactatcggttcgaaa

SEQ ID NO: 517660 - DNA, 75 bp, synthetic construct
  source 1..75: mol_type = other DNA
gcgacgaatatgatgattgagcagaacacccaaattatcaatcagctcgctggtaacaccgacgcaacctatatc

SEQ ID NO: 517661 - DNA, 75 bp, synthetic construct
  source 1..75: mol_type = other DNA
cactgacgccgttaacggctcgcagctcaaaaccaccaacgagaacgtgccgaccaacaccaccaacatcgccac

SEQ ID NO: 517662 - DNA, 75 bp, synthetic construct
  source 1..75: mol_type = other DNA
cactgacgccgttaacggctcgcagctcaaaaccaccaacgacaacgtggcgaccaacaccaccaacatcgccac

SEQ ID NO: 517663 - DNA, 75 bp, synthetic construct
  source 1..75: mol_type = other DNA
cactgacgccgttaacggctcccagctcaaaaccaccaacgagaacgtggcgaccaacaccaccaacatcgccac

SEQ ID NO: 517664 - DNA, 75 bp, synthetic construct
  source 1..75: mol_type = other DNA
aaaccgaaagcaagttgagcggtggtatcgcttccgcaatggcaatgaccggtctgccgcaggcttacacgccgg

SEQ ID NO: 517665 - DNA, 75 bp, synthetic construct
  source 1..75: mol_type = other DNA
acgacagcggcttagcgttcaacgatgccagcgcagcaggtattggctctaccgctgtgggttataactctgttg

SEQ ID NO: 517666 - DNA, 75 bp, synthetic construct
  source 1..75: mol_type = other DNA
caaccagtaccgatgctgttaacggttcccagttaaacgcaaccaatattctggttacgcaaaatagccaaatga

SEQ ID NO: 517667 - DNA, 75 bp, synthetic construct
  source 1..75: mol_type = other DNA
atgcgccagacgctgccacaccagaccatgcagcgtgaatcagattatcgctggccgtcaaattcccgtatcggt

SEQ ID NO: 517668 - DNA, 75 bp, synthetic construct
  source 1..75: mol_type = other DNA
ttatgcgtcagacgttgccctatcagagtatgcagcgcagcgcggattatagctgggcgtcaaactcccgcatcg

SEQ ID NO: 517669 - DNA, 75 bp, synthetic construct
  source 1..75: mol_type = other DNA
gacggctatccgcctgatggctgaccaggggcgcgcctggccgttactggatggcaccggcacaatttacggtat

SEQ ID NO: 517670 - DNA, 75 bp, synthetic construct
  source 1..75: mol_type = other DNA
cgtctccagccgtgtgattgttaaaggttctcgtaacaccagcgtatcggaagaaggtgttgtgattggttatga

SEQ ID NO: 517671 - DNA, 75 bp, synthetic construct
  source 1..75: mol_type = other DNA
tatcatccgccagtactgatgccattaatggcagccagcttcatgggttgagcagttcgatcgccacctatcttg

SEQ ID NO: 517672 - DNA, 75 bp, synthetic construct
  source 1..75: mol_type = other DNA
ctaccgatgctgttaacgttgcgcagttgaagtcttctgaggcgggcggcgggcgttacgacaccaaagctgatg

SEQ ID NO: 517673 - DNA, 75 bp, synthetic construct
  source 1..75: mol_type = other DNA
tattgtcagcaatgtctcggagaccggcacggtattttttgaggacgggtcgccacgaaaaatcagctttactct

SEQ ID NO: 517674 - DNA, 75 bp, synthetic construct
  source 1..75: mol_type = other DNA
ccaaagctgatggttccgttgattacagtaacatcaccctcggtggtggcaatggcggtacaacgcgtatcagca

SEQ ID NO: 517675 - DNA, 75 bp, synthetic construct
  source 1..75: mol_type = other DNA
gtcaaggtagcagcagctccgttgataccggcattgccttgggtagcagctccgtttccagtcgcgtgattgtta

SEQ ID NO: 517676 - DNA, 75 bp, synthetic construct
  source 1..75: mol_type = other DNA
ctcgggagagaatgccatcgcattgggagagggtagtgccgctggtggcagcaacagccttgctttcggtagcca

SEQ ID NO: 517677 - DNA, 75 bp, synthetic construct
  source 1..75: mol_type = other DNA
tgttgtgattggttatgacaccacggatggcgaactgcttggcgcgttgtcgattggtgatgacggtaaatatcg

SEQ ID NO: 517678 - DNA, 75 bp, synthetic construct
  source 1..75: mol_type = other DNA
gcgatatcgtaaccaccggtagtactaagtacttcaagaccaacaccgatggcgcagacgccaacgcgcagggta

SEQ ID NO: 517679 - DNA, 75 bp, synthetic construct
  source 1..75: mol_type = other DNA
gcacatcactcggcgacgccctactttgggatgcaaccgcaggcaaattcagcgccaaacacggcattaataatg

SEQ ID NO: 517680 - DNA, 75 bp, synthetic construct
  source 1..75: mol_type = other DNA
cactgacgccgttaacggctctcagctcaaaaccaccaacgataacgtgacgaccaacaccaccaacatcgccac

SEQ ID NO: 517681 - DNA, 75 bp, synthetic construct
  source 1..75: mol_type = other DNA
ctcagttgtatgccacaaatgtgctcatcaaccagaatagcgatatgattaaccagctcgctggcgacaccagta

SEQ ID NO: 517682 - DNA, 75 bp, synthetic construct
  source 1..75: mol_type = other DNA
aatgcggggggcaaaaacagccttgctttcggttttggcgccaccgcaaatggtgataacgcagtcgccattggt

SEQ ID NO: 517683 - DNA, 75 bp, synthetic construct
  source 1..75: mol_type = other DNA
gcacatgcttcggttacacttgacggcggtacaaacgccgaagaagctgcaggtggaactccactgggtgataat

SEQ ID NO: 517684 - DNA, 75 bp, synthetic construct
  source 1..75: mol_type = other DNA
aacgccattggtgcagtagcaaccacaccaaccaaatactatcacgccaactcaacggctgaagactcactggca

SEQ ID NO: 517685 - DNA, 75 bp, synthetic construct
  source 1..75: mol_type = other DNA
actcctgctaagtacttccactcaaactcgaaagaagaggattcactggccgttgggacggactctctggcgatg

SEQ ID NO: 517686 - DNA, 75 bp, synthetic construct
  source 1..75: mol_type = other DNA
gatactggcttgacctttatagatgccagcgcagcgggcgtcggctctaccgcgttgggttataacgcgaccgca

SEQ ID NO: 517687 - DNA, 75 bp, synthetic construct
  source 1..75: mol_type = other DNA
ggtattgctatcggttctaacgcacgcgcaaatcatgccgacagcattgcaatgggtaatggttctcagactacc

SEQ ID NO: 517688 - DNA, 75 bp, synthetic construct
  source 1..75: mol_type = other DNA
aagagtcgaggatggcgctgactatgccgccagtcttggatacaaggccaaagcagcaggtatgtatagtctggc

SEQ ID NO: 517689 - DNA, 75 bp, synthetic construct
  source 1..75: mol_type = other DNA
aaaaccactaacgacaacgtggcaaccaacaccactaacatcagcaccctgaccggcgatgttgctaacaacacc

SEQ ID NO: 517690 - DNA, 75 bp, synthetic construct
  source 1..75: mol_type = other DNA
cttacaacggtgaatcggctgttgctttaggtgtgtcgatggtgagcgccaatggtcgttgggtctacaaattac

SEQ ID NO: 517691 - DNA, 75 bp, synthetic construct
  source 1..75: mol_type = other DNA
cccagaatacccagagcattactaacctgaacactcaggtcactaatctggatactcgcgtgaccaatatcgaaa

SEQ ID NO: 517692 - DNA, 75 bp, synthetic construct
  source 1..75: mol_type = other DNA
gcgataacagcgtggcaatcggtcatggcagcaacagcatcgttgagacgagtattgcgccgggtagcgaatccg

SEQ ID NO: 517693 - DNA, 75 bp, synthetic construct
  source 1..75: mol_type = other DNA
accagcgccgtatcaccaacgttgctgccggtgttaatgccaccgatgcggttaacgtttcgcaactgaagtctt

SEQ ID NO: 517694 - DNA, 75 bp, synthetic construct
  source 1..75: mol_type = other DNA
ggcgttcgctacgacaccaaagctgatggctctatcgactacagcaacatcactctcggtggcggcaatggcggt

SEQ ID NO: 517695 - DNA, 75 bp, synthetic construct
  source 1..75: mol_type = other DNA
agccgtgtgattgttaaaggttctcgtaatacccgcgttacggaaaatggggtcgagatcggttatgacaccacg

SEQ ID NO: 517696 - DNA, 75 bp, synthetic construct
  source 1..75: mol_type = other DNA
ttaactatgtgcgtaccaatgacaccggtttaaccttcaccgatgccagcgcagcaggtattggctctaccgctg

SEQ ID NO: 517697 - DNA, 75 bp, synthetic construct
  source 1..75: mol_type = other DNA
cactgacgccgttaacggctcacagctcaaaaccaccaacgataacgtgtcgaccaacaccaccaacatcgccac

SEQ ID NO: 517698 - DNA, 75 bp, synthetic construct
  source 1..75: mol_type = other DNA
cggcaaacaccaccaacatcactaacctgacgagcgaagtggctggcaacaccaccagtatcaccaacctgactg

SEQ ID NO: 517699 - DNA, 75 bp, synthetic construct
  source 1..75: mol_type = other DNA
atgaacaaaatttttaaagttatctggaatccagcgacgggcagttacaccgttgccagcgaaacggctaagagt

SEQ ID NO: 517700 - DNA, 75 bp, synthetic construct
  source 1..75: mol_type = other DNA
actcgcggcgctcagactggctacaccgcctacaacatggacgcgccgcagaactctgtcggtgagttctctgtc

SEQ ID NO: 517701 - DNA, 75 bp, synthetic construct
  source 1..75: mol_type = other DNA
ctggctggcaagatatcttctaacagcactgatgccattaatggctcacaactttatggcgtagcggattcattt

SEQ ID NO: 517702 - DNA, 75 bp, synthetic construct
  source 1..75: mol_type = other DNA
agctaccagcaagatcaccaacttactggctggcaagatatcttctaacagcactgatgccattaatggctcaca

SEQ ID NO: 517703 - DNA, 75 bp, synthetic construct
  source 1..75: mol_type = other DNA
cagcgcttcaggtattggcgctacagctgtaggttataacgcagttgcctctcatgccagcagtgtagccatcgg

SEQ ID NO: 517704 - DNA, 75 bp, synthetic construct
  source 1..75: mol_type = other DNA
gcacagactacatcgaagagaacggtgcgggtctgaactatgcgcgtactaatgacaccggcttaacctttattg

SEQ ID NO: 517705 - DNA, 75 bp, synthetic construct
  source 1..75: mol_type = other DNA
tcaccgctgcacacggcaccgaagccaccagcaaaatcactaacgtcaccgctggaacaatctcgtctaccagta

SEQ ID NO: 517706 - DNA, 75 bp, synthetic construct
  source 1..75: mol_type = other DNA
ttgatggcaacgggcgtctgaccggtgcccgtactgcacagactgcgccatacgatcgttatacctgccatcttt

SEQ ID NO: 517707 - DNA, 75 bp, synthetic construct
  source 1..75: mol_type = other DNA
accctgatgtcggcaaataaccccgttggcgggaatatgtgggtcgacattcagacgccggaaggggtgacggag

SEQ ID NO: 517708 - DNA, 75 bp, synthetic construct
  source 1..75: mol_type = other DNA
cggcagcgaatgcggctaaagtaaccgtggtggctgatgcgttatcttcaggccagtcgacagtgtctgtagccg

SEQ ID NO: 517709 - DNA, 75 bp, synthetic construct
  source 1..75: mol_type = other DNA
tggctggataatttcggggaaacagacgatgagaaaaataatacggcaataatattcggcggcctgtttttttcc

SEQ ID NO: 517710 - DNA, 75 bp, synthetic construct
  source 1..75: mol_type = other DNA
atggctattgaaaacaaactcagcgacaaactgttaaagagtcttgccggaaaacgacaggacaaacaaaaaaca

SEQ ID NO: 517711 - DNA, 75 bp, synthetic construct
  source 1..75: mol_type = other DNA
gcattgcttacaaccacccggattgtgtgctgatggttctgctgatcgacgaacgtccggaagaagtaaccgaga

SEQ ID NO: 517712 - DNA, 75 bp, synthetic construct
  source 1..75: mol_type = other DNA
cgtaatgcggccctgattgaccagcaaaaaatccgggaacagttgcgatcccgggaagagacactgaagaatgag

SEQ ID NO: 517713 - DNA, 75 bp, synthetic construct
  source 1..75: mol_type = other DNA
tctggaaactgagcggggtctgaacctttccattcaggccgttccccgtgaaggcgcggggcgtaccattcagct

SEQ ID NO: 517714 - DNA, 75 bp, synthetic construct
  source 1..75: mol_type = other DNA
ggcagccgggaacccgtgccgtgatgttcagccagcctgccagccagttactggcaggggcgcgcatggatgtgt

SEQ ID NO: 517715 - DNA, 75 bp, synthetic construct
  source 1..75: mol_type = other DNA
caaagaatcgagcatgacggtaattatagttatcacgtatggtattcagtaaccagcacgataggatttacttac

SEQ ID NO: 517716 - DNA, 75 bp, synthetic construct
  source 1..75: mol_type = other DNA
tcctggaacaatcgtaactttcgattcatcgctagaggctgtttctggtgactttgtgatgtgtgtgctgaatga

SEQ ID NO: 517717 - DNA, 75 bp, synthetic construct
  source 1..75: mol_type = other DNA
atggactggtatctgaaagtactaaaaaattatgtcggtttccggggtcgtgcgcggcgcaaagagtactggatg

SEQ ID NO: 517718 - DNA, 75 bp, synthetic construct
  source 1..75: mol_type = other DNA
tgaacggtggtcaggccagtattgccatcagcaataccagcccgaatctgtttaccgttcctggtgaccggatta

SEQ ID NO: 517719 - DNA, 75 bp, synthetic construct
  source 1..75: mol_type = other DNA
cgcttgattcatcgtctgcagcaattcgttccggatgccttacccgtggtccgtaaagccagctggcactgcaga

SEQ ID NO: 517720 - DNA, 75 bp, synthetic construct
  source 1..75: mol_type = other DNA
cgcttgattcatcgtctgcagcaattcgttccggatgccttacccgtggtacgtaaagccagctggcactgcagc

SEQ ID NO: 517721 - DNA, 75 bp, synthetic construct
  source 1..75: mol_type = other DNA
cgcttgatttatcgtctgcagcaattcgttccggatgccttacccgtggtgcgtaaagccagctggcactgcagt

SEQ ID NO: 517722 - DNA, 75 bp, synthetic construct
  source 1..75: mol_type = other DNA
caatgtcaccacgattattatggggagcggtactgcacacactgccagaccgggcgattcagtgaggaggtggta

SEQ ID NO: 517723 - DNA, 75 bp, synthetic construct
  source 1..75: mol_type = other DNA
caatgtcaccacgattattatggggagctgtactgcacacactgccagaccgggcgtttcagtgaggaggtggta

SEQ ID NO: 517724 - DNA, 75 bp, synthetic construct
  source 1..75: mol_type = other DNA
caatgtcaccacgattattatggggagcagtactgcacacactgccagaccgggcggttcagtgaggaggtggta

SEQ ID NO: 517725 - DNA, 75 bp, synthetic construct
  source 1..75: mol_type = other DNA
gactgcgcttgaaaacgtaatgtttggcccgctgcgcgtgcgtggtgcaaacaaagaagacgcagaaaaactggc

SEQ ID NO: 517726 - DNA, 75 bp, synthetic construct
  source 1..75: mol_type = other DNA
gcgtgagctgctggcgaaagtcggtctggcagaacgtgcacatcactacccttccgaactttctggtggtcaaca

SEQ ID NO: 517727 - DNA, 75 bp, synthetic construct
  source 1..75: mol_type = other DNA
tggaaaataaaacgctgtctgccctgaatatccgggaaagtgatttctggcagccgggaacccgtgccgtgatgt

SEQ ID NO: 517728 - DNA, 75 bp, synthetic construct
  source 1..75: mol_type = other DNA
cgcttgatttatcgtctgcagcaattcgttccggatgccttacccgtggttcgtaaagccagctggcactgcagg

SEQ ID NO: 517729 - DNA, 75 bp, synthetic construct
  source 1..75: mol_type = other DNA
cgcttgattaatcgtctgcagcaattcgttccggatgccttacccgtggtccgtaaagccagctggcactgcagc

SEQ ID NO: 517730 - DNA, 75 bp, synthetic construct
  source 1..75: mol_type = other DNA
caatgtcatcacgattattatggggagcggtactgcactcactgccataccgggcacttcagtgaggagggagtg

SEQ ID NO: 517731 - DNA, 75 bp, synthetic construct
  source 1..75: mol_type = other DNA
ctctgaaagagttcatcaaacaatatatcgcagcgtctggcaatcaggtctattttacctggcaaggcggtgaac

SEQ ID NO: 517732 - DNA, 75 bp, synthetic construct
  source 1..75: mol_type = other DNA
acagaaccggctaccagatgaaggttaaagagttcgttggtgtacctgagttcaaagtggatacaaacatcccta

SEQ ID NO: 517733 - DNA, 75 bp, synthetic construct
  source 1..75: mol_type = other DNA
atgaatacagccctttccatcatcgacgatgccagctcaaacacggctatcgactatcgtcaggaaatgaatgtc

SEQ ID NO: 517734 - DNA, 75 bp, synthetic construct
  source 1..75: mol_type = other DNA
aagaaagcagcggcagaaaaagccgccgcagacaaaaaagcggcagcggcaaaagctgcagctgaaaaagccgct

SEQ ID NO: 517735 - DNA, 75 bp, synthetic construct
  source 1..75: mol_type = other DNA
attttgcacaccaaccgtacgctggaagaagtggctggcgatcagatgggcgtcactggcgtgcgtctgcgtgat

SEQ ID NO: 517736 - DNA, 75 bp, synthetic construct
  source 1..75: mol_type = other DNA
cttctatcgtaaccaaaaagtagcggttatcggcggcggcaatactgcggttgaagaggcgctgtatctgtctaa

SEQ ID NO: 517737 - DNA, 75 bp, synthetic construct
  source 1..75: mol_type = other DNA
gaagcctttaaaggccgtggggtttctgcttgtgcaacctgcgacggtttcttctatcgcaaccagaaagttgcg

SEQ ID NO: 517738 - DNA, 75 bp, synthetic construct
  source 1..75: mol_type = other DNA
atgagcagtaacttcagacatcaactattgagtctgtcgttactggttggtatagcggccccctgggccgctttt

SEQ ID NO: 517739 - DNA, 75 bp, synthetic construct
  source 1..75: mol_type = other DNA
accaatgaagaagctatctctactgcacgtcgtttaatggaagaagaaggcattcttgccggaatctcttccggc

SEQ ID NO: 517740 - DNA, 75 bp, synthetic construct
  source 1..75: mol_type = other DNA
gcggttataaactcactctgaccatgccagagacaatgagtattgaacgccgcaaactgctgaaagctctgggcg

SEQ ID NO: 517741 - DNA, 75 bp, synthetic construct
  source 1..75: mol_type = other DNA
gctcaggctcggttgaagaccgcgtcactcaacttgagcgtatttctaatgctcacagccagcttttaacccaac

SEQ ID NO: 517742 - DNA, 75 bp, synthetic construct
  source 1..75: mol_type = other DNA
aaagtcggcgtcatcatgcaggacaaaggtgacaccgcaaaagcgaaagccgtataccagcaggttatcagtaaa

SEQ ID NO: 517743 - DNA, 75 bp, synthetic construct
  source 1..75: mol_type = other DNA
tgcggcggcatcaacgacgccgacagctgatgctggtactgcgaatgctggcgcgccggtgaaaagcggcgatgc

SEQ ID NO: 517744 - DNA, 75 bp, synthetic construct
  source 1..75: mol_type = other DNA
tggcgttcgtctgcgcgatacgcaaaacagcgataacatcgagtcactcgacgttgccggtctgtttgttgctat

SEQ ID NO: 517745 - DNA, 75 bp, synthetic construct
  source 1..75: mol_type = other DNA
gttctgcaaaaagtacgaagggcgtgagcatccgttcgtgcaggcgctgattgatgaataccgttttgatctggt

SEQ ID NO: 517746 - DNA, 75 bp, synthetic construct
  source 1..75: mol_type = other DNA
aaaggggatccagccggatctgatctacacctcggaagaagccgatgcgccacagtatatggaacatctggggat

SEQ ID NO: 517747 - DNA, 75 bp, synthetic construct
  source 1..75: mol_type = other DNA
gtggcgatgagatcgcgttgcagtattccgactacgataaaatcgcgctgggacatgcgcaatatattgattttg

SEQ ID NO: 517748 - DNA, 75 bp, synthetic construct
  source 1..75: mol_type = other DNA
gtgcgtgggagtttggtcgtgattatgttttttcgcatcttggcggtgacgagattgcgttacagtattctgact

SEQ ID NO: 517749 - DNA, 75 bp, synthetic construct
  source 1..75: mol_type = other DNA
cgcagtatatggaacatctggggatcgaaacggtgttggtcgatccgaaacgtacttttatgagtatcagtggtg

SEQ ID NO: 517750 - DNA, 75 bp, synthetic construct
  source 1..75: mol_type = other DNA
tggttattgcagacttttaaatatcagaaaaatatccgcattcattccttcaatgaagagggcatggaaccgtat

SEQ ID NO: 517751 - DNA, 75 bp, synthetic construct
  source 1..75: mol_type = other DNA
gccttttatgccgaatcggatgcgcagcgtgcggactggcagaaagggctgcaggagggattcagtaactgggtg

SEQ ID NO: 517752 - DNA, 75 bp, synthetic construct
  source 1..75: mol_type = other DNA
gctgcatccctgctttctctggtcggcgggatacccggcttactgatgctcggggccggtgcctggtacacggtg

SEQ ID NO: 517753 - DNA, 75 bp, synthetic construct
  source 1..75: mol_type = other DNA
gaaacggtttccggtagtatcacgaaggtggaaaacgcctttatggcctgggtgggcggtgcgaatgaggccagc

SEQ ID NO: 517754 - DNA, 75 bp, synthetic construct
  source 1..75: mol_type = other DNA
ggtatgaccaaagggtatttaagccagttactgaatgccaaaattaaaagccccagcgcgcaaaagctggaggca

SEQ ID NO: 517755 - DNA, 75 bp, synthetic construct
  source 1..75: mol_type = other DNA
tggttattgcaaacctttaaatatcagaaaaatatccgcattcatgctttcaacgaagagggcatggagccgtat

SEQ ID NO: 517756 - DNA, 75 bp, synthetic construct
  source 1..75: mol_type = other DNA
tatgccaataaagtggcatttatcgataccgattttgtcaccactcaggcgttctgcaaaaagtacgagggacgc

SEQ ID NO: 517757 - DNA, 75 bp, synthetic construct
  source 1..75: mol_type = other DNA
cagaggtgattgacgcatcgaaaaaatttaatgctgccgcgctgcgcgcccattctgcaggcgtcggctcaatgt

SEQ ID NO: 517758 - DNA, 75 bp, synthetic construct
  source 1..75: mol_type = other DNA
ccagacaatgcaccacagcttaatgatttcattgcgctggctcaggggggaacattagtgctcagccatcctgaa

SEQ ID NO: 517759 - DNA, 75 bp, synthetic construct
  source 1..75: mol_type = other DNA
attgtgtatcgcatcgactctggcatgggtttgggcgctttcagcagcgaaagaagcctggtacatcctgaagag

SEQ ID NO: 517760 - DNA, 75 bp, synthetic construct
  source 1..75: mol_type = other DNA
cgtcgaagcgcaactgcgtggtggctatatcgcgatttatgcacggcggtataacctccaccagggcgtttttag

SEQ ID NO: 517761 - DNA, 75 bp, synthetic construct
  source 1..75: mol_type = other DNA
tccgtcgtttgccggaacgcgcatccccttgctggcggacgtgctgcgctgggcggtggaaaacagcatggggct

SEQ ID NO: 517762 - DNA, 75 bp, synthetic construct
  source 1..75: mol_type = other DNA
cgaaagtgggacttaagccactggtaccgcagggtaaagatatgctggcgattttatcgaacaacagcgtcggga

SEQ ID NO: 517763 - DNA, 75 bp, synthetic construct
  source 1..75: mol_type = other DNA
ccgggcacggcgatgtgccaatggcagttgatgcggtgaaaaaaggcgcgtgggattttttgcaaaaaccggtcg

SEQ ID NO: 517764 - DNA, 75 bp, synthetic construct
  source 1..75: mol_type = other DNA
ctggcgctggggaaatactccgaagtctcactggcggatgccagggcacgcagggatgaggcccgtaagctatta

SEQ ID NO: 517765 - DNA, 75 bp, synthetic construct
  source 1..75: mol_type = other DNA
gactgcactggagctttttgaaatcagcacccttgatcactttattgtcgccggaaataacgtcatttcgatggc

SEQ ID NO: 517766 - DNA, 75 bp, synthetic construct
  source 1..75: mol_type = other DNA
ttcttccatcggtacttgcaacatcccaaatgggttgttgtgtatcaagagtcgggttgtattgccttttggaaa

SEQ ID NO: 517767 - DNA, 75 bp, synthetic construct
  source 1..75: mol_type = other DNA
caatacacctccatggcgaagatgcgtatgttgcagccgaagattcaggcaatgcgtgagcgtctgggcgatgac

SEQ ID NO: 517768 - DNA, 75 bp, synthetic construct
  source 1..75: mol_type = other DNA
aactgatttcggttaaaaccgacgtgcttgatctgaccatcaacacccgtggtggtgatgttgagcaggccctgc

SEQ ID NO: 517769 - DNA, 75 bp, synthetic construct
  source 1..75: mol_type = other DNA
aacactcttattcgcatggggttcacatgggacggtggagcttactggcaagcgcctcaacccattttatacggc

SEQ ID NO: 517770 - DNA, 75 bp, synthetic construct
  source 1..75: mol_type = other DNA
ggtggctgagcgcggtggtccaggattcacgccatttattaccttcagcagtaacggacagccgtttactgtgac

SEQ ID NO: 517771 - DNA, 75 bp, synthetic construct
  source 1..75: mol_type = other DNA
catgcagatattcttgatggtggcgaaattcagtttaatggctttgtcactgacgaagcccccaaatggacctgg

SEQ ID NO: 517772 - DNA, 75 bp, synthetic construct
  source 1..75: mol_type = other DNA
tacagagaacgggcaactggtttttgatttgagtgacaaagggcctctgccttttcttgaggggtatttgtatga

SEQ ID NO: 517773 - DNA, 75 bp, synthetic construct
  source 1..75: mol_type = other DNA
caaccagaaagtgttggctgacagcagagcaatgaatctggccgcatcatatgcctctgaattgtctgattttat

SEQ ID NO: 517774 - DNA, 75 bp, synthetic construct
  source 1..75: mol_type = other DNA
tttggcgaataggtcagttacaaatttggcggcagcgtatgcttctgttttatctggttttgagctacgtttgcc

SEQ ID NO: 517775 - DNA, 75 bp, synthetic construct
  source 1..75: mol_type = other DNA
tctttatttctgcttttgtttttatagtcttgttttatacgacagcgctacatgcaaaacttcttgatggcggcg

SEQ ID NO: 517776 - DNA, 75 bp, synthetic construct
  source 1..75: mol_type = other DNA
taggcaatatggaatttacaatagaacaagggatgggtattgctgtgggacttcaggaggaaaatgtccccttca

SEQ ID NO: 517777 - DNA, 75 bp, synthetic construct
  source 1..75: mol_type = other DNA
tggatcaaccctatagatgcgcagaaacgtgggattgccaacggcgatatggtgcgggtgtttaaccatcgtggc

SEQ ID NO: 517778 - DNA, 75 bp, synthetic construct
  source 1..75: mol_type = other DNA
gtgatcgatccactgccgatctatacgccgggttttgaaagttatcaggatccgctgaacaaacagtatccgctg

SEQ ID NO: 517779 - DNA, 75 bp, synthetic construct
  source 1..75: mol_type = other DNA
atgatgaaaacagtatgtcactataaatttattctttcagccattatttcggtggctctgttttattcagcagcg

SEQ ID NO: 517780 - DNA, 75 bp, synthetic construct
  source 1..75: mol_type = other DNA
agctttctttcaccctgaatcagggaatggccgtcagtgccggtgcacaggaagagggggcaacagtgccggcag

SEQ ID NO: 517781 - DNA, 75 bp, synthetic construct
  source 1..75: mol_type = other DNA
ttaatcagggtatggccgtcagtactggtgtccaggaggggggggtatcggtaccggcggggatgtcactggtca

SEQ ID NO: 517782 - DNA, 75 bp, synthetic construct
  source 1..75: mol_type = other DNA
gcagtacgacactgaacttccctggtttgaacacactgacgacgggctgactgagcacggtcaacagtgccctta

SEQ ID NO: 517783 - DNA, 75 bp, synthetic construct
  source 1..75: mol_type = other DNA
aaattcacccggcggcagataacaactggcgtttagcaccgatagccggcgataagaaactggatatccgtttcg

SEQ ID NO: 517784 - DNA, 75 bp, synthetic construct
  source 1..75: mol_type = other DNA
ccagtgctttcagctgccgcaccgtttaaagttggtggtcgcaaaaatgacccgcaagctatgtggaggtggaaa

SEQ ID NO: 517785 - DNA, 75 bp, synthetic construct
  source 1..75: mol_type = other DNA
ccgccgatctttatctctaccccaatacgctgattgtagtgaaagccagcggtaaagaggtgaaagagtggctgg

SEQ ID NO: 517786 - DNA, 75 bp, synthetic construct
  source 1..75: mol_type = other DNA
tacatcggtgttgtaccaccacagatcatgggatgggataaggccaatttatccggcaaagttaccgttaacgat

SEQ ID NO: 517787 - DNA, 75 bp, synthetic construct
  source 1..75: mol_type = other DNA
ctggcgtttagcaccgatagctggcgataagaaactggatatccgtttcgaaacctctccgtcagataaagccgc

SEQ ID NO: 517788 - DNA, 75 bp, synthetic construct
  source 1..75: mol_type = other DNA
tgacggcgtgaattatcagattgatgttacccagccagcccgctatgacggtgaatgtcaggtgattaatgccaa

SEQ ID NO: 517789 - DNA, 75 bp, synthetic construct
  source 1..75: mol_type = other DNA
atgtacgcaaaatcctttatcgctcttgatggcaacggacgtctgacgggcgcccgtactgtacaggccgcacct

SEQ ID NO: 517790 - DNA, 75 bp, synthetic construct
  source 1..75: mol_type = other DNA
gcgtaaagccagctggcactgcagacaatgtcaccacgattattatggggagcggtactgcacactgaaccgccc

SEQ ID NO: 517791 - DNA, 75 bp, synthetic construct
  source 1..75: mol_type = other DNA
acaatggatcgttaatctttacgcagaaacaaaaaatcgcggttatgttgtcggttgtgctttgcaaagggcgac

SEQ ID NO: 517792 - DNA, 75 bp, synthetic construct
  source 1..75: mol_type = other DNA
tttgaacacactgacgatgggctgactgagcacggtcatgagtgcccttatgtcagaccggaacgcagagaaata

SEQ ID NO: 517793 - DNA, 75 bp, synthetic construct
  source 1..75: mol_type = other DNA
atgtacgcaaaatcctttgtcgctcttgatagcaacggacgtctgacgggcgcccgtactgtacaggccgcacct

SEQ ID NO: 517794 - DNA, 75 bp, synthetic construct
  source 1..75: mol_type = other DNA
atgtacgcaaaatcctttttcgctcttgattgcaacggacgtctgacgggcgcccgtactgtacaggccgcacct

SEQ ID NO: 517795 - DNA, 75 bp, synthetic construct
  source 1..75: mol_type = other DNA
atggttaagtttagtgcaacgcttcttgctacgctgattgccgccagtgtgaatgcggcaacagtcgatctccgc

SEQ ID NO: 517796 - DNA, 75 bp, synthetic construct
  source 1..75: mol_type = other DNA
cggagcacggtcagcagtgcccttatgtcagaccggaacgcagggagatacaactgattaagcgtctgcagcaat

SEQ ID NO: 517797 - DNA, 75 bp, synthetic construct
  source 1..75: mol_type = other DNA
tttgaacacactgacgaagggctgactaagcacggtcatgagtgcccttatgtcagaccggagtgcagagaaata

SEQ ID NO: 517798 - DNA, 75 bp, synthetic construct
  source 1..75: mol_type = other DNA
gggaacgctactgtctgacctgccgaaccggtgagcacagtcatgtgctttctgatgctgaaagctgtagtggtc

SEQ ID NO: 517799 - DNA, 75 bp, synthetic construct
  source 1..75: mol_type = other DNA
caatgtcaccacgattattatggggagcggtactgcacacactgtcatacagggcgtttcagtgaggagggggta

SEQ ID NO: 517800 - DNA, 75 bp, synthetic construct
  source 1..75: mol_type = other DNA
gcaatacgataccgagcgtccctggtttgaacacactggcgaagggctggctgagcacggtcatgagtgccctta

SEQ ID NO: 517801 - DNA, 75 bp, synthetic construct
  source 1..75: mol_type = other DNA
atgtacgcaaaatcctttattgcatttgatggcaatgggcgtctgacgggtgcccgtaccgcacagactgcacct

SEQ ID NO: 517802 - DNA, 75 bp, synthetic construct
  source 1..75: mol_type = other DNA
tgatggcgtgaattatcagattgatgttacccagcccgctcgctatgacggcgaatgtcagatggtcaatgccaa

SEQ ID NO: 517803 - DNA, 75 bp, synthetic construct
  source 1..75: mol_type = other DNA
taagaaacagacgctgaaaataggttatattggcgtcgtgccgccacagatcatgggctgggataaagccaattt

SEQ ID NO: 517804 - DNA, 75 bp, synthetic construct
  source 1..75: mol_type = other DNA
aaagttggtggtcgcaaaaatgacccggcaagctatgtggaggtggaaaaaggccagttgaccttccgtaatgcc

SEQ ID NO: 517805 - DNA, 75 bp, synthetic construct
  source 1..75: mol_type = other DNA
ggtttaccaggccgactggcactgcagcggctgtgatggcgattaccacggggaacgctactgtctgacctgccg

SEQ ID NO: 517806 - DNA, 75 bp, synthetic construct
  source 1..75: mol_type = other DNA
gggaacgttattgcctgaactgccataccggaaagttcagcatcgtggccacttccatagcaagtatgggagtgg

SEQ ID NO: 517807 - DNA, 75 bp, synthetic construct
  source 1..75: mol_type = other DNA
gctgaagagtcgaagcgtgcgggggaaattcacccggcagcggataacaactggcgtttggcaccaattgctggc

SEQ ID NO: 517808 - DNA, 75 bp, synthetic construct
  source 1..75: mol_type = other DNA
gtgctggcgtgaatacggatggcagcatcagtgcaccaacgtacaccattgctaacactgattacgataatgtcg

SEQ ID NO: 517809 - DNA, 75 bp, synthetic construct
  source 1..75: mol_type = other DNA
atgacccgttcctggccaccgggaaatactctggtcgcgcgcctgatgaactgctgcggcggttatctgaaccat

SEQ ID NO: 517810 - DNA, 75 bp, synthetic construct
  source 1..75: mol_type = other DNA
ctctcgagaatccgatccagaccagcatttccatgtttatgtggaccgatgcgattgaacgcggcccggagatga

SEQ ID NO: 517811 - DNA, 75 bp, synthetic construct
  source 1..75: mol_type = other DNA
cgaaaacagtaagctggtagtgctgtttggtaataaccctggcgaaacgcgaatgagtggcggtggggtgactta

SEQ ID NO: 517812 - DNA, 75 bp, synthetic construct
  source 1..75: mol_type = other DNA
tttgagaacgttgttttaacaggcatcgaatacacagaagaggcaagcgaatccctggtatttgatcttagcttt

SEQ ID NO: 517813 - DNA, 75 bp, synthetic construct
  source 1..75: mol_type = other DNA
atcactgaaacaccgattaaaagcgatcctggcttgttaaagagtgcaggggtgaacgggaacagaagatcatta

SEQ ID NO: 517814 - DNA, 75 bp, synthetic construct
  source 1..75: mol_type = other DNA
agcttaccgtttgtccgtatgccgaccctcgaaaacccgatccagaccagcatttctatgtttatgtggaccgat

SEQ ID NO: 517815 - DNA, 75 bp, synthetic construct
  source 1..75: mol_type = other DNA
atcctgcgggaatatgtcttacgtgattttcaacgatcaggtgattaaaccgcgctttgaatgtaagaccatcta

SEQ ID NO: 517816 - DNA, 75 bp, synthetic construct
  source 1..75: mol_type = other DNA
gcgacagcgaaattcgccgtcagttagagaaaggtgacagcttctcttttgaggagacggcgctgtacaagaaag

SEQ ID NO: 517817 - DNA, 75 bp, synthetic construct
  source 1..75: mol_type = other DNA
gtaggggaaattgaactttacgaccgtgataaacaggtggcgcactggccgctggttaccctggaatctgtcggg

SEQ ID NO: 517818 - DNA, 75 bp, synthetic construct
  source 1..75: mol_type = other DNA
actgaccacgccatcgggcaaaattgagatttattcgcaggcgctggctgacattgccgctacctgggaattgcc

SEQ ID NO: 517819 - DNA, 75 bp, synthetic construct
  source 1..75: mol_type = other DNA
ggggtaacgtactatcttgaacaggctcggcagaaatcaaatgctcgcatgattatcatcgatccgcgttatacc

SEQ ID NO: 517820 - DNA, 75 bp, synthetic construct
  source 1..75: mol_type = other DNA
agaccgtctgaagtatccgatgaaacgggtaggggcgcgtggcgaaggtaaatttgagcgtattagctgggaaga

SEQ ID NO: 517821 - DNA, 75 bp, synthetic construct
  source 1..75: mol_type = other DNA
taaatctgtagggggacagattaaaatgcaggtaaatacaaaaagcccagggcaagacgttgtaacgccagtatt

SEQ ID NO: 517822 - DNA, 75 bp, synthetic construct
  source 1..75: mol_type = other DNA
atatcgttggcatcaaagacaccatcgacagcgccacggtcagcagtgtccttatgtcagaccggaacgcagaga

SEQ ID NO: 517823 - DNA, 75 bp, synthetic construct
  source 1..75: mol_type = other DNA
tgttctggtttatgaggtcgatagccagtggggaaaagtgtatatcctgcgcgtattgcataccgcacagaagtg

SEQ ID NO: 517824 - DNA, 75 bp, synthetic construct
  source 1..75: mol_type = other DNA
tgttctggtttatgaagtcgatagccagtggggtaaagtgtatatcctgcgcgtattgcatactgcacagaagtg

SEQ ID NO: 517825 - DNA, 75 bp, synthetic construct
  source 1..75: mol_type = other DNA
aaattcaggctgctgcatcaatcggtcgtcgtttcaccatccatcatggttatggggtggttatcaacaaacacg

SEQ ID NO: 517826 - DNA, 75 bp, synthetic construct
  source 1..75: mol_type = other DNA
tgcttaatgatgactacgacggtggaaagaagcttattccggttttccaggagcacctcaataaaggaacccggg

SEQ ID NO: 517827 - DNA, 75 bp, synthetic construct
  source 1..75: mol_type = other DNA
agccagatgaataccgcccagcgaatggcgttcaccgaagaagccgtcgccgttgtcggcggacgggtcccggta

SEQ ID NO: 517828 - DNA, 75 bp, synthetic construct
  source 1..75: mol_type = other DNA
taaaaacagcaccaaataaatctgtagggggacaggttaaaatgcaggtaaatacaacagaacagaaaaatcaaa

SEQ ID NO: 517829 - DNA, 75 bp, synthetic construct
  source 1..75: mol_type = other DNA
ttgaagctcaatcccgatatgattaagaatgcgggaattaacggcaatcgacgtatgcttatgcttgaataccta

SEQ ID NO: 517830 - DNA, 75 bp, synthetic construct
  source 1..75: mol_type = other DNA
aagattggcaatgctttacgcaccattgatacctggcatccgaaggttgatgagttgggggctatcgccgtggag

SEQ ID NO: 517831 - DNA, 75 bp, synthetic construct
  source 1..75: mol_type = other DNA
atgtggaaggctggcagaacagcgatattaatagcgcgatgtatcagaatttagagaagttgttaaatactttgc

SEQ ID NO: 517832 - DNA, 75 bp, synthetic construct
  source 1..75: mol_type = other DNA
tcggggctaatatgaaaaaacgtgttaacactgaaaaatcaagtagtgaaggtgaagacactattacgcctgcct

SEQ ID NO: 517833 - DNA, 75 bp, synthetic construct
  source 1..75: mol_type = other DNA
acgaaaatagcaaagctaataaaacaaaaggagagaatggatttgctattgttaccagtggcttggcatcttctg

SEQ ID NO: 517834 - DNA, 75 bp, synthetic construct
  source 1..75: mol_type = other DNA
caggatatcaactgggataacgacaacggcaccaagtggtggaccgtcggtattcgcccgatgtacaagtggacg

SEQ ID NO: 517835 - DNA, 75 bp, synthetic construct
  source 1..75: mol_type = other DNA
ggatgacccgcgacgaagtgattgaccatctggggactatcgctaaatccggcaccaaatcattcctcgaatccc

SEQ ID NO: 517836 - DNA, 75 bp, synthetic construct
  source 1..75: mol_type = other DNA
ctctttcgataaagacaagcgcacgctgaccatctccgataacggcgtggggatgacccgcgacgaagtgatcga

SEQ ID NO: 517837 - DNA, 75 bp, synthetic construct
  source 1..75: mol_type = other DNA
ctgctggcagaacgcggcacgctggaagatccgaacctgtttattcgtcgtatgaaccagctgctggtttcctga

SEQ ID NO: 517838 - DNA, 75 bp, synthetic construct
  source 1..75: mol_type = other DNA
tttatggctgccgttttatctctcgctaccgacgctggtgttcagttatgcgctgggcattgtgctgaaaggaca

SEQ ID NO: 517839 - DNA, 75 bp, synthetic construct
  source 1..75: mol_type = other DNA
acttacgttttggtgcctggctgacggcggacagcatcatcaactatctcaacaccaacctttcaacgctggtgc

SEQ ID NO: 517840 - DNA, 75 bp, synthetic construct
  source 1..75: mol_type = other DNA
agatcgaaaaacgcgaagagaaagacggcgaaaccgttatctcctgggaaaaaatcaacaaagcgcaggcgctgt

SEQ ID NO: 517841 - DNA, 75 bp, synthetic construct
  source 1..75: mol_type = other DNA
aaacacatcgcccacgactttaacgatccgctgacctggagccacaaccgtgtcgaaggtaagcaggagtacacc

SEQ ID NO: 517842 - DNA, 75 bp, synthetic construct
  source 1..75: mol_type = other DNA
agcctgctgtacattccgtcccaggctccgtgggatatgtggaaccgtgatcataaacacggcctgaaactgtac

SEQ ID NO: 517843 - DNA, 75 bp, synthetic construct
  source 1..75: mol_type = other DNA
gcgaaagaagcggagaaagcactgactccgttcatcgaccgtgtgaaagccctgctcggcgagcgcgtgaaagat

SEQ ID NO: 517844 - DNA, 75 bp, synthetic construct
  source 1..75: mol_type = other DNA
cttctgcgcagaccgtgtctctggaagactacgtttcccgcatgaaagaagggcaggagaaaatctactatatca

SEQ ID NO: 517845 - DNA, 75 bp, synthetic construct
  source 1..75: mol_type = other DNA
ctctttcgataaagacaagcgtacgctgaccatctccgataacggcgtggggatgacccgcgacgaagtgattga

SEQ ID NO: 517846 - DNA, 75 bp, synthetic construct
  source 1..75: mol_type = other DNA
gccagttcaacttgctggtatctggcacgccagttgcctgacatcaacattcaggtcttcaccaatagccatccg

SEQ ID NO: 517847 - DNA, 75 bp, synthetic construct
  source 1..75: mol_type = other DNA
tatatcggcggaatgcttctcatctattacactactgttttcttgacactatcaactttcatggttggaattctt

SEQ ID NO: 517848 - DNA, 75 bp, synthetic construct
  source 1..75: mol_type = other DNA
gtgttgataatttgtggaacgctctatctacgaatttaaacaacttccttgatacaagtatgagtatttatggaa

SEQ ID NO: 517849 - DNA, 75 bp, synthetic construct
  source 1..75: mol_type = other DNA
attgagaaggccgggatagaactgaataaagaagaacacgatcagctatataaagccatattattactggtgggt

SEQ ID NO: 517850 - DNA, 75 bp, synthetic construct
  source 1..75: mol_type = other DNA
taactctgcagacaatatcggtggcgtgtattacaaacaggctcagatttatattaatggtgcatggcgatctgt

SEQ ID NO: 517851 - DNA, 75 bp, synthetic construct
  source 1..75: mol_type = other DNA
tattcacaacgtgatgtggttatgtcggaagttactaaaaatataatgaaattggctctggttggtgttttcaca

SEQ ID NO: 517852 - DNA, 75 bp, synthetic construct
  source 1..75: mol_type = other DNA
ttaacttctacaagctgctgtcggtagtggggattatcaactttccggcgctgctcgggctgatggtggtgtcga

SEQ ID NO: 517853 - DNA, 75 bp, synthetic construct
  source 1..75: mol_type = other DNA
gccattggtgacgtgctgaataacccggacctggcaccgttgattaaaacattgtcgctggcgtttgtggtgatc

SEQ ID NO: 517854 - DNA, 75 bp, synthetic construct
  source 1..75: mol_type = other DNA
ggccgacagcatcatcaactatgtcaacaccaacctttccacgctggtgctggcgcgcattctgggggcgagcgt

SEQ ID NO: 517855 - DNA, 75 bp, synthetic construct
  source 1..75: mol_type = other DNA
caagatcggcatgattgaaaccagcgccgtgctggcgggctttaccttcacggtggtgagcgcccatttctggcc

SEQ ID NO: 517856 - DNA, 75 bp, synthetic construct
  source 1..75: mol_type = other DNA
ttggttcgctgctgatggcgaaagcgcgggtcgatatcagctttaaattcaacgtattcaaaacatttctgttta

SEQ ID NO: 517857 - DNA, 75 bp, synthetic construct
  source 1..75: mol_type = other DNA
gagattggtctttatgatgatgaaggtgtactcattgcggtggcaaactgcccggaaacgtacaaaccgcagttg

SEQ ID NO: 517858 - DNA, 75 bp, synthetic construct
  source 1..75: mol_type = other DNA
agtgagcgagtttttacttataccactggtggaagaaatggtgctgaatcagtgagttcacctgatgcctcctct

SEQ ID NO: 517859 - DNA, 75 bp, synthetic construct
  source 1..75: mol_type = other DNA
atggctatgcaatcacaagatattataaaacgctctgcgacgaacaacatcacgccgccgcctcaggcgcggaat

SEQ ID NO: 517860 - DNA, 75 bp, synthetic construct
  source 1..75: mol_type = other DNA
tgtcgctggtcttctctcataccttggtttgggagaagcggcgaaaagggatgtgggcacaggagataatcagat

SEQ ID NO: 517861 - DNA, 75 bp, synthetic construct
  source 1..75: mol_type = other DNA
gaacactggatttaatattacggtgtcgcccggttcaggatatggttcatctgctgatgcgtattacattgcaat

SEQ ID NO: 517862 - DNA, 75 bp, synthetic construct
  source 1..75: mol_type = other DNA
aaaaatttccgtctggattaattttacagtgcggtcagttgaatggtgccccgaatgtatcttcaacatacggga

SEQ ID NO: 517863 - DNA, 75 bp, synthetic construct
  source 1..75: mol_type = other DNA
cttcagaaatcatttgcaaatcagacttggctactcacaggtattgtcctgtctgcgatggctgtgcttgtggct

SEQ ID NO: 517864 - DNA, 75 bp, synthetic construct
  source 1..75: mol_type = other DNA
taccgttcagaaaaaagaaagagaatgccaataatgtatccaacaaccaagtgacaggaagtggtaatgatggag

SEQ ID NO: 517865 - DNA, 75 bp, synthetic construct
  source 1..75: mol_type = other DNA
gctcatcgcctgacgatggcacagaatgagtggcggcgcatgaaggacaataactcgcaggagtgccgtaactgt

SEQ ID NO: 517866 - DNA, 75 bp, synthetic construct
  source 1..75: mol_type = other DNA
gcaggtgtcagaaatgacattttaaaaaaaagaaataatattgagtttccacctcaagctactcatttcaaccct

SEQ ID NO: 517867 - DNA, 75 bp, synthetic construct
  source 1..75: mol_type = other DNA
tcgaattaatgatgctggtgttgatgatcctagaaataaattacttttaaggtatttcgattttgtttgtgaatt

SEQ ID NO: 517868 - DNA, 75 bp, synthetic construct
  source 1..75: mol_type = other DNA
atcatttgcaaatcagacttggttactcacaggtattgtcctgtctgcgatggctgtgcttgtggctgtggttac

SEQ ID NO: 517869 - DNA, 75 bp, synthetic construct
  source 1..75: mol_type = other DNA
ggtttgggagaaggctctgcattacctgttggggtgcctgttccgtggccttcagccactccgccaacaggctgg

SEQ ID NO: 517870 - DNA, 75 bp, synthetic construct
  source 1..75: mol_type = other DNA
tggcggagatcaccttgatggcggcagaaactgttcgtcgttttggtattgagccgcgtgtggctctgttgtcgc

SEQ ID NO: 517871 - DNA, 75 bp, synthetic construct
  source 1..75: mol_type = other DNA
gaaaaatgtctttggttatcgcgatggcgttcacaccgcaggcgcaatgaacgcgctgctgctgccgagtggtaa

SEQ ID NO: 517872 - DNA, 75 bp, synthetic construct
  source 1..75: mol_type = other DNA
tccatgacgaccagcacggtacggcaatcatcagcaccgccgccatcctcaacggcttgcgcgtggtggagaaaa

SEQ ID NO: 517873 - DNA, 75 bp, synthetic construct
  source 1..75: mol_type = other DNA
gtaacccgacagtgatcggcgcgatcatggttcagcgtggcgaagccgatgcaatgatttgcggtacggtgggcg

SEQ ID NO: 517874 - DNA, 75 bp, synthetic construct
  source 1..75: mol_type = other DNA
cgcgtggtggagaaaaacatctccgacgtgcggatggtggtttccggcgcgggtgccgcagcaatcgcctgtatg

SEQ ID NO: 517875 - DNA, 75 bp, synthetic construct
  source 1..75: mol_type = other DNA
ggcgttcacaccgctggcgcaatgaacgcgctgctgctgccgagtggtaacacctttattgctgacacctacgtc

SEQ ID NO: 517876 - DNA, 75 bp, synthetic construct
  source 1..75: mol_type = other DNA
atggtgttgattaccagcagcacggacaagatcaccctgaaaatcgaccctgccgtagtgctggcaacccgcaag

SEQ ID NO: 517877 - DNA, 75 bp, synthetic construct
  source 1..75: mol_type = other DNA
tgatccagggcgttcgatagggtctagccagggatggtctccaggatcgcacgtccacggcttggaaatttggac

SEQ ID NO: 517878 - DNA, 75 bp, synthetic construct
  source 1..75: mol_type = other DNA
aataacaccacgcagattgcgaccaccgcgtttgttcaggcggcactgacgtccctgattaatggtgcgccagcc

SEQ ID NO: 517879 - DNA, 75 bp, synthetic construct
  source 1..75: mol_type = other DNA
aggcaagggcgttctgtttaagaaattcgccgggattgatgtatttgacattgaagttgatgaactcgacccgga

SEQ ID NO: 517880 - DNA, 75 bp, synthetic construct
  source 1..75: mol_type = other DNA
tggtggcttcagcgtatggcgatcaggatctgagctttggtccggaatacatcattccaaaaccgtttgatccgc

SEQ ID NO: 517881 - DNA, 75 bp, synthetic construct
  source 1..75: mol_type = other DNA
atggatgaccagttaaaacaaagtgcacttgatttccatgaatttccagttccagggaaaatccaggtttctcca

SEQ ID NO: 517882 - DNA, 75 bp, synthetic construct
  source 1..75: mol_type = other DNA
ttgttggcggcatcgtcttctggggcggctttaacaccgggatggaaaaagccaataccgaagagttctgcatta

SEQ ID NO: 517883 - DNA, 75 bp, synthetic construct
  source 1..75: mol_type = other DNA
gcgtgtctggcgaaggtcatatcacttgtggtcactgtcgcaactgtcgcggcggtcgtacccatctgtgccgca

SEQ ID NO: 517884 - DNA, 75 bp, synthetic construct
  source 1..75: mol_type = other DNA
gcctgtaattccgatgtcatttttgtcggtattggcgcattaggtcggcaaagcccgatcttcaaagatggcttt

SEQ ID NO: 517885 - DNA, 75 bp, synthetic construct
  source 1..75: mol_type = other DNA
ccccgacatgggttcgaaccctgtgccggagacaaaggctatccggcaccttatcccatcccggaggagcacaaa

SEQ ID NO: 517886 - DNA, 75 bp, synthetic construct
  source 1..75: mol_type = other DNA
ctgctagcccggtatgaaggcaaagccgtcgggcatattttatttacccgggcaaccttcaaaggagaaatggat

SEQ ID NO: 517887 - DNA, 75 bp, synthetic construct
  source 1..75: mol_type = other DNA
gggatcgggttctggatgaagccgaactgggccagctctggaaggcaatttttgtcgagcctgatttaaaactaa

SEQ ID NO: 517888 - DNA, 75 bp, synthetic construct
  source 1..75: mol_type = other DNA
acggcggggaatgaacatcaacaacgtaatcccgccagtctgaccaagctgatgacaggctatgttgtcgatcgt

SEQ ID NO: 517889 - DNA, 75 bp, synthetic construct
  source 1..75: mol_type = other DNA
ttgaaacgccgtcttgttattgctgcttctttgttcgtttttaatttatcgtctgcttttgcagcagaaaatatt

SEQ ID NO: 517890 - DNA, 75 bp, synthetic construct
  source 1..75: mol_type = other DNA
cagatcccttccgaaggtgaaaaaaaacgccgtgatgagcagttcgcggcgttttacgattattgccggaaagtg

SEQ ID NO: 517891 - DNA, 75 bp, synthetic construct
  source 1..75: mol_type = other DNA
tcgatcaaaaagtacgagcagcatggatgtattacatcgccggacttaaccaaagcgaaatcgccagtcagttag

SEQ ID NO: 517892 - DNA, 75 bp, synthetic construct
  source 1..75: mol_type = other DNA
gccaaaatacccgttgcgttgcactgatcagcgccatgaacgaacatggacaatgtaactattacgacgatgttc

SEQ ID NO: 517893 - DNA, 75 bp, synthetic construct
  source 1..75: mol_type = other DNA
aggtggcgcactggccgctggtcacgctggaatcggtcggtgaaggcggtatgttttcccgtttgagtgactatt

SEQ ID NO: 517894 - DNA, 75 bp, synthetic construct
  source 1..75: mol_type = other DNA
accgtaaaccccagcctgtggcgtcagtcgcaaatcaacggtatttctggcctgttcaaagtcaccgataaaatg

SEQ ID NO: 517895 - DNA, 75 bp, synthetic construct
  source 1..75: mol_type = other DNA
cgcccggcagatgcccgaaggcgggcgcatcttaatcatcggctccgtgaatggcgatcgtatgcctgttgcagg

SEQ ID NO: 517896 - DNA, 75 bp, synthetic construct
  source 1..75: mol_type = other DNA
ggctttaccgtgttgaaggtggtaatccgtacgttattggcatttaccagcgactgtcatctgtaattgcagatg

SEQ ID NO: 517897 - DNA, 75 bp, synthetic construct
  source 1..75: mol_type = other DNA
cttcggtcgagtggtgcgcctgcatacgttaccttctctgtacctgcggcgtaacaacgagggtggcacggtgat

SEQ ID NO: 517898 - DNA, 75 bp, synthetic construct
  source 1..75: mol_type = other DNA
gcgttttgaagatggcggttatttttgcacgattgaagtcactgcaacctcaaccgtaacgctggatacgctgac

SEQ ID NO: 517899 - DNA, 75 bp, synthetic construct
  source 1..75: mol_type = other DNA
gaactgaaaaaggtcattgccgacatctatcccggccagacacagttttatgtgattgaatttaaatgtctttaa

SEQ ID NO: 517900 - DNA, 75 bp, synthetic construct
  source 1..75: mol_type = other DNA
atcccgccaacgggccaatgcgcgatatgttgcatagttttatggctatcaaaagacatgggcaaccggaagagg

SEQ ID NO: 517901 - DNA, 75 bp, synthetic construct
  source 1..75: mol_type = other DNA
aagggatcggtaacttctccaccatccttgtaaacattcccggtggagacggcgacgccatcaaattcattgaaa

SEQ ID NO: 517902 - DNA, 75 bp, synthetic construct
  source 1..75: mol_type = other DNA
atgagcatcatcacattcggcaaaccggaacctgtcctgaccaccggcacggattaccgcgacatctggtacgac

SEQ ID NO: 517903 - DNA, 75 bp, synthetic construct
  source 1..75: mol_type = other DNA
agtcgcaaatcaacggtatttctggcctgttcaaagtcaccgataaaatgtatcaggtgcgcggccaggatatct

SEQ ID NO: 517904 - DNA, 75 bp, synthetic construct
  source 1..75: mol_type = other DNA
atttctgaatatcaagaatatcagtgcgcaggaccaacttgttgcgcaccgtttcccgccagggctggctggcat

SEQ ID NO: 517905 - DNA, 75 bp, synthetic construct
  source 1..75: mol_type = other DNA
aactactggacactaccaatagacagacttgcgctcgcgcagttgccgaaccttaacgcccagcatggcggcgta

SEQ ID NO: 517906 - DNA, 75 bp, synthetic construct
  source 1..75: mol_type = other DNA
tgctacacgatggcgtggcaaaaaaaacagccagcaaaatgacgtttattgaatttggtgacccggaaccggtcg

SEQ ID NO: 517907 - DNA, 75 bp, synthetic construct
  source 1..75: mol_type = other DNA
atgctggcggatatcgcacgtcaggttcaatggtgcggcaaatggttaaaaccagaacaatggaaggttttgttg

SEQ ID NO: 517908 - DNA, 75 bp, synthetic construct
  source 1..75: mol_type = other DNA
cgcgaaagcagtgcgcaaatgagcgtgaagcgtatggcaagcctgattgagtacacaacttcctgggctgtggat

SEQ ID NO: 517909 - DNA, 75 bp, synthetic construct
  source 1..75: mol_type = other DNA
ccttgaaggtgaatacgtcaacattcgcgaaagcagcgcacagatgagcgtgaagcgcatggcaagcctgattga

SEQ ID NO: 517910 - DNA, 75 bp, synthetic construct
  source 1..75: mol_type = other DNA
cgtaagcaacgtgcgccaaaaatccagcagccgcgttaccgacgtgcctgtgccggtgaactcatacaaattgac

SEQ ID NO: 517911 - DNA, 75 bp, synthetic construct
  source 1..75: mol_type = other DNA
cagatcgataactatatggttgatggtatccccacctattttgaatcgcgctggaatctgggcgacgcactttct

SEQ ID NO: 517912 - DNA, 75 bp, synthetic construct
  source 1..75: mol_type = other DNA
atgaagcaaacaatcttcctccgaactaagcaacaacagcaagccgcaatcaacgccatcctcgcactcgataaa

SEQ ID NO: 517913 - DNA, 75 bp, synthetic construct
  source 1..75: mol_type = other DNA
agcgtcgagcaaatccttcagtcagccgtcaaaaactggcggctcaccgcagtgcctgagtcggcaattgtaaat

SEQ ID NO: 517914 - DNA, 75 bp, synthetic construct
  source 1..75: mol_type = other DNA
ttattcacgccgacgaaaaactggcgcgggaagattttattattcatcgccgtgatggtttgttcgcctataacc

SEQ ID NO: 517915 - DNA, 75 bp, synthetic construct
  source 1..75: mol_type = other DNA
acgagatgacagacacacactatattggccgctttgccccctctccttccggcgagcttcattttggctctctga

SEQ ID NO: 517916 - DNA, 75 bp, synthetic construct
  source 1..75: mol_type = other DNA
cgtacacgatttgcgccgcacctttcgcagccttgccgcctctttgggcattgcaggcaacgtggccgaacgctg

SEQ ID NO: 517917 - DNA, 75 bp, synthetic construct
  source 1..75: mol_type = other DNA
acagatagcggaaggccaaccatttcaaacgatgccctactctacatgaagcaactctttgaccacggcattaag

SEQ ID NO: 517918 - DNA, 75 bp, synthetic construct
  source 1..75: mol_type = other DNA
aagattttattattcatcgccgtgatggtttgtttgcctataacctggcggtggtggtggatgatcacttccagg

SEQ ID NO: 517919 - DNA, 75 bp, synthetic construct
  source 1..75: mol_type = other DNA
ttgccgaagagttcatgaacgattacaaccgacgtttttcaaaagcgcctcgccaggagttcgatgttcatcggg

SEQ ID NO: 517920 - DNA, 75 bp, synthetic construct
  source 1..75: mol_type = other DNA
aactatcgttaatggtaatgcgggtattggtatcggttatggtgcctacgtggacgcgaatgcacttaatggcat

SEQ ID NO: 517921 - DNA, 75 bp, synthetic construct
  source 1..75: mol_type = other DNA
aggtattggtatcggttatggtgcctctgtgggcgcgaatgcacttaacggcattgccattggtagcaatgcgca

SEQ ID NO: 517922 - DNA, 75 bp, synthetic construct
  source 1..75: mol_type = other DNA
tgggtgcgaaaaccattgttaatggtgatgcagggatcggtattggcctgaacactctggtgttaactgatgcaa

SEQ ID NO: 517923 - DNA, 75 bp, synthetic construct
  source 1..75: mol_type = other DNA
aatggtgcatttagcgccgctcacggaaaagataaaacagccagtgtaatcactaacgtcgctaacggtgcaatc

SEQ ID NO: 517924 - DNA, 75 bp, synthetic construct
  source 1..75: mol_type = other DNA
aacggcttagcattcaacgatgccagcgcttcaggtattggctctaccgccgtgggttataactctgttgcctca

SEQ ID NO: 517925 - DNA, 75 bp, synthetic construct
  source 1..75: mol_type = other DNA
tatgacaccaaagctgacggttctgttgattacagcaacatcactctcggcggtggtaatggcggaacgactcgc

SEQ ID NO: 517926 - DNA, 75 bp, synthetic construct
  source 1..75: mol_type = other DNA
tgttaacaataaacacgccacaggcggagacgggcatactcagtttgggcgagccatgcatgaactgaacatcca

SEQ ID NO: 517927 - DNA, 75 bp, synthetic construct
  source 1..75: mol_type = other DNA
actatcatttttataattttaacatgttctttttttataaaggcaaggtttcttgctaactattcgcgtaatttt

SEQ ID NO: 517928 - DNA, 75 bp, synthetic construct
  source 1..75: mol_type = other DNA
tatcgtgaagatggtccacttggaatgaccagccgtcgccgtggtaaagcaagcaaccatcagttgcctcaggga

SEQ ID NO: 517929 - DNA, 75 bp, synthetic construct
  source 1..75: mol_type = other DNA
gctctaccgctgtcggttataactctgttgctaaaggcgatagcagcgtggccgtgggttataacgctgttgccg

SEQ ID NO: 517930 - DNA, 75 bp, synthetic construct
  source 1..75: mol_type = other DNA
attaacactacctcagcaggtgagcgaagcctcgctataggtgcatcggcaacgtcaacgggtggattttcaatc

SEQ ID NO: 517931 - DNA, 75 bp, synthetic construct
  source 1..75: mol_type = other DNA
ctgacatgctcgttgaggcatatggaaatcagacagaggtagcccgaatactgaactgcaatcgtgccacagtca

SEQ ID NO: 517932 - DNA, 75 bp, synthetic construct
  source 1..75: mol_type = other DNA
tgacttcaattacgatccatcaatgcacgaacaccaaattaaaggtttcctgtcaaaacctgatgaactggtacg

SEQ ID NO: 517933 - DNA, 75 bp, synthetic construct
  source 1..75: mol_type = other DNA
acggtcaacgtcagatcaccaacgtcgcagcggggtcggcggataccgatgcggttaacgtgggtcagttgaaag

SEQ ID NO: 517934 - DNA, 75 bp, synthetic construct
  source 1..75: mol_type = other DNA
ggtgcagtagcaaccacaccaaccaaatactatcacgccaactcaacggctgaagactcactggcagtcggtgaa

SEQ ID NO: 517935 - DNA, 75 bp, synthetic construct
  source 1..75: mol_type = other DNA
cgtcaaatcatcaacgtcgcggatggttctgaagcccatgacgctgttactgttcgccagttgcaaaacgccatt

SEQ ID NO: 517936 - DNA, 75 bp, synthetic construct
  source 1..75: mol_type = other DNA
aaagaagcatggacgactctcaatgagtttatttcgctatggtttagactatgttcaaatggcgattcagcgttt

SEQ ID NO: 517937 - DNA, 75 bp, synthetic construct
  source 1..75: mol_type = other DNA
tcggtcatggcagcaacagcatcgttgagacgagtattgcgctgggtagcgaatccgtctccagccgtttgattg

SEQ ID NO: 517938 - DNA, 75 bp, synthetic construct
  source 1..75: mol_type = other DNA
aaacggctctcaattgtacgacctgcagcaggatgctctgttgtggaacggcacagcattcagtgccgcacacgg

SEQ ID NO: 517939 - DNA, 75 bp, synthetic construct
  source 1..75: mol_type = other DNA
caacccatgcgtcagtgggtgttgagcttcccgtttcagctgcgtttcctgtttggggtcgtttgcgggaagggg

SEQ ID NO: 517940 - DNA, 75 bp, synthetic construct
  source 1..75: mol_type = other DNA
tgtaagcgtcgcggtttctgcccgagctgtggggcgcggcggatggccgaaagtgccgccttgctggttgatgaa

SEQ ID NO: 517941 - DNA, 75 bp, synthetic construct
  source 1..75: mol_type = other DNA
attatcgctggccgtcaaattcccgtatcggtaaacgggatgcctttcagtttctcggtgtgggtgaggaaaaca

SEQ ID NO: 517942 - DNA, 75 bp, synthetic construct
  source 1..75: mol_type = other DNA
gttgattacagtaacatcaccctcggtggtggcaatggcggtacaacgcgtatcagcaacgtttctgctggcgtg

SEQ ID NO: 517943 - DNA, 75 bp, synthetic construct
  source 1..75: mol_type = other DNA
caatatcgccgataacactacggatattgcgaccaacactgccaatatcgccactaacactacggatattgcaac

SEQ ID NO: 517944 - DNA, 75 bp, synthetic construct
  source 1..75: mol_type = other DNA
atgaacaaaatttttaaagttatctggaacccggcgacaggcagttacaccgtcgccagcgaaacggccaaaagc

SEQ ID NO: 517945 - DNA, 75 bp, synthetic construct
  source 1..75: mol_type = other DNA
tacatttgaaaatgatttcagtccaatcatgggctatgaaaccttagagcaattaaaaggcagcactaaatcacg

SEQ ID NO: 517946 - DNA, 75 bp, synthetic construct
  source 1..75: mol_type = other DNA
atgaacataatcgagacggatacattattgcttcctgttattggagaatcgccggcaggtgaagatattgagtac

SEQ ID NO: 517947 - DNA, 75 bp, synthetic construct
  source 1..75: mol_type = other DNA
tactgcttcctgttattggagaatcgccggcaggtgaagatattgagtatgatccggtgtatagcgaaatacggg

SEQ ID NO: 517948 - DNA, 75 bp, synthetic construct
  source 1..75: mol_type = other DNA
aatatggaaatggcacagctggaacgtatagctgttgggcagcgttcccgaccggcagatggtcttccagggctt

SEQ ID NO: 517949 - DNA, 75 bp, synthetic construct
  source 1..75: mol_type = other DNA
tactgcttcctgttataggagaatcgccggcaggtgatgatattgaatatgatccggtgtatagcgaaatacggg

SEQ ID NO: 517950 - DNA, 75 bp, synthetic construct
  source 1..75: mol_type = other DNA
aaaccagacaaaccatcagtgaaatcaccgagttactgagccgttttttaccgcaagacgtacaggataccaatg

SEQ ID NO: 517951 - DNA, 75 bp, synthetic construct
  source 1..75: mol_type = other DNA
atgaacaaattcgagacggatacattactgcttcctgttattggagaatcgccggcaggtgaagatattgagtat

SEQ ID NO: 517952 - DNA, 75 bp, synthetic construct
  source 1..75: mol_type = other DNA
gaaaaatgctggcatcgccaccgtaaattgtggccggaccgtaccatcaacctggcgctggcaatccacggtcag

SEQ ID NO: 517953 - DNA, 75 bp, synthetic construct
  source 1..75: mol_type = other DNA
cccaaattggacaacgtttagaagacctgggcgatgatttgatgcttacgtcaaaatattggcaacgttccgtta

SEQ ID NO: 517954 - DNA, 75 bp, synthetic construct
  source 1..75: mol_type = other DNA
aaaacctaaacactctcaagtcagaattaaaattcatggaaagaagagagtcatcattattacaaataatgaaag

SEQ ID NO: 517955 - DNA, 75 bp, synthetic construct
  source 1..75: mol_type = other DNA
aatttctggtgctgccggacggggtgaaaggggaaaacacctggacggtgggcgacaagaacgccgtgaggctgg

SEQ ID NO: 517956 - DNA, 75 bp, synthetic construct
  source 1..75: mol_type = other DNA
aaatcacaaccggttaatactcagcttgatcctgaaaaactgactaccgcgcagttaatcgctgcctggcagagt

SEQ ID NO: 517957 - DNA, 75 bp, synthetic construct
  source 1..75: mol_type = other DNA
gcagttaatcgctgcctggcaaagtggagaaccgtggatcaccagctgggttgatcgctcttggtttgagtctgt

SEQ ID NO: 517958 - DNA, 75 bp, synthetic construct
  source 1..75: mol_type = other DNA
tcctcaggcttatttgcttagtaaaacagaccccgctcgttgggattatggcgtgaatggtggacgcctgaaata

SEQ ID NO: 517959 - DNA, 75 bp, synthetic construct
  source 1..75: mol_type = other DNA
gtgatctggtggtgaccgttgaggatgaaagtggtaacaaaaccgagcaggtctatccggtcaccacgctgccga

SEQ ID NO: 517960 - DNA, 75 bp, synthetic construct
  source 1..75: mol_type = other DNA
gaatggcagctcaacattctgcgcgaagaggcgtaccgcgacacacggtcgcaggatgcagcaggtgcacaattc

SEQ ID NO: 517961 - DNA, 75 bp, synthetic construct
  source 1..75: mol_type = other DNA
ggcagcagtccttctgggaccgtgaccgggacgcgctgggggccaccgtgacggccagcgccacggtgtttgacg

SEQ ID NO: 517962 - DNA, 75 bp, synthetic construct
  source 1..75: mol_type = other DNA
gacatcacgccggtgggaaacggcagcctgatggtcaccgtcgaggacagcgccgggcgtaagaccaccacggaa

SEQ ID NO: 517963 - DNA, 75 bp, synthetic construct
  source 1..75: mol_type = other DNA
cgggcaaagcttcagtgccaaatacgccaaaagtttctcagacaaaacggacctgcagttactgacgtaccgtta

SEQ ID NO: 517964 - DNA, 75 bp, synthetic construct
  source 1..75: mol_type = other DNA
ccgcgacacactgtcgcaggatgcagcaggtgcacaattcagtgagacaggcccggggccgtcttccgcaagtaa

SEQ ID NO: 517965 - DNA, 75 bp, synthetic construct
  source 1..75: mol_type = other DNA
tttcactgcgggagcaaatcgccctgttgtacaaaggttgtaacgctggctgcgcatttgatgttgctggcggcg

SEQ ID NO: 517966 - DNA, 75 bp, synthetic construct
  source 1..75: mol_type = other DNA
ttgtggtgtagcgacggcggctgtgtattgggtgatgttcctcgccatggtttcttatattaaacatgcccgttc

SEQ ID NO: 517967 - DNA, 75 bp, synthetic construct
  source 1..75: mol_type = other DNA
tctccgacggggagccggtgatgaatttcgccgaacaggccacaaaagagcgtgtcggcgacacggtgaaggtgg

SEQ ID NO: 517968 - DNA, 75 bp, synthetic construct
  source 1..75: mol_type = other DNA
aagaggcgtaccgcgacacaccgtcgcaggatgcagcaggtgcgcaattcagtgagacaggccaggtgccgtctt

SEQ ID NO: 517969 - DNA, 75 bp, synthetic construct
  source 1..75: mol_type = other DNA
tgctggatgccgtcgccggtggcgacaagccggtggagtttgctgagggggaaagccgcacaccgctggccaccg

SEQ ID NO: 517970 - DNA, 75 bp, synthetic construct
  source 1..75: mol_type = other DNA
ttgttaaggccaagtgatttccagtacgactttgccatgggtaagaaaaatcaaagtaatgaactgaataaggcg

SEQ ID NO: 517971 - DNA, 75 bp, synthetic construct
  source 1..75: mol_type = other DNA
tattccggcgattgttattggtgggcagatggcgggcgcaatcggcgtcacgcttggcttcctgctggtgcaaat

SEQ ID NO: 517972 - DNA, 75 bp, synthetic construct
  source 1..75: mol_type = other DNA
ccccacgggcaacagttccgcgcgttgatgcaaaaggagctggagttcaacaaaatcggcatgatcgaaaccagc

SEQ ID NO: 517973 - DNA, 75 bp, synthetic construct
  source 1..75: mol_type = other DNA
gtcataggcgacgtgctgaataacccggatctggcaccgttgattaaaacattgtcgctggcgtttgtggtgatc

SEQ ID NO: 517974 - DNA, 75 bp, synthetic construct
  source 1..75: mol_type = other DNA
cccgcgaaaccggacctctctttacaaaagagtcttccgatactgtcgctattgtcagcgtaccgggtgtcagtg

SEQ ID NO: 517975 - DNA, 75 bp, synthetic construct
  source 1..75: mol_type = other DNA
ataactttgtaccgctggtctttggtgagaagtggaacagcattattccggtgctgcaattgctgtgtgtggtgg

SEQ ID NO: 517976 - DNA, 75 bp, synthetic construct
  source 1..75: mol_type = other DNA
atgagcttacgtgaaaaaaccatcagcggcgcgaagtggtcggcgattgccacggtgatcatcatcggtctcggg

SEQ ID NO: 517977 - DNA, 75 bp, synthetic construct
  source 1..75: mol_type = other DNA
aactgtctacgttgagccttgcattagtttcacacttttcttttgcaggtaatgactcagaactgaacctggatt

SEQ ID NO: 517978 - DNA, 75 bp, synthetic construct
  source 1..75: mol_type = other DNA
aggtcagaacgtcagtatcaagtatgccaaaaactttacagacagaacagacctgcagcttctgacatatcgtta

SEQ ID NO: 517979 - DNA, 75 bp, synthetic construct
  source 1..75: mol_type = other DNA
acgactttgccatgggtaagaaaaatcaaagtaatgaactgaataaggcgttctcgtcggataccggactcttct

SEQ ID NO: 517980 - DNA, 75 bp, synthetic construct
  source 1..75: mol_type = other DNA
gtggtgtggttgtctgagtatgctgaaaacagcattaacatcaacatggataacgtgccggataacatggagttt

SEQ ID NO: 517981 - DNA, 75 bp, synthetic construct
  source 1..75: mol_type = other DNA
tccagtaacagtgtgggtcgcacgcgtaatggcggtacaacctttaataccagtgtatcagcgacaccaactgat

SEQ ID NO: 517982 - DNA, 75 bp, synthetic construct
  source 1..75: mol_type = other DNA
ccgtggggcatctgcatctgccagttacgcctttgatgccattcagacaaacttgggggtgtctcgttcctacaa

SEQ ID NO: 517983 - DNA, 75 bp, synthetic construct
  source 1..75: mol_type = other DNA
attatcggcctgacttctgctgccattatgatgatgctgcgtatgcgttttctgcaacgtttaccgtcagccatt

SEQ ID NO: 517984 - DNA, 75 bp, synthetic construct
  source 1..75: mol_type = other DNA
aaccagggcctgaacatgcgtgattctggtctggatatctcctacgctctgcgtaaagaagcgattgccgaaaag

SEQ ID NO: 517985 - DNA, 75 bp, synthetic construct
  source 1..75: mol_type = other DNA
cgtcggttgtggtgcgcagggtcttaaccagggcctgaacatgcgtgattctggtctggatatctcttatgccct

SEQ ID NO: 517986 - DNA, 75 bp, synthetic construct
  source 1..75: mol_type = other DNA
gaaaaactgattcagttcggttgggaaaccatcaccgaagcactgaaacagggcggcatcaccctgatgatggac

SEQ ID NO: 517987 - DNA, 75 bp, synthetic construct
  source 1..75: mol_type = other DNA
tttccccgaaaacccgctcgctcatactctggacagaacgcggagcagcccgtcacgccaaaatgctcgaagccg

SEQ ID NO: 517988 - DNA, 75 bp, synthetic construct
  source 1..75: mol_type = other DNA
ctgccgacgttgatttcaagctacgcggtggggcgactgctggaaggcagcgtttcgctctcggcgctgctggcg

SEQ ID NO: 517989 - DNA, 75 bp, synthetic construct
  source 1..75: mol_type = other DNA
tgccgcggtgtatctgctgagcgataccattgcgcggttgctgcacaacccggatctcgcgccgttgatcaaaac

SEQ ID NO: 517990 - DNA, 75 bp, synthetic construct
  source 1..75: mol_type = other DNA
ttaacgccttagtagcgaccgactctaggtggtctgttgatcttagcccacatggctacgatggtcatatcctgt

SEQ ID NO: 517991 - DNA, 75 bp, synthetic construct
  source 1..75: mol_type = other DNA
tcggtcagtgctctgttagccgaagctctcgtactcaaactacgcaagcagtcggtagccgcaacgttgaaagat

SEQ ID NO: 517992 - DNA, 75 bp, synthetic construct
  source 1..75: mol_type = other DNA
tgctggcggtaagtattccccccctcgcgccatggtggatggtcgtgctgggtacggtgtttgcggtgatcatcg

SEQ ID NO: 517993 - DNA, 75 bp, synthetic construct
  source 1..75: mol_type = other DNA
ctggtggttaacctgacgccggacaagcagcactctgatgtagtgcgcaccgtacagccactgatgaaagacggc

SEQ ID NO: 517994 - DNA, 75 bp, synthetic construct
  source 1..75: mol_type = other DNA
ggaaggggcgaaagaggcgatgatgcagcacaggaaggacgtgttaaagctggcagggaatacgggcatgatgtt

SEQ ID NO: 517995 - DNA, 75 bp, synthetic construct
  source 1..75: mol_type = other DNA
atcttggcgggatgatacaggcgaacctggaagatatcaggaagcaggaagagacattgcagaaactgaacgcga

SEQ ID NO: 517996 - DNA, 75 bp, synthetic construct
  source 1..75: mol_type = other DNA
atcaggcgtgggatgtgttcgaaaaactggaagactgctatttcagtcaaaaggatccgtcaacgccagtttcat

SEQ ID NO: 517997 - DNA, 75 bp, synthetic construct
  source 1..75: mol_type = other DNA
ctcattaatggttggggagggagtttattcagatgtatatttgttggtttatttatcatgattgtatttacgatt

SEQ ID NO: 517998 - DNA, 75 bp, synthetic construct
  source 1..75: mol_type = other DNA
aattgcatttttggtgattgccgtgatgttaaaataacatcatctgagtttgaaaatggaattatgattgcgtat

SEQ ID NO: 517999 - DNA, 75 bp, synthetic construct
  source 1..75: mol_type = other DNA
tctgatgaagaacgattatcccgtggcgtggtgtagttgggcaaacttaagtctcgaaaatgaagtcaaatatat

SEQ ID NO: 518000 - DNA, 75 bp, synthetic construct
  source 1..75: mol_type = other DNA
tcctttgccgagaagctggttggcgatggccgactggcccccaaagcgaagtcggtagtcgtggccatcctggac

SEQ ID NO: 518001 - DNA, 75 bp, synthetic construct
  source 1..75: mol_type = other DNA
ccgtgactgaagaagaaattaaggcgatgcgcgaagagaatgcccgcctgaaagccgacgctgctgaccgcgcga

SEQ ID NO: 518002 - DNA, 75 bp, synthetic construct
  source 1..75: mol_type = other DNA
accgctggcgacggcgtttaaagaactgctgacgagtgctgcgccggtattggacttcggcgaagttgccagcaa

SEQ ID NO: 518003 - DNA, 75 bp, synthetic construct
  source 1..75: mol_type = other DNA
aaaggatccgtcaacgccagtttcatgccagaaaagttacgacacgcgagttctctgttatcagcaaggcggtgt

SEQ ID NO: 518004 - DNA, 75 bp, synthetic construct
  source 1..75: mol_type = other DNA
tcccatcacttacacatcaacaccttcctgttataacaacagaacttctggctgagctgtacggaacagaacgcc

SEQ ID NO: 518005 - DNA, 75 bp, synthetic construct
  source 1..75: mol_type = other DNA
ctctggaacggttcaaattttatctggaacaacgcggctggatcgttgcccgtaaagagcagctgctggaacgac

SEQ ID NO: 518006 - DNA, 75 bp, synthetic construct
  source 1..75: mol_type = other DNA
cggaaattcgctgggatcaactggaagcgggtgacgttaacttcattaaagatttttactaccgtctggcgcatc

SEQ ID NO: 518007 - DNA, 75 bp, synthetic construct
  source 1..75: mol_type = other DNA
tgttgctggcgattgcactccctgtccttgttgcttactttgggggttctaaagttatgtcagtgtattgggttc

SEQ ID NO: 518008 - DNA, 75 bp, synthetic construct
  source 1..75: mol_type = other DNA
agtcatggctggaactggcgagagccaatggttggtttgttgttcgcagagataaactggtggaaaggctgatgc

SEQ ID NO: 518009 - DNA, 75 bp, synthetic construct
  source 1..75: mol_type = other DNA
attcgccgccatgttgaggctaatggtggtcacttccctgccgatgttgatcaaaaagtcgatcaggttgcgcgt

SEQ ID NO: 518010 - DNA, 75 bp, synthetic construct
  source 1..75: mol_type = other DNA
gcgtatttgtaccgctggcagacgttgatgatctggataacgccgatataaaccagcgcctgatggagtccattg

SEQ ID NO: 518011 - DNA, 75 bp, synthetic construct
  source 1..75: mol_type = other DNA
ttcactggggttatgccccggagtggtggaacaagcccgctctcatcaacgccagaagtgaaactgcggccagca

SEQ ID NO: 518012 - DNA, 75 bp, synthetic construct
  source 1..75: mol_type = other DNA
cccggtgcgccgctggagcgaagaacgtaaggctgcggtacgacggcggaatctggagaaacgtatcaacaggca

SEQ ID NO: 518013 - DNA, 75 bp, synthetic construct
  source 1..75: mol_type = other DNA
tgggttgccggagcagggtatgcggtctgtctggattttatttctgaccgcccggtgcgccgctggagcgaagaa

SEQ ID NO: 518014 - DNA, 75 bp, synthetic construct
  source 1..75: mol_type = other DNA
aagctttaaagcagatatccagaaactgctcacttccctgcccgcacaccatttccagattgtgctggaaattac

SEQ ID NO: 518015 - DNA, 75 bp, synthetic construct
  source 1..75: mol_type = other DNA
cagattttcccgctgggatgggcaatgattttacagcgcgcggctggcactcactacattgcggatgctgtcgca

SEQ ID NO: 518016 - DNA, 75 bp, synthetic construct
  source 1..75: mol_type = other DNA
agccgtcaggtgtgaaggtgtctgccggtgagcgccaggaagaccgggcgcatgcagctatgctggcgcttcagg

SEQ ID NO: 518017 - DNA, 75 bp, synthetic construct
  source 1..75: mol_type = other DNA
tgaatgagctggcacagcaggcggcacggtttgaagagcagcagagcgcgaagcaggccgccatcagcgcaaaag

SEQ ID NO: 518018 - DNA, 75 bp, synthetic construct
  source 1..75: mol_type = other DNA
caggccatggtggggattgtcgggagtattggcagcgccatgggtggtgctttcggtggtggggcgtctgcctcc

SEQ ID NO: 518019 - DNA, 75 bp, synthetic construct
  source 1..75: mol_type = other DNA
atgttaattcatgattttcacgaaagaaaaagaatatcagctaacaacatgctttgtcttttaaatttccttaag

SEQ ID NO: 518020 - DNA, 75 bp, synthetic construct
  source 1..75: mol_type = other DNA
gtgcaaaacccgcgatgattcgcgagcgtttgcccgtgaaaccggcattgccattgcctgggatgaaagcctgcg

SEQ ID NO: 518021 - DNA, 75 bp, synthetic construct
  source 1..75: mol_type = other DNA
tgggatgaaagcctgcgcgagccggattttgcctttgtggctgaagagggcgtgcgcgcggtagttatcaaaccc

SEQ ID NO: 518022 - DNA, 75 bp, synthetic construct
  source 1..75: mol_type = other DNA
gcgtcttgacgcgaatcgcgcctggacgccgctgaaaggccagcagtttgccaaatacgttaacccggattatcg

SEQ ID NO: 518023 - DNA, 75 bp, synthetic construct
  source 1..75: mol_type = other DNA
gtgctgttttactggcgaatggttactggacgttggctatggaaataccctcgacccgaaccgcaaaagtgtgaa

SEQ ID NO: 518024 - DNA, 75 bp, synthetic construct
  source 1..75: mol_type = other DNA
cacaaagcgggctgcttgcctgggtaaataactggctggcaggtgatagcgagctaccgcaaatgccttccgtcg

SEQ ID NO: 518025 - DNA, 75 bp, synthetic construct
  source 1..75: mol_type = other DNA
cggattgccgcctggttaacaccagagactattccagggctggacacgctggatctgatgcaggcgcagcaggtt

SEQ ID NO: 518026 - DNA, 75 bp, synthetic construct
  source 1..75: mol_type = other DNA
agaatactgagcagagccatcaaaaaaggttttatcattaaacatgaaatacctggagtgaaacaaaaaataacg

SEQ ID NO: 518027 - DNA, 75 bp, synthetic construct
  source 1..75: mol_type = other DNA
ggtcagaattgcactggaagagaaaggcgggcaaggctggcttaatggtgatcggggggagtttattgcgcgtta

SEQ ID NO: 518028 - DNA, 75 bp, synthetic construct
  source 1..75: mol_type = other DNA
ttgaacatcgtcttttaaatcagcgagtgagaatatctctggaaagtaaaggagctactgaatggattaacggtg

SEQ ID NO: 518029 - DNA, 75 bp, synthetic construct
  source 1..75: mol_type = other DNA
ccagctgatgaacgcttatctgctcgggcagcagctgccggaagtgtgggactttggcatgttcagcatcgccaa

SEQ ID NO: 518030 - DNA, 75 bp, synthetic construct
  source 1..75: mol_type = other DNA
ttctgtggttgatcggtgaagcgatcttcttctacctgccggtcgggatttgctggtcagcggtgaaaaaatggg

SEQ ID NO: 518031 - DNA, 75 bp, synthetic construct
  source 1..75: mol_type = other DNA
atgagcggaaaacagtatcagggtacggccactatccgtgtgaacggtcaggaatacgagacgcttgagggggct

SEQ ID NO: 518032 - DNA, 75 bp, synthetic construct
  source 1..75: mol_type = other DNA
aggcgtatgagcgtctgctgacgccactggagaaatataccgcccggcaggaagagctgaataaggccctgaaag

SEQ ID NO: 518033 - DNA, 75 bp, synthetic construct
  source 1..75: mol_type = other DNA
ggtggtggattctttatgactatcctgctggggatagtcggtgccgtagtcggcggatggatcagcacgctgttt

SEQ ID NO: 518034 - DNA, 75 bp, synthetic construct
  source 1..75: mol_type = other DNA
gttgatggtattgagctcgctgaactgattaacatggtctgcgataacggctactcccttcgtgttgttgatgaa

SEQ ID NO: 518035 - DNA, 75 bp, synthetic construct
  source 1..75: mol_type = other DNA
ctaccgaagggacgctttcctggcggcaagccacggcccaggcggggcagggagagcgttacgaccagatactcg

SEQ ID NO: 518036 - DNA, 75 bp, synthetic construct
  source 1..75: mol_type = other DNA
gcctacgtgatatccctagcccgtctatcacagacgtccccgttggggtgaaattcttcggcatgaaggcaccac

SEQ ID NO: 518037 - DNA, 75 bp, synthetic construct
  source 1..75: mol_type = other DNA
gcgggcagacttcgcacactaatctgtatcaaccggcaaataacgactgctatctgtttgataacctttcgaaac

SEQ ID NO: 518038 - DNA, 75 bp, synthetic construct
  source 1..75: mol_type = other DNA
tgattaacaaggtctctgaaaacggttatttactccgcgtggtcgataaatccgacaacacgcaaccagtacacc

SEQ ID NO: 518039 - DNA, 75 bp, synthetic construct
  source 1..75: mol_type = other DNA
agggcaaactgaaattacagtcgcatctcgatcgtgaagagtacgttgccagagttctggatcgcgaggcgaaaa

SEQ ID NO: 518040 - DNA, 75 bp, synthetic construct
  source 1..75: mol_type = other DNA
ctcgatagctggctactggatgtgttctacaacagcgatacccacagtagctggaatctggccgggatccagaat

SEQ ID NO: 518041 - DNA, 75 bp, synthetic construct
  source 1..75: mol_type = other DNA
tgataacttagcgcatttgcaacaagtggttggacacgagaaaagcggagcagggatcacacagcgatatttgca

SEQ ID NO: 518042 - DNA, 75 bp, synthetic construct
  source 1..75: mol_type = other DNA
gtttctgcttcgccagcgaccacgggggcgcgaacgatgaccgcctggacgcaggatcttatctatgcgggcgat

SEQ ID NO: 518043 - DNA, 75 bp, synthetic construct
  source 1..75: mol_type = other DNA
atcaactgtatcagctgtcgtcatcaggcgtgaccaaagtctcggcattacctgacacgctcaccacgccgttag

SEQ ID NO: 518044 - DNA, 75 bp, synthetic construct
  source 1..75: mol_type = other DNA
gcgcgcggacgatgaccgcctggactcaggatctcatctatgcgggcgatccggttcactatcatggcagctggg

SEQ ID NO: 518045 - DNA, 75 bp, synthetic construct
  source 1..75: mol_type = other DNA
ggccatggttcagatgcaaaaccaattttaagaattgaagaaaactgcgttgacatgaaaatgtacaggaaaatg

SEQ ID NO: 518046 - DNA, 75 bp, synthetic construct
  source 1..75: mol_type = other DNA
cggtttgaagagcagcagagcgcgaagcaggccgccatcagcgcaaaagcccgtggtctcactgaccgtcaggca

SEQ ID NO: 518047 - DNA, 75 bp, synthetic construct
  source 1..75: mol_type = other DNA
ggggagcgtcaggaagaccgggcgcatgcagccctgctggcgcttgaaactgagctccggacgctggagaagcac

SEQ ID NO: 518048 - DNA, 75 bp, synthetic construct
  source 1..75: mol_type = other DNA
ggcagccagtacagctacatggtggtgctggatgctgactcggtaatgaccggtgattgtctgtgcggcctggtg

SEQ ID NO: 518049 - DNA, 75 bp, synthetic construct
  source 1..75: mol_type = other DNA
ctgatgaaggcggtgtatgacatggcccgtaagggggcgcaggatgaactccggctgcagttgcgtgatggcggt

SEQ ID NO: 518050 - DNA, 75 bp, synthetic construct
  source 1..75: mol_type = other DNA
gtgccgtttcgcagcaataatcccctcacgcgcgacgaattgctgtcgcgctttttcccgcagtttcatcccgtc

SEQ ID NO: 518051 - DNA, 75 bp, synthetic construct
  source 1..75: mol_type = other DNA
gtttttcgcaggttaaaagtgctgccacgcagacctttgacggtattgcacagaatatgacggcgatgctgaccg

SEQ ID NO: 518052 - DNA, 75 bp, synthetic construct
  source 1..75: mol_type = other DNA
tcgccgtcgcgtgaagcgtaaaagcggtaacattgacgatttctgccgtcgctggggtagccagtacagctacat

SEQ ID NO: 518053 - DNA, 75 bp, synthetic construct
  source 1..75: mol_type = other DNA
agcgtccggtatggatacgctgtatgcgcgctgccagcagtttgcgacccgtgtatatgggccactgttcactgc

SEQ ID NO: 518054 - DNA, 75 bp, synthetic construct
  source 1..75: mol_type = other DNA
ttgccgaagactgatatccgcgccgttcatcaggcgctggatgccgaacaccgcacctgggcgcgggaggatgat

SEQ ID NO: 518055 - DNA, 75 bp, synthetic construct
  source 1..75: mol_type = other DNA
cgaaagaatacggtggcttctggcgcgttacattatcgttgctgctggaagtgcttttttccgtgctgctggctc

SEQ ID NO: 518056 - DNA, 75 bp, synthetic construct
  source 1..75: mol_type = other DNA
atccgccgttacattctgttaatcctgacgctcgcgcaaactgttgtcgcgacctggtatatgaagaccattctt

SEQ ID NO: 518057 - DNA, 75 bp, synthetic construct
  source 1..75: mol_type = other DNA
cagtggcgtcctgaactggcgattgcgctgtttgcctcgacgatggtgctgctgttcctgccgaagttgttgagt

SEQ ID NO: 518058 - DNA, 75 bp, synthetic construct
  source 1..75: mol_type = other DNA
cgcgaagacccgaacgctttctgctgaggaaaaatccctgctggccagtaaaagtgaggtgctttcccgtgcgga

SEQ ID NO: 518059 - DNA, 75 bp, synthetic construct
  source 1..75: mol_type = other DNA
caggcgatggtaggcctggtggattcagcatcaaccgcgctgggatttgcaggtggcggttataccggttcaggc

SEQ ID NO: 518060 - DNA, 75 bp, synthetic construct
  source 1..75: mol_type = other DNA
gttgcaggcgctgcaggcgtattacgccgagcaggataagctgcgggacgactggcaatccggggccaaatccgc

SEQ ID NO: 518061 - DNA, 75 bp, synthetic construct
  source 1..75: mol_type = other DNA
aagacctcctctttccgtgccaacctgcagggcgcatgggatgaccgggaaaatgcccgtctggggctggcagcg

SEQ ID NO: 518062 - DNA, 75 bp, synthetic construct
  source 1..75: mol_type = other DNA
aactgcgcaaaatgggcattaaaacggtgatgattaccggcgataaccgtctgactgccgccgccattgctgcgg

SEQ ID NO: 518063 - DNA, 75 bp, synthetic construct
  source 1..75: mol_type = other DNA
gtcagccggggagcgtcaggaagaccgggcgcatgcagccctgctgacgcttcaggcagaactccggacgctgga

SEQ ID NO: 518064 - DNA, 75 bp, synthetic construct
  source 1..75: mol_type = other DNA
atgagcgacctgaatcagtttcgtagtaaagggccggaactgttggtggaactggcacagcatacctctgagact

SEQ ID NO: 518065 - DNA, 75 bp, synthetic construct
  source 1..75: mol_type = other DNA
gtaaagggccggaactgctggttgaactggcccagcacactgctgaaacccttcgggaaattatcgatatagacc

SEQ ID NO: 518066 - DNA, 75 bp, synthetic construct
  source 1..75: mol_type = other DNA
ggggtaaatatgaacctgcggggattgttcatcgcggggagtttgtcttcacgaaggaggcgaccagccggattg

SEQ ID NO: 518067 - DNA, 75 bp, synthetic construct
  source 1..75: mol_type = other DNA
cggatgcgctggcgaaggccacatcggcactgaagaacacctggtctgctgaggaccagctgagcggtaactgga

SEQ ID NO: 518068 - DNA, 75 bp, synthetic construct
  source 1..75: mol_type = other DNA
gaggcgacaaacatcacgccctatctgagtgttggtgaggatgttgtagtcgagggccagcgcaagagcatatcg

SEQ ID NO: 518069 - DNA, 75 bp, synthetic construct
  source 1..75: mol_type = other DNA
caataaacataggtggtgtatcctttgatggttcagccgatatagatttgcctggtgtgaatacaaaaggtaatc

SEQ ID NO: 518070 - DNA, 75 bp, synthetic construct
  source 1..75: mol_type = other DNA
agtgcacagaaggcatttgatgaggcggataaaaaatggcagtggtaccagagccggagccagcgccggggaaaa

SEQ ID NO: 518071 - DNA, 75 bp, synthetic construct
  source 1..75: mol_type = other DNA
ttcgtcagtacaaactcaatttgtcaagggaaccaagttcctgtgctgtggccactgataatgggactaggtgtc

SEQ ID NO: 518072 - DNA, 75 bp, synthetic construct
  source 1..75: mol_type = other DNA
tatcgtgggcagaagttggccttggccgaattcttgccactacgcagcgagaattggatcacttgtggaaatgcg

SEQ ID NO: 518073 - DNA, 75 bp, synthetic construct
  source 1..75: mol_type = other DNA
gatgaagagcgcggtgaattagggatgcactacactagtgttcccaacatcctgaaggtactgaacccactattc

SEQ ID NO: 518074 - DNA, 75 bp, synthetic construct
  source 1..75: mol_type = other DNA
ccagagccggagccagcgccggggaaagacctcctctttccgtgccaacctgcagggcgcatgggatgaccggga

SEQ ID NO: 518075 - DNA, 75 bp, synthetic construct
  source 1..75: mol_type = other DNA
tcgttgacctgagtctggatgcggtccgtttcgatgagcagatgagccgggtaaggcgtcatttttccggactgg

SEQ ID NO: 518076 - DNA, 75 bp, synthetic construct
  source 1..75: mol_type = other DNA
gtcgcctgaaagaaaacatggggacactggagacctgggcggataaaaccgggaaggcattcaaatcgatgtggg

SEQ ID NO: 518077 - DNA, 75 bp, synthetic construct
  source 1..75: mol_type = other DNA
cagtttgaggcaatcagccagagtgtggcgcgtttctcctctgcatccggcgtggaggtggacaaggtcgctgaa

SEQ ID NO: 518078 - DNA, 75 bp, synthetic construct
  source 1..75: mol_type = other DNA
gattcatacatcaccatcttatacagcgaataaaccaacaggcctgacagatggaactgtatatgtaatttacag

SEQ ID NO: 518079 - DNA, 75 bp, synthetic construct
  source 1..75: mol_type = other DNA
ccagagtgtgacaatctgaagagcaactggcttgcggtacttcaacgcaattcccaggacaataaagactactgg

SEQ ID NO: 518080 - DNA, 75 bp, synthetic construct
  source 1..75: mol_type = other DNA
cactgctcctggtgtgcagcgccgccacgtctgccgataacgcaggatggcagaacgcacgcacaccacaaacga

SEQ ID NO: 518081 - DNA, 75 bp, synthetic construct
  source 1..75: mol_type = other DNA
cgcttgccgctccggtgaccagcgtcgtcccccgcatcagctcactgacggtcagcctttcgccgggagccagcc

SEQ ID NO: 518082 - DNA, 75 bp, synthetic construct
  source 1..75: mol_type = other DNA
tggcggcaccaccgatgaatccgaatgaacatctctttcaaatcaactacatcccggactcaccggtattctccg

SEQ ID NO: 518083 - DNA, 75 bp, synthetic construct
  source 1..75: mol_type = other DNA
cacggtgaagctatcgttaactatcttgcgcgtaaagaggcggcaacacacagtgggcggcgcggaaaggggaaa

SEQ ID NO: 518084 - DNA, 75 bp, synthetic construct
  source 1..75: mol_type = other DNA
ctgagttgcggggcctataccagtttgttggggcgaagctattccggtggtggtgctggcggcggtgcgggtggc

SEQ ID NO: 518085 - DNA, 75 bp, synthetic construct
  source 1..75: mol_type = other DNA
ctggccgtttgaaatctataagacccgattttcactcaagttccctgatatcgcgggtaatccatttagcgaaat

SEQ ID NO: 518086 - DNA, 75 bp, synthetic construct
  source 1..75: mol_type = other DNA
gaaacagatacgccgtcatccagtcaggaaatggacagtcgtctggatctgcgaataccacggcagggaccaacc

SEQ ID NO: 518087 - DNA, 75 bp, synthetic construct
  source 1..75: mol_type = other DNA
catctctggaaacttcccgtcaccccactactgactttctctgtgaatggccagtccgttcacgtgacaccagaa

SEQ ID NO: 518088 - DNA, 75 bp, synthetic construct
  source 1..75: mol_type = other DNA
gcagatctggcaactcaaacatataacgaacattataaaaatggtacgcacactaaagcagacaaagcaaatatg

SEQ ID NO: 518089 - DNA, 75 bp, synthetic construct
  source 1..75: mol_type = other DNA
ccgctggcggcgaagctgcgcgagcgcctgaaaagcgattttggcgtggtgaaaaacagcaaaggtaagctcggc

SEQ ID NO: 518090 - DNA, 75 bp, synthetic construct
  source 1..75: mol_type = other DNA
gatggtgaccgccacctttggttttgttgcggtttctcatgcgctgaagaagatgatggcgaaagcagcgcgcca

SEQ ID NO: 518091 - DNA, 75 bp, synthetic construct
  source 1..75: mol_type = other DNA
attgatgccattgacagtgtgcgacccaaagcggcactaatcgcatattgccgtcgcaataaaatcccactggta

SEQ ID NO: 518092 - DNA, 75 bp, synthetic construct
  source 1..75: mol_type = other DNA
gcgccccggaaattgcccgtagcggcgttttattctcattacagacgcacctaagttgcggggcctataccagtt

SEQ ID NO: 518093 - DNA, 75 bp, synthetic construct
  source 1..75: mol_type = other DNA
gccaggaaagtgcgttgcaggtagatgcattccactggaaagaagacggcatcagtgataaaggtgtgatgctaa

SEQ ID NO: 518094 - DNA, 75 bp, synthetic construct
  source 1..75: mol_type = other DNA
tagtcaattttgataaagacagcggcgttgctgtgaaattcacccacagtaattatgttgcacagaatgatggca

SEQ ID NO: 518095 - DNA, 75 bp, synthetic construct
  source 1..75: mol_type = other DNA
agcggtgacttcattctaaataacagcagaaatgctattcacttatatcagtctgggtcgttctacaataccggt

SEQ ID NO: 518096 - DNA, 75 bp, synthetic construct
  source 1..75: mol_type = other DNA
atcaaactgacggggcgattatgagaggtgctgcgctgacaggtactgcagtggcaaataacgaaggaacctgga

SEQ ID NO: 518097 - DNA, 75 bp, synthetic construct
  source 1..75: mol_type = other DNA
cagcggcaccggtgctgtggctatggaaggtgataagaacgcgcagctggttaacaatggcaccatcaacctcgg

SEQ ID NO: 518098 - DNA, 75 bp, synthetic construct
  source 1..75: mol_type = other DNA
cggtctggccttcaacgtggtagcgaaaggcgacccgcgtgctgaactgggtaacgacacacagtacgacatgat

SEQ ID NO: 518099 - DNA, 75 bp, synthetic construct
  source 1..75: mol_type = other DNA
tctgaaagacgtgcggccacagatgacacgccagcgcgacagcggtcatctgttcgtgacgaaatacggcagcgg

SEQ ID NO: 518100 - DNA, 75 bp, synthetic construct
  source 1..75: mol_type = other DNA
ggtgggccatgtggcgctggcgtggctggggcggtatctgaaagacgtgcggccacagatgacgcgccagcgcga

SEQ ID NO: 518101 - DNA, 75 bp, synthetic construct
  source 1..75: mol_type = other DNA
gctatatcggcaaatttggggagggaatgggcgttacgcattgccccttcgctttcttcggcgattcgcgctcca

SEQ ID NO: 518102 - DNA, 75 bp, synthetic construct
  source 1..75: mol_type = other DNA
ggcgcccgctggccctgaaagccggagataaagttcaggttgtggagaagtggatatttctgatgagggaaaccg

SEQ ID NO: 518103 - DNA, 75 bp, synthetic construct
  source 1..75: mol_type = other DNA
atgaaaaaaatattactggtggcagccattacgggaatgttcgttcagggggtatgggcaaaatcagatcagcaa

SEQ ID NO: 518104 - DNA, 75 bp, synthetic construct
  source 1..75: mol_type = other DNA
acgcagatctacacgaaggtggcaataaagccgttgcagaaggttcatgcgcggacgcacccggcagagaagcgg

SEQ ID NO: 518105 - DNA, 75 bp, synthetic construct
  source 1..75: mol_type = other DNA
cgcgcagtgaaatcatccgcctgttcaactatccggcggatcggatcgtcaccaccaagctggcctgcagcagcg

SEQ ID NO: 518106 - DNA, 75 bp, synthetic construct
  source 1..75: mol_type = other DNA
aagggtggttacgttatctcggatttaccccttatgcagatctacctgctttgtatgcaggtgctacaacattca

SEQ ID NO: 518107 - DNA, 75 bp, synthetic construct
  source 1..75: mol_type = other DNA
aaaccgtgctgggtaaattgcctaagccgcgctacgccgattatcttccgttcaaagacgccgacggcagcgtgc

SEQ ID NO: 518108 - DNA, 75 bp, synthetic construct
  source 1..75: mol_type = other DNA
tccgctaatccttagcggctatcgcggctgggaagacgatgtgctgtggcagttagtcgagcgcggtactcggga

SEQ ID NO: 518109 - DNA, 75 bp, synthetic construct
  source 1..75: mol_type = other DNA
tttctgatttctcgcgcagtgaaattatccgcttgttcaactatccggcggagcggatcgtaaccaccaagctag

SEQ ID NO: 518110 - DNA, 75 bp, synthetic construct
  source 1..75: mol_type = other DNA
tccatttttacctgcccggaatatcatccaaaagatcgggttcgctatatggagaagtccctgcatgagagtctg

SEQ ID NO: 518111 - DNA, 75 bp, synthetic construct
  source 1..75: mol_type = other DNA
gccggaatttatcgcccgtctgccagcgaaactgccgatcaccgtggtacgcaataaagccgatatcaccggcga

SEQ ID NO: 518112 - DNA, 75 bp, synthetic construct
  source 1..75: mol_type = other DNA
gcgaaactgccgatcaccgtggtacgcaataaagccgatatcaccggcgaaacgctgggaatgagtgaagtgaac

SEQ ID NO: 518113 - DNA, 75 bp, synthetic construct
  source 1..75: mol_type = other DNA
cctacaggcgctggaacaagcggcggagcatctgcaacagggcaaagcacaactgttgggtgcatgggctggtga

SEQ ID NO: 518114 - DNA, 75 bp, synthetic construct
  source 1..75: mol_type = other DNA
gcgcagcagaatttaagcgagatcaccggagaatttacctcagacgacctactggggcggattttctccagcttc

SEQ ID NO: 518115 - DNA, 75 bp, synthetic construct
  source 1..75: mol_type = other DNA
gcacagcagaacttaagcgaaatcaccggggaatttacttctgatgacctgctggggcggattttctccagcttc

SEQ ID NO: 518116 - DNA, 75 bp, synthetic construct
  source 1..75: mol_type = other DNA
aaaccgtgctgggtaagttacccaaaccgcgctacgccgattatcttccgtttaaagacgccgacggcagcgtgc

SEQ ID NO: 518117 - DNA, 75 bp, synthetic construct
  source 1..75: mol_type = other DNA
tggtcgtctgtcggcgtttctacgccgacagacgctgttgattgaggcttatcgcttgctgcatccgcggcgcca

SEQ ID NO: 518118 - DNA, 75 bp, synthetic construct
  source 1..75: mol_type = other DNA
tgatgtgttggtgctgacctctggtcaaactgacaataagatccacggcacggcaaatatttataagaagaagta

SEQ ID NO: 518119 - DNA, 75 bp, synthetic construct
  source 1..75: mol_type = other DNA
tgatgtgttggtgctgacctctggtcaaactgacaataagatccacggcacggcggatatttataagaagaagta

SEQ ID NO: 518120 - DNA, 75 bp, synthetic construct
  source 1..75: mol_type = other DNA
gaatatggggcgaattgtcgttgacattgatggtgttaatctcgctgaactgattaacatggtctgcgataacgg

SEQ ID NO: 518121 - DNA, 75 bp, synthetic construct
  source 1..75: mol_type = other DNA
atgaaaactggaactaagctcttagttggtgcgttagcttttgttgtcacaaacgtctatgccgctgaattgatg

SEQ ID NO: 518122 - DNA, 75 bp, synthetic construct
  source 1..75: mol_type = other DNA
atgaaaactggaactaagctcttagttggtgcgttagcttttgttgtcacaaacgtttatgcagcggaattgatg

SEQ ID NO: 518123 - DNA, 75 bp, synthetic construct
  source 1..75: mol_type = other DNA
tgatgtgttagtgctgacctccggccagaccgacaataagatccatggtacggctgatatttataagaagaagta

SEQ ID NO: 518124 - DNA, 75 bp, synthetic construct
  source 1..75: mol_type = other DNA
ggctgaaaatctgtccgctctggagcaggatatcgccagtctgacaaaggcagcggcattaagcgttgccagaat

SEQ ID NO: 518125 - DNA, 75 bp, synthetic construct
  source 1..75: mol_type = other DNA
atgcagaaacgagaacccgtcatcatctcgccagactataccgatgatgaactttatgagtggatgcgccagaaa

SEQ ID NO: 518126 - DNA, 75 bp, synthetic construct
  source 1..75: mol_type = other DNA
caggtggagaataaaagcgatagcaaagccagcaatcatggtcgtctgttggcgtttctgcgccgccagccgctg

SEQ ID NO: 518127 - DNA, 75 bp, synthetic construct
  source 1..75: mol_type = other DNA
aaagcaaaagactataaagactatcacgatctgattaatgatgaagatgtcgaagtagtggtaattactgcctcg

SEQ ID NO: 518128 - DNA, 75 bp, synthetic construct
  source 1..75: mol_type = other DNA
ggatcgggaaaattggtgccgatcacttaagacgtctggctaacactatttctggagtagaagttgttgctgtgt

SEQ ID NO: 518129 - DNA, 75 bp, synthetic construct
  source 1..75: mol_type = other DNA
atgcagaagcgagaacccgtcatcatctcgccagactataccgatgatgaactttatgagtggatgcgccggaaa

SEQ ID NO: 518130 - DNA, 75 bp, synthetic construct
  source 1..75: mol_type = other DNA
aattgaacaagccgaccgcgttctgtttatggttgatggcaccaccacggacgccgttgatccagcagagatctg

SEQ ID NO: 518131 - DNA, 75 bp, synthetic construct
  source 1..75: mol_type = other DNA
acgctctgcgtgagcaacagcgtgtctggctgacccagcaagcgcgtaccgctgacggtatccgcattgaaattg

SEQ ID NO: 518132 - DNA, 75 bp, synthetic construct
  source 1..75: mol_type = other DNA
atggtgcggaaggcgttggtttgttccgcactgaaatgctctatatggatcgcaccagtgcaccgggcgaaagcg

SEQ ID NO: 518133 - DNA, 75 bp, synthetic construct
  source 1..75: mol_type = other DNA
gacaaacccgttgattatctgaacattccggcagaagctaacccgttcctcggttatcgcgccgtgcgtatttat

SEQ ID NO: 518134 - DNA, 75 bp, synthetic construct
  source 1..75: mol_type = other DNA
agcgggacaaagcgttgtcacttgtccgcaagcctccacaaggcgacgctcagccagatttttttgcgcccagcc

SEQ ID NO: 518135 - DNA, 75 bp, synthetic construct
  source 1..75: mol_type = other DNA
aactcagcatgagcgcaccgtcaattccggcggcgaaagcgcgaatggcgcaacttgatagccgtgagtgccgcc

SEQ ID NO: 518136 - DNA, 75 bp, synthetic construct
  source 1..75: mol_type = other DNA
tcatcatcgatcaatgctgcgaagagattgatttctttagtattggtagtaatgacctgacgcaatatctgctgg

SEQ ID NO: 518137 - DNA, 75 bp, synthetic construct
  source 1..75: mol_type = other DNA
gcggaaggcgttggtttgttccgcactgaaatgctctatatggatcgcaccagtgcaccgggcgaaagcgagttg

SEQ ID NO: 518138 - DNA, 75 bp, synthetic construct
  source 1..75: mol_type = other DNA
ctcgattacgccgtgcaggcggtgcatcgccagggcaaatggattggtctgtgcggtgagctgggagcgaaaggt

SEQ ID NO: 518139 - DNA, 75 bp, synthetic construct
  source 1..75: mol_type = other DNA
tatccgcgcccgcaccgtgtgcagcggtagtgcaggcggcattctgacgccgatctcttctttagatctcaatgc

SEQ ID NO: 518140 - DNA, 75 bp, synthetic construct
  source 1..75: mol_type = other DNA
gatttccggagccgacgaacaggaagcgcaccagcgtttaagccaatggctgcgcgatgaatttccccactgcga

SEQ ID NO: 518141 - DNA, 75 bp, synthetic construct
  source 1..75: mol_type = other DNA
agcaaatcggaacatattgagcaatccaccatcagcgtagcgcgtctgcaagcgccggtgcgctggggcgatgat

SEQ ID NO: 518142 - DNA, 75 bp, synthetic construct
  source 1..75: mol_type = other DNA
tatccgtgctcgcaccgtgtgcagtggtagcgcaggcggcattctgacgccgatctcttctttagatctcaatgc

SEQ ID NO: 518143 - DNA, 75 bp, synthetic construct
  source 1..75: mol_type = other DNA
tcgctggtgaccgcactaccggtagtgattatgtatgcgctttcggaacgttttattaagagtggtttgaccgct

SEQ ID NO: 518144 - DNA, 75 bp, synthetic construct
  source 1..75: mol_type = other DNA
gcaacgtgcctcacgcctggctgccagcgtaaagcgttacaagacatcagaaatgctgcgctttatttttgctac

SEQ ID NO: 518145 - DNA, 75 bp, synthetic construct
  source 1..75: mol_type = other DNA
tattggtgacatttatgaatttcctctactgagatgccctgggctggttaccccggtaaatgaagaacatctcag

SEQ ID NO: 518146 - DNA, 75 bp, synthetic construct
  source 1..75: mol_type = other DNA
cacacaacctctcaagcaaacagaggggaccaggtttctgcaaatactctgacaacggcttttaaaaaggccagg

SEQ ID NO: 518147 - DNA, 75 bp, synthetic construct
  source 1..75: mol_type = other DNA
gattatctggctgaagttgctaattacagtgacgaccgctgggaagcaccccaacgcgccgcacgtctggcagct

SEQ ID NO: 518148 - DNA, 75 bp, synthetic construct
  source 1..75: mol_type = other DNA
cggtagccagtggcttatagtggaaattttcggggtgaagggacggcagcaccgcagcgatgacagcactccgga

SEQ ID NO: 518149 - DNA, 75 bp, synthetic construct
  source 1..75: mol_type = other DNA
acagtgacgaccgctgggaagcaccccaacgcgccgcacgtctggcagctgccgtaaagcgttacaagacatcag

SEQ ID NO: 518150 - DNA, 75 bp, synthetic construct
  source 1..75: mol_type = other DNA
ccacagcagtggacgctggagcattacgtcgacatttttaacccgatgattttcccgtttgtcgactacttccgt

SEQ ID NO: 518151 - DNA, 75 bp, synthetic construct
  source 1..75: mol_type = other DNA
ccggtggtgattatgtatgcgctttcggaacgttttattaagagtggtttgaccgccggtggcgtgaagggctaa

SEQ ID NO: 518152 - DNA, 75 bp, synthetic construct
  source 1..75: mol_type = other DNA
acgcgctgttcagtacccctgattacatctggggccgaatgatggcggcctcgctggtgaccgcattgccggtgg

SEQ ID NO: 518153 - DNA, 75 bp, synthetic construct
  source 1..75: mol_type = other DNA
acctctcaagcaaacagaggagaccaggtttctgcaaatactctgacaacggcttttaaaaaggccagggaaaaa

SEQ ID NO: 518154 - DNA, 75 bp, synthetic construct
  source 1..75: mol_type = other DNA
ggcgaacgcgaacagaggcggaaaagtaacgaggtcgcccagttccaagccgaggcaactttggccgcacagttg

SEQ ID NO: 518155 - DNA, 75 bp, synthetic construct
  source 1..75: mol_type = other DNA
acttcgacaccatccctgatgagatcgaagaagcggcgatgatggatggcctcaaccgtctgcaaattatcttcc

SEQ ID NO: 518156 - DNA, 75 bp, synthetic construct
  source 1..75: mol_type = other DNA
aaaaaaatatgcctggcatgatacagtgcccctgatactttgcgttgctgctgctatcgcctgcgccctggcacc

SEQ ID NO: 518157 - DNA, 75 bp, synthetic construct
  source 1..75: mol_type = other DNA
tctggttaaaacgcggcaataaccgccaccgttttcatgccatgttgctgcgcgttgcactcatcggcccgctga

SEQ ID NO: 518158 - DNA, 75 bp, synthetic construct
  source 1..75: mol_type = other DNA
tacgcagcgccatccttgaagggcatcccctttccgatgcattacagcattttcccacgcttttcgattcgctct

SEQ ID NO: 518159 - DNA, 75 bp, synthetic construct
  source 1..75: mol_type = other DNA
atgagagccttattagcaatattattgtttccgctgctggcgcaagccgccggggaggggatgtggcaggcgagc

SEQ ID NO: 518160 - DNA, 75 bp, synthetic construct
  source 1..75: mol_type = other DNA
ccgttgcgatttatctgggaagtgcctggcggtgggcggttaattccaccgctaaaggtacaacgtaatgaagtg

SEQ ID NO: 518161 - DNA, 75 bp, synthetic construct
  source 1..75: mol_type = other DNA
aaaaccgcaccgctggacgcgacttcacagaaaaccgcgttcagatcgataaatttgatggccgtcacaccatca

SEQ ID NO: 518162 - DNA, 75 bp, synthetic construct
  source 1..75: mol_type = other DNA
taatccactattgccatgttaactttggtactggcaggtttaacgatttgacccgttctcagcttcaaatggcgc

SEQ ID NO: 518163 - DNA, 75 bp, synthetic construct
  source 1..75: mol_type = other DNA
gaacgatgtgttcgctaatctgtataaagcactggagaaaaacggtcagcttgataacacgctgattgtctttac

SEQ ID NO: 518164 - DNA, 75 bp, synthetic construct
  source 1..75: mol_type = other DNA
ccagttcttcaccaacccgcgcaacgattctcactggacagtattccatccaccacggcattttgatgccgccga

SEQ ID NO: 518165 - DNA, 75 bp, synthetic construct
  source 1..75: mol_type = other DNA
atggttttacagcgtgcggctggtactcaccacattgcggatgctgtcgcacagtctgctggtggggtgtttgta

SEQ ID NO: 518166 - DNA, 75 bp, synthetic construct
  source 1..75: mol_type = other DNA
aaaagaaataatattctttatctgcgtaggggttttggtaggcggtgccatttctagggtgttttttaatttgta

SEQ ID NO: 518167 - DNA, 75 bp, synthetic construct
  source 1..75: mol_type = other DNA
ttgatatcctaaaaaaatacgccaaagaaataggttttatttttatacttggtgtttctgtaggggcgattatat

SEQ ID NO: 518168 - DNA, 75 bp, synthetic construct
  source 1..75: mol_type = other DNA
ccgttgcgctttatctgggaagttccaggcggtgggaggttaattccgccgctgaaggtgcagcgtaatgaagtg

SEQ ID NO: 518169 - DNA, 75 bp, synthetic construct
  source 1..75: mol_type = other DNA
aacagtgtgaccgattggcaagaacaattcccgttctggagcgagtcgacaataaaacgcgtgctggccaatctg

SEQ ID NO: 518170 - DNA, 75 bp, synthetic construct
  source 1..75: mol_type = other DNA
acgtatataaacagaatactggattttctagggggatctggctctccattatctcaaacctaccttgctctttgg

SEQ ID NO: 518171 - DNA, 75 bp, synthetic construct
  source 1..75: mol_type = other DNA
aaagaagccgtgcttgaagaggtcaagttccaaaaagaagagatgcaagccacggagcttgatgatgaaccattg

SEQ ID NO: 518172 - DNA, 75 bp, synthetic construct
  source 1..75: mol_type = other DNA
ctttcatcgacaaaatttgggaatggaaagcggaatccggcggcacgattacccgtcagatgcgccgtctcggca

SEQ ID NO: 518173 - DNA, 75 bp, synthetic construct
  source 1..75: mol_type = other DNA
cctggcggcgctggcttctaccggtcgtgacatcaactgggatatgaaacgcctggaaggctaccgtaacttctg

SEQ ID NO: 518174 - DNA, 75 bp, synthetic construct
  source 1..75: mol_type = other DNA
gtactcgccatacgctggtgactgtactggaaggtctgctgcgcctcgcgcatccgatcattccgttcatcaccg

SEQ ID NO: 518175 - DNA, 75 bp, synthetic construct
  source 1..75: mol_type = other DNA
taatcatcaggaactgttgcagcaggcattaactcatcgtagtgccagcagtaaacataacgagcgtttagaatt

SEQ ID NO: 518176 - DNA, 75 bp, synthetic construct
  source 1..75: mol_type = other DNA
gtagtccaggtacgtggcgaagcgcacgatcaggaatttacaatccactgccaggtcagaggcctgagtgaaccg

SEQ ID NO: 518177 - DNA, 75 bp, synthetic construct
  source 1..75: mol_type = other DNA
ttctacttaactatccttttcccgcaaaccgtttttatccccagcggcaaatcgaatacaccaccagcgccaccg

SEQ ID NO: 518178 - DNA, 75 bp, synthetic construct
  source 1..75: mol_type = other DNA
atagcagtaaaccagctcacggagccatcagccgtattaatcgaccgaataatcccttcgcaccgcagcgaaatc

SEQ ID NO: 518179 - DNA, 75 bp, synthetic construct
  source 1..75: mol_type = other DNA
atgtgtcagcatgattggcctcagattaatgttaagcgtcttgcaggacgcgtaatgttaactggggcttttctc

SEQ ID NO: 518180 - DNA, 75 bp, synthetic construct
  source 1..75: mol_type = other DNA
atgaaccccatcgtaattaatcgacttcaacggaagctgggctacacttttaatcatcaggaactgttgcagcag

SEQ ID NO: 518181 - DNA, 75 bp, synthetic construct
  source 1..75: mol_type = other DNA
gataccccgtcaactgccaccgcacgcaaaggctttgccggatacgatcacccaaaccagtatctggttaaaccg

SEQ ID NO: 518182 - DNA, 75 bp, synthetic construct
  source 1..75: mol_type = other DNA
tggttaaggagcacgatcgcgtagggcgaatggcagatacccaggagtttgaaaactttgtactggagaagcggc

SEQ ID NO: 518183 - DNA, 75 bp, synthetic construct
  source 1..75: mol_type = other DNA
cattcgtggaatggtgatgctggtgttcacgctgccgggttttgatcgagtattcaaagtgatcaaagacaaatt

SEQ ID NO: 518184 - DNA, 75 bp, synthetic construct
  source 1..75: mol_type = other DNA
tggtgaaagagcacgatcgcgtgggccgaatggcggacacccaggagtttgaaaactttgtgctggagaagcggc

SEQ ID NO: 518185 - DNA, 75 bp, synthetic construct
  source 1..75: mol_type = other DNA
ccgctacggaaagaggcattgttcattcgaacagacctgatttacctcctgttgattatgcacagccagagctac

SEQ ID NO: 518186 - DNA, 75 bp, synthetic construct
  source 1..75: mol_type = other DNA
tatcgtgttatggtcactgataataagttttgcgtcacaagagaaagtcatagtggttgttttactaatctgttg

SEQ ID NO: 518187 - DNA, 75 bp, synthetic construct
  source 1..75: mol_type = other DNA
tgtccagcaggcgatgaaaaaccgtatccatctttatgatcatcacgttggtctggtggtggagcaattgcgctg

SEQ ID NO: 518188 - DNA, 75 bp, synthetic construct
  source 1..75: mol_type = other DNA
gtgttagagatactggaagcactggcagcggagaatcagggtgtttcattaactcacctttcggaaaaaacaggc

SEQ ID NO: 518189 - DNA, 75 bp, synthetic construct
  source 1..75: mol_type = other DNA
aaatggtgatggggtgctggatgcttatgctaatggtgtgcatgtattccgctttagaaatggttcagcaatatc

SEQ ID NO: 518190 - DNA, 75 bp, synthetic construct
  source 1..75: mol_type = other DNA
tgcctcggcagttataacgccggcttcagtaaaagtaacactcaccgccggatgaaatacgcccggcagatttac

SEQ ID NO: 518191 - DNA, 75 bp, synthetic construct
  source 1..75: mol_type = other DNA
gccagcgaaccgtggtacagcgtctcgccgggcgatgttttcccggaagagtttcgccactggctatgcgccgac

SEQ ID NO: 518192 - DNA, 75 bp, synthetic construct
  source 1..75: mol_type = other DNA
atacggctgacgccccaattaacgggtaaaggccagcagtggttaactcgcaagctacttgatgctggtttgtta

SEQ ID NO: 518193 - DNA, 75 bp, synthetic construct
  source 1..75: mol_type = other DNA
ttacgcttgccgaatacgccacaggtaactttacggattagtgtgggggttgcgccgctgaatccacaaatgagt

SEQ ID NO: 518194 - DNA, 75 bp, synthetic construct
  source 1..75: mol_type = other DNA
aaatggccgcttatctgggcagcaaagaggcaaaggagatcaaaatgaaacgcatagaggaagcctacaaggaga

SEQ ID NO: 518195 - DNA, 75 bp, synthetic construct
  source 1..75: mol_type = other DNA
gtctaaccgtaaggccgagcactacttcctcaacggtaaactcgctgctgtgcgtatggatgagttcaagtatca

SEQ ID NO: 518196 - DNA, 75 bp, synthetic construct
  source 1..75: mol_type = other DNA
tggttatctgtattcagagggcgagattatttatctcgccgatacgccattcgagcggttacttgatattcagcg

SEQ ID NO: 518197 - DNA, 75 bp, synthetic construct
  source 1..75: mol_type = other DNA
acaggctccggtaaaagtaccacgctctacgccattctttcggcgctgaatactcccggccgcaatattctgacg

SEQ ID NO: 518198 - DNA, 75 bp, synthetic construct
  source 1..75: mol_type = other DNA
tttcttcctctattacggcactcgcggctgtcacttcgataactacccgaacgccaaatatgcgggtagctctcc

SEQ ID NO: 518199 - DNA, 75 bp, synthetic construct
  source 1..75: mol_type = other DNA
aggccatcgggaaatggcatatgggggaaaacaaagagtcgcagccgcagaacgttggctttgatgatttccgtg

SEQ ID NO: 518200 - DNA, 75 bp, synthetic construct
  source 1..75: mol_type = other DNA
tcgatggtgtggaccagacatctttcttcctgggaacaaatggtcagtctaaccgtaaggccgagcactacttcc

SEQ ID NO: 518201 - DNA, 75 bp, synthetic construct
  source 1..75: mol_type = other DNA
tgctccctatgacgatcgggatgattatcgtctggtgagggaaggtgagaacagcgatacgcctgtttttagtag

SEQ ID NO: 518202 - DNA, 75 bp, synthetic construct
  source 1..75: mol_type = other DNA
cggcagttaataaaaacgtgtccgttagttgatcaggaacatcctgtttatctctatctacttgaactggagcag

SEQ ID NO: 518203 - DNA, 75 bp, synthetic construct
  source 1..75: mol_type = other DNA
acctcttattccagcaggtgatagccgtcttgctgccgcaattaaccaattgggcaacattgactgggtgaggaa

SEQ ID NO: 518204 - DNA, 75 bp, synthetic construct
  source 1..75: mol_type = other DNA
gcggataagcaggatttagaaaatctcattcagcttccgcacggtattatcctggtgacagggccgacaggctcc

SEQ ID NO: 518205 - DNA, 75 bp, synthetic construct
  source 1..75: mol_type = other DNA
cgcatcgatctctcttgaggatctttctgcactggcaggcaatgtttctgcacagatcgccagtattaatgtggc

SEQ ID NO: 518206 - DNA, 75 bp, synthetic construct
  source 1..75: mol_type = other DNA
gttatacgtgccagaattggtgagaaagtgattattctgacgcacagcctgtttttctttcaggagttactgctt

SEQ ID NO: 518207 - DNA, 75 bp, synthetic construct
  source 1..75: mol_type = other DNA
ggggggtatattatggggaaaattatcacatatatagtgtatatcgaatagcaacggatgaaagagctgtggcag

SEQ ID NO: 518208 - DNA, 75 bp, synthetic construct
  source 1..75: mol_type = other DNA
gaaaaagccgaagtcgtcaggcgtgaaagtgtcagccggtgagcgtcaggaagaccagtcgcatgccgcactgct

SEQ ID NO: 518209 - DNA, 75 bp, synthetic construct
  source 1..75: mol_type = other DNA
catcggatgtaaaacgcttacagaacgcggacttagtcgtttgggttggcccggagatggaagcgttcatgcaaa

SEQ ID NO: 518210 - DNA, 75 bp, synthetic construct
  source 1..75: mol_type = other DNA
tccgaacatgactattcactacgtccatcagatgtaaaacgcttacagaacgcggacttagtagtctgggttggc

SEQ ID NO: 518211 - DNA, 75 bp, synthetic construct
  source 1..75: mol_type = other DNA
ctgggtaaaacaagctattcagaatttctgaatcaattagccaaccagtacgcgagctgcctgaaaggagattaa

SEQ ID NO: 518212 - DNA, 75 bp, synthetic construct
  source 1..75: mol_type = other DNA
cgcacagcaacaacgggcaaaacgggcagccattgaggcgaaaaaccgggggcttactgaccggcaggcagcgcg

SEQ ID NO: 518213 - DNA, 75 bp, synthetic construct
  source 1..75: mol_type = other DNA
gaaaaagccgaagtcgtcaggcgttaaagtgtcagccggtgagcgtcaggaagaccaggcgcatgccgccctgct

SEQ ID NO: 518214 - DNA, 75 bp, synthetic construct
  source 1..75: mol_type = other DNA
gaaaaagccgaagtcgtcaggcgttaaagtgtcagccggtgagcgtcaggaagaccagccgcatgccgcgctgct

SEQ ID NO: 518215 - DNA, 75 bp, synthetic construct
  source 1..75: mol_type = other DNA
gaaaaagccgaagtcgtcaggcgtaaaagtgtcagccggtgagcgtcaggaagaccagccgcatgccgctctgct

SEQ ID NO: 518216 - DNA, 75 bp, synthetic construct
  source 1..75: mol_type = other DNA
tcatattcattacgattattggtcgcattatgttacataaaaaaacgcttcttttcgcagcattatccgccgctc

SEQ ID NO: 518217 - DNA, 75 bp, synthetic construct
  source 1..75: mol_type = other DNA
ataccgacgccagaaaaaccgccagtgctgttgaacagggcctgagccgccaggcgctgactgctcaaaaaagcc

SEQ ID NO: 518218 - DNA, 75 bp, synthetic construct
  source 1..75: mol_type = other DNA
ggggcggtgcacttaaccggcactggcgtacccacagtggtgatggggcctgcaacccgccacggacattgcgcc

SEQ ID NO: 518219 - DNA, 75 bp, synthetic construct
  source 1..75: mol_type = other DNA
attatatgcgtgagtggctggcagagcagggaatggttaaaacgggtgaatgcccgccgccagataccgtttatg

SEQ ID NO: 518220 - DNA, 75 bp, synthetic construct
  source 1..75: mol_type = other DNA
gcaggggatggtgaaatcgggggaatgcccgccgccgtacaccgtttatgcctatgccaatagtctgcaacgtac

SEQ ID NO: 518221 - DNA, 75 bp, synthetic construct
  source 1..75: mol_type = other DNA
cgtagcccgtaaggcggcaatggatgttgtgaccgggcagatgcgtgatggtggtctgttctccggaggtggacg

SEQ ID NO: 518222 - DNA, 75 bp, synthetic construct
  source 1..75: mol_type = other DNA
catcgcttctgccattgctgatggggtaacagaaacggaggttttacttcctgacggcgcttcagaacatgatta

SEQ ID NO: 518223 - DNA, 75 bp, synthetic construct
  source 1..75: mol_type = other DNA
aagtgatgcaggcaggaattcgtccaggcgatcgcgtcacgtttgataccacttttcaggttctccctcaccagc

SEQ ID NO: 518224 - DNA, 75 bp, synthetic construct
  source 1..75: mol_type = other DNA
ttggcaatgtgcgcatggctgcccgccagctgcagtcggtgcggatcactacccgtgaagagtgcaaaattcccg

SEQ ID NO: 518225 - DNA, 75 bp, synthetic construct
  source 1..75: mol_type = other DNA
acctcgctggcggtggcgaccggtgcgctggcgtacgcctggtaccagggggattccacgctttcagcgtttaat

SEQ ID NO: 518226 - DNA, 75 bp, synthetic construct
  source 1..75: mol_type = other DNA
gccggaagtccggcgcagatgcggcgggctgaaggcattaattttaatcagaacaatcacgtggtgattcagaac

SEQ ID NO: 518227 - DNA, 75 bp, synthetic construct
  source 1..75: mol_type = other DNA
tgggggcttataccggctttctgctgtcggcgctgaaatcgtatccgttcctcaataacccgatcctgccggtgc

SEQ ID NO: 518228 - DNA, 75 bp, synthetic construct
  source 1..75: mol_type = other DNA
cagtgccggtgtgcgtggtggtgaacagtttgatgccattaaccagagtgtggcgcgttttgcgtctgcctccgg

SEQ ID NO: 518229 - DNA, 75 bp, synthetic construct
  source 1..75: mol_type = other DNA
tctatgcctggagctgtagatgcgctggatgcgttttaccgatgatcagcgccgtcgggcgtttggtcgcccgct

SEQ ID NO: 518230 - DNA, 75 bp, synthetic construct
  source 1..75: mol_type = other DNA
gagttagtgcagtttgcgaccgctaactatcttgctgccgatcaggtgcccgcttttgttctgccacaacatcct

SEQ ID NO: 518231 - DNA, 75 bp, synthetic construct
  source 1..75: mol_type = other DNA
gtttggtcgcccgctcgattttgttttctaccgtggtctgaacgtcagcgaagcttctgtactggttacgcgcgc

SEQ ID NO: 518232 - DNA, 75 bp, synthetic construct
  source 1..75: mol_type = other DNA
tcacagctgaagtataccggagaggcgcagaaggcgtatgagcgcctgctgacgccactggagaaatataccgcc

SEQ ID NO: 518233 - DNA, 75 bp, synthetic construct
  source 1..75: mol_type = other DNA
gcaaccagccggataggtgtggggaatctttaccgtctgatgcgcggctatgcggaaggtggttatgtgggtggt

SEQ ID NO: 518234 - DNA, 75 bp, synthetic construct
  source 1..75: mol_type = other DNA
cggggacggctattgaggctgcggcggcgaacttccatttcgcgaccggaggatttacggggacgggcggcaaat

SEQ ID NO: 518235 - DNA, 75 bp, synthetic construct
  source 1..75: mol_type = other DNA
ctggttgccgaagctggggatcgtgcaaaaggttctgagcctgctgacgcccgttcatcgcggactggaaacatt

SEQ ID NO: 518236 - DNA, 75 bp, synthetic construct
  source 1..75: mol_type = other DNA
ataccgacgtcagaaaaaccgccagtgctgttgaacagggcctgagccgccaggcgctggctgcacaaaaagccg

SEQ ID NO: 518237 - DNA, 75 bp, synthetic construct
  source 1..75: mol_type = other DNA
gcctgcttaccctgctgaaggaggaacttctcgggatcagggatgcctctgaatcatcagaggagtcgctgtcag

SEQ ID NO: 518238 - DNA, 75 bp, synthetic construct
  source 1..75: mol_type = other DNA
atgcggcgggccgaaggcattaattttaatcagaacaatcacgtggtgattcagaacgacggtatcaacggacag

SEQ ID NO: 518239 - DNA, 75 bp, synthetic construct
  source 1..75: mol_type = other DNA
tttcgcgaccgggggatttacggggacggggggtaaatatgaacctgcggggattgttcatcgcggggagtttgt

SEQ ID NO: 518240 - DNA, 75 bp, synthetic construct
  source 1..75: mol_type = other DNA
cctgctgcaacaggggggccacctcgctggcggtggcgaccggtgcgctggcgtatgcctggtatcagggcaact

SEQ ID NO: 518241 - DNA, 75 bp, synthetic construct
  source 1..75: mol_type = other DNA
ggcggcgtgtggagccagcctggtcggtgtgttgatgctgcgttttttcattctctacgccggacagttgacggt

SEQ ID NO: 518242 - DNA, 75 bp, synthetic construct
  source 1..75: mol_type = other DNA
agtcgttgaacagtcgatgaaccggcaggcgctggctgcacagaaagcgggaatttccgtcgggcagtataaagc

SEQ ID NO: 518243 - DNA, 75 bp, synthetic construct
  source 1..75: mol_type = other DNA
gcggtttatgacgtagcccgtaaggcggcaatggatgttgtgaccgggcagatgcgcgatggtggtctgttctcc

SEQ ID NO: 518244 - DNA, 75 bp, synthetic construct
  source 1..75: mol_type = other DNA
ggaaaattaaacgacagtttcctgcccgcgatatacattgctgatggtggatttaagttaaatgatgacaaggct

SEQ ID NO: 518245 - DNA, 75 bp, synthetic construct
  source 1..75: mol_type = other DNA
atgcggaaggtggttatgtgggtggtgccggaagtccggcgcagatgcggcggacggaaggcattaattttaatc

SEQ ID NO: 518246 - DNA, 75 bp, synthetic construct
  source 1..75: mol_type = other DNA
gggatctctgccggacacagccagaacagttatcgcggcttagtgaaaatcatgccgacggcaaccaatgcacgt

SEQ ID NO: 518247 - DNA, 75 bp, synthetic construct
  source 1..75: mol_type = other DNA
gcatttgagcagttgggcgtaccggtgcgtgaaggcaaagaggtggcggtggatgccattttcgattctgtttcg

SEQ ID NO: 518248 - DNA, 75 bp, synthetic construct
  source 1..75: mol_type = other DNA
gttgacgttctgctgctggataaaaccggcaccatcacgctaggtaaccgtcaggcgtcggagtttatccccgcg

SEQ ID NO: 518249 - DNA, 75 bp, synthetic construct
  source 1..75: mol_type = other DNA
cgacgtcggggctgactgcgatggcacgccagttccgcaacgtgacggcggagcagattgcgtatgttgcacagc

SEQ ID NO: 518250 - DNA, 75 bp, synthetic construct
  source 1..75: mol_type = other DNA
agaggccgccacgaaacgacagttatccgggcaggaaaaatccctgctggcccatgagaaagagacgctggagta

SEQ ID NO: 518251 - DNA, 75 bp, synthetic construct
  source 1..75: mol_type = other DNA
agtgcgaagcaggctgcaatcagcgcaaaagcccgggggctgacggaccgtcaggcacagcgggagtcggaatcg

SEQ ID NO: 518252 - DNA, 75 bp, synthetic construct
  source 1..75: mol_type = other DNA
gacaagatagaacaccagaagcggctgaatgagctggcacagcaggcggcgcggtttgaacagcagcagagcgcg

SEQ ID NO: 518253 - DNA, 75 bp, synthetic construct
  source 1..75: mol_type = other DNA
gccacgaaaggctttgatgaccagacccgccgcctgaaagagaacatggggacgctggaaacctgggcggataaa

SEQ ID NO: 518254 - DNA, 75 bp, synthetic construct
  source 1..75: mol_type = other DNA
caccgcgcccggacgctggaaagtgtttgccagcgatatcgacaccgaagtgctggaaaaagccagaagcggtat

SEQ ID NO: 518255 - DNA, 75 bp, synthetic construct
  source 1..75: mol_type = other DNA
gaaggcggtgtatgacatggcccgcaagggggcgcaggatgagattcaggcgcagatgcgtgatggcggcgtctt

SEQ ID NO: 518256 - DNA, 75 bp, synthetic construct
  source 1..75: mol_type = other DNA
cgccgcgcagaaccaggaggacgtgaacaacatccgccaggccatgaaaagcgccaaagggccagggaacttccg

SEQ ID NO: 518257 - DNA, 75 bp, synthetic construct
  source 1..75: mol_type = other DNA
gctgcaaaagcgaatcaaagaaattaatgaatggttgagtgatgaaataatctctttcctaccatatgaattaca

SEQ ID NO: 518258 - DNA, 75 bp, synthetic construct
  source 1..75: mol_type = other DNA
ctatgtggaatgcgtacaaacagatcgctggtatgagcctcccgtcagctttgacggactggcgcgaaccttccg

SEQ ID NO: 518259 - DNA, 75 bp, synthetic construct
  source 1..75: mol_type = other DNA
atattggaatcggggcgggtgcgttggtaggtaatcaggtgagtctgcactggtcaatgtcgatgattggttatg

SEQ ID NO: 518260 - DNA, 75 bp, synthetic construct
  source 1..75: mol_type = other DNA
taatattggcattggtgccggggcgctggtgggtaatcaggtcagtctgcactggtcaatgtcgatgattggtta

SEQ ID NO: 518261 - DNA, 75 bp, synthetic construct
  source 1..75: mol_type = other DNA
atgaccacgcagccctatgaatttacgcagggcaacatctttcatctgctggaaccggatattaatcaggagatt

SEQ ID NO: 518262 - DNA, 75 bp, synthetic construct
  source 1..75: mol_type = other DNA
cggatacatcatgtacgtcaccgatgccgtgcaggatcgcaacgatatcgaaatgcttcgcgaaaacatggtgaa

SEQ ID NO: 518263 - DNA, 75 bp, synthetic construct
  source 1..75: mol_type = other DNA
agatggtatgagccaccggtcagctttaccggtctggcaaaaagcctgcgtgctgccgtgcatcacagctcgccg

SEQ ID NO: 518264 - DNA, 75 bp, synthetic construct
  source 1..75: mol_type = other DNA
cgtctctggcgatccgtatggctccggccgggaagcgagcacaggcattgagtttaattgccaccggtacagcac

SEQ ID NO: 518265 - DNA, 75 bp, synthetic construct
  source 1..75: mol_type = other DNA
atgccacaacgaacgtttttaataatgttaatcgtcgtctgtgtgacgatactgtgttttgtctggatggtgagg

SEQ ID NO: 518266 - DNA, 75 bp, synthetic construct
  source 1..75: mol_type = other DNA
ggcccgcaagggggcgcaggatgagctccggctgcagttgcgtgatggcggtatgttatcggggagcgggcgatg

SEQ ID NO: 518267 - DNA, 75 bp, synthetic construct
  source 1..75: mol_type = other DNA
tgtaccgcctgatgcgcggctatgcggaaggtggttatgtgggtggtgccggaagtccggcgcagatgcggcggg

SEQ ID NO: 518268 - DNA, 75 bp, synthetic construct
  source 1..75: mol_type = other DNA
agattccacgctttcagcgtttaataaaaccctggttctttccggtaatcagtccggactgactgccgatcgtat

SEQ ID NO: 518269 - DNA, 75 bp, synthetic construct
  source 1..75: mol_type = other DNA
gtcttcacgaaggaggcaaccagccggattggtgtcgggaacctgtaccgcctgatgcggggctatgcggaaggg

SEQ ID NO: 518270 - DNA, 75 bp, synthetic construct
  source 1..75: mol_type = other DNA
gaggatttacggggacgggcggcaaatatgagcctgcggggatagttcatcgcggggagtttgttttcacgaaag

SEQ ID NO: 518271 - DNA, 75 bp, synthetic construct
  source 1..75: mol_type = other DNA
tgacgctggaattaaccggctgcccgatagacgctgatggtttctgcccaatggataagtttgatagcgtgttga

SEQ ID NO: 518272 - DNA, 75 bp, synthetic construct
  source 1..75: mol_type = other DNA
cgaaaccgctggtcagttatatcgacaaagccctggtcaccgatcgtgccagcgcaccgaaaatcactgtgttgg

SEQ ID NO: 518273 - DNA, 75 bp, synthetic construct
  source 1..75: mol_type = other DNA
ggggacaatcaccatgccgtgatgcgcaagggtcgtccaggtggatgtgatggtttgttcctgaccgccgccagt

SEQ ID NO: 518274 - DNA, 75 bp, synthetic construct
  source 1..75: mol_type = other DNA
cagttctcaggcggaatggatgaagtacggcgaacagatgtcgacgggtaagcgagtcgttaacccttcagatga

SEQ ID NO: 518275 - DNA, 75 bp, synthetic construct
  source 1..75: mol_type = other DNA
tcaccggaagtggcgcgcaatgtcgcgaaaccgctggtgagctacatcgacaaagccctggtcaccgatcgcgcc

SEQ ID NO: 518276 - DNA, 75 bp, synthetic construct
  source 1..75: mol_type = other DNA
tctgctcactgcgctggacttcaaaccgtatcaactacatgaccagaatgaacgcacgccgattggcggcaaaat

SEQ ID NO: 518277 - DNA, 75 bp, synthetic construct
  source 1..75: mol_type = other DNA
gactcctctgcagatatgctcgccaaagctgaaaaggcttttgatgaagcggataaaaaatggcagtggtatcag

SEQ ID NO: 518278 - DNA, 75 bp, synthetic construct
  source 1..75: mol_type = other DNA
actgtgttttgtctggatggtgagggattcgctttgcggattccgtgtcgagcagggaaacacagtgcttgtggc

SEQ ID NO: 518279 - DNA, 75 bp, synthetic construct
  source 1..75: mol_type = other DNA
tggctgtgcttttgctaagtgcgaatgcatcagcagccattgaaattaataaccaccaggccagaaatatggatg

SEQ ID NO: 518280 - DNA, 75 bp, synthetic construct
  source 1..75: mol_type = other DNA
ccggcaccatcacactcggtaaccgtcaggcatcggagtttatccctgcgcagggcgtggatgaaaaaacgctgg

SEQ ID NO: 518281 - DNA, 75 bp, synthetic construct
  source 1..75: mol_type = other DNA
atgccggattctttaaatacaggggaaagtatgaaaaaaataacagggattattttattgcttcttgcagtcatt

SEQ ID NO: 518282 - DNA, 75 bp, synthetic construct
  source 1..75: mol_type = other DNA
atgcctcaacaacattatagtagcccgatgacggccgaaaggcaatggagggctgcgatgccacaacgaacgttt

SEQ ID NO: 518283 - DNA, 75 bp, synthetic construct
  source 1..75: mol_type = other DNA
agccggtgaactggcggcaagggacagggctgagcgtgagtcgtcacagctgaagtataccggagaggcgcagaa

SEQ ID NO: 518284 - DNA, 75 bp, synthetic construct
  source 1..75: mol_type = other DNA
ggggattgtcgggagtatcggcagcgccattggcggggggggtgggtgggggggggcccgcgccgggggggacac

SEQ ID NO: 518285 - DNA, 75 bp, synthetic construct
  source 1..75: mol_type = other DNA
acgtcggggctgatggcgatggcgcgccagttccgtaacgtgacggcagagcagattgcgtatgttgcgcagctg

SEQ ID NO: 518286 - DNA, 75 bp, synthetic construct
  source 1..75: mol_type = other DNA
cctccacggggacggccattcaggctgcggcggcgaacttccatttcgcgaccggaggatttacgggaaccggtg

SEQ ID NO: 518287 - DNA, 75 bp, synthetic construct
  source 1..75: mol_type = other DNA
gaaaccggtatggatgtggcttcgactccttccgtcagggaggtgcgctttggtgatggctattcccagcgagcg

SEQ ID NO: 518288 - DNA, 75 bp, synthetic construct
  source 1..75: mol_type = other DNA
gtctgccggtgagcgccaggaagaccgggcacatgctgccctgctggcgcttgaaaccgagctccggacgctgga

SEQ ID NO: 518289 - DNA, 75 bp, synthetic construct
  source 1..75: mol_type = other DNA
tgagccgccaggcgctggctgcacaaaaagccgggatttccgtcgggcagtataaagcggccatgcgaaccctgc

SEQ ID NO: 518290 - DNA, 75 bp, synthetic construct
  source 1..75: mol_type = other DNA
cagttccgtaacgtgacggcagagcagattgcgtatgttgcacagctgcagcgttccggagacgaggccggggca

SEQ ID NO: 518291 - DNA, 75 bp, synthetic construct
  source 1..75: mol_type = other DNA
ggtgcgaatgagaaaatcagccagcagcgccgtgatttatggaaagcggaaagtcagtatgcggtcctgaaagag

SEQ ID NO: 518292 - DNA, 75 bp, synthetic construct
  source 1..75: mol_type = other DNA
cagagccggagccagcgccggggaaaaaccgcctcttttcgtgcgaaccttcagggtgcatggaatgaccgggaa

SEQ ID NO: 518293 - DNA, 75 bp, synthetic construct
  source 1..75: mol_type = other DNA
caccggaagtccggcgcagatgcggcgttcagagggtatcagatttgagcagaacaacaacgtggtgattcagaa

SEQ ID NO: 518294 - DNA, 75 bp, synthetic construct
  source 1..75: mol_type = other DNA
cagatcgattctgacaacaaactggacgtaggttctgacgacaccgttgctgtgggtatcgtttaccagttctaa

SEQ ID NO: 518295 - DNA, 75 bp, synthetic construct
  source 1..75: mol_type = other DNA
tgccgttgagcagagtctgaaccgtcaggcgctggccgcacaaaaagccgggatttccgtcgggcagtataaagc

SEQ ID NO: 518296 - DNA, 75 bp, synthetic construct
  source 1..75: mol_type = other DNA
aagggtacgccacaggagggcttgtcgggggcagtggcacaggtcccgctgcagcacctttcggggtgagcgtgt

SEQ ID NO: 518297 - DNA, 75 bp, synthetic construct
  source 1..75: mol_type = other DNA
gcgctgaaagaggggcggatcctccaggctgactacaacatcaacctggctgccgcgaaaaaagagtacgaagac

SEQ ID NO: 518298 - DNA, 75 bp, synthetic construct
  source 1..75: mol_type = other DNA
ctggcgcttgaaaccgagctccggacgctggagaagcacagcggtgcgaatgagaaaatcagccagcagcgccgt

SEQ ID NO: 518299 - DNA, 75 bp, synthetic construct
  source 1..75: mol_type = other DNA
acagcaggcggcacggtttgaagagcagcagagcgcgaagcaggccgccatcagcgcaaaagcccgtggtctcac

SEQ ID NO: 518300 - DNA, 75 bp, synthetic construct
  source 1..75: mol_type = other DNA
agacctgggcagacaagactgcacaggcattcaaatccatgtgggatgcggtgctggatattggtcgcccggact

SEQ ID NO: 518301 - DNA, 75 bp, synthetic construct
  source 1..75: mol_type = other DNA
tgcctccacggggacggccattcaggctgcggcggcgaacttccatttcgcgaccgggggatttacgggaaccgg

SEQ ID NO: 518302 - DNA, 75 bp, synthetic construct
  source 1..75: mol_type = other DNA
gtcgggagtgtgggcagtgtcattggcggtgctgtcggtggtgacgcatcagcgtcaggcggtacagccattcag

SEQ ID NO: 518303 - DNA, 75 bp, synthetic construct
  source 1..75: mol_type = other DNA
ggcgaaaaaggattatgaatcaacgcagaaaaaaccgaagtcgtcaggtgtcagagtgtcagccggggagcgtca

SEQ ID NO: 518304 - DNA, 75 bp, synthetic construct
  source 1..75: mol_type = other DNA
aaggactcgttcggtgggatgatccccatgttccggggactggcgggggccgtctcgctacctgctgtcgggatc

SEQ ID NO: 518305 - DNA, 75 bp, synthetic construct
  source 1..75: mol_type = other DNA
ttatcgctgtattttgcccgggagtcaggggtgcttcttgaagggggcttgctgtttgtcgacaatggggaagga

SEQ ID NO: 518306 - DNA, 75 bp, synthetic construct
  source 1..75: mol_type = other DNA
agaaaactatcagatatttatcatgatattatatgtgaacaaaggttacgaactgaagacaaaagagatgaatac

SEQ ID NO: 518307 - DNA, 75 bp, synthetic construct
  source 1..75: mol_type = other DNA
gacacagaacaattggtaaaagcgttgttaccgtggagccgcgaactaccgcatcgtcaccatattatgctgtca

SEQ ID NO: 518308 - DNA, 75 bp, synthetic construct
  source 1..75: mol_type = other DNA
aactcgccacttaattcaacaaggccatacacgcattggttatatctgctctaaccactctatttctgacgccga

SEQ ID NO: 518309 - DNA, 75 bp, synthetic construct
  source 1..75: mol_type = other DNA
acagtaatcaggacaacccgctgctttatttctgtcagcatcgttggcgagtaaccccgcgcggtgaactccagc

SEQ ID NO: 518310 - DNA, 75 bp, synthetic construct
  source 1..75: mol_type = other DNA
ccgatttcgtacgctggtttcgtgacaatgttaccgcctttccgctggttcaggagcgattaaccacctacctgt

SEQ ID NO: 518311 - DNA, 75 bp, synthetic construct
  source 1..75: mol_type = other DNA
ccttggtgagcgggagcaaacggcctggctgtcagggacgatggcccgcgagctggatatggatccggactccct

SEQ ID NO: 518312 - DNA, 75 bp, synthetic construct
  source 1..75: mol_type = other DNA
actagcgcgaaggagctggcggcagcgttatccgttgatcccgaaagcgtcgcgctatgtggcgaaggcggattt

SEQ ID NO: 518313 - DNA, 75 bp, synthetic construct
  source 1..75: mol_type = other DNA
aagcgactggcaaccatggggctgattgaaatgatcccctggcgtggcgtgtttttaacggcagaaggagagaag

SEQ ID NO: 518314 - DNA, 75 bp, synthetic construct
  source 1..75: mol_type = other DNA
ctgtccgggacgatggcccgcgagctggatatggatccggactccctgcgcttcgattacagcgaagactcactc

SEQ ID NO: 518315 - DNA, 75 bp, synthetic construct
  source 1..75: mol_type = other DNA
ggtagcgatcgtgcggggcgcaaaagaatgctttttgcaacgctggtggcggttgccgctggagaacgacattat

SEQ ID NO: 518316 - DNA, 75 bp, synthetic construct
  source 1..75: mol_type = other DNA
cctgccttttttaccttctcatcagcaatgtctggcctggcgtgataacgaacagtggttatgggcgacgcgtta

SEQ ID NO: 518317 - DNA, 75 bp, synthetic construct
  source 1..75: mol_type = other DNA
ctactggtctgaagtatgacgcgaacaacatctacctggcagcgaactacggtgaaacccgtaacgctacgccga

SEQ ID NO: 518318 - DNA, 75 bp, synthetic construct
  source 1..75: mol_type = other DNA
tccggaatcctcagcggatatgctcgccagtgcacagaaggcatttgatgaggcggataaaaaatggcagtggta

SEQ ID NO: 518319 - DNA, 75 bp, synthetic construct
  source 1..75: mol_type = other DNA
atgacaacaaacactgtttcccgcaaagtagcgtggctacgggtcgttacgctggcagtcgccgcctttatcttc

SEQ ID NO: 518320 - DNA, 75 bp, synthetic construct
  source 1..75: mol_type = other DNA
tatgtgggtggtgccggaagtccggcgcagatgcggcgggcggaaggtattaattttaatcagaacaatcacgtg

SEQ ID NO: 518321 - DNA, 75 bp, synthetic construct
  source 1..75: mol_type = other DNA
tgaagtggcgcaacctactacttcaacaaaaacatgtccacctatgttgactacatcatcaaccagatcgattct

SEQ ID NO: 518322 - DNA, 75 bp, synthetic construct
  source 1..75: mol_type = other DNA
aatgctggagaaagcagaaaaggcttttgatgaggcggacaaaaaatggcagtggtatcagagccggagccaccg

SEQ ID NO: 518323 - DNA, 75 bp, synthetic construct
  source 1..75: mol_type = other DNA
agctcgccctgtctctcattgctgaccttgcaaacagtgaaaacaaaggacccgaagaagaagttttctataagg

SEQ ID NO: 518324 - DNA, 75 bp, synthetic construct
  source 1..75: mol_type = other DNA
agcttgctctgactctcattgctgacttagcaaatagtgaaaataatgaaaccgaagaaggcatgttttatgagg

SEQ ID NO: 518325 - DNA, 75 bp, synthetic construct
  source 1..75: mol_type = other DNA
tattgcacagaatatggcagcgatgctgaccggcagcgaacagaactggcgtggtttcacccgttccgtgctctc

SEQ ID NO: 518326 - DNA, 75 bp, synthetic construct
  source 1..75: mol_type = other DNA
cgagtgggcggaaagtgcgacggacagtttttcgcaggttaaaagcgcggccacgcagacctttgacggtattgc

SEQ ID NO: 518327 - DNA, 75 bp, synthetic construct
  source 1..75: mol_type = other DNA
ctacgtcggggctgattgcgatggcgcgccagttccgtaacgtgacggcagagcagattgcgtttgttgcgcagc

SEQ ID NO: 518328 - DNA, 75 bp, synthetic construct
  source 1..75: mol_type = other DNA
aacgctacacgaccagtttgggcagtactttgcggtagataacgttctgtatcatgaaaagaccgatcaccagga

SEQ ID NO: 518329 - DNA, 75 bp, synthetic construct
  source 1..75: mol_type = other DNA
tttgatgctgtagattttctgctacaccaaaaagcattgctacccaaaaatagtctaatatatcttgatccacct

SEQ ID NO: 518330 - DNA, 75 bp, synthetic construct
  source 1..75: mol_type = other DNA
atttcttgcgcatgttgatctgatgacccggccgcttattgatgttgcggctgccaccagagggctgattactgc

SEQ ID NO: 518331 - DNA, 75 bp, synthetic construct
  source 1..75: mol_type = other DNA
gtccgtttcgatgagcagatgagccgggtaaggcgtcatttttccggactggagactgacgccagaaaaaccgcc

SEQ ID NO: 518332 - DNA, 75 bp, synthetic construct
  source 1..75: mol_type = other DNA
ctgacgcatgcggcgctgctggcgcttgaaaccgagctccggacgctggagaagcacagcggagcgaatgagaaa

SEQ ID NO: 518333 - DNA, 75 bp, synthetic construct
  source 1..75: mol_type = other DNA
gctgaatgagctggcacagcaggctgcgcggtttgagcagcagcagggcgcgaagcaggcggcaatcagtgccca

SEQ ID NO: 518334 - DNA, 75 bp, synthetic construct
  source 1..75: mol_type = other DNA
gtcaccattaacatggtgccgaaccaccttgataaacgtgcgcacaaatatctcggcatggtccgccaggcgtca

SEQ ID NO: 518335 - DNA, 75 bp, synthetic construct
  source 1..75: mol_type = other DNA
ttttctcgaatgataaaattcaggcagctaatattattaacaccatgacgccaggtgatgtttatcagactttga

SEQ ID NO: 518336 - DNA, 75 bp, synthetic construct
  source 1..75: mol_type = other DNA
gctggggccgtctcgctgcctgctgtcggaattggtgcgcttgctgctgccacgggggtgctggcgtatgcctgg

SEQ ID NO: 518337 - DNA, 75 bp, synthetic construct
  source 1..75: mol_type = other DNA
atgcgctatgttgccggacaacctgcggaaaggatcttaccgccggggtcttttgcgagcatcggccaggcatta

SEQ ID NO: 518338 - DNA, 75 bp, synthetic construct
  source 1..75: mol_type = other DNA
tgggggacgatccgggttcggtcgatctctattccgacgttgatgatattacgatttcgaaagaacctttccttt

SEQ ID NO: 518339 - DNA, 75 bp, synthetic construct
  source 1..75: mol_type = other DNA
gcgtcttctcaaatgataaaattcaggctgccgctattattaataccatgacaccgggcgatgtttatcagacgc

SEQ ID NO: 518340 - DNA, 75 bp, synthetic construct
  source 1..75: mol_type = other DNA
ggcgcagaaggcatatgaacgcctgcagacgccgctggataaatataccgcccgccagaaggaactgaataaggc

SEQ ID NO: 518341 - DNA, 75 bp, synthetic construct
  source 1..75: mol_type = other DNA
gaaatccctgctggcgcataaagacgaaacgctggaatacaaacgccagctggcagacctgggtgacaaggttga

SEQ ID NO: 518342 - DNA, 75 bp, synthetic construct
  source 1..75: mol_type = other DNA
ccggacaggccgcggggctgacgtttaaccaggcgagtgagtcactggcagccctggtgaatgccggtgtgcgtg

SEQ ID NO: 518343 - DNA, 75 bp, synthetic construct
  source 1..75: mol_type = other DNA
tcaggaagacctgacgcatgcggcgctgctggcgcttgaaaccgagctccggacgctggagaagcacagcggagc

SEQ ID NO: 518344 - DNA, 75 bp, synthetic construct
  source 1..75: mol_type = other DNA
ggcagtgaacagaactggcggggattcacccgttcggtgctgtccatgatgacagaaatcctgcttaaacaggcc

SEQ ID NO: 518345 - DNA, 75 bp, synthetic construct
  source 1..75: mol_type = other DNA
gggtatctcacagtaaaagccgccggggtgtgggcgggtggcattgaaacaccttcggtggaaaccccatcggaa

SEQ ID NO: 518346 - DNA, 75 bp, synthetic construct
  source 1..75: mol_type = other DNA
ctaccgaagggacgctctcctggcgacacgctaccgctcaggcggggctgggggaacgttacgaccagatacttt

SEQ ID NO: 518347 - DNA, 75 bp, synthetic construct
  source 1..75: mol_type = other DNA
ttggagtcattaccgtttgcccgctatccgctgaagaaaatcacagcggaaaagagtacgacggcagtaaatccc

SEQ ID NO: 518348 - DNA, 75 bp, synthetic construct
  source 1..75: mol_type = other DNA
atggccgaaaaaaaacagtggcatgaaacgctacacgaccagtttggacagtactttgcggtagataacgctctg

SEQ ID NO: 518349 - DNA, 75 bp, synthetic construct
  source 1..75: mol_type = other DNA
ggcgatccggttcattatcatggcagtcgcgctaccgaagggacactttcctggcggcaagccacggcccaggcg

SEQ ID NO: 518350 - DNA, 75 bp, synthetic construct
  source 1..75: mol_type = other DNA
tttaacccatgagtatctgcatctggcattcgatggttatcccaccgggctggatgagagctatatcgaaacgct

SEQ ID NO: 518351 - DNA, 75 bp, synthetic construct
  source 1..75: mol_type = other DNA
acgacggcagtaaaacccggcgtgctcaatgggcgctatcgagtgacgtttgccaatggtaaccatattacgttg

SEQ ID NO: 518352 - DNA, 75 bp, synthetic construct
  source 1..75: mol_type = other DNA
aagcaggcgatggtggggatagtcgggagtatcggcagcgccattggcggtgctttcggtggtggtgcgtctgcc

SEQ ID NO: 518353 - DNA, 75 bp, synthetic construct
  source 1..75: mol_type = other DNA
gtatcggcagtgccattggcggtgctgttggtggtggtgcctcagcttcaaccggtacagccattcaggccgctg

SEQ ID NO: 518354 - DNA, 75 bp, synthetic construct
  source 1..75: mol_type = other DNA
gaagtccggcgcaaatgcggcgttcagagggtatcaggtttgagcagaacaacaacgtggtgattcagaacgacg

SEQ ID NO: 518355 - DNA, 75 bp, synthetic construct
  source 1..75: mol_type = other DNA
atgccatctgcaacacaaactgcccgactggaagcaaggagcagcgcagaactgcatgctgtgctgaaacgcgct

SEQ ID NO: 518356 - DNA, 75 bp, synthetic construct
  source 1..75: mol_type = other DNA
ccgggctgagcgtgaggcgtcacagctgaagtataccggagaggcgcagaaggcgtatgagcgcctgcagacgcc

SEQ ID NO: 518357 - DNA, 75 bp, synthetic construct
  source 1..75: mol_type = other DNA
gatacatgtacctcagcgatgaaacttatcgtgtcatccttaaagcgaagattgcgattaataactgggacggac

SEQ ID NO: 518358 - DNA, 75 bp, synthetic construct
  source 1..75: mol_type = other DNA
atatgatcctgattctggatacatgtatctcagcgatgaaacttatcgtgtcattcttaaagcgaagattgcgat

SEQ ID NO: 518359 - DNA, 75 bp, synthetic construct
  source 1..75: mol_type = other DNA
gggtatgggcggggggcattgaaactccttcggtggaaaccccatcggaaggctcaaaattttttggttttgata

SEQ ID NO: 518360 - DNA, 75 bp, synthetic construct
  source 1..75: mol_type = other DNA
tgggcaacctgttcgaccgcctgtggcacggcttcgttgtcgatatgatcgacttctatgtcggcgactggcact

SEQ ID NO: 518361 - DNA, 75 bp, synthetic construct
  source 1..75: mol_type = other DNA
tgaaatgtcgttattacaatccggcaatccacacggcagcttttgccttaccccagtatctgcaagacgcactgg

SEQ ID NO: 518362 - DNA, 75 bp, synthetic construct
  source 1..75: mol_type = other DNA
tatcgatcctgcacacccaatgttcggatttgatattcaggatacggctattgccggatttgataatggttactg

SEQ ID NO: 518363 - DNA, 75 bp, synthetic construct
  source 1..75: mol_type = other DNA
gagcaacttgatatcgttgggttgtgggtagggcgaaacaggaatgtgaccacgccaatttccaatgtctatttc

SEQ ID NO: 518364 - DNA, 75 bp, synthetic construct
  source 1..75: mol_type = other DNA
gatcttgtgctttgcgatgtgcgaatggcagagatggacggcatcgccacgctaaaagagatcaaagcgttaaat

SEQ ID NO: 518365 - DNA, 75 bp, synthetic construct
  source 1..75: mol_type = other DNA
ggttatctcaccgttaaagctgctggtgtatgggctggcggcgttgaaacaccctcagtcgaaacaccgtccgaa

SEQ ID NO: 518366 - DNA, 75 bp, synthetic construct
  source 1..75: mol_type = other DNA
ggctatctcaccgttaaagcagctggcgtatgggccggtgatgtggaaacgccttcggtagaaacaccgtccgag

SEQ ID NO: 518367 - DNA, 75 bp, synthetic construct
  source 1..75: mol_type = other DNA
accttcggtggaaactccatcggaaggctctaaattttttggttttgatatggataacgaattcatcagtggttt

SEQ ID NO: 518368 - DNA, 75 bp, synthetic construct
  source 1..75: mol_type = other DNA
gaactggaaaacgcggtggaacgggcggtggtgctgctgaccggggaatatatttccgaacgcgagctgccgctg

SEQ ID NO: 518369 - DNA, 75 bp, synthetic construct
  source 1..75: mol_type = other DNA
gctgaaagagatcaaagcgttaaatccggcgattccggtactgattatgaccgcgtactccagcgtcgagacggc

SEQ ID NO: 518370 - DNA, 75 bp, synthetic construct
  source 1..75: mol_type = other DNA
tgctgcccattcgccttttggcggggtaagcattacagtagagttaccgctggaacgggatttacagagagaagt

SEQ ID NO: 518371 - DNA, 75 bp, synthetic construct
  source 1..75: mol_type = other DNA
gtaacgtccatatctcagttgagtgtgaaagcctgcataacgcactgaatgacctgattagcatttattttgcca

SEQ ID NO: 518372 - DNA, 75 bp, synthetic construct
  source 1..75: mol_type = other DNA
ttaatagcggaacgccatgctaatggttcatggtggaccgttgagggttaccacgaagctaatgaccctcgtatg

SEQ ID NO: 518373 - DNA, 75 bp, synthetic construct
  source 1..75: mol_type = other DNA
ccggcaaactgtttctggcgatcttcgccacctgcattgtgttattgataacaatgcactgggcagtacggatca

SEQ ID NO: 518374 - DNA, 75 bp, synthetic construct
  source 1..75: mol_type = other DNA
gcgagcagtatgcgcagcatggtaactggcgcttcctgcgcaacaatgatcgctttgtctttcagatcctgcgtt

SEQ ID NO: 518375 - DNA, 75 bp, synthetic construct
  source 1..75: mol_type = other DNA
cagctacaaaaattgtttgaacgtttttatcgcaccgaaggttcccgcaaccgcgccagcggcggttccgggctg

SEQ ID NO: 518376 - DNA, 75 bp, synthetic construct
  source 1..75: mol_type = other DNA
gaacgtacgccggatcaggttaaagagattgctcgtggtggttatgtgctgaaagacagcggcggcaagccagat

SEQ ID NO: 518377 - DNA, 75 bp, synthetic construct
  source 1..75: mol_type = other DNA
aagagctgaagaacttccgtcagttgcattcgaaaaccccaggacaccctgagcttggctatacgccaggcgttg

SEQ ID NO: 518378 - DNA, 75 bp, synthetic construct
  source 1..75: mol_type = other DNA
tggcaccatccgccatttgagatccctaaagagatttatcacgcctgggatgcccgcgaaaaaggcgaaaaagcg

SEQ ID NO: 518379 - DNA, 75 bp, synthetic construct
  source 1..75: mol_type = other DNA
atggatgaagaagaaccggtacctcaaaaatttgacagccttaatgatcttctcaatgaactgaaccgggctggc

SEQ ID NO: 518380 - DNA, 75 bp, synthetic construct
  source 1..75: mol_type = other DNA
attagcaggagaaggtcgcaatgtacgcgtagtttccctgccctcgaccgatattttcgacgcccaggatgagga

SEQ ID NO: 518381 - DNA, 75 bp, synthetic construct
  source 1..75: mol_type = other DNA
ggatgagcggcggtttgccgaaggactgggagaaaacgactcagaaatatatcaatgagttgcaggcgaatccgg

SEQ ID NO: 518382 - DNA, 75 bp, synthetic construct
  source 1..75: mol_type = other DNA
agacagtattaccgtatttggcgatcgcgaccgtttaatgcagttgttcaataacttactggaaaacagcctgcg

SEQ ID NO: 518383 - DNA, 75 bp, synthetic construct
  source 1..75: mol_type = other DNA
cgaaaccaccgaaaccaccgaaaccaccgaaaaacagcatcccgccgacaaggaaaaagaacaatgaccatccac

SEQ ID NO: 518384 - DNA, 75 bp, synthetic construct
  source 1..75: mol_type = other DNA
cagaactgggcgcactgattaaccgtaataacaggctgatgcacctgtccttcagttccccttttcgcgaaataa

SEQ ID NO: 518385 - DNA, 75 bp, synthetic construct
  source 1..75: mol_type = other DNA
agcggtaacagccggatatattttactgaaaccggacagcgattcccctctcagggtacctgtcacagaatccgt

SEQ ID NO: 518386 - DNA, 75 bp, synthetic construct
  source 1..75: mol_type = other DNA
cgtcgccttctgggtgtaaatgatgatgttgaggcaatgacccgcgacatgattctgcaatggctggcggggtga

SEQ ID NO: 518387 - DNA, 75 bp, synthetic construct
  source 1..75: mol_type = other DNA
tgcgtgatcgcgtcagccgcaaaggaccggaggtccgttacgcagagcgtcgccttctgggcgtaaatgatgatg

SEQ ID NO: 518388 - DNA, 75 bp, synthetic construct
  source 1..75: mol_type = other DNA
accggaggtccgttacgcagagcgtaagctattgggtatccacgataaagaatattatcaaatcaaggataccct

SEQ ID NO: 518389 - DNA, 75 bp, synthetic construct
  source 1..75: mol_type = other DNA
tgcgtgatcgcgtaaataaaaaaggtttaatcgcgaaatatccgcaacgtactttattgggcttatcttataaaa

SEQ ID NO: 518390 - DNA, 75 bp, synthetic construct
  source 1..75: mol_type = other DNA
agattgctgggacaaacccaagagagtaaccagataattctaaacactctcttgaggtggatgacaaaagataac

SEQ ID NO: 518391 - DNA, 75 bp, synthetic construct
  source 1..75: mol_type = other DNA
ctggcgcttcctgcgtaataacgatcgctttgtatttcagatcctacgttcactggagcatgataacaacgaaga

SEQ ID NO: 518392 - DNA, 75 bp, synthetic construct
  source 1..75: mol_type = other DNA
accggaagtacgatacgcagagcgtcgtttacttggaatgaatgaatatgcagaaaatatagtaaaagatatatt

SEQ ID NO: 518393 - DNA, 75 bp, synthetic construct
  source 1..75: mol_type = other DNA
ttgccttgaatattcagggcaatagcgattattccattctgagacagctggctacaatagcatgtcaaaatggtt

SEQ ID NO: 518394 - DNA, 75 bp, synthetic construct
  source 1..75: mol_type = other DNA
agcggctttgagccgcgccgggtagcagcccgcagtaagaaggggcgcatcaaacgccagatgttcgccaaattg

SEQ ID NO: 518395 - DNA, 75 bp, synthetic construct
  source 1..75: mol_type = other DNA
ccctcaaacgtttctgcccgcgtagcggtagaagcaggtattgccgattactggtacaaatatgtcggtctgaaa

SEQ ID NO: 518396 - DNA, 75 bp, synthetic construct
  source 1..75: mol_type = other DNA
atttttttgcctattatctcgcagcaaggaaaagatggtggaggctttctcttgctatttttttatactctgtta

SEQ ID NO: 518397 - DNA, 75 bp, synthetic construct
  source 1..75: mol_type = other DNA
agggtaatctgcggctgttttttgcaatggcaatcattgtctgtggttacggctatgtaattatttgtgttttta

SEQ ID NO: 518398 - DNA, 75 bp, synthetic construct
  source 1..75: mol_type = other DNA
actgtcgatattgatactgttgatgatttccagttggctgcagaaatttactctattaggagaaaatatgagaaa

SEQ ID NO: 518399 - DNA, 75 bp, synthetic construct
  source 1..75: mol_type = other DNA
tgctttattgatagtgaacagagagataatacattactaataattggtaaagtcatcgattataaggaggaaatc

SEQ ID NO: 518400 - DNA, 75 bp, synthetic construct
  source 1..75: mol_type = other DNA
attactagttcatcgctttctgaaacgattgaagggctaagcctgggatatcgcaaaggtagcgcaaggaaagaa

SEQ ID NO: 518401 - DNA, 75 bp, synthetic construct
  source 1..75: mol_type = other DNA
tgctctgctataatatgataacccttgttatatatagtttcctgagttcttatgggttgcctggagcatgtctat

SEQ ID NO: 518402 - DNA, 75 bp, synthetic construct
  source 1..75: mol_type = other DNA
accagcgtcaaaggaatgaatgaacctgctgatagtgccatgaatcttgttaaaaccagtaatggctggaaagct

SEQ ID NO: 518403 - DNA, 75 bp, synthetic construct
  source 1..75: mol_type = other DNA
ctgatggtctttgagcagggctatgactcgaacgtattagggataacagacgaaggaataaaagctaaagtctgg

SEQ ID NO: 518404 - DNA, 75 bp, synthetic construct
  source 1..75: mol_type = other DNA
gcgcaactctggcactggcgggatgtggtgagaaaggtgagtttgagaaagcgattaatgccaagattgggcaag

SEQ ID NO: 518405 - DNA, 75 bp, synthetic construct
  source 1..75: mol_type = other DNA
aatgagtttgattctatggttgctgtcaaaaaatataaaggacatttaatcgatgcatcagggaacccattaaat

SEQ ID NO: 518406 - DNA, 75 bp, synthetic construct
  source 1..75: mol_type = other DNA
aaacataattccattttataatggaatgtctttgtttgatataaaaatagaacagctccttaattctggtattaa

SEQ ID NO: 518407 - DNA, 75 bp, synthetic construct
  source 1..75: mol_type = other DNA
gaactggattgataaaaaggcattcggcagcgttaaaggaatgaatgaacctgctgatggtgcaatgaatttagt

SEQ ID NO: 518408 - DNA, 75 bp, synthetic construct
  source 1..75: mol_type = other DNA
ttaaggatcttcccgagcgtgagaagcacttaaaagtcattattagggcgctgtcgttcgatctctcttatatgt

SEQ ID NO: 518409 - DNA, 75 bp, synthetic construct
  source 1..75: mol_type = other DNA
gtgcgaaataagcaggtggtgttactcattgccggaatatccggcatcgcgaccggaatcatcgtcagcctgaat

SEQ ID NO: 518410 - DNA, 75 bp, synthetic construct
  source 1..75: mol_type = other DNA
gggcaattgtgggatggatttcggtgtctgaaatatattacagccgcaggactggtctgaatgaattatcagaaa

SEQ ID NO: 518411 - DNA, 75 bp, synthetic construct
  source 1..75: mol_type = other DNA
tcaacgcatttttgttgttgtcgggggggggggggggaagagtaaaggcatttgcctcgctcagggattcagcca

SEQ ID NO: 518412 - DNA, 75 bp, synthetic construct
  source 1..75: mol_type = other DNA
acgactactataagcaacaccactatgaaaccattgtgatgggcgcgagtttccgtcgcaccgaacaaatcctcg

SEQ ID NO: 518413 - DNA, 75 bp, synthetic construct
  source 1..75: mol_type = other DNA
tctttctggttttcctgtttattggtgtaagtcctgacacaaacgccgccactgtaaatcagacccttaaatgcg

SEQ ID NO: 518414 - DNA, 75 bp, synthetic construct
  source 1..75: mol_type = other DNA
gtctgaaatatattacagccgcatgacctgtctgcatgaatcatcagaaatatcagaggaaacttatgatgaaag

SEQ ID NO: 518415 - DNA, 75 bp, synthetic construct
  source 1..75: mol_type = other DNA
tgctttattgatagtgagcagagagagaatacattattaatgattggtaaagttatcgactataaggaggaaatc

SEQ ID NO: 518416 - DNA, 75 bp, synthetic construct
  source 1..75: mol_type = other DNA
aaatttacaaaatgaattagcgatgattaccagttcgtcgctttctgaaacgattgaagggctaagcctagggta

SEQ ID NO: 518417 - DNA, 75 bp, synthetic construct
  source 1..75: mol_type = other DNA
attttaaatgaagtgttatcgattattgaacatgtctggctaacagaagactggttgctggagagtccttctcgg

SEQ ID NO: 518418 - DNA, 75 bp, synthetic construct
  source 1..75: mol_type = other DNA
tcatgtccagcggcatggtgctttatctgaggtcatgcatattgttgaatccaaatgcgatattcccggcggcat

SEQ ID NO: 518419 - DNA, 75 bp, synthetic construct
  source 1..75: mol_type = other DNA
ggaatagttatgaatctttatggctataatgatatcaacaatgtagtttctgtattttggcataaaaattcattt

SEQ ID NO: 518420 - DNA, 75 bp, synthetic construct
  source 1..75: mol_type = other DNA
ttattgaacatgtatggttaacagaagactggctcctggaaagcccttctcgggtatcgattgtcgaagataaac

SEQ ID NO: 518421 - DNA, 75 bp, synthetic construct
  source 1..75: mol_type = other DNA
gtccaatgacgggatatgaaaatttcaaccgcgaggcatttcacaaggcggaagaagcactgaaacgggaagggc

SEQ ID NO: 518422 - DNA, 75 bp, synthetic construct
  source 1..75: mol_type = other DNA
gtgagggtgagaatttatatcgccggtccaatgacgggatatgaaaatttcaaccgcgaggcgtttcacagggcg

SEQ ID NO: 518423 - DNA, 75 bp, synthetic construct
  source 1..75: mol_type = other DNA
ggttcgctttccgttgcccgtcaactggatggaacggccattgggatgtgtgcattacccaacggcaaacgctgt

SEQ ID NO: 518424 - DNA, 75 bp, synthetic construct
  source 1..75: mol_type = other DNA
gattcagtgtgatgatgatgaggggctcatgatcgatgggtgcgtagctagattaagaaagtacaaaccagaaga

SEQ ID NO: 518425 - DNA, 75 bp, synthetic construct
  source 1..75: mol_type = other DNA
ttcttccctacacaagcaaaacacgtcaggcttgttcagatagtgatgcattaattattgaaggttgtcttgctc

SEQ ID NO: 518426 - DNA, 75 bp, synthetic construct
  source 1..75: mol_type = other DNA
catccattactacatcgccaattgatgattcgaaaaatgtaattttatcgttagaaagtgatgattatatcagaa

SEQ ID NO: 518427 - DNA, 75 bp, synthetic construct
  source 1..75: mol_type = other DNA
gcgggcgctaaggcagagctggcactggcggagaaactggggcatgcggtgatttatcaggaggtggctcaatga

SEQ ID NO: 518428 - DNA, 75 bp, synthetic construct
  source 1..75: mol_type = other DNA
ccaggcagatgcgctactcacgagcatcagagacgtaatgaagaatagtctttcagatgttcattttcctcttga

SEQ ID NO: 518429 - DNA, 75 bp, synthetic construct
  source 1..75: mol_type = other DNA
cacagtctttgatatctaaaaatgcagtcattcctgtggtctactggctttacaaaaagcaaaccagtggacatc

SEQ ID NO: 518430 - DNA, 75 bp, synthetic construct
  source 1..75: mol_type = other DNA
gggatgtgtgcattacccaacggcaaacgctgtagcgaacagtcacttgccgccgggagctgtggcagctattaa

SEQ ID NO: 518431 - DNA, 75 bp, synthetic construct
  source 1..75: mol_type = other DNA
atgcgagcagcgttttgggtagggtgtgccgctttattgttgtcggcgtgtagtagtgaacctgttcagcaggcg

SEQ ID NO: 518432 - DNA, 75 bp, synthetic construct
  source 1..75: mol_type = other DNA
atgaaggtttatgtcgcagggccgatgactggccatgaaaacttcaaccgtgaggcgtttcacaaagcggaagag

SEQ ID NO: 518433 - DNA, 75 bp, synthetic construct
  source 1..75: mol_type = other DNA
gaaatcccacttggcattctgaccgcttttgttggtgcaccgtttttcctgtttttgttgttacgcggaggtcgc

SEQ ID NO: 518434 - DNA, 75 bp, synthetic construct
  source 1..75: mol_type = other DNA
gacccgttgcattcatcccccatcgttagcgccccggcgaagctttcagtgctggacgccaacggcagtctgttg

SEQ ID NO: 518435 - DNA, 75 bp, synthetic construct
  source 1..75: mol_type = other DNA
tgcaggcgctgagatgcgccagacgctgacgctgcacaaaggggcgaattatatttcgctgacgctgcacaaagg

SEQ ID NO: 518436 - DNA, 75 bp, synthetic construct
  source 1..75: mol_type = other DNA
cagtcagcaggataacgaaccggtggcgctggtgactaaatttgcaggcgctgagatgcgccagacgctgacgct

SEQ ID NO: 518437 - DNA, 75 bp, synthetic construct
  source 1..75: mol_type = other DNA
tcgttctgcctcctgctcgttatgtgcgttcctatgcacctgcacagcaaagtgttgcggcagggagtgaatgga

SEQ ID NO: 518438 - DNA, 75 bp, synthetic construct
  source 1..75: mol_type = other DNA
gccgggggaacattctttttgcttgctgacagcagttttagcagcagtgaagaggcgaaagtgcgactggaagcg

SEQ ID NO: 518439 - DNA, 75 bp, synthetic construct
  source 1..75: mol_type = other DNA
cttctacgaaagtgaaatctacaacacccgcttgtatatctttaccgatcgcccgctatatcgcgcaggcgatcg

SEQ ID NO: 518440 - DNA, 75 bp, synthetic construct
  source 1..75: mol_type = other DNA
gttattggtatctcattacgcactattgccaaaaggagaaggtgctctgatggcactattaggaaggagttgcaa

SEQ ID NO: 518441 - DNA, 75 bp, synthetic construct
  source 1..75: mol_type = other DNA
cgctaataaaaacgctggccgatccttacacccagttaccgtcaattaccttctggttgctggggggctgtccac

SEQ ID NO: 518442 - DNA, 75 bp, synthetic construct
  source 1..75: mol_type = other DNA
ggaacgttgtgcggagcggggatatcgctaattaaaacgctggccgatccttacacccagttaccgtcaattacc

SEQ ID NO: 518443 - DNA, 75 bp, synthetic construct
  source 1..75: mol_type = other DNA
gtgtggaccgctggcaaaaaacggggtgaagctaaacctggttcggaagttctgtggactgacggtcttggcgtg

SEQ ID NO: 518444 - DNA, 75 bp, synthetic construct
  source 1..75: mol_type = other DNA
ccacatttcgagattggtttagctctcgacaaaaaagagttcaaaacaggcgaagcggttagcggcaaactgcaa

SEQ ID NO: 518445 - DNA, 75 bp, synthetic construct
  source 1..75: mol_type = other DNA
tcggaaaaaaatctctacatgaagtggagtatgccaacggtgtatcgcctgggcgacaaaccggcggcagggctg

SEQ ID NO: 518446 - DNA, 75 bp, synthetic construct
  source 1..75: mol_type = other DNA
gcaaagactactgagtcgggtgtttcttacaacaaaaatagattcatcaccatccacaatggatacggatgaaga

SEQ ID NO: 518447 - DNA, 75 bp, synthetic construct
  source 1..75: mol_type = other DNA
gtgatttttgactgggatgagtacagtctcgatttatgtagcgatatcaatcagcttaatgaatatctcccgctt

SEQ ID NO: 518448 - DNA, 75 bp, synthetic construct
  source 1..75: mol_type = other DNA
tacgtgatcgcgtcagccgcaaaggaccggaggtccgttacgcagagcgtcgcctgctgggtgtaaatgatgatg

SEQ ID NO: 518449 - DNA, 75 bp, synthetic construct
  source 1..75: mol_type = other DNA
caggatgcagcgcaaccctgacggcagcagctatgaaccgcgacgggtaacagcacgaagtaaaaaagggcgcat

SEQ ID NO: 518450 - DNA, 75 bp, synthetic construct
  source 1..75: mol_type = other DNA
ctatcagggcaaaagtggtatgagtggcgatcgggtggcaggaaaagttttcttcgaaacgcaatcgacccacaa

SEQ ID NO: 518451 - DNA, 75 bp, synthetic construct
  source 1..75: mol_type = other DNA
tgtttctttttagtattggcatcgataaaaccaaggcaatgggattattgcgtgggttgacggaattcaaacgct

SEQ ID NO: 518452 - DNA, 75 bp, synthetic construct
  source 1..75: mol_type = other DNA
tgccgtacacccattttcatccaatctaccagggtaaaagtggtatgagcggcgagcgtgttgcgggaaaagttt

SEQ ID NO: 518453 - DNA, 75 bp, synthetic construct
  source 1..75: mol_type = other DNA
ccgccagcgctgattctgccagcgtacagtttgaaggtaaggtgcagcgcattgcacgcgttcaccattacggct

SEQ ID NO: 518454 - DNA, 75 bp, synthetic construct
  source 1..75: mol_type = other DNA
tctggaaccagccgcaagaagccgcatgatgcggcagctggcgcaggaactgcgtcggacacagcagcagaatat

SEQ ID NO: 518455 - DNA, 75 bp, synthetic construct
  source 1..75: mol_type = other DNA
aaagctgcgcaccaccaaatacctgaaaaccgccgccagcgccgactctgccagcgtgcagtttgaaggtaaggt

SEQ ID NO: 518456 - DNA, 75 bp, synthetic construct
  source 1..75: mol_type = other DNA
gccagaggtacgttatgcggagcggctgttactaggttttacttcatctgacaaagatgaaattgcatctgtcgt

SEQ ID NO: 518457 - DNA, 75 bp, synthetic construct
  source 1..75: mol_type = other DNA
agcagttatgaaccgcgcagggtaacagcacgcagcaagaaggggcgcatcaaacgtcagatgtttgcaaagctg

SEQ ID NO: 518458 - DNA, 75 bp, synthetic construct
  source 1..75: mol_type = other DNA
acctgaggtccgttatgcagagcgtcgtttgttaggggggaatgatgaagtagaaactcgaactaggaatatcct

SEQ ID NO: 518459 - DNA, 75 bp, synthetic construct
  source 1..75: mol_type = other DNA
atgcggtgattaccaactccacctatgatggcttgctctacaacaccgactggatcaaacagacgctggatgtcc

SEQ ID NO: 518460 - DNA, 75 bp, synthetic construct
  source 1..75: mol_type = other DNA
atgcgtgatgatcgttttaatgccctgaaacaggaattttccggcgctcctaatgatgcggctgatgcgctttcg

SEQ ID NO: 518461 - DNA, 75 bp, synthetic construct
  source 1..75: mol_type = other DNA
acctgcgccggagcaaaacaataaaatcgaaatcaatattgtcggtgcgacagatccgcagtcaatacaacaatc

SEQ ID NO: 518462 - DNA, 75 bp, synthetic construct
  source 1..75: mol_type = other DNA
agtttatggattcgggaggtaaatattcaccgaacgctggattgactgctgataatattgcgaaggcaaaagccg

SEQ ID NO: 518463 - DNA, 75 bp, synthetic construct
  source 1..75: mol_type = other DNA
tatccgccgcggagaacgtgaggcggcagatgcgctggggcttacactctatgagctgatgcttcgcgctggcga

SEQ ID NO: 518464 - DNA, 75 bp, synthetic construct
  source 1..75: mol_type = other DNA
aggatgacgacagaattatctacacctatgccgggcgtcaggttaatgagatccgccacctgatgatgttggttc

SEQ ID NO: 518465 - DNA, 75 bp, synthetic construct
  source 1..75: mol_type = other DNA
atgcgtgatgatcgttttaattccctgaaacgggaatttgatggcgcaccggaagatacatcgggcgcattgttg

SEQ ID NO: 518466 - DNA, 75 bp, synthetic construct
  source 1..75: mol_type = other DNA
atgaagtccatgattttacctccgccttaattaactgttttctttctgaagaagaaattgtctggtggcaatcag

SEQ ID NO: 518467 - DNA, 75 bp, synthetic construct
  source 1..75: mol_type = other DNA
tggagcacctcaaaaacaccatcatacactaaatcagtaagttggcagcatcacctgaaacgtttacataccctt

SEQ ID NO: 518468 - DNA, 75 bp, synthetic construct
  source 1..75: mol_type = other DNA
tgtcctgtggatgccctttaacacttcagcggggcaatcacggacaaccaccgtggtttgaacatgaccagatga

SEQ ID NO: 518469 - DNA, 75 bp, synthetic construct
  source 1..75: mol_type = other DNA
gcaagcggcgagcctcgctgaccagctcatggggggcgaggctaataagatcatgacgtatatgaaggcgacggg

SEQ ID NO: 518470 - DNA, 75 bp, synthetic construct
  source 1..75: mol_type = other DNA
cagaaggcttctccgtcgttcgtgaatattgcggacacggtattggtcgcggcttccacgaagaaccgcaggtgc

SEQ ID NO: 518471 - DNA, 75 bp, synthetic construct
  source 1..75: mol_type = other DNA
aatatttgtagtaattatctatattatagtcacccctaaaaattgccttgcttcagtaaaaatattaaccaataa

SEQ ID NO: 518472 - DNA, 75 bp, synthetic construct
  source 1..75: mol_type = other DNA
tgcaggcccgtattgatgcatcccggggagagaattccgccctgacaactatccacaaacttaccgtaactcccg

SEQ ID NO: 518473 - DNA, 75 bp, synthetic construct
  source 1..75: mol_type = other DNA
ttggcgatgcgctcacctattggcttgagtcgtacgcaaaggaaaagcgcacagattacgaatcactgaaaagcc

SEQ ID NO: 518474 - DNA, 75 bp, synthetic construct
  source 1..75: mol_type = other DNA
tcccgatctgagtctgaaagcagccagggaaaaagccgcccagtgtcgcgcatggctggctgaggggaaaaatcc

SEQ ID NO: 518475 - DNA, 75 bp, synthetic construct
  source 1..75: mol_type = other DNA
aacgtggtgattgaggatttcagcggagaccagaatctgttgatggccccggttttattgtggctgcgggataac

SEQ ID NO: 518476 - DNA, 75 bp, synthetic construct
  source 1..75: mol_type = other DNA
gcgccgcaggccgctggcaaaatccatactgattttgaaaaaggctttatccgtgcacaaaccatctcgttcgaa

SEQ ID NO: 518477 - DNA, 75 bp, synthetic construct
  source 1..75: mol_type = other DNA
gatttcatcacttacaaaggtgaacaaggcgcgaaagaagcaggcaaaatgcgtgcagaaggtaaagattacatc

SEQ ID NO: 518478 - DNA, 75 bp, synthetic construct
  source 1..75: mol_type = other DNA
tggatggagcggttagggatactggcgggaacacatgaaaacgtaaccacgctaccagtagccagaagaaaataa

SEQ ID NO: 518479 - DNA, 75 bp, synthetic construct
  source 1..75: mol_type = other DNA
cggagccaggacggtagaactgaggctatcggagatcggggagtgggattttacggaaatgctatggaccgttcc

SEQ ID NO: 518480 - DNA, 75 bp, synthetic construct
  source 1..75: mol_type = other DNA
gatgctgaacgatttaggtgtcgatccgcatatcgtggagcacatcacagcgcatcagatgcccggtcagcaaaa

SEQ ID NO: 518481 - DNA, 75 bp, synthetic construct
  source 1..75: mol_type = other DNA
cgtgatgcgctggatatgtggacggagcggttagggatactggcgggagcacatgaaaacgtaaccacgctacca

SEQ ID NO: 518482 - DNA, 75 bp, synthetic construct
  source 1..75: mol_type = other DNA
gggaaaaaaccggatataagcgaacgtgtcttaagcaccaaagaactgggcgagttattgcaggcgctggataaa

SEQ ID NO: 518483 - DNA, 75 bp, synthetic construct
  source 1..75: mol_type = other DNA
gcctgaataatcacgtcatacagcatattggcaatatgccactggataaatgcgagttacgtcactggctggcct

SEQ ID NO: 518484 - DNA, 75 bp, synthetic construct
  source 1..75: mol_type = other DNA
cactgacggcagtgtgtcgcgtgttgaagctgtggcggaacctgatgaacctgaagaaatgtggacggtgaaacg

SEQ ID NO: 518485 - DNA, 75 bp, synthetic construct
  source 1..75: mol_type = other DNA
gtctgtgatatcagccttaacctgcaactgacggagcgtgtgctggtcagcactgacggcggtgtgtcgagcgtt

SEQ ID NO: 518486 - DNA, 75 bp, synthetic construct
  source 1..75: mol_type = other DNA
gtctgtgatatcagccttaacctgcagctgacagagcgtgtggtggtcaacactgacggcagtgtgtcgagcgtt

SEQ ID NO: 518487 - DNA, 75 bp, synthetic construct
  source 1..75: mol_type = other DNA
ggttttgctgtggctgcgtgataaccaacctgatgccatcaataatccggcattacgggaaaagctattcacctt

SEQ ID NO: 518488 - DNA, 75 bp, synthetic construct
  source 1..75: mol_type = other DNA
tcgcatcatcgacaaaaaagggccgctcaataacccggctgaccgcgaccactgcattcagtacatggtggcgat

SEQ ID NO: 518489 - DNA, 75 bp, synthetic construct
  source 1..75: mol_type = other DNA
atgtcagctcaaatcaacaacatccgcccggaattcgaccgtgaaatcgttgatatcgtcgattacgtcatgaat

SEQ ID NO: 518490 - DNA, 75 bp, synthetic construct
  source 1..75: mol_type = other DNA
ggttttgctgtggctgcgtgataaccagcccgatgccatcaataacccagcgttacgggaaaagctattcacctt

SEQ ID NO: 518491 - DNA, 75 bp, synthetic construct
  source 1..75: mol_type = other DNA
acgccctcaataaagcagtgccttatgtccgcaataacccggataagctgcatctgtttgtggataacggttcgc

SEQ ID NO: 518492 - DNA, 75 bp, synthetic construct
  source 1..75: mol_type = other DNA
gcatggaaagacgctgttgactgggttctcgaagaggcttgtcaggctgtaaacattcgcatcaaaggagagtga

SEQ ID NO: 518493 - DNA, 75 bp, synthetic construct
  source 1..75: mol_type = other DNA
gccagtgccggtaactccggatggttggataagctgtagtgagcgaatgccggatagcaaaacagccgttcttgt

SEQ ID NO: 518494 - DNA, 75 bp, synthetic construct
  source 1..75: mol_type = other DNA
gcgaccagaatctgctgatggccccggttttgctgtggctgcgggataaccagcccgataccatcaataacccgg

SEQ ID NO: 518495 - DNA, 75 bp, synthetic construct
  source 1..75: mol_type = other DNA
aactgacggagcgcgtactggtcagcactaacggtagcgtgtcaagcgttgaagcagtgccggagccggacgaac

SEQ ID NO: 518496 - DNA, 75 bp, synthetic construct
  source 1..75: mol_type = other DNA
cactgacggcagagtgtcaagagttgaagcggtgccggagccggacgaacccgaagaaatgtggacggtgaaacg

SEQ ID NO: 518497 - DNA, 75 bp, synthetic construct
  source 1..75: mol_type = other DNA
gcattgaagagcagtcatgggcacgacactaccggcaaattacccgtgaagaaaatgagactgaactggcggacg

SEQ ID NO: 518498 - DNA, 75 bp, synthetic construct
  source 1..75: mol_type = other DNA
gaaactgaagcagagctggcggacgacctggaaaaaggactgccccagcgcctgtttgaatcgctctgcatagat

SEQ ID NO: 518499 - DNA, 75 bp, synthetic construct
  source 1..75: mol_type = other DNA
tgagttaggtgggttaaatgaggcctattttttatattatgaagagcttgatttaattaccagagcagccaagaa

SEQ ID NO: 518500 - DNA, 75 bp, synthetic construct
  source 1..75: mol_type = other DNA
gcacaggtcagtcgtgaagaggcgcgccagtggcgtgtgcagcacccgcttgctgtggatgtgccggagagataa

SEQ ID NO: 518501 - DNA, 75 bp, synthetic construct
  source 1..75: mol_type = other DNA
aatgaagaactcgcagcatatcttgggattagtcatgtatcggtagccaaaagaatccaggcggcccgtattgac

SEQ ID NO: 518502 - DNA, 75 bp, synthetic construct
  source 1..75: mol_type = other DNA
ttgaattcaataggataagtgcgggttttattaaggagctagaggagttcataaaagaaaaattaaaagtatcag

SEQ ID NO: 518503 - DNA, 75 bp, synthetic construct
  source 1..75: mol_type = other DNA
gtggtagcatagggtcttcaagcaaatcatttgacgcagtttcaagtatttcagataagtatttattgcagagtc

SEQ ID NO: 518504 - DNA, 75 bp, synthetic construct
  source 1..75: mol_type = other DNA
caggaagcgttaaagcctgcaacggttggcgatgcgctcacctactggcttgagtcgtacgcaaaggaaaagcgc

SEQ ID NO: 518505 - DNA, 75 bp, synthetic construct
  source 1..75: mol_type = other DNA
attttcctttaattcgactgcagcaacgtcatattttgaagcccgcaatgatgcgatgggaggaacgggggttgc

SEQ ID NO: 518506 - DNA, 75 bp, synthetic construct
  source 1..75: mol_type = other DNA
atatttggatggaaagactcgaacttctgcatagcgatgatgaaaaaatcgttatcatgagtcagcgaaataccg

SEQ ID NO: 518507 - DNA, 75 bp, synthetic construct
  source 1..75: mol_type = other DNA
atggtgaattactgtcttatatcattggcgctgacaatgaacgcttattacattcaggatcgtcttgaggctcag

SEQ ID NO: 518508 - DNA, 75 bp, synthetic construct
  source 1..75: mol_type = other DNA
ctggatgcgaaacgcaatgcgctggatatgtggacggagcggttagggatactggcgggaacacatgaaaacgta

SEQ ID NO: 518509 - DNA, 75 bp, synthetic construct
  source 1..75: mol_type = other DNA
atataagcgagcgtgtcttaagcaacaaagaacttggcgaattattgcaggcactggacaaaaaaatattctccc

SEQ ID NO: 518510 - DNA, 75 bp, synthetic construct
  source 1..75: mol_type = other DNA
tgaaaaaagataccacggtggcgcaatatggacgaaatgcgcataagcggcttaagcaggaacactggacgctgc

SEQ ID NO: 518511 - DNA, 75 bp, synthetic construct
  source 1..75: mol_type = other DNA
atgccagccaatatggaactcaccgacggtggtcagcgcatcaagttaaaaatggataactggatagtgaaataa

SEQ ID NO: 518512 - DNA, 75 bp, synthetic construct
  source 1..75: mol_type = other DNA
atgcccctgcccgattttcgctttatccgcctgctaccgctggctgctcttgtgctcactgcctgttccgttacc

SEQ ID NO: 518513 - DNA, 75 bp, synthetic construct
  source 1..75: mol_type = other DNA
cctggcttgctgaggggaaaaatccacgttatgagcttaatcacgccgtacaggaagcgttatcacctgtgacag

SEQ ID NO: 518514 - DNA, 75 bp, synthetic construct
  source 1..75: mol_type = other DNA
aaaacgaaggtagcaatattcaggccaataccggaagcgatcttgccgttcgtaacgaagctggtggagcagaac

SEQ ID NO: 518515 - DNA, 75 bp, synthetic construct
  source 1..75: mol_type = other DNA
agagtacggaagaacggcacacagacgcattaatcaagccccctggacgttgcacgacatccggcacacgtttac

SEQ ID NO: 518516 - DNA, 75 bp, synthetic construct
  source 1..75: mol_type = other DNA
cggtcgcgctcacccgctacgccgcgcagatgctgtatgccccgctacgcaccgtggaacttttgccgggcgttc

SEQ ID NO: 518517 - DNA, 75 bp, synthetic construct
  source 1..75: mol_type = other DNA
tcgggcaggagcggatcgtctttgtcgatcgtaatgttcgggtgggctatcccgccgcgctggaaggcaagctgc

SEQ ID NO: 518518 - DNA, 75 bp, synthetic construct
  source 1..75: mol_type = other DNA
attcgcggtattcgcctgtatgtggacggtattcccgcaccatgcccgacgggcaagggcaaacatccaacatcg

SEQ ID NO: 518519 - DNA, 75 bp, synthetic construct
  source 1..75: mol_type = other DNA
attaccaaatttacagggggagttggttttgtaattccagttcagccctctgaagacgttgatcacccctcgctc

SEQ ID NO: 518520 - DNA, 75 bp, synthetic construct
  source 1..75: mol_type = other DNA
tgaagtgatgaaacagaaacgaaaagcactctttgagtacgccaaaaaaatgctgtcgccagatgattatgtgat

SEQ ID NO: 518521 - DNA, 75 bp, synthetic construct
  source 1..75: mol_type = other DNA
tgctggttactctgcccctgcacgccgtcgagctggtgaagtgggaacgcatcccgctaccggtggcgctgaaca

SEQ ID NO: 518522 - DNA, 75 bp, synthetic construct
  source 1..75: mol_type = other DNA
tcagggtatccacctgcgtggctatgcacagaaagatccgaagcaggaatacaaacgtgaatcgttctccatgtt

SEQ ID NO: 518523 - DNA, 75 bp, synthetic construct
  source 1..75: mol_type = other DNA
accataattgatgactggaaaacaaaatacggcgcagcactggttgcagagatgggagatccacaaggcaattca

SEQ ID NO: 518524 - DNA, 75 bp, synthetic construct
  source 1..75: mol_type = other DNA
cgactggtatgcgttttcactgccgaaaatgaaagccagtaaagaagttacaatggacgatcaattacgtatctg

SEQ ID NO: 518525 - DNA, 75 bp, synthetic construct
  source 1..75: mol_type = other DNA
acccggcgatgtcgattacaccgtctcaaccacacgttttacgacccatggctatcgattaatgaactgtcttat

SEQ ID NO: 518526 - DNA, 75 bp, synthetic construct
  source 1..75: mol_type = other DNA
tcagatttgatcctcgtgttgctgtcgctggtggatatgacactggttggcggtttgctggtgatggtgatgttt

SEQ ID NO: 518527 - DNA, 75 bp, synthetic construct
  source 1..75: mol_type = other DNA
aaaatccgcaccgctcagaaagctaacgcagccctggaaccgtgggtgctgttcaccagaatcaactcagcgaaa

SEQ ID NO: 518528 - DNA, 75 bp, synthetic construct
  source 1..75: mol_type = other DNA
gcctggcagcatcatcagagcaaaaaagaagcgcagcaatccactctctctatcgaatccccggtacaacgttag

SEQ ID NO: 518529 - DNA, 75 bp, synthetic construct
  source 1..75: mol_type = other DNA
aatacgaatccaacgccagttcgctgtctttagggcgcttcgaccagtatatgttgccgttctatcaggcatctt

SEQ ID NO: 518530 - DNA, 75 bp, synthetic construct
  source 1..75: mol_type = other DNA
gtgccccgggtgcaatcggcccttatgttcagggtgtggatttaggcagcatggtcttcacttccgggcaaattc

SEQ ID NO: 518531 - DNA, 75 bp, synthetic construct
  source 1..75: mol_type = other DNA
ttgcgctgttaggggtagtcctgctgggcatgatgttcgctgtatatcagcgtatggttaaggactatcacttaa

SEQ ID NO: 518532 - DNA, 75 bp, synthetic construct
  source 1..75: mol_type = other DNA
gtggaggctggctggtgttccttcgtgggtagataaaagtgcattcgctggcgtcaggggaatgactgaacctgc

SEQ ID NO: 518533 - DNA, 75 bp, synthetic construct
  source 1..75: mol_type = other DNA
aaagccacgatcaagggggtgaaaatggtggagtcagggtttggtcattctgtccgccttgtccctaagatgata

SEQ ID NO: 518534 - DNA, 75 bp, synthetic construct
  source 1..75: mol_type = other DNA
cactgatggcccgcgtcgcgaagaactgctgaccattgcggagatctcccgccataacgccgaacataagccgca

SEQ ID NO: 518535 - DNA, 75 bp, synthetic construct
  source 1..75: mol_type = other DNA
taacccgtgggtatggaaagtcggacagggaaatgaaggcctggatgttaaactgagccgcggtgttcgtgacgg

SEQ ID NO: 518536 - DNA, 75 bp, synthetic construct
  source 1..75: mol_type = other DNA
gattgaaggtgtttatggtgcccgggttgttgcggacagtggtgaattacatctgcggggagataaaacagaacg

SEQ ID NO: 518537 - DNA, 75 bp, synthetic construct
  source 1..75: mol_type = other DNA
aactcagggcagattccgggattactccagccgatgttcagtggtgaagggccagactggttgtcggaaatatca

SEQ ID NO: 518538 - DNA, 75 bp, synthetic construct
  source 1..75: mol_type = other DNA
gctgtcgaatacatacggtgataagtgggtagacgaatggcttcgtactaagggcctggaattaaatgattacga

SEQ ID NO: 518539 - DNA, 75 bp, synthetic construct
  source 1..75: mol_type = other DNA
gacggacagccggtgtatgtcggcgtgtatgacgatctgaatgcgaatggtctgcctagtgaaagcaattctatg

SEQ ID NO: 518540 - DNA, 75 bp, synthetic construct
  source 1..75: mol_type = other DNA
ttgctgtcagcctcctgccctccacagtgctggcctggaatacaccgggagaagattttagcggcgagcttaagc

SEQ ID NO: 518541 - DNA, 75 bp, synthetic construct
  source 1..75: mol_type = other DNA
accccgaactcgattacaacctgcagcacagctactacaacggcacggtaaaaaaccagctcgctgccgactatg

SEQ ID NO: 518542 - DNA, 75 bp, synthetic construct
  source 1..75: mol_type = other DNA
gcgcgatttaaaacgctgctcggtcgggatattgcgcgcctgccgctggcggtggtctggctgttcacctggcct

SEQ ID NO: 518543 - DNA, 75 bp, synthetic construct
  source 1..75: mol_type = other DNA
cgggcaggatcatgtctattatcatcatgctgccgggcgagagattatcctgcgcgactgggatgaaccggtcac

SEQ ID NO: 518544 - DNA, 75 bp, synthetic construct
  source 1..75: mol_type = other DNA
ggcggctggatgtggtgcatatgctgggggaggcgggtggggcgcgcaataatttgcagcacgttgccgggatca

SEQ ID NO: 518545 - DNA, 75 bp, synthetic construct
  source 1..75: mol_type = other DNA
gtcgcgcaatggcaacgcaaagaaggccatgggcaactgacagacgggattctggctttgcctgctatttcggca

SEQ ID NO: 518546 - DNA, 75 bp, synthetic construct
  source 1..75: mol_type = other DNA
gataattaccgcgcagggctttctcatcaacagcaattacgtatgtttaatcagctcgacagccacgatactgcg

SEQ ID NO: 518547 - DNA, 75 bp, synthetic construct
  source 1..75: mol_type = other DNA
cggcgttattcgcgctgtaccagcgaatgattgcgctgcgtaagaaaagtcaggcgctgcgtcgtggcggctgtc

SEQ ID NO: 518548 - DNA, 75 bp, synthetic construct
  source 1..75: mol_type = other DNA
ggatgatttatgcacccttgatcggtttgctgtgcagattgattttttaaaggcccacgaaactgttgctgtttt

SEQ ID NO: 518549 - DNA, 75 bp, synthetic construct
  source 1..75: mol_type = other DNA
aagtgatgctcgcactggcgatttttgcactggccgccatggcggtgttacagatagccagcggcgcgctgagta

SEQ ID NO: 518550 - DNA, 75 bp, synthetic construct
  source 1..75: mol_type = other DNA
tttcaggatccgcccacaggtgactgccggtgtctcatggcacaacgacatgttcaccaccgcactggatgttga

SEQ ID NO: 518551 - DNA, 75 bp, synthetic construct
  source 1..75: mol_type = other DNA
tatttctgcaaccatgaggattttacctcgtttattgcccgtctttttgttaaaacaaatatataaagttttaag

SEQ ID NO: 518552 - DNA, 75 bp, synthetic construct
  source 1..75: mol_type = other DNA
aagtgatgctcgcactggcgatttttgcgctggctgccacggcggtgttacagattgccagcggtgcgctgagta

SEQ ID NO: 518553 - DNA, 75 bp, synthetic construct
  source 1..75: mol_type = other DNA
atccgaaagtggttgcggcagtggaagcgcagttgaaaaaactgtcgcacacctgcttccaggtgctggcctacg

SEQ ID NO: 518554 - DNA, 75 bp, synthetic construct
  source 1..75: mol_type = other DNA
ctggattatcagtcggaaagtctggtgaatgaaatttatcgcggggaagacagtattgtccgccactggctgaaa

SEQ ID NO: 518555 - DNA, 75 bp, synthetic construct
  source 1..75: mol_type = other DNA
cgttaaactggttctcatctggggaaacaaggaacgcattaattattgaaactgaaaaaaaaaattaccgctact

SEQ ID NO: 518556 - DNA, 75 bp, synthetic construct
  source 1..75: mol_type = other DNA
gcaacccactgagcaaagaagaaggctatgcgttcctgattaaacgcaccggttccggtcgtgacaccaagtacg

SEQ ID NO: 518557 - DNA, 75 bp, synthetic construct
  source 1..75: mol_type = other DNA
aaaagtacgtaatagtacagatttcaaaccacttccgacggaaatccgctcgcttttcccaagtgaatttgaaga

SEQ ID NO: 518558 - DNA, 75 bp, synthetic construct
  source 1..75: mol_type = other DNA
ggctggcagtggtacaacgagaaacttaagccccatgatgaggaaaggaaagccgcaccagcggcaccaccgccg

SEQ ID NO: 518559 - DNA, 75 bp, synthetic construct
  source 1..75: mol_type = other DNA
tggaacaaccaacatgacctgattgcttatgtgaatcaggccgatgaaactcgccttcttgcgacagttcgcact

SEQ ID NO: 518560 - DNA, 75 bp, synthetic construct
  source 1..75: mol_type = other DNA
ttgatataaattgttcagtgtttattagcaaaattaaaaataatttagagctaagtcctgatgaatcccctaatg

SEQ ID NO: 518561 - DNA, 75 bp, synthetic construct
  source 1..75: mol_type = other DNA
cgtcaccgtttcttaatgtcgtgcaatggcaacgcaaagaaggccatgggcaactgacagacgggattctggctt

SEQ ID NO: 518562 - DNA, 75 bp, synthetic construct
  source 1..75: mol_type = other DNA
cggacaagagatcatattgcgtgactgggatgaaccggtcacggcgcaggcgggcggatcaacgttctatggcgg

SEQ ID NO: 518563 - DNA, 75 bp, synthetic construct
  source 1..75: mol_type = other DNA
gcattatgctgcgcacggaaaacgataacgaagaaacgtcagtaccgatgtacaaactgcgcagtcagccacagc

SEQ ID NO: 518564 - DNA, 75 bp, synthetic construct
  source 1..75: mol_type = other DNA
tgctcccgaaactcatctccggtgagctatccctggaagatcttccggatctcaacaccgatacagaagctgcat

SEQ ID NO: 518565 - DNA, 75 bp, synthetic construct
  source 1..75: mol_type = other DNA
tattaatcaatcagtagtatgtattcggccaattaaaccatcttatagcacatggctgtattttaatctttcgtc

SEQ ID NO: 518566 - DNA, 75 bp, synthetic construct
  source 1..75: mol_type = other DNA
gctcggcgtgacggcgctgtatcttaacccggtgtttaaagcccccagcgtacataaatacgatacagaggatta

SEQ ID NO: 518567 - DNA, 75 bp, synthetic construct
  source 1..75: mol_type = other DNA
ttgatgaagcattattgacgctggaacgcgatcgcgtggaacagcagtcgctgctttcgcatccggcaaactggc

SEQ ID NO: 518568 - DNA, 75 bp, synthetic construct
  source 1..75: mol_type = other DNA
gggtaacgtttatgttggccgcaacgaagatgaagtgcgcaaggaaaataaccttgccgccgacgtcgctctgcg

SEQ ID NO: 518569 - DNA, 75 bp, synthetic construct
  source 1..75: mol_type = other DNA
aacgtcgcgtaaatgaaaaccgtggcttcctgcaaacgctggcgcgtctggaaagcatcaccgtgctgcctgctg

SEQ ID NO: 518570 - DNA, 75 bp, synthetic construct
  source 1..75: mol_type = other DNA
ccgatgctgaccgaccagtggtacgtacgtgccgacgtgctggcgaaaccggcagttgaagcggttgagaatggc

SEQ ID NO: 518571 - DNA, 75 bp, synthetic construct
  source 1..75: mol_type = other DNA
atgatcaacatcctgacctttgacggcgatatccgtgaaagcgcccaggtgttcgataccaaaggtaacgaatct

SEQ ID NO: 518572 - DNA, 75 bp, synthetic construct
  source 1..75: mol_type = other DNA
ttcatcaaagatgaaaatggcaaaccgcaggtgccgttccacaccgtttacatgacaggtctgattcgtgacgac

SEQ ID NO: 518573 - DNA, 75 bp, synthetic construct
  source 1..75: mol_type = other DNA
acaaagaagatgagctggcgcgcctggcgaaagaagtggctaagatcgaaggtgaaatcagccgcatcgaaaaca

SEQ ID NO: 518574 - DNA, 75 bp, synthetic construct
  source 1..75: mol_type = other DNA
tataactacgactcatctctgctgcaatctgactactctgcctgttccgggaccggacttacggcggtcttgacc

SEQ ID NO: 518575 - DNA, 75 bp, synthetic construct
  source 1..75: mol_type = other DNA
ctggcgccaggctatacccagacgctggaaccacgcgcacagtatctgtatgtaccgtatcgcgatcagagcaaa

SEQ ID NO: 518576 - DNA, 75 bp, synthetic construct
  source 1..75: mol_type = other DNA
gacacctggagcgtggtaggtagcgaaattattcatgaccgcgaagaacaagttgcggagatctggaacgcccgc

SEQ ID NO: 518577 - DNA, 75 bp, synthetic construct
  source 1..75: mol_type = other DNA
ccgatgctgaccgaccagtggtacgtgcgtgccgatgtactggcgaaaccggcagttgaagcggttgagaacggc

SEQ ID NO: 518578 - DNA, 75 bp, synthetic construct
  source 1..75: mol_type = other DNA
caacataacatgggagaatgacgacaaaacgggctcactggtatgggcaggcgatacttactggcgcatctccga

SEQ ID NO: 518579 - DNA, 75 bp, synthetic construct
  source 1..75: mol_type = other DNA
ttttgataataaatatggttccagtaccgatggctacgccacgcaaaaattcagcgtgggctatgcggtgcagaa

SEQ ID NO: 518580 - DNA, 75 bp, synthetic construct
  source 1..75: mol_type = other DNA
aacactgaaggtcaggattgcggctttaacggcggcgaaattaccctgtcactggcagaccgctggatcctggcg

SEQ ID NO: 518581 - DNA, 75 bp, synthetic construct
  source 1..75: mol_type = other DNA
cgacgacgacccgcaggcatccaacgagaaaatcctcgaagcgattttgttagtctggctggacgaagccgagtg

SEQ ID NO: 518582 - DNA, 75 bp, synthetic construct
  source 1..75: mol_type = other DNA
acgggcgctggcagctgcgacgctttccaacctgatgagtgcgaccattgccgggttctttattgggctggcgta

SEQ ID NO: 518583 - DNA, 75 bp, synthetic construct
  source 1..75: mol_type = other DNA
acgtgcgctggcagcggctacgctctccaacctgatgagtgcgaccattgccggattctttattgggctggcgta

SEQ ID NO: 518584 - DNA, 75 bp, synthetic construct
  source 1..75: mol_type = other DNA
aatgggatctgaaagaaatgttgtggacagtgccaaaagagcacagcaaaacgaaggtaacaatattccgaccta

SEQ ID NO: 518585 - DNA, 75 bp, synthetic construct
  source 1..75: mol_type = other DNA
aacgggactaaataatatgggggtgatgcctcatattgtcgaatcattattaggacacgtttataatgcgggttc

SEQ ID NO: 518586 - DNA, 75 bp, synthetic construct
  source 1..75: mol_type = other DNA
cgacgacgacccgcaggcatccaacgaaaaaatcctcgaagcgattttgttggtctggctggacgaagccgaata

SEQ ID NO: 518587 - DNA, 75 bp, synthetic construct
  source 1..75: mol_type = other DNA
tgctgatttccagcgttaactggatggtaatgggagcgattatctggctgttacttggtcaaagcgtgaactatt

SEQ ID NO: 518588 - DNA, 75 bp, synthetic construct
  source 1..75: mol_type = other DNA
gcatattccggcggggatcggtgtgctggaagcggtgtttatcgcactactggctggggagcatacctcgaaagg

SEQ ID NO: 518589 - DNA, 75 bp, synthetic construct
  source 1..75: mol_type = other DNA
agttcaaccagaccatcaaagcgtaccgcgaagcgctggacagcttccgcttcgatatcgccgcaggcattctgt

SEQ ID NO: 518590 - DNA, 75 bp, synthetic construct
  source 1..75: mol_type = other DNA
aaactggcgattaacgaatttgtcgcttacctgagtttctcgccatatctgcaaacgggcggcacgctggacgtg

SEQ ID NO: 518591 - DNA, 75 bp, synthetic construct
  source 1..75: mol_type = other DNA
atgagtaaatcacacccacgctggcgcttagcaaagaagatcctcacctggctgttttttatcgcggtgattgtg

SEQ ID NO: 518592 - DNA, 75 bp, synthetic construct
  source 1..75: mol_type = other DNA
tcccactgctgctggcgctgatctgttacctgttgctggaaagccaggcgaagaagctacgggcgaaaaatgaag

SEQ ID NO: 518593 - DNA, 75 bp, synthetic construct
  source 1..75: mol_type = other DNA
agcaaaccaatcttgactggtataacagcaaccccaaaaacaccaaactggcagactccgctaaccgcgtgatgc

SEQ ID NO: 518594 - DNA, 75 bp, synthetic construct
  source 1..75: mol_type = other DNA
gctaaatatcaagagattgcaccaagaaacatggtgtatgatcgaactcagaaggcttatgtaactaccccagat

SEQ ID NO: 518595 - DNA, 75 bp, synthetic construct
  source 1..75: mol_type = other DNA
tggatgtgaaaatcgattcttcaatagatgataagcagcaaatcatcatgctaagaatagaaaaacctgaagatt

SEQ ID NO: 518596 - DNA, 75 bp, synthetic construct
  source 1..75: mol_type = other DNA
tatcgctcttttgtcgattttacatatagatacgatgtcaacgccaagattattggccgtttttcgccattttta

SEQ ID NO: 518597 - DNA, 75 bp, synthetic construct
  source 1..75: mol_type = other DNA
atgtcgaacgagatggcgggcgtaacaacagagcaagttgagcgcattgccgcgatcgttgctcgggaggttgtc

SEQ ID NO: 518598 - DNA, 75 bp, synthetic construct
  source 1..75: mol_type = other DNA
gcataaagtcatcagtatatggtgtgtctgcaggtgagcatagtgatgctgttaatggcgaaatttcttcaagaa

SEQ ID NO: 518599 - DNA, 75 bp, synthetic construct
  source 1..75: mol_type = other DNA
cgtcggaaaaacaggtcgatctgcaatcctatcttgcagcgaatacgccgaaagcgacgctcgctgaacaggtga

SEQ ID NO: 518600 - DNA, 75 bp, synthetic construct
  source 1..75: mol_type = other DNA
catgctgatatttatggtggctatcagtgcgaagcggcgtttggcgaggcgctgaaactggcacctcacctgcgt

SEQ ID NO: 518601 - DNA, 75 bp, synthetic construct
  source 1..75: mol_type = other DNA
ggcggcgctgggctgccagtttgatctgcatagtctggcaggatcgctggatgtcgccgatcgccaaatggtgga

SEQ ID NO: 518602 - DNA, 75 bp, synthetic construct
  source 1..75: mol_type = other DNA
ctgccgaaaccgaacgcttgtttcgtcgcttgcaagagctgcttgctactggcgtgggtattgtttttatctcgc

SEQ ID NO: 518603 - DNA, 75 bp, synthetic construct
  source 1..75: mol_type = other DNA
gctacaggctcctgagcctccagcgagagattttcgctttggggtcagtaccttaaaaaatactcgattacaaca

SEQ ID NO: 518604 - DNA, 75 bp, synthetic construct
  source 1..75: mol_type = other DNA
gcgggttatgtggctgctttcgataaatacgttaacccggaaggaaaacccctacctcatatggaagtctcgcat

SEQ ID NO: 518605 - DNA, 75 bp, synthetic construct
  source 1..75: mol_type = other DNA
cgcgaccgatcatctggatctgctgttaatccaccgaccagacccgttaatggatgccgatgaagtggcggacgc

SEQ ID NO: 518606 - DNA, 75 bp, synthetic construct
  source 1..75: mol_type = other DNA
gtatggttttatctttaactgccgggcaaacacatgcagatatgaacaattatctaggatatacatctggtgaga

SEQ ID NO: 518607 - DNA, 75 bp, synthetic construct
  source 1..75: mol_type = other DNA
ttttgataataaatatggttccagtaccgatggttacgcaacgcaaaaattcagcgttggctatgcggtgcagaa

SEQ ID NO: 518608 - DNA, 75 bp, synthetic construct
  source 1..75: mol_type = other DNA
actgatggttacgcaacgcaaaaattcagcgttggctatgcggtgcagaattttgacgccactctttcgaccaaa

SEQ ID NO: 518609 - DNA, 75 bp, synthetic construct
  source 1..75: mol_type = other DNA
cgatcttttatagcccgtatctgcagttaccggtgggtgacaaacgccgttcaggtttcttgatcccgaacgcca

SEQ ID NO: 518610 - DNA, 75 bp, synthetic construct
  source 1..75: mol_type = other DNA
accgttgatgcgctcggtaatgtccattacgacgataaccaggtgatcctcaaagggccgaaaggctgggcgaat

SEQ ID NO: 518611 - DNA, 75 bp, synthetic construct
  source 1..75: mol_type = other DNA
cgcaggtaggcgcagtcgccagctggccaatcgccgatcgttggtcaattgtcggggcttactactacgacacca

SEQ ID NO: 518612 - DNA, 75 bp, synthetic construct
  source 1..75: mol_type = other DNA
gtagcgaaattattcatgaccgcgaagaacaagttgcggagatctggaacgcccgctttaaagtgggtccggttc

SEQ ID NO: 518613 - DNA, 75 bp, synthetic construct
  source 1..75: mol_type = other DNA
tgggtgttgactggagtgatgcgaatcttgccggaagtttgattggacagaaactggcgattaatgaatttgtcg

SEQ ID NO: 518614 - DNA, 75 bp, synthetic construct
  source 1..75: mol_type = other DNA
acgcgcgctggcagcggcgacactttctaacctgatgagcgctaccattgccggattttttattggcttagcgta

SEQ ID NO: 518615 - DNA, 75 bp, synthetic construct
  source 1..75: mol_type = other DNA
gcaaacggctggcactctcgatgctaaaaccgtggcgattatttccttcgcgttgtgcggtttcgctaactttgg

SEQ ID NO: 518616 - DNA, 75 bp, synthetic construct
  source 1..75: mol_type = other DNA
aagcattaaatatcagcaagattgagtcattcgtcgcggtcactaccattttcctcgggcaaaacgaaattccgg

SEQ ID NO: 518617 - DNA, 75 bp, synthetic construct
  source 1..75: mol_type = other DNA
tggcggcattatgctttggttaccgccagggcgttgggtcgcagaaaaagtcgcttttggcgtccataaagtgat

SEQ ID NO: 518618 - DNA, 75 bp, synthetic construct
  source 1..75: mol_type = other DNA
gggcgtgcctgtggaatatctgctggcggcatcgttaatggcgatccccggcgggatcttgtttgcccgcctgtt

SEQ ID NO: 518619 - DNA, 75 bp, synthetic construct
  source 1..75: mol_type = other DNA
cccgcctgagcctgatattttctgcagtcatgctgacggtatggtggctttcaagttttattctgatcagcacgc

SEQ ID NO: 518620 - DNA, 75 bp, synthetic construct
  source 1..75: mol_type = other DNA
gcagccttttattggactggttcttgcgggttatggtgcatggaaattttcaggtgacagtatctcagcattact

SEQ ID NO: 518621 - DNA, 75 bp, synthetic construct
  source 1..75: mol_type = other DNA
caaggactggtgaaggcgtggacgtgctgcgtaaccatctcaaacagagcatgggctttgacaccaacatggaag

SEQ ID NO: 518622 - DNA, 75 bp, synthetic construct
  source 1..75: mol_type = other DNA
agagtttctgctgcttcacatatgccttttatcggttccgtcgggccgaaattcttcctcaaaaattcgatggaa

SEQ ID NO: 518623 - DNA, 75 bp, synthetic construct
  source 1..75: mol_type = other DNA
gtcatattgatatcctggtgaataacgccggattgattcgccgcgaagatgctctcgagttcagcgaaaaagact

SEQ ID NO: 518624 - DNA, 75 bp, synthetic construct
  source 1..75: mol_type = other DNA
ctggcgcgttacttcattcttcttacttttatgaccctgccgcatggcagggttttttatacctgtagatcatca

SEQ ID NO: 518625 - DNA, 75 bp, synthetic construct
  source 1..75: mol_type = other DNA
caatcaggtcaaaattccgtccgaagtgatgatcccggaaacccgcgaatttgaattttccaaccttggctttat

SEQ ID NO: 518626 - DNA, 75 bp, synthetic construct
  source 1..75: mol_type = other DNA
attcttccttaaaaattcgatggaagaagtcgccgcgattaaagatatcggcaactactttgaccgcgccgaata

SEQ ID NO: 518627 - DNA, 75 bp, synthetic construct
  source 1..75: mol_type = other DNA
ggcggtgtacggcatccggcagtcgttaaaggagccgccgctggaagaactgcttcggcaacttgtagtggtcaa

SEQ ID NO: 518628 - DNA, 75 bp, synthetic construct
  source 1..75: mol_type = other DNA
gagcacctgcaacagggtaaagcgcaactgttaggagcctgggcaggcgagctgctggcggaagaactgcgtctg

SEQ ID NO: 518629 - DNA, 75 bp, synthetic construct
  source 1..75: mol_type = other DNA
catttacgtcgaagcggcaattgatttccctgatgaagagatcgatttcctctccgacggcaaaattgaagccca

SEQ ID NO: 518630 - DNA, 75 bp, synthetic construct
  source 1..75: mol_type = other DNA
cgcgaaaatatcggcaccaccaaagaccgtcgtctgctggaattagaactcaacacctgggttcgcagtctggtg

SEQ ID NO: 518631 - DNA, 75 bp, synthetic construct
  source 1..75: mol_type = other DNA
atgaattcgataacagcccgcaggatattgccctgctgcgtaatatttccagagtctctgctgcatcacatatgc

SEQ ID NO: 518632 - DNA, 75 bp, synthetic construct
  source 1..75: mol_type = other DNA
tgaatactacaacagcagaagaattagcctgaaattaaaaagtctgactccaattgaatatcggaatcagaccta

SEQ ID NO: 518633 - DNA, 75 bp, synthetic construct
  source 1..75: mol_type = other DNA
gtagtcaatgggcgcaagctgtatttgtctccagtaatagatctcttcaacaacgaagttatttcttacagcctt

SEQ ID NO: 518634 - DNA, 75 bp, synthetic construct
  source 1..75: mol_type = other DNA
cagacttcgagaagaaactgaaagagcgagccgcttctaccgagaacatgctgaacagcgagttcaggaagctcg

SEQ ID NO: 518635 - DNA, 75 bp, synthetic construct
  source 1..75: mol_type = other DNA
gcctgtaatcacaaaggttttcgcggacgcaccgctatccatgaactgattgtggtggacgccacattgcgtgat

SEQ ID NO: 518636 - DNA, 75 bp, synthetic construct
  source 1..75: mol_type = other DNA
tgaagatattgagaacggcgatatcaaccagcgtctcatggagtcagttgagtggatcggcaggcattcgcaata

SEQ ID NO: 518637 - DNA, 75 bp, synthetic construct
  source 1..75: mol_type = other DNA
tatcttgatgagttcagtaatataagcgaactgaaggatgctgttacggaatatattgaatactacaacagcaga

SEQ ID NO: 518638 - DNA, 75 bp, synthetic construct
  source 1..75: mol_type = other DNA
ggtaacaagcataacgattcaattcttggtgatatgcagaatcatgttcacgacctgtttgctgcatttggtcgt

SEQ ID NO: 518639 - DNA, 75 bp, synthetic construct
  source 1..75: mol_type = other DNA
acggctcaacaaagtaacattccggtgaccgttgaacgccaattgtatcggcttatccctggtgaagaagagatg

SEQ ID NO: 518640 - DNA, 75 bp, synthetic construct
  source 1..75: mol_type = other DNA
gagaatatcggcaccaccaaagaccgccgcgtgctggaactggagcttaacacctggatccgcacgctggtgacg

SEQ ID NO: 518641 - DNA, 75 bp, synthetic construct
  source 1..75: mol_type = other DNA
attgcgaaaaatatcctgactatcagagagcaggaaaacacgctggcgaaactcgaggcaaaaacctggggggtg

SEQ ID NO: 518642 - DNA, 75 bp, synthetic construct
  source 1..75: mol_type = other DNA
gggtgtaatagcgatttatctgcttaacaagctaacaggacaaaaagagcgctttattgttctcaacgttcatta

SEQ ID NO: 518643 - DNA, 75 bp, synthetic construct
  source 1..75: mol_type = other DNA
aagcagaagcagatatttctgaatatataacaacaaaaatcattgagcttaagaaaaagaccgggaaagaagtta

SEQ ID NO: 518644 - DNA, 75 bp, synthetic construct
  source 1..75: mol_type = other DNA
gcattgattcgtcagtatcaggcagaaggccgtttagtggcgatgaccggcgatggcaccaacgatgctccggcg

SEQ ID NO: 518645 - DNA, 75 bp, synthetic construct
  source 1..75: mol_type = other DNA
gctgattggcctgatgaaaagtgcttctcatgccacacttagctggggcgactggttcctcggcatgttgccgct

SEQ ID NO: 518646 - DNA, 75 bp, synthetic construct
  source 1..75: mol_type = other DNA
aggtggaagagattgaagaagtgcactggacagaactcgggatgccggagtcactgtgggtctgccgggtcaaag

SEQ ID NO: 518647 - DNA, 75 bp, synthetic construct
  source 1..75: mol_type = other DNA
gatatctcgcgccgctggccgtcatcgccattattgctctacttccggttcccgcagggctagagagccatacct

SEQ ID NO: 518648 - DNA, 75 bp, synthetic construct
  source 1..75: mol_type = other DNA
aaagatctccaaggatttttctctcataaaaaattattgtattaaggaaagcgaatcgatgtctccaagtaatac

SEQ ID NO: 518649 - DNA, 75 bp, synthetic construct
  source 1..75: mol_type = other DNA
acggttgtggtcgtggtcgctacccataacttagcaattggggtatttgtaggtgtattactcgcgtccctattt

SEQ ID NO: 518650 - DNA, 75 bp, synthetic construct
  source 1..75: mol_type = other DNA
taaagcttattcctatggcggcactggttgccgtgatgatcatggtggctatcggtacattctcttgggattcaa

SEQ ID NO: 518651 - DNA, 75 bp, synthetic construct
  source 1..75: mol_type = other DNA
gccaccggactcaacaacacgggttttattagctggtttggcaagctgttagcaggcagcttaagcagctattcg

SEQ ID NO: 518652 - DNA, 75 bp, synthetic construct
  source 1..75: mol_type = other DNA
ggggctaaataatatgggggtgatgcctcatattgtcgagtcattattagggcacgtttataatgctggctcggc

SEQ ID NO: 518653 - DNA, 75 bp, synthetic construct
  source 1..75: mol_type = other DNA
agagcttgaactgagcaccgaagaaacgcttaaacctgtgacagtacaggatgctctcgaatactggctggtgaa

SEQ ID NO: 518654 - DNA, 75 bp, synthetic construct
  source 1..75: mol_type = other DNA
ggtgccgcgttgggcagagacggaactgcaagcgatggggccactctgttcgcgtgaaaaacggatgctggggct

SEQ ID NO: 518655 - DNA, 75 bp, synthetic construct
  source 1..75: mol_type = other DNA
ctggctggcctcgcttatcaccctcgctaccggactcaacaacactggttttattagctggtttggcaaactgtt

SEQ ID NO: 518656 - DNA, 75 bp, synthetic construct
  source 1..75: mol_type = other DNA
ttgcgccgctggcggtcatcgccattattgctctactttgccgtttttactggcgtgatcgttggactgatcctc

SEQ ID NO: 518657 - DNA, 75 bp, synthetic construct
  source 1..75: mol_type = other DNA
gggaatacctgttacttccccctgactatcctgaagttaacgattctctggcgaatttctcatctgaagacatga

SEQ ID NO: 518658 - DNA, 75 bp, synthetic construct
  source 1..75: mol_type = other DNA
gtgacggagatgaccgatccgggcgatgagctgcaggcttcgcatccgctgcgtgacggaaaagtggtggtggaa

SEQ ID NO: 518659 - DNA, 75 bp, synthetic construct
  source 1..75: mol_type = other DNA
gtaccacatttccaggtggaaggtatggacgtcagtctgtcactggtttcgcagatgccgaaggcaaaagcgtaa

SEQ ID NO: 518660 - DNA, 75 bp, synthetic construct
  source 1..75: mol_type = other DNA
gtccagcactggggcaaaaatggtgacaacgagggtcataaaaacgttcggggagctttgtgatatctggacaaa

SEQ ID NO: 518661 - DNA, 75 bp, synthetic construct
  source 1..75: mol_type = other DNA
tgccaatccatctgtatgatctgggaaccggtaatcaggtcaaaattccgtcagaggtgatgatcccggaaacgc

SEQ ID NO: 518662 - DNA, 75 bp, synthetic construct
  source 1..75: mol_type = other DNA
gtttatatcgtcatacatacattcaggagtacgatacgccgggtggcgaacctgtagcctcattaatatccagct

SEQ ID NO: 518663 - DNA, 75 bp, synthetic construct
  source 1..75: mol_type = other DNA
tctgaggtggcgaaaacagaagtgatcgcaagccagcgcgagctggtcaacactctgaagaaggagcagaaggtt

SEQ ID NO: 518664 - DNA, 75 bp, synthetic construct
  source 1..75: mol_type = other DNA
agaaaacgttattggtcattacatcaccgatcgcgaccatattattaaaagtgccgaacagtcgctaattaatct

SEQ ID NO: 518665 - DNA, 75 bp, synthetic construct
  source 1..75: mol_type = other DNA
tgacattacagcgtaaatatccggatatttcaccgtcacaccttgatgtggtgaaaactgaaatcgcaaaagcct

SEQ ID NO: 518666 - DNA, 75 bp, synthetic construct
  source 1..75: mol_type = other DNA
ccaacgaggagatctcggaacgtctgggaattgttccagattggatggatgctatagatactaaccaacttgcct

SEQ ID NO: 518667 - DNA, 75 bp, synthetic construct
  source 1..75: mol_type = other DNA
acggcgatctcgacacctgcattgtgatccgctcggcgctggtggaaaacggcgtcgccaccgtgcaagccggtg

SEQ ID NO: 518668 - DNA, 75 bp, synthetic construct
  source 1..75: mol_type = other DNA
agtctgctgttagtggatagtgcgctgcgtattaccgcattaggtgacactgtcacaattaaagcgctaactgac

SEQ ID NO: 518669 - DNA, 75 bp, synthetic construct
  source 1..75: mol_type = other DNA
ggaaaatgaacaatcaccaaactgccgtgtgctgcgcttcccccctgtcagtccactgctggatgaagacgctcg

SEQ ID NO: 518670 - DNA, 75 bp, synthetic construct
  source 1..75: mol_type = other DNA
gaatttttgttaccgccgatcacgggttcctgttccaacaacaagcgctggtggagcaggataaaacgaagctgg

SEQ ID NO: 518671 - DNA, 75 bp, synthetic construct
  source 1..75: mol_type = other DNA
tctgcttctgaaactgttctgtaccgatctctgggcgcagggtgatgaagcacatcgtgactggttgagtaaaaa

SEQ ID NO: 518672 - DNA, 75 bp, synthetic construct
  source 1..75: mol_type = other DNA
ccgcacgctcagtacctcaaaacagcggatattgataaatatattccggttggttttccgctgccgtggccgcag

SEQ ID NO: 518673 - DNA, 75 bp, synthetic construct
  source 1..75: mol_type = other DNA
cagtgaaattcagcggggtatccaggccgcgacagcggcgcttcaggggctggcggggggtaatttagcaggtgc

SEQ ID NO: 518674 - DNA, 75 bp, synthetic construct
  source 1..75: mol_type = other DNA
gcatttttgttacggcggatcacggtttcctgttccagcaacaggcgctttcggttcaggataaaatcactctgc

SEQ ID NO: 518675 - DNA, 75 bp, synthetic construct
  source 1..75: mol_type = other DNA
tagtgatacagagttcctgcttccaaaagcggctcaacgcttccacttcgttggtggtgccaagtttgtgcacgg

SEQ ID NO: 518676 - DNA, 75 bp, synthetic construct
  source 1..75: mol_type = other DNA
ccggctgttccggttgatgtggtgcaccgcgcgctgcgtgaaatccacgaacgcgctgatgccgtacgtcgccaa

SEQ ID NO: 518677 - DNA, 75 bp, synthetic construct
  source 1..75: mol_type = other DNA
ccggctgttccggttgatgtggtgcatcgcgcgctgcgtgaaatccacgagcgcgccgatgccgttcgtcgtcag

SEQ ID NO: 518678 - DNA, 75 bp, synthetic construct
  source 1..75: mol_type = other DNA
attgccgtggcgaactgcccggagacctacaagccgcaattgcaggagggaagcggccgcacacagaccattcgc

SEQ ID NO: 518679 - DNA, 75 bp, synthetic construct
  source 1..75: mol_type = other DNA
tggcacaatccgggcttaaacacgcctaagactgctgcagaaacccgctcacgtaacatcgcgttcaacttcatc

SEQ ID NO: 518680 - DNA, 75 bp, synthetic construct
  source 1..75: mol_type = other DNA
ctcattaaccagaagcgtatcgcgccgctgaacctgctgaccgttgacccggctaataccagccagattatcgcg

SEQ ID NO: 518681 - DNA, 75 bp, synthetic construct
  source 1..75: mol_type = other DNA
tgacgctaccagatgctcgcggtgagtttccgcgcatctgggatgacgggcgaggcgttgatagtgggcgggcgc

SEQ ID NO: 518682 - DNA, 75 bp, synthetic construct
  source 1..75: mol_type = other DNA
gatggctggaacaatatcctgccatcaggaacacaggattacggacaggccgtagcctcgtggaatcagtatgct

SEQ ID NO: 518683 - DNA, 75 bp, synthetic construct
  source 1..75: mol_type = other DNA
cgtgcaagtctgcggcgtagcacaacggttaatgatgtttgcttgtcagaagggtttcgttctctgctgatgcag

SEQ ID NO: 518684 - DNA, 75 bp, synthetic construct
  source 1..75: mol_type = other DNA
actggttcagctgatacaggactccctgaatgaagaactggcacaggtactgtttcactatctgctgaatggcag

SEQ ID NO: 518685 - DNA, 75 bp, synthetic construct
  source 1..75: mol_type = other DNA
agtccgtatccgtacagcatgaactggctggatggcttttctgacccggatattgcggctaaaatctacaccaga

SEQ ID NO: 518686 - DNA, 75 bp, synthetic construct
  source 1..75: mol_type = other DNA
agctaaagttgacgacttaaaatcaaaacgtgaagacatcgcaaagcaaatggaaaaatttcgttcacgaataac

SEQ ID NO: 518687 - DNA, 75 bp, synthetic construct
  source 1..75: mol_type = other DNA
cacaatagattgtttgaaatcaatttagtctcaaattatcgagaattggctataacttcaatcgtagaagaaaga

SEQ ID NO: 518688 - DNA, 75 bp, synthetic construct
  source 1..75: mol_type = other DNA
ccactgatgaccgactcctggttcggcgaaccggaaagcagcagtcttaaaacagcaaccgatttggtttgcaga

SEQ ID NO: 518689 - DNA, 75 bp, synthetic construct
  source 1..75: mol_type = other DNA
caatcttacttcaaggtttctgagccgactgcgaaggaagccgctagtgaaacccatgataccaaaataaagcag

SEQ ID NO: 518690 - DNA, 75 bp, synthetic construct
  source 1..75: mol_type = other DNA
aaaggtcaggacgcgccaggcgaagcacgtaacgacggcgaaattttggcgggtatctaccatcatcttcgcgag

SEQ ID NO: 518691 - DNA, 75 bp, synthetic construct
  source 1..75: mol_type = other DNA
aaactctcatcgcatctgctgttttattttcctttaattcaacagccgcaacttcatattttgaagcccgcaatg

SEQ ID NO: 518692 - DNA, 75 bp, synthetic construct
  source 1..75: mol_type = other DNA
ggtgctgttctaccacggtgagcgcagtccgtatccgtacagcatgaactggctggatggcttttctgacccgga

SEQ ID NO: 518693 - DNA, 75 bp, synthetic construct
  source 1..75: mol_type = other DNA
gtatgcatgtgatgcactgttcagtatgaagactgtcagtggtgaggatggctatgtttactgcctcgtggagca

SEQ ID NO: 518694 - DNA, 75 bp, synthetic construct
  source 1..75: mol_type = other DNA
attttgttgagttacatcttccggcggaataccggcagttgtgtgatctgtcgacgctgcggctggagccctgta

SEQ ID NO: 518695 - DNA, 75 bp, synthetic construct
  source 1..75: mol_type = other DNA
ggattgttcacttatgttgatggggctttttcaggagttaacagaacagggactgacggtttggttactgttact

SEQ ID NO: 518696 - DNA, 75 bp, synthetic construct
  source 1..75: mol_type = other DNA
gtcgatctggataagaaaatggcatggatgcaccctgatgaaacaaaagctggcaatgcgatcggagttcctctt

SEQ ID NO: 518697 - DNA, 75 bp, synthetic construct
  source 1..75: mol_type = other DNA
gcggcgctgagacgagcaggtattgatgatttcagatttcacgacttgagacacacctgggcaagttggctggtt

SEQ ID NO: 518698 - DNA, 75 bp, synthetic construct
  source 1..75: mol_type = other DNA
acaaccgtctgccagaagtatggcacaccgaattatcccatcaaagaaccccgcgagatgaaggaaccagcaaca

SEQ ID NO: 518699 - DNA, 75 bp, synthetic construct
  source 1..75: mol_type = other DNA
tatgcatcctgtcgcccataccggcgtgcgtaaactgaccgataagaatgcggtaagccaatggatgcgtgggcg

SEQ ID NO: 518700 - DNA, 75 bp, synthetic construct
  source 1..75: mol_type = other DNA
ctttaactcgttgacctgctactttgcttctgatgtttgtcaggaacagttcatttcacgcttagtctggctggg

SEQ ID NO: 518701 - DNA, 75 bp, synthetic construct
  source 1..75: mol_type = other DNA
tggctgttgaatggggatggcttgacagagcacccaaaatatcaacaccacgcgttaagaatggacgcatcagat

SEQ ID NO: 518702 - DNA, 75 bp, synthetic construct
  source 1..75: mol_type = other DNA
gtaaacaacccgctcaggaagccccagaacacgatgaacaagacgaagatgacgacgactacacaccaatctgtt

SEQ ID NO: 518703 - DNA, 75 bp, synthetic construct
  source 1..75: mol_type = other DNA
gaaatgatctacgcgctgcaaccggaaatcgcgccgaatatcggcaaatttttctatccgctggggcgtaacaat

SEQ ID NO: 518704 - DNA, 75 bp, synthetic construct
  source 1..75: mol_type = other DNA
ttatcagctacgaccaggcgctctccagcgagccggttgcgcctggcgcaactaaccgcagcgagcggcgagtaa

SEQ ID NO: 518705 - DNA, 75 bp, synthetic construct
  source 1..75: mol_type = other DNA
cgccgcatccgccagtggcgcggtgcagttgccggatgcaacgcttgccgcgttttatccggccaggaggattgc

SEQ ID NO: 518706 - DNA, 75 bp, synthetic construct
  source 1..75: mol_type = other DNA
aatctgacgcaacaagatctcaatgaccttcattcttatgcctatacagcatatcaatctggtgatgttataacc

SEQ ID NO: 518707 - DNA, 75 bp, synthetic construct
  source 1..75: mol_type = other DNA
agggcatcttattattctgggattagctacttattggtcggaaatcggaaaatggccaaaaagcctttaaggctt

SEQ ID NO: 518708 - DNA, 75 bp, synthetic construct
  source 1..75: mol_type = other DNA
actgggcgtttttgtctgggcatggccggatggaacgcagttaatgaccgatcgtttacagcagctgactaccgc

SEQ ID NO: 518709 - DNA, 75 bp, synthetic construct
  source 1..75: mol_type = other DNA
aaactcaacctgacgcagatggccgtcggtgatgcgaatggtacgttgccgacccctgacccggcgcagacgaag

SEQ ID NO: 518710 - DNA, 75 bp, synthetic construct
  source 1..75: mol_type = other DNA
gcattggagaatatttccgggtttatttgggggtttatgatacctacgaaaaaaattcccatgcagaggctttct

SEQ ID NO: 518711 - DNA, 75 bp, synthetic construct
  source 1..75: mol_type = other DNA
gtgtgaaatatcttgaagaaaacgctaaaaaagaaggcgtgaacagcaccgaatccggcctgcaattccgcgtga

SEQ ID NO: 518712 - DNA, 75 bp, synthetic construct
  source 1..75: mol_type = other DNA
aaaaaccttggtttgggagaaggttcggcattacccgttggcgtgcctgttccgtggccttccgccactccgcca

SEQ ID NO: 518713 - DNA, 75 bp, synthetic construct
  source 1..75: mol_type = other DNA
tatgtcgacgacaaggttatcgaggtgaaagcctatgccgatagtctgctggccgcacacctcgccgctgcagac

SEQ ID NO: 518714 - DNA, 75 bp, synthetic construct
  source 1..75: mol_type = other DNA
atttgcgcggggagtttctgcgcgggtgggatgacggtagaggggtggatgccgggcgcgcattgttgagtacgc

SEQ ID NO: 518715 - DNA, 75 bp, synthetic construct
  source 1..75: mol_type = other DNA
tctggaatggcaacaaatcgacatgcagcgacgagttgcctgggtgaatccagaagagagcaaatcaaaccgcgc

SEQ ID NO: 518716 - DNA, 75 bp, synthetic construct
  source 1..75: mol_type = other DNA
atgatctggcagcctgagttcacagataaaatactctccaggaaacccggggcggttcaggccgccatcaggaaa

SEQ ID NO: 518717 - DNA, 75 bp, synthetic construct
  source 1..75: mol_type = other DNA
ctggtggcgtggaaatatcaacctgtggcacaggttgctgaagtgagttcgattcagtttgcagtgggcaaaagc

SEQ ID NO: 518718 - DNA, 75 bp, synthetic construct
  source 1..75: mol_type = other DNA
cattacaccggtaagctgatcgacggtactgtatttgacagctccgttgcccgtggtgagccggctgaattcccg

SEQ ID NO: 518719 - DNA, 75 bp, synthetic construct
  source 1..75: mol_type = other DNA
gtgtgaaatatcttgaagaaaatgccaaaaaagaaggtgtgaacagcaccgaatctggcctgcaattccgcgtga

SEQ ID NO: 518720 - DNA, 75 bp, synthetic construct
  source 1..75: mol_type = other DNA
caaataggcaagcatcacaaatgggtgtttgtacataccaaggcggctaagcgagcagatggaacatcaacgcct

SEQ ID NO: 518721 - DNA, 75 bp, synthetic construct
  source 1..75: mol_type = other DNA
agttctttaaaaagtttgatctgctgaatgatgaggggctgcgcattgcactggacagcatggtgcaccgcagcg

SEQ ID NO: 518722 - DNA, 75 bp, synthetic construct
  source 1..75: mol_type = other DNA
gctatgccgttgatgcctggaggcgggaaactttcgcaccaggcacaccggcagacgcgactatcacagaacgcc

SEQ ID NO: 518723 - DNA, 75 bp, synthetic construct
  source 1..75: mol_type = other DNA
gggacaccgcattggcatatgttgctgtttatgcgcccgcacgatgtggacaccgtgcgcgatatcctttgctat

SEQ ID NO: 518724 - DNA, 75 bp, synthetic construct
  source 1..75: mol_type = other DNA
ggcgttcgcatcagctgcgtgtgcatatgctggcgctgggtcatccgattcttggcgatcgtttttatgcttcac

SEQ ID NO: 518725 - DNA, 75 bp, synthetic construct
  source 1..75: mol_type = other DNA
gcacatttatatatccatatagcaacatcagggaaatcaactactcgctgcctgattgcagatccgatgatgccg

SEQ ID NO: 518726 - DNA, 75 bp, synthetic construct
  source 1..75: mol_type = other DNA
atgctggagcctggccaacaccatgccgtcaatgcctggcggcgtgaaacctttgcgcctggtaccccgtcagat

SEQ ID NO: 518727 - DNA, 75 bp, synthetic construct
  source 1..75: mol_type = other DNA
ctgaagaactgcaatctgaaaaggcgctgaaggcgcgttttcatgttgaagctatcgatcccgccaaaggttcgg

SEQ ID NO: 518728 - DNA, 75 bp, synthetic construct
  source 1..75: mol_type = other DNA
aatacaaaatgaagaagagaaaacaactgatgccaataggcatatatcggcgcaagaaagactgacgcaaaaaag

SEQ ID NO: 518729 - DNA, 75 bp, synthetic construct
  source 1..75: mol_type = other DNA
cgaagcaccagattgataaccccggctatgcacataagtctttttactatctggggggattaaccgaaggcagcg

SEQ ID NO: 518730 - DNA, 75 bp, synthetic construct
  source 1..75: mol_type = other DNA
attcttcgcatgatggcacctgaatggtggtatctgcgtcttaagcgggcgcgtgatatgcagcgtgagcatatg

SEQ ID NO: 518731 - DNA, 75 bp, synthetic construct
  source 1..75: mol_type = other DNA
gggctgtaaacccactggattatgaatggcgttcccagtacctgcatgaaatacccgactggttagccgggtatt

SEQ ID NO: 518732 - DNA, 75 bp, synthetic construct
  source 1..75: mol_type = other DNA
ctggatggtgagcaggacgaagaaaccggcgaaaacctgcgtgatatggctaagtccgtttccgcgtgggcttca

SEQ ID NO: 518733 - DNA, 75 bp, synthetic construct
  source 1..75: mol_type = other DNA
atgtcgtaccgtcatttcgccgcttataacgtgatcggcgcactgttgtgggtactgctttttacctacgcaggt

SEQ ID NO: 518734 - DNA, 75 bp, synthetic construct
  source 1..75: mol_type = other DNA
cttcttctctgctgtttagaagagcggatgtattgcaaaaagcgggcgtttgggactgtgttaaaacgggtgctg

SEQ ID NO: 518735 - DNA, 75 bp, synthetic construct
  source 1..75: mol_type = other DNA
acctgctgcccgtcgtgcggcttatccatcagccacgcgttgtgtttcctgtcagtcagtctttgaagcaaaaaa

SEQ ID NO: 518736 - DNA, 75 bp, synthetic construct
  source 1..75: mol_type = other DNA
ctggggggattaaccgaaggcacagaaacgatcttactgtttgtgctgggatgtttattccctgcatggtttgcg

SEQ ID NO: 518737 - DNA, 75 bp, synthetic construct
  source 1..75: mol_type = other DNA
ggacgcacagaactggccgagacgctctatggtctgcgtactttgcgtggcggacgcattatgctgaatggtaaa

SEQ ID NO: 518738 - DNA, 75 bp, synthetic construct
  source 1..75: mol_type = other DNA
gaactgtctaccgacgacattattcaggccatcacgccagcggtacgggaaaaatcgctctctgccagccaaaaa

SEQ ID NO: 518739 - DNA, 75 bp, synthetic construct
  source 1..75: mol_type = other DNA
gggtcccctgatttctattttaatgacaacatacaataccggcaggcgggtagaaaatgcagtaatatcattgct

SEQ ID NO: 518740 - DNA, 75 bp, synthetic construct
  source 1..75: mol_type = other DNA
atgaaaggttttggtcagcctcagttagcgatgattctgccgctggatgggcggaagaaactggtcaatgccgat

SEQ ID NO: 518741 - DNA, 75 bp, synthetic construct
  source 1..75: mol_type = other DNA
tctggcagaactggtcgcagagtatggcgtctgggtttatgccatcctgtttttgattttgttctgtgaaaccgg

SEQ ID NO: 518742 - DNA, 75 bp, synthetic construct
  source 1..75: mol_type = other DNA
ggtactgctttttacctacgcaggctatttcttcggtacaatcccaatggttcaggataaccttaagctgctgat

SEQ ID NO: 518743 - DNA, 75 bp, synthetic construct
  source 1..75: mol_type = other DNA
ttatgcgcataaatcgttttactatctggggggattaaccgaaggcacagaaacgatcttactgtttgtgctggg

SEQ ID NO: 518744 - DNA, 75 bp, synthetic construct
  source 1..75: mol_type = other DNA
acgtcaggggctgcgttcttgctcctgttgtacggcaatccttcctgctgatgaacccgtatgcccgcgctgtgg

SEQ ID NO: 518745 - DNA, 75 bp, synthetic construct
  source 1..75: mol_type = other DNA
gcaaacgcgaccaaacctatttatatgtcgaaaaaaaagacgatttttcacgtgttccagaagaactgatgaaag

SEQ ID NO: 518746 - DNA, 75 bp, synthetic construct
  source 1..75: mol_type = other DNA
tttctcgcttttgctgcgctggcggcgaaacatcagattgataatcccggttatgcgcataaatcgttttattat

SEQ ID NO: 518747 - DNA, 75 bp, synthetic construct
  source 1..75: mol_type = other DNA
ggccgctcaaccgtcgcgtactctacaaccgtgcttcggcggatatcaacggtaaaccgtgggatccgaaacgga

SEQ ID NO: 518748 - DNA, 75 bp, synthetic construct
  source 1..75: mol_type = other DNA
ctgtggtacgccaaaagccgacttcctgaaagtgtgtgaagtgctggcctccaccagcgcaccggatcgcacaac

SEQ ID NO: 518749 - DNA, 75 bp, synthetic construct
  source 1..75: mol_type = other DNA
aataaaaatagcgcaagatattgcgaaaaaatttcctaatgctgtatataaccaatcattacagagaaaaacaac

SEQ ID NO: 518750 - DNA, 75 bp, synthetic construct
  source 1..75: mol_type = other DNA
ccttctgcttccgtccgtcggtgcgcaactctccgacccggataatatcaccgacaacgccgaccggatcagtga

SEQ ID NO: 518751 - DNA, 75 bp, synthetic construct
  source 1..75: mol_type = other DNA
ggaacgccagaaccaatcaaagtcggcaacaccttaatcctttcgactgatagtggcggtatcgatattggtaaa

SEQ ID NO: 518752 - DNA, 75 bp, synthetic construct
  source 1..75: mol_type = other DNA
ggtggatatcaaaaacgctaacgtcgtaatggtgatgggcggtaacgctgctgaagcgcatcccgtcggtttccg

SEQ ID NO: 518753 - DNA, 75 bp, synthetic construct
  source 1..75: mol_type = other DNA
gttgactggagtgatgcgaatcttgccggaagtttgattggacagaagctggcgattaatgaatttgtcgcttac

SEQ ID NO: 518754 - DNA, 75 bp, synthetic construct
  source 1..75: mol_type = other DNA
ctgttggccccattggcgtgggtgatgggggttgactggagtgatgcaaatcttgccgggagtttgattgggcag

SEQ ID NO: 518755 - DNA, 75 bp, synthetic construct
  source 1..75: mol_type = other DNA
attagttccagaactgaaagcacagttccccgatgcaccttacattgctcgcccgggaaatattaacgcctggga

SEQ ID NO: 518756 - DNA, 75 bp, synthetic construct
  source 1..75: mol_type = other DNA
ccgcgcctgtatgaatatggggacgttaagcggtgcgccgaaagtacgcgctatgcagttaattgccgaagcaga

SEQ ID NO: 518757 - DNA, 75 bp, synthetic construct
  source 1..75: mol_type = other DNA
gtaactatgagatcggcatagcgaacgaactgccctggcgttgttctaccgatctgaagctatttaagagactca

SEQ ID NO: 518758 - DNA, 75 bp, synthetic construct
  source 1..75: mol_type = other DNA
cgggaaacgcaactgatgacccgctggatggataaccagaatatgaaggcggcgaccatccgggaactgaaaagc

SEQ ID NO: 518759 - DNA, 75 bp, synthetic construct
  source 1..75: mol_type = other DNA
tctcgcccgtaatgatctggcacgcatttgtacaccgggcagccgctacgtcgccgatctcactaaagttgaccg

SEQ ID NO: 518760 - DNA, 75 bp, synthetic construct
  source 1..75: mol_type = other DNA
ttttctgaataacattattaaccctatccgggttgaggcagggaaaccacctcatgaaccgcgtaagttccttgc

SEQ ID NO: 518761 - DNA, 75 bp, synthetic construct
  source 1..75: mol_type = other DNA
caaacattgccggaggcattacgtctcgccgcggatctggccgagcagaaagaacaactggcccagcagttagcc

SEQ ID NO: 518762 - DNA, 75 bp, synthetic construct
  source 1..75: mol_type = other DNA
gccagctaagcaatacctcacttaccccacaggaacagttcgctatcggcaaccgctggacggttcgtggttttg

SEQ ID NO: 518763 - DNA, 75 bp, synthetic construct
  source 1..75: mol_type = other DNA
caacgaagatttcgttaaagcagtcaaagccacgggtaaaaaacagctgattatcgccggtgtggtcaccgaagt

SEQ ID NO: 518764 - DNA, 75 bp, synthetic construct
  source 1..75: mol_type = other DNA
attagttccagaactgaaagcacaattccccgatacaccttacattgctcgcccgggaaatattaacgcctggga

SEQ ID NO: 518765 - DNA, 75 bp, synthetic construct
  source 1..75: mol_type = other DNA
taaaaacaacccggtggtggtgggcgaagcgggcgtgggcaaaagcgcactgattgaagggctggcgctgcgcat

SEQ ID NO: 518766 - DNA, 75 bp, synthetic construct
  source 1..75: mol_type = other DNA
cggcgactccattaccgttgatttcaaccatccgctggccgggcagaccgttcattttgatattgaagtgctgga

SEQ ID NO: 518767 - DNA, 75 bp, synthetic construct
  source 1..75: mol_type = other DNA
atgatatctctccctgccggttcgcgtatctggctggttgccggtatcaccgatatgagaaatggcttcaacggc

SEQ ID NO: 518768 - DNA, 75 bp, synthetic construct
  source 1..75: mol_type = other DNA
tttctgaacatctgatgctggtggatctcgcccgtaatgatctggcacgcatttgcacccccggcagccgctacg

SEQ ID NO: 518769 - DNA, 75 bp, synthetic construct
  source 1..75: mol_type = other DNA
gacgttttcatcggtcgtccgttttcaaaaccggcgggttttatgacgagtgatgtgacagccggttttaatctg

SEQ ID NO: 518770 - DNA, 75 bp, synthetic construct
  source 1..75: mol_type = other DNA
gttcgtggttttgacggggagcgaacgctgaatgccagtaacggctggtatccatgttgccgggccggatacccg

SEQ ID NO: 518771 - DNA, 75 bp, synthetic construct
  source 1..75: mol_type = other DNA
agtacggattatgacgttttcatcggtcgtccgttttcaaaaccggcgggttttatgacgagtgatgtgacagcc

SEQ ID NO: 518772 - DNA, 75 bp, synthetic construct
  source 1..75: mol_type = other DNA
tcgacggtctggctcgcaccttccgcgccgccgtgcatcacagttccccgattgcagtaaagtgcaacattctgg

SEQ ID NO: 518773 - DNA, 75 bp, synthetic construct
  source 1..75: mol_type = other DNA
gttatcattatcaatgaaagagatgaaaccatgttgcaacgtacgctgggcagtggctggggagtgttgctgccg

SEQ ID NO: 518774 - DNA, 75 bp, synthetic construct
  source 1..75: mol_type = other DNA
gcgattgccgatcgcaaggtgaaccagccacgtgccttaattatggcaccgacgcgtgaacttgccgtgcagatc

SEQ ID NO: 518775 - DNA, 75 bp, synthetic construct
  source 1..75: mol_type = other DNA
acacacgtctttaactacgatttacccgatgactgtgaagattacgttcaccgtattggtcgtacaggtcgcgca

SEQ ID NO: 518776 - DNA, 75 bp, synthetic construct
  source 1..75: mol_type = other DNA
aatgagttaggatatgtttatggtaatgaagaaaaaacaaatgaaattgtaaaaaaaacatccgggttatgtcat

SEQ ID NO: 518777 - DNA, 75 bp, synthetic construct
  source 1..75: mol_type = other DNA
aaaaaacaatccgggttatgtcgttaagatttttgaagaaaagatggttaatgaattaaaattagaacaagaatg

SEQ ID NO: 518778 - DNA, 75 bp, synthetic construct
  source 1..75: mol_type = other DNA
gctgattgcagggctgatgtatgcggatttatcaccggatcagtggcggattgtcattctgatgggattagtatt

SEQ ID NO: 518779 - DNA, 75 bp, synthetic construct
  source 1..75: mol_type = other DNA
cttagaaagtcagagtgttaatgtcaaaagtaataatgcaaataactggtatctgaccattatcgatgaccatgg

SEQ ID NO: 518780 - DNA, 75 bp, synthetic construct
  source 1..75: mol_type = other DNA
attagaaagccagagtgtaaacgtcaaaactaataatgcgaatagctggtatttgaccattattgatgatgatgg

SEQ ID NO: 518781 - DNA, 75 bp, synthetic construct
  source 1..75: mol_type = other DNA
tccggtaaataaagcgacatttaaaaagttactggtaaatcgcagtggcaatggattggtgataaaaaatgactc

SEQ ID NO: 518782 - DNA, 75 bp, synthetic construct
  source 1..75: mol_type = other DNA
tctgccaaaaccgctgcgcctcacgcgcccgcgtacaggcaatggtccgcgtcgtactggcgctccgcgtaatcg

SEQ ID NO: 518783 - DNA, 75 bp, synthetic construct
  source 1..75: mol_type = other DNA
ttctggttgccaccgacgttgccgcgcgtggtttgcatattccggcagtgacgcacgtctttaactacgatttac

SEQ ID NO: 518784 - DNA, 75 bp, synthetic construct
  source 1..75: mol_type = other DNA
cttagaaagtcagagtattaatgtcaaaagtaataatgcgaataactggtatctgaccattatcgatgaccatgg

SEQ ID NO: 518785 - DNA, 75 bp, synthetic construct
  source 1..75: mol_type = other DNA
cgctccgcttttctcgccgcccaggccattcttggctgcatgattgcacaaaacctcactggttcgattctcacc

SEQ ID NO: 518786 - DNA, 75 bp, synthetic construct
  source 1..75: mol_type = other DNA
gtgaggcggcaacttataacatattcagagagtctaatggatggattcgtgttgagtttacctacaaatcaccag

SEQ ID NO: 518787 - DNA, 75 bp, synthetic construct
  source 1..75: mol_type = other DNA
taatcagggtgtatacctgcttggtcagttcactggtccggttaactacttcacaaaacacagtgatggttggat

SEQ ID NO: 518788 - DNA, 75 bp, synthetic construct
  source 1..75: mol_type = other DNA
tgaatgtttccgtccagttaactttgacgataaaacgtttatgccgtgctacggactggcagagaacgtgctggc

SEQ ID NO: 518789 - DNA, 75 bp, synthetic construct
  source 1..75: mol_type = other DNA
ttttctttcggttggctttctaagctgcctgtacggcagtgaactcaaatactacacgtttagtccgttattaat

SEQ ID NO: 518790 - DNA, 75 bp, synthetic construct
  source 1..75: mol_type = other DNA
gccagagagtacgcaagccaggctgcggagccgtataaatatgtcttacagccgttacctgaggtgtggataccg

SEQ ID NO: 518791 - DNA, 75 bp, synthetic construct
  source 1..75: mol_type = other DNA
ctgaagtttctgatgaaagttatatgtattttggttttaccactcgtggtaaaaggctaattatcaccaatggca

SEQ ID NO: 518792 - DNA, 75 bp, synthetic construct
  source 1..75: mol_type = other DNA
atgttgcaacgtatgctgggcagtggctggggagtgttgctgccaggattgctgattgcagggctgatgtatgcg

SEQ ID NO: 518793 - DNA, 75 bp, synthetic construct
  source 1..75: mol_type = other DNA
taccgcaaatcctgctgtcgatttttgctctgctggctatttgtgcgggtatggcgtgggggctgacccggttta

SEQ ID NO: 518794 - DNA, 75 bp, synthetic construct
  source 1..75: mol_type = other DNA
cagatattcgtctggtagcatttatgcagtatttgcgagtattgtttgtcgcaggtgcagcagtactggtaacgc

SEQ ID NO: 518795 - DNA, 75 bp, synthetic construct
  source 1..75: mol_type = other DNA
tggagatgtctctgcgttgggcgaagcgtagccgtgagcgttttgatagcctcggtaacaaaaatgcgctgtttg

SEQ ID NO: 518796 - DNA, 75 bp, synthetic construct
  source 1..75: mol_type = other DNA
gttggggagtgttgctgccgggattgctgattgcaggactgacgtatgtggatttatcgccggaactgtggcgga

SEQ ID NO: 518797 - DNA, 75 bp, synthetic construct
  source 1..75: mol_type = other DNA
atatgatatttattatcattatcgatgtgagagataaaaccatgttgcaacgtatgctgggtagtggttggggag

SEQ ID NO: 518798 - DNA, 75 bp, synthetic construct
  source 1..75: mol_type = other DNA
tggatattccaccaaatagtccagaacaagaaggtaagaatgcactgaagtttgcgatgcaaaacagaatcaaat

SEQ ID NO: 518799 - DNA, 75 bp, synthetic construct
  source 1..75: mol_type = other DNA
ttgcgccttctctcgatagcgcaacaattaccccgcaaatttatcccgaaggaaaactgcgctgtactgcgccag

SEQ ID NO: 518800 - DNA, 75 bp, synthetic construct
  source 1..75: mol_type = other DNA
tatcttcaaccgttaataccgcttcgcaaagggtcagaaatccagtgtttggagcgttcgcactgtcatggtgcg

SEQ ID NO: 518801 - DNA, 75 bp, synthetic construct
  source 1..75: mol_type = other DNA
atatacgcggaagcaattccacagttacgcattgcaatggagatttcctatctttgtgcggcaaggctcggtgat

SEQ ID NO: 518802 - DNA, 75 bp, synthetic construct
  source 1..75: mol_type = other DNA
gcgtgggtcgcatccggtatctgggcgtgctgctttacgacgccgaccgcattgaggaagcggcaagcaccgagc

SEQ ID NO: 518803 - DNA, 75 bp, synthetic construct
  source 1..75: mol_type = other DNA
gccattgccaactatgaagaccgttttgtcatcccgacaagccatcgggaaatggcgggcgatgccttcgcagaa

SEQ ID NO: 518804 - DNA, 75 bp, synthetic construct
  source 1..75: mol_type = other DNA
gtgatcgaggaagccctgaaacaaggtattccacaaaatgtgattgacgctgcccagcgttcgccagtctacaaa

SEQ ID NO: 518805 - DNA, 75 bp, synthetic construct
  source 1..75: mol_type = other DNA
atcttctgctgaaagtgtctgcacctgaagccggctggacacacgaaagcctgaaccttgttcagccgcaggaag

SEQ ID NO: 518806 - DNA, 75 bp, synthetic construct
  source 1..75: mol_type = other DNA
ggcctttacccgatggtaaaaagcattaccacctagctctcctcgtcaataccgacacgttcaatattctgggaa

SEQ ID NO: 518807 - DNA, 75 bp, synthetic construct
  source 1..75: mol_type = other DNA
cgttgcctgtacagcgcgttactggccagttcttgcgaagcagacatcattgcgctggtgctgaatgcagatgcg

SEQ ID NO: 518808 - DNA, 75 bp, synthetic construct
  source 1..75: mol_type = other DNA
gtgctcgagctgaaatggcaggatattatggataaaggaatttacattgagcaaaacaagactggtgctaaacaa

SEQ ID NO: 518809 - DNA, 75 bp, synthetic construct
  source 1..75: mol_type = other DNA
cccgcatttacagagctggcccccagaacccaaaaagattatcggcaacatcaaagagcgttgctggctgtattc

SEQ ID NO: 518810 - DNA, 75 bp, synthetic construct
  source 1..75: mol_type = other DNA
gccggaagaagttgaagccactggcgcgcaaattatcctcggcaacaccttccatctgtggctgcgcccgggcca

SEQ ID NO: 518811 - DNA, 75 bp, synthetic construct
  source 1..75: mol_type = other DNA
atgattaacgctcatatcgtaccggccaccgcagagcatatcgaatcaattcttccgcatgtccgccaggcagat

SEQ ID NO: 518812 - DNA, 75 bp, synthetic construct
  source 1..75: mol_type = other DNA
tcgttatatcccgaatgcagaacagcgtgagcagatcctgacagtattacgtgaccgggaaaaaaactgcagcat

SEQ ID NO: 518813 - DNA, 75 bp, synthetic construct
  source 1..75: mol_type = other DNA
cgtaagaaaaataatgtcagacgagctgtaatagtgcaggggcgtgaaaactttaccattcgtaaagtcagtgtt

SEQ ID NO: 518814 - DNA, 75 bp, synthetic construct
  source 1..75: mol_type = other DNA
tccggcgtcaatgatcggtggcaatggtacgccctggctggtcgggaccagccgtattgaaaaatatcagaagac

SEQ ID NO: 518815 - DNA, 75 bp, synthetic construct
  source 1..75: mol_type = other DNA
cgcattatttacccggcagaaaataaagaagttatggtgcagttgatgaaccagggaaaccgttcttcgctgctg

SEQ ID NO: 518816 - DNA, 75 bp, synthetic construct
  source 1..75: mol_type = other DNA
tgtgtcagcttttttccaggctggcccatcagttaatctgtctacaggccgtctgaataatacggaaaaccaagg

SEQ ID NO: 518817 - DNA, 75 bp, synthetic construct
  source 1..75: mol_type = other DNA
ataaagaacagttacagtatctgttcattaataagcccaattccatcacgatgggcgatctttaccgactttatg

SEQ ID NO: 518818 - DNA, 75 bp, synthetic construct
  source 1..75: mol_type = other DNA
ttatggataaggggatctacattgagcaaaacaagaccggcactaagcaaatcaaagaatggtctccgcgattac

SEQ ID NO: 518819 - DNA, 75 bp, synthetic construct
  source 1..75: mol_type = other DNA
attatggcacatgtttatggactcccctgcatttacagaattggcaccacgaactcaaaaagattatcggcaaca

SEQ ID NO: 518820 - DNA, 75 bp, synthetic construct
  source 1..75: mol_type = other DNA
gcgtaaccacactgcacgcatctggcttcactggctgggattcaccattgatgagcctcagccatacggcattaa

SEQ ID NO: 518821 - DNA, 75 bp, synthetic construct
  source 1..75: mol_type = other DNA
ggaataagtcaacttcactggacgttacagaaacaggcgcagatagtttcgggtttaattatggccggtttgtcg

SEQ ID NO: 518822 - DNA, 75 bp, synthetic construct
  source 1..75: mol_type = other DNA
tagatcgaatggttacagttacgtatggaaacccgaaggaagcacaaaaactatagggctcggaagagtgcggga

SEQ ID NO: 518823 - DNA, 75 bp, synthetic construct
  source 1..75: mol_type = other DNA
aaattgaacaggtaagaattttcatggataagcggggacttgagagcaagacccaggcaaaccatgaactggcaa

SEQ ID NO: 518824 - DNA, 75 bp, synthetic construct
  source 1..75: mol_type = other DNA
aaaatccgtaaaggcgttgaactgcaaccattcacctggcaaaaaaaaaacgctttatctcacggtaagtattgg

SEQ ID NO: 518825 - DNA, 75 bp, synthetic construct
  source 1..75: mol_type = other DNA
gaagccgatgttgcgcttcaacgtccagttccaaacgatatcgcctacctccagtacacctccggcagcacccgt

SEQ ID NO: 518826 - DNA, 75 bp, synthetic construct
  source 1..75: mol_type = other DNA
gcgctgacagagagtgaattttctgctgattgggttaaactctactctataggcacgttttattattctgccaat

SEQ ID NO: 518827 - DNA, 75 bp, synthetic construct
  source 1..75: mol_type = other DNA
tgtatgctgacactggttattcccggtgttatgccgcgctttaaagctgagcgactaatgccagccatggcgctg

SEQ ID NO: 518828 - DNA, 75 bp, synthetic construct
  source 1..75: mol_type = other DNA
gccacgatggccatttgcccaattatggtttcttttagcgtggcggcgattaattcactgatgaagcaagtttct

SEQ ID NO: 518829 - DNA, 75 bp, synthetic construct
  source 1..75: mol_type = other DNA
gactttgattttctgactcaggtttactcacggtccggtctttatgaggcgctgaaaagtccatcgctgaaacag

SEQ ID NO: 518830 - DNA, 75 bp, synthetic construct
  source 1..75: mol_type = other DNA
aaacacgacgtcgctcagcgcctacaacagcgcgtcacggccattatgcggtatgcggtacagaacgattacatc

SEQ ID NO: 518831 - DNA, 75 bp, synthetic construct
  source 1..75: mol_type = other DNA
agctaagccactctgagcgtaatagcgttagggctgcttatattcatacttcagagcatttggatgagcgtcgtt

SEQ ID NO: 518832 - DNA, 75 bp, synthetic construct
  source 1..75: mol_type = other DNA
cgataaagtactcaaaagcctcgagacgcatgttttcccttttatcggcaaccgagatatcacaaaactcaacac

SEQ ID NO: 518833 - DNA, 75 bp, synthetic construct
  source 1..75: mol_type = other DNA
caacccaggatgtctgtgggcatgggttcagggcgatggcgtgcagtgcgttaatagaatcaggtttatggtccc

SEQ ID NO: 518834 - DNA, 75 bp, synthetic construct
  source 1..75: mol_type = other DNA
acttccagaaaatgtcacatttattgcgccagacggagaataccaacgctgggatggtagccagtgggtgaccga

SEQ ID NO: 518835 - DNA, 75 bp, synthetic construct
  source 1..75: mol_type = other DNA
gcagaactacagacatgggctggtgaaaatggtctgatctttacgggagcacatgacccgcgtaaaccaatcagt

SEQ ID NO: 518836 - DNA, 75 bp, synthetic construct
  source 1..75: mol_type = other DNA
ttgcgtgctgattttgattttctgacgcaggtatattcgcggtctggtctctatgaggcgttaaaaaatccgtca

SEQ ID NO: 518837 - DNA, 75 bp, synthetic construct
  source 1..75: mol_type = other DNA
tggtttttattcgttccagtgaactcagatatgcccgctggtcagaaattgatattgaaaatgccatgtggacta

SEQ ID NO: 518838 - DNA, 75 bp, synthetic construct
  source 1..75: mol_type = other DNA
caaacctctgccaggcgtaaaatattcgcaccggggcacaaaaatgcgtactgaacatcttgtaccgctttcctc

SEQ ID NO: 518839 - DNA, 75 bp, synthetic construct
  source 1..75: mol_type = other DNA
accaatcagtgaaaatactgtaaataaagccctgagggtgatggggtatgacacaacccaggatgtctgtggcca

SEQ ID NO: 518840 - DNA, 75 bp, synthetic construct
  source 1..75: mol_type = other DNA
ttcccctcagcaagcaggctgtagctatacttacagaacttcagacatgggctggtgaaaatggtctggtcttta

SEQ ID NO: 518841 - DNA, 75 bp, synthetic construct
  source 1..75: mol_type = other DNA
atggttcccgttactggcgtctccgttatccgtattctgggtaaacgagaagactctggcaactttggtgtgtat

SEQ ID NO: 518842 - DNA, 75 bp, synthetic construct
  source 1..75: mol_type = other DNA
gctgcagaagctaaacaaatttatgaaatcgccagtcgtctgcagcaaaggatatctgctgtaatgcgttatgcc

SEQ ID NO: 518843 - DNA, 75 bp, synthetic construct
  source 1..75: mol_type = other DNA
ggaagaacggcgactgatgctacagtggtgggcagattttctgaatgcgaacagagagaaatgtatcagtccgtt

SEQ ID NO: 518844 - DNA, 75 bp, synthetic construct
  source 1..75: mol_type = other DNA
cgtattgacggttataaaggccagcctgtcacccggcttgccgttatgctgaatttactggtttttattcgttcc

SEQ ID NO: 518845 - DNA, 75 bp, synthetic construct
  source 1..75: mol_type = other DNA
aattctcacaccggggatccaagatgcgaacaccacatcttgtgccactcagcaaacaggttgtagccatactgg

SEQ ID NO: 518846 - DNA, 75 bp, synthetic construct
  source 1..75: mol_type = other DNA
aaacaggctgtagccatactgacagaacttcagacatgggcaggtgaaaatggtctgatatttacgggtgcacat

SEQ ID NO: 518847 - DNA, 75 bp, synthetic construct
  source 1..75: mol_type = other DNA
ggaacgtcagatgagccatcaggagcgtaatggtgtacgtgctgcgtatatccataaagcagaacatctggaaga

SEQ ID NO: 518848 - DNA, 75 bp, synthetic construct
  source 1..75: mol_type = other DNA
tattgcacgacgctggcatgccagtaataaacaatgggcacaatcacacagcgataaagtactcaaaagcctcga

SEQ ID NO: 518849 - DNA, 75 bp, synthetic construct
  source 1..75: mol_type = other DNA
tttttgcagcgcttggtgaacgtaatatcgctgagttaaaaactcgagatttattagcacccattaaggccgtgg

SEQ ID NO: 518850 - DNA, 75 bp, synthetic construct
  source 1..75: mol_type = other DNA
attgaccacggtaaaacgccagcatcgccctgctctggagctttcacgcctgcctgaacttctgtcgcgtattga

SEQ ID NO: 518851 - DNA, 75 bp, synthetic construct
  source 1..75: mol_type = other DNA
tttccgaacaatggcctgtagttcattgatcgaatcaggtttgtggtctcgtgatgctgttgaacgtcagatgag

SEQ ID NO: 518852 - DNA, 75 bp, synthetic construct
  source 1..75: mol_type = other DNA
gagatgcggtagaacggcagatgagccatatggaacgcaattcggtgagggcggcgtatattcataaagcggaac

SEQ ID NO: 518853 - DNA, 75 bp, synthetic construct
  source 1..75: mol_type = other DNA
gcattgaccacggtaaaacgccagcatcgccccgctcttgatctttcccgcctgcctgaacttttgtcgcgtatt

SEQ ID NO: 518854 - DNA, 75 bp, synthetic construct
  source 1..75: mol_type = other DNA
gcattgaccacggtaaaacgccagcatcgccccgctcttgatctttctcgcctgcctgaacttctgtcgcgtatt

SEQ ID NO: 518855 - DNA, 75 bp, synthetic construct
  source 1..75: mol_type = other DNA
cattggtatggcctctgcactggcggttctggctgacgaaaacgtggttcacggtccgctggaagtgctgctgac

SEQ ID NO: 518856 - DNA, 75 bp, synthetic construct
  source 1..75: mol_type = other DNA
ggtgaagatgcctctacaggtgtgagttatctggaattagcagatgttcttatcagacatggcgcgcagactaat

SEQ ID NO: 518857 - DNA, 75 bp, synthetic construct
  source 1..75: mol_type = other DNA
ataaacagctaaaacagcataatatcggacttttcaattgctcaaaaaattctcttttaagaccttatttgccgt

SEQ ID NO: 518858 - DNA, 75 bp, synthetic construct
  source 1..75: mol_type = other DNA
aaagcaaaaccatcccattctcctgcagcacccttttttatccttaccttccagcagcactaattatcaacaact

SEQ ID NO: 518859 - DNA, 75 bp, synthetic construct
  source 1..75: mol_type = other DNA
gtgccgctaaaccggatgaaaaaccttataaacttgccgacagcggcaacatgttcttgctcgttcaccctaacg

SEQ ID NO: 518860 - DNA, 75 bp, synthetic construct
  source 1..75: mol_type = other DNA
atggtagaaagaaccgctgttttccctgctggccgacattcactgtatgcagaacatcgttattctgcggctatt

SEQ ID NO: 518861 - DNA, 75 bp, synthetic construct
  source 1..75: mol_type = other DNA
aatcctgtggtcaggtctgatggtctaaaactcaatattacggaaaatgacaatgcacttgatttggaattagct

SEQ ID NO: 518862 - DNA, 75 bp, synthetic construct
  source 1..75: mol_type = other DNA
ctagcagttatgctgaatttactggtttttattcgttccagtgaactcagatatgcccgttggtctgaaattgat

SEQ ID NO: 518863 - DNA, 75 bp, synthetic construct
  source 1..75: mol_type = other DNA
tcagcaaacaggttgtagccatactggcagaacttcagatatgggctggtgaaaatggtctgatctttacgggag

SEQ ID NO: 518864 - DNA, 75 bp, synthetic construct
  source 1..75: mol_type = other DNA
tcctatcatgaagagcaactcgctgaatacattgttggttgggcaaaagagaaaggtttccatgtcgaacgcgat

SEQ ID NO: 518865 - DNA, 75 bp, synthetic construct
  source 1..75: mol_type = other DNA
ttgaacgtcagatgagtcatcaggagcgcaacggagtacgtgccgcgtatattcataaagcagaacatctggaag

SEQ ID NO: 518866 - DNA, 75 bp, synthetic construct
  source 1..75: mol_type = other DNA
aacacgacgtcgctcagcgcctacaacagcgcgtcacggccattatgcggtatgccgtacagaacgattacatcg

SEQ ID NO: 518867 - DNA, 75 bp, synthetic construct
  source 1..75: mol_type = other DNA
gttaagccactcagagcgtaacaatgttcgtgctgcgtatatccatacttctgagcatttagatgagcgtcgatt

SEQ ID NO: 518868 - DNA, 75 bp, synthetic construct
  source 1..75: mol_type = other DNA
tggtgtacgtgctgcgtatatccataaagcagaacatctggaagaacggcgactgatgttgcaatggtgggccga

SEQ ID NO: 518869 - DNA, 75 bp, synthetic construct
  source 1..75: mol_type = other DNA
tgcgctggtgaatcgcgaactcacccagccagacgatgtccgcaaagccgcgcaggaaatcgttaatagcggcaa

SEQ ID NO: 518870 - DNA, 75 bp, synthetic construct
  source 1..75: mol_type = other DNA
cttgcggttatgctgaatttactggtttttattcgttccagtgaactcagatacgcccgttggtctgaaattgat

SEQ ID NO: 518871 - DNA, 75 bp, synthetic construct
  source 1..75: mol_type = other DNA
cttgccgttatgctgaatttactggtttttattcgttccagtgaactcagataggcccgttggtctgaaattgat

SEQ ID NO: 518872 - DNA, 75 bp, synthetic construct
  source 1..75: mol_type = other DNA
aaatactgtaaataaggccctgagggtgatggggtatgacacaacccaggaagtctgtggccatggattccgggc

SEQ ID NO: 518873 - DNA, 75 bp, synthetic construct
  source 1..75: mol_type = other DNA
cttcagacatgggcaggtgaaaatggtctgatctttacgggagcacacgacccacgtaaaccaatcagtgaaaat

SEQ ID NO: 518874 - DNA, 75 bp, synthetic construct
  source 1..75: mol_type = other DNA
atcctggtcataagcggaagcctgccgccaggtgtgaagctggaaaaattaacccaactgatttccgctgcgcaa

SEQ ID NO: 518875 - DNA, 75 bp, synthetic construct
  source 1..75: mol_type = other DNA
cggtgacggtggcagcaccgccggaactggcttacggggatgagggatatccacccaaagtgccgccgggagcga

SEQ ID NO: 518876 - DNA, 75 bp, synthetic construct
  source 1..75: mol_type = other DNA
ggaaaagctgacggacggcacggtcatcgaagatatggatgcgcgggggacggtgatatcccagccactgggtga

SEQ ID NO: 518877 - DNA, 75 bp, synthetic construct
  source 1..75: mol_type = other DNA
acagaagcacgttatatgggcgatatcatggcggatgacgagaatacggcaaaagcgccctcttacactctcgtc

SEQ ID NO: 518878 - DNA, 75 bp, synthetic construct
  source 1..75: mol_type = other DNA
cccgcccccgcactggggctgacgctggcacaaaaactggtgaccacgttccatctgatggatcttagccagctt

SEQ ID NO: 518879 - DNA, 75 bp, synthetic construct
  source 1..75: mol_type = other DNA
agaagacgccagccggaggaagaataaaactctgcattctgtgtgtgacactaatgctggccggggccggaactg

SEQ ID NO: 518880 - DNA, 75 bp, synthetic construct
  source 1..75: mol_type = other DNA
gccgaaacgcaggcaaaactggcggcatcggaaaaggagaatgaagggctgaagtcttcactggatgaacttaag

SEQ ID NO: 518881 - DNA, 75 bp, synthetic construct
  source 1..75: mol_type = other DNA
agagcggattgtgattcaggaggtgctggaggccagcgatattccgtatcgtcatgaccgccagttgttacatag

SEQ ID NO: 518882 - DNA, 75 bp, synthetic construct
  source 1..75: mol_type = other DNA
ctggaggccagcgatatcccctatcgtcatgaccgtcagttgttacatagcgcgctggaaaaggcattacaggct

SEQ ID NO: 518883 - DNA, 75 bp, synthetic construct
  source 1..75: mol_type = other DNA
cgataacggtggctcgacggggcgtattcgccgttcagaaggcggcattgcctggggcgatatgcgcaactgcct

SEQ ID NO: 518884 - DNA, 75 bp, synthetic construct
  source 1..75: mol_type = other DNA
tgtcattgtcaatgagtcaaacgggcgatattacgaacctgcgcccgggcgaaattatggtgtcggcgtgaatat

SEQ ID NO: 518885 - DNA, 75 bp, synthetic construct
  source 1..75: mol_type = other DNA
ttcgcgtaaacgcgtcctggacctggcttgatgcgacctatcgcagcaatgtttgcaatgaacaggattgtaacg

SEQ ID NO: 518886 - DNA, 75 bp, synthetic construct
  source 1..75: mol_type = other DNA
ctggaggccagcgatattccgtatcgtcatgaccgccagttgttacataacgcgctggaaaaggcattacaggct

SEQ ID NO: 518887 - DNA, 75 bp, synthetic construct
  source 1..75: mol_type = other DNA
cgctacacctttaataataaagatgacagcaatggctgggatttactggcacaggcggaggccgcgctaaataac

SEQ ID NO: 518888 - DNA, 75 bp, synthetic construct
  source 1..75: mol_type = other DNA
atcggaagacttattgcgaatggtgtttcacgtaagcggatagcgattatcttcgatgttaccttatccacgctt

SEQ ID NO: 518889 - DNA, 75 bp, synthetic construct
  source 1..75: mol_type = other DNA
ccgtttgatgccgtcacaataggcaaccatgaatttgaccacggctgggacaacacattattacagttgagccag

SEQ ID NO: 518890 - DNA, 75 bp, synthetic construct
  source 1..75: mol_type = other DNA
taggtcagcgcattgtatcttttaaaattaatggtgaagagatcgttgatacgaatatttaccatgttgcgacgg

SEQ ID NO: 518891 - DNA, 75 bp, synthetic construct
  source 1..75: mol_type = other DNA
acgaagagcttattccggaaacagcccctatctgcatcgtagccgactctctggcgtcgatggttccgaactcga

SEQ ID NO: 518892 - DNA, 75 bp, synthetic construct
  source 1..75: mol_type = other DNA
cggttggattaatttctgaactgggtgatctgacccgttttgaacatccacgacaactgatgtcatggtttggta

SEQ ID NO: 518893 - DNA, 75 bp, synthetic construct
  source 1..75: mol_type = other DNA
cgtattgctcgactaatttacactggatcacccgccgcgcgccgtttggcgtggcaacgttgctggatcaggatg

SEQ ID NO: 518894 - DNA, 75 bp, synthetic construct
  source 1..75: mol_type = other DNA
atgttcaggcagttgaaaaaaaacctggttgcaaccctcattgctgccatgaccattggtcaggtagccccggcg

SEQ ID NO: 518895 - DNA, 75 bp, synthetic construct
  source 1..75: mol_type = other DNA
tgacagcaacggctgggatttactggcacaggcggaagccgcgctaaataaccgcgatcaggagctggctgcgcg

SEQ ID NO: 518896 - DNA, 75 bp, synthetic construct
  source 1..75: mol_type = other DNA
cattactgacggcagaaccaacgaatgcatggtttctcgatctggcaaccgatatcgaccttgggcaaaacaaag

SEQ ID NO: 518897 - DNA, 75 bp, synthetic construct
  source 1..75: mol_type = other DNA
cgttactggcggcagaacctggcaacgcatggtatctcgatctggctactgatatcgatcttgggcaaaacaaag

SEQ ID NO: 518898 - DNA, 75 bp, synthetic construct
  source 1..75: mol_type = other DNA
cgctacacctttaacaataaagatgacagcaatggctgggatttactggcacaggcggaggccgcgctaaataat

SEQ ID NO: 518899 - DNA, 75 bp, synthetic construct
  source 1..75: mol_type = other DNA
tgacctgggtcggggcgttaggttctattttactggcgatggccagtccacaagcagggatggcggcgctaaccg

SEQ ID NO: 518900 - DNA, 75 bp, synthetic construct
  source 1..75: mol_type = other DNA
agagcggattgtgattcaggaggtactggaggccagcgatattccgtatcgtcatgaccgccagttgttacataa

SEQ ID NO: 518901 - DNA, 75 bp, synthetic construct
  source 1..75: mol_type = other DNA
ccgacgcgcaggataaggcgcagggtcaggtacgcgaaatggccgacattatcagcgaactgaacagcctgagcg

SEQ ID NO: 518902 - DNA, 75 bp, synthetic construct
  source 1..75: mol_type = other DNA
gcgcggcaaagagcatatcaaggtcagtaccgagtacggcggcaagagccagctaaacctcggtcatcttgttga

SEQ ID NO: 518903 - DNA, 75 bp, synthetic construct
  source 1..75: mol_type = other DNA
atgacgatagaaacattcccctggggcattaaggtttccagccagcccaccgagggaagcaaagacacagtcagg

SEQ ID NO: 518904 - DNA, 75 bp, synthetic construct
  source 1..75: mol_type = other DNA
tgcgcaaggcgggtatcaaactgattgccaataaaggcgcagtatcggtacaggcgcagcacgatttgatggagt

SEQ ID NO: 518905 - DNA, 75 bp, synthetic construct
  source 1..75: mol_type = other DNA
aactgaacggtctgagcgataaaatccagaaactgtccgatgacgcgacgacggcgaacgccgacccggcggata

SEQ ID NO: 518906 - DNA, 75 bp, synthetic construct
  source 1..75: mol_type = other DNA
aaggcatctttatcagcgccgacgcacaggacaaggcgcagggtcaggtcagagagatggccgacattatcagcg

SEQ ID NO: 518907 - DNA, 75 bp, synthetic construct
  source 1..75: mol_type = other DNA
ttgtctggaatcacattccctggggggctgaagattttacaggttcagtacctctccaggagcgagtggatttat

SEQ ID NO: 518908 - DNA, 75 bp, synthetic construct
  source 1..75: mol_type = other DNA
tttaatgattcgctggatatgattacgggctattctccgggttataaaaaagtgaagattggtgataatgtggtt

SEQ ID NO: 518909 - DNA, 75 bp, synthetic construct
  source 1..75: mol_type = other DNA
aaaatgcgtatgttttcccgctctggtgaacggtatgcaactgacttgtgcaattactggcgaaagtctggcgaa

SEQ ID NO: 518910 - DNA, 75 bp, synthetic construct
  source 1..75: mol_type = other DNA
ccacttgtcaggcgaaatactggaacaacggcaccggctggagtgaagttgtcgcttacctaaaatcgctaggtt

SEQ ID NO: 518911 - DNA, 75 bp, synthetic construct
  source 1..75: mol_type = other DNA
agtaagaaatatttcgtgcgctttcgtattcaggtattccgtcagggggaagaaacgcccctgctggatgaaacc

SEQ ID NO: 518912 - DNA, 75 bp, synthetic construct
  source 1..75: mol_type = other DNA
tttatgactttaatgatggcgctcgtgtgttgcttcctgaagggaaatggcacgtacgtctgctggatgcggatt

SEQ ID NO: 518913 - DNA, 75 bp, synthetic construct
  source 1..75: mol_type = other DNA
atcagcgccgacgcgcaggataaggcgcagggtcaggtacgcgaaatggccgacattatcagcgaactgaacagc

SEQ ID NO: 518914 - DNA, 75 bp, synthetic construct
  source 1..75: mol_type = other DNA
ctgtaatatctgcgaaatttgatgagcaagttagagtaattgatgatgacggaaaattcattgctaatgtacctt

SEQ ID NO: 518915 - DNA, 75 bp, synthetic construct
  source 1..75: mol_type = other DNA
ggggcgatctcggtacaggcacagaacgatctgatggaactgttggcacagaaatcgatagagatcaccagtacg

SEQ ID NO: 518916 - DNA, 75 bp, synthetic construct
  source 1..75: mol_type = other DNA
tgtccactgatgcgcagacggcgaatgccgatccggcagatctgtcatcacagatagcgctgttgcagcaaagtg

SEQ ID NO: 518917 - DNA, 75 bp, synthetic construct
  source 1..75: mol_type = other DNA
cattacgccgcacgccagcgccgatggtctatatcggcaatctggggcgtgagttgagtttacctgcggctaatt

SEQ ID NO: 518918 - DNA, 75 bp, synthetic construct
  source 1..75: mol_type = other DNA
atctgattctgattgggccgggtagtttttataccagtctgatgccgattctgttgcttgaggaaatggcgcagg

SEQ ID NO: 518919 - DNA, 75 bp, synthetic construct
  source 1..75: mol_type = other DNA
aaagatctgacgcaggctgcgatcctgctaagcgcacccaaaggcgtggcgatcgccagcggagagcacctgcaa

SEQ ID NO: 518920 - DNA, 75 bp, synthetic construct
  source 1..75: mol_type = other DNA
aaacagcagcgcggggaaggttttgaactgcgtaccgatctgtggggtgcagtacgggcaaagaaaggcatcttt

SEQ ID NO: 518921 - DNA, 75 bp, synthetic construct
  source 1..75: mol_type = other DNA
atgacctgaccgcctcggtgattttgatgcacgcgccgaaaggtgtggcggtcgccagcggcgagcacctgcaac

SEQ ID NO: 518922 - DNA, 75 bp, synthetic construct
  source 1..75: mol_type = other DNA
attcagaactacaagcgtaacgtgctgcgcaccccggcgaacaacaaaatccgcctcgacgatgagcgcggcaaa

SEQ ID NO: 518923 - DNA, 75 bp, synthetic construct
  source 1..75: mol_type = other DNA
tggcacagaaactgatggccacgttccatctgatggatctgagtcagctttacactttgttattttgtctgtggt

SEQ ID NO: 518924 - DNA, 75 bp, synthetic construct
  source 1..75: mol_type = other DNA
ggtttttggtgctgggcgtcattgaatattttgtgttgcgctttatctggcgacgctggttttcgctggcagatt

SEQ ID NO: 518925 - DNA, 75 bp, synthetic construct
  source 1..75: mol_type = other DNA
ctgattccaaacaaacaattgatgtcagattattgaatcaaaatatagacatgatattgggaggcgtgcatgagt

SEQ ID NO: 518926 - DNA, 75 bp, synthetic construct
  source 1..75: mol_type = other DNA
tggaataaaaagctggatgaagtcgtgcagcaaacggtggcgcaatcgccggttgaactaaaacgtgcctatggt

SEQ ID NO: 518927 - DNA, 75 bp, synthetic construct
  source 1..75: mol_type = other DNA
atgaaaattaaaatgcttgctgcgggtatcgcattaacactgccgttttgggcttgcgccaaagatgtcaccatc

SEQ ID NO: 518928 - DNA, 75 bp, synthetic construct
  source 1..75: mol_type = other DNA
gatcgctgacggtaaacgggatattggcggctgggcaaatatcactacgctggttaagcaagaaaaagcaaaaaa

SEQ ID NO: 518929 - DNA, 75 bp, synthetic construct
  source 1..75: mol_type = other DNA
atgaaagtagcaaaagacctggtggtcagcctggcctatcaggtacgtacagaagacggtgtgttggttgatgag

SEQ ID NO: 518930 - DNA, 75 bp, synthetic construct
  source 1..75: mol_type = other DNA
ggagttcactgttaaacgcctgcagctgcgcccgaccgtgcaactcaatcctatgaacagcgcctacagtccgat

SEQ ID NO: 518931 - DNA, 75 bp, synthetic construct
  source 1..75: mol_type = other DNA
gccgcgacacgcgtaggtattgaagccagagatgaaattaaatggctgcaacattatatcgacgaactaaaaggt

SEQ ID NO: 518932 - DNA, 75 bp, synthetic construct
  source 1..75: mol_type = other DNA
aactatactaagtagctatcatgagtttttgattaaatgttttagtggggatgattatgttctttattacaaaag

SEQ ID NO: 518933 - DNA, 75 bp, synthetic construct
  source 1..75: mol_type = other DNA
gctggtactggtgcaaaacctggttggtactgtggcatcggcgccccccgcgcgggggggggggggggggggggg

SEQ ID NO: 518934 - DNA, 75 bp, synthetic construct
  source 1..75: mol_type = other DNA
gcatcggtgcgctgtgtgctgatttcgaccttcgcggtcagcgcctcgtcgttgttctacgtgcgctatgtgtta

SEQ ID NO: 518935 - DNA, 75 bp, synthetic construct
  source 1..75: mol_type = other DNA
atggcagtttctctcgtaaaaggcggcaacgtatctctgaccaaagaagcaccaaccatgaatgttgctatggtt

SEQ ID NO: 518936 - DNA, 75 bp, synthetic construct
  source 1..75: mol_type = other DNA
ctcctctaaaaagaatgcatgaaattaatctcaaaaaaaactataatatcgagttaaactttaaacagcgtgccc

SEQ ID NO: 518937 - DNA, 75 bp, synthetic construct
  source 1..75: mol_type = other DNA
tattcctgcgcttggttgcttacaacttattgttgcccggaaacggactattcctttaacgctaaatccgatgaa

SEQ ID NO: 518938 - DNA, 75 bp, synthetic construct
  source 1..75: mol_type = other DNA
agtggttgatggtaaccacatgctggccggtcagaacctgaaattcaacgttgaggttgtggcgattcgtgaagc

SEQ ID NO: 518939 - DNA, 75 bp, synthetic construct
  source 1..75: mol_type = other DNA
cgagtttacggtgaaaaaatttgcaactacgcccgacggtacagcttattcccatgaacagtgcgtactcgccca

SEQ ID NO: 518940 - DNA, 75 bp, synthetic construct
  source 1..75: mol_type = other DNA
gtcatctgatgatggattttcggtaattgattatcatcaggtcgccagtgaagcgggtagtggcaggatattcag

SEQ ID NO: 518941 - DNA, 75 bp, synthetic construct
  source 1..75: mol_type = other DNA
cagccgggattatttgatgaaacccagccccgtaaaaacagtgaaaagttaatgaaaatactcgatgaactgaac

SEQ ID NO: 518942 - DNA, 75 bp, synthetic construct
  source 1..75: mol_type = other DNA
atgacagagaaaactcttgccagtccgaaaccttcggaaattcccattgcaaataattttaaaaaagtcttcagg

SEQ ID NO: 518943 - DNA, 75 bp, synthetic construct
  source 1..75: mol_type = other DNA
ccgaattccgcacttagctacgagttggatgccattgctgctgccgtattggggggcaccagtctcaacggtggt

SEQ ID NO: 518944 - DNA, 75 bp, synthetic construct
  source 1..75: mol_type = other DNA
atgacgatcatccatcctctgcttgccagccgtagcgcaccggactatcgccagccctggcggttagcgggagtg

SEQ ID NO: 518945 - DNA, 75 bp, synthetic construct
  source 1..75: mol_type = other DNA
ctacattaaaagcagatacaacagaaaatacggttggtggttttgtccagtattctccggatacagggcagatgg

SEQ ID NO: 518946 - DNA, 75 bp, synthetic construct
  source 1..75: mol_type = other DNA
gaggaaccgcccctgaatggcaaatgaaacgggaaatgctctcgccttcgtatacaacacaatggactgagatcc

SEQ ID NO: 518947 - DNA, 75 bp, synthetic construct
  source 1..75: mol_type = other DNA
attacgtttatcacgcggtggttgattactttaaagcgggtaataccatcacggatgaacagatcaacggtatgc

SEQ ID NO: 518948 - DNA, 75 bp, synthetic construct
  source 1..75: mol_type = other DNA
ggccgcagagaaactacgtggggagcgtcagtattgccggcaggtgacgacatttgtacggacatccccctttgc

SEQ ID NO: 518949 - DNA, 75 bp, synthetic construct
  source 1..75: mol_type = other DNA
gcgaggaaccgcccctgaatggcaaatgaaacgggaaatgttgagtcagtgttatacaactaaatggcgagatat

SEQ ID NO: 518950 - DNA, 75 bp, synthetic construct
  source 1..75: mol_type = other DNA
gtatagcgcagccgggattatttgatgaaatccagccccataaaaacagcgaaaagttaatgaaaacactcgatg

SEQ ID NO: 518951 - DNA, 75 bp, synthetic construct
  source 1..75: mol_type = other DNA
tggtgaatattccttatggttcacttgctaccgcgatgacccaacaaccacaatcccgcgcccgtctgggcgcgg

SEQ ID NO: 518952 - DNA, 75 bp, synthetic construct
  source 1..75: mol_type = other DNA
ctcttgtccggtactggagccgaccggcccgctgcacacccagttcggatatcacatcattaaggtgctgtaccg

SEQ ID NO: 518953 - DNA, 75 bp, synthetic construct
  source 1..75: mol_type = other DNA
ctcttgtccggtactggagccaaccggcccgctgcacacccagttcggttaccacatcattaaggtgctgtaccg

SEQ ID NO: 518954 - DNA, 75 bp, synthetic construct
  source 1..75: mol_type = other DNA
ttccggcgttcgataaagtggttttctcttgtccggtactggagccgaccggcccgctgcacacccagttcggtt

SEQ ID NO: 518955 - DNA, 75 bp, synthetic construct
  source 1..75: mol_type = other DNA
aactaatgatgatcgcacgccgccggaaaacgatgattttgtgcgcaagttgccacgacaagttacatagcggaa

SEQ ID NO: 518956 - DNA, 75 bp, synthetic construct
  source 1..75: mol_type = other DNA
ttatctctgatcagggttggttgcacccttattgccattagcaatccggtgcagattttctcaatcacagaggta

SEQ ID NO: 518957 - DNA, 75 bp, synthetic construct
  source 1..75: mol_type = other DNA
actgcgttactatcagggcaaggaatcagaaatagcggacgccgttgaattttttagcgacaacaaagatgttat

SEQ ID NO: 518958 - DNA, 75 bp, synthetic construct
  source 1..75: mol_type = other DNA
accaaaagacgccggtatgactgatgcctttagtggctcggataaagacgcttttggtgcatctgatggtgacgc

SEQ ID NO: 518959 - DNA, 75 bp, synthetic construct
  source 1..75: mol_type = other DNA
cggtctgatacacctcggtattcgatatgcagatgttgatgtcatgaaaattgctggagatgcccagctttctac

SEQ ID NO: 518960 - DNA, 75 bp, synthetic construct
  source 1..75: mol_type = other DNA
attatggtttcctttagcgtggcagcgatcaattcgctaatgaagcaagttgcgctgcgagccgactttgatttt

SEQ ID NO: 518961 - DNA, 75 bp, synthetic construct
  source 1..75: mol_type = other DNA
ctcttgtccggtactggagccaaccggcccgctgcatacccagttcgggtatcacatcattaaggtgctttaccg

SEQ ID NO: 518962 - DNA, 75 bp, synthetic construct
  source 1..75: mol_type = other DNA
ggctctggatcttctcgagcagattaagaacggtgccgatttcggcaagctggcgaagaaacactccatttgccc

SEQ ID NO: 518963 - DNA, 75 bp, synthetic construct
  source 1..75: mol_type = other DNA
ttattttgcacctgacagttttctcgctgaaattattcatgaatggaagaaggcagatatatcagaacaagtgac

SEQ ID NO: 518964 - DNA, 75 bp, synthetic construct
  source 1..75: mol_type = other DNA
aaaagaaatatggctgttatgagaatgtgaaggctgtacatcgttcaagtctacaaaatctcagtgaagctgaaa

SEQ ID NO: 518965 - DNA, 75 bp, synthetic construct
  source 1..75: mol_type = other DNA
gccatcaccgcaggggcaaaaagaaaaagaggtcgccattgttaaggtctgggagaaatgatgtgggacaaagtt

SEQ ID NO: 518966 - DNA, 75 bp, synthetic construct
  source 1..75: mol_type = other DNA
gtggtcagacaggcattcataacatgaaagccgtggccaccgaccccaccgtggattattaccgcccgcagataa

SEQ ID NO: 518967 - DNA, 75 bp, synthetic construct
  source 1..75: mol_type = other DNA
ggtggtcctgactacaccaccacgccggtggacacgctgcttctgacgctggacggtaccgggaacaacgtgatg

SEQ ID NO: 518968 - DNA, 75 bp, synthetic construct
  source 1..75: mol_type = other DNA
tgctattcttctgggtttccgtctggtcactgccggtggcgttggttgcgttggccatcgcttcaattggtcagg

SEQ ID NO: 518969 - DNA, 75 bp, synthetic construct
  source 1..75: mol_type = other DNA
actattctcatttacccgtaaatgcggtcaggcaatcggaggttcaattcctgcctttattttgggattaagcgg

SEQ ID NO: 518970 - DNA, 75 bp, synthetic construct
  source 1..75: mol_type = other DNA
gacgccttcccgcgcgagaagaaacgccatcaccgcaggggcaaaaagaaaaaagaggtcgccattgttaaggtc

SEQ ID NO: 518971 - DNA, 75 bp, synthetic construct
  source 1..75: mol_type = other DNA
gtgactgcctatcaaacaaagaaagaggcgcttaaaggccgtggccccaaaaatccgcgtccagctagtttgaac

SEQ ID NO: 518972 - DNA, 75 bp, synthetic construct
  source 1..75: mol_type = other DNA
gcgaggtggcgctggaaaatactcacccgtttacccgcgagttatggggacgcaactggacttatgcccataacg

SEQ ID NO: 518973 - DNA, 75 bp, synthetic construct
  source 1..75: mol_type = other DNA
gctctggctcatgcggacaggattgtagtgacaacacatgatgctgggctgtggtttcgaatcagagatctgttg

SEQ ID NO: 518974 - DNA, 75 bp, synthetic construct
  source 1..75: mol_type = other DNA
gcgttctgcgcctctctcatatccataacacactgtggccggagggggcagaaatcgaatacgaaggtggtagcg

SEQ ID NO: 518975 - DNA, 75 bp, synthetic construct
  source 1..75: mol_type = other DNA
tcttccgacgcgaactggaagagattttccagcgtgaaatgcaacaagaacgacgccagctggacggctgggatg

SEQ ID NO: 518976 - DNA, 75 bp, synthetic construct
  source 1..75: mol_type = other DNA
ttattacggcgacgccacgcaggtagatcttttacgttctgcgggtgcagaggccgctgagtctatcgtcattac

SEQ ID NO: 518977 - DNA, 75 bp, synthetic construct
  source 1..75: mol_type = other DNA
cagatattcccgctggtctgaaattgatattgacaatgccatgtggactattccagccgaacgcgaacctctgcc

SEQ ID NO: 518978 - DNA, 75 bp, synthetic construct
  source 1..75: mol_type = other DNA
cattcacactcaaacagttcacagactgtctcgaagggaaagcagactggtttgcccccgaatttcagccagccg

SEQ ID NO: 518979 - DNA, 75 bp, synthetic construct
  source 1..75: mol_type = other DNA
gagatcagtgacgaagcgttcgcagaggcgctgtgtcatgagatggctctaccgctaagctatgagcagttctcc

SEQ ID NO: 518980 - DNA, 75 bp, synthetic construct
  source 1..75: mol_type = other DNA
ggtttctcatttgctggtgcttacgcaaactctgatcgtactgatttccagtctagtgatagtaaaggtgaaaaa

SEQ ID NO: 518981 - DNA, 75 bp, synthetic construct
  source 1..75: mol_type = other DNA
ctaaccgcctgcataccaccttctggccggaagaatacccggaaattcgtgatgctgctgaccatatctatctgt

SEQ ID NO: 518982 - DNA, 75 bp, synthetic construct
  source 1..75: mol_type = other DNA
accgctaagctacgagcagttctctcacggctggcaggcggtgtttgttgcgctgcgcccggaagtgatcgccat

SEQ ID NO: 518983 - DNA, 75 bp, synthetic construct
  source 1..75: mol_type = other DNA
actgacctggcgctttttgctgcccaacagtacgccgcccgtgagggtactggaagcacgatacaggacaaggag

SEQ ID NO: 518984 - DNA, 75 bp, synthetic construct
  source 1..75: mol_type = other DNA
gcatttactgatatgttcgttgagtggggcggtgattcatgggcaggcacagacttgtttatgactaaccgtacc

SEQ ID NO: 518985 - DNA, 75 bp, synthetic construct
  source 1..75: mol_type = other DNA
gttatcacttaacccattacaagcccgctgccgcagatattcccgtggcgagcgataacccagcgcactatgcgg

SEQ ID NO: 518986 - DNA, 75 bp, synthetic construct
  source 1..75: mol_type = other DNA
taggatctttcgactatggtcgtaactacggtgttgcttatgatgccgcagcttataccgatatgttagttgaat

SEQ ID NO: 518987 - DNA, 75 bp, synthetic construct
  source 1..75: mol_type = other DNA
cggttactcctattctaaagcactggacgtagcaggttacaaagattctgatcgtctgaactacattgaaatcgg

SEQ ID NO: 518988 - DNA, 75 bp, synthetic construct
  source 1..75: mol_type = other DNA
tctaaattttgctctgcaatatcagggtaaaaatgaaggtactagactggcccctgaatctccagacaaccagta

SEQ ID NO: 518989 - DNA, 75 bp, synthetic construct
  source 1..75: mol_type = other DNA
tctgaactttgctctgcaatatcagggtaaaaatgaaggttccggcaactacgaagctaatggcgatggtcatgg

SEQ ID NO: 518990 - DNA, 75 bp, synthetic construct
  source 1..75: mol_type = other DNA
tgaagctcgaatttaccagcatgttttgcaggcggaaggtttttcacccagcgatacggtctttttcgacgataa

SEQ ID NO: 518991 - DNA, 75 bp, synthetic construct
  source 1..75: mol_type = other DNA
attccaacaacaagtggcagaatctatcctagagggaattaaagagtatttttcggatatagacgcgttagcgag

SEQ ID NO: 518992 - DNA, 75 bp, synthetic construct
  source 1..75: mol_type = other DNA
ggagctggcgattacagaacccggaacatgctgatagcggcattgtgcttatctggaatgatgcggtttacggct

SEQ ID NO: 518993 - DNA, 75 bp, synthetic construct
  source 1..75: mol_type = other DNA
acaggagaaggaccacggcggggtggagcagaacctgcgttaccaggggcagtacctcgacagggaaacggggct

SEQ ID NO: 518994 - DNA, 75 bp, synthetic construct
  source 1..75: mol_type = other DNA
catgcaggcacatgatgtctgcgtaacaacaatgacaacgttactggctccctggaatatccgccctgtcgtctt

SEQ ID NO: 518995 - DNA, 75 bp, synthetic construct
  source 1..75: mol_type = other DNA
attgcaaatagctcgccgtctgcgctctctgatcgaaaaagagggtaatatgaaggtgtacatgacgcgcaatga

SEQ ID NO: 518996 - DNA, 75 bp, synthetic construct
  source 1..75: mol_type = other DNA
caaagtggtccacaaccgggtaaagcagggcgtgatcgtccgattgtcattatgcttgaccccggccacggtggc

SEQ ID NO: 518997 - DNA, 75 bp, synthetic construct
  source 1..75: mol_type = other DNA
ggcgaacagcagcgtccgtgcatccgtctgtattacgaactggcggcgcatccccggcgggtgacacagatttat

SEQ ID NO: 518998 - DNA, 75 bp, synthetic construct
  source 1..75: mol_type = other DNA
cgaaggcagaacaggaagaagcgcagcgtcaggaggatgccagaacgttccgggatgtggccggggaatatctgg

SEQ ID NO: 518999 - DNA, 75 bp, synthetic construct
  source 1..75: mol_type = other DNA
cattttcctccaaaaaacaaatcatggaaggatataattaaatcaacaaaatcaggcccggcaaaatattctcca

SEQ ID NO: 519000 - DNA, 75 bp, synthetic construct
  source 1..75: mol_type = other DNA
aggggagttatgaaccgctggcgcgggtggataaggcgggcaaagagggcccgaaccggatactgtattttcaca

SEQ ID NO: 519001 - DNA, 75 bp, synthetic construct
  source 1..75: mol_type = other DNA
cgaggccggccacctgaacggcgtgtacgacagcacggggcacctgctgcgtgagtttgcttacgacgaaaacca

SEQ ID NO: 519002 - DNA, 75 bp, synthetic construct
  source 1..75: mol_type = other DNA
aatgaaacccagaactttgaagcggttgttcagtatcaattcgactttggtctgcgtccgtccttaggttatgtg

SEQ ID NO: 519003 - DNA, 75 bp, synthetic construct
  source 1..75: mol_type = other DNA
aatacggctatcattgttactgaccctaacggaaaaccagtaaaatttgatggcacaactccgacaggcgtatca

SEQ ID NO: 519004 - DNA, 75 bp, synthetic construct
  source 1..75: mol_type = other DNA
tgtatctctgacattctcaggggttcaagcagctggtaccgatatgttgcaaacagttggtacgactaatacagc

SEQ ID NO: 519005 - DNA, 75 bp, synthetic construct
  source 1..75: mol_type = other DNA
ctgctggatattaatttgcccgatgaaaatggcctgatgttaacccgcgccctgcgagaacgctcaacggtgggg

SEQ ID NO: 519006 - DNA, 75 bp, synthetic construct
  source 1..75: mol_type = other DNA
ttggcgattccaatgggcgtcggtcagcgggattcctggagcgccaaactgcagggtttactggcaagttgccag

SEQ ID NO: 519007 - DNA, 75 bp, synthetic construct
  source 1..75: mol_type = other DNA
gctgcaagccttcatgtgcaggaatccctggcatgaatcaaactgtcgcggtgacgggcgctaccgggtttatcg

SEQ ID NO: 519008 - DNA, 75 bp, synthetic construct
  source 1..75: mol_type = other DNA
ccccgaattacatgttttaagccacgcctggtttaaggcattaccggaagccgatgttgcgctccagcgtccagt

SEQ ID NO: 519009 - DNA, 75 bp, synthetic construct
  source 1..75: mol_type = other DNA
gttatgggggtgggaccatccgtcagtcagcgagtcacttggagaatatgcccggcgcgtgcacgactttggtga

SEQ ID NO: 519010 - DNA, 75 bp, synthetic construct
  source 1..75: mol_type = other DNA
taataattttgttgtattattaaatactttagccaagaaatattcattacctataatagtgtctactcatcctag

SEQ ID NO: 519011 - DNA, 75 bp, synthetic construct
  source 1..75: mol_type = other DNA
ctattgtcggaactcgtcctgaaatcatcagattatcaagaataatatctagactagatgagtgcactgaacata

SEQ ID NO: 519012 - DNA, 75 bp, synthetic construct
  source 1..75: mol_type = other DNA
ctggcctgcgtattaacagtgctaaagatgacgcagcaggtcaggcgattgctaaccgttttacggcaaatatta

SEQ ID NO: 519013 - DNA, 75 bp, synthetic construct
  source 1..75: mol_type = other DNA
tataatgaacctcttacaaataacgatgaagtaggaaggatacttggaaatggcgcggtcgctaatgcgattgat

SEQ ID NO: 519014 - DNA, 75 bp, synthetic construct
  source 1..75: mol_type = other DNA
tccgcatgtcgttcttcgcaccgccaaacagcggcgtgccggcggcggccgtccgcgtaagggaaaaagtgccaa

SEQ ID NO: 519015 - DNA, 75 bp, synthetic construct
  source 1..75: mol_type = other DNA
agcgcgtgccgaagctggtgcgaagcggttgttatcgctgaacctgaaaaaaggcgatcgcgtggcgctgattgc

SEQ ID NO: 519016 - DNA, 75 bp, synthetic construct
  source 1..75: mol_type = other DNA
tgacgacgttactaatgtagagcttaaccgttcaacaagcaaaggtgatgacgaggaagaagaagaaatcgagac

SEQ ID NO: 519017 - DNA, 75 bp, synthetic construct
  source 1..75: mol_type = other DNA
caactgacaaaaatatatatgatgcacttcatcataaacgaattactatcgcaagattacgcgagatattattac

SEQ ID NO: 519018 - DNA, 75 bp, synthetic construct
  source 1..75: mol_type = other DNA
gtctggtattcaacgtcagagaatacaaagcgtaagtatcctcacacgtgggaactgactgaaacgcaagctggc

SEQ ID NO: 519019 - DNA, 75 bp, synthetic construct
  source 1..75: mol_type = other DNA
taaattcaacatgctggataaagatgacgcggcaattactggcgcagcaactgatgaccagtttgcagttggtat

SEQ ID NO: 519020 - DNA, 75 bp, synthetic construct
  source 1..75: mol_type = other DNA
aatatgatgcgaacaatgtctacgctgctgtgatgtatggtgaaactcgtaatatgacaccgacatcagttaata

SEQ ID NO: 519021 - DNA, 75 bp, synthetic construct
  source 1..75: mol_type = other DNA
ctatattttctcaactacacgagaaaggttattatataggccgtatcgcatggtcttcaaaaccgacaagtggag

SEQ ID NO: 519022 - DNA, 75 bp, synthetic construct
  source 1..75: mol_type = other DNA
atgaatactcagtctgtcatcatggttttccttgggctgattgtcgcaaaactatatccagactggtggaaaggg

SEQ ID NO: 519023 - DNA, 75 bp, synthetic construct
  source 1..75: mol_type = other DNA
tttggctaatgatcattttgcaaataaaacccaaaactttgaagctgttgtacagtatcagttcgacttcggttt

SEQ ID NO: 519024 - DNA, 75 bp, synthetic construct
  source 1..75: mol_type = other DNA
accctttgtcgagctttgctggccttttggcccggagttcgatgtttttaaaattggcggcaagatttttatgct

SEQ ID NO: 519025 - DNA, 75 bp, synthetic construct
  source 1..75: mol_type = other DNA
gcatttatttgcgtcaatacactttgggcaaacagattgacgaaagaggctatcctcaatggggatatttcggaa

SEQ ID NO: 519026 - DNA, 75 bp, synthetic construct
  source 1..75: mol_type = other DNA
ttcgtcccatcgggcaatgagagggcaactcccagtctgaatatttcccgcgatacgctcaggccagatgaaatt

SEQ ID NO: 519027 - DNA, 75 bp, synthetic construct
  source 1..75: mol_type = other DNA
gtgaatgctcagtctgtcatcatggttttccttgggctgattgtcgcaaaactatatccagactggtggaaaggg

SEQ ID NO: 519028 - DNA, 75 bp, synthetic construct
  source 1..75: mol_type = other DNA
tggccagttgaagaatattgattttactaaccatcccgccgcagccgatccggttacgatgcgtgctatccagaa

SEQ ID NO: 519029 - DNA, 75 bp, synthetic construct
  source 1..75: mol_type = other DNA
actaaccatcccgccgccgcagacccggtcaccatgcgggcaatccaaaaagccatcgcgcttattgaactcaag

SEQ ID NO: 519030 - DNA, 75 bp, synthetic construct
  source 1..75: mol_type = other DNA
atgtcccagccgctgaatgccgatcaggaactggtttctgatgtggttgcttgccagttggttatcaaacaaatt

SEQ ID NO: 519031 - DNA, 75 bp, synthetic construct
  source 1..75: mol_type = other DNA
atccaagagctacccactgaggaacccctcatccaggtgccgcctaaaactgatgatgatgacgactgtttcttc

SEQ ID NO: 519032 - DNA, 75 bp, synthetic construct
  source 1..75: mol_type = other DNA
caatgtgctgtcacgactcggctgactctccgtaatatccgcgacaaggtggatggacttagcttcttgaacagc

SEQ ID NO: 519033 - DNA, 75 bp, synthetic construct
  source 1..75: mol_type = other DNA
tgatattggtatggcattggctgggtataattctggctatgctcgtattaatgccgtcagaaacggtaaatctac

SEQ ID NO: 519034 - DNA, 75 bp, synthetic construct
  source 1..75: mol_type = other DNA
ataactgctcatactgcaaacgtgcggtcgagttggcgaagcaactaaagggacatggctacggtgattatgagt

SEQ ID NO: 519035 - DNA, 75 bp, synthetic construct
  source 1..75: mol_type = other DNA
gttggtaaaccggtagagactatcccccaggtactgatcgatggccaaccgattggcggatacacagaactggct

SEQ ID NO: 519036 - DNA, 75 bp, synthetic construct
  source 1..75: mol_type = other DNA
gttggtaaaccggtagagactatcccccaggtgctgatcgatggccagccgattggcggatacacagaatttgct

SEQ ID NO: 519037 - DNA, 75 bp, synthetic construct
  source 1..75: mol_type = other DNA
tgttgaatccggcttgtttaaaaaaagcggatgaatgggaatctcctacatgtggagaagttcgggcagtcattg

SEQ ID NO: 519038 - DNA, 75 bp, synthetic construct
  source 1..75: mol_type = other DNA
attccgctcgatttaattgaagtgcgctccggctcttatctcgaagaggatgatgtggtgcgcttgtcagatcgc

SEQ ID NO: 519039 - DNA, 75 bp, synthetic construct
  source 1..75: mol_type = other DNA
ggcaaatatgactctatcgacgcgggcgaccgctaccaggtgaaacgcatcaccgtgaaaccgggcgaaggcttg

SEQ ID NO: 519040 - DNA, 75 bp, synthetic construct
  source 1..75: mol_type = other DNA
aacaaaaactggccaccgcgttagagtttttccagtatcgattttccgattcgtttggggtaacccaccgttata

SEQ ID NO: 519041 - DNA, 75 bp, synthetic construct
  source 1..75: mol_type = other DNA
gattgctcgccgcctgcgcgctttgatcgaaaaagagggcaacatgaaggtgtacatgacgcgtaatgaagacat

SEQ ID NO: 519042 - DNA, 75 bp, synthetic construct
  source 1..75: mol_type = other DNA
ggatcagtgcaggggaattatatcaaccgtgtggtgaagcgccactattgccggataacaggcaaaacaaaggcg

SEQ ID NO: 519043 - DNA, 75 bp, synthetic construct
  source 1..75: mol_type = other DNA
acgcgtaaaatgacgccaatctctggcggctttgccaataagacgcagaactttgaagcagtcgctcaataccaa

SEQ ID NO: 519044 - DNA, 75 bp, synthetic construct
  source 1..75: mol_type = other DNA
ttgtgtggcgttttctggcactgagtgccggagaatctcaaatcatccacgtaaccgcctggacggaacgcgaag

SEQ ID NO: 519045 - DNA, 75 bp, synthetic construct
  source 1..75: mol_type = other DNA
agctgcgctctgaagtcttccggtaatcgcatttggtatggaggcgaacgtttttctaatggtgttgacatggta

SEQ ID NO: 519046 - DNA, 75 bp, synthetic construct
  source 1..75: mol_type = other DNA
aggattacaacaaaggcgacctcgaaaagcaggtgccgccagcgcaaagtggtccacaaccgggtaaagcagggc

SEQ ID NO: 519047 - DNA, 75 bp, synthetic construct
  source 1..75: mol_type = other DNA
gatggcgaccagagctatatccgttttggttttaaaggcgaaactcaaattaacgatcaactaaccggttatggt

SEQ ID NO: 519048 - DNA, 75 bp, synthetic construct
  source 1..75: mol_type = other DNA
gaagcacgccagcaatccccggctggctgcgtgatggtattcgccgcccgtattcgtcagggggtgagtcatgca

SEQ ID NO: 519049 - DNA, 75 bp, synthetic construct
  source 1..75: mol_type = other DNA
tgccggagcgcccttgtgaacaattaacctgctgcgaaaaaaatggatcagtgcaggggaattatatcaactgtg

SEQ ID NO: 519050 - DNA, 75 bp, synthetic construct
  source 1..75: mol_type = other DNA
tatgtcagcgtttgttgattataaaataaaccaactggatagcgataataagctgaacatcaataatgatgatat

SEQ ID NO: 519051 - DNA, 75 bp, synthetic construct
  source 1..75: mol_type = other DNA
agaacggcgatgggtttggtacttcactgacgtatgactttggcggcagcgatttcgctatcagtggggcctata

SEQ ID NO: 519052 - DNA, 75 bp, synthetic construct
  source 1..75: mol_type = other DNA
agggaaaaacgaaaaccgcgacgttaaaaagcaaaacggcgatggcttcggcacgtcattgacatatgactttgg

SEQ ID NO: 519053 - DNA, 75 bp, synthetic construct
  source 1..75: mol_type = other DNA
gtaaataatattagccctggggtcgttggtgttgatgttgaatcacggatcgcctttgaaactcgccggaggcaa

SEQ ID NO: 519054 - DNA, 75 bp, synthetic construct
  source 1..75: mol_type = other DNA
tttgctgccggtatcgggatgagcattctgacgcagaaggccgccacagcccttccgcatccggtcagtgccgcc

SEQ ID NO: 519055 - DNA, 75 bp, synthetic construct
  source 1..75: mol_type = other DNA
ccaggaaatcctgatggtgatttaccacatttacaagttcatcaacatggtggaagtgttagacatatatttttc

SEQ ID NO: 519056 - DNA, 75 bp, synthetic construct
  source 1..75: mol_type = other DNA
gtgaagtttatattcccgggggaaatggagtacctattaaaccggataaaattcgggtcagaaataatgggggtg

SEQ ID NO: 519057 - DNA, 75 bp, synthetic construct
  source 1..75: mol_type = other DNA
gaagccgtgctgccggggagcgggttttacagccccggtgaaggactggcagtacggcgtggtgagcaggggcac

SEQ ID NO: 519058 - DNA, 75 bp, synthetic construct
  source 1..75: mol_type = other DNA
ggcacccggtgtggcaccagccggaaacggaggtggacgcggcgggaaacacctggcgctgtgtgtacgatgaac

SEQ ID NO: 519059 - DNA, 75 bp, synthetic construct
  source 1..75: mol_type = other DNA
attccgagtactaatccgaatgaaacacatatagggatcaggaatccaaatgattatcctacaaaacgagggcgg

SEQ ID NO: 519060 - DNA, 75 bp, synthetic construct
  source 1..75: mol_type = other DNA
tccatctgcggcagctaaatttcctaattctaatgcggcaaatgggccgacagcgagcatgaaaaatacttcaac

SEQ ID NO: 519061 - DNA, 75 bp, synthetic construct
  source 1..75: mol_type = other DNA
ctcgtgcgcacaccgggtagcgcagacgaaaactgcatgacctttgtgtcgggtatggggcgacgcctggatatg

SEQ ID NO: 519062 - DNA, 75 bp, synthetic construct
  source 1..75: mol_type = other DNA
ccacaccatgttcgatatggtgcagtcgctgaccattgccgacagccttaagtttggtaaagcggtgctgaataa

SEQ ID NO: 519063 - DNA, 75 bp, synthetic construct
  source 1..75: mol_type = other DNA
ctgtcatggatagatccccttggattaagtggtagcggtcttgtaaatggcgtgcctcaaaatcctggaatagtt

SEQ ID NO: 519064 - DNA, 75 bp, synthetic construct
  source 1..75: mol_type = other DNA
agagtaattgatattgatgggcaattagtttcttatgataataggcgattagacgcagctctagaggccggatta

SEQ ID NO: 519065 - DNA, 75 bp, synthetic construct
  source 1..75: mol_type = other DNA
tacgtccatgatgcggcagaccagctactggaaatccgccgccagcggcacgaaactgacgcgccggaagttatc

SEQ ID NO: 519066 - DNA, 75 bp, synthetic construct
  source 1..75: mol_type = other DNA
actgtattttcacacggatgtgaacggcgcgccggaagagatgacggacagtgacgggaaaatcgtgtgggagac

SEQ ID NO: 519067 - DNA, 75 bp, synthetic construct
  source 1..75: mol_type = other DNA
gttgcagggcgtggtggagaaaggcggcgaactgcgtgttgaagttgcggataccaacgaaagtaaagagttgct

SEQ ID NO: 519068 - DNA, 75 bp, synthetic construct
  source 1..75: mol_type = other DNA
cagattcaggcgcggcagttgtatcacgatcgcgaagaagtgacggtgcacgtccgccgtatctgggctgcggtg

SEQ ID NO: 519069 - DNA, 75 bp, synthetic construct
  source 1..75: mol_type = other DNA
acgcagcaatatctcctggatggtatgcgatatggttgaaaaaccggcgaaagttgcggcattgatggcgcagtg

SEQ ID NO: 519070 - DNA, 75 bp, synthetic construct
  source 1..75: mol_type = other DNA
attcaatacttataaccccggagccaatatgaatggtgatacaacgttcactgtttacgataacgttaattacat

SEQ ID NO: 519071 - DNA, 75 bp, synthetic construct
  source 1..75: mol_type = other DNA
tatacggtccggctgttactatgggtatagatcaagttccaaccattcaggaatcagatataactgttactttat

SEQ ID NO: 519072 - DNA, 75 bp, synthetic construct
  source 1..75: mol_type = other DNA
tcgagccgtttccgggtgggatgctgtaaataatactagccctggagtcgttggtgttgatgttgaatcacggat

SEQ ID NO: 519073 - DNA, 75 bp, synthetic construct
  source 1..75: mol_type = other DNA
caaacagagcggcatttttcttccccgcaactttcaattctgtttttcgtgcctgctccagattttgcgatgttt

SEQ ID NO: 519074 - DNA, 75 bp, synthetic construct
  source 1..75: mol_type = other DNA
aatctatcaatgccgaagtgacaaactctgccatcgagctgaaagtgttgattgagcaaatgcgcgagcagattc

SEQ ID NO: 519075 - DNA, 75 bp, synthetic construct
  source 1..75: mol_type = other DNA
agtctatcaatgccgaagtgacgaactccgcgattgagttgaaggtgttgattgagcagatgcgcgaacagatcc

SEQ ID NO: 519076 - DNA, 75 bp, synthetic construct
  source 1..75: mol_type = other DNA
acctaccaactggtgaagcgcaacatgtgggtttattccgtcgataacggcccgatggcgcaaagtctgatggat

SEQ ID NO: 519077 - DNA, 75 bp, synthetic construct
  source 1..75: mol_type = other DNA
cagaatgcttattaatgatagcagcaacactgaagttattttctggcatagtttccccttcgcaggaaacacgaa

SEQ ID NO: 519078 - DNA, 75 bp, synthetic construct
  source 1..75: mol_type = other DNA
caaaaaagcaatcggcgaaaaactcatcaacggtcgtcagataaacccgacacctctgcaggtccgttacccaca

SEQ ID NO: 519079 - DNA, 75 bp, synthetic construct
  source 1..75: mol_type = other DNA
ggcgcgggtgttagtggtgcgttattttccgcatattaatgccgaatcgattgagatctttgttgggatgatcat

SEQ ID NO: 519080 - DNA, 75 bp, synthetic construct
  source 1..75: mol_type = other DNA
ggggcgtgttgatccttacttgcctgttgccagtaaaccagctgctgaccgcgctgccggtggatgtattaggta

SEQ ID NO: 519081 - DNA, 75 bp, synthetic construct
  source 1..75: mol_type = other DNA
cggcaccagtggtggcagtaatgattaccggtattctgctgaatgtactttactggcttggcctgtttgttccgg

SEQ ID NO: 519082 - DNA, 75 bp, synthetic construct
  source 1..75: mol_type = other DNA
tgcttctggttgtcgtactgatagcgggggtgacccgggcccgggcagactgctggcgtggaccggccgcaacgt

SEQ ID NO: 519083 - DNA, 75 bp, synthetic construct
  source 1..75: mol_type = other DNA
ttcgaacttccattgcctggacacgaatctttccgcaaggtgacgaacaggagccgaatgaagagggtttacaat

SEQ ID NO: 519084 - DNA, 75 bp, synthetic construct
  source 1..75: mol_type = other DNA
ctcgcctaatccgatggttgcggcggtattgggcgcagtggttatttcggcggaagttttgttgttacggtcgat

SEQ ID NO: 519085 - DNA, 75 bp, synthetic construct
  source 1..75: mol_type = other DNA
gccagaagtggaatacgatttgttccaatcccgattacagcagatgcagaacttcatctgtttggtgaaattctt

SEQ ID NO: 519086 - DNA, 75 bp, synthetic construct
  source 1..75: mol_type = other DNA
agcaagctgaaaaattcacattcctcttgcaaacgtgagcaagacatgtctgttgaaattacccgtcttaagcga

SEQ ID NO: 519087 - DNA, 75 bp, synthetic construct
  source 1..75: mol_type = other DNA
tgaggagcgggagatctttatggtgatctttctcgactcacaacaccgggttataacgcatagccgacttttttc

SEQ ID NO: 519088 - DNA, 75 bp, synthetic construct
  source 1..75: mol_type = other DNA
agcgaagtgtctattttcacccttgagaaagcgtactccgcaggcgttacaccggaacaatcgcaaacgctgatt

SEQ ID NO: 519089 - DNA, 75 bp, synthetic construct
  source 1..75: mol_type = other DNA
gttataccggattctctatcgcggttgccatttacttcctcaacgaatctctcggtcgtccggtacaaaaaatgg

SEQ ID NO: 519090 - DNA, 75 bp, synthetic construct
  source 1..75: mol_type = other DNA
ggatgcgctgtcggagcggcagcgccaggcgcttgccgagcgcggcctgcgccgctactaccagaccgctttcga

SEQ ID NO: 519091 - DNA, 75 bp, synthetic construct
  source 1..75: mol_type = other DNA
gtgggcgcagtgatagcacagcattcctggactatgcctgcaggaatgggcattaattatagctgtttcgggaaa

SEQ ID NO: 519092 - DNA, 75 bp, synthetic construct
  source 1..75: mol_type = other DNA
tacttcattgaatgcgagaaacgtttaagacaacaagaaacaaaggtggagaaggtcttgtcaggcttcatgccc

SEQ ID NO: 519093 - DNA, 75 bp, synthetic construct
  source 1..75: mol_type = other DNA
gctgaaccagttacaggaagacgggcacgatgtatcgggcgcggcggcggagctgaccaccatgttctgctacat

SEQ ID NO: 519094 - DNA, 75 bp, synthetic construct
  source 1..75: mol_type = other DNA
tctttccagccaactgaaagaaaatcaagaagaattagcacagactgtacgagatctatcagagcttgaaggacg

SEQ ID NO: 519095 - DNA, 75 bp, synthetic construct
  source 1..75: mol_type = other DNA
tacctgtcctagaagctatgcaggccggatgtccagttatttgtgcaaacacatcctcgttgccggaagtagggg

SEQ ID NO: 519096 - DNA, 75 bp, synthetic construct
  source 1..75: mol_type = other DNA
actccttgaaaaatatttaaaaaatagatatgaacattttacatttttgagtaatgaagatttaaatatacagta

SEQ ID NO: 519097 - DNA, 75 bp, synthetic construct
  source 1..75: mol_type = other DNA
aaatgttacaactgttcatgatttcacctatgaaaaatacaggggaggaatgtcaaaatttattcattctcttca

SEQ ID NO: 519098 - DNA, 75 bp, synthetic construct
  source 1..75: mol_type = other DNA
ttgttgcggatgggcaaatcccaacagaaaatatagcagaagctgtacagttgacttatgacagaactactggga

SEQ ID NO: 519099 - DNA, 75 bp, synthetic construct
  source 1..75: mol_type = other DNA
gacacggttttgttattaagaggaaccaggaacctgttaaaagttagtacgatcaagaacccagctaaaataaaa

SEQ ID NO: 519100 - DNA, 75 bp, synthetic construct
  source 1..75: mol_type = other DNA
cttcagcaacacatcaggggagactcttgtgctgcaggtagccgggacagtgcttttatagccacaacatcagat

SEQ ID NO: 519101 - DNA, 75 bp, synthetic construct
  source 1..75: mol_type = other DNA
agtaaaaaacacaaagcggctatagataacctgacagctaacaacatagccctttctaaccaactgattgaaaat

SEQ ID NO: 519102 - DNA, 75 bp, synthetic construct
  source 1..75: mol_type = other DNA
ataaagaaaagggctatttggatggagtcggaaatcaagttttggttttaggcaaggacgatggtgataaaacgg

SEQ ID NO: 519103 - DNA, 75 bp, synthetic construct
  source 1..75: mol_type = other DNA
aaggagagatcattcatatagagttggtaattactatgaacaagaattttacgatgctcgaggagctctgaaagt

SEQ ID NO: 519104 - DNA, 75 bp, synthetic construct
  source 1..75: mol_type = other DNA
ttcgcctgaatttctcagtgaagccctgaaacttgctgaacgcatcggtgttgctgccgcagcccgtgaactcag

SEQ ID NO: 519105 - DNA, 75 bp, synthetic construct
  source 1..75: mol_type = other DNA
aggcgtaaaattctcacaccggggctccaagatgcgaacaccacatcttgtgccactcagccaacaggctgtagc

SEQ ID NO: 519106 - DNA, 75 bp, synthetic construct
  source 1..75: mol_type = other DNA
agaccgcaaagccgaaagagaaagcctataaaatggctgatggaggcggcttgtatcttgaagtctccccaaaag

SEQ ID NO: 519107 - DNA, 75 bp, synthetic construct
  source 1..75: mol_type = other DNA
taaaattctcacaccggggatccaagatgcgaacaccacatcttgtgccactcagcaaacaggttgtagccatac

SEQ ID NO: 519108 - DNA, 75 bp, synthetic construct
  source 1..75: mol_type = other DNA
cttgctgttatgctgaatttactggtttttattcgttccagtgaactcagataagcccggtggtctgaaattgat

SEQ ID NO: 519109 - DNA, 75 bp, synthetic construct
  source 1..75: mol_type = other DNA
gcattgaccacggtaaaacgccagcatcgccctgctctagatctttcgcgcctgcctgaacttttgtcgcgtatt

SEQ ID NO: 519110 - DNA, 75 bp, synthetic construct
  source 1..75: mol_type = other DNA
gcattgaccacggtaaaacgccagcatcgccctgctctagatctttctcgcctgcctgaacttgtgtcgcgtatt

SEQ ID NO: 519111 - DNA, 75 bp, synthetic construct
  source 1..75: mol_type = other DNA
atttactggtttttattcgttccagtgaactcagatacgcccgctggtctgaaattgatattgacaatgccatgt

SEQ ID NO: 519112 - DNA, 75 bp, synthetic construct
  source 1..75: mol_type = other DNA
cacaacccaggatgtctgtggtcatggattccgggcgatggcatgtagtgcattaatagaatcaggtttgtggtc

SEQ ID NO: 519113 - DNA, 75 bp, synthetic construct
  source 1..75: mol_type = other DNA
ttgatattgacaatgccatgtggactattccagccgaacgcgaacctctgccaggcgtaaaattttcataccggg

SEQ ID NO: 519114 - DNA, 75 bp, synthetic construct
  source 1..75: mol_type = other DNA
tcatcagatataatcctgctctggatatggctggcgcattgactacggtaaaacgccagcatcgccccgctcttg

SEQ ID NO: 519115 - DNA, 75 bp, synthetic construct
  source 1..75: mol_type = other DNA
tggattccgggcgatggcatgtagtgcgttaatagaatcaggtttgtggtcccgcgatgcagttgaacgtcagat

SEQ ID NO: 519116 - DNA, 75 bp, synthetic construct
  source 1..75: mol_type = other DNA
ctattccagccgaacgcgaacctctgccaggcgtaaaatactcacaccggggctccaagatgcgaacaccacatc

SEQ ID NO: 519117 - DNA, 75 bp, synthetic construct
  source 1..75: mol_type = other DNA
ctcgcggttatgctgaatttactggtttttattcgttccagtgaactcagataagcccgatggtctgaaattgat

SEQ ID NO: 519118 - DNA, 75 bp, synthetic construct
  source 1..75: mol_type = other DNA
gcggtaaaccgctgcgtgccgacctgagcgcacgtcttgatcgcgatgtacgccttgataacgatgccaactgtt

SEQ ID NO: 519119 - DNA, 75 bp, synthetic construct
  source 1..75: mol_type = other DNA
ataataaattgctattcgccagtccctctgcggcattgtccatttctgcgacgcgaccaggatgccagccatttc

SEQ ID NO: 519120 - DNA, 75 bp, synthetic construct
  source 1..75: mol_type = other DNA
taaataaggccctcagagtgatggggtatgacacaaccaaggaagtctgtggccatggattccgggcgatggcgt

SEQ ID NO: 519121 - DNA, 75 bp, synthetic construct
  source 1..75: mol_type = other DNA
ttgccctttctgaggcctgggacgatgagtttacccaatatccgctggtgatggggttgattcttggtacaggcg

SEQ ID NO: 519122 - DNA, 75 bp, synthetic construct
  source 1..75: mol_type = other DNA
gatcaacgttttggctgtaaaggttctgtcggcatcggtattccgggaatgccggaaacagaagatggtacgctg

SEQ ID NO: 519123 - DNA, 75 bp, synthetic construct
  source 1..75: mol_type = other DNA
attaccggcgagtttggccatatgcgtctgccggttgatgcgttaaccatgatggggttggatttcccgttacgc

SEQ ID NO: 519124 - DNA, 75 bp, synthetic construct
  source 1..75: mol_type = other DNA
aggcgtaaaattctcacaccgaggctccaaaatgcgaaccccacatcttgtgccactcagcaaacaggctgtagc

SEQ ID NO: 519125 - DNA, 75 bp, synthetic construct
  source 1..75: mol_type = other DNA
cataaggcggaacatcttggggagcgaatgttgatgctgcagtggtgggctgattatctggatgcgaatagaatg

SEQ ID NO: 519126 - DNA, 75 bp, synthetic construct
  source 1..75: mol_type = other DNA
ctggccgttatgctgaatttactggtttttattcgttccagtgaactcagataagcccgatggtctgaaattgat

SEQ ID NO: 519127 - DNA, 75 bp, synthetic construct
  source 1..75: mol_type = other DNA
cgtgcagtgcattgattgaatcaggtttgtggtcccgcgatgctgtggaacgtcagatgagccatcaggagcgta

SEQ ID NO: 519128 - DNA, 75 bp, synthetic construct
  source 1..75: mol_type = other DNA
aagatgcgaacaccacatcttgtgccactcagccaacaggctgtagccatactggcagaacttcagacatgggca

SEQ ID NO: 519129 - DNA, 75 bp, synthetic construct
  source 1..75: mol_type = other DNA
agattttctggatgcaaacagggaggagtgtatcagtccgtttgaatatgcaaagattaacaatccattaaaata

SEQ ID NO: 519130 - DNA, 75 bp, synthetic construct
  source 1..75: mol_type = other DNA
gcagcaaagacatagaaaacttattatttggttctattatttctactagagaagataccgaaagatatctaaatg

SEQ ID NO: 519131 - DNA, 75 bp, synthetic construct
  source 1..75: mol_type = other DNA
attggcgtgcggcaggcgatttatcatcacggtcgtgatgcacaggccagcgggcaacagtggggcgaagccgat

SEQ ID NO: 519132 - DNA, 75 bp, synthetic construct
  source 1..75: mol_type = other DNA
tggcgcggtgaaagccttgcgcgaacagtgccctgacaaaatcatcgttgccgactggaaggtcgccgacgctgg

SEQ ID NO: 519133 - DNA, 75 bp, synthetic construct
  source 1..75: mol_type = other DNA
ttctaaaaccactaggatttagtgattatgttcgtttgcagatggatgcaaaagttgtattaagtgatagcggaa

SEQ ID NO: 519134 - DNA, 75 bp, synthetic construct
  source 1..75: mol_type = other DNA
gaagctcaggaacgacctgaaggttttgaagagggggtggcgatgtttacgggaatgagcattgatagaattttg

SEQ ID NO: 519135 - DNA, 75 bp, synthetic construct
  source 1..75: mol_type = other DNA
agccacgcaagcaccttaaaatcaccatcatacactaaatcagtaagttggcagcattacctgcttgggctatgg

SEQ ID NO: 519136 - DNA, 75 bp, synthetic construct
  source 1..75: mol_type = other DNA
atgctcagtctgcaaaacatcagtaaacgtttcgacggcaaaccggcgctcagcgccctgtcgctggatatccac

SEQ ID NO: 519137 - DNA, 75 bp, synthetic construct
  source 1..75: mol_type = other DNA
ttcttggctcattcaacgctaaccagtcatacacggtcggcactacgtacacacaatccgaagtcgcagctatcg

SEQ ID NO: 519138 - DNA, 75 bp, synthetic construct
  source 1..75: mol_type = other DNA
cagtaactatccaggccacccggctagacacatcaatcctgccgcgaaatatcttctcgcagtcgtacctgctgt

SEQ ID NO: 519139 - DNA, 75 bp, synthetic construct
  source 1..75: mol_type = other DNA
atcggtatctccgcacagggaaagggcttgtttttgctggataaaaacgacaagccgctcggtaacgccattttg

SEQ ID NO: 519140 - DNA, 75 bp, synthetic construct
  source 1..75: mol_type = other DNA
tcaaccggatgcgcgaacgttttactgatgttcacaccctgcgcgtcactggcggcccggcgcactccgatgtct

SEQ ID NO: 519141 - DNA, 75 bp, synthetic construct
  source 1..75: mol_type = other DNA
cgcacttcagggctttcacgcccgcattaaggagcacacattatgagccgaccacttctgcaactggccctcgac

SEQ ID NO: 519142 - DNA, 75 bp, synthetic construct
  source 1..75: mol_type = other DNA
ggggttagagtgtgaacgcgtattacaagcgctggatattctggcaacacaaccgcgaggtgaagtccgtctttt

SEQ ID NO: 519143 - DNA, 75 bp, synthetic construct
  source 1..75: mol_type = other DNA
ttgttgggactcgtccagaaattattcgactctcgcgtgtccttgcaaaattagatgaatattgtgaccacctta

SEQ ID NO: 519144 - DNA, 75 bp, synthetic construct
  source 1..75: mol_type = other DNA
ctgtcgatcgtcgggacgtggcccagcggaaccgccaacaggtcaatgcagctaacattttccggctctgttcct

SEQ ID NO: 519145 - DNA, 75 bp, synthetic construct
  source 1..75: mol_type = other DNA
cggtaatcattcaggctacacggctcgacacatcagtccttccacgcaatatcttctcgcagtcgtatctgctgt

SEQ ID NO: 519146 - DNA, 75 bp, synthetic construct
  source 1..75: mol_type = other DNA
acgagcaaaattcgaaaaatatggctttgcatttaaaagtgaaataagattattaaaacctctcggttttcatga

SEQ ID NO: 519147 - DNA, 75 bp, synthetic construct
  source 1..75: mol_type = other DNA
tcgtaaccgcatcaatgaaaacggtattcaattccataaaaatatcttgcttcttaagccattaggatttcacga

SEQ ID NO: 519148 - DNA, 75 bp, synthetic construct
  source 1..75: mol_type = other DNA
tagttgtttctactcatcctcgcactcgtaaccgcatcaacgaaaacggtattcaattccataaaaatatcttgc

SEQ ID NO: 519149 - DNA, 75 bp, synthetic construct
  source 1..75: mol_type = other DNA
aatatctgcgcttgagtatgccaccacgcgcaagaaatcagaggttgtttactcaggggtatcggtaacaattcc

SEQ ID NO: 519150 - DNA, 75 bp, synthetic construct
  source 1..75: mol_type = other DNA
caagaagtcagaggttgtttactctggcgtatctgtaactattccgacagcgcctactaaccttgttagcctgct

SEQ ID NO: 519151 - DNA, 75 bp, synthetic construct
  source 1..75: mol_type = other DNA
aaagacggctttcttgccacaaatggcagtacgttaaccattcagtcaaatggggcggcgtttactgccacaacc

SEQ ID NO: 519152 - DNA, 75 bp, synthetic construct
  source 1..75: mol_type = other DNA
gcggaaccgccaacagatcaatgcaactaaccttttccggctctgttcctgacacacttgtgagcagtcgcaatg

SEQ ID NO: 519153 - DNA, 75 bp, synthetic construct
  source 1..75: mol_type = other DNA
gaaaacgctcacgccgtcatccggcgcgttggcaccattcttcgacaccgttaacaacaagatggttgtgttcaa

SEQ ID NO: 519154 - DNA, 75 bp, synthetic construct
  source 1..75: mol_type = other DNA
tggtaacgtggcgaacaaggccaacgaggccggacagggcgcttatgatgcacaagtcaggaacgatgagcagga

SEQ ID NO: 519155 - DNA, 75 bp, synthetic construct
  source 1..75: mol_type = other DNA
cggcgacaacaaccgacaacatcctgttagctacgttcttcagcgtggataaagacggctttcttgccacaaatg

SEQ ID NO: 519156 - DNA, 75 bp, synthetic construct
  source 1..75: mol_type = other DNA
gggccaaaaataaacgcgacgtgggtaaagccacattcattggcttcgttgtatcactgattatctgtctactgg

SEQ ID NO: 519157 - DNA, 75 bp, synthetic construct
  source 1..75: mol_type = other DNA
tggttccggtgctgcttacgctgggcgtgcccctgtttatctgggcaagaaaaaaagacgatcgcgcagataaaa

SEQ ID NO: 519158 - DNA, 75 bp, synthetic construct
  source 1..75: mol_type = other DNA
agcgccctgtctgctgaggcactgaatggctatgctcaggcgcagagccagctacagcgcctgtcggcgcagctg

SEQ ID NO: 519159 - DNA, 75 bp, synthetic construct
  source 1..75: mol_type = other DNA
tttcggtgggttactgacgttaatgataataaacgtcgttactattctatcgataatacactcttatatattgaa

SEQ ID NO: 519160 - DNA, 75 bp, synthetic construct
  source 1..75: mol_type = other DNA
aaagcgaaagacgtagaaggtatcggtgatgttgatctggtgaactactttgaagtgggcgcaacctactacttc

SEQ ID NO: 519161 - DNA, 75 bp, synthetic construct
  source 1..75: mol_type = other DNA
gccgaagtttgggcgttgtcaacaaaatatgacgctaacaatgtctatgctgctgtgatgtacggtgaatctcac

SEQ ID NO: 519162 - DNA, 75 bp, synthetic construct
  source 1..75: mol_type = other DNA
tgatcctggcgagtctcagcccggcaaaggcaacattaacaaaaattcccgctggttttgaggttattgctcagg

SEQ ID NO: 519163 - DNA, 75 bp, synthetic construct
  source 1..75: mol_type = other DNA
acgactcttcagacctgggatttcgccatgctgatggcaccgataagatgatcggttttcgaatttccgatggaa

SEQ ID NO: 519164 - DNA, 75 bp, synthetic construct
  source 1..75: mol_type = other DNA
tctatagttttacttctaccgctacgatctttggcccgaataagtcggttatttgtatcttcatcgagatacact

SEQ ID NO: 519165 - DNA, 75 bp, synthetic construct
  source 1..75: mol_type = other DNA
ccaatgatgggctcaccatcttaagagccgtagacaaagatactgcgcaagagttcgttcatgaaatgctgcagt

SEQ ID NO: 519166 - DNA, 75 bp, synthetic construct
  source 1..75: mol_type = other DNA
tagaaatgattctgaatgccttcattaatacagataaaaaattaaatttatgggtaattgggataacagcgagta

SEQ ID NO: 519167 - DNA, 75 bp, synthetic construct
  source 1..75: mol_type = other DNA
gaacttggatgtgaaaaagccacagtattcagtagctcagaaaaaccgcgcaataatcttggctcatggcctgta

SEQ ID NO: 519168 - DNA, 75 bp, synthetic construct
  source 1..75: mol_type = other DNA
gaggccgcattgcttcatatttgcggaaaatctacatttcgggaatactgttcaatgatcttacccagcaatagt

SEQ ID NO: 519169 - DNA, 75 bp, synthetic construct
  source 1..75: mol_type = other DNA
ggacgcatatggagttacaggcactacgatatgcggcaatgatttacacaatgagttttgcgaaagcatgtgagt

SEQ ID NO: 519170 - DNA, 75 bp, synthetic construct
  source 1..75: mol_type = other DNA
aagcagattcactgggctgccagtttgctcattcaagtcgccggtacttggccgcgtgaagatatgccggaattg

SEQ ID NO: 519171 - DNA, 75 bp, synthetic construct
  source 1..75: mol_type = other DNA
ttcaaagaggtgagtcgctgggggcgtaagtacggtttccccgtcgtatgcactctggccgatgaaagtgaagaa

SEQ ID NO: 519172 - DNA, 75 bp, synthetic construct
  source 1..75: mol_type = other DNA
ctcaggtgaaaaacgatgaacaggatgtcgaactggctgatcacgacgcaagaatcaccgcaaacacaaaagcga

SEQ ID NO: 519173 - DNA, 75 bp, synthetic construct
  source 1..75: mol_type = other DNA
cggtaatcattcaggctacacgactcgacacatcagtccttccacgcaatatcttctcgcagtcatatctgctgt

SEQ ID NO: 519174 - DNA, 75 bp, synthetic construct
  source 1..75: mol_type = other DNA
aaaatgcgaaagaaaaaatacttgaatttgttgagctggatgaaactgagcttgttgattttggtaaagatatca

SEQ ID NO: 519175 - DNA, 75 bp, synthetic construct
  source 1..75: mol_type = other DNA
tattctctcttattaacgcgacgccagactcggctccgtggatgatctcgttggcgatttttattgctaaagatt

SEQ ID NO: 519176 - DNA, 75 bp, synthetic construct
  source 1..75: mol_type = other DNA
gcttctttctgatgtgctctggtgggttcgtaatccgcctgtagtagagaacgtcaataacccatacagccgcaa

SEQ ID NO: 519177 - DNA, 75 bp, synthetic construct
  source 1..75: mol_type = other DNA
caactccagaacagcgccgcaccatactcgccgagtatggctttgactgcgaagaacgcatcagggaagagaagt

SEQ ID NO: 519178 - DNA, 75 bp, synthetic construct
  source 1..75: mol_type = other DNA
ataaaccaactggatagcgataataagctgaacatcaataatgatgatattgtcgcggttggcatgacctatcag

SEQ ID NO: 519179 - DNA, 75 bp, synthetic construct
  source 1..75: mol_type = other DNA
tatgtcggcatttgttgattataaaataaaccaactggatagcgataataagctgaacatcaataatgatgatat

SEQ ID NO: 519180 - DNA, 75 bp, synthetic construct
  source 1..75: mol_type = other DNA
cttacatcatgcggcggatgactctttccccagcgatcacggtacggtgattttcaccttcgcgctagcgtttct

SEQ ID NO: 519181 - DNA, 75 bp, synthetic construct
  source 1..75: mol_type = other DNA
ggatctgacagatacattagccaccctcgataaaatcgatcgcgtaaaagaagagacagttcagctacggcaaaa

SEQ ID NO: 519182 - DNA, 75 bp, synthetic construct
  source 1..75: mol_type = other DNA
taagaaaaccgccgaacgcctgattgttgaaatgaaagatcgctttaaaggcttgcatggcgatctgtttacacc

SEQ ID NO: 519183 - DNA, 75 bp, synthetic construct
  source 1..75: mol_type = other DNA
aatgtcagcgcagcagttcgttaatgccgttgaacgtgaagaagtgggggcactggtgaaactgccgggtattgg

SEQ ID NO: 519184 - DNA, 75 bp, synthetic construct
  source 1..75: mol_type = other DNA
aaactggctggagcgggcgctgcaatcggaacgcaatattaaagagcagattgccgtcctgaagggcagcctgct

SEQ ID NO: 519185 - DNA, 75 bp, synthetic construct
  source 1..75: mol_type = other DNA
taacagcacttagcgatgtcgataacgacgaagaaacgcgcaaaattctgagcacgctttcgttgcgccagctgg

SEQ ID NO: 519186 - DNA, 75 bp, synthetic construct
  source 1..75: mol_type = other DNA
ctgttgcaagaagcggtaaacagcaagcgcctgactttaaccgaaaaaacggcgcaggaagccgtctccccggat

SEQ ID NO: 519187 - DNA, 75 bp, synthetic construct
  source 1..75: mol_type = other DNA
cttttttacagaaagtgcaaaggaagatctcacagatgtgattaatctcgtcagtttaatatctgtggtctttgg

SEQ ID NO: 519188 - DNA, 75 bp, synthetic construct
  source 1..75: mol_type = other DNA
atgaaaattttccaacggtacaacccacttcaggtggcgaagtacgtaaagatcctgttccgtggacggttatac

SEQ ID NO: 519189 - DNA, 75 bp, synthetic construct
  source 1..75: mol_type = other DNA
atgttcgtatgggatctgaattctaacttggtggagggaatgatctttatactgatcgctttgtttttcactgat

SEQ ID NO: 519190 - DNA, 75 bp, synthetic construct
  source 1..75: mol_type = other DNA
tctggcaacactggctaataccagcgcgttattatacgaacgtctggccgacgtaaattgggcggggttttatct

SEQ ID NO: 519191 - DNA, 75 bp, synthetic construct
  source 1..75: mol_type = other DNA
ctgtgatgcggcgagtaattctgaaattgttctgccgctggtggtgaaaaatcagattattggtgttctcgacat

SEQ ID NO: 519192 - DNA, 75 bp, synthetic construct
  source 1..75: mol_type = other DNA
gatatttgccgcggaatgcttatttctgtccttaatattatgagtcgagaactccggtcaataaagtcagatatg

SEQ ID NO: 519193 - DNA, 75 bp, synthetic construct
  source 1..75: mol_type = other DNA
tcttccagagcgatgcgttcgtcaacaaactggaagaaggtcacaccaacgaagtcaacagcgaagttcacgatg

SEQ ID NO: 519194 - DNA, 75 bp, synthetic construct
  source 1..75: mol_type = other DNA
tggttgaaggcataccaacaaaaactggcttcggcagtaggttctctgcgtaacgatagccagcttaatacgccg

SEQ ID NO: 519195 - DNA, 75 bp, synthetic construct
  source 1..75: mol_type = other DNA
tgactgctacaggctacttctacactacgctgcgtctggcaggacgctggattgaaaccgtttatctggtgatca

SEQ ID NO: 519196 - DNA, 75 bp, synthetic construct
  source 1..75: mol_type = other DNA
atccgctggtgaaacaggaactggaaattaaccagcagttaagtcagcgtctgattaccgcgactgaaaacggta

SEQ ID NO: 519197 - DNA, 75 bp, synthetic construct
  source 1..75: mol_type = other DNA
tatattgcaggagcggtgtaggcctgataagcgtagcgcatcaggcagttttgcgtttgcccgcaaccttagggg

SEQ ID NO: 519198 - DNA, 75 bp, synthetic construct
  source 1..75: mol_type = other DNA
caactattgcaggaggcggttaacagcaagcgtctgacattaactgaaaaaacggcgcaggaagcggtaacgccg

SEQ ID NO: 519199 - DNA, 75 bp, synthetic construct
  source 1..75: mol_type = other DNA
ctttgttgaatgccgagattgaccagcaacgtaaaagcctggaagggaacaccgtcttacaggataccctgcaaa

SEQ ID NO: 519200 - DNA, 75 bp, synthetic construct
  source 1..75: mol_type = other DNA
aagatgaatttaagtcgatgaaaatcacggtgaactgggaaaaagcctggcctgccgtttttatcgctttcctcg

SEQ ID NO: 519201 - DNA, 75 bp, synthetic construct
  source 1..75: mol_type = other DNA
tcgtctccggtttgatcattctgttcgaacgtccggtgcgtattggcgatacggtaaccattggtagcttctcgg

SEQ ID NO: 519202 - DNA, 75 bp, synthetic construct
  source 1..75: mol_type = other DNA
atcgcctcaatggtggcctgggcgttgattcgcaacctgcctggtttactggaagtgctggtgctctcgcgactg

SEQ ID NO: 519203 - DNA, 75 bp, synthetic construct
  source 1..75: mol_type = other DNA
gggataaactccagtggctggccgcagcattatccgtaggtcttggttttggtttacaagaaatcttcggtaact

SEQ ID NO: 519204 - DNA, 75 bp, synthetic construct
  source 1..75: mol_type = other DNA
tggcctatggctccgatctggaaaaagtgcgtaaagtgttgctgaaggcggcgactgagcacccaagggtgatgc

SEQ ID NO: 519205 - DNA, 75 bp, synthetic construct
  source 1..75: mol_type = other DNA
ctgtgctggaaagtgctggagaaaaacggtgttgccgtgcgtcactttggtatgccggaacagcagaccagccac

SEQ ID NO: 519206 - DNA, 75 bp, synthetic construct
  source 1..75: mol_type = other DNA
atggcagagaacaaacctgacctgccggatggcaaaacagagctggctgtcagggatattgccggacaggagcgt

SEQ ID NO: 519207 - DNA, 75 bp, synthetic construct
  source 1..75: mol_type = other DNA
tgaccaaagatgaagagcacaagaacaccatgtgcaaagatggtcgctgcccggatatcaataaaaaggtacaaa

SEQ ID NO: 519208 - DNA, 75 bp, synthetic construct
  source 1..75: mol_type = other DNA
tggcctgcggtgttctgtatgaatgtcaacgaagacgcatcaaagtaccagacgatctcgccgtagtgggatttg

SEQ ID NO: 519209 - DNA, 75 bp, synthetic construct
  source 1..75: mol_type = other DNA
atggcaataacccgaaaacgtcgtagtactggtaaagtcactatcgccgatgtcgcgcaactcgcaggagttggc

SEQ ID NO: 519210 - DNA, 75 bp, synthetic construct
  source 1..75: mol_type = other DNA
tcgctcaacgtgctggccccgggtgggcggctttcgatcatcagcttccactcgctggaagaccgcattgtgaaa

SEQ ID NO: 519211 - DNA, 75 bp, synthetic construct
  source 1..75: mol_type = other DNA
cgcagacgatgatgaagcgtaccgcagcaacgctagaaacgagcaccattgttaaagatgccggtaaagaaaatc

SEQ ID NO: 519212 - DNA, 75 bp, synthetic construct
  source 1..75: mol_type = other DNA
tgaccaaagatgaagagcacaaaaatacgatgtgcaaagatggtcgctgtccggacattaataaaaaagtacaaa

SEQ ID NO: 519213 - DNA, 75 bp, synthetic construct
  source 1..75: mol_type = other DNA
tgagaggtttagagggtgcatataatgttgcacttatgaaggcagtgcctaaatctgaattattggataacgagt

SEQ ID NO: 519214 - DNA, 75 bp, synthetic construct
  source 1..75: mol_type = other DNA
catgcaaaaatatttatatgagcagtgtgaagcaaataacgatgattatcttgcctatcttcgcatacataatga

SEQ ID NO: 519215 - DNA, 75 bp, synthetic construct
  source 1..75: mol_type = other DNA
gacgctgaccagcgaagtgaacaaacaaaccagcgtatttgcgccgaatgtgctgattcttgatcagaacatgac

SEQ ID NO: 519216 - DNA, 75 bp, synthetic construct
  source 1..75: mol_type = other DNA
gcttaagcgcattcgctacgtggatgaagaagcggtatcgattgaggagtcgtgggttcctgcgcatttaattca

SEQ ID NO: 519217 - DNA, 75 bp, synthetic construct
  source 1..75: mol_type = other DNA
tttaatcagcggagaaaacagcgccgctgcgttgctggagaaaatcaaagctgagcgcgcagccagcgggggtaa

SEQ ID NO: 519218 - DNA, 75 bp, synthetic construct
  source 1..75: mol_type = other DNA
ccgcaatcaatgcaaatacgtcctcggttactgtaaagcatctttcttccaggacacttcaagataccctacttc

SEQ ID NO: 519219 - DNA, 75 bp, synthetic construct
  source 1..75: mol_type = other DNA
cggaagtcgttgctgccgcaacgccggtgaaggacaaattcaaacatcctgcgacccgtaccttccaggcggtgc

SEQ ID NO: 519220 - DNA, 75 bp, synthetic construct
  source 1..75: mol_type = other DNA
gcgtgatattggcctgaaactggccgatacgcttcctggcgttaaaccacaactgatccgtcaggctatgggatt

SEQ ID NO: 519221 - DNA, 75 bp, synthetic construct
  source 1..75: mol_type = other DNA
gatggcagtatgttaacggcgcgtctggtgattggcgcggacggcgctaattcctggttgcgcaacaaagccgat

SEQ ID NO: 519222 - DNA, 75 bp, synthetic construct
  source 1..75: mol_type = other DNA
gggacaaagacagctttggtcacatctcgtttgacgatcagagcatgggctatagccatcttgggcatattgttg

SEQ ID NO: 519223 - DNA, 75 bp, synthetic construct
  source 1..75: mol_type = other DNA
cagttgtggatgcagtacgtccccgtgcaacgttttatccgcgctttgtttgcttctcgcctgccgccgggcgtc

SEQ ID NO: 519224 - DNA, 75 bp, synthetic construct
  source 1..75: mol_type = other DNA
ttatgggcaccagccgatagcaccctacaacgcgtagcgcgttacaccatgatcttgctgatgctgacagaattc

SEQ ID NO: 519225 - DNA, 75 bp, synthetic construct
  source 1..75: mol_type = other DNA
tgtgggcgctggcggcctgcaccacgctagtcctgcccgcgcagaccattttgccggtctatagcgcggcgacct

SEQ ID NO: 519226 - DNA, 75 bp, synthetic construct
  source 1..75: mol_type = other DNA
atgcaaagtgttgatgtagccattgttggtggcggcatggtggggctgacggttgcctgcggcttacaggggagc

SEQ ID NO: 519227 - DNA, 75 bp, synthetic construct
  source 1..75: mol_type = other DNA
ggcggctttctgtcatcagttttcattcgctggaagatcgtattgtgaaacgcttcatgcgtgaaaacagccgtg

SEQ ID NO: 519228 - DNA, 75 bp, synthetic construct
  source 1..75: mol_type = other DNA
ggcgaagaagaggtggctgagaatcctcgtgcccgtagttcagttctgcgtattgcagagaggacgaacgcatga

SEQ ID NO: 519229 - DNA, 75 bp, synthetic construct
  source 1..75: mol_type = other DNA
gatatcactctgttggcccccgcagaattacagcaggtcgcctggggagaaaatgaaaccttcctgacgctgaaa

SEQ ID NO: 519230 - DNA, 75 bp, synthetic construct
  source 1..75: mol_type = other DNA
gacacgctgcctggcgttaagccgcagcttattcgtcaggcaatggggttaaatgatttgcctgaatggttgcgt

SEQ ID NO: 519231 - DNA, 75 bp, synthetic construct
  source 1..75: mol_type = other DNA
atcgcttttgataatcgcctgggcttatgcaaggttgagagcgagcgtcaggtgttcccgctgacggggcgttat

SEQ ID NO: 519232 - DNA, 75 bp, synthetic construct
  source 1..75: mol_type = other DNA
gcgaaaacgtatgctgatgctcaccgtctggatgatgggaattgccacagcactcattggcgttctcccttcatt

SEQ ID NO: 519233 - DNA, 75 bp, synthetic construct
  source 1..75: mol_type = other DNA
ttaccgttggatagctatgcgaagcctgatattgaagccaactatcagggccgactgctcgccagacaaagcggc

SEQ ID NO: 519234 - DNA, 75 bp, synthetic construct
  source 1..75: mol_type = other DNA
ttgcagcgttcgttgccttgatgtgcgcagtgggcgcggttgggctctgctttatgccagcgcacgcgatcacct

SEQ ID NO: 519235 - DNA, 75 bp, synthetic construct
  source 1..75: mol_type = other DNA
tataggctggattttcagtagcaaggcacacagcaatgaacagcgtattatgtatattttgcttacagcacatat

SEQ ID NO: 519236 - DNA, 75 bp, synthetic construct
  source 1..75: mol_type = other DNA
tgtcgactgccggcggctcttttggcatttttgatggtaatgttctggccgtatccctgcgtgcggtgcagagta

SEQ ID NO: 519237 - DNA, 75 bp, synthetic construct
  source 1..75: mol_type = other DNA
attaattcagtcgttgatgtttgaaaccagtttatccgatggtgttgatttgtcgtttgctgccggttctgcgtc

SEQ ID NO: 519238 - DNA, 75 bp, synthetic construct
  source 1..75: mol_type = other DNA
ggtgatgttctccctgattatctacatcgagaacaggatgtaccgcacgccgcgtaacctcaagaaactgaacgt

SEQ ID NO: 519239 - DNA, 75 bp, synthetic construct
  source 1..75: mol_type = other DNA
ttttcaactactagtcaatctgatgtcagtgaaacattaaaggcagagagggtaagggatcagcggctggaatta

SEQ ID NO: 519240 - DNA, 75 bp, synthetic construct
  source 1..75: mol_type = other DNA
gttgcgagaggctgctttttctcacctgtcagaatctgacgcatcaaaatctgacccatcaaaatctgatgcatc

SEQ ID NO: 519241 - DNA, 75 bp, synthetic construct
  source 1..75: mol_type = other DNA
cagcgcacgcgatcacctggactctgcttttcggttttggttccggcgcaacaatgatactggggttgacgttca

SEQ ID NO: 519242 - DNA, 75 bp, synthetic construct
  source 1..75: mol_type = other DNA
ttcctgctgcaggtggaaaaccattcctcctggcaccgtctgtttgtggacccgttaagccgcgccatgtacagc

SEQ ID NO: 519243 - DNA, 75 bp, synthetic construct
  source 1..75: mol_type = other DNA
ttatcctcaaacagagtgcgaaggagttcgcgaaatacaaccagctgtatccggaccagttcctgccactgcagc

SEQ ID NO: 519244 - DNA, 75 bp, synthetic construct
  source 1..75: mol_type = other DNA
actcattcaatcgctcatgtttgaaaccagtttgtctgatggtgttgatttgtcatttgcagctggctctgcatc

SEQ ID NO: 519245 - DNA, 75 bp, synthetic construct
  source 1..75: mol_type = other DNA
ttccggtcctttctgaagaagatcctcccggttgggaagtccgtcagcactggcagcgttactggctggtagacc

SEQ ID NO: 519246 - DNA, 75 bp, synthetic construct
  source 1..75: mol_type = other DNA
agatcctaaggctgttgtgtggctaggggacaacacattcggtataggtagcgagggcgatggctctgtaatctg

SEQ ID NO: 519247 - DNA, 75 bp, synthetic construct
  source 1..75: mol_type = other DNA
tggcggtgcgcgtaacgacgcaggcccgatgcagtacctgatccccggctggacgttcgataacaagcgtccgtg

SEQ ID NO: 519248 - DNA, 75 bp, synthetic construct
  source 1..75: mol_type = other DNA
tggagatcagccccaatttatgggcgggcgttggcttagtgcgcggcggtgccgggacggcactggtgggcgatg

SEQ ID NO: 519249 - DNA, 75 bp, synthetic construct
  source 1..75: mol_type = other DNA
tttaccaccttgtatggcaacatgcccttgtggacagcctggaacggtatcattgcttaccttctgataggtttc

SEQ ID NO: 519250 - DNA, 75 bp, synthetic construct
  source 1..75: mol_type = other DNA
tggcagcgttactggctggtagacccgctggatggtactaaagagtttattaaacgtaatggcgaattcaccgtt

SEQ ID NO: 519251 - DNA, 75 bp, synthetic construct
  source 1..75: mol_type = other DNA
gtttttaagctggggctggcgcattcctttcctgtttagcatcgtactggtactgggagcattgtgggtgcgcaa

SEQ ID NO: 519252 - DNA, 75 bp, synthetic construct
  source 1..75: mol_type = other DNA
atggggaggcgcagcgttgctttccgttgaaagtgcgccgaaaaataaaaaagccttttacagtagcggtgtaca

SEQ ID NO: 519253 - DNA, 75 bp, synthetic construct
  source 1..75: mol_type = other DNA
tcgtcagccattacgagcgacgctggctgatagaggaataccacaaggcgtggaaaagtggtggtacatgtgtgg

SEQ ID NO: 519254 - DNA, 75 bp, synthetic construct
  source 1..75: mol_type = other DNA
gtaatgctcaatgcggtggatattccacttgccgatccgcatttctggacgctttccggtgcagtccgcgtggcg

SEQ ID NO: 519255 - DNA, 75 bp, synthetic construct
  source 1..75: mol_type = other DNA
gggttgtcactaaagaaagacgtgaagaagaagaacagcagcagcgtgaactggcagagcgccaggaaaaaatta

SEQ ID NO: 519256 - DNA, 75 bp, synthetic construct
  source 1..75: mol_type = other DNA
ttattcccgccagcgttgccgataaaattgcgcaacgtgataccagcagtattgtattacacagtgcacttagtg

SEQ ID NO: 519257 - DNA, 75 bp, synthetic construct
  source 1..75: mol_type = other DNA
tgccgataacattggtggcgtatattacagaccggtgcagaaatacattaacgggacatggtataacgtggcgca

SEQ ID NO: 519258 - DNA, 75 bp, synthetic construct
  source 1..75: mol_type = other DNA
gcgttatcacagcattagggaaggtgcgaataagcggggaaattcttctcggctgactcagtcatttcatttctt

SEQ ID NO: 519259 - DNA, 75 bp, synthetic construct
  source 1..75: mol_type = other DNA
gtcgatgatcagcggcaagcttggcgaggataaacagaacaagcaagaaaaatcagaaaccgcggtacgtgaaag

SEQ ID NO: 519260 - DNA, 75 bp, synthetic construct
  source 1..75: mol_type = other DNA
agagatgacggacagtgacgggaaaatcgtgtgggagacggggtatcaggtctggggtaacacgatacaggagaa

SEQ ID NO: 519261 - DNA, 75 bp, synthetic construct
  source 1..75: mol_type = other DNA
tcaatattcaggatcttgcggaatacatagacaaaagacgagaagaaggacgtatcgagtgggaacaggtcagaa

SEQ ID NO: 519262 - DNA, 75 bp, synthetic construct
  source 1..75: mol_type = other DNA
tcctcagcctttcatttttgcttgccgcatgtagttcaattccgcaaaatatcaaaggcaataaccaacctgata

SEQ ID NO: 519263 - DNA, 75 bp, synthetic construct
  source 1..75: mol_type = other DNA
gaatcacaacggaccaactggaactactcaaagcacagtccgcagtagcaggttgctcaatgattcaggtgttga

SEQ ID NO: 519264 - DNA, 75 bp, synthetic construct
  source 1..75: mol_type = other DNA
atcgcatcgatggttgcctgggcgctgatccgcaacctgcctggtttgctggaagtgctggtgctctcgcggttg

SEQ ID NO: 519265 - DNA, 75 bp, synthetic construct
  source 1..75: mol_type = other DNA
tctcgctgtcggcctgattctgctgactatgcagctcaatatcagcgagttattgtggtcgttcagcaaaaaact

SEQ ID NO: 519266 - DNA, 75 bp, synthetic construct
  source 1..75: mol_type = other DNA
gtgcggcggtggtgaaaaacgtgaccatgggcagcctgttgtttgcgattatcgcatcgatggttgcctgggcgc

SEQ ID NO: 519267 - DNA, 75 bp, synthetic construct
  source 1..75: mol_type = other DNA
cagcgcgggagacataccggtatgtgtacgatgcgctggggaggcggacggaaaaacagcacatcagccctgacg

SEQ ID NO: 519268 - DNA, 75 bp, synthetic construct
  source 1..75: mol_type = other DNA
atggtaacggacccgatagggctaagaggcgggttaaacctgtatgcttatgcaccgaatccgttaagctggatc

SEQ ID NO: 519269 - DNA, 75 bp, synthetic construct
  source 1..75: mol_type = other DNA
tagggctggcggggggcattaatctttatcagtatgcgccgaatccgttgtcatggatcgatccactcggtttat

SEQ ID NO: 519270 - DNA, 75 bp, synthetic construct
  source 1..75: mol_type = other DNA
gttgaaaatcctgctgcctcgcaagacgttcagcctgtcgctgatgcgcagccaacaccggtgtttacgcctgac

SEQ ID NO: 519271 - DNA, 75 bp, synthetic construct
  source 1..75: mol_type = other DNA
gcaactagaagcatctaatttaatcgttgatgataaagttatgctaagccttagacgaatggtgataaatcagtt

SEQ ID NO: 519272 - DNA, 75 bp, synthetic construct
  source 1..75: mol_type = other DNA
atggcgctggtggacagccagattggcaactttggccgcccggcgcacgtctggtttgtctcgcaattgccaaaa

SEQ ID NO: 519273 - DNA, 75 bp, synthetic construct
  source 1..75: mol_type = other DNA
caatcagcaaaatggatgatgtgaaaaaattcatacaggagtacatttataacaattcgcccgaaccaatatatt

SEQ ID NO: 519274 - DNA, 75 bp, synthetic construct
  source 1..75: mol_type = other DNA
tgttccgacagaggattatgtcgtcggtcagacgacatataagtggggggcaactaatcccgctacagaaagcac

SEQ ID NO: 519275 - DNA, 75 bp, synthetic construct
  source 1..75: mol_type = other DNA
ttcagaaagatcagaacggtgcggatattcctgataaaggacgcttcctgagtaacattaatgtttacagcaaag

SEQ ID NO: 519276 - DNA, 75 bp, synthetic construct
  source 1..75: mol_type = other DNA
tggtcgtggggaaaaccggtagcggtaagacagtcatcagcgttgatgttatgcggacctttttatcagaacaac

SEQ ID NO: 519277 - DNA, 75 bp, synthetic construct
  source 1..75: mol_type = other DNA
gtggcagggccagcagacgcctcgcagtccatccttaagaacaaccagtcatcactgaaaggggactttaccgat

SEQ ID NO: 519278 - DNA, 75 bp, synthetic construct
  source 1..75: mol_type = other DNA
aagccaggctgaaaactactgcagcaaccaggtcggtaatggctacccccttccccgcgcggaccttttaagcaa

SEQ ID NO: 519279 - DNA, 75 bp, synthetic construct
  source 1..75: mol_type = other DNA
ccattgtcgccaaatcagatgccgatgctcgcctgaaagagtacggtgtgaaaagcattaacgtgccggaaagtg

SEQ ID NO: 519280 - DNA, 75 bp, synthetic construct
  source 1..75: mol_type = other DNA
acatgagtacatacaagtttcaaccaatttctttaataagattggctgggatgttttagggctagccgaaccata

SEQ ID NO: 519281 - DNA, 75 bp, synthetic construct
  source 1..75: mol_type = other DNA
gtgctgagctacatcttgttctgcacgatatatcaggcaatccgatcaaagtttctgaagggatggaatttgtgc

SEQ ID NO: 519282 - DNA, 75 bp, synthetic construct
  source 1..75: mol_type = other DNA
gcatggctacgaagaagagaagtggagaagaaataaatgaccgacaaatcttatgcgggatgggtatcaaactac

SEQ ID NO: 519283 - DNA, 75 bp, synthetic construct
  source 1..75: mol_type = other DNA
ctctggcaagactttcagcaggtgggcatttccgtagcgcgcttgggagatatcctcaactacccgacagaggtg

SEQ ID NO: 519284 - DNA, 75 bp, synthetic construct
  source 1..75: mol_type = other DNA
agtgaagagcagacagaacgccagcgcaaacaggaggccacacagccggacagcgtgacctctgaaaattatgcg

SEQ ID NO: 519285 - DNA, 75 bp, synthetic construct
  source 1..75: mol_type = other DNA
atgaaaccttcatttttcacacttaaaaaaaaccattgctcatcagttcagattgatggtgatgttttgtacagt

SEQ ID NO: 519286 - DNA, 75 bp, synthetic construct
  source 1..75: mol_type = other DNA
ggctcttgttacaaatcctcgaattcttatttttgatgaagcaacaagtgctcttgattatgagtcggaaaatat

SEQ ID NO: 519287 - DNA, 75 bp, synthetic construct
  source 1..75: mol_type = other DNA
tgcacagggggttttcaacccttaatgttattactgttgcattatctgttgtagtggtgtttgagattatactca

SEQ ID NO: 519288 - DNA, 75 bp, synthetic construct
  source 1..75: mol_type = other DNA
aggtcagattgttgcaccggttattcgccttgcacaaatctggcaggatttccagcaggttggtatatcagttac

SEQ ID NO: 519289 - DNA, 75 bp, synthetic construct
  source 1..75: mol_type = other DNA
gaatgctggcggttgcgtcatcttctgctacgcttgcttatgacggaacaattaattttactgggaaagtcgttg

SEQ ID NO: 519290 - DNA, 75 bp, synthetic construct
  source 1..75: mol_type = other DNA
tttttggtgcgctggttcatggggggcgctataccccctaagtggaaaccaaaatggcggtaagggggttatacg

SEQ ID NO: 519291 - DNA, 75 bp, synthetic construct
  source 1..75: mol_type = other DNA
ggctatcgaggacaattccatcaataggccaagaccctatctataccatttggaggtggaacgactgctgcaata

SEQ ID NO: 519292 - DNA, 75 bp, synthetic construct
  source 1..75: mol_type = other DNA
aagggtgttccatttgaagtagttctattaggctctcacttcctaagtgtaaagggtagaaaattcttccaatac

SEQ ID NO: 519293 - DNA, 75 bp, synthetic construct
  source 1..75: mol_type = other DNA
tcagcgaggacgaacagggcaccttccccgattacctgcaggcccggcacggctggaaacaggccacatggctgg

SEQ ID NO: 519294 - DNA, 75 bp, synthetic construct
  source 1..75: mol_type = other DNA
ccggcggtttctacgactactttatctgctgatacaaaaacagcaggccttacaccatttactattcaactaaca

SEQ ID NO: 519295 - DNA, 75 bp, synthetic construct
  source 1..75: mol_type = other DNA
tcatgaaatcgttcaggcaaaaaacgtcccggcgatggagggggtggatattgagtgggttcacccgactgagca

SEQ ID NO: 519296 - DNA, 75 bp, synthetic construct
  source 1..75: mol_type = other DNA
ccggagccagaacttatattttctctcatactacaagtcgtattgacgtcgaactgggtgctaagttattcagac

SEQ ID NO: 519297 - DNA, 75 bp, synthetic construct
  source 1..75: mol_type = other DNA
aatgttcgtatcgacgcactcggtgtagatggtttgggtgctgcgggtattccttcctgggtagatctgcacttc

SEQ ID NO: 519298 - DNA, 75 bp, synthetic construct
  source 1..75: mol_type = other DNA
ttttagataatatcaatctcagtattaagcagggggaggttattggtattgtcggacgttctggttcaggaaaaa

SEQ ID NO: 519299 - DNA, 75 bp, synthetic construct
  source 1..75: mol_type = other DNA
gttttctaatactctttgaacgcttcataaaaaaactcgaagaatctggattatcagagtcagaaataatagata

SEQ ID NO: 519300 - DNA, 75 bp, synthetic construct
  source 1..75: mol_type = other DNA
tctgcgggatataccttagtgctggcacaaagtagcggcacgacggtaaaaatgaccattatcagcgaagcgggt

SEQ ID NO: 519301 - DNA, 75 bp, synthetic construct
  source 1..75: mol_type = other DNA
ttttgaataatattaatttatacatatcaaagggggatgttatcggtatagttggccgttctggttcaggaaaaa

SEQ ID NO: 519302 - DNA, 75 bp, synthetic construct
  source 1..75: mol_type = other DNA
agatcaggcagtcaatgtctagcctggcaggttttattcaacgtcatgccgagaataaagccacatctccttcaa

SEQ ID NO: 519303 - DNA, 75 bp, synthetic construct
  source 1..75: mol_type = other DNA
tcatttagctatagtgatgataaaaaaatacttaattcagtcagtcttgacctttttaccggaaaaatgtattca

SEQ ID NO: 519304 - DNA, 75 bp, synthetic construct
  source 1..75: mol_type = other DNA
cgatggcgcgcgtttcacctactacgtaggctacgccaccagcgcgccgaccacggtaaccaccggtgtggttaa

SEQ ID NO: 519305 - DNA, 75 bp, synthetic construct
  source 1..75: mol_type = other DNA
caaaataaaaggggcgattcgtaccgattttattttgtctgcggaaatcgtcgccatcacgctggggattgtggc

SEQ ID NO: 519306 - DNA, 75 bp, synthetic construct
  source 1..75: mol_type = other DNA
ccggtgtattaggggatgatttatcgctcaatgcgcaacaagtttcaggcgtgcgggccaaccgggaacttcccg

SEQ ID NO: 519307 - DNA, 75 bp, synthetic construct
  source 1..75: mol_type = other DNA
gacatttatctgaatgatatatccttatgtgatatcagtgacgaggatttgaatgaggctatttactaccttaca

SEQ ID NO: 519308 - DNA, 75 bp, synthetic construct
  source 1..75: mol_type = other DNA
atgaaatgtgctggcatttaagttgtgattatgtcgacgcaggcgggcaacgcgttagggtaatggtgccaactt

SEQ ID NO: 519309 - DNA, 75 bp, synthetic construct
  source 1..75: mol_type = other DNA
gctcagccagcaggctttttcgcgttttgtgcaggactatctggtatttggcaacgcctatctggagaaacgcac

SEQ ID NO: 519310 - DNA, 75 bp, synthetic construct
  source 1..75: mol_type = other DNA
tatttgtacgtaatgaattaactcccttgcaaaaaaggctacaagagctgaacgactggctgggcgaagaagtga

SEQ ID NO: 519311 - DNA, 75 bp, synthetic construct
  source 1..75: mol_type = other DNA
atttctgaatatcaaaaatgttagtcgcgatgacatgatggcggcacaccgcgtgccgccacagatgatggggat

SEQ ID NO: 519312 - DNA, 75 bp, synthetic construct
  source 1..75: mol_type = other DNA
aaggcagcatttttcacctgatggagccggatattaatcaagaaatctacggcctgcccggctatctttctgtca

SEQ ID NO: 519313 - DNA, 75 bp, synthetic construct
  source 1..75: mol_type = other DNA
gttgcaaaaaagattacaggaaataaacatatggctagatgaggaaatagtaacattcgatagttatcagcttac

SEQ ID NO: 519314 - DNA, 75 bp, synthetic construct
  source 1..75: mol_type = other DNA
aacgactggctgggtgaagaggtgatctgcttcgagccttattctttacaacttgatgaaagtgctgatagcaac

SEQ ID NO: 519315 - DNA, 75 bp, synthetic construct
  source 1..75: mol_type = other DNA
ttgacgggctggcgcgcaccttccgcgctgccgtgcatcacagttcaccgattgcagtgaaatgcaacattctga

SEQ ID NO: 519316 - DNA, 75 bp, synthetic construct
  source 1..75: mol_type = other DNA
gtttctgaacatcaagaacgtgagccgggatgacatgatggcggcgcatcgtgtgccaccgcaaatgatggggat

SEQ ID NO: 519317 - DNA, 75 bp, synthetic construct
  source 1..75: mol_type = other DNA
attgcagtaaagtgcaacattctgaccagtacctatatccctcacccgctgctcagtcagcaggctttttcacgt

SEQ ID NO: 519318 - DNA, 75 bp, synthetic construct
  source 1..75: mol_type = other DNA
aaggacgggcttcagatcatcccgctgtcagaagtggcggcaaaggatgagtttctgaacataaagaacgtaagt

SEQ ID NO: 519319 - DNA, 75 bp, synthetic construct
  source 1..75: mol_type = other DNA
tagcggcgatgaatcagatccagcataaaagccagacttcagccgaagcattcagcttcggcgatcccgttcctg

SEQ ID NO: 519320 - DNA, 75 bp, synthetic construct
  source 1..75: mol_type = other DNA
tgcatcacagctcaccgattgcggtgaaatgcaatattctgaccagtacctacatccctcacccgctgctcagcc

SEQ ID NO: 519321 - DNA, 75 bp, synthetic construct
  source 1..75: mol_type = other DNA
tatttgttatgaatgagttactaccaattcaaaaacatattctgcaacttaatgaatgggctaaaaaaaacatca

SEQ ID NO: 519322 - DNA, 75 bp, synthetic construct
  source 1..75: mol_type = other DNA
ctgatgaggtgttgtcagcaatcagaaatgttgccaggattcgcgccaatttcgctgattttgacggtgacagaa

SEQ ID NO: 519323 - DNA, 75 bp, synthetic construct
  source 1..75: mol_type = other DNA
ctatgtagaatgcgtacagacggatcgctggtatgagccacccgtaagttttgacggactggcgcgcaccttccg

SEQ ID NO: 519324 - DNA, 75 bp, synthetic construct
  source 1..75: mol_type = other DNA
atgggaaagagtaagaagaacctcgctgcggcgacgaaacagacccagcataaaaaccagacttcagccgaagca

SEQ ID NO: 519325 - DNA, 75 bp, synthetic construct
  source 1..75: mol_type = other DNA
cgcagtatgctcaaacgcgcaagtgctgggtgtgacgaattgccctggaacaccattttgcgcaataacagaaaa

SEQ ID NO: 519326 - DNA, 75 bp, synthetic construct
  source 1..75: mol_type = other DNA
gcaggggttcctataagtggtggaggcggatcattcccgagtgaagccgtaagcaaccctctgtgtatgtgcgag

SEQ ID NO: 519327 - DNA, 75 bp, synthetic construct
  source 1..75: mol_type = other DNA
cgcactattggcgatgtgttccgcaataagcgagcgcaattctattacgcgctggctgacaggctgtatctgaca

SEQ ID NO: 519328 - DNA, 75 bp, synthetic construct
  source 1..75: mol_type = other DNA
cgctgccgtacatcatagctccccgattgcagtaaagtgcaacattctgaccagtacctacatccctcacccgct

SEQ ID NO: 519329 - DNA, 75 bp, synthetic construct
  source 1..75: mol_type = other DNA
atgggaaagattaagaaaaaccgcgctgcgtcgacgaaacagatccagcataaaaaccaggcttcagccgaagca

SEQ ID NO: 519330 - DNA, 75 bp, synthetic construct
  source 1..75: mol_type = other DNA
aaggtccaggcaacttccgcaacctgtttatgtactcacctaacggcaaaaaggatggtcttcagattatcccgt

SEQ ID NO: 519331 - DNA, 75 bp, synthetic construct
  source 1..75: mol_type = other DNA
taaaaaccaaacttcagccgaagcattcagcttcggtgatcccgttcctgttctggaccgccgggaactgctgga

SEQ ID NO: 519332 - DNA, 75 bp, synthetic construct
  source 1..75: mol_type = other DNA
gctacagaagcggctgcaagaacttaaccaatgggttggtgaggaggtagctcgctttgaatcatattgtctaga

SEQ ID NO: 519333 - DNA, 75 bp, synthetic construct
  source 1..75: mol_type = other DNA
aggtaacagttgatcacaacacaaaaccaggcaacagcccaacggctgaggctttcagctttggtgatcccattc

SEQ ID NO: 519334 - DNA, 75 bp, synthetic construct
  source 1..75: mol_type = other DNA
cagggtggagcaaggaaggcagatagaaagattaatactctatatttagagtttgctcgtgctttgagaaagatt

SEQ ID NO: 519335 - DNA, 75 bp, synthetic construct
  source 1..75: mol_type = other DNA
ttaatatgaagtatacagtagttggcaatgctgttccgcctcctttatttgaggcggttgctaaatctcttccag

SEQ ID NO: 519336 - DNA, 75 bp, synthetic construct
  source 1..75: mol_type = other DNA
actgttttaaatctgatacttggttttatcatcggcggcattgtggtacttggagtgaaagcggtagcgaaaatg

SEQ ID NO: 519337 - DNA, 75 bp, synthetic construct
  source 1..75: mol_type = other DNA
cccggcaagaatctctgattgagttaagtgcccatcacaatatgatcaatgaccttatattacacaatcacccca

SEQ ID NO: 519338 - DNA, 75 bp, synthetic construct
  source 1..75: mol_type = other DNA
ttggtcgagagtggttttcttacacggatgaattatgcgaatttatcaataccctgaacacctatgcaatcagga

SEQ ID NO: 519339 - DNA, 75 bp, synthetic construct
  source 1..75: mol_type = other DNA
gtcttggcatgaaatacacggtggttggtaatgcagtgcctccgccgctttttgaagctgtaacgaaggcattgc

SEQ ID NO: 519340 - DNA, 75 bp, synthetic construct
  source 1..75: mol_type = other DNA
gtgattattggcgatcgcgtggagatcggcgcctgtactaccatcgatcgtggtgctctggatgacaccattatc

SEQ ID NO: 519341 - DNA, 75 bp, synthetic construct
  source 1..75: mol_type = other DNA
tctgttaaataaagataagattgatgccctgattcggttgccgacgctcaaaaaagaacttcacggacaggactt

SEQ ID NO: 519342 - DNA, 75 bp, synthetic construct
  source 1..75: mol_type = other DNA
agacaaccaccgccagttagtccaggcactgctggaagttaaccgtaagcatggcgtgaaggtcgtcatttccaa

SEQ ID NO: 519343 - DNA, 75 bp, synthetic construct
  source 1..75: mol_type = other DNA
tggtaaaaacagcaaaatcggcgcaggttcgcgcctttgggcgaacgtaaccatttaccatgagatccagatcgg

SEQ ID NO: 519344 - DNA, 75 bp, synthetic construct
  source 1..75: mol_type = other DNA
gcacccagtgcagtgatcgacgcgacggcgaagctgggtaacaacgtatcgattggcgctaacgcggtgattgag

SEQ ID NO: 519345 - DNA, 75 bp, synthetic construct
  source 1..75: mol_type = other DNA
ccaacaaagtctggcgcaaaaccgctgcactggtgatgaacattgatgacatgagcaagcgtctgaaatcgcttg

SEQ ID NO: 519346 - DNA, 75 bp, synthetic construct
  source 1..75: mol_type = other DNA
tgatttgtcatatcttgatttgagtgagttaccgcctatcccctcgacagttaatacgttaaatctggaaaacaa

SEQ ID NO: 519347 - DNA, 75 bp, synthetic construct
  source 1..75: mol_type = other DNA
aggtaactggatcaccgtaagtaaaggtcacgctacgcttggcggcccgaataccacttatgtgtttaaggccgg

SEQ ID NO: 519348 - DNA, 75 bp, synthetic construct
  source 1..75: mol_type = other DNA
tcagttctaccatcgtctggggtacgcgttatcacagcattagttatctgtttggtttctttgtggctattgcat

SEQ ID NO: 519349 - DNA, 75 bp, synthetic construct
  source 1..75: mol_type = other DNA
cgtcccaagaacaaacaggcgccagatggactattgatattagagggaatcagcaattggctgaaattgcacata

SEQ ID NO: 519350 - DNA, 75 bp, synthetic construct
  source 1..75: mol_type = other DNA
gacgctgacgctgaccagcgaagttaacaagcaaaccagcgtatttgcgccgaatgtgttaattcttgatcagaa

SEQ ID NO: 519351 - DNA, 75 bp, synthetic construct
  source 1..75: mol_type = other DNA
gtgttctttgaagccgccgatcgtgaagaagcgcgggaaacgctgccggtattaatgtcgctactctggcatatc

SEQ ID NO: 519352 - DNA, 75 bp, synthetic construct
  source 1..75: mol_type = other DNA
ccaatactaatgccaatgccaatgccaatgccaatgccaatgctaatgctaatgctaatgctaatgctaatgcta

SEQ ID NO: 519353 - DNA, 75 bp, synthetic construct
  source 1..75: mol_type = other DNA
ggctggaaaatctgcctgccgctgacgctgatcaacttgctggtaacggcggctgtcattctctggcaggcgcaa

SEQ ID NO: 519354 - DNA, 75 bp, synthetic construct
  source 1..75: mol_type = other DNA
aactagaacgacttattggagtggtgacgtaggtgtagtcactgaaaataacagtaatattattgttactattct

SEQ ID NO: 519355 - DNA, 75 bp, synthetic construct
  source 1..75: mol_type = other DNA
atatcatcaaaacatctttggcatgtattagttaacggcatcaacaatgatccacttgcacaaatgcagtactgg

SEQ ID NO: 519356 - DNA, 75 bp, synthetic construct
  source 1..75: mol_type = other DNA
gttgttgaaaacaatatgctgaatgtgatagccactgaaacagcagctaatacggcagcagcaatagctggtgct

SEQ ID NO: 519357 - DNA, 75 bp, synthetic construct
  source 1..75: mol_type = other DNA
cggacggcgaagagcgttgcgtagcctgtaacctctgcgcggtagcctgcccggtcggctgtatctcgctgcaaa

SEQ ID NO: 519358 - DNA, 75 bp, synthetic construct
  source 1..75: mol_type = other DNA
ccaggttcgtagtatctggatgatcggcctgcacgcgttcgccaaacgcgaaacgcgaatgtacccggaagagcc

SEQ ID NO: 519359 - DNA, 75 bp, synthetic construct
  source 1..75: mol_type = other DNA
gtgatctggggtgcctgttccgtcaactgtggtagccgctgtgcacttcgtctacatgttaaagataatgaagtc

SEQ ID NO: 519360 - DNA, 75 bp, synthetic construct
  source 1..75: mol_type = other DNA
gtatgccgcccgaaaacgggggctggaacccggtatcttctgcgccatccacacgtatggccgtcgtctcaactg

SEQ ID NO: 519361 - DNA, 75 bp, synthetic construct
  source 1..75: mol_type = other DNA
tgtaccgtcgtgcagtcgcgggactgaatgtggcagggctgaagaaaaacgcgcgggatatcagcctgcagaggt

SEQ ID NO: 519362 - DNA, 75 bp, synthetic construct
  source 1..75: mol_type = other DNA
ttatctgaagaagccaccaatagcggcttcccgactggctcattacaacggaggtgcgagcctgagcttccgtta

SEQ ID NO: 519363 - DNA, 75 bp, synthetic construct
  source 1..75: mol_type = other DNA
tgccggacacgctgtggccggtgttcgaaagcaaccgctggctgctgaatgacgtgtgccgtctggcggtggaga

SEQ ID NO: 519364 - DNA, 75 bp, synthetic construct
  source 1..75: mol_type = other DNA
acggtggatgtggaatatgcggcagctgcttctgaaagcgtggtcagaggggatggcgatgccggagtcgttgtc

SEQ ID NO: 519365 - DNA, 75 bp, synthetic construct
  source 1..75: mol_type = other DNA
aatcgtcttcctgactgcgactgggtacatctggtcttcaccctgccggacacgctgtggccggtgttcgaaagc

SEQ ID NO: 519366 - DNA, 75 bp, synthetic construct
  source 1..75: mol_type = other DNA
actgggtacatctggtcttcaccctgccggacacgctgtggccggtgttcggaagcaacagctggctgctgaatg

SEQ ID NO: 519367 - DNA, 75 bp, synthetic construct
  source 1..75: mol_type = other DNA
atgtcgtgctggcggcaataggtgaacgctttcaacgtgccggacatccgcaaaacatcactaccatccacccta

SEQ ID NO: 519368 - DNA, 75 bp, synthetic construct
  source 1..75: mol_type = other DNA
taacggaaaaaagaaaatatgatcgttccgtattggcaaggtcattaaaagaaagaaatttcaactatattgcga

SEQ ID NO: 519369 - DNA, 75 bp, synthetic construct
  source 1..75: mol_type = other DNA
tcaactggcatccgcatgtacatgtgtcagtaacctgcggggggctgaataagcacggtcagtggaaaaagctga

SEQ ID NO: 519370 - DNA, 75 bp, synthetic construct
  source 1..75: mol_type = other DNA
acggcacgctacctgggtcgttatctgaagaagccaccaatagcggcttcccgactggcgcattacaacggaggg

SEQ ID NO: 519371 - DNA, 75 bp, synthetic construct
  source 1..75: mol_type = other DNA
atgacccgaagtggtggtgattttcagccccgaccgctgaaacgcctgttcacggccaaccagtgctggacatcc

SEQ ID NO: 519372 - DNA, 75 bp, synthetic construct
  source 1..75: mol_type = other DNA
tgtatgccgcccggaagcggggtctggagcccggtatcttctgcgccatccacacatatggccgtcgtctcaact

SEQ ID NO: 519373 - DNA, 75 bp, synthetic construct
  source 1..75: mol_type = other DNA
caccgcgcccggacgctggaaagtgtttgccagtgatatcgacaccgaagtgctggaaaagccagaagcggtatt

SEQ ID NO: 519374 - DNA, 75 bp, synthetic construct
  source 1..75: mol_type = other DNA
tacaaccggttgatacgccgtttgcgttcgctgggactggtcgattttggtcattatctgaacatgctggaatct

SEQ ID NO: 519375 - DNA, 75 bp, synthetic construct
  source 1..75: mol_type = other DNA
gggataaggatttttccgacgacctcaacgtcgtcgccagcgtttttttacagcacaccccaaccttatggccca

SEQ ID NO: 519376 - DNA, 75 bp, synthetic construct
  source 1..75: mol_type = other DNA
gcgttgattcgtcagtaccaggcggaaggccgtttggtggcaatgactggcgacggcaccaacgatgccccagcg

SEQ ID NO: 519377 - DNA, 75 bp, synthetic construct
  source 1..75: mol_type = other DNA
tttagaggagatggtaactataaaggtggcggaattggacagccaaagagtggcacaatatcagcacaggacatt

SEQ ID NO: 519378 - DNA, 75 bp, synthetic construct
  source 1..75: mol_type = other DNA
atgaagccaacgatgctactcatgattaccgtattcctgactttttcagccatttctcaggccgaatcgccattc

SEQ ID NO: 519379 - DNA, 75 bp, synthetic construct
  source 1..75: mol_type = other DNA
ccgggtgtgcggaaatgtgtggggtgccaggaggtgcaggagattcaggcccgccattacaggaggtggcagtga

SEQ ID NO: 519380 - DNA, 75 bp, synthetic construct
  source 1..75: mol_type = other DNA
tgtcacagttactttctaggaaaggtgagttattacagcaaaatacgaatgatttattagaacgtgttaacaccg

SEQ ID NO: 519381 - DNA, 75 bp, synthetic construct
  source 1..75: mol_type = other DNA
acagcataacgattaaagatacacgcacaggcaaccagtaccagcggaagctggatcgcaccacctgtggaattg

SEQ ID NO: 519382 - DNA, 75 bp, synthetic construct
  source 1..75: mol_type = other DNA
aggaaatgacgcattggggcaggcatttttacaaatcctacgcaacgaaggattaatccatattgttgactggaa

SEQ ID NO: 519383 - DNA, 75 bp, synthetic construct
  source 1..75: mol_type = other DNA
actggctgagccataaactgaagctgaaggtcaacgcgaagaagagtgctgtagcacgccctgaaacgcgcaagt

SEQ ID NO: 519384 - DNA, 75 bp, synthetic construct
  source 1..75: mol_type = other DNA
gtcaacctcaggcatgccctgaaaagagtgaaggccaataaaggtgcggcgggagccgacggcatgagcgtaagc

SEQ ID NO: 519385 - DNA, 75 bp, synthetic construct
  source 1..75: mol_type = other DNA
atgagtctgaatatgttctggtttttaccgacccatggtgacgggcattatctgggaacggaagaaggttcacgc

SEQ ID NO: 519386 - DNA, 75 bp, synthetic construct
  source 1..75: mol_type = other DNA
gggcaggaggttgctgtgcacccgcgcaaacgtacttatggctacagtacccgcaacgaacacatgcctgaagct

SEQ ID NO: 519387 - DNA, 75 bp, synthetic construct
  source 1..75: mol_type = other DNA
aatcgcaggatcgtatggcggccagccgtccttatgcagaaaccatgcgcaaagtgattggtcaccttgcacacg

SEQ ID NO: 519388 - DNA, 75 bp, synthetic construct
  source 1..75: mol_type = other DNA
ccatcagccaactgctgccgttaccggcgtcagaggatgatgatctgaaacataaatcctgggattacctgtacg

SEQ ID NO: 519389 - DNA, 75 bp, synthetic construct
  source 1..75: mol_type = other DNA
acacaaaaagagatacctgatatattgaaacaactggttaacagttttgttgcattactcaataaatactgcgag

SEQ ID NO: 519390 - DNA, 75 bp, synthetic construct
  source 1..75: mol_type = other DNA
ttgggccgttggtggagatataagtggatcacttttcatccgtcgttgacagttcctgaacttgttgttccggat

SEQ ID NO: 519391 - DNA, 75 bp, synthetic construct
  source 1..75: mol_type = other DNA
gggctacagtacaccgggaactgcgtaataaatgcgtgacgctgcagctactctgggaagaatactgtgagcgta

SEQ ID NO: 519392 - DNA, 75 bp, synthetic construct
  source 1..75: mol_type = other DNA
ggtcggcatcgaccggcgaagctgactgggcgttatcgccgctgtttgcgtcacagaactggccaccgacgctgt

SEQ ID NO: 519393 - DNA, 75 bp, synthetic construct
  source 1..75: mol_type = other DNA
gcgggaaggaattaaattccaggatggcaccgatttcaacgcagcggcggtaaaagcgaatctggaccgggccag

SEQ ID NO: 519394 - DNA, 75 bp, synthetic construct
  source 1..75: mol_type = other DNA
ttctcagcgtttattaatattcttgcccatccggcgaccgcgatgatttcaccggcagcgctggaaaaatatggc

SEQ ID NO: 519395 - DNA, 75 bp, synthetic construct
  source 1..75: mol_type = other DNA
ctgcgtcatcatcgggataacgttgagcttccgttatcccgccagggcgaacaacatccggcatatgcttcagag

SEQ ID NO: 519396 - DNA, 75 bp, synthetic construct
  source 1..75: mol_type = other DNA
taaaagcgaatctggaccgggccagcgatccggcgaatcatcttaaacgctataacctgtataagaatattgcta

SEQ ID NO: 519397 - DNA, 75 bp, synthetic construct
  source 1..75: mol_type = other DNA
ccgtggatcccgctggtggtagaaaaactggtgtcggcacacagtaaaaaacctgaccggtttttggatcatgcc

SEQ ID NO: 519398 - DNA, 75 bp, synthetic construct
  source 1..75: mol_type = other DNA
gaatatgtgcgaaaaaattgccatcctgctggataatcatggcgatgatcccctttttttacaagaagcaatttc

SEQ ID NO: 519399 - DNA, 75 bp, synthetic construct
  source 1..75: mol_type = other DNA
accatttgcaatatcactggaactatgggcaatcctgagtgctcaggcaagaaatgcgattgcgcaggttgaaaa

SEQ ID NO: 519400 - DNA, 75 bp, synthetic construct
  source 1..75: mol_type = other DNA
tgatattcaccattacttgtcagatgggacgctagatggctgcctgcgtacactggcgttttatgcatccaatcg

SEQ ID NO: 519401 - DNA, 75 bp, synthetic construct
  source 1..75: mol_type = other DNA
acctgcatgcatttccagccttggctggatggcccccatgaggatgtctatcaggggctgctcaacgagcgtgaa

SEQ ID NO: 519402 - DNA, 75 bp, synthetic construct
  source 1..75: mol_type = other DNA
tgttgttgccggtgtgttatcggcagcattttatgttgttatatcgtctcgccttattaaatcgtttgagcctat

SEQ ID NO: 519403 - DNA, 75 bp, synthetic construct
  source 1..75: mol_type = other DNA
atccagatctcgctgcttcatgcagtcgatgtgctttgcggtaaaaatggaaagggagagccattctatgttttg

SEQ ID NO: 519404 - DNA, 75 bp, synthetic construct
  source 1..75: mol_type = other DNA
cagcattatcgcggttgcagatgtaatcatgcgttgtgctaaacgtcgaggagagtttagtcagcagggggccat

SEQ ID NO: 519405 - DNA, 75 bp, synthetic construct
  source 1..75: mol_type = other DNA
aggcataatcaaaagcaggcactgaatagtagcatcaagaatgatgtttatttcaccgttgcacaacagtgtttt

SEQ ID NO: 519406 - DNA, 75 bp, synthetic construct
  source 1..75: mol_type = other DNA
tgcattactcaataaatactacgagaaatcacatgcccaagatattgtcaatcaggatggttcaccattgcaaaa

SEQ ID NO: 519407 - DNA, 75 bp, synthetic construct
  source 1..75: mol_type = other DNA
cagcatcatatgacagacggccactggagcatctttccctgtcagatttcatccatgctctgccaaccgttacca

SEQ ID NO: 519408 - DNA, 75 bp, synthetic construct
  source 1..75: mol_type = other DNA
gtggcgaacatggcttttgtggcgccaatgtacctattccttgctacacctgcatgcattttcagccatggctgg

SEQ ID NO: 519409 - DNA, 75 bp, synthetic construct
  source 1..75: mol_type = other DNA
atgatgaataacatcttaccagcattgcctaccgagaaaatacctgcaaaatcaaatggatactttttcacgttg

SEQ ID NO: 519410 - DNA, 75 bp, synthetic construct
  source 1..75: mol_type = other DNA
gaacatcataccatgaaaaggctgcaacccagggaagagctgaggaaagagaatatgtgcgaaaaaattgccatc

SEQ ID NO: 519411 - DNA, 75 bp, synthetic construct
  source 1..75: mol_type = other DNA
gccgccccagcgaaggcagcaccaaagaccatctgggaagtcactggtgatgacggtagaacgctgggcgatgtt

SEQ ID NO: 519412 - DNA, 75 bp, synthetic construct
  source 1..75: mol_type = other DNA
atccgcatagtgcgctgggttatcgctcgccacgggaatatctgcggcagcgggcttgtaatgggttaagtgata

SEQ ID NO: 519413 - DNA, 75 bp, synthetic construct
  source 1..75: mol_type = other DNA
gaaaaccatccgcatagtgcgttgggttatcgctctccgcgagaatatcgacgtcagcgggtaatgttaacttaa

SEQ ID NO: 519414 - DNA, 75 bp, synthetic construct
  source 1..75: mol_type = other DNA
acagcaatggctgggatttgctggcccaggcggaggccgcgctgaataatcgcgatcaggaactggcggcgcggg

SEQ ID NO: 519415 - DNA, 75 bp, synthetic construct
  source 1..75: mol_type = other DNA
aaaactctactttgaaaaaagatttactatcagtgggtataaaggattataataaagccgatgctacgttgtata

SEQ ID NO: 519416 - DNA, 75 bp, synthetic construct
  source 1..75: mol_type = other DNA
agaaacgaatgcatattttttgcgaagggtctaaaacagaacctatgtacttgcagggttatatcgatgaatttg

SEQ ID NO: 519417 - DNA, 75 bp, synthetic construct
  source 1..75: mol_type = other DNA
acgcgcacgtttacccttattggtattgatgaacagacaatggaagttcaggttaacgataccggcgatatatct

SEQ ID NO: 519418 - DNA, 75 bp, synthetic construct
  source 1..75: mol_type = other DNA
ggtagtgagatccaaaagatattaagtgagcagccttacattgatcgtggggtagccgaagtcgctgcaaaaatg

SEQ ID NO: 519419 - DNA, 75 bp, synthetic construct
  source 1..75: mol_type = other DNA
gacagggctcatcggtcacatcactgagcggcacctcagccacgcgcatcccttatccaacagagtcacagaatt

SEQ ID NO: 519420 - DNA, 75 bp, synthetic construct
  source 1..75: mol_type = other DNA
ggggcgagtttcagagctcgtccatgaaagacggagttgtccttgccagcacaggtgaaactttccggcagaaaa

SEQ ID NO: 519421 - DNA, 75 bp, synthetic construct
  source 1..75: mol_type = other DNA
ccaatgaggcgatcaatcgtctgaaaaatgcccgcgatttacgcaccaatccggtgttgcagctcaacctggcga

SEQ ID NO: 519422 - DNA, 75 bp, synthetic construct
  source 1..75: mol_type = other DNA
ctggcaaaagtgcgcacactggggatgtataattccggacgtaaccagctcaccagtgatttgctggatgaatgg

SEQ ID NO: 519423 - DNA, 75 bp, synthetic construct
  source 1..75: mol_type = other DNA
catgtcccctcccctttccgtggcttacaggcccatgcaatttcgcatcgcctggtatgccgtacagtccaaaaa

SEQ ID NO: 519424 - DNA, 75 bp, synthetic construct
  source 1..75: mol_type = other DNA
atccggtagtgcgatcgcttgtcagcgcgcgcattgcgcaaatgtgcctgtgtgagttttgcgtggatatcacca

SEQ ID NO: 519425 - DNA, 75 bp, synthetic construct
  source 1..75: mol_type = other DNA
atgctcgacgagatgaatggtccagcgggtccgatggaaccagtaaaaattgacggtaaagtctacctgaaaggt

SEQ ID NO: 519426 - DNA, 75 bp, synthetic construct
  source 1..75: mol_type = other DNA
ctcagctatgccgacatcgcagaaacggtgatccatcacgttgagggcgcacgttttgctctggtggaacgcgtg

SEQ ID NO: 519427 - DNA, 75 bp, synthetic construct
  source 1..75: mol_type = other DNA
gcgcatcaaactcagcaagccaggtgcagtggcgcgcgctgctaatgttggcgtaatcattgagcgtggcaataa

SEQ ID NO: 519428 - DNA, 75 bp, synthetic construct
  source 1..75: mol_type = other DNA
gcgtgaaatggggttggttggtactatctgcagcattggtagcacctaccatcgcccacgccgatttcaaaactg

SEQ ID NO: 519429 - DNA, 75 bp, synthetic construct
  source 1..75: mol_type = other DNA
atactaaatatgatggctggcaacctataaatgagggatatcaaccatcaagtaggccaaatcagcagaacaatg

SEQ ID NO: 519430 - DNA, 75 bp, synthetic construct
  source 1..75: mol_type = other DNA
ctgtagtccaaatgcctgggtgcgcaaaggctccattaaaggtggtcaatatctgtctgttgacatcggcgttgg

SEQ ID NO: 519431 - DNA, 75 bp, synthetic construct
  source 1..75: mol_type = other DNA
gtgacgtgactcccaacggtttttctgccatgaataccgggttcatgccccctctggccgccattgagcgtattg

SEQ ID NO: 519432 - DNA, 75 bp, synthetic construct
  source 1..75: mol_type = other DNA
gggcaggaggttgctgtgcacccgcgcaagcgtacttatggctacagtacccgcaacgagcacatgcctgaagct

SEQ ID NO: 519433 - DNA, 75 bp, synthetic construct
  source 1..75: mol_type = other DNA
acggcattgatcggcctgcaaaacctgtcggctcgttttaattctgccctggcgatccccgctcaggggctgtgc

SEQ ID NO: 519434 - DNA, 75 bp, synthetic construct
  source 1..75: mol_type = other DNA
gccccaagttggtactaaatttggtcgctggttggatctcacctttatgcaattgcagcttgacgatcgtagcga

SEQ ID NO: 519435 - DNA, 75 bp, synthetic construct
  source 1..75: mol_type = other DNA
gggatcagcggtgtatccgggcagggacgtactaatctactcggtaaccccgaactgaagccggaagagagtgta

SEQ ID NO: 519436 - DNA, 75 bp, synthetic construct
  source 1..75: mol_type = other DNA
actgggtagcctgacagggggatatgaccatactctgcgctatgagcgaaacaaaatttcggctggctatgatca

SEQ ID NO: 519437 - DNA, 75 bp, synthetic construct
  source 1..75: mol_type = other DNA
tttctggatagttttcttctccatcatgctggcaaacattgcgcatgacatggtggtgtgtgtgcaacaaccgat

SEQ ID NO: 519438 - DNA, 75 bp, synthetic construct
  source 1..75: mol_type = other DNA
cgaagcactattacgacatcccggtgctttcctgaagattattgcgctacgactgtgcgagttgctgacgatgta

SEQ ID NO: 519439 - DNA, 75 bp, synthetic construct
  source 1..75: mol_type = other DNA
ctcgaccattgggtggtgggcccccattttactggtgacgctgcgtgccattcagggatttgccgtcggcggcga

SEQ ID NO: 519440 - DNA, 75 bp, synthetic construct
  source 1..75: mol_type = other DNA
attttattggtgacgctgcgtgccattcagggttttgccgtcggcggagagtggggaggcgctgcattgctgtct

SEQ ID NO: 519441 - DNA, 75 bp, synthetic construct
  source 1..75: mol_type = other DNA
aagccttttacagtagcggtgtacaagttggctacggtgtaggtttactgctttcaaccggactggtttcattga

SEQ ID NO: 519442 - DNA, 75 bp, synthetic construct
  source 1..75: mol_type = other DNA
ctttcaactggactggtttctctgattagtatgatgacgactgacgagcagtttttgagctggggctggcgcatt

SEQ ID NO: 519443 - DNA, 75 bp, synthetic construct
  source 1..75: mol_type = other DNA
aaatcttcctcggcagggatgaccatcgtcagctcctgagcgaacaggtcagcgccttccatacactagcggcat

SEQ ID NO: 519444 - DNA, 75 bp, synthetic construct
  source 1..75: mol_type = other DNA
gcacggcatgtccgggcatatcaaagcagaaaactgcacgcatattgccttgatcgaacgtaaatttatgggcat

SEQ ID NO: 519445 - DNA, 75 bp, synthetic construct
  source 1..75: mol_type = other DNA
aaattttcctcggtcggaatgagcatcgtcagctcctgagtgaacaagtcagcgccttccatactctggcggcat

SEQ ID NO: 519446 - DNA, 75 bp, synthetic construct
  source 1..75: mol_type = other DNA
taggaaaatatccacgggtactcaaggagattattgatcgtgaaggtaaagatggtctgcaaaaatacgcggtaa

SEQ ID NO: 519447 - DNA, 75 bp, synthetic construct
  source 1..75: mol_type = other DNA
catggtgtcgttcgataagcgccaccagctcgaatcaacccggcgcacactggaaagcatggttgctggtggact

SEQ ID NO: 519448 - DNA, 75 bp, synthetic construct
  source 1..75: mol_type = other DNA
agattcttgaactctacaaacctgagtatcgcgattgggtgcgggtggaggccggagaaccgccttttgacgttc

SEQ ID NO: 519449 - DNA, 75 bp, synthetic construct
  source 1..75: mol_type = other DNA
aatagcattagagtttaaagatgaatatggggctgtggtaattgatgtagatgctatgcaaagtaaaagcgctga

SEQ ID NO: 519450 - DNA, 75 bp, synthetic construct
  source 1..75: mol_type = other DNA
ccagcatggcgtgcactacggtcagggctggctctacagcaaggcattaccgaaagaggatttcttacgctgggc

SEQ ID NO: 519451 - DNA, 75 bp, synthetic construct
  source 1..75: mol_type = other DNA
tgatcaatcactatcaggttaatcccagacagatcgcgcttgaactcactgaacgcgagtttgccgatccgaaaa

SEQ ID NO: 519452 - DNA, 75 bp, synthetic construct
  source 1..75: mol_type = other DNA
atgaatacaaatcatcaacaactgccgtccggcattgataacaactgtccttatgtcactgacagcaatgaaaaa

SEQ ID NO: 519453 - DNA, 75 bp, synthetic construct
  source 1..75: mol_type = other DNA
atggtatgcaactgacatgtgcgatctctggcgagagtctggcgtatcgctttactggagatacgccagaacagt

SEQ ID NO: 519454 - DNA, 75 bp, synthetic construct
  source 1..75: mol_type = other DNA
atgcaggcaccgttaaaaacattttttatttcccctccggaaatacccactcagcacggccccgacaacatcctg

SEQ ID NO: 519455 - DNA, 75 bp, synthetic construct
  source 1..75: mol_type = other DNA
cccaggcagatgaatcaggagcatctctccgcgcagctggttttgttcgtgtgaaagagcttcctccaagaaaaa

SEQ ID NO: 519456 - DNA, 75 bp, synthetic construct
  source 1..75: mol_type = other DNA
atggaaaccgtggcttacgctgattttgcgcgtctggaaatgcgcgttgggaagattgtggaagtgaaacgccat

SEQ ID NO: 519457 - DNA, 75 bp, synthetic construct
  source 1..75: mol_type = other DNA
tggtataaaccccagtttaagagggaatatcagacgatccactatgagaatacttggtattacgttcttgctcgt

SEQ ID NO: 519458 - DNA, 75 bp, synthetic construct
  source 1..75: mol_type = other DNA
aaaaaagctgttaaaaaacatgagtacaaagaaaaatataaacacttgctttaccagaaaaaatttcttgatggt

SEQ ID NO: 519459 - DNA, 75 bp, synthetic construct
  source 1..75: mol_type = other DNA
taccgttcatggtaataaatccctaactgatgaaaatcatcagacggttaaagtaaaaatcgtcaagggaaaaac

SEQ ID NO: 519460 - DNA, 75 bp, synthetic construct
  source 1..75: mol_type = other DNA
tttggagagcctcagacacgcgctacgaatgatggacaggagatgtggaactactcaagtatgacgggagaaagc

SEQ ID NO: 519461 - DNA, 75 bp, synthetic construct
  source 1..75: mol_type = other DNA
gtgaccagcctggtgccgtactacagcgaagaagagctgatggggaaaacggtggtggtcttatgcaatctgcaa

SEQ ID NO: 519462 - DNA, 75 bp, synthetic construct
  source 1..75: mol_type = other DNA
ttcgccggggagcctgccggggacgaagacgcagatgacgatacggtcgaagacctataaaggaagcgggtttaa

SEQ ID NO: 519463 - DNA, 75 bp, synthetic construct
  source 1..75: mol_type = other DNA
tcgggaaaatctggccaaactacttgccatgatcgcatataaaaatctttgtgcggaggattatcatggtataga

SEQ ID NO: 519464 - DNA, 75 bp, synthetic construct
  source 1..75: mol_type = other DNA
cagatggctgattgataatgaccctgataccctgaaaaacaatataatggcattactgagtcagacgggtagcca

SEQ ID NO: 519465 - DNA, 75 bp, synthetic construct
  source 1..75: mol_type = other DNA
catttctgacaggaactgttttactgagcggggctgctttatttttcctcgcgccagattatgttacgacaaagc

SEQ ID NO: 519466 - DNA, 75 bp, synthetic construct
  source 1..75: mol_type = other DNA
ccgctgggccgtaattaccgcgtcagtatgccgcttatagccttttgctccggaaaaatgtttaagcgtctggga

SEQ ID NO: 519467 - DNA, 75 bp, synthetic construct
  source 1..75: mol_type = other DNA
tgatacaggaatatttaataattttatttctgaattaatttgctcgccagtcatttcagaagaagctttactgaa

SEQ ID NO: 519468 - DNA, 75 bp, synthetic construct
  source 1..75: mol_type = other DNA
aacagattatagccaaaatggatttttgtataaataatctggatgatattattaatcgttcagagtgtgcggaca

SEQ ID NO: 519469 - DNA, 75 bp, synthetic construct
  source 1..75: mol_type = other DNA
acgaccggctggtgggcgtcgtggttatggcttacccgaaactgctgctggcgcctcgccatcgcatgtttccta

SEQ ID NO: 519470 - DNA, 75 bp, synthetic construct
  source 1..75: mol_type = other DNA
agttgaaaccaaccactaataccaccgtggctaaccagtactggggccggtacgtgaataacaactttgcggtga

SEQ ID NO: 519471 - DNA, 75 bp, synthetic construct
  source 1..75: mol_type = other DNA
ttaccggaacgtatccgcgtctccatgacatcaatttttggtttggcatcgctggggattggtattttactggtg

SEQ ID NO: 519472 - DNA, 75 bp, synthetic construct
  source 1..75: mol_type = other DNA
aaagaagaagagataaataataacttaagcgaatgtatttctcgtattgcgacatttattcccaatatgcgtgta

SEQ ID NO: 519473 - DNA, 75 bp, synthetic construct
  source 1..75: mol_type = other DNA
tctgacagaaaacctgtaaaatttatttatgctgtcagagatggtattttcaactcagcagagtcaagaacgaaa

SEQ ID NO: 519474 - DNA, 75 bp, synthetic construct
  source 1..75: mol_type = other DNA
agatattctggcagaactgagtccctggatgggtgacgatgatctgcgcctgacactgcttaaacgttgtctggt

SEQ ID NO: 519475 - DNA, 75 bp, synthetic construct
  source 1..75: mol_type = other DNA
atgatccggaatattttcaaacggtttaccaatcatactttccgttgtcctcgtccgggtcagtggtacaccacg

SEQ ID NO: 519476 - DNA, 75 bp, synthetic construct
  source 1..75: mol_type = other DNA
aatacgtctgacaatggacgaccagaaaaagaaagagtggcaatcctgaaaaattcagttgcaagctcgacagct

SEQ ID NO: 519477 - DNA, 75 bp, synthetic construct
  source 1..75: mol_type = other DNA
cctggcgtccacgggtgcagagcaaaccgaaggtggacgggccgcagagtgcgatagtgacggggccagcgggag

SEQ ID NO: 519478 - DNA, 75 bp, synthetic construct
  source 1..75: mol_type = other DNA
ccggagccgtcgcgctcggcgtggcagaggtggatgccgctgccggtgatgtaacgccggtcaacgtactgggta

SEQ ID NO: 519479 - DNA, 75 bp, synthetic construct
  source 1..75: mol_type = other DNA
cggtttacgctgacggggcatccgcagaagatgctgaaccgtgaatggcaggtggtacagagcattctgtcagga

SEQ ID NO: 519480 - DNA, 75 bp, synthetic construct
  source 1..75: mol_type = other DNA
agtgatagtggacttcctgaacggggacccggaccagccgctggtcatgggcaggacgtaccatgaggacaaccg

SEQ ID NO: 519481 - DNA, 75 bp, synthetic construct
  source 1..75: mol_type = other DNA
gcgacggataaggaacaggtctatatccacgcgcagaagaacatggacacggaggtacttaacgaccggacgacg

SEQ ID NO: 519482 - DNA, 75 bp, synthetic construct
  source 1..75: mol_type = other DNA
caccactgaccatatctctccggcgggcagtattaagcccgacagcccagcgggtcgatatctacaaggtcgggg

SEQ ID NO: 519483 - DNA, 75 bp, synthetic construct
  source 1..75: mol_type = other DNA
ttttgatcgccaaatcgtttctcgatttctttactgcgatgattttcgcctgctcgctcggcattgcggtgtcag

SEQ ID NO: 519484 - DNA, 75 bp, synthetic construct
  source 1..75: mol_type = other DNA
atgatccgaaatattttcaaacggtttaccaatcaaactttccgttgtcctcgcccgggtcagtggtacaccacg

SEQ ID NO: 519485 - DNA, 75 bp, synthetic construct
  source 1..75: mol_type = other DNA
tcagatgctcaggccagagccgtgccgcagtccggcgacggtaaatcctgtggtattgcacttgatgaagccggg

SEQ ID NO: 519486 - DNA, 75 bp, synthetic construct
  source 1..75: mol_type = other DNA
gtcgcgcagctcatcaggcactgaagtcaaaaccatgtatccactactgcgaaattggcacaatcatcgttaatg

SEQ ID NO: 519487 - DNA, 75 bp, synthetic construct
  source 1..75: mol_type = other DNA
cgggagacatcacgtattgtgtgcccggagttcagggcgagcatggaggctcaaatgaaccacgagtctgtctgg

SEQ ID NO: 519488 - DNA, 75 bp, synthetic construct
  source 1..75: mol_type = other DNA
cttattggtagctgctgaccaaatgtcgacacatgggcaaaccatcatactcgggatccagtcctacaataccag

SEQ ID NO: 519489 - DNA, 75 bp, synthetic construct
  source 1..75: mol_type = other DNA
ctatggcgctttttctggcttaattggctttatggcgatgcatcttggaacgaacttttatcttaaacagcacga

SEQ ID NO: 519490 - DNA, 75 bp, synthetic construct
  source 1..75: mol_type = other DNA
acaatcgtcagcgtcgtcactctcgtctggggaatatctccccggcagccttcagggaaaatatcatcagatggc

SEQ ID NO: 519491 - DNA, 75 bp, synthetic construct
  source 1..75: mol_type = other DNA
ggatattagaatgcaacatgcagcaagattgataacgacgactgaaaaacatattaatagtatatctgatgaggt

SEQ ID NO: 519492 - DNA, 75 bp, synthetic construct
  source 1..75: mol_type = other DNA
aatcaatatgttatattgagaaaaatacagtcattgatgttacacttaacgtgttaggtaaaggcatgccttatg

SEQ ID NO: 519493 - DNA, 75 bp, synthetic construct
  source 1..75: mol_type = other DNA
tcatttgaagcgaaagtggtaaaaattatcgacggggacacaatcaccgcgctcgatggtcagaatacaagcatc

SEQ ID NO: 519494 - DNA, 75 bp, synthetic construct
  source 1..75: mol_type = other DNA
attaaagatgtcgaacaggtcgcgcaggagctgcagcagaagtttgacgacttcaaagcaaagaacgacaagcgc

SEQ ID NO: 519495 - DNA, 75 bp, synthetic construct
  source 1..75: mol_type = other DNA
atgaactatcgggtcagcgaagggccgttacaagggatgaatttctttcttgctgccgataaagggcgggaaaag

SEQ ID NO: 519496 - DNA, 75 bp, synthetic construct
  source 1..75: mol_type = other DNA
tggttttaaggcattccagtcgctgcctccacaattacaagcctttatgctggtatgtgaatggcgtaactattg

SEQ ID NO: 519497 - DNA, 75 bp, synthetic construct
  source 1..75: mol_type = other DNA
gtaagcgtattaatcgtcttgtggaacactggcctgagttattcaaccgggaaaaaccccaaccgcttaaagttg

SEQ ID NO: 519498 - DNA, 75 bp, synthetic construct
  source 1..75: mol_type = other DNA
caaaaagcgaatgctcggagtgaaatctgttggatgggttgaatcagagattgatgaatggctatcgcaacgcag

SEQ ID NO: 519499 - DNA, 75 bp, synthetic construct
  source 1..75: mol_type = other DNA
cggagaattacagcattttggtggcgatagtatcgccaacaaactgcgcggacacggtaaattgtatcgcgccat

SEQ ID NO: 519500 - DNA, 75 bp, synthetic construct
  source 1..75: mol_type = other DNA
cttgaggtctttcagtctagtaatgtgggatatcactgtgaaatcctgaggaactgggccagtttgacgcctgta

SEQ ID NO: 519501 - DNA, 75 bp, synthetic construct
  source 1..75: mol_type = other DNA
taattgggcctcaatgactcctgtgtgtgccagcgatgattataattcccttcgccaaaaatacgatctaaaaga

SEQ ID NO: 519502 - DNA, 75 bp, synthetic construct
  source 1..75: mol_type = other DNA
tttggcgtttcaaaagtggacctttaaaggatgtaggtaaggctaaacgtgccataaatgaaactcttttatctt

SEQ ID NO: 519503 - DNA, 75 bp, synthetic construct
  source 1..75: mol_type = other DNA
aagagtttaaattaattttatctgaagttgatgtcggcctgttctccctttcatctcgccattcttcacataatt

SEQ ID NO: 519504 - DNA, 75 bp, synthetic construct
  source 1..75: mol_type = other DNA
aatacatcccgccagtaacttaccgcgtagttgattatttcctagctgaacaagaaggcgagggcgatgatgatt

SEQ ID NO: 519505 - DNA, 75 bp, synthetic construct
  source 1..75: mol_type = other DNA
actatttgcctgatagtactcgtgttagtgctaagatgatgcatgaattggcttgtgaacttttagaaaaaggac

SEQ ID NO: 519506 - DNA, 75 bp, synthetic construct
  source 1..75: mol_type = other DNA
ttgcgtgaggcgattcaacgtctcgaagcgaagggcttgttgcttcgtcgccagggtggcggcacttttgttcag

SEQ ID NO: 519507 - DNA, 75 bp, synthetic construct
  source 1..75: mol_type = other DNA
gaacaggccagcggtcacaccattcacacaattgcttctggccccggctttccggaagatctcattcaccaggca

SEQ ID NO: 519508 - DNA, 75 bp, synthetic construct
  source 1..75: mol_type = other DNA
cgattgatgctcgactccgccgggagtgtggcttttttccgcagcccgtggcccgagctaatgcgtaatgccggt

SEQ ID NO: 519509 - DNA, 75 bp, synthetic construct
  source 1..75: mol_type = other DNA
tcagggaaaaattatttttttctatggagggaatattggacacgctcaagatatggcaaatttaatgcgtcttgc

SEQ ID NO: 519510 - DNA, 75 bp, synthetic construct
  source 1..75: mol_type = other DNA
cttgagatatttcgtcaggccaataaaggttatccgtgtgaagttttacgtaattgggcctcaatgactcctgtg

SEQ ID NO: 519511 - DNA, 75 bp, synthetic construct
  source 1..75: mol_type = other DNA
tgtggagcaggacatttgtcgcgccattgcacacgccgttcgttttgagtgccagacgtatcctcgtccttacaa

SEQ ID NO: 519512 - DNA, 75 bp, synthetic construct
  source 1..75: mol_type = other DNA
accagatgtcaatattatgccgtttgagcaggccagcggtcacaccattcacacaattgcttctggccccggctt

SEQ ID NO: 519513 - DNA, 75 bp, synthetic construct
  source 1..75: mol_type = other DNA
aaagtgcgcagaaaaaatctgcgcagactgcacaaaagcggaacgaaaaatctcagaaaaaaaggctgtatccga

SEQ ID NO: 519514 - DNA, 75 bp, synthetic construct
  source 1..75: mol_type = other DNA
catctgcatcttatcaggagcttgatcgcatagcgaaaaccgcctttatcaataacgtctgtatgttaaaggcgg

SEQ ID NO: 519515 - DNA, 75 bp, synthetic construct
  source 1..75: mol_type = other DNA
gctcagccggactgcaaattaccggagaaggcgatggattacctgaaacgaaatggactgataagcgtggaggat

SEQ ID NO: 519516 - DNA, 75 bp, synthetic construct
  source 1..75: mol_type = other DNA
cataccggcgataccggataccgcgacgaagagggctttttttatttcgtcgatcgccgctgcaatatgatcaaa

SEQ ID NO: 519517 - DNA, 75 bp, synthetic construct
  source 1..75: mol_type = other DNA
ttttaatgatgagctttccgcttctggctagtgcggctcccggtagtgatccgctggcagaccagtatttcaaca

SEQ ID NO: 519518 - DNA, 75 bp, synthetic construct
  source 1..75: mol_type = other DNA
taacagaccgttgctgcctataaaccttcaggcccaagcttcaccaattgaaagctttaaggctccagataaagg

SEQ ID NO: 519519 - DNA, 75 bp, synthetic construct
  source 1..75: mol_type = other DNA
atcgttaaccatgcgaccagcgctaatgataacaggattaatagcagcctatacgatgctccctatccttggtgg

SEQ ID NO: 519520 - DNA, 75 bp, synthetic construct
  source 1..75: mol_type = other DNA
tgcacctgaatatgctgatatacggcaggtggagtcatcgacggcggtgttgtacttgtttagcgagcgatttat

SEQ ID NO: 519521 - DNA, 75 bp, synthetic construct
  source 1..75: mol_type = other DNA
aggggaattacaccccaagcccgggcgtcatctacccgacgctggattttctgcaggagcagtcgctgattacca

SEQ ID NO: 519522 - DNA, 75 bp, synthetic construct
  source 1..75: mol_type = other DNA
cgaatacgctgcgcttggcatcgacagctttctgctttctggttatccgcatctggaagaagcgtatcgggtcgg

SEQ ID NO: 519523 - DNA, 75 bp, synthetic construct
  source 1..75: mol_type = other DNA
cgcggcggagaaaatgtctcctgcgtggagctggaaaatattatctccgcccatccgaaaattcaggatatcgtg

SEQ ID NO: 519524 - DNA, 75 bp, synthetic construct
  source 1..75: mol_type = other DNA
atcgattgccagtgtactgcggcgatggcggcgttttctgccggggccacctttgtgctggtcgagaaatacagc

SEQ ID NO: 519525 - DNA, 75 bp, synthetic construct
  source 1..75: mol_type = other DNA
gtgaagacgtcgcagaaccagaaccgacagaagttctggcagagtttatccgccagcattcggctgcgcgtcaac

SEQ ID NO: 519526 - DNA, 75 bp, synthetic construct
  source 1..75: mol_type = other DNA
gcgcgtctataacgatggtgtgaaaactatcatccagttcccgaaaaacatttcttctggcgaaaccccgatcct

SEQ ID NO: 519527 - DNA, 75 bp, synthetic construct
  source 1..75: mol_type = other DNA
aaatattagctggcgcggcgaaccgttggcgaagctcaatcgcgcgcaacgtaaagcgttccgccgtgatattca

SEQ ID NO: 519528 - DNA, 75 bp, synthetic construct
  source 1..75: mol_type = other DNA
atgactttacttaacgtctccgacctttcccatcactatgcgcacggtggatttagcggaaaacatcaacaccag

SEQ ID NO: 519529 - DNA, 75 bp, synthetic construct
  source 1..75: mol_type = other DNA
gcagcagcaagttcaacaggggaaagctcaggcttccagtagagccagtgatactggatctgcattccgcaccca

SEQ ID NO: 519530 - DNA, 75 bp, synthetic construct
  source 1..75: mol_type = other DNA
atagtttgcgataataataattattttttatacagtcttcttttttcaggggggcctgttaaatgcatatgtgct

SEQ ID NO: 519531 - DNA, 75 bp, synthetic construct
  source 1..75: mol_type = other DNA
aatagccgtaccactgatggttgcgcgctttatcaaccgcgacgtttgcccgccatcgttgaagaacacaggcat

SEQ ID NO: 519532 - DNA, 75 bp, synthetic construct
  source 1..75: mol_type = other DNA
gcattgctggtttacagcgccctggttatctggagcgccagcggtcaggatattggcatgatggagcgtaaaata

SEQ ID NO: 519533 - DNA, 75 bp, synthetic construct
  source 1..75: mol_type = other DNA
ctgttctctaaagatgaaacacaaatggttaatctgcgaacccaaggagatagaactattgtcgatggtcttttt

SEQ ID NO: 519534 - DNA, 75 bp, synthetic construct
  source 1..75: mol_type = other DNA
gcggttctgccagctggaaaccggtacgtgtatataacgatggcgtcaaaaccattatccagttccctaaaacga

SEQ ID NO: 519535 - DNA, 75 bp, synthetic construct
  source 1..75: mol_type = other DNA
ggctttgcagcccggagaaaacgtcaacaatatcgacgttggtgatccacgcgtaacggtatctccttcaatcac

SEQ ID NO: 519536 - DNA, 75 bp, synthetic construct
  source 1..75: mol_type = other DNA
gatgaaattatgaagtggcttggcgttcatagtggtcagagcatgtcgggttatgctcagtcggcatcgaaaggt

SEQ ID NO: 519537 - DNA, 75 bp, synthetic construct
  source 1..75: mol_type = other DNA
atgtatatgagctacatgccgcaggaaatcaaaaccaatatatcagccgttgttgaagctcataatgcagctttt

SEQ ID NO: 519538 - DNA, 75 bp, synthetic construct
  source 1..75: mol_type = other DNA
tgtttgctgattacgcaaaatgcatacgcagcagatttatttacggttcctgatacggataaatcaaagctatgg

SEQ ID NO: 519539 - DNA, 75 bp, synthetic construct
  source 1..75: mol_type = other DNA
tgcaggaagcagttaaggatgagccaaataatggcaatatccatctcgacttctttgatcgctcgaaactgactc

SEQ ID NO: 519540 - DNA, 75 bp, synthetic construct
  source 1..75: mol_type = other DNA
gacggaggaattgacgttcatgttcaggttcctatcgacaaactaagtacagggtttatcgagaggcccgacacg

SEQ ID NO: 519541 - DNA, 75 bp, synthetic construct
  source 1..75: mol_type = other DNA
agctaacggggctcctgacctacgaatttattggcaacaactagtcattcaattggatctacaacacaaatctca

SEQ ID NO: 519542 - DNA, 75 bp, synthetic construct
  source 1..75: mol_type = other DNA
agcagggtcctcgagctgaagtggtcaacaaaaactggccaccgcgttagagtttttccagtatcgattttccga

SEQ ID NO: 519543 - DNA, 75 bp, synthetic construct
  source 1..75: mol_type = other DNA
gtgagagtttagccctactttcagatgcgcagttgtttaatcgcttgtttgaacaacgtaatcatcccgacggcc

SEQ ID NO: 519544 - DNA, 75 bp, synthetic construct
  source 1..75: mol_type = other DNA
aaagctgtccgctcaacaatctactttttccatacaaaaagaaaagataacgaagacgtagaaccattgccggaa

SEQ ID NO: 519545 - DNA, 75 bp, synthetic construct
  source 1..75: mol_type = other DNA
tacaaaacaaccagatttccggcggtcaactgggggggatgccacaggcggcagaccagcaactgaacgcctcaa

SEQ ID NO: 519546 - DNA, 75 bp, synthetic construct
  source 1..75: mol_type = other DNA
tccactgtggcgcgttataacggcaaacctgctgccgggattgctatcaagctggctgccggagcgaatgccctt

SEQ ID NO: 519547 - DNA, 75 bp, synthetic construct
  source 1..75: mol_type = other DNA
tgcgtatctggctggacccgcaaaaactcaataaatataacctggtaccttccgatgttatttcccagattaagg

SEQ ID NO: 519548 - DNA, 75 bp, synthetic construct
  source 1..75: mol_type = other DNA
gccttgaagatgaggacggacaggtgacgcactggtgccatatttcggctttaccggaattacgggaggtgaatg

SEQ ID NO: 519549 - DNA, 75 bp, synthetic construct
  source 1..75: mol_type = other DNA
tacgcggttatccctggcattcactgaatgatgctttcccacctgatatggaggctgtcgtgctgattgttcagt

SEQ ID NO: 519550 - DNA, 75 bp, synthetic construct
  source 1..75: mol_type = other DNA
tcaggttttgatatggaactgctggacaacggcaacctggggcacgaaaagctgacccaggcgagaaacgagttg

SEQ ID NO: 519551 - DNA, 75 bp, synthetic construct
  source 1..75: mol_type = other DNA
ctcagtcgcatttttgatggtacggaggatcaacaacagaggcggctgcatttcatcaatcatgatgattcacat

SEQ ID NO: 519552 - DNA, 75 bp, synthetic construct
  source 1..75: mol_type = other DNA
tcaactgggtagcctgacagggggatatgaccatactctgcgctatgagcgaaacaaaatttcagctggctatga

SEQ ID NO: 519553 - DNA, 75 bp, synthetic construct
  source 1..75: mol_type = other DNA
acgggccgttcctgcgaggatgcgtggctggtggcggcgtcgatgatcccggtgacgcaacggctgaagttcctc

SEQ ID NO: 519554 - DNA, 75 bp, synthetic construct
  source 1..75: mol_type = other DNA
aacggtaaacatattcatgtgcggggagccaaactgctcttcccgccgattcaacagccttatcctccgctttac

SEQ ID NO: 519555 - DNA, 75 bp, synthetic construct
  source 1..75: mol_type = other DNA
tccccttgtggatgattctgtcagcctgcaggtacgcggtagcacacaacagcgtcagggctcatcggtcacatc

SEQ ID NO: 519556 - DNA, 75 bp, synthetic construct
  source 1..75: mol_type = other DNA
catgaataccgggttcatgcctcctctggccgcgattgagcgtattgaggttatcagggggccgatgtccacact

SEQ ID NO: 519557 - DNA, 75 bp, synthetic construct
  source 1..75: mol_type = other DNA
agaagaaagtgtatgatgagaaaggagaatatctgaaagcctggacggtggtggatgcaggtctgtcgtggaagg

SEQ ID NO: 519558 - DNA, 75 bp, synthetic construct
  source 1..75: mol_type = other DNA
ttattcccgccagcgttgccgataaaattgctcagcgtgatgctagcagtattgtgttgcacagcgcgctcagtg

SEQ ID NO: 519559 - DNA, 75 bp, synthetic construct
  source 1..75: mol_type = other DNA
aaaagcaccctcgcgcggctgctggtaggtttggaatcgcccgcgcaggggaatattagctggcgtggcgaaccg

SEQ ID NO: 519560 - DNA, 75 bp, synthetic construct
  source 1..75: mol_type = other DNA
gaatattagctggcgcggcgaaccgctggcgaaactcaatcgcgcccagcgtaaagcgttccgccgcgatattca

SEQ ID NO: 519561 - DNA, 75 bp, synthetic construct
  source 1..75: mol_type = other DNA
aacggtaaacatattcatgtgcgcggagcaaaactgctcttcccgccgattcaacagccgtatccgccactttac

SEQ ID NO: 519562 - DNA, 75 bp, synthetic construct
  source 1..75: mol_type = other DNA
atctgtcgagggtgtggatgttgaaagtggtacgggtaaaaccggtgggctggaaatcagcatccgtggaatgcc

SEQ ID NO: 519563 - DNA, 75 bp, synthetic construct
  source 1..75: mol_type = other DNA
gtgatgattgtctcggcatccggctatgagaaaaaactgaccaacgcagccgccagtgtttccgtaatcagtcag

SEQ ID NO: 519564 - DNA, 75 bp, synthetic construct
  source 1..75: mol_type = other DNA
caatggtatcccggcgatggaaattttaggggaagcggcggcaggaaaaagtaccggtgacgcgatgaaatttat

SEQ ID NO: 519565 - DNA, 75 bp, synthetic construct
  source 1..75: mol_type = other DNA
ttggcgaagatgaacattttcagccgtcaatggcagccagcggtattaactccgccacgttatcagaagagattt

SEQ ID NO: 519566 - DNA, 75 bp, synthetic construct
  source 1..75: mol_type = other DNA
tgaatatctgctgctgacggtgccgttgccgtttgagtgcgaaacttatgccacgtcagaggtaccgctggcagg

SEQ ID NO: 519567 - DNA, 75 bp, synthetic construct
  source 1..75: mol_type = other DNA
gcctggcatcataattctcttttccgggcataaaatcggttatatcaatgaacgcgtgtttcgttatgatgccaa

SEQ ID NO: 519568 - DNA, 75 bp, synthetic construct
  source 1..75: mol_type = other DNA
cgacctgtacactagtctgaacgtaggaacgactgctgaactgaacagtgcgctgaaacaaattagcggcagcca

SEQ ID NO: 519569 - DNA, 75 bp, synthetic construct
  source 1..75: mol_type = other DNA
aatttagccgtgagtttaaacgttactttggtgtgacgccgggggaagatgcggcaagaatgcgggcgatgcagg

SEQ ID NO: 519570 - DNA, 75 bp, synthetic construct
  source 1..75: mol_type = other DNA
ggaagtgccattagcgggtttacgtctcaatgttgatattttgcagttacaggaactgttgatggacattggtga

SEQ ID NO: 519571 - DNA, 75 bp, synthetic construct
  source 1..75: mol_type = other DNA
tccctcagtggagtgttgatgcaggtttaattaaagctggatcgttaatagaaaaatattttcgcttctttgaaa

SEQ ID NO: 519572 - DNA, 75 bp, synthetic construct
  source 1..75: mol_type = other DNA
aatacatccctccagttacttaccgtgccgttgatgatttcctggctgaacatgaagacgagggcgatgatgatt

SEQ ID NO: 519573 - DNA, 75 bp, synthetic construct
  source 1..75: mol_type = other DNA
aatacatcccgccagtcacttaccgcgtcgtcgatgatttcctggctgaacatgaagacgaggatgatgatgatt

SEQ ID NO: 519574 - DNA, 75 bp, synthetic construct
  source 1..75: mol_type = other DNA
gtgactcgcagtttttctccgttatcacagcggaactcgaacccgtcagagcaccatcgctgattactttctttc

SEQ ID NO: 519575 - DNA, 75 bp, synthetic construct
  source 1..75: mol_type = other DNA
acagcggcttactcgattctgacaccattagcgcagccgcgaatgtctataaccgagcatcgggtagcattatca

SEQ ID NO: 519576 - DNA, 75 bp, synthetic construct
  source 1..75: mol_type = other DNA
tgtgagttttgcgtggatatcaccagtatgaaagtcgccgagcgcactggcagcaccgataaactgctggcagtg

SEQ ID NO: 519577 - DNA, 75 bp, synthetic construct
  source 1..75: mol_type = other DNA
agcagtatctggaattccgtagtgaaggggcaaaaacctttgaactgcgtgaaggtctgaatgtgacaccttatg

SEQ ID NO: 519578 - DNA, 75 bp, synthetic construct
  source 1..75: mol_type = other DNA
ccgtcgtcttcccgttcaacttacccgcggtggctgaactgggtaccgcgtcaggttttgatatggaactgctgg

SEQ ID NO: 519579 - DNA, 75 bp, synthetic construct
  source 1..75: mol_type = other DNA
acgattattgccagcaaagatcgtgaaattgccggacttaagttttctctaacaatgttgatgtctgcattcaat

SEQ ID NO: 519580 - DNA, 75 bp, synthetic construct
  source 1..75: mol_type = other DNA
gaatgaatgtttttctgaaccagatggaataactgtcaatggcacacaaaaagcgattcagttaggtaaggattt

SEQ ID NO: 519581 - DNA, 75 bp, synthetic construct
  source 1..75: mol_type = other DNA
accgacagtacccgttcgctactgcgctgcaccgggcgttatatggtggtttacctgctgattggcgccggaatg

SEQ ID NO: 519582 - DNA, 75 bp, synthetic construct
  source 1..75: mol_type = other DNA
tcgcgatgagtctgactcctgccctttgcgccaccattttgaaagccacgccagaaggcggccacaaaccgaacg

SEQ ID NO: 519583 - DNA, 75 bp, synthetic construct
  source 1..75: mol_type = other DNA
tccacggtggcgcgttataacggcaaacctgccgccgggatcgccatcaaactggctgccggagcaaacgcgctg

SEQ ID NO: 519584 - DNA, 75 bp, synthetic construct
  source 1..75: mol_type = other DNA
atgaccctgtgtccgtcactggaggggtttattcgcttcgttcgtgatgacatgaaagtaccggttcacgccatt

SEQ ID NO: 519585 - DNA, 75 bp, synthetic construct
  source 1..75: mol_type = other DNA
gatttataaccgtagtctgtacttgcctgagaaattggatgcgttgaataaatggtatgacagacttgatatttt

SEQ ID NO: 519586 - DNA, 75 bp, synthetic construct
  source 1..75: mol_type = other DNA
aaacgctaaatagtaatgtgaccgccaaagcgtggctttataaccaggataaggccaatctgacaattaacggag

SEQ ID NO: 519587 - DNA, 75 bp, synthetic construct
  source 1..75: mol_type = other DNA
acctcagtcacgcttgaaacattctggtcattacctgtttcacttatcctttttatatataccgacccggatgta

SEQ ID NO: 519588 - DNA, 75 bp, synthetic construct
  source 1..75: mol_type = other DNA
ccggtacgtctggactgctatttcagttgttttcggtacgcaaccttcccatactggcactaatcatggggcttt

SEQ ID NO: 519589 - DNA, 75 bp, synthetic construct
  source 1..75: mol_type = other DNA
agataaaagatcttttgtgttctgtatgattgccgggttattaatgataatttcctggtcatcttttatttacgc

SEQ ID NO: 519590 - DNA, 75 bp, synthetic construct
  source 1..75: mol_type = other DNA
tttgactgggttatagatgaagaatcattagtatcaagtgtttatgaaaaaaaattggatgttagcctcgtcata

SEQ ID NO: 519591 - DNA, 75 bp, synthetic construct
  source 1..75: mol_type = other DNA
tcctgaagggcaaatttacttttctacatataagaaaggtaaaacacctgcaagcaaaaaaattgatcttcattt

SEQ ID NO: 519592 - DNA, 75 bp, synthetic construct
  source 1..75: mol_type = other DNA
caaccagattctatgttgattatgatgatttaatgctttctttgctaaaagaagcggcaaaaaaaatgattaaca

SEQ ID NO: 519593 - DNA, 75 bp, synthetic construct
  source 1..75: mol_type = other DNA
atggaattcgcaaagatttactggattttgatcccagagaatatttcaaaaaggatggaggtaaacttaatctgg

SEQ ID NO: 519594 - DNA, 75 bp, synthetic construct
  source 1..75: mol_type = other DNA
gcagttgaacttggaatctcaagaaacacagtattaacaacttatgaacaattacaggcggaaggatatgtggta

SEQ ID NO: 519595 - DNA, 75 bp, synthetic construct
  source 1..75: mol_type = other DNA
gttcccgtcaaaacaatgcggcgccctgacccgtgccgggatctcttatgtaaaacgccgcgatgggcgacctcg

SEQ ID NO: 519596 - DNA, 75 bp, synthetic construct
  source 1..75: mol_type = other DNA
atggcactggaaaaaggaattgcagagtttatcaccacggattttttcagcgaggcagcgcgtacggcgctacgg

SEQ ID NO: 519597 - DNA, 75 bp, synthetic construct
  source 1..75: mol_type = other DNA
ggtttttacttttgctggaacgtaagcacgaagttttttcttgtgtgctgcttaacgggaagacaaaatttatcg

SEQ ID NO: 519598 - DNA, 75 bp, synthetic construct
  source 1..75: mol_type = other DNA
agatttttttgaatcgctagctgcaactgtaaaaagtgctaatacggatattgataaagccaagagtaagttaaa

SEQ ID NO: 519599 - DNA, 75 bp, synthetic construct
  source 1..75: mol_type = other DNA
atgttgattgaagccgggggaataatgatgccgggtaatccgataaaaatcagcggctgcgcggacccgcatgtt

SEQ ID NO: 519600 - DNA, 75 bp, synthetic construct
  source 1..75: mol_type = other DNA
catgaggggggggcggctatcagaaaaggttgtacgcagacttatggtggaagaacagcttgtcgtcagccgtaa

SEQ ID NO: 519601 - DNA, 75 bp, synthetic construct
  source 1..75: mol_type = other DNA
gaggcagaacgcgatgcgttgcgggaggaagtcgcacgactgaatcaggaaatacgccgccggcagatggagctg

SEQ ID NO: 519602 - DNA, 75 bp, synthetic construct
  source 1..75: mol_type = other DNA
tgatgtgggtaagtattcagtaactcataaagatataacaaacattttagctggtgatagtcaatctttccttaa

SEQ ID NO: 519603 - DNA, 75 bp, synthetic construct
  source 1..75: mol_type = other DNA
tagctgaaaatggcatttcagatttcatggaaaatttaatggaaattaattcatgggtagaagaatttaataatt

SEQ ID NO: 519604 - DNA, 75 bp, synthetic construct
  source 1..75: mol_type = other DNA
gagcaatatttacggtggataattgagaaaaataatgactataataaggagaattatggagatataaaagacaaa

SEQ ID NO: 519605 - DNA, 75 bp, synthetic construct
  source 1..75: mol_type = other DNA
cacaatgcgttctttattttctgaagaactcagcttggatatttataagcatgatattcattttgatcagaaggc

SEQ ID NO: 519606 - DNA, 75 bp, synthetic construct
  source 1..75: mol_type = other DNA
tagccttgccgcgcatattgaacaccacacggtcaggccgccggttgtttcaacgcttagtgaacaatctgcctc

SEQ ID NO: 519607 - DNA, 75 bp, synthetic construct
  source 1..75: mol_type = other DNA
atgatgtagttcaaaatatcaggcgttggctaaaagaaaatgaaaatatggtgaaagctattaagaaaattgata

SEQ ID NO: 519608 - DNA, 75 bp, synthetic construct
  source 1..75: mol_type = other DNA
gatctttttcccatgtatcatattaaggaggctaaacaagccattgtagattttgtgacggaaactggtgataaa

SEQ ID NO: 519609 - DNA, 75 bp, synthetic construct
  source 1..75: mol_type = other DNA
atagctataatgaggaaaattatggtaataaaaaagacaaatatgccaagcttatttatgaaagaaattatttag

SEQ ID NO: 519610 - DNA, 75 bp, synthetic construct
  source 1..75: mol_type = other DNA
taaaatgccagatgaaaatctgaatgcaaaaaatagaacgcaaaaatattcaggaaaaattgatttgtttcttga

SEQ ID NO: 519611 - DNA, 75 bp, synthetic construct
  source 1..75: mol_type = other DNA
ttcaaacagcgcaagatttcacttccactttaattttaatgatttgcgggatatttacaaagactataataataa

SEQ ID NO: 519612 - DNA, 75 bp, synthetic construct
  source 1..75: mol_type = other DNA
gtgtttaaagggtattttctgtatcaatgtgaaataaaaaactttaacatagatacatcaaaaatatactctgta

SEQ ID NO: 519613 - DNA, 75 bp, synthetic construct
  source 1..75: mol_type = other DNA
ttgagaatgtgtcacttgttagctccaggtatcgagtaaaaccaaataatgaaatacctatttacggcgtgttta

SEQ ID NO: 519614 - DNA, 75 bp, synthetic construct
  source 1..75: mol_type = other DNA
aaatattgtaactttaaaaatgtgacattcactggtgatatatcttacgaaaatcttaatggttcagtatttgaa

SEQ ID NO: 519615 - DNA, 75 bp, synthetic construct
  source 1..75: mol_type = other DNA
cgctacaacggcatcccgtcaatggagattttaggtgaagcggcggccgggaaaagtaccggtgacgccatgaaa

SEQ ID NO: 519616 - DNA, 75 bp, synthetic construct
  source 1..75: mol_type = other DNA
aaatatgtacagatatttcatatggatatacagcaagcgcaactgcgaaacctgttggtcctaaatttctccgta

SEQ ID NO: 519617 - DNA, 75 bp, synthetic construct
  source 1..75: mol_type = other DNA
ctggtgtacccattataagcggccaacatctgaaagacccccttcttatcgatggggataataatttcattactc

SEQ ID NO: 519618 - DNA, 75 bp, synthetic construct
  source 1..75: mol_type = other DNA
agacaccctgctccccaaactcatctccggcgagctatccctggaagatcttccggatctcaccaccgatacaga

SEQ ID NO: 519619 - DNA, 75 bp, synthetic construct
  source 1..75: mol_type = other DNA
ccagccgcttgcgatttgttccgcaagacactaatggtgtcaccattggtacaatttcggagataaaaccaggcg

SEQ ID NO: 519620 - DNA, 75 bp, synthetic construct
  source 1..75: mol_type = other DNA
aacttaaagaagttgtagatattatcactactaaagttgatgtatcgcaaattagtctttgcgattacatatcaa

SEQ ID NO: 519621 - DNA, 75 bp, synthetic construct
  source 1..75: mol_type = other DNA
atcaactatattactgatgagcatgcaaatattctcaagaattcattagtatatgaacacgacattgtgctaact

SEQ ID NO: 519622 - DNA, 75 bp, synthetic construct
  source 1..75: mol_type = other DNA
agagatggattggatagcgtcacgctctgatgccgacttgaagcacatctctaacgcgatgatgcaggtggagag

SEQ ID NO: 519623 - DNA, 75 bp, synthetic construct
  source 1..75: mol_type = other DNA
tacatcagaggaagatgctcgccgattcatgatcgcaagcaatgagctggattgggtttcacaaattgatggcgg

SEQ ID NO: 519624 - DNA, 75 bp, synthetic construct
  source 1..75: mol_type = other DNA
atcaaaagccatatatctcagttagaagtcgcagtgcttcgaattaataacctaaaagtgcgagaagatattgat

SEQ ID NO: 519625 - DNA, 75 bp, synthetic construct
  source 1..75: mol_type = other DNA
ctaatgtcattggtattttagatgataaaataaatttaaataaaaagatcaaccaaaccttggaacaaatgtccc

SEQ ID NO: 519626 - DNA, 75 bp, synthetic construct
  source 1..75: mol_type = other DNA
ctatttgattcattattttaggtcagaaaaaggacaacatgctctgctttctaatgcctctcaggttggtgttcc

SEQ ID NO: 519627 - DNA, 75 bp, synthetic construct
  source 1..75: mol_type = other DNA
acctggagccgctacgggcagttgctggcgttcaccgactgctcgggctaccagacccgttatgaatacgaccgc

SEQ ID NO: 519628 - DNA, 75 bp, synthetic construct
  source 1..75: mol_type = other DNA
ggtacagttacggcaatctggacggtaaaagatgcctatgacaaccctgtgaccagcctcacgccggaagcgccg

SEQ ID NO: 519629 - DNA, 75 bp, synthetic construct
  source 1..75: mol_type = other DNA
atggctatatcatcatatagtacagttacagataaatttgctaatctgactaaaatgccagatgaaaataatgga

SEQ ID NO: 519630 - DNA, 75 bp, synthetic construct
  source 1..75: mol_type = other DNA
aaatctttttttaacggtgaaaaactttaaggcagaagaaaaaataaaccaagagaaatatatagaaaaaccagc

SEQ ID NO: 519631 - DNA, 75 bp, synthetic construct
  source 1..75: mol_type = other DNA
gcttttcaatcagggatattgaaaatgcagttccctaatgataatgaaaaactaagcgtatatttaaaaaataaa

SEQ ID NO: 519632 - DNA, 75 bp, synthetic construct
  source 1..75: mol_type = other DNA
ctggcgcaagagatgctcagctagaaagaaaggtttattttaatgagaagatgcttaatttaaatgataatgatg

SEQ ID NO: 519633 - DNA, 75 bp, synthetic construct
  source 1..75: mol_type = other DNA
gatggaattcgtgaagatttacgagattatgatcctagaaaatatttcggaaaaagtgaaaataaacttaatctg

SEQ ID NO: 519634 - DNA, 75 bp, synthetic construct
  source 1..75: mol_type = other DNA
ttacagataaatttgctactctgactaaaatgccagatgaaaataatagattacaaaaaaagtcagaaaaaattt

SEQ ID NO: 519635 - DNA, 75 bp, synthetic construct
  source 1..75: mol_type = other DNA
gcggtgaaaaactctcagaagacggtcacggtgaaattcaacgcggatgccagcaccggtcaggcaaacctgcag

SEQ ID NO: 519636 - DNA, 75 bp, synthetic construct
  source 1..75: mol_type = other DNA
tcagtgaataatgctcagaagacggttacggtgaaattcaaggcggatttcagtaccggtcaggcgaccctggag

SEQ ID NO: 519637 - DNA, 75 bp, synthetic construct
  source 1..75: mol_type = other DNA
gaaactgaagcaggggtgtatcagtctgtctttactaccggaacgcagtcaggtgaggcaacgattactgttagc

SEQ ID NO: 519638 - DNA, 75 bp, synthetic construct
  source 1..75: mol_type = other DNA
atgtatcatattaaggaggctaaagaaacaattgtagaatttgtaacgaaaactgaggacaaagttaagagattt

SEQ ID NO: 519639 - DNA, 75 bp, synthetic construct
  source 1..75: mol_type = other DNA
ctgcatatataaaaacgataaatgttgaaaccatcaatgactggggaaacgtagagcattactccctgaaaggag

SEQ ID NO: 519640 - DNA, 75 bp, synthetic construct
  source 1..75: mol_type = other DNA
agagaaatgtttaacgacccgttatttgtgcgcacggcaaaggggatggcaccgacaccacgtgcacaagatctg

SEQ ID NO: 519641 - DNA, 75 bp, synthetic construct
  source 1..75: mol_type = other DNA
atgactgaaatcgttgcagataaaacggtagaagtagttaaaaacgcaatcgaaactgcagatggagcattagat

SEQ ID NO: 519642 - DNA, 75 bp, synthetic construct
  source 1..75: mol_type = other DNA
cgcggcaggacgtgtcatcagcctgaccaacgagaacggcagtcacagcgacttcagctacgatgcgctggaccg

SEQ ID NO: 519643 - DNA, 75 bp, synthetic construct
  source 1..75: mol_type = other DNA
cagacccgctatgagtatgaccgcttcggccagatgacggcggtccaccgcgaggaaggcatcagcctttaccgc

SEQ ID NO: 519644 - DNA, 75 bp, synthetic construct
  source 1..75: mol_type = other DNA
cactgatgaaagcgaaacaggaaaaccggctggagcgtcagctacaacaactgagttatgcccgggagttgatcc

SEQ ID NO: 519645 - DNA, 75 bp, synthetic construct
  source 1..75: mol_type = other DNA
tcagatgaaataaaagaaaagcttgagaaaatttatcattacggttgccaacatgttatcgcgacccgcggacat

SEQ ID NO: 519646 - DNA, 75 bp, synthetic construct
  source 1..75: mol_type = other DNA
gtgacaatgttgtcgataaatacctccattccggagtgatgtatccgggggggaatgcattaaatttttccgtgt

SEQ ID NO: 519647 - DNA, 75 bp, synthetic construct
  source 1..75: mol_type = other DNA
caatatatgattgatttagatatttatgatggctttgaaagtaacataatcggtttaagtgaaactgataaatat

SEQ ID NO: 519648 - DNA, 75 bp, synthetic construct
  source 1..75: mol_type = other DNA
ccaaaattgccaacatgcggtacaagtggctgatgcgagtattcgtacgcctgataataagatcatattagagaa

SEQ ID NO: 519649 - DNA, 75 bp, synthetic construct
  source 1..75: mol_type = other DNA
agcaacaaaacagataccggagacaaacaacctataactgacttaagcaacaaaagcgatagcgtagaaaaacca

SEQ ID NO: 519650 - DNA, 75 bp, synthetic construct
  source 1..75: mol_type = other DNA
acagccagcaccgtctggtgttctacacgcggatacagcacggcgaaccacaggtggagagccggtacctctatg

SEQ ID NO: 519651 - DNA, 75 bp, synthetic construct
  source 1..75: mol_type = other DNA
atattttgaagaaaaagctaaaagtttaaacgcgcttgcacagttaggtattagtgttgagataatatctcatga

SEQ ID NO: 519652 - DNA, 75 bp, synthetic construct
  source 1..75: mol_type = other DNA
cattatttttcatatcgttgtgttggcatcgatttagtcatcaaactcaagttgcatttcgtttattattcatag

SEQ ID NO: 519653 - DNA, 75 bp, synthetic construct
  source 1..75: mol_type = other DNA
acgctcagggcaagggtgagaccattggcacggcgcacatccagtccgccatgctggagctgggccacagcggta

SEQ ID NO: 519654 - DNA, 75 bp, synthetic construct
  source 1..75: mol_type = other DNA
gtcaacagcatcaagccgaacacagataacacggtatctctgaccgtcgcggaatatagcgacgccatctaccca

SEQ ID NO: 519655 - DNA, 75 bp, synthetic construct
  source 1..75: mol_type = other DNA
acaagcgagccgatcgcgtttaccggctcgatgtatgtcctggtgaccgacagcctgggcaacccgactctgcgc

SEQ ID NO: 519656 - DNA, 75 bp, synthetic construct
  source 1..75: mol_type = other DNA
tgagcgcctgggttacttcgactacacgtttgacgacgagaacgattcgttgggcgacagggtgcaggctatctg

SEQ ID NO: 519657 - DNA, 75 bp, synthetic construct
  source 1..75: mol_type = other DNA
gtcaattttatgagattattagaccagaatcgtctttcaagccaaatcctcttaatcccttccctgctggagaag

SEQ ID NO: 519658 - DNA, 75 bp, synthetic construct
  source 1..75: mol_type = other DNA
gacggctcactgcacaacttgcgataaagatttcactgttcaggcgctttgccctgactgtcatcagccgttaca

SEQ ID NO: 519659 - DNA, 75 bp, synthetic construct
  source 1..75: mol_type = other DNA
gtcaatagcatcaagccgaacacagataacacggtatctctgaccgtcgcggaatacagcgacgccatctaccaa

SEQ ID NO: 519660 - DNA, 75 bp, synthetic construct
  source 1..75: mol_type = other DNA
agcgctagtggtaggcccgttcttctcgccggtcgaatctgcccagttatggctgcacactcaggtgcagctggg

SEQ ID NO: 519661 - DNA, 75 bp, synthetic construct
  source 1..75: mol_type = other DNA
tggtgacgcgtcagaccatcagttacaacctgacgacgcaagcggtggattacaccctgcgggcctcgcgctcgt

SEQ ID NO: 519662 - DNA, 75 bp, synthetic construct
  source 1..75: mol_type = other DNA
gtggatgaagctgactggctgagtctggatgccgtagaagaattgcgtattctccaggaggaatgcggtgttggt

SEQ ID NO: 519663 - DNA, 75 bp, synthetic construct
  source 1..75: mol_type = other DNA
acagtcagctatggacggtcaacagcatcaaaccgaacacagataacacggtatctctgaccgtcgcggaataca

SEQ ID NO: 519664 - DNA, 75 bp, synthetic construct
  source 1..75: mol_type = other DNA
ccgatacgctggtgcgcgtgaaggtaagagcgacagagaacgcgctgggcagtcgtgatcgcaaatacaacgccc

SEQ ID NO: 519665 - DNA, 75 bp, synthetic construct
  source 1..75: mol_type = other DNA
acgccgcacaaatcatccagcgaagtgttttatcgcactgacaagctgacgccgaccggcggtttcggcaagtac

SEQ ID NO: 519666 - DNA, 75 bp, synthetic construct
  source 1..75: mol_type = other DNA
gatcgatatgttgaaaaaacagttaagcaacaaaagcgatattgtagataaaccagttaatcaacaaatcgagac

SEQ ID NO: 519667 - DNA, 75 bp, synthetic construct
  source 1..75: mol_type = other DNA
ctggccggactgagtagtctctcctggcagggccgttcccattacctacaacttaagcagaaccaatgctggctt

SEQ ID NO: 519668 - DNA, 75 bp, synthetic construct
  source 1..75: mol_type = other DNA
tctaatggtgtacctatattcatgctgaacgataacgatattgataacatcatacaggctatcgcatcatcggca

SEQ ID NO: 519669 - DNA, 75 bp, synthetic construct
  source 1..75: mol_type = other DNA
agtgttaccgagccggtcatttgcgcattatgggctttactaatgaagaaaacttgttcggatacgccttaatct

SEQ ID NO: 519670 - DNA, 75 bp, synthetic construct
  source 1..75: mol_type = other DNA
cccttcgatggatattggggctgtgtggttacaggcgcgtcctttgctgcccagcgctgaaatgttgatagattt

SEQ ID NO: 519671 - DNA, 75 bp, synthetic construct
  source 1..75: mol_type = other DNA
ttaataaagcgccattgtgcgaaggcatgatcctggcttgcgaagcaatccgccgcgattttccctcgcaagatg

SEQ ID NO: 519672 - DNA, 75 bp, synthetic construct
  source 1..75: mol_type = other DNA
agggaaaagaataaccgccagtacgccagaactggcagcctacgagctattaagcgcagtaccccaagaaatctc

SEQ ID NO: 519673 - DNA, 75 bp, synthetic construct
  source 1..75: mol_type = other DNA
agcctggacaggatcctgcctcgtttgctgacggtattgcagatatgacccgaacgaaccccgcgtttaaaggaa

SEQ ID NO: 519674 - DNA, 75 bp, synthetic construct
  source 1..75: mol_type = other DNA
ctggaataattccaccagcaggaaaaacaccgccaacatttcatgaacaacgctccctgtcagaacggttgtacc

SEQ ID NO: 519675 - DNA, 75 bp, synthetic construct
  source 1..75: mol_type = other DNA
gtaggcaccagaaacaaccaaaaccgatgagtaaagacaacctgagcgattacttcgccaaagcgcgagatctgg

SEQ ID NO: 519676 - DNA, 75 bp, synthetic construct
  source 1..75: mol_type = other DNA
gcgaataccagtacagatggtaatcatagccattcactgtccggcacagcagcatctgcaggtgcacacgcgcat

SEQ ID NO: 519677 - DNA, 75 bp, synthetic construct
  source 1..75: mol_type = other DNA
tcagcagcaatcataaaagatgcttatatcgcaataactcctgacaccctcaatattacatatggcaagtgccta

SEQ ID NO: 519678 - DNA, 75 bp, synthetic construct
  source 1..75: mol_type = other DNA
gcggacgccattgccggaatgacgaaaaacaacccagccttcagtggtaataatgcgttgtgggatggaggaagt

SEQ ID NO: 519679 - DNA, 75 bp, synthetic construct
  source 1..75: mol_type = other DNA
cgcagtattgatgaggtcggagataagcggctgcaaaccaatattgagcgtaatggctgggatgtaaacgatccg

SEQ ID NO: 519680 - DNA, 75 bp, synthetic construct
  source 1..75: mol_type = other DNA
gcccacatcgacacaacggacggtatcagtattgaataccctgagtggcgctttaacctgcgcacgtccaacacg

SEQ ID NO: 519681 - DNA, 75 bp, synthetic construct
  source 1..75: mol_type = other DNA
cccatgaattaggtcttaagccgcgcgctcgtgtgcgttcgatggcggtcgttggttgtgacccatcgattatgg

SEQ ID NO: 519682 - DNA, 75 bp, synthetic construct
  source 1..75: mol_type = other DNA
ttcatcatcaggatgcagcatcaatagaactgttaacaagactttatctccaccgccagatacaaaatgggtcaa

SEQ ID NO: 519683 - DNA, 75 bp, synthetic construct
  source 1..75: mol_type = other DNA
aaactgaaacgcaaagagttagctgacgcgctcggtattggtgagcaggcgctcaatagctatctgactggtagc

SEQ ID NO: 519684 - DNA, 75 bp, synthetic construct
  source 1..75: mol_type = other DNA
cgtccggcaaaattcaaagtagaacagcttgagcaatggcttaaggagcaaggcggatacaaggggactatcgac

SEQ ID NO: 519685 - DNA, 75 bp, synthetic construct
  source 1..75: mol_type = other DNA
atgaaggcggataacccgcgcaatgctttctactggcggtttgtggaaatggggaccgtgaatatgccaccgcac

SEQ ID NO: 519686 - DNA, 75 bp, synthetic construct
  source 1..75: mol_type = other DNA
aaaggtagcaattatatcctttatgagagacctgggtggaatgctaacctgggcgtgctaccccggacggtgcta

SEQ ID NO: 519687 - DNA, 75 bp, synthetic construct
  source 1..75: mol_type = other DNA
aaaggtaaagatgaaatcctttatgagcaacctgggtggaatgctaacctggacggtgctatcctggacggtgct

SEQ ID NO: 519688 - DNA, 75 bp, synthetic construct
  source 1..75: mol_type = other DNA
ttattaataaaatccccccaaaaaaattgatactaaaggagttgctactgaagaagttgctactaaaaaagtact

SEQ ID NO: 519689 - DNA, 75 bp, synthetic construct
  source 1..75: mol_type = other DNA
gagttacgccgagtacgtagccattcggtcgtttttaccactcaccatccgcaacacgctctgcatctcgcagac

SEQ ID NO: 519690 - DNA, 75 bp, synthetic construct
  source 1..75: mol_type = other DNA
cagaatagcgatacgccgtgatcagtgcatatcgagaggtaacggcctgcgccgaggcgaatatgcagggatcgg

SEQ ID NO: 519691 - DNA, 75 bp, synthetic construct
  source 1..75: mol_type = other DNA
gggcgtgctaccccggacggtgctaccccggacggtgctaacccggacggtgctaacctggacggtgctaccgtg

SEQ ID NO: 519692 - DNA, 75 bp, synthetic construct
  source 1..75: mol_type = other DNA
taattcttgcttcattcggcagccatgccagaacagaaatagcgactaaaaacttcccagtatcaacgactattt

SEQ ID NO: 519693 - DNA, 75 bp, synthetic construct
  source 1..75: mol_type = other DNA
attaccagtgttatggctatcgtcgcctgcatgcgatgctcaggcatgagggggggcggctatcagaaaaggttg

SEQ ID NO: 519694 - DNA, 75 bp, synthetic construct
  source 1..75: mol_type = other DNA
tgaaatatccggtctggcagaccgtcggcgcacataaccgcatgatgaacattccgcaacgtgaatttctggggc

SEQ ID NO: 519695 - DNA, 75 bp, synthetic construct
  source 1..75: mol_type = other DNA
gcgaaaaaagcgggcagctcggcacattaatggtcagagccgcagataaccaggagacactccaacaaaatcgga

SEQ ID NO: 519696 - DNA, 75 bp, synthetic construct
  source 1..75: mol_type = other DNA
cgtgtgaatttacagcagggtgttgatattgcgcttagtggaagaatggcaaccagcggcatgatgagtgagttg

SEQ ID NO: 519697 - DNA, 75 bp, synthetic construct
  source 1..75: mol_type = other DNA
caaccgcccctaaagctgcaccggcgaccagcgtatccccgctggagcagtcaggctccccaaaaacgaaatttc

SEQ ID NO: 519698 - DNA, 75 bp, synthetic construct
  source 1..75: mol_type = other DNA
gaaacccgtagaacacagcgaaacttcagccacgtcagtcaggcccagctatctcactggctatggctaaccggc

SEQ ID NO: 519699 - DNA, 75 bp, synthetic construct
  source 1..75: mol_type = other DNA
atgattaatagttttgaagagttgcctgtaaaaattgagtttgttcttggtaagaaaataattaatctttatgaa

SEQ ID NO: 519700 - DNA, 75 bp, synthetic construct
  source 1..75: mol_type = other DNA
ttggcgagaaagaagtgctttccgttgacacctacagatcgccctatgaaacgcgcaagaaaagagggaggacag

SEQ ID NO: 519701 - DNA, 75 bp, synthetic construct
  source 1..75: mol_type = other DNA
gtgaccagcggctggaggatatccgccgcgccgttgaaaaactggcagatggttcattgcaggcagagctgctgg

SEQ ID NO: 519702 - DNA, 75 bp, synthetic construct
  source 1..75: mol_type = other DNA
ttgataatagtttaggtggttactggtttaccaacggggcacatggtgttgttgccatcgcagaagccagggcgt

SEQ ID NO: 519703 - DNA, 75 bp, synthetic construct
  source 1..75: mol_type = other DNA
caggacgtgtacgtggacgattatggcaacagttggaaactcaataaatgggaaatcaactgacgattatattga

SEQ ID NO: 519704 - DNA, 75 bp, synthetic construct
  source 1..75: mol_type = other DNA
aaaaattatggaggtcaagtatggattgataatttatcgtcaaaggatgatgacgtatttatgatagcacaaccg

SEQ ID NO: 519705 - DNA, 75 bp, synthetic construct
  source 1..75: mol_type = other DNA
aaggcaaagggcaactgctgctggatggtcgcaacgctgaactggctgcggccatcggcccgaccatctttgtgg

SEQ ID NO: 519706 - DNA, 75 bp, synthetic construct
  source 1..75: mol_type = other DNA
ttgtggatgtggacccgaatgcgtccttaagccgcgaagagattttcggcccggtgctggtggtcacgcgtttca

SEQ ID NO: 519707 - DNA, 75 bp, synthetic construct
  source 1..75: mol_type = other DNA
gcgatgatcgtgcgtgaaccggtcggcgtaattgccgccattgtaccgtggaacttcccgctgctgctgacctgc

SEQ ID NO: 519708 - DNA, 75 bp, synthetic construct
  source 1..75: mol_type = other DNA
aactgctggcggcaatggtaagccacgactgggataagttctggccgcagggcggcccggcgcgtactgaaatgc

SEQ ID NO: 519709 - DNA, 75 bp, synthetic construct
  source 1..75: mol_type = other DNA
tcgacttgccgttctttgaacgcggggttctgtcgaccatgagatgcaaactaagggggcgatgtgagaatggag

SEQ ID NO: 519710 - DNA, 75 bp, synthetic construct
  source 1..75: mol_type = other DNA
gactcggtgcatggctttattcgtgaaggcgaaggcaaagggcaactactgctggatggtcgtaacgcaaagctg

SEQ ID NO: 519711 - DNA, 75 bp, synthetic construct
  source 1..75: mol_type = other DNA
cgttccattcagattggtggaaaaccagacggcttctgcgcaaactgctgatgttactttcctgactttacctgt

SEQ ID NO: 519712 - DNA, 75 bp, synthetic construct
  source 1..75: mol_type = other DNA
taattcattattatgatgaagcacatgtttttttaatgacatctgttcatgaaggatatccactttctctcgcgc

SEQ ID NO: 519713 - DNA, 75 bp, synthetic construct
  source 1..75: mol_type = other DNA
gataccagcggttgcactggtgaactgcctatcagcgccggtaacagcgtcggcctgttcatggtggtcggggga

SEQ ID NO: 519714 - DNA, 75 bp, synthetic construct
  source 1..75: mol_type = other DNA
aggcatcttctacaaccaggggcaggtgtgtatcgccggaacgcgcctgttgctggaagagagcatcgccgatga

SEQ ID NO: 519715 - DNA, 75 bp, synthetic construct
  source 1..75: mol_type = other DNA
cattgaaacccgcttatttattaacggtgaatataccgctgcggcggaaaatgaaacctttgaaaccgttgatcc

SEQ ID NO: 519716 - DNA, 75 bp, synthetic construct
  source 1..75: mol_type = other DNA
attgcccgcggcaagagcgtcgatatcgaccgtgcggtgagcgcagcacgcggcgtatttgaacgcggcgactgg

SEQ ID NO: 519717 - DNA, 75 bp, synthetic construct
  source 1..75: mol_type = other DNA
tttttcttttccaaaaagtatttatgcggttaaggaatgtttagagtcgcttagtaattcgaagtatgctcattt

SEQ ID NO: 519718 - DNA, 75 bp, synthetic construct
  source 1..75: mol_type = other DNA
tgaatcttctatatgtatacagggagggaagacagggattggttctgcgattacagaagctcagcgtattctata

SEQ ID NO: 519719 - DNA, 75 bp, synthetic construct
  source 1..75: mol_type = other DNA
caattatataagaatgatacctggggtgatgagcggctactctggatgtttgaaaatgtagtggctgagtgtatt

SEQ ID NO: 519720 - DNA, 75 bp, synthetic construct
  source 1..75: mol_type = other DNA
agtgcaatcgctgacagcgagtttgcaggtacttactgacgaagaaaaacagttaattaccgcgcagcagcaaga

SEQ ID NO: 519721 - DNA, 75 bp, synthetic construct
  source 1..75: mol_type = other DNA
cgtgtgggtcaggaggtgattgtcgattttttaaacggtgatcctgaccagccgatcatcatggggcgcacctac

SEQ ID NO: 519722 - DNA, 75 bp, synthetic construct
  source 1..75: mol_type = other DNA
atctgctgggcgagcctcatccggcgcgggagttctgcgtgcagtacggtgaaactgattttggttttctctgcc

SEQ ID NO: 519723 - DNA, 75 bp, synthetic construct
  source 1..75: mol_type = other DNA
gcgccgtcaggcgctgtttttttcatcccttccgcgatttttacgccgctaccggattatgccgtgacgcattga

SEQ ID NO: 519724 - DNA, 75 bp, synthetic construct
  source 1..75: mol_type = other DNA
aagcgtgacacaatcacccggattacgggggatgagttttctcgcattaccatcatagccggttataacggcctg

SEQ ID NO: 519725 - DNA, 75 bp, synthetic construct
  source 1..75: mol_type = other DNA
catcggaaacggcgtaaacgtccgcgcgctgattaacccgaatatccgggttaacgggcttattcagctggatca

SEQ ID NO: 519726 - DNA, 75 bp, synthetic construct
  source 1..75: mol_type = other DNA
ggcgaataatgaatatgttcacgaagcgattgtgctcaacagcgctaccgggcttattggcatgccgcagcagac

SEQ ID NO: 519727 - DNA, 75 bp, synthetic construct
  source 1..75: mol_type = other DNA
tcatattgggaatatttcttgcgaaaaaattgccattaacggtagcaggaattatattgaacgtggtgattttaa

SEQ ID NO: 519728 - DNA, 75 bp, synthetic construct
  source 1..75: mol_type = other DNA
gtcgtactggttgcgcctcagattcgatttaagctgacggaaatacaaaagctggcagaaatgaatggcaagaaa

SEQ ID NO: 519729 - DNA, 75 bp, synthetic construct
  source 1..75: mol_type = other DNA
ataccagagggcaggcatggtatatggatctggcttgtgaagctcggggcgctactgatatttattctggcgaaa

SEQ ID NO: 519730 - DNA, 75 bp, synthetic construct
  source 1..75: mol_type = other DNA
tgcagtaccaccttcagatacgcccgcccctgtggcgcagcgggctgcggcagaactaccgaatcttccagcagc

SEQ ID NO: 519731 - DNA, 75 bp, synthetic construct
  source 1..75: mol_type = other DNA
caattccgatgcccgaaaaacgtcggcgttactatttcttgatggcgataatttcaaatacatcaatgatacctg

SEQ ID NO: 519732 - DNA, 75 bp, synthetic construct
  source 1..75: mol_type = other DNA
ctctgacctgatttccatggtcacgcagcgtgctactaacgtgatcacgatggctgactcaaccacaggttcaca

SEQ ID NO: 519733 - DNA, 75 bp, synthetic construct
  source 1..75: mol_type = other DNA
tttggttactggtgctggaggggtatttggcaaagtgctggtggaatcgggcgtcggcaaagcccttgccaacat

SEQ ID NO: 519734 - DNA, 75 bp, synthetic construct
  source 1..75: mol_type = other DNA
gtttatgatcttgatgatgctaatgagcaagccaggttattaaaagacgccatttctaagtatcgattgactcac

SEQ ID NO: 519735 - DNA, 75 bp, synthetic construct
  source 1..75: mol_type = other DNA
cgggcgtggtgctttgaaccggatgccggtgaagggcttaaccgttatatccgcaagtcaggcatgctcagagca

SEQ ID NO: 519736 - DNA, 75 bp, synthetic construct
  source 1..75: mol_type = other DNA
gcgttactatttcttgatggcgataatttcaaatacatcaatgatacctggggtcatgcgacgggcgatagagtc

SEQ ID NO: 519737 - DNA, 75 bp, synthetic construct
  source 1..75: mol_type = other DNA
tttaagttgttcttttcagctaaaatagatctaaatcgaagaattgcgattcactttttaaatgggtacagcata

SEQ ID NO: 519738 - DNA, 75 bp, synthetic construct
  source 1..75: mol_type = other DNA
tgtgtgatactttaataaaaggcaacacaacgttcatgttcttggattccttttttagccatcaccaaaataatc

SEQ ID NO: 519739 - DNA, 75 bp, synthetic construct
  source 1..75: mol_type = other DNA
aagtgcctcaaccaaagaataaacggatccgctggctggagcctcatgaagcacaaaggctgattgatgaatgtc

SEQ ID NO: 519740 - DNA, 75 bp, synthetic construct
  source 1..75: mol_type = other DNA
gtcgcccgtttgtttaacggcgaagtcacgctgcgcaacgtgcaggaaggtggcgtgctggcctcgcttcgactt

SEQ ID NO: 519741 - DNA, 75 bp, synthetic construct
  source 1..75: mol_type = other DNA
ttagtcaactgaagaaagcgaaaccgggctgcaaattgccggataaagtgatggactacctggagcgaagcggac

SEQ ID NO: 519742 - DNA, 75 bp, synthetic construct
  source 1..75: mol_type = other DNA
actgatgacgaggaactgcgagatgttgagcaaattggtttaggttatttattaccttgtcctccagataaatac

SEQ ID NO: 519743 - DNA, 75 bp, synthetic construct
  source 1..75: mol_type = other DNA
atttataaaaaagatacccacagctaataaaactctatttgagaggtttgttttttttattaagtacaagatact

SEQ ID NO: 519744 - DNA, 75 bp, synthetic construct
  source 1..75: mol_type = other DNA
aaagacaagccagtgtttgaaattaaattggatgaaataaagaaagaaattggtgctagtgagttgtcaaaatat

SEQ ID NO: 519745 - DNA, 75 bp, synthetic construct
  source 1..75: mol_type = other DNA
gcacggaaggggcaacagcgtggtgcgcagaatatgatgaatggggcaacctgctgaatgaagagaacccgcatc

SEQ ID NO: 519746 - DNA, 75 bp, synthetic construct
  source 1..75: mol_type = other DNA
cggcccgctgccgttcatcctctcctgcacctacagcagttaccggacaaaaacgcccgcgccggtggggagcct

SEQ ID NO: 519747 - DNA, 75 bp, synthetic construct
  source 1..75: mol_type = other DNA
ctaacgacacaattcaatctctactccttagtttcgaagataattatcatctcccgctactacaggaagtgaata

SEQ ID NO: 519748 - DNA, 75 bp, synthetic construct
  source 1..75: mol_type = other DNA
gcgatccgctttctctgctgagtgaaaaaaacagcgagtcagttattcgcgtaaatgtgcctgaagtccatgtgg

SEQ ID NO: 519749 - DNA, 75 bp, synthetic construct
  source 1..75: mol_type = other DNA
gaaatccttcctgaagcgccaagaatccgcgcactgaatgacaagcgtaaaaaccagatccgaacgttctggcgc

SEQ ID NO: 519750 - DNA, 75 bp, synthetic construct
  source 1..75: mol_type = other DNA
aatcaagcccaggaaggaggcgaggaacagtccgccgagatattaggtatgatctattaccagggatttgaagaa

SEQ ID NO: 519751 - DNA, 75 bp, synthetic construct
  source 1..75: mol_type = other DNA
tttattatcgcatcgaaaaagaaatagccagttatttttacagtacgatgtcaccttctgaagagttagaaaatg

SEQ ID NO: 519752 - DNA, 75 bp, synthetic construct
  source 1..75: mol_type = other DNA
ccggtgaactggccagaacgcagcgccgcagcctggcggatgcgcttcagcagtccggcggcgaagacggtggca

SEQ ID NO: 519753 - DNA, 75 bp, synthetic construct
  source 1..75: mol_type = other DNA
ccgcgctggtggtgattgatttacaagaaggcatcttaccttttgccggtggcccgcatactgccgatgaggtgg

SEQ ID NO: 519754 - DNA, 75 bp, synthetic construct
  source 1..75: mol_type = other DNA
agtccgctggcactgcaacaaatctcgcaaccatgctgggcatcaagccgatgtcggtcagccgctggaaaaacc

SEQ ID NO: 519755 - DNA, 75 bp, synthetic construct
  source 1..75: mol_type = other DNA
cttcactctggaacgcgacaacaccgctgcgcttactcacgcgatgttgcagtctgacagtgaaaataccacatc

SEQ ID NO: 519756 - DNA, 75 bp, synthetic construct
  source 1..75: mol_type = other DNA
tattgcagcagcccaattcatgtcatgcttggttaaattgttttacttaatgtcatggtcatataagaatttttt

SEQ ID NO: 519757 - DNA, 75 bp, synthetic construct
  source 1..75: mol_type = other DNA
cccgaaaataaaaaatcaaaatatacgcagttagcgaaggttgctgtaggtactgcagcccaatttggggtggga

SEQ ID NO: 519758 - DNA, 75 bp, synthetic construct
  source 1..75: mol_type = other DNA
ctcccggacaacgtaaaattgatatcagccaggtggtgaaagagccggaagcaacaggggagttaaccgtctttg

SEQ ID NO: 519759 - DNA, 75 bp, synthetic construct
  source 1..75: mol_type = other DNA
ggttggcgcacgctatgaccatcctgaagggctcgagattacccttgctgatgccaggcgtattggaatagaaat

SEQ ID NO: 519760 - DNA, 75 bp, synthetic construct
  source 1..75: mol_type = other DNA
tgcgcgactcgcggattctgatcctcgatgaacctaccgcctcgcttacccctgcggaaaccgaacgcttgtttc

SEQ ID NO: 519761 - DNA, 75 bp, synthetic construct
  source 1..75: mol_type = other DNA
cgccaggctgcctactcgaacctgccgcaggtgatgtgggcgctctcctcgaaagtgaacccggcaggggatttg

SEQ ID NO: 519762 - DNA, 75 bp, synthetic construct
  source 1..75: mol_type = other DNA
gcagcacttgaggcgtcattattgttctctgagcgtatgcgtaaccgtctggaatatacgtccggtgagacagaa

SEQ ID NO: 519763 - DNA, 75 bp, synthetic construct
  source 1..75: mol_type = other DNA
acaataggtgcttgccgctcttttcatggtgctattagcacaggtgcaggaaactggacgacggcacaattgatt

SEQ ID NO: 519764 - DNA, 75 bp, synthetic construct
  source 1..75: mol_type = other DNA
ttgctgggtaagatcaaactgcttggtaatacgcttactggaagcactgccgccaaaggcgttggcgtactcatt

SEQ ID NO: 519765 - DNA, 75 bp, synthetic construct
  source 1..75: mol_type = other DNA
ttatcggtgtcgtaatgtgcaggaacaggcttaaggatcatgcgaccctgactctgcaagaaaagtacctgaatg

SEQ ID NO: 519766 - DNA, 75 bp, synthetic construct
  source 1..75: mol_type = other DNA
taatgtgcaggaacaggcttaagggtcatgcgacccagactctgcaagaaaagtacctgaatgccatcatccacg

SEQ ID NO: 519767 - DNA, 75 bp, synthetic construct
  source 1..75: mol_type = other DNA
ccgtcgcatgaagttcaggttgaagaggggggattactgtctgcgctgttacctgaatgtagcaacttttgggta

SEQ ID NO: 519768 - DNA, 75 bp, synthetic construct
  source 1..75: mol_type = other DNA
gggctggcggccacgcaggggcatcatattcaggaaaattcgacgtcttttttcagaaatggcggcaggccgtcc

SEQ ID NO: 519769 - DNA, 75 bp, synthetic construct
  source 1..75: mol_type = other DNA
agaacattacttctcttcttcagctagtgatgacggagataagacttatgctcgtctgggattcaaaggaaactc

SEQ ID NO: 519770 - DNA, 75 bp, synthetic construct
  source 1..75: mol_type = other DNA
tggagaaggggctattgtagccaatggaacaaatagcgatgttgcttccggagctgctattggtgctgtggctgg

SEQ ID NO: 519771 - DNA, 75 bp, synthetic construct
  source 1..75: mol_type = other DNA
ggaaatatcagtgttggagcctattcttttatgcgtggaggaaggctttgtgctgatattggaaattattgtagt

SEQ ID NO: 519772 - DNA, 75 bp, synthetic construct
  source 1..75: mol_type = other DNA
ggttcaggtcaataaacagccgctcccggatgaccacgatattttctggtacgcctctgaaaaagaggccggtaa

SEQ ID NO: 519773 - DNA, 75 bp, synthetic construct
  source 1..75: mol_type = other DNA
atgctggtgaagatgacgcgagcaaaagctatgcttgtctgacaccggaactggtagcgcagtttggtttaaaag

SEQ ID NO: 519774 - DNA, 75 bp, synthetic construct
  source 1..75: mol_type = other DNA
tttgtgccgttatttcttgtgcagacggttgggaagatatagaggattttggggaaacacatctcgattttttaa

SEQ ID NO: 519775 - DNA, 75 bp, synthetic construct
  source 1..75: mol_type = other DNA
caaattaccaggctgccaagacagaaggtaaacaaggccaagaatgagcttatcgcgatgaaggttatccttcgc

SEQ ID NO: 519776 - DNA, 75 bp, synthetic construct
  source 1..75: mol_type = other DNA
tggcattcaattattcacgatgacattaattattgggattggacaatcatttatagatcaatatttttctcttat

SEQ ID NO: 519777 - DNA, 75 bp, synthetic construct
  source 1..75: mol_type = other DNA
ttggcccaagtgttcttgtttggaatggcacctgttttaaacattatgtcatccaagggggttcagttaaataaa

SEQ ID NO: 519778 - DNA, 75 bp, synthetic construct
  source 1..75: mol_type = other DNA
ttgcagccgttaaaatgatgcacgccatcgaaaaaccactgatcctggtgtctgtgtttaaatttatcgcggcta

SEQ ID NO: 519779 - DNA, 75 bp, synthetic construct
  source 1..75: mol_type = other DNA
agctggcaaaaaatagtcagttctggtttttattaatgttcactctgttcgtaacacaaatttatgacacctacg

SEQ ID NO: 519780 - DNA, 75 bp, synthetic construct
  source 1..75: mol_type = other DNA
atattttgctcagtattttcgatttcctgtacctctttgcctggtcggcaacgatggcattttttgtcatatgga

SEQ ID NO: 519781 - DNA, 75 bp, synthetic construct
  source 1..75: mol_type = other DNA
gccgggagttaaacctgtctaactcttcagtgcttggtgcctgtcagaaactccaggaggctgttggcttaccga

SEQ ID NO: 519782 - DNA, 75 bp, synthetic construct
  source 1..75: mol_type = other DNA
cctttattggctcaactccaattgacaacacaacggttatcactgaagttgaaaatcaatttcaaagcattcctg

SEQ ID NO: 519783 - DNA, 75 bp, synthetic construct
  source 1..75: mol_type = other DNA
aaggacaattgatcttccattcgaaatgaagtcaattgttggcgtcttgtgtgattataattcaatagacagaaa

SEQ ID NO: 519784 - DNA, 75 bp, synthetic construct
  source 1..75: mol_type = other DNA
tttggagggttgatagtacggcatgaatcttattcagatcctaatgagtatgataaatccgattttgatccaata

SEQ ID NO: 519785 - DNA, 75 bp, synthetic construct
  source 1..75: mol_type = other DNA
gatacgcagggaaactgtacagggaatacgccgggaaaagcggcagggagatactgcccgtctctgtcgtcgtcc

SEQ ID NO: 519786 - DNA, 75 bp, synthetic construct
  source 1..75: mol_type = other DNA
tggcttgaaatggataaacctgattttgataagttatatatatcttcttttatatccagtgaagaaaattccaaa

SEQ ID NO: 519787 - DNA, 75 bp, synthetic construct
  source 1..75: mol_type = other DNA
ctgtcattcgacccctggatttatcgttaaccgtgtggcgcgtccttattattccgaggcctggcgggcactgga

SEQ ID NO: 519788 - DNA, 75 bp, synthetic construct
  source 1..75: mol_type = other DNA
ataacggtgagggaacgtggggttgaacgtgattttactgtcacactgaaaaaatgcacgcagcgaattccgaaa

SEQ ID NO: 519789 - DNA, 75 bp, synthetic construct
  source 1..75: mol_type = other DNA
caaccgctcacaggcattattccgcgaactgtatccggcgctaaaacaaattcaatcgaactattccggcagatg

SEQ ID NO: 519790 - DNA, 75 bp, synthetic construct
  source 1..75: mol_type = other DNA
gaattgtttccacaagtccagaagagagcttcctgatggaagcagcagtcaggcaatttcccgtcattataacac

SEQ ID NO: 519791 - DNA, 75 bp, synthetic construct
  source 1..75: mol_type = other DNA
cagacaagaaattttggcgctgaaacagaatgcaagcaaggatgcaaaagattatttacaatctctccgtgaaga

SEQ ID NO: 519792 - DNA, 75 bp, synthetic construct
  source 1..75: mol_type = other DNA
tcagcgattcagattggcagaggattatgaattcaaggcctcagtatccaaagcttatgagggatatagaagaga

SEQ ID NO: 519793 - DNA, 75 bp, synthetic construct
  source 1..75: mol_type = other DNA
gggagtatctgacacgttgtggtcataaattcctatggctaaaaattagccctctacctccaggatataccggtt

SEQ ID NO: 519794 - DNA, 75 bp, synthetic construct
  source 1..75: mol_type = other DNA
tgaacgtatcgcagaacaaatgtatctggataataaagaaaataaaaatatcgtgaaggcgttatttgtcgcttt

SEQ ID NO: 519795 - DNA, 75 bp, synthetic construct
  source 1..75: mol_type = other DNA
aggatatatattaataaaaaatggtatttagcgcacagactagcttggttatatgttaccgggaaatggccagta

SEQ ID NO: 519796 - DNA, 75 bp, synthetic construct
  source 1..75: mol_type = other DNA
ccgattttaattggcgtgctggtggggtacgcgctctctttcgcaatgggaattgtcgataccacgccgattatt

SEQ ID NO: 519797 - DNA, 75 bp, synthetic construct
  source 1..75: mol_type = other DNA
ctgatatcaaacattacatccttattctgaagcgggaaaacggggtgtatcaggcagtggtcattgacctgtggt

SEQ ID NO: 519798 - DNA, 75 bp, synthetic construct
  source 1..75: mol_type = other DNA
agaaatcagttcgatgagataaatgatgcatactttttttataaaagaaatgttgatttaatgaataaagactct

SEQ ID NO: 519799 - DNA, 75 bp, synthetic construct
  source 1..75: mol_type = other DNA
tcacggagcacaatactctcccggctggcggcgagattttaatagcagaaacttaccagaagaactctacccagc

SEQ ID NO: 519800 - DNA, 75 bp, synthetic construct
  source 1..75: mol_type = other DNA
ggtgcaaggcgcgaaaaaactggcgtggctgcaaagtagcgggaatatgtcgaatccacactatctcgcccaacc

SEQ ID NO: 519801 - DNA, 75 bp, synthetic construct
  source 1..75: mol_type = other DNA
tgttttcaggccgaacgaagcggtaacgcctgcagacagacaagcggtaatggcaaaaatggccgccaaacgaca

SEQ ID NO: 519802 - DNA, 75 bp, synthetic construct
  source 1..75: mol_type = other DNA
gctgccgcaggaggatgtggatgatatcgtagctttcctgcacagtctgaacggggtgtacacgccgtatatgca

SEQ ID NO: 519803 - DNA, 75 bp, synthetic construct
  source 1..75: mol_type = other DNA
gatcgcaaaagaaattggtgcaactaatgttataaactccggtataacagatgcagtttctgaaataatgaaaat

SEQ ID NO: 519804 - DNA, 75 bp, synthetic construct
  source 1..75: mol_type = other DNA
tttgatcagatatggcctcgattaacccatgagcaaagacgtgtactgattatgctcttagatgaatatacgaaa

SEQ ID NO: 519805 - DNA, 75 bp, synthetic construct
  source 1..75: mol_type = other DNA
aagatcaatgtggcacatcttgttaacatcgctattaaattgaatacaccaattagttggttttttattgactgc

SEQ ID NO: 519806 - DNA, 75 bp, synthetic construct
  source 1..75: mol_type = other DNA
atggcgtcagtagcaccgccagcattgcaactgccattacccgatcatttccaaccgactggcaggccgcttcct

SEQ ID NO: 519807 - DNA, 75 bp, synthetic construct
  source 1..75: mol_type = other DNA
ccataatggaaaaaatactttttgataattgtattctcgatgactcaaatttcgctcagataaaaatgactgacg

SEQ ID NO: 519808 - DNA, 75 bp, synthetic construct
  source 1..75: mol_type = other DNA
aagaataaaccaacaatattaagcaagcgaaatacctggtttatcgcccatgaaagtttcactgagcatccttgc

SEQ ID NO: 519809 - DNA, 75 bp, synthetic construct
  source 1..75: mol_type = other DNA
gcgtttcgccttttgcggtagtgaagcggacagcgatccccatgtcagtcggtttcgtggtgaatatgattgcca

SEQ ID NO: 519810 - DNA, 75 bp, synthetic construct
  source 1..75: mol_type = other DNA
cgaatgctcacatcctgctgctcgacgaagccacgtcatgtctggatcgcacatccgaagaacgactgatgtcat

SEQ ID NO: 519811 - DNA, 75 bp, synthetic construct
  source 1..75: mol_type = other DNA
ctgatgctgccggggaaaggcgtaacgaaaaaacagcctccgttaccggagagcaaggaggctgaatgcagttta

SEQ ID NO: 519812 - DNA, 75 bp, synthetic construct
  source 1..75: mol_type = other DNA
ctgatgctgccggggaaaggcgtaacgaaaaaacagcctccgttaccggatagcaagcaggctgaatgtagttta

SEQ ID NO: 519813 - DNA, 75 bp, synthetic construct
  source 1..75: mol_type = other DNA
ctgatgctgccggggaaaggcgtaacgaaaaaacagcctccgttaccggaaagcaagaaggctgaatggagttta

SEQ ID NO: 519814 - DNA, 75 bp, synthetic construct
  source 1..75: mol_type = other DNA
aaacctgaagaaaacgatataaataatataagtttaggctgttcagagcaaaaatcatatggcacctatttttat

SEQ ID NO: 519815 - DNA, 75 bp, synthetic construct
  source 1..75: mol_type = other DNA
tcactcttctgtataaatatctgtataaaataaatatcaaaaaaaataaagcagtgattgtccagcaagattggc

SEQ ID NO: 519816 - DNA, 75 bp, synthetic construct
  source 1..75: mol_type = other DNA
ttatcgcagccctgaatgaggcaggactgtccggtgccgcacgggacgcggagaaaatgaagaaaggcgatgcgg

SEQ ID NO: 519817 - DNA, 75 bp, synthetic construct
  source 1..75: mol_type = other DNA
cctcggggcctcttcggtcctccctgtcaccggtgcactgcatcttgatgaggtcacgttcagttatcccgacag

SEQ ID NO: 519818 - DNA, 75 bp, synthetic construct
  source 1..75: mol_type = other DNA
gtgagcaaattgatatcaattcacaatttaattcatttgaatatgacgggatttcttttcaccttaaaaatatga

SEQ ID NO: 519819 - DNA, 75 bp, synthetic construct
  source 1..75: mol_type = other DNA
atcactatcgacaggatcaagttagacctcttcaataatgtgaattttaagatttatggtgatccttctcgctac

SEQ ID NO: 519820 - DNA, 75 bp, synthetic construct
  source 1..75: mol_type = other DNA
cgtcctggcgcgcagaataagatgaaagtgattctggccgaagaagcaaagctcatcaaaaaagataacgtgaat

SEQ ID NO: 519821 - DNA, 75 bp, synthetic construct
  source 1..75: mol_type = other DNA
tctgaaaatttcaggtaaacaggaaaataataaagggggagtatttattaaatatcaggaaggacaaagtatttc

SEQ ID NO: 519822 - DNA, 75 bp, synthetic construct
  source 1..75: mol_type = other DNA
cagaataattacagcggcgctgttagcgtatattcaacatcaactgagacgcaatatattaaagtcacagtaaag

SEQ ID NO: 519823 - DNA, 75 bp, synthetic construct
  source 1..75: mol_type = other DNA
agactatcacttatttaagtgatactggttgtctggagattcagggggccagtctaaccattgctaacggtcttc

SEQ ID NO: 519824 - DNA, 75 bp, synthetic construct
  source 1..75: mol_type = other DNA
ggaataaaaatatacccgatttttggtctggtcctactatatgggcacaaagtgtttcaagtgtaataaaaaaaa

SEQ ID NO: 519825 - DNA, 75 bp, synthetic construct
  source 1..75: mol_type = other DNA
gaactattgcagaagctgatgtttcagttggtggtttaactgtcataactggtgaaaatgatacggggaagagta

SEQ ID NO: 519826 - DNA, 75 bp, synthetic construct
  source 1..75: mol_type = other DNA
atgatgcacttaaaaaatattacggcacaaaaccctaaaacaattgagcaatatcagctggcgcgacagcataaa

SEQ ID NO: 519827 - DNA, 75 bp, synthetic construct
  source 1..75: mol_type = other DNA
ttccgctttcaccggctgaatgtcgggctattggcaagagtattgctaaatacacctaccgaaaattctctcctg

SEQ ID NO: 519828 - DNA, 75 bp, synthetic construct
  source 1..75: mol_type = other DNA
tttagggtgggcgcctccacatccttctttttatatgaagagaagtttatataaggaagacggtttttttgattt

SEQ ID NO: 519829 - DNA, 75 bp, synthetic construct
  source 1..75: mol_type = other DNA
cttataacagcgagaaaacaattaaagacactttagattcggttgctgtgcagacatataataatattgagtata

SEQ ID NO: 519830 - DNA, 75 bp, synthetic construct
  source 1..75: mol_type = other DNA
ccactagcttagatttaaataaaatggagtataaaataactgtaccgcaaatttatattacatctaattattggt

SEQ ID NO: 519831 - DNA, 75 bp, synthetic construct
  source 1..75: mol_type = other DNA
ggcgattcgtcagggatggccagcattctcacagtggcttgatgcggtgattcagcgtgtcgaaatgtacaacgc

SEQ ID NO: 519832 - DNA, 75 bp, synthetic construct
  source 1..75: mol_type = other DNA
atcaacaacaggctgcgctggactggctggcagcgcagggggagagaagcggttttacactgctggatacttcgg

SEQ ID NO: 519833 - DNA, 75 bp, synthetic construct
  source 1..75: mol_type = other DNA
gtgcagggggcggcggcgactggccgccccctgcgcgctccctgcgccagtggctttatatggcattgcacatga

SEQ ID NO: 519834 - DNA, 75 bp, synthetic construct
  source 1..75: mol_type = other DNA
aacgattattaatgccaaatattactggcactttgcacaaagtgattttttttgggaacaggctaataaattagt

SEQ ID NO: 519835 - DNA, 75 bp, synthetic construct
  source 1..75: mol_type = other DNA
aatgcagcacaaagcgcacagcagaccgcgcaggatgtggaggcaacggtcaccgcacgtgatgatgcggaacgt

SEQ ID NO: 519836 - DNA, 75 bp, synthetic construct
  source 1..75: mol_type = other DNA
taagcttggtgaagctgcaacactgactggcgaggttaaggccagtgcagaggcggcagccaaaagcgagcagaa

SEQ ID NO: 519837 - DNA, 75 bp, synthetic construct
  source 1..75: mol_type = other DNA
cgctgattctacgactgtttttctgttccggaatccgtcacgtcttcactctgtgctgcgcattccgcagaatat

SEQ ID NO: 519838 - DNA, 75 bp, synthetic construct
  source 1..75: mol_type = other DNA
atccgataatcacagtcgtctatccagaacagataagtggctcttgcattctgattattcccggtggcggatata

SEQ ID NO: 519839 - DNA, 75 bp, synthetic construct
  source 1..75: mol_type = other DNA
cctatcagcctaatacggcccgtttaactgcctatgagccaggtgacattcttttaggtaatattcgcccatatt

SEQ ID NO: 519840 - DNA, 75 bp, synthetic construct
  source 1..75: mol_type = other DNA
aacgtcgatttagataacgcggtcgctaacgttgttcccactcgtggggcgatcgtgcgagcagagtttaaagcg

SEQ ID NO: 519841 - DNA, 75 bp, synthetic construct
  source 1..75: mol_type = other DNA
catgctcaatgtcaaattgccatacagggcttgcgattcagggcggtattagagctgctaatgatcctttgtatt

SEQ ID NO: 519842 - DNA, 75 bp, synthetic construct
  source 1..75: mol_type = other DNA
cacaaccaactcatgatgaattggttgcagcatctgaattaatgaaacagcatctgattgatgctgctatggctt

SEQ ID NO: 519843 - DNA, 75 bp, synthetic construct
  source 1..75: mol_type = other DNA
tacgccagctctgagcgaagccgcagagcaattgaggtgtactggcaatagcggacactaccatttgttcttttt

SEQ ID NO: 519844 - DNA, 75 bp, synthetic construct
  source 1..75: mol_type = other DNA
tctaatagtctagaggccttttttatctggcaatttctatccaattttttatttttgattataatatataagcta

SEQ ID NO: 519845 - DNA, 75 bp, synthetic construct
  source 1..75: mol_type = other DNA
tttattatttcgccatgcaacatgaaggaactgtcggtgtggctaaatccgtgcttatcacggtattaactatat

SEQ ID NO: 519846 - DNA, 75 bp, synthetic construct
  source 1..75: mol_type = other DNA
tgctggcaggattacccggtcatcatcgacggtgacgagacggaagaagcgaaagagaccaatcagtgggaaaag

SEQ ID NO: 519847 - DNA, 75 bp, synthetic construct
  source 1..75: mol_type = other DNA
cacatccagaatgggaattactacaatagctataccattctttaaattcaataaatcagacataccttcattaga

SEQ ID NO: 519848 - DNA, 75 bp, synthetic construct
  source 1..75: mol_type = other DNA
tttggcgagagtatgttcaaaacagcacatccagaatgggaattactacaatagctataccattctttaaattca

SEQ ID NO: 519849 - DNA, 75 bp, synthetic construct
  source 1..75: mol_type = other DNA
tgggatgcagacgggtgagcgcgccagcactgaggatgccaaaggttgggggcgcaccaggatgagccgccggaa

SEQ ID NO: 519850 - DNA, 75 bp, synthetic construct
  source 1..75: mol_type = other DNA
gagcgcctcgactttgaccacttctacaacatgtatgagcgcaacggtgccgcgttcggtgctgttcataagttg

SEQ ID NO: 519851 - DNA, 75 bp, synthetic construct
  source 1..75: mol_type = other DNA
ccgatgcgaggtgagcctgtgcacccaagccgggtgatccttttctgtgaaggttcagaggatgaaaatgtcctg

SEQ ID NO: 519852 - DNA, 75 bp, synthetic construct
  source 1..75: mol_type = other DNA
tcaccaggcacttcttcagtatattcgtccgggcgcacagaatgaaatgaaggttattctggcggaagaagcaaa

SEQ ID NO: 519853 - DNA, 75 bp, synthetic construct
  source 1..75: mol_type = other DNA
atacgcgtgaagcggaagatgtgctggatgtggcggtggccattgcggaggcagacggcgaaattgagccggaag

SEQ ID NO: 519854 - DNA, 75 bp, synthetic construct
  source 1..75: mol_type = other DNA
ggatctgggtgtgcagggtgacctctggccggtgcaggagcagagcatgctttccctgatccatcaacggctgga

SEQ ID NO: 519855 - DNA, 75 bp, synthetic construct
  source 1..75: mol_type = other DNA
attaataaacccgatgggccagcaacagcagggatagatgatttgggtgaaattttagctaaaatgaaacagaga

SEQ ID NO: 519856 - DNA, 75 bp, synthetic construct
  source 1..75: mol_type = other DNA
gcggcctgccgctggcgcttgtcagcacggaaggggcaacagaatggtgcgcagaatacgatgaatggggcaacc

SEQ ID NO: 519857 - DNA, 75 bp, synthetic construct
  source 1..75: mol_type = other DNA
tggctggcatcgtgcggcctgaccgtggagcagatgcaaaaccagatggacccggtgtacacgccggcgcgaaaa

SEQ ID NO: 519858 - DNA, 75 bp, synthetic construct
  source 1..75: mol_type = other DNA
ctgccctgggacgtgtgggggttcagacagcttccgtaattgcagtcctgggggctgcaggtcttgctgttggac

SEQ ID NO: 519859 - DNA, 75 bp, synthetic construct
  source 1..75: mol_type = other DNA
aaagtccgacgtttaccgggacaccaaaagcgccaacgccagcggcagggaataacaccacgcaggttgcgacca

SEQ ID NO: 519860 - DNA, 75 bp, synthetic construct
  source 1..75: mol_type = other DNA
gaatgcaaaagtttcgttctcattcgataaagcaaccaactcctactttgcaatcgttgctgatggttcagcaga

SEQ ID NO: 519861 - DNA, 75 bp, synthetic construct
  source 1..75: mol_type = other DNA
gcaactgatggtagtgtgggaggtgctaaagcattcggtagcaattataaaaatgctgatgttgaaacttatttt

SEQ ID NO: 519862 - DNA, 75 bp, synthetic construct
  source 1..75: mol_type = other DNA
ggctaatggcaagaaaggaaaggtgattctcggcgcgatgatgcgcaagctggcacaggtggcgtatggagtgct

SEQ ID NO: 519863 - DNA, 75 bp, synthetic construct
  source 1..75: mol_type = other DNA
aaagtgatgtatctgagcaaatcagaaggtggtagcccgattctggtaaacgaagatgcagcaaaatcgttgcaa

SEQ ID NO: 519864 - DNA, 75 bp, synthetic construct
  source 1..75: mol_type = other DNA
caataactacagaaatagatgtttacaaaaatagcgcgggccagttcactactacaaaagtggaaaataaagccg

SEQ ID NO: 519865 - DNA, 75 bp, synthetic construct
  source 1..75: mol_type = other DNA
ttcgtgcggcagaaaatcccgccattattaacgttgcctctattgcagcgctgatcccaagcgtcggtcaggcga

SEQ ID NO: 519866 - DNA, 75 bp, synthetic construct
  source 1..75: mol_type = other DNA
taaatgaaaaaaccgtactggtgacaggagccagtggtgatattggactgggtatttgcgaaaaatatctggagc

SEQ ID NO: 519867 - DNA, 75 bp, synthetic construct
  source 1..75: mol_type = other DNA
atgtatccctggacccccctgcatatccgaatgctcagacgcactgataccgtattttcctttcgtcgtcagata

SEQ ID NO: 519868 - DNA, 75 bp, synthetic construct
  source 1..75: mol_type = other DNA
actacgcaaccgaagtgtctaacatgtctcgtgcgcagatcctgcaacaagcgggtacctctgttctggcacagg

SEQ ID NO: 519869 - DNA, 75 bp, synthetic construct
  source 1..75: mol_type = other DNA
aagcagcaaggatttaccaataatcttaaacgggcgaaccaagcatttttacccgcatctacctttaaaattccc

SEQ ID NO: 519870 - DNA, 75 bp, synthetic construct
  source 1..75: mol_type = other DNA
cggagcgcagccagcgtattgtcaaacaagccatgctgaccgaagccaatggtgactatattattcgggctaaaa

SEQ ID NO: 519871 - DNA, 75 bp, synthetic construct
  source 1..75: mol_type = other DNA
cttcgttcacccgacggtggtatgtcaggaggtatgtcggaaggaatgacagacagcggcatgggtgactcaatg

SEQ ID NO: 519872 - DNA, 75 bp, synthetic construct
  source 1..75: mol_type = other DNA
tcaatcattacttacctggggagatcacgagcttgaggctgcgggacgtctcactcagcctttgaaatatgatgc

SEQ ID NO: 519873 - DNA, 75 bp, synthetic construct
  source 1..75: mol_type = other DNA
tcaacaaaatgtatgtcaacttcttgatttttctataagtacattaaaaaaatatgagtccggcgcaattgagcc

SEQ ID NO: 519874 - DNA, 75 bp, synthetic construct
  source 1..75: mol_type = other DNA
cggatttagacggtgtattttgcaccaatgacgatattgcgatgggtgcgcttctgctgtgccgcgagcgaaacc

SEQ ID NO: 519875 - DNA, 75 bp, synthetic construct
  source 1..75: mol_type = other DNA
atggccaccgccacatccagcacatcttccgcttcacgcgtatcgtgtttcacatcttcaatttcacgcaatgcc

SEQ ID NO: 519876 - DNA, 75 bp, synthetic construct
  source 1..75: mol_type = other DNA
ctcaatttcgccgtctgcctccgcaatggccaccgccacatccagcacatcttccgcttcacgcgtatcgtgttt

SEQ ID NO: 519877 - DNA, 75 bp, synthetic construct
  source 1..75: mol_type = other DNA
atggccaccgccacatccagcacatcttccgcttcacgcgtatcgtgtttcacatcctcaatctcacgtaacgcc

SEQ ID NO: 519878 - DNA, 75 bp, synthetic construct
  source 1..75: mol_type = other DNA
aacatatcggaatgaatattgacgggtgtgcacccggcggaatgaaccatgaaacaggccatacgctggtggtga

SEQ ID NO: 519879 - DNA, 75 bp, synthetic construct
  source 1..75: mol_type = other DNA
aagctggctggcagcgttaagcgtgcttctacttctgttgtgcacaccttatgaaaacgactttattgccggtta

SEQ ID NO: 519880 - DNA, 75 bp, synthetic construct
  source 1..75: mol_type = other DNA
cgaaaaaggccgccagatacgccgctacttcattgagtgcgagaaaaagtttcgccagagtcttttacctacacc

SEQ ID NO: 519881 - DNA, 75 bp, synthetic construct
  source 1..75: mol_type = other DNA
taatgttaaccgcgctggcactgttgttctccaactcctatggcggcatggttactcactatggcggcgcggcag

SEQ ID NO: 519882 - DNA, 75 bp, synthetic construct
  source 1..75: mol_type = other DNA
cgcgcatgcctgcgccggaagaagaacaggcattcactgaagaggtgaacagcgccttttccgggctgcctcgtt

SEQ ID NO: 519883 - DNA, 75 bp, synthetic construct
  source 1..75: mol_type = other DNA
caggctctctcggtgttaacagagggcctgctttaacgccctggacttgtgtcaataactgcatttcgggcagaa

SEQ ID NO: 519884 - DNA, 75 bp, synthetic construct
  source 1..75: mol_type = other DNA
cagaccctccccctctccttcacccgtttccacagttctgtactgccgctgcatggcctgacgggcgtgggctgg

SEQ ID NO: 519885 - DNA, 75 bp, synthetic construct
  source 1..75: mol_type = other DNA
gccaacaatgtgggctggcattataaatgccgtcgaggcaatcgttcgcctccccagtgggcaatccaaatggtg

SEQ ID NO: 519886 - DNA, 75 bp, synthetic construct
  source 1..75: mol_type = other DNA
caagtcgatgctgcatatgcaaaagaatgcgcgctcgaaaacacaggttatgtggctgaaagaggggattattaa

SEQ ID NO: 519887 - DNA, 75 bp, synthetic construct
  source 1..75: mol_type = other DNA
gcctcggactacccttttccgtcgtaaccgactgggacccactggatggtacgaaacaaccgatgggtaaaacac

SEQ ID NO: 519888 - DNA, 75 bp, synthetic construct
  source 1..75: mol_type = other DNA
tacatatcagttacgtgatcagaatattgttattcctggtatcgcgacagtaatagaaaagttattggcgggtga

SEQ ID NO: 519889 - DNA, 75 bp, synthetic construct
  source 1..75: mol_type = other DNA
gttatccattgaaaggggatgagcagaacggtattgtttatatttcagggccaccaatttttgttagtattgtta

SEQ ID NO: 519890 - DNA, 75 bp, synthetic construct
  source 1..75: mol_type = other DNA
aaacaaccgcgatcctctggataagtgggtgttaagctacctgaaccggggtcaggccctgaaccatggaaaata

SEQ ID NO: 519891 - DNA, 75 bp, synthetic construct
  source 1..75: mol_type = other DNA
gaaacagaaccagcttgagtcatggataaacagcttttgtgacaaggacggggccatcaatactggttctaaaaa

SEQ ID NO: 519892 - DNA, 75 bp, synthetic construct
  source 1..75: mol_type = other DNA
ggcgggatgagcgacaccgccagcaaccgcatcacgtttgagcgcgacagccagtaccggatcacgggtgtcagt

SEQ ID NO: 519893 - DNA, 75 bp, synthetic construct
  source 1..75: mol_type = other DNA
agcgactcctggagcgaatacgcctgggtgcgtgaacagggaaaccgggtggatatcatcagccagggagccacg

SEQ ID NO: 519894 - DNA, 75 bp, synthetic construct
  source 1..75: mol_type = other DNA
gatagtcatggagaatattgggacgaaatattttcaggcaaagatgagaaaatagttaaaagtaaagataacaat

SEQ ID NO: 519895 - DNA, 66 bp, synthetic construct
  source 1..66: mol_type = other DNA
atgacacaatatcttgacaacatccgtcactgtctgtcagaaaatgtaactgccaatagaagcaac

SEQ ID NO: 519896 - DNA, 75 bp, synthetic construct
  source 1..75: mol_type = other DNA
gcatactgcgacgaacgtaccgactttacgctgggccagaccctccccctctccttcacccgtttccacagttct

SEQ ID NO: 519897 - DNA, 75 bp, synthetic construct
  source 1..75: mol_type = other DNA
ggtggaatatttctccaacgtgaaaccagacttgtttgccgatgtgattaacaagtttatggctcacggtaagag

SEQ ID NO: 519898 - DNA, 75 bp, synthetic construct
  source 1..75: mol_type = other DNA
atggccggtatgcagactcgcctgcatctgatcgccaacgaacccggtacttatgacggtatctccgccagctac

SEQ ID NO: 519899 - DNA, 75 bp, synthetic construct
  source 1..75: mol_type = other DNA
atgcgtcaacatcgattcagtaaggtgaatttcgatacccaacagatgatccattttattaacagatttaatatg

SEQ ID NO: 519900 - DNA, 75 bp, synthetic construct
  source 1..75: mol_type = other DNA
taatgagattacagctatcccagaacttcttaacatgctggatattaaaggaaaaatcatcacaactgatgcgat

SEQ ID NO: 519901 - DNA, 75 bp, synthetic construct
  source 1..75: mol_type = other DNA
gcaacattaaaagaaataaaagatttagcaaagaacataacacagcaatacggtacgccggatctttgtatagag

SEQ ID NO: 519902 - DNA, 75 bp, synthetic construct
  source 1..75: mol_type = other DNA
tcaagacggatgagaaatccaatgagattacagccattcctgaacttcttaacatgatggatattaaaggaaaaa

SEQ ID NO: 519903 - DNA, 75 bp, synthetic construct
  source 1..75: mol_type = other DNA
ggagcagacttgggagcgtacgattgagaacatcctcgacctgcgaccggataaccgcctgttcgagttcaccgc

SEQ ID NO: 519904 - DNA, 75 bp, synthetic construct
  source 1..75: mol_type = other DNA
ctgattacaaaacgcgatggcccgcaatggccgatgttttggagtcagtcatcgttgggcaaaaattgacaatat

SEQ ID NO: 519905 - DNA, 75 bp, synthetic construct
  source 1..75: mol_type = other DNA
tgagcagaagaaaagcgggctgacggttgccctttccggcacagtgggcagtgccattaataatgcggtcaccag

SEQ ID NO: 519906 - DNA, 75 bp, synthetic construct
  source 1..75: mol_type = other DNA
tggaaattgacggggaaaaaatcactatcatccctgtagatatattcccgcaggtgcctgaacgcaacacgattt

SEQ ID NO: 519907 - DNA, 75 bp, synthetic construct
  source 1..75: mol_type = other DNA
gtcaacgaaggctgggacgtgctcaacctctacgacattgtccgcatcagcgagcaggcgagcagcagcaaaacc

SEQ ID NO: 519908 - DNA, 75 bp, synthetic construct
  source 1..75: mol_type = other DNA
ggagcagacctgggaacgcacgattgagaacatcctcgacctgcgaccggataaccggctgttcgagttcaccgc

SEQ ID NO: 519909 - DNA, 75 bp, synthetic construct
  source 1..75: mol_type = other DNA
caatattctggaaaacttcgatatgaagaaatacggttttggcagcgccgacgcgatgcagatcatggcagaagc

SEQ ID NO: 519910 - DNA, 75 bp, synthetic construct
  source 1..75: mol_type = other DNA
attcttgcagattcctctagatattacactggatcaacaggcattaaccattttagaaacaatgctatcagaagg

SEQ ID NO: 519911 - DNA, 75 bp, synthetic construct
  source 1..75: mol_type = other DNA
gattctggcgcgttgcgcccgtagttcgctgatgctcacacgcgcagtacagcgccccgtcctgttgcgacgcac

SEQ ID NO: 519912 - DNA, 75 bp, synthetic construct
  source 1..75: mol_type = other DNA
atcttatttgcgtgacatttttttcagcattgcaattatatatgacatataatattgctcaagtgattatgccat

SEQ ID NO: 519913 - DNA, 75 bp, synthetic construct
  source 1..75: mol_type = other DNA
taagaacgcgtcccggatggatcagaatctccggactcctgtacccatgacatgggcatttatgatgcgtgaggc

SEQ ID NO: 519914 - DNA, 75 bp, synthetic construct
  source 1..75: mol_type = other DNA
gtctctggaatttaaagacatcatctactaacgcacaattgctacaggtcggtgtattaggcacgggtgaactga

SEQ ID NO: 519915 - DNA, 75 bp, synthetic construct
  source 1..75: mol_type = other DNA
tacgcacttaaccagtggccggcactgacgtactatgcgaacgatggctgggtggaaatcgacaacaacatcgct

SEQ ID NO: 519916 - DNA, 75 bp, synthetic construct
  source 1..75: mol_type = other DNA
cgcaaactgctctcagttatgacgactatcgtttcctggaaaaactctctcgcgaagtcggttcacgtataggaa

SEQ ID NO: 519917 - DNA, 75 bp, synthetic construct
  source 1..75: mol_type = other DNA
cagtgggtggaggagaatccatctacattcttcagacgggatagccttcctgaaacaggagaaaacgaaatatta

SEQ ID NO: 519918 - DNA, 75 bp, synthetic construct
  source 1..75: mol_type = other DNA
ttccttgatgaccagggcaacccggacagcaaaaaatcactcacttcgcatctggcttccggcacaccaggtacg

SEQ ID NO: 519919 - DNA, 75 bp, synthetic construct
  source 1..75: mol_type = other DNA
tacttcaacgagctaacgggtagtcgttgtgctgcgctggcacctttcgagaaagctctctccacggtgaagagc

SEQ ID NO: 519920 - DNA, 75 bp, synthetic construct
  source 1..75: mol_type = other DNA
actggatactgaatccgaagaactggggatctgtctacgagcaggctatcaacgagcaccgtgagcgcaagggag

SEQ ID NO: 519921 - DNA, 75 bp, synthetic construct
  source 1..75: mol_type = other DNA
caggacgggatatcaccgctgttgcgtcatccgttaccgcaaccggcaatatcagcgtgaatgccggtcgtgatg

SEQ ID NO: 519922 - DNA, 75 bp, synthetic construct
  source 1..75: mol_type = other DNA
tggacctggattctcaagttcgcaccgtgaagcagagcggtgaatggtttgcagaagtttccgtgaataatggat

SEQ ID NO: 519923 - DNA, 75 bp, synthetic construct
  source 1..75: mol_type = other DNA
atggcgcgccagcagcgtaatattccggcgaactcatattgacgcgtttttcaggcgcgcgtcatcggcggcaca

SEQ ID NO: 519924 - DNA, 75 bp, synthetic construct
  source 1..75: mol_type = other DNA
cagagcgtttgcgagacctacagtaaattcaaagatgacgtgaaacggatgaagcaaacagggttcaactcgttt

SEQ ID NO: 519925 - DNA, 75 bp, synthetic construct
  source 1..75: mol_type = other DNA
tttatcttcttatcggttatagcaatatggcaattcagacggatgaaatcatttaaagatgatgtagggatgtaa

SEQ ID NO: 519926 - DNA, 75 bp, synthetic construct
  source 1..75: mol_type = other DNA
ccagcaatatcatatagcgtctgtgatctctattataatctttatcttcttatcggttatagcaatatggcaatt

SEQ ID NO: 519927 - DNA, 75 bp, synthetic construct
  source 1..75: mol_type = other DNA
gaataccgctatcggatgcgaaaccagttatttgataataaagatttaccctccggaattatcaacaaactcgat

SEQ ID NO: 519928 - DNA, 75 bp, synthetic construct
  source 1..75: mol_type = other DNA
tgatcacaactttgaagtgatgaagggaattagcgcgcgaggcattattgtttccgataaagcaacgcaatttga

SEQ ID NO: 519929 - DNA, 75 bp, synthetic construct
  source 1..75: mol_type = other DNA
ggtcgctggctattaataatccacagctggctgccgatgtgaaaacggcgtggttaaaagaggatccatcattac

SEQ ID NO: 519930 - DNA, 75 bp, synthetic construct
  source 1..75: mol_type = other DNA
aacggctccggaaatgaaattggtttttggatctttgattatcccgcgcagtgcgaactgcaggtacgggagcat

SEQ ID NO: 519931 - DNA, 75 bp, synthetic construct
  source 1..75: mol_type = other DNA
taacgaagatcgcttcctcaaaaataacggctccggaaatgaaattggtttttggatctttgaaccgccccgggt

SEQ ID NO: 519932 - DNA, 75 bp, synthetic construct
  source 1..75: mol_type = other DNA
atacagagagtttatcacccgccgttatgctgcaactgttacagcaccccgatgaccagacgcgtgaatcgatgg

SEQ ID NO: 519933 - DNA, 75 bp, synthetic construct
  source 1..75: mol_type = other DNA
aattggcgtcgtcctgaacctgacaccctcgtatacccgaaatgacagcgaggaggataaaaaagctgcgtggta

SEQ ID NO: 519934 - DNA, 75 bp, synthetic construct
  source 1..75: mol_type = other DNA
tagagggcgtgatagcgaccattattgttggcttattcgccactatttacatccttaatattaaagatgcgcgga

SEQ ID NO: 519935 - DNA, 75 bp, synthetic construct
  source 1..75: mol_type = other DNA
gacacaggggagcgttatcagatcaaacgtataacagtaaatcctggtgaaggactttctttacaaatgcaccat

SEQ ID NO: 519936 - DNA, 75 bp, synthetic construct
  source 1..75: mol_type = other DNA
cgcgaaaccagtctacatggtgccaagccgcaaccgctacggcattatcgggccaatctatccgcaggaaatgca

SEQ ID NO: 519937 - DNA, 75 bp, synthetic construct
  source 1..75: mol_type = other DNA
tccatatctgattacggtgaatccgaaactggatggtctcgaaaaggtggacagcagtctgtttgccgggctgta

SEQ ID NO: 519938 - DNA, 75 bp, synthetic construct
  source 1..75: mol_type = other DNA
tatctaaaatatgttaaaggtaatgatctaaaaatccagcgtagaattctatattttttgttattagcaacgttt

SEQ ID NO: 519939 - DNA, 75 bp, synthetic construct
  source 1..75: mol_type = other DNA
tgggataacgcaagacaaagccaatttatcgagtcattacttttaaatatacctacgccaacactttttttctac

SEQ ID NO: 519940 - DNA, 75 bp, synthetic construct
  source 1..75: mol_type = other DNA
tgaccgtgacaaaaataacgcaaaccagtttcgccccatgcttagcatcggatgtacagaggagcaacgtccatg

SEQ ID NO: 519941 - DNA, 75 bp, synthetic construct
  source 1..75: mol_type = other DNA
aatattacatatggcaagtgcctataatacccctgttgttgcaatttatgctgattacaaaacgcgggtaatgac

SEQ ID NO: 519942 - DNA, 75 bp, synthetic construct
  source 1..75: mol_type = other DNA
agttcccaaaggagttgtgtgaaattctggctatgcacgattgtctgcctgaaataaaaaaagcagatgtagact

SEQ ID NO: 519943 - DNA, 75 bp, synthetic construct
  source 1..75: mol_type = other DNA
gttagataaaattgaagtatgtgcatttaatgtggagcatgcacaattgcaagtgccagagagcttacgaacatg

SEQ ID NO: 519944 - DNA, 75 bp, synthetic construct
  source 1..75: mol_type = other DNA
gcgacaagccggctctggccatggttgggcttgcggatattccggcgttgtttttcctcggccagaccattggcg

SEQ ID NO: 519945 - DNA, 75 bp, synthetic construct
  source 1..75: mol_type = other DNA
tccggttacggttgtgttccctgagcccagttcacggggaagggatgcgggttactggcaggcgattaaggattt

SEQ ID NO: 519946 - DNA, 75 bp, synthetic construct
  source 1..75: mol_type = other DNA
gcctgctcggaaacaaattctacaccggaaaagacaaggtcacgtttgattatgtgctggctgccaaattgcgtg

SEQ ID NO: 519947 - DNA, 75 bp, synthetic construct
  source 1..75: mol_type = other DNA
ccagtctgccggattgcttatcctggcgggtctggttgacagtaagacgggtaagcctgttgatgataccgctgc

SEQ ID NO: 519948 - DNA, 75 bp, synthetic construct
  source 1..75: mol_type = other DNA
cgacgttattgcagtccatggataacgccaacaaagtgttcccggaaatggcgacgatgccgattgcgctggtta

SEQ ID NO: 519949 - DNA, 75 bp, synthetic construct
  source 1..75: mol_type = other DNA
ctctattacgactttgtcggggcgtcgccaatttctggttttgacagtggcttctctacctttgctcagggcttt

SEQ ID NO: 519950 - DNA, 75 bp, synthetic construct
  source 1..75: mol_type = other DNA
tttgcggtactgagcattatgcttcagatacaccaaaaagcagatggcgtaataattatataaaagaatcattat

SEQ ID NO: 519951 - DNA, 75 bp, synthetic construct
  source 1..75: mol_type = other DNA
ggtcattatctttacggtcatcaactacggtctgacctatatcggcgtcaacccgtactggcagtacatcatcaa

SEQ ID NO: 519952 - DNA, 75 bp, synthetic construct
  source 1..75: mol_type = other DNA
aagcctggcaccatcgagcgagccagaagaaagtcatggatgcagggaaaagaataccgccattacgctgtagaa

SEQ ID NO: 519953 - DNA, 75 bp, synthetic construct
  source 1..75: mol_type = other DNA
cggcgctgtaccgtgatgccggcctgatggcggcccgggtgattatttcccgccaggttatccgtgacggcgagc

SEQ ID NO: 519954 - DNA, 75 bp, synthetic construct
  source 1..75: mol_type = other DNA
gggggctctctgccgcgcgtctccagatgctggagcacggccgcctctccgttccggctgccgtgctctctgtct

SEQ ID NO: 519955 - DNA, 75 bp, synthetic construct
  source 1..75: mol_type = other DNA
ggtatccggctggaggcggtgtggctgacacacgacccggcatacccggatgaacagccgactgcgccgctggcg

SEQ ID NO: 519956 - DNA, 75 bp, synthetic construct
  source 1..75: mol_type = other DNA
atatcgaggttggtggtaatcgttacagcgttcccgaagcgctgtgtggtcagccagtatcgatacgaatatcgc

SEQ ID NO: 519957 - DNA, 75 bp, synthetic construct
  source 1..75: mol_type = other DNA
agaaggctgcggtgctgaagaataacaacgggaaagtcgtgttcaactccggattcctgttgctggccgaccact

SEQ ID NO: 519958 - DNA, 75 bp, synthetic construct
  source 1..75: mol_type = other DNA
acgggaactgattccagcaagcatggtcaaggtagtaaaagcatcaaagctcttgtggctgataatgatattgga

SEQ ID NO: 519959 - DNA, 75 bp, synthetic construct
  source 1..75: mol_type = other DNA
atatccgaatcagtgatgcgttaaaaataccagatcaggatgcagcgaaaacccgcgcgattgggctgattattt

SEQ ID NO: 519960 - DNA, 75 bp, synthetic construct
  source 1..75: mol_type = other DNA
gcccgatacggagatgacgctggttggtcaacctggcatcgcaaagttaacccccggaggaaatgccgcgggatg

SEQ ID NO: 519961 - DNA, 75 bp, synthetic construct
  source 1..75: mol_type = other DNA
tatacagcagcgcaaaaactggggattatcaatagcaacggcggcgtcagcgccttagtctcagataattatgac

SEQ ID NO: 519962 - DNA, 75 bp, synthetic construct
  source 1..75: mol_type = other DNA
aaatgtacaagagtttcaacaatcatttgcgaacccgacaatggcatttatgatgcactgaataaaggtattcaa

SEQ ID NO: 519963 - DNA, 75 bp, synthetic construct
  source 1..75: mol_type = other DNA
taatacaattaagctgattaagagtaattgtacaaaagtttcaaaaatcatttgcgaacccgataagggcattta

SEQ ID NO: 519964 - DNA, 75 bp, synthetic construct
  source 1..75: mol_type = other DNA
gcaactggaaacagcaaaaagcctgctgcctgaagacccgaaaatgttgcctcccggtattttactggtgaatcc

SEQ ID NO: 519965 - DNA, 75 bp, synthetic construct
  source 1..75: mol_type = other DNA
cactactaccaaaaatgcataaaattgattttctagggaatgatttgtacattcatcgcccaaccattaaagata

SEQ ID NO: 519966 - DNA, 75 bp, synthetic construct
  source 1..75: mol_type = other DNA
gaccctggcctgtacaatttgtcgtgtctacacactcgcctcacattgccaatgcggctggtttcgagagtattc

SEQ ID NO: 519967 - DNA, 75 bp, synthetic construct
  source 1..75: mol_type = other DNA
caaacgccagctggcagaacgggatgaagagctggctatcctccaaaaggccgcgacatacttcgcgaagcgcct

SEQ ID NO: 519968 - DNA, 75 bp, synthetic construct
  source 1..75: mol_type = other DNA
accaatggcgacgaccgcgtggggggcttttacgatgcaggcgggcctgatggtctgagtgatgtctatgccacc

SEQ ID NO: 519969 - DNA, 75 bp, synthetic construct
  source 1..75: mol_type = other DNA
aactatcaacggcaggacatatattaaaaagtgatgcattaactcctgaaggtagaatgcttgcctgcttgtgtt

SEQ ID NO: 519970 - DNA, 75 bp, synthetic construct
  source 1..75: mol_type = other DNA
ctcctttaggttggaatgaaagcttaccattttatttacgtgataactttctgttatcacaaaatataaactccg

SEQ ID NO: 519971 - DNA, 75 bp, synthetic construct
  source 1..75: mol_type = other DNA
tcctctataaagccgatttcagaatcagaattaacagaggaaatatcagatcttttcagattatctcagaatgaa

SEQ ID NO: 519972 - DNA, 75 bp, synthetic construct
  source 1..75: mol_type = other DNA
aacgaggatgctcaggcacttaaagttctctgtatggagtttgaagttttcctgaaggaaagaataaaggaggtg

SEQ ID NO: 519973 - DNA, 75 bp, synthetic construct
  source 1..75: mol_type = other DNA
tgatggtgaatctcttgatgatgctggagaaattaaatcctcgcccaagcaggagcaattgtggatgtggcgtga

SEQ ID NO: 519974 - DNA, 75 bp, synthetic construct
  source 1..75: mol_type = other DNA
gcggggtatccaggccgcgacagcggcgcttcaggggctggcggggggtaatttagcaggtgctctggccggagc

SEQ ID NO: 519975 - DNA, 75 bp, synthetic construct
  source 1..75: mol_type = other DNA
ggcaggccggacaacgtacccaggctgatacgttaatgcgtaacctggcgcaacagaagccgaacgacccggacc

SEQ ID NO: 519976 - DNA, 75 bp, synthetic construct
  source 1..75: mol_type = other DNA
cgtggactggcgaacatttatcggcagcaatcgccggaaaaagctgaagcgtttattgcgtcactttctgccagc

SEQ ID NO: 519977 - DNA, 75 bp, synthetic construct
  source 1..75: mol_type = other DNA
gttatgacaagctatttaacggagtaccgtcagatgtcggcatggcgttggaatactggagtgcagtggcgcaaa

SEQ ID NO: 519978 - DNA, 75 bp, synthetic construct
  source 1..75: mol_type = other DNA
atgtttcattacgcaatcccactcagagcaaaattgacttctaacaattggaatgaagtttgcgttagactggaa

SEQ ID NO: 519979 - DNA, 75 bp, synthetic construct
  source 1..75: mol_type = other DNA
tgatttgatagtttattctttatggaaatctgcattgttaggaatttcattgtgtcttttaaaaccttttctcaa

SEQ ID NO: 519980 - DNA, 75 bp, synthetic construct
  source 1..75: mol_type = other DNA
cccttcaggccacgcctcatgacgggcgttatttcttcgactacccgcgcgcacaggctgacattcagaccatgc

SEQ ID NO: 519981 - DNA, 75 bp, synthetic construct
  source 1..75: mol_type = other DNA
ctggaaatagaagcgttacgccatcaaaaggctgtttcagggactttgctttctaatattgaagcatggatgtcg

SEQ ID NO: 519982 - DNA, 75 bp, synthetic construct
  source 1..75: mol_type = other DNA
gtgccgataggttaggcccacaaagccatcaccagttgtctgagtttcatatccgtgatttaaaatcacttggtc

SEQ ID NO: 519983 - DNA, 75 bp, synthetic construct
  source 1..75: mol_type = other DNA
agatgccagggattgttcaaatcaggaagagaaaggaacatttctattttcactaaaagaccatacaaaatatcc

SEQ ID NO: 519984 - DNA, 75 bp, synthetic construct
  source 1..75: mol_type = other DNA
ggcaggccggacaacgcagccaggccgatacgttaatgcgcaatctggcgcaacagaagccgaacgacccggagc

SEQ ID NO: 519985 - DNA, 75 bp, synthetic construct
  source 1..75: mol_type = other DNA
tgcgcattaacctgagtatgtgtacggcggcggatatcgaacgcggcctgatggatggaaggctgcatgtgggcg

SEQ ID NO: 519986 - DNA, 75 bp, synthetic construct
  source 1..75: mol_type = other DNA
cggatcgccattgtgacgcgcaaagcttcgcggccgaattcaatccttgagctgtttctggactccctttcaaaa

SEQ ID NO: 519987 - DNA, 75 bp, synthetic construct
  source 1..75: mol_type = other DNA
ttccggtggtatagattttacaacgtcatcaccaggcgaagcgaaaagtatggtcgatgccaaaatggtgcgtaa

SEQ ID NO: 519988 - DNA, 75 bp, synthetic construct
  source 1..75: mol_type = other DNA
ttgccctggcgctggggagcgtactggcttccgcatcgacgacagcctttgccgccgacaaaccggctatggaga

SEQ ID NO: 519989 - DNA, 75 bp, synthetic construct
  source 1..75: mol_type = other DNA
aattgcacccgaagcaagaggtaagacaatgttactaggatattggattgggcagaaggagatccctgatccata

SEQ ID NO: 519990 - DNA, 75 bp, synthetic construct
  source 1..75: mol_type = other DNA
attcgctggcaatgctggaatttgccctcgacaacatgccggataccccactgctgaccgaaggctttagctata

SEQ ID NO: 519991 - DNA, 75 bp, synthetic construct
  source 1..75: mol_type = other DNA
ggttctggcgagccgcttacggatcacgcaacattaaaagaaataaaagatttagcaaagaacataacacagaaa

SEQ ID NO: 519992 - DNA, 75 bp, synthetic construct
  source 1..75: mol_type = other DNA
cgcacaccaccatgttgcaggtggatgcaccgtattccgacggacggatgttctttcgcagtgatttcgtcaata

SEQ ID NO: 519993 - DNA, 75 bp, synthetic construct
  source 1..75: mol_type = other DNA
aggcgcagcttggcgataccgcagcggcgcagcagacgtttaacaagctgatcccgcaggcaaaatctcagccgc

SEQ ID NO: 519994 - DNA, 75 bp, synthetic construct
  source 1..75: mol_type = other DNA
gacttgactaaaagtttcatgaaatttatgagcttgactatggctatacccattatagtattatgtgtcttttca

SEQ ID NO: 519995 - DNA, 75 bp, synthetic construct
  source 1..75: mol_type = other DNA
tcactgacgatccccgattgatggctcatcttaatgactgtgtccttaatccggggcctccgatggtggcccgcc

SEQ ID NO: 519996 - DNA, 75 bp, synthetic construct
  source 1..75: mol_type = other DNA
ggagcaattgtagcagcttcgattcaagctgcattaattggtctgataatattggtaattaatttaaaccaacaa

SEQ ID NO: 519997 - DNA, 75 bp, synthetic construct
  source 1..75: mol_type = other DNA
tctgatagaattgggtctcaaaagacgcaatgcgtgtgcagattttcttttagatgttgtgaaacaagaaattga

SEQ ID NO: 519998 - DNA, 75 bp, synthetic construct
  source 1..75: mol_type = other DNA
aacgccatcggtgggtgatgcgaactcgcaaacaccggagtataaagcatttctggtcaacatagagcgagcgta

SEQ ID NO: 519999 - DNA, 75 bp, synthetic construct
  source 1..75: mol_type = other DNA
ttcctgctttgctgaagaaaatggttcaatagctaactccgggcgttggttgcagtggcactgggctgcggcaga

SEQ ID NO: 520000 - DNA, 75 bp, synthetic construct
  source 1..75: mol_type = other DNA
aattaagaagaaaagaaacaacgaaaatagatgtgtcactttttgaggaggctactagtctatctcaaatgcttg

SEQ ID NO: 520001 - DNA, 75 bp, synthetic construct
  source 1..75: mol_type = other DNA
gtgtctgcctgttatttgttgttgccgcagttggagaattcaattagatggattttagaattaagaagaaaagaa

SEQ ID NO: 520002 - DNA, 75 bp, synthetic construct
  source 1..75: mol_type = other DNA
tttcagttgatgattttaaaaaaagtgagtacgccagtatattgttaccaccaagaagccattcttattttgaaa

SEQ ID NO: 520003 - DNA, 75 bp, synthetic construct
  source 1..75: mol_type = other DNA
ttacttttattgctgaagactcggctggtaacagaacacaacaaacaattaaattttactttattacggataaac

SEQ ID NO: 520004 - DNA, 75 bp, synthetic construct
  source 1..75: mol_type = other DNA
ggaagatattgcgggtaatcagagccagacgaagggagatatcactcttgatacaaaagcgccgataatcagtga

SEQ ID NO: 520005 - DNA, 75 bp, synthetic construct
  source 1..75: mol_type = other DNA
aattagatgaaagtagtgatacaggtataaagcatgacaatattactaataactcaacaccaatattaaccgggc

SEQ ID NO: 520006 - DNA, 75 bp, synthetic construct
  source 1..75: mol_type = other DNA
caattgagttctgctctgataaaaattatatccgtagagatatcggagcatttatactcgggcaaataaaaattt

SEQ ID NO: 520007 - DNA, 75 bp, synthetic construct
  source 1..75: mol_type = other DNA
tacggcgggaagtcaccgaaaattgcgagcgtgcatcagttcggtctgtcagaagaaaaccggaaagacggtaag

SEQ ID NO: 520008 - DNA, 75 bp, synthetic construct
  source 1..75: mol_type = other DNA
cggtctgtcggaagaaaaccggaaagacggtaagaaaattgattatccggcgcgtcctctgctcggctttaccgg

SEQ ID NO: 520009 - DNA, 75 bp, synthetic construct
  source 1..75: mol_type = other DNA
tttttgcctgtgtctttatcttttatttaacttgtttgcctttatttagtgtatgggaagataaagttgaacctt

SEQ ID NO: 520010 - DNA, 75 bp, synthetic construct
  source 1..75: mol_type = other DNA
gtctggacgcagtggtcacgctgcgttgctcaattaagcggcattttcagtatagcgtctgttttctgtgtacat

SEQ ID NO: 520011 - DNA, 75 bp, synthetic construct
  source 1..75: mol_type = other DNA
acagcatgattcatgatgcacgggaaaaggccggagaactggggaaggtgcaggtcatggtgcctgtcctgaaca

SEQ ID NO: 520012 - DNA, 75 bp, synthetic construct
  source 1..75: mol_type = other DNA
gtgcataaatccattaatttatacagaacgttcttcttatttgtttgtgccttttttattgcctcaaatccggcc

SEQ ID NO: 520013 - DNA, 75 bp, synthetic construct
  source 1..75: mol_type = other DNA
atgcgcagcgccggcgtggatgcacagacactggcgtcctttctgcatgacacgcagctgcagcagcgcagcgga

SEQ ID NO: 520014 - DNA, 75 bp, synthetic construct
  source 1..75: mol_type = other DNA
ggctttcctttgctgagcaggtagtttctgaagcacattccgcaatagtcattctcgacagccggggggaatatt

SEQ ID NO: 520015 - DNA, 75 bp, synthetic construct
  source 1..75: mol_type = other DNA
atgattatatatggggcttagaacgttcaggaaaaacagcatactttgataaggaaaatggtttaccgggactaa

SEQ ID NO: 520016 - DNA, 75 bp, synthetic construct
  source 1..75: mol_type = other DNA
cgctgaaagtgacggtgaaagcaggagatgcggtcgggttcctcggtgctcaggatctggccgacgaagataact

SEQ ID NO: 520017 - DNA, 75 bp, synthetic construct
  source 1..75: mol_type = other DNA
aattatccactggagaacgtttactgcgcggtctggtttatctgccggaagatcgccagtcatccggactgaatc

SEQ ID NO: 520018 - DNA, 75 bp, synthetic construct
  source 1..75: mol_type = other DNA
gtaagttcttggcggctttgctatttattacgtgcgttgtttaattttaaattttctaggtctggtgatattatc

SEQ ID NO: 520019 - DNA, 75 bp, synthetic construct
  source 1..75: mol_type = other DNA
ctccgcacgctgacgcccgggccagcttcacaggacgggccggatgtgcagcaggcggtgacacaggccattgcc

SEQ ID NO: 520020 - DNA, 75 bp, synthetic construct
  source 1..75: mol_type = other DNA
tcattgcctgttgtttcacaatggtcatgggggagacccgttgctacttttgttcgttgtttaagtggaggtggg

SEQ ID NO: 520021 - DNA, 75 bp, synthetic construct
  source 1..75: mol_type = other DNA
cgattggaagtgagttgattaaaggaaacaaccccagagcggggggattatctggttcggccgttttagtcatat

SEQ ID NO: 520022 - DNA, 75 bp, synthetic construct
  source 1..75: mol_type = other DNA
tactatttctgctttatcctgctctttagatgcagagagcattacaggacaggggacaaacgttgaaacttcaaa

SEQ ID NO: 520023 - DNA, 75 bp, synthetic construct
  source 1..75: mol_type = other DNA
gttgatttaaattccatcaatattttgtttgaaactatatcagcagcagagtctaatgtaatgatagtcgcaggg

SEQ ID NO: 520024 - DNA, 75 bp, synthetic construct
  source 1..75: mol_type = other DNA
tcgtatggatacagatgatatttgtcatccggataggttttccatacaatttagttatctgaggaaacaccccga

SEQ ID NO: 520025 - DNA, 75 bp, synthetic construct
  source 1..75: mol_type = other DNA
tgaaaaaaagcttagggagaaggaaggccaagctatttgacgatgtcccagcgcagcctacaccacaaggtggta

SEQ ID NO: 520026 - DNA, 75 bp, synthetic construct
  source 1..75: mol_type = other DNA
gtttatccccgctggcgcggggaactctgcataaaaaccagcgtgaagaactttgcagtcggtttatccccgctg

SEQ ID NO: 520027 - DNA, 75 bp, synthetic construct
  source 1..75: mol_type = other DNA
acgcggtttatccccgctggcgcggggaactcacgaacgcggcacaccagggcgtctcatcgtccggtttatccc

SEQ ID NO: 520028 - DNA, 75 bp, synthetic construct
  source 1..75: mol_type = other DNA
ttactctctttcatatataagttacttatctattgaaaaaccatgcataaagattggaaaaaaaataatcaacac

SEQ ID NO: 520029 - DNA, 75 bp, synthetic construct
  source 1..75: mol_type = other DNA
acggtgatgttcttgatgccgtctgtgccgacttttacggaacggctgacctctctgcgaccgtctcaatggtac

SEQ ID NO: 520030 - DNA, 75 bp, synthetic construct
  source 1..75: mol_type = other DNA
ggtacgctggttctgtcttctgaaaatacttacacaggagtgacagatattcgcggcggcaatatcctcatgaac

SEQ ID NO: 520031 - DNA, 75 bp, synthetic construct
  source 1..75: mol_type = other DNA
caccttggtgttatggccggttacggtaacgaccataacaatacggactctgtgcgcaccggataccgctcaaaa

SEQ ID NO: 520032 - DNA, 75 bp, synthetic construct
  source 1..75: mol_type = other DNA
gatttgctggctggtgggcaatgtgttcagtgtgctggcttgctggtggactatcagccttttggttctatgcct

SEQ ID NO: 520033 - DNA, 75 bp, synthetic construct
  source 1..75: mol_type = other DNA
aacatacctcataaaaataatgattggtcaggttatataaaagctagttctatagcatcagaaaaaaatatggtt

SEQ ID NO: 520034 - DNA, 75 bp, synthetic construct
  source 1..75: mol_type = other DNA
cactacagaattttacggggattgccttatcaggcatggctcttgatgaattgctgagaaaacaacgggaaggag

SEQ ID NO: 520035 - DNA, 75 bp, synthetic construct
  source 1..75: mol_type = other DNA
ggcgcggggaactcgcacccatcaaggaataacgcgtttattttcccggtttatccccgctggcgcggggaactc

SEQ ID NO: 520036 - DNA, 75 bp, synthetic construct
  source 1..75: mol_type = other DNA
ctgtagttgcgtctgcagtggtatctggttctgctctagcatcggattggaccgataatcaaccagcaggtgata

SEQ ID NO: 520037 - DNA, 75 bp, synthetic construct
  source 1..75: mol_type = other DNA
gcggggaacacgctgcgggtcaatcaactggagtgcaaatccccggtttatccccgctggcgcggggaacactcg

SEQ ID NO: 520038 - DNA, 75 bp, synthetic construct
  source 1..75: mol_type = other DNA
tggcgcggggaacaccctggtggagattgacgcgaaatatgagaaaccggtttatccccgctggcgcggggaaca

SEQ ID NO: 520039 - DNA, 75 bp, synthetic construct
  source 1..75: mol_type = other DNA
aagcgatacaggagtaaccggagacaatattacgggatgtaataagcctgttttcaccggtaccacggctcctga

SEQ ID NO: 520040 - DNA, 75 bp, synthetic construct
  source 1..75: mol_type = other DNA
accttggttatgcacttggatggtgacgtttcaagtcatactgaatgggttgcgccagtaactgttactgttagt

SEQ ID NO: 520041 - DNA, 75 bp, synthetic construct
  source 1..75: mol_type = other DNA
gaagggctagtcaagccgggtcagatgagtgatgtaaatattgctactaaatggagcggtattccagtaactgag

SEQ ID NO: 520042 - DNA, 75 bp, synthetic construct
  source 1..75: mol_type = other DNA
gcattaaaaaattgctcaaggagaaggataaagacaaaaaagatgaacacggcggcatcggcacaccggcgaccc

SEQ ID NO: 520043 - DNA, 75 bp, synthetic construct
  source 1..75: mol_type = other DNA
ttactaccagctcgcagggcagtttatcagcggtacggacgttgtctgcgcccgctggcagacgtccgaatacgc

SEQ ID NO: 520044 - DNA, 75 bp, synthetic construct
  source 1..75: mol_type = other DNA
atttaagccgccttaccgacaaggaaaaggcggtttatctcaccatcgcgcagttttatctcgcgcagttcgtgg

SEQ ID NO: 520045 - DNA, 75 bp, synthetic construct
  source 1..75: mol_type = other DNA
gcggggaacacaaaaccaaacttctccataaattccatagccgcggtttatccccgctggcgcggggaacacacg

SEQ ID NO: 520046 - DNA, 75 bp, synthetic construct
  source 1..75: mol_type = other DNA
gacaggtcatcccggtttatccccgctggcgcggggaacacggatctgccagcgcctctgcggggcggtaaaccg

SEQ ID NO: 520047 - DNA, 75 bp, synthetic construct
  source 1..75: mol_type = other DNA
gacaagtgaaacgttaacatgccgagatattgatatatcagagcaaaaaacaaagccacagccacttttcacaga

SEQ ID NO: 520048 - DNA, 75 bp, synthetic construct
  source 1..75: mol_type = other DNA
atcaattatgttccttgtggataccaataacggtcccttgctcggaacattgatggccatagccctgtttggtcg

SEQ ID NO: 520049 - DNA, 75 bp, synthetic construct
  source 1..75: mol_type = other DNA
aaaactttattaagttaagtgactatgatgaggctgtgtcctatataaaaacgcaagaaaatgttactcaacgtg

SEQ ID NO: 520050 - DNA, 75 bp, synthetic construct
  source 1..75: mol_type = other DNA
ccagccaggcggaagcactgttgctcaaagtattctcttcagcgctggaaaagacccatcggtatcaattgcaaa

SEQ ID NO: 520051 - DNA, 75 bp, synthetic construct
  source 1..75: mol_type = other DNA
agaattagaactcgagttcaataaccttacagaatttccaaaggtaccggatggaataacccttatttccgtaaa

SEQ ID NO: 520052 - DNA, 75 bp, synthetic construct
  source 1..75: mol_type = other DNA
taaccttacagaatttccacaagtacctgatggaattaccctgatctccgtaaataataacctgatatcgcatat

SEQ ID NO: 520053 - DNA, 75 bp, synthetic construct
  source 1..75: mol_type = other DNA
ggaaataccaacaataccagacaccgctaaggtttttgattgtagtgagaataatataaaggaaattagatggtt

SEQ ID NO: 520054 - DNA, 75 bp, synthetic construct
  source 1..75: mol_type = other DNA
tggtgggataaatgcggctatcacatattctgagaccaagtctttacctacatcgggagtcagcaattcagtagg

SEQ ID NO: 520055 - DNA, 75 bp, synthetic construct
  source 1..75: mol_type = other DNA
actggccagacaggtggagccggaatacacaccggcgcgaaaagttcatctctatcactgcgaccaccgtggcct

SEQ ID NO: 520056 - DNA, 75 bp, synthetic construct
  source 1..75: mol_type = other DNA
cacggtgtggtgttcccgcctgaactggtgatgatgctggacaggctggagggagagatacgggcagaccgcgtg

SEQ ID NO: 520057 - DNA, 75 bp, synthetic construct
  source 1..75: mol_type = other DNA
gctggcgcagtgcgggctgacggtggagcggctggcggcacagatagagccggtttatttacctgagcgaaaagt

SEQ ID NO: 520058 - DNA, 75 bp, synthetic construct
  source 1..75: mol_type = other DNA
ggagtatgatgaatggggcaaccagcttaatgaggaaaacccgtattacctgcaccagccataccgtctgccggg

SEQ ID NO: 520059 - DNA, 75 bp, synthetic construct
  source 1..75: mol_type = other DNA
gacagaatctgttggtatcggtgcaggtgttgacgcttcagttatgactctggcttgtagaacgtggcaagaatg

SEQ ID NO: 520060 - DNA, 75 bp, synthetic construct
  source 1..75: mol_type = other DNA
tcgatttcaataaccttacagaatttccacaagtacctgatggaattaccctgatctccgtaaataataacctga

SEQ ID NO: 520061 - DNA, 75 bp, synthetic construct
  source 1..75: mol_type = other DNA
aaaaaataactcagaaaaagtttccaatgctgatattgtacatcataaagaaaataatatgaatcttgataatgt

SEQ ID NO: 520062 - DNA, 75 bp, synthetic construct
  source 1..75: mol_type = other DNA
ttttgagcttgatagggaaagaataaaagcaattaataaggttcttttagcaaataataaaaatgttaagcaacc

SEQ ID NO: 520063 - DNA, 75 bp, synthetic construct
  source 1..75: mol_type = other DNA
ttatttgccaattgatagctttagacggttgttaaccggtgtgccagatgatagaaatatattattgtacatgat

SEQ ID NO: 520064 - DNA, 75 bp, synthetic construct
  source 1..75: mol_type = other DNA
cacagtaatgaacttaacttatcatacctttttttgggttctgtgccgcctcttccagagtggattgaaatgctt

SEQ ID NO: 520065 - DNA, 75 bp, synthetic construct
  source 1..75: mol_type = other DNA
ctgatctccgtaaataataacctgatatcgcatattgactcatttccgccaaaggctaagaaaatttttatttgt

SEQ ID NO: 520066 - DNA, 75 bp, synthetic construct
  source 1..75: mol_type = other DNA
atgaactggcatatcttcgcaatcactatccagatttaagcgaagaagaggccgcgatgcttgcagctgacggac

SEQ ID NO: 520067 - DNA, 75 bp, synthetic construct
  source 1..75: mol_type = other DNA
aagaaaatgtggatagagcattggtgagattgtttaaatgtgttgagctccacagtaatgaacttaacttatcat

SEQ ID NO: 520068 - DNA, 75 bp, synthetic construct
  source 1..75: mol_type = other DNA
gagcaatgtttcaggtggggtaattatactctattgtttgaaaattatgaggcttatgataagacggggtctatc

SEQ ID NO: 520069 - DNA, 75 bp, synthetic construct
  source 1..75: mol_type = other DNA
acctttttttgggttctgtgccgcctcttccagagtggattgaaatgcttagccttattcataataaacttgatt

SEQ ID NO: 520070 - DNA, 75 bp, synthetic construct
  source 1..75: mol_type = other DNA
atgtttccattaaatgatctgtcgttaaaaactcagtcggttcaattaaataaaatcacatctaatactgaatct

SEQ ID NO: 520071 - DNA, 75 bp, synthetic construct
  source 1..75: mol_type = other DNA
agaatgtttaaatgtgttgagctccacaataatgaacttgacttatcatccctatttttgggttctgtaccgcct

SEQ ID NO: 520072 - DNA, 75 bp, synthetic construct
  source 1..75: mol_type = other DNA
aatactttttatggaatgtaatcctattaaagaggcatttttaatgccatggactctgacagggatctgctatga

SEQ ID NO: 520073 - DNA, 75 bp, synthetic construct
  source 1..75: mol_type = other DNA
ccctcacagtgtggccggataaccgcatcgcgaaggatgcgcactatgtttaccactacgatgaatacggcagac

SEQ ID NO: 520074 - DNA, 75 bp, synthetic construct
  source 1..75: mol_type = other DNA
ggcgaaatacagaaccaatagtaatgaacagcaggagagcaaatttgcccaggccacgttgcagtggggcggacc

SEQ ID NO: 520075 - DNA, 75 bp, synthetic construct
  source 1..75: mol_type = other DNA
aaatcaaagaagcggacggcagcgtcaatagctacagcgtacccttttccagcgtgccattactccagcgtcagg

SEQ ID NO: 520076 - DNA, 75 bp, synthetic construct
  source 1..75: mol_type = other DNA
caccaaaggggcgctggtattggcgcaattcagtgctcatgttggggccagagtattaatgaaaacatcaaagca

SEQ ID NO: 520077 - DNA, 75 bp, synthetic construct
  source 1..75: mol_type = other DNA
atgcctagaactcaccgacaacacagcctgttaacctctggtggagtgccatcgtttattggtgggctggtggtg

SEQ ID NO: 520078 - DNA, 75 bp, synthetic construct
  source 1..75: mol_type = other DNA
ccaattgggtactaactttcaattgatgggctatcgctattcgacgtcgggtttctacaccctttccgacaccat

SEQ ID NO: 520079 - DNA, 75 bp, synthetic construct
  source 1..75: mol_type = other DNA
ggcgtcagatgacaacatgctgccagacagcctgaaagggtttgcgcctgtggtgcgtggtatcgccaaaagcaa

SEQ ID NO: 520080 - DNA, 75 bp, synthetic construct
  source 1..75: mol_type = other DNA
ccttgcacttattattagggaagaaatataatcgtgaaaaaataaaatcggcctcagatttacactatacagtgt

SEQ ID NO: 520081 - DNA, 75 bp, synthetic construct
  source 1..75: mol_type = other DNA
cgcaaatatccgcagggactaccttcacaaagtcacaacggccgtcagcaaaaaccacgcaatgatagtcattga

SEQ ID NO: 520082 - DNA, 75 bp, synthetic construct
  source 1..75: mol_type = other DNA
atgtcgggctggatgctggcgtggctaaactacgccacgctgtcagatggcacagtctttgagcctgtaaacagt

SEQ ID NO: 520083 - DNA, 75 bp, synthetic construct
  source 1..75: mol_type = other DNA
tacttcctcgtccgaaaatcaccgggaccatgacggcccgtgtgaccagtgcaaaagaaggggatatctacgcct

SEQ ID NO: 520084 - DNA, 75 bp, synthetic construct
  source 1..75: mol_type = other DNA
atgggtaagacctatcagcaacgctacagctggtttaaacgtggtttcgacagcggcgatccggcacaatgcaat

SEQ ID NO: 520085 - DNA, 75 bp, synthetic construct
  source 1..75: mol_type = other DNA
ttttcaagttaaacaaaaggtatatatcgcatctagtagttcaggcaaattggattagagaaaaaatatctgaaa

SEQ ID NO: 520086 - DNA, 75 bp, synthetic construct
  source 1..75: mol_type = other DNA
aagtaatgatagctataccaggaaaaaaaattacgcctggatgacctctaacaccagtatcgataacgaagggca

SEQ ID NO: 520087 - DNA, 75 bp, synthetic construct
  source 1..75: mol_type = other DNA
tggtgggccagcagaaattattggaaatggacaggattttggcataacaatatcggttaatgatgtacatcactt

SEQ ID NO: 520088 - DNA, 75 bp, synthetic construct
  source 1..75: mol_type = other DNA
tgcaatgctgaaaatttcagcacttagcgaggtgcgagcaagctggcgcttgcatggtggcgtgcgacagggata

SEQ ID NO: 520089 - DNA, 75 bp, synthetic construct
  source 1..75: mol_type = other DNA
taccggaagtggtcaccgaagtcctgcaggagcatggtctcagaggctgggagtatgagttcactcttaaagccg

SEQ ID NO: 520090 - DNA, 75 bp, synthetic construct
  source 1..75: mol_type = other DNA
cgaactaacaagcattgaacgtttaggtgggcttcgggataaattagcgtcgaactttactattgatgattctta

SEQ ID NO: 520091 - DNA, 75 bp, synthetic construct
  source 1..75: mol_type = other DNA
gtgcaggaaataaaaaagtaacaaaattactaagtgatttagataaaatatctggagatattaaacgaagctacg

SEQ ID NO: 520092 - DNA, 75 bp, synthetic construct
  source 1..75: mol_type = other DNA
atgttaaaacaggggttttgtcaggtgccatttcatgtaacctatttggaaagaagataaagccccttaataaaa

SEQ ID NO: 520093 - DNA, 75 bp, synthetic construct
  source 1..75: mol_type = other DNA
actgactggcgcggatataccgttgtccctatgccacttcttatcgggaaaatcgaatcgcacttgatgcggcat

SEQ ID NO: 520094 - DNA, 75 bp, synthetic construct
  source 1..75: mol_type = other DNA
gtggccgatttgtcccgtttcgaaaaaggacaaaaaataacgccaggggtttatcgtgtcgatattgttctgaat

SEQ ID NO: 520095 - DNA, 75 bp, synthetic construct
  source 1..75: mol_type = other DNA
aggcagcaacaacttaactacgccttttcaggcagtttagttgcccattcgcagggcgttacgctggggcaatcg

SEQ ID NO: 520096 - DNA, 75 bp, synthetic construct
  source 1..75: mol_type = other DNA
agatctcactgcgccgggaatgctgttgcatgctcctgatgggattggcatggttagtgcacgggcgttacgaat

SEQ ID NO: 520097 - DNA, 75 bp, synthetic construct
  source 1..75: mol_type = other DNA
tgtccgtaccggcggacatgacccgtggagaaggttacgacaccagttatggcgaggtttatcattaccggccac

SEQ ID NO: 520098 - DNA, 75 bp, synthetic construct
  source 1..75: mol_type = other DNA
tatctcccagcaattaggcgagtacggttcgttttatttaagcggcagtcagcagacatactggcatacgaatca

SEQ ID NO: 520099 - DNA, 75 bp, synthetic construct
  source 1..75: mol_type = other DNA
gagcgccgattgattgtggagaattttggagcaaggaaatttgaacctttagcggtcaattctatagcttttggg

SEQ ID NO: 520100 - DNA, 75 bp, synthetic construct
  source 1..75: mol_type = other DNA
aaagtaggattctctatatatgtagaagaagcggattttgcatcagctgtagattggttaaaaatttataacctt

SEQ ID NO: 520101 - DNA, 75 bp, synthetic construct
  source 1..75: mol_type = other DNA
agtttgccatgagcaaatagggctgtctcacgagcttgggcatattattggatatcttactgatgaatactatag

SEQ ID NO: 520102 - DNA, 75 bp, synthetic construct
  source 1..75: mol_type = other DNA
aaagaatcctcaagagtgaacttatagccttagtttttaaatggcagcagcgagatggtgattttgatattgatg

SEQ ID NO: 520103 - DNA, 75 bp, synthetic construct
  source 1..75: mol_type = other DNA
cacagaacgccgccacagcgcagcgcgatgcgctgtcaggggaactggcaaaactggcgcaatgctggcagtcac

SEQ ID NO: 520104 - DNA, 75 bp, synthetic construct
  source 1..75: mol_type = other DNA
aggcaaacccgttgaaaacaccttcggggaaaatcgaaatttattctgaacgactggcgaagattgcggatacct

SEQ ID NO: 520105 - DNA, 75 bp, synthetic construct
  source 1..75: mol_type = other DNA
cgtgggacaaagacaatttaccgacgctgctcaaagccgtcgagggcctgaaaaaccaggagggtctggaggagc

SEQ ID NO: 520106 - DNA, 75 bp, synthetic construct
  source 1..75: mol_type = other DNA
gctcatccgcatcgagacagagaacggcgagcgggagaaagcgcagcgccgcagcctggcggagaagttacagca

SEQ ID NO: 520107 - DNA, 75 bp, synthetic construct
  source 1..75: mol_type = other DNA
taccggctgccggggcagcagtatgataaggagtcggggctgtactacaaccggaaccggtactacgatccgttg

SEQ ID NO: 520108 - DNA, 75 bp, synthetic construct
  source 1..75: mol_type = other DNA
catgcacataatgctgaaattagtgaaaaaatgccacaatttcttcattatattcagaaaaatcatccaaaacag

SEQ ID NO: 520109 - DNA, 75 bp, synthetic construct
  source 1..75: mol_type = other DNA
gttgtggtgagaatatcacctttcatcaggtggccaaatttagtgtgccactacaattatctgtcattactggat

SEQ ID NO: 520110 - DNA, 75 bp, synthetic construct
  source 1..75: mol_type = other DNA
gagctggaggacctggatgaccttatggatctggagttcctggatgacccggaactcctggagcgcgtgaaggta

SEQ ID NO: 520111 - DNA, 75 bp, synthetic construct
  source 1..75: mol_type = other DNA
gcgctccggcaagcgacactgacaagcaaagcatttctcagccaaatcaatttattaaacgcggtacgccgcaat

SEQ ID NO: 520112 - DNA, 75 bp, synthetic construct
  source 1..75: mol_type = other DNA
caaaccgaacgccgaatgatagagcttataagggaacaaaaagatttaattccagaaaaatatttacatcaatca

SEQ ID NO: 520113 - DNA, 75 bp, synthetic construct
  source 1..75: mol_type = other DNA
ctataccactaaaggcgaaagtatcatccataacaacgctaaagatgataatcggtcaagggataatgatatccg

SEQ ID NO: 520114 - DNA, 75 bp, synthetic construct
  source 1..75: mol_type = other DNA
ggattggaaatttgttttatgcttgttcacaagcatttcatgttgctaatgataacgctgcacatgatgtgcgta

SEQ ID NO: 520115 - DNA, 75 bp, synthetic construct
  source 1..75: mol_type = other DNA
tgttacccctgaatcagtgaatgctgataaaaaaacatgggttgccaccacgggtataaatagtcaaataacaat

SEQ ID NO: 520116 - DNA, 75 bp, synthetic construct
  source 1..75: mol_type = other DNA
aggataatatttataaatttaatatgatagaacaaagcggcctgctcgataattatagggcaaggtttaaagatg

SEQ ID NO: 520117 - DNA, 75 bp, synthetic construct
  source 1..75: mol_type = other DNA
tggcagagaacaaacctgacctgccggatggcaaaacagagcaggctgtcagggagattgccgggcaggaacgtg

SEQ ID NO: 520118 - DNA, 75 bp, synthetic construct
  source 1..75: mol_type = other DNA
gttatgaaattaaagggggcggcaatggtactttctatgtatcggggccaccggtttatgttgacctggtcgtta

SEQ ID NO: 520119 - DNA, 75 bp, synthetic construct
  source 1..75: mol_type = other DNA
gtctgcggctgctggttgaccgtgccattgtccgcatggtgtctgacagtctggagcggcagaacctgcaaatcc

SEQ ID NO: 520120 - DNA, 75 bp, synthetic construct
  source 1..75: mol_type = other DNA
gaaatcctggctgaccgggtgagtgaggaaagccgccgctggctggcatcgtgcggcctgacggtggagcagatg

SEQ ID NO: 520121 - DNA, 75 bp, synthetic construct
  source 1..75: mol_type = other DNA
aggcggaatttagctcactccttgcagatgcagaaagacaagttctggagggaagttcatttgttttatgttgtg

SEQ ID NO: 520122 - DNA, 75 bp, synthetic construct
  source 1..75: mol_type = other DNA
atgcagcaattcatctttcaggctgcctgcaatatgcatatctggagtctgtaaagaatgatattgactatcctg

SEQ ID NO: 520123 - DNA, 75 bp, synthetic construct
  source 1..75: mol_type = other DNA
atgcattacgtgtttttgatgcagcagcacgccacctcagcttcacccgcgcagccgatgagctttttgtgacgc

SEQ ID NO: 520124 - DNA, 75 bp, synthetic construct
  source 1..75: mol_type = other DNA
cgaaatatatctcgccggggcgtaaatacccgcagctgcacgtggcgctcccggccttcgaccgcaacggcagga

SEQ ID NO: 520125 - DNA, 75 bp, synthetic construct
  source 1..75: mol_type = other DNA
tgattcgacttctttttaagtatccggtatttacaatgaaaactatagttttgttaattccctattcgttgttaa

SEQ ID NO: 520126 - DNA, 75 bp, synthetic construct
  source 1..75: mol_type = other DNA
aatcgccatagaagcgcgatatctttcattaaattgtgcttctttgctggcagagcgtttgaactggcattcatt

SEQ ID NO: 520127 - DNA, 75 bp, synthetic construct
  source 1..75: mol_type = other DNA
ctttcagataatacactcgagaaagacgaaaattctcctgacaattgctttgaggttgtaaaatataacacatat

SEQ ID NO: 520128 - DNA, 75 bp, synthetic construct
  source 1..75: mol_type = other DNA
cggaacagatggccgcgcaactggaggcggaatacatcccggagaggaaacttcatctttaccactgtgaccacc

SEQ ID NO: 520129 - DNA, 75 bp, synthetic construct
  source 1..75: mol_type = other DNA
gaggatgctggacaggctggagggggaaatccgggcaaactgcgtgagcagtgaaagccgccagtggcttgcaca

SEQ ID NO: 520130 - DNA, 75 bp, synthetic construct
  source 1..75: mol_type = other DNA
ctggttaaagagacgatcgaactggcggaacaagttaatcataccgaagttcatctggttggcgcttatccggta

SEQ ID NO: 520131 - DNA, 75 bp, synthetic construct
  source 1..75: mol_type = other DNA
atttttttaagtgcgctttgcaggtaaatcctgcgggttacagtaagtatcgcgggaaagaatcacttagcgagg

SEQ ID NO: 520132 - DNA, 75 bp, synthetic construct
  source 1..75: mol_type = other DNA
cggcgaagacatttaaccagcgttttcctgtcggctccagtttcctgtatcacccgacaccaggtatgcccgaac

SEQ ID NO: 520133 - DNA, 75 bp, synthetic construct
  source 1..75: mol_type = other DNA
caaatcaatgtcacagcgtgaaatggcgagaatgtacggcgtatcaaaagcaacaattgcaggaattcttaacta

SEQ ID NO: 520134 - DNA, 75 bp, synthetic construct
  source 1..75: mol_type = other DNA
aatgcttatctggtaattccccaaattaattatactatggatttaaacatagaagactctagctcagaagagtta

SEQ ID NO: 520135 - DNA, 75 bp, synthetic construct
  source 1..75: mol_type = other DNA
agattggcgcagagtatcaaatattgttacgtcaaattgcttctattcgccctaaagcaacggagctggagaact

SEQ ID NO: 520136 - DNA, 75 bp, synthetic construct
  source 1..75: mol_type = other DNA
tcagctctttaaggaacatggtattgtcgtttttcctggatttgagatctgctcgagcgaaaaaattcatttcgt

SEQ ID NO: 520137 - DNA, 75 bp, synthetic construct
  source 1..75: mol_type = other DNA
tgcgtccgtacttctgcaatgctatttagaatcgctgacgaatgggaatactcagcaaaaaacgcagatatttga

SEQ ID NO: 520138 - DNA, 75 bp, synthetic construct
  source 1..75: mol_type = other DNA
atacggactctattctacagatacactacgaaccgttcagactgccacttttttttcaggtggcaaaactccgat

SEQ ID NO: 520139 - DNA, 75 bp, synthetic construct
  source 1..75: mol_type = other DNA
gctccagaacggcattgaccgcaataccgtcataaaaatgaccggtctgactgaagacgacctggcgcagatccg

SEQ ID NO: 520140 - DNA, 75 bp, synthetic construct
  source 1..75: mol_type = other DNA
cggtagccgccatgcagcgccacctggaggcagggcataaaaaactgccactggtgataccggtgctgttctata

SEQ ID NO: 520141 - DNA, 75 bp, synthetic construct
  source 1..75: mol_type = other DNA
actggtgtttaaacgctacgagcagcgttaagtttgcagtcaatgccggatgcggcgtgaacgccttatccggcc

SEQ ID NO: 520142 - DNA, 75 bp, synthetic construct
  source 1..75: mol_type = other DNA
gaacaaaaaagggggatggagtgaaaatgatatcagtcactatgtgagcaatgacataaggctggaaaatgatac

SEQ ID NO: 520143 - DNA, 75 bp, synthetic construct
  source 1..75: mol_type = other DNA
cacacacaatccgcaccgccgtcgattgtcagaagtggctggaattatgaatgaaagcagtttcaggaacccgaa

SEQ ID NO: 520144 - DNA, 75 bp, synthetic construct
  source 1..75: mol_type = other DNA
ttgaatgctttggtgctgaatggcttaataaaataaagtgtattttaaacagtttaaaattacccctgatagggc

SEQ ID NO: 520145 - DNA, 75 bp, synthetic construct
  source 1..75: mol_type = other DNA
atgctatcgtactatgtaaaaaagtttttgatgaactcaaacaacgtaacgatgtttctgaaacagatttggcat

SEQ ID NO: 520146 - DNA, 75 bp, synthetic construct
  source 1..75: mol_type = other DNA
tgtttgtacctgacaatggtattaaaacgtcttatagctcgtggttacgtaatggaatgacaacagttttgctac

SEQ ID NO: 520147 - DNA, 75 bp, synthetic construct
  source 1..75: mol_type = other DNA
attatttattttggcccaatactggctgaacgagtgatgccgttatcctttttcccagaacaattgcaactatac

SEQ ID NO: 520148 - DNA, 75 bp, synthetic construct
  source 1..75: mol_type = other DNA
tgcccgcacctctcaggcatctgacaatacccgcaaagtcgtgcaaagtaaaatgaactttacggcatggccaca

SEQ ID NO: 520149 - DNA, 75 bp, synthetic construct
  source 1..75: mol_type = other DNA
catatatcagcactctcgttggatgaagaaaaattaaatgatttgtttgtaatgcttattaacaacaaaaaaaat

SEQ ID NO: 520150 - DNA, 75 bp, synthetic construct
  source 1..75: mol_type = other DNA
ggggggatctcccggacaacagcgtccagccgggagccggaaatggcgaaccggtcacggcagaggtgctggcac

SEQ ID NO: 520151 - DNA, 75 bp, synthetic construct
  source 1..75: mol_type = other DNA
atggcgaaagccggtctgcgcgaacagaaccgactttcaggtgcaaatcgtaacgcactcattgcgggaggaatt

SEQ ID NO: 520152 - DNA, 75 bp, synthetic construct
  source 1..75: mol_type = other DNA
atggttagtgtgacgagttatacatatccaacggaaacagagaatgataatagccagtttcagagtcagagtcag

SEQ ID NO: 520153 - DNA, 75 bp, synthetic construct
  source 1..75: mol_type = other DNA
agagtatcctgttggggagtcacgcgatctggtggcagagcttaaagcggctgctcagcggttaggtgttaccga

SEQ ID NO: 520154 - DNA, 75 bp, synthetic construct
  source 1..75: mol_type = other DNA
ccgctggctggcatcgtgcggcctgacggtggagcagatgcaaaaccagatggacccggtgtacacgccggcgcg

SEQ ID NO: 520155 - DNA, 75 bp, synthetic construct
  source 1..75: mol_type = other DNA
ttttagagtcagccttcctatgacatatggtattagacatcttgcgtctctgataattgaattccagtctgctca

SEQ ID NO: 520156 - DNA, 75 bp, synthetic construct
  source 1..75: mol_type = other DNA
ctggtggcggaaagccaggggatgaggctatatgctggcgcagagcttgagcgcacagccgcagataccgcctgt

SEQ ID NO: 520157 - DNA, 75 bp, synthetic construct
  source 1..75: mol_type = other DNA
tgcaaacattcctcttaaagaggcatcctcgcaaagtgaggagcctcatcaactggaaaacagcaaaagcgaggg

SEQ ID NO: 520158 - DNA, 75 bp, synthetic construct
  source 1..75: mol_type = other DNA
atatagatattctacgtcagcagaatgcaaacattcctcttaaagaggcatcctcgcaaagtgaggagcctcatc

SEQ ID NO: 520159 - DNA, 75 bp, synthetic construct
  source 1..75: mol_type = other DNA
atggaggtgttaggaaatataaagatttcgaaaatctttttagtaaaattgtatttacgccagatgaatgtagtg

SEQ ID NO: 520160 - DNA, 75 bp, synthetic construct
  source 1..75: mol_type = other DNA
gattttaatattgctaatttcatttatcgaacatacggtgaggattatattcataacgactcagtggatgactct

SEQ ID NO: 520161 - DNA, 75 bp, synthetic construct
  source 1..75: mol_type = other DNA
gagatagtatcgagggtaatattgaagcatttgatgcgatggcacaaagtggcctgctcgataattgtagaacat

SEQ ID NO: 520162 - DNA, 75 bp, synthetic construct
  source 1..75: mol_type = other DNA
gatttggacgatgccgtctttaaatttgatggatgcagcgtcgatgatatcagtcaggggattgaccggatcctg

SEQ ID NO: 520163 - DNA, 75 bp, synthetic construct
  source 1..75: mol_type = other DNA
tattagctttgccgtgcctaagcactttttacgttaacgcgtcttctttacaggaacaattagcggctattgcgc

SEQ ID NO: 520164 - DNA, 75 bp, synthetic construct
  source 1..75: mol_type = other DNA
aaacatttttagggtcaggtgaaaattggagtaatattatgcctgaatcagatgtccctaatcaagtaaaaatga

SEQ ID NO: 520165 - DNA, 75 bp, synthetic construct
  source 1..75: mol_type = other DNA
acgaagacgcagatgacgatccgctcgaaaacctataagggcagcgggtttaatgaactgaagtttgacgatgcg

SEQ ID NO: 520166 - DNA, 75 bp, synthetic construct
  source 1..75: mol_type = other DNA
tacaggcactgccacgctgaatgccacgaataacattactcttaccgggagcagtacgagtgggaatgccatcaa

SEQ ID NO: 520167 - DNA, 75 bp, synthetic construct
  source 1..75: mol_type = other DNA
atcaagttgaccgggaacgggcacggtagcgcctccgggattctgtttgctggcaacaacaggctgacggccagt

SEQ ID NO: 520168 - DNA, 75 bp, synthetic construct
  source 1..75: mol_type = other DNA
aactggatacgttttttcgtgaaacacgccactcgctggattatctgtttgtcccgtttaattctgacagaaaat

SEQ ID NO: 520169 - DNA, 75 bp, synthetic construct
  source 1..75: mol_type = other DNA
ataacagcagaacagcagaacagcagaacagcagaacaaaagaaagagccaaaaaatgacggtcagatattatat

SEQ ID NO: 520170 - DNA, 75 bp, synthetic construct
  source 1..75: mol_type = other DNA
aatcgttatcaaaaatgcaaagtattgttcagggcgttcttgactcgtttaagtgggttggtaatcagcaacact

SEQ ID NO: 520171 - DNA, 75 bp, synthetic construct
  source 1..75: mol_type = other DNA
aagaataacagtaaattcgataatatttctcagacatggcaagctgatgtacagaaacgacaagcactggaaatg

SEQ ID NO: 520172 - DNA, 75 bp, synthetic construct
  source 1..75: mol_type = other DNA
taccgggcagaccgcgatttactccgccggtgagcatctggagctctgctgtggtaaggcaaggctggtgctgac

SEQ ID NO: 520173 - DNA, 75 bp, synthetic construct
  source 1..75: mol_type = other DNA
acttcggtggctctgatgcagtcctcgcagatcggtttgcataaatcgttgagggtcgggctgggttatgacgtc

SEQ ID NO: 520174 - DNA, 75 bp, synthetic construct
  source 1..75: mol_type = other DNA
agatagagacggtgggcagtaaccagatcattaacgtgggttctgttcaggtggaaacgattggacttgttcgtg

SEQ ID NO: 520175 - DNA, 75 bp, synthetic construct
  source 1..75: mol_type = other DNA
aatgttaatactattgacggaaaattaaaggatcccgctaaaatatttgccctgcataactctgtgagaaaaacg

SEQ ID NO: 520176 - DNA, 75 bp, synthetic construct
  source 1..75: mol_type = other DNA
aggagtggcttggcaaatatggtacggctcgagtcaaattgaatgccgataaagatttctcgctgaaggactctt

SEQ ID NO: 520177 - DNA, 75 bp, synthetic construct
  source 1..75: mol_type = other DNA
tctgtgactgcgggaacgtatgcaatcaccgcaacggcaggaaatgaccagatgtcggatgcgcagagcatcacg

SEQ ID NO: 520178 - DNA, 75 bp, synthetic construct
  source 1..75: mol_type = other DNA
ggtaacgcttctgaggctaacattcacgatatttcagtgaatgttgataaccaactggctgatggacagtccgcc

SEQ ID NO: 520179 - DNA, 75 bp, synthetic construct
  source 1..75: mol_type = other DNA
cgtctaagtacggaaaatactgcggttgctactgacaataatgcagaaaaaaatatcgcgtcgtttgccgcgaat

SEQ ID NO: 520180 - DNA, 75 bp, synthetic construct
  source 1..75: mol_type = other DNA
cgatgaaggtaaagccgagctgcgtattgtttctgtggttgcaggaacgtatgcaatcacagccacggcaggaaa

SEQ ID NO: 520181 - DNA, 75 bp, synthetic construct
  source 1..75: mol_type = other DNA
cggtcgcatacgataacaaaggcaatgcctcgaaacgcgtgcagacagcggtggtcattaccggagcgggtatga

SEQ ID NO: 520182 - DNA, 75 bp, synthetic construct
  source 1..75: mol_type = other DNA
acggatagcattcgcgagcgtcgggtactcgcaggcagccgttatgatctggttgaacgtaataacaatattgtt

SEQ ID NO: 520183 - DNA, 75 bp, synthetic construct
  source 1..75: mol_type = other DNA
ctggaaaaaatcgccggatattgaggattatcaagagcgtccggctaatggttgggatatccgcgcagagggata

SEQ ID NO: 520184 - DNA, 75 bp, synthetic construct
  source 1..75: mol_type = other DNA
agcagattgtctttgccctgaagcaggctgagctgggtacgcccgtaccggaagtctgccgcaagctgggcatct

SEQ ID NO: 520185 - DNA, 75 bp, synthetic construct
  source 1..75: mol_type = other DNA
cggaacaaagcaatggcacctatgttacgacgttaaccacaggctctgcagccggtcaactggttatctggcctc

SEQ ID NO: 520186 - DNA, 75 bp, synthetic construct
  source 1..75: mol_type = other DNA
aacgttacaacaaacgctgaagtttgtcgccggaccgcttgatacagcgcattcaaccatcaccctgaacccgga

SEQ ID NO: 520187 - DNA, 75 bp, synthetic construct
  source 1..75: mol_type = other DNA
ggtcttcaccaccggtacgcaatcaggtgaagcaaccattacggtgagcgttgatggcatgagcaaaaccgtcac

SEQ ID NO: 520188 - DNA, 75 bp, synthetic construct
  source 1..75: mol_type = other DNA
tttcaggctggacggataatggcgacgggacgtggactgcgcagatttctctgggtactacggcgggtgaattaa

SEQ ID NO: 520189 - DNA, 75 bp, synthetic construct
  source 1..75: mol_type = other DNA
gtaataggcagttgatactctcatcacatgaagataatatttcttcatatctcaggtttagattcatgcgtgcag

SEQ ID NO: 520190 - DNA, 75 bp, synthetic construct
  source 1..75: mol_type = other DNA
aaacaatcattagtattgttgatacgtcaacaaaagaaaaatgagctgatttcacttcctgaaggatgggaatca

SEQ ID NO: 520191 - DNA, 75 bp, synthetic construct
  source 1..75: mol_type = other DNA
tcgcgtaattattgataatgccagaatagaaaatttcataagcaaaaatgaaaagctattaaccgaggtaattaa

SEQ ID NO: 520192 - DNA, 75 bp, synthetic construct
  source 1..75: mol_type = other DNA
cttctccgattgtcgaagttgaaccgcaaggtagcggtctgtatgttattattcccaaccctcagattattgaca

SEQ ID NO: 520193 - DNA, 75 bp, synthetic construct
  source 1..75: mol_type = other DNA
acatacaacttaacttcgttaaaaacatgctcagaaatttccctgctgaaaacctgtcagagaaaggatctgcgc

SEQ ID NO: 520194 - DNA, 75 bp, synthetic construct
  source 1..75: mol_type = other DNA
agattgttcgcagggactatccggcaggcgttgcgcttgctgatatttgtgcccgtctgaacggacgagcgccga

SEQ ID NO: 520195 - DNA, 75 bp, synthetic construct
  source 1..75: mol_type = other DNA
cccatcaatggcaaataccaaaataattgcacctcatgatgacatcattgcacacacagatttttacacatggca

SEQ ID NO: 520196 - DNA, 75 bp, synthetic construct
  source 1..75: mol_type = other DNA
ggaatcgcacgccacctcccccgcccgcgagcgcaataacctcggacgggatctgaacccgctgggacagctggc

SEQ ID NO: 520197 - DNA, 75 bp, synthetic construct
  source 1..75: mol_type = other DNA
ttcctccctggcgcgcgcgttcgggcatgaagcatacgagatgattattcccgtcggcgctcctggtgttatcga

SEQ ID NO: 520198 - DNA, 75 bp, synthetic construct
  source 1..75: mol_type = other DNA
cattgacgaggaaatcaaccggtctgaatttcattcaaaagagggattcaatcacatctcaaattcaagcgatag

SEQ ID NO: 520199 - DNA, 75 bp, synthetic construct
  source 1..75: mol_type = other DNA
tcgcataatgattgcatatggataaaaatacactctaaaaatttgcaatctgcagtagaaacaataagagaaaaa

SEQ ID NO: 520200 - DNA, 75 bp, synthetic construct
  source 1..75: mol_type = other DNA
cacacacagatttttacacatggcaagcggttttgagcgatgcttttcatacacaatcaagatctgaagcatcaa

SEQ ID NO: 520201 - DNA, 75 bp, synthetic construct
  source 1..75: mol_type = other DNA
tggatatccgcatcccgtatgcgaccgacccggcgggaaaccagctgcgggacccggagctacacccggacagca

SEQ ID NO: 520202 - DNA, 75 bp, synthetic construct
  source 1..75: mol_type = other DNA
acgcgccggtatcgatgaggccatcagtcgtgagcagcttatccccctcgaccgtgagaaggggctgttcacatc

SEQ ID NO: 520203 - DNA, 75 bp, synthetic construct
  source 1..75: mol_type = other DNA
ccgctttgccgggaaagcgcggttaatgtcatttggtagctacgatcttgtgagcctcgccgaagcacgtgagag

SEQ ID NO: 520204 - DNA, 75 bp, synthetic construct
  source 1..75: mol_type = other DNA
ataccatgtcgacaatactgcatgagcaaggatttaacagtgcctggattgaaatgcaattagcgcatgttgata

SEQ ID NO: 520205 - DNA, 75 bp, synthetic construct
  source 1..75: mol_type = other DNA
ctgaatataaccctgcacctgatttggccattgcattagctgtcccgaagcaaaaacatcatccttatctttcgg

SEQ ID NO: 520206 - DNA, 75 bp, synthetic construct
  source 1..75: mol_type = other DNA
ttatcggccagcgccctatgggggacattacgccgcaagaattgctacaggttctcaaacgcattgagcaacgtg

SEQ ID NO: 520207 - DNA, 75 bp, synthetic construct
  source 1..75: mol_type = other DNA
tcatgcgcagtatctggagaagcggcgagaaatgatgcaatggtatgcggatttccttgatggtataattgcaac

SEQ ID NO: 520208 - DNA, 75 bp, synthetic construct
  source 1..75: mol_type = other DNA
ataccatgtcgacaatattgcatgaacaggggtttgatagtgcttggattgaaatgcaactggcgcatgttgata

SEQ ID NO: 520209 - DNA, 75 bp, synthetic construct
  source 1..75: mol_type = other DNA
gaattacagcttgcacatgtagataaaaattcgatacgtggtatttataaccatgcgcaaggtagtgactccaac

SEQ ID NO: 520210 - DNA, 75 bp, synthetic construct
  source 1..75: mol_type = other DNA
acattcgagcaagatgtgttcccgttcattggtaaacgcccaatcagtgaaatcaaaccgttagagttgcttgaa

SEQ ID NO: 520211 - DNA, 75 bp, synthetic construct
  source 1..75: mol_type = other DNA
agcgaggttgaccttgagaaaggtatttgggaaattcctgcagaacggatgaagatgcgtaggcctcatattgtt

SEQ ID NO: 520212 - DNA, 75 bp, synthetic construct
  source 1..75: mol_type = other DNA
tttcaaaagaaagcgtatctcaagtaattgagttacttggttacaaaggacgtgctacaggtcacggttttagac

SEQ ID NO: 520213 - DNA, 75 bp, synthetic construct
  source 1..75: mol_type = other DNA
ctgaatacaatcctgcgcctgatttagccatcgctctggctgttcctaagcaaaaacatcatccttttttatccg

SEQ ID NO: 520214 - DNA, 75 bp, synthetic construct
  source 1..75: mol_type = other DNA
agagttacaggacacggttttagacatagtttatcgacaatcttgcatgagaaaggctataacagcaattggata

SEQ ID NO: 520215 - DNA, 75 bp, synthetic construct
  source 1..75: mol_type = other DNA
agggagatgatgcagtggtatgcagattatataggtgagttgcataaaagccgggaagtaatcaaagagtcgatt

SEQ ID NO: 520216 - DNA, 75 bp, synthetic construct
  source 1..75: mol_type = other DNA
aaggagatgatgcagtggtatgcagattatattggtaatttaggaaaagaagggattgttatcaaagggggattt

SEQ ID NO: 520217 - DNA, 75 bp, synthetic construct
  source 1..75: mol_type = other DNA
gcaagagttgcgtttcgcgcattgggaggatattgattttgaggcaaaattatgggagatcccggcagaagtaat

SEQ ID NO: 520218 - DNA, 75 bp, synthetic construct
  source 1..75: mol_type = other DNA
ccatcccggaatccagaaaatggcccattcacggcgactgcagccggccggagaccatcagttatctttcgcgtc

SEQ ID NO: 520219 - DNA, 75 bp, synthetic construct
  source 1..75: mol_type = other DNA
gaaatggcttcgttctatgactctatcccggagtccagaaagtggcccatccacggtgactgcagccgacctgaa

SEQ ID NO: 520220 - DNA, 75 bp, synthetic construct
  source 1..75: mol_type = other DNA
aaatatgctgggtggaagaggcgcagactgtatcgcaggatagttgggatatccttggcccgaccgttcgcgcca

SEQ ID NO: 520221 - DNA, 75 bp, synthetic construct
  source 1..75: mol_type = other DNA
gaaaggattcaatagtgcatggattgaaatgcaacttgcacatacggacaaaaacagcattcgtggtacatacaa

SEQ ID NO: 520222 - DNA, 75 bp, synthetic construct
  source 1..75: mol_type = other DNA
tcattggtaagcgccccatcagtgagataaaaccactggaacttcttgaagtgctgcgacgaatagagaagcgtg

SEQ ID NO: 520223 - DNA, 75 bp, synthetic construct
  source 1..75: mol_type = other DNA
aatggtgtgattgaacgggcacgcgccggtatcgatgaggccatcagccgtgagcagcttatcccccctcgatcg

SEQ ID NO: 520224 - DNA, 75 bp, synthetic construct
  source 1..75: mol_type = other DNA
gcaaatgagtttgaaaaacactttcgaggccgttgctcgcgagtggcatcagacgaaagccgatcgctggtcact

SEQ ID NO: 520225 - DNA, 75 bp, synthetic construct
  source 1..75: mol_type = other DNA
ctataagctggctgatggcggaggtatgtatctgctgattaacgctaatggttccaaatactggcgtatgaagta

SEQ ID NO: 520226 - DNA, 75 bp, synthetic construct
  source 1..75: mol_type = other DNA
agtagtgttggtaaaactatcagatgattgcacaaataatcaaaacgataaacttcccttccctctggagaatgg

SEQ ID NO: 520227 - DNA, 75 bp, synthetic construct
  source 1..75: mol_type = other DNA
atgtttattgatgaagagcagttgaaagcattcaattacccagaaaatttaagagatacaatacaaaaatatgga

SEQ ID NO: 520228 - DNA, 75 bp, synthetic construct
  source 1..75: mol_type = other DNA
atggtttaccgtgatttgcgtgaacataccccccttggaagccagatgtgctgcaacgttattttttctgtttgt

SEQ ID NO: 520229 - DNA, 75 bp, synthetic construct
  source 1..75: mol_type = other DNA
tggctgtcagggatattgccggacaggagcgtgaccggtctgccatatctgaacgggaaaccgcactgccggaga

SEQ ID NO: 520230 - DNA, 75 bp, synthetic construct
  source 1..75: mol_type = other DNA
actcagtcggtgcacaaacagcaggcgggattctcacagacgtcgcagatccataaaaaagataaccatatccgc

SEQ ID NO: 520231 - DNA, 75 bp, synthetic construct
  source 1..75: mol_type = other DNA
atcctgcaacagtctatataggtccttttataaaaaaaatatctataaaggatgagccacaattcgcaacgtatt

SEQ ID NO: 520232 - DNA, 75 bp, synthetic construct
  source 1..75: mol_type = other DNA
gggtttactgatatttctgcgcataagaaatatttaaaaagcttaaatattgacacggcaatatatttaataaat

SEQ ID NO: 520233 - DNA, 75 bp, synthetic construct
  source 1..75: mol_type = other DNA
acgatgggcgttgatatgggagaaaacaaccttgccgcccacagtctgggtaagctgtttggtggtgaacaactt

SEQ ID NO: 520234 - DNA, 75 bp, synthetic construct
  source 1..75: mol_type = other DNA
acctgaacgcgtcaaagctatcccgtcacttggacagatgcgttatctaagtgcggttaaatatgcttcagcggt

SEQ ID NO: 520235 - DNA, 75 bp, synthetic construct
  source 1..75: mol_type = other DNA
tgcggtctcttttgagtcaccggaatataccgctgacgtcgacgcgatgggtacgctgcgcctgctcgaggcgat

SEQ ID NO: 520236 - DNA, 75 bp, synthetic construct
  source 1..75: mol_type = other DNA
gcaaaggatttggcgaagtttggcataagcgtcaatgcttattgccctggtattgtgcggacaccaatgatggaa

SEQ ID NO: 520237 - DNA, 75 bp, synthetic construct
  source 1..75: mol_type = other DNA
aagtgcctcccgtcgcctgcagctctcccgtggcgacattgacattgccgatgcgctgccggtggatcaactcaa

SEQ ID NO: 520238 - DNA, 75 bp, synthetic construct
  source 1..75: mol_type = other DNA
ccacgcgcagcgctattgcgctttggcttcggactatggcgttggccgggtaagctgcgccaactggcgacacta

SEQ ID NO: 520239 - DNA, 75 bp, synthetic construct
  source 1..75: mol_type = other DNA
aaataagaaagattggaatactgcggctgatgagtctcatcgaactaagataggtgaaggccgaaataatgatac

SEQ ID NO: 520240 - DNA, 75 bp, synthetic construct
  source 1..75: mol_type = other DNA
ttaatgcaggatgaattgttcatcgattatattgatgttgaatggagtttaagagcaaagagtaaaggttataat

SEQ ID NO: 520241 - DNA, 75 bp, synthetic construct
  source 1..75: mol_type = other DNA
cagttcgctcggctctacacaatacggatttggtgacgctttaacctctaatcaactgggggtcataaatggcaa

SEQ ID NO: 520242 - DNA, 75 bp, synthetic construct
  source 1..75: mol_type = other DNA
gtccggctggggtatgcggcggatgacctcggttttgtgggtgaaccgtatcaggaggcgagacaacgttatatc

SEQ ID NO: 520243 - DNA, 75 bp, synthetic construct
  source 1..75: mol_type = other DNA
tagggccggaagctgcgggcagccttgtgcagctgattgaccagcgggtgcaggcggtgatgctgtccatgcgac

SEQ ID NO: 520244 - DNA, 75 bp, synthetic construct
  source 1..75: mol_type = other DNA
cgcggtgagtttatccgtggatgggacgacgggcgcaagattgacgaggggcgtaagttgctttcatggcagaaa

SEQ ID NO: 520245 - DNA, 75 bp, synthetic construct
  source 1..75: mol_type = other DNA
tgccacaccgccagcaggctggttaaagtgcgacgggcgcacctttacaaaagaacaatatcctgttctggccag

SEQ ID NO: 520246 - DNA, 75 bp, synthetic construct
  source 1..75: mol_type = other DNA
ccgcacaaggggcaacgctgttaagaacagcaatgctggattattataaccaggacactacgggaacctcgggga

SEQ ID NO: 520247 - DNA, 75 bp, synthetic construct
  source 1..75: mol_type = other DNA
gcggttgaagaaggccgacttgagcaaatgctcaataaaagaaagcaaacacaacagttaataaacgacataact

SEQ ID NO: 520248 - DNA, 75 bp, synthetic construct
  source 1..75: mol_type = other DNA
aagggctgaatctgctacccaatcacaacgcaaggccgccgccgatgctattgctgctgagcgagcttaccagct

SEQ ID NO: 520249 - DNA, 75 bp, synthetic construct
  source 1..75: mol_type = other DNA
aaaaaaaagatacttcattatacaataactgcaattaaagatggtgttagtaaaaaattcggaccttgtaaaaaa

SEQ ID NO: 520250 - DNA, 75 bp, synthetic construct
  source 1..75: mol_type = other DNA
caaaagttcttatgaatgcggccattgtcaacggaattaagacggcggcaaacggtatgtccggtgcgggaggat

SEQ ID NO: 520251 - DNA, 75 bp, synthetic construct
  source 1..75: mol_type = other DNA
cgtctggcggccacacaggaacgcctgaacagaaatattgctgccagaaccgcagcccagaatgcgctgaacagt

SEQ ID NO: 520252 - DNA, 75 bp, synthetic construct
  source 1..75: mol_type = other DNA
atggctgttgctaacggcgtcagttcaattggttctctcttcagctttggcgcatcttccgccgctgccgccagt

SEQ ID NO: 520253 - DNA, 75 bp, synthetic construct
  source 1..75: mol_type = other DNA
caacggagaccatgattatatgaaattcaatgcttccgttattaacaatattcaagagtacacaaatcagaaagt

SEQ ID NO: 520254 - DNA, 75 bp, synthetic construct
  source 1..75: mol_type = other DNA
cggacagcgcgctctaccaggcaaaaaagacaagggtgcaaccaagttgtgggcgcacaagtatttcagaattga

SEQ ID NO: 520255 - DNA, 75 bp, synthetic construct
  source 1..75: mol_type = other DNA
gtgctacgctggcgctcggggtgacttactggctgctgcgcgagcgcgatgaccggaccgccggggaacgctcag

SEQ ID NO: 520256 - DNA, 75 bp, synthetic construct
  source 1..75: mol_type = other DNA
gctaatattttgtatacactaaatgatcgtagttatcgtttcagatatgagcattatcctatcttcggtgaagaa

SEQ ID NO: 520257 - DNA, 75 bp, synthetic construct
  source 1..75: mol_type = other DNA
caattaagtcgtcgttgagacgtgatccagatgtattaatggttggtgaaattcgagatcccatatcatctaatg

SEQ ID NO: 520258 - DNA, 75 bp, synthetic construct
  source 1..75: mol_type = other DNA
cccacgcgctacagcgtgccgggcgaacattgttgagcgacaaacccgttgccgcgttcaaaaattacggcaaaa

SEQ ID NO: 520259 - DNA, 75 bp, synthetic construct
  source 1..75: mol_type = other DNA
cctacctgtaattaacaggggggctaatgattcgttgcatcctcaagtattagggaaggtgcgaacaagttcctg

SEQ ID NO: 520260 - DNA, 75 bp, synthetic construct
  source 1..75: mol_type = other DNA
cacctgaagagcgttatgcagcagtaatttatgggaaggttttaccacacagccgattaataaggaaaggactat

SEQ ID NO: 520261 - DNA, 75 bp, synthetic construct
  source 1..75: mol_type = other DNA
gatggaagaagacttatcgttgaatgcctttgttaataaggctctggaaaaagaagtcagcaatcatcgcgcagg

SEQ ID NO: 520262 - DNA, 75 bp, synthetic construct
  source 1..75: mol_type = other DNA
atcccattcatggcagggctctgttttgtcggcctgcatcaccacaaacagtacccgctgatgtccccggtgcag

SEQ ID NO: 520263 - DNA, 75 bp, synthetic construct
  source 1..75: mol_type = other DNA
gcttacaattatcagtgcgctatctgcggctttaacatgcgccatgacaatgcgccaattgctctggaagccgct

SEQ ID NO: 520264 - DNA, 75 bp, synthetic construct
  source 1..75: mol_type = other DNA
gcccgaattcttcgagagttagctcatgaataccaagcggaagcagagttgataatagaacagcacagtaaaaaa

SEQ ID NO: 520265 - DNA, 75 bp, synthetic construct
  source 1..75: mol_type = other DNA
agcgttagctaatcagcaatggcttagtgtatattccgtttggagagaaaaacgtttcacctcgccgggaatttc

SEQ ID NO: 520266 - DNA, 75 bp, synthetic construct
  source 1..75: mol_type = other DNA
gtgggataaatgcggctatcacatattctgagaccaagtctttacctacatcgggagtcagcaattcagtaggtg

SEQ ID NO: 520267 - DNA, 75 bp, synthetic construct
  source 1..75: mol_type = other DNA
cacgacgaccactgcggcggatggcgcagttggtagtagttttgcgttgagcatggaagtagtcattggggacct

SEQ ID NO: 520268 - DNA, 75 bp, synthetic construct
  source 1..75: mol_type = other DNA
acactgtattatgtcaacactgaaagtatacgtgttccgcgcagaacgcgcaatttcggcacgaattttgacgta

SEQ ID NO: 520269 - DNA, 75 bp, synthetic construct
  source 1..75: mol_type = other DNA
tttccggaccgcgtgatgccacggggccgggtgttctacggtatgacccgtgattacatgagcaatcttgcggcg

SEQ ID NO: 520270 - DNA, 75 bp, synthetic construct
  source 1..75: mol_type = other DNA
tggtcacgaacattcaaaccaagggcaaaccaaggtttacacgggcaagatgaaagtttctgatttacttccagt

SEQ ID NO: 520271 - DNA, 75 bp, synthetic construct
  source 1..75: mol_type = other DNA
agctgtgtgaagccctgttggggcgtggcagtgaggttactcgcccgccgcgtctggcgctggaaggcgaaacgc

SEQ ID NO: 520272 - DNA, 75 bp, synthetic construct
  source 1..75: mol_type = other DNA
gtccaagaattcttttccaccaaaatgatggtcatgaatatggtaaagtatttttaataagcggaactgaaaaca

SEQ ID NO: 520273 - DNA, 75 bp, synthetic construct
  source 1..75: mol_type = other DNA
gagaacataggttcaatagctcctaaaaacttcactgacacagttgttatagagataaaggatgatgcctggagg

SEQ ID NO: 520274 - DNA, 75 bp, synthetic construct
  source 1..75: mol_type = other DNA
attgaaagtgaaactggagatctgattccaactgctcagccgatagttattaacgcgggtgggtatcctgtttac

SEQ ID NO: 520275 - DNA, 75 bp, synthetic construct
  source 1..75: mol_type = other DNA
ttggttttgtgtttaacaatatttatacaagcacagctttacaggggagacaatggaaaatttttcagcaaggga

SEQ ID NO: 520276 - DNA, 75 bp, synthetic construct
  source 1..75: mol_type = other DNA
gctcattcaagggtgattgcactggctcaatattcacaatattgaataatactatacgcgctgacaccaacctaa

SEQ ID NO: 520277 - DNA, 75 bp, synthetic construct
  source 1..75: mol_type = other DNA
tacttcacaaatatacagacatgaattgactcagcgcagcgtatcaggaaggttaactattgaatgcaacataac

SEQ ID NO: 520278 - DNA, 75 bp, synthetic construct
  source 1..75: mol_type = other DNA
cccgaccactggcgcggcatacgttgcagcagatgctgataactgtgctgtagctctgcaaaatcaagtcgctgg

SEQ ID NO: 520279 - DNA, 75 bp, synthetic construct
  source 1..75: mol_type = other DNA
ccatcaggcatcagaaggccttttcgataatgataccggcgctctgctctccctgggcagggaaatgttccgcct

SEQ ID NO: 520280 - DNA, 75 bp, synthetic construct
  source 1..75: mol_type = other DNA
tgatgaaatcaatggtgttaaaggtaaaaacacgaggctctgttattaagcaagaggacccaaataagggggcta

SEQ ID NO: 520281 - DNA, 75 bp, synthetic construct
  source 1..75: mol_type = other DNA
ataatagtaatagacaagcgaaacagtatggttatttttttaacattgatgaagctaaatggaaattagatagtg

SEQ ID NO: 520282 - DNA, 75 bp, synthetic construct
  source 1..75: mol_type = other DNA
caaaagcggaccaacaacgcactgaagaacgtgcaatagctattgaagcggtcgcagaacgccgggtagaaacaa

SEQ ID NO: 520283 - DNA, 75 bp, synthetic construct
  source 1..75: mol_type = other DNA
tggctctgtgcggatgatgtcgctattctggacattcacatccttagggcgggattacttgcaggttttttcccg

SEQ ID NO: 520284 - DNA, 75 bp, synthetic construct
  source 1..75: mol_type = other DNA
tctcggttgcactaaacaggctggatgtagagatgccgccgacggattcgggccgtgctctcagagactggctga

SEQ ID NO: 520285 - DNA, 75 bp, synthetic construct
  source 1..75: mol_type = other DNA
tggctgaatggatgcagacgctgaaggaaaccgggttcgacatccgggcatatcgtgacgcggcggatcagcgtg

SEQ ID NO: 520286 - DNA, 75 bp, synthetic construct
  source 1..75: mol_type = other DNA
cagtgcagttacacccggcgaaagtgcaggaaggcgttgatatcgctatcgaaaatgatgtgattgtcgctatcg

SEQ ID NO: 520287 - DNA, 75 bp, synthetic construct
  source 1..75: mol_type = other DNA
cctcatatttcaagtaacttttcggttaggggtaataatttctatatgtatagtagttgtatttgccataattaa

SEQ ID NO: 520288 - DNA, 75 bp, synthetic construct
  source 1..75: mol_type = other DNA
taatatttttttcttttcagactagtgcaacccttgtttggcgaactaaccaggaaagtgagagcgtttcgcgat

SEQ ID NO: 520289 - DNA, 75 bp, synthetic construct
  source 1..75: mol_type = other DNA
cagagtgaagatgaggggcttatcaccctctggcattacgatgcgtcagaccgtatcacccggcgcacggtgaac

SEQ ID NO: 520290 - DNA, 75 bp, synthetic construct
  source 1..75: mol_type = other DNA
gcggaagatgcgcactatgtctaccgctacgatgaatacggcaggctggcggagaagacggaccgcatcccggaa

SEQ ID NO: 520291 - DNA, 75 bp, synthetic construct
  source 1..75: mol_type = other DNA
ttgctgcagcagtcattgccgccatcgctggcgctttcggcctgggccatattcgcggctcaagcaaagcagaag

SEQ ID NO: 520292 - DNA, 75 bp, synthetic construct
  source 1..75: mol_type = other DNA
tatctgatattctttctggttttgtatctggtcaatttggaaattcaggaaatataagctctaacatatccagta

SEQ ID NO: 520293 - DNA, 75 bp, synthetic construct
  source 1..75: mol_type = other DNA
gggatatataagtcatgtgaagattatgatcttttctttaggttaatgtccattggaaaggtgcataacttacct

SEQ ID NO: 520294 - DNA, 75 bp, synthetic construct
  source 1..75: mol_type = other DNA
taaagctgggcgataccctgatgaacagattacctaaaatggcggctattcaggagcagtacatcttcccgatta

SEQ ID NO: 520295 - DNA, 75 bp, synthetic construct
  source 1..75: mol_type = other DNA
cgaaagtcgctatctttacgacccgctgggccgcagggtggcaaaacgggtatggcggcgtgaacgggacctgac

SEQ ID NO: 520296 - DNA, 75 bp, synthetic construct
  source 1..75: mol_type = other DNA
cgaactcatccgcatcagcagcccgcgccagacccggagttacagctacagcaccaccggcaggctgaccggcgt

SEQ ID NO: 520297 - DNA, 75 bp, synthetic construct
  source 1..75: mol_type = other DNA
tactggtgttaataactctcctacgcttttaaaacgggatgtaacgacagatgttgttatgaatgatggtgatat

SEQ ID NO: 520298 - DNA, 75 bp, synthetic construct
  source 1..75: mol_type = other DNA
gatggactatgacgaaacaatgtctttcatcctcctgaatgccgccgatgaagtggtcaacaaaaactggccacc

SEQ ID NO: 520299 - DNA, 75 bp, synthetic construct
  source 1..75: mol_type = other DNA
cgtaccgaacagccagcctatggaatcatgcgacagaatgaacgcctgatcgataagctggaggtcatggacgcc

SEQ ID NO: 520300 - DNA, 75 bp, synthetic construct
  source 1..75: mol_type = other DNA
ttgacacccttatctggcgtgtcgatcagcgtctgacttcccgtaaatccctgattgagttacggagccgtttta

SEQ ID NO: 520301 - DNA, 75 bp, synthetic construct
  source 1..75: mol_type = other DNA
cgttgatttcaatcgttcagtgatgctaaagttggtatttggaaaagacaaaactattgagggtatagaatataa

SEQ ID NO: 520302 - DNA, 75 bp, synthetic construct
  source 1..75: mol_type = other DNA
tggacgagatgcgagacgccttagaaagtttctcgacgtacatcgcatcaatcgtagagcaaccggatttagacg

SEQ ID NO: 520303 - DNA, 75 bp, synthetic construct
  source 1..75: mol_type = other DNA
atcctcattttacgcaagcgccatcaggcattagagaccttccgcgatgatttaggttgggaaatcgaagaagcc

SEQ ID NO: 520304 - DNA, 75 bp, synthetic construct
  source 1..75: mol_type = other DNA
cacctcaaactgatgtgattaatgccattgtcaaaccgttctatgaacgtcagatgagtaagtcagataatccaa

SEQ ID NO: 520305 - DNA, 75 bp, synthetic construct
  source 1..75: mol_type = other DNA
accaacagcgcacaggggccgtggtggatactgggctggtcagagctggtgccgggtgctgaggacgtactgcca

SEQ ID NO: 520306 - DNA, 75 bp, synthetic construct
  source 1..75: mol_type = other DNA
ttgaaccgaaaccggaccgggaggtcatgaatgcagagcggctgttcagtacggcgcgggagctgcgggacgtgg

SEQ ID NO: 520307 - DNA, 75 bp, synthetic construct
  source 1..75: mol_type = other DNA
gaagtaattgcagatctattagcctcaatgtccaactctcaggctaatagaactgatgttgcaaaagcaattttg

SEQ ID NO: 520308 - DNA, 75 bp, synthetic construct
  source 1..75: mol_type = other DNA
agggctggaagcaatggtgcgcatgcagcgccaactgctacgtcagttcataaagacaagtgatgaacaaaccca

SEQ ID NO: 520309 - DNA, 75 bp, synthetic construct
  source 1..75: mol_type = other DNA
cgcctgatacaagaactgatcgatcctgccatagctgagtacatggattccctcccaaacagctataaaaaccat

SEQ ID NO: 520310 - DNA, 75 bp, synthetic construct
  source 1..75: mol_type = other DNA
ttgataagaaatttcaagagatattagattttgctgacattggtgattttattgatcaaccgataaagacctatt

SEQ ID NO: 520311 - DNA, 75 bp, synthetic construct
  source 1..75: mol_type = other DNA
cgaatcaaacccttcatggattgagtttttccagctaatgagtgaattcattgctgatgaagaaggattcatttt

SEQ ID NO: 520312 - DNA, 75 bp, synthetic construct
  source 1..75: mol_type = other DNA
atgccgtacagaaaggaactgcccacgatgtgctagagccgaaaccggaccgggaggtcatgaatgcagagcggc

SEQ ID NO: 520313 - DNA, 75 bp, synthetic construct
  source 1..75: mol_type = other DNA
gattgtgggcgtcatcaatactggtatcgctacatcgcgaccgccggtaactttgccctggcaccgccaaaagaa

SEQ ID NO: 520314 - DNA, 75 bp, synthetic construct
  source 1..75: mol_type = other DNA
gagtgtctttcgattgtgactgtggtcgtcatcaatactggtatcgttacatcgctactgcgggtaactttgccc

SEQ ID NO: 520315 - DNA, 75 bp, synthetic construct
  source 1..75: mol_type = other DNA
aggtagcatattagaatatgcagatcgctgccttgtaatgagtgatggcatgttagtcggcaatacgactgatgt

SEQ ID NO: 520316 - DNA, 75 bp, synthetic construct
  source 1..75: mol_type = other DNA
aaaatctttaactgcattaacaaataaaattactgcctggaagtcccagcaacaggcaagacagcaaaaaaacct

SEQ ID NO: 520317 - DNA, 75 bp, synthetic construct
  source 1..75: mol_type = other DNA
gccccgcaacaatcggcactaccactggatatcctgcctacccggatggaaacagcactgccccgaaacgccagt

SEQ ID NO: 520318 - DNA, 75 bp, synthetic construct
  source 1..75: mol_type = other DNA
atgccagactggctgcggctatggaatatgaggatgacgaggcttacggttactatgacgcaccgtcctccccgg

SEQ ID NO: 520319 - DNA, 75 bp, synthetic construct
  source 1..75: mol_type = other DNA
aaattaatgccacctggtcttacagcggtgaaaaaccggatccggtggccgccctgcacatcaaagccgtcaatg

SEQ ID NO: 520320 - DNA, 75 bp, synthetic construct
  source 1..75: mol_type = other DNA
attacagaaatggaggtctgttctaccgttcctcaagagatggctatggttttgaggaaggctgggcagaagttt

SEQ ID NO: 520321 - DNA, 75 bp, synthetic construct
  source 1..75: mol_type = other DNA
tggaaaagttgtgagcagttctctcagtgcacgtcccgaggctgaactggtcaacaccatagtggataaagctgt

SEQ ID NO: 520322 - DNA, 75 bp, synthetic construct
  source 1..75: mol_type = other DNA
gctgcacaggcaagagataatacgcagacccttgctgatgcggtgcagaaaaatgcagaggttgtggcagaacag

SEQ ID NO: 520323 - DNA, 75 bp, synthetic construct
  source 1..75: mol_type = other DNA
cgtgatgccatcagacttgtgcgttcactgcgtgcaggagtgtcaacgccacgatgtttgaccgttatttgccat

SEQ ID NO: 520324 - DNA, 75 bp, synthetic construct
  source 1..75: mol_type = other DNA
aaaaaattaagccgggaagaaatacaactcactatcaaaaaagacgcagcagttaaagacaggacattgattgag

SEQ ID NO: 520325 - DNA, 75 bp, synthetic construct
  source 1..75: mol_type = other DNA
ccagagactatgaaaaacaaattaataaactaaaaaacgcagattctaaaataaaagacctagaaaataaaatta

SEQ ID NO: 520326 - DNA, 75 bp, synthetic construct
  source 1..75: mol_type = other DNA
atccaatggctctatcctgcccatgctgaagacgacatcgctcaggacgatctcgcccattaccagcagctgttt

SEQ ID NO: 520327 - DNA, 75 bp, synthetic construct
  source 1..75: mol_type = other DNA
catcgccgaggagcttggcctgccccacggtcgttataagggtaccccgcaggtactgaccagcgactttctggt

SEQ ID NO: 520328 - DNA, 75 bp, synthetic construct
  source 1..75: mol_type = other DNA
cccaggcccagatcgatagaaggctcaaggacgggcgtggccaaggccagggatcggactacaagccgttcatct

SEQ ID NO: 520329 - DNA, 75 bp, synthetic construct
  source 1..75: mol_type = other DNA
gtcgttaagatttttgaagaaaagatcgataatgaattaaaaattagaacaagaaagatggaaaccctgcgggat

SEQ ID NO: 520330 - DNA, 75 bp, synthetic construct
  source 1..75: mol_type = other DNA
aacgtgaccattacggatagtgaggtatcatcggctgcagatgtttttatcaataatattaaaggtcatttgacc

SEQ ID NO: 520331 - DNA, 75 bp, synthetic construct
  source 1..75: mol_type = other DNA
tgaatcactagagtcacttgaggagcctgaaagaattgctcaaattgtcactgattttgaaaagcggcaagccag

SEQ ID NO: 520332 - DNA, 75 bp, synthetic construct
  source 1..75: mol_type = other DNA
taactattagtttaccatttagagatgccggaatagatcggaaaggtgttatggatattcttgactcatcaggag

SEQ ID NO: 520333 - DNA, 75 bp, synthetic construct
  source 1..75: mol_type = other DNA
gcgcatacattgacgcctgggcgcaatatagctggtttaaaaactcggtgaaaggggatgaattagcctatgaat

SEQ ID NO: 520334 - DNA, 75 bp, synthetic construct
  source 1..75: mol_type = other DNA
gtgaaacgcgctacatcgatcctgtaactgaacaggagcgttcaagccgactttggctacgtcaaattggcgggc

SEQ ID NO: 520335 - DNA, 75 bp, synthetic construct
  source 1..75: mol_type = other DNA
ccagcagatgccttcagacaaggtgatgcaaggattgcagctggagctttcgaatatcaactaaaacaacaaggc

SEQ ID NO: 520336 - DNA, 75 bp, synthetic construct
  source 1..75: mol_type = other DNA
ggtgtggtgttcccggctgaactggtggggctgctggacaggctggagggggaaatccgggcaaactgcgtgagc

SEQ ID NO: 520337 - DNA, 75 bp, synthetic construct
  source 1..75: mol_type = other DNA
taccgacacgatgaatacggcaggctgacggagaagacggaccgcatcccggcgggtgtgatacggacggacgac

SEQ ID NO: 520338 - DNA, 75 bp, synthetic construct
  source 1..75: mol_type = other DNA
tcatcagcgaagacggcaatacggcgtggagcggggagtatgatgaatggggcaaccagctgaatgaggagaacc

SEQ ID NO: 520339 - DNA, 75 bp, synthetic construct
  source 1..75: mol_type = other DNA
tttctgggggtaaagacagtgctgcacttgctgttttcatgcgccagacacgccccgagttagatatcgactatt

SEQ ID NO: 520340 - DNA, 75 bp, synthetic construct
  source 1..75: mol_type = other DNA
tgaaaccccgcgttcaatcaaccagacaaaatgggcgatctggcagttcaccgacgcagcacagcttaatttagg

SEQ ID NO: 520341 - DNA, 75 bp, synthetic construct
  source 1..75: mol_type = other DNA
gtgaccatcgcggatagtgaggtatcatcggctgcagatgtttttatcaataatattaaaggtcatttggccatc

SEQ ID NO: 520342 - DNA, 75 bp, synthetic construct
  source 1..75: mol_type = other DNA
cctgctgcgtatttattaattttaattactatcccaggcgtctttgcggctttcatttcgctgctgaaattaaac

SEQ ID NO: 520343 - DNA, 75 bp, synthetic construct
  source 1..75: mol_type = other DNA
ggcttactcaccctggtaaaatcgttgatattaacctgacgccagtacaagaaaattggcttcatgcgggactgt

SEQ ID NO: 520344 - DNA, 75 bp, synthetic construct
  source 1..75: mol_type = other DNA
tgcgtgaagcggaggagaaggcgacgaaaggccggtgggctgttgagttcgacgatgagatttactccactgacg

SEQ ID NO: 520345 - DNA, 75 bp, synthetic construct
  source 1..75: mol_type = other DNA
gtgtggcagagtgggaagaggaggtttgcgcctcggaaaatgaaatcgcagatgttgatgagaccgggcatgagc

SEQ ID NO: 520346 - DNA, 75 bp, synthetic construct
  source 1..75: mol_type = other DNA
gggatctttttccacaaatcggtcagcgagtcatgatcgacagtagtagtgtggttattggtgatgttcggttgg

SEQ ID NO: 520347 - DNA, 75 bp, synthetic construct
  source 1..75: mol_type = other DNA
cacagagttttgccaaagcgctcagcaaagggttatatgaaaatgggattgccagccaaaacttccattacgacc

SEQ ID NO: 520348 - DNA, 75 bp, synthetic construct
  source 1..75: mol_type = other DNA
ggaaaaaatgccggtggcagacggtgagcgtctgagggtgacagggaaaattcccggactccgcgtctccggcgg

SEQ ID NO: 520349 - DNA, 75 bp, synthetic construct
  source 1..75: mol_type = other DNA
gagttgcgtttatagtaatatttttatttttcattgcaatgacgacattcatcgcgctaaagaaatcaataccta

SEQ ID NO: 520350 - DNA, 75 bp, synthetic construct
  source 1..75: mol_type = other DNA
ttcccagagtatttctataattgggattggccattcccttatatgaatagagttggagtttactttaaacaccct

SEQ ID NO: 520351 - DNA, 75 bp, synthetic construct
  source 1..75: mol_type = other DNA
ggtagccgaacgtcagcggcaacagtcggttgaaggatggactcctgaacatgacaacgcatatcaaaatagcga

SEQ ID NO: 520352 - DNA, 75 bp, synthetic construct
  source 1..75: mol_type = other DNA
aatcgtggctctcagtttgacgaagttttaatccgtcaaatgcaatctcttcattcaatagaaaaacacttatcc

SEQ ID NO: 520353 - DNA, 75 bp, synthetic construct
  source 1..75: mol_type = other DNA
gatatattttcataaatagctcaccagagaagggacggcctaaaaatacagataaagaatacatacgtgaagtaa

SEQ ID NO: 520354 - DNA, 75 bp, synthetic construct
  source 1..75: mol_type = other DNA
aggatgggattgcagatgatggtggcagactgggagccgtccctgcttgagcagctagaacaaaaattcacggca

SEQ ID NO: 520355 - DNA, 75 bp, synthetic construct
  source 1..75: mol_type = other DNA
gcctttaaacatgtgaaagagaacgcggcgaatattaaaggattaacctttacgtacgaaccgaaagtattgcgt

SEQ ID NO: 520356 - DNA, 75 bp, synthetic construct
  source 1..75: mol_type = other DNA
ttctcggcaacccgcagcagagcgtgccgaagcgcctgctgctggcgcgcaacctctctccgcgcgacaagttcg

SEQ ID NO: 520357 - DNA, 75 bp, synthetic construct
  source 1..75: mol_type = other DNA
ggttgccccatgaacatcccggatggaaggattatacccttttgttcctgcaaaaattaaagcgtgaagtattat

SEQ ID NO: 520358 - DNA, 75 bp, synthetic construct
  source 1..75: mol_type = other DNA
atggcaagaaaggaaaggtgattctcggcgcgatgatgcgcaagctggcacaggtggcgtatggagtgctgaagt

SEQ ID NO: 520359 - DNA, 75 bp, synthetic construct
  source 1..75: mol_type = other DNA
cgaatgcgctcggtcatctggtacgcacctgggaagaaaaaggccgccagcttggtgaactggccagccagtggc

SEQ ID NO: 520360 - DNA, 75 bp, synthetic construct
  source 1..75: mol_type = other DNA
agcacctctggctggagcattaatacttgattattataactggaatgtaatatttattgtaatggggtcatttag

SEQ ID NO: 520361 - DNA, 75 bp, synthetic construct
  source 1..75: mol_type = other DNA
agttccccgaagcactggaacggatgaaagagatactgccaccgtatctcattatggttctggaaaaccagtaca

SEQ ID NO: 520362 - DNA, 75 bp, synthetic construct
  source 1..75: mol_type = other DNA
gtgtttgataacgggattggtagtaagatcactctagtgcaacatcagcatcgcagtcagtctgtaggtatgatg

SEQ ID NO: 520363 - DNA, 75 bp, synthetic construct
  source 1..75: mol_type = other DNA
tgatgaagatgatcctacggcgattaataaaacggtacgcgtagtcacgaccgtaacctatgcgttgcaggatta

SEQ ID NO: 520364 - DNA, 75 bp, synthetic construct
  source 1..75: mol_type = other DNA
ttttttgggaaccactttaagtattagttgtcttattcttgcattattgtcaatgttcgtaactattattatagg

SEQ ID NO: 520365 - DNA, 75 bp, synthetic construct
  source 1..75: mol_type = other DNA
ctgttgttttttccctatcagttttatttttcatcattggaaaccaattatcaaaaatcgaaaaaatatcagatc

SEQ ID NO: 520366 - DNA, 75 bp, synthetic construct
  source 1..75: mol_type = other DNA
ttccgagtccgatgcgattgaagcaacggcccgaaccttaccgctgatggccgcctggatccattatcaaatgac

SEQ ID NO: 520367 - DNA, 75 bp, synthetic construct
  source 1..75: mol_type = other DNA
gagcgcgacagccagtaccggatcacgggtgtcagtcacaccgacgggatccggcttaaactgacgtaccacgcc

SEQ ID NO: 520368 - DNA, 75 bp, synthetic construct
  source 1..75: mol_type = other DNA
gatagcccagggcagcagcaacgtttttatcaacaatcagcccgccgcgcgcaagggggacaaactggagtgcag

SEQ ID NO: 520369 - DNA, 75 bp, synthetic construct
  source 1..75: mol_type = other DNA
cgaactgcatgtacacggcctatgcgtttggctatcgccgaacgagcccaatgttctccattcactcataccggc

SEQ ID NO: 520370 - DNA, 75 bp, synthetic construct
  source 1..75: mol_type = other DNA
ggcgccggacaggggatcgggcgtgccatcgctcgtcgcctggctaaagatggattcagaatcggatgtctggac

SEQ ID NO: 520371 - DNA, 75 bp, synthetic construct
  source 1..75: mol_type = other DNA
ggtatccaggccgcgacagccgcgcttcagggactggcgggtggtaatttagcgggtgctctggccggagcttct

SEQ ID NO: 520372 - DNA, 75 bp, synthetic construct
  source 1..75: mol_type = other DNA
tcttgaaatagtaatcctgaacaataaatgtgagttgttgggtaactatcttaatggctttattcaaaagtgcag

SEQ ID NO: 520373 - DNA, 75 bp, synthetic construct
  source 1..75: mol_type = other DNA
gcgtttatcattgatgtgtttgccggatacatcgtggggtggcgggtctcatcgtctatggaaacgacattcgtg

SEQ ID NO: 520374 - DNA, 75 bp, synthetic construct
  source 1..75: mol_type = other DNA
ggattaagtgaacgaaaagtgcagttcacgtatacggacgtgctggccaggacggtcggcatactgccgccggaa

SEQ ID NO: 520375 - DNA, 75 bp, synthetic construct
  source 1..75: mol_type = other DNA
attctggaacagaatgtggcttgtgggatactgatgaagcacctctggaaattgaaactgcatcatttgatttta

SEQ ID NO: 520376 - DNA, 75 bp, synthetic construct
  source 1..75: mol_type = other DNA
taatgttccttactgggatgacagaaacaattataaaaaaatgaaagaaaggctttcgaagctgaaatcagaata

SEQ ID NO: 520377 - DNA, 75 bp, synthetic construct
  source 1..75: mol_type = other DNA
tattggtttttattattatttttttttccacactaaaaccatttggagatattgcagagtatcttcatgtttacc

SEQ ID NO: 520378 - DNA, 75 bp, synthetic construct
  source 1..75: mol_type = other DNA
aatcaagatattgcattaggtaacgtggcgacaacagaaattaacaacacaggtcattcaagcgaaaaacaaatc

SEQ ID NO: 520379 - DNA, 75 bp, synthetic construct
  source 1..75: mol_type = other DNA
caacactggccaaaggcgttggtatccaactgaacaccgaactaggcaataaagtgtcgtttctgggctggcatg

SEQ ID NO: 520380 - DNA, 75 bp, synthetic construct
  source 1..75: mol_type = other DNA
gctttttactgtcactacaggcagtagctgtaggcgtattgcttgctatatccgtactggttctggtttttttta

SEQ ID NO: 520381 - DNA, 75 bp, synthetic construct
  source 1..75: mol_type = other DNA
ctgcaaatattgatcgtggcgcgcaatcattcagtgcgctgacattatctgttttctggacactactcccaatta

SEQ ID NO: 520382 - DNA, 75 bp, synthetic construct
  source 1..75: mol_type = other DNA
agagttaaagatgatgggtctttagttgataaagccttatatcgtaataaagcgtacaaaaatccttataatgat

SEQ ID NO: 520383 - DNA, 75 bp, synthetic construct
  source 1..75: mol_type = other DNA
ggacggaaagcgtggctgttcgccggttcactgatggccggaaaccgggcggcacagataatgagccttctgtaa

SEQ ID NO: 520384 - DNA, 75 bp, synthetic construct
  source 1..75: mol_type = other DNA
atgatcgcgggtctttatcgcattgagaagttcatccgtgaacgtcctgtggaaaaaatacggcaatggcgacaa

SEQ ID NO: 520385 - DNA, 75 bp, synthetic construct
  source 1..75: mol_type = other DNA
atatctgcgagcgtgctatccgcccggtggtcatggggcggaaagcatggttattcgccggttcactgatggccg

SEQ ID NO: 520386 - DNA, 75 bp, synthetic construct
  source 1..75: mol_type = other DNA
aacccggagacgggggaactgctgtggcagcatgagacaacgcacgcctacaacgaacaggggctggcaaaccgc

SEQ ID NO: 520387 - DNA, 75 bp, synthetic construct
  source 1..75: mol_type = other DNA
ataagttcgtcagcatgcagttcattactgaactaactgggttatccgataaatggttttataagcttgcacagg

SEQ ID NO: 520388 - DNA, 75 bp, synthetic construct
  source 1..75: mol_type = other DNA
gatgtgagcacacctgttgtggtgaagccgacaggtggagaaggtgcagtaatcagtgccaccagcgacccggag

SEQ ID NO: 520389 - DNA, 75 bp, synthetic construct
  source 1..75: mol_type = other DNA
ttttttatgccgctaaatgaacattcaaaggaagaagatgcaccaccactaatccagcttgacgacaaagaaaag

SEQ ID NO: 520390 - DNA, 75 bp, synthetic construct
  source 1..75: mol_type = other DNA
ctgagagtcgacgagcgactgccgctagatataccagagggtctacctgacttccaagcgcctatcaccagtgaa

SEQ ID NO: 520391 - DNA, 75 bp, synthetic construct
  source 1..75: mol_type = other DNA
ttacctggcgggcatgaagctgggcgggacgccgctggtcgagtatacgcgggacaggctgcaccgtgagacggt

SEQ ID NO: 520392 - DNA, 75 bp, synthetic construct
  source 1..75: mol_type = other DNA
atgatgcgccacatccggcatggtatgccggatgtggcgtatgctgataagacgcgccagcgtcgcatcaggcaa

SEQ ID NO: 520393 - DNA, 75 bp, synthetic construct
  source 1..75: mol_type = other DNA
gcgatgtactggaatgcctgatggcatcaggacgtaatagcgctcgcggtgtggctgaagtgttgcagatgtcac

SEQ ID NO: 520394 - DNA, 75 bp, synthetic construct
  source 1..75: mol_type = other DNA
gcgatgtactggaattcctgctggcatcaggacgcaataccgcacgaagtgtggctgagacgttgcagatgtcac

SEQ ID NO: 520395 - DNA, 75 bp, synthetic construct
  source 1..75: mol_type = other DNA
cgaaaaagaaagagatcgtctggggaaattatggcgtctccggagcatttgaagtcactgcaacctcttataatg

SEQ ID NO: 520396 - DNA, 75 bp, synthetic construct
  source 1..75: mol_type = other DNA
caaagcggcttatgccagctgggggtgtccagctgctgctgcagataactacacggggccttacaactgtaatca

SEQ ID NO: 520397 - DNA, 75 bp, synthetic construct
  source 1..75: mol_type = other DNA
tttacgcgcatctggcagcaggtaccactgaccgaatatgaagtaagcggtaataagatcctaatcaaaggtaaa

SEQ ID NO: 520398 - DNA, 75 bp, synthetic construct
  source 1..75: mol_type = other DNA
acggctggaaacagaaggactggtaaagcaactgaatggtttctggtctgcgcaggaagagagaaatacaggagg

SEQ ID NO: 520399 - DNA, 75 bp, synthetic construct
  source 1..75: mol_type = other DNA
ccgggggagacagtccggcacggtttattgcaccggggcgcaaatatccgcagccgtatgtggcactgccggcgt

SEQ ID NO: 520400 - DNA, 75 bp, synthetic construct
  source 1..75: mol_type = other DNA
cagacatgcgtacaacgcgcaggaactggcgaaccgctgtataccggacagcctgcccgccgtggaatggctgac

SEQ ID NO: 520401 - DNA, 75 bp, synthetic construct
  source 1..75: mol_type = other DNA
gggctgacgcgcagtatggaatacgatgctgccggacgggtcatccgcctgaccagtgaaaacggcagccacacc

SEQ ID NO: 520402 - DNA, 75 bp, synthetic construct
  source 1..75: mol_type = other DNA
cgaggcccgttatatcgcacaagcaacaagccgtgacgtggcgctaacagcagaagagatcggcatcctgttacg

SEQ ID NO: 520403 - DNA, 75 bp, synthetic construct
  source 1..75: mol_type = other DNA
tcacctctacggtgctgaatatctttgccgtactgaccgcattctttggcatttatctcggtttccacgaggcta

SEQ ID NO: 520404 - DNA, 75 bp, synthetic construct
  source 1..75: mol_type = other DNA
gaacacggtgacgattgatgcgggcacactgccgctgagcaccgaactgacgaacaccagtcagaaggtggtgcc

SEQ ID NO: 520405 - DNA, 75 bp, synthetic construct
  source 1..75: mol_type = other DNA
ccagtcgtgtaatggccatcgcctttatatttatgtcggtgcttattgtcctcagcctcgccgttaacgtcattc

SEQ ID NO: 520406 - DNA, 75 bp, synthetic construct
  source 1..75: mol_type = other DNA
atgcataaaatctataataacctttattggtatagacattacgatgaaaatggaaaaacatatcgtactgccaat

SEQ ID NO: 520407 - DNA, 75 bp, synthetic construct
  source 1..75: mol_type = other DNA
ggccgttctccggctgaaaacagcacggaaaatgatcctcaacccgtagagcaaccagagccggttcagcccgga

SEQ ID NO: 520408 - DNA, 75 bp, synthetic construct
  source 1..75: mol_type = other DNA
ggtcgttctccggctgaaaacagcacggagaatgagcctcagcccgtagagcaaccagagccggttcaacccgga

SEQ ID NO: 520409 - DNA, 75 bp, synthetic construct
  source 1..75: mol_type = other DNA
gaaggcaaatatggtcagcgcctgtatagcctgaccagttacggcatgcgcttcgcccctgacacgataccgggc

SEQ ID NO: 520410 - DNA, 75 bp, synthetic construct
  source 1..75: mol_type = other DNA
ttattatgagtggtggagaaagatattgtcttgtattagataaaggcagcgggattcccctttattatcctgctt

SEQ ID NO: 520411 - DNA, 75 bp, synthetic construct
  source 1..75: mol_type = other DNA
ctttgacgttgaaaaatatttattggggggcattgatagaagtaataattatattaatgaaaatttcacttataa

SEQ ID NO: 520412 - DNA, 75 bp, synthetic construct
  source 1..75: mol_type = other DNA
aaactggtcgataaattcaaaatcaatctcgcgcgccagttcccgactcgccaacagcagcgcattctggaggtt

SEQ ID NO: 520413 - DNA, 75 bp, synthetic construct
  source 1..75: mol_type = other DNA
caaagctgttattttctccctgcatgttgcctgccactttaagcgcatgcaccagaacatcgtcgacaaaatcga

SEQ ID NO: 520414 - DNA, 75 bp, synthetic construct
  source 1..75: mol_type = other DNA
gtggatgaaacctttgaggccatccgcgacagcctgaatcagcaggccatcaataacatcgccagaaagctggca

SEQ ID NO: 520415 - DNA, 75 bp, synthetic construct
  source 1..75: mol_type = other DNA
acagagtgattaccaagaaggatacagatgtactgctaaaaaaaaatattttaaaaactagtccatttatccatc

SEQ ID NO: 520416 - DNA, 75 bp, synthetic construct
  source 1..75: mol_type = other DNA
ggatggaacaggagaacctgataatggtgatttgaggaagtttaaagatggtgtattagacctcattaatcttga

SEQ ID NO: 520417 - DNA, 75 bp, synthetic construct
  source 1..75: mol_type = other DNA
ttatttatctggccgttgcaacttattgcagggatctcttttcttatctcttatgtcattggtagtgattatttc

SEQ ID NO: 520418 - DNA, 75 bp, synthetic construct
  source 1..75: mol_type = other DNA
ttcagcggacagacacaaacgttatctgccaggagtgccggaatagtccggctatgaagcgagtattgatggttt

SEQ ID NO: 520419 - DNA, 75 bp, synthetic construct
  source 1..75: mol_type = other DNA
tcagcaggtctgaacggaaccttccggcagacaagctggtcccttaattacaatattgacagggtgagaggaaat

SEQ ID NO: 520420 - DNA, 75 bp, synthetic construct
  source 1..75: mol_type = other DNA
tgaatataactggtacgatacagtgaacgacacggtaaatcggcgtaaaagcattcagcataaatggaactttct

SEQ ID NO: 520421 - DNA, 75 bp, synthetic construct
  source 1..75: mol_type = other DNA
aatggctggagttatgggtgatgataatatatttttaagtaattcggattcagctgctttatattgtgtggctaa

SEQ ID NO: 520422 - DNA, 75 bp, synthetic construct
  source 1..75: mol_type = other DNA
catacccgcgataccgacaacggccagtttttccctaagcctgcggatcttcttcgtcacatcgaaggcaacaaa

SEQ ID NO: 520423 - DNA, 75 bp, synthetic construct
  source 1..75: mol_type = other DNA
cgcatacaccgtctcaatgaaacaggaacagcactcacactaaccgaaagctcacactggatcgtttacatccat

SEQ ID NO: 520424 - DNA, 75 bp, synthetic construct
  source 1..75: mol_type = other DNA
taaaataacccgcattgacactaaggaaggtgcgaataagcggggaaattcttctcggctgactcagtcatttca

SEQ ID NO: 520425 - DNA, 75 bp, synthetic construct
  source 1..75: mol_type = other DNA
gtaataatggtgatggatcgagtgctaaggctggagagataacaattacacctgacaactcgaaacctggtcgtt

SEQ ID NO: 520426 - DNA, 75 bp, synthetic construct
  source 1..75: mol_type = other DNA
ccgccgtgctgggccagaaacttgttcatcgcctgcgcggcacccgcatcagcggacgcccctggtggtatcgta

SEQ ID NO: 520427 - DNA, 75 bp, synthetic construct
  source 1..75: mol_type = other DNA
cacgcagggcgggctgacgcgcagtatggagtacgatgctgccggacgtgtcatcagcctgaccaacgagaacgg

SEQ ID NO: 520428 - DNA, 75 bp, synthetic construct
  source 1..75: mol_type = other DNA
gttaaagccattgatgaacggcagccttttgccgcgcagctggcggcggtaatgtcaaaggggcgttttactcgc

SEQ ID NO: 520429 - DNA, 75 bp, synthetic construct
  source 1..75: mol_type = other DNA
cagggttaaagcttccaagaacaaaaccctcccaaaatttgggacttcaatgtcttaatgtcatgtatacaaact

SEQ ID NO: 520430 - DNA, 75 bp, synthetic construct
  source 1..75: mol_type = other DNA
gtcatgtgtatacggcaaagaccggcacactgtcagaactggtgaacgcaggtgaccagtttaaccagcagcaca

SEQ ID NO: 520431 - DNA, 75 bp, synthetic construct
  source 1..75: mol_type = other DNA
aaagcgacaagctggtgggcgatctttccatcggtgaccagcaaatggttgaaatcgccaaagtgctgagttttg

SEQ ID NO: 520432 - DNA, 75 bp, synthetic construct
  source 1..75: mol_type = other DNA
gcagaaactatgcataatatgttaggtgctgatgtttatgggttgtgtgtatctgtcgttagttttgtggacatg

SEQ ID NO: 520433 - DNA, 75 bp, synthetic construct
  source 1..75: mol_type = other DNA
tcgataacggtcatgccgctcggttggcagggttttatcaccgctggtttcgttattcgccatgtgaatggcgtg

SEQ ID NO: 520434 - DNA, 75 bp, synthetic construct
  source 1..75: mol_type = other DNA
caatttgtcgccagcaccgccgaatgctgtggtgagggaggaattaaagcctgggattatgtccggatgggtttt

SEQ ID NO: 520435 - DNA, 75 bp, synthetic construct
  source 1..75: mol_type = other DNA
ccctggggcgtcattacacatttgattttattcggttggtttctctggtgtctgcgttttcgcattaaggctgcc

SEQ ID NO: 520436 - DNA, 75 bp, synthetic construct
  source 1..75: mol_type = other DNA
agcggttgccggacgttgtgtcggtagtgctggtgtgcaaaaaattgctgctgccttgcaggattattatattaa

SEQ ID NO: 520437 - DNA, 75 bp, synthetic construct
  source 1..75: mol_type = other DNA
gctctcggtctacttcccttcgcccgttctgctgagaccactcaatccgccttgccgctttgcctgccgattcag

SEQ ID NO: 520438 - DNA, 75 bp, synthetic construct
  source 1..75: mol_type = other DNA
cctcaacacgaacggttaacggtcgagcgctatcgagtaatatcgatcttttcccgtctgatatttttcggttgg

SEQ ID NO: 520439 - DNA, 75 bp, synthetic construct
  source 1..75: mol_type = other DNA
tgaaaacatgaagaagctgtatgttaaatctgtagcagctccttttgaatcaataaataatgatttacggttaga

SEQ ID NO: 520440 - DNA, 75 bp, synthetic construct
  source 1..75: mol_type = other DNA
tgaacttcttggaataacaccggcagatgaacgacttattcagcgtatcattatggacaatatcgcgagggctgt

SEQ ID NO: 520441 - DNA, 75 bp, synthetic construct
  source 1..75: mol_type = other DNA
caatagataaccacgggaaggaaataacaaacagaaaaggattacctaatgtctgcagagttcatggtaatatgt

SEQ ID NO: 520442 - DNA, 75 bp, synthetic construct
  source 1..75: mol_type = other DNA
acaaaccaagaatattgacgcacatacttttataaaagagggggtttacagaatgatcatgatttgtgatagctt

SEQ ID NO: 520443 - DNA, 75 bp, synthetic construct
  source 1..75: mol_type = other DNA
atgtgtatacggcaaagatcggcacgctgtcagaactggtgaccgcaggtgaccagtttaaccagcagcacatta

SEQ ID NO: 520444 - DNA, 75 bp, synthetic construct
  source 1..75: mol_type = other DNA
tattgaatactttattgatgagttaaatcccatcagcagttcaaaagctaacacatcagctcgatcaactggtaa

SEQ ID NO: 520445 - DNA, 75 bp, synthetic construct
  source 1..75: mol_type = other DNA
cttgttgcgcctgtcatttaatgttgatttttacccaccgtcagggctgggccagagcgatgctggatggccagg

SEQ ID NO: 520446 - DNA, 75 bp, synthetic construct
  source 1..75: mol_type = other DNA
ctgatgggcgtgctgccagtgactaaagagcagttgggtaaaaagacgctggcgcaaatgccgattaacccactg

SEQ ID NO: 520447 - DNA, 75 bp, synthetic construct
  source 1..75: mol_type = other DNA
atcgcagcgggacaatgccccgctgcgtcatgcctcaccttacgagcaaatgctcgtcaagctggccgcagaccg

SEQ ID NO: 520448 - DNA, 75 bp, synthetic construct
  source 1..75: mol_type = other DNA
aagatcagctggcattactctccagaaacggcgattactacaaagtgctacatgcaggcgagcatcttttaccct

SEQ ID NO: 520449 - DNA, 75 bp, synthetic construct
  source 1..75: mol_type = other DNA
cgtgatggaaaatgtggaagagggcggattctttggtcgggtgtgggatttcgtgatgatgaaattccatcagtg

SEQ ID NO: 520450 - DNA, 75 bp, synthetic construct
  source 1..75: mol_type = other DNA
gatgtgcctgcagcttcactgacggtaaaaggcaccgtgcaactcagcagcgctactaacagcacgtcagaaacg

SEQ ID NO: 520451 - DNA, 75 bp, synthetic construct
  source 1..75: mol_type = other DNA
ataccctgccgggttacaccgaatatggccgggacaacggcatccgtctgtctgccgtgtggctgacgcacgacc

SEQ ID NO: 520452 - DNA, 75 bp, synthetic construct
  source 1..75: mol_type = other DNA
attgcttgtgaaactgcccatgacaatggattctctgactacattctttccactgatgatcatccctcctttgtt

SEQ ID NO: 520453 - DNA, 75 bp, synthetic construct
  source 1..75: mol_type = other DNA
ggtaaaaacccgtgagcgagtattaaaacatgcggctcagggtggttactgggtggcagctgcccatatctcatt

SEQ ID NO: 520454 - DNA, 75 bp, synthetic construct
  source 1..75: mol_type = other DNA
gattagccacatgtcactgaacttgggagagaatataactgctgtcgacgaaattatgtctaagctctcgcgaat

SEQ ID NO: 520455 - DNA, 75 bp, synthetic construct
  source 1..75: mol_type = other DNA
ttcctgggtatgaaggtttatatgccgtaacagaggatgggcgagtatattctcactcacgtgttgttaaagctg

SEQ ID NO: 520456 - DNA, 75 bp, synthetic construct
  source 1..75: mol_type = other DNA
atataataataactatctaaatcttgaatgggttactccatcaggaaatatctcacactcatatggattggagtc

SEQ ID NO: 520457 - DNA, 75 bp, synthetic construct
  source 1..75: mol_type = other DNA
aaacagcaggaggaacttaaccgggcattagaaaaacaacgtattgaaccgccccgggtttcttggagagtattt

SEQ ID NO: 520458 - DNA, 75 bp, synthetic construct
  source 1..75: mol_type = other DNA
atggaggggccagctgcggcgtttcagacctgggaacaactgatttttaaactgctggcggcagaagaagagtat

SEQ ID NO: 520459 - DNA, 75 bp, synthetic construct
  source 1..75: mol_type = other DNA
atgtgggcatcaaagtcaacaaacttgacgacgacaaaggcgtcggtgaagtggtcggtgttggtcgctactgga

SEQ ID NO: 520460 - DNA, 75 bp, synthetic construct
  source 1..75: mol_type = other DNA
ataaaggaagcggctttaatgaactgcggtttgaagacgccacgggcggtgaacaggtctatatccacgcgcaga

SEQ ID NO: 520461 - DNA, 75 bp, synthetic construct
  source 1..75: mol_type = other DNA
gaaaaagacgaaaaattcgcacagagccgcacacgatcgtggatacattccagcaacgcattgcaggacgtcagg

SEQ ID NO: 520462 - DNA, 75 bp, synthetic construct
  source 1..75: mol_type = other DNA
ccctttaattatggcagtggttgtatcaggtcgggtacttggagtgaatgaaagccatgatggctttgaacttca

SEQ ID NO: 520463 - DNA, 75 bp, synthetic construct
  source 1..75: mol_type = other DNA
gtgctgaataaccgcaccacggatgtgataaacaaccatgctgagaccattggcaacaatcagatgattgcggtt

SEQ ID NO: 520464 - DNA, 75 bp, synthetic construct
  source 1..75: mol_type = other DNA
tagtgacggagttatggctagttcctgggttaggaggggactagacgagctagatcctgaaattgcaaataccgc

SEQ ID NO: 520465 - DNA, 75 bp, synthetic construct
  source 1..75: mol_type = other DNA
tctatgttctcaaaagggttaatttcaagagaaagcttgcatgatatagatgagaaaatcagcaatactgaattg

SEQ ID NO: 520466 - DNA, 75 bp, synthetic construct
  source 1..75: mol_type = other DNA
tttttcattctctggggtataactctactatttctaatgctttagcaagattgtgttcatttaatggttcgctac

SEQ ID NO: 520467 - DNA, 75 bp, synthetic construct
  source 1..75: mol_type = other DNA
gaaaaactatagaaaattgatgactttctcaaataaaatgtctgaagcatatggggttgatctaagtgttctttt

SEQ ID NO: 520468 - DNA, 75 bp, synthetic construct
  source 1..75: mol_type = other DNA
atggtactccgcctggtatttctgaacatcatcgagtcatttacacactcgccattctggttattacctgtccgt

SEQ ID NO: 520469 - DNA, 75 bp, synthetic construct
  source 1..75: mol_type = other DNA
ccggtggcaatcagcaaaaagtgttgatccttgatgaacctacccgtggcgtagatgtcggcgcgaaaaaagaga

SEQ ID NO: 520470 - DNA, 75 bp, synthetic construct
  source 1..75: mol_type = other DNA
cacaaaattacccttagccagcgcagatagtacgaacgtcgctcgaaacatcggtattgataaagcctggtctgg

SEQ ID NO: 520471 - DNA, 75 bp, synthetic construct
  source 1..75: mol_type = other DNA
gactatgttaaccagttgcgtgtctttgccgtggttaaccagttccgtcttcagtattcagaggagtctgcataa

SEQ ID NO: 520472 - DNA, 75 bp, synthetic construct
  source 1..75: mol_type = other DNA
atcaacccaactctgtaatggaggagtatatgagaaatgcaaaagcatttatctttgctgctgaggaggattttg

SEQ ID NO: 520473 - DNA, 75 bp, synthetic construct
  source 1..75: mol_type = other DNA
ttagcgggctggagattcgtttgcctaacggcgagccacatatcgcgcatattgccgccgccgcgcgcgaactgt

SEQ ID NO: 520474 - DNA, 75 bp, synthetic construct
  source 1..75: mol_type = other DNA
gtgatgaccgatcccagcggacagcgcacatttttccattcaccgggcgctaaccggctgctggatcttccggcg

SEQ ID NO: 520475 - DNA, 75 bp, synthetic construct
  source 1..75: mol_type = other DNA
gggcaagcctgttatgcgccaatgccatcgacggggcgaaaacgctggaagagctgcaaacagaaatgtcggatt

SEQ ID NO: 520476 - DNA, 75 bp, synthetic construct
  source 1..75: mol_type = other DNA
aagaataaaaatattactactacatttattcaaaactttccttttgctagaaagaaataccaatcatatttgcct

SEQ ID NO: 520477 - DNA, 75 bp, synthetic construct
  source 1..75: mol_type = other DNA
tccatcgacggcaacaaacttgccaaagttggtcagaaggaaaaagacatggatatggtcgggccgaagaaaggt

SEQ ID NO: 520478 - DNA, 75 bp, synthetic construct
  source 1..75: mol_type = other DNA
ccacggtggccaatggatgggaaagaaaactgtgactaaacttagtgacccctttgccacgaccttctgtccaca

SEQ ID NO: 520479 - DNA, 75 bp, synthetic construct
  source 1..75: mol_type = other DNA
aacgctttaagaatgaaatgaataattatgttagccagaaatggacggatttccaaaagttcaaagccgttacat

SEQ ID NO: 520480 - DNA, 75 bp, synthetic construct
  source 1..75: mol_type = other DNA
atcaacctgattcagtcatgcaggaatatatgcgtaacgctaaagcatttgtttttgctgcagaagaggattttg

SEQ ID NO: 520481 - DNA, 75 bp, synthetic construct
  source 1..75: mol_type = other DNA
aatctaatagcgttatggtcgactatatgagaaatgcgcgggcttttgttttcgctgcagaagaggattttggca

SEQ ID NO: 520482 - DNA, 75 bp, synthetic construct
  source 1..75: mol_type = other DNA
actcaaggtgaagatacatcaggcctgcgaattattacgctgttaattgatggcgaccagaatgaattgtcgaat

SEQ ID NO: 520483 - DNA, 75 bp, synthetic construct
  source 1..75: mol_type = other DNA
gactaacattgagccgctaaagcatatgcataaaaaacttactcaagatgcaatattagtattctgcaacaaaca

SEQ ID NO: 520484 - DNA, 75 bp, synthetic construct
  source 1..75: mol_type = other DNA
ggattgttgaaaggaaatatatctgaaactgattttttgattgctagcgcagagcttgagagtcattattctcaa

SEQ ID NO: 520485 - DNA, 75 bp, synthetic construct
  source 1..75: mol_type = other DNA
tgttaggtctatcggtacaggttgatagacttgcatcagaacaagggttgcttaaattatttaacgatattccat

SEQ ID NO: 520486 - DNA, 75 bp, synthetic construct
  source 1..75: mol_type = other DNA
atctatatatattgcaggtatgctgttctctagtagagaactagaaaaaaccgtatgttttttacatggttctga

SEQ ID NO: 520487 - DNA, 75 bp, synthetic construct
  source 1..75: mol_type = other DNA
aaataccattaagttatttccatcatgggttaaaaatatttctgaaatatttaaatactcacttattgatagaga

SEQ ID NO: 520488 - DNA, 75 bp, synthetic construct
  source 1..75: mol_type = other DNA
tctaaatacaatcaacaaaaaaactatcagaaaattagttttttcaaaacccaaacgattaaaaaatataatcat

SEQ ID NO: 520489 - DNA, 75 bp, synthetic construct
  source 1..75: mol_type = other DNA
aattgttctggcgacctgcaacgttacgcaagaaaacaggtgaacatgtagagctgcagttacaggttagccaac

SEQ ID NO: 520490 - DNA, 75 bp, synthetic construct
  source 1..75: mol_type = other DNA
caccaacggggcgaaaatgttggggccaattacctccgtcacttcaacgctgatgctgctgttaacgctctccta

SEQ ID NO: 520491 - DNA, 75 bp, synthetic construct
  source 1..75: mol_type = other DNA
ctggttcgtaaacctgttctttttcacctcgctgttgccgcgcgttattgcttatgcttcgtatgccttcctcgg

SEQ ID NO: 520492 - DNA, 75 bp, synthetic construct
  source 1..75: mol_type = other DNA
cgcctgtcacaaagtaaattcagatgccaggtatgtggatatacagcgaacgccgatgtaaatggcgctcgtaac

SEQ ID NO: 520493 - DNA, 75 bp, synthetic construct
  source 1..75: mol_type = other DNA
gtcgacagctaataaaattgttgggcaattctccgtacctgcaggatgtactgcactgattgacaggaattgcca

SEQ ID NO: 520494 - DNA, 75 bp, synthetic construct
  source 1..75: mol_type = other DNA
tgctaatatgattcttccgtatccaccaggagtacctttagttcttcccggagaaatgattacagagagcaatcg

SEQ ID NO: 520495 - DNA, 75 bp, synthetic construct
  source 1..75: mol_type = other DNA
catagtgaatttatgaaagaaaaattcctgaagaacttgcctaaaaaattaactattaattcagataaaataatc

SEQ ID NO: 520496 - DNA, 75 bp, synthetic construct
  source 1..75: mol_type = other DNA
ccaggatgccatcaatgccgttccggccctgccgtttacggcttcatcttcggcaggcgtggtcacactgaccgc

SEQ ID NO: 520497 - DNA, 75 bp, synthetic construct
  source 1..75: mol_type = other DNA
gacgaggtaattcatcaatcgtttccaaaagcaacaattatctcttttacaaatttatatcaggcattagcatcc

SEQ ID NO: 520498 - DNA, 75 bp, synthetic construct
  source 1..75: mol_type = other DNA
cgcgttacatgatcgatcattactatcctaatgaactgtatcattttcttattcccggcgttccgaatgcatcgc

SEQ ID NO: 520499 - DNA, 75 bp, synthetic construct
  source 1..75: mol_type = other DNA
aggacaaaaaaccgttgccgctacaggtgttgtacagatacctgcccgttatcagagcatgatcaacgcccgaca

SEQ ID NO: 520500 - DNA, 75 bp, synthetic construct
  source 1..75: mol_type = other DNA
atgataaacgtcggccgctaccgctggtcatcccgatgctattttatcacggtagccgtagtccttatccctggt

SEQ ID NO: 520501 - DNA, 75 bp, synthetic construct
  source 1..75: mol_type = other DNA
ggtaaagacccgcgaaggcgatggctatatctatgtggtgattgaacatcagagccgcgaggacattcatatggc

SEQ ID NO: 520502 - DNA, 75 bp, synthetic construct
  source 1..75: mol_type = other DNA
gaacttgatgggaaagctgtgataagcgtagtcggtagtgactccaacttactgatagtgttttatgttcagata

SEQ ID NO: 520503 - DNA, 75 bp, synthetic construct
  source 1..75: mol_type = other DNA
ctggcataaccaacggattggatattcagatcctcgaaggcttaaagattggagagaatgttgtgttgtcgttgc

SEQ ID NO: 520504 - DNA, 75 bp, synthetic construct
  source 1..75: mol_type = other DNA
gttctggcaactggtcgcattgacgcgattgaacgcgttaacgtaggggcacaggtatcaggccaggtgaaatca

SEQ ID NO: 520505 - DNA, 75 bp, synthetic construct
  source 1..75: mol_type = other DNA
gaaaataatgtttcatttgcagaagctttcataacaacgccatacgtttttgtcatgcaaaaagcacctgacagt

SEQ ID NO: 520506 - DNA, 75 bp, synthetic construct
  source 1..75: mol_type = other DNA
tttttctccgatcaccgtttcacacaatatccatgccggaacacagcttaaccccggtggatgggatataatacc

SEQ ID NO: 520507 - DNA, 75 bp, synthetic construct
  source 1..75: mol_type = other DNA
tgattgcagtacacaagtcccaaacggctaccttgttgcataccgattcgcagcaacaggttcgtggtattaatg

SEQ ID NO: 520508 - DNA, 75 bp, synthetic construct
  source 1..75: mol_type = other DNA
aaattcagcgactgacggtcgttatccataacgtcggcggccagtggaaaaccacgcctcttgaggtggcattca

SEQ ID NO: 520509 - DNA, 75 bp, synthetic construct
  source 1..75: mol_type = other DNA
tgctgggacaaatcgccaccgcggtggggccgctggataaaccctttacgcgtaccgaactgcacaagcaggcct

SEQ ID NO: 520510 - DNA, 75 bp, synthetic construct
  source 1..75: mol_type = other DNA
ggggcggcgtcgcgtgcctggtgatggtcccgcttatcctgttgcatagcggcaataaagcgccgactcagtccc

SEQ ID NO: 520511 - DNA, 75 bp, synthetic construct
  source 1..75: mol_type = other DNA
ctgcattgataagtgctatcaaatcagactcagtcgtcgatctcagcaaggagtacgctgagtgcggactggata

SEQ ID NO: 520512 - DNA, 75 bp, synthetic construct
  source 1..75: mol_type = other DNA
tactggtcttgatgatgacgatgaatttactccaaatagactttcattttttttaaaaaactgggatgataggta

SEQ ID NO: 520513 - DNA, 75 bp, synthetic construct
  source 1..75: mol_type = other DNA
ttaaaatcatgctgtggtggtatatatcatcgtttttgggaattctattatgtcgcactttaataagatatgggg

SEQ ID NO: 520514 - DNA, 75 bp, synthetic construct
  source 1..75: mol_type = other DNA
cattttccttgtggacactgttgctgacctgtcgaatgctcatgctatcattgcgcatttggaaagttttgtgaa

SEQ ID NO: 520515 - DNA, 75 bp, synthetic construct
  source 1..75: mol_type = other DNA
ctaactttcgcggtcatgctgctggttacagggctgctatagaagcagcaccacaactggaggttaaccgtggct

SEQ ID NO: 520516 - DNA, 75 bp, synthetic construct
  source 1..75: mol_type = other DNA
aaaccgtcgccatcgaattacgtaatagcgatcgctcccggctcgcactggggaggcgagcccgactgaggaagt

SEQ ID NO: 520517 - DNA, 75 bp, synthetic construct
  source 1..75: mol_type = other DNA
ctggataccggtagtggtattcctgactacgcgctgtcacgtatttttgaacgcttttactctttgccgcgtgca

SEQ ID NO: 520518 - DNA, 75 bp, synthetic construct
  source 1..75: mol_type = other DNA
ctcctgggcaaccaccaggtcagggagataatctgccgtctggcacgggcaatcagcctttatccagtcagcaac

SEQ ID NO: 520519 - DNA, 75 bp, synthetic construct
  source 1..75: mol_type = other DNA
ctttcatatgcttagcatgttctaagaaattcaatgctttttgtgttgctggaaaattaattaataaaaacagag

SEQ ID NO: 520520 - DNA, 75 bp, synthetic construct
  source 1..75: mol_type = other DNA
gctggcgcaagaataatcgaaataatagaccgaatggagagtgaaaataaaccagaattggcggcaaactttttt

SEQ ID NO: 520521 - DNA, 75 bp, synthetic construct
  source 1..75: mol_type = other DNA
tccccaaagcccgggatgcgcatactctggcactctccgtgctggcagaagtcgcctctgtacgtctccatcagg

SEQ ID NO: 520522 - DNA, 75 bp, synthetic construct
  source 1..75: mol_type = other DNA
ttgaagcgctggaggtgatgggctcaggctgcgatcgcgaaattcgctatggcgaaggttcgccgtggtttgaca

SEQ ID NO: 520523 - DNA, 75 bp, synthetic construct
  source 1..75: mol_type = other DNA
aaagtgtttaagtaacaattacgcatatgattttttcaaatctgccttggaagacttgtcagttcaaattgaaca

SEQ ID NO: 520524 - DNA, 75 bp, synthetic construct
  source 1..75: mol_type = other DNA
tcgacgggagcgccggtgcccgtactgcgaagaccacccctgacgatcgttatacctgccacagcagtagcgtgc

SEQ ID NO: 520525 - DNA, 75 bp, synthetic construct
  source 1..75: mol_type = other DNA
gcaagccgtaccgcccgcgcagcggtgtttatccgcaacgatccggcacgtcccacgcagaccggtgagctggtg

SEQ ID NO: 520526 - DNA, 75 bp, synthetic construct
  source 1..75: mol_type = other DNA
tacaccgaatatggccgggacaacggcatccgtctgtctgccgtgtggctgacgcacgacccggaatacccggag

SEQ ID NO: 520527 - DNA, 75 bp, synthetic construct
  source 1..75: mol_type = other DNA
tattcccggtcatcggatcgcgtccgatatccgagatatcgccgctggagatactggacatgctgcgacgaattg

SEQ ID NO: 520528 - DNA, 75 bp, synthetic construct
  source 1..75: mol_type = other DNA
aagccaccacaaggccaccatcatgaacacctttcaggccatcgctactgaatggcacgacctgaaaaaggccga

SEQ ID NO: 520529 - DNA, 75 bp, synthetic construct
  source 1..75: mol_type = other DNA
cagcaccattttaaacgagcagggatataaccccgactggatagagttacaactcgcccacgttgacggtaacac

SEQ ID NO: 520530 - DNA, 75 bp, synthetic construct
  source 1..75: mol_type = other DNA
tctacacagatcattcatggagtatttttacgctgaaggacttaggaagcgtggcttaatagacataaatgataa

SEQ ID NO: 520531 - DNA, 75 bp, synthetic construct
  source 1..75: mol_type = other DNA
aaagactaaccgccgccatgaaaaaaatgggagccgaaaggaatgccagcgtggcacagatagccatcgcatggg

SEQ ID NO: 520532 - DNA, 75 bp, synthetic construct
  source 1..75: mol_type = other DNA
acgcgattgatatctactggatccataatcccctcgacgtcgaaaaatggacaccaggactgatcccacttttac

SEQ ID NO: 520533 - DNA, 75 bp, synthetic construct
  source 1..75: mol_type = other DNA
atgaatatagctaacttcaactggaagagttatctcacgaaaattcagaggcaatcatacgctgtaataggctta

SEQ ID NO: 520534 - DNA, 75 bp, synthetic construct
  source 1..75: mol_type = other DNA
ttccaggagtaactccctttcgcaaaacaattgagcagctaacaagaaataataatcttaaaataatggatgaag

SEQ ID NO: 520535 - DNA, 75 bp, synthetic construct
  source 1..75: mol_type = other DNA
ggctctgttgatggtgatgacccagcagtattcagaccaatacaaaaatacatcaatggcacatggtataacgtc

SEQ ID NO: 520536 - DNA, 75 bp, synthetic construct
  source 1..75: mol_type = other DNA
agagctctatgatgtgtataaaagattatttaaaagtaagatgtttatatgtctttcgctgcaagagtcatattg

SEQ ID NO: 520537 - DNA, 75 bp, synthetic construct
  source 1..75: mol_type = other DNA
aaggggagccgatgccgctcaccagcggtgagtttgcggtactgaaggcactggtcagccatccgcgtgagccgc

SEQ ID NO: 520538 - DNA, 75 bp, synthetic construct
  source 1..75: mol_type = other DNA
gacctgatgaatcttaaatgggatgctttgtctgttcttgttaaagcccttttcagcagtgaagtaaaaatatcg

SEQ ID NO: 520539 - DNA, 75 bp, synthetic construct
  source 1..75: mol_type = other DNA
attctggatgtttatgctaatagtcagcgtgtattccgctttcagaatggagtggctattgcttttaaaaatatt

SEQ ID NO: 520540 - DNA, 75 bp, synthetic construct
  source 1..75: mol_type = other DNA
agttgttgcatatctgtggcaatacgttgtatccagccaagttgcgttatttcgtcggttgtttcgtgggcgtag

SEQ ID NO: 520541 - DNA, 75 bp, synthetic construct
  source 1..75: mol_type = other DNA
tttgctggggcgaaaaactatcagtacgttatgagcgaacagccggaaatgcgcagtatccagccggttcacgtc

SEQ ID NO: 520542 - DNA, 75 bp, synthetic construct
  source 1..75: mol_type = other DNA
cagataaatcgccattcgttgactacttcttatctggatttaatgtcgcatagtggaacctcactgacgcagtct

SEQ ID NO: 520543 - DNA, 75 bp, synthetic construct
  source 1..75: mol_type = other DNA
tcgatacccgcagtatatatcgtgaactgggcgcaacgctgagttacaacatgcgtctggggaacggtatggaaa

SEQ ID NO: 520544 - DNA, 75 bp, synthetic construct
  source 1..75: mol_type = other DNA
gatctctggtcgtgacggtcttgtctcgacacccccagttgctggagtcgattttgtccgatgccagcatcagta

SEQ ID NO: 520545 - DNA, 75 bp, synthetic construct
  source 1..75: mol_type = other DNA
agtaaaactagcggaaaataaaagtactcgcctgcctacggacctttttactcagggtatttttgttttccataa

SEQ ID NO: 520546 - DNA, 75 bp, synthetic construct
  source 1..75: mol_type = other DNA
aaggtgtttctttaacctataaggaaggcaccaaagtgtatacctctacccaggtgggtaaagagtgccagttta

SEQ ID NO: 520547 - DNA, 75 bp, synthetic construct
  source 1..75: mol_type = other DNA
taatatccggcctgaacaacgttatgccggagctgtttgtcgaagcccgtgaagccttcaaacgcggcgacctgg

SEQ ID NO: 520548 - DNA, 75 bp, synthetic construct
  source 1..75: mol_type = other DNA
gctgaattgttggcacagcaacaaaatgcgccacaaaaccgcgaaatgttatgggcgcaagcgagcgtctgcccg

SEQ ID NO: 520549 - DNA, 75 bp, synthetic construct
  source 1..75: mol_type = other DNA
cgttccatctacaacgttgcagccgttgcgaacgcccgtttgcccagcaaaaaaccgtcgcactggctgctgaat

SEQ ID NO: 520550 - DNA, 75 bp, synthetic construct
  source 1..75: mol_type = other DNA
tgatgttcaaaggggcgattatatttgatagttttcaatctgtcttgattttattggttttagatattgtatttt

SEQ ID NO: 520551 - DNA, 75 bp, synthetic construct
  source 1..75: mol_type = other DNA
gctggcaatctcctgccccatggataagcgtttttcgaatgtagcccatatataccccgctgttgagatttggga

SEQ ID NO: 520552 - DNA, 75 bp, synthetic construct
  source 1..75: mol_type = other DNA
ttgccaaggctgcatatgcctttacatctgctttggcgcttcttttgaaacgtttgggtaagcacaatgtaatgg

SEQ ID NO: 520553 - DNA, 75 bp, synthetic construct
  source 1..75: mol_type = other DNA
ttgacgttgttagtgacggggaaactgagaggaggattgcagcgctacagcatgaggttgaaactgtcacagcca

SEQ ID NO: 520554 - DNA, 75 bp, synthetic construct
  source 1..75: mol_type = other DNA
tgccggggcagcagtatgatgaggagtccggcctgtattacaaccgccaccgctattatgacccgctgcaggggc

SEQ ID NO: 520555 - DNA, 75 bp, synthetic construct
  source 1..75: mol_type = other DNA
ctatcgcggcctgccgctgacgcttatcagccctgacggggcaacagaatggtgcgcagaatatgatgaatgggg

SEQ ID NO: 520556 - DNA, 75 bp, synthetic construct
  source 1..75: mol_type = other DNA
cctgtacgagcaggccgccgaatgtgacggcgaggtggttcgtcccaaagaaccgaactggacagcatgggcaaa

SEQ ID NO: 520557 - DNA, 75 bp, synthetic construct
  source 1..75: mol_type = other DNA
tctctgacctgacgcgtatcctggtcgaagacgcgttaagtgaaatgtttcttcctgcagataacatcgtccgcc

SEQ ID NO: 520558 - DNA, 75 bp, synthetic construct
  source 1..75: mol_type = other DNA
ggtaactgtaacgctacagaacgacactgaaataaccatacctacaaacccgttaccgctaaatgatggaacatc

SEQ ID NO: 520559 - DNA, 75 bp, synthetic construct
  source 1..75: mol_type = other DNA
gacttttcatccatcgttcggcattgaacgcctatctgtccataacaggtgaagagcttatacatcgccgttttg

SEQ ID NO: 520560 - DNA, 75 bp, synthetic construct
  source 1..75: mol_type = other DNA
ttaccggtgaggtgaataaggttgcaaatgtggcagcccatgccgtggtgaatgtcacactggcggtggcacagg

SEQ ID NO: 520561 - DNA, 75 bp, synthetic construct
  source 1..75: mol_type = other DNA
aaaataaaagaaaatatcgattttaattatgtcggtgcagttaacggatattgcgatatatccgaaccggaaaaa

SEQ ID NO: 520562 - DNA, 75 bp, synthetic construct
  source 1..75: mol_type = other DNA
tgctattcgacaaggtaacattgatataaaaaatagttctattacaacaacaggcactaaagcccccattgcaaa

SEQ ID NO: 520563 - DNA, 75 bp, synthetic construct
  source 1..75: mol_type = other DNA
aacttgttgaaaacaggagaatttcccacagccgtaacaagccaattacagcattaccagacaaacgtatcatta

SEQ ID NO: 520564 - DNA, 75 bp, synthetic construct
  source 1..75: mol_type = other DNA
gaacgcctacctggccataacaggtgaagaacttatatatcgccgttttgctaacaggggatattttgatttagc

SEQ ID NO: 520565 - DNA, 75 bp, synthetic construct
  source 1..75: mol_type = other DNA
ccgaccggaagcacggcgaccatttatagccacggttctggtatattctcgcggtgcggcgatacgtggtcagcg

SEQ ID NO: 520566 - DNA, 75 bp, synthetic construct
  source 1..75: mol_type = other DNA
cagaccgcgaccttaaagacgatattctcgttatcagcgacgcgacgaaagcaatccgcaaaatgaacgggtaca

SEQ ID NO: 520567 - DNA, 75 bp, synthetic construct
  source 1..75: mol_type = other DNA
aaaatagtgatgatggcccccgtcttattataaaaaactcaaacaattcggcgcagtcgtggagtgttacggtgt

SEQ ID NO: 520568 - DNA, 75 bp, synthetic construct
  source 1..75: mol_type = other DNA
cgcttgttgatgaaaacggtggagtaaagttttttgttaacaggctgtctgccatgtcaccgcgtacctattacc

SEQ ID NO: 520569 - DNA, 75 bp, synthetic construct
  source 1..75: mol_type = other DNA
acttggcaacgtaactaatgatgcgcaggtgaaaaaatccggcgatgttatgtcaggtgacttgacgatcaataa

SEQ ID NO: 520570 - DNA, 75 bp, synthetic construct
  source 1..75: mol_type = other DNA
ttgaagtccgtgatctcacagtagcgtataaaattaaaagcagaacgattgagattgcaaataccgacactgact

SEQ ID NO: 520571 - DNA, 75 bp, synthetic construct
  source 1..75: mol_type = other DNA
tcccgtcacttacgcataaccatcttcctgtcatgacaacagagctgctggctgatttgtacggaacagagcgcc

SEQ ID NO: 520572 - DNA, 75 bp, synthetic construct
  source 1..75: mol_type = other DNA
ccgtaagtaatgggtattttgatattgttaagcttttagtagaatcaggagccgatcttactataaaggatgaat

SEQ ID NO: 520573 - DNA, 75 bp, synthetic construct
  source 1..75: mol_type = other DNA
aaacggaaagaagagcgtgagcgtatggctgaggaaaggaaacgaacccagctgctggaaaactacttatctgat

SEQ ID NO: 520574 - DNA, 75 bp, synthetic construct
  source 1..75: mol_type = other DNA
gtcacaatctgccttactggtggtcagccttgcttggtatcttttccgtcctgagtctgcaggattatgtcttca

SEQ ID NO: 520575 - DNA, 75 bp, synthetic construct
  source 1..75: mol_type = other DNA
gatggaagccagtacccgtcgcgtcgccgtaaaacgctgcgtacccagcaagggatcgcttttatctgggaaggg

SEQ ID NO: 520576 - DNA, 75 bp, synthetic construct
  source 1..75: mol_type = other DNA
ggaatactctggtattgtctgtaaagatactaatggaaaatattttgcatctaaggcagaaactgataatttaag

SEQ ID NO: 520577 - DNA, 75 bp, synthetic construct
  source 1..75: mol_type = other DNA
tcattgcctctggtggcggtggcggcggcggtggggttcctgaaacaacagaaaatcagcaggcaacagccggag

SEQ ID NO: 520578 - DNA, 75 bp, synthetic construct
  source 1..75: mol_type = other DNA
cctaaccatcagctcgttcttcagctgggccccgccggcatcatcagtaatatccgccgtaatccgaaggctgtt

SEQ ID NO: 520579 - DNA, 75 bp, synthetic construct
  source 1..75: mol_type = other DNA
taatactttgtattatgttgggaggttttatgatccgtagctgtactggaaaaacaaactcttcaagcgaagcaa

SEQ ID NO: 520580 - DNA, 75 bp, synthetic construct
  source 1..75: mol_type = other DNA
aagttatgcagttgctattcgacaaggtaacattgatataaaaaatagttctattacaacaaaaggcactaaagc

SEQ ID NO: 520581 - DNA, 75 bp, synthetic construct
  source 1..75: mol_type = other DNA
tgcacgtatcggtcagcatattgcatcgccaggaacgccctgtggcaatggcctccgttaccgatccgctttttg

SEQ ID NO: 520582 - DNA, 75 bp, synthetic construct
  source 1..75: mol_type = other DNA
ctgagtggcgtatcaccgcactggcgctgatagccgcagttagcgccaatgttaaagctattgatgaacggcagc

SEQ ID NO: 520583 - DNA, 75 bp, synthetic construct
  source 1..75: mol_type = other DNA
tcagctggaaagggaatatctgaatgaacaaatcacgttgcggggcctgcgtgccagacagggaagtgcggattc

SEQ ID NO: 520584 - DNA, 75 bp, synthetic construct
  source 1..75: mol_type = other DNA
cccgatgacgcaatacgattggcccgttgttactggtaatgagtctttttacataaagatcgcgaaactttccga

SEQ ID NO: 520585 - DNA, 75 bp, synthetic construct
  source 1..75: mol_type = other DNA
caaacaacttgaaagtattgcccgtagtcgtggtctccccccaaaaaaactgctgaatgaaatgattgagcaggc

SEQ ID NO: 520586 - DNA, 75 bp, synthetic construct
  source 1..75: mol_type = other DNA
aagctattccttttgcagaacaaggtaaattagttacttttggtattgttccaagtatggctgaaacaggatatg

SEQ ID NO: 520587 - DNA, 75 bp, synthetic construct
  source 1..75: mol_type = other DNA
ggtgatgttattaatcacaatactgagaatagttatgtctatgccgagtctggtttggtgactaccattggggta

SEQ ID NO: 520588 - DNA, 75 bp, synthetic construct
  source 1..75: mol_type = other DNA
caaacagcttgaaagtattgcccgcagtcgtggtctcctcccaaaaaaactgctgaatgaaatgattgagcaggc

SEQ ID NO: 520589 - DNA, 75 bp, synthetic construct
  source 1..75: mol_type = other DNA
caaacaccttgaaagtattgcccgtagtcgtggtctccacccaaaaaaactgctgaatgaaatgattgagcaggc

SEQ ID NO: 520590 - DNA, 75 bp, synthetic construct
  source 1..75: mol_type = other DNA
caaacatcttgaaagtattgcccgcagtcgtggtctccgcccaaaaaaactgctgaatgaaatgattgagcaggc

SEQ ID NO: 520591 - DNA, 75 bp, synthetic construct
  source 1..75: mol_type = other DNA
gagacagcgttccctcgtatggacatgtgtttgccatactatttgcttgttgttgctcttttggcaggcagagcc

SEQ ID NO: 520592 - DNA, 75 bp, synthetic construct
  source 1..75: mol_type = other DNA
aataggaaatgttcgatgggatatatcttctagttttgaagtgataattggtcccgtagatttaaatatagcgca

SEQ ID NO: 520593 - DNA, 75 bp, synthetic construct
  source 1..75: mol_type = other DNA
attttgcggcaaatttgtcaaacgcaggttatcattatcccttttagtgggcgttggaaaaatattgatcacaat

SEQ ID NO: 520594 - DNA, 75 bp, synthetic construct
  source 1..75: mol_type = other DNA
gtgtggaatatttacgccaataatgatgtggtggtgcctactggcggctgcgatgtttctgctcgtgatgtcacc

SEQ ID NO: 520595 - DNA, 75 bp, synthetic construct
  source 1..75: mol_type = other DNA
attttatgcagacactgttcatggtgggtggctatctactgactctgttcatcgttatcgtactttcctttttca

SEQ ID NO: 520596 - DNA, 75 bp, synthetic construct
  source 1..75: mol_type = other DNA
gatgattttttggctgccggaatgagccaggtacaattctgtaccgcaatcgaacaaagtcttcaggcgaaagaa

SEQ ID NO: 520597 - DNA, 75 bp, synthetic construct
  source 1..75: mol_type = other DNA
gcggtatgacattatctctggatcacgcggcgtggatcaagaacccacgatactcagaacacaacaagggaaaag

SEQ ID NO: 520598 - DNA, 75 bp, synthetic construct
  source 1..75: mol_type = other DNA
aggggaattagtttatcgcggtacatggcacacccatcccgaaggtattccttatgcttcaaatgttgatgtcag

SEQ ID NO: 520599 - DNA, 75 bp, synthetic construct
  source 1..75: mol_type = other DNA
tagaaacagagaatttcagaatcaacattttaaagaatgttgatgatatttggtttggatatcgacaaataaata

SEQ ID NO: 520600 - DNA, 75 bp, synthetic construct
  source 1..75: mol_type = other DNA
caacaccttatttaggcaaggtgttgaaacgacgaaaccccgcactgtaggagcagtaacggggcttctaaccaa

SEQ ID NO: 520601 - DNA, 75 bp, synthetic construct
  source 1..75: mol_type = other DNA
gcatcaacaaaggccactgaagcatcaaaaagtgctgccgctgcagagtcttcaaaaagcgcggcagccaccagt

SEQ ID NO: 520602 - DNA, 75 bp, synthetic construct
  source 1..75: mol_type = other DNA
tgcttgatgattttcttccccattttcctggcttctatctgtattttcctcaacgccggaatatagcgccaaaac

SEQ ID NO: 520603 - DNA, 75 bp, synthetic construct
  source 1..75: mol_type = other DNA
agatactttcgggacaatgcttgtaatgcggaccacgcgctcagttaatttgacggaagcaggagaacggctgca

SEQ ID NO: 520604 - DNA, 75 bp, synthetic construct
  source 1..75: mol_type = other DNA
tacgaagttgattttgacgctgagtttaactccgaaaaagaaagactgatgaaactatattttcctagtgagcca

SEQ ID NO: 520605 - DNA, 75 bp, synthetic construct
  source 1..75: mol_type = other DNA
atgatttaacaccaggaaaatacaaaaaatttatctgtctggggatggttctgctggtctaccacttcttaagtg

SEQ ID NO: 520606 - DNA, 75 bp, synthetic construct
  source 1..75: mol_type = other DNA
tgctcttgggatgacgccagaaatgttggcgttaatgcgtgaaggtgagcgcatgaaaacgctgctggctaaatc

SEQ ID NO: 520607 - DNA, 75 bp, synthetic construct
  source 1..75: mol_type = other DNA
gtaaaacccggacgggccggctgtgggtgtatgtgctcgatgaccggaaccgcggttcagcggctccgccagcgg

SEQ ID NO: 520608 - DNA, 75 bp, synthetic construct
  source 1..75: mol_type = other DNA
gcgtaaactcgctggcgctcgcgctaactgcggcattctgcggcgcaaatcagcatgatcatggcctgttggtct

SEQ ID NO: 520609 - DNA, 75 bp, synthetic construct
  source 1..75: mol_type = other DNA
attttctttcgccccttctatgccctgtcgggcattacatgaatctaaccatctgtatttgatggcatttatttt

SEQ ID NO: 520610 - DNA, 75 bp, synthetic construct
  source 1..75: mol_type = other DNA
cgctcaggagctgcttccgggacgtatcggtatggtttctggactctttttcggttttgcttttggtatgggagg

SEQ ID NO: 520611 - DNA, 75 bp, synthetic construct
  source 1..75: mol_type = other DNA
ataccgcgtgtgggtcaggaggtgattgtagacttcctcaacggcgatccggaccagccgatcattatggggcgc

SEQ ID NO: 520612 - DNA, 75 bp, synthetic construct
  source 1..75: mol_type = other DNA
gtatcgatctcggcactaccaatagggaaggtgcgaataagcggggaaatacttctcggctgactcagtcatttc

SEQ ID NO: 520613 - DNA, 75 bp, synthetic construct
  source 1..75: mol_type = other DNA
atgaaattcccttcaatatttaataaaataaatccacaatccatacagcaacatccagaaaaaaatgaacttaac

SEQ ID NO: 520614 - DNA, 75 bp, synthetic construct
  source 1..75: mol_type = other DNA
tgtaaaccagaggaatataaaaattaaaaatatgaccttagatgaaataaacaatacttactgtaataacgatta

SEQ ID NO: 520615 - DNA, 75 bp, synthetic construct
  source 1..75: mol_type = other DNA
cgattggacttgttcgtgcgctgaccgtgggcgtggcgtaccagacgacggtaggtggcattatgaacacttcgg

SEQ ID NO: 520616 - DNA, 75 bp, synthetic construct
  source 1..75: mol_type = other DNA
taacccgacacctacgccgggtccggatctgaatgtggataatgacctgcgaccggaggcgggtagctacattgc

SEQ ID NO: 520617 - DNA, 75 bp, synthetic construct
  source 1..75: mol_type = other DNA
gcagcagaagggctgatctccaacgtgctacgtgtggagcgggtgctggaaaggtgtgtgaagcaacagccgccg

SEQ ID NO: 520618 - DNA, 75 bp, synthetic construct
  source 1..75: mol_type = other DNA
tttcagctaaagtcagagccgatctcaaacggaaccttaaaggtaattcggtgtataaaaaacatcgctggagtc

SEQ ID NO: 520619 - DNA, 75 bp, synthetic construct
  source 1..75: mol_type = other DNA
gaggggctgggctatatcaatacgctcaatggtacgacttacttaaccggcgataactctgcatttagcggcaaa

SEQ ID NO: 520620 - DNA, 75 bp, synthetic construct
  source 1..75: mol_type = other DNA
ttatcgtgcaaaagcgagtgtgaacggatatagcaccggcctctatgccacctggtatgccgatgacgagtcgcg

SEQ ID NO: 520621 - DNA, 75 bp, synthetic construct
  source 1..75: mol_type = other DNA
ctgacggctaatatgaatattgcaaacggggccagtgttctggtgagccatgcacaaggattggggagtgcaaac

SEQ ID NO: 520622 - DNA, 75 bp, synthetic construct
  source 1..75: mol_type = other DNA
tagagtttgtgcaattagaatgttgcgaaaggctgcagtacctgaatctcagccacaatcaattaactgatattg

SEQ ID NO: 520623 - DNA, 75 bp, synthetic construct
  source 1..75: mol_type = other DNA
gacacactcaagttttcgcgatccggtaactatatcaatgttcataatccatcacctttttatgtcaccctggtt

SEQ ID NO: 520624 - DNA, 75 bp, synthetic construct
  source 1..75: mol_type = other DNA
cccttaccctcaggagtgcagggaaagctgaaatttcagaccgttaatgattatggttcagtaaccccggtcaga

SEQ ID NO: 520625 - DNA, 75 bp, synthetic construct
  source 1..75: mol_type = other DNA
acaaacaggaggccacgcagccggacaccgccagcagaaggtattatgattttcgtaatacctttagcaaagcgt

SEQ ID NO: 520626 - DNA, 75 bp, synthetic construct
  source 1..75: mol_type = other DNA
tttcagccaattttactaatttgattgttagtatttttattggactattactgacgcctttactcgtcaaaagtt

SEQ ID NO: 520627 - DNA, 75 bp, synthetic construct
  source 1..75: mol_type = other DNA
atctcactggtctggattatcctcaccatcatctgggctttcagagccagaacggctctgcaacaatatgcgctg

SEQ ID NO: 520628 - DNA, 75 bp, synthetic construct
  source 1..75: mol_type = other DNA
atgaggagtccggcctgtattacaaccgccaccgctattatgacccgctgcaggggaggtatatcactcaggatc

SEQ ID NO: 520629 - DNA, 75 bp, synthetic construct
  source 1..75: mol_type = other DNA
ttcagacattaaacgctgcgaacaatcagttggaaaaaataaaccttcatttcctgacttatctttcatctatca

SEQ ID NO: 520630 - DNA, 75 bp, synthetic construct
  source 1..75: mol_type = other DNA
ttcgcctggtgcatttgaagttcactctgacggaatagatgtggataacgaattgtttcactatcctattaataa

SEQ ID NO: 520631 - DNA, 75 bp, synthetic construct
  source 1..75: mol_type = other DNA
tagagtttgtgcaattagaatcttgcgaatggctgcaatacctgaatctcagccataatcaattaactgatattg

SEQ ID NO: 520632 - DNA, 75 bp, synthetic construct
  source 1..75: mol_type = other DNA
gaatatagtccctgatggtgctgtaattctgaatatccggtcacaggcttacaaaattactgctgtaacttatgg

SEQ ID NO: 520633 - DNA, 75 bp, synthetic construct
  source 1..75: mol_type = other DNA
tgagtttgtggcctggctgaaagaaaagggggcatttgaccagccttactggatgatgaaggcatcactgcctgc

SEQ ID NO: 520634 - DNA, 75 bp, synthetic construct
  source 1..75: mol_type = other DNA
gcaggcaccggttttggccacctggcgataccgcgtgtgggtcaggaggtgattgtggacttcctcaacggcgac

SEQ ID NO: 520635 - DNA, 75 bp, synthetic construct
  source 1..75: mol_type = other DNA
aaattatttctttcaataaaactctcgatgcctatattctggctttcagccagtgcctgcatgatgaacttctta

SEQ ID NO: 520636 - DNA, 75 bp, synthetic construct
  source 1..75: mol_type = other DNA
tctttggaagcaaaatcagtgcttgatcaaatcgttaatgttgacaatcaattaaacgaattgaccttcagagag

SEQ ID NO: 520637 - DNA, 75 bp, synthetic construct
  source 1..75: mol_type = other DNA
gtttacggacaagtcttcattttgcaatgatggaggccaaaaataatgtattaatgatttctggagcaagtccta

SEQ ID NO: 520638 - DNA, 75 bp, synthetic construct
  source 1..75: mol_type = other DNA
ctatccgcggtttgcgtacaagcctgcacttcgcaatgatggaagcacgaaacaatgtcttgatgatttctggag

SEQ ID NO: 520639 - DNA, 75 bp, synthetic construct
  source 1..75: mol_type = other DNA
ataatgaatatgatctagtcattatcgatacgccaccaatacttgccgctaccgatgcagcaataattggtaatt

SEQ ID NO: 520640 - DNA, 75 bp, synthetic construct
  source 1..75: mol_type = other DNA
acagtcaagaatgatattagggaaaacagtagatgatttaaatttacaaacaagagttaaacaggattatttccc

SEQ ID NO: 520641 - DNA, 75 bp, synthetic construct
  source 1..75: mol_type = other DNA
tgaaaaaagactctgatgaaattgatttagggcgattagttggcgaactcattgatcatcgaaaactaattattt

SEQ ID NO: 520642 - DNA, 75 bp, synthetic construct
  source 1..75: mol_type = other DNA
actccgatttatcagtcggatgccttaattcaagttgaacaaaagcaaggcaatgctattttaagcaatctgagt

SEQ ID NO: 520643 - DNA, 75 bp, synthetic construct
  source 1..75: mol_type = other DNA
atcttgttattattgatacccctccaattctcgctgtaacagatgcagcaattatcggaaggtatgtaggaacta

SEQ ID NO: 520644 - DNA, 75 bp, synthetic construct
  source 1..75: mol_type = other DNA
cttccgctacagaagctgaggctattgatttcggtaggttaattggtgagttaatagaccatcgaaaattaatta

SEQ ID NO: 520645 - DNA, 75 bp, synthetic construct
  source 1..75: mol_type = other DNA
acgcctatttatcaggctgatgcgttactacaagtagagcaaaagcaaggtaatgctattctgaatagtctaagc

SEQ ID NO: 520646 - DNA, 75 bp, synthetic construct
  source 1..75: mol_type = other DNA
ataaaacgctttgagcaaagcggtgtaatagtaaaaggttgtatactgaacggtattattaacaaagcaagtagt

SEQ ID NO: 520647 - DNA, 75 bp, synthetic construct
  source 1..75: mol_type = other DNA
acagtcaagaatgatacttggaaagacagttgatgatttaactttacaagctaaagttaagcaagattactttcc

SEQ ID NO: 520648 - DNA, 75 bp, synthetic construct
  source 1..75: mol_type = other DNA
gaattaattaataaagatgggttctcaataaaaattaataaagtagatgctcttcctggtacggtattcacgata

SEQ ID NO: 520649 - DNA, 75 bp, synthetic construct
  source 1..75: mol_type = other DNA
gaggtgagtgttaaacggttcgaacaagctggcgtatcagtgaaaggctgtatactgaatggtgttattaaaaaa

SEQ ID NO: 520650 - DNA, 75 bp, synthetic construct
  source 1..75: mol_type = other DNA
aagactatcataattgtaataggtgttgttttagggctaatcgtttcggttgtactggtattgttccaagtgttt

SEQ ID NO: 520651 - DNA, 75 bp, synthetic construct
  source 1..75: mol_type = other DNA
agcgttaatggagaaaaaacaaacattacaaacggagaggaataaattaaacaagaaagtcagctcaatgccctc

SEQ ID NO: 520652 - DNA, 75 bp, synthetic construct
  source 1..75: mol_type = other DNA
tctgaatgacaatctcttcacgtattccagaaaggaacaaattataaatcagcttcatgggatgaaacgtcgtga

SEQ ID NO: 520653 - DNA, 75 bp, synthetic construct
  source 1..75: mol_type = other DNA
aagctatattctttctcatatcaggcagaaaaagaatgtcccccttaaaagcgttgttaagcgactcctgaattc

SEQ ID NO: 520654 - DNA, 75 bp, synthetic construct
  source 1..75: mol_type = other DNA
acagccacagccacagccacagccacagccacagccacagccacagccacagccacagccacagccacagccaca

SEQ ID NO: 520655 - DNA, 75 bp, synthetic construct
  source 1..75: mol_type = other DNA
tgagaatagcaaaattatttatacctggtgcaaatgaagattatataccaaagttacaactgaatgttattgata

SEQ ID NO: 520656 - DNA, 75 bp, synthetic construct
  source 1..75: mol_type = other DNA
aatcaattagagggcttaggaccagcctccattttgcaatgatggaagctaggaataatgtattaatgatttcgg

SEQ ID NO: 520657 - DNA, 75 bp, synthetic construct
  source 1..75: mol_type = other DNA
actcctatatatcaagctgatgctctcgttcaggttgagcagaagcaagccaatgccatactaagtaatattagc

SEQ ID NO: 520658 - DNA, 75 bp, synthetic construct
  source 1..75: mol_type = other DNA
acaggtaagaaggtattatttattgatgcagatctccggaagggatatgtccataaaatattaggcaacactaaa

SEQ ID NO: 520659 - DNA, 75 bp, synthetic construct
  source 1..75: mol_type = other DNA
gttcttgttgggattgtaattggtgcagtactatctattgggattattcttctccgtatctcgctgagacgtgga

SEQ ID NO: 520660 - DNA, 75 bp, synthetic construct
  source 1..75: mol_type = other DNA
attacaatcaagaatgatattagggaagaccgttgatgagctagcgctacaagctcaaataactcctaaatattt

SEQ ID NO: 520661 - DNA, 75 bp, synthetic construct
  source 1..75: mol_type = other DNA
ataaaaaacgcgcactttgtcaacaatctgaaacgccggagatttttctctccggcgttattttttacttcagca

SEQ ID NO: 520662 - DNA, 75 bp, synthetic construct
  source 1..75: mol_type = other DNA
ccctgcaagatgttgccgccaagcagtccgcagagaacagccagcacatcaccgacaagctgagcgcattcacta

SEQ ID NO: 520663 - DNA, 75 bp, synthetic construct
  source 1..75: mol_type = other DNA
acgtccattgaacgctgcaagcaggagcgacagaccgccctcgatgagagcgcagaggctgagcaggactggcgc

SEQ ID NO: 520664 - DNA, 75 bp, synthetic construct
  source 1..75: mol_type = other DNA
ctgatgcttatctgcctgaacccgaagatcccggcgcgcggaaaaagaaaaaagccagagtacaggaggacccgt

SEQ ID NO: 520665 - DNA, 75 bp, synthetic construct
  source 1..75: mol_type = other DNA
attgaggtgatcaacaaaatactcggtcagcagcaggcactggcttacgacgacccgcacggcaggctggtgatt

SEQ ID NO: 520666 - DNA, 75 bp, synthetic construct
  source 1..75: mol_type = other DNA
cactcaccggcgtggacatgaagctctttaaaagccctgttctcagaatggcgcgggctaaggagctggcacaga

SEQ ID NO: 520667 - DNA, 75 bp, synthetic construct
  source 1..75: mol_type = other DNA
cttccctaacctgacgctggtaaaaattccgcgtgccattttgagcaaatgcgaatgggatcaggacgactatag

SEQ ID NO: 520668 - DNA, 75 bp, synthetic construct
  source 1..75: mol_type = other DNA
acggttaaaactgctgccttatgaaacccttgtcggttttgtggtcgccctgatttccacactgatgtttggcgt

SEQ ID NO: 520669 - DNA, 75 bp, synthetic construct
  source 1..75: mol_type = other DNA
agaaaagacgcgcgacgaaatggcgcagatgctgaatggtattcaggacgccgccatcaaatttaaggttgatga

SEQ ID NO: 520670 - DNA, 75 bp, synthetic construct
  source 1..75: mol_type = other DNA
atgctgcgcgcatttgcccgccttcttctccgtatttgtttttctcgccggactcttaaaattggctgtttattg

SEQ ID NO: 520671 - DNA, 75 bp, synthetic construct
  source 1..75: mol_type = other DNA
tgcctgaacttttgtcgcgtattggcagttacaaggggcaacctgtcacccagctttgccgttatgctgaattta

SEQ ID NO: 520672 - DNA, 75 bp, synthetic construct
  source 1..75: mol_type = other DNA
ggctgaatccgatgatatcggggtggctgaattattacgcgaaataccacaaatcagcgatgaagaaagtatgca

SEQ ID NO: 520673 - DNA, 75 bp, synthetic construct
  source 1..75: mol_type = other DNA
tattcagcaaaatggacgattgatttagaattagtcaaaatgtatttttttatggggagtaaactcattgtatca

SEQ ID NO: 520674 - DNA, 75 bp, synthetic construct
  source 1..75: mol_type = other DNA
tggcgataacggacgtaaaaattacgatgaagcctcaggtatgcagcaggctttgatcgctaaaggcgtaccggc

SEQ ID NO: 520675 - DNA, 75 bp, synthetic construct
  source 1..75: mol_type = other DNA
acgggattgcgtgtttgtccgactacatgatcgacaaagaaatcgctcgcggagaattggtggagttaatggcag

SEQ ID NO: 520676 - DNA, 75 bp, synthetic construct
  source 1..75: mol_type = other DNA
tctgctgtgcgatggcgtcattatcaagccatggcgggagaaggggtatgaacactggatccgggtgtctgtggg

SEQ ID NO: 520677 - DNA, 75 bp, synthetic construct
  source 1..75: mol_type = other DNA
ggcagcctgagttcacagataaaacactctccaggaaacccggggcggttcacagtacgccaaacgtgatgcgtc

SEQ ID NO: 520678 - DNA, 75 bp, synthetic construct
  source 1..75: mol_type = other DNA
gatgtagaagttgcggtgcgtgaaaaaaatcgcgatgcgctatcgccaagctggagattgaacagcaagaagcgt

SEQ ID NO: 520679 - DNA, 75 bp, synthetic construct
  source 1..75: mol_type = other DNA
gttggagattgaacaacaagaagcgtttatgacgcttgagcaggagcagcaggttaaaaacccgtactgccgaac

SEQ ID NO: 520680 - DNA, 75 bp, synthetic construct
  source 1..75: mol_type = other DNA
caactggtcgccgaaaacgctgacggtaaacacactgcatgccagcagtatgaatatcgccatgggggtcagcac

SEQ ID NO: 520681 - DNA, 75 bp, synthetic construct
  source 1..75: mol_type = other DNA
gtgctcggtgtgctgataatgatggtattgtatggcggatacctgacttggtttgttctgggatttactctggtt

SEQ ID NO: 520682 - DNA, 75 bp, synthetic construct
  source 1..75: mol_type = other DNA
gtacgcagtatctctgcagcatcccgcccgtcacctatgaaaggcactgtcagcgtggcagccatatccagcgca

SEQ ID NO: 520683 - DNA, 75 bp, synthetic construct
  source 1..75: mol_type = other DNA
atcgccaaactggccagtaatgaaaatccgctgggcgccagcccgcaggtcatcgcggcactgcaggcggatgcc

SEQ ID NO: 520684 - DNA, 75 bp, synthetic construct
  source 1..75: mol_type = other DNA
tgggatggttcgtatgctgagctcgctgctttccttgcgggaactggtgagagtgatggtggtggctctggttgc

SEQ ID NO: 520685 - DNA, 75 bp, synthetic construct
  source 1..75: mol_type = other DNA
gcgccgccggagagtgaagaaaaactcgcggtgctgcgcgtaatgcgaatgctggaggacaaaatcggcgctgaa

SEQ ID NO: 520686 - DNA, 75 bp, synthetic construct
  source 1..75: mol_type = other DNA
ggcggcattatcgccgtacgtaagacgtacaagttcggtaaaactatccacgacatcatgaatcccaaagggaaa

SEQ ID NO: 520687 - DNA, 75 bp, synthetic construct
  source 1..75: mol_type = other DNA
agaccatcctatatccagtatcaatcagaagatagcaaggcaagaaaccaacgtgttaattacttgttgggagat

SEQ ID NO: 520688 - DNA, 75 bp, synthetic construct
  source 1..75: mol_type = other DNA
ggaccaaactacatccagtatcaatctgaagacagtaaagccagaaaccagcgggttaattacctattgaaagac

SEQ ID NO: 520689 - DNA, 75 bp, synthetic construct
  source 1..75: mol_type = other DNA
agtattcagaggtatggaaactatttggtcaaatgcctgattctgccactgtaaatagtgagcttgcttctgtct

SEQ ID NO: 520690 - DNA, 75 bp, synthetic construct
  source 1..75: mol_type = other DNA
agaaggatatagcccggcacgtgctaccgtacaagctgagatggctcgcccggagattctggttgaagtgatggt

SEQ ID NO: 520691 - DNA, 75 bp, synthetic construct
  source 1..75: mol_type = other DNA
aacgtaataacccacagccgcgtctggccgccagcgtggaatatagcaaccttgtttttctctccggccagacac

SEQ ID NO: 520692 - DNA, 75 bp, synthetic construct
  source 1..75: mol_type = other DNA
gctgatgctctttaacagtgaaggtaaaaccgtctggcgaccggggcagaccagcctgtgggggctggcactcag

SEQ ID NO: 520693 - DNA, 75 bp, synthetic construct
  source 1..75: mol_type = other DNA
atggtgaatattcaatagctacacaatttagtgatcttttgcgttcacttgctggtttggtagctggtagtttgg

SEQ ID NO: 520694 - DNA, 75 bp, synthetic construct
  source 1..75: mol_type = other DNA
cagaaaggataaggtaaagagattaacatctttcagtggctggatattgtttgatcaaattgggtcaattctttt

SEQ ID NO: 520695 - DNA, 75 bp, synthetic construct
  source 1..75: mol_type = other DNA
ggacttctatctacatttcctttctatagtaaagaggaaaggcgatcatttatgttaatgctcaagaggaaagtg

SEQ ID NO: 520696 - DNA, 75 bp, synthetic construct
  source 1..75: mol_type = other DNA
cagggtactggcactacgatccgcattttactgccgctgacgctggccatcctcgacggcatgtccgtacgcgtt

SEQ ID NO: 520697 - DNA, 75 bp, synthetic construct
  source 1..75: mol_type = other DNA
tcgtttcaccggaaaaacaccttcagaatatagaaaaaataaagtttgggacgtttctgttttacagaattcatt

SEQ ID NO: 520698 - DNA, 75 bp, synthetic construct
  source 1..75: mol_type = other DNA
tacgaagaaattaacaagcaggtcactaacaaaaaaattgctctccaggctctttttctttcgattactaatcaa

SEQ ID NO: 520699 - DNA, 75 bp, synthetic construct
  source 1..75: mol_type = other DNA
ggagtgatgatgcgattgagcgccagttaagccactcagaacgtaacaatgttcgtgcggcgtatattcatactt

SEQ ID NO: 520700 - DNA, 75 bp, synthetic construct
  source 1..75: mol_type = other DNA
gcggcgctggttgcagggggaagcttcgctgtcactcagttctttacctctaactatattggtccggaactgccg

SEQ ID NO: 520701 - DNA, 75 bp, synthetic construct
  source 1..75: mol_type = other DNA
gatattacttcggcgctggtgagtatcgtctcactttctttatttcttaaagtctggcggccaaaaaataccgaa

SEQ ID NO: 520702 - DNA, 75 bp, synthetic construct
  source 1..75: mol_type = other DNA
gaaattcctgtcagcctcaattactacggctttggtgggggcgaagtgctgccagcgggcgtacagattgctgtg

SEQ ID NO: 520703 - DNA, 75 bp, synthetic construct
  source 1..75: mol_type = other DNA
cttccgatattgcttcaggagattgccagaaaatcagggaaccggggcgcagaagaacaaaataaaaggctgatt

SEQ ID NO: 520704 - DNA, 75 bp, synthetic construct
  source 1..75: mol_type = other DNA
ccattcgtaccacagcaattgcagggagaaatccgtgtggtggtggaaggtgatgcacgcgtgaaaagcgtcaga

SEQ ID NO: 520705 - DNA, 75 bp, synthetic construct
  source 1..75: mol_type = other DNA
gaaattcctgtcagcctcaattactacggctttggtgggggcgaagtgctgccagcgggtgtacagattgccgtg

SEQ ID NO: 520706 - DNA, 75 bp, synthetic construct
  source 1..75: mol_type = other DNA
ctggcgtttggcccttacccgaccgttacgctggcgaatgcacgtaagctgcgtgaagaagctcgcgccgtactc

SEQ ID NO: 520707 - DNA, 75 bp, synthetic construct
  source 1..75: mol_type = other DNA
ctgagcatctggaagctcgtatggagatgatgcagtggtggtcagattatcttgatgcaaaccgtgaaggatata

SEQ ID NO: 520708 - DNA, 75 bp, synthetic construct
  source 1..75: mol_type = other DNA
gcccagtcaggcattatcagctataaccctgcagtggatatggctggtgctttaacgacggtgaaacgccagcac

SEQ ID NO: 520709 - DNA, 75 bp, synthetic construct
  source 1..75: mol_type = other DNA
tagcgctcgtgtattgaaaagcctcgaagataatctctttgctgctatcggtaagcggaacattgcggaactgaa

SEQ ID NO: 520710 - DNA, 75 bp, synthetic construct
  source 1..75: mol_type = other DNA
atagtgaaacacttcataccagcgtatatgtgttgcgcaagttgaagtctgtcattaccagcaaatacggccgcc

SEQ ID NO: 520711 - DNA, 75 bp, synthetic construct
  source 1..75: mol_type = other DNA
tccctgcagaaagacgagaattggagggggttaagtattcaaataggggctcaaaaatgaaaacccctcatcttg

SEQ ID NO: 520712 - DNA, 75 bp, synthetic construct
  source 1..75: mol_type = other DNA
ggtctgattaacggtatcaaaaacaaatgggggtcgctcaaatccagtgtaaccggaatgggtgacagcatcagt

SEQ ID NO: 520713 - DNA, 75 bp, synthetic construct
  source 1..75: mol_type = other DNA
cggtatcaaaagcaaatgggggtcgctcaaatccagtgtaaccggaatgggtgacagcatcagtagctggtttaa

SEQ ID NO: 520714 - DNA, 75 bp, synthetic construct
  source 1..75: mol_type = other DNA
aaccgtgatcgagcgaattaatgaacatttttatctcaatattgaacaactgcgtaaacaaggggtacggatatc

SEQ ID NO: 520715 - DNA, 75 bp, synthetic construct
  source 1..75: mol_type = other DNA
agtggacgaaattaggcgtaattacagaaataactgttggatagattttgaaatttatctctatagtaatgggcg

SEQ ID NO: 520716 - DNA, 75 bp, synthetic construct
  source 1..75: mol_type = other DNA
atgaaacatatgcctaaacttcaacaaattaaattttttaatgaaatagtcctgtgcggaagtttaagatctgcc

SEQ ID NO: 520717 - DNA, 75 bp, synthetic construct
  source 1..75: mol_type = other DNA
actacccgttagccagtacgggcttatttatccacgaaaaaggctaatgacggcaccagcacagataatgattga

SEQ ID NO: 520718 - DNA, 75 bp, synthetic construct
  source 1..75: mol_type = other DNA
atgcaccattcactcggaaaactcaacatgttgcactcttatacgccgtctggaaaaggcgtaggagtggtataa

SEQ ID NO: 520719 - DNA, 75 bp, synthetic construct
  source 1..75: mol_type = other DNA
acggacgaaatcggccaggcgaccgcacaagagatgcaaaaacattcgctggtgttgtggcccttccacggcgtc

SEQ ID NO: 520720 - DNA, 75 bp, synthetic construct
  source 1..75: mol_type = other DNA
cgaaactggcctggtgcagattcaggcgcggatgggcggcaccggcgaacgcttttttgccggcgacgccacgct

SEQ ID NO: 520721 - DNA, 75 bp, synthetic construct
  source 1..75: mol_type = other DNA
atacaggacgcgacgggcagtacaaaacagatggcatggagccgttacggtcaactgctggccttcacggactgc

SEQ ID NO: 520722 - DNA, 75 bp, synthetic construct
  source 1..75: mol_type = other DNA
atgagcctgttaatgccatcaaggccgatagtcatcaatcctgaccttgcctatagcatcggcctgaatgaagcc

SEQ ID NO: 520723 - DNA, 75 bp, synthetic construct
  source 1..75: mol_type = other DNA
tagaaactgcataaattcatatcgaaaaagatataacattgataaaaagagagaggtaaatattagagtaattat

SEQ ID NO: 520724 - DNA, 75 bp, synthetic construct
  source 1..75: mol_type = other DNA
caagattttttacgtaataacgctaaaagttttagatgtgctttactaagtcatcgcgatggagcaaaagtacat

SEQ ID NO: 520725 - DNA, 75 bp, synthetic construct
  source 1..75: mol_type = other DNA
ctctttattcaatacagacataatgagtacacttggtgatggtaatcatgttaagatggttaatgatacaataat

SEQ ID NO: 520726 - DNA, 75 bp, synthetic construct
  source 1..75: mol_type = other DNA
ttcggtgactatatttatatagacgcttcttatactaagttacggattattaattgtcatatggagggattcgat

SEQ ID NO: 520727 - DNA, 75 bp, synthetic construct
  source 1..75: mol_type = other DNA
accgttgtctgtatctccggtgacggctctttcatgatgaatgtgcaagagctgggcaccgtaaaacgcaagcag

SEQ ID NO: 520728 - DNA, 75 bp, synthetic construct
  source 1..75: mol_type = other DNA
ctggcaccaatatttactgcggcgggttatcaggctgaaccgttatgccagtttgaaatggaactgacattttaa

SEQ ID NO: 520729 - DNA, 75 bp, synthetic construct
  source 1..75: mol_type = other DNA
cctgggttgagaataaaacaccgggtgaagttttaaaccatgcacatacaattattgaagaacaactttcgcttc

SEQ ID NO: 520730 - DNA, 75 bp, synthetic construct
  source 1..75: mol_type = other DNA
aagtagtattgaatcagtcgggtaatgttagccaagtcattccaccttttaatgaaaatattttttggatgaacc

SEQ ID NO: 520731 - DNA, 75 bp, synthetic construct
  source 1..75: mol_type = other DNA
ccgtgggtgatgcagtcgtcagaatctgatgcggcgttgctgtcccggattgcaggtatgtatggtgccaccagt

SEQ ID NO: 520732 - DNA, 75 bp, synthetic construct
  source 1..75: mol_type = other DNA
gatcaccatttatgccacagcagcccccatgaatgcgtccaggcatggtgcagatgtgactgcactgaaaacccg

SEQ ID NO: 520733 - DNA, 75 bp, synthetic construct
  source 1..75: mol_type = other DNA
atctgtcgctgaccacggatatttccgcgaaaggacaggcatcagggaagaagaacgcggataaaaaaggtgtca

SEQ ID NO: 520734 - DNA, 75 bp, synthetic construct
  source 1..75: mol_type = other DNA
tcataactggcaggcagagtcggtggaattttcactggcaccggggcagggatttacgctgaatctttctctggc

SEQ ID NO: 520735 - DNA, 75 bp, synthetic construct
  source 1..75: mol_type = other DNA
tataccgataatggtgcggccacaaagcgggccgatgaactgatgataacgctgttcagtgagaagatggcgttg

SEQ ID NO: 520736 - DNA, 75 bp, synthetic construct
  source 1..75: mol_type = other DNA
tgcgacaggcagtgatgccccggtgatgaccattacaacggatatggtgtcagactgggattacagggaaggcga

SEQ ID NO: 520737 - DNA, 75 bp, synthetic construct
  source 1..75: mol_type = other DNA
aagttcctatgtggattctaaaaataagccaagtaaacgggcataaatttacagatagtgctaaaaatctttact

SEQ ID NO: 520738 - DNA, 75 bp, synthetic construct
  source 1..75: mol_type = other DNA
tcctcaatttcgggacgttacactgttcaggcaccttataaagcgggtgtcgggattggcgtcctggaattcaat

SEQ ID NO: 520739 - DNA, 75 bp, synthetic construct
  source 1..75: mol_type = other DNA
ctgcaattccgggacgttacactgtctctgcaccttataaagcgggtgccgggattggcgtcctgaaattcaata

SEQ ID NO: 520740 - DNA, 75 bp, synthetic construct
  source 1..75: mol_type = other DNA
taaagaaaacactcttggaaagatggagggtactcaaacagaccttgtatctgatactgatattcggaatctttt

SEQ ID NO: 520741 - DNA, 75 bp, synthetic construct
  source 1..75: mol_type = other DNA
gtctgaacgatatcctaatcggctgtgtaaatggactgaaaggcttcccggatgccatcaacacagtatatccgg

SEQ ID NO: 520742 - DNA, 75 bp, synthetic construct
  source 1..75: mol_type = other DNA
aacagatcctggaggtcgcatccggactgtttcgacaaaagggatttgatgccacgtctatctcagaaattaacg

SEQ ID NO: 520743 - DNA, 75 bp, synthetic construct
  source 1..75: mol_type = other DNA
tccattgcatacggaggctgccatcatggctacagtcccaacttccccatacctgaaaatcgaatccgtcaacgg

SEQ ID NO: 520744 - DNA, 75 bp, synthetic construct
  source 1..75: mol_type = other DNA
gaggcttatcgccagaccgatccgtttggcgagctgtatgtgattgccgttcctgaatccacaggcgcggcggca

SEQ ID NO: 520745 - DNA, 75 bp, synthetic construct
  source 1..75: mol_type = other DNA
tgaatttcaaattggtaatcaaggaactggggaggcgactattcgcgagggtggactgattacggctgaaaatac

SEQ ID NO: 520746 - DNA, 75 bp, synthetic construct
  source 1..75: mol_type = other DNA
ttaataaacccgatgggccagcaacagcagggatagatgatttgggtgaaattttagctaaaatgaaacagagaa

SEQ ID NO: 520747 - DNA, 75 bp, synthetic construct
  source 1..75: mol_type = other DNA
ttctgtcatcttctctggttgtaggtctgttgagtgttagttcttttacacgtgcaaatgaatatagctacagcg

SEQ ID NO: 520748 - DNA, 75 bp, synthetic construct
  source 1..75: mol_type = other DNA
cgaaaccggcctggtgcagattcaggcgcgaatgggcggcaccggcgaacgcttttttgctggcgacgccacgct

SEQ ID NO: 520749 - DNA, 75 bp, synthetic construct
  source 1..75: mol_type = other DNA
gagtggtgggattattgctcatgctgatggcatcacctttggtcagccgctgggcgacacaatggttctggttaa

SEQ ID NO: 520750 - DNA, 75 bp, synthetic construct
  source 1..75: mol_type = other DNA
cacgacggctatggcgtctgctgcccctgctcttggagcaatggctgtggtcgctgggccaatgggatatgacct

SEQ ID NO: 520751 - DNA, 75 bp, synthetic construct
  source 1..75: mol_type = other DNA
tcggatattttgattttatctgggtgtatatgttgatctatctgccgagaaacaataaaaagagaagttttttat

SEQ ID NO: 520752 - DNA, 75 bp, synthetic construct
  source 1..75: mol_type = other DNA
cagcaggttaccaaaaataatgctgtaataaatcagaatattaataatgccaagaatgaatcactggcatataca

SEQ ID NO: 520753 - DNA, 75 bp, synthetic construct
  source 1..75: mol_type = other DNA
atgcactggtactcaacgacaacggcggacggagcattcactttgagccgctgctgccgggtgaggcggtgtaca

SEQ ID NO: 520754 - DNA, 75 bp, synthetic construct
  source 1..75: mol_type = other DNA
aagattggatttgcgtattatgtagtcaaaacacaaaagttacatgttgactcgaaatcgttctcgggaaaaaat

SEQ ID NO: 520755 - DNA, 75 bp, synthetic construct
  source 1..75: mol_type = other DNA
ggccgtccgctgatgctctttaacagtgaaggtaaaaccgtctggcgaccgggcagaccagcctgtgggggctgg

SEQ ID NO: 520756 - DNA, 75 bp, synthetic construct
  source 1..75: mol_type = other DNA
acagctgcggctacctgaaggcgcagtctgcgggcaggcaccggataagtgaagagactgaccagtatgccggag

SEQ ID NO: 520757 - DNA, 75 bp, synthetic construct
  source 1..75: mol_type = other DNA
atctggatggtgtaatcaccgataccgcgcatctgcatttccaggcgtggcagcagattgccgctgaaattggca

SEQ ID NO: 520758 - DNA, 75 bp, synthetic construct
  source 1..75: mol_type = other DNA
gactcgcgtaatttatccggcagggcaaaaacaagtgcaacttgccgtgacaaataatgatgaaaatagtaccta

SEQ ID NO: 520759 - DNA, 75 bp, synthetic construct
  source 1..75: mol_type = other DNA
tccccgcttattcgcaccttcccaagcattgcagtagtctggaagattatcggcgaattatcagtgatggtcgtc

SEQ ID NO: 520760 - DNA, 75 bp, synthetic construct
  source 1..75: mol_type = other DNA
agcctgattctgtatcttccgtgctaaaagtttttggcattttgcaggcgctgggtgaagagcgcgaaataggga

SEQ ID NO: 520761 - DNA, 75 bp, synthetic construct
  source 1..75: mol_type = other DNA
atcgatatcatgtgttgcaatcctttccgatgccacaattggcaagtagtcgcgaaataagaatattactacctg

SEQ ID NO: 520762 - DNA, 75 bp, synthetic construct
  source 1..75: mol_type = other DNA
atggcactcataaatctggtatacttaccgttacacattggggctgattctggattcgacgggatttgcgaaacc

SEQ ID NO: 520763 - DNA, 75 bp, synthetic construct
  source 1..75: mol_type = other DNA
atcgcggcgcaaagatgaagatgcagcatctggtgccgttgtcagcgcaggcggtgacaatactcaaacagttaa

SEQ ID NO: 520764 - DNA, 75 bp, synthetic construct
  source 1..75: mol_type = other DNA
taatctgctgatctttatccgttccagcgagctacgttttgcccgctggacggagatcaatctggatggcgcaat

SEQ ID NO: 520765 - DNA, 75 bp, synthetic construct
  source 1..75: mol_type = other DNA
atgcgaattgagcttaaagaaccaaatggtaaagccccgacgaaagagcagatcgcctggatgcgcaggcttaga

SEQ ID NO: 520766 - DNA, 75 bp, synthetic construct
  source 1..75: mol_type = other DNA
aatttaaatgcaggaaattttattgtaaatggtaatgcttgggaaccaactactgtcacgataaaaattaatggt

SEQ ID NO: 520767 - DNA, 75 bp, synthetic construct
  source 1..75: mol_type = other DNA
ccgactatgaagtaatccgcgccgctgaaaccggcctggtgcagattcaggcgcggatgggtggcaccggcgaac

SEQ ID NO: 520768 - DNA, 75 bp, synthetic construct
  source 1..75: mol_type = other DNA
gacggcacgctcggctatagctgggtgctggggcgcgacaaacagcacgccgaacgttgtgcgctgattgatgcg

SEQ ID NO: 520769 - DNA, 75 bp, synthetic construct
  source 1..75: mol_type = other DNA
gtttctggtaaaacaaaccgaaaacttgtagcaacaatgttgtctctggctgttgcaggtacagtaaatgcagca

SEQ ID NO: 520770 - DNA, 75 bp, synthetic construct
  source 1..75: mol_type = other DNA
tcttgaagcaatggcaaacagttgtgctgttgtgtcgacagatgttggtatagcaaatgaagtattacctgaaaa

SEQ ID NO: 520771 - DNA, 75 bp, synthetic construct
  source 1..75: mol_type = other DNA
ctgagctagatgaaatacttaatgcatacggtattcgtgcattctcagtatcgaactatgctgtatcaggcactt

SEQ ID NO: 520772 - DNA, 75 bp, synthetic construct
  source 1..75: mol_type = other DNA
gcggagcttcgacagcagtctttcgctgttgctgctgatgccactgagagctgtgaggaccgtgtcgcgctcaca

SEQ ID NO: 520773 - DNA, 75 bp, synthetic construct
  source 1..75: mol_type = other DNA
atgcggatgcggagagggaagccggtgcacaggtgatgcgtgagactgaacagcagatttaccgtcagttgactg

SEQ ID NO: 520774 - DNA, 75 bp, synthetic construct
  source 1..75: mol_type = other DNA
cagcagatttaccgtcagttgactgacgaggtactggccctgcgattgtctgaaaacggctcaaatcatatcgca

SEQ ID NO: 520775 - DNA, 75 bp, synthetic construct
  source 1..75: mol_type = other DNA
tctgtttcgactcgctgtctcattgaatggcaactcctgacacttgtgcgtccttctgaagcctctggtgctcgt

SEQ ID NO: 520776 - DNA, 75 bp, synthetic construct
  source 1..75: mol_type = other DNA
aagcagcgcaagatgcaaagagtttagcattcttgaatgagcaattaccaattgttagaagtgatttagataacg

SEQ ID NO: 520777 - DNA, 75 bp, synthetic construct
  source 1..75: mol_type = other DNA
gaaattagtgcgaaacgttttgaaaatagtggtgtaatagtaaaaggttgcatcttaaacggcgtggtgaagaaa

SEQ ID NO: 520778 - DNA, 75 bp, synthetic construct
  source 1..75: mol_type = other DNA
gcacaagatggactgatatagataccgataactcaatgtggaacattcctgctgaatttatgaaaatgaagaagc

SEQ ID NO: 520779 - DNA, 75 bp, synthetic construct
  source 1..75: mol_type = other DNA
attgaaggttacggatcagggtaaagatacaggcatgttaagcctgatattaactggagataatcctgatcttat

SEQ ID NO: 520780 - DNA, 75 bp, synthetic construct
  source 1..75: mol_type = other DNA
agccttaatggagaaaaagcaaatacttcaagatgagagaattaggctcaataagaaagtgaacaccatgccatc

SEQ ID NO: 520781 - DNA, 75 bp, synthetic construct
  source 1..75: mol_type = other DNA
taaaaatattattttgaaatcaaaagtcatagattttgatttcatttctagaggtacaacccctcccaatcctgc

SEQ ID NO: 520782 - DNA, 75 bp, synthetic construct
  source 1..75: mol_type = other DNA
ccaacactgaaattctgcggactaaagctttagagaaggatctaacactgcatgatggcgaggggcttttcctga

SEQ ID NO: 520783 - DNA, 75 bp, synthetic construct
  source 1..75: mol_type = other DNA
agccagtacagctatgaatgaggaaggttttaatcccgatgttattgaagcagcattagcgcatagcgataaaaa

SEQ ID NO: 520784 - DNA, 75 bp, synthetic construct
  source 1..75: mol_type = other DNA
atggcttttgagaagcccaaaaagcaaaacatgccgacactgcggccagaagaattgccaaagctaatgcgttct

SEQ ID NO: 520785 - DNA, 75 bp, synthetic construct
  source 1..75: mol_type = other DNA
caaatgtggagatcgctggcgcgaagccccgtagcacggattatgagctacgggacggtgaaggcctgtacttgc

SEQ ID NO: 520786 - DNA, 75 bp, synthetic construct
  source 1..75: mol_type = other DNA
aagcgcattggttatggtgggaagcttgttgctcatggattacgttctatagcaagtaccgcgctaaatgaagct

SEQ ID NO: 520787 - DNA, 75 bp, synthetic construct
  source 1..75: mol_type = other DNA
caacgtattaacgaaataatgatttatgcgattaacactggtttgattgatactaatccagcatcaggcattggt

SEQ ID NO: 520788 - DNA, 75 bp, synthetic construct
  source 1..75: mol_type = other DNA
gagcatcatactgacgtcaaacaaagggttcgcagacggggagaaatgttcggagatcacgtgctggcaacagcg

SEQ ID NO: 520789 - DNA, 75 bp, synthetic construct
  source 1..75: mol_type = other DNA
tgatagcagtgatacgggaacaaatcacagcgcagagggagcagacggaagcgataagccgtctggctgaatcaa

SEQ ID NO: 520790 - DNA, 75 bp, synthetic construct
  source 1..75: mol_type = other DNA
tggccgggcaatattcgtgaactgaaaaacgtcgtggagcgatccgtttaccggcatggaaccagtgattacccg

SEQ ID NO: 520791 - DNA, 75 bp, synthetic construct
  source 1..75: mol_type = other DNA
aaagagcatctggtagaagttatcattcagacaacagcggttccgctggaggctcagatagcggcggatttagcg

SEQ ID NO: 520792 - DNA, 75 bp, synthetic construct
  source 1..75: mol_type = other DNA
ggttttatttgcttggtgtcgtgatggcgggaatttagaatcagcatatctttcatcagaacgagcattgctgtt

SEQ ID NO: 520793 - DNA, 75 bp, synthetic construct
  source 1..75: mol_type = other DNA
tgaaaacaacagatactgtattggcttcatatgcaagctccctaccgttgaaggttacaagattcgagaattctt

SEQ ID NO: 520794 - DNA, 75 bp, synthetic construct
  source 1..75: mol_type = other DNA
accacaatgactctaaaacaatagctagagcaataaaaaatgcaattaaccaaagtcatcaacctcatgaaataa

SEQ ID NO: 520795 - DNA, 75 bp, synthetic construct
  source 1..75: mol_type = other DNA
gcagatatctgcacggtaacgaacatctgcgtcagtccgtcaccgatattttgtcaacaccggtcggcagccggg

SEQ ID NO: 520796 - DNA, 75 bp, synthetic construct
  source 1..75: mol_type = other DNA
ctcagcgtataaaccgcaaagttaactttgcaccagagcccggtaacctccacctcaacttcgcctcagtcatgc

SEQ ID NO: 520797 - DNA, 75 bp, synthetic construct
  source 1..75: mol_type = other DNA
attatctcagtaccattagattctagatataatagtaaagatattctcaggatctgtgatttaattaatcagttt

SEQ ID NO: 520798 - DNA, 75 bp, synthetic construct
  source 1..75: mol_type = other DNA
tgaagatgaagaaaattgtgaaagattccggtggccaggtagacgaaaagttatcgatcatcaaagtgggtcgac

SEQ ID NO: 520799 - DNA, 75 bp, synthetic construct
  source 1..75: mol_type = other DNA
aaagaaatcctcaaaattcataaagatgaggcagaagagtttaagtcgccaaaagttctctttgaaaccaaagaa

SEQ ID NO: 520800 - DNA, 75 bp, synthetic construct
  source 1..75: mol_type = other DNA
tacttctcagggaatacggcagcaggctgttcagtctgcttgataacccgcaggatgatttcacacgggtgagga

SEQ ID NO: 520801 - DNA, 75 bp, synthetic construct
  source 1..75: mol_type = other DNA
tacttcatcctcgtcactggcttacctggtctggtttgggtctgctgtggcttctcgttcaacttccttacccgg

SEQ ID NO: 520802 - DNA, 75 bp, synthetic construct
  source 1..75: mol_type = other DNA
tctcattgaggagtacgagaaaaaacattacccaattgagccgccatcacctattgaagccattaaatcccgtat

SEQ ID NO: 520803 - DNA, 75 bp, synthetic construct
  source 1..75: mol_type = other DNA
ccgtaaacgtaatctgacactgcccatgatcaggaaattacattcaatgttcggtattcctttaaaaagcctcgt

SEQ ID NO: 520804 - DNA, 75 bp, synthetic construct
  source 1..75: mol_type = other DNA
cggcagtaacgccctatcgctacaaccgtatatctctcgatccacaaggaatggatggcgatgccgagttggtcg

SEQ ID NO: 520805 - DNA, 75 bp, synthetic construct
  source 1..75: mol_type = other DNA
ctaacaatttgtgaaatagtatttcgtccgggtgttcgctttgtttatgtcgttacggggaagtcatcttcacag

SEQ ID NO: 520806 - DNA, 75 bp, synthetic construct
  source 1..75: mol_type = other DNA
tgcaaattgctgtgcttgccagaattaaactttttgtccgcccggcaggtttatcagaaaagtcagcagatgctc

SEQ ID NO: 520807 - DNA, 75 bp, synthetic construct
  source 1..75: mol_type = other DNA
tggcaccagaagtcttacgttaccaatgattcgccgtcttcataatcaatttggtattcccctggaaagcttggt

SEQ ID NO: 520808 - DNA, 75 bp, synthetic construct
  source 1..75: mol_type = other DNA
tactgccgatgaaggtcgaaacaatatctcaggagactttatggggattgggggggctcgtacgtctactgcaga

SEQ ID NO: 520809 - DNA, 75 bp, synthetic construct
  source 1..75: mol_type = other DNA
gttgctattggtacttctgcgtctggttcatatgccatgacagcaactggtgtagatatgtctgtggccgcctct

SEQ ID NO: 520810 - DNA, 75 bp, synthetic construct
  source 1..75: mol_type = other DNA
ggttaatatgtctgttgctgctactggcaacattttaagaactttgggaacagatggacaaaaaacattaactgc

SEQ ID NO: 520811 - DNA, 75 bp, synthetic construct
  source 1..75: mol_type = other DNA
cctctttctcaggaagtttagtctccaggattcccggggcggttcaaatagctttagccatggcatcagtatgaa

SEQ ID NO: 520812 - DNA, 75 bp, synthetic construct
  source 1..75: mol_type = other DNA
gttggtgtaggaacatctgcatctggggcatatggactgacaactaaagttaaaatgtctgatccagtggataac

SEQ ID NO: 520813 - DNA, 75 bp, synthetic construct
  source 1..75: mol_type = other DNA
atggtggacaagatgcgttaactgcagataaaattcttggtacttgcacagctaccacaaactcaattattttag

SEQ ID NO: 520814 - DNA, 75 bp, synthetic construct
  source 1..75: mol_type = other DNA
tgagcgtttacgaaaacagtccgcacatctggcgtggcggtttatctgatgtggagctggcagagtggttgatac

SEQ ID NO: 520815 - DNA, 75 bp, synthetic construct
  source 1..75: mol_type = other DNA
agaatggtgtcaacgtttatgacaaagatgggaagatgcgatcacttccaacactcctggaggaaatcgctaaaa

SEQ ID NO: 520816 - DNA, 75 bp, synthetic construct
  source 1..75: mol_type = other DNA
gggtgtcaaggacgtaggggttgcacttgaatctgccgttgatgccacagggaaccgtgataccgccgcaacagc

SEQ ID NO: 520817 - DNA, 75 bp, synthetic construct
  source 1..75: mol_type = other DNA
ctataatgaacatctctcattaactatcatggctgaaagtccaattgatacagatggctcggcagagggattcag

SEQ ID NO: 520818 - DNA, 75 bp, synthetic construct
  source 1..75: mol_type = other DNA
aagcattcgcaagattcgcaagatggacaaacaatagggctccccattggtccagatacatcacttatcatagca

SEQ ID NO: 520819 - DNA, 75 bp, synthetic construct
  source 1..75: mol_type = other DNA
aacattattccaccttctctctatatgcccgccattcgcgaagctggtttatcagagaaatttactctttgcctg

SEQ ID NO: 520820 - DNA, 75 bp, synthetic construct
  source 1..75: mol_type = other DNA
atgcaagggattacagctctgttgcgacctgagaatattcgaatgatggaggagatgatatacggcactgtcgag

SEQ ID NO: 520821 - DNA, 75 bp, synthetic construct
  source 1..75: mol_type = other DNA
atttattcattttataaatgaatttgaaaataaacatgtaactacaaacgctgaagtaatattattaggtcattc

SEQ ID NO: 520822 - DNA, 75 bp, synthetic construct
  source 1..75: mol_type = other DNA
gcatatatacctatcaaaaccactttggcatatttcgctataaattatagtgccagttatactaagaaaatgttt

SEQ ID NO: 520823 - DNA, 75 bp, synthetic construct
  source 1..75: mol_type = other DNA
ggcaaagggatacccggtggcattacggatgttttcggctccggcgtgatgccggtttatgtggtcaatatgggc

SEQ ID NO: 520824 - DNA, 75 bp, synthetic construct
  source 1..75: mol_type = other DNA
ttaaaagcgtcaccatgaaccagccgggtatcaaacttagtgcgtctgctggcgtgtccagcgtggagcaaggct

SEQ ID NO: 520825 - DNA, 75 bp, synthetic construct
  source 1..75: mol_type = other DNA
agcaatgcaatctcttaacaatgaatggcagcgctttgctgaaaatgaactcgctgaacctattcaaaatttagc

SEQ ID NO: 520826 - DNA, 75 bp, synthetic construct
  source 1..75: mol_type = other DNA
ttaaaaatggagcaacacccgttccttttgatatttccttgcaaaactgtatacgcataagaaatattgaaacga

SEQ ID NO: 520827 - DNA, 75 bp, synthetic construct
  source 1..75: mol_type = other DNA
tcgattcatcgtttagcaatgctgagcgttcagttccagttataagtaaaattcctcttataggctggattttca

SEQ ID NO: 520828 - DNA, 75 bp, synthetic construct
  source 1..75: mol_type = other DNA
gctgactgtcaaagcagatattgattctgcgacgatcaccagtctggagatgcctgaaggtcaggtaataatcag

SEQ ID NO: 520829 - DNA, 75 bp, synthetic construct
  source 1..75: mol_type = other DNA
ccgcatcatcaagctcattcaccgcgagcacaaccgagggcgcgaccctgacggcaagcgtcactgacgcttacg

SEQ ID NO: 520830 - DNA, 75 bp, synthetic construct
  source 1..75: mol_type = other DNA
tccaaaaactgagcggctatctggtacttgccagtaaagtgtacggcagtgataacaatccaacggataacccgt

SEQ ID NO: 520831 - DNA, 75 bp, synthetic construct
  source 1..75: mol_type = other DNA
aagcggaaatcattgggaatggcgtggatgagacgactctgacagcaacagttaaagatccttttgtgaaccgcc

SEQ ID NO: 520832 - DNA, 75 bp, synthetic construct
  source 1..75: mol_type = other DNA
cacctcccccgcagacacgcaactgagtctgaacgcgcgtaatactaatgagaacggtattgccgaagttaccct

SEQ ID NO: 520833 - DNA, 75 bp, synthetic construct
  source 1..75: mol_type = other DNA
ttgaaacctaatgattcaaattctgtttataaagattacgacccgagaggcaaagacgatacaacaggaggagtt

SEQ ID NO: 520834 - DNA, 75 bp, synthetic construct
  source 1..75: mol_type = other DNA
gctacaacaggatggaactataccaatagaagctggtgagtttaaagccaccagtactttccaggtaacctaccc

SEQ ID NO: 520835 - DNA, 75 bp, synthetic construct
  source 1..75: mol_type = other DNA
acgctcaccggtaatgatgccgcaaagggagtaggtgtattggttgagggcttgctatccaccaaaagtccgcaa

SEQ ID NO: 520836 - DNA, 75 bp, synthetic construct
  source 1..75: mol_type = other DNA
tggcatttttgctgggcggtgtctgctgcgcggcgctttataaacaccagcgccgttttcataagggggattcat

SEQ ID NO: 520837 - DNA, 75 bp, synthetic construct
  source 1..75: mol_type = other DNA
aatgtcaaattaaccttaccaacatgttttacctccatacttaccgggccatcagtcaatggttcaacggttaga

SEQ ID NO: 520838 - DNA, 75 bp, synthetic construct
  source 1..75: mol_type = other DNA
cgaagatgacacctccgatggggtttaccctaatcaaggtaacggcacatcacagcctcttcatttccaggcaac

SEQ ID NO: 520839 - DNA, 75 bp, synthetic construct
  source 1..75: mol_type = other DNA
ctgttgaatttattactgaaattgaaattagcaaaaaattatcaggaaagtatttaaaaacacataattatcaaa

SEQ ID NO: 520840 - DNA, 75 bp, synthetic construct
  source 1..75: mol_type = other DNA
tgttgataacattgcagaatcagtacttaggttccgtagtcatttaaatttaaatgttgataataatattgccaa

SEQ ID NO: 520841 - DNA, 75 bp, synthetic construct
  source 1..75: mol_type = other DNA
gttcacctcagagagtatggcagaacagaaaaacataaatgcacctttgtttttcaacctgaagtgtcagcgaga

SEQ ID NO: 520842 - DNA, 75 bp, synthetic construct
  source 1..75: mol_type = other DNA
tgtagttatgaccttggacataagtgatgaacagggtaataaaatggggaaaatggccgttgatatgttagcagc

SEQ ID NO: 520843 - DNA, 75 bp, synthetic construct
  source 1..75: mol_type = other DNA
atctgtataccggtcatgaccacaggggacatttccgtcagggcgttttcgaactgcacggctgtcgcgtcgtgt

SEQ ID NO: 520844 - DNA, 75 bp, synthetic construct
  source 1..75: mol_type = other DNA
gcataccagaatttctgccatctcttctggcctggccatattgatgatcctgaagcgactttcagagattataat

SEQ ID NO: 520845 - DNA, 75 bp, synthetic construct
  source 1..75: mol_type = other DNA
cactggaagatgttcgtcgagttggattgttgcccttagttgagcttttacaatcagggacagtacttttgactg

SEQ ID NO: 520846 - DNA, 75 bp, synthetic construct
  source 1..75: mol_type = other DNA
attacgacgagccaaccgcaccgctaacgggccaaatcctggctatctatggaaatgcattggttgaactgaatg

SEQ ID NO: 520847 - DNA, 75 bp, synthetic construct
  source 1..75: mol_type = other DNA
cttgaaagaggagtaaatatatctgtaagaatacagaagcaaattttatcagaaaaaccatatattgcattcaga

SEQ ID NO: 520848 - DNA, 75 bp, synthetic construct
  source 1..75: mol_type = other DNA
tggggtagagcaggatgttctgaatgaaatgtctagacaggcccgtaaatatatcattgaagagcataactggcc

SEQ ID NO: 520849 - DNA, 75 bp, synthetic construct
  source 1..75: mol_type = other DNA
gtagaattctcacctaatgagcgtccaatgcagcttttccacatgccgaatgagaacaatggcaaatggcaggcg

SEQ ID NO: 520850 - DNA, 75 bp, synthetic construct
  source 1..75: mol_type = other DNA
atttgtgggagatcgcccaggtggaacgggaactaaatcaagggggaagcgatgccgatgaaacacaaagctgtc

SEQ ID NO: 520851 - DNA, 75 bp, synthetic construct
  source 1..75: mol_type = other DNA
cccgggagcatgtgagtgtggatgcgtatgaaaaggcaatccgtgcctggcagcagaaacagacagagacaaaat

SEQ ID NO: 520852 - DNA, 75 bp, synthetic construct
  source 1..75: mol_type = other DNA
gcaaaagagatgaaaagcgtggttgacaacacatcgaaatatccagactggagtaaatgcgatgatattaaagcg

SEQ ID NO: 520853 - DNA, 75 bp, synthetic construct
  source 1..75: mol_type = other DNA
aacaaaaagaaacgtacagaaaagattgacgtgaatattcgtcttgcaggactgaaaggctatgatctgaatgaa

SEQ ID NO: 520854 - DNA, 75 bp, synthetic construct
  source 1..75: mol_type = other DNA
gtggtggctggaaaacacctgagatggaagaattcgtcagaaacgatttgttcaatattctgacagattgtaaag

SEQ ID NO: 520855 - DNA, 75 bp, synthetic construct
  source 1..75: mol_type = other DNA
agtttataaaaccaatagcaaaaaaatttacagaaaaaaactcggcagaaagagagttggttgttttaaaagatc

SEQ ID NO: 520856 - DNA, 75 bp, synthetic construct
  source 1..75: mol_type = other DNA
aaactgtcttcatatcaggtaactacaaaaatcagaagaacaataaatcgttcaatcgggaaactccaaattgat

SEQ ID NO: 520857 - DNA, 75 bp, synthetic construct
  source 1..75: mol_type = other DNA
cagtcagaacgaggcggagttgaaaattcgctggttgccattgccgaaggcactcagctggttggcggtttgcgt

SEQ ID NO: 520858 - DNA, 75 bp, synthetic construct
  source 1..75: mol_type = other DNA
gcgtctcagggcagcgacggcatgatgtgggtcgcgccgacggaccagaaagaggcggacccgcgggacgcggcc

SEQ ID NO: 520859 - DNA, 75 bp, synthetic construct
  source 1..75: mol_type = other DNA
caacgccggcgggcaaaataataacgcccaggctaaacaggataccagcaccagtggcggtatcggctggatctc

SEQ ID NO: 520860 - DNA, 75 bp, synthetic construct
  source 1..75: mol_type = other DNA
agtctgctaaaatcagagctttacaatcaggtttatcaagagattatgcctctttatgaacgagctgcgttatca

SEQ ID NO: 520861 - DNA, 75 bp, synthetic construct
  source 1..75: mol_type = other DNA
cacagattctattgaattttctggaattcggaataacatcataaatgcagtaaaacggctggaatcatttgaaaa

SEQ ID NO: 520862 - DNA, 75 bp, synthetic construct
  source 1..75: mol_type = other DNA
acgtcaacggcctttcttctgcgctgaccggcagtgccggggaggcggcactgggtaaggcgatttccggcggaa

SEQ ID NO: 520863 - DNA, 75 bp, synthetic construct
  source 1..75: mol_type = other DNA
gaaggagaatgaacaactgcgcaaacgcggaacggatgtgtccggtcagctgaacgatgccgtggcaggactgca

SEQ ID NO: 520864 - DNA, 75 bp, synthetic construct
  source 1..75: mol_type = other DNA
gtcccgatgaagggacgctttcgttaagtcgcgcccgacgagctgcgttaggcagtttcgctggtgccgtcgtcg

SEQ ID NO: 520865 - DNA, 75 bp, synthetic construct
  source 1..75: mol_type = other DNA
ataaaggtccgacgttccaaataaaaattaatgatgcaaataaaatccataacttaaataagaatggaagctctg

SEQ ID NO: 520866 - DNA, 75 bp, synthetic construct
  source 1..75: mol_type = other DNA
taccatttgctttgcggaatttttatcaagaaaagggaatccattcattggatttgttgtgcttgatagtccatt

SEQ ID NO: 520867 - DNA, 75 bp, synthetic construct
  source 1..75: mol_type = other DNA
atgaagcatcaggtatgcagcaggcttatcgctaaaggcgtaccggcgaaagtgatcttctgcgactatgccggt

SEQ ID NO: 520868 - DNA, 75 bp, synthetic construct
  source 1..75: mol_type = other DNA
ggggcaacctgctgaatgaagagaacccgcatcagctgcagcagcttatccggctgccggggcagcagtatgatg

SEQ ID NO: 520869 - DNA, 75 bp, synthetic construct
  source 1..75: mol_type = other DNA
tgagggagtgggctcaggatttttggaatgaaattctgtttcctttttttgtcacagccggacttttgttgccac

SEQ ID NO: 520870 - DNA, 75 bp, synthetic construct
  source 1..75: mol_type = other DNA
tggataacagcactggatatactgatattgcccctcaattatctgatgctaaggaaagttatcaggatgttgaga

SEQ ID NO: 520871 - DNA, 75 bp, synthetic construct
  source 1..75: mol_type = other DNA
gtttattgagaaaacaaaagacgttgaaaacaataataatataagaccatacactggtaagcatagaagtattgg

SEQ ID NO: 520872 - DNA, 75 bp, synthetic construct
  source 1..75: mol_type = other DNA
atggtgatactccaattacagaggatgttttatggacgctacccttccctttctgattttgtacgcttgtttatc

SEQ ID NO: 520873 - DNA, 75 bp, synthetic construct
  source 1..75: mol_type = other DNA
caattgcaatcagaattaagtctggaaacactaagtgctattttacttgctggtgttttctttgttgccccattt

SEQ ID NO: 520874 - DNA, 75 bp, synthetic construct
  source 1..75: mol_type = other DNA
ttcaggacaactaaagcaaggcgaagtcagggcatactcccatactggaggaaacgatgttgagtggaacagaga

SEQ ID NO: 520875 - DNA, 75 bp, synthetic construct
  source 1..75: mol_type = other DNA
atgacccaggggattaatttaaaagactcgattgttttaaataccatgagtatgtttggcgcgccatttggtatt

SEQ ID NO: 520876 - DNA, 75 bp, synthetic construct
  source 1..75: mol_type = other DNA
ctaatactgacctaaacacccttaccggtgaatattctggtttctatcaacaaccaacgagcgcttacgcaacag

SEQ ID NO: 520877 - DNA, 75 bp, synthetic construct
  source 1..75: mol_type = other DNA
ctgacggcaagcgtcactgacgcttacggcaacccgctagaaggtatcaaggtcaatttccgcggccccgccacc

SEQ ID NO: 520878 - DNA, 75 bp, synthetic construct
  source 1..75: mol_type = other DNA
gactctaaagattgcctgcttactgttacttgtggcaggagcgaccatttttatcgccgatcgcgtaatggtcaa

SEQ ID NO: 520879 - DNA, 75 bp, synthetic construct
  source 1..75: mol_type = other DNA
acttcttataccggaggtattgatgctcctgctgcctcagccagcatgtataacaccttatggagagtaaacgga

SEQ ID NO: 520880 - DNA, 75 bp, synthetic construct
  source 1..75: mol_type = other DNA
taacggcaacggctatacaacgacagtcaatattgcgcccgatgccagcaacgcgcaggttacgctgaacatccc

SEQ ID NO: 520881 - DNA, 75 bp, synthetic construct
  source 1..75: mol_type = other DNA
ggcagcctcgaaggatccggtgattgccgacaataacgatctcacgacactaacagcaacagtcgctgatacaga

SEQ ID NO: 520882 - DNA, 75 bp, synthetic construct
  source 1..75: mol_type = other DNA
tagtgctgagctacatcttgttctgcacgatatatcaggcaatccgatcaaagtttctgaagggctggaatttgt

SEQ ID NO: 520883 - DNA, 75 bp, synthetic construct
  source 1..75: mol_type = other DNA
tatggcgttctggtcgctgacagcaacgctcaggctacatgctgggccgccagcgcagtaaataatctgggaaat

SEQ ID NO: 520884 - DNA, 75 bp, synthetic construct
  source 1..75: mol_type = other DNA
ttacactattcacttgttgaaaccgttaccggttcctggcaccgctttggcgatattgcagaggctgtgcttgag

SEQ ID NO: 520885 - DNA, 75 bp, synthetic construct
  source 1..75: mol_type = other DNA
acgagagccaacactgcttcttcctgcgttcaggtgtaccacccttataataatccgggaattacttatagacga

SEQ ID NO: 520886 - DNA, 75 bp, synthetic construct
  source 1..75: mol_type = other DNA
tgttctcaggaagaaacattactggcgaaggttttggattcagacaacagcttcgctccggggattcagcaggcg

SEQ ID NO: 520887 - DNA, 75 bp, synthetic construct
  source 1..75: mol_type = other DNA
ctctatgggcgaattatttcagccagtaatgctctcagtcatactgagagcagtagtgctggcggtcagcgaatc

SEQ ID NO: 520888 - DNA, 75 bp, synthetic construct
  source 1..75: mol_type = other DNA
gcccattgttccgcaaactgaccgaaacatgtattgctcaccagatagcggaaaccggttcggcaaccttgctgg

SEQ ID NO: 520889 - DNA, 75 bp, synthetic construct
  source 1..75: mol_type = other DNA
atgagcaataattcaacactaaatcacctcaatacaaaaaatagcctgtttgtcttcagtagtgataacggttct

SEQ ID NO: 520890 - DNA, 75 bp, synthetic construct
  source 1..75: mol_type = other DNA
tatgggagtgggtaacgtttttgaagaatgaaatcctgtatccgttttttacgacagccaccattttgttgccgt

SEQ ID NO: 520891 - DNA, 75 bp, synthetic construct
  source 1..75: mol_type = other DNA
attataaaattttaaacacggacacacccgataattctgctgcggatttagacagtttcttaaagaaaaacaaaa

SEQ ID NO: 520892 - DNA, 75 bp, synthetic construct
  source 1..75: mol_type = other DNA
tgtggagtccatcgaggatgcccgcaggtatatcacgcgtagcaatctggggaaacatcttcccatttttgaggt

SEQ ID NO: 520893 - DNA, 75 bp, synthetic construct
  source 1..75: mol_type = other DNA
gtacgcctttatccgtgacaactcctgttgctggcctgttcacctgctctgtcgggtgctggatgttcatcccag

SEQ ID NO: 520894 - DNA, 75 bp, synthetic construct
  source 1..75: mol_type = other DNA
ttgcgctaccggcagagcaccagcaggacgacccgcgctttacgcttgctgacggcaaagtgaccagtcactggc

SEQ ID NO: 520895 - DNA, 75 bp, synthetic construct
  source 1..75: mol_type = other DNA
ggcctgaaaggcttcccggatgccatcaacacagtatatccgaaggcccgcatccagttatgcatcgtgcatatg

SEQ ID NO: 520896 - DNA, 75 bp, synthetic construct
  source 1..75: mol_type = other DNA
taaaaggaagttcacccaagaaatattattctcttaaattcttaaacgatcaaaaagacaataatagcctcctgg

SEQ ID NO: 520897 - DNA, 75 bp, synthetic construct
  source 1..75: mol_type = other DNA
atacgaccaatcacgacggcaatttttacgcaagctttaccgctacaaaagccggggtttatcaagtgacggcaa

SEQ ID NO: 520898 - DNA, 75 bp, synthetic construct
  source 1..75: mol_type = other DNA
gtcacggtaagcgcagtcacgaccgctggtggaatgcaaacagtagatataacgctggtggctggcccggcagac

SEQ ID NO: 520899 - DNA, 75 bp, synthetic construct
  source 1..75: mol_type = other DNA
taagcatgaccccacagttgcttgatgaggccagccttcgctttgaggcttatgcttttggaggaaaatatgagt

SEQ ID NO: 520900 - DNA, 75 bp, synthetic construct
  source 1..75: mol_type = other DNA
agtttattgaatatcggcaggccctgggtgaaatatggttgaataattgtactccacgagcttttgggcgtttta

SEQ ID NO: 520901 - DNA, 75 bp, synthetic construct
  source 1..75: mol_type = other DNA
tacccgtggttggcagtcttgacgggcagagtatttatgggctgacagaggaggtggggctccttatatggatgg

SEQ ID NO: 520902 - DNA, 75 bp, synthetic construct
  source 1..75: mol_type = other DNA
gcctgtaatacgtgagccagcaccggtagtgcctgaagaagcaactccggaaaacgtagaaatgctctctggcta

SEQ ID NO: 520903 - DNA, 75 bp, synthetic construct
  source 1..75: mol_type = other DNA
acgagaacattaagcaagccatcaatagcgcaccgcgaaatggtcaaacggttgaaatgcacctccagatgatca

SEQ ID NO: 520904 - DNA, 75 bp, synthetic construct
  source 1..75: mol_type = other DNA
cttaaagccagctttgctacagagttcagcaaaatgagaaatcttaccgagcgactcaaagccgccggacttgat

SEQ ID NO: 520905 - DNA, 75 bp, synthetic construct
  source 1..75: mol_type = other DNA
ccacctgctttgacagagaaggtaagaaggcatactcgcgacgtaaggatgtggtgcatttactgacataccaga

SEQ ID NO: 520906 - DNA, 75 bp, synthetic construct
  source 1..75: mol_type = other DNA
atggggcaattattgagaatggcagtagttataaatcaaccctgacattaaatcttaaggcaattaatcctgatg

SEQ ID NO: 520907 - DNA, 75 bp, synthetic construct
  source 1..75: mol_type = other DNA
caaccaccaatggtagttcgtggattggtggtggtatcatcgtagaagatggtgcgacagtcaattggggagtta

SEQ ID NO: 520908 - DNA, 75 bp, synthetic construct
  source 1..75: mol_type = other DNA
atggaatggagcgagaaaacccgcacaccgcattgtaataccgagaaatgtgtgggttgtctgctttgtggtcac

SEQ ID NO: 520909 - DNA, 75 bp, synthetic construct
  source 1..75: mol_type = other DNA
atattgaagcaattatttctggggcaggctttgagctaagtaactcagaagctccgatgacgtttaaaaaaatgt

SEQ ID NO: 520910 - DNA, 75 bp, synthetic construct
  source 1..75: mol_type = other DNA
gtttcaccattgaggaggcgaaggaattacatgaagacctggtacgcagccacataagcaaggccttaagtggcg

SEQ ID NO: 520911 - DNA, 75 bp, synthetic construct
  source 1..75: mol_type = other DNA
agggaaaagggtttaataacattcagattatatataatgacatcgatatttcattaagagatgaagtcaaaaaat

SEQ ID NO: 520912 - DNA, 75 bp, synthetic construct
  source 1..75: mol_type = other DNA
ttctgctggccgtctgctggatgcagggcgaatttgacatgagcgccgctacgtactcacagcaacctccgctgt

SEQ ID NO: 520913 - DNA, 75 bp, synthetic construct
  source 1..75: mol_type = other DNA
cagcagcttatccggctgccggggcagcagtatgatgaggagtccggcctgtattacaaccgccaccgctattat

SEQ ID NO: 520914 - DNA, 75 bp, synthetic construct
  source 1..75: mol_type = other DNA
cccgggagcatgtgaatgcggacgcgtatgaaaaggccatccgtgcctggcagcagaaacagacagagacagaat

SEQ ID NO: 520915 - DNA, 75 bp, synthetic construct
  source 1..75: mol_type = other DNA
aatatacttgcatgcaataaatggttgtcaaaaaactattggtatgagcgcggaggaaatttcataattacagat

SEQ ID NO: 520916 - DNA, 75 bp, synthetic construct
  source 1..75: mol_type = other DNA
ggtgagaggatacataactaaatattctcctccaggctctcaaaatggatataataacagacctaaagtattcta

SEQ ID NO: 520917 - DNA, 75 bp, synthetic construct
  source 1..75: mol_type = other DNA
ctctgtggatgattttagaaaaagctattgccatattagggcttatttttgttacatcctatgttgcaaagtatg

SEQ ID NO: 520918 - DNA, 75 bp, synthetic construct
  source 1..75: mol_type = other DNA
tggttagcgagcaaaaaaaatcttgtgattgcagtacataagtcccaaacggctacgttgttgcataccgattcg

SEQ ID NO: 520919 - DNA, 75 bp, synthetic construct
  source 1..75: mol_type = other DNA
ctgactgaatttatgggtaagcgtgcagcaagaaccgtattgacggggatgtgttattcagtcggcagtgctacg

SEQ ID NO: 520920 - DNA, 75 bp, synthetic construct
  source 1..75: mol_type = other DNA
ttccttaccattccgggttcagctatttcgaactcgacaagagcggacaggcctggacagaaatggctgccgccg

SEQ ID NO: 520921 - DNA, 75 bp, synthetic construct
  source 1..75: mol_type = other DNA
atgagcaacgtagagaaattcacaccgggaaatgacgacgtattacgcgccgaagccacaccgcacggcgtcaat

SEQ ID NO: 520922 - DNA, 75 bp, synthetic construct
  source 1..75: mol_type = other DNA
gagcgctacggcattgagcagggaacagcgaacgccattgttttttatcaggccatgatcgacacggagcgcggc

SEQ ID NO: 520923 - DNA, 75 bp, synthetic construct
  source 1..75: mol_type = other DNA
tggcataaggacgatagtgcctggagtgacgaggaaaatcggaaagacaagagttttgcaggaagtatcgagcct

SEQ ID NO: 520924 - DNA, 75 bp, synthetic construct
  source 1..75: mol_type = other DNA
atcattgctggttcccgcgtcagcgaagccagaatccccgcgctgcgtgagcgggccaatggcctgttattgcaa

SEQ ID NO: 520925 - DNA, 75 bp, synthetic construct
  source 1..75: mol_type = other DNA
tttatgatcactctgaaagacgggaaatatatagaaaaacgggctcattataatacagcggatatcctccgacag

SEQ ID NO: 520926 - DNA, 75 bp, synthetic construct
  source 1..75: mol_type = other DNA
aataaactggactgtcgtgaaagactggagtgagcagtttcgttacgataccaacataactagagcattgtcaga

SEQ ID NO: 520927 - DNA, 75 bp, synthetic construct
  source 1..75: mol_type = other DNA
cgtacatcattcattcatggataaagccttggtcggtaacgttgataacaaagctataatagtactgtttgatac

SEQ ID NO: 520928 - DNA, 75 bp, synthetic construct
  source 1..75: mol_type = other DNA
cgtccgggcgcacagaaccagatgaaagttattctggctgaagaagcgaagcgtattaaaaacgataacgtgaac

SEQ ID NO: 520929 - DNA, 75 bp, synthetic construct
  source 1..75: mol_type = other DNA
ggaattatctttgacaacgatggggataaaacggattcggcagcactgttgccctgtatcgaacaggccagagag

SEQ ID NO: 520930 - DNA, 75 bp, synthetic construct
  source 1..75: mol_type = other DNA
atgatactttggtctgtgaaaaaagaaaccgatatccgtcggggaaggcattgtgttttcctgaggcatgttcac

SEQ ID NO: 520931 - DNA, 75 bp, synthetic construct
  source 1..75: mol_type = other DNA
cagaacctgctgacactggcagaactgttcctagtggggttgattacatcagcggccaggatcagaagtggtggc

SEQ ID NO: 520932 - DNA, 75 bp, synthetic construct
  source 1..75: mol_type = other DNA
acagcccctttaacgtgggaaaatttccgaattccaagcggccccttcagtactgctggtgctggacgatgtggc

SEQ ID NO: 520933 - DNA, 75 bp, synthetic construct
  source 1..75: mol_type = other DNA
ggggattatgctgaacgtcttccgttcacggtactgctggacgatgtggctgggggcgctgataacgtcgttgtt

SEQ ID NO: 520934 - DNA, 75 bp, synthetic construct
  source 1..75: mol_type = other DNA
atgatactttggtctatgaaaaaagaaaccgatatccgtcgaggaaggcattgtgttttcctgaggcatgttcac

SEQ ID NO: 520935 - DNA, 75 bp, synthetic construct
  source 1..75: mol_type = other DNA
accgcacacccggcagcctgccggggacgaagacgcagatgacgatccgctcgaaaacctataagggcagcggga

SEQ ID NO: 520936 - DNA, 75 bp, synthetic construct
  source 1..75: mol_type = other DNA
gtgtctggcctcagtatggctgtgtggaaattcgtggtgtgcttaaaacctggattggtgattcaaaacctttca

SEQ ID NO: 520937 - DNA, 75 bp, synthetic construct
  source 1..75: mol_type = other DNA
atgatactttggtctctgaaaaaagaaaccgatatccgtcgcggaaggcattgtgttttcctgaggcatgttcac

SEQ ID NO: 520938 - DNA, 75 bp, synthetic construct
  source 1..75: mol_type = other DNA
atgatactttggtctttgaaaaaagaaaccgatatccggcgaggaaggcattgtgttttcctgaggcatgttcac

SEQ ID NO: 520939 - DNA, 75 bp, synthetic construct
  source 1..75: mol_type = other DNA
atgatactttggtctttgaaaaaagaaaccgatatccgacggggaaggcattgtgttttcctgaggcatgttcac

SEQ ID NO: 520940 - DNA, 75 bp, synthetic construct
  source 1..75: mol_type = other DNA
tagtttgtattatatgtgttttttgggttttctttgatgctacttctaacaacataggaagttatgttgttagag

SEQ ID NO: 520941 - DNA, 75 bp, synthetic construct
  source 1..75: mol_type = other DNA
aatattcccagtatagatactttacatcccaggataacaggttctttgaaggaaaaactaataaaatataaaaaa

SEQ ID NO: 520942 - DNA, 75 bp, synthetic construct
  source 1..75: mol_type = other DNA
atgtctgaaacatcaaaatttatagatgcagttaagaagtactattcagatgataaaaatacgcttgatttttat

SEQ ID NO: 520943 - DNA, 75 bp, synthetic construct
  source 1..75: mol_type = other DNA
agttattgactaactctggttttatatacagcacaactctattattattctcattagaaagtatgaagcttagaa

SEQ ID NO: 520944 - DNA, 75 bp, synthetic construct
  source 1..75: mol_type = other DNA
acggacgacgagcggacccaccactaccactacgacagccagcaccgcctggtgttccacacgcggatacagcat

SEQ ID NO: 520945 - DNA, 75 bp, synthetic construct
  source 1..75: mol_type = other DNA
ggtcgggtgacggagcaggtcaacccggaggggctggactaccgctttgagtacggagagagccgggtaatcatc

SEQ ID NO: 520946 - DNA, 75 bp, synthetic construct
  source 1..75: mol_type = other DNA
caagttatcagcttagacgcgctaactgtgttagaacaaactaaaattcaattattaaacttgaacattgatgaa

SEQ ID NO: 520947 - DNA, 75 bp, synthetic construct
  source 1..75: mol_type = other DNA
tgtcggtgcgttagagatttcaagaaaagaaaatcccggtttggttgatagatctaatagagaaggattgattga

SEQ ID NO: 520948 - DNA, 75 bp, synthetic construct
  source 1..75: mol_type = other DNA
tttgagagaataccgggtcagcctcttttttatgcttctgaagattttatccagggagagttatttaaaattaca

SEQ ID NO: 520949 - DNA, 75 bp, synthetic construct
  source 1..75: mol_type = other DNA
gattcaggcgacagcctgaacgtagcagggatcctcgtcattcagggcgtggaggatgtcaagacacggaaaacg

SEQ ID NO: 520950 - DNA, 75 bp, synthetic construct
  source 1..75: mol_type = other DNA
aaaaatttagttccagaccccttttttttgttttttttggactctcactttgtgaattttttcaggaacaatcag

SEQ ID NO: 520951 - DNA, 75 bp, synthetic construct
  source 1..75: mol_type = other DNA
tcacgtgttctatctggggctggatgaggcgtttgttaccccattgatgggacgtgctcaacccgctctctggca

SEQ ID NO: 520952 - DNA, 75 bp, synthetic construct
  source 1..75: mol_type = other DNA
aaccattgtgataatcccccttgcgtgcccgtttgcccggtacaagccactttccaacgcgaagacggcattgtg

SEQ ID NO: 520953 - DNA, 75 bp, synthetic construct
  source 1..75: mol_type = other DNA
atggtaactaatccgcaaattccattaactggtttatatgtatctaaagttaatccatctaatcgtatagtcgtt

SEQ ID NO: 520954 - DNA, 75 bp, synthetic construct
  source 1..75: mol_type = other DNA
ttgcgatggcgcacgatgcgcgcggtcaactgaggcgttacaccgactgttcagggtgcgccacgggttatgaat

SEQ ID NO: 520955 - DNA, 75 bp, synthetic construct
  source 1..75: mol_type = other DNA
cacttcgcgcctggcctatcagtattaccggtcaaaaaccgaccgaggggccgtttagcgcgcaggggtatttac

SEQ ID NO: 520956 - DNA, 75 bp, synthetic construct
  source 1..75: mol_type = other DNA
atgcacagtctggtcatcggacagatcaggacggatgagaaatccaatgaaattacagctatccctgaacttctt

SEQ ID NO: 520957 - DNA, 75 bp, synthetic construct
  source 1..75: mol_type = other DNA
ggcgtatacctcacgcctgttccgcttgctgaaaatgtccggtattaactttgtcgccaacccgctggtcaatat

SEQ ID NO: 520958 - DNA, 75 bp, synthetic construct
  source 1..75: mol_type = other DNA
gaatcagaaattaacacctccagcccgatgctgggtgtgcgtgatgctgaatttcgtcaattgggtaaaccgcag

SEQ ID NO: 520959 - DNA, 75 bp, synthetic construct
  source 1..75: mol_type = other DNA
gattcagaaattaacacctccagcccaatgcttggggtgcgcgatgctgaatttcgtcagttgggtaaaccgcaa

SEQ ID NO: 520960 - DNA, 75 bp, synthetic construct
  source 1..75: mol_type = other DNA
ggagatacagtaaacaagatttaggagacgctctggatttttatctttttgaaggtgattttggtgcgccattcg

SEQ ID NO: 520961 - DNA, 75 bp, synthetic construct
  source 1..75: mol_type = other DNA
gcgtcaattgtgaatacgaagaagaagacccgatagaagcgcgttacacgctgggccatcaacgcagaggattgg

SEQ ID NO: 520962 - DNA, 75 bp, synthetic construct
  source 1..75: mol_type = other DNA
ctccttcttgggagcttgatcctgatgaatgggagcagttagttgatgaaaagctctttatgcgggttgagcaat

SEQ ID NO: 520963 - DNA, 75 bp, synthetic construct
  source 1..75: mol_type = other DNA
ctgattatatcattcacctttttatacgtgagttatttacttacggtgataaagcctctgttgtacgtataatta

SEQ ID NO: 520964 - DNA, 75 bp, synthetic construct
  source 1..75: mol_type = other DNA
gagaaattctcaataaatgcggtaagttagagattaggattgcagaggataacaacgatcgttctcttaccgtaa

SEQ ID NO: 520965 - DNA, 75 bp, synthetic construct
  source 1..75: mol_type = other DNA
ttatgaatatgaagacaaagacccggtagaagcacgttatgcgcttggggaagagcgcaggagagcaaaaccgct

SEQ ID NO: 520966 - DNA, 75 bp, synthetic construct
  source 1..75: mol_type = other DNA
cgcccatcttgccgggcgccgctgtcgtgtggaaatccgcccaccttaccgggcgccggtgccgtgtgggaatcc

SEQ ID NO: 520967 - DNA, 75 bp, synthetic construct
  source 1..75: mol_type = other DNA
atgtcgatatgggaatcggcccaccttgccgcgcgccggtgctgtgtggaaatccgcccaccttgccgggcgccg

SEQ ID NO: 520968 - DNA, 75 bp, synthetic construct
  source 1..75: mol_type = other DNA
ctgcacaattacctcgatgacctggtcgacaaagccgtctctccggtggtgtatctcatcggtgttgaccatatt

SEQ ID NO: 520969 - DNA, 75 bp, synthetic construct
  source 1..75: mol_type = other DNA
cgagtgcgcctgaaaataatggagaaacatacgcctgtaaggtcgctgtaacctacaatggaaaacgctcaaact

SEQ ID NO: 520970 - DNA, 75 bp, synthetic construct
  source 1..75: mol_type = other DNA
gatcgcctgctctttattgctaaaggcctgatcaacgaagatattctccagcgccagctgatgcgccgcgcgata

SEQ ID NO: 520971 - DNA, 75 bp, synthetic construct
  source 1..75: mol_type = other DNA
ggtgccgtgtggaaatccgcccaccttgccgggcgccggtgctgtgtggaaatccgcccaccctttccgggcgcc

SEQ ID NO: 520972 - DNA, 75 bp, synthetic construct
  source 1..75: mol_type = other DNA
ttgctatggaaaaccgcccgcgatcaggatgaatttctgctgttgacgcgcaccggtgaaaaaatctggattaaa

SEQ ID NO: 520973 - DNA, 75 bp, synthetic construct
  source 1..75: mol_type = other DNA
tgatgtttttcaaccccgccgcagagaagctctgggggtacaaacgtgaagaagtcattggcaataacattgata

SEQ ID NO: 520974 - DNA, 75 bp, synthetic construct
  source 1..75: mol_type = other DNA
cgcgccggtgctgtgtgggaatcagcccaccttaccgggcgccggtgctgtgtgggaatcagcccaccttgccgg

SEQ ID NO: 520975 - DNA, 75 bp, synthetic construct
  source 1..75: mol_type = other DNA
tcgaattaccccaggcagcgagttaccctctgctcgctgatcaattctcttgttttatatcccctggcacacagc

SEQ ID NO: 520976 - DNA, 75 bp, synthetic construct
  source 1..75: mol_type = other DNA
gaagtcattggcaataacattgatatattgattcctcaggatttgcgccctgctcatcctgaatatatccgccat

SEQ ID NO: 520977 - DNA, 75 bp, synthetic construct
  source 1..75: mol_type = other DNA
tacccaaatcgccgatgagctacggaatgtggtcagcaagccgataatgattgacgataaacccttcccgcttac

SEQ ID NO: 520978 - DNA, 75 bp, synthetic construct
  source 1..75: mol_type = other DNA
acgcgatcattcagccgaaattcgcattaactacacggcatccagctacgatatcaattatgaaaatagccagaa

SEQ ID NO: 520979 - DNA, 75 bp, synthetic construct
  source 1..75: mol_type = other DNA
tcagaaagaataccgccgggatcataaaggcaccgcgtcggatgcctgttgccgaggccgttcataagtacatgc

SEQ ID NO: 520980 - DNA, 75 bp, synthetic construct
  source 1..75: mol_type = other DNA
tatatttatgtcggtgcttattgtcctcagcctcgctgttaacgtcattcaggggataaataactaccgtcttca

SEQ ID NO: 520981 - DNA, 75 bp, synthetic construct
  source 1..75: mol_type = other DNA
ttgatgtcatcggcacagagaagcagcaaattattcatctggaatatgcgtcagcggaagatctcgccgagattc

SEQ ID NO: 520982 - DNA, 75 bp, synthetic construct
  source 1..75: mol_type = other DNA
attaacaataaaacaattaaagatattacttggtattgtagtgatagcatggattcatgtttcagtacccgtaat

SEQ ID NO: 520983 - DNA, 75 bp, synthetic construct
  source 1..75: mol_type = other DNA
ttccggcacagtggacaagaaaaacgttgccggaagagatgagcggcaaaaagcagcgtcgccggaagcgttatc

SEQ ID NO: 520984 - DNA, 75 bp, synthetic construct
  source 1..75: mol_type = other DNA
cgtttgtgatcccgctgacatgctggttattcaggtctccgaagagaaagcgcgtgaacattccaagaaacgcct

SEQ ID NO: 520985 - DNA, 75 bp, synthetic construct
  source 1..75: mol_type = other DNA
attaataatcattgtttctcccctgacaaggttaacgaaatctgcgaacaagccagacattatttagttgaaaaa

SEQ ID NO: 520986 - DNA, 75 bp, synthetic construct
  source 1..75: mol_type = other DNA
tatacctaccagtttcaaagataagtctcttgaagtagagtcatattttgtcgacaaatcaatatggaatgtcca

SEQ ID NO: 520987 - DNA, 75 bp, synthetic construct
  source 1..75: mol_type = other DNA
tcttacaaacgagaaatggaacaagatttttcatgttaaaacccaaaaatggtgatggctggggagggtattcgt

SEQ ID NO: 520988 - DNA, 75 bp, synthetic construct
  source 1..75: mol_type = other DNA
tgacggcgatcgtcgtcctcctggcgggctgttcttcgccaccggagcctgcggccgttgactggtcacaaccgg

SEQ ID NO: 520989 - DNA, 75 bp, synthetic construct
  source 1..75: mol_type = other DNA
aaatcaatatggaatgtccatattacatttcatgatgataagcgttttgtgtttttttaccgatcaatttattgc

SEQ ID NO: 520990 - DNA, 75 bp, synthetic construct
  source 1..75: mol_type = other DNA
atgggaatcggcccaccttgccgggcgccggtgccgtgtggaaatccgcccaccttgccgcgcgccggtgccgtg

SEQ ID NO: 520991 - DNA, 75 bp, synthetic construct
  source 1..75: mol_type = other DNA
tcttgataaaaagatgggggatatgaaaacaaaactgactgcaggtatcgcaacatcgatggctttatcaggaat

SEQ ID NO: 520992 - DNA, 75 bp, synthetic construct
  source 1..75: mol_type = other DNA
accggcaatataaccacactgcagaatgacgtgaataatatcagcagcggctccgtggggctggtacgtcaggat

SEQ ID NO: 520993 - DNA, 75 bp, synthetic construct
  source 1..75: mol_type = other DNA
aacaatatgatttttcaatgcaagtcgcacgctcgctatgctatcagcaggatatgttgtcggtttatatcaaaa

SEQ ID NO: 520994 - DNA, 75 bp, synthetic construct
  source 1..75: mol_type = other DNA
acaggtttcttttttatgaagaaaaactccgctggcgaatgagtcggcaaatttctaatgcaaacacaatatttt

SEQ ID NO: 520995 - DNA, 75 bp, synthetic construct
  source 1..75: mol_type = other DNA
ggaatacgttactggcggaactgaccgatggacagagcaagcggcaggcgctgctgggaccaccagccgaaaagg

SEQ ID NO: 520996 - DNA, 75 bp, synthetic construct
  source 1..75: mol_type = other DNA
cgtaccctgaccggcgtccgggatggtactctagcagcggacagcagcgaagccgtgaccggcagtcagcttttt

SEQ ID NO: 520997 - DNA, 75 bp, synthetic construct
  source 1..75: mol_type = other DNA
aaattttttcttcttattctctggatcaagaacaaaataaggttgaagaatcaaataatattacctcacttttac

SEQ ID NO: 520998 - DNA, 75 bp, synthetic construct
  source 1..75: mol_type = other DNA
acctttttaagcggatcatgacctggaatttttataaaggtgacggcttctatttctctatcccatggataaaac

SEQ ID NO: 520999 - DNA, 75 bp, synthetic construct
  source 1..75: mol_type = other DNA
aattatccggcgttgaattgctggttcggtggcatacgccaacaggagaaatcattccgccgacatactttataa

SEQ ID NO: 521000 - DNA, 75 bp, synthetic construct
  source 1..75: mol_type = other DNA
tgtggcctgacagacgtaaccgggagacattctgccttcgccagtggtacacagagacaccggtgttaaggaagg

SEQ ID NO: 521001 - DNA, 75 bp, synthetic construct
  source 1..75: mol_type = other DNA
tccagcgaaaggcgttacgacagaactggtcaaagcgggaaacgataacacgcggcaaatcgtgttaaatcgcta

SEQ ID NO: 521002 - DNA, 75 bp, synthetic construct
  source 1..75: mol_type = other DNA
acttacatattattctttacaggatgacatttatgacactgagcttgaaatcaaaaggagtgagaatgaacttat

SEQ ID NO: 521003 - DNA, 75 bp, synthetic construct
  source 1..75: mol_type = other DNA
gattagaatatgggtgccacagggggaattatatttcgcattaatgaatgtattgcagatgttccccctgaaaaa

SEQ ID NO: 521004 - DNA, 75 bp, synthetic construct
  source 1..75: mol_type = other DNA
gatgccactgaactgctggacggtctggcccgtgcccggggtctgcagtttggttacaacggcgtccggctcccc

SEQ ID NO: 521005 - DNA, 75 bp, synthetic construct
  source 1..75: mol_type = other DNA
gcccatcgcgccgctgcacaaagccagcgatatcggcggtattgataatgcgccaatctggttacaggttaacgg

SEQ ID NO: 521006 - DNA, 75 bp, synthetic construct
  source 1..75: mol_type = other DNA
ccattcttcttctgcaaaccagcggatgccgttgttccggttgccgctggcgaaacgctggcgctgccgtatccg

SEQ ID NO: 521007 - DNA, 75 bp, synthetic construct
  source 1..75: mol_type = other DNA
tggccctccagggccaaagggagatccgggaccacaggggcctgccgggcctcagggaaaatcaggcagccttga

SEQ ID NO: 521008 - DNA, 75 bp, synthetic construct
  source 1..75: mol_type = other DNA
tgagtcaatgctggaagcaacagaagatgttcgtcatcctggttgtccggtatttgctggtatggaattaccgaa

SEQ ID NO: 521009 - DNA, 75 bp, synthetic construct
  source 1..75: mol_type = other DNA
caaagcgcatttgtcgacaagttgaatgccgggtttaatcccagcattatttttatcccggcaaaaaacactctt

SEQ ID NO: 521010 - DNA, 75 bp, synthetic construct
  source 1..75: mol_type = other DNA
atgtcacgaattgcagtcaaaagcagcagaagaggcagtaagaattcttcatggagtcacccccaaaaactgggt

SEQ ID NO: 521011 - DNA, 75 bp, synthetic construct
  source 1..75: mol_type = other DNA
tgagacttctgcttctttatactggaaggcgtcctcaaccgctattgttgatatatctcttcttgttgctttttt

SEQ ID NO: 521012 - DNA, 75 bp, synthetic construct
  source 1..75: mol_type = other DNA
gattagaatatgggtgcctgaggggaaattgtatttcgcattaatgaatgtattgcagatgtttcccatgaaaaa

SEQ ID NO: 521013 - DNA, 75 bp, synthetic construct
  source 1..75: mol_type = other DNA
atgaaaaggcacgatacaaacccggcatcgctaactatcacaatatcatcacggctttgttgaataaatcagatt

SEQ ID NO: 521014 - DNA, 75 bp, synthetic construct
  source 1..75: mol_type = other DNA
gaggaaaagagagaagaaaaatttattcaaggttattatgatggctatacaaaaggcattattgatgagatggat

SEQ ID NO: 521015 - DNA, 75 bp, synthetic construct
  source 1..75: mol_type = other DNA
aaatgaaaatcgcattaacatgatgaaaaaatcatgcgttctcgtaaatacaggacgtggtggattaattgatga

SEQ ID NO: 521016 - DNA, 75 bp, synthetic construct
  source 1..75: mol_type = other DNA
ctggcaactcaagcaccgcccatgttgctagctttatcgctgctccatcgactatcgccgccaccaacagtgatt

SEQ ID NO: 521017 - DNA, 75 bp, synthetic construct
  source 1..75: mol_type = other DNA
agaacgtatttccaataaatactgcaaatactgaatatatagtgagaaatatttatcctagagttgaacatggtt

SEQ ID NO: 521018 - DNA, 75 bp, synthetic construct
  source 1..75: mol_type = other DNA
gtttctcttctgaacataacgtgaccaagcgtgagaacggtaaagaatggctggtagagatcccttacttcctgc

SEQ ID NO: 521019 - DNA, 75 bp, synthetic construct
  source 1..75: mol_type = other DNA
ttatccgtcgccatctgcggcgttatccacacgcgctacgccagcatttgctgcaggagctcaaccgactcgtta

SEQ ID NO: 521020 - DNA, 75 bp, synthetic construct
  source 1..75: mol_type = other DNA
caagtgttaagagatgagtcgccagagttaaagtctattaaatctgagattattattgctcgtgaaatgggagaa

SEQ ID NO: 521021 - DNA, 75 bp, synthetic construct
  source 1..75: mol_type = other DNA
agatcttccctaaagaaaatagtgattttttgtatataattgttgtattcagaaatgattctccccaaggagaac

SEQ ID NO: 521022 - DNA, 75 bp, synthetic construct
  source 1..75: mol_type = other DNA
accagaagtatggcacaattaaaaatagaggagtttattaatgagaaatccagacgacttaattatatgaagaca

SEQ ID NO: 521023 - DNA, 75 bp, synthetic construct
  source 1..75: mol_type = other DNA
actattagtggtagtggctgggggaatctatgcgctgcaagtgaagggcaaaagcggtgtcacactagtggcgac

SEQ ID NO: 521024 - DNA, 75 bp, synthetic construct
  source 1..75: mol_type = other DNA
aaaaggcccgaaatatgtggtttacccctgcctgctgttctttacggttgggctggtggttctcggctacaccca

SEQ ID NO: 521025 - DNA, 75 bp, synthetic construct
  source 1..75: mol_type = other DNA
cttttactggaaatgtctgcgacaaaaaagggccgaaatatgtggtttatccctgcctagtgttctttacgatag

SEQ ID NO: 521026 - DNA, 75 bp, synthetic construct
  source 1..75: mol_type = other DNA
tcttcttcaatgcgatggatgcaggcctggcgctgggagcctttgtgatggggatgatggttgcacatactggct

SEQ ID NO: 521027 - DNA, 75 bp, synthetic construct
  source 1..75: mol_type = other DNA
gccatcttcctgatgatctgccgtacctttaccggcaatgtctgcgacaaaaaaggcccgaaatatgtggtttac

SEQ ID NO: 521028 - DNA, 75 bp, synthetic construct
  source 1..75: mol_type = other DNA
attctggtgctctcttctctggcctttttattggtcacagcgttgtatcctttttgccactcaattgaatcactg

SEQ ID NO: 521029 - DNA, 75 bp, synthetic construct
  source 1..75: mol_type = other DNA
atgacgactggggatttgggcgcgggaaggcaaactatataactggcggtgctgctatcgcgcagaaagccaaat

SEQ ID NO: 521030 - DNA, 75 bp, synthetic construct
  source 1..75: mol_type = other DNA
cgtggcaataaccataattacgatggaaaaagcgttgtcgaaattagaaaacttgatattagtaaagagtcctga

SEQ ID NO: 521031 - DNA, 75 bp, synthetic construct
  source 1..75: mol_type = other DNA
gtgatatatataaaatcacttcaagtgattttcagactgccacatctgaaaaaatttatcgacataatgaacgaa

SEQ ID NO: 521032 - DNA, 75 bp, synthetic construct
  source 1..75: mol_type = other DNA
gaatattcaaaaagaattgtccaagaggtttttgtgtttaatgttgaagacaaaaaagtaaaattaaaaggttat

SEQ ID NO: 521033 - DNA, 75 bp, synthetic construct
  source 1..75: mol_type = other DNA
ccccctctcggtgccaatattcagcagaatggcagtggaatcagtgtcggtatggttagcgaggaaggccatgcc

SEQ ID NO: 521034 - DNA, 75 bp, synthetic construct
  source 1..75: mol_type = other DNA
agatcatcaatatctccgcgaagccgaagctggggtacccgcccgtgaactatgccgcaagcatgccatttccga

SEQ ID NO: 521035 - DNA, 75 bp, synthetic construct
  source 1..75: mol_type = other DNA
acctgaataatattgaagcgaagaagcattttctcaaaatggaaagctactttaactctgatttacccgcatact

SEQ ID NO: 521036 - DNA, 75 bp, synthetic construct
  source 1..75: mol_type = other DNA
gctgataaacgccccaataacggtgacctgcgtgattccggggcgctggagcaggatgctgacctgattatgttt

SEQ ID NO: 521037 - DNA, 75 bp, synthetic construct
  source 1..75: mol_type = other DNA
atcatttgcgcagtggcaacatggatgatgaggactgggcgagggtgtcatctgcggttggcatggcgctgggtg

SEQ ID NO: 521038 - DNA, 75 bp, synthetic construct
  source 1..75: mol_type = other DNA
tatgcaggcattgtggtggagaaaagcgttctgcgtcagttacaggccaccggaaacaccctgattgctgatgtg

SEQ ID NO: 521039 - DNA, 75 bp, synthetic construct
  source 1..75: mol_type = other DNA
aggcctccgcgctatgggggccagccgcgcagccctcctgcgcgatactatcggcgatgagaaaacccaattact

SEQ ID NO: 521040 - DNA, 75 bp, synthetic construct
  source 1..75: mol_type = other DNA
tttgatatggcgaccagcgccgcagcgcgcggtgaaattcagctgcaccaacgggcgggtaagccaattccagaa

SEQ ID NO: 521041 - DNA, 75 bp, synthetic construct
  source 1..75: mol_type = other DNA
gcttggccgggctacgcgattcgtcaatctgcactcatcggttccctctcccctatggggagagggctagggtga

SEQ ID NO: 521042 - DNA, 75 bp, synthetic construct
  source 1..75: mol_type = other DNA
gcaggtcaatcgtcggacgtggaccggccgtcaggagaagaaaatcgtcaccagcgtgcgcctggtctatcccgg

SEQ ID NO: 521043 - DNA, 75 bp, synthetic construct
  source 1..75: mol_type = other DNA
atggtacttagcggtagtactatcaccgatttaaatgaattcagaattggtgaatttaattaccaggcacagggg

SEQ ID NO: 521044 - DNA, 75 bp, synthetic construct
  source 1..75: mol_type = other DNA
gaatataaataaaggcactttgcgcgccggtgtcaacgataccttcagcccaaactccgattatgttgtcgacag

SEQ ID NO: 521045 - DNA, 75 bp, synthetic construct
  source 1..75: mol_type = other DNA
gaaaaatttgcttttttttacccccataatatagttcttgagatactcataacaggtgggattgttttatttcta

SEQ ID NO: 521046 - DNA, 75 bp, synthetic construct
  source 1..75: mol_type = other DNA
acgcgaactgttttgccttctttacctgatccttgcgagcgtctcgctcatctcgctcgtggcgaagaaggctac

SEQ ID NO: 521047 - DNA, 75 bp, synthetic construct
  source 1..75: mol_type = other DNA
attatcgtcagtttctgtctgcggccaggctacctgtccaccatcctgctggccgatgccccgctggcagcggcg

SEQ ID NO: 521048 - DNA, 75 bp, synthetic construct
  source 1..75: mol_type = other DNA
cgctggttgatggtgacaattcttcattagccgtgaatgagtttatctcccttgggggattgggctcattgctga

SEQ ID NO: 521049 - DNA, 75 bp, synthetic construct
  source 1..75: mol_type = other DNA
actggtcagatctaccgaaagatgagctaacccgtttctggcaggatgtcgatgccggcactcagggtaatttcc

SEQ ID NO: 521050 - DNA, 75 bp, synthetic construct
  source 1..75: mol_type = other DNA
cttataagttatagtgaagatggattacttacaatagaagattttaataaattactagctgattttggtgatgtt

SEQ ID NO: 521051 - DNA, 75 bp, synthetic construct
  source 1..75: mol_type = other DNA
cgaaaaagttcgatggcagtgtgctgttactgaaacgcgataaagaaggcgactatcaccggagttcacaacaac

SEQ ID NO: 521052 - DNA, 75 bp, synthetic construct
  source 1..75: mol_type = other DNA
agctgggttttgaaatatccccagtaatactttgcggagggatagcgcaggccattcctggaggaatgctcccga

SEQ ID NO: 521053 - DNA, 75 bp, synthetic construct
  source 1..75: mol_type = other DNA
tggctactgaaatccatgccacctgatgaagcctacttttgtacagcagaacggctgagggagctggccatacag

SEQ ID NO: 521054 - DNA, 75 bp, synthetic construct
  source 1..75: mol_type = other DNA
gtcttatcgaggaggggattctgcgtgaagatgaggagatctccccgcgtgcagcacgtgagcgctggtaccgtc

SEQ ID NO: 521055 - DNA, 75 bp, synthetic construct
  source 1..75: mol_type = other DNA
aatgcagttcctgtgttgctagctcagaagataggacagcaattgtataacttattgaatgaagaggttgagcct

SEQ ID NO: 521056 - DNA, 75 bp, synthetic construct
  source 1..75: mol_type = other DNA
ttcgtagtctgttgcaaaactatcacgctcaggcaaaaaccattgataaagaaacattctctgtacatagcgatg

SEQ ID NO: 521057 - DNA, 75 bp, synthetic construct
  source 1..75: mol_type = other DNA
tgtctcaaatgtgctcaatggcagaggaaatgtaagcgttgagaagattgaagcggttcaacgtgcggcccaaga

SEQ ID NO: 521058 - DNA, 75 bp, synthetic construct
  source 1..75: mol_type = other DNA
ttcactacagttgctgaagttaagtgtgctaccgtcaattttcatgaagccaactataacaatattgttattaag

SEQ ID NO: 521059 - DNA, 75 bp, synthetic construct
  source 1..75: mol_type = other DNA
atcacgccgaacgcctatctctcctcaattgcgccgattgttgaaggcgaacacgttattgaagcggtcaacgtc

SEQ ID NO: 521060 - DNA, 75 bp, synthetic construct
  source 1..75: mol_type = other DNA
gtgttcccggccttatatctctggctgctaatagtgttgcgcgtaagcgtaatacttcctccaattctcgccacg

SEQ ID NO: 521061 - DNA, 75 bp, synthetic construct
  source 1..75: mol_type = other DNA
attacttctactgcccgttttaataacgacagtgatgattttgaagagttgcacaagattacgcttatggtgttt

SEQ ID NO: 521062 - DNA, 75 bp, synthetic construct
  source 1..75: mol_type = other DNA
atggctatgattgaccctcgtacacctatcggcaaagcgacccttcgttaccgtggtctgcctacacgtcatctg

SEQ ID NO: 521063 - DNA, 75 bp, synthetic construct
  source 1..75: mol_type = other DNA
ctgccagcttttcgcccgcttgccagactggacagccccggcattaacgcccgccacggaacaggcacaaggagc

SEQ ID NO: 521064 - DNA, 75 bp, synthetic construct
  source 1..75: mol_type = other DNA
gctcatggagtccctggtggcgaaaatatgattagatatgaaaatgatagcgtccgttacttcacagtttatgaa

SEQ ID NO: 521065 - DNA, 75 bp, synthetic construct
  source 1..75: mol_type = other DNA
tgattatatacatgccaaaaaagatgattaccctatgagtgataatgtggaaaacatagtttcctttacattcag

SEQ ID NO: 521066 - DNA, 75 bp, synthetic construct
  source 1..75: mol_type = other DNA
ataaatatgttgataaatttatggctattctgcttttagggggtttacactcgctggaaaggggagcagtaacca

SEQ ID NO: 521067 - DNA, 75 bp, synthetic construct
  source 1..75: mol_type = other DNA
gttcctgagtatcttgatgatgctataaaaaacttaataatcaaaacaagtgattttacatatgcaataaaagat

SEQ ID NO: 521068 - DNA, 75 bp, synthetic construct
  source 1..75: mol_type = other DNA
attggcgttcaatgtatctttcttcccgagcttcagcgcaatatcagctttaagatggacttaatagcgttgtac

SEQ ID NO: 521069 - DNA, 75 bp, synthetic construct
  source 1..75: mol_type = other DNA
accgcacaaacattacaatggctggcagaggagacgttacccgacaacacccaggtgatgcgccgcgcgataaat

SEQ ID NO: 521070 - DNA, 75 bp, synthetic construct
  source 1..75: mol_type = other DNA
gtatgacatcattgttgatggacaacctcggcagtctcacggtaaaggtgttcgtgccattctttattcagcttt

SEQ ID NO: 521071 - DNA, 75 bp, synthetic construct
  source 1..75: mol_type = other DNA
agaaggattatatcagaatctattctgtctctgataaaaggggaaaagtactcaattaaacatgatggattagat

SEQ ID NO: 521072 - DNA, 75 bp, synthetic construct
  source 1..75: mol_type = other DNA
ggatcatggaaaaaattggctcaatatgtggagataaattaatatgtctgcataaagatgatgcagtgattgctc

SEQ ID NO: 521073 - DNA, 75 bp, synthetic construct
  source 1..75: mol_type = other DNA
ggtaataacgccagagtcaaaattcttgaaagctataaaatagaaaataggattttgaaattagatgaactttat

SEQ ID NO: 521074 - DNA, 75 bp, synthetic construct
  source 1..75: mol_type = other DNA
gcgcattatctaaatcagaagttttcccaatgagtattggcctggcatggcgtaataatgttgagtttacgcctg

SEQ ID NO: 521075 - DNA, 75 bp, synthetic construct
  source 1..75: mol_type = other DNA
cctctgctggaaaaagaaattctctccctgaatgatattgtctcagagccttttattatccttgatgtggatgaa

SEQ ID NO: 521076 - DNA, 75 bp, synthetic construct
  source 1..75: mol_type = other DNA
tgggaatcaggctgttcggctgcttctacacctgccaggaagcaatcagggagggttggtttcaccgaggccagg

SEQ ID NO: 521077 - DNA, 75 bp, synthetic construct
  source 1..75: mol_type = other DNA
aagaaagcctagatttagctattgagcagcgagctgaaagagactctgagttgaatgatcgacagagatggtttg

SEQ ID NO: 521078 - DNA, 75 bp, synthetic construct
  source 1..75: mol_type = other DNA
tgtattaaagtttagtttttctaattacaaaaggaatcatataaaatccattggtggagtagggattaaattttt

SEQ ID NO: 521079 - DNA, 75 bp, synthetic construct
  source 1..75: mol_type = other DNA
gtaattttctcagtagtagcatggatttataattttgatattggtataggtctaggtttaaaaaatagtttaaat

SEQ ID NO: 521080 - DNA, 75 bp, synthetic construct
  source 1..75: mol_type = other DNA
aagaaaataaaagttttaactggctaaatccagtgagtgttggtattaatgatattacaccagatgatgaaagct

SEQ ID NO: 521081 - DNA, 75 bp, synthetic construct
  source 1..75: mol_type = other DNA
ttaataccttatgaaaattgggatttgactaggcattatgaaacatatttatatgttagtcaaacatcactaaac

SEQ ID NO: 521082 - DNA, 75 bp, synthetic construct
  source 1..75: mol_type = other DNA
gccgcatccggataacccggccattgctgttattaaagattttgagcgtcgtctcgagcagcgtttcctgcgaaa

SEQ ID NO: 521083 - DNA, 75 bp, synthetic construct
  source 1..75: mol_type = other DNA
gtggctcctttcgtggtgtgccgtttctgatttatcaggaacaacgggaacggggcggacgtaacattgtacgcc

SEQ ID NO: 521084 - DNA, 75 bp, synthetic construct
  source 1..75: mol_type = other DNA
gaatcaaagattcttggtgcctgtacaggattttttatcatgtatctgtcaatgaaaattgtaagtcatatgaaa

SEQ ID NO: 521085 - DNA, 75 bp, synthetic construct
  source 1..75: mol_type = other DNA
cttactcgtggcaataaccataattacgatggaaaaagcgttgtcgaaattagaaaacttgatattagtaaatag

SEQ ID NO: 521086 - DNA, 75 bp, synthetic construct
  source 1..75: mol_type = other DNA
aataataggtataagtcacaaaaaattatattctctgcaattatttcatgttgtattcatcccagcgcaatacta

SEQ ID NO: 521087 - DNA, 75 bp, synthetic construct
  source 1..75: mol_type = other DNA
gcaattggcaccagcgattgattcctattttatttttgtccttcatttgtctaattttgttattggggaacttgc

SEQ ID NO: 521088 - DNA, 75 bp, synthetic construct
  source 1..75: mol_type = other DNA
gtccaattgatcaaggatctggtattctttcttactgtaaaaatttaactctttctctgaaagcgttaggacatg

SEQ ID NO: 521089 - DNA, 75 bp, synthetic construct
  source 1..75: mol_type = other DNA
tcgaaaaggtatagaaatacttgttaagcagggagagctgttatcatcattaataaatgataataaaggaaataa

SEQ ID NO: 521090 - DNA, 75 bp, synthetic construct
  source 1..75: mol_type = other DNA
ccggctccttccgtggcgtgccgtttctggtgtatcaggagcagcgggaacggggcggacgtaacattgtgcgcc

SEQ ID NO: 521091 - DNA, 75 bp, synthetic construct
  source 1..75: mol_type = other DNA
aacaacaggtgctggatctgtccgcacagggccataccggcaccgcccttgcattacgtgatgcagggcttgcgc

SEQ ID NO: 521092 - DNA, 75 bp, synthetic construct
  source 1..75: mol_type = other DNA
atgcgctgcaggcgctggttgccatgccgcaaagttggtgggggggtaaatagttctctggcgctgcccaccgtt

SEQ ID NO: 521093 - DNA, 75 bp, synthetic construct
  source 1..75: mol_type = other DNA
gaaggaagtgggggattttgatggctttgtaagtttaccgactacaagccctttgcgaagtgtcgatgatgtcga

SEQ ID NO: 521094 - DNA, 75 bp, synthetic construct
  source 1..75: mol_type = other DNA
cgcatcccgtatgcgaccgacccggcgggaaaccgcctgccggacccggagctgcacccggacagcacgctcacg

SEQ ID NO: 521095 - DNA, 75 bp, synthetic construct
  source 1..75: mol_type = other DNA
caggacccgattgggctggcggggggatggagtctgtatgcgtatccgctgaatccggtgaatggtattgatcca

SEQ ID NO: 521096 - DNA, 75 bp, synthetic construct
  source 1..75: mol_type = other DNA
cagttaccagccgtccaccgtggcagtcaacatgaatgatttacctgacggcgtgacggtagcagaaaatgtcat

SEQ ID NO: 521097 - DNA, 75 bp, synthetic construct
  source 1..75: mol_type = other DNA
tccagtgtctgcgtgagtccgcagagaaactgtcgctaacgcagtacagccagcagtgtggggtgtcagaagcag

SEQ ID NO: 521098 - DNA, 75 bp, synthetic construct
  source 1..75: mol_type = other DNA
caggccatgcagcaggcaggagaaaaaagctggactaatgcaacgcatctggtgattaccgatgaaattccaacg

SEQ ID NO: 521099 - DNA, 75 bp, synthetic construct
  source 1..75: mol_type = other DNA
acccacgtaaaacccgactgggataacgtcgaattcgcgctgtttatgggcacctctccggcgcaatccggcaac

SEQ ID NO: 521100 - DNA, 75 bp, synthetic construct
  source 1..75: mol_type = other DNA
ttttcacagctacgccaactatctggatcacaaatacaacgacaacgatgcgcaggacgaaaaacagacgatcag

SEQ ID NO: 521101 - DNA, 75 bp, synthetic construct
  source 1..75: mol_type = other DNA
gataaatttggtttaaaaccagatatccgtcagtccttgccacagatagatcggtgtattgatttcagttcccga

SEQ ID NO: 521102 - DNA, 75 bp, synthetic construct
  source 1..75: mol_type = other DNA
agtgcgtcgattttagctcccgaccagaaatgctcttcaattttgatcaggccagtcagcaactgaatatcacca

SEQ ID NO: 521103 - DNA, 75 bp, synthetic construct
  source 1..75: mol_type = other DNA
tatcctgcctggtcatggcgatgccttccgcattggcggtcgaattcaacctgaatgttctcgataaatcgatgc

SEQ ID NO: 521104 - DNA, 75 bp, synthetic construct
  source 1..75: mol_type = other DNA
atgataaccatgaacagtcaggcgaaatatcacgtacctatctttttcgcccgctaccgcaattaggttcaaaat

SEQ ID NO: 521105 - DNA, 75 bp, synthetic construct
  source 1..75: mol_type = other DNA
gtggccgtgaacatgaacgacttacccgacggcgtgacggtgacagaaaacgtcatcaaagaaacgtggattgaa

SEQ ID NO: 521106 - DNA, 75 bp, synthetic construct
  source 1..75: mol_type = other DNA
atccaataagccgtcaggggaataagagtggggttgccgatatgactatagtcaatagtacgcaaaagactcata

SEQ ID NO: 521107 - DNA, 75 bp, synthetic construct
  source 1..75: mol_type = other DNA
gtgaccttgatttgatattcgtgccggtgcaggcgtggctgcgtgaacatcagccggacattatgaccaccgacg

SEQ ID NO: 521108 - DNA, 75 bp, synthetic construct
  source 1..75: mol_type = other DNA
caccgatacacccgtgaagagctggatggcatccgcgctaaggcccgggcagatcttcgcgcactcaaacagcag

SEQ ID NO: 521109 - DNA, 75 bp, synthetic construct
  source 1..75: mol_type = other DNA
ggcggccatcctctcagatacgaaagttaatttgtgcgcaaaaacatcttcaagtccaaatcacatttgggctat

SEQ ID NO: 521110 - DNA, 75 bp, synthetic construct
  source 1..75: mol_type = other DNA
ttggcaagccccgaatgactcagcgtgaccgatggcataaacggccagcaacagcagcgtactgggcatacaaag

SEQ ID NO: 521111 - DNA, 75 bp, synthetic construct
  source 1..75: mol_type = other DNA
tcggcaagcctcgcatgacccgcgcggataagtggaagcagcgtccacctgtaatgcgttaccgcgctttttgcg

SEQ ID NO: 521112 - DNA, 75 bp, synthetic construct
  source 1..75: mol_type = other DNA
accggtactacgatccgttgcaggggcggtatatcactcaggacccgatagggctggagggggggatggagtctg

SEQ ID NO: 521113 - DNA, 75 bp, synthetic construct
  source 1..75: mol_type = other DNA
caggttgcgatattattgtttcaacggggatggccactctttctgaaatagaagctgctttgggtgttatcgcat

SEQ ID NO: 521114 - DNA, 75 bp, synthetic construct
  source 1..75: mol_type = other DNA
ttatatagcgtcgcggcgagaatttttataaagcttccatttgtaaaggttcctgttaaggaaagctcactaaag

SEQ ID NO: 521115 - DNA, 75 bp, synthetic construct
  source 1..75: mol_type = other DNA
tcagaatgttgaaaatgatactggtgcccccgtttcgctgggcggtacagttatgatcgacaccaccacggaata

SEQ ID NO: 521116 - DNA, 75 bp, synthetic construct
  source 1..75: mol_type = other DNA
caccgttggacagtcgaagagctgaaggaaatcaggcttaccgcgctggccgacctacgcgcactgaagaaacag

SEQ ID NO: 521117 - DNA, 75 bp, synthetic construct
  source 1..75: mol_type = other DNA
gttgctattaattatttcagtatcaatggctatggcgggcaaaatatagttccgttcggggagcggggggtattg

SEQ ID NO: 521118 - DNA, 75 bp, synthetic construct
  source 1..75: mol_type = other DNA
atcaatcaacatggcgacatcaatcacacccatgaggtgcttcaggatgacagcaagtgtgaaccgccccgggtt

SEQ ID NO: 521119 - DNA, 75 bp, synthetic construct
  source 1..75: mol_type = other DNA
aaataaatcttcttcaggtctgaaacgtgtaattgatgtaaagataatgcaaagagcatatttgtcagccaccat

SEQ ID NO: 521120 - DNA, 75 bp, synthetic construct
  source 1..75: mol_type = other DNA
gcgcggcggtgtggcgaaactggatgaaggtcaccggctggccgcactctggcaggcgctgccggaagaactccg

SEQ ID NO: 521121 - DNA, 75 bp, synthetic construct
  source 1..75: mol_type = other DNA
aggatgaagatcggcgattacggcagtatgacgttgaaagatgcacgccacgcggtggcagaatacaaagaacta

SEQ ID NO: 521122 - DNA, 75 bp, synthetic construct
  source 1..75: mol_type = other DNA
tacgtaacagaaaccaacgcagatacaattgataaaaatcatgcgatctatgaaaaggcaaaagaagtatctagc

SEQ ID NO: 521123 - DNA, 75 bp, synthetic construct
  source 1..75: mol_type = other DNA
gcggaccaacccccggagccaatgagaaaacatcccaacctgtaattcactatcatataaataatgataatagaa

SEQ ID NO: 521124 - DNA, 75 bp, synthetic construct
  source 1..75: mol_type = other DNA
cgaaatgggggctgcaaaaaaagtcatcatcttcacggagtcgatgcgaactcaacagtaccttgcacattttct

SEQ ID NO: 521125 - DNA, 75 bp, synthetic construct
  source 1..75: mol_type = other DNA
cgaaatattttgcgcatgaactttccattcttcattcaaacaatggggtggaccgtctgtctcaatcgctgtttg

SEQ ID NO: 521126 - DNA, 75 bp, synthetic construct
  source 1..75: mol_type = other DNA
acctttaatcttaaagcccgtgcagtgagtaaaggccaggttactcctggagatatcagttctgttataaccgtc

SEQ ID NO: 521127 - DNA, 75 bp, synthetic construct
  source 1..75: mol_type = other DNA
ttacagtttcgcactaatacaatcgcccattttcaatgcacctaccggccgttatcaactggttcgagcgaagca

SEQ ID NO: 521128 - DNA, 75 bp, synthetic construct
  source 1..75: mol_type = other DNA
caggcaaaaagttaataattatgtcttaccattttgccgccaaattagccgacgacttagtgacggttccttggg

SEQ ID NO: 521129 - DNA, 75 bp, synthetic construct
  source 1..75: mol_type = other DNA
aaccaacgaaaagctggataattcggcaagtttagatgcattacctgatgacttgatcttactcaagaacaggca

SEQ ID NO: 521130 - DNA, 75 bp, synthetic construct
  source 1..75: mol_type = other DNA
ggtggatgattcgcagatctaccgtcagaacaagatagcattaaagctattattgctcaccgggtgcagggtggg

SEQ ID NO: 521131 - DNA, 75 bp, synthetic construct
  source 1..75: mol_type = other DNA
actgatacctctggctgtaatgcaattgaagggaaactaaaagcggtgtttggtgaagctttgcttgtcgagttt

SEQ ID NO: 521132 - DNA, 75 bp, synthetic construct
  source 1..75: mol_type = other DNA
tgaactggaaaaaatcgccactgactatgcacttaaattccagaaagcacaggacgcattaaagcatgccgcttt

SEQ ID NO: 521133 - DNA, 75 bp, synthetic construct
  source 1..75: mol_type = other DNA
ctgccgaccgtcaatgacgcagccaaaggcattggccgcatcacaactgttgtggcgaaattcgcagcggaacac

SEQ ID NO: 521134 - DNA, 75 bp, synthetic construct
  source 1..75: mol_type = other DNA
actaacgatacagcgtcgtatttacacacgtttggcttaactgagggtcttttatcagagaaccctttctatggc

SEQ ID NO: 521135 - DNA, 75 bp, synthetic construct
  source 1..75: mol_type = other DNA
ggagcaatggccgaccaactcgacgacacaaagagtcggcttgaagacatgatgcgtgagttaagccatcgacat

SEQ ID NO: 521136 - DNA, 75 bp, synthetic construct
  source 1..75: mol_type = other DNA
atatattttctagaggctgtatttttctactaaatgtaattcttaaaccattatatttgtcaacaatagttagac

SEQ ID NO: 521137 - DNA, 75 bp, synthetic construct
  source 1..75: mol_type = other DNA
gatcagcaagctgccaaaacacatgcaggcggcaacgctttcgcaactgtttggtaaggaatcgattggcgctat

SEQ ID NO: 521138 - DNA, 75 bp, synthetic construct
  source 1..75: mol_type = other DNA
tgcgtgaagctatggatttgcacggctttaattttatcttcgttcccgtgctttctggaagggatgaagcggtag

SEQ ID NO: 521139 - DNA, 75 bp, synthetic construct
  source 1..75: mol_type = other DNA
tatagacagttcaaaaatggcgcggctaaatcagatattgatgaagctgattatattcaccggatgcagaacaag

SEQ ID NO: 521140 - DNA, 75 bp, synthetic construct
  source 1..75: mol_type = other DNA
gcgtgtggccaccctggcggcgcagttcggcttcactttcctgaaaggtggcgtgttgcagatgtccagcctgtt

SEQ ID NO: 521141 - DNA, 75 bp, synthetic construct
  source 1..75: mol_type = other DNA
gcagaaggaattccagaacaccgtcaacaccaccaacgcgcagatggttatccttcgtaaccgcacagctgacgt

SEQ ID NO: 521142 - DNA, 75 bp, synthetic construct
  source 1..75: mol_type = other DNA
cgcgcgaagcgttcaaggaattgggttattccgcgcaggaagtggcgaaatccatgcaactggatagcgtcaaga

SEQ ID NO: 521143 - DNA, 75 bp, synthetic construct
  source 1..75: mol_type = other DNA
tctttattttttaaaagtggaaaggtaaaagataaggtaaaaaaatggattaaagtaatgtgtgatttattttgg

SEQ ID NO: 521144 - DNA, 75 bp, synthetic construct
  source 1..75: mol_type = other DNA
atgtcaaaggcaatttttcgaatcgtgaacagagcatggtagtcgttcaggcacctacgctaagccagaaagatt

SEQ ID NO: 521145 - DNA, 75 bp, synthetic construct
  source 1..75: mol_type = other DNA
gccgttatgatctggtggatcgcaacaacaacatcgttctggaatatcgcaaaaaagaactggtccgcctgaccc

SEQ ID NO: 521146 - DNA, 75 bp, synthetic construct
  source 1..75: mol_type = other DNA
aagcaccgcacatgttgctagctttatcgctgatccgtcgactatcacggccaacaatagtgatatcagcacgct

SEQ ID NO: 521147 - DNA, 75 bp, synthetic construct
  source 1..75: mol_type = other DNA
tggctggcccggcagacacctcgcagtccgtccttaagagcaatcggtcatcactgaaaggggactataccgata

SEQ ID NO: 521148 - DNA, 75 bp, synthetic construct
  source 1..75: mol_type = other DNA
ggaagatacggttcgtatactgtgaaagcatccctggcgaatggatcctcttatgagaaggatctggtggtaatc

SEQ ID NO: 521149 - DNA, 75 bp, synthetic construct
  source 1..75: mol_type = other DNA
agtcacccttgaaaatggcgtgaaacaaacgttaatcgtcagttttgtcggcgactcgagtaccgcgcaggttga

SEQ ID NO: 521150 - DNA, 75 bp, synthetic construct
  source 1..75: mol_type = other DNA
atattgaggtgaaggataattacggcaacggtgtcccccagcatcaggtgaccctcagcgtttcaccaagtgaag

SEQ ID NO: 521151 - DNA, 75 bp, synthetic construct
  source 1..75: mol_type = other DNA
cccgtgacagttagcgtgaacaattatggtgtcagtgatacgaaacaggtgactttgattgccgatgctggtacc

SEQ ID NO: 521152 - DNA, 75 bp, synthetic construct
  source 1..75: mol_type = other DNA
attaacagcggtgaccgatcaaaacggaatcgcgacaacaagcgtgaaaggagcgatgacaggtagcgtcacggt

SEQ ID NO: 521153 - DNA, 75 bp, synthetic construct
  source 1..75: mol_type = other DNA
cagcagaagacagcactatcgttattaaagataaagcaaaagcattattttcaaattatgtatacctgctgaaca

SEQ ID NO: 521154 - DNA, 75 bp, synthetic construct
  source 1..75: mol_type = other DNA
acacacaatacgaaaaaccaccactcagttgcgacgcaaaactgggggaacagcacgtacaaacaaactgactgg

SEQ ID NO: 521155 - DNA, 75 bp, synthetic construct
  source 1..75: mol_type = other DNA
tcacacacactgacagcagtgcctccgccgatgttttcagtggtaaaacgaagtctgtgggggctggcctgtatg

SEQ ID NO: 521156 - DNA, 75 bp, synthetic construct
  source 1..75: mol_type = other DNA
ttgcaatcgcctccctgaccggcacgttagcgggcacgcatatgatcacggctcgtctggctaacagcaatgtca

SEQ ID NO: 521157 - DNA, 75 bp, synthetic construct
  source 1..75: mol_type = other DNA
ggggatatgaaggttaaagcgctgtttgacgagtttcataaagttcttttgtttaggaatcgactttttcaccat

SEQ ID NO: 521158 - DNA, 75 bp, synthetic construct
  source 1..75: mol_type = other DNA
gggtcagtacctggattaaacacacgatgggacccggactggcttatctcgccgcgtggacctactgggtggtgc

SEQ ID NO: 521159 - DNA, 75 bp, synthetic construct
  source 1..75: mol_type = other DNA
gtaccaactcttttcgtgcggatcctgcacgtgaaatatatggatcacctgttgtatttactggtgatgaagaac

SEQ ID NO: 521160 - DNA, 75 bp, synthetic construct
  source 1..75: mol_type = other DNA
tttggcttaaaaaccgtaaaagaatttgttaaagcaattctttatattattttttttttttgcattggcgatcaa

SEQ ID NO: 521161 - DNA, 75 bp, synthetic construct
  source 1..75: mol_type = other DNA
tattaaggggcggaattgccgccatcatgtggtttggtttgcaatgttacgcggggtcactggcctgcttgattc

SEQ ID NO: 521162 - DNA, 75 bp, synthetic construct
  source 1..75: mol_type = other DNA
ggcgctatttgagcgtttttgcgaggaacatggtgaagaccctaacgatatttatcatgatcttgggggtgaaga

SEQ ID NO: 521163 - DNA, 75 bp, synthetic construct
  source 1..75: mol_type = other DNA
gtggcggacaaaacctcggctctggttgttcttcagatatcaaaaaatgagatcacaggtaatggcgtcgatagc

SEQ ID NO: 521164 - DNA, 75 bp, synthetic construct
  source 1..75: mol_type = other DNA
actcaacttagtcagagcaaaagcaatactaacgacagtggtgtggccgaagttacctttaagggcacggttttg

SEQ ID NO: 521165 - DNA, 75 bp, synthetic construct
  source 1..75: mol_type = other DNA
ggatgggcctcttctcagacttcaggcgcaatgacagactggttaagccgcttcggtaccgcaagaatcacgctg

SEQ ID NO: 521166 - DNA, 75 bp, synthetic construct
  source 1..75: mol_type = other DNA
gaacagcacggtcgcgagctcatcaaaaaaggctatgcgatgctcgatgaatcagaaaatcctgctgagcaggaa

SEQ ID NO: 521167 - DNA, 75 bp, synthetic construct
  source 1..75: mol_type = other DNA
gaaggtgtcaatgtgaacttcgcattaaaaagaggctttgcctttgccacattaacgtcattaacagcggtgacc

SEQ ID NO: 521168 - DNA, 75 bp, synthetic construct
  source 1..75: mol_type = other DNA
gtgttcaccaggctggtctgaataccacgatagaattcattagcgcggaaaccagaccaatgaccggtacagtgt

SEQ ID NO: 521169 - DNA, 75 bp, synthetic construct
  source 1..75: mol_type = other DNA
cctgcaggaacgactactccacagcctcaacaggcgacggttggagttacgccagaagaaagagcagggaaaaac

SEQ ID NO: 521170 - DNA, 75 bp, synthetic construct
  source 1..75: mol_type = other DNA
acaaaaaaatcccttatattttgttgaggttgctaaacaaattataaaaaatgaactaatacctggttcgatttt

SEQ ID NO: 521171 - DNA, 75 bp, synthetic construct
  source 1..75: mol_type = other DNA
gccctgatggctctccgttgccgtttggttatgaggttgaagatgaaagcggcaacaatgtgggcttagtaggac

SEQ ID NO: 521172 - DNA, 75 bp, synthetic construct
  source 1..75: mol_type = other DNA
tgcgggtacttccctgctgcgttgcattggcaatgtccgggagttatgtcaatgcctgggctgaaaatgaaattc

SEQ ID NO: 521173 - DNA, 75 bp, synthetic construct
  source 1..75: mol_type = other DNA
gttggcagcatcaccgaccccaaatacaaaataatggcaaatcatcatgggataacttttgatgatcagcgaaaa

SEQ ID NO: 521174 - DNA, 75 bp, synthetic construct
  source 1..75: mol_type = other DNA
gtgatatctggactaaagcggctaactaccactccagaacaccttattttaatcaaatctaccgcgaccagatca

SEQ ID NO: 521175 - DNA, 75 bp, synthetic construct
  source 1..75: mol_type = other DNA
aaacagatatgaatttaaaaaaaaggttattacttttaggctggcgaaatgatatcccaaacatattaaaagcaa

SEQ ID NO: 521176 - DNA, 75 bp, synthetic construct
  source 1..75: mol_type = other DNA
aaattgcacatgttcaattgatgccactactgagtggtgttcagcgagtatcgttacaagaattcgaattattac

SEQ ID NO: 521177 - DNA, 75 bp, synthetic construct
  source 1..75: mol_type = other DNA
attacttaatattctacaaaaaacagtttatgaaccggggcatctggagttactcgataaagtgttaaagttatg

SEQ ID NO: 521178 - DNA, 75 bp, synthetic construct
  source 1..75: mol_type = other DNA
ttagttataccttgtctgttagccagacctacgatgaagataaccgcgaagatagacgcattaacttatatttct

SEQ ID NO: 521179 - DNA, 75 bp, synthetic construct
  source 1..75: mol_type = other DNA
tggccttaataatttgctgactctctatgctggcacgcagttgtctgataattactcatcgtttgttctcggcac

SEQ ID NO: 521180 - DNA, 75 bp, synthetic construct
  source 1..75: mol_type = other DNA
agaagacaactcaggctatgacattgccaactactaccagtatgattttggtcgcaagaatagcttttctttaaa

SEQ ID NO: 521181 - DNA, 75 bp, synthetic construct
  source 1..75: mol_type = other DNA
aaactcaaaaaaaatgggagtggagtcgctactatgcctggcgggcgttaccatcattaaaagccaaactggcgc

SEQ ID NO: 521182 - DNA, 75 bp, synthetic construct
  source 1..75: mol_type = other DNA
accgcagcagcgttgtaccacgccggaaaagtgaaatggctactggtaagtggcgataacggacgtaaaaattac

SEQ ID NO: 521183 - DNA, 75 bp, synthetic construct
  source 1..75: mol_type = other DNA
acccgtaacaagcccggacggaacgacggttaagcaggtctttttgccaaccgccaaagactggaaaaccaatct

SEQ ID NO: 521184 - DNA, 75 bp, synthetic construct
  source 1..75: mol_type = other DNA
tcagcattatgtctgaacatattaataatgataaaactaaatccatgtgggagagggaattgtctgaatatccac

SEQ ID NO: 521185 - DNA, 75 bp, synthetic construct
  source 1..75: mol_type = other DNA
aaaaaactggcgaatgcaaggaaataaccgacaattagcgaaaaaaatgcataataactcattggggaaagtcag

SEQ ID NO: 521186 - DNA, 75 bp, synthetic construct
  source 1..75: mol_type = other DNA
catatccagctcaggagcatctccttttacaactttgtatgcgtgttaccaaaaaacttactgataatattaatt

SEQ ID NO: 521187 - DNA, 75 bp, synthetic construct
  source 1..75: mol_type = other DNA
taggtgcaatccctttatcctattctttttcacgatctggtattaatcctatatctgatttttttaatacttttt

SEQ ID NO: 521188 - DNA, 75 bp, synthetic construct
  source 1..75: mol_type = other DNA
ttggtggcgtcttgccaatgagatgcatatgagtaagaaacatcattttaaactagcagcaagacggttacacct

SEQ ID NO: 521189 - DNA, 75 bp, synthetic construct
  source 1..75: mol_type = other DNA
accaacctcacccgttactgggagcgtgaattattacggtcaaaatacaaatgctcatggatacgatttgcaaaa

SEQ ID NO: 521190 - DNA, 75 bp, synthetic construct
  source 1..75: mol_type = other DNA
actccgcaccgggtattctcgccgtgagcgcggccttacaccgtttaccgtgctctcctgcgacaatattcccga

SEQ ID NO: 521191 - DNA, 75 bp, synthetic construct
  source 1..75: mol_type = other DNA
tgcattactcaggaagaaatggatgaattatatgctttgtctgagagactgaaagaaaagtgcgccggtaattaa

SEQ ID NO: 521192 - DNA, 75 bp, synthetic construct
  source 1..75: mol_type = other DNA
tactggaaaggctgggccatatccctccggcagaagcagaaaaagcgtattatgcttccatcaaaaacgatgttc

SEQ ID NO: 521193 - DNA, 75 bp, synthetic construct
  source 1..75: mol_type = other DNA
aaagcccgcaatatcacgccggatttcagtaagaaagcaggtattgataacgccacggtcgctatttacggttgt

SEQ ID NO: 521194 - DNA, 75 bp, synthetic construct
  source 1..75: mol_type = other DNA
ttcgtcgatacacaagtgctgtagcaacccatgttgacacccatcttgagcaaacgacaaaatatcgtcttacag

SEQ ID NO: 521195 - DNA, 75 bp, synthetic construct
  source 1..75: mol_type = other DNA
ttgaatcggcttaccgggccggagtgatgtcccttcgcgaaatagcatcgcagcatggcatcagcgaaggtgcta

SEQ ID NO: 521196 - DNA, 75 bp, synthetic construct
  source 1..75: mol_type = other DNA
tgaagttctggctcaatgtgctgactgaactgaaaaaacgcggttggtcgccctaccttttcatcaagccagtag

SEQ ID NO: 521197 - DNA, 75 bp, synthetic construct
  source 1..75: mol_type = other DNA
gtggcagtatgacgaacgcggctggctgacaggcatcagccatctcagcgaaggccaccgggtgacggtgcatta

SEQ ID NO: 521198 - DNA, 75 bp, synthetic construct
  source 1..75: mol_type = other DNA
ttataagaatatactttcagctattgaaaaaggtgatacacaaacagccagacagattcagacagaatgtaataa

SEQ ID NO: 521199 - DNA, 75 bp, synthetic construct
  source 1..75: mol_type = other DNA
ataaatacacaattaatattatattcatattgtcaatgatgtgttcatttttgaccttatcacggagttcttttt

SEQ ID NO: 521200 - DNA, 75 bp, synthetic construct
  source 1..75: mol_type = other DNA
aatggtttcaagaacccccacaaaatcaaatgttattttggggtgtatgttcttgactatatactatatgttcat

SEQ ID NO: 521201 - DNA, 75 bp, synthetic construct
  source 1..75: mol_type = other DNA
tcaatgcgtagtaggcgcgctgattgttagcggaattggctggttcgccgccaaaaatgacgcagaccgtcagcg

SEQ ID NO: 521202 - DNA, 75 bp, synthetic construct
  source 1..75: mol_type = other DNA
cttggcggtgagatgatcgggcgtgtgctcttttatggcctgcacatgacagtaggaatggctattgcaggttaa

SEQ ID NO: 521203 - DNA, 75 bp, synthetic construct
  source 1..75: mol_type = other DNA
ttatcctggggttgatgatggtcagcatgtgggacctctccaaaaacatcggttcattcccttcttttagtattt

SEQ ID NO: 521204 - DNA, 75 bp, synthetic construct
  source 1..75: mol_type = other DNA
gttatgataatccacacagtgacttaccctgcgcaacggaggatgccaccggcagccggaaaaccatgacatgga

SEQ ID NO: 521205 - DNA, 75 bp, synthetic construct
  source 1..75: mol_type = other DNA
cggatgcacgacgagcggacgcaccactaccattacgacagccagcaccgcctggtgttctacacgcggatacag

SEQ ID NO: 521206 - DNA, 75 bp, synthetic construct
  source 1..75: mol_type = other DNA
gtcattttcgtctggatgatgacctgcgtgtatcaaatcgacaccgtgccaacctggcataacggttacactacg

SEQ ID NO: 521207 - DNA, 75 bp, synthetic construct
  source 1..75: mol_type = other DNA
acgacaggtgacgacgtctacggtaatcatcaggttcgcgcgtgtttacgcgggcgctctatccgccgacggatg

SEQ ID NO: 521208 - DNA, 75 bp, synthetic construct
  source 1..75: mol_type = other DNA
tatagctgattgcgaaatacaagctaaagatcatgattgttttactattttcgctaagggtactatttttttccg

SEQ ID NO: 521209 - DNA, 75 bp, synthetic construct
  source 1..75: mol_type = other DNA
atgacaccttcagaactggatgaaaaacatagagcaatgaaaggtataccgcattatcacgggggaggtagcgct

SEQ ID NO: 521210 - DNA, 75 bp, synthetic construct
  source 1..75: mol_type = other DNA
aaaaagaagagactctgaaatattacgataaagaaaaagaaactacggaagaaaagattagagataaaaacgagc

SEQ ID NO: 521211 - DNA, 75 bp, synthetic construct
  source 1..75: mol_type = other DNA
gtgaagaattcatttttgttatttctgatgatgtgtttttttccattcagtgttctggcctggaatacacccgga

SEQ ID NO: 521212 - DNA, 75 bp, synthetic construct
  source 1..75: mol_type = other DNA
caagggaataaaaatctcgaggtcaagtataatcgcggaatcaatagcggagaacagaggagtttgttatcacta

SEQ ID NO: 521213 - DNA, 75 bp, synthetic construct
  source 1..75: mol_type = other DNA
gccgggattgagcgaaggaaaaaaaatgaaccccgcatctgtgtgacctttgctccagatgcaaagaagcggtta

SEQ ID NO: 521214 - DNA, 75 bp, synthetic construct
  source 1..75: mol_type = other DNA
tgaataaccgcaccactgatgtgataaacaaccatgccgaaaaaataggtaacaaccaggcgatcaccgttacca

SEQ ID NO: 521215 - DNA, 75 bp, synthetic construct
  source 1..75: mol_type = other DNA
tcagaatggaatggatttctcaacggcattaaccgtttatactattcttactgtgggagatggacttgtctctca

SEQ ID NO: 521216 - DNA, 75 bp, synthetic construct
  source 1..75: mol_type = other DNA
caggtattaacatacctattaaagatattgttttacttggttctgtagatattagacgttttatcaaaaagttaa

SEQ ID NO: 521217 - DNA, 75 bp, synthetic construct
  source 1..75: mol_type = other DNA
ttcaatcgcacctgagcaaatgcatagccagaaactaagtcccgcagaacgcgttatatcgcttttaaatggcat

SEQ ID NO: 521218 - DNA, 75 bp, synthetic construct
  source 1..75: mol_type = other DNA
gcggacctgattaaccacatcaaggggaatggcggcacattcactggtagcaaagaagatttagcgaaagctgta

SEQ ID NO: 521219 - DNA, 75 bp, synthetic construct
  source 1..75: mol_type = other DNA
ttctgccggtgagcatcttgaactctgctgtggtaaggcaaggctggtgctgacgaaggacggaagcatatttct

SEQ ID NO: 521220 - DNA, 75 bp, synthetic construct
  source 1..75: mol_type = other DNA
atggttctgcgcgtgaacaggcggcgagctgccagcgtgtgattggcggtctggcgaatattgccgaggagtacg

SEQ ID NO: 521221 - DNA, 75 bp, synthetic construct
  source 1..75: mol_type = other DNA
tcataactcactgtgtgccgtgggcggcaccattaacggtgatgatcatattttcggtttatcggcagctcagcg

SEQ ID NO: 521222 - DNA, 75 bp, synthetic construct
  source 1..75: mol_type = other DNA
aaatgaaaagacgaataaaactcaaaatttccactaaaaataaatcttacgatataattgattcgccgttttata

SEQ ID NO: 521223 - DNA, 75 bp, synthetic construct
  source 1..75: mol_type = other DNA
gcaacaattaatggctcggttaataataagggaagcgttgtcattaataacagcattataaacgggaatattacg

SEQ ID NO: 521224 - DNA, 75 bp, synthetic construct
  source 1..75: mol_type = other DNA
agggaaaaccacctctacaacagttaatagttcgggagctcagaacgttgggaactcaggaactgcaataagtac

SEQ ID NO: 521225 - DNA, 75 bp, synthetic construct
  source 1..75: mol_type = other DNA
caaaccagccccctatgtcgggccgcaggatgtggcgctggcgattatcggcgcggtgttcaaaaacggttatgt

SEQ ID NO: 521226 - DNA, 75 bp, synthetic construct
  source 1..75: mol_type = other DNA
ctagaggaaaaatatggaaggaaggctgattatatcgtacccgtttgcattaaagatacacaaagagaaaaaagt

SEQ ID NO: 521227 - DNA, 75 bp, synthetic construct
  source 1..75: mol_type = other DNA
tgccaggcttgcggaagctgaaagcggagggaggttgcggcggcgaacggcagagcgaaactttaactgctggct

SEQ ID NO: 521228 - DNA, 75 bp, synthetic construct
  source 1..75: mol_type = other DNA
tacctcctggacgacagtaccatgcaggacgctcgccaggcgtatgaaacaatactggaagaaataaggaaggat

SEQ ID NO: 521229 - DNA, 75 bp, synthetic construct
  source 1..75: mol_type = other DNA
caggttttatcggctttcatatcgcgcagcgcctgctgaatgaagggcatgatgttgtcgggatcgacaacatga

SEQ ID NO: 521230 - DNA, 75 bp, synthetic construct
  source 1..75: mol_type = other DNA
ggcttacatcagctaagcaaaagtcattgctctataaatcattggctgatttggttcagtcaatgatggatacct

SEQ ID NO: 521231 - DNA, 75 bp, synthetic construct
  source 1..75: mol_type = other DNA
atgctgattgcccgatgcgacgctgttgcgtcttctcaggcctacgattgtggtgcgttctggggcggacaaggc

SEQ ID NO: 521232 - DNA, 75 bp, synthetic construct
  source 1..75: mol_type = other DNA
gaatggcagtcttgttaataacaaaaatatcattctgaatccgacaaaagaaagtgcaggtaatactcttaccgt

SEQ ID NO: 521233 - DNA, 75 bp, synthetic construct
  source 1..75: mol_type = other DNA
gtctgcctaatatattcgggaaatggtgtaagcctaattataattcttttattgcaactttttgttataattcaa

SEQ ID NO: 521234 - DNA, 75 bp, synthetic construct
  source 1..75: mol_type = other DNA
attaccattcaataaagttcgttgggtggcgctggttggaggagacaaagaatcatttgtccagatgggctggga

SEQ ID NO: 521235 - DNA, 75 bp, synthetic construct
  source 1..75: mol_type = other DNA
tggtggtttttcctctctggtggtacagcttcccggcaatgctaaaaggatatattgacagagtatggaataatg

SEQ ID NO: 521236 - DNA, 75 bp, synthetic construct
  source 1..75: mol_type = other DNA
gttcagtacatttttacgtgctcagatctcgcttgcctgggttatcgggccaccgctcgcttatgaactggcaat

SEQ ID NO: 521237 - DNA, 75 bp, synthetic construct
  source 1..75: mol_type = other DNA
aattaaccccgccgccgggtaataacagtgacaacctcgagcaacagatagccagtacttcacagcaaatcgggt

SEQ ID NO: 521238 - DNA, 75 bp, synthetic construct
  source 1..75: mol_type = other DNA
taatggcattcatcgttgttgcgcgtgaaaagagtttcaccagggctgctgctcaattggggatatcacaatcag

SEQ ID NO: 521239 - DNA, 75 bp, synthetic construct
  source 1..75: mol_type = other DNA
ttataagtcttttggtggggggagcgttagcagccagcaatagttatgcagataataaattttcaacacatgtta

SEQ ID NO: 521240 - DNA, 75 bp, synthetic construct
  source 1..75: mol_type = other DNA
tatgtttataaaggtggtaccagcaatgacacgacaattaagggcggtacttcacgcatagaggggggggactgc

SEQ ID NO: 521241 - DNA, 75 bp, synthetic construct
  source 1..75: mol_type = other DNA
tcatcttcccacatctgatacccggcaatacagaccggagaacggaagttatgctaccaatatggcactggctaa

SEQ ID NO: 521242 - DNA, 75 bp, synthetic construct
  source 1..75: mol_type = other DNA
ggcgctggttggaggagacaaagaatcatttgtccagatgggctgggaaaaaaatataagcgattatttgataaa

SEQ ID NO: 521243 - DNA, 75 bp, synthetic construct
  source 1..75: mol_type = other DNA
attttcttgaaatccgcatttctcttgtcatttgcatcctgtttcctggatgaacttattacatatccacaaaaa

SEQ ID NO: 521244 - DNA, 75 bp, synthetic construct
  source 1..75: mol_type = other DNA
cttttctttaaatccgcatttctcttgtcatttgcatcctgttttctggatgaacttattacatatccacaaaaa

SEQ ID NO: 521245 - DNA, 75 bp, synthetic construct
  source 1..75: mol_type = other DNA
cagttgagaagcctgctgactgttatcgatgcggctgatgcgacgacatttataaatgtcgcggccaactgcgga

SEQ ID NO: 521246 - DNA, 75 bp, synthetic construct
  source 1..75: mol_type = other DNA
attatctattgaaattaactcattacttccacataaattagctcaattatgttcagctcatagtgctaaactcat

SEQ ID NO: 521247 - DNA, 75 bp, synthetic construct
  source 1..75: mol_type = other DNA
atcatatctcaagttgatgtgcttgaatatgaaacaatcgagaatgttatttcagactggaaaccagatttttta

SEQ ID NO: 521248 - DNA, 75 bp, synthetic construct
  source 1..75: mol_type = other DNA
gttgatatggatatgatttccctacctcttgccagagacttccgttttgcagtggtcggagcgccctcttatttc

SEQ ID NO: 521249 - DNA, 75 bp, synthetic construct
  source 1..75: mol_type = other DNA
tctggaaaaacatctcagccagcatcaaaaacatctacttcttcgcttcgccagcaataaagctgaggtaaagaa

SEQ ID NO: 521250 - DNA, 75 bp, synthetic construct
  source 1..75: mol_type = other DNA
tgaaagctaatttgaaaatgacaaaacctaaaaagactaatggggttttaaattcgaattccggtagtcaagttt

SEQ ID NO: 521251 - DNA, 75 bp, synthetic construct
  source 1..75: mol_type = other DNA
aataacgattaatgcattattgcctcatcagttggctgaaatatgttcctcttatgaagcaaaactcatccattt

SEQ ID NO: 521252 - DNA, 75 bp, synthetic construct
  source 1..75: mol_type = other DNA
ggctaattgaaataaaagaagaacaaaaagacacaaagtcagcattagaaattagtgataatcttatagctcttg

SEQ ID NO: 521253 - DNA, 75 bp, synthetic construct
  source 1..75: mol_type = other DNA
gtgaatattaatgataataatgagaactatctgacagctcagtttgaagagttatctcaacgtgatatgaagaag

SEQ ID NO: 521254 - DNA, 75 bp, synthetic construct
  source 1..75: mol_type = other DNA
aaaatgcgagatgctgcaccgaaattaattgactttgctaagtcgtttgacccaaactcaaaggaaaagattaaa

SEQ ID NO: 521255 - DNA, 75 bp, synthetic construct
  source 1..75: mol_type = other DNA
tgatgaaggtatcctgattgctgtcgccaactgcccggaaacctataaaccgttactggctgaggggagcggccg

SEQ ID NO: 521256 - DNA, 75 bp, synthetic construct
  source 1..75: mol_type = other DNA
atgtgttttggacaaaggccactgataatctttcactttatgaataaattactttcttattaccaaaaagaatta

SEQ ID NO: 521257 - DNA, 75 bp, synthetic construct
  source 1..75: mol_type = other DNA
tcttctaataatgatattacaatagaggcagtttttaataattgctatatgtctcatgatcttgatcgtatagag

SEQ ID NO: 521258 - DNA, 75 bp, synthetic construct
  source 1..75: mol_type = other DNA
cttgctggaatttggaatcagtctgccgacaggggatgccgcaataaaacggttgtctctggtgttggctgaaca

SEQ ID NO: 521259 - DNA, 75 bp, synthetic construct
  source 1..75: mol_type = other DNA
gcggtgttggctacatcatggttaactgtcaggacccaaccagcgtacatatttcagttaaaaataactattgta

SEQ ID NO: 521260 - DNA, 75 bp, synthetic construct
  source 1..75: mol_type = other DNA
gcaaaaattagataataataacaatggatttggtggtgattggtgtgctggtaataacgtatccaacaacataat

SEQ ID NO: 521261 - DNA, 75 bp, synthetic construct
  source 1..75: mol_type = other DNA
agaaattgttatttagataaatatggcgatgcacgaatcaatgcttcttatacacaattagaaataaaacactca

SEQ ID NO: 521262 - DNA, 75 bp, synthetic construct
  source 1..75: mol_type = other DNA
acaacttattttcagaggaatgagtgtatcagatgcacttaattatcttgtgaacgaaaagaaaggtggtgaata

SEQ ID NO: 521263 - DNA, 75 bp, synthetic construct
  source 1..75: mol_type = other DNA
tcatgccgtgtcaccctagcgatgagattaaagaaccattgcgtaaagcaattctgaaacaactcggtttgagtt

SEQ ID NO: 521264 - DNA, 75 bp, synthetic construct
  source 1..75: mol_type = other DNA
ggctcgaatctcagggcgtcgatgtagcgaatggcagcaaccatttgaaactcaggtttcatgggaggcgcagtg

SEQ ID NO: 521265 - DNA, 75 bp, synthetic construct
  source 1..75: mol_type = other DNA
tccggcatttgcgctggggatgcttttaattcaggtattctccgttgaactgggctggctgcctaccgtgggagc

SEQ ID NO: 521266 - DNA, 75 bp, synthetic construct
  source 1..75: mol_type = other DNA
ggaattcaacctgtcattacctggaaattatcaggcagataaaaagcctgttcaattttgggataattttttata

SEQ ID NO: 521267 - DNA, 75 bp, synthetic construct
  source 1..75: mol_type = other DNA
tacagaaataatggtgactttacagaattgggtctagatccaaataagaaatcttggttggatgataatttttgt

SEQ ID NO: 521268 - DNA, 75 bp, synthetic construct
  source 1..75: mol_type = other DNA
ggctgctgaagcatggctacgtgctgcctgtgttgcgccccggacaaactggcagcagttttgtcagcgctagtg

SEQ ID NO: 521269 - DNA, 75 bp, synthetic construct
  source 1..75: mol_type = other DNA
atatccagcggtatgatctctgtacgtattggtcccgacgtgcgctttgctgttgtcggttcgccagcatatttt

SEQ ID NO: 521270 - DNA, 75 bp, synthetic construct
  source 1..75: mol_type = other DNA
tggtattagcaggtaccgaagcccgtgactccacggttggcaagggggggggcaatgcaaaacctgggtcaggac

SEQ ID NO: 521271 - DNA, 75 bp, synthetic construct
  source 1..75: mol_type = other DNA
ggttcagggggcaaacggtgagcagacatggcaggcggtcagcagtggtacccggttcatcagtgcatccgggga

SEQ ID NO: 521272 - DNA, 75 bp, synthetic construct
  source 1..75: mol_type = other DNA
cctctgatgccagaacgacggaaaacagcgagtggctgactgcagaacagttcgccgggatcgaagggatgccgg

SEQ ID NO: 521273 - DNA, 75 bp, synthetic construct
  source 1..75: mol_type = other DNA
atcccgacgcgacagcttcattccctgtgtacctggtgcatccggaataaatatcgtaccggcgacggctgcgac

SEQ ID NO: 521274 - DNA, 75 bp, synthetic construct
  source 1..75: mol_type = other DNA
aacagcaaacgcagcaataaaacgcatgggttttggtcggcggctggttgctcatggcttgcgctcaatagcaag

SEQ ID NO: 521275 - DNA, 75 bp, synthetic construct
  source 1..75: mol_type = other DNA
gatgatctctttgcacgctggaagtttggcccagtaataccgccgctctatcacatgctaaaaaaatacgggtct

SEQ ID NO: 521276 - DNA, 75 bp, synthetic construct
  source 1..75: mol_type = other DNA
gctaccagacccgctatgaatacgaccgcttcggccagatgacggcggttcaccgcgaggaaggtatcagccttt

SEQ ID NO: 521277 - DNA, 75 bp, synthetic construct
  source 1..75: mol_type = other DNA
gtagcacgctacggagggaccttattggttacgtttatttgttatcttgtgtttttcgttatagtgagcatgtta

SEQ ID NO: 521278 - DNA, 75 bp, synthetic construct
  source 1..75: mol_type = other DNA
aaagccggttaacctgcgttactcgctgcggttggtttaaacctgccgtatacgtgaccccggtgcggacattta

SEQ ID NO: 521279 - DNA, 75 bp, synthetic construct
  source 1..75: mol_type = other DNA
cccaatccggcacccgtctgtatatctgatgttattgaggtcactgcggaaaccagagacaaggataacgagtcg

SEQ ID NO: 521280 - DNA, 75 bp, synthetic construct
  source 1..75: mol_type = other DNA
agctcgaacctggcgatgtggtcaggcttttcgaagtggatggcacggcatttggtacaggtgatgtgctgcgat

SEQ ID NO: 521281 - DNA, 75 bp, synthetic construct
  source 1..75: mol_type = other DNA
acaccgctggtggatttcacccgcgaccgcctgcaccgggaaacgctgcgcagcttcggtcgttatgaactcacc

SEQ ID NO: 521282 - DNA, 75 bp, synthetic construct
  source 1..75: mol_type = other DNA
tcgggactgtattacaaccgtcaccggtactacgatccgttgcaggggcggtatatcacccaggatccgataggg

SEQ ID NO: 521283 - DNA, 75 bp, synthetic construct
  source 1..75: mol_type = other DNA
taggaacattcagtaaagcccatgctcctgcgcaaaagaaatgctggattgaaattcagctggttgatgagaatg

SEQ ID NO: 521284 - DNA, 75 bp, synthetic construct
  source 1..75: mol_type = other DNA
tgaaatattatacatgacaggtaaaaaattgcctcaaagttgtcaagcgtcaactaatagatatattttatatcg

SEQ ID NO: 521285 - DNA, 75 bp, synthetic construct
  source 1..75: mol_type = other DNA
ggacaatgataacggttctaatggggcagagaaaaaattaaaaaacaaaaaaatgcttatatgtataaatgatat

SEQ ID NO: 521286 - DNA, 75 bp, synthetic construct
  source 1..75: mol_type = other DNA
cactgggtggctctgcggcagcccatggatttacgggttctaattttacttatggtgttcctgtaaactttaacg

SEQ ID NO: 521287 - DNA, 75 bp, synthetic construct
  source 1..75: mol_type = other DNA
atgagtctgaatatgttctggtttttaccgacccacggtgacgggcattatctgggaacggaagaaggttcacgc

SEQ ID NO: 521288 - DNA, 75 bp, synthetic construct
  source 1..75: mol_type = other DNA
aaaagagcgcgggtataccatccccagccataccgtacaggaaatcgcagcaattcacggcaaggcacggaagca

SEQ ID NO: 521289 - DNA, 75 bp, synthetic construct
  source 1..75: mol_type = other DNA
tgaaatattagacatgacaggtaaacaattgcccaacagttgtcaacagtcaactagtagatacattttacatcg

SEQ ID NO: 521290 - DNA, 75 bp, synthetic construct
  source 1..75: mol_type = other DNA
gattttccccgaaaggcaatctgctgagcgaacggtcgtttgaaaacggggaggtgtcccgttcaaaacgggata

SEQ ID NO: 521291 - DNA, 75 bp, synthetic construct
  source 1..75: mol_type = other DNA
tctcaacgccattaaggttaaagacctgaaagggcgaattaacgggcggctacgcccgcgccataccctgcggga

SEQ ID NO: 521292 - DNA, 75 bp, synthetic construct
  source 1..75: mol_type = other DNA
aaaaaagcgctggctgatctgaaagacgggctggcgccgcgcagtatcgggctggtacgccgccgtctgctctct

SEQ ID NO: 521293 - DNA, 75 bp, synthetic construct
  source 1..75: mol_type = other DNA
ggcagcctgagttcacagataaaacactctccaggattcccggggcggttcagtggaacaatattcgtagctatt

SEQ ID NO: 521294 - DNA, 75 bp, synthetic construct
  source 1..75: mol_type = other DNA
atgaaggctctggcagaattaaaaaccggcctggcgccacgcaagatggaccatttccgacggcgtatttttaca

SEQ ID NO: 521295 - DNA, 75 bp, synthetic construct
  source 1..75: mol_type = other DNA
agttataaatgggaataatttcacgtcatttgcgcagagtattttcagagaacagggaacctatgatttaacgtt

SEQ ID NO: 521296 - DNA, 75 bp, synthetic construct
  source 1..75: mol_type = other DNA
actttaactcagtgaaaacttataccaaatcactggataaaataaaatcactaacctccagtaaattaaattcca

SEQ ID NO: 521297 - DNA, 75 bp, synthetic construct
  source 1..75: mol_type = other DNA
aagagcgcggcgtggcggcgatttatggtccaggtaggtacacctatgctcgacagtgtgcgcgacgtactgaat

SEQ ID NO: 521298 - DNA, 75 bp, synthetic construct
  source 1..75: mol_type = other DNA
cagttccttgccgacaatggtcgtcgccagcgcctattccgatctcggtttcgacgtagatttaagcccgatgtt

SEQ ID NO: 521299 - DNA, 75 bp, synthetic construct
  source 1..75: mol_type = other DNA
ctcactcgctgccgggcataaaacgctgatcccggaactggtagaagccctcaaaaaatggggacgcgaagatat

SEQ ID NO: 521300 - DNA, 75 bp, synthetic construct
  source 1..75: mol_type = other DNA
gacatgaggatgaaatatttgtttttagttttcagggaggagtaagtaacacaggatttggcattaatcatcaag

SEQ ID NO: 521301 - DNA, 75 bp, synthetic construct
  source 1..75: mol_type = other DNA
aaaaccttcgaagagcgtgggttgaacccggcacaaatcccagcggtactggtgcattctcacggcccgttcgcc

SEQ ID NO: 521302 - DNA, 75 bp, synthetic construct
  source 1..75: mol_type = other DNA
tgttttttttgagtgggtgtacttcacaaaaagagtattccaatatagtcaggattgagaatagatgctcctcag

SEQ ID NO: 521303 - DNA, 75 bp, synthetic construct
  source 1..75: mol_type = other DNA
cgtggcaaatgtattttctgctgcttttggttctccgataacggctaaagattcaccagaattgcataaattact

SEQ ID NO: 521304 - DNA, 75 bp, synthetic construct
  source 1..75: mol_type = other DNA
aaatcagtaagttggcagcatcacctgattctgctatgttgcttatttggagtgctggcctgcacgctttttgcg

SEQ ID NO: 521305 - DNA, 75 bp, synthetic construct
  source 1..75: mol_type = other DNA
ggatacgcggctactttttgtggtctgttcaatgatgtgggcggcgaataatctctacatgataaatatgccgct

SEQ ID NO: 521306 - DNA, 75 bp, synthetic construct
  source 1..75: mol_type = other DNA
aaatctgccgcaccgtcgatccgctggccggatcttattacgttgagtcgttgaccgatcagatcgtcaaacagg

SEQ ID NO: 521307 - DNA, 75 bp, synthetic construct
  source 1..75: mol_type = other DNA
ttccggtaacatgccgcgctttaataccatcagtattagcggctaccacatgggagaagcgggcgcgaactgcgt

SEQ ID NO: 521308 - DNA, 75 bp, synthetic construct
  source 1..75: mol_type = other DNA
gttacgcccgaaaaactgactggcaccattcagaacgatatcctgaaagaatatctctgtcgcaatacctacatt

SEQ ID NO: 521309 - DNA, 75 bp, synthetic construct
  source 1..75: mol_type = other DNA
ggatgctaaactagtaattaagcgtctacagtttgacgtatttggctttagtcgtggggcggcagccgcacggca

SEQ ID NO: 521310 - DNA, 75 bp, synthetic construct
  source 1..75: mol_type = other DNA
atacacggcatcagatggttgataatggtcgatggattgcaactaatccagatggggaaccgggtgtagtagggt

SEQ ID NO: 521311 - DNA, 75 bp, synthetic construct
  source 1..75: mol_type = other DNA
atttagaccagttctgtaggcaagatttccgtactgtacaaggtcgcatagtaccgacacttgccgtattcgtgg

SEQ ID NO: 521312 - DNA, 75 bp, synthetic construct
  source 1..75: mol_type = other DNA
atcgccatagcatatgcccaatcaaaattaggtactcaaccattcaggaagttacgcgattataaagcacaggaa

SEQ ID NO: 521313 - DNA, 75 bp, synthetic construct
  source 1..75: mol_type = other DNA
gcagaagaactaaaacctgctggtggcaaattagtatggcgattgaagaaagggcagaaacgtaatgaagccctt

SEQ ID NO: 521314 - DNA, 75 bp, synthetic construct
  source 1..75: mol_type = other DNA
gaatttaaccttcataccattcccgaaagtactttaggcattacgatagccgtagaccagcaattagatcgtctt

SEQ ID NO: 521315 - DNA, 75 bp, synthetic construct
  source 1..75: mol_type = other DNA
ctttcacgtttaaaacattagaaaacggtagggcaatacctgacagtactacaactcgtttaatttgcccacatt

SEQ ID NO: 521316 - DNA, 75 bp, synthetic construct
  source 1..75: mol_type = other DNA
ccattccgcctgacggggtgagcgaaattgatcgccgggaagtgaaggccgggtttcagaaatccctgaaggata

SEQ ID NO: 521317 - DNA, 75 bp, synthetic construct
  source 1..75: mol_type = other DNA
ctacagccgtcttgtcatcgacggcggggcattacgggatcagcctcctgacggccctaaaaaaatcactgttga

SEQ ID NO: 521318 - DNA, 75 bp, synthetic construct
  source 1..75: mol_type = other DNA
atatcaataacaagatccaaacattgacagacaaagacacaccaaaaataaccaactctgacaaaatttataaat

SEQ ID NO: 521319 - DNA, 75 bp, synthetic construct
  source 1..75: mol_type = other DNA
taccatcagatttctttgagcaactttcagcagaggagttaaaacccgctggtggtaagttggtatggcgattaa

SEQ ID NO: 521320 - DNA, 75 bp, synthetic construct
  source 1..75: mol_type = other DNA
ccactgtttaagaatgacttaatcaatagtgaattcaatctatctgataaacgctactggttcgtaacacatgat

SEQ ID NO: 521321 - DNA, 75 bp, synthetic construct
  source 1..75: mol_type = other DNA
tgcctgataagcgcacttaagaaagctgaagaccgacaagaagtgattttacggctgtttaatccggctgaatca

SEQ ID NO: 521322 - DNA, 75 bp, synthetic construct
  source 1..75: mol_type = other DNA
gcatctaaggcagaaactgataatttaagaaaggagtcatatcctctgaaaagaaaatgtcccacaggtacagat

SEQ ID NO: 521323 - DNA, 75 bp, synthetic construct
  source 1..75: mol_type = other DNA
ctgaaggggggatggaacctgtatggatatcaattgaatccgatatcagacatcgaccccctgggtttatctatg

SEQ ID NO: 521324 - DNA, 75 bp, synthetic construct
  source 1..75: mol_type = other DNA
attgttggcggagctcataatggggccgccgatgcaatgagacattgttacttgatgtgtcgaatgactaagaca

SEQ ID NO: 521325 - DNA, 75 bp, synthetic construct
  source 1..75: mol_type = other DNA
atgaataaatccgttgtgtcaatttctgcggcaatgttggttttactttgccaaccggtcatggggagcgaaatc

SEQ ID NO: 521326 - DNA, 75 bp, synthetic construct
  source 1..75: mol_type = other DNA
gccagctaaagaaagaatcatggatcttaaaaataacactgtcggtattgcttgtggcgatttttctgccaaatg

SEQ ID NO: 521327 - DNA, 75 bp, synthetic construct
  source 1..75: mol_type = other DNA
actatctgaaaaaagatgaggcctttaaccgctatctcggtgaattgtggggagatttgcgggaatggctaaaaa

SEQ ID NO: 521328 - DNA, 75 bp, synthetic construct
  source 1..75: mol_type = other DNA
cggctaccgtggcatttgaagagaagtatggctcccagctggagctgatatttcgttttatcgatcgtgcgctgg

SEQ ID NO: 521329 - DNA, 75 bp, synthetic construct
  source 1..75: mol_type = other DNA
atgagcactaaattaaccggctatgtatgggatggttgcgctgtatcaggcatgaagttatccagtgtggcaatt

SEQ ID NO: 521330 - DNA, 75 bp, synthetic construct
  source 1..75: mol_type = other DNA
ggcattctgacaggctaccgcagcaacggccaccggatggacttcggccattcccccgcaggcctggaaaaaaac

SEQ ID NO: 521331 - DNA, 75 bp, synthetic construct
  source 1..75: mol_type = other DNA
acggcaggctgacggagaagacggaccgcatcccggcgggtgtgatacggacggacgacgagcggacccaccact

SEQ ID NO: 521332 - DNA, 75 bp, synthetic construct
  source 1..75: mol_type = other DNA
tcggctgcaaaagaattagggttaactcaaccagccgtaaaatcattaacgatattgaagattattttggtgtgg

SEQ ID NO: 521333 - DNA, 75 bp, synthetic construct
  source 1..75: mol_type = other DNA
tgcgtacagagaaaatgtcgaaagtttaatcgagaaaagacaaaaggaattagccaattacgctttaacaagcgt

SEQ ID NO: 521334 - DNA, 75 bp, synthetic construct
  source 1..75: mol_type = other DNA
cgtacccgtcctggtaaagcgctgctgattaaatcccgcatggcagatggttcggaactgccaatgggagccgat

SEQ ID NO: 521335 - DNA, 75 bp, synthetic construct
  source 1..75: mol_type = other DNA
atccagacgatttatcagccggggagcttcacgccactcatcagagttgaaactgccaccggtgagctggcgaaa

SEQ ID NO: 521336 - DNA, 75 bp, synthetic construct
  source 1..75: mol_type = other DNA
cacgatacagaacgacaggagccgcatccagacgatttatcagccggggagcttcacgccactcatcagagttga

SEQ ID NO: 521337 - DNA, 75 bp, synthetic construct
  source 1..75: mol_type = other DNA
ctttcaaccgtcttgagaagctaaaaaagacggttgctgaaactgttaagctgcactttacctctatcgttattg

SEQ ID NO: 521338 - DNA, 75 bp, synthetic construct
  source 1..75: mol_type = other DNA
aaaaatcagttcagaaaacagatgaagatggagtatatttcactgataaacaacatgagttatacaaacttttaa

SEQ ID NO: 521339 - DNA, 75 bp, synthetic construct
  source 1..75: mol_type = other DNA
tttgctgccaagtgtttgagaaaatcgcacgagaaggcagaaagtttggtcttggtatggtgatttcctcacaac

SEQ ID NO: 521340 - DNA, 75 bp, synthetic construct
  source 1..75: mol_type = other DNA
caccgggtgacggtgcattacgggtatgatgagaaaggccggctgaccggtgagcgtcagacggtgcatcacccg

SEQ ID NO: 521341 - DNA, 75 bp, synthetic construct
  source 1..75: mol_type = other DNA
ccattccctgcaagtatcgcggcatatgctcaaattctttctatgggtgcacaacttgtcagtactgccaaaggt

SEQ ID NO: 521342 - DNA, 75 bp, synthetic construct
  source 1..75: mol_type = other DNA
aaataaacgcaataaagatgcagaatcagccgccagaaaagcagaagcagcagcgaagaaacataatgatgaact

SEQ ID NO: 521343 - DNA, 75 bp, synthetic construct
  source 1..75: mol_type = other DNA
aggtcggtgggtcagctgtacatctggcaaatcagagttattcatataaggatctggattatccccaggataaca

SEQ ID NO: 521344 - DNA, 75 bp, synthetic construct
  source 1..75: mol_type = other DNA
tttcttttcagaaagagccaattgatatagcccaacaaaggggggtacgtaaaatcgtcctacaatcatgcagcc

SEQ ID NO: 521345 - DNA, 75 bp, synthetic construct
  source 1..75: mol_type = other DNA
agcggcggtattgcgatacgtttgattaacctcgcccaggtaaggttggccgcgttcctggttcgcttggtcatg

SEQ ID NO: 521346 - DNA, 75 bp, synthetic construct
  source 1..75: mol_type = other DNA
ttaaagatcctgatgtaaaacagttcattgaacagggcattaataaagatatccaggatgtgcattcttctgacg

SEQ ID NO: 521347 - DNA, 75 bp, synthetic construct
  source 1..75: mol_type = other DNA
gggcgcagcgtgaactggcagtaccgccctggtgccgataacccgcatgagaaactgagtgcggttatccgggcc

SEQ ID NO: 521348 - DNA, 75 bp, synthetic construct
  source 1..75: mol_type = other DNA
acaacctgttccagatgaactgctcccctcagaagataaattcaaagaaggtgaagacacaaaaagcgagaataa

SEQ ID NO: 521349 - DNA, 75 bp, synthetic construct
  source 1..75: mol_type = other DNA
gcccggctaacacgcctacttatactctcattgctaatgctggcgactggtttattcagaaacgcgattatgatg

SEQ ID NO: 521350 - DNA, 75 bp, synthetic construct
  source 1..75: mol_type = other DNA
ccggacaggccgcgacgtcggctcaggaggctttttccagcgcaggaacggcatcaacaaaggccactgaagcat

SEQ ID NO: 521351 - DNA, 75 bp, synthetic construct
  source 1..75: mol_type = other DNA
aaaacatctctggcaggagacgctggcacatgaccattcagaggctgttcgcattgctgaaaatgtcgtggtgct

SEQ ID NO: 521352 - DNA, 75 bp, synthetic construct
  source 1..75: mol_type = other DNA
gaaatattacgtcttctgctgtggcttgaagatgtggagaatgctggacaacctgttccagatgaacagctctct

SEQ ID NO: 521353 - DNA, 75 bp, synthetic construct
  source 1..75: mol_type = other DNA
tttttttgcattggcgatcaaagtattttggagtaaccataaatcactgctttttaaaactcttgatggagatat

SEQ ID NO: 521354 - DNA, 75 bp, synthetic construct
  source 1..75: mol_type = other DNA
tttgcgcgggcgcgacgttcatcaccggcttcaatggcagtggctacagtgagacgaacttcgccgtgcgctttc

SEQ ID NO: 521355 - DNA, 75 bp, synthetic construct
  source 1..75: mol_type = other DNA
ctctgaatgatggtacgccctctatggcaaaaggtctggttcagcttattgataccttcttgatacggtggaaat

SEQ ID NO: 521356 - DNA, 75 bp, synthetic construct
  source 1..75: mol_type = other DNA
cgttccatttcttgaaaagtattatccggggaaatgggagccacagggtcgctctttcgggatcaccctgtctta

SEQ ID NO: 521357 - DNA, 75 bp, synthetic construct
  source 1..75: mol_type = other DNA
cgggtgcactgatggttttaaaggacggggctaatgttgggtactcatgtattcagatttattatgtatacaata

SEQ ID NO: 521358 - DNA, 75 bp, synthetic construct
  source 1..75: mol_type = other DNA
agcagccacttctgcatccaccgcgaccacgaaagcgtcagaagctgccacctcagcccgggatgcgtcggcctc

SEQ ID NO: 521359 - DNA, 75 bp, synthetic construct
  source 1..75: mol_type = other DNA
gcgtcttggtgctgatatgtatgttgagactttatcaaatgagccaggtcaattaacaataaggtttacatacga

SEQ ID NO: 521360 - DNA, 75 bp, synthetic construct
  source 1..75: mol_type = other DNA
atccaacggaaacagagaatgataatagtcattttcagagtcaaactcagagccagggcctgagccagagtctaa

SEQ ID NO: 521361 - DNA, 75 bp, synthetic construct
  source 1..75: mol_type = other DNA
ctggcagccgccgcagcaaatacctgtgcagccggaatagccaaagctgttgcaggatttggaggccctttgatt

SEQ ID NO: 521362 - DNA, 75 bp, synthetic construct
  source 1..75: mol_type = other DNA
catgttttgaaagtgacttatcaaacatcatcttttcaaatggagaaataaacaacctcttcattaaaaagcaac

SEQ ID NO: 521363 - DNA, 75 bp, synthetic construct
  source 1..75: mol_type = other DNA
taccagaataaaaaatttgctctgtgaagatattatgcctggtcgatggacactcaacttgtcaataagcactta

SEQ ID NO: 521364 - DNA, 75 bp, synthetic construct
  source 1..75: mol_type = other DNA
aggaagtggtaaaggaagagggggagatagagttttatattctgaaacagaaaatgaaataattattcatgatat

SEQ ID NO: 521365 - DNA, 75 bp, synthetic construct
  source 1..75: mol_type = other DNA
gggcagatattccgtgtgaccgacgagtcagacggcagcgaactggtgcgttatgactacatcagccacggcgat

SEQ ID NO: 521366 - DNA, 75 bp, synthetic construct
  source 1..75: mol_type = other DNA
gacggtgaaggcaaaatcgccctccacaccggggccatggggcaggccacgcgctaccgccacggggcatttgac

SEQ ID NO: 521367 - DNA, 75 bp, synthetic construct
  source 1..75: mol_type = other DNA
ttggatgtttttgatgacataacaagcgaatgtctttctgaagagattaagatatgtcaagcatgctatgaaaaa

SEQ ID NO: 521368 - DNA, 75 bp, synthetic construct
  source 1..75: mol_type = other DNA
gcgctgccggatgtggtgacctgtattgactgccagcagatgcgtgagcgcaggaggaagacgtgtcctgggaag

SEQ ID NO: 521369 - DNA, 75 bp, synthetic construct
  source 1..75: mol_type = other DNA
atgaaaaaggtctatactatttgacccgtgatttgcagtgttctattgatccccataattaccttttttattctt

SEQ ID NO: 521370 - DNA, 75 bp, synthetic construct
  source 1..75: mol_type = other DNA
tgcacgattacgacaaaacatcatcagaaatgagaaaataccttaaaagcatcaacgagtgtatgttccttatga

SEQ ID NO: 521371 - DNA, 75 bp, synthetic construct
  source 1..75: mol_type = other DNA
gacccgtggtacaaccccggcgatgtcaaaggcagcgataccaacattcagcagctgaatgaacaggaacgctac

SEQ ID NO: 521372 - DNA, 75 bp, synthetic construct
  source 1..75: mol_type = other DNA
tcacgatggttatgcctccagttcttacggccaggaatacatcaggttacgtaagctggtgggcgtccacgtgct

SEQ ID NO: 521373 - DNA, 75 bp, synthetic construct
  source 1..75: mol_type = other DNA
cgatttacgccgcactgcatgtcaccggcgttcagcgcgtagaactgctctcccctgccgttgatgtcattatca

SEQ ID NO: 521374 - DNA, 75 bp, synthetic construct
  source 1..75: mol_type = other DNA
tgataaagacaaagctgaagtcattaccaagcacgaaaaactggacttacgcaacatattttcgatttataattg

SEQ ID NO: 521375 - DNA, 75 bp, synthetic construct
  source 1..75: mol_type = other DNA
taccgttagcaccagaaacggttgcggaacgagctgctgtgctttgctttgctttgctgcggaaagtgtggcgac

SEQ ID NO: 521376 - DNA, 75 bp, synthetic construct
  source 1..75: mol_type = other DNA
ttagttgaagcaaaaggtgttagtggagctaccgttttagggcttcctggtataaaaactgattttagaggttat

SEQ ID NO: 521377 - DNA, 75 bp, synthetic construct
  source 1..75: mol_type = other DNA
acgaggtgattcatattttggtcaaatagaaccagggctcaacgtaggtccatggcgcattaggaatttatcaac

SEQ ID NO: 521378 - DNA, 75 bp, synthetic construct
  source 1..75: mol_type = other DNA
atgcccttgaagatgatgatgatgttcaaaaagtatatcataacgttgcaaatctctaattatgaatttaagaaa

SEQ ID NO: 521379 - DNA, 75 bp, synthetic construct
  source 1..75: mol_type = other DNA
tcgagttgcgccagaaacaatacgaatactaccgtgatttactgttcagtttcccaaaacctgaaactgtcagta

SEQ ID NO: 521380 - DNA, 75 bp, synthetic construct
  source 1..75: mol_type = other DNA
cagttttgaaggctactatattcctctgattagcaaaaacatggattttatgctcgactatgaagagtacatgag

SEQ ID NO: 521381 - DNA, 75 bp, synthetic construct
  source 1..75: mol_type = other DNA
aacggtcgggacaccttgccgacaggctcattgccgcgatgcaggcaggcatgagcgcagggggagaagcgggcc

SEQ ID NO: 521382 - DNA, 75 bp, synthetic construct
  source 1..75: mol_type = other DNA
taccgttagcaccagaaacggttgcggaacgagctgctgtgctttgctgcggaaagtgtggcgacagattgccag

SEQ ID NO: 521383 - DNA, 75 bp, synthetic construct
  source 1..75: mol_type = other DNA
cattggtaccgaagttccggttccgggcggtgaggccagcgccattcagtcagtacacatcaccaggttgaagat

SEQ ID NO: 521384 - DNA, 75 bp, synthetic construct
  source 1..75: mol_type = other DNA
ggaaaaatcccttgccatccagtctgaaatcgttcggattctggacaaattcagcgcccttacagcagagcttac

SEQ ID NO: 521385 - DNA, 75 bp, synthetic construct
  source 1..75: mol_type = other DNA
cccgccatccctcctttacggtggtttctgagcagataaaggcgcgtgccggtgagacattgctggaaaccgcta

SEQ ID NO: 521386 - DNA, 75 bp, synthetic construct
  source 1..75: mol_type = other DNA
ttaaggaaaaagtacagcagcgcccactgaatcaacagcaacgtgataacgcccgccagcgtgttcaatcagcat

SEQ ID NO: 521387 - DNA, 75 bp, synthetic construct
  source 1..75: mol_type = other DNA
actggagcggcgggaacgctgctggcctatctgattggtgcgctggtggtctggctggcacgcaaaatggccagt

SEQ ID NO: 521388 - DNA, 75 bp, synthetic construct
  source 1..75: mol_type = other DNA
gctatgacgataaaggccgcctgaccggcgaacgccagacggtggagaacccggagacgggggaactgctgtggc

SEQ ID NO: 521389 - DNA, 75 bp, synthetic construct
  source 1..75: mol_type = other DNA
gggaaattataaagaagctataaatctcattgatcaagcatttgacgaagggtggaactttagcgattacaccat

SEQ ID NO: 521390 - DNA, 75 bp, synthetic construct
  source 1..75: mol_type = other DNA
cgctacccgtgttggtcaccttgatgatgcttataccagcaatggaaagcctgtaggcatcacgatttatcagtt

SEQ ID NO: 521391 - DNA, 75 bp, synthetic construct
  source 1..75: mol_type = other DNA
tgacgacttccgcgacttcagccgtcgccaaccactgacccagcaacaaaaggacgccgctcgtcagcgttatca

SEQ ID NO: 521392 - DNA, 75 bp, synthetic construct
  source 1..75: mol_type = other DNA
ttggctggtactttaaagcgtatctggactctggtgactacggtatgggcacgctaacctcaccaattgctcgtg

SEQ ID NO: 521393 - DNA, 75 bp, synthetic construct
  source 1..75: mol_type = other DNA
aacgcttaaagaatttggtgccgatgtgcagtgggacgactacgcccagatctttaccctgattaaagatggcgc

SEQ ID NO: 521394 - DNA, 75 bp, synthetic construct
  source 1..75: mol_type = other DNA
taaatcaggtgtggtaaaactgtttgcccccctcactccggaacttcttagggtgctcattcgcgaaatgaaagg

SEQ ID NO: 521395 - DNA, 75 bp, synthetic construct
  source 1..75: mol_type = other DNA
aatacggcgtggagcgcggaatatgatgaatggggcaaccagcttaatgaggagaacccgcatcatgtgtatcag

SEQ ID NO: 521396 - DNA, 75 bp, synthetic construct
  source 1..75: mol_type = other DNA
gggtgtgatacggacggacgacgagcggacccaccactaccactacgacagccagcaccgcctggtgttctacac

SEQ ID NO: 521397 - DNA, 75 bp, synthetic construct
  source 1..75: mol_type = other DNA
tcggcagcatggcaggcagtaatgccgcatataaactgaccagcacatacacccccgcaggccagttacagagcc

SEQ ID NO: 521398 - DNA, 75 bp, synthetic construct
  source 1..75: mol_type = other DNA
gggccgcgcattcttgacaggctgcagcagggcgctaccgccgaaaccgcgcttaaagccgggctggacaccgat

SEQ ID NO: 521399 - DNA, 75 bp, synthetic construct
  source 1..75: mol_type = other DNA
acggagtgcagagcgaaatgctgtccattgaaagtggtacggatgcagccagtgggctggcaattgcgattctgg

SEQ ID NO: 521400 - DNA, 75 bp, synthetic construct
  source 1..75: mol_type = other DNA
tctgatttcttcataaaagcagacacttcaattaattattatgttacgcgtcaaaatgattataactacgtattc

SEQ ID NO: 521401 - DNA, 75 bp, synthetic construct
  source 1..75: mol_type = other DNA
atgactcaaagatattttctgtttgcgggaataattttatgtgcttttattgcagcaattctgagccatattgcg

SEQ ID NO: 521402 - DNA, 75 bp, synthetic construct
  source 1..75: mol_type = other DNA
gaatctatcctcagcgctccacatgtattgcgcaatttactgacctacaaaatttaccacagccattttcctgag

SEQ ID NO: 521403 - DNA, 75 bp, synthetic construct
  source 1..75: mol_type = other DNA
ggtcacggcagaggtgctggcacagcggcaggctgaagaggacatccgtcgtgaaacggaacgccgtgcggatga

SEQ ID NO: 521404 - DNA, 75 bp, synthetic construct
  source 1..75: mol_type = other DNA
ggcgcagatacgtcgttatcaacacagcaggcacttgaacgttatggtgttaattataaaggcgagaagaaactt

SEQ ID NO: 521405 - DNA, 75 bp, synthetic construct
  source 1..75: mol_type = other DNA
cggctctctgattgaagcagaacttgacgacgtttctgtgggtgaagtatgcgaaatttatgcgagctggcaagc

SEQ ID NO: 521406 - DNA, 75 bp, synthetic construct
  source 1..75: mol_type = other DNA
ggtaaagataatccctgagcaagctattaaaaatgttaaatggtcgcggcagggtaataatctcatcgtcgaaaa

SEQ ID NO: 521407 - DNA, 75 bp, synthetic construct
  source 1..75: mol_type = other DNA
tcttttaaatagcagctttagctatgttaataccgagaaaaggacgcttgaaaaaatagatgagatctctaatac

SEQ ID NO: 521408 - DNA, 75 bp, synthetic construct
  source 1..75: mol_type = other DNA
gtacacgcgggataccggatgtccagggtggtgtggaaacacactgccagaatctttacccggctataaaaaagc

SEQ ID NO: 521409 - DNA, 75 bp, synthetic construct
  source 1..75: mol_type = other DNA
aataacagaaatgtattgcaaactaacattaaaaactttggtatagctctttatcaaggagatggtaatactaca

SEQ ID NO: 521410 - DNA, 75 bp, synthetic construct
  source 1..75: mol_type = other DNA
ggtccgggaggttgcccgggaaaatctgctgcaggagcgtctgcagcagatggagcgggatatggttcgtgacct

SEQ ID NO: 521411 - DNA, 75 bp, synthetic construct
  source 1..75: mol_type = other DNA
attgagttcgatctgcatcgccattttgcgcaggccgaacagtatcatcaggaactattaagcgagctggcggca

SEQ ID NO: 521412 - DNA, 75 bp, synthetic construct
  source 1..75: mol_type = other DNA
tgaatggggaaattattactaaagaaggtttttgtgaaaaagtaaaaaatattaaggcaatttcgtcaggtttag

SEQ ID NO: 521413 - DNA, 75 bp, synthetic construct
  source 1..75: mol_type = other DNA
ctggagctaccacgcgttgttctggctggcgatagggatgttgggtattgcgatgatttgcctgctgtttattaa

SEQ ID NO: 521414 - DNA, 75 bp, synthetic construct
  source 1..75: mol_type = other DNA
tatttagtaaggaagaaaaaattccttatctcatccaggcatgggtggatccgtttaataaagatgataaaacta

SEQ ID NO: 521415 - DNA, 75 bp, synthetic construct
  source 1..75: mol_type = other DNA
gagcagatgcaaaaccagatggacccggtatacacgccggcgcgaaaaattcacctgtaccactgcgaccatcgc

SEQ ID NO: 521416 - DNA, 75 bp, synthetic construct
  source 1..75: mol_type = other DNA
aggtattccctgctctgatctcgttcaggttatccctctccgtccaggtcaatcctatggcctgttcatgaaccg

SEQ ID NO: 521417 - DNA, 75 bp, synthetic construct
  source 1..75: mol_type = other DNA
cgccagagttcgcctttgaagcgttgatgcacgacgctgcggaggcatattgccaggatattccagccccgctca

SEQ ID NO: 521418 - DNA, 75 bp, synthetic construct
  source 1..75: mol_type = other DNA
agtaatgaaggtattcgtaatagtgatttaatccgtcgcttccgaattactagcaggggcacgaggtttattgta

SEQ ID NO: 521419 - DNA, 75 bp, synthetic construct
  source 1..75: mol_type = other DNA
ctatttctatattaagcatttgttgagtgtgtcatcgctggaagtcactccagatgaggcaacggtgctgaagat

SEQ ID NO: 521420 - DNA, 75 bp, synthetic construct
  source 1..75: mol_type = other DNA
caggattctatccttagcgccccgcatgtattgcgcaatttactgacctacaaaatttaccactgtcattttccg

SEQ ID NO: 521421 - DNA, 75 bp, synthetic construct
  source 1..75: mol_type = other DNA
gaaaaaatattacgtatcgtccacaccaaaggtttgtcattaccagaggatcgtgagtctgtcttctggctaaat

SEQ ID NO: 521422 - DNA, 75 bp, synthetic construct
  source 1..75: mol_type = other DNA
ctgttctggcgaccagcaaatatccgccttattcccgaagatgctgcgccgaaagtgaaatggcgccgggaaggg

SEQ ID NO: 521423 - DNA, 75 bp, synthetic construct
  source 1..75: mol_type = other DNA
ggctctttaaaacaaccgtttcatgtaagttatttaccgcgattatactcagtgtttttttagtccaaccagcat

SEQ ID NO: 521424 - DNA, 75 bp, synthetic construct
  source 1..75: mol_type = other DNA
tctgggaacggaagaaggttcacgcccggttgatcacggttatctgcaacaaattgcgcaagcggcggatcgtct

SEQ ID NO: 521425 - DNA, 75 bp, synthetic construct
  source 1..75: mol_type = other DNA
tttgacctgccggaggagccaacaggccatgacgcgccttcatggctgactgagccgacgccacagattaacggg

SEQ ID NO: 521426 - DNA, 75 bp, synthetic construct
  source 1..75: mol_type = other DNA
tttgacctgccggaggagccaacaggcaatgccgcgccttcatggctgactgagccgacgccacagattaacggg

SEQ ID NO: 521427 - DNA, 75 bp, synthetic construct
  source 1..75: mol_type = other DNA
tttgacctgccggaagagccaacaggcgatggcgcgccttcatggctgactgagccgacgccacagattaacggg

SEQ ID NO: 521428 - DNA, 75 bp, synthetic construct
  source 1..75: mol_type = other DNA
agtccagagctgacctgattgctcgtactgaacttggacgtgcaaccggcgcgctggatcaggcacgtgcgctgt

SEQ ID NO: 521429 - DNA, 75 bp, synthetic construct
  source 1..75: mol_type = other DNA
tccccgtgtcgtggggctgggccccacgcaccgtgcggtcggtgagatgcgcagcgccggcgtggatgcacagac

SEQ ID NO: 521430 - DNA, 75 bp, synthetic construct
  source 1..75: mol_type = other DNA
cttccgctggaagctgccgaccgcgttcgtgacatccaggagcgcgcaatggaagccgtcataaacggtgagcgc

SEQ ID NO: 521431 - DNA, 75 bp, synthetic construct
  source 1..75: mol_type = other DNA
gcccttccttcgttttttatggctgcaattgttaccagcttttcagtctacaagcgtggtaaagaactggaagat

SEQ ID NO: 521432 - DNA, 75 bp, synthetic construct
  source 1..75: mol_type = other DNA
atatcgatctggtacttgtaacggaagcgggtgatctctatgacccctccaaagagatcggctgtggcaacgtgc

SEQ ID NO: 521433 - DNA, 75 bp, synthetic construct
  source 1..75: mol_type = other DNA
tgcgctgcggatggtgagtctggggcgaaaaaactacctgttcttcggttctgaccatggtggtgagcggggagc

SEQ ID NO: 521434 - DNA, 75 bp, synthetic construct
  source 1..75: mol_type = other DNA
acgggtgcaggacgctgtccgggaggttgcccgggaaaatctgctgcaggagcgacttcagcagatggagcggga

SEQ ID NO: 521435 - DNA, 75 bp, synthetic construct
  source 1..75: mol_type = other DNA
ctgctgacagaggcgaagtcgtttgctgcagaaggaaccagttttactgaactgggaggggaaatcaatgcgcag

SEQ ID NO: 521436 - DNA, 75 bp, synthetic construct
  source 1..75: mol_type = other DNA
caccgaacagaaaaaagaatatgtcgctgcaccaggtgcaagaaaaggggttgctatttttgccataggagtcgt

SEQ ID NO: 521437 - DNA, 75 bp, synthetic construct
  source 1..75: mol_type = other DNA
gaagcgttaaaagcccgtgtaacgtgctctaagagcgttagcgttaaaaatggtgagagcaccttcacagcctga

SEQ ID NO: 521438 - DNA, 75 bp, synthetic construct
  source 1..75: mol_type = other DNA
cttatgccaacgcggctgagcggctattgatggctatcggtgagcctgtcatggtcgatacagcccaggaaccca

SEQ ID NO: 521439 - DNA, 75 bp, synthetic construct
  source 1..75: mol_type = other DNA
cgggaggttgcccgggaaaatctgctgcaggagcgactgcagcagatggagcgggatatggttcgtgacctgcag

SEQ ID NO: 521440 - DNA, 75 bp, synthetic construct
  source 1..75: mol_type = other DNA
ggacttcactgtacatgatatgcgccgtacagccagtacgttgttgcatgaggctggttatccttcagactggat

SEQ ID NO: 521441 - DNA, 75 bp, synthetic construct
  source 1..75: mol_type = other DNA
ctgacgctgccgaaggaggagaaacggcttccggcgcaggtgttcagcgagcaggaaacgcggcaggtgttacag

SEQ ID NO: 521442 - DNA, 75 bp, synthetic construct
  source 1..75: mol_type = other DNA
ggcggcagagccgcagacgcggcgtgagcgtaaccacgcggagatggagcgtgcgctggtcagcaggaagcgcag

SEQ ID NO: 521443 - DNA, 75 bp, synthetic construct
  source 1..75: mol_type = other DNA
ccgggttcgacatccgggcatatcgtgacgcggcggatcagcgtgcggagacccgcacgcaggcgcccggggctg

SEQ ID NO: 521444 - DNA, 75 bp, synthetic construct
  source 1..75: mol_type = other DNA
ctcgctgctttgcgtaaaggcggctatatcgaaatgaataaaggcaaactggtcgctatcaaccgtttgccttca

SEQ ID NO: 521445 - DNA, 75 bp, synthetic construct
  source 1..75: mol_type = other DNA
cagacatgcacgcgtcacagttattttgggggccggactttgcgcgaggacttgccgggccgcttttttacgata

SEQ ID NO: 521446 - DNA, 75 bp, synthetic construct
  source 1..75: mol_type = other DNA
tcagcaacccagacctgttccggttcaagagcggtaacctattcagggcctggtttgagcaggtttggatgccgg

SEQ ID NO: 521447 - DNA, 75 bp, synthetic construct
  source 1..75: mol_type = other DNA
ccagatggccgccgaaaaggcagcgaaaacagaaacgcctgaagaaaaggccgcccgcgagaagaaagaagcgga

SEQ ID NO: 521448 - DNA, 75 bp, synthetic construct
  source 1..75: mol_type = other DNA
gaacatgatgtttgaccatgtggcggtgctgcttgatgagcctggtgcaggtacgccggaggagggcgttggcat

SEQ ID NO: 521449 - DNA, 75 bp, synthetic construct
  source 1..75: mol_type = other DNA
aaagcctcgccatcaacgcctccaacatctcaacgaccaccatcaacggccaggaacactacgtcattcgtggtg

SEQ ID NO: 521450 - DNA, 75 bp, synthetic construct
  source 1..75: mol_type = other DNA
ggatatatccagtggtggctctgcaactcagacgatcattagcgggggtatccagacgatttacgatggaggctc

SEQ ID NO: 521451 - DNA, 75 bp, synthetic construct
  source 1..75: mol_type = other DNA
acacggtaggtttgggcgaatacagtccaaaagaagttattgacggtgcgaatggtgtgcctttttcgatcacac

SEQ ID NO: 521452 - DNA, 75 bp, synthetic construct
  source 1..75: mol_type = other DNA
cgtactccggactcacattgcgcaacgagctgaaaaataaaggcataaaggcagtcatcccccgaaaatcaaatg

SEQ ID NO: 521453 - DNA, 75 bp, synthetic construct
  source 1..75: mol_type = other DNA
aacagaaaaggcagcacgttgctgcctggcgcgctagtggtcttacgcgccagcaatactatgaactcaacgata

SEQ ID NO: 521454 - DNA, 75 bp, synthetic construct
  source 1..75: mol_type = other DNA
ctacaaggaagagtgcaggtttgaaaggtgtcacctgaatcttggtcgtgtggcatgggtggaaaaacactgcat

SEQ ID NO: 521455 - DNA, 75 bp, synthetic construct
  source 1..75: mol_type = other DNA
tctacttcaggatgcacatgtaccgtgtgagctcattcaaaacaacctccagcagcgatatctatatcggtgata

SEQ ID NO: 521456 - DNA, 75 bp, synthetic construct
  source 1..75: mol_type = other DNA
atgactaccggcgcccctgcaatgtcggctgctttattgggtaactcgttaaccgccgaagccaatgccgccaac

SEQ ID NO: 521457 - DNA, 75 bp, synthetic construct
  source 1..75: mol_type = other DNA
gaggttccacaaacccagcaaggggacattggcgcgaaagatatcccctcctggcggcggatatgcaaagtttta

SEQ ID NO: 521458 - DNA, 75 bp, synthetic construct
  source 1..75: mol_type = other DNA
gtgcgtaatagcgactgtgcggctaaagcacttattgacagacaaagtggtgaactgattggcatctgtactttt

SEQ ID NO: 521459 - DNA, 75 bp, synthetic construct
  source 1..75: mol_type = other DNA
taagggcaagcccgccagtggtcgtgccgtattgtctcaggaacaggacggcattaaatcgcacacccacagcgc

SEQ ID NO: 521460 - DNA, 75 bp, synthetic construct
  source 1..75: mol_type = other DNA
tggggttgagtttgatggttcaaaagatattactttaaccgccgcgcatgtggctgcttttgccagaagggcaac

SEQ ID NO: 521461 - DNA, 75 bp, synthetic construct
  source 1..75: mol_type = other DNA
cggaagttgtcaacgggcatacggacgttatctgttccacctcaatctgccacatgctgaccgtacgaaagagca

SEQ ID NO: 521462 - DNA, 75 bp, synthetic construct
  source 1..75: mol_type = other DNA
ggacgttatttgctcaaccagtatccgccacattctggctgtacgaaagagtacactgctgcaaatcgacacact

SEQ ID NO: 521463 - DNA, 75 bp, synthetic construct
  source 1..75: mol_type = other DNA
aattgtgatggctactcaaaatactttaccggggctgtcgacgagaaggcgcgtgataggtttacccaccggcta

SEQ ID NO: 521464 - DNA, 75 bp, synthetic construct
  source 1..75: mol_type = other DNA
atgccgggtgtaccggacgttgcattgaactatgtgccgggatagggcggttgtcattcgatcagtaccaacgca

SEQ ID NO: 521465 - DNA, 75 bp, synthetic construct
  source 1..75: mol_type = other DNA
ctgtatcgaactatgtgccgggattggtcgccttagctactaccagtacttaaggaatgagccaacgcatattac

SEQ ID NO: 521466 - DNA, 75 bp, synthetic construct
  source 1..75: mol_type = other DNA
atggcaagaattacaaaaaaggaatcaggattacacataaaggtgatggatctagtctactcagataaacaactg

SEQ ID NO: 521467 - DNA, 75 bp, synthetic construct
  source 1..75: mol_type = other DNA
gcaggattttactattcggcatggtgtttctgctgttatctggttgtgataataaccgggaagaattaaaactgg

SEQ ID NO: 521468 - DNA, 75 bp, synthetic construct
  source 1..75: mol_type = other DNA
caccctttgggaagatcagtacctcaaaagcgtatacaggccgttataagggtagtgaatttgaatacaaggtga

SEQ ID NO: 521469 - DNA, 75 bp, synthetic construct
  source 1..75: mol_type = other DNA
ctgctaatcacaataaagtgatggaattaatacattcagataagcaattaacacaagatgatagggaattcatat

SEQ ID NO: 521470 - DNA, 75 bp, synthetic construct
  source 1..75: mol_type = other DNA
gtggcagtggatatgtcccgcgaggcatcactggaaatgcagtctgagccgggcggcgacagtaccacgccgtcc

SEQ ID NO: 521471 - DNA, 75 bp, synthetic construct
  source 1..75: mol_type = other DNA
atgcttacctttccgggatttcccttaatggtgcttgccttcgcaaggctgacctgagcaatgctgaaatggaca

SEQ ID NO: 521472 - DNA, 75 bp, synthetic construct
  source 1..75: mol_type = other DNA
acgcaaaagatccggaaatgatgcaggcgaggggctcaatctcgccagataatatgttatgtgtcagtttttata

SEQ ID NO: 521473 - DNA, 75 bp, synthetic construct
  source 1..75: mol_type = other DNA
cttactattgattctccttatttttttggacaggcgtatctgtctgcaaacaaacattgggttgtaggctgtagt

SEQ ID NO: 521474 - DNA, 75 bp, synthetic construct
  source 1..75: mol_type = other DNA
gtgacccggagacgggaaatgtgtcgggacaactttctttcaccctgaatcaggggatggcagtcagtgccggtg

SEQ ID NO: 521475 - DNA, 75 bp, synthetic construct
  source 1..75: mol_type = other DNA
aaatacatcccttacgggaaaatggcttcctggctggttgagtggaaaaatgccactgaaacgcaatggcttaaa

SEQ ID NO: 521476 - DNA, 75 bp, synthetic construct
  source 1..75: mol_type = other DNA
atgctgtggtagaggttatggatattaatcaaggttatttatccggcctgacaaatgtggatgttacagggaatg

SEQ ID NO: 521477 - DNA, 75 bp, synthetic construct
  source 1..75: mol_type = other DNA
ttcgagacttgggatgaaagtgtgggaaataccaccttcggacaacggaaggtacggtttgataacgtgcgatgt

SEQ ID NO: 521478 - DNA, 75 bp, synthetic construct
  source 1..75: mol_type = other DNA
ctattaccggtgaccccggtctgaccggcatgaatcctgtcgccgcactgtcggcggatgacctttataacgcct

SEQ ID NO: 521479 - DNA, 75 bp, synthetic construct
  source 1..75: mol_type = other DNA
tatggaaattacgatttttatttctgacaaaaacagtgaagttctttgttgcagtaatatttggtatccagtata

SEQ ID NO: 521480 - DNA, 75 bp, synthetic construct
  source 1..75: mol_type = other DNA
gagagtgaaaagcaattgttttaaatatcaaggtgatgaatgtatttttgccaaagtgcagggagggattagtag

SEQ ID NO: 521481 - DNA, 75 bp, synthetic construct
  source 1..75: mol_type = other DNA
tcatttgtgccgttattccgactaacgaagaaaaaatgattgctttggatgccattcatttaggcaaagttaacg

SEQ ID NO: 521482 - DNA, 75 bp, synthetic construct
  source 1..75: mol_type = other DNA
caaaagcggcaacgctactcggcgcggcacggttacaggaactgcgcaaactgccgcaaccaatacaggagaatg

SEQ ID NO: 521483 - DNA, 75 bp, synthetic construct
  source 1..75: mol_type = other DNA
ccgtcacaagcgatttccggaccagtaagggccgtgtaacaaaatacaatgaccgcgtcgcaaaacagatttgct

SEQ ID NO: 521484 - DNA, 75 bp, synthetic construct
  source 1..75: mol_type = other DNA
cagcccgggatgcctcattgggacacgctcaagatctggatgcttcagcaccctgaactgcgccagacgattgag

SEQ ID NO: 521485 - DNA, 75 bp, synthetic construct
  source 1..75: mol_type = other DNA
atccccggaatgccttgccgggcaacgttaatcgtctggcagcttgaacacccggaactgaggcagactatcgaa

SEQ ID NO: 521486 - DNA, 75 bp, synthetic construct
  source 1..75: mol_type = other DNA
tggagccagatacggcagatgaatatcgcctacaggcgatggagattatgttgtctgctaaaaatgcagctaagt

SEQ ID NO: 521487 - DNA, 75 bp, synthetic construct
  source 1..75: mol_type = other DNA
cgaaagcggcaacgctactcggcatggcacgactacaagacttgcgcaagctgccgcaaccaatacaggagaacg

SEQ ID NO: 521488 - DNA, 75 bp, synthetic construct
  source 1..75: mol_type = other DNA
cataccaaatcacggctattaaatttcttcctgatggtatgaaatcattcggccttgatgttccattatggatgg

SEQ ID NO: 521489 - DNA, 75 bp, synthetic construct
  source 1..75: mol_type = other DNA
atgaaaacgaaaaaacatacttcacgtgtcgtgaataaaacgccggaacgtgacctgtatcagctggtgaccgac

SEQ ID NO: 521490 - DNA, 75 bp, synthetic construct
  source 1..75: mol_type = other DNA
actgggtggccatgtccgtaaaggcgaaatggcgacgaatactgtgatattcaaaccggtgaaggtgccggcaaa

SEQ ID NO: 521491 - DNA, 75 bp, synthetic construct
  source 1..75: mol_type = other DNA
ggagtgcaagtattttctggaataatatccatattgtatgttaagtataataatattatttcatttaaagttgtg

SEQ ID NO: 521492 - DNA, 75 bp, synthetic construct
  source 1..75: mol_type = other DNA
cgcatatgttgcgtcacgcgtgtggtttcgcacttgctgatcgtggggtcgatacccgattaattcaggattatc

SEQ ID NO: 521493 - DNA, 75 bp, synthetic construct
  source 1..75: mol_type = other DNA
tctttatacagctgcaaatgctgaaagatttaacagggcatgggtcaaagacgggaatttcatttgcccggatac

SEQ ID NO: 521494 - DNA, 75 bp, synthetic construct
  source 1..75: mol_type = other DNA
gtggctgatcgtgtactgacgatggtgaatgcctgcggtgtgaagattcattctttacctcaggaccgggcgtat

SEQ ID NO: 521495 - DNA, 75 bp, synthetic construct
  source 1..75: mol_type = other DNA
tttaatattaccaaagactatgtcctcaataatatactggcttcaaaaaacggcaacggctggacagggatatct

SEQ ID NO: 521496 - DNA, 75 bp, synthetic construct
  source 1..75: mol_type = other DNA
cgtatgtccgtcgtcagatcagcggtccactgaacattatgatgacggatgctctgtcaatggctgccgtggcat

SEQ ID NO: 521497 - DNA, 75 bp, synthetic construct
  source 1..75: mol_type = other DNA
gataaaaatagtgaagttttttgttgcagtaatatttggtatccagtatatcgtcctcatcaaccagatgtatta

SEQ ID NO: 521498 - DNA, 75 bp, synthetic construct
  source 1..75: mol_type = other DNA
gccggataacggggaagcccgcatcactctgaagacgtccctgatggttgacggaaagagagtggcactcagtgc

SEQ ID NO: 521499 - DNA, 75 bp, synthetic construct
  source 1..75: mol_type = other DNA
ccgacagacccggtgctgtaccgctcagacagtaacagcccgttgcctgcagagctgataatccggcatgcagaa

SEQ ID NO: 521500 - DNA, 75 bp, synthetic construct
  source 1..75: mol_type = other DNA
aaaaggctgtactgaatgccagtcagcagggcgaggatgttctgataacggtgcctgaggcgcaaaagcaggttg

SEQ ID NO: 521501 - DNA, 75 bp, synthetic construct
  source 1..75: mol_type = other DNA
tgttgaccccgactgtgatgattttccgcaacggctggcactggcaaaagcgagggcagcaacattactcggcat

SEQ ID NO: 521502 - DNA, 75 bp, synthetic construct
  source 1..75: mol_type = other DNA
aagcatcctcggcacgattttgcaggaaaacggggtgaccgaatggaggccgctgttcagcgagccccatccttc

SEQ ID NO: 521503 - DNA, 75 bp, synthetic construct
  source 1..75: mol_type = other DNA
gtagatgatatttggtcattgcgttcgtcggtagatgcttttgtacatttaggctatttgctgggtgaagaacac

SEQ ID NO: 521504 - DNA, 75 bp, synthetic construct
  source 1..75: mol_type = other DNA
gcatcctctttatacctatagctgcccggcgctactgaaagagtggctggaccgggaggaaaccaactggcggga

SEQ ID NO: 521505 - DNA, 75 bp, synthetic construct
  source 1..75: mol_type = other DNA
tgtctatcccggatacctgggcggtcgataaaaacggtgcaccaacaaccgatccgttcgcggtacatgctctgc

SEQ ID NO: 521506 - DNA, 75 bp, synthetic construct
  source 1..75: mol_type = other DNA
aagcatcctcggcacgattttgcaggaaaacggggtgaccgagtggagaccgctgttcagcgagccgcatccttc

SEQ ID NO: 521507 - DNA, 75 bp, synthetic construct
  source 1..75: mol_type = other DNA
aagcatcctcggcacgattttgcaggaaaacggggtgaccgactggaggccgctgttcagcgagccacatccttc

SEQ ID NO: 521508 - DNA, 75 bp, synthetic construct
  source 1..75: mol_type = other DNA
gtcgagctggctcaagccaaggttacctgcgaattgcagaaggctgcttctgaaaaagatgccgaaatccaggca

SEQ ID NO: 521509 - DNA, 75 bp, synthetic construct
  source 1..75: mol_type = other DNA
gagggtgacgatcttgagttttcatgggccagaaaaataatggattatactcgcggtgaactcagttatttaaaa

SEQ ID NO: 521510 - DNA, 75 bp, synthetic construct
  source 1..75: mol_type = other DNA
agtacacgcgctgacgcacccggaagagcaggatgggacgtggacagatcggcacggaagcgccagcgacgcagt

SEQ ID NO: 521511 - DNA, 75 bp, synthetic construct
  source 1..75: mol_type = other DNA
ccctgctcgtcgttctgtcaggctgctctaccacaccccggacgcctgacacaccggcagcatcctttgtcagca

SEQ ID NO: 521512 - DNA, 75 bp, synthetic construct
  source 1..75: mol_type = other DNA
atctgggaattagtaagttaatcaaccttgataatgtcaatgtaatggaaacgactgttgagggcggtgttgctt

SEQ ID NO: 521513 - DNA, 75 bp, synthetic construct
  source 1..75: mol_type = other DNA
tgaggcgctgagcgcggtagaaaaagatcgcgatgcactgacgaacgcgctggaaaaagcaaagcaagagaatga

SEQ ID NO: 521514 - DNA, 75 bp, synthetic construct
  source 1..75: mol_type = other DNA
tatgtggcactgccggcgtttgaccgtaacggcaagtcagcaggtatctggctgaacccgctgaccacggatgac

SEQ ID NO: 521515 - DNA, 75 bp, synthetic construct
  source 1..75: mol_type = other DNA
aaatcaggagatactggtactgatgatagcagacattatgattacatgattaaaatggagacattcggtcaaata

SEQ ID NO: 521516 - DNA, 75 bp, synthetic construct
  source 1..75: mol_type = other DNA
ataaagaattttctgtaaagtttaacttctatttaattaaatttggcattgccgcatgttatcttgcttttatca

SEQ ID NO: 521517 - DNA, 75 bp, synthetic construct
  source 1..75: mol_type = other DNA
cgtggtatcagcgttttggccctgaacgtaaccagcaactgctcgccgccgcctttcccggctatgcgcaggcgg

SEQ ID NO: 521518 - DNA, 75 bp, synthetic construct
  source 1..75: mol_type = other DNA
cattcatctggcccttcctgtgctggaaagtaaaaacctggccttcagcatggtggacctgctgacagaggcgaa

SEQ ID NO: 521519 - DNA, 75 bp, synthetic construct
  source 1..75: mol_type = other DNA
ctctccgcgcccaggctcgtcgctgcgcagaagagataaccaaagcgatgagcgtaaagcctaaaccgaagtgga

SEQ ID NO: 521520 - DNA, 75 bp, synthetic construct
  source 1..75: mol_type = other DNA
cgccagtgcacgcattatgggcgttggcctcaacacggttttacgacacttaaaaaactcaggccgcagtcggta

SEQ ID NO: 521521 - DNA, 75 bp, synthetic construct
  source 1..75: mol_type = other DNA
tggccatgaatggcgtcggatgtcgcgccagtgcacgcattatgggcgttggcctcaacacggttttacgacact

SEQ ID NO: 521522 - DNA, 75 bp, synthetic construct
  source 1..75: mol_type = other DNA
gtgggcggcaatttgttccattgcccaaagattggctgtacgccggagactctgcgtgtctgggttcgccagcat

SEQ ID NO: 521523 - DNA, 75 bp, synthetic construct
  source 1..75: mol_type = other DNA
ctctacaatgaattccacgcattatatatagataaagcaggaatatggagcgcatttgagggtgtatttgcaact

SEQ ID NO: 521524 - DNA, 75 bp, synthetic construct
  source 1..75: mol_type = other DNA
tggtaaatggatttgcccctatatttccagacatctgttatcacttaacccattacaagcccgctgccgcagata

SEQ ID NO: 521525 - DNA, 75 bp, synthetic construct
  source 1..75: mol_type = other DNA
ggggaaagtgcatactgacctccaggctgagttgaatgaaaaaattaaacagcttagtggtcagtttcaagatgc

SEQ ID NO: 521526 - DNA, 75 bp, synthetic construct
  source 1..75: mol_type = other DNA
tacgctgcgttagaggaagccgctgtaaataacgcggaaagaattcgatctgaaatagatgcttctgcccagaag

SEQ ID NO: 521527 - DNA, 75 bp, synthetic construct
  source 1..75: mol_type = other DNA
ttgaaactggtaagggatttgataacttttttcagtctcaagtaacaattcatgacagagatttttgtcccgatt

SEQ ID NO: 521528 - DNA, 75 bp, synthetic construct
  source 1..75: mol_type = other DNA
aaatggcttcctggctggttgagtggaaaaaagccactgaaacgcaatggcttaaagattcccccagtcacagcc

SEQ ID NO: 521529 - DNA, 75 bp, synthetic construct
  source 1..75: mol_type = other DNA
tcctacacgactgagcgtgtacagagagctggttaaagccggacataaagggttaccggttggcgaactgcagaa

SEQ ID NO: 521530 - DNA, 75 bp, synthetic construct
  source 1..75: mol_type = other DNA
caccatatatcagcactggtatcggtaggactggtcaaacaaaaccgtgagagtcggacgctgatgtgtgtttcg

SEQ ID NO: 521531 - DNA, 75 bp, synthetic construct
  source 1..75: mol_type = other DNA
acttaagctttggtacggcaaagctgctctctgctactgtgaatggcagtcttgttaataacaaaaatatcattc

SEQ ID NO: 521532 - DNA, 75 bp, synthetic construct
  source 1..75: mol_type = other DNA
aatggtgctcttatcaaagataactcaggattcatgtcttatgaaggtacattgacacaggcgaggggggttaac

SEQ ID NO: 521533 - DNA, 75 bp, synthetic construct
  source 1..75: mol_type = other DNA
aaaaattgcgacttcaataatgaggaattgcgcgaaatatataaaacttgcgaaattttgcaatctggattgtaa

SEQ ID NO: 521534 - DNA, 75 bp, synthetic construct
  source 1..75: mol_type = other DNA
gttgctgtgcctgatgccatccgttgtgtgaactgccagaacatcatggaggcccgtaatgtgggtcagcatcgt

SEQ ID NO: 521535 - DNA, 75 bp, synthetic construct
  source 1..75: mol_type = other DNA
cgtagcacacgcagcattggcctgaccgaagccggcagaatttactaccagggctgccgtcggatgcttcatgaa

SEQ ID NO: 521536 - DNA, 75 bp, synthetic construct
  source 1..75: mol_type = other DNA
tcaaagacctgtcgctggcagatctgcagatgctccaggacccgtggggccgtcgctacctgatgttcgctcagc

SEQ ID NO: 521537 - DNA, 75 bp, synthetic construct
  source 1..75: mol_type = other DNA
atggatttaaacactgctgcaaacgcacttcgagaactgggccacccgacacgtctcagcatataccgggagctg

SEQ ID NO: 521538 - DNA, 75 bp, synthetic construct
  source 1..75: mol_type = other DNA
agactttcgacaactggtttgatagccagactgttgcgctgaaagaagatttgcttgctgcaatgctgattcttg

SEQ ID NO: 521539 - DNA, 75 bp, synthetic construct
  source 1..75: mol_type = other DNA
atcagcctttaccgccactatgacaaccgtggccggttaacctcggtgaaagacgcacagggccgtgaaacgcag

SEQ ID NO: 521540 - DNA, 75 bp, synthetic construct
  source 1..75: mol_type = other DNA
gtgctggtacgtcgcttagccgcctattttcgaatgacacgaagttgcgtgaggaattgttagctaactgggata

SEQ ID NO: 521541 - DNA, 75 bp, synthetic construct
  source 1..75: mol_type = other DNA
aacgcggacgcggagtaacacgcgagggcacggcatgggcattcgtgacaactcacgcgggtacgactacgaacg

SEQ ID NO: 521542 - DNA, 75 bp, synthetic construct
  source 1..75: mol_type = other DNA
ctaggcattaaaaataaaaaggaattgcaatcggaaataaaacaaatatttactaattttttaaataataagaat

SEQ ID NO: 521543 - DNA, 75 bp, synthetic construct
  source 1..75: mol_type = other DNA
cgctgcgggtgatgggctatgacaccaaaaaagacgtctgcgggcatggcttccgggcgatggcctgtagtgcgc

SEQ ID NO: 521544 - DNA, 75 bp, synthetic construct
  source 1..75: mol_type = other DNA
tgccatgcctgctataacaacctcggggcactgattgcctttctgacagatgaatgctgttcaggcggatctgac

SEQ ID NO: 521545 - DNA, 75 bp, synthetic construct
  source 1..75: mol_type = other DNA
gcagggccactgctgaattttgctgacgatcaagtctgtcttcaaagctatctggaggtctatcaaacattaggt

SEQ ID NO: 521546 - DNA, 75 bp, synthetic construct
  source 1..75: mol_type = other DNA
attcttcgcctgccagacctgtgtgcgcgacccgggccgccggggatacacaaaacacatgctgcgcctgcgccg

SEQ ID NO: 521547 - DNA, 75 bp, synthetic construct
  source 1..75: mol_type = other DNA
acaaggcgctgcgcgtgatgggttacgacaccaaaaaggatatctgcgggcatggcttccgggcaatggcctgta

SEQ ID NO: 521548 - DNA, 75 bp, synthetic construct
  source 1..75: mol_type = other DNA
tttttttgagtgccatttcaatcaatgtgatggcatctccggttgtgagcaatgataaacccagaagcccattca

SEQ ID NO: 521549 - DNA, 75 bp, synthetic construct
  source 1..75: mol_type = other DNA
ggctttctgttctacaccaaccactttgatgcgctggcgctgccagaggaagaccgacgtatcgctgtgctgggg

SEQ ID NO: 521550 - DNA, 75 bp, synthetic construct
  source 1..75: mol_type = other DNA
ttgactccatcacaatacagtagcggcggaaagtcgaagttaggcaggataacaaaagccggtgattcgtatctg

SEQ ID NO: 521551 - DNA, 75 bp, synthetic construct
  source 1..75: mol_type = other DNA
ccgatttttgttacggatcttatgaaaacaaaaaataatattatttttatacctgtcacaattactgtgcatcca

SEQ ID NO: 521552 - DNA, 75 bp, synthetic construct
  source 1..75: mol_type = other DNA
tgtttgtattattgttagatattctcggttttgtaatttgctcatttttgttgctttttattttaatgaaaatac

SEQ ID NO: 521553 - DNA, 75 bp, synthetic construct
  source 1..75: mol_type = other DNA
attagataactactttacattcctgaaaagatacgcacaatgcacatttctgcattggaacatgcgagataacaa

SEQ ID NO: 521554 - DNA, 75 bp, synthetic construct
  source 1..75: mol_type = other DNA
ccgcgattaagcttgctggtgatttttattcaatgatggggtacgcgcatcgccctggattcaaatattgggaat

SEQ ID NO: 521555 - DNA, 75 bp, synthetic construct
  source 1..75: mol_type = other DNA
gagttctcctaactttagcactcaggggattgaaaaccagtctggttcggcaactggttcttgggtagagctcaa

SEQ ID NO: 521556 - DNA, 75 bp, synthetic construct
  source 1..75: mol_type = other DNA
aattactggcaatcaacggtatctccccaactgaggaaaatatccgcaacggcacttatccatacattgtggatg

SEQ ID NO: 521557 - DNA, 75 bp, synthetic construct
  source 1..75: mol_type = other DNA
cgcaggacggcaggctgtcagccaaggagttcatcggcaacaaggcgcagatgacacgcgaccagaccacgtttg

SEQ ID NO: 521558 - DNA, 75 bp, synthetic construct
  source 1..75: mol_type = other DNA
ctgactgccagctcggaaaatttagttctggatcctaaagggacggcgaaaactaatgagcaaggacaggctgtt

SEQ ID NO: 521559 - DNA, 75 bp, synthetic construct
  source 1..75: mol_type = other DNA
tgattcacctgatttcggtatcgatctgcgtccatatcgtgagcagggcttgccgctgccggaagagtaccggat

SEQ ID NO: 521560 - DNA, 75 bp, synthetic construct
  source 1..75: mol_type = other DNA
cggcctcgaccttcgtccgtatcgggaacaaggattgccgctgccaccggaataccagatcggttatcgccgcaa

SEQ ID NO: 521561 - DNA, 75 bp, synthetic construct
  source 1..75: mol_type = other DNA
caatattgtgtcaaatagtctggattatcagatagtggcatcgatttgccacctggcgcgaatgaagaaaatgcg

SEQ ID NO: 521562 - DNA, 75 bp, synthetic construct
  source 1..75: mol_type = other DNA
ggcccacccgcgcatcaaaagaacgccggctggcatcgaaggcacaaaaatcaaccgtgaaggcaatgcgcggca

SEQ ID NO: 521563 - DNA, 75 bp, synthetic construct
  source 1..75: mol_type = other DNA
tcgttacgttgcgtctgagactatcggcgtcctgcctgaccgcttcaagtctatcgacggtgataaccccgaggt

SEQ ID NO: 521564 - DNA, 75 bp, synthetic construct
  source 1..75: mol_type = other DNA
ctggagaaccaaaacaaataaaagctgaatatatagatgacaatgggcaaagaagaaattatataacctccatca

SEQ ID NO: 521565 - DNA, 75 bp, synthetic construct
  source 1..75: mol_type = other DNA
ataacactggaaactcaatctggacagaaactggtcgcagaaaataacgattttatgctgtatcctttctcacaa

SEQ ID NO: 521566 - DNA, 75 bp, synthetic construct
  source 1..75: mol_type = other DNA
cgtcgatgcccgatttctattctgcatgtggcttccgcacatggtacgggcagaggatgggtcagccagttaatg

SEQ ID NO: 521567 - DNA, 75 bp, synthetic construct
  source 1..75: mol_type = other DNA
gcaggcgaacgtattcagtgggactgcggtctgcccggcgaacctctgaaaattacatctgaacagctcgaaagc

SEQ ID NO: 521568 - DNA, 75 bp, synthetic construct
  source 1..75: mol_type = other DNA
tttatctgacaaactccgatcttgtttatagctatgcacacaaaatagtacactccattccatcaggaatgaaag

SEQ ID NO: 521569 - DNA, 75 bp, synthetic construct
  source 1..75: mol_type = other DNA
aaataaaattattttgttttgaaaataaaggggtgtctgaggcaagaaatagagggcttaaaaatgcaaatggag

SEQ ID NO: 521570 - DNA, 75 bp, synthetic construct
  source 1..75: mol_type = other DNA
aagcgctatcaacccttagcggacacgtgttttttacggtgtcgcttgcgctatggttcgattaaaaacaacttt

SEQ ID NO: 521571 - DNA, 75 bp, synthetic construct
  source 1..75: mol_type = other DNA
tgtttaccggtattttgtggatcaagatgcccgcctgcggattccgcggcgctggcttagccatctttggtggct

SEQ ID NO: 521572 - DNA, 75 bp, synthetic construct
  source 1..75: mol_type = other DNA
ttcgctgctctgttttgcctgccggaaacgggggcactctgcgactcgcgcggtgacagtattacatagcttagg

SEQ ID NO: 521573 - DNA, 75 bp, synthetic construct
  source 1..75: mol_type = other DNA
gaaggaggggcagatccgctactgcgaatcgctcggcttcagcccgcaggagctgtgcgagctgacgcgccttac

SEQ ID NO: 521574 - DNA, 75 bp, synthetic construct
  source 1..75: mol_type = other DNA
atcctttccccagttaaataaacacgcaatatccataatgagatcaaagaaagttgatattgaggtgttcaaaga

SEQ ID NO: 521575 - DNA, 75 bp, synthetic construct
  source 1..75: mol_type = other DNA
gaatcttttcgtctaaatactcaatctgctacggatcgactgctgttacatttaccgttattgcaagaattgttg

SEQ ID NO: 521576 - DNA, 75 bp, synthetic construct
  source 1..75: mol_type = other DNA
attgatccccgttcagtcgcagcttaaagtttatcttaatgatgagttgatgggagtattaccgattaccaaaga

SEQ ID NO: 521577 - DNA, 75 bp, synthetic construct
  source 1..75: mol_type = other DNA
tcaggaatctggtctgattcgatacagtgtttttttaccatatgctaaacaaagacgagtgacgacagagcggtt

SEQ ID NO: 521578 - DNA, 75 bp, synthetic construct
  source 1..75: mol_type = other DNA
tgcacctgttattaagatgattaaccatccacaaaatcctttcgtcaaattgttggtaatttggggccgcgatga

SEQ ID NO: 521579 - DNA, 75 bp, synthetic construct
  source 1..75: mol_type = other DNA
agtatcatcactttatcgccatgcctgatttacgcgcctttgtcagcgcaggctttccttttagtcgaatggctg

SEQ ID NO: 521580 - DNA, 75 bp, synthetic construct
  source 1..75: mol_type = other DNA
cttccgcaagaatttgcagacaatcagcaaattaatctgctcattgaggcaacaacgagttgggtaaaaagccca

SEQ ID NO: 521581 - DNA, 75 bp, synthetic construct
  source 1..75: mol_type = other DNA
atttgcgcattgatacccgaaactccgaaaccgggttaatacgctatagcttacttctgccctacgccaaacagc

SEQ ID NO: 521582 - DNA, 75 bp, synthetic construct
  source 1..75: mol_type = other DNA
caactggccaagctggcaacaaaagatttgcgcattgatacccgaaactccgaaaccgggttaatacgctatagc

SEQ ID NO: 521583 - DNA, 75 bp, synthetic construct
  source 1..75: mol_type = other DNA
tattcaccctgctcacgctgtccaccgttccggcccaggctgatattatcgacgatactattggtaatattcagc

SEQ ID NO: 521584 - DNA, 75 bp, synthetic construct
  source 1..75: mol_type = other DNA
tttgaactcgatattcctgatcgaatttatctaaaaacggcaatggagtttgatgataaatatattgttaacaaa

SEQ ID NO: 521585 - DNA, 75 bp, synthetic construct
  source 1..75: mol_type = other DNA
agttcgtccctcgaccgtatctcgaacattggggggtttaccaagaaatcgataatattcttgaccctcttgaaa

SEQ ID NO: 521586 - DNA, 75 bp, synthetic construct
  source 1..75: mol_type = other DNA
ctcgaagattatgaagacctcgaattcatccctcgcccgcactcccatgactggggaatctatcaggaaattgat

SEQ ID NO: 521587 - DNA, 75 bp, synthetic construct
  source 1..75: mol_type = other DNA
ggtaggcggttctcgtattgatgttaatcttaataatcagtacattgaatcttttcgcctaagtccgcgctcgac

SEQ ID NO: 521588 - DNA, 75 bp, synthetic construct
  source 1..75: mol_type = other DNA
ctggtggcgatcctgattatgctgccgacgctgggtatcggcgatatgaataatctctacaagtggttgctgaat

SEQ ID NO: 521589 - DNA, 75 bp, synthetic construct
  source 1..75: mol_type = other DNA
gttgcaacgccgtttgtgctggtaggattagggctgatattcccgctgctggcgcgtaaagcgaatagtaaataa

SEQ ID NO: 521590 - DNA, 75 bp, synthetic construct
  source 1..75: mol_type = other DNA
aaaatgatgttgaaattacaaaggacatccttaatgcttgcagccaccacggggggttagaattgaaaagaaaga

SEQ ID NO: 521591 - DNA, 75 bp, synthetic construct
  source 1..75: mol_type = other DNA
tggtgctcatacgcactccgttgcgattggttcgcatggacacaccatcaccgttaacgctgctggtaacgcgga

SEQ ID NO: 521592 - DNA, 75 bp, synthetic construct
  source 1..75: mol_type = other DNA
aatataatattagttgaaggcccaactgaaaaaatcgtcattaacaaaatatgtgatattgtcggagttgattat

SEQ ID NO: 521593 - DNA, 75 bp, synthetic construct
  source 1..75: mol_type = other DNA
taactttgtgaatcttagagggttgagacaaccggatggacgtcctctttatgaatatcatgcaaccaatgctga

SEQ ID NO: 521594 - DNA, 75 bp, synthetic construct
  source 1..75: mol_type = other DNA
attattctaaagttataaacttatatcagcaagaaggtcttgctctcaaagaatcaaaagcatttcttcgaccta

SEQ ID NO: 521595 - DNA, 75 bp, synthetic construct
  source 1..75: mol_type = other DNA
tattcgccatatccgcgccctcgccaaccgggtactgaataaagaaggcgaagtcgaacgcctgctcggcattaa

SEQ ID NO: 521596 - DNA, 75 bp, synthetic construct
  source 1..75: mol_type = other DNA
agactcaatttgaaaaatgatctttcatatcttcctgtaccgttctttgatccgcgagataaccgccctaataca

SEQ ID NO: 521597 - DNA, 75 bp, synthetic construct
  source 1..75: mol_type = other DNA
taaattcgatcatgaaattcatgattgggacattataaaaaactcaatcacaactttaataaataaaaatatcca

SEQ ID NO: 521598 - DNA, 75 bp, synthetic construct
  source 1..75: mol_type = other DNA
gcggtggtacagggaaataacgcccgtgccagtgccgcaggtgctgccactggagacgtggtggggatgatagcc

SEQ ID NO: 521599 - DNA, 75 bp, synthetic construct
  source 1..75: mol_type = other DNA
atattcacgagattctaaagaattatatagaaaaagttgcaccacattcgtatgagcatacgacgatagatgctc

SEQ ID NO: 521600 - DNA, 75 bp, synthetic construct
  source 1..75: mol_type = other DNA
ggtcatctgccgtggttcgaacgtttgtggtatgcactggctaatcacccgattctgttggcggtgctggcggca

SEQ ID NO: 521601 - DNA, 75 bp, synthetic construct
  source 1..75: mol_type = other DNA
tgccgcagaagcgaccgaaacgctgcgaaatgcgctggctaataacgggaaatttaccctggtttccgcccagca

SEQ ID NO: 521602 - DNA, 75 bp, synthetic construct
  source 1..75: mol_type = other DNA
tcggtgccgacgatcccgcagcagccaggcccaattgagcacgaagatcaaactgcaccgcctgcgccgcatatt

SEQ ID NO: 521603 - DNA, 75 bp, synthetic construct
  source 1..75: mol_type = other DNA
ctgcgccggagcaacctgccgagccgcaacagccagtaccaaccgtgccatcggtgccgacgatcccgcagcagc

SEQ ID NO: 521604 - DNA, 75 bp, synthetic construct
  source 1..75: mol_type = other DNA
ctatgcacttgctcatgggcatcattcacatggggcaccactgacagaaatggaacaaaaagcagcagagggtat

SEQ ID NO: 521605 - DNA, 75 bp, synthetic construct
  source 1..75: mol_type = other DNA
tcgcgcgacgacggctggcagcgtgaagtgaacgacgatcggcgcagacaatatgacgaccgccgccgccagttt

SEQ ID NO: 521606 - DNA, 75 bp, synthetic construct
  source 1..75: mol_type = other DNA
cttatcggtcagtttcacctggtttacgtaaaaaaccgcttcggcgggtttttgcttttggaggggcagaaagat

SEQ ID NO: 521607 - DNA, 75 bp, synthetic construct
  source 1..75: mol_type = other DNA
gcgataaattactcacctatgaagaagtgtgctcgttaaccaaactctctcagccaactctgcgccgttatgtca

SEQ ID NO: 521608 - DNA, 75 bp, synthetic construct
  source 1..75: mol_type = other DNA
gataccaattcttgcatttatcatgaaggatacagtagctttacccaagaataaaagagatgataatctacaaga

SEQ ID NO: 521609 - DNA, 75 bp, synthetic construct
  source 1..75: mol_type = other DNA
atgtgaatacgccaaccctgcaaatgcaactgatgctggtccagactggcgaaattatctggtcaggtaaaggtg

SEQ ID NO: 521610 - DNA, 75 bp, synthetic construct
  source 1..75: mol_type = other DNA
gaacgtgtaacgcagattattaacggcggacagaatggcattaaagaccgccgtgaacgttacgccaaagcaaaa

SEQ ID NO: 521611 - DNA, 75 bp, synthetic construct
  source 1..75: mol_type = other DNA
acaacagaatggtgcgcagaatacgatgaatggggcaacctgctgaatgaagagaacccgcatcagctgcagcag

SEQ ID NO: 521612 - DNA, 75 bp, synthetic construct
  source 1..75: mol_type = other DNA
ttcagaaagcatgccagttatcatagatatgatgttggagcagatgtattgtctttacgatagaatgaagggggc

SEQ ID NO: 521613 - DNA, 75 bp, synthetic construct
  source 1..75: mol_type = other DNA
attaacgtgggttctgttcaggtggaaacgattggacttgttcgtgcgctgaccgtgggcgtggcgtaccagacg

SEQ ID NO: 521614 - DNA, 75 bp, synthetic construct
  source 1..75: mol_type = other DNA
tactgccttttccggccatacagaaggcagttatgttgtgtcagttcagatcctgtctggggcgtacctcgcaaa

SEQ ID NO: 521615 - DNA, 75 bp, synthetic construct
  source 1..75: mol_type = other DNA
ccgaccagcggctacgtcggcaccgataccttcacctataccgtcaccagcggcggcaaaaccgaaaccgcgacg

SEQ ID NO: 521616 - DNA, 75 bp, synthetic construct
  source 1..75: mol_type = other DNA
cttgagcggcacccgcgcccaggtgaacgcggcgctggcgggcctgacggtgaccttcagaaccgaccgcaacgc

SEQ ID NO: 521617 - DNA, 75 bp, synthetic construct
  source 1..75: mol_type = other DNA
acacaacgtagatttccaatgatgaaatcagttgcacttagctccaaattcgcatctggaagaatgtttgatatg

SEQ ID NO: 521618 - DNA, 75 bp, synthetic construct
  source 1..75: mol_type = other DNA
tcaatgggatacaacaagaaaaagcaaattctccttttgttaatgtcttatacgttcctcaagatctagatctca

SEQ ID NO: 521619 - DNA, 75 bp, synthetic construct
  source 1..75: mol_type = other DNA
acagcgtgctgattcctctgagaccatcaccgcgaatgtcctgcgcaccgtagcaataacgaacatcattctgga

SEQ ID NO: 521620 - DNA, 75 bp, synthetic construct
  source 1..75: mol_type = other DNA
aataaaactgtcagacgatgacattggtaattatcagaaaacaattaacgacaataaagatagagtaaaaaacta

SEQ ID NO: 521621 - DNA, 75 bp, synthetic construct
  source 1..75: mol_type = other DNA
atacctttaaaaacatagagatggctatagcagatataaaaagggagtactattcgcatacagttgatattgaga

SEQ ID NO: 521622 - DNA, 75 bp, synthetic construct
  source 1..75: mol_type = other DNA
aagaagatctccagtacatgcctgaccttgacagaatgattcgcgaacctgaatgccgggctatgactacgttgt

SEQ ID NO: 521623 - DNA, 75 bp, synthetic construct
  source 1..75: mol_type = other DNA
cgtctgctgcatgcggacggcagcgccttcgtggccagcgaatacagcgacgtgaccctgggttacgcgaccggc

SEQ ID NO: 521624 - DNA, 75 bp, synthetic construct
  source 1..75: mol_type = other DNA
ctggcctattccaaagatggtgtgaacttcagccccatcggcaaaggctcctccttcacccagcaggatgtggcg

SEQ ID NO: 521625 - DNA, 75 bp, synthetic construct
  source 1..75: mol_type = other DNA
tggacggctaccgcctgcaaaacggcggcaccttcaccatgcaggatatcgtcgacggcaaagtgcagtacgtgc

SEQ ID NO: 521626 - DNA, 75 bp, synthetic construct
  source 1..75: mol_type = other DNA
aactttacgcctgccctttaaagagaaactctcttacggtattggcgacctggcctctaacatcctgctggatat

SEQ ID NO: 521627 - DNA, 75 bp, synthetic construct
  source 1..75: mol_type = other DNA
ttccgctattacaaacttgccccgaccttaattgtgaaagataagtttggcttggaagtgatcaataaagagtac

SEQ ID NO: 521628 - DNA, 75 bp, synthetic construct
  source 1..75: mol_type = other DNA
acgagatttttggtcgtgcaaatcagttaaataccatatcgatgaccacaaatgacccttcaggctttaaggcaa

SEQ ID NO: 521629 - DNA, 75 bp, synthetic construct
  source 1..75: mol_type = other DNA
ctatgagcatcgcgttgagttgtttagaatagttgagcttttcccttcacatgaactgaggcttgtagcaagaaa

SEQ ID NO: 521630 - DNA, 75 bp, synthetic construct
  source 1..75: mol_type = other DNA
aacaagaactgcttgcaacaatcctcgattacttccagaagggagaagtcccggatacagacactattgcggaaa

SEQ ID NO: 521631 - DNA, 75 bp, synthetic construct
  source 1..75: mol_type = other DNA
ggtatggctttgttcggtatagagaagtccctaggggggatttgcccctatatttccgagcctgtgcatagatgt

SEQ ID NO: 521632 - DNA, 75 bp, synthetic construct
  source 1..75: mol_type = other DNA
cctttgccatcacggcggtgcagcacgtaccggagaaagaagccatcgtggataacggggcccgctttgagccgc

SEQ ID NO: 521633 - DNA, 75 bp, synthetic construct
  source 1..75: mol_type = other DNA
tgcgccgtcgcctgttccgctgtgtctccgtccgggaaaacacggacggtacctttgccatcacggcggtgcagc

SEQ ID NO: 521634 - DNA, 75 bp, synthetic construct
  source 1..75: mol_type = other DNA
cccttgaggtggttttatctgaacctgaggtaatgaagtcaccattaggtcgttcgtttgatgcaattattgatt

SEQ ID NO: 521635 - DNA, 75 bp, synthetic construct
  source 1..75: mol_type = other DNA
tttggcgataacttattggcattgaaggcgctagagcaagaatatgcaggcaaagtgaagtgtgtttacatagac

SEQ ID NO: 521636 - DNA, 75 bp, synthetic construct
  source 1..75: mol_type = other DNA
cgctttctgttcctggtagttatgaagtgataacttttgagaatggcgactttgttgtaataccactaccacctg

SEQ ID NO: 521637 - DNA, 75 bp, synthetic construct
  source 1..75: mol_type = other DNA
aatctgctttcacttttacggtgttgaaagattaccttgaaactcaggaaattgatcctcgatatttctactaca

SEQ ID NO: 521638 - DNA, 75 bp, synthetic construct
  source 1..75: mol_type = other DNA
tggttttaataaagtcatccaggaagggcttgggggactaatcgagttaagttttgatattgacgataccagaca

SEQ ID NO: 521639 - DNA, 75 bp, synthetic construct
  source 1..75: mol_type = other DNA
atagtgctgccactggcggactcattgctgtttctgaattagcgaaaaaagtcatatgtaaaacaaaccgaaaaa

SEQ ID NO: 521640 - DNA, 75 bp, synthetic construct
  source 1..75: mol_type = other DNA
aaatatgtgtaccgtgctatcgctttgcactttctggccaaggaaaacagccttacggccagcgttcgttcttca

SEQ ID NO: 521641 - DNA, 75 bp, synthetic construct
  source 1..75: mol_type = other DNA
ttttaaggatccggcttattttgcgcgctttttttatcgcttagtcggttgctcgcccagtgcttatcgtgccaa

SEQ ID NO: 521642 - DNA, 75 bp, synthetic construct
  source 1..75: mol_type = other DNA
atatcaggctgacctgttaagtgcatcactattccatataacaaatttacgagcaaatactgtcggaggtaacaa

SEQ ID NO: 521643 - DNA, 75 bp, synthetic construct
  source 1..75: mol_type = other DNA
acgctttggtcttgagtttgagaaatcggcatttggtaagtacaacgtggataacgccatcaacgccaacttccg

SEQ ID NO: 521644 - DNA, 75 bp, synthetic construct
  source 1..75: mol_type = other DNA
ctcctggtatgccggtgcggaagtcggttaccgttaccatgtaactgactctgcatggattgagccgcaggcgga

SEQ ID NO: 521645 - DNA, 75 bp, synthetic construct
  source 1..75: mol_type = other DNA
tgtctgattctggttcttgaccggtcaatgtcatcggtgcgcattgaaccgccccgggaatcctggagactaaac

SEQ ID NO: 521646 - DNA, 75 bp, synthetic construct
  source 1..75: mol_type = other DNA
atatcattgatgttcacctcagagagtatggcagaacagaaaaacaaaaatgcacctttgtttttcaacctgaag

SEQ ID NO: 521647 - DNA, 75 bp, synthetic construct
  source 1..75: mol_type = other DNA
atcggtagagtctacgacaccgtaagcgactggcccatagcctcaacaacagaggttgctgcggctatggatgaa

SEQ ID NO: 521648 - DNA, 75 bp, synthetic construct
  source 1..75: mol_type = other DNA
aagatagatcataaaacttatgagataatgaattcagttttcaatgactcgataaaaaattttgaaaaatgtgta

SEQ ID NO: 521649 - DNA, 75 bp, synthetic construct
  source 1..75: mol_type = other DNA
catcgttcagcgatatgctgtgcggcttcaaagataaggtgacatcatcccttaacagcgcggccagttccgtta

SEQ ID NO: 521650 - DNA, 75 bp, synthetic construct
  source 1..75: mol_type = other DNA
gacatcgccgcacacgcctgagctccccgccaacactaaagaaactcattcaaagcgagatcggtgatttcttcg

SEQ ID NO: 521651 - DNA, 75 bp, synthetic construct
  source 1..75: mol_type = other DNA
gcccataacgacagctacctggttctcgatgagtcgaagctgttagataaagacgtactggcagccgctaaaatc

SEQ ID NO: 521652 - DNA, 75 bp, synthetic construct
  source 1..75: mol_type = other DNA
ttttggctctctggcagaaaaaattggccgcattggcgtgttgcgtatcaccattgtgatgttcgtcgcgatgga

SEQ ID NO: 521653 - DNA, 75 bp, synthetic construct
  source 1..75: mol_type = other DNA
atacccttgataagcttgctatgctcagaacttgaaaaaaagaataaacatgataaacgatctgaagagtatatt

SEQ ID NO: 521654 - DNA, 75 bp, synthetic construct
  source 1..75: mol_type = other DNA
tgagatgaatcttccatcggatgatggcaaaagtacggagaaattaggaccaataacgtatagcttgtataaaga

SEQ ID NO: 521655 - DNA, 75 bp, synthetic construct
  source 1..75: mol_type = other DNA
gagaatatgattttatgactcatttgccattgttttattccccggattttgtaagcacagcgaaaaaagaagctt

SEQ ID NO: 521656 - DNA, 75 bp, synthetic construct
  source 1..75: mol_type = other DNA
aataattttattaaacgtatttcagacgcgtattttgagaagattttgcttcaaacaaatgatgactatgattac

SEQ ID NO: 521657 - DNA, 75 bp, synthetic construct
  source 1..75: mol_type = other DNA
atgtttgctggtcttgtaggctattttcttgttccgctttacggctggaaagtgatgtttttgataggtcttatc

SEQ ID NO: 521658 - DNA, 75 bp, synthetic construct
  source 1..75: mol_type = other DNA
cctaaatttgtttctcagtcgattagccaaacgattctatcctttagcccacaagattaccagtttgccgtatcg

SEQ ID NO: 521659 - DNA, 75 bp, synthetic construct
  source 1..75: mol_type = other DNA
tttcttattcagcgcagcgtgttcatcagcgattgagtgtgctttctgatagtgcaattgagcagcgcgttcttt

SEQ ID NO: 521660 - DNA, 75 bp, synthetic construct
  source 1..75: mol_type = other DNA
ttgaatagctctgaagacgatttgcttgaagtggcgtggtatttgtcgaagtatggtaactctcaaccacccgca

SEQ ID NO: 521661 - DNA, 75 bp, synthetic construct
  source 1..75: mol_type = other DNA
ggcattgatggccctgtttttgatttggttaatctaaagcttaaggttactaaaaatataaaggatattttagag

SEQ ID NO: 521662 - DNA, 75 bp, synthetic construct
  source 1..75: mol_type = other DNA
ccgtcttgttcgtacagtcagtggaagccggcatcatgccggcttcttcacggattatttatcgcgatggcgatc

SEQ ID NO: 521663 - DNA, 75 bp, synthetic construct
  source 1..75: mol_type = other DNA
aggactcagacgatgagctatcacaattagtcagctatcgcgacaatctttattccactccagcagaacttgttg

SEQ ID NO: 521664 - DNA, 75 bp, synthetic construct
  source 1..75: mol_type = other DNA
agatacagagtattgggagaggtttatgagaaatataaaaatgaatatgatttgaggtttgttctttatttccct

SEQ ID NO: 521665 - DNA, 75 bp, synthetic construct
  source 1..75: mol_type = other DNA
aaagcgttattccggtactgctgagtattgttgcatccttaagtggatgtgcgggataccagagtgaagcggaca

SEQ ID NO: 521666 - DNA, 75 bp, synthetic construct
  source 1..75: mol_type = other DNA
accaacggctaaaggagctaaataacacgcaagtagatatagatttgtttcatgcgcgctttacgctgaacgatc

SEQ ID NO: 521667 - DNA, 75 bp, synthetic construct
  source 1..75: mol_type = other DNA
gcctatgcctggaaacttattgaccaacaacttgcggatagtgttatttttgccctccctacacaagctactgca

SEQ ID NO: 521668 - DNA, 75 bp, synthetic construct
  source 1..75: mol_type = other DNA
cacaagcagggcgtgatgaaaattgtcggtataaatactgacctatcagcctggattttggacaaaccgaaaacg

SEQ ID NO: 521669 - DNA, 75 bp, synthetic construct
  source 1..75: mol_type = other DNA
cgcaactaaaacctgatggcaagttatttgaatttagtcactctgcaccattttatgtgtccaaggcgattagca

SEQ ID NO: 521670 - DNA, 75 bp, synthetic construct
  source 1..75: mol_type = other DNA
accggtgagcgtcagacggtgcatcacccggagacggaagcactgctctggcagcatgagaccagacatgcgtac

SEQ ID NO: 521671 - DNA, 75 bp, synthetic construct
  source 1..75: mol_type = other DNA
ccggtggagaagtggattacctggctaagcaggccatcctcaaccgaaaccctattcgcatgaagcgagtggaat

SEQ ID NO: 521672 - DNA, 75 bp, synthetic construct
  source 1..75: mol_type = other DNA
acagtgtaaacctggtgccaaaggtatcaagtcgccggaatatgatttttggctgggatgacagtgggcagccta

SEQ ID NO: 521673 - DNA, 75 bp, synthetic construct
  source 1..75: mol_type = other DNA
gcacatcacaattcatcattgcgtcaatgcaaggcgagatcaaacgccgccagcgccgcaaggccaaagaatcag

SEQ ID NO: 521674 - DNA, 75 bp, synthetic construct
  source 1..75: mol_type = other DNA
acaaagcgacattgttccgtgcgctggaagaaaatgcggcgattgtatcagcgtgtaacttgcagcaaattgctg

SEQ ID NO: 521675 - DNA, 75 bp, synthetic construct
  source 1..75: mol_type = other DNA
aaaacctgcatatcaaaggtaatctgaccattgacggcacaggaaaatcacagggtacgttcacgatgtccgagg

SEQ ID NO: 521676 - DNA, 75 bp, synthetic construct
  source 1..75: mol_type = other DNA
gaaggtgaagtcaccatatcctcagatagcgcagctgtcgtcgccttaactactaactatgcaacaggcctgttc

SEQ ID NO: 521677 - DNA, 75 bp, synthetic construct
  source 1..75: mol_type = other DNA
cagggcaaaaccccaaaagcctctccgataacaccagaacaaatcgaaatacgtgagctgaggaaaaagctacaa

SEQ ID NO: 521678 - DNA, 75 bp, synthetic construct
  source 1..75: mol_type = other DNA
atgggcatcaaacaacacaatgggaataccaaagccgatcgtctcgctgaattaaaaatccgttcgccctccatt

SEQ ID NO: 521679 - DNA, 75 bp, synthetic construct
  source 1..75: mol_type = other DNA
atgaaggggtgtatcccatgagtagtggccagctctcttatttcaaatttgccttactagcttgcttatatattg

SEQ ID NO: 521680 - DNA, 75 bp, synthetic construct
  source 1..75: mol_type = other DNA
tctggcggaacaggctcagcgtgaacgtgatgagcggctgaaacaggaagcggcagaacaagcccgccgcgatgc

SEQ ID NO: 521681 - DNA, 75 bp, synthetic construct
  source 1..75: mol_type = other DNA
aacgtattgaagccgagcaacgagcacagcgcgaagcaaaagaggcagcagaacgagctgaaagagaaaagcagg

SEQ ID NO: 521682 - DNA, 75 bp, synthetic construct
  source 1..75: mol_type = other DNA
gaactgaaggaaattccaaagctaattgatgccaaccgcaagacagtgcgtgatcgccttgatgaactgaaagcc

SEQ ID NO: 521683 - DNA, 75 bp, synthetic construct
  source 1..75: mol_type = other DNA
ggaaaaccgcccccccggcagcctgccggggacgaagacgcagatgacgatccgctcgaaaacctataagggcag

SEQ ID NO: 521684 - DNA, 75 bp, synthetic construct
  source 1..75: mol_type = other DNA
ttggattcgtaacacggtagatgatgctttggaaatattccagacactcattcagcagggacaaattcctgaaaa

SEQ ID NO: 521685 - DNA, 75 bp, synthetic construct
  source 1..75: mol_type = other DNA
tgctgtggtaaggcaaggctggtgctgacgaaggacggacaaatttttctcaacggcacaaaaattcatttgcag

SEQ ID NO: 521686 - DNA, 75 bp, synthetic construct
  source 1..75: mol_type = other DNA
ggtcgttgctctaatcaacacaatattgaagaagcccaagcagttgctgaggctgtacttcatcatgcgcaacac

SEQ ID NO: 521687 - DNA, 75 bp, synthetic construct
  source 1..75: mol_type = other DNA
aattgatgaatttgataaatatcttattcctgttaccccggatgataaagcatggcaggaaagtattaagaccgc

SEQ ID NO: 521688 - DNA, 75 bp, synthetic construct
  source 1..75: mol_type = other DNA
agggcgttttgatcaggaaggccagtaccaggattaccagcgcacgcagtatgaagtgtatgactaccccggacg

SEQ ID NO: 521689 - DNA, 75 bp, synthetic construct
  source 1..75: mol_type = other DNA
catgaagaagaaattaagcgaatggcagccgccgcagcagcccgagaagttgagcagcgcgcaccgcgtgaacgt

SEQ ID NO: 521690 - DNA, 75 bp, synthetic construct
  source 1..75: mol_type = other DNA
gcattaccggtacaggaagcggcaacacaggaagaaattaaaacagaaacggtggcggatattgtgcagtcactg

SEQ ID NO: 521691 - DNA, 75 bp, synthetic construct
  source 1..75: mol_type = other DNA
tgtgggggacattgtgcagtcgttgccatcgttcactgaaacgcgagccaatggcctgattttaccatcgctgca

SEQ ID NO: 521692 - DNA, 75 bp, synthetic construct
  source 1..75: mol_type = other DNA
caaaaagggaagaatgaattaatgactttagcccttgatgtctgtaatgatttattatcttctggagtacctcct

SEQ ID NO: 521693 - DNA, 75 bp, synthetic construct
  source 1..75: mol_type = other DNA
caaaacgaaagtatgatggggtctacagcaatgacctatgatttaagtgaaaaaaagttgatgaaactgaagtat

SEQ ID NO: 521694 - DNA, 75 bp, synthetic construct
  source 1..75: mol_type = other DNA
ttacccgaaaagcactcctgatagaaaagaattgaaatggttgctaatatctttcattccatctcaggataaaat

SEQ ID NO: 521695 - DNA, 75 bp, synthetic construct
  source 1..75: mol_type = other DNA
agcgcctgcaatcctcatcgttcagtgatatgctgtccggcttcaaagataaggtcacatcatcccttaacagcg

SEQ ID NO: 521696 - DNA, 75 bp, synthetic construct
  source 1..75: mol_type = other DNA
cgcagcaacctgttatcatccaattacctcaagaaccaactactccacgagtacttcaccaacaggaaaaatcaa

SEQ ID NO: 521697 - DNA, 75 bp, synthetic construct
  source 1..75: mol_type = other DNA
gccgataacattggcggggtttatttccgtcctgtgcagatatatattagtaatgcatggcgtacagtttcatct

SEQ ID NO: 521698 - DNA, 75 bp, synthetic construct
  source 1..75: mol_type = other DNA
atatgaaagccatgcgctggacacgacgattgaaggtggaactcagtctctgaataataagtcaacggcaaaaaa

SEQ ID NO: 521699 - DNA, 75 bp, synthetic construct
  source 1..75: mol_type = other DNA
aaatcatatagatcttattaattactgggccttggatgacgaatctttagaagacagttttgcattaactcctga

SEQ ID NO: 521700 - DNA, 75 bp, synthetic construct
  source 1..75: mol_type = other DNA
gaagggagggactcttcttggtgttaagcatggtagtgatagatacacaaaggatattgatttttctaccgaaaa

SEQ ID NO: 521701 - DNA, 75 bp, synthetic construct
  source 1..75: mol_type = other DNA
actccgctaataatattcgttcatcatgtcaatgtctttatattattcttcattgttttgatgtttgccggaggt

SEQ ID NO: 521702 - DNA, 75 bp, synthetic construct
  source 1..75: mol_type = other DNA
gctcttcgttgtttggcactaattgggggctaggctttttcaaacatcatgcatgtgatttttgtgatgacattg

SEQ ID NO: 521703 - DNA, 75 bp, synthetic construct
  source 1..75: mol_type = other DNA
ctgccgaacgcaaccgaacgcgccggatacatgagcggggttatcgagtcgttagatcgaggtatccggttttga

SEQ ID NO: 521704 - DNA, 75 bp, synthetic construct
  source 1..75: mol_type = other DNA
gctggtggggcatcggtaaagaactcaggaattgaatcagcaaaagactacggtccatggctgctagaaaatggc

SEQ ID NO: 521705 - DNA, 75 bp, synthetic construct
  source 1..75: mol_type = other DNA
gcgttttgaactcacaggctctgaccagagctaaaattaatgctgataattttaaaaagggcattgataaaaaac

SEQ ID NO: 521706 - DNA, 75 bp, synthetic construct
  source 1..75: mol_type = other DNA
gctggcctgcacgctttttgcgtggaatcgcaactacttcattctcctctctacgggcgtacttctgagtagttt

SEQ ID NO: 521707 - DNA, 75 bp, synthetic construct
  source 1..75: mol_type = other DNA
cagttagctaaattggctgctggtgactttcgaatcgatacttgcaatacgacaacagggctggttcgttatagc

SEQ ID NO: 521708 - DNA, 75 bp, synthetic construct
  source 1..75: mol_type = other DNA
ggcgctagtgcagaggaaattgctcacattcttggccattcatctctggttgtagcaaagcactacatccgtgcg

SEQ ID NO: 521709 - DNA, 75 bp, synthetic construct
  source 1..75: mol_type = other DNA
aaaggtattgatatctccggtgaactgactatgatgggaatccctgaacagaatagtaaaactgtaacgccgggt

SEQ ID NO: 521710 - DNA, 75 bp, synthetic construct
  source 1..75: mol_type = other DNA
atgttctccacgagcgatatcagcgtctctggtaatctgtccatgacaggcaatcccgacaaagacaataaattc

SEQ ID NO: 521711 - DNA, 75 bp, synthetic construct
  source 1..75: mol_type = other DNA
tcactattccatataacaaatttacgagcaaatactgtcggaggtaacaaagtggaatatgaaaatgactcatat

SEQ ID NO: 521712 - DNA, 75 bp, synthetic construct
  source 1..75: mol_type = other DNA
cttcgtttacgtgcatttctacgaatgatccgcatcggtgaagggacaattcaggaagacggatacagaacgatg

SEQ ID NO: 521713 - DNA, 75 bp, synthetic construct
  source 1..75: mol_type = other DNA
acccgattgggcacatgggctactatcaggcaccaaaggatggggggtatgaggcacgatatcaggtacatatcg

SEQ ID NO: 521714 - DNA, 75 bp, synthetic construct
  source 1..75: mol_type = other DNA
ggcggacattgtgcagtcgttgccatcgtttaccaaaacgcaagcagatgagctgatttttccgtcccgcgcagg

SEQ ID NO: 521715 - DNA, 75 bp, synthetic construct
  source 1..75: mol_type = other DNA
gccttgccgcaagctggtttgccaatggcggggaggatcccataagcgctaacttaagggttgtggtattacgcc

SEQ ID NO: 521716 - DNA, 75 bp, synthetic construct
  source 1..75: mol_type = other DNA
caatgagttcattttgtgttaacggtagagttgaaaactgcatgtttagaaggcttggcttaacacaagaaaacg

SEQ ID NO: 521717 - DNA, 75 bp, synthetic construct
  source 1..75: mol_type = other DNA
atataacgaccccagtcagccaggcattatatccttatatgacacgggcaaaaaattgggccctgttttttaaaa

SEQ ID NO: 521718 - DNA, 75 bp, synthetic construct
  source 1..75: mol_type = other DNA
aatattattgatttttctgtgtgtgatttttctttattttttagtaaatgaccaattgcaacaatttaaaataga

SEQ ID NO: 521719 - DNA, 75 bp, synthetic construct
  source 1..75: mol_type = other DNA
gaacagaagggatataccagggaagaatacgatagtgcggcagatgactactttgcgcgacgcaaacggcggcag

SEQ ID NO: 521720 - DNA, 75 bp, synthetic construct
  source 1..75: mol_type = other DNA
ttcaacatcagcaaagaagaagctggacagctgacgatgacagagttccagatgatgcttgccgtgaaatatcct

SEQ ID NO: 521721 - DNA, 75 bp, synthetic construct
  source 1..75: mol_type = other DNA
cagattgtatacgtagcatcagcagctagcactacacatgctgaaaaccaccttggtggcggctttttcgagtct

SEQ ID NO: 521722 - DNA, 75 bp, synthetic construct
  source 1..75: mol_type = other DNA
atggtgaggattactcatcagcaccaaatagcattaagaaatgtgcaaaaaaatatggtttcgagccagaaccaa

SEQ ID NO: 521723 - DNA, 75 bp, synthetic construct
  source 1..75: mol_type = other DNA
gaccgacgccgccatcaaccccggcaattccggtggcccgctgctcgattcggctgggcggctgatcggaatcaa

SEQ ID NO: 521724 - DNA, 75 bp, synthetic construct
  source 1..75: mol_type = other DNA
tatcaacaactgggatttatcaagctcctctctgccatcggcgaccctgcgctgctgagcgattttatgcacgac

SEQ ID NO: 521725 - DNA, 75 bp, synthetic construct
  source 1..75: mol_type = other DNA
gtatgtgataacggctgtccgcacaacgcgaagcgaacttgaccgccacggtaaggccaaaaaaattgagttcac

SEQ ID NO: 521726 - DNA, 75 bp, synthetic construct
  source 1..75: mol_type = other DNA
gtagcttaaactcacaagaaaagaaagaactgacgcacaagttagaatctatttcaataatacccaagtgcaaat

SEQ ID NO: 521727 - DNA, 75 bp, synthetic construct
  source 1..75: mol_type = other DNA
agaactgacgcacaagttagaatctattttcaataatacccaagtgcaaattgcggtgatgctgccaacttactg

SEQ ID NO: 521728 - DNA, 75 bp, synthetic construct
  source 1..75: mol_type = other DNA
tggcggtagtcgtttggtttaccctgccagagaggaaaatacggcaattgggcaaacagcgtgccacacctcact

SEQ ID NO: 521729 - DNA, 75 bp, synthetic construct
  source 1..75: mol_type = other DNA
atgatgcaggttcaaatggataaggcgaaagccgcgcaacgcgctcgccagaaagaacaggctactatcgacctt

SEQ ID NO: 521730 - DNA, 75 bp, synthetic construct
  source 1..75: mol_type = other DNA
tgtccgaagggatctgtattcgtctctattccgaagacgatttcctttcgcgcccggagtttaccgatccggaga

SEQ ID NO: 521731 - DNA, 75 bp, synthetic construct
  source 1..75: mol_type = other DNA
tgcccctatatttccagacatctgttatcacttaacccattacaagcccgctgccgcagatattcccgtggcgag

SEQ ID NO: 521732 - DNA, 75 bp, synthetic construct
  source 1..75: mol_type = other DNA
tagctctgaactttctcataaactttctgagcgggtcgctattttcttaaaaccatataactttgatcctatcac

SEQ ID NO: 521733 - DNA, 75 bp, synthetic construct
  source 1..75: mol_type = other DNA
tactcaagccactgagtatgaaaggtaatctaaccgccgaaaaattgaaaacaccggaaatatcattgagtgtac

SEQ ID NO: 521734 - DNA, 75 bp, synthetic construct
  source 1..75: mol_type = other DNA
tatcgacggcacgcgtgtcggggacagggaatatgcggaggtgctgatcgctattacggagtatcaccgtgccct

SEQ ID NO: 521735 - DNA, 75 bp, synthetic construct
  source 1..75: mol_type = other DNA
taatccgccaactggaagagcagcgcgctgtgattgttcagcgcgacgatgaaattaaccggttacgcggtgatg

SEQ ID NO: 521736 - DNA, 75 bp, synthetic construct
  source 1..75: mol_type = other DNA
cgatgattcggcagatgcagagcttcaacgtggcggatgtcatttgcattggaccgttcctacgcagtctaaata

SEQ ID NO: 521737 - DNA, 75 bp, synthetic construct
  source 1..75: mol_type = other DNA
ttactgctttgcagcagcggctggattcgctgatgctgcgtgacagactgcgtttttctcgccgtctgcatggtg

SEQ ID NO: 521738 - DNA, 75 bp, synthetic construct
  source 1..75: mol_type = other DNA
ctggcattgctgcgtgaaagcgggctattgctggaccgcaagcaaggtaagtgggttcattaccgcttatcaccg

SEQ ID NO: 521739 - DNA, 75 bp, synthetic construct
  source 1..75: mol_type = other DNA
tgtacctgcccggcgctcacggcggtgtgtggaatgaacaggcgctgatcgggtcatcaacggttatcctgtgcg

SEQ ID NO: 521740 - DNA, 75 bp, synthetic construct
  source 1..75: mol_type = other DNA
ggatcgggaggcggcgcttgagttgttgcgcgatgagtgtcttgccgggcgcatcgcgtcggatatggcggcctg

SEQ ID NO: 521741 - DNA, 75 bp, synthetic construct
  source 1..75: mol_type = other DNA
aatacctacggtgcgattcggggcacggatgttttttatccgcagcagggcgcgggaatacgcgttatcgtcgca

SEQ ID NO: 521742 - DNA, 75 bp, synthetic construct
  source 1..75: mol_type = other DNA
atgggtggggatctgtggggggttattgataaactcgattatctggaagatctgggtattgatgggatttatttt

SEQ ID NO: 521743 - DNA, 75 bp, synthetic construct
  source 1..75: mol_type = other DNA
cccaagctaaatactgagaatgaagagtgccgtgaatacttacttagtatagttcgctattggacgcaaaatttt

SEQ ID NO: 521744 - DNA, 75 bp, synthetic construct
  source 1..75: mol_type = other DNA
tggatgcggcattacgcgcagaaatagatgaattgctggagcgtaaacagcgtgcgggtgaagcggaatatggac

SEQ ID NO: 521745 - DNA, 75 bp, synthetic construct
  source 1..75: mol_type = other DNA
aaaaggtgtaccgccaatgcgtttttccgaattgctggcgggaagtgagttggatgcggcattacgcgcagaaat

SEQ ID NO: 521746 - DNA, 75 bp, synthetic construct
  source 1..75: mol_type = other DNA
aaagagccaaaacggttgatcctaatcccggatggcgaacacattgatgctttttccgatcgccacggcgatgtt

SEQ ID NO: 521747 - DNA, 75 bp, synthetic construct
  source 1..75: mol_type = other DNA
ccatcatggcatcactgaggagcgtatcgatgagcttttacgagacttttttattttccacggtgccgaattgag

SEQ ID NO: 521748 - DNA, 75 bp, synthetic construct
  source 1..75: mol_type = other DNA
gggaagtttttgatgtcataataaaaaatgtacctaagataagaggtgggcgaccaacttttactgctaaatatg

SEQ ID NO: 521749 - DNA, 75 bp, synthetic construct
  source 1..75: mol_type = other DNA
gacagagcaagactgggatattgtaattgatataaaccttaaaggtgtttttaatataactcaggcagttgcacc

SEQ ID NO: 521750 - DNA, 75 bp, synthetic construct
  source 1..75: mol_type = other DNA
tattacgtgggtaggatcacaccgacttcattcaactttatgggtggggatctgtggggggttattgataaactc

SEQ ID NO: 521751 - DNA, 75 bp, synthetic construct
  source 1..75: mol_type = other DNA
tatctcttccgtcaactcggatttaatcagacctggcatgaatggaagcgggacgaacagcacaggcaacaacaa

SEQ ID NO: 521752 - DNA, 75 bp, synthetic construct
  source 1..75: mol_type = other DNA
tacaagctcaccgatgcccgcgtggaggccatcagccggcagctgattaagcaccgcgcggcgcagggcgaggcc

SEQ ID NO: 521753 - DNA, 75 bp, synthetic construct
  source 1..75: mol_type = other DNA
taccggcgtgattgcgggtattcaccggtatttaattgatatcggcggcgtgacggcgatcccctgctttatcac

SEQ ID NO: 521754 - DNA, 75 bp, synthetic construct
  source 1..75: mol_type = other DNA
aaagaagcgaaagcgatcgccgctgccgaaggacgcgagttgatcattctcgcctatgtgctgggtaccgatctt

SEQ ID NO: 521755 - DNA, 75 bp, synthetic construct
  source 1..75: mol_type = other DNA
catactttatttaataaaccagaataccgaaagcatcaataaaataaatctatttagccatttgattaaacgtct

SEQ ID NO: 521756 - DNA, 75 bp, synthetic construct
  source 1..75: mol_type = other DNA
taaagaagatatgccaaaacaattaactgaactattaaatttagttacaaacattcctgacattgaagataaatt

SEQ ID NO: 521757 - DNA, 75 bp, synthetic construct
  source 1..75: mol_type = other DNA
tgccgccccggagatgacgccggaagatcgggaggcggcgctggagctgctgcgcgacgagtgtcttgcgtcacg

SEQ ID NO: 521758 - DNA, 75 bp, synthetic construct
  source 1..75: mol_type = other DNA
gcggcttacggggtgaacggcttcaccgatgagatggatcaggcgttcagaaaacacggcgtcaggcaggtactg

SEQ ID NO: 521759 - DNA, 75 bp, synthetic construct
  source 1..75: mol_type = other DNA
aagacttgaagcattgaccgttgatgatgcatatgagtactgggttaaccattactgtatccctgaagggataat

SEQ ID NO: 521760 - DNA, 75 bp, synthetic construct
  source 1..75: mol_type = other DNA
tgtgttgctgttcatgatatgaatgcagggtttgatgaaaagattttgttcccctcatcagttgaaagcactgcg

SEQ ID NO: 521761 - DNA, 75 bp, synthetic construct
  source 1..75: mol_type = other DNA
cgcaggtcgatattgctgaagataatgcattcttcccttcagaatattcgcttagggaaggtgcgaacaagtccc

SEQ ID NO: 521762 - DNA, 75 bp, synthetic construct
  source 1..75: mol_type = other DNA
atttcacccaaggtttgaaaaactttgacgtagcaaaagctaaaaagcttaaaccgcaaaaaatgattgtgctgg

SEQ ID NO: 521763 - DNA, 75 bp, synthetic construct
  source 1..75: mol_type = other DNA
cctagattttggatctgcttctgatgaaaaagaaggagagcttataactgatattctaaaagattttgataccgg

SEQ ID NO: 521764 - DNA, 75 bp, synthetic construct
  source 1..75: mol_type = other DNA
gggtggcaacagcaaaagctcagccttatttatcagtctgttgaaacatctgaaattgacataccgacgggataa

SEQ ID NO: 521765 - DNA, 75 bp, synthetic construct
  source 1..75: mol_type = other DNA
cgatgaaggttaacgcgcaggtgctggacacggaaagcggcgtggtgttcgcggatgcggtggacatgatgagcg

SEQ ID NO: 521766 - DNA, 75 bp, synthetic construct
  source 1..75: mol_type = other DNA
taacgtttggttatgaagttaatgatatccatggtcataatattggtgttgtcggtcagggaagccagttattta

SEQ ID NO: 521767 - DNA, 75 bp, synthetic construct
  source 1..75: mol_type = other DNA
atggaatgaacactatgaatatttgaggaaattttttcttgacgatagatatttaaaaatcaataattcaccagt

SEQ ID NO: 521768 - DNA, 75 bp, synthetic construct
  source 1..75: mol_type = other DNA
acaacaaggggaaaacgcacgatgtgctgaccggaagtgatgacgatcgccacagcaacacgtctctggcgtggg

SEQ ID NO: 521769 - DNA, 75 bp, synthetic construct
  source 1..75: mol_type = other DNA
aaaaatgagaaagagaaaagatgatttaaggaaggaaaaatatcatgccgcaggcttagcggcaattggagggaa

SEQ ID NO: 521770 - DNA, 75 bp, synthetic construct
  source 1..75: mol_type = other DNA
tggcggtcttcgatcgggcagcgttaatgcttatctgcctgttctttctcatccgtatccgcctgtttcgcgaac

SEQ ID NO: 521771 - DNA, 75 bp, synthetic construct
  source 1..75: mol_type = other DNA
atcagcaagcgttacactcagcgcattgagcgacataatctgaatctgagacaacacctggcaaggccgggacgg

SEQ ID NO: 521772 - DNA, 75 bp, synthetic construct
  source 1..75: mol_type = other DNA
ggcgggcatggatgcgaacggctatctgtgccaggtggcagagccggaacgggcgttcagtctgttgctggatgg

SEQ ID NO: 521773 - DNA, 75 bp, synthetic construct
  source 1..75: mol_type = other DNA
ctggtgaggtcactcagattagtgataagacggatcctggctgggtggacgattcgagaattcaatggggaaata

SEQ ID NO: 521774 - DNA, 75 bp, synthetic construct
  source 1..75: mol_type = other DNA
gcgaaacagaattacgcgggaaccgtaaaatgaccgccccttatcgcggcgcggtcgttctggttgattttgata

SEQ ID NO: 521775 - DNA, 75 bp, synthetic construct
  source 1..75: mol_type = other DNA
ggttaatgtagcaattgataaacgacaaggactttcatgcataatcaccttcggtaaagagattgatgaaagtaa

SEQ ID NO: 521776 - DNA, 75 bp, synthetic construct
  source 1..75: mol_type = other DNA
ggccgctggcggtgctgatccagtcatcgagcgcggcgggtaagtccagcttaatggatgcggtgctcaacctga

SEQ ID NO: 521777 - DNA, 75 bp, synthetic construct
  source 1..75: mol_type = other DNA
ggtaaagacttaggttctcctgttccagatcgtatagctaataaactacgtgataaggagtttaaaagtttcgat

SEQ ID NO: 521778 - DNA, 75 bp, synthetic construct
  source 1..75: mol_type = other DNA
gcaaatggcagggcttaaggcccagcgggcacagacggatgtaaataataagaaggctgcatttgatgctgctgc

SEQ ID NO: 521779 - DNA, 75 bp, synthetic construct
  source 1..75: mol_type = other DNA
acgacgtgaagcgcggtttgcgaaacggcgttgctccttacatacctgcggccttttgcagggatgcccggagcg

SEQ ID NO: 521780 - DNA, 75 bp, synthetic construct
  source 1..75: mol_type = other DNA
ttttgtgggctgttcatttaccctggacagtcagtgcggcaggttgtggctgtctcagcccccggcgacagggac

SEQ ID NO: 521781 - DNA, 75 bp, synthetic construct
  source 1..75: mol_type = other DNA
ttttgtgggctgttcatttaccctggacagtcagtgcggcaggttgtggctgtatcagcccccggcgacagggcc

SEQ ID NO: 521782 - DNA, 75 bp, synthetic construct
  source 1..75: mol_type = other DNA
acgacgtgaagcgcggtttgcgaaacggcgttgctccttacataccggcggccttttgctgggatgcccggagcg

SEQ ID NO: 521783 - DNA, 75 bp, synthetic construct
  source 1..75: mol_type = other DNA
acgacgtgaagcgcggtttgcgaaacggcgttgctccttacatacccgcggccttttgcggggatgcctggagcg

SEQ ID NO: 521784 - DNA, 75 bp, synthetic construct
  source 1..75: mol_type = other DNA
acgacgtgaagcgcggtttgcgaaacggcgttgctccttacatacctgcggccttttgccgggatgccaggagcg

SEQ ID NO: 521785 - DNA, 75 bp, synthetic construct
  source 1..75: mol_type = other DNA
tccggaatctgccgatcagtgtcggaacggtgtgtcggaagcatgttattcaggagagtttttctgcttattcag

SEQ ID NO: 521786 - DNA, 75 bp, synthetic construct
  source 1..75: mol_type = other DNA
tggctgccgtgaccggcagcctgcccccggctgacccggcagagacgggtgcggccggtgttgacaacgaagctg

SEQ ID NO: 521787 - DNA, 75 bp, synthetic construct
  source 1..75: mol_type = other DNA
gctgagcaacggtgagctgagaccgttttcggttgaaaaggcaatagacgccatcgtaaaagcagctgcagctga

SEQ ID NO: 521788 - DNA, 75 bp, synthetic construct
  source 1..75: mol_type = other DNA
ctctaaagaagtcgatgagctgatagcagtatcagatagtgttggtaatgctctcaatccactaatttctatcca

SEQ ID NO: 521789 - DNA, 75 bp, synthetic construct
  source 1..75: mol_type = other DNA
gtctttagatatcgagcatggtagtctctcaattgataatgctaatggtcatatggtacataagtctctctctgt

SEQ ID NO: 521790 - DNA, 75 bp, synthetic construct
  source 1..75: mol_type = other DNA
agtattatcttaagaaaagatacaatgattttttgatttatatattccttttatgtaaaaaaaataaaatagttt

SEQ ID NO: 521791 - DNA, 75 bp, synthetic construct
  source 1..75: mol_type = other DNA
gccttttgctgggatgccgggagcgcaggccacggcgcgacagaggcggcgcgaccggaacggtcgctgcaagcc

SEQ ID NO: 521792 - DNA, 75 bp, synthetic construct
  source 1..75: mol_type = other DNA
gaatctaagagaagcctatgttgcactgttaaattctaaaagcaacggtaagaatatgatttctatttacaaaga

SEQ ID NO: 521793 - DNA, 75 bp, synthetic construct
  source 1..75: mol_type = other DNA
agatgagctaccaaatctgattgccaaaaaacaggctttacagcaagcacattcgaagttgacccaacttactca

SEQ ID NO: 521794 - DNA, 75 bp, synthetic construct
  source 1..75: mol_type = other DNA
cagttccgcaattttttgattattcgtctgttgttaaattatggtttacgaacaggtgagctattgttgttagag

SEQ ID NO: 521795 - DNA, 75 bp, synthetic construct
  source 1..75: mol_type = other DNA
attcagcaggataaaagtattgaagataccgtacgcgagcagctgattgcggcacggctggggcagggtaccttt

SEQ ID NO: 521796 - DNA, 75 bp, synthetic construct
  source 1..75: mol_type = other DNA
gccaacctggcagccgctaacactctttttgttatgcgtctgaacgatcgtgcaggtgaaacgcgttacatcgat

SEQ ID NO: 521797 - DNA, 75 bp, synthetic construct
  source 1..75: mol_type = other DNA
ctctggtcgaaaatatatttaagtcggtgaagttactaacagctgagtttcgcaaacatatcgaatatttacgat

SEQ ID NO: 521798 - DNA, 75 bp, synthetic construct
  source 1..75: mol_type = other DNA
aagctaaccatggcgattgcattttggtgagccatgaaagcggttcaggcactctcaacttgctcattgatgggg

SEQ ID NO: 521799 - DNA, 75 bp, synthetic construct
  source 1..75: mol_type = other DNA
gccgggagcgcaggccacggcgcgacagaggcggcgcgaccggaacggtcgctgcaagcccgggggtttggcgtc

SEQ ID NO: 521800 - DNA, 75 bp, synthetic construct
  source 1..75: mol_type = other DNA
gttcacgacagtccgccccgccagggggacgcccggaaaagccataaacaggagaggaacggaaagaggaagaag

SEQ ID NO: 521801 - DNA, 75 bp, synthetic construct
  source 1..75: mol_type = other DNA
acatctggcgcttgcaggacggcgaaaagcagcctcgttgatgcccttgcagccgatatcgacagcactaactgc

SEQ ID NO: 521802 - DNA, 75 bp, synthetic construct
  source 1..75: mol_type = other DNA
aaacaaaataaaatacaataatagagagttagaattaacaaaagaatcaaactctaacatttactcaggtacatt

SEQ ID NO: 521803 - DNA, 75 bp, synthetic construct
  source 1..75: mol_type = other DNA
tcagctggttaaatcgatctggttcaattcttcgaggttaatcacacatcattttaatgtgcctgaaatttgtga

SEQ ID NO: 521804 - DNA, 75 bp, synthetic construct
  source 1..75: mol_type = other DNA
acgcagctatgacagttggctggcagaggcaccggataaagccagcgcggccattacctgctgtatcattcggag

SEQ ID NO: 521805 - DNA, 75 bp, synthetic construct
  source 1..75: mol_type = other DNA
acatatacatgcccattttttaggtatactgacgcggtatttgccagaagtgtacacggagggaaaattgaaaga

SEQ ID NO: 521806 - DNA, 75 bp, synthetic construct
  source 1..75: mol_type = other DNA
ataataaaatgctatagagatttcgatttacatattcatataagagatgatggttcagttgattcaacatgtgaa

SEQ ID NO: 521807 - DNA, 75 bp, synthetic construct
  source 1..75: mol_type = other DNA
acaggcacattcattgagccaggaatgtattgataagttggacatttttttcgctgacgatctgtttaaatatga

SEQ ID NO: 521808 - DNA, 75 bp, synthetic construct
  source 1..75: mol_type = other DNA
cactcactttctttatatcaacgggtcaatgtgcctgcgatgaaatagcagaatcaaacttcaattatatgattg

SEQ ID NO: 521809 - DNA, 75 bp, synthetic construct
  source 1..75: mol_type = other DNA
tgcaccataaaactaaaaatatcaagctgatggctattgttcagcgtttacagcggattatggtcaacgaaaatc

SEQ ID NO: 521810 - DNA, 75 bp, synthetic construct
  source 1..75: mol_type = other DNA
tacttttacgtgctgcgtccgctgctggccgtgcgctgggtcgaagcgggaaaaggcgtaccgccaatgcgcttt

SEQ ID NO: 521811 - DNA, 75 bp, synthetic construct
  source 1..75: mol_type = other DNA
ttcgtgcggaactggcgcgtggggaaattccaccgctgttaccggatagcagagaaggggacgttaaggaactgg

SEQ ID NO: 521812 - DNA, 75 bp, synthetic construct
  source 1..75: mol_type = other DNA
gctggccgtgcgctgggtcgaagcgggtaaaggcgtaccgccaatgcgctttgctgagttactggcgggaagcga

SEQ ID NO: 521813 - DNA, 75 bp, synthetic construct
  source 1..75: mol_type = other DNA
gtatgcatcgccgcgatggaacatttaaaaagtaaggcaacggctcctatacaaaacggaccgttgccagcataa

SEQ ID NO: 521814 - DNA, 75 bp, synthetic construct
  source 1..75: mol_type = other DNA
ttaccggatagcagagaaggggacgttaaggaactggatagcttaatgtaccagacggtaatgcgccgggcgtga

SEQ ID NO: 521815 - DNA, 75 bp, synthetic construct
  source 1..75: mol_type = other DNA
ggatagcttaatgtaccagacggtaatgcccccggcgcaaaaaaccgcccggctttttccccccccccccctttt

SEQ ID NO: 521816 - DNA, 75 bp, synthetic construct
  source 1..75: mol_type = other DNA
gctgctgcgcgacgagtgtcttgcgtcacgcatcgcggcagacatggcggcgtgtggcgtggtgggtgagtccac

SEQ ID NO: 521817 - DNA, 75 bp, synthetic construct
  source 1..75: mol_type = other DNA
gttaaggcgttacgcttcaacggcgagctttacacgcctgatgccggattcgggcacaatccgggtcagggctgg

SEQ ID NO: 521818 - DNA, 75 bp, synthetic construct
  source 1..75: mol_type = other DNA
ccgttccggtcgtcaccatcaacacggtggcaggcgatgatgtgatcaacgcgacggaacacgcccaggcgcaga

SEQ ID NO: 521819 - DNA, 75 bp, synthetic construct
  source 1..75: mol_type = other DNA
aactcggcgggagtgctggtcgccacgcaaatcatcaacccgcagtcgggtatgggggttaacgacacctcggcg

SEQ ID NO: 521820 - DNA, 75 bp, synthetic construct
  source 1..75: mol_type = other DNA
tggggtatgcgtacacactgaaaccggaagaagcgattaagtatttcgaaagtaagggatacgttatcggcttcc

SEQ ID NO: 521821 - DNA, 75 bp, synthetic construct
  source 1..75: mol_type = other DNA
gtcgcttgtaaacgccggtgccacagtcacccctggcgatgtgttatctgaacgcgcggcgcagctgctggagct

SEQ ID NO: 521822 - DNA, 75 bp, synthetic construct
  source 1..75: mol_type = other DNA
ctctcttctctcggacagcgcctcatggataaatctgcaactaccacgccccggattgcctctcaggccatccat

SEQ ID NO: 521823 - DNA, 75 bp, synthetic construct
  source 1..75: mol_type = other DNA
ttaaactcacaaaaacatgttgcagcggtgagagatggattcgtttttacgtttccaattatcatggcaagttaa

SEQ ID NO: 521824 - DNA, 75 bp, synthetic construct
  source 1..75: mol_type = other DNA
cagagtagcagcgatgcaaaacacattaaagttggcgttataaatggcgcagaacaagatgtcgcggaagtcgct

SEQ ID NO: 521825 - DNA, 75 bp, synthetic construct
  source 1..75: mol_type = other DNA
tagagagtcttatgactatgcctgtccagttgcgccgaacgtcagcattgctccagatagttaacgatagtgaac

SEQ ID NO: 521826 - DNA, 75 bp, synthetic construct
  source 1..75: mol_type = other DNA
cgaccgtaacggcacgggcgatctgtttatcacccgtgatgactacggtacgggctatattaacggctttaccaa

SEQ ID NO: 521827 - DNA, 75 bp, synthetic construct
  source 1..75: mol_type = other DNA
gggcggcgcggtagtggtcgatccggcgcacaacacctggtatgtacagttgccggataccgatgcgctgacagt

SEQ ID NO: 521828 - DNA, 75 bp, synthetic construct
  source 1..75: mol_type = other DNA
tttcacgtatgacgcgcagcacccgggccggatggtggggcaccgttatgcgggaaggccggagatgcgctaccg

SEQ ID NO: 521829 - DNA, 75 bp, synthetic construct
  source 1..75: mol_type = other DNA
agatggcatatacggtgctgagatggtacctgatagcggtaaattacaatttcgttctggcactctaccttcgca

SEQ ID NO: 521830 - DNA, 75 bp, synthetic construct
  source 1..75: mol_type = other DNA
caactactgttcataaacacgggcgttatagggtcatcgctggtgatgttttcattcgtcatggttacgactacc

SEQ ID NO: 521831 - DNA, 75 bp, synthetic construct
  source 1..75: mol_type = other DNA
tcagttacaggatgtggaaagcggggaaatcctgttgctggatgtgacggccacggccggtaaaggggcgctgga

SEQ ID NO: 521832 - DNA, 75 bp, synthetic construct
  source 1..75: mol_type = other DNA
attgtgtttgtggaaaagaatgtgcgtgtcggatttccgccgtccctgaatgagaaactgcggatccagagtacc

SEQ ID NO: 521833 - DNA, 75 bp, synthetic construct
  source 1..75: mol_type = other DNA
ccagccgggcgtggaaacccgtttaatgagcaaaaggcgacacagacgcgcccagcgtctttttttgtgtcgtgc

SEQ ID NO: 521834 - DNA, 75 bp, synthetic construct
  source 1..75: mol_type = other DNA
agaaagaagcctttaatctggctaacctgttaacaaatgttaacccttacaaccttataaaaccaaaggtcgcga

SEQ ID NO: 521835 - DNA, 75 bp, synthetic construct
  source 1..75: mol_type = other DNA
ctgagaataccccaatagacacaggcaacaggtgggtaagcgacctgtttaaaaaactacgtgaacgcctgaggg

SEQ ID NO: 521836 - DNA, 75 bp, synthetic construct
  source 1..75: mol_type = other DNA
tgagtttaactatggccgcaaactcaatgcattgagtaaagtctttattgacgacctgatccaggcactaagcga

SEQ ID NO: 521837 - DNA, 75 bp, synthetic construct
  source 1..75: mol_type = other DNA
tcactatcaacaaagttgcgatcattgagttcaactatacccgcaaactcaatgctttaagtaaagtatttattg

SEQ ID NO: 521838 - DNA, 75 bp, synthetic construct
  source 1..75: mol_type = other DNA
gagtttgaacgtattcaggggatgcgccgggaggtttatgacagcgaggattatcaggaaggtatgaacgccttc

SEQ ID NO: 521839 - DNA, 75 bp, synthetic construct
  source 1..75: mol_type = other DNA
attgtgtttgtggaaaaaaatgtgcgtgtcggttttccaccgtctctgaatgagaaactgcggatccagagtacc

SEQ ID NO: 521840 - DNA, 75 bp, synthetic construct
  source 1..75: mol_type = other DNA
tattcacgaactgccgtctggcggtcgcgatccgctctcctatgatgatccgttgcgtcaaatcacccgcatgat

SEQ ID NO: 521841 - DNA, 75 bp, synthetic construct
  source 1..75: mol_type = other DNA
aaagcgccgttagccattgccgttatcaaagaagagctgcgtgtactgggcgaagcgcacaccatgaactccgat

SEQ ID NO: 521842 - DNA, 75 bp, synthetic construct
  source 1..75: mol_type = other DNA
aaccttacaaaacctgatattgataccgcagcgcctggagttccgttaccagtacgcgaggcgcttaccctcaac

SEQ ID NO: 521843 - DNA, 75 bp, synthetic construct
  source 1..75: mol_type = other DNA
ggcggactctcccccactggaatagtgtcgttttcagcggaatacggcgcatggtgccagctcattgagggcagg

SEQ ID NO: 521844 - DNA, 75 bp, synthetic construct
  source 1..75: mol_type = other DNA
ggatgcgctgacccgcgagctggctgaaaagcaaaaggcacatgacgagactgttcgcgatcttaaaaagaggct

SEQ ID NO: 521845 - DNA, 75 bp, synthetic construct
  source 1..75: mol_type = other DNA
atgacttttaaaaaacatttaaagttaaataagttcatgaaagagagagggcgaagcagagtccgccctctccct

SEQ ID NO: 521846 - DNA, 75 bp, synthetic construct
  source 1..75: mol_type = other DNA
cttccccaaccaggcaaaagcagctaccaatatggtagagaatgcaatgtcaaaagaccttcgtaacgcagttgc

SEQ ID NO: 521847 - DNA, 75 bp, synthetic construct
  source 1..75: mol_type = other DNA
cccgccgaaaaatgctttcactcgcggccttactcaggatgccgagggggctttgctcgggacaggctcaaagcg

SEQ ID NO: 521848 - DNA, 75 bp, synthetic construct
  source 1..75: mol_type = other DNA
ggcacacagcctgccgccttttttcaagaatgacggtttcaaagaggagcaggagttcaggatggtaatccttcc

SEQ ID NO: 521849 - DNA, 75 bp, synthetic construct
  source 1..75: mol_type = other DNA
gtccatcagcacaaaggcaccatcagcgcattgcgtcgggtggttgagccgctcggcttcctgattgaggtgcgc

SEQ ID NO: 521850 - DNA, 75 bp, synthetic construct
  source 1..75: mol_type = other DNA
gctttggcagcatggcaggcagtaatgccgcatatgaactgaccagcacatacaccccgcaggccagttacagag

SEQ ID NO: 521851 - DNA, 75 bp, synthetic construct
  source 1..75: mol_type = other DNA
gggatgggagagcgttataatggcaaactttctcgtgcagatctggaaacgccaacagcgtataacacctacacc

SEQ ID NO: 521852 - DNA, 75 bp, synthetic construct
  source 1..75: mol_type = other DNA
gtcgagcgaaatattatgctaggaaattatcctgaatattccgaccgttttgggaatgttgattcacatcgttgt

SEQ ID NO: 521853 - DNA, 75 bp, synthetic construct
  source 1..75: mol_type = other DNA
tatagagtggaaaagggactaaaaaagttcctgatccctaagttgttgttaacaagattaaagttcttgtttaaa

SEQ ID NO: 521854 - DNA, 75 bp, synthetic construct
  source 1..75: mol_type = other DNA
cgtgctcgatagcggcattactgacgaaatgtatcaggaacttgagcgcctgattgaagacgccaaaccggcaag

SEQ ID NO: 521855 - DNA, 75 bp, synthetic construct
  source 1..75: mol_type = other DNA
tcaacgagctggaagatttcaccttacaaatggctcaccacatttccgaaaaagcaccgctggcgattgcggtaa

SEQ ID NO: 521856 - DNA, 75 bp, synthetic construct
  source 1..75: mol_type = other DNA
tataacagatgaagttcatcgttcaaaatcaaaacgttccatagcttttcctgatgatgtgttaatgaacattgt

SEQ ID NO: 521857 - DNA, 75 bp, synthetic construct
  source 1..75: mol_type = other DNA
atcaacggggacaaattttaaccctggcagatgctggtcactatgatactgcgctggttaaacttaagcagctta

SEQ ID NO: 521858 - DNA, 75 bp, synthetic construct
  source 1..75: mol_type = other DNA
tcatcagcaattaccagcgcgtggttatgcagctgtcgccgtcgcttatcgtaacctgcaacaatggcaaaactc

SEQ ID NO: 521859 - DNA, 75 bp, synthetic construct
  source 1..75: mol_type = other DNA
acacattcgagtctgaatatgatggggctgcagaacacgtcggacgatatcatcatgaacctggtgatggggacg

SEQ ID NO: 521860 - DNA, 75 bp, synthetic construct
  source 1..75: mol_type = other DNA
aaatcctgaaacgttttcgtcaggcggtgctatctagtgctgttagcggtaagttaattgacaaaagcttcgaaa

SEQ ID NO: 521861 - DNA, 75 bp, synthetic construct
  source 1..75: mol_type = other DNA
tgtattaaagtacaaagtggttctacgccaaccggtaacccatttgctcaaaatggcacaatcccctttctgaaa

SEQ ID NO: 521862 - DNA, 75 bp, synthetic construct
  source 1..75: mol_type = other DNA
gaagatatgagtatatatctttagcattgttgttagtatatataatttgcttaatgtatagtccgcacttaagtt

SEQ ID NO: 521863 - DNA, 75 bp, synthetic construct
  source 1..75: mol_type = other DNA
cgccaactgggcttcaatgaaagctgatgacgcgcagcacgccatcacggtggcgcagacggatattgatgccaa

SEQ ID NO: 521864 - DNA, 75 bp, synthetic construct
  source 1..75: mol_type = other DNA
ttgatttaagcaaagacccagctgtactcaaaatgtactacccgcaaatgttcgaacgacaccaaccgacgaggg

SEQ ID NO: 521865 - DNA, 75 bp, synthetic construct
  source 1..75: mol_type = other DNA
atctcttagcttggcggggtcaagccagccgggatgcccggacggttacgctggtccgcgcccagttgcagcacc

SEQ ID NO: 521866 - DNA, 75 bp, synthetic construct
  source 1..75: mol_type = other DNA
gcatgttccttggcggaaactcgtctgggcgcgcccagccgacgatttccccgaggctgctcaggccaacgtgcg

SEQ ID NO: 521867 - DNA, 75 bp, synthetic construct
  source 1..75: mol_type = other DNA
tttttaagacaagagttagctacgcctatattgctcttatcattatctttctggttatgcgggagaagatattta

SEQ ID NO: 521868 - DNA, 75 bp, synthetic construct
  source 1..75: mol_type = other DNA
ccgtacaaagataaaaatcaactggtaaccatggcatcgattatcgaaaaagagactgccgttgccagcgagcgc

SEQ ID NO: 521869 - DNA, 75 bp, synthetic construct
  source 1..75: mol_type = other DNA
tgggagatttgcaggattttatcgcattggttaaagatgctaaggaaggtgcgaataagcggggaaattcttctc

SEQ ID NO: 521870 - DNA, 75 bp, synthetic construct
  source 1..75: mol_type = other DNA
ttatcgcttcagccttgtttgcaactggcattgcaaatgctgaattgaagcagaatactatttctcttggttatg

SEQ ID NO: 521871 - DNA, 75 bp, synthetic construct
  source 1..75: mol_type = other DNA
tgattactttgatagctccttgaaagaattcttggatgatcatatggaaaaattttcagacttaaaagatgatga

SEQ ID NO: 521872 - DNA, 75 bp, synthetic construct
  source 1..75: mol_type = other DNA
ccaaaaatgccccaaaccggtaatttcgatggttgaagggagcgtctggggaggcgcatttgaaatgatcatgag

SEQ ID NO: 521873 - DNA, 75 bp, synthetic construct
  source 1..75: mol_type = other DNA
cgcatttcttgatgatgacgatctctgggagataaatcatcttgaaggacttataaattgttttcagaatgatga

SEQ ID NO: 521874 - DNA, 75 bp, synthetic construct
  source 1..75: mol_type = other DNA
gggtgttccccagtatcaaagctccactcaatcacatgcatgaacaaactgatccggtgatgctgccaacttact

SEQ ID NO: 521875 - DNA, 75 bp, synthetic construct
  source 1..75: mol_type = other DNA
tatgtagagggagctatccccaagaatattttttcacctatcaatagggtcataaaagaacggcaggccgcaaat

SEQ ID NO: 521876 - DNA, 75 bp, synthetic construct
  source 1..75: mol_type = other DNA
ctcgcagcctctggcgttgggcatatagatttatatgatccagagacactttcactgaataacctttatcgccac

SEQ ID NO: 521877 - DNA, 75 bp, synthetic construct
  source 1..75: mol_type = other DNA
atcatttagggtatgctgagggggctgtccaggataatattttttcacctatcaatcagcttctaaaagatcgcc

SEQ ID NO: 521878 - DNA, 75 bp, synthetic construct
  source 1..75: mol_type = other DNA
acatcttaccgacatactccgcgcactccgccttaaccacaggacaactggctttctcactgatcatgatcgtag

SEQ ID NO: 521879 - DNA, 75 bp, synthetic construct
  source 1..75: mol_type = other DNA
ggtatttactgcgcggacgggagcgcgatgtcgcattacgctcgtttgccatcggttccgtcttcggtactctgg

SEQ ID NO: 521880 - DNA, 75 bp, synthetic construct
  source 1..75: mol_type = other DNA
gacaagaaatcatgctggatgtggagatgcatttcttccttactcctatacatcatcaaccatgacagcgcttgt

SEQ ID NO: 521881 - DNA, 75 bp, synthetic construct
  source 1..75: mol_type = other DNA
tcgcgctggcaggtgatggtgacgtcgtttactgcgatccgccttatgagccgcttcccggcaccgctggtttca

SEQ ID NO: 521882 - DNA, 75 bp, synthetic construct
  source 1..75: mol_type = other DNA
tacagcatgaaggtgtgcccaccgctgtggcgcacagggctgcgccagaacttccgtatcttccagaatgaggac

SEQ ID NO: 521883 - DNA, 75 bp, synthetic construct
  source 1..75: mol_type = other DNA
gagatgctatttcttcttgttctatattgtcttgtcagtatgattattatcttgatttttgattatattgcagaa

SEQ ID NO: 521884 - DNA, 75 bp, synthetic construct
  source 1..75: mol_type = other DNA
agaggcgacagaattgtgcggaaatttgaatttgatgctcggcggtgcgcttgaggtgatcaatgactggtccta

SEQ ID NO: 521885 - DNA, 75 bp, synthetic construct
  source 1..75: mol_type = other DNA
ctgaacatgatctcgtctcgtctgtaccaactgatcagccagcagcagggttcacactggatgctaatgtacttg

SEQ ID NO: 521886 - DNA, 75 bp, synthetic construct
  source 1..75: mol_type = other DNA
aaggcgtgcactggagtggtgatttaccattatgtgaaggccaggctactctggaacgagttaaaacaacgttgg

SEQ ID NO: 521887 - DNA, 75 bp, synthetic construct
  source 1..75: mol_type = other DNA
gaaggcccggaccctggtattgatggagcatttttatttttagacgacagagccattttttcaactgaagaactt

SEQ ID NO: 521888 - DNA, 75 bp, synthetic construct
  source 1..75: mol_type = other DNA
accgcaccttatatccccgccctgaaggatggggttttacggcgcaccggataagcctggagattatctacacca

SEQ ID NO: 521889 - DNA, 75 bp, synthetic construct
  source 1..75: mol_type = other DNA
tattagcaattaatcaagagctggttcaatcaattgcggaaaaggaggctgatggtttatatacctaccctctgg

SEQ ID NO: 521890 - DNA, 75 bp, synthetic construct
  source 1..75: mol_type = other DNA
tatcctagcattaacaacctatttcttttggattaatgaccgaaaaataattttttctcaggtgttttctagtgt

SEQ ID NO: 521891 - DNA, 75 bp, synthetic construct
  source 1..75: mol_type = other DNA
atgcctgttaattatagtgacataaaattcactattcataaaaatgaaaaaaatgaaggctccgcgattgcattc

SEQ ID NO: 521892 - DNA, 75 bp, synthetic construct
  source 1..75: mol_type = other DNA
attttaatgctaaaggtgctattgaaggaaataaaatttattttgagagaagaaaggggcagtatagttcagaaa

SEQ ID NO: 521893 - DNA, 75 bp, synthetic construct
  source 1..75: mol_type = other DNA
atgatcacagtcagtgggatagaggttaccggcggtcacttctatcttgggcagcgtatgaaacctgccgggcat

SEQ ID NO: 521894 - DNA, 75 bp, synthetic construct
  source 1..75: mol_type = other DNA
gtagtaatgatgaattcaaaacctttgtagataaacagatatatagtattatggaaaaaggcggtatttttagtt

SEQ ID NO: 521895 - DNA, 75 bp, synthetic construct
  source 1..75: mol_type = other DNA
agatcatggtagtggaaatggatgtggtaacagaggaagttccagtagttgttcaggtaataatgttggcggaac

SEQ ID NO: 521896 - DNA, 75 bp, synthetic construct
  source 1..75: mol_type = other DNA
tagatgagataacgcttgtcagcggaggaaacgcaaacagcaactttgaaggtggcccccgtaatgagcgttcca

SEQ ID NO: 521897 - DNA, 75 bp, synthetic construct
  source 1..75: mol_type = other DNA
atgggcgttctggcagcactgtttatgtggaaatttgtcccggaaaccaaaggtaaaacccttgaggagctggaa

SEQ ID NO: 521898 - DNA, 75 bp, synthetic construct
  source 1..75: mol_type = other DNA
ttattgcccgttccggcgatgccacctggctgaatactgacggctggcgttatatgtttgcttcggaatgtatcc

SEQ ID NO: 521899 - DNA, 75 bp, synthetic construct
  source 1..75: mol_type = other DNA
gtataccgtgccagaaagtcctcgctggctgatgtcacgcggcaagcaagaacaggcggaaagtatcctgcgcaa

SEQ ID NO: 521900 - DNA, 75 bp, synthetic construct
  source 1..75: mol_type = other DNA
cagcatctgttgcagatcatgagcggttttcttgagctgaccgatgatgcgcgcattcagcgcctgctcaagcgg

SEQ ID NO: 521901 - DNA, 75 bp, synthetic construct
  source 1..75: mol_type = other DNA
gatgcaccagtgctggaagatgctgatgatcacatttgggttgacctggaaatagccaaagaattagagggttag

SEQ ID NO: 521902 - DNA, 75 bp, synthetic construct
  source 1..75: mol_type = other DNA
aacagaaagtgcttgagaatgccatcaacaacaatgccagcttcagcgatgatgaaaagcgctctctgcacgcat

SEQ ID NO: 521903 - DNA, 75 bp, synthetic construct
  source 1..75: mol_type = other DNA
atgtctgtgttatcctattctgtgtttttcatctatagagatattaaatattatgaatgtgttcaggtatcgact

SEQ ID NO: 521904 - DNA, 75 bp, synthetic construct
  source 1..75: mol_type = other DNA
acaataatcggttttagcctggatgtttcagccttgtttcctgttaacgcaagcgtggctgaagttgctgctaat

SEQ ID NO: 521905 - DNA, 75 bp, synthetic construct
  source 1..75: mol_type = other DNA
ctgcttaagcgggcggtacaccgagcgatcgataaggtcgatctctccggcaccagtgcattgatgctggagagc

SEQ ID NO: 521906 - DNA, 75 bp, synthetic construct
  source 1..75: mol_type = other DNA
gcaattaggtatgagtattacacctgtgcgtgaagcattattacgtctggtttcggtgaatgcgctttctgtcgc

SEQ ID NO: 521907 - DNA, 75 bp, synthetic construct
  source 1..75: mol_type = other DNA
tccaaaatcgcagctgcatctggtggtcagtttaccgagaaccagatccttgaaatcagtaaaccaaaagccgct

SEQ ID NO: 521908 - DNA, 75 bp, synthetic construct
  source 1..75: mol_type = other DNA
tgaaaaaatatcgcgtgcttttaagccgggttgatacttccaaggcgcctgatattgactggccgacagccatat

SEQ ID NO: 521909 - DNA, 75 bp, synthetic construct
  source 1..75: mol_type = other DNA
gcgcattgaagcctatgccgaacaggtgaaagcctccctcggtaccgctggcaaagttgccaaaacgatggccga

SEQ ID NO: 521910 - DNA, 75 bp, synthetic construct
  source 1..75: mol_type = other DNA
acgaatacgacccgttccgagtttgatcgctacggtaaggcgaaaaagatagaattttcactgacccttgaacgc

SEQ ID NO: 521911 - DNA, 75 bp, synthetic construct
  source 1..75: mol_type = other DNA
aatagcggaggagatgcggcgcagctatcacagcggcgaatcctggtggcgggacggtccggccctgaacgtgcc

SEQ ID NO: 521912 - DNA, 75 bp, synthetic construct
  source 1..75: mol_type = other DNA
tttgcggcgctggccgtcacccgcacgcatcaggggatgaagattattcgctaccgccggaatctccgccgtctg

SEQ ID NO: 521913 - DNA, 75 bp, synthetic construct
  source 1..75: mol_type = other DNA
tgcctgattttttttctaagccgaaaaattaccactttaagtcaaaattaaattattatcctataactcaggctg

SEQ ID NO: 521914 - DNA, 75 bp, synthetic construct
  source 1..75: mol_type = other DNA
gccgctgaagcggctccggctgtatctgcggatgcaccggctgcgacagaaaaaccggtcgcccaaccggcatcc

SEQ ID NO: 521915 - DNA, 75 bp, synthetic construct
  source 1..75: mol_type = other DNA
tctattcaactgagagcggtatcaccgggggtggtttatttaaaacccctccccttcactttacaaaagaacagc

SEQ ID NO: 521916 - DNA, 75 bp, synthetic construct
  source 1..75: mol_type = other DNA
ggcgactggaacggctaaaccggcagcagcagcggatgaactctgcaaaaaatagctacgcaggagcaatggacg

SEQ ID NO: 521917 - DNA, 75 bp, synthetic construct
  source 1..75: mol_type = other DNA
cgcgtccgggcgctggccacggcaatgcaaagcagcactgcgcccacggcagcgatgcgtcgggagtttgaacgt

SEQ ID NO: 521918 - DNA, 75 bp, synthetic construct
  source 1..75: mol_type = other DNA
gagcgctgaaagcggcgcagcagcaggtcaaagacctgaacaaacaggccggacaaatcgatggctaccgcaagc

SEQ ID NO: 521919 - DNA, 75 bp, synthetic construct
  source 1..75: mol_type = other DNA
gaacactgccgtggtggcggcaacggcggccggtgtctgtgtaacggccccctgggcggtggcgctcgcgccgtc

SEQ ID NO: 521920 - DNA, 75 bp, synthetic construct
  source 1..75: mol_type = other DNA
atggagcccggactttcctcccctccgcccgtctcccccgaagaggacgacgacgaagcggcgactgtctggtca

SEQ ID NO: 521921 - DNA, 75 bp, synthetic construct
  source 1..75: mol_type = other DNA
tcccgtagagacggtggttattgaccttgcttatgaaggctccggcagtggcgactggcgcactgacggtttcat

SEQ ID NO: 521922 - DNA, 75 bp, synthetic construct
  source 1..75: mol_type = other DNA
agcggcagtgctgaagacaagcaaaaacaggccgaattgattcaacagcaaatcaccctactggaaacacaactg

SEQ ID NO: 521923 - DNA, 75 bp, synthetic construct
  source 1..75: mol_type = other DNA
atctgaatattatttcaggaggtttacagcgagcacataatgaaagtaaacgcaaagctcgcttaagtattaaaa

SEQ ID NO: 521924 - DNA, 75 bp, synthetic construct
  source 1..75: mol_type = other DNA
attagttggttgtatgccgaaggtgtatctgcatatagcggaaaaaatatcgaagatggttctgtactgaaaaac

SEQ ID NO: 521925 - DNA, 75 bp, synthetic construct
  source 1..75: mol_type = other DNA
gggtttttacgtaaatcaggtgaaactgaccgataagccgggttctgtcgtggacagtcattcatctaggccagc

SEQ ID NO: 521926 - DNA, 75 bp, synthetic construct
  source 1..75: mol_type = other DNA
gtggaatgcagacgcctccacgaccgccaacatcacagcaggttttaatgttgatattggtgactggagagatat

SEQ ID NO: 521927 - DNA, 75 bp, synthetic construct
  source 1..75: mol_type = other DNA
ctgaccggaacctatgccgccaatgattacacttccgccagtgccagttggagcggctcgtttaccgcgactcaa

SEQ ID NO: 521928 - DNA, 75 bp, synthetic construct
  source 1..75: mol_type = other DNA
aacaacggaccgaaaagacagccagaacggcaggaagatcgccggccggtaagcagactcaccggctggttccgc

SEQ ID NO: 521929 - DNA, 75 bp, synthetic construct
  source 1..75: mol_type = other DNA
atggtcatctggaacaggccgcgcaccgcgtcgcaccagagttttcggcattcctgacacgccacattactgaca

SEQ ID NO: 521930 - DNA, 75 bp, synthetic construct
  source 1..75: mol_type = other DNA
aacaatgcatcagcgacgctgaattacactggttcaaagatagatatcggtagtggttatatcggagagggtgag

SEQ ID NO: 521931 - DNA, 75 bp, synthetic construct
  source 1..75: mol_type = other DNA
gtgataacagatgtctggaaatataggggcaaatccaaagatcgcgacaaccagatttacctgtcgatttcgctc

SEQ ID NO: 521932 - DNA, 75 bp, synthetic construct
  source 1..75: mol_type = other DNA
gcagttgctcgccggagctgatcacgctcctggacagcgatgacattcagccgggtatgtcggctggctatcaga

SEQ ID NO: 521933 - DNA, 75 bp, synthetic construct
  source 1..75: mol_type = other DNA
cgctcaggagacggtgctgctggagctccagtcccgggtgcgaaatgaaagcgccggctcagaagcgttgcgtgg

SEQ ID NO: 521934 - DNA, 75 bp, synthetic construct
  source 1..75: mol_type = other DNA
ggcagtactggcccacggcgaaaatgctcagtctggctggctggtgatggaaaaactcccgggtcgtttgctgag

SEQ ID NO: 521935 - DNA, 75 bp, synthetic construct
  source 1..75: mol_type = other DNA
taactacaccacagttagcttctggatatttcaatgctggttttttactgataaatattgatgagtggaatctaa

SEQ ID NO: 521936 - DNA, 75 bp, synthetic construct
  source 1..75: mol_type = other DNA
ttctgtcggttttggtctcctgcctggtgttacgcagtgcgtggcagttgctgaaagagagcgtgaacgaactgc

SEQ ID NO: 521937 - DNA, 75 bp, synthetic construct
  source 1..75: mol_type = other DNA
ttcgatttgaccgtagctttatggcgattgctgccgcagttgacggcttgggagttgtgcttgaatcaaaactac

SEQ ID NO: 521938 - DNA, 75 bp, synthetic construct
  source 1..75: mol_type = other DNA
aagtattccagattttccgcgccggaacccacgttgacgggcacggcacaatggccaccatgacgcctgacgacc

SEQ ID NO: 521939 - DNA, 75 bp, synthetic construct
  source 1..75: mol_type = other DNA
tccattagtttcatctattgctgctcataccttttcgaatattaaaaatgccactcctgatttggttagggcatt

SEQ ID NO: 521940 - DNA, 75 bp, synthetic construct
  source 1..75: mol_type = other DNA
aacagcgcattacgtgcaatgggatatgacactaagactgaagtgtgtggacatggatttagaactatggctcgc

SEQ ID NO: 521941 - DNA, 75 bp, synthetic construct
  source 1..75: mol_type = other DNA
atgacggaacgggaactgtccattatttgtgcactgggcgaagaattctccacggtgctggcggatttacagcgc

SEQ ID NO: 521942 - DNA, 75 bp, synthetic construct
  source 1..75: mol_type = other DNA
ttgattttgaagtaaaaacacaactaaacttacctgaaaatatcccaccattctcggcacagcatcatcactatc

SEQ ID NO: 521943 - DNA, 75 bp, synthetic construct
  source 1..75: mol_type = other DNA
gccgaaacggtaaaaggttacgtgcaggcaatgcaccagagctggctacaggatgtggcgagccgacaatccaca

SEQ ID NO: 521944 - DNA, 75 bp, synthetic construct
  source 1..75: mol_type = other DNA
aatctgacgaagggaactcagtttaccctcctgatttagctcaggctatctttgaactcgatattcctgaccgaa

SEQ ID NO: 521945 - DNA, 75 bp, synthetic construct
  source 1..75: mol_type = other DNA
gggatgggagagcgttataatggcaagctctcccgtgcagatctggaagcaccaacagcgtataacacttatacc

SEQ ID NO: 521946 - DNA, 75 bp, synthetic construct
  source 1..75: mol_type = other DNA
catatgcattttcctcaagatacagaggaatgttacttgcatatgaaagcggaaccattaaagacccatacttaa

SEQ ID NO: 521947 - DNA, 75 bp, synthetic construct
  source 1..75: mol_type = other DNA
ccgtttaatgtgtccagagcgattaacaaggccttcctctgtttcagtccgccagattatcaggcagccgtaaag

SEQ ID NO: 521948 - DNA, 75 bp, synthetic construct
  source 1..75: mol_type = other DNA
aagccagattattacctaccgataaaatgtttaatatggggggatcagcacctaaatttgtttctcagtcgatta

SEQ ID NO: 521949 - DNA, 75 bp, synthetic construct
  source 1..75: mol_type = other DNA
ggagataaatgggctttcgattattcaggcagtcggcgatatcttgttttcaatcaagatcatatctcaaataaa

SEQ ID NO: 521950 - DNA, 75 bp, synthetic construct
  source 1..75: mol_type = other DNA
tattgtgaaacttttaacggtgaaagatcgctcagaacagaatattttatcactacaggcatcccttatgatgat

SEQ ID NO: 521951 - DNA, 75 bp, synthetic construct
  source 1..75: mol_type = other DNA
atttatcagatagaggacgttatacgggaagctaacagcgatattcctgaagtctggctgcccttcatgatgaaa

SEQ ID NO: 521952 - DNA, 75 bp, synthetic construct
  source 1..75: mol_type = other DNA
agtttttggctcctggcacagcgtcctttccgtcttcggaaacacaccagatgaagccagtgataacggttctga

SEQ ID NO: 521953 - DNA, 75 bp, synthetic construct
  source 1..75: mol_type = other DNA
aaaatatatttaagttttctcaaactgaattcataaagtctcaacatacagacagaagcatatataatggattat

SEQ ID NO: 521954 - DNA, 75 bp, synthetic construct
  source 1..75: mol_type = other DNA
ttgattaactggaactgtgcagcctcgaaatccccaccgaagacccctgatgaaaagcaggatacgccggatatg

SEQ ID NO: 521955 - DNA, 75 bp, synthetic construct
  source 1..75: mol_type = other DNA
aaggacggacaaatttttctcaacggcacaaaaattcatttgcagggtaaggagcaggttaatggtgactcactg

SEQ ID NO: 521956 - DNA, 75 bp, synthetic construct
  source 1..75: mol_type = other DNA
tcagatggctgtcctttaagtcggaaaggccctgctcctgcaggaatgaaaaaacctgagttatcatggttttct

SEQ ID NO: 521957 - DNA, 75 bp, synthetic construct
  source 1..75: mol_type = other DNA
gatattgaggctgtcaatggtgatcgtgacgacaaacacctaatctttgttgacgaacaaaatccgacggtacag

SEQ ID NO: 521958 - DNA, 75 bp, synthetic construct
  source 1..75: mol_type = other DNA
aaattaagaggaacaactggcttactcggcgaacttgataatgataaaaaaacgaattataaagaagttctagct

SEQ ID NO: 521959 - DNA, 75 bp, synthetic construct
  source 1..75: mol_type = other DNA
ttcttgtaatacaggtaaaggacaaaattcatttgctagccaattagctaaagagttacatacaaatgtaatagg

SEQ ID NO: 521960 - DNA, 75 bp, synthetic construct
  source 1..75: mol_type = other DNA
cttcacctgaacctgaattgacagattggctacgtaaacgtgcacaagacaatagtttcaagttactcgagaacg

SEQ ID NO: 521961 - DNA, 75 bp, synthetic construct
  source 1..75: mol_type = other DNA
cggtcctgcccgccgggctgaagcatctttatgtgtgtaaaaccagctgtgcagcctgccggtgctgcccgccag

SEQ ID NO: 521962 - DNA, 75 bp, synthetic construct
  source 1..75: mol_type = other DNA
aaatacgaaaatgctcgcctagggattcaactcgacgaagtgatatcggcggtagcacaagttgtgaaaatctgc

SEQ ID NO: 521963 - DNA, 75 bp, synthetic construct
  source 1..75: mol_type = other DNA
tcagggatttgacagcaaatcaccagcccaaacaaaaatgaatcaaacatcaataaagataaaaactgttgctaa

SEQ ID NO: 521964 - DNA, 75 bp, synthetic construct
  source 1..75: mol_type = other DNA
ggatgtgcgcggcattttgctggatatcgacagcccgggcggtcaggctgccggggcgtttgactgtgctgacat

SEQ ID NO: 521965 - DNA, 75 bp, synthetic construct
  source 1..75: mol_type = other DNA
aatttgcgctgggaagtggtgcgcaagttgcgtctagtggcgatatttatggttcagtgtgggaaaacaactggt

SEQ ID NO: 521966 - DNA, 75 bp, synthetic construct
  source 1..75: mol_type = other DNA
tgcgtgtattggtcgtggtggtcgtcagataaaaccgccccgttattatgacaagttattatcaggctgtgattt

SEQ ID NO: 521967 - DNA, 75 bp, synthetic construct
  source 1..75: mol_type = other DNA
gctctatgtggctgccacgcgggcccggaatacgcttgttctgaacagtgtacttcaccagattctggcaaaccg

SEQ ID NO: 521968 - DNA, 75 bp, synthetic construct
  source 1..75: mol_type = other DNA
gacgatttgtagtttcccaaatttctgtgaagataatgaattattttccggaatggatgtccaggctctcgatga

SEQ ID NO: 521969 - DNA, 75 bp, synthetic construct
  source 1..75: mol_type = other DNA
gaacgataacgttctggggaataccagtatactaaaacttgcacctgatacaggttttgatatgcgcggaaattc

SEQ ID NO: 521970 - DNA, 75 bp, synthetic construct
  source 1..75: mol_type = other DNA
cagagcgaatcttataagtccagaggtattactggctcactggagctgggatacacccataagctgaatgagttc

SEQ ID NO: 521971 - DNA, 75 bp, synthetic construct
  source 1..75: mol_type = other DNA
accgactggcatattccccgcctgtacgattttgctcacgccctcggcgccagtatgctggtcgggaattattcc

SEQ ID NO: 521972 - DNA, 75 bp, synthetic construct
  source 1..75: mol_type = other DNA
cgggtacacagtagttatattaataattcgctaatccctttgctatgcagaaaggctggtatacctgagcaggat

SEQ ID NO: 521973 - DNA, 75 bp, synthetic construct
  source 1..75: mol_type = other DNA
tcagcagttacagcaacacaaaagctggcggcatgtgaaaaatgaacgcgttaaccgttcagcaagctggcagta

SEQ ID NO: 521974 - DNA, 75 bp, synthetic construct
  source 1..75: mol_type = other DNA
gacagtgccaggtggacaggtacaacgaatattaatgcgggcactctgattctgggaagtctggaagactccctc

SEQ ID NO: 521975 - DNA, 75 bp, synthetic construct
  source 1..75: mol_type = other DNA
acaagatattttcccgatatttctgagaaggctgtcatcgcatggcatcctgattacgaaaaaaatgctccatat

SEQ ID NO: 521976 - DNA, 75 bp, synthetic construct
  source 1..75: mol_type = other DNA
ccgtgatgtaatggagtttatttcaagagatcctgctaagcaagctcgccagcgaatgctactgcgcattctggc

SEQ ID NO: 521977 - DNA, 75 bp, synthetic construct
  source 1..75: mol_type = other DNA
gtgttggtttttgtatgtacattcgtcgtgactgcttaaaccaggttggatattttgacgaagagacttttggtc

SEQ ID NO: 521978 - DNA, 75 bp, synthetic construct
  source 1..75: mol_type = other DNA
tgaggagaacggaaagctggtaaataacgggaaggtatttcaggagtatcttcagatgcaacttgccaaagatgg

SEQ ID NO: 521979 - DNA, 75 bp, synthetic construct
  source 1..75: mol_type = other DNA
attgtgtccttgaaggcggcatgacaaaagaagaacagggtaaagatgaaatctattacaatgaaataattgctc

SEQ ID NO: 521980 - DNA, 75 bp, synthetic construct
  source 1..75: mol_type = other DNA
gcaggaattacagcgctctgttgtgatagatgccattaaccgcaagcaaccggaaattatcaaggctctggttgc

SEQ ID NO: 521981 - DNA, 75 bp, synthetic construct
  source 1..75: mol_type = other DNA
gtggtgtaatcaccaatgacccgactcagctatctcgctgcaatcctggcgttttgtgctggcgaccgcgggagg

SEQ ID NO: 521982 - DNA, 75 bp, synthetic construct
  source 1..75: mol_type = other DNA
gctctgccggtggtcaccatgggcgggctggcgctggccggaagctggcttcatcagcatgtcagcgaacgtcgc

SEQ ID NO: 521983 - DNA, 75 bp, synthetic construct
  source 1..75: mol_type = other DNA
gcggctcgcccttcgggccgttgctaaagcaacgttatcctccctggtgcctgcggttattaccgccacctcttc

SEQ ID NO: 521984 - DNA, 75 bp, synthetic construct
  source 1..75: mol_type = other DNA
acgagcttctcgtggcgttgggtgcgcgggttatcgaccgtctccagatggatggcggaatgtgggtgaactttg

SEQ ID NO: 521985 - DNA, 75 bp, synthetic construct
  source 1..75: mol_type = other DNA
ttttcggtcgctcaggaattcaaagcctgcaccgcagctgcactttcgagaattaccatgtatccggggaagggc

SEQ ID NO: 521986 - DNA, 75 bp, synthetic construct
  source 1..75: mol_type = other DNA
ttaatgagcgactcgaaggcgtgttaagccgctggctgctgctgaagaataacgtcatgccagaggcggcaaccg

SEQ ID NO: 521987 - DNA, 75 bp, synthetic construct
  source 1..75: mol_type = other DNA
cattatattatgagcgagttacatgttgatgctgttcctgttaaagtttccacaattagtccatgcagtgaggag

SEQ ID NO: 521988 - DNA, 75 bp, synthetic construct
  source 1..75: mol_type = other DNA
ttcgccaggcgtctgcattcactggtgctgaacaggatgatatcgaatctctgcagaatgaggcgtttcacctcg

SEQ ID NO: 521989 - DNA, 75 bp, synthetic construct
  source 1..75: mol_type = other DNA
gtgtggatgtattcgacactctgtctaaggctgtgggtggacttctggggggcttaggtttgtactcacagtggc

SEQ ID NO: 521990 - DNA, 75 bp, synthetic construct
  source 1..75: mol_type = other DNA
gccgatacccgtttaattcaggattatctcgggcatcgaaatattcgccatactgtacgttataccgccagtaat

SEQ ID NO: 521991 - DNA, 75 bp, synthetic construct
  source 1..75: mol_type = other DNA
tgaaccgaagaacacggcggtgctgagtccggagagtaacggaatagcagagagcttcgtgaaaacaataaagcg

SEQ ID NO: 521992 - DNA, 75 bp, synthetic construct
  source 1..75: mol_type = other DNA
cggatggccgacgagctagatgctattggtgtgatgtcccaactggacgccagagcccttgagttgctagttgag

SEQ ID NO: 521993 - DNA, 75 bp, synthetic construct
  source 1..75: mol_type = other DNA
atgaaaaatattgcgacaggaggcgttctggagcgtatccgcagactgaccccaccacatgtaaccgccccattc

SEQ ID NO: 521994 - DNA, 75 bp, synthetic construct
  source 1..75: mol_type = other DNA
actaccgtgtatcaacagttaagcaggggaaaagcggtttagggttggcagctcaacgggaagccgtttctgctt

SEQ ID NO: 521995 - DNA, 75 bp, synthetic construct
  source 1..75: mol_type = other DNA
agaaacgctaaatgcttcaaggacacctgcaccgaaaggtggtgagtggggattgtcgcagctccaaagggtgat

SEQ ID NO: 521996 - DNA, 75 bp, synthetic construct
  source 1..75: mol_type = other DNA
ttttgctttcagtcggctcgctgtggctgatgccatttgccagctacgtgatgcaggcaacctgcttcttcacca

SEQ ID NO: 521997 - DNA, 75 bp, synthetic construct
  source 1..75: mol_type = other DNA
accatcaaggattgcggtcatatgatcccgctcgaacaacctgaggagttggcgagaaccattactgaatggatc

SEQ ID NO: 521998 - DNA, 75 bp, synthetic construct
  source 1..75: mol_type = other DNA
tgaaactatcggggctgaggaagatacttttaccaaaatagcattagaattaaggaatagtgttaaacatatcaa

SEQ ID NO: 521999 - DNA, 75 bp, synthetic construct
  source 1..75: mol_type = other DNA
cgttaccgggctaattgaaaccgggattaactttgtggccgctgatatgccgcaagctgacaaggtgatgatcca

SEQ ID NO: 522000 - DNA, 75 bp, synthetic construct
  source 1..75: mol_type = other DNA
caaactatcgatgatctaattgatgcgcacaatcttattttactaagtgaaatcagtaacccggagctgcatcat

SEQ ID NO: 522001 - DNA, 75 bp, synthetic construct
  source 1..75: mol_type = other DNA
cgttgagctattcgcggaaagctctatcttgcctgttgtgtaccgcccggatttcactacacgactgacgaacga

SEQ ID NO: 522002 - DNA, 75 bp, synthetic construct
  source 1..75: mol_type = other DNA
catttagtgataaggtcttaagaagccatggtggagatcctatcttggcgcttaattatttaaaagaatattttt

SEQ ID NO: 522003 - DNA, 75 bp, synthetic construct
  source 1..75: mol_type = other DNA
aggtgccgggcacaatgaaaattatttcagcagaaataccagtgcctaaagaagatgaagttggtgatgctgcca

SEQ ID NO: 522004 - DNA, 75 bp, synthetic construct
  source 1..75: mol_type = other DNA
cgtccctgcgatcgctggctcgaagatcagacgccaatggaaacattacttgatggaaagcgcatctgggccgag

SEQ ID NO: 522005 - DNA, 75 bp, synthetic construct
  source 1..75: mol_type = other DNA
agtgatattgaagttcgtactgcttacaagctgaagagtgactttacaactcggcgggtaaagcagtcgattaag

SEQ ID NO: 522006 - DNA, 75 bp, synthetic construct
  source 1..75: mol_type = other DNA
ctgtgacgataggtactggtggcagtgctgttgctgctggtgtctcgtctaaaggtgggaatggtggtgatacaa

SEQ ID NO: 522007 - DNA, 75 bp, synthetic construct
  source 1..75: mol_type = other DNA
tcgcggcaggaaaagtaaaagccacggcgcataaatgcgacctttgtgcggggcgcgaaaacggtcctgcctgtg

SEQ ID NO: 522008 - DNA, 75 bp, synthetic construct
  source 1..75: mol_type = other DNA
attgattatttgcacggcgtcacactttgctatgccatagcatttttatccataagattagcggatcctacctga

SEQ ID NO: 522009 - DNA, 75 bp, synthetic construct
  source 1..75: mol_type = other DNA
tggacggaatgccaggaacaatacaaggcgtgcacaaacgagcgaagaaagaaggatggcctaagcgttcgcaag

SEQ ID NO: 522010 - DNA, 75 bp, synthetic construct
  source 1..75: mol_type = other DNA
ttttctggacgctgcgaaaaaaatttgtcgccagtagcgacgagatgccggaacacagctcccaggtaatgtatt

SEQ ID NO: 522011 - DNA, 75 bp, synthetic construct
  source 1..75: mol_type = other DNA
gcctggcgaccggagccacgccattactgacgtatcattatctggtagaaaaatccaccagcagcaggttgatgt

SEQ ID NO: 522012 - DNA, 75 bp, synthetic construct
  source 1..75: mol_type = other DNA
gatggagatcgacaataacctgtgtgaaaacgccctccgggtatccggcatatcctgcgggctttttccctgttg

SEQ ID NO: 522013 - DNA, 75 bp, synthetic construct
  source 1..75: mol_type = other DNA
cccaccgcccggcttttatcagttcaccttatggcgcagaccacggcttaaaagtaacaacctgcctctgccaga

SEQ ID NO: 522014 - DNA, 75 bp, synthetic construct
  source 1..75: mol_type = other DNA
gatgaccgtttcaccttcgacgatatagaggggcgagggtcgtttgtttgtcgcaagtgcccggatgaaaccgac

SEQ ID NO: 522015 - DNA, 75 bp, synthetic construct
  source 1..75: mol_type = other DNA
ccaaagcattgggtatcaatccggtatggcaaaacatggtggctatgatgttgactggtgaactgacctcttcaa

SEQ ID NO: 522016 - DNA, 75 bp, synthetic construct
  source 1..75: mol_type = other DNA
caatcatttctacgagcacgaacaagttgattgcagtagaagtgttaagcagatttcgctccaaagatggtgtcg

SEQ ID NO: 522017 - DNA, 75 bp, synthetic construct
  source 1..75: mol_type = other DNA
cattactttcattctggcggacgatgaccgctacgaaatcgaagaaggttccggcctgttcgttcctaagtttaa

SEQ ID NO: 522018 - DNA, 75 bp, synthetic construct
  source 1..75: mol_type = other DNA
ttgcgcaaaagattaaattcgttgcattacaggaacatgccagcgacagaatcaatatggtcgccgaaaatcgcg

SEQ ID NO: 522019 - DNA, 75 bp, synthetic construct
  source 1..75: mol_type = other DNA
agaatcatcaccatgttggctaagacttgcaatggagctggctgttgttaccgggcagcgagttggtgatttatg

SEQ ID NO: 522020 - DNA, 75 bp, synthetic construct
  source 1..75: mol_type = other DNA
aagcgtatgcggcagcgcgtctggataaaatccgtcgccagaaccggataaaggcagagcttcaggctgtgcttg

SEQ ID NO: 522021 - DNA, 75 bp, synthetic construct
  source 1..75: mol_type = other DNA
ctatgtgaatggtttgctggttactaaaatgaccattccaccgtttatcgctacgttgggactgatgatgtccgt

SEQ ID NO: 522022 - DNA, 75 bp, synthetic construct
  source 1..75: mol_type = other DNA
tcctgatataaaagccagaattgcgaaggccgcattgcaatttattcaccctggtgattgtattttaatggataa

SEQ ID NO: 522023 - DNA, 75 bp, synthetic construct
  source 1..75: mol_type = other DNA
ttttggtgattataaaaagatcattctcgatatacacggggtagttcctgaggaaatgattttccttggtaaaag

SEQ ID NO: 522024 - DNA, 75 bp, synthetic construct
  source 1..75: mol_type = other DNA
cgtgcggacggtctgccttataaagataaaaaccagttggtgacgatggcatcaattatcgaaaaagaaaccgcc

SEQ ID NO: 522025 - DNA, 75 bp, synthetic construct
  source 1..75: mol_type = other DNA
ccggtatgacacggaagggtatgtgacggagcatatttctcagaaggaggaagcgtatgcggcagcgcgtctgga

SEQ ID NO: 522026 - DNA, 75 bp, synthetic construct
  source 1..75: mol_type = other DNA
ggtgggagtatcgtcgtaactttgaatgggcagtttaatgttgggccagtatttgcttacggagcttttcgtcag

SEQ ID NO: 522027 - DNA, 75 bp, synthetic construct
  source 1..75: mol_type = other DNA
aagtccgcaaagcgatgatgcagtggtggtcggattatctggaagcatgccgagaatcttatgcaccgccttata

SEQ ID NO: 522028 - DNA, 75 bp, synthetic construct
  source 1..75: mol_type = other DNA
agcagtaaaagaagttgatgttgcagttcgccgatttgagcaaaatggtatagcgattaaaggtattttactgaa

SEQ ID NO: 522029 - DNA, 75 bp, synthetic construct
  source 1..75: mol_type = other DNA
cttaacgccgtgttccagtttggtgttgataacggttacctggcagataatccgtttaaggggatctcgccatta

SEQ ID NO: 522030 - DNA, 75 bp, synthetic construct
  source 1..75: mol_type = other DNA
aacgttctcctgaaagaaaagtatgttctattatcaccgctattaatggtatcgaaactcatactcccttgaatg

SEQ ID NO: 522031 - DNA, 75 bp, synthetic construct
  source 1..75: mol_type = other DNA
cttcgatggaagtctactcgggaatccacaaagttggcttttgagcctcagtaacgtagattttgaccgagtagt

SEQ ID NO: 522032 - DNA, 75 bp, synthetic construct
  source 1..75: mol_type = other DNA
ggaactggcgcagggacaagctcttgatattgagtatggcgatgagatcgactacagcaaagctcaaccgctgcg

SEQ ID NO: 522033 - DNA, 75 bp, synthetic construct
  source 1..75: mol_type = other DNA
aatactgctgagccttgttcatgcgctgtacgaaggtaatccgcagccggtttttgccaatacggaaaaattgaa

SEQ ID NO: 522034 - DNA, 75 bp, synthetic construct
  source 1..75: mol_type = other DNA
acgtggtgctggtgcgtattccgctctattcgatcacggattggcatcgaagttcgatcagcgattcgcatccat

SEQ ID NO: 522035 - DNA, 75 bp, synthetic construct
  source 1..75: mol_type = other DNA
gttttgaatttcagacctggggtgaaaatagacgtattccggtggatttggatgggttgcgtttggtttcttttc

SEQ ID NO: 522036 - DNA, 75 bp, synthetic construct
  source 1..75: mol_type = other DNA
caaccattgccgcctttttccatgagatgacccaccagcgatatgtcattcctttgctacatcactggatggaat

SEQ ID NO: 522037 - DNA, 75 bp, synthetic construct
  source 1..75: mol_type = other DNA
tgctgccgcagtggaatcaccgcccggtggatttcggcgggatcaccgcgccgtttaacctgcgtcagccggtta

SEQ ID NO: 522038 - DNA, 75 bp, synthetic construct
  source 1..75: mol_type = other DNA
gctgcggtttatcggcaacgacaagtatctgctggatcgcctgagcctgtggcgctttggggtacaggataaaag

SEQ ID NO: 522039 - DNA, 75 bp, synthetic construct
  source 1..75: mol_type = other DNA
tgtagaaattttaaaagaattcaatatatgcccagaaaaggtagcagaatacctaagcgagttcagcggaaaaca

SEQ ID NO: 522040 - DNA, 75 bp, synthetic construct
  source 1..75: mol_type = other DNA
ccgaagcacgttacatacgcgagatgttggtcaaacatcccaatccaatgaagctggatgagatgacagagcggt

SEQ ID NO: 522041 - DNA, 75 bp, synthetic construct
  source 1..75: mol_type = other DNA
ccatcagtcgcgactttacgctgcgttttgccgagcttgaatccaccctttgccgggtgttaaccgatgttattc

SEQ ID NO: 522042 - DNA, 75 bp, synthetic construct
  source 1..75: mol_type = other DNA
gtaaatgggttcccgctttgggataccttgataaagttgaagaaatgattaataaatccagagaaggaaccatta

SEQ ID NO: 522043 - DNA, 75 bp, synthetic construct
  source 1..75: mol_type = other DNA
cgttcgcggagaatgagctgccgccgggaggacgtgaaaaagtgatggcgagctttgagcgtgtactgatgcccg

SEQ ID NO: 522044 - DNA, 75 bp, synthetic construct
  source 1..75: mol_type = other DNA
cgtattctcaatgtcgcaccggatcgccttcacgacgatgaccgggatatatacattcagtcaaaaggccatgct

SEQ ID NO: 522045 - DNA, 75 bp, synthetic construct
  source 1..75: mol_type = other DNA
tcagattgcctttggcaggctctaccgggaaaagctgaaagagcaggttgaggcgctgggctatgaaacggaagt

SEQ ID NO: 522046 - DNA, 75 bp, synthetic construct
  source 1..75: mol_type = other DNA
ggagaatttgttgaagggattagcgacccgaatgattcgaaatggattcccggtcatcatatctcctcaaatgaa

SEQ ID NO: 522047 - DNA, 75 bp, synthetic construct
  source 1..75: mol_type = other DNA
gcaggctacgacgaagatgattttaaaaaacctgttcgcgtaaatttgcccgttgttgatgaccttccgccagaa

SEQ ID NO: 522048 - DNA, 75 bp, synthetic construct
  source 1..75: mol_type = other DNA
agaaggaaaacaggatgatgaagaaaaaccgcaaccatcttgcgcaatggcagatgaacaggcaacggctgaaac

SEQ ID NO: 522049 - DNA, 75 bp, synthetic construct
  source 1..75: mol_type = other DNA
gtgcaacgctgtctattgctggtaccgaagtggcaaaagagttgcagttaagtgcggtttcgatgggttacatct

SEQ ID NO: 522050 - DNA, 75 bp, synthetic construct
  source 1..75: mol_type = other DNA
ccggattgcccgtgataatcctggcagcggtgtggtggtgagaattgccggtgaaggtcgtccgtggaatcccgg

SEQ ID NO: 522051 - DNA, 75 bp, synthetic construct
  source 1..75: mol_type = other DNA
tgctgacaaaagagtggatgaagggtaatcgtgtttcacacatcactcgcacggcttccggtgctaatgctggcg

SEQ ID NO: 522052 - DNA, 75 bp, synthetic construct
  source 1..75: mol_type = other DNA
gattgccgggcaggagcgtgaccgggctgccataactgaacgggaagccgcgctgccggagagtgtgctgcgtga

SEQ ID NO: 522053 - DNA, 75 bp, synthetic construct
  source 1..75: mol_type = other DNA
gggatcgaggtcacccccgcgcacgtcactgaatatctgaacaaagtactgactgaaactgatcatgccaaccct

SEQ ID NO: 522054 - DNA, 75 bp, synthetic construct
  source 1..75: mol_type = other DNA
aaagtgccggactcccgaacaaggagtgcaccgaaggcgatcaacatgccaatggcaataatgaaacaggcgaga

SEQ ID NO: 522055 - DNA, 75 bp, synthetic construct
  source 1..75: mol_type = other DNA
cactgcactgcgaagcaaaaaacgataaagtcagaaaacgccttggcatcaaaggcggttttttctgggctgata

SEQ ID NO: 522056 - DNA, 75 bp, synthetic construct
  source 1..75: mol_type = other DNA
tgatggagagagtacccggcgaactcatggagacgttaacgtcgggacagcgtgccgccacccgtatgatactgg

SEQ ID NO: 522057 - DNA, 75 bp, synthetic construct
  source 1..75: mol_type = other DNA
aaactccggtgaattgtttgttcaggtctggggaaatggagccaacttcgacaacgtgattttgcgccgttcata

SEQ ID NO: 522058 - DNA, 75 bp, synthetic construct
  source 1..75: mol_type = other DNA
ctttaatggccccctttgtcacaggatacgtcaatgctcattatcacccctgcagtaataacaaaggaattttcc

SEQ ID NO: 522059 - DNA, 75 bp, synthetic construct
  source 1..75: mol_type = other DNA
ccttatgccaccggtgctcacgcatgggaaatgagcgttgtcagagtgcgccgaagctggtggaaaaaacatcgg

SEQ ID NO: 522060 - DNA, 75 bp, synthetic construct
  source 1..75: mol_type = other DNA
gcgtagcgtcagcgtgggttggcttcatagtgaacaagagtgtattgcgcgtatcgaatcggcggtaagtcaggg

SEQ ID NO: 522061 - DNA, 75 bp, synthetic construct
  source 1..75: mol_type = other DNA
gaaatgcatcgcctggatccggaattctgtcgatgacgctattaaggtttatcgtcagttacttggcgggccata

SEQ ID NO: 522062 - DNA, 75 bp, synthetic construct
  source 1..75: mol_type = other DNA
tattcgtccctttattaacatggtggagatccccagacaggtgatgtttaccgtgtatgtgacatcaacgcctta

SEQ ID NO: 522063 - DNA, 75 bp, synthetic construct
  source 1..75: mol_type = other DNA
tgattacccctggctgacgcatgtcacgaaaaccgatgtacattcgcaccgggtagcgacgcgcaaagaagttga

SEQ ID NO: 522064 - DNA, 75 bp, synthetic construct
  source 1..75: mol_type = other DNA
aaaacatcgggatgagttttctttactggaaggggatgcgttcaggcagtggtgcattgaacagcggcaagatcc

SEQ ID NO: 522065 - DNA, 75 bp, synthetic construct
  source 1..75: mol_type = other DNA
cattggttcagattcaaaccttgatttcttgtttaagaaaatatcgaacaacattgactccatagctgatgctgt

SEQ ID NO: 522066 - DNA, 75 bp, synthetic construct
  source 1..75: mol_type = other DNA
gtaaactccgtgctcagtaaagttgcaaaatcgtggaattatgatgttgtacatataagaattagcgatttaatg

SEQ ID NO: 522067 - DNA, 75 bp, synthetic construct
  source 1..75: mol_type = other DNA
gtaaagaaaagaatgagtccacgtcgtaacgacaataatgtccatgataagacgttcagggatggctcgttcctt

SEQ ID NO: 522068 - DNA, 75 bp, synthetic construct
  source 1..75: mol_type = other DNA
aatcactctggtctggtgatttagtcgggtcagaagaaccggatgaacaaacgttcagtcagggatgtgcggcct

SEQ ID NO: 522069 - DNA, 75 bp, synthetic construct
  source 1..75: mol_type = other DNA
tgctcgatgagagctcaatggtgggcaataccgacatggcacgggcatacgccctgattgcggccggtggtggtc

SEQ ID NO: 522070 - DNA, 75 bp, synthetic construct
  source 1..75: mol_type = other DNA
tgtcggcgttttgttcgcctatggtgggtagccaggttcagcgcgataaagggtacgaaacaagcattattcgcc

SEQ ID NO: 522071 - DNA, 75 bp, synthetic construct
  source 1..75: mol_type = other DNA
gtctggttgatagtgttggtaatgactccaacttactgatagtgttttatgttcagataatgcccgatgaccttg

SEQ ID NO: 522072 - DNA, 75 bp, synthetic construct
  source 1..75: mol_type = other DNA
gaaaaattaggggcttatctctttatgcagtcttttgttcaagactgtacaattcagggaggtagttgtcctgga

SEQ ID NO: 522073 - DNA, 75 bp, synthetic construct
  source 1..75: mol_type = other DNA
gctggcttatatcggtctgaaggaccgcttcgcccatgccagacagttcgccgcttttgcgggtctgacaccacg

SEQ ID NO: 522074 - DNA, 75 bp, synthetic construct
  source 1..75: mol_type = other DNA
atgcaggccgaagcattcatcgctgctcatctggaagaggccggagtaagcaaaaacgggaacgattggctccaa

SEQ ID NO: 522075 - DNA, 75 bp, synthetic construct
  source 1..75: mol_type = other DNA
aaaaccgtccggaagtgggtaatgactccaacttattgatagtgttttatgttcagataatgcccgatgactttg

SEQ ID NO: 522076 - DNA, 75 bp, synthetic construct
  source 1..75: mol_type = other DNA
gatttaaccacacgcgaagcggtggtaaaccgtccggaagtgcatcgtcggtatggtaatgactcgaacttattg

SEQ ID NO: 522077 - DNA, 75 bp, synthetic construct
  source 1..75: mol_type = other DNA
ccgggcatcatatgaccgccaagcatcgtgccgtgtggatcggaaacgcagagatgaagatgctcaccactctgt

SEQ ID NO: 522078 - DNA, 75 bp, synthetic construct
  source 1..75: mol_type = other DNA
gaagataatagcgtagggaaaccatcaggtagcatcagacgtggcttaacagaatcgatgattgccttggctgtt

SEQ ID NO: 522079 - DNA, 75 bp, synthetic construct
  source 1..75: mol_type = other DNA
ttaaggcgcttaatgcccatagccccaaactataaaccacaatgggctgaacatgtttcatctgagcttattgcc

SEQ ID NO: 522080 - DNA, 75 bp, synthetic construct
  source 1..75: mol_type = other DNA
gctatccacttacgcaaaaggattcgtatttgatgcaggtgagcattaccgaatttctgtgtgcgtaactaggcc

SEQ ID NO: 522081 - DNA, 75 bp, synthetic construct
  source 1..75: mol_type = other DNA
atgctattgatcgcgggtgcattaacaaacatatcccgagatttgtatgaggctagtgaggtcgatggcgcaact

SEQ ID NO: 522082 - DNA, 75 bp, synthetic construct
  source 1..75: mol_type = other DNA
tatacgcccatgacacaggatttcgcggaacacctgtacccggcgcttgttcttgactacatagatgataagaca

SEQ ID NO: 522083 - DNA, 75 bp, synthetic construct
  source 1..75: mol_type = other DNA
tcaacaattacgctgcactccgattttggtcttgctttagcgcgatcctcaacaaagtgtgggcataaacatttt

SEQ ID NO: 522084 - DNA, 75 bp, synthetic construct
  source 1..75: mol_type = other DNA
cggttaatggtggcaatctttatagggttggtgaacacggagtaccagaactatttaccaccactggcgggaaac

SEQ ID NO: 522085 - DNA, 75 bp, synthetic construct
  source 1..75: mol_type = other DNA
cagggttgttctctccacaatggaataaccgttatggcgaaccgcgcaatgtgatgtttacattgaaggctgatt

SEQ ID NO: 522086 - DNA, 75 bp, synthetic construct
  source 1..75: mol_type = other DNA
aacctcattttatttttcattacacaattaaactaaatatctatggatctatagctgctggtattacgaattgta

SEQ ID NO: 522087 - DNA, 75 bp, synthetic construct
  source 1..75: mol_type = other DNA
cggtagagttattcctaatcgtgatattggcggcggtggcggcatcacactgaacgtaacaaacaacatccaggc

SEQ ID NO: 522088 - DNA, 75 bp, synthetic construct
  source 1..75: mol_type = other DNA
agacgtctggaagacaccatgaagcgtgtagctatgggcgtttgcagacaggaatcaaccaggccggggggaatg

SEQ ID NO: 522089 - DNA, 75 bp, synthetic construct
  source 1..75: mol_type = other DNA
ggcggcattaacggcctgattagtgacatggctgatggcctgagtggtggcgctacaaatgccgtggttggcctg

SEQ ID NO: 522090 - DNA, 75 bp, synthetic construct
  source 1..75: mol_type = other DNA
agccgggcagcgtgagcgggtggctgaactggtcatgatggcccgggagcaggggcgggaagtgcagattatcgc

SEQ ID NO: 522091 - DNA, 75 bp, synthetic construct
  source 1..75: mol_type = other DNA
gagctacataaacgattacggtgggcgcccagtcttacaatttagctgcagtgaagatcgttgtacggcggtgaa

SEQ ID NO: 522092 - DNA, 75 bp, synthetic construct
  source 1..75: mol_type = other DNA
ccgggcgagtaccggtaagcagtacatgattccaggggataatggacgggtcatcagcaataaggatatgtcttc

SEQ ID NO: 522093 - DNA, 75 bp, synthetic construct
  source 1..75: mol_type = other DNA
taataaaaatatataagaaaataagacctgattttatttttcattacacaatcaaactaaatatatatggatcta

SEQ ID NO: 522094 - DNA, 75 bp, synthetic construct
  source 1..75: mol_type = other DNA
gcagagcgctgcacaaatgcgccatgttcgcggtgcggatatggcgatgatatttcaggagccgatgacatcgct

SEQ ID NO: 522095 - DNA, 75 bp, synthetic construct
  source 1..75: mol_type = other DNA
cgataacactgctgatatcgccactaacaccacggatattgcaaccaacactgccaatatcgccactaacactac

SEQ ID NO: 522096 - DNA, 75 bp, synthetic construct
  source 1..75: mol_type = other DNA
atcgttcaacttcaattcctgctgatccggagcatacagtaaaaagaagctctcagaaaaagacttttattatta

SEQ ID NO: 522097 - DNA, 60 bp, synthetic construct
  source 1..60: mol_type = other DNA
gtaatgaattacgtgttcactcttgagacttggtattcatttttcgtcttgcgacgttaa

SEQ ID NO: 522098 - DNA, 75 bp, synthetic construct
  source 1..75: mol_type = other DNA
tggtggcgaataccctaatagcggatattcgtctggtacttatgcaggacatttgactgtatcattttacagcaa

SEQ ID NO: 522099 - DNA, 75 bp, synthetic construct
  source 1..75: mol_type = other DNA
ttgtattaattgcaggaacttccggagtggtaaatgcaggaaactggcaatataaatctctggatgtaaatgtaa

SEQ ID NO: 522100 - DNA, 75 bp, synthetic construct
  source 1..75: mol_type = other DNA
cctggctttgtctgcggatgaacacaataaaaataccagtatgacgcatgtcatttctgattacaggatgtcact

SEQ ID NO: 522101 - DNA, 75 bp, synthetic construct
  source 1..75: mol_type = other DNA
gcgcaggtgctggacaaaatggcctacctgacgatatggcagggcgatgacgtacagcgccgggtgaaaggtatg

SEQ ID NO: 522102 - DNA, 75 bp, synthetic construct
  source 1..75: mol_type = other DNA
taacaataatgtcggcggcgcagctccagggaaaagctatcgtagctacgggcaactggaagccgagtaccgcat

SEQ ID NO: 522103 - DNA, 75 bp, synthetic construct
  source 1..75: mol_type = other DNA
aaaattgctcttattattcgagcggatccgttcattgaactgccaatagcttacatcctagaacttcccgagcag

SEQ ID NO: 522104 - DNA, 75 bp, synthetic construct
  source 1..75: mol_type = other DNA
gcaactagccgttttgaatatgatgatgtttgtagtgaagttcttagcatgtctaatgatgtttctcagtcgaaa

SEQ ID NO: 522105 - DNA, 75 bp, synthetic construct
  source 1..75: mol_type = other DNA
aaatcttactttcctatggttgctaatgttagagtccttgatacagatggtgaagttgttactgaactttaccaa

SEQ ID NO: 522106 - DNA, 75 bp, synthetic construct
  source 1..75: mol_type = other DNA
gtaaggtactggaaggaaaacgttttctgtacgaactgccttggttcatggttatcggtagccccggcgacggta

SEQ ID NO: 522107 - DNA, 75 bp, synthetic construct
  source 1..75: mol_type = other DNA
tgttatcgtggccagtggcttgattgatgcccatgccggtggcgtggcgctggctggcgctcacccatcaggaac

SEQ ID NO: 522108 - DNA, 75 bp, synthetic construct
  source 1..75: mol_type = other DNA
tgcaaaactatcagaaaaaaggatagctctggtcggttgtggaacaatcggagggtatcttgcagagttattact

SEQ ID NO: 522109 - DNA, 75 bp, synthetic construct
  source 1..75: mol_type = other DNA
agctgagccgagagcaggctattctgaatgcgcagcagtcgctcgggaaaggtgccaccaaagagcagatagcac

SEQ ID NO: 522110 - DNA, 75 bp, synthetic construct
  source 1..75: mol_type = other DNA
cgaaactccggtcaccgacgctctcctggctgaagtacgtgcgcaggcgtttaatgacctttgctcggtgttcgt

SEQ ID NO: 522111 - DNA, 75 bp, synthetic construct
  source 1..75: mol_type = other DNA
gtggaatgactatcgcgcaaagtctctgcaatcagacaccccagccaccgatgctttcctgactgaaattgaacg

SEQ ID NO: 522112 - DNA, 75 bp, synthetic construct
  source 1..75: mol_type = other DNA
ataattatattgatgatttacattttgataattctcccttgaagagatttacgtttgatgattatgctgtaaaac

SEQ ID NO: 522113 - DNA, 75 bp, synthetic construct
  source 1..75: mol_type = other DNA
tgatgctgatacctgcactggcgcaggctgcagaccagaacacaaccgtgacggacgcgtcccgtacggatacgt

SEQ ID NO: 522114 - DNA, 75 bp, synthetic construct
  source 1..75: mol_type = other DNA
tgatgctgatcgtaagatatggatcgcacgtaatattattaatgcgttaaagaatgatgaaatatgtgtatatta

SEQ ID NO: 522115 - DNA, 75 bp, synthetic construct
  source 1..75: mol_type = other DNA
gaccaccagagagcgattgagtcaattaagcaggctgatgcggctgttaagttggcacacgagaagttttcggcg

SEQ ID NO: 522116 - DNA, 75 bp, synthetic construct
  source 1..75: mol_type = other DNA
aaaaacatcagtgacgcgatgcgtaatattctggattggttcgaacggtatcccgatattgtacaaaatataacc

SEQ ID NO: 522117 - DNA, 75 bp, synthetic construct
  source 1..75: mol_type = other DNA
gggaggatttacaaaaaaactatcaggaaataaatacttccattaaagattacgatgacttattgcgagaaatta

SEQ ID NO: 522118 - DNA, 75 bp, synthetic construct
  source 1..75: mol_type = other DNA
tttactaaaaaactatcaggaaataagagcttccattaaagattacgatgacttattgcgagaaattaaagagtt

SEQ ID NO: 522119 - DNA, 75 bp, synthetic construct
  source 1..75: mol_type = other DNA
ttatccagtgcatttgcaattaacaggcaggatttattaaaaaactatcaggaaataaacgcttccattaaagat

SEQ ID NO: 522120 - DNA, 75 bp, synthetic construct
  source 1..75: mol_type = other DNA
ggaaatcattccatcggcagatataaagatgtctactgatgattcagccaaatttattcgacaaaaaaagcaaga

SEQ ID NO: 522121 - DNA, 75 bp, synthetic construct
  source 1..75: mol_type = other DNA
ttacgacgctgattaaaaataaaattcctattattaatacaacaatcaatttatcatcgttgtctaaggatgttt

SEQ ID NO: 522122 - DNA, 75 bp, synthetic construct
  source 1..75: mol_type = other DNA
tatctggtcgacagccagggcagtgatgatgcgcttcgcagctgggcgcgggaccatcacattcccgtggaaaag

SEQ ID NO: 522123 - DNA, 75 bp, synthetic construct
  source 1..75: mol_type = other DNA
gcatcgtttatgaagtcagcgccaatattgagccgctgctgcagggcggtaaacaggccattgatgctctggata

SEQ ID NO: 522124 - DNA, 75 bp, synthetic construct
  source 1..75: mol_type = other DNA
atcttcttatttttttctaggtagaaaaaaaacattgataaacttttacctcttaataaacaaagtggtatggac

SEQ ID NO: 522125 - DNA, 75 bp, synthetic construct
  source 1..75: mol_type = other DNA
ggcttttgcttctgattctcccttaccctggttgggcgataactggtacaaaattaacgactatcttgccgcgaa

SEQ ID NO: 522126 - DNA, 75 bp, synthetic construct
  source 1..75: mol_type = other DNA
agctgagccgcgagcaggccatcctggctgcgcagcagtcgcttggaaaaggtgccaccaaagagcaaatagctc

SEQ ID NO: 522127 - DNA, 75 bp, synthetic construct
  source 1..75: mol_type = other DNA
ctgtcgaaactacagggcgaggcccgcgcgcggctgcaggcgcaatacgctgccgaagatgccgggtttgcgaag

SEQ ID NO: 522128 - DNA, 75 bp, synthetic construct
  source 1..75: mol_type = other DNA
ggtgcagggtgggcagtctgcgctggtggcgttcgctcagcagggttcacagcttgccggtgcatttggccctgg

SEQ ID NO: 522129 - DNA, 75 bp, synthetic construct
  source 1..75: mol_type = other DNA
ggaacaatcagcagaatatctatcaccgttggttgaaaggtgaaacgaaagcgcaaagggaaaaaattcagaaac

SEQ ID NO: 522130 - DNA, 75 bp, synthetic construct
  source 1..75: mol_type = other DNA
gattgaaatacgcgagctgaagaaaagacttcaacgcgttgaaatggaaagggatatattaaaaaaggctaccgc

SEQ ID NO: 522131 - DNA, 75 bp, synthetic construct
  source 1..75: mol_type = other DNA
tacacggttgcagccgctgctacggcaatgaatgtcggtaaatccacgatggataagtgggtccgccagttgaaa

SEQ ID NO: 522132 - DNA, 75 bp, synthetic construct
  source 1..75: mol_type = other DNA
gaaagccagaatggaacagcagatgcatgaatggttcggacgcataccgaagttcatcatcacgctggcggccga

SEQ ID NO: 522133 - DNA, 75 bp, synthetic construct
  source 1..75: mol_type = other DNA
ccagaccatgagcatctgatcgatgcggatctctgcttcatgtgggcgtcagactcgttcgcgaagaaagggcgc

SEQ ID NO: 522134 - DNA, 75 bp, synthetic construct
  source 1..75: mol_type = other DNA
gtcgttgcctgcggcaacgctctctcgctggcgctcaagtcgaaccttggtcgaagcttctcatccttccccgct

SEQ ID NO: 522135 - DNA, 75 bp, synthetic construct
  source 1..75: mol_type = other DNA
gcaaagcgttatcagttgccgctgaaccttccgagcctgccgagtccgttgcgccgggcggcggtttccatcgcg

SEQ ID NO: 522136 - DNA, 75 bp, synthetic construct
  source 1..75: mol_type = other DNA
atactgtttttattacttccaatggaacaatctacgatatttagatagcggctctgcacaatcacaaatcacaat

SEQ ID NO: 522137 - DNA, 75 bp, synthetic construct
  source 1..75: mol_type = other DNA
aagaactttcgagtctgtaaacttgaagtttccttctttaaactcaattgagaaatttaatgaagaaatatctcc

SEQ ID NO: 522138 - DNA, 75 bp, synthetic construct
  source 1..75: mol_type = other DNA
gctggtgctgtggttacaaaagatgtaccggataacgttatagtaattggcaatccggcaataatccttaagaaa

SEQ ID NO: 522139 - DNA, 75 bp, synthetic construct
  source 1..75: mol_type = other DNA
ggtaatagagttacaataaagtctggcgtatatatttgggatggtgtaactatagaggatgatgtttttattggt

SEQ ID NO: 522140 - DNA, 75 bp, synthetic construct
  source 1..75: mol_type = other DNA
ttcctgatgatgttattgttattggaaatccggctaaaataatacgatctatatcaagcgattatccatctaaaa

SEQ ID NO: 522141 - DNA, 75 bp, synthetic construct
  source 1..75: mol_type = other DNA
gcacaataagtggttgcgtgattaagcctcaacccgctggtgtgcttttctgcgatgcggctacaccgctataca

SEQ ID NO: 522142 - DNA, 75 bp, synthetic construct
  source 1..75: mol_type = other DNA
gtggaatcccggtgccatcaccggtggtcgcgtgtggggggatatcccggacaacagcgtccagccgggggccgg

SEQ ID NO: 522143 - DNA, 75 bp, synthetic construct
  source 1..75: mol_type = other DNA
ggctctcgaaaaccttggtttgggagaagcagctaaaaggaatgtaggtacaggggcgaatcagatacctgatat

SEQ ID NO: 522144 - DNA, 75 bp, synthetic construct
  source 1..75: mol_type = other DNA
tagatgaagttgttgaatacttcattgattatagaggaaaaactcctgataaaaaagattcaggtataccactca

SEQ ID NO: 522145 - DNA, 75 bp, synthetic construct
  source 1..75: mol_type = other DNA
tggtttgatgtggatagcaatgatgaatggcaagaaaaaaatgtcctagatatattcacattagttggaggtgga

SEQ ID NO: 522146 - DNA, 75 bp, synthetic construct
  source 1..75: mol_type = other DNA
agagactgaaagagaggtgctttttcacaatatgataggggagcgattgtgtggatggggcagaaaaacaccata

SEQ ID NO: 522147 - DNA, 75 bp, synthetic construct
  source 1..75: mol_type = other DNA
gtaaaattgacactgacccggtaaatcctgaaaaccagattcaggtttatgtggagaacgaagacggctctcacg

SEQ ID NO: 522148 - DNA, 75 bp, synthetic construct
  source 1..75: mol_type = other DNA
attccgggtgatggtcgcactctggttgttcacttcgacaaattcggcaatgtcgaattcaccgaaaccgttcct

SEQ ID NO: 522149 - DNA, 75 bp, synthetic construct
  source 1..75: mol_type = other DNA
atactgatatttcagatgtatcgcgtgagttaattgcggcaattaaacagggatatctcacagtaaaagccgccg

SEQ ID NO: 522150 - DNA, 75 bp, synthetic construct
  source 1..75: mol_type = other DNA
aaacaactgggatggtcagaacgatacgctgccttcaattcttgatgccgctcttgccgggtccgggatccgcat

SEQ ID NO: 522151 - DNA, 75 bp, synthetic construct
  source 1..75: mol_type = other DNA
acatccgcaaggtatgggagtaaccgggctgctcaagagcgagttgtttggcctctcgtccacgctggatattga

SEQ ID NO: 522152 - DNA, 75 bp, synthetic construct
  source 1..75: mol_type = other DNA
accggcaagtccaacttgatcgaagcgctgatcaccatcttccgtgatgtcgacctggatcgtgaagctgcgttc

SEQ ID NO: 522153 - DNA, 75 bp, synthetic construct
  source 1..75: mol_type = other DNA
tggtgtggcacagatgctggcccgaagccaaaaacaccggaatacagggcaacggataacggtaaacagaacacg

SEQ ID NO: 522154 - DNA, 75 bp, synthetic construct
  source 1..75: mol_type = other DNA
cgtggtgtctatctcacctcttcgcttcagcgtgggcagatggatgatatattcacccagtctgccgcccgccag

SEQ ID NO: 522155 - DNA, 75 bp, synthetic construct
  source 1..75: mol_type = other DNA
tggtcgctcagactcacacccgcgcgtctttattcagtttttcccgccagatgcagggaagccgtgaaccgctgg

SEQ ID NO: 522156 - DNA, 75 bp, synthetic construct
  source 1..75: mol_type = other DNA
gcctgacttgtttggctgctgacttcgttaatggtactggctataaatttaaagattgtactggagtgaatctat

SEQ ID NO: 522157 - DNA, 75 bp, synthetic construct
  source 1..75: mol_type = other DNA
aggtttacatcagaatttaattaaatcagactggaatgataaatttgacaggggatatttaaaaggtaaacgcat

SEQ ID NO: 522158 - DNA, 75 bp, synthetic construct
  source 1..75: mol_type = other DNA
gtctgtgaggcttttacccggtcaaaacagcgttacggtgctccacgcctgacggatgaactgtgcgctcagggt

SEQ ID NO: 522159 - DNA, 75 bp, synthetic construct
  source 1..75: mol_type = other DNA
tacagatgaaggctggctgtatctggcagtggtcattgacctgtggtcacgtggcgtcattggctggtcaatgtc

SEQ ID NO: 522160 - DNA, 75 bp, synthetic construct
  source 1..75: mol_type = other DNA
agcagtaaacttattaaccatattaatggttatctggctgaaatatcagatcacaaattctataagtggttacag

SEQ ID NO: 522161 - DNA, 75 bp, synthetic construct
  source 1..75: mol_type = other DNA
aggataaatttattggcagtatttacaatgtcaatattgagattggtcaatatctgccggattggagaccgtcaa

SEQ ID NO: 522162 - DNA, 75 bp, synthetic construct
  source 1..75: mol_type = other DNA
gacggcaatgatagcgccacaatgaccgcgacagtccgggatgcaaaaggcaacctgctcaatgacgtcaaggtc

SEQ ID NO: 522163 - DNA, 75 bp, synthetic construct
  source 1..75: mol_type = other DNA
gaaaacggatgattaccgcataaccatcgattatctccgaacccgtcctgttgatttaatcattatggatataga

SEQ ID NO: 522164 - DNA, 75 bp, synthetic construct
  source 1..75: mol_type = other DNA
aaacaagaccattaactgtgcgtgagtatgcaagaatacagaccttccccgatgactgggtatttgaaggcccaa

SEQ ID NO: 522165 - DNA, 75 bp, synthetic construct
  source 1..75: mol_type = other DNA
tacgatagcgacgtgccagaatctgaaggacaaaaatatcccaaaagaaaagcagagatcctaagtatggttcct

SEQ ID NO: 522166 - DNA, 75 bp, synthetic construct
  source 1..75: mol_type = other DNA
ctactcgaattaagtcatgagctggattatgcgcaatggctatttggtgaactgaaacttgtgaattcagtgcta

SEQ ID NO: 522167 - DNA, 75 bp, synthetic construct
  source 1..75: mol_type = other DNA
ttgtctgtgatttaaacacaacaccatcagccacattggatgatatcgacacattcataagaaagatggatatga

SEQ ID NO: 522168 - DNA, 75 bp, synthetic construct
  source 1..75: mol_type = other DNA
aaatacttttagaaacatctaatgaaaatggtggtaattatttataccttaaagagtgcgagggtcatgaacacc

SEQ ID NO: 522169 - DNA, 75 bp, synthetic construct
  source 1..75: mol_type = other DNA
atgaccttactgacacctgaaaacgtggcagcggctagggctgcccgtagcgcgaggattgaacactggaaagcc

SEQ ID NO: 522170 - DNA, 75 bp, synthetic construct
  source 1..75: mol_type = other DNA
taaagaaattgccgataagttattacttagcaataaaacagttagtgcgcataaatctaaggaaggtgcgaacaa

SEQ ID NO: 522171 - DNA, 75 bp, synthetic construct
  source 1..75: mol_type = other DNA
atgaatcatcgtatgcttttttttctctcagtaattgtgataacagttggtcttgctggcatttttatgcaaaag

SEQ ID NO: 522172 - DNA, 75 bp, synthetic construct
  source 1..75: mol_type = other DNA
tttgagggaaacgctccggcggcctgtctttttgagggatcgctttgtcacgtcggatatttcactgaacatgct

SEQ ID NO: 522173 - DNA, 75 bp, synthetic construct
  source 1..75: mol_type = other DNA
cacatgccgccacctttgaaaacagctacgtcgggagtatgccctgcatgcccgcccggcgagagctgcataccg

SEQ ID NO: 522174 - DNA, 75 bp, synthetic construct
  source 1..75: mol_type = other DNA
gttatcccaacgaggtgctcacggaatattcgacggcgcagtggacgttggcagaggtgatcgctcagtgcaata

SEQ ID NO: 522175 - DNA, 75 bp, synthetic construct
  source 1..75: mol_type = other DNA
tgaatgcagagcggctgttcagtacggcacgggaactgcgggacgtggcggcaggccgtgccgttctccgtcagg

SEQ ID NO: 522176 - DNA, 75 bp, synthetic construct
  source 1..75: mol_type = other DNA
atgaacggtcatataggagaactggataaattagttccccatcttattacggagcataaaatatatggaagagat

SEQ ID NO: 522177 - DNA, 75 bp, synthetic construct
  source 1..75: mol_type = other DNA
atgcctacaattctcatcacagctctcccaatagtcgcatttatccgttacctcaacgtgttacttaacgattac

SEQ ID NO: 522178 - DNA, 75 bp, synthetic construct
  source 1..75: mol_type = other DNA
caactggttatttgggaagcgcagtttggtgactttgccaacggcgctcaggttgctattgaccagtttatctcg

SEQ ID NO: 522179 - DNA, 75 bp, synthetic construct
  source 1..75: mol_type = other DNA
agacatggttaccacacctaatttgccatcacttaaatcacttaagagcctcaagcctctaaaatcgctaacgga

SEQ ID NO: 522180 - DNA, 75 bp, synthetic construct
  source 1..75: mol_type = other DNA
attgaatgtgtgcaaaatcagacagttccgcaaaccgccggcgaacaggccgtgctggcgcaacgtatcgttgac

SEQ ID NO: 522181 - DNA, 75 bp, synthetic construct
  source 1..75: mol_type = other DNA
ctgcgttagcaccaaaagtgaaggctgagatgatgaagctgagcgagcaattagctgacttgcctgaagaaagac

SEQ ID NO: 522182 - DNA, 75 bp, synthetic construct
  source 1..75: mol_type = other DNA
gtttgggcatttgctgttcgatctgcaaaacgatccgcagcagttgcatcctattgatgatgatgcgatcgaggc

SEQ ID NO: 522183 - DNA, 75 bp, synthetic construct
  source 1..75: mol_type = other DNA
tggccgatgatgctgagtggctattctataatgctagttttggcatgcagcatcccatacttcacgcgataatgt

SEQ ID NO: 522184 - DNA, 75 bp, synthetic construct
  source 1..75: mol_type = other DNA
ccagttctcttatgctgatatggaatctttttcatattcaacctcaccaggggcaaacaatacattgaaggctgt

SEQ ID NO: 522185 - DNA, 75 bp, synthetic construct
  source 1..75: mol_type = other DNA
atttagataacacgttagcatcaacaagtaagctaaaagatattagagagcgtggggcttatgatgaaataacag

SEQ ID NO: 522186 - DNA, 75 bp, synthetic construct
  source 1..75: mol_type = other DNA
taatcagacatgcagtattccatatacacttggaaataaaaattcggcgggactatatgtctccacctttagatg

SEQ ID NO: 522187 - DNA, 75 bp, synthetic construct
  source 1..75: mol_type = other DNA
ggcatatggcggaaaggttacgatagagaaagttcgtatcagaaatcctacacatatgctgaaagggatatccgg

SEQ ID NO: 522188 - DNA, 75 bp, synthetic construct
  source 1..75: mol_type = other DNA
gatgaggatggtagtgctgttcgggtaaggtataagaatttattgagtgaaacaaatacgacttttgatattgca

SEQ ID NO: 522189 - DNA, 75 bp, synthetic construct
  source 1..75: mol_type = other DNA
tttactgacctgaacaggcaattacaggagttgtacagcaccagggaaccgtcggtctataaaaaatgcctgatt

SEQ ID NO: 522190 - DNA, 75 bp, synthetic construct
  source 1..75: mol_type = other DNA
cggtgaggatggtgagcccacaggcctgaatgccgggcgttatgagttctggctctatcgtcagataagaaagcg

SEQ ID NO: 522191 - DNA, 75 bp, synthetic construct
  source 1..75: mol_type = other DNA
acgtacaacaatgattactattatttatatctgaagccgggtgttaatataggaagctggagactacgaaactct

SEQ ID NO: 522192 - DNA, 75 bp, synthetic construct
  source 1..75: mol_type = other DNA
tcgttattggcgctggtggcgcggcagttgcagcagggaatgcaggggatggcggtgatgggggagacactacca

SEQ ID NO: 522193 - DNA, 75 bp, synthetic construct
  source 1..75: mol_type = other DNA
ttatgagcctgacgggccgacgaaccttctggcatgggaaggcttaagaacaaagagttgccgccttcactgcat

SEQ ID NO: 522194 - DNA, 75 bp, synthetic construct
  source 1..75: mol_type = other DNA
acaaattgccacccatacacatggccacatctgagctttcatccggcatctattgtttgcgttcgcgccagtcgc

SEQ ID NO: 522195 - DNA, 75 bp, synthetic construct
  source 1..75: mol_type = other DNA
agttagagagcaatctggcagagctgcgtggcggcagcgattacgcgcaacgtaaaatcaagatagccgctgccc

SEQ ID NO: 522196 - DNA, 75 bp, synthetic construct
  source 1..75: mol_type = other DNA
ggcgcaggggtcaggcagcagccaggcgttgacgcaggtgcgtcgctgggacagcgcctgtcagaaattacccga

SEQ ID NO: 522197 - DNA, 75 bp, synthetic construct
  source 1..75: mol_type = other DNA
gacgaccggaatgggataaagccagcgcgatgtttgtcagcaatgttcagccttatgaagagatgaagttacgca

SEQ ID NO: 522198 - DNA, 75 bp, synthetic construct
  source 1..75: mol_type = other DNA
cagtgtatggtgaaaaatcaggtagtgtaactttttcagctgctcctgcgagccttactggagctcgcccagccc

SEQ ID NO: 522199 - DNA, 75 bp, synthetic construct
  source 1..75: mol_type = other DNA
gtaacggcaagtccgccggtatctggctgaacccgctgaccacggatgacggaaacgggctgcggggattcagcg

SEQ ID NO: 522200 - DNA, 75 bp, synthetic construct
  source 1..75: mol_type = other DNA
ggcaataccgacatggcacgggcatacgccctgattgcggccggtggcggtcgtgccgtggccagcggtgacacg

SEQ ID NO: 522201 - DNA, 75 bp, synthetic construct
  source 1..75: mol_type = other DNA
agtggtgtggtggtgagaattgccggtgaaggtcgcccgtggaatcccggtgccatcaccggtggtcgcgtgtgg

SEQ ID NO: 522202 - DNA, 75 bp, synthetic construct
  source 1..75: mol_type = other DNA
agcagggatgacgggctgataaccctgcaggatgcggaaggtaacacgcggctgatttcgccccgggaggcggtg

SEQ ID NO: 522203 - DNA, 75 bp, synthetic construct
  source 1..75: mol_type = other DNA
aaatcagaaattaaggcagcttatgacaacgcaaagcgagcactgtcgggcggcctggtcaaaacaaaagaacaa

SEQ ID NO: 522204 - DNA, 75 bp, synthetic construct
  source 1..75: mol_type = other DNA
tcgttgacgttcattccagcgattttactgatgatgaccagtttcacccgcatcattattgtttttggtttattg

SEQ ID NO: 522205 - DNA, 75 bp, synthetic construct
  source 1..75: mol_type = other DNA
tcccgccgtaaagccgaagtcggagatattgcacaaatggcagccagccagaaagcgcggttgctttcatctcga

SEQ ID NO: 522206 - DNA, 75 bp, synthetic construct
  source 1..75: mol_type = other DNA
taaagcaacagacggatccggttattgagttttgccagttcctgaattttctggaggaagcgcgcggcctgatga

SEQ ID NO: 522207 - DNA, 75 bp, synthetic construct
  source 1..75: mol_type = other DNA
agcgcgggcgcgataatgtcccggcccctgctgcagaaccagcacggctgtgaaattctgaataagataataaat

SEQ ID NO: 522208 - DNA, 75 bp, synthetic construct
  source 1..75: mol_type = other DNA
tgccaataacgttgctgctgttgttactgaacgcgatgctaactggtggtcgttacggggtcaaagtctgcagtg

SEQ ID NO: 522209 - DNA, 75 bp, synthetic construct
  source 1..75: mol_type = other DNA
atggcaaaaagtacaaaaggtgcaaaacgtatcaaagccgcagcagcactctgggtgccggggacacgcgaagag

SEQ ID NO: 522210 - DNA, 75 bp, synthetic construct
  source 1..75: mol_type = other DNA
ctcgctttagcgtggccgcctggcgttatgcttcgcaggattacaggacattcagcgaccatctttacgaaaatg

SEQ ID NO: 522211 - DNA, 75 bp, synthetic construct
  source 1..75: mol_type = other DNA
gaagaaaatctgcaaagatttttttacatgtatggataaaaacgtttcatcccttttcagtaattaaattactta

SEQ ID NO: 522212 - DNA, 75 bp, synthetic construct
  source 1..75: mol_type = other DNA
aattcagttcggtgtaattgacagaccaacgcatagcgatgattcgttcgcttttgccaaagatgaaataccagc

SEQ ID NO: 522213 - DNA, 75 bp, synthetic construct
  source 1..75: mol_type = other DNA
ggagtggtaatcttagttgtaacatcagtgctgatgcttctaaagagaagtgattatgatttcaaaaaaaatatg

SEQ ID NO: 522214 - DNA, 75 bp, synthetic construct
  source 1..75: mol_type = other DNA
attctggtatttgaaaagcgcacagcagggtaatcggcatgcccagtttcaaattgcatgggattataacgctgg

SEQ ID NO: 522215 - DNA, 75 bp, synthetic construct
  source 1..75: mol_type = other DNA
tacccgccagcaggtagggctgaacggtacaacgcttgccgacaacaacctgagctacagcctccagcagagcta

SEQ ID NO: 522216 - DNA, 75 bp, synthetic construct
  source 1..75: mol_type = other DNA
tgaaatacgccattaccgccgggaaataccgcagtggcaacgacgacagcgatgaaccgcagttcggccaggtca

SEQ ID NO: 522217 - DNA, 75 bp, synthetic construct
  source 1..75: mol_type = other DNA
ccggacagcctgcgcgggttcgccccggtgatccgcggtatcgcccagtctaacgcgcaggtgaccattaagcag

SEQ ID NO: 522218 - DNA, 75 bp, synthetic construct
  source 1..75: mol_type = other DNA
tccccgtcctgatacttggtgggcgttggctctttgttgggaaaacctttctttttggcgtgacgtttatgacca

SEQ ID NO: 522219 - DNA, 75 bp, synthetic construct
  source 1..75: mol_type = other DNA
tacttaaaggcccgtaaccgcattgcgggcaccgtattgggtataatagtttcttttatcgccgcatatctgttt

SEQ ID NO: 522220 - DNA, 75 bp, synthetic construct
  source 1..75: mol_type = other DNA
gctccccagaggaagatacagagctatcacgactttccactgaattggccgatttgggtttttctactgccgatt

SEQ ID NO: 522221 - DNA, 75 bp, synthetic construct
  source 1..75: mol_type = other DNA
ctgccgctcaggaaagcgtcggcgcttacgttaacatcggctatatgtataaacacggtcaaggcgttgagaagg

SEQ ID NO: 522222 - DNA, 75 bp, synthetic construct
  source 1..75: mol_type = other DNA
atggcacatatgcgctgattaactttattgagcagcatgctgatatccgtcgggtgcgggtatgggcgaagtcac

SEQ ID NO: 522223 - DNA, 75 bp, synthetic construct
  source 1..75: mol_type = other DNA
atgaacgatctgatgattgatactgaaaccacaggaacatcccatcattcggggattatttcctttgcggcagca

SEQ ID NO: 522224 - DNA, 75 bp, synthetic construct
  source 1..75: mol_type = other DNA
gtgcggatgatacgaaggtacagaacaataccggggtttacaccgactggcgcggttatgcggtagtgccgtatg

SEQ ID NO: 522225 - DNA, 75 bp, synthetic construct
  source 1..75: mol_type = other DNA
tgggttttgcaattattatggctgctgtgagtgcgcttgttaatgataagtttattgagcagaacaataaactta

SEQ ID NO: 522226 - DNA, 75 bp, synthetic construct
  source 1..75: mol_type = other DNA
tgacgcaaaaaggcgtggtgcagcttaacagtgctgttaacagtgaatcagaaacagaagcagctacgccaaaag

SEQ ID NO: 522227 - DNA, 75 bp, synthetic construct
  source 1..75: mol_type = other DNA
tgtcggggccagcaaggcactatttgctgtatttgaaaaaccgttgagatcggttcggtcgccttatatgttgct

SEQ ID NO: 522228 - DNA, 75 bp, synthetic construct
  source 1..75: mol_type = other DNA
ttctggagacaaaactcgcattgctcttcgggatacttttctttatctattaaaaaagtatccaaaatacagatt

SEQ ID NO: 522229 - DNA, 75 bp, synthetic construct
  source 1..75: mol_type = other DNA
tgcacatgttgatggtgatgactactatttttcaaataaattaagtttacaagcacgatatcttgatgaaaataa

SEQ ID NO: 522230 - DNA, 75 bp, synthetic construct
  source 1..75: mol_type = other DNA
agatgggtgcttcatggatgcacaaaagatagctatagataaactattttctatgctgaaagacggggttgtttt

SEQ ID NO: 522231 - DNA, 75 bp, synthetic construct
  source 1..75: mol_type = other DNA
ggcctgatggcattaaaatcaaagcttcagaatggcaaagatttgaaagatatcactctgcatcctgacgatgaa

SEQ ID NO: 522232 - DNA, 75 bp, synthetic construct
  source 1..75: mol_type = other DNA
cgttactgaagcacttggaaacccttaaaaacgaaaagccacaccagaaggttttactcgtttttccaggtaagc

SEQ ID NO: 522233 - DNA, 75 bp, synthetic construct
  source 1..75: mol_type = other DNA
gactggcgtgccggaggaaggcgatattgcggttaactggaacggagcacaacagtgcgtggtgcattaccgttt

SEQ ID NO: 522234 - DNA, 75 bp, synthetic construct
  source 1..75: mol_type = other DNA
gcatgtggccggataaccgtatcgcccgtgacgcgcactatctttaccggtatgaccgttacggcaggctgacgg

SEQ ID NO: 522235 - DNA, 75 bp, synthetic construct
  source 1..75: mol_type = other DNA
ctacgctgctacctgacggccagaccagtgaggacagcaccgcgaatgagcctcagcaggcaaaaagtacggcgc

SEQ ID NO: 522236 - DNA, 75 bp, synthetic construct
  source 1..75: mol_type = other DNA
ttttggttcgggtgatggcgacgccttcagccgaaataatacggatgcgtttttaaccaaacaggaaacagcgaa

SEQ ID NO: 522237 - DNA, 75 bp, synthetic construct
  source 1..75: mol_type = other DNA
tggcagtaagcttctcagagaagccggcaaccgttctgcagtggacagccaggaacccggtagcaagagattttc

SEQ ID NO: 522238 - DNA, 75 bp, synthetic construct
  source 1..75: mol_type = other DNA
gccgggcagacggtcagcgtgttggcggacaacggcgcaacggtcgcttcgacggtcaccacagggccggacggc

SEQ ID NO: 522239 - DNA, 75 bp, synthetic construct
  source 1..75: mol_type = other DNA
actgccagcatcaacagcagcagcctgagccggaacgtgacgtttattgcggatgtcaggacggcgcagatcgcg

SEQ ID NO: 522240 - DNA, 75 bp, synthetic construct
  source 1..75: mol_type = other DNA
acggtacggtggagttcagtgtcaccagccagacggcaggaaccagtacagtcaccgccagtatcaacagcagca

SEQ ID NO: 522241 - DNA, 75 bp, synthetic construct
  source 1..75: mol_type = other DNA
gcagatcgcggatctgggggttattaaggacggctcagtggcagacggttcgacggcgaacacgctgcgggcgag

SEQ ID NO: 522242 - DNA, 75 bp, synthetic construct
  source 1..75: mol_type = other DNA
tggaaatcagtgtcaccagccagacggcggggatcagtactgtcactgctagcatcaacaacagcagcctgagcc

SEQ ID NO: 522243 - DNA, 75 bp, synthetic construct
  source 1..75: mol_type = other DNA
agtcaccagggataacgcggtggcagacggttcgacggcgaacacgctgcaggcgagggtcactgacgcgttcgg

SEQ ID NO: 522244 - DNA, 75 bp, synthetic construct
  source 1..75: mol_type = other DNA
gttgaaaggcaagccgggtgaggttaaatcgctggtttcttccttacaaaccaaatatgcgctgaaaggttatga

SEQ ID NO: 522245 - DNA, 75 bp, synthetic construct
  source 1..75: mol_type = other DNA
cgagtcgctgagtgttaatggtgtaaaattcagggcgacagatggttttccagaaacagggtttgatggtgcaaa

SEQ ID NO: 522246 - DNA, 75 bp, synthetic construct
  source 1..75: mol_type = other DNA
ttagtagtggaaggggcggatttacctgtcagtgctttattagttgatgattttggaaatccggtggataacggt

SEQ ID NO: 522247 - DNA, 75 bp, synthetic construct
  source 1..75: mol_type = other DNA
ggacggcacggtggagatctctgtcaccagccagacggcaggaatcagtgcagtcactgccagcatcaacagcag

SEQ ID NO: 522248 - DNA, 75 bp, synthetic construct
  source 1..75: mol_type = other DNA
ccgcgagccggaacgtgacgtttgttgcagatgtcaggacggcgaagatcgctgatctggtggtcattaaggacg

SEQ ID NO: 522249 - DNA, 75 bp, synthetic construct
  source 1..75: mol_type = other DNA
gtgacgtttattgccgatgtcaggacggcgcagatcgcggacctggtggtcattaaggacgactcagtggcagac

SEQ ID NO: 522250 - DNA, 75 bp, synthetic construct
  source 1..75: mol_type = other DNA
tccgcttggttcacagcttcgtatacgagaagttttagtagtggaaggggcggatttacctgtcagtgctttatt

SEQ ID NO: 522251 - DNA, 75 bp, synthetic construct
  source 1..75: mol_type = other DNA
tcacaatttaatgcattgataaatttactggcgcaacaatcacgcttcgctgatctaaaattatcaaactacaaa

SEQ ID NO: 522252 - DNA, 75 bp, synthetic construct
  source 1..75: mol_type = other DNA
gtatcacgataatttatgtgggaaatattcagaaaaaatatataactattttaattctttatcacaggggaaggt

SEQ ID NO: 522253 - DNA, 75 bp, synthetic construct
  source 1..75: mol_type = other DNA
agccggacgggacgttggagatctcagtcaccagccagacggcgggagtcagtgcagtcactgcaaccatcaaca

SEQ ID NO: 522254 - DNA, 75 bp, synthetic construct
  source 1..75: mol_type = other DNA
ggaaggaccagggaatgcatctgtccatgaaggacaaggactacaatccgctgattggccgaactggtgtggatg

SEQ ID NO: 522255 - DNA, 75 bp, synthetic construct
  source 1..75: mol_type = other DNA
gggaggcggtatacagcctgattaaccgggatgtggaaagggcactgtccgggcttgagagtgtgaaaccgtctc

SEQ ID NO: 522256 - DNA, 75 bp, synthetic construct
  source 1..75: mol_type = other DNA
gtgtcgatcaagagccaagcatacttatttaagagaaaagatgggatctggatgtttcagatttttgttcctaaa

SEQ ID NO: 522257 - DNA, 75 bp, synthetic construct
  source 1..75: mol_type = other DNA
cagggcaggacggcacggtggaaatcagtgtcaccagccagacggcgggcaccagcgcgatcactgccagcatta

SEQ ID NO: 522258 - DNA, 75 bp, synthetic construct
  source 1..75: mol_type = other DNA
cacgtttatcgccgatgtcaggacggcgcagatcgcggacctggcggttattaaggacggctcagtggcggacgg

SEQ ID NO: 522259 - DNA, 75 bp, synthetic construct
  source 1..75: mol_type = other DNA
ctggcgtagtgcaccggaactcgaccatgactatgaagcacgtccggcgaacgggtgggatcttcgcgccgaagg

SEQ ID NO: 522260 - DNA, 75 bp, synthetic construct
  source 1..75: mol_type = other DNA
agcagtagtcagagtcagaacgtgacatttatcgccgatgtcagcacggcgaagatcgctgatctggtggtcagc

SEQ ID NO: 522261 - DNA, 75 bp, synthetic construct
  source 1..75: mol_type = other DNA
aatggcgaatatgctgcgggcgagggtcaccgatgcgttcggtaatgcgcttgccgggcagacggtcagcgtgtt

SEQ ID NO: 522262 - DNA, 75 bp, synthetic construct
  source 1..75: mol_type = other DNA
gtcatcacagagccggacggtacggtggagatctcagtcaccagccggacggcggggatcagtactgtcactgca

SEQ ID NO: 522263 - DNA, 75 bp, synthetic construct
  source 1..75: mol_type = other DNA
tggtgaatataccattgtctggacagcatgggttgccgaggaaaatctggttgccagtctgaaattaaaaacatg

SEQ ID NO: 522264 - DNA, 75 bp, synthetic construct
  source 1..75: mol_type = other DNA
cgaacaaagcagcctttatcgtcggtgctgatatcaccgaatttttgtccctgttcctcgttcctcgttcctcgt

SEQ ID NO: 522265 - DNA, 75 bp, synthetic construct
  source 1..75: mol_type = other DNA
acgccaccaagttatttcttgccgctcgttccgatggtataggaaaagcctgtctgtggtgcatgtcgtatttaa

SEQ ID NO: 522266 - DNA, 75 bp, synthetic construct
  source 1..75: mol_type = other DNA
actacaggtacaccggttttagtgtattacctgtctggtactatcaattcacttggctcatgttccgtcaatgcc

SEQ ID NO: 522267 - DNA, 75 bp, synthetic construct
  source 1..75: mol_type = other DNA
cagcgaaacaagcactgaccatcaactggtactatgctgatgtaaacggcaatattggttatgttcatactggtg

SEQ ID NO: 522268 - DNA, 75 bp, synthetic construct
  source 1..75: mol_type = other DNA
atgatatttgtgggcaccatggcaaaccgcttctctgatagcactagcgaaattgataatctggcactgctaacg

SEQ ID NO: 522269 - DNA, 75 bp, synthetic construct
  source 1..75: mol_type = other DNA
ttggcaaagattttgtgaaatttgataaagatatccgtcgtaactactggccggatgctatccgggcgcaaattg

SEQ ID NO: 522270 - DNA, 75 bp, synthetic construct
  source 1..75: mol_type = other DNA
gaatattcggctggctgataaatctaattgtgattttttatttattacggtttagcacaagggcaaatgaacaag

SEQ ID NO: 522271 - DNA, 75 bp, synthetic construct
  source 1..75: mol_type = other DNA
aattgctaataaaagggtggaaggaaatatataaaatgaagtccaaaaattcattttcaaaaaatttttatatat

SEQ ID NO: 522272 - DNA, 75 bp, synthetic construct
  source 1..75: mol_type = other DNA
ggaccttatggttttgaagaggttgacttagcttttagattaataaatgcaggatatgttattaaatataatccc

SEQ ID NO: 522273 - DNA, 75 bp, synthetic construct
  source 1..75: mol_type = other DNA
gtgtatcgccacggcaccagcgattatccgcttgatgacatcattattgatccctttaaacggcgtccgcctgaa

SEQ ID NO: 522274 - DNA, 75 bp, synthetic construct
  source 1..75: mol_type = other DNA
tgcaacaagggaaatataaccagaagcgcgcggctgaattactggggttaacttatcatcagttccgcgcgttgt

SEQ ID NO: 522275 - DNA, 75 bp, synthetic construct
  source 1..75: mol_type = other DNA
atattgttaatagattcgcacttaaacaccggtaagttaactataacgacgccatgttatccttattacgcaata

SEQ ID NO: 522276 - DNA, 75 bp, synthetic construct
  source 1..75: mol_type = other DNA
gctcccgatggaacagttgataagcactatgaagatcagctgaaaatgtacgaaaattttggccgtaagtcgctc

SEQ ID NO: 522277 - DNA, 75 bp, synthetic construct
  source 1..75: mol_type = other DNA
gacggctcagtggcagacggcgcgacggcgaatacgctgcgtgcgagggtaaccgatgcatttggtaatgcgctt

SEQ ID NO: 522278 - DNA, 75 bp, synthetic construct
  source 1..75: mol_type = other DNA
gaccttaaagacgatattctcgttatcagcgacgcgacgaaagcaatccgtaaaatgaacggatacacctacacg

SEQ ID NO: 522279 - DNA, 75 bp, synthetic construct
  source 1..75: mol_type = other DNA
cttgaccaatggaatagcgaaacatggttatataaccatgataaatccatgcgcctgggtttaaccggatcaaca

SEQ ID NO: 522280 - DNA, 75 bp, synthetic construct
  source 1..75: mol_type = other DNA
atacgcttgccgggcagacggtgagcgtgttgggaggcaacggcgcaacgactgccccgacggtcatcacagggc

SEQ ID NO: 522281 - DNA, 75 bp, synthetic construct
  source 1..75: mol_type = other DNA
ccgatgtcaggacggcgcagatcgcggacctggtggtcattaaggacgactcagtggcagacggtgcaatggcga

SEQ ID NO: 522282 - DNA, 75 bp, synthetic construct
  source 1..75: mol_type = other DNA
ctgcgggcgagggtgacggatgcgttcgggaatgcgcttgccgggcagacggtcagcgtgttggcggacaacggc

SEQ ID NO: 522283 - DNA, 75 bp, synthetic construct
  source 1..75: mol_type = other DNA
actttattttgaaaaaataaaaaagaacaaaacacatggcaggatctgtccacaaaagaacaaaaattacagctt

SEQ ID NO: 522284 - DNA, 75 bp, synthetic construct
  source 1..75: mol_type = other DNA
tcagacaatacctgtgaacttacaattaatgaaccgttaaaaaccaggaaatatccacaggcaatatcaatgtta

SEQ ID NO: 522285 - DNA, 75 bp, synthetic construct
  source 1..75: mol_type = other DNA
aaagcacccggcaatatcctctgtcgcggtatgacgaccgcaacatagccgatccaatactcagggcagagctgc

SEQ ID NO: 522286 - DNA, 75 bp, synthetic construct
  source 1..75: mol_type = other DNA
ggaggcattgagcaccctccagatatcaggtcctgacttgattcaaagaaagatgttgcaatttttcaggagtag

SEQ ID NO: 522287 - DNA, 75 bp, synthetic construct
  source 1..75: mol_type = other DNA
cggagaatgccacaaggcaggtagtcatccaccctaagttaatcgaatggggtttcatagagtatgttgatcgcc

SEQ ID NO: 522288 - DNA, 75 bp, synthetic construct
  source 1..75: mol_type = other DNA
gttgttattggcatatactggagcaagaagaagtgagataggaaaactggagaagtcacagatcaagttcgacga

SEQ ID NO: 522289 - DNA, 75 bp, synthetic construct
  source 1..75: mol_type = other DNA
aggctgcgagaaatccactttttctccaccagcagatagctcctcctgttgaaattgtggaatctcaaccgtcag

SEQ ID NO: 522290 - DNA, 75 bp, synthetic construct
  source 1..75: mol_type = other DNA
aacaggaaatcactggccgacgtcgtgatgtactacaacggcaagccagtcggttctttcgaatacattgaagag

SEQ ID NO: 522291 - DNA, 75 bp, synthetic construct
  source 1..75: mol_type = other DNA
cattacggaacgatgagtcaaatccggcttgtctataacggtcacaatcaccggggcgacagtggtggcagcacc

SEQ ID NO: 522292 - DNA, 75 bp, synthetic construct
  source 1..75: mol_type = other DNA
caaagacgaaaagggacgcaactggacgaaatcgatttcaatggcgaatgatcgttacatggaagtattgcttac

SEQ ID NO: 522293 - DNA, 75 bp, synthetic construct
  source 1..75: mol_type = other DNA
acaaaaaggagaaggctcagaactggacaaaggcaatttcacaggccaatgagcgttttatggaggtgctgttta

SEQ ID NO: 522294 - DNA, 75 bp, synthetic construct
  source 1..75: mol_type = other DNA
gagcaatattcagccgatggttgctcaggaataccgggagagggttaccccggtagcagttactaagccacaaaa

SEQ ID NO: 522295 - DNA, 75 bp, synthetic construct
  source 1..75: mol_type = other DNA
gcagggatcactagaagatacttacacatttttcctctgaaaactgtgtgttacgtcattgatggattgtgttgg

SEQ ID NO: 522296 - DNA, 75 bp, synthetic construct
  source 1..75: mol_type = other DNA
atggcagcatacgccgccggggtggctctgttcgctggctctatctggaagttgggcggggcctttaaatggttg

SEQ ID NO: 522297 - DNA, 75 bp, synthetic construct
  source 1..75: mol_type = other DNA
gatagcccgctgggtaaactgtgggatttcatccacagcccagaccttccgactaatccagactttgccaaacca

SEQ ID NO: 522298 - DNA, 75 bp, synthetic construct
  source 1..75: mol_type = other DNA
ttaccggtcaatgacggttcagcaactgatcgagtgtgatgatgttccgccagaagatttggttggcgctgagcc

SEQ ID NO: 522299 - DNA, 75 bp, synthetic construct
  source 1..75: mol_type = other DNA
cgctaccgttttattaccgaatccgacggcaccgtcagcctggaactgtacgtcgataatgccgggcagggatac

SEQ ID NO: 522300 - DNA, 75 bp, synthetic construct
  source 1..75: mol_type = other DNA
gtacatcagcctgcccagtatggatgcgaataaaagccacacgtcagctggcgatgtattccgcatacttagccg

SEQ ID NO: 522301 - DNA, 75 bp, synthetic construct
  source 1..75: mol_type = other DNA
accggcgagttgccgcctgccctgctgccgattgaagaacacggcatgaagctgctggtggatattcagcacgga

SEQ ID NO: 522302 - DNA, 75 bp, synthetic construct
  source 1..75: mol_type = other DNA
cgataccctggaacgccgtgtattactggcggcgcaggaagcgttaagtacggcaattgatgcgcatgatgatgc

SEQ ID NO: 522303 - DNA, 75 bp, synthetic construct
  source 1..75: mol_type = other DNA
ctgggggacgaacatctgggccttgcggcgaacgtcagcaacgagcttcaggtcaacgccgccattgaacaggtg

SEQ ID NO: 522304 - DNA, 75 bp, synthetic construct
  source 1..75: mol_type = other DNA
gcatcgtctgcatctcttccgtttctgctcagcgcggcggcggcattttcggcggtccacactacagcgcagcga

SEQ ID NO: 522305 - DNA, 75 bp, synthetic construct
  source 1..75: mol_type = other DNA
cggaggcgggctaatggtcgcggtgattcagctttcaatcgcccttggatcgacggcaggaggcatcgtgtttga

SEQ ID NO: 522306 - DNA, 75 bp, synthetic construct
  source 1..75: mol_type = other DNA
cagcagaatatctatcatcgttggttaaaaggtgaaacggaagcgcaaagggaaaaaattcagaagctgatccca

SEQ ID NO: 522307 - DNA, 75 bp, synthetic construct
  source 1..75: mol_type = other DNA
ggaaaaaattcagaagctgatcccagcaattctggcaatccttccgcgggagctgcgtcatcgactctgcatctt

SEQ ID NO: 522308 - DNA, 75 bp, synthetic construct
  source 1..75: mol_type = other DNA
aggtttccgccgatggctacggcgactggacggttgtgaaacctgatttcgatctggactggcagacggatgatc

SEQ ID NO: 522309 - DNA, 75 bp, synthetic construct
  source 1..75: mol_type = other DNA
ctggcggcgcaggaagcgttgagtacggtaattgatgcgcatgatgatgcagttcaggccgtttaccggaaagca

SEQ ID NO: 522310 - DNA, 75 bp, synthetic construct
  source 1..75: mol_type = other DNA
cagcagaatatctatcaccgttggttgaaaggtgaaacgaaagcgcaaagggaaaaaattcagaaactgatccct

SEQ ID NO: 522311 - DNA, 75 bp, synthetic construct
  source 1..75: mol_type = other DNA
attttgagcttgaaatgacttatccaccaatgcatgacacctctacgacagagggtattggattgaacatacaaa

SEQ ID NO: 522312 - DNA, 75 bp, synthetic construct
  source 1..75: mol_type = other DNA
agggcaatacggaatacagcgtgaccgatgccagtgggaaaatgtttaccatcaactgcacgggaaatccggacc

SEQ ID NO: 522313 - DNA, 75 bp, synthetic construct
  source 1..75: mol_type = other DNA
gcatgagacaacacacgcctacaacgaacaggggctggcaaaccgcgtcacgccggacagcctgccgccggtgga

SEQ ID NO: 522314 - DNA, 75 bp, synthetic construct
  source 1..75: mol_type = other DNA
tgaaaaaagtatatttgatatagaagaaaatgcttatcatttcaaaaagtatgtattgtattattcaaatgaaga

SEQ ID NO: 522315 - DNA, 75 bp, synthetic construct
  source 1..75: mol_type = other DNA
acaggaaaaaccagacggccagccctcttacgcctgttttttggtgaaaagcctactcgaaatggagaacgacga

SEQ ID NO: 522316 - DNA, 75 bp, synthetic construct
  source 1..75: mol_type = other DNA
tcccgtaatttcgggaatatgggggaggtgctggaagtaaaagccgagcgggatgatgaaggtattcttcgttta

SEQ ID NO: 522317 - DNA, 75 bp, synthetic construct
  source 1..75: mol_type = other DNA
cttggaggcagtgccacagcgatcttcccggcgggtggcgcgaccggcgaacacctggtttctctgttggcggat

SEQ ID NO: 522318 - DNA, 75 bp, synthetic construct
  source 1..75: mol_type = other DNA
atattgtattttataatccaacatccaccacaccgaccaatgcaaaaataaaattatattggagtgaactggaca

SEQ ID NO: 522319 - DNA, 75 bp, synthetic construct
  source 1..75: mol_type = other DNA
gctggcgtcctttctgcatgacacgcagctgctgcagcgcagcggagaaacgccggatttcagcaacacgctgtt

SEQ ID NO: 522320 - DNA, 75 bp, synthetic construct
  source 1..75: mol_type = other DNA
gaacgtatgagcggcaacatctgtcgctgtggtgcatacgctaacatccttgccgccattgaagacgctgcgggg

SEQ ID NO: 522321 - DNA, 75 bp, synthetic construct
  source 1..75: mol_type = other DNA
aatcctggcgtctgagctactccaaacggtttgataatgcggatgccgacattacgttcgccgggtatcgtttct

SEQ ID NO: 522322 - DNA, 75 bp, synthetic construct
  source 1..75: mol_type = other DNA
ggaagaattatccaaagccaataccgacgtagaaacacaacggcagattgtgaaaggaaaatcagatacattaaa

SEQ ID NO: 522323 - DNA, 75 bp, synthetic construct
  source 1..75: mol_type = other DNA
gtgcatctatcctcagtacaattcgtggtactaatccagttggtcaagcccacgaagggattgaagaagtaccag

SEQ ID NO: 522324 - DNA, 75 bp, synthetic construct
  source 1..75: mol_type = other DNA
agataaggctttccgtgacactggtttaggtatggaaaagttacttgatattaatcaggatgtaatggataaaat

SEQ ID NO: 522325 - DNA, 75 bp, synthetic construct
  source 1..75: mol_type = other DNA
cggttacagcgatgcggtcagtgttctggcacaggatcgcccgtcgctggctattgtgtccgggcagggcggtgc

SEQ ID NO: 522326 - DNA, 75 bp, synthetic construct
  source 1..75: mol_type = other DNA
aacctacacgtctgtcaaaaggagcttttgttatgctgacggtaattttctggacgaacaggacgcctcaggcct

SEQ ID NO: 522327 - DNA, 75 bp, synthetic construct
  source 1..75: mol_type = other DNA
gcgcggtggcggtggctcactatgcccgccctgtctttgatccgtttgcccgtcaacattttaaaggtattaccg

SEQ ID NO: 522328 - DNA, 75 bp, synthetic construct
  source 1..75: mol_type = other DNA
gctatagaacaactttagctatggttatggatattgcagcaagaatggcagaagctaacccctattcgagtgatc

SEQ ID NO: 522329 - DNA, 75 bp, synthetic construct
  source 1..75: mol_type = other DNA
atggcgccgtagcccggcgtagccggttgcggatcgaaagggatcgccaatcccctttccaccctgtaaagccat

SEQ ID NO: 522330 - DNA, 75 bp, synthetic construct
  source 1..75: mol_type = other DNA
acggttttgccatgccggtgaaacaggcgtttgcgccggtgctgaaactacgcaaatggctgaatccggtgtctc

SEQ ID NO: 522331 - DNA, 75 bp, synthetic construct
  source 1..75: mol_type = other DNA
cagcaggacagctgatatcctggcagcagaagtggatacggaacgactgagaaagaccgatattcgtctgacggc

SEQ ID NO: 522332 - DNA, 75 bp, synthetic construct
  source 1..75: mol_type = other DNA
attcccggggcggttcagtctgtgggtttggtcggtactttgtttctggtggcgaggatctgggatgctattaac

SEQ ID NO: 522333 - DNA, 75 bp, synthetic construct
  source 1..75: mol_type = other DNA
ctacttccgtttctatcgcctcaatggcgacacgctgcgcaggatccagattcatctgctggataaatatcgcaa

SEQ ID NO: 522334 - DNA, 75 bp, synthetic construct
  source 1..75: mol_type = other DNA
aactgcgcgatgaacaggggatgacattcagcgaaatcagaaagtacatccgggacacgaccgggatatccctta

SEQ ID NO: 522335 - DNA, 75 bp, synthetic construct
  source 1..75: mol_type = other DNA
catccggaatggcaacgtgagtttctccctagattaatcaacgttttccctcatcttcagttcatagtatcgacg

SEQ ID NO: 522336 - DNA, 75 bp, synthetic construct
  source 1..75: mol_type = other DNA
atcattgatggtgtagccgctcctgctgccaaatctggtaaaggtaaaggcgctaaaggtgagaagcgcggcact

SEQ ID NO: 522337 - DNA, 75 bp, synthetic construct
  source 1..75: mol_type = other DNA
tgatcccgccaactatatggtgcatagggccagaagcatgctggcgcaactacgggcaagacaatttgaattctg

SEQ ID NO: 522338 - DNA, 75 bp, synthetic construct
  source 1..75: mol_type = other DNA
ccgtatgtggcactgccggcgtttgaccgtaacggcaagtcagccggtatctggctgaacccactgaccacggat

SEQ ID NO: 522339 - DNA, 75 bp, synthetic construct
  source 1..75: mol_type = other DNA
tgatgaaaaagaattactttggcatagcttagagtttgctttatattttatgtcaggtaatgataaaatccttta

SEQ ID NO: 522340 - DNA, 75 bp, synthetic construct
  source 1..75: mol_type = other DNA
gaggctgcagccggttttggaaagacttgcacggcgtatgaattattgagggagattatagttaacaatataggg

SEQ ID NO: 522341 - DNA, 75 bp, synthetic construct
  source 1..75: mol_type = other DNA
aactggagcatacctatagtcaatattataaatatgagtttgtcataaaagataatgttgatggtaaagaatctg

SEQ ID NO: 522342 - DNA, 75 bp, synthetic construct
  source 1..75: mol_type = other DNA
tcccttatccaaagcttggtagtgttcatataacgtactacaaagcgatgtgcaaggcgaaaaacaatagtaatt

SEQ ID NO: 522343 - DNA, 75 bp, synthetic construct
  source 1..75: mol_type = other DNA
tggtattaggtgtatcgaaactaaggcatgaaatcatagttgcattcggtacgagccaaaaaacacacaaactct

SEQ ID NO: 522344 - DNA, 75 bp, synthetic construct
  source 1..75: mol_type = other DNA
ttcctgtcagcgccagccgggcagagcgggtggtggacagtaccgccggtgatatgctggcggaaatcgcggtct

SEQ ID NO: 522345 - DNA, 75 bp, synthetic construct
  source 1..75: mol_type = other DNA
acggtcagcgtgttggcggataacggcgcaacggtcgctccgacggtcatcacagggcaggacggcacggtggaa

SEQ ID NO: 522346 - DNA, 75 bp, synthetic construct
  source 1..75: mol_type = other DNA
tgcggtcaccgccagtatcaacaacagcagcctgagccgggatgtgacgtttattgcggatgtcaggacggcgca

SEQ ID NO: 522347 - DNA, 75 bp, synthetic construct
  source 1..75: mol_type = other DNA
ttgtctgccggaggaaaaggcactgattaaagaaaaggccgaactttccggtatgagtgtgggggaatatcttcg

SEQ ID NO: 522348 - DNA, 75 bp, synthetic construct
  source 1..75: mol_type = other DNA
atgagtgacagtttccagcgggagataccaaaggctcgtattaatctgaaattagaactgcatacagggggggcg

SEQ ID NO: 522349 - DNA, 75 bp, synthetic construct
  source 1..75: mol_type = other DNA
tggcaaaccaaacggtcctttttgcccaagatgttatgaaagttcagagaagaagctatcttcaatgagtcaagt

SEQ ID NO: 522350 - DNA, 75 bp, synthetic construct
  source 1..75: mol_type = other DNA
tgttgatgacacaggaaagtatgaaataaatctaaatggctgggacatcaaggatgcagatggcgctgaagtaaa

SEQ ID NO: 522351 - DNA, 75 bp, synthetic construct
  source 1..75: mol_type = other DNA
ctcaggaaacacttttcagctccaaatctcatggtaaatatgcgcttttccccatttttactgcgagttggcgag

SEQ ID NO: 522352 - DNA, 75 bp, synthetic construct
  source 1..75: mol_type = other DNA
caaagcgagtggtgattatgtcgattttagcaaaaatattcttgatacagttgacttctcgcagagtcaacttac

SEQ ID NO: 522353 - DNA, 75 bp, synthetic construct
  source 1..75: mol_type = other DNA
tcccagcgcttacatgatatgttgaatcctacaaaagataccaattggatagactggccccctgaatctccagac

SEQ ID NO: 522354 - DNA, 75 bp, synthetic construct
  source 1..75: mol_type = other DNA
tatctattgattactcagatatatttggaaatgaagatctcgatgattatatcaataacattataaaaatgattg

SEQ ID NO: 522355 - DNA, 75 bp, synthetic construct
  source 1..75: mol_type = other DNA
tatctattgattactcagatatatttggaaatgaagatctcgatgactatatcaataatattataaaaatgattg

SEQ ID NO: 522356 - DNA, 75 bp, synthetic construct
  source 1..75: mol_type = other DNA
actaaatcagtaagttggcagcatcaccgtcgacgtttacacaatgtgatttttatcaaagcgagtggtgaatgt

SEQ ID NO: 522357 - DNA, 75 bp, synthetic construct
  source 1..75: mol_type = other DNA
cgaaaattttggtcgtaagtcgctctggttaacgaagcaggatgtggaggcgcataaggagtcgcaggaagtgtt

SEQ ID NO: 522358 - DNA, 75 bp, synthetic construct
  source 1..75: mol_type = other DNA
ctggatggtaaaaacaaaattgatcttggggatggtgacaacactattcaggttggaggatacataaccaactca

SEQ ID NO: 522359 - DNA, 75 bp, synthetic construct
  source 1..75: mol_type = other DNA
tgggtgtatattggtggagggatatctccccatataggggatcagaatccaggctctgacaacaacattgatatg

SEQ ID NO: 522360 - DNA, 75 bp, synthetic construct
  source 1..75: mol_type = other DNA
atgttaggtcatatctcaaagtttgacggcaataactctttgataaaacatgatgtggtgcaaggaaataataaa

SEQ ID NO: 522361 - DNA, 75 bp, synthetic construct
  source 1..75: mol_type = other DNA
ccgctgcacggaacgggaatttgcgaccattcttgccggtatcagcgccggaggtatgtactgcccggagtgtgg

SEQ ID NO: 522362 - DNA, 75 bp, synthetic construct
  source 1..75: mol_type = other DNA
taggtcattacattggaggctcatatgcagtgctaatacaaataccagtattgttaaaatctgtttctgtagtgg

SEQ ID NO: 522363 - DNA, 75 bp, synthetic construct
  source 1..75: mol_type = other DNA
attggctcgacagcggtatgatattttatccaggagatggtcatctctctattgcgtcacgttcatccccattgt

SEQ ID NO: 522364 - DNA, 75 bp, synthetic construct
  source 1..75: mol_type = other DNA
agccgggacgtgacgtttatcgccgatgtcaggacggcgaagatcgcggacctggtggtcattaaggacgactca

SEQ ID NO: 522365 - DNA, 75 bp, synthetic construct
  source 1..75: mol_type = other DNA
gctaacctccaccatcaagacggacgatgtgtcatacaccgcgggtggcaagataaaagtgtcagttacccttat

SEQ ID NO: 522366 - DNA, 75 bp, synthetic construct
  source 1..75: mol_type = other DNA
tctccgttatgggtatgatccgtcgcttcctgccgattattggtcttattaccaccggatttgtagcctggaaaa

SEQ ID NO: 522367 - DNA, 75 bp, synthetic construct
  source 1..75: mol_type = other DNA
ggtagtaccgcgaaaagtaggtacgttgtggggcgaatatggtaatttaaaaacttatgggaacgcttttagcgg

SEQ ID NO: 522368 - DNA, 75 bp, synthetic construct
  source 1..75: mol_type = other DNA
cctaccaagaaggagaaaatttaacttcatttatggagattaaaggttggcgtatatacggacaaccatcctata

SEQ ID NO: 522369 - DNA, 75 bp, synthetic construct
  source 1..75: mol_type = other DNA
cggacagacggtcagcgtctcagcggacaacggggcagcggttgccgcgacggttatcaccgggccggacggcgc

SEQ ID NO: 522370 - DNA, 75 bp, synthetic construct
  source 1..75: mol_type = other DNA
tgaagagtgggggaaggctcgtattcgcaatttattaaaaatatggaaagaccggagggctgaagaaaaaacgaa

SEQ ID NO: 522371 - DNA, 75 bp, synthetic construct
  source 1..75: mol_type = other DNA
accgacataacctacaactcttataataaagattctccggcagtcattcatggaaatgtaaacaattctcctgga

SEQ ID NO: 522372 - DNA, 75 bp, synthetic construct
  source 1..75: mol_type = other DNA
aggtgtatattacgcctgacgagaaatatccggaaacagctcctccgtcagcaggagctgcctgcaagactcttc

SEQ ID NO: 522373 - DNA, 75 bp, synthetic construct
  source 1..75: mol_type = other DNA
caaagtcattcttcggggtcggtgaggatgaacagcagcagggagtaaccggcggcggtaacggcggcatgagtc

SEQ ID NO: 522374 - DNA, 75 bp, synthetic construct
  source 1..75: mol_type = other DNA
tcggagatttggctgctgaagcagctaaagattcaggccttgataaggatgaagattttaatggacgagttgatt

SEQ ID NO: 522375 - DNA, 75 bp, synthetic construct
  source 1..75: mol_type = other DNA
tttaaaacgtccactgatgggaagaaaaggaattggaaaatttgctggttttggtattgcatcagttataacagt

SEQ ID NO: 522376 - DNA, 75 bp, synthetic construct
  source 1..75: mol_type = other DNA
tagcggtgctgtcccgcgaaaagtaggttcgttatggggtgaatatggtaatctgacttcttatgacggaatatt

SEQ ID NO: 522377 - DNA, 75 bp, synthetic construct
  source 1..75: mol_type = other DNA
tcatgtagttatggtcaaatgccgtcatctttagaattagcgcagcggccaagcggtggggtagtaccgcgaaaa

SEQ ID NO: 522378 - DNA, 75 bp, synthetic construct
  source 1..75: mol_type = other DNA
caatatcaaaggcagtatatggcgcattttgcggaagcgaatttgaatgcgcaactgaagatggctggttggagc

SEQ ID NO: 522379 - DNA, 75 bp, synthetic construct
  source 1..75: mol_type = other DNA
acggtcagcgtgttggcaggcaacggtgcaacggttgccccaacggtgattacagagccggacggcacggcggag

SEQ ID NO: 522380 - DNA, 75 bp, synthetic construct
  source 1..75: mol_type = other DNA
cagaataatggtgaatataccattgtctggacagcatgggttgccgaggaaaatctggttgccagtctgaaatta

SEQ ID NO: 522381 - DNA, 75 bp, synthetic construct
  source 1..75: mol_type = other DNA
accatcacggtaacgctccgggatgcgttcgataatctggtaaccggtgcagcttcacagttagccgctaatggt

SEQ ID NO: 522382 - DNA, 75 bp, synthetic construct
  source 1..75: mol_type = other DNA
cgctgcgggcgagggtgaccgatgcgttcggcaatgcgcttgccgggcagacggtcagcgtgttggcggacaacg

SEQ ID NO: 522383 - DNA, 75 bp, synthetic construct
  source 1..75: mol_type = other DNA
taagggtgaccgataagttcgggaatgcgattgccgggcagacggtgagcgtgttggcggacaacggcgcaacgg

SEQ ID NO: 522384 - DNA, 75 bp, synthetic construct
  source 1..75: mol_type = other DNA
acggtcagcgtgacggcagacaacagtgcaatggtcgcttcgactggcatcacagggccggacggcacggtggag

SEQ ID NO: 522385 - DNA, 75 bp, synthetic construct
  source 1..75: mol_type = other DNA
cctggtcgatcgtaataacaatattgtcctcgaatatcgcaagaaagagctggtgcggttgacgctgaccgatcc

SEQ ID NO: 522386 - DNA, 75 bp, synthetic construct
  source 1..75: mol_type = other DNA
ttcgacggcgaatacgctgcaggtgaaggtcaccgatgctaacggtaatacgcttgccggacagacggtcagcgt

SEQ ID NO: 522387 - DNA, 75 bp, synthetic construct
  source 1..75: mol_type = other DNA
ccagataattgatcgccggacagcatcactgtgcagtgtcgggatgttaacaaacctgaatcatgccgcaatgag

SEQ ID NO: 522388 - DNA, 75 bp, synthetic construct
  source 1..75: mol_type = other DNA
acggcggaaatcagtgttaccagtcagacggcgggagttagcgcagtcaccgtcagcatcaacaacagcagccag

SEQ ID NO: 522389 - DNA, 75 bp, synthetic construct
  source 1..75: mol_type = other DNA
aaagcacagcattatttgcactagatacaaaaactattcagagaaaccagaagtatctgacgtagtacgtattac

SEQ ID NO: 522390 - DNA, 75 bp, synthetic construct
  source 1..75: mol_type = other DNA
tttgcatcaggtttatgattccgttgtaatgaatcaagtttttatacgttatgttagtaatattgtttcaatatt

SEQ ID NO: 522391 - DNA, 75 bp, synthetic construct
  source 1..75: mol_type = other DNA
aactttgaagcggttgttcagtatcaattcgactttggtctgcgtccgtccttaggttatgtgtatgacctgctc

SEQ ID NO: 522392 - DNA, 75 bp, synthetic construct
  source 1..75: mol_type = other DNA
acaaagacgggctggagtggtcggcacaactggcagaagccaatcatccgcaaacaggtgactggttgtacgatg

SEQ ID NO: 522393 - DNA, 75 bp, synthetic construct
  source 1..75: mol_type = other DNA
acccgctcccacgcctaaacccaccacgaccgcagatgctggcggcaattatctcaatgtcggttacttattgaa

SEQ ID NO: 522394 - DNA, 75 bp, synthetic construct
  source 1..75: mol_type = other DNA
gcagtattgtttgaaagcgcaaaaggttaaaactctgttatacgtatttttcatattgaatcttgtgactttttt

SEQ ID NO: 522395 - DNA, 75 bp, synthetic construct
  source 1..75: mol_type = other DNA
gtggaacatctacccttaatggtcctgtaaatatcaacaacaacctgaaggtaaaatccgatacctatctgaaca

SEQ ID NO: 522396 - DNA, 75 bp, synthetic construct
  source 1..75: mol_type = other DNA
ttgtccggggtcgatgtatgactcaaggtatggttttttatctggaacacttattgcggaatatgatgaacgtcg

SEQ ID NO: 522397 - DNA, 75 bp, synthetic construct
  source 1..75: mol_type = other DNA
aatgtacgcctaatggtctggttgggcgagacagtacaggtcgagtgttatcgtgtgtcagtggtaaatggcaga

SEQ ID NO: 522398 - DNA, 75 bp, synthetic construct
  source 1..75: mol_type = other DNA
attcctttaccccacctttggttagaggtggcacttaatcagttaggtgcaccataccatgtaaacgtgaaaatg

SEQ ID NO: 522399 - DNA, 75 bp, synthetic construct
  source 1..75: mol_type = other DNA
ctaaatcaagttgctatatatgatgagagcattgtattacgcaatggttataattgggtgcaaaaaataagtgat

SEQ ID NO: 522400 - DNA, 75 bp, synthetic construct
  source 1..75: mol_type = other DNA
catcatacactaaatcagtaagttggcagcattaccatcgcatcggtgggaaaaacgccctgctgctggctggca

SEQ ID NO: 522401 - DNA, 75 bp, synthetic construct
  source 1..75: mol_type = other DNA
tctgtccccctctcctgtctgatgtctgaatctgtttatgccccaaaaacgacaggcaccccggagggtgcctgt

SEQ ID NO: 522402 - DNA, 75 bp, synthetic construct
  source 1..75: mol_type = other DNA
gcagcgatgccaacaaaaaaatcaccgttgtccgcaccctcgacgaattatcaaaacctgaaacactcgcttcat

SEQ ID NO: 522403 - DNA, 75 bp, synthetic construct
  source 1..75: mol_type = other DNA
tgattgaccttgcattacagaaacacgatacgccagttggcccactgttcgtggcagtacgccacggtcgtatca

SEQ ID NO: 522404 - DNA, 75 bp, synthetic construct
  source 1..75: mol_type = other DNA
atgcaaaatcaagaaatgaatatccaaattaaactatacgcttatttaaataaatatgacactcgccttacagaa

SEQ ID NO: 522405 - DNA, 75 bp, synthetic construct
  source 1..75: mol_type = other DNA
aggacacgaaaatcgctgcgcttgaaaccgaaaacgccgatcttaaagcgaagattaaggcgctggaagacgagc

SEQ ID NO: 522406 - DNA, 75 bp, synthetic construct
  source 1..75: mol_type = other DNA
ggcaccatcgccgaacgatgaagatcctgccgctggtggtgacgacaaggacgcgaaaatcactgcgctggaaac

SEQ ID NO: 522407 - DNA, 75 bp, synthetic construct
  source 1..75: mol_type = other DNA
gcagcagaccacaaagacaaagcatccggtcatatcgccaatacccgtatcgagggtggtgaggtggtctgcgac

SEQ ID NO: 522408 - DNA, 75 bp, synthetic construct
  source 1..75: mol_type = other DNA
tgatgcagcagaaagaaaccgcttcagattgtccacgccgcgcggtgcgcaaatatatggcacgcaggcgaagat

SEQ ID NO: 522409 - DNA, 75 bp, synthetic construct
  source 1..75: mol_type = other DNA
caggagaaaaacagcggtccgcacggtgacgactttgaaccttttgttgaaatgaactggatccataacagtaaa

SEQ ID NO: 522410 - DNA, 75 bp, synthetic construct
  source 1..75: mol_type = other DNA
gcaaaaatatacaatggtggagagttatttttttccaatgtcaccgcggtatcagaacaagataaaggaatatca

SEQ ID NO: 522411 - DNA, 75 bp, synthetic construct
  source 1..75: mol_type = other DNA
cagaagcagaacaaaaatttactactctggaaaatacgctgaatgctgcacggccgcatctgggagaattatatg

SEQ ID NO: 522412 - DNA, 75 bp, synthetic construct
  source 1..75: mol_type = other DNA
aacgctgggcacgcctttattgtcctgaagtgattcttggagtgtacacccaggacgaactggacgaaccacagg

SEQ ID NO: 522413 - DNA, 75 bp, synthetic construct
  source 1..75: mol_type = other DNA
aggctgtcagggagattgccgggcaggagcgtgaccggtctgccatatctgaacgggaagccgcgctgccggaga

SEQ ID NO: 522414 - DNA, 75 bp, synthetic construct
  source 1..75: mol_type = other DNA
tggacacaaattacgcatggtggaatgaccatgcctttcctcgacatgggatggtttgatggacgtctctggtgt

SEQ ID NO: 522415 - DNA, 75 bp, synthetic construct
  source 1..75: mol_type = other DNA
ccgcccaaaacagataaaaaaatgtgatgcaagtcactatgcagcacgcattgaaactattctggcggccaaaat

SEQ ID NO: 522416 - DNA, 75 bp, synthetic construct
  source 1..75: mol_type = other DNA
cagaaggggagcaacggagctttgccggttaatcaaggtggtaccggcgcaacgaatgccgcagacgctcgcaca

SEQ ID NO: 522417 - DNA, 75 bp, synthetic construct
  source 1..75: mol_type = other DNA
acaggacgaagattcaaaaccagcaattcaaaagaaaaaaataaataaggcgagcaaaaaaagcaccaaatgtaa

SEQ ID NO: 522418 - DNA, 75 bp, synthetic construct
  source 1..75: mol_type = other DNA
ctcttcgattttattcaacaaaaatatcagttagccggcgttgactggatacatattggcgataatgaatggtcc

SEQ ID NO: 522419 - DNA, 75 bp, synthetic construct
  source 1..75: mol_type = other DNA
ccctcgctaaataaatacattttagcactgacgattgaccttgcggttttttataaaagaaaattctatcgcaag

SEQ ID NO: 522420 - DNA, 75 bp, synthetic construct
  source 1..75: mol_type = other DNA
ctgcttatccatcacggtggcgggacggaacttgccacgctgagaggaaagtcactgataaccgatgatggcgaa

SEQ ID NO: 522421 - DNA, 75 bp, synthetic construct
  source 1..75: mol_type = other DNA
aacacgaaacgataatatctttatcctgttctcctctgtcgatgatgggccagttatggtggtaagctcccagcg

SEQ ID NO: 522422 - DNA, 75 bp, synthetic construct
  source 1..75: mol_type = other DNA
tgcgtcaaaatcgattcagtaaggtgaatttcgatacccaacagatgatcgattttattaacagatttaatatga

SEQ ID NO: 522423 - DNA, 75 bp, synthetic construct
  source 1..75: mol_type = other DNA
aaatctcaggataaacatgcgcttttccccatttttactgcgagttggcgagctaatcgtataaagaataaaggt

SEQ ID NO: 522424 - DNA, 75 bp, synthetic construct
  source 1..75: mol_type = other DNA
ggaagaaaggggagatgaagccggcattacgcgatttcatcgccattgtgcaggaacgtttggcaagcgtaacgg

SEQ ID NO: 522425 - DNA, 75 bp, synthetic construct
  source 1..75: mol_type = other DNA
aacaggctgtcattctcaacgcaccacgccaccagaaactgaaggaaattagtgaaggtattgtgtcgatgtttc

SEQ ID NO: 522426 - DNA, 75 bp, synthetic construct
  source 1..75: mol_type = other DNA
agatggtcaggatgtcgtttctgctctgatcgtcgaagagtaccgggcgaagggtggtgacgagattactttccc

SEQ ID NO: 522427 - DNA, 75 bp, synthetic construct
  source 1..75: mol_type = other DNA
ggtgggtggatttccacacggcaccggcgcccggcaaggtgggcggatttccataactttaattatacctttgtg

SEQ ID NO: 522428 - DNA, 75 bp, synthetic construct
  source 1..75: mol_type = other DNA
tcaactcaaccatttctcttgaaggcgttgtgcgctggctggcgcaaacgggacagacggggaccaatcaaccgc

SEQ ID NO: 522429 - DNA, 75 bp, synthetic construct
  source 1..75: mol_type = other DNA
agagcccgtaccgttgcctaacccgctaatgggttatatggcttctggggctgatgggcatgttttccagcaaag

SEQ ID NO: 522430 - DNA, 75 bp, synthetic construct
  source 1..75: mol_type = other DNA
atgaagcccagcgtctggattgcgcctggcgctgtcacaaatgcgggaccattggctatgaagaggggatgagca

SEQ ID NO: 522431 - DNA, 75 bp, synthetic construct
  source 1..75: mol_type = other DNA
aggtatggttttttatctggaacacttattgcggaatatgatgaacgtcgttgtagtggtagtaagaacgagcac

SEQ ID NO: 522432 - DNA, 75 bp, synthetic construct
  source 1..75: mol_type = other DNA
cagcaagcggtgatggcctgaaaggtatttttataacaataaccgatcaaacatctggatataaatgtgtaatac

SEQ ID NO: 522433 - DNA, 75 bp, synthetic construct
  source 1..75: mol_type = other DNA
gactttaattaatgaaggtctgttgtctgtcggctatacaggaactaacgcgcaaaaagcatcttacaaaattgt

SEQ ID NO: 522434 - DNA, 75 bp, synthetic construct
  source 1..75: mol_type = other DNA
gttaaactcaggctacctcaaggaacgcattttttgaatggactgctatgcgcagcctctgtagaggctaagcct

SEQ ID NO: 522435 - DNA, 75 bp, synthetic construct
  source 1..75: mol_type = other DNA
gtgggcggattcccacacggcaccggcgcccggcaaggtgggtggattggcactgttgcaaatagtcggtggtga

SEQ ID NO: 522436 - DNA, 75 bp, synthetic construct
  source 1..75: mol_type = other DNA
acggcaccggcgcccggcaaggtgggcggatttccacacagcaccggcgcccggcaaggtgggtggattcccaca

SEQ ID NO: 522437 - DNA, 75 bp, synthetic construct
  source 1..75: mol_type = other DNA
aggtttttgccaacccactctggccatttgaaaccatgatcccggcacccatggtcgcgatgaactccgcccgac

SEQ ID NO: 522438 - DNA, 75 bp, synthetic construct
  source 1..75: mol_type = other DNA
ttaacggagagaaaaatgtgccggcagacagtctgaaaccgcagtctttgattcttccggacagaagaaaatcat

SEQ ID NO: 522439 - DNA, 75 bp, synthetic construct
  source 1..75: mol_type = other DNA
gaagataatgaacccgttatggtttttaacggagagaaaaatgtgccggcagacagtctgaaaccgcagtctttg

SEQ ID NO: 522440 - DNA, 75 bp, synthetic construct
  source 1..75: mol_type = other DNA
tcattttcacggaaaaaaccacattaactttaaccactatatccaatatactgtcctggtttgatggtagcttgt

SEQ ID NO: 522441 - DNA, 75 bp, synthetic construct
  source 1..75: mol_type = other DNA
tcacttggacgaaaaatatcctcgttttgtttatcatgatggtgtgtttgagtctttggatgatcgtaagaaaga

SEQ ID NO: 522442 - DNA, 75 bp, synthetic construct
  source 1..75: mol_type = other DNA
ttagttatacagactattaccatggggcttgttaatttagttattttaaatatatataatccatggttaccgaag

SEQ ID NO: 522443 - DNA, 75 bp, synthetic construct
  source 1..75: mol_type = other DNA
tggcgcgactggtgatccggacctcttcccagtgtcgcgactggatgcgtcatcacggcgttaattttcagcctc

SEQ ID NO: 522444 - DNA, 75 bp, synthetic construct
  source 1..75: mol_type = other DNA
gcgcggcctattgatacgcccccctactacggttatgccctgcgaccagggatcacctttacctatctcgggctg

SEQ ID NO: 522445 - DNA, 75 bp, synthetic construct
  source 1..75: mol_type = other DNA
cttcgatcttttcttcggcacgtgccagtgcaggaaggcctccgtctcttcaaccagactcagttgctggtcttt

SEQ ID NO: 522446 - DNA, 75 bp, synthetic construct
  source 1..75: mol_type = other DNA
tcatttttggttctggtggtctgcttggcgcatgcctgacgaaggcatgccttgcaaatggttcaaaggttattg

SEQ ID NO: 522447 - DNA, 75 bp, synthetic construct
  source 1..75: mol_type = other DNA
aaatccttattgctggtgccggtggattgctaggcactcatcttgttaaaaaagtcatagatgaaggtggttatg

SEQ ID NO: 522448 - DNA, 75 bp, synthetic construct
  source 1..75: mol_type = other DNA
taaatagtaaaatatttttaatgaaaatgaaagcaaaaaatagaatttggattctaattacaattttacaattaa

SEQ ID NO: 522449 - DNA, 75 bp, synthetic construct
  source 1..75: mol_type = other DNA
cgagaacatgaacctacgcatgctgtgttaacttttagaggcccaacagtagttggcacgcatggcatttcagca

SEQ ID NO: 522450 - DNA, 75 bp, synthetic construct
  source 1..75: mol_type = other DNA
tcaagatgtgtgaaccggagcagaaggagaaagtattgaagccatggaaaaaacagaatgatataatggcttttc

SEQ ID NO: 522451 - DNA, 75 bp, synthetic construct
  source 1..75: mol_type = other DNA
gcaacattgctacgcgctttgatgaaaatggcgacatttgtcttgatcaggcatttctgcaacaagccggtttaa

SEQ ID NO: 522452 - DNA, 75 bp, synthetic construct
  source 1..75: mol_type = other DNA
ttactgagattaagaagttaacaacaatcataaatgaagctaaaactttagtatgtaaattacaagattgtttaa

SEQ ID NO: 522453 - DNA, 75 bp, synthetic construct
  source 1..75: mol_type = other DNA
ggcggcgtagctggcagattcaagggatagatgcctgtcccgagcatggctgtcagctcctgaactcacctatcc

SEQ ID NO: 522454 - DNA, 75 bp, synthetic construct
  source 1..75: mol_type = other DNA
tgctcccgaccggccgacgattggtctgtctggggcctcgacggccttggtcaagtggcccgattggctgcgtta

SEQ ID NO: 522455 - DNA, 75 bp, synthetic construct
  source 1..75: mol_type = other DNA
gcatgttacgcctggctctatcgtcatgaccgaagctggctgatggctgcaaatcaggccagaccgcgccgacag

SEQ ID NO: 522456 - DNA, 75 bp, synthetic construct
  source 1..75: mol_type = other DNA
acagcgtgcgggcggcatatgtgcataaagcagagcatctggaggccagaaaggccatgatgcagtggtggtcgg

SEQ ID NO: 522457 - DNA, 75 bp, synthetic construct
  source 1..75: mol_type = other DNA
cgtgattatatcgctttatatgtagacagggcgatttttcattatgcgattagttttgtctgtaataaagtagaa

SEQ ID NO: 522458 - DNA, 75 bp, synthetic construct
  source 1..75: mol_type = other DNA
aaaaaatcacccttaatttatggacagcaagtatcaaaaatgtgtcgttaatcagcagaataaatgaactcaaac

SEQ ID NO: 522459 - DNA, 75 bp, synthetic construct
  source 1..75: mol_type = other DNA
ccttgaacgaccatgcacaacgtctggtgttacgtttaccgctattacaagaattactcgatgatcatccagaag

SEQ ID NO: 522460 - DNA, 75 bp, synthetic construct
  source 1..75: mol_type = other DNA
catcccgtcagtaaatcccgcctgtttcagtgttgtcatgcaaaagctgcccacggtcaggtcccggaggcacag

SEQ ID NO: 522461 - DNA, 75 bp, synthetic construct
  source 1..75: mol_type = other DNA
acgggcgagctcaaaatctcgccagcgtattgagcatgactacattgtcagcctgaatatggctaaagagctttc

SEQ ID NO: 522462 - DNA, 75 bp, synthetic construct
  source 1..75: mol_type = other DNA
tgccgagtccgtcggcgagtatcagatccgtcgcctgactgcagcgatgctgaaggatgtacagacaggcataac

SEQ ID NO: 522463 - DNA, 75 bp, synthetic construct
  source 1..75: mol_type = other DNA
gccagttattgcggcggcggccatggctctttcctccgtcagcgtcattgtgaatgcgttgcgtctgaaaagtgt

SEQ ID NO: 522464 - DNA, 75 bp, synthetic construct
  source 1..75: mol_type = other DNA
ggcaatgccagatttacgggtgtttgcacacacgggatttccgttcagccggatggcggatctctcagaaacgct

SEQ ID NO: 522465 - DNA, 75 bp, synthetic construct
  source 1..75: mol_type = other DNA
attacggtgatcagtctgtggttatgacagaactgtccgggctgcagcgggtggaatatctgtcgtttgtccaga

SEQ ID NO: 522466 - DNA, 75 bp, synthetic construct
  source 1..75: mol_type = other DNA
gccgcaggagccgaaagcaaccccgcaaaatgcgcaacagattgctgctcagcaggcaccatcaaccggaaatgt

SEQ ID NO: 522467 - DNA, 75 bp, synthetic construct
  source 1..75: mol_type = other DNA
tgacttcagtcatcccggattcccacaaccccgatgtatttcacgttcaagttgatacacgtgcagtgcttgctg

SEQ ID NO: 522468 - DNA, 75 bp, synthetic construct
  source 1..75: mol_type = other DNA
acagtgccggcatccacgccggttactgcacggaagcggagtatgcccgctttggcggaaccgatgtctgccctg

SEQ ID NO: 522469 - DNA, 75 bp, synthetic construct
  source 1..75: mol_type = other DNA
tatgctgctccagaaatcgggtgaccgtcgcctgaacattcgtcctgcttttatgttgacgcctgttgccattga

SEQ ID NO: 522470 - DNA, 75 bp, synthetic construct
  source 1..75: mol_type = other DNA
tgccgcaccgatggcaatggtggggctggcattcacccacagtggcagtgactttggcaatatcctgatggatgt

SEQ ID NO: 522471 - DNA, 75 bp, synthetic construct
  source 1..75: mol_type = other DNA
tgctgaagtctcagcaaaaggggtattacccaactgtcaggataccggcaccgcaactattgttgccagtaaagg

SEQ ID NO: 522472 - DNA, 75 bp, synthetic construct
  source 1..75: mol_type = other DNA
agctccggcaacgcactttcccaagcggccaatggtggtgcaaagatgctcggcgtaatggcctcgatggcagtg

SEQ ID NO: 522473 - DNA, 75 bp, synthetic construct
  source 1..75: mol_type = other DNA
tgggctacaacgaagtgaccttcttatccgaccgcgtgtgtgggatttgcggttttgcccacagtgtggcctata

SEQ ID NO: 522474 - DNA, 75 bp, synthetic construct
  source 1..75: mol_type = other DNA
caacgaaaagagcagggcgctcgagccgattattgcgtggattgagcagcagaaaaaacaggcaatgacagaaat

SEQ ID NO: 522475 - DNA, 75 bp, synthetic construct
  source 1..75: mol_type = other DNA
tgtatggcttttctaaaacagatgacgctatacacgcggaaacagaacaaggtgatttcacccttaacacacctc

SEQ ID NO: 522476 - DNA, 75 bp, synthetic construct
  source 1..75: mol_type = other DNA
ggctggaactatgcctctggtgcaaccagccttctcgatcagtgtgacgtgcgtgctgcctccgcccgcgtactc

SEQ ID NO: 522477 - DNA, 75 bp, synthetic construct
  source 1..75: mol_type = other DNA
cacggcctgaccagttacgcgagcacgaacggctgcgtgcgctgggctttaccgtggtggtattaaatagcaaaa

SEQ ID NO: 522478 - DNA, 75 bp, synthetic construct
  source 1..75: mol_type = other DNA
catgttaacgccgccgcgagctaccacgcaacgcgatccccagcaaccacaagtgcagcagccggtggtgagcca

SEQ ID NO: 522479 - DNA, 75 bp, synthetic construct
  source 1..75: mol_type = other DNA
ccagaattttgcagatgtgattgcagaggcccgccttgacgaagctgacgcaaaagcctggtatctgatggcggc

SEQ ID NO: 522480 - DNA, 75 bp, synthetic construct
  source 1..75: mol_type = other DNA
gcgctgctgggtaaagatgcttcaccatcggcgaaaaccatgccagcgcatattcatgcaggtaacggtaatttt

SEQ ID NO: 522481 - DNA, 75 bp, synthetic construct
  source 1..75: mol_type = other DNA
ctggtcagttccatctggcagaccattttgacctgcgggtagagcgccgggttcccggcatgtgtctggcggggg

SEQ ID NO: 522482 - DNA, 75 bp, synthetic construct
  source 1..75: mol_type = other DNA
agcgtttgccgggcatcgataccacgccaaaacagcgactgtttatccgtgatctgattgctccaggtcgtaccg

SEQ ID NO: 522483 - DNA, 75 bp, synthetic construct
  source 1..75: mol_type = other DNA
agcgtctgccgggtatcgacaccgcaccgaaacagcgccttttcatccgcgatctgatcgcgcctggccgcacct

SEQ ID NO: 522484 - DNA, 75 bp, synthetic construct
  source 1..75: mol_type = other DNA
cgctatcgagtcccgagcaagccagctgattaagtctgccagtgtacccggtgcggatgccaacagcggtatcaa

SEQ ID NO: 522485 - DNA, 75 bp, synthetic construct
  source 1..75: mol_type = other DNA
tgcagttcacatccatgcgggtaacgggaatattgttggtgattccattcgtgcggcggtgatgaaccgtgcggg

SEQ ID NO: 522486 - DNA, 75 bp, synthetic construct
  source 1..75: mol_type = other DNA
aaacatgcaaacgtactggagagcgctgcaatggacgtggcatcgctggataaagcccgccagttgatgcgcgtt

SEQ ID NO: 522487 - DNA, 75 bp, synthetic construct
  source 1..75: mol_type = other DNA
cgatctctgaacatccgcccggcatttatgctggtgccggtcgcgctggagacactggctaaccagacgattaaa

SEQ ID NO: 522488 - DNA, 75 bp, synthetic construct
  source 1..75: mol_type = other DNA
ggtgccgaatgtctggcacacggatttgctgaccaggtgacacccgctgttgaggcaatggcatgtattcagtca

SEQ ID NO: 522489 - DNA, 75 bp, synthetic construct
  source 1..75: mol_type = other DNA
tgtggatggcgttgccgcctcgatggcatctgtgattgcgatggccggtgatacggtcattatgccggaaaatgc

SEQ ID NO: 522490 - DNA, 75 bp, synthetic construct
  source 1..75: mol_type = other DNA
ctggtgctggcgcatcgcaaggacaatcatattcatatcgaccacgtctggcgtcagggtaaaagggtgttctga

SEQ ID NO: 522491 - DNA, 75 bp, synthetic construct
  source 1..75: mol_type = other DNA
acagcgactttggaccaacactggccgcagaaaaattacgcgaacggcacaacatcacagtatctgttgaaacgc

SEQ ID NO: 522492 - DNA, 75 bp, synthetic construct
  source 1..75: mol_type = other DNA
tagatataactaaccgatccatagcaaatgaaagttcatggatgatatttcattatgttctatcaaagatggttt

SEQ ID NO: 522493 - DNA, 75 bp, synthetic construct
  source 1..75: mol_type = other DNA
gtgagcatctggagctctgctgtggtaaggcaaggctggtgctgacaaaggacggtcaaatttttctcaacggca

SEQ ID NO: 522494 - DNA, 75 bp, synthetic construct
  source 1..75: mol_type = other DNA
cgggcaagggggctgaacagcttgggctgcagggcagtgttgataaggatgtctttacccgtcttctggagggga

SEQ ID NO: 522495 - DNA, 75 bp, synthetic construct
  source 1..75: mol_type = other DNA
ataataataaatcaaaatactaagccattattaattgatgtagtgagcaaagctgatgtctgtcatattcataat

SEQ ID NO: 522496 - DNA, 75 bp, synthetic construct
  source 1..75: mol_type = other DNA
ggtcatttagacgtatatggttcggcaaccaggacgataattaaagataaaggaacaatgtcagttttaacgaat

SEQ ID NO: 522497 - DNA, 75 bp, synthetic construct
  source 1..75: mol_type = other DNA
ttggtggtattaaggtgaatacagatatagtctttcttaagactatctgtagcgaacgttttttatttcgaacat

SEQ ID NO: 522498 - DNA, 75 bp, synthetic construct
  source 1..75: mol_type = other DNA
ggacctgttgcatgaactatcgcaatttactgcgctgggtgtgcggctgtgccatgttgaacaggatctgcaatt

SEQ ID NO: 522499 - DNA, 75 bp, synthetic construct
  source 1..75: mol_type = other DNA
ggtggcacaattattctgcaattggcgatttttaatctcctgctgccctttgtcattattggtattattggcggc

SEQ ID NO: 522500 - DNA, 75 bp, synthetic construct
  source 1..75: mol_type = other DNA
gcagatgccgttacaggttgttatctcaccccctacagtgaaaagcgccttgatgtgctggcaggatacctttcc

SEQ ID NO: 522501 - DNA, 75 bp, synthetic construct
  source 1..75: mol_type = other DNA
tccggcatcaaagtccggcctgcgcccggctggtgaaatcgttaatcgaaagccagcggccacgatacgtattga

SEQ ID NO: 522502 - DNA, 75 bp, synthetic construct
  source 1..75: mol_type = other DNA
actctagccgaaaaatatagcgaaaaaaaactaatggatagtttctcaccatcactatcacaagataaaatggac

SEQ ID NO: 522503 - DNA, 75 bp, synthetic construct
  source 1..75: mol_type = other DNA
cagtatgaagtgtatgactaccccggacgtttcaagggcgcccacgggcagaactttgcccgctggcagatggac

SEQ ID NO: 522504 - DNA, 75 bp, synthetic construct
  source 1..75: mol_type = other DNA
ttgcacccgccattgcttgcggttttaatgagcgctctgagaattgttttgaacgaagtcgatgcttttgctatt

SEQ ID NO: 522505 - DNA, 75 bp, synthetic construct
  source 1..75: mol_type = other DNA
ctgaagcggggattaatcccataagcgctaacttaagggttgaaccatctgaagaatgcgacgcctcggtgcctc

SEQ ID NO: 522506 - DNA, 75 bp, synthetic construct
  source 1..75: mol_type = other DNA
caaaattgttgtatggcctgatgccgccgggacctgcatggtcagataccgacggtgtgcttgacggtctggcac

SEQ ID NO: 522507 - DNA, 75 bp, synthetic construct
  source 1..75: mol_type = other DNA
atcttaaaaactcaactataacgttgaatgtaataatgcctgatactaacttcactctattgagtgtaaccaaat

SEQ ID NO: 522508 - DNA, 75 bp, synthetic construct
  source 1..75: mol_type = other DNA
tatgatattgccacaataatccatgaccaaaaattcttcagggcaactacattctcatatggggaacaatatgtt

SEQ ID NO: 522509 - DNA, 75 bp, synthetic construct
  source 1..75: mol_type = other DNA
tataagttaatgcaggccacagataatatgcctgaagacattatttttaaagcatattacctgccttacaaaaag

SEQ ID NO: 522510 - DNA, 75 bp, synthetic construct
  source 1..75: mol_type = other DNA
gcgtaaaacggctattgtctgcggtttgatgatgtcggcattaggcacgttgctggtcgtgcaatcctcctcgcc

SEQ ID NO: 522511 - DNA, 75 bp, synthetic construct
  source 1..75: mol_type = other DNA
agcagtgaagggcttcgcaatgctatccctccagaaagtcgtcaagtatcatttgccatcatatctcctgatgtt

SEQ ID NO: 522512 - DNA, 75 bp, synthetic construct
  source 1..75: mol_type = other DNA
atgaaccgatttataacgtcctctttttttattattgtcttcctgctttctggctgttcaacatcagggaaccag

SEQ ID NO: 522513 - DNA, 75 bp, synthetic construct
  source 1..75: mol_type = other DNA
cttgagatcgacttcaagggagagaccgttagtaaatggactttctcctctgataacaacaacaccaaaactggt

SEQ ID NO: 522514 - DNA, 75 bp, synthetic construct
  source 1..75: mol_type = other DNA
gccctcttgggcgagccagatacaagaaccaatcttgataacggtaatgaagaatggacttactttatgaataac

SEQ ID NO: 522515 - DNA, 75 bp, synthetic construct
  source 1..75: mol_type = other DNA
cagcaaagtttgggggaaggtggacacggttatgcattgtgtctgagctgtggccgtgctgagtcgatgctgaat

SEQ ID NO: 522516 - DNA, 75 bp, synthetic construct
  source 1..75: mol_type = other DNA
tgggccgctcgccggagatatggccgggacggcgaattgtgctgacggggcatccgcaggcgaacctgaaccggg

SEQ ID NO: 522517 - DNA, 75 bp, synthetic construct
  source 1..75: mol_type = other DNA
attcagctacaggtcggggaatcgacggtaatcaggctgtcgaaggatggcatcaccatcgtgggcagttctgtt

SEQ ID NO: 522518 - DNA, 75 bp, synthetic construct
  source 1..75: mol_type = other DNA
caaaattgcgctgacgccggatggcattcagctacaggtcggggaatcgacggtaatcaggctgtcgaaggatgg

SEQ ID NO: 522519 - DNA, 75 bp, synthetic construct
  source 1..75: mol_type = other DNA
cggacggttgcgcgcgctgggctttaccgtagtggtgctggatagcaaaaatctggaggccattattttaagccg

SEQ ID NO: 522520 - DNA, 75 bp, synthetic construct
  source 1..75: mol_type = other DNA
gaatgacaacggcgacctggtgcgcatcagcggcccgcgacagacgcgggaatacggctacagcgccacgggcag

SEQ ID NO: 522521 - DNA, 75 bp, synthetic construct
  source 1..75: mol_type = other DNA
gacagaacatggcgaccacagccgttgctgaaaccgctggtcgacggcccgcagagcgccgtcgtgacgggaccg

SEQ ID NO: 522522 - DNA, 75 bp, synthetic construct
  source 1..75: mol_type = other DNA
gctggaatcgctaacgcaaacccggcgctggagatggaaagcgagcaatggcaacgcgttatcgatatcaacctg

SEQ ID NO: 522523 - DNA, 75 bp, synthetic construct
  source 1..75: mol_type = other DNA
acgccaccagaaactgaaggagatgagtgaaggcattgtgtcgatgtttcgagtggacccggatctggctggtcc

SEQ ID NO: 522524 - DNA, 75 bp, synthetic construct
  source 1..75: mol_type = other DNA
acatgaacgtctgcgaaagctgggctttaccgtggtggtactggatagcaaagagctggggggaattattccccc

SEQ ID NO: 522525 - DNA, 75 bp, synthetic construct
  source 1..75: mol_type = other DNA
ttacggataaccctcgatacattgcggagaaaaattatatggaagctttactcaaaaaagcatctccccataccg

SEQ ID NO: 522526 - DNA, 75 bp, synthetic construct
  source 1..75: mol_type = other DNA
ggatttcaggacgttattcaccactgcgcattgcagcagtgactgactttatcattgtactggcactgttgatgc

SEQ ID NO: 522527 - DNA, 75 bp, synthetic construct
  source 1..75: mol_type = other DNA
cagaagctgttccgcttcctggataaccgtttcgactccgaacagtaccgcgagaacgtgcgccagctgacaccc

SEQ ID NO: 522528 - DNA, 75 bp, synthetic construct
  source 1..75: mol_type = other DNA
cgttgttgcagtcctcacaggtagggctgcataaatcactgatggtgggaatgggctacagcgtcaatgtgggga

SEQ ID NO: 522529 - DNA, 75 bp, synthetic construct
  source 1..75: mol_type = other DNA
tttccggatgtccccatgacactgtatgaagccattgtccgcgattataccggcaggacaccggaagcacgggag

SEQ ID NO: 522530 - DNA, 75 bp, synthetic construct
  source 1..75: mol_type = other DNA
tggccctgcagggcagccgtaacggagagagcctgctggctgataatatgcaggatggtgtccggattgcccgtg

SEQ ID NO: 522531 - DNA, 75 bp, synthetic construct
  source 1..75: mol_type = other DNA
gcagatgcagattgaaaacttcgatgtcagtccgttcctctgcggggttatcgccctgtcactgctgtatgccgc

SEQ ID NO: 522532 - DNA, 75 bp, synthetic construct
  source 1..75: mol_type = other DNA
aaaacatcaacagaattgagaaatgcattaaatttaatcagtaaaaaagatgatatcgagttagttatacctgat

SEQ ID NO: 522533 - DNA, 75 bp, synthetic construct
  source 1..75: mol_type = other DNA
tttgctgacctggggcgggaaatcaatgcgcagataaaacggggcgatttactgcatgtggatgtggcaaaaggt

SEQ ID NO: 522534 - DNA, 75 bp, synthetic construct
  source 1..75: mol_type = other DNA
ctgaggtgttaaccgaccctaccgatgtgatttgttccaccagcattgagcgcatcgtcaccggacgtaacgctg

SEQ ID NO: 522535 - DNA, 75 bp, synthetic construct
  source 1..75: mol_type = other DNA
taatgccattatcgacgctcctattctggatcaagccgatgtcgctatccccggtatgcacttctcaaaatcttt

SEQ ID NO: 522536 - DNA, 75 bp, synthetic construct
  source 1..75: mol_type = other DNA
gcagcgttatgtcccgctggtgcgtcacgaagcattacgcctgcaggttcgactgcccgcgagcgtggaacttga

SEQ ID NO: 522537 - DNA, 75 bp, synthetic construct
  source 1..75: mol_type = other DNA
acagcagtttattctgccggtgagcatcttgaactctgctgtggtaaggcaaggctggtgctgacgaaggacgga

SEQ ID NO: 522538 - DNA, 75 bp, synthetic construct
  source 1..75: mol_type = other DNA
tttagcggtacgttgattcgcctgcatattggtctggaaaacgtcgatgatttgattgccgatctggacgcgggc

SEQ ID NO: 522539 - DNA, 75 bp, synthetic construct
  source 1..75: mol_type = other DNA
cgctggatagcaaggggatttattcgcaagtaaaatgcctgataaaatacacgaatctagtaatcatcaatattt

SEQ ID NO: 522540 - DNA, 75 bp, synthetic construct
  source 1..75: mol_type = other DNA
caccacggcctgaccagttacgcgagcacgaacggctgcgcgcgttgggctttaccgtggtggtattagatagca

SEQ ID NO: 522541 - DNA, 75 bp, synthetic construct
  source 1..75: mol_type = other DNA
ttgatcgcggcggataaaggtaatatcgatagctataccctgggggcttatgccggttgggagcatcagaacggt

SEQ ID NO: 522542 - DNA, 75 bp, synthetic construct
  source 1..75: mol_type = other DNA
tccagggtgatccgggacgcagaaaaatactagatgccatcggtaaagatgtaaaggaacgcgctaccaaaagct

SEQ ID NO: 522543 - DNA, 75 bp, synthetic construct
  source 1..75: mol_type = other DNA
aaaagcgccgttctataaagacggcgaatggaaaaacgctctgaactcccctgcgccgctgggcgagctggaatc

SEQ ID NO: 522544 - DNA, 75 bp, synthetic construct
  source 1..75: mol_type = other DNA
acagaaaatgttatgaggaatcactagacatttattctgatgaggtgagaaagattttcatagaacaagaaaata

SEQ ID NO: 522545 - DNA, 75 bp, synthetic construct
  source 1..75: mol_type = other DNA
aggttaaacattacagatgcgacagtttatcaaggcatggaaaggacaatgaaactaattgcggcccaattttcc

SEQ ID NO: 522546 - DNA, 75 bp, synthetic construct
  source 1..75: mol_type = other DNA
ccggttgtatgctttccggaattaacgtgcaggaaaccggctcccggtctgcggacaatatcggtggggtctatt

SEQ ID NO: 522547 - DNA, 75 bp, synthetic construct
  source 1..75: mol_type = other DNA
ataacgaagaaaagtatggtgccatcgtatccgatggaattattgacttgcataaattatttcccgaacttcccg

SEQ ID NO: 522548 - DNA, 75 bp, synthetic construct
  source 1..75: mol_type = other DNA
tatatattatcataatacccacttgtgtgattatttcgcttaattcgacccaaatcctaaatatttggataggaa

SEQ ID NO: 522549 - DNA, 75 bp, synthetic construct
  source 1..75: mol_type = other DNA
atatatgcttgtgtgctgtcgtaacagtagttatatgtagcatttttaagaatcaagaatctcaaatattcttgt

SEQ ID NO: 522550 - DNA, 75 bp, synthetic construct
  source 1..75: mol_type = other DNA
gatctggcacgaagttggtcacaacgccgccgaaacgccgctgactgttcctggcgcaactgaagtagcgaacaa

SEQ ID NO: 522551 - DNA, 75 bp, synthetic construct
  source 1..75: mol_type = other DNA
gtggcgcatgcccgttcccgtggtctgcgtcggcgcatgccaccggtactgcgtcgtcgggctattgatgcgctg

SEQ ID NO: 522552 - DNA, 75 bp, synthetic construct
  source 1..75: mol_type = other DNA
ttgttgaagttgagatttcaagaattggttgcctgataaatcacattataagcgacaacgaagagtatccggtca

SEQ ID NO: 522553 - DNA, 75 bp, synthetic construct
  source 1..75: mol_type = other DNA
ttgctaacgctactgttctggtttgcttactcccttacatatcaccatttaaaactggactcgacagccagccat

SEQ ID NO: 522554 - DNA, 75 bp, synthetic construct
  source 1..75: mol_type = other DNA
gagaggcaacttgatgaaaaataactccttttcactagttttctctgcaacccatgctgaagaacgattaacaaa

SEQ ID NO: 522555 - DNA, 75 bp, synthetic construct
  source 1..75: mol_type = other DNA
tggtgaaattagtttccaataagtccattgcacaccaggagagcctttcaggaaaaaaacgggaaaagatagact

SEQ ID NO: 522556 - DNA, 75 bp, synthetic construct
  source 1..75: mol_type = other DNA
ttgcccctatatttccagacacctgttatcacttaacccattactggcttgctgccgtagatattcccgtggcga

SEQ ID NO: 522557 - DNA, 75 bp, synthetic construct
  source 1..75: mol_type = other DNA
acttttatactatgaggcatgggcgtggaatacgctcagactgtttggtactttcctgctaatgcagtttgtggc

SEQ ID NO: 522558 - DNA, 75 bp, synthetic construct
  source 1..75: mol_type = other DNA
acgataatgacgcggaaaacgcttttgaggcgctcgcagtggacttactgagcgggttgctgggggcgcatgata

SEQ ID NO: 522559 - DNA, 75 bp, synthetic construct
  source 1..75: mol_type = other DNA
aaacaaagagtttggttaactgaatttgacgtagataaacgcattgctggtattcaaaaggagcgcggataccac

SEQ ID NO: 522560 - DNA, 75 bp, synthetic construct
  source 1..75: mol_type = other DNA
tgtatcgatgtgaaataaaaaattttaacatagatacatcaaaaatatactctgtaaatcaagatcccaatgtgg

SEQ ID NO: 522561 - DNA, 75 bp, synthetic construct
  source 1..75: mol_type = other DNA
ttcagtatttgaaaattgtttttttgagggctgtaaatttgagaatgtgtcacttataagctccaggtgtcgagt

SEQ ID NO: 522562 - DNA, 75 bp, synthetic construct
  source 1..75: mol_type = other DNA
atctcctgacaccctaaaatatatggatttaaatgaagcaacccggatcacattttctcagaaaggtatccttta

SEQ ID NO: 522563 - DNA, 75 bp, synthetic construct
  source 1..75: mol_type = other DNA
gcattatgggtacaccgatggccattaatctggcgcgtgccggtcatcaattacatgtcacgaccattggaccgg

SEQ ID NO: 522564 - DNA, 75 bp, synthetic construct
  source 1..75: mol_type = other DNA
gcatgattaaacgcacctttaatccaggttttaaaattgcgctgcaccagaaagatctcaacctggcactgcaaa

SEQ ID NO: 522565 - DNA, 75 bp, synthetic construct
  source 1..75: mol_type = other DNA
ttattattatatggaatgctgatgacttttgatttaatatctatgattttcatgacagcgtatgcgcttttagct

SEQ ID NO: 522566 - DNA, 75 bp, synthetic construct
  source 1..75: mol_type = other DNA
ggatcaatgagcggcaaggatttttgtttgccaaaccgatgcccgccgtcgccttcgaacgctggtataaacgct

SEQ ID NO: 522567 - DNA, 75 bp, synthetic construct
  source 1..75: mol_type = other DNA
ttcccggtagcggcaataccagcagtgctgagacaaccgccccggaagccgcacgtcagccggaacacctgccgg

SEQ ID NO: 522568 - DNA, 75 bp, synthetic construct
  source 1..75: mol_type = other DNA
gagctattcagataaatatctggaaattgaacttaacgaagataccgttagaaactatttatcgtattacaacca

SEQ ID NO: 522569 - DNA, 75 bp, synthetic construct
  source 1..75: mol_type = other DNA
aatcatatacatcctgattttaaggatgctttaactttttcattactttcaatttttagtgatgttgacaacctt

SEQ ID NO: 522570 - DNA, 75 bp, synthetic construct
  source 1..75: mol_type = other DNA
tttatctttaccaattttattattgcaatactgctcatccgtacttttgcgcttctgatgcagggaaaattgtta

SEQ ID NO: 522571 - DNA, 75 bp, synthetic construct
  source 1..75: mol_type = other DNA
ctatccgctatgataggtccagataaatttgattctatagatagcaccgcatatgacgccttaaataaaataaat

SEQ ID NO: 522572 - DNA, 75 bp, synthetic construct
  source 1..75: mol_type = other DNA
tggcgattatgttgatgaatttttttcaagtagcgataaaaatcttgtaagaagtaaagataataatcttgaagc

SEQ ID NO: 522573 - DNA, 75 bp, synthetic construct
  source 1..75: mol_type = other DNA
aaatattcttttaggcatgtccttcggtttatgggcctatgtgataggatatgttttaattaaaggattaaatgc

SEQ ID NO: 522574 - DNA, 75 bp, synthetic construct
  source 1..75: mol_type = other DNA
attccatccctttatccatgcagcgacagtttcctgatttaacaccgcgccatcttgaccatctgaaaaccctta

SEQ ID NO: 522575 - DNA, 75 bp, synthetic construct
  source 1..75: mol_type = other DNA
gaagtatcaccgcaaaggtggcctttccccgtggcagattgaagcggtggctgccgcgcttggatttactatccg

SEQ ID NO: 522576 - DNA, 75 bp, synthetic construct
  source 1..75: mol_type = other DNA
ggactgaaggggggatggaatttttatcagtatccgttgaatccggttcagtatatagattcaatgggactggca

SEQ ID NO: 522577 - DNA, 75 bp, synthetic construct
  source 1..75: mol_type = other DNA
cgatacagaacgacaggagccgcatccagacgatttatcagccggggagcttcacaccactcatcagagttgaaa

SEQ ID NO: 522578 - DNA, 75 bp, synthetic construct
  source 1..75: mol_type = other DNA
gaaatatactttttaatattatagcttataaatatttcaaggaaactacgttaggaatcgcatattcgatatctg

SEQ ID NO: 522579 - DNA, 75 bp, synthetic construct
  source 1..75: mol_type = other DNA
caatactgctcatccgtacttttgcgcttctgatgcagggaaaattgttagtcagaaccgagcgcgccgttttaa

SEQ ID NO: 522580 - DNA, 75 bp, synthetic construct
  source 1..75: mol_type = other DNA
cggttggtgagactacgcattcgcttattgcaaccgtgccgagaaaagggttcaagatcaataatgatataaaca

SEQ ID NO: 522581 - DNA, 75 bp, synthetic construct
  source 1..75: mol_type = other DNA
aatattacttatacaagatatgctgatgatcttacattttctactaatgaaaaaggtattttgtatgaattcata

SEQ ID NO: 522582 - DNA, 75 bp, synthetic construct
  source 1..75: mol_type = other DNA
gttacagggacaggcttcttgcagtgtgcgaagcagcgatgttctgattgtgctccctcgggataatagctatgt

SEQ ID NO: 522583 - DNA, 75 bp, synthetic construct
  source 1..75: mol_type = other DNA
ctggcgattgaattacatcaggacattccggaagaagagaaaccgcagcgcatcgccatcaacaacaacccggcg

SEQ ID NO: 522584 - DNA, 75 bp, synthetic construct
  source 1..75: mol_type = other DNA
acggatattgattaacattaaccacgattttcctaacaatggtaatcttttcaatgactttctatttaaccatca

SEQ ID NO: 522585 - DNA, 75 bp, synthetic construct
  source 1..75: mol_type = other DNA
tattgggacaagccaatgttctaagaggaaagtcagccatcgttcaaatgcccaccagtgcaggtaagacaaagg

SEQ ID NO: 522586 - DNA, 75 bp, synthetic construct
  source 1..75: mol_type = other DNA
agacggtggcagtgtggtgttcccgccggtgctggtgcagatgctcgaccggctggaaagtgaaatcctggctga

SEQ ID NO: 522587 - DNA, 75 bp, synthetic construct
  source 1..75: mol_type = other DNA
ccacatccggatttattcgccagcagggcattggctttgcgaaaaaatatcaagaaataagcgtttgtctggtag

SEQ ID NO: 522588 - DNA, 75 bp, synthetic construct
  source 1..75: mol_type = other DNA
gaccataaatctggcaaaattctcgatgagacaccagctgaaaccttgaccatgatgaaaaaaagctttatttcc

SEQ ID NO: 522589 - DNA, 75 bp, synthetic construct
  source 1..75: mol_type = other DNA
taatcctgagactattacaaaaataaaggtttcacgcccggaggatcttgaagcgtgtggtgttatcgtggaaaa

SEQ ID NO: 522590 - DNA, 75 bp, synthetic construct
  source 1..75: mol_type = other DNA
cgctcaggaagagatgggatgggaaaaagccgcatatcgttctgtggaagctcttatctcaattactcataattc

SEQ ID NO: 522591 - DNA, 75 bp, synthetic construct
  source 1..75: mol_type = other DNA
ggttttaacacaacatacaacttttggtgaaattggtgagcaaaaaaatactgacactctatcacaagagttgaa

SEQ ID NO: 522592 - DNA, 75 bp, synthetic construct
  source 1..75: mol_type = other DNA
gacgctattgaagtgcaactggcacatgccaacggcggatctgtgcgcgggatttacaaccacgctcagtatcta

SEQ ID NO: 522593 - DNA, 75 bp, synthetic construct
  source 1..75: mol_type = other DNA
tgggctgatgactcacttaatgttgatgaactgaatatcactctggataatggttctaagtgggtaggctctaga

SEQ ID NO: 522594 - DNA, 75 bp, synthetic construct
  source 1..75: mol_type = other DNA
agtaacatcaatatttctaacaactcccgcgttgctggtatcagcctgactcagggtaataccgtaaacaatact

SEQ ID NO: 522595 - DNA, 75 bp, synthetic construct
  source 1..75: mol_type = other DNA
ctcgccgggataacgccagttacagcgcacgcggacgaaattgccaccccattcaatgaggaggttgattactga

SEQ ID NO: 522596 - DNA, 75 bp, synthetic construct
  source 1..75: mol_type = other DNA
atgagtgagattgttgctggatccattctccagttattacgtcaggctcaggatagccaattccctacgtttggg

SEQ ID NO: 522597 - DNA, 75 bp, synthetic construct
  source 1..75: mol_type = other DNA
cataatggtatccatacagaatacatcacagatcaaaaaaacagtaataataaagatcgtgaaaaaaaataccgc

SEQ ID NO: 522598 - DNA, 75 bp, synthetic construct
  source 1..75: mol_type = other DNA
gacgattgctgggaaggctgggccatactcctccggcagaagcacaaaaagctcattatgcttccatcggaaaca

SEQ ID NO: 522599 - DNA, 75 bp, synthetic construct
  source 1..75: mol_type = other DNA
tttgccggatacatcgtggggtggcgggtctcatcgtctatggaaacgccattcgtgctggagcaggcgttgtgg

SEQ ID NO: 522600 - DNA, 75 bp, synthetic construct
  source 1..75: mol_type = other DNA
tttacactcggtatccgtcatacactggggcatgatgaccaccgtctttgccttaagccatgttgcgtttttgat

SEQ ID NO: 522601 - DNA, 75 bp, synthetic construct
  source 1..75: mol_type = other DNA
attacagcattacgcctgaaggttataatggctatactttcaataacggaactactactgatcttgactacaatt

SEQ ID NO: 522602 - DNA, 75 bp, synthetic construct
  source 1..75: mol_type = other DNA
aacagtccactggcacagacgatggcgcataagctcgggaatttgcccaaaaagatgcttgcggagatcctgcgt

SEQ ID NO: 522603 - DNA, 75 bp, synthetic construct
  source 1..75: mol_type = other DNA
aatcttaatgtagaaagtaacatcaatatctccaataactcccgtgttgcaggtattgcgttatctcaaggtagt

SEQ ID NO: 522604 - DNA, 75 bp, synthetic construct
  source 1..75: mol_type = other DNA
ttaataagatgtttggtgttcagcggggatttcggcaggctggtcttaacggtgactcgttcatttcatcttctg

SEQ ID NO: 522605 - DNA, 75 bp, synthetic construct
  source 1..75: mol_type = other DNA
gacaggccaatatcacggaagcctgtttagagagtggatatatctgctgacatccaccgatgagttggctcgcta

SEQ ID NO: 522606 - DNA, 75 bp, synthetic construct
  source 1..75: mol_type = other DNA
ctgtatctattcttgcacatacgacaagtaataatagagctttagggttaatatttggattagataacgaaaaca

SEQ ID NO: 522607 - DNA, 75 bp, synthetic construct
  source 1..75: mol_type = other DNA
cccgacaacagccttagccgctggggagctccacgctcaacctgccagttattacccaaagcgaaagcctggctg

SEQ ID NO: 522608 - DNA, 75 bp, synthetic construct
  source 1..75: mol_type = other DNA
actttgcgcctaaatcaccgatgttcagtgactctcctcgcgcaaccgcatcagacagtctcaccggcactgacg

SEQ ID NO: 522609 - DNA, 75 bp, synthetic construct
  source 1..75: mol_type = other DNA
acgctgaatgattttctcggtgccatgacggaagatgatgtcatgccggaggcattgcgtcgttttgaggtaatg

SEQ ID NO: 522610 - DNA, 75 bp, synthetic construct
  source 1..75: mol_type = other DNA
atggcaccgcttctgtatcccgcgggtttggaaagcggcttatttcatctggtgggccattcatccacagggaaa

SEQ ID NO: 522611 - DNA, 75 bp, synthetic construct
  source 1..75: mol_type = other DNA
tggaagtggacggcctgccaccggacgcttttgcggtggtttcctttcatttgaaccagtcactctcttcgctct

SEQ ID NO: 522612 - DNA, 75 bp, synthetic construct
  source 1..75: mol_type = other DNA
cgggaatatgacgaagcaattcacaaaggcagttggtggtgcggaagaggctctgaagctattggcagcagcata

SEQ ID NO: 522613 - DNA, 75 bp, synthetic construct
  source 1..75: mol_type = other DNA
gggcttactggcgctgcccaaaatttgctggttcttggcgctcgtaccggattagatatcaataagctcggcgac

SEQ ID NO: 522614 - DNA, 75 bp, synthetic construct
  source 1..75: mol_type = other DNA
acattcatctggaaggggagtcggatgtgaacggtgatgcgccagtgattaactggaactgtggtgccacacaac

SEQ ID NO: 522615 - DNA, 75 bp, synthetic construct
  source 1..75: mol_type = other DNA
agacggttggtgtcaaccaggtggaaacggtgggcagtaaccagattatcaaagtgggatcaaaccaggttgaaa

SEQ ID NO: 522616 - DNA, 75 bp, synthetic construct
  source 1..75: mol_type = other DNA
ctgccggggacgaagacgcagatgacgatccgctcgaaaacctataagggcagcgggtttaatgaactgaagttt

SEQ ID NO: 522617 - DNA, 75 bp, synthetic construct
  source 1..75: mol_type = other DNA
acccggagcaactggcggtgcataacaaggccgtaacgctggcgaaggccgaaggcatcagttacgaagccgccg

SEQ ID NO: 522618 - DNA, 75 bp, synthetic construct
  source 1..75: mol_type = other DNA
gcttattgaggggcaaagaacgaactacatgctcaattcggaaagccctgccagttgggggcgatcgtcaaatat

SEQ ID NO: 522619 - DNA, 75 bp, synthetic construct
  source 1..75: mol_type = other DNA
tgctgcaggagcgtctgcagcagatggagcgggatatggtccgtgacctgcagaaagagaaaaccctgggcggag

SEQ ID NO: 522620 - DNA, 75 bp, synthetic construct
  source 1..75: mol_type = other DNA
cccggcgtaaggggcaggaattaactaggctgctttgggcgcttcgtgcagaccgacatcctgcgtgcgattttg

SEQ ID NO: 522621 - DNA, 75 bp, synthetic construct
  source 1..75: mol_type = other DNA
atgacgttcgcacttggctttctgaaaaggcggtgaaaaaattcggaatcacttatataagtaacgattttaacg

SEQ ID NO: 522622 - DNA, 75 bp, synthetic construct
  source 1..75: mol_type = other DNA
ttccttggcatgaaaattatatatactagccaagccgttgtttatcataaattgcaaaaagccactgacggcatg

SEQ ID NO: 522623 - DNA, 75 bp, synthetic construct
  source 1..75: mol_type = other DNA
ttgtctgtaacgattctctgattgggcaaacctcagccattaatatggcatcaattgcagcaacaaagtcagttg

SEQ ID NO: 522624 - DNA, 75 bp, synthetic construct
  source 1..75: mol_type = other DNA
tgtgtggtgtgctgccgtttaggtcggataagacgggtacgctgcatccgacaatgagtgcggtgccgttgcctg

SEQ ID NO: 522625 - DNA, 75 bp, synthetic construct
  source 1..75: mol_type = other DNA
ttttgggactattggcgctggccgtattggacttgctgtattacgcagattaaaagcgtttgatatgccattgca

SEQ ID NO: 522626 - DNA, 75 bp, synthetic construct
  source 1..75: mol_type = other DNA
tggcaagccatgaaaatacggcgcaaattattgatgcccgcccggctgcacgttttaacgcagaagttgatgaac

SEQ ID NO: 522627 - DNA, 75 bp, synthetic construct
  source 1..75: mol_type = other DNA
atttccgatccttgctgtggatgaatatcaggatttgggcgtggcgctccaccgtatggttaaacgcctggcttt

SEQ ID NO: 522628 - DNA, 75 bp, synthetic construct
  source 1..75: mol_type = other DNA
ctggcccgaatcctggccgaggatgttcaggctccacgtggcgcggcatgtatcacatatagccaagaatgtgct

SEQ ID NO: 522629 - DNA, 75 bp, synthetic construct
  source 1..75: mol_type = other DNA
gacaaatagccaatgctgttccacccaaactaggtatagccttaggtaaaatgttaattgagcatcataaaacga

SEQ ID NO: 522630 - DNA, 75 bp, synthetic construct
  source 1..75: mol_type = other DNA
atgacaactaacaccaataccccagaagcagctgagcaagataatattgtccccatggatgcaatgaatgatccc

SEQ ID NO: 522631 - DNA, 75 bp, synthetic construct
  source 1..75: mol_type = other DNA
cagcagtaccgcaagaattgatttctctgttcccggttcagtctgagctgtcgtttagtgactataaaattctgt

SEQ ID NO: 522632 - DNA, 75 bp, synthetic construct
  source 1..75: mol_type = other DNA
agagcataaccttcgggagatcggcttaagattgatggctctgaaagcgtctggattcaatcaaaaggaaattgc

SEQ ID NO: 522633 - DNA, 75 bp, synthetic construct
  source 1..75: mol_type = other DNA
gttgaaagtaagacattcgtaaaccaggaaatcaacggaagagatcaacttgctctgaccagggagtccctgaaa

SEQ ID NO: 522634 - DNA, 75 bp, synthetic construct
  source 1..75: mol_type = other DNA
cctaataacccaaagcccggcgcgttgtatctgcgccacgtgggttttctcggtgcgcagccgcctgccgtaaaa

SEQ ID NO: 522635 - DNA, 75 bp, synthetic construct
  source 1..75: mol_type = other DNA
actgcaacacattgatcggctgaacagtattgaatcactggcattgccggaaggtattgatcgtaccattcatca

SEQ ID NO: 522636 - DNA, 75 bp, synthetic construct
  source 1..75: mol_type = other DNA
ttatccagcgttataccgatgcggaaatagctgtgctggatggaaagtctataacattcaacgggcagcagatga

SEQ ID NO: 522637 - DNA, 75 bp, synthetic construct
  source 1..75: mol_type = other DNA
agaaccaccggataagcgccgccgtgacctggacaacattctgaaagcaccgctggatgcgctgacgcatgcgga

SEQ ID NO: 522638 - DNA, 75 bp, synthetic construct
  source 1..75: mol_type = other DNA
ggacaccgagggcgagcaactggttcagttcggcgcgttcaagactgcgactgtgcctgtgtggttggcaggcat

SEQ ID NO: 522639 - DNA, 75 bp, synthetic construct
  source 1..75: mol_type = other DNA
atgacgcaagcagcttggacgcgcgacggtcggccggtggatgcggcttccattcccggtgccgagtgggaggcg

SEQ ID NO: 522640 - DNA, 75 bp, synthetic construct
  source 1..75: mol_type = other DNA
ttggtagacagttaaatactcaggcgttaatggtcgagatgactgacacccaaagaagtcaggtatttaccctta

SEQ ID NO: 522641 - DNA, 75 bp, synthetic construct
  source 1..75: mol_type = other DNA
ttatcctactccttggtacgatataactccaaaaaatacttatatccccatagtcaatcactggataaacgtgga

SEQ ID NO: 522642 - DNA, 75 bp, synthetic construct
  source 1..75: mol_type = other DNA
gtggcgcttattgttcgccagcagcggctgaaattaagcctgtccggacggctggcaataaaaattattgcagaa

SEQ ID NO: 522643 - DNA, 75 bp, synthetic construct
  source 1..75: mol_type = other DNA
acatcctctggggcatgacttacaccattatggatattcccttctggtcgctggttccaaccatcacgctcgata

SEQ ID NO: 522644 - DNA, 75 bp, synthetic construct
  source 1..75: mol_type = other DNA
aattcgacatgattggcctagacattaccttcccgaaagagggaatagcgccaggggtgcaggagactgccgatg

SEQ ID NO: 522645 - DNA, 75 bp, synthetic construct
  source 1..75: mol_type = other DNA
ctggccgacggcagtatacccgaacctgctgatatggccggcggccatgctgctgggggtggccatcactgtgac

SEQ ID NO: 522646 - DNA, 75 bp, synthetic construct
  source 1..75: mol_type = other DNA
acaacaagccgtgcacgatatggcgcaagggcgcaggcggtaatgacgagtggggcgatcctgtcgacccatacg

SEQ ID NO: 522647 - DNA, 75 bp, synthetic construct
  source 1..75: mol_type = other DNA
gtttattgcacccgggcgcaaatatccgcagccgtatgtggcactgccggcttttgaccgtaacggcaagtcagc

SEQ ID NO: 522648 - DNA, 75 bp, synthetic construct
  source 1..75: mol_type = other DNA
gcggggaactcagcagcaacaatatttcccgcagtgctgccagcggtttatccccgctggcgcggggaactctga

SEQ ID NO: 522649 - DNA, 75 bp, synthetic construct
  source 1..75: mol_type = other DNA
atgactctcggcattcgcccggaacatattgcgctaagctcgcaggcagaaggtggcgttccgctggtgatgggc

SEQ ID NO: 522650 - DNA, 75 bp, synthetic construct
  source 1..75: mol_type = other DNA
cctactattacatggtatggaaaattcagggtatagcatacaaaaatgggatccttcatataggcgtaggtggca

SEQ ID NO: 522651 - DNA, 75 bp, synthetic construct
  source 1..75: mol_type = other DNA
tcacatatgtgcattgatggtaatttactcttctgcacattaaacgcgacaccagtaggattgtcacaatcacag

SEQ ID NO: 522652 - DNA, 75 bp, synthetic construct
  source 1..75: mol_type = other DNA
gaacctatacccacacttccatctgccgctgtcagggcgaacaagataatagccttcgataatagtgggtctcct

SEQ ID NO: 522653 - DNA, 75 bp, synthetic construct
  source 1..75: mol_type = other DNA
ccgtattttaccttttgcgttatatcgccagggctacgagtactactggaaaacccacgcacacccaaacatatt

SEQ ID NO: 522654 - DNA, 75 bp, synthetic construct
  source 1..75: mol_type = other DNA
ctggatttaaatggttatgatcagagttttaataaaattgcagcgacagatataggagcactcataacaaatagt

SEQ ID NO: 522655 - DNA, 75 bp, synthetic construct
  source 1..75: mol_type = other DNA
gatggatttaacatgctggatgccgcttccggatattgtcctctcccaacatatggatttaataggctcatgcgt

SEQ ID NO: 522656 - DNA, 75 bp, synthetic construct
  source 1..75: mol_type = other DNA
tattcctggctccagccgtcctggccgtatggcagaagatctggctgcactgaatgcgcctgttccggctgaatt

SEQ ID NO: 522657 - DNA, 75 bp, synthetic construct
  source 1..75: mol_type = other DNA
gataaagatttaaaagtcaggacagtacgtatgtggcttctgatgcgcaagctgaagaaaaatgagcatggagaa

SEQ ID NO: 522658 - DNA, 75 bp, synthetic construct
  source 1..75: mol_type = other DNA
aacctgatcgaaggtctcactgtgtacttcgccttaaaaagcggctccaccacattaacgtcattaacagcagtg

SEQ ID NO: 522659 - DNA, 75 bp, synthetic construct
  source 1..75: mol_type = other DNA
tgcctgtcgcgatcctctatctggccttacaaaaatacttcgtctccggtctgacttccgggagtactaagggat

SEQ ID NO: 522660 - DNA, 75 bp, synthetic construct
  source 1..75: mol_type = other DNA
caagcatctgacagaaatgatgccgattatttataccccggtggttggccatgcctgcgaacacttttccgacat

SEQ ID NO: 522661 - DNA, 75 bp, synthetic construct
  source 1..75: mol_type = other DNA
tcgccgtaaatatcccgcaggaaaccttgcaacataacatttcgagcggattctgggagccgcagtatcttcagt

SEQ ID NO: 522662 - DNA, 75 bp, synthetic construct
  source 1..75: mol_type = other DNA
cacgtactgaacaatatctggcgtgccgcagaagtcgaaaaagagttgcaacgcaaagctcaacacaacgaaaac

SEQ ID NO: 522663 - DNA, 75 bp, synthetic construct
  source 1..75: mol_type = other DNA
gattttccgagaacgtgctagcgaaccggattgcgttcgggaaaatatatcagagtgagttacgtcagcgcgttg

SEQ ID NO: 522664 - DNA, 75 bp, synthetic construct
  source 1..75: mol_type = other DNA
atggggagcgccgttaatgaaatcaaaacggtttatccccgctggcgcggggaacacccgttcatattcgtttcc

SEQ ID NO: 522665 - DNA, 75 bp, synthetic construct
  source 1..75: mol_type = other DNA
cagccggagccgttatctgcgggatatgtaccgcccggggatggtgatggagcagtggaacccggagacacgcag

SEQ ID NO: 522666 - DNA, 75 bp, synthetic construct
  source 1..75: mol_type = other DNA
gtgccctggcgttttgctggctctcgcgcggtttatccccgctggcgcggggaacacgtcggcagagaatcgttc

SEQ ID NO: 522667 - DNA, 75 bp, synthetic construct
  source 1..75: mol_type = other DNA
ttatccccgctggcgcggggaactcttcccctgaccaatggcgcgggccagttcccacggtttatccccgctggc

SEQ ID NO: 522668 - DNA, 75 bp, synthetic construct
  source 1..75: mol_type = other DNA
tttatccccgctggcgcggggaacacattacgcctttttgcgattgcccggtttttgccggtttatccccgctgg

SEQ ID NO: 522669 - DNA, 75 bp, synthetic construct
  source 1..75: mol_type = other DNA
atggaattagcgggtggtattcatggaaataatgataaattcttatcacaagacttattggaatcttatgccatt

SEQ ID NO: 522670 - DNA, 75 bp, synthetic construct
  source 1..75: mol_type = other DNA
cacccgcagcggcacgcgcatcactctgaccagtaaagagtttactctgctggagttttttctccgccatcaggg

SEQ ID NO: 522671 - DNA, 75 bp, synthetic construct
  source 1..75: mol_type = other DNA
aaaaggaaacaaataatttatctactgaacaagataagaaaatttggttagctgagcaagcgaataaaggtcttg

SEQ ID NO: 522672 - DNA, 75 bp, synthetic construct
  source 1..75: mol_type = other DNA
tgcccgaatattaaatcaaccgttagatacgaatgcgttggctaatggattgttttccgatttgattttgattgc

SEQ ID NO: 522673 - DNA, 75 bp, synthetic construct
  source 1..75: mol_type = other DNA
cccaacgatcggcaaaacagtctgaataatatcgccgcaaccggtggcgaaaacggcaaggtttttgcactacgt

SEQ ID NO: 522674 - DNA, 75 bp, synthetic construct
  source 1..75: mol_type = other DNA
aagctgtccaccaatgaaatttatcgcagcctggaagactggatctacaacagagaaaaggccgcagaaatcaag

SEQ ID NO: 522675 - DNA, 75 bp, synthetic construct
  source 1..75: mol_type = other DNA
tcgacagcgacactaacgccattgatgtggcggtgaagcggctacgcggcaaaatcgacaacgactttgagccga

SEQ ID NO: 522676 - DNA, 75 bp, synthetic construct
  source 1..75: mol_type = other DNA
cactgatattggtttctttgatgtaaatgaattttctagatcaagtattggcgaaaacgcaattgggtttaatgg

SEQ ID NO: 522677 - DNA, 75 bp, synthetic construct
  source 1..75: mol_type = other DNA
gtttaaccatttcatcaaagaatgatgcttgtctttatgctgatgggctatggtacgtatggactggagcattac

SEQ ID NO: 522678 - DNA, 75 bp, synthetic construct
  source 1..75: mol_type = other DNA
cagaaatcagggtaagtttttcgcagaagtgcatgaggatgcttttgataagttgaccatgctgatacagcaggc

SEQ ID NO: 522679 - DNA, 75 bp, synthetic construct
  source 1..75: mol_type = other DNA
tggtgcattaccaggggcaatgtttgctatagttggtacattagtttatgcgacattaaaagataaaaccaagtt

SEQ ID NO: 522680 - DNA, 75 bp, synthetic construct
  source 1..75: mol_type = other DNA
ttgctgactacggggttagcagcagtgtatgcctttaccgcaaaagagcagtggacggctaaaacctatattcaa

SEQ ID NO: 522681 - DNA, 75 bp, synthetic construct
  source 1..75: mol_type = other DNA
aacaaaaattaactcagaagtagagtgtttagccattaaggaaagttgtaatattttacgtgactatctagtcgt

SEQ ID NO: 522682 - DNA, 75 bp, synthetic construct
  source 1..75: mol_type = other DNA
ggagcttagggaattggccgaatgttgagccgcgcattatcgagcatctggatcgaatagttcgccgccacaacg

SEQ ID NO: 522683 - DNA, 75 bp, synthetic construct
  source 1..75: mol_type = other DNA
gccctggcttggcatagtgaaagacgatgggaaatttaccttttctattgattcagtgccagtccgtttgtaccg

SEQ ID NO: 522684 - DNA, 75 bp, synthetic construct
  source 1..75: mol_type = other DNA
acaacttgcatccctaattcgaaatgtcagggatgatgtgattgatttacataatgaagagcttggtgattctgc

SEQ ID NO: 522685 - DNA, 75 bp, synthetic construct
  source 1..75: mol_type = other DNA
atgacacaacacataaaatcccacaattctgaagccgacccggaaattaagcaggggaggcgttttcgtgcgcct

SEQ ID NO: 522686 - DNA, 75 bp, synthetic construct
  source 1..75: mol_type = other DNA
ggataatatagataaaattaaaaatacaatatccacctctgaaattattgaatgcgcctctcctgaaataagaag

SEQ ID NO: 522687 - DNA, 75 bp, synthetic construct
  source 1..75: mol_type = other DNA
tagacgaattcagatacgtggatcgggtcacattcactggttttcttgaaggtgcccaagtttcatgctgggaga

SEQ ID NO: 522688 - DNA, 75 bp, synthetic construct
  source 1..75: mol_type = other DNA
aggtaagccagatagtcctgaagaacgtcgattaattccatgttatgaagctttgagccaagctagtttcttatt

SEQ ID NO: 522689 - DNA, 75 bp, synthetic construct
  source 1..75: mol_type = other DNA
gcattcagctacaggtcggggaatcgacggtaatcaggctgtcgaaggatggcatcaccatcgtgggcggttctg

SEQ ID NO: 522690 - DNA, 75 bp, synthetic construct
  source 1..75: mol_type = other DNA
ggccgcgcatttctgaaatgcgtttagcgactccggcagagttcaatatggacgacatgatctggacaacaccag

SEQ ID NO: 522691 - DNA, 75 bp, synthetic construct
  source 1..75: mol_type = other DNA
atgaccgggctgaaaatcgccgccggtgtagcgacagttgttatggcatttgtcgccatcattgcgttaattaat

SEQ ID NO: 522692 - DNA, 75 bp, synthetic construct
  source 1..75: mol_type = other DNA
gaggcattgcgccagaatggcagataaagcgtgagatgtcgtcaccggcatacactacccgctggaacgaactac

SEQ ID NO: 522693 - DNA, 75 bp, synthetic construct
  source 1..75: mol_type = other DNA
ctggggaaagtgtggtttgcaggccgaggcattgcgccagaatggcagataaagcgtgagatgtcgtcaccggca

SEQ ID NO: 522694 - DNA, 75 bp, synthetic construct
  source 1..75: mol_type = other DNA
ccttcttccgtggtgacaaaagactacacctttaaacgtcccggctgggcagggcgttttgaccaggagggccag

SEQ ID NO: 522695 - DNA, 75 bp, synthetic construct
  source 1..75: mol_type = other DNA
cctggaacacaagcacagcggtattaagtatgttactccggatgaacgccatcgcggaattgatgcacaaatact

SEQ ID NO: 522696 - DNA, 75 bp, synthetic construct
  source 1..75: mol_type = other DNA
atgcgcagctgtacgttactggacaaaatgtacgcgcttggagtattaagttcttattttcgtccccgggttagc

SEQ ID NO: 522697 - DNA, 75 bp, synthetic construct
  source 1..75: mol_type = other DNA
ttgattacgccgtcgctttcccggcacacggtcagcaccggacgcagcaacgagctgcgtaaacagggcgttttt

SEQ ID NO: 522698 - DNA, 75 bp, synthetic construct
  source 1..75: mol_type = other DNA
gacccgctgggccgccggacgggaaaacgggtgtggcggcgggagcgtgacctgacggggtggatgtcgctgtcg

SEQ ID NO: 522699 - DNA, 75 bp, synthetic construct
  source 1..75: mol_type = other DNA
aagggtgtaataatgatatattatttacaggaggaagtggtcccgataataaaatacttaatgaattaggtccga

SEQ ID NO: 522700 - DNA, 75 bp, synthetic construct
  source 1..75: mol_type = other DNA
gcgaaggcagtatgggcgtaaaacgccgcgttaaggcgtgggagataacccacgacaaggtggttacggatttgt

SEQ ID NO: 522701 - DNA, 75 bp, synthetic construct
  source 1..75: mol_type = other DNA
agattaacgagttcaatgccttcaatggtgattggctactgaagatgttgacttgcaacgacaccattcgcaaag

SEQ ID NO: 522702 - DNA, 75 bp, synthetic construct
  source 1..75: mol_type = other DNA
aagatggggggttgacattgtttcgaataaaaataataaatgtgaaatttattttgatggttttggtgaatgtgg

SEQ ID NO: 522703 - DNA, 75 bp, synthetic construct
  source 1..75: mol_type = other DNA
aaatgacagattctggagtgatgggaaaaaacccgacagatgtgacgtacttcaggaactaattgattgtggtga

SEQ ID NO: 522704 - DNA, 75 bp, synthetic construct
  source 1..75: mol_type = other DNA
ttattcgcctgggcattgatattgagactgccatctcccgcaagcctgaccatgactatgccgagctgcaggaca

SEQ ID NO: 522705 - DNA, 75 bp, synthetic construct
  source 1..75: mol_type = other DNA
tcattagataagtatttaatggaattcataaatagtaaaatcaatgagctagtttttgaaaacgtcacaataaaa

SEQ ID NO: 522706 - DNA, 75 bp, synthetic construct
  source 1..75: mol_type = other DNA
ttgtggcgtgcctgattgcgccagtggcattcacctacgcctccgaactgcaagaaatgaaaattgtactacttg

SEQ ID NO: 522707 - DNA, 75 bp, synthetic construct
  source 1..75: mol_type = other DNA
cgagcggacccaccactaccactacgacagccagcaccgtctggtgttctacacgcggatacagcacggtgagcc

SEQ ID NO: 522708 - DNA, 75 bp, synthetic construct
  source 1..75: mol_type = other DNA
gcattcgcctacatgtggaccggattcgttaaagttatcgccgtccactcactgagctacaaagacacattcaaa

SEQ ID NO: 522709 - DNA, 75 bp, synthetic construct
  source 1..75: mol_type = other DNA
gttactatggacgtcacttatgaaagctcaggctctggcgactggaaaactgatggtttatttgcaggcattggc

SEQ ID NO: 522710 - DNA, 75 bp, synthetic construct
  source 1..75: mol_type = other DNA
tgaggatgtagaaattatcaacccactttataatagtggtggacttaaagagccatatacaaatcgtgctgcaaa

SEQ ID NO: 522711 - DNA, 75 bp, synthetic construct
  source 1..75: mol_type = other DNA
atgaccgggaacacgtgttcctgttcgagtcagagcgagaagagtggctgaaaagtcagggcaataaaaaagcgg

SEQ ID NO: 522712 - DNA, 75 bp, synthetic construct
  source 1..75: mol_type = other DNA
tggacggtacttatgtctgcaccgccatctggaacggcaacaagcgtgccgcgctgccaaccagcatgatggata

SEQ ID NO: 522713 - DNA, 75 bp, synthetic construct
  source 1..75: mol_type = other DNA
taaaggttccagccgtcgtggcgtgggcgaaagaacacttcaggaatggctgtctgtttacctttctacacgtcc

SEQ ID NO: 522714 - DNA, 75 bp, synthetic construct
  source 1..75: mol_type = other DNA
aagcgttgcagtatgcgaatcaggcgcaggtgacaaagccgcagattcagcagacacaggacgtaacccaagata

SEQ ID NO: 522715 - DNA, 75 bp, synthetic construct
  source 1..75: mol_type = other DNA
cttaaaagttgatgatcttgatattcatgcttaccgttatgtgatgaaaccgacgttacctattcgtcgcgatag

SEQ ID NO: 522716 - DNA, 75 bp, synthetic construct
  source 1..75: mol_type = other DNA
gcggggattcagtggtgaaggacgggtgaaaggcagcggggatgcgcagttcgtggccctgcagggcagccgtaa

SEQ ID NO: 522717 - DNA, 75 bp, synthetic construct
  source 1..75: mol_type = other DNA
caaagaaaaagaaattacaaatccactttatgatcagacagctggagttccttacataaatcgaactaataataa

SEQ ID NO: 522718 - DNA, 75 bp, synthetic construct
  source 1..75: mol_type = other DNA
tatatcggtaatgttacatcagaaaaaggacgtattgaacttaatgtgcaggattgtcctgtatctcctgatgga

SEQ ID NO: 522719 - DNA, 75 bp, synthetic construct
  source 1..75: mol_type = other DNA
ttaacaacaatatcaggaaaacctttaacattctcaggtttatcaaagaatattggctcacttgataaaactaaa

SEQ ID NO: 522720 - DNA, 75 bp, synthetic construct
  source 1..75: mol_type = other DNA
aaatgacaatatcttttcagctctcaagattgagtggaatggcgaaaacaatctttatgtaaaaaatgctgtcaa

SEQ ID NO: 522721 - DNA, 75 bp, synthetic construct
  source 1..75: mol_type = other DNA
atgttactattccgttaaaagcacgctacatcaaaatgggtagcgtcaaaagtggtcgggttaattctgttgcca

SEQ ID NO: 522722 - DNA, 75 bp, synthetic construct
  source 1..75: mol_type = other DNA
cttgacttattggaagaggtgatagaagaagcaatttcgaagtcaaataatcaatttgttatttttgctgatagg

SEQ ID NO: 522723 - DNA, 75 bp, synthetic construct
  source 1..75: mol_type = other DNA
tatcttggggaccgaagagacaaaatataagtagcaaaataagaaaaaaattgaacgctattctcgatgataaca

SEQ ID NO: 522724 - DNA, 75 bp, synthetic construct
  source 1..75: mol_type = other DNA
ccgatattacttgtgtaggtggcatagaacgcgtgatttgcttattagccaacgcgttagctaattatgggttta

SEQ ID NO: 522725 - DNA, 75 bp, synthetic construct
  source 1..75: mol_type = other DNA
tctctgacgatgtatggattggagcgggttcagttattacaaagaatacttatatagggaagcatagtgtgattg

SEQ ID NO: 522726 - DNA, 75 bp, synthetic construct
  source 1..75: mol_type = other DNA
cttattattgcgctggcttccagttatctgatgtatatggtcggtcgtgcgatgattggtgtggctattggcgga

SEQ ID NO: 522727 - DNA, 75 bp, synthetic construct
  source 1..75: mol_type = other DNA
ccgccgaagaagtcgctcgacttttttgtgtaaataagcgaaccattctcaggtggatcgattctattcccggct

SEQ ID NO: 522728 - DNA, 75 bp, synthetic construct
  source 1..75: mol_type = other DNA
ccagtattaatgacatccggcaggtgacgcaggccatcgcccttgatgttgctctggctgctcaacgtgatggcg

SEQ ID NO: 522729 - DNA, 75 bp, synthetic construct
  source 1..75: mol_type = other DNA
ttctgattggcgtcagcgggcagccaggactattcagcgaagcggtgatcggggaaatgtatcgtcactgttcgc

SEQ ID NO: 522730 - DNA, 75 bp, synthetic construct
  source 1..75: mol_type = other DNA
tgtcattgatgacattcaagcaacagcgaatactatttcacaaaatagactcaatgatttgttaaaagaatatga

SEQ ID NO: 522731 - DNA, 75 bp, synthetic construct
  source 1..75: mol_type = other DNA
aatgaattacagtctaataccggttttaaagaaacattgaaactgactctatataggccaagagatattttggtt

SEQ ID NO: 522732 - DNA, 75 bp, synthetic construct
  source 1..75: mol_type = other DNA
ataaaaactatatcagcgagggtaatgactccaacttattgatagtgttttatgttcagataatgcccgatgact

SEQ ID NO: 522733 - DNA, 75 bp, synthetic construct
  source 1..75: mol_type = other DNA
ttgcgttcaaagttttctaaactatctataatccgaacagagaactatacactagataagatattgccattgtgg

SEQ ID NO: 522734 - DNA, 75 bp, synthetic construct
  source 1..75: mol_type = other DNA
ctgacagaggcgaagtcgtttgctgcagaaggaaccggttttactgaactgggaggggaaatcaatgcgcagata

SEQ ID NO: 522735 - DNA, 75 bp, synthetic construct
  source 1..75: mol_type = other DNA
gccacccgcatgatactggaaacgtccgaccgtttcacggtggtgcagggttatgccggtgtgggtaagaccaca

SEQ ID NO: 522736 - DNA, 75 bp, synthetic construct
  source 1..75: mol_type = other DNA
ggtggagtttgccagcggagtgcaacgaattgcgcgagtgcatcagtatggtttaaaagatagacccaatcccga

SEQ ID NO: 522737 - DNA, 75 bp, synthetic construct
  source 1..75: mol_type = other DNA
ggactggaaagtgacagcccgtgccggtctgggctaccagttcgacctgctggctaacggcgaaaccgtattacg

SEQ ID NO: 522738 - DNA, 75 bp, synthetic construct
  source 1..75: mol_type = other DNA
accagatggcggggcttatcggggcattgtcaccggcgtcgcggcgcaggctggccgcagagatagcgaaacaac

SEQ ID NO: 522739 - DNA, 75 bp, synthetic construct
  source 1..75: mol_type = other DNA
gcgcgccctctgctcggcttcaccggtgaggatgtgcagatgattgaagagattattctggcgcacctcgaccgt

SEQ ID NO: 522740 - DNA, 75 bp, synthetic construct
  source 1..75: mol_type = other DNA
tttatttggtcagtctttggatgattttttctaccaaaaaaaacaagtgtttaatttatataggaaagtcatttc

SEQ ID NO: 522741 - DNA, 75 bp, synthetic construct
  source 1..75: mol_type = other DNA
atgctgactgtttatacttttgtctttagcgaaatttttaaagctcgttggcatgggggcagtgcttccaaaggt

SEQ ID NO: 522742 - DNA, 75 bp, synthetic construct
  source 1..75: mol_type = other DNA
ggatgggtgccggaagcgtttgactcaataagccgtgccgcagaacagggagatgagtggctgtatgagcaggta

SEQ ID NO: 522743 - DNA, 75 bp, synthetic construct
  source 1..75: mol_type = other DNA
aaacccttttcttcaccagcgtacgggcggtcccttcaacaacgaagcgggaagagggcaataccctgaagattg

SEQ ID NO: 522744 - DNA, 75 bp, synthetic construct
  source 1..75: mol_type = other DNA
tcatgttaggtgcttttgacactatcgaattaatctacgctggaggattctggaatgagatttctcgcgtaaatc

SEQ ID NO: 522745 - DNA, 75 bp, synthetic construct
  source 1..75: mol_type = other DNA
tcgtaatcaggggaagttttttccagaggtccacgaggatgcacttgactatctgaccatgcttattcagcaatg

SEQ ID NO: 522746 - DNA, 75 bp, synthetic construct
  source 1..75: mol_type = other DNA
tttcagaacgcgatattgatgtggcgcggcaaaattatctggcgcaggaagcctccgtaaagtcatcggcggcgg

SEQ ID NO: 522747 - DNA, 75 bp, synthetic construct
  source 1..75: mol_type = other DNA
gaaaacggggtgatgatgccggtgaaaaatccgatgtccggcaccggtctgcgctggaagccgctgcgcgatcag

SEQ ID NO: 522748 - DNA, 75 bp, synthetic construct
  source 1..75: mol_type = other DNA
cctctgcctacgtacgaaaagtgatggtatgcgcgacggtgcttggccttgctgatgagattgaaccgctggatt

SEQ ID NO: 522749 - DNA, 75 bp, synthetic construct
  source 1..75: mol_type = other DNA
gtaatcaggcaattaagacatcttatcttgatatggcgaaccccaattttgcatttgtgatggaaggatacaatt

SEQ ID NO: 522750 - DNA, 75 bp, synthetic construct
  source 1..75: mol_type = other DNA
gaatggtgttgcaacaatggtcactcaggccgcaatacgttacctgactactgtaggggatgtcactcaatggca

SEQ ID NO: 522751 - DNA, 75 bp, synthetic construct
  source 1..75: mol_type = other DNA
taaggtgcctgaacctcacgcgtttctcgaatggcttgctccccatatttctgaagaatccctgtccgcgatgtc

SEQ ID NO: 522752 - DNA, 75 bp, synthetic construct
  source 1..75: mol_type = other DNA
taaaagcaccgatgactttttcatgaagttctacagaacgcgagaaacagatggttctgcgggtaatgctgccaa

SEQ ID NO: 522753 - DNA, 75 bp, synthetic construct
  source 1..75: mol_type = other DNA
actacatagcctacttgaagcaggtattgagcctgcgaatgcactgagcttactgatggggtggatgggacataa

SEQ ID NO: 522754 - DNA, 75 bp, synthetic construct
  source 1..75: mol_type = other DNA
tccagtatttgactgcccttaatattaatatacataaaatgttgctatcaaatataacaatagaaaagagcgacc

SEQ ID NO: 522755 - DNA, 75 bp, synthetic construct
  source 1..75: mol_type = other DNA
tgaacaaaatgacgaaggcgggtatgccagaaagcgtgcaaacttcctgaaaacccaactggatacagagcgtct

SEQ ID NO: 522756 - DNA, 75 bp, synthetic construct
  source 1..75: mol_type = other DNA
agttctaccgcaggggcgggggaactccaagtgatatccatcatcgcatccagtgcgcccggtttatccccgctg

SEQ ID NO: 522757 - DNA, 75 bp, synthetic construct
  source 1..75: mol_type = other DNA
gacacatttacagcttatgcgcgtcgtgtcctgcttaatgacggcaaacgcttaccaagcagattcgataagagg

SEQ ID NO: 522758 - DNA, 75 bp, synthetic construct
  source 1..75: mol_type = other DNA
tccactcaatcacatgcatgaacaaacagctaatgcggccataatccgtatgggtttcggaggtgagcttgtagc

SEQ ID NO: 522759 - DNA, 75 bp, synthetic construct
  source 1..75: mol_type = other DNA
atcaaaatataaaattcagtgataatgtgaactatcattatcgctttaacattaatagttgtgcaaaatttcttg

SEQ ID NO: 522760 - DNA, 75 bp, synthetic construct
  source 1..75: mol_type = other DNA
atacaagcagggcgagaactccgccaccaaaatcagcaccctttgtacctattacaaagagagcgtcaacggtga

SEQ ID NO: 522761 - DNA, 75 bp, synthetic construct
  source 1..75: mol_type = other DNA
atttttgttgtatctgattttctatattatcttaattcaagcgcttcagacttttcgcaatcgccgtaatacttc

SEQ ID NO: 522762 - DNA, 75 bp, synthetic construct
  source 1..75: mol_type = other DNA
tctcacaatttgcttctttttcatcgtctagtgcaccttcggtcaccgcaccattcagggcagaacttagtgcga

SEQ ID NO: 522763 - DNA, 75 bp, synthetic construct
  source 1..75: mol_type = other DNA
ggaccgtgttgaaggagctgcgctggagttttatgaggcagcagccagaatgagcgtccggcaagtcttcctgga

SEQ ID NO: 522764 - DNA, 75 bp, synthetic construct
  source 1..75: mol_type = other DNA
agataaaaacacgactaggcttttctgcaagagaattatcgaatattacttttttagtgaaaaaaataaatgaaa

SEQ ID NO: 522765 - DNA, 75 bp, synthetic construct
  source 1..75: mol_type = other DNA
tagtcaccctggctaacactgaaatctcgctctcgacagctgatttcgaattattgtgggaattagctacccatg

SEQ ID NO: 522766 - DNA, 75 bp, synthetic construct
  source 1..75: mol_type = other DNA
aaaaaaactgctcgataacgccgcagaaccttatcgcattaaaactgtgcgtaacaaaggctatctttttgcgcc

SEQ ID NO: 522767 - DNA, 75 bp, synthetic construct
  source 1..75: mol_type = other DNA
tgaacaaacagctaatgcggctataatccgtatgggcttcggaggtgagcttgtagctcatggtatgcgatcaat

SEQ ID NO: 522768 - DNA, 75 bp, synthetic construct
  source 1..75: mol_type = other DNA
ttttatgaggagcatgcttacaaaagtaccgaccagagcctggtgctgtgcgacacggtccgccatctgcccgaa

SEQ ID NO: 522769 - DNA, 75 bp, synthetic construct
  source 1..75: mol_type = other DNA
ccactgtgaccaccgtggactgccgcaggcgctcatcaccccggaaggcgaaacggcgtggtgcggggagtatga

SEQ ID NO: 522770 - DNA, 75 bp, synthetic construct
  source 1..75: mol_type = other DNA
ttctcagggagtaaaaatatactcaaaaagtgatgattactcaggaaaattcatgacaaacccctgtgttccatc

SEQ ID NO: 522771 - DNA, 75 bp, synthetic construct
  source 1..75: mol_type = other DNA
tcaaagaaaagcgcataattacgtgttaaaactccataaacttagaattagaagagggagagataattttgatgt

SEQ ID NO: 522772 - DNA, 75 bp, synthetic construct
  source 1..75: mol_type = other DNA
ttaaaagaaatgaagaagataaattaagcgagctgacaaaggtgagaggggcaactagtgatgtaagaaatggtg

SEQ ID NO: 522773 - DNA, 75 bp, synthetic construct
  source 1..75: mol_type = other DNA
caagctgaggtgacaatggacttctctcgtccaagcgcagactggatagcacatggcttacctcgccctggactg

SEQ ID NO: 522774 - DNA, 75 bp, synthetic construct
  source 1..75: mol_type = other DNA
attataaaactaacatcaagatctgaaatgttactcgttttattaggtgtattgttaagctcacttattttatat

SEQ ID NO: 522775 - DNA, 75 bp, synthetic construct
  source 1..75: mol_type = other DNA
gctttatcatctttggcgcgtcagaatctcaaatcatccacgtcaccgcctggacggaacgcgaagcgcgtagcc

SEQ ID NO: 522776 - DNA, 75 bp, synthetic construct
  source 1..75: mol_type = other DNA
tttatagctggagtgtgctagatttagcagttaatacatataggcagggaatagcaattccttttataattcttg

SEQ ID NO: 522777 - DNA, 75 bp, synthetic construct
  source 1..75: mol_type = other DNA
atcattttttattgctactatttgtaatatttcaaatcgcattttctattgaaactttttggcgagctcctttga

SEQ ID NO: 522778 - DNA, 75 bp, synthetic construct
  source 1..75: mol_type = other DNA
tctgcatcagccagttccgctacagcgcacaaatccgtccttcttccgtagtgaccaaagactacacctttaaac

SEQ ID NO: 522779 - DNA, 75 bp, synthetic construct
  source 1..75: mol_type = other DNA
cgcacagggctgcgccagaacttccgtatcttccagaatgaggacatcgaaagcatcctcgctacgatcctgaaa

SEQ ID NO: 522780 - DNA, 75 bp, synthetic construct
  source 1..75: mol_type = other DNA
acaacagaagctactactgcatccagttccaccgccgatcccctgaaagctctggacgaagccatcagttccatc

SEQ ID NO: 522781 - DNA, 75 bp, synthetic construct
  source 1..75: mol_type = other DNA
atctcaaagagtgggttaataagtatattggagattgcactgatgaggaattaaacgatcgtgactttattgcat

SEQ ID NO: 522782 - DNA, 75 bp, synthetic construct
  source 1..75: mol_type = other DNA
aaaagcaaaaatggttggcgatggatatgaagtgcattacggctcttatcgaaagggaagcgatgattttgtatg

SEQ ID NO: 522783 - DNA, 75 bp, synthetic construct
  source 1..75: mol_type = other DNA
aagcgctgggctatgaaactgaagtggttggtaagcacggtatgtgggaaatgccgggcgtaccggtggaggcct

SEQ ID NO: 522784 - DNA, 75 bp, synthetic construct
  source 1..75: mol_type = other DNA
cattctcaaactgcctttatctggcgctttatcatctttggcgcgtcagaatcccaaatcatccacgtcaccgcc

SEQ ID NO: 522785 - DNA, 75 bp, synthetic construct
  source 1..75: mol_type = other DNA
aaaatgtcgctatcaaatataacaatagaaaagagcaacctttcatatgggtattattttggttgtatattatcc

SEQ ID NO: 522786 - DNA, 75 bp, synthetic construct
  source 1..75: mol_type = other DNA
taaagaccctgaatattatgcattgcttgatgcaggagatggagtgggtctttatgaaatagaaaagtcaagagg

SEQ ID NO: 522787 - DNA, 75 bp, synthetic construct
  source 1..75: mol_type = other DNA
aagtttttcaaaagcggcagaacgattatgtaaaaccacggcgacgatcagttatcgcattaaacttctggaaga

SEQ ID NO: 522788 - DNA, 75 bp, synthetic construct
  source 1..75: mol_type = other DNA
atggattcaatgaggattgatggggaatactatgcttttgcaagttgtaaaagcattgaagggtctgagatagag

SEQ ID NO: 522789 - DNA, 75 bp, synthetic construct
  source 1..75: mol_type = other DNA
ccctcttctgcccaaaagcataacccgctaggtaatgactccaacttattgatagtgttttatgttcagataatg

SEQ ID NO: 522790 - DNA, 75 bp, synthetic construct
  source 1..75: mol_type = other DNA
agaaattaataatctattcattaaaaaaagcaacatatttggagcatcattcactaataccagaataaaaaattt

SEQ ID NO: 522791 - DNA, 75 bp, synthetic construct
  source 1..75: mol_type = other DNA
acagcagatcgcttatctggcactcaaatactgggcgcgcctgtattgccctgcagttgttcttggtgtgtacac

SEQ ID NO: 522792 - DNA, 75 bp, synthetic construct
  source 1..75: mol_type = other DNA
caaggtatccattacccgctcgcagctggcaatacacctcgataagctggactggcgtcagccaaaaacatctcg

SEQ ID NO: 522793 - DNA, 75 bp, synthetic construct
  source 1..75: mol_type = other DNA
gtgctgggaacacatacggggcgtctaaccaacaacgtaaactaggagccgttatggttgccgtaaatcatatac

SEQ ID NO: 522794 - DNA, 75 bp, synthetic construct
  source 1..75: mol_type = other DNA
tgacaccgtcacaaccacgcagagcgcacaggaatcatcggtaaatatcggctcaccggccgatgatttccgcga

SEQ ID NO: 522795 - DNA, 75 bp, synthetic construct
  source 1..75: mol_type = other DNA
tgggttacgaagcgcaactggtcaacgcagtaatctccagctccagcgccatcgtgggccgcttccattacgaat

SEQ ID NO: 522796 - DNA, 75 bp, synthetic construct
  source 1..75: mol_type = other DNA
gctggcaaccaataagcgtcacatgggcgacgagctgcacgatcggttcagcatcaccctggcggatatgaaacc

SEQ ID NO: 522797 - DNA, 75 bp, synthetic construct
  source 1..75: mol_type = other DNA
ctgaagtcgctgtctctggggaaattgctaacaccgatcgtgtgttaaatatcgcttacggtattgaccgcaact

SEQ ID NO: 522798 - DNA, 75 bp, synthetic construct
  source 1..75: mol_type = other DNA
gccctgcagggcagccgtaacggagagagcctgctggctgataatatgcaggatggtgtccggattgcccgtgat

SEQ ID NO: 522799 - DNA, 75 bp, synthetic construct
  source 1..75: mol_type = other DNA
cacgacgcgatggccgtgatggcaggctcagcgggcaacctggaagccgccgccagaaccatgcgggaacgccac

SEQ ID NO: 522800 - DNA, 75 bp, synthetic construct
  source 1..75: mol_type = other DNA
acattggaaacagacccattagtgaaatcgaacctcttgaacttctcgcagttcttcagcgtatcgaaagccgag

SEQ ID NO: 522801 - DNA, 75 bp, synthetic construct
  source 1..75: mol_type = other DNA
aaacctttccgaaggaagaacttttgccgcaatcgccaccgagtggtacaacgcaaaagtttcaggctggtctgc

SEQ ID NO: 522802 - DNA, 75 bp, synthetic construct
  source 1..75: mol_type = other DNA
tgggctttgttgaagcgccacgcggtgaagacgtgcactggagcatgctcggtgataaccaaaaattgttccgct

SEQ ID NO: 522803 - DNA, 75 bp, synthetic construct
  source 1..75: mol_type = other DNA
gcaggatgccagcggcgtggtggtggcattccagacgatatcagcggacggtaaagaaaagcgcttcagaggtaa

SEQ ID NO: 522804 - DNA, 75 bp, synthetic construct
  source 1..75: mol_type = other DNA
gctccatcattgaagggtcatacactgtctatcgctgcgatggcggaagtgtcccctcgcgtccttttggccccc

SEQ ID NO: 522805 - DNA, 75 bp, synthetic construct
  source 1..75: mol_type = other DNA
tgcccacgatgtgtttgagccgaaaccggaccgggaggtcatgaatgcagagcggctgttcagtacggcgcggga

SEQ ID NO: 522806 - DNA, 75 bp, synthetic construct
  source 1..75: mol_type = other DNA
gatacagggcaacgcagccgcccgttgtgacagttttctctggcttgatgagctgggcgaaggacgcccggaaga

SEQ ID NO: 522807 - DNA, 75 bp, synthetic construct
  source 1..75: mol_type = other DNA
ggaccaccagcggaacggctgatacctggcgggagtcagtcgcccggctggtggatggtaacagcctcatgatgg

SEQ ID NO: 522808 - DNA, 75 bp, synthetic construct
  source 1..75: mol_type = other DNA
cacgctcgcacccgggcaacttgtccgcttgctcaatatcccggttgagcagatgcagccggaaaaccttcacgg

SEQ ID NO: 522809 - DNA, 75 bp, synthetic construct
  source 1..75: mol_type = other DNA
acgtgcggccgctggcacctacaccaaggggcaagccctatctattgcaaacggccgagtcaaagtggctgctgg

SEQ ID NO: 522810 - DNA, 75 bp, synthetic construct
  source 1..75: mol_type = other DNA
atgcctgtcatattaaatttttcgaatggaagtacgttgacaccaagggaagtggatgctgtgcgtcatgtagca

SEQ ID NO: 522811 - DNA, 75 bp, synthetic construct
  source 1..75: mol_type = other DNA
tcgagcgcaacgtccttggctcaatcatgctgggaagggatgaattcgctgatgcagcccaggatgccattgagg

SEQ ID NO: 522812 - DNA, 75 bp, synthetic construct
  source 1..75: mol_type = other DNA
gttaattaatgtacaaaactatggaggtacaattttcatagataaaaactggaacattgatatggatatattcga

SEQ ID NO: 522813 - DNA, 75 bp, synthetic construct
  source 1..75: mol_type = other DNA
tagcgactaccaacaatcaatttttgtcaaaaaaggagatttttattccggtttaagcatatcgggaaaagatga

SEQ ID NO: 522814 - DNA, 75 bp, synthetic construct
  source 1..75: mol_type = other DNA
agtaaccagaatgcacagcaacaactcacaatcttctcagatactgcacaaaaccttagtggggcgatggtggcc

SEQ ID NO: 522815 - DNA, 75 bp, synthetic construct
  source 1..75: mol_type = other DNA
caaaaatgattgctattttaatgaggaaaaacaacagttctgcgtaaaatcttcctccggtgaggatacgtatct

SEQ ID NO: 522816 - DNA, 75 bp, synthetic construct
  source 1..75: mol_type = other DNA
gctggcgtcaacaacaacgacgcggtgaactacgcgcagttgaagcaaagcgtgcaggaaacgaagcaatacacc

SEQ ID NO: 522817 - DNA, 75 bp, synthetic construct
  source 1..75: mol_type = other DNA
catttttgagtcaggcattaaagattatgacgatgtcgcgatgaagatcccgctggacaccgcgcagcgcatgat

SEQ ID NO: 522818 - DNA, 75 bp, synthetic construct
  source 1..75: mol_type = other DNA
ctgattgccgattatgcggcgttaaagaaagctattttgtcggacccgacgctggcggcggatatttccacgctc

SEQ ID NO: 522819 - DNA, 75 bp, synthetic construct
  source 1..75: mol_type = other DNA
catcgctcccggcggtaaaaacgcatctggtggttttcgacaccgcagtggttgatatgacagagaagctcgacg

SEQ ID NO: 522820 - DNA, 75 bp, synthetic construct
  source 1..75: mol_type = other DNA
tatgtggcactgccggcttttgaccgtaacggcaagtcagctggtatctggctgaacccgctgaccacggatgac

SEQ ID NO: 522821 - DNA, 75 bp, synthetic construct
  source 1..75: mol_type = other DNA
tatcgatggtgagcgccaatggtcgttgggtctacaaattacaaggtagtaccaatagccagggtgaatactccg

SEQ ID NO: 522822 - DNA, 75 bp, synthetic construct
  source 1..75: mol_type = other DNA
ggaaagcactttttcaaagttgtgggtgaggagctaaaaaatttgcgactatctttaagagagtcacaaatttcg

SEQ ID NO: 522823 - DNA, 75 bp, synthetic construct
  source 1..75: mol_type = other DNA
gctcatgcgcagtattaccttcttgataaggaaaatttcatggctcttttaagccgaacagataagaaatatgag

SEQ ID NO: 522824 - DNA, 75 bp, synthetic construct
  source 1..75: mol_type = other DNA
agggggagtatgacgaatggggaaacctgctgggcgaaaccagcgcgcagcacctccagcagtcactccgtctgc

SEQ ID NO: 522825 - DNA, 75 bp, synthetic construct
  source 1..75: mol_type = other DNA
tgaaaagagtcacggcagagaagaaatccgccttcatattgtttgcggtgtccctgatgaacttattgatttcac

SEQ ID NO: 522826 - DNA, 75 bp, synthetic construct
  source 1..75: mol_type = other DNA
atcgttttctacccggtggcggacaccggaacaaacactggagcatgacgctgaaacattatgccgacaatctat

SEQ ID NO: 522827 - DNA, 75 bp, synthetic construct
  source 1..75: mol_type = other DNA
ttttacctggtggtgggcaccgtaacaaaaagtggagtctggagctgaaacattatgccgacgatctggataacc

SEQ ID NO: 522828 - DNA, 75 bp, synthetic construct
  source 1..75: mol_type = other DNA
ttataaaaaacaatgatattggtgacaaaggactttttggagctattgaatacttttttgatacgttgaatgata

SEQ ID NO: 522829 - DNA, 75 bp, synthetic construct
  source 1..75: mol_type = other DNA
tggccatagcgatggctgcgccggtaacagcaaagccgactgtcacagtcggcttttctccttcggcacctcagg

SEQ ID NO: 522830 - DNA, 75 bp, synthetic construct
  source 1..75: mol_type = other DNA
ctattgaagatatttcataacgatggaacagcaacggaatttaaccgcttctcacaatttgcttctttttcatcg

SEQ ID NO: 522831 - DNA, 75 bp, synthetic construct
  source 1..75: mol_type = other DNA
gtactgagcaattcaatattttagggagctttttcactacggatattttgagtgattatagccatctggatatgg

SEQ ID NO: 522832 - DNA, 75 bp, synthetic construct
  source 1..75: mol_type = other DNA
gaaaaagtgtcgtttagtcttgaggacgcgcaagaactggcgggttccgacaacaagaaaagcaatgcgctctcg

SEQ ID NO: 522833 - DNA, 75 bp, synthetic construct
  source 1..75: mol_type = other DNA
gcagaatataattctttaaaagatgcaaggattagcagccaaaaagaatttgcaaaagatccaaacaatgctaaa

SEQ ID NO: 522834 - DNA, 75 bp, synthetic construct
  source 1..75: mol_type = other DNA
atggtcctgatggtggtgcgtatcctgtaaacattaacggaacgacctgggtagaaggtggcggttgtaaagccc

SEQ ID NO: 522835 - DNA, 75 bp, synthetic construct
  source 1..75: mol_type = other DNA
tttcaacagacgttgattcgtatgttagttacagacggtgaagcatttgtacgtaaacatcgtatcaatggtgaa

SEQ ID NO: 522836 - DNA, 75 bp, synthetic construct
  source 1..75: mol_type = other DNA
atccccctatgtctatccatttctgctgggactcagtgattgataaaaaagtgtatgaaacctggataacgctgg

SEQ ID NO: 522837 - DNA, 75 bp, synthetic construct
  source 1..75: mol_type = other DNA
atccccctatgtctatccatttttgctgggattcagtgattgataaaaaagtgtatgaaacctggataacgctgg

SEQ ID NO: 522838 - DNA, 75 bp, synthetic construct
  source 1..75: mol_type = other DNA
atccccctatgtctatccatttatgctgggaatcagtgattgataaaaaagtgtatgaaacctggataacgctgg

SEQ ID NO: 522839 - DNA, 75 bp, synthetic construct
  source 1..75: mol_type = other DNA
atgccgggcgtaccggtggaggccttctccggacgctcacaggctatccgggaggccgtcggggaagacgcctcg

SEQ ID NO: 522840 - DNA, 75 bp, synthetic construct
  source 1..75: mol_type = other DNA
gtgacgataaaaccgccttcatccgaagttatgcgcctggtcaactggtgacagttgaagaagccctgactttgc

SEQ ID NO: 522841 - DNA, 75 bp, synthetic construct
  source 1..75: mol_type = other DNA
atccccctatgtctatccatttgtgctgggagtcagtgattgataaaaaagtgtatgaaacctggataacgctgg

SEQ ID NO: 522842 - DNA, 75 bp, synthetic construct
  source 1..75: mol_type = other DNA
cgggagacgtctggaaattgatgctcacaccttattcaccaccaggcggtggcagtgaaaagtattatctgcggt

SEQ ID NO: 522843 - DNA, 75 bp, synthetic construct
  source 1..75: mol_type = other DNA
acctaaaaaaagatattttttatagtaagacaataccacgcaaggtgaaactaccttcatttattaatatcgaga

SEQ ID NO: 522844 - DNA, 75 bp, synthetic construct
  source 1..75: mol_type = other DNA
gtactgaggtatctagagcaaccgcgttattttcatcattcgttgaaaagaacaaagtaaaatgtcctggtaatg

SEQ ID NO: 522845 - DNA, 75 bp, synthetic construct
  source 1..75: mol_type = other DNA
tgaaaagtattatctgcggtatctgttaatcgggctggctccggaagggaaaataggagtgtggctggagaaacc

SEQ ID NO: 522846 - DNA, 75 bp, synthetic construct
  source 1..75: mol_type = other DNA
ttgataaaaaagtgtatgaaacctggataacgctggcgggagacgtctggaaattgatgctcacaccttatacac

SEQ ID NO: 522847 - DNA, 75 bp, synthetic construct
  source 1..75: mol_type = other DNA
tgcaccctatgatgaatggtatttcctttttttctaccctaatgcgctaccagcacaagttacctatgtagaact

SEQ ID NO: 522848 - DNA, 75 bp, synthetic construct
  source 1..75: mol_type = other DNA
cgctattggtcaacccattgccggccctgcttctggcggcgctatttatcgtggtgatgctgcgtctgagctttc

SEQ ID NO: 522849 - DNA, 75 bp, synthetic construct
  source 1..75: mol_type = other DNA
caaagcctggtcgcctcgtctccagaaagcgatagctctggctcgttctctgcctttaaaaccgggaatcagtag

SEQ ID NO: 522850 - DNA, 75 bp, synthetic construct
  source 1..75: mol_type = other DNA
atatatagataaagcaggaatatggagcgcatttgagggtgtatttgcaactaaaaacgttctggcctttagtcg

SEQ ID NO: 522851 - DNA, 75 bp, synthetic construct
  source 1..75: mol_type = other DNA
gcatcaaaaccgggttccacaatctcaagcatcccatcaaaaagacggatattgattaacattaaccacgatttt

SEQ ID NO: 522852 - DNA, 75 bp, synthetic construct
  source 1..75: mol_type = other DNA
aattttatttattactgctcggttgtgggatcaacgctggggtttggtgatatcacaccccaaacggttggggga

SEQ ID NO: 522853 - DNA, 75 bp, synthetic construct
  source 1..75: mol_type = other DNA
atgaaaatcttaaattgcccgcggttcgaaaaatatgccttgtggtttatgactgggaaaattgcgcctgaatcc

SEQ ID NO: 522854 - DNA, 75 bp, synthetic construct
  source 1..75: mol_type = other DNA
gcgcaaactcgatgcgttgatgatctcaatggacacactctggttatctagcgttcttagcaataagcaacgtgt

SEQ ID NO: 522855 - DNA, 75 bp, synthetic construct
  source 1..75: mol_type = other DNA
atgcatcatcccgatgttgtaaacatcacccaaaataacgttgagattaatctcgtactaagcaaaacctggaaa

SEQ ID NO: 522856 - DNA, 75 bp, synthetic construct
  source 1..75: mol_type = other DNA
atgaccagcggtttctacgggatgcaggccattcacacccgcgcacacctgttgcaggccatttatgaaggggtg

SEQ ID NO: 522857 - DNA, 75 bp, synthetic construct
  source 1..75: mol_type = other DNA
ctgccgcaggtggaagaaaccggctgttttggcgcggcacttgccgcccgtgtcggcaccggagtttatcgcgat

SEQ ID NO: 522858 - DNA, 75 bp, synthetic construct
  source 1..75: mol_type = other DNA
cgctgttcgtcaggcaaagagaaaggccaaaacgacatacatgaaggcgtatcgaaaagcatggaaagaacaccg

SEQ ID NO: 522859 - DNA, 75 bp, synthetic construct
  source 1..75: mol_type = other DNA
ctcaggctgcggttcgttttgatggtacagaagcacctggcggcgatggcgatctgaaagtgggtactccgacta

SEQ ID NO: 522860 - DNA, 75 bp, synthetic construct
  source 1..75: mol_type = other DNA
gacctgaaagtgggtacgccgcttacagcaggcaaccctggtgattttaccggtacaggacaagcgattgcggca

SEQ ID NO: 522861 - DNA, 75 bp, synthetic construct
  source 1..75: mol_type = other DNA
ttcgtgccaatggagtggctctgctactacctgtctatttacaaagatcacaacccggatgaacgccgctattac

SEQ ID NO: 522862 - DNA, 75 bp, synthetic construct
  source 1..75: mol_type = other DNA
gacacgatgctctacagcgatgccctggatcaacgactggcgatgtttaaatcaggcaaaaatgggccacgcata

SEQ ID NO: 522863 - DNA, 75 bp, synthetic construct
  source 1..75: mol_type = other DNA
tgttcctttcgttgtcctgttcaggcccaggtagtcaataacaagaccgtttttatacagggcaatccttcggcg

SEQ ID NO: 522864 - DNA, 75 bp, synthetic construct
  source 1..75: mol_type = other DNA
aagaggtaacacagaattttgctctggcctttgagggtagctatcaatatatggatctgaagccaaaggggtatc

SEQ ID NO: 522865 - DNA, 75 bp, synthetic construct
  source 1..75: mol_type = other DNA
ttggtttataacctcagtgcatcaaattggcgacaaataatagtacgcagctatagctggtggccattgccgctt

SEQ ID NO: 522866 - DNA, 75 bp, synthetic construct
  source 1..75: mol_type = other DNA
gacacggggctatattgaaatgcatggtaagccactggcgctctatagcgacaaagccagtgtcttcaggatcaa

SEQ ID NO: 522867 - DNA, 75 bp, synthetic construct
  source 1..75: mol_type = other DNA
ggacgatatgttcaatgcacttgtaaaacttcagacacgagctgaggagatttttggtgaacgcaaccaaaaatg

SEQ ID NO: 522868 - DNA, 75 bp, synthetic construct
  source 1..75: mol_type = other DNA
acgacctgatcaagaccaaagactacccggcagtacataaagccatccaatcattaggagcttgggcaaaagtca

SEQ ID NO: 522869 - DNA, 75 bp, synthetic construct
  source 1..75: mol_type = other DNA
cagccgtaccggctgccggggcagcagtatgataaggagtcggggctgtactataaccgtcaccggtactacgat

SEQ ID NO: 522870 - DNA, 75 bp, synthetic construct
  source 1..75: mol_type = other DNA
tgcgggctgacggtggagcggctggcggcacagatagagccggtttatttgcctgagcgaaaaatacatctttat

SEQ ID NO: 522871 - DNA, 75 bp, synthetic construct
  source 1..75: mol_type = other DNA
tgcgaggagtgggtatcggttgctcggcctgcgcgataggcagttttccgcctggcgcactggcgcgaaattctc

SEQ ID NO: 522872 - DNA, 75 bp, synthetic construct
  source 1..75: mol_type = other DNA
taacatgcgcctgcttggaccaaacagtctgggtttactggctccctgcgcaaggtctgaatgccagcttttcgc

SEQ ID NO: 522873 - DNA, 75 bp, synthetic construct
  source 1..75: mol_type = other DNA
ataatgaattttaagccaaatagcgaattaatacatgagctaaaggcgtcatcaggtcttttaattgcaaaatcg

SEQ ID NO: 522874 - DNA, 75 bp, synthetic construct
  source 1..75: mol_type = other DNA
tcgttcacgaagccagcccgacatcttccggcaatctcgaatggtttaccgcacagtggggagaaatctcgtttg

SEQ ID NO: 522875 - DNA, 75 bp, synthetic construct
  source 1..75: mol_type = other DNA
tatattgtttaaaaaacctctcaactgttaacggacgcgccagacgtaaggagtactggtattatcgcctgagcg

SEQ ID NO: 522876 - DNA, 75 bp, synthetic construct
  source 1..75: mol_type = other DNA
attatgacccgctgcaggggcggtatatcactcaggatccgattgggctgaaggggggatggaatttttatcagt

SEQ ID NO: 522877 - DNA, 75 bp, synthetic construct
  source 1..75: mol_type = other DNA
tcagcaagctcagaaaaatgcctcctgaggctgtcgtggtctggcagggctatgaccaatcagagggtgagtata

SEQ ID NO: 522878 - DNA, 75 bp, synthetic construct
  source 1..75: mol_type = other DNA
aaaacgcatcctgcccgaagtgcgtgcgcacctgaaaccgtggcagtccgtcggaacgcgcgcgcagccgagcct

SEQ ID NO: 522879 - DNA, 75 bp, synthetic construct
  source 1..75: mol_type = other DNA
tggatttttgagacatttccatcagtttgcctctcttgttccggaggaaaggattccaccgtactgttccatctt

SEQ ID NO: 522880 - DNA, 75 bp, synthetic construct
  source 1..75: mol_type = other DNA
aagcctggtatcgcaatgccattccttcagcgcaggcgcgagactggtttgattcccatgtcgccattcgtgact

SEQ ID NO: 522881 - DNA, 75 bp, synthetic construct
  source 1..75: mol_type = other DNA
ctcatggcgtcggcattcgtacaacgtcagcaggttcattcccgatttttctgaatggagggatcgaggccgatc

SEQ ID NO: 522882 - DNA, 75 bp, synthetic construct
  source 1..75: mol_type = other DNA
gtagtagctatctctaaccgattagatggcggacttttcaagtcactggagaccctcgagccatccacaaagctg

SEQ ID NO: 522883 - DNA, 75 bp, synthetic construct
  source 1..75: mol_type = other DNA
ttccatcttgtggcagaggtggcccgcaggagaaaacgtcatttctctgttctgttcattgactgggaggcctag

SEQ ID NO: 522884 - DNA, 75 bp, synthetic construct
  source 1..75: mol_type = other DNA
tactgcctgatgtggtcgtggttccgggatatgttcagcaactggctcagaattattctgggctgcatccttaca

SEQ ID NO: 522885 - DNA, 75 bp, synthetic construct
  source 1..75: mol_type = other DNA
ggcagcgcaacggcctcgtctgcctccacggcctcccgcgccaccggcgatgcgcgcagccgcagccgcgccgcc

SEQ ID NO: 522886 - DNA, 75 bp, synthetic construct
  source 1..75: mol_type = other DNA
cgataaccatacgtgggcagctctccgataacatggtgtatacggagaagcacatccgtatcatcagtgtgacga

SEQ ID NO: 522887 - DNA, 75 bp, synthetic construct
  source 1..75: mol_type = other DNA
attgaggacaatgttttattaaacaaatattctatcagttgtatagcagaacaatattgtctactttacaaggac

SEQ ID NO: 522888 - DNA, 75 bp, synthetic construct
  source 1..75: mol_type = other DNA
aacctgctgaatgaagagaacccgcatcagctgcagcagcttatccgcctgccggggcagcagtatgatgaggag

SEQ ID NO: 522889 - DNA, 75 bp, synthetic construct
  source 1..75: mol_type = other DNA
acacgaatattgggtcagtgactcagaatcacagtggttctggtgataacattattggaaacaaaaatatataca

SEQ ID NO: 522890 - DNA, 75 bp, synthetic construct
  source 1..75: mol_type = other DNA
ttccgcctcacgaccgcaccaggtaatggtttgtacgttaactatgggctgaaagcgctgaacatccatggtggg

SEQ ID NO: 522891 - DNA, 75 bp, synthetic construct
  source 1..75: mol_type = other DNA
aatggttttttccagcctttgatgcaggtttaatgttagtattttcatccgcagtcacgctctattgcatcaata

SEQ ID NO: 522892 - DNA, 75 bp, synthetic construct
  source 1..75: mol_type = other DNA
attctgcacgtcatctgacgctggcatggggggcaggacttcagtttaatccggcggatacggtggcggttgacc

SEQ ID NO: 522893 - DNA, 75 bp, synthetic construct
  source 1..75: mol_type = other DNA
ttgggtcgggtggctcattaacgttacgtgatttacagggcgacgaggtggaagcggacaaaacgttacacattg

SEQ ID NO: 522894 - DNA, 75 bp, synthetic construct
  source 1..75: mol_type = other DNA
aaacggaaggtgacggaaacgtgcaaacgcgacttggggtgaaaacctacctgaacagtcatcaccagcgtgaca

SEQ ID NO: 522895 - DNA, 75 bp, synthetic construct
  source 1..75: mol_type = other DNA
gcgcgtgatacacagatagctctgaatgacaaaagtaagggcgacgtgcgggtggatgggcagaactctcttctt

SEQ ID NO: 522896 - DNA, 75 bp, synthetic construct
  source 1..75: mol_type = other DNA
aatccggtggcgagcgacgatattattaatgccgccgaatcgggcgtggcgcaaaccatcagcggccaggtgacg

SEQ ID NO: 522897 - DNA, 75 bp, synthetic construct
  source 1..75: mol_type = other DNA
caatctgcccggcctgcgggtcgatacggtggcgggcgatgatgtggtcaatatcatcgagcacgggcaggcgct

SEQ ID NO: 522898 - DNA, 75 bp, synthetic construct
  source 1..75: mol_type = other DNA
ggggcagaacaccattaacaccttcctcagcacggcgggcagcggtggtaactcgacgtctgtctccatgacctg

SEQ ID NO: 522899 - DNA, 75 bp, synthetic construct
  source 1..75: mol_type = other DNA
tctgcctggcctgcgggtcgataccgtggcgggcgatgatgttattaacagcattgagcacaatcaggcgctggt

SEQ ID NO: 522900 - DNA, 75 bp, synthetic construct
  source 1..75: mol_type = other DNA
cacggtaaccgcgaacgtcaccgatagtgcaggcaacagcaattccgccagccataacgtgctggtcaacagcgc

SEQ ID NO: 522901 - DNA, 75 bp, synthetic construct
  source 1..75: mol_type = other DNA
cagatgtgggcaactggcctgcggggacggtgaatatcacggtaagcggcactaacaccgccggaacaactacga

SEQ ID NO: 522902 - DNA, 75 bp, synthetic construct
  source 1..75: mol_type = other DNA
agcccttgtaacaggacaacgtcgcgaagacataacaaatatgcggttcagtgagatttatgatgatcgtctcca

SEQ ID NO: 522903 - DNA, 75 bp, synthetic construct
  source 1..75: mol_type = other DNA
atcactccggggatgctgaaaaaggttggtgaggataacaaggctgattattactttctcacaaacggtgctgat

SEQ ID NO: 522904 - DNA, 75 bp, synthetic construct
  source 1..75: mol_type = other DNA
aatctgggccaatcgctgggtgaactcacaactaacgttatcgcgtgggcctcgcaaattggcggagaacttcag

SEQ ID NO: 522905 - DNA, 75 bp, synthetic construct
  source 1..75: mol_type = other DNA
ccgccgcgatgggaaatctgcctgacggcgcggtggcgattaccgcttctgtgacggatctcagcggcaataccg

SEQ ID NO: 522906 - DNA, 75 bp, synthetic construct
  source 1..75: mol_type = other DNA
ctcagaccaccgcaattgaaagcattgcgccgtaccttgatatcgtcggccagacgacggctttcccgtggggat

SEQ ID NO: 522907 - DNA, 75 bp, synthetic construct
  source 1..75: mol_type = other DNA
gccggaaaaccgttgccgcaggtaaccgcgtaaaccgtcaattcgtggcagaacgtcctgaccagttgtgggtgg

SEQ ID NO: 522908 - DNA, 75 bp, synthetic construct
  source 1..75: mol_type = other DNA
ccactgacgatgtgattaacgccgccgaaaaaggcagcgatttgcagctctccggcaccacctccggcgtggaag

SEQ ID NO: 522909 - DNA, 75 bp, synthetic construct
  source 1..75: mol_type = other DNA
ccgatcaaaccatcagcggggtggtgactcgcgccgccgctggcgatacggtcaccgtgacgctgggcggcaaca

SEQ ID NO: 522910 - DNA, 75 bp, synthetic construct
  source 1..75: mol_type = other DNA
gatgtgattaacgccgccgaaaaaggtgcggcgctaacgctctccggcagcacgtccggcgtcgaagcggggcaa

SEQ ID NO: 522911 - DNA, 75 bp, synthetic construct
  source 1..75: mol_type = other DNA
cagttagcgcattgggtgaagctaactacacggtaacggcaaacgtcaccgacacggcaggcaacagtaattccg

SEQ ID NO: 522912 - DNA, 75 bp, synthetic construct
  source 1..75: mol_type = other DNA
gtcgataccgtggcgggcgatgatgtggttaacagcatcgagcacggtcaggcactggtgataaccggtagcagc

SEQ ID NO: 522913 - DNA, 75 bp, synthetic construct
  source 1..75: mol_type = other DNA
aaacctacacctccacggtggcggctaacggtagctggagcaccactgttccggctgcagatttggcggcgctgc

SEQ ID NO: 522914 - DNA, 75 bp, synthetic construct
  source 1..75: mol_type = other DNA
gatattatcaatgccgccgaagcgggcagcgcacaaaccatcagcggccaggtgaccggggcggcggcgggcagt

SEQ ID NO: 522915 - DNA, 75 bp, synthetic construct
  source 1..75: mol_type = other DNA
attaatccggtggcgaccgataacgtcatcaacacgccggaacacacccaggcgcaaatcatcagtggcacggtt

SEQ ID NO: 522916 - DNA, 75 bp, synthetic construct
  source 1..75: mol_type = other DNA
aacaccatcgccacggacgacgtgattaacgccgcagaaaaaggcgctgatttaaccctttccggcaccaccact

SEQ ID NO: 522917 - DNA, 75 bp, synthetic construct
  source 1..75: mol_type = other DNA
gctcggcgctaacgagttcgcgcaaatcagtaccgacaacggcgcaacctgggtgaacgtaacgctggcggcaga

SEQ ID NO: 522918 - DNA, 75 bp, synthetic construct
  source 1..75: mol_type = other DNA
tcggtgcgctgggcgaagccagctacacggtgacggcgaacgtcaccgacagcgcgggcaacagcaattccgcca

SEQ ID NO: 522919 - DNA, 75 bp, synthetic construct
  source 1..75: mol_type = other DNA
gtatcagggcgtcgtgcagtcagacggcacctggagcgtgactgtgcccgccgccaacgtgggcgcactggctga

SEQ ID NO: 522920 - DNA, 75 bp, synthetic construct
  source 1..75: mol_type = other DNA
gcattacgcatccggtaacggtggatctcactccggcggctattaccatcaacactatcgccacggacgatgtga

SEQ ID NO: 522921 - DNA, 75 bp, synthetic construct
  source 1..75: mol_type = other DNA
ggggcagggacttatccagcgtatgcatcaactctcttctgaaggatggaccctatctgatgcgcagcaagccaa

SEQ ID NO: 522922 - DNA, 75 bp, synthetic construct
  source 1..75: mol_type = other DNA
tcgatgatgaaaaagaattactttggcatagcttagagtttgctttatattttatgtcaggtaatgataaaatcc

SEQ ID NO: 522923 - DNA, 75 bp, synthetic construct
  source 1..75: mol_type = other DNA
tggatttgttaatgaatttgttcttggtaattttgtttctgaaaatattattaatgataagtcaaatgaatggat

SEQ ID NO: 522924 - DNA, 75 bp, synthetic construct
  source 1..75: mol_type = other DNA
atattgaaagactcttaattggtaaagagttgcagtctataaatcctaacacccccccattattccttttaaaaa

SEQ ID NO: 522925 - DNA, 75 bp, synthetic construct
  source 1..75: mol_type = other DNA
gctgcatagtgcgttcaatgatgaaatcccggcgattgtcgatgtttttcgcgtttttcgcgggtgcggcgcgct

SEQ ID NO: 522926 - DNA, 75 bp, synthetic construct
  source 1..75: mol_type = other DNA
gcatttgccgaatgggggcaaaccacgccgaaagtgcgtgcggaatgtctgctgaaactggctgatgttatcgaa

SEQ ID NO: 522927 - DNA, 75 bp, synthetic construct
  source 1..75: mol_type = other DNA
aacgtgaaagcgttttttcctgccgtcagggagtttgtctataaccccaacgttaaaaacgccctggtactcaag

SEQ ID NO: 522928 - DNA, 75 bp, synthetic construct
  source 1..75: mol_type = other DNA
gaaccggatcacggcaattccggaaagcatacttggccctgatgaatcccctaatgatttttatcaaaatcatta

SEQ ID NO: 522929 - DNA, 75 bp, synthetic construct
  source 1..75: mol_type = other DNA
aaagctatcatcagtctgagaaatcggcctccgagttcgatgccattgttgcgcaaacggagcagttccttgccg

SEQ ID NO: 522930 - DNA, 75 bp, synthetic construct
  source 1..75: mol_type = other DNA
cctgctggctgccgctgttaatgccgctcgcgttcgcgccaccctgggtgaaatttccgatgcgctggaagtcgc

SEQ ID NO: 522931 - DNA, 75 bp, synthetic construct
  source 1..75: mol_type = other DNA
ttatttatgttttatgtgaatcatgttggtatgataaaaaaaacttccgagaaaatttcaaacctgttattgatg

SEQ ID NO: 522932 - DNA, 75 bp, synthetic construct
  source 1..75: mol_type = other DNA
tgagcacaaccccactcgattttggtgatgttcctgtacttattaaatcaaatgataaagacgccattaaaaaat

SEQ ID NO: 522933 - DNA, 75 bp, synthetic construct
  source 1..75: mol_type = other DNA
ggctaactcagttgtgactcttgattataatatagaggtgccaacattaaaaattagtaataatactactgtaga

SEQ ID NO: 522934 - DNA, 75 bp, synthetic construct
  source 1..75: mol_type = other DNA
gctgcatagtgcgttcaatgatgaaatcccggcgattgtcgatgtttttcgctttttcgctttttcgcgggtgcg

SEQ ID NO: 522935 - DNA, 75 bp, synthetic construct
  source 1..75: mol_type = other DNA
atgaaaaatgtagacaatattatctggcatgatggtgttttagttgaaacaagaatggaatgtcaccacgccggg

SEQ ID NO: 522936 - DNA, 75 bp, synthetic construct
  source 1..75: mol_type = other DNA
gttgcggtcactggcgaagctgagatcaagtttgcgcctcttgaggtgaatgttaatgatggtgcgattaacggt

SEQ ID NO: 522937 - DNA, 75 bp, synthetic construct
  source 1..75: mol_type = other DNA
agaatgggctgaacaactcacactcttaggtgctggctcttctcgaagtttgtttgtctgggctgctgaacatct

SEQ ID NO: 522938 - DNA, 75 bp, synthetic construct
  source 1..75: mol_type = other DNA
attaatcagcagatggatgtgtttgtccatgacgataagatcgcagggctggttgataccaagataagggagaac

SEQ ID NO: 522939 - DNA, 75 bp, synthetic construct
  source 1..75: mol_type = other DNA
ggtgagctaaccaccaacattctctccttctctggtcgagtcggagaagaacttaagaaaggcgcgacattgccg

SEQ ID NO: 522940 - DNA, 75 bp, synthetic construct
  source 1..75: mol_type = other DNA
accgctcagatggaaggcaaggcttcactagcatcggctaaggctcagacagcgaagctccgccaggctgaacaa

SEQ ID NO: 522941 - DNA, 75 bp, synthetic construct
  source 1..75: mol_type = other DNA
cgtgaacttacaatttttccttggctatccggtaggctttttttctaccaaacccattatgaaattaaccgctct

SEQ ID NO: 522942 - DNA, 75 bp, synthetic construct
  source 1..75: mol_type = other DNA
actgtttgaagccaatggctatctatatcgaaataacaaaacattatgaaactcatgaaaaggtcgcatatttat

SEQ ID NO: 522943 - DNA, 75 bp, synthetic construct
  source 1..75: mol_type = other DNA
cgggagtacggcagaaccgaaaagcaaaaactgcattttgttttcatgcccagagtgtgtaacggaaaacagaaa

SEQ ID NO: 522944 - DNA, 75 bp, synthetic construct
  source 1..75: mol_type = other DNA
cggtggaatttgcagccgttgttacaaagtgcacagttaacaggaatgaccgtaacaatcaaatccaatacctgt

SEQ ID NO: 522945 - DNA, 75 bp, synthetic construct
  source 1..75: mol_type = other DNA
ggctggtggtgcgcgttgccggatacagcgccttctttgtcgaactgtcgaaggagatccaggatgacatcatcc

SEQ ID NO: 522946 - DNA, 75 bp, synthetic construct
  source 1..75: mol_type = other DNA
ttaatacaggagcaaaaaccgtaaccttaccgtggaatgagcaaattacgacagcactccgcgacgggaaactcg

SEQ ID NO: 522947 - DNA, 75 bp, synthetic construct
  source 1..75: mol_type = other DNA
gcgcaagttcgtcgaagagctggataccagcaaggatgtggtggtatatgccaagttgccgcgtggttttctgat

SEQ ID NO: 522948 - DNA, 75 bp, synthetic construct
  source 1..75: mol_type = other DNA
ttaaaggcctcaatgctgacgtcttcgcacaattcaagagcaacccagaaagcttcattgccgaagccattcgtt

SEQ ID NO: 522949 - DNA, 75 bp, synthetic construct
  source 1..75: mol_type = other DNA
caagttatcagagggaactttgctgacaagacgagccgctgccgaaattcttaaaggcctcaatgctgacgtctt

SEQ ID NO: 522950 - DNA, 75 bp, synthetic construct
  source 1..75: mol_type = other DNA
gtactccttgcttgtacaggaatatcttgatgagttgactcttttaccgagtgagcagactgatgcctataaagc

SEQ ID NO: 522951 - DNA, 75 bp, synthetic construct
  source 1..75: mol_type = other DNA
tttgtggttactgatgtcaacgcgattaacgacacggttgaattcaaaaatggccatgttttaaccacgggcgat

SEQ ID NO: 522952 - DNA, 75 bp, synthetic construct
  source 1..75: mol_type = other DNA
catattgctacatcaaaaccatctttgagatgaataagcgctatggctggagcaaatttattatcgttgtgccta

SEQ ID NO: 522953 - DNA, 75 bp, synthetic construct
  source 1..75: mol_type = other DNA
caggttctaccattaccggtactaaccgttacggtgctttctctgtctcacaaaacgtagcgtcaaatgttgtat

SEQ ID NO: 522954 - DNA, 75 bp, synthetic construct
  source 1..75: mol_type = other DNA
ctgcaacaaatttaagtggcggtgtacagaacatctataatcttggtcatgcatcaaataccgttatttttagcg

SEQ ID NO: 522955 - DNA, 75 bp, synthetic construct
  source 1..75: mol_type = other DNA
ggagccactccagacaggcttgggttgtggcctcagagttagccagagggcatggttttgtccttgcaaaaaata

SEQ ID NO: 522956 - DNA, 75 bp, synthetic construct
  source 1..75: mol_type = other DNA
gggacgccccttatgctaaatatctacgccacattgcggccgataagacgcatagcggctacttttctatcgaca

SEQ ID NO: 522957 - DNA, 75 bp, synthetic construct
  source 1..75: mol_type = other DNA
cacacaacaagatctaccgtctggatgcgcttgatgcctacaaccagaagctggtgaagaaaattgaggtgcgcg

SEQ ID NO: 522958 - DNA, 75 bp, synthetic construct
  source 1..75: mol_type = other DNA
acaacggttaattctgcagggagattaaggattgatgatggaggaatacttaatggtatcacaaccattaatgcc

SEQ ID NO: 522959 - DNA, 75 bp, synthetic construct
  source 1..75: mol_type = other DNA
attgtcaatgagctttcgagaaaatcagatgaattaggtggaagttatttcgtaataacctccctcgatgttgac

SEQ ID NO: 522960 - DNA, 75 bp, synthetic construct
  source 1..75: mol_type = other DNA
ggcgtggctcgccgttccaaatacgaaaaagagaactatctccgtatcgatttcagcaaagccggtaaggttaca

SEQ ID NO: 522961 - DNA, 75 bp, synthetic construct
  source 1..75: mol_type = other DNA
tgcgacatttgatcttgccgtaatgcgaactctcccaaggcttaaaggaatttcagctaacctacgcaaacaacg

SEQ ID NO: 522962 - DNA, 75 bp, synthetic construct
  source 1..75: mol_type = other DNA
agatcgtgatggtgtgcggcgtgagtccgttgattcattatggtacaggcaaacgccaaaccgggtaagagatat

SEQ ID NO: 522963 - DNA, 75 bp, synthetic construct
  source 1..75: mol_type = other DNA
acgttcagtctgtgctggaccgcatcgccgttcttgccgcccagttcgacgacgacggtgaaatggatgtctggg

SEQ ID NO: 522964 - DNA, 75 bp, synthetic construct
  source 1..75: mol_type = other DNA
tcagaatacggattcacacaaaccctttgcgtcttaggagcagtcgtaaataacgcgaatgacacctttgatgtt

SEQ ID NO: 522965 - DNA, 75 bp, synthetic construct
  source 1..75: mol_type = other DNA
acattaagttattgtccgagttttgttgctttgaatggtagaaataaccatcttcatgccgatttctcagaatac

SEQ ID NO: 522966 - DNA, 75 bp, synthetic construct
  source 1..75: mol_type = other DNA
tccacgtggtataattccatcacaaattgatatggaaattaggtaccatgtaaatgatgtgatgaagtttattgt

SEQ ID NO: 522967 - DNA, 75 bp, synthetic construct
  source 1..75: mol_type = other DNA
agttaattgatcaggctgggctgggtcacgatgccctgacccaggcccgtaaccagttgcttggcatggcggcgc

SEQ ID NO: 522968 - DNA, 75 bp, synthetic construct
  source 1..75: mol_type = other DNA
atttaaaggtaaagctcatcttgatacagatgttatggccgactgggtagatacgcaaaaagaaataaatgcatt

SEQ ID NO: 522969 - DNA, 75 bp, synthetic construct
  source 1..75: mol_type = other DNA
agatcgtgatggtatgcggcgtgagtccgttgattcattatggtacagacaaacgccaaaccgggtaagagatat

SEQ ID NO: 522970 - DNA, 75 bp, synthetic construct
  source 1..75: mol_type = other DNA
attgtcgctaacgttagcgatattataccaggggttttagctgtgacaaaaaatcagtgtcgcaatttatggggt

SEQ ID NO: 522971 - DNA, 75 bp, synthetic construct
  source 1..75: mol_type = other DNA
tgggccatgtcgatataaaaatgacaatgatttacgcccacttcgctcccgaccatctggaagatgctgtaacca

SEQ ID NO: 522972 - DNA, 75 bp, synthetic construct
  source 1..75: mol_type = other DNA
aagttccagaattaccaaagtgttgtaacatataatcaacaagtttataaggataatttagttgagcacataagc

SEQ ID NO: 522973 - DNA, 75 bp, synthetic construct
  source 1..75: mol_type = other DNA
ggccggataaccgtatcgcccgtgacgcgcactatctttaccggtatgaccgttacggcaggctgacggagaaaa

SEQ ID NO: 522974 - DNA, 75 bp, synthetic construct
  source 1..75: mol_type = other DNA
aaaggaagaaataaaagaccttgatacaaatttgcccccggacatatataaaaaagaaattttaaacatcataaa

SEQ ID NO: 522975 - DNA, 75 bp, synthetic construct
  source 1..75: mol_type = other DNA
agcttacattccattatttttatattctcatatttgtatttttggttttgtattggttcctataggtcgtttaaa

SEQ ID NO: 522976 - DNA, 75 bp, synthetic construct
  source 1..75: mol_type = other DNA
aaatggatccagagcggcaaaacgtttgatgcgaaacagctgacagatgagaacatcgcgcttaaatcactgtaa

SEQ ID NO: 522977 - DNA, 75 bp, synthetic construct
  source 1..75: mol_type = other DNA
taatgcaccaccgcccgtgcaacgctatcttttacagcgccatcagcaggctggtgtgcgcattctgctcaataa

SEQ ID NO: 522978 - DNA, 75 bp, synthetic construct
  source 1..75: mol_type = other DNA
cgagcaactggctcgcgaggccaaccttgatactgccaatggcattgtcattgatgaggcttgccgcacctgcga

SEQ ID NO: 522979 - DNA, 75 bp, synthetic construct
  source 1..75: mol_type = other DNA
taccgtggtggcagtgccaccatcgctcattttttgtaccgtggtggcagtgccaccatcgcttattttttgtac

SEQ ID NO: 522980 - DNA, 75 bp, synthetic construct
  source 1..75: mol_type = other DNA
cgaatacagcttttcggtaacagccaaagggcttgagatggcactgtatagaacgcggaaaaaccgaaaaaatgt

SEQ ID NO: 522981 - DNA, 75 bp, synthetic construct
  source 1..75: mol_type = other DNA
caatcccggatgacaaaagacattgtcctgaacgcactgctgatggctgtatggcggcgtaatccccaaaaacag

SEQ ID NO: 522982 - DNA, 75 bp, synthetic construct
  source 1..75: mol_type = other DNA
tattgcaagaagttgaagaaaccgttgaaatattaaaagatacgcaacaaataaaaccagtaaaggttaaatcaa

SEQ ID NO: 522983 - DNA, 75 bp, synthetic construct
  source 1..75: mol_type = other DNA
cacgagaaatttaatcctgaaactggtatatcagagcttgggacaggaaagtcttctggcttgtgtgtagagtat

SEQ ID NO: 522984 - DNA, 75 bp, synthetic construct
  source 1..75: mol_type = other DNA
tgacggtctggaattgctgacagaggatgccgtgtacttacaaaatgtggaaaagaaagaaggggctaaatgggt

SEQ ID NO: 522985 - DNA, 75 bp, synthetic construct
  source 1..75: mol_type = other DNA
gcgaatacgctgcaggtgaaggtcaccgatgctaacggtaatacgcttgtcggacagacggtcagcgtgatggca

SEQ ID NO: 522986 - DNA, 75 bp, synthetic construct
  source 1..75: mol_type = other DNA
gttgataacgggcaacgacatcatcatctttacccgtctcattggccattattatggtttgctctgctggcggcg

SEQ ID NO: 522987 - DNA, 75 bp, synthetic construct
  source 1..75: mol_type = other DNA
atgaagtatctcagaggaacgttgatattgaaaaaaacttttggaccaactccaacctaaaaaccacaacaataa

SEQ ID NO: 522988 - DNA, 75 bp, synthetic construct
  source 1..75: mol_type = other DNA
atttaccgagtcatcagcaatgaaaagcaagaggttgaatgtcttaatgaaatggggagggagataataagcaac

SEQ ID NO: 522989 - DNA, 75 bp, synthetic construct
  source 1..75: mol_type = other DNA
tgtcaatggtgcaaaattcagggcggcagatggttttcccaaaacagggtttgatggtgctaaatttacactgat

SEQ ID NO: 522990 - DNA, 75 bp, synthetic construct
  source 1..75: mol_type = other DNA
gggcgtcaggctgccgtaatggcaatttgcgcccggatcaggccgcagaggttaaactctgcggcctttttcgtg

SEQ ID NO: 522991 - DNA, 75 bp, synthetic construct
  source 1..75: mol_type = other DNA
gattatgaggtcattccttttgtagagttatgtctaaaagaaataagagattttgttaatgaagcatatgaaatt

SEQ ID NO: 522992 - DNA, 75 bp, synthetic construct
  source 1..75: mol_type = other DNA
acgcagccggacggaacggtggagatctctgtcaccagccagacggcaggcaccagtgcggtcactgccagcatt

SEQ ID NO: 522993 - DNA, 75 bp, synthetic construct
  source 1..75: mol_type = other DNA
aaatggtttatacctcaagggataattcaggaatcatggagtgagatgaattcatattgtattggtaatggttat

SEQ ID NO: 522994 - DNA, 75 bp, synthetic construct
  source 1..75: mol_type = other DNA
atgcgttcggtaatgcgctgggcgggcagacggtcagcgtgttggcggacaacagcgcaacggtcgctccgacgg

SEQ ID NO: 522995 - DNA, 75 bp, synthetic construct
  source 1..75: mol_type = other DNA
agcgacgccactggcggcaacggttcggatgtggtgaatggctttacggtaggcacatgggaaggcaccgccgac

SEQ ID NO: 522996 - DNA, 75 bp, synthetic construct
  source 1..75: mol_type = other DNA
gagttttactactaccgtgcaggctgatggctcctggagtctgacggtacctgccgccgcgatgggaaatctgcc

SEQ ID NO: 522997 - DNA, 75 bp, synthetic construct
  source 1..75: mol_type = other DNA
acccacgcctatagcgtcgatgccacggcaccgacgcttgccattaacactattgccaccgacgatattcttaac

SEQ ID NO: 522998 - DNA, 75 bp, synthetic construct
  source 1..75: mol_type = other DNA
cggcaatacttacacggcaacggtgggcagcaatctcacctggagcgtgaatgttccggcggcagatttacaggc

SEQ ID NO: 522999 - DNA, 75 bp, synthetic construct
  source 1..75: mol_type = other DNA
gatatcgtgatagatgccaacttgccaggtctgcgggttgataccgtggcaggcgatgatgtgattaacagcatt

SEQ ID NO: 523000 - DNA, 75 bp, synthetic construct
  source 1..75: mol_type = other DNA
ggatgccacgccgccggtggtgaccattaatccggtggcgaccgataacgtcatcaacacgccggaacacaccca

SEQ ID NO: 523001 - DNA, 75 bp, synthetic construct
  source 1..75: mol_type = other DNA
tcgataccgttgcgccaacggtcaccatcgccacggtggcgggtgacgatattatcaacaacgccgagcagcttg

SEQ ID NO: 523002 - DNA, 75 bp, synthetic construct
  source 1..75: mol_type = other DNA
cacctttgcgggcgacaacattgtcaacaacgccgaagcgggagcagatcaaaccctgagtggcgtcgtcgtggg

SEQ ID NO: 523003 - DNA, 75 bp, synthetic construct
  source 1..75: mol_type = other DNA
agcgtgacgttgaataatgtcacgtatagcgctcaggtcagcggcggcgtctggtcgctgagcgttccggtgagt

SEQ ID NO: 523004 - DNA, 75 bp, synthetic construct
  source 1..75: mol_type = other DNA
ggtttagcccccgtagaactgactgcccagaccactgcgattgaaagcattgcgccatttcttgataccgttgct

SEQ ID NO: 523005 - DNA, 75 bp, synthetic construct
  source 1..75: mol_type = other DNA
gcgagcaaaaccatcgccattgcgggcatcagcgatgacaccgggttaagcagcagcgattttgttactcgcgac

SEQ ID NO: 523006 - DNA, 75 bp, synthetic construct
  source 1..75: mol_type = other DNA
ccaccagcggcgtggcggcaatggactacgactgggacggcgcggtggatgtgctggtgaccaaacagtcgggca

SEQ ID NO: 523007 - DNA, 75 bp, synthetic construct
  source 1..75: mol_type = other DNA
tatcaccatcagtgccgggctgccggggctgcgcattgacaccatcgcgggcgatgatgtgatcaatgccgttga

SEQ ID NO: 523008 - DNA, 75 bp, synthetic construct
  source 1..75: mol_type = other DNA
cctgcctgggctgcgggtggataccgtggcgggcgatgatatcgtcaacagcattgaacacggacaggcgctggt

SEQ ID NO: 523009 - DNA, 75 bp, synthetic construct
  source 1..75: mol_type = other DNA
ggtgctggatgccagcggcaactggagcgtcggcgttccggcaagcgtcgtctcggcactggcgaacggcacggt

SEQ ID NO: 523010 - DNA, 75 bp, synthetic construct
  source 1..75: mol_type = other DNA
tggccgtcgactgggatcatgacgggttaatggacatcgcccgtatcgcccagaccggacagtcgtatctttata

SEQ ID NO: 523011 - DNA, 75 bp, synthetic construct
  source 1..75: mol_type = other DNA
ataactaaagccagcaaaggagataaggttaattcagttgtattggatgacataggttctgaaattaataacgaa

SEQ ID NO: 523012 - DNA, 75 bp, synthetic construct
  source 1..75: mol_type = other DNA
gtaatttataatgagggaatgttagcgtcatctttttggattaaaaatgaaaaaaaatatcctataattgtacaa

SEQ ID NO: 523013 - DNA, 75 bp, synthetic construct
  source 1..75: mol_type = other DNA
cgctaccgtgcagggcaatttaagctggagcgtggacgttccggctgcggatattcaggccatcggtaatggcga

SEQ ID NO: 523014 - DNA, 75 bp, synthetic construct
  source 1..75: mol_type = other DNA
accattggcattaacaccatcgccaccgatgacgtgattaacgccaccgaaaaaggcgcggatctgcaaatttcc

SEQ ID NO: 523015 - DNA, 75 bp, synthetic construct
  source 1..75: mol_type = other DNA
gcgttaacgctctccggcagcacctctggcgtcgaagccggacaaacggttaccgtcacctttggcggcaaaact

SEQ ID NO: 523016 - DNA, 75 bp, synthetic construct
  source 1..75: mol_type = other DNA
cgtggaggttaatccgggcgcggtgcttatcaccatcaataccgtctccggtgatgacattatcaatgccgcaga

SEQ ID NO: 523017 - DNA, 75 bp, synthetic construct
  source 1..75: mol_type = other DNA
cggcgcagcaaacgtccaggccagcgtcagcaatgtcgcagggaacagcgcccaggcaacgcatgcttacagcgt

SEQ ID NO: 523018 - DNA, 75 bp, synthetic construct
  source 1..75: mol_type = other DNA
gcggtaaaacctacactgcaagcgtcgccgccaacggtagctggagtgtgaacgttccagcggcagatctggcaa

SEQ ID NO: 523019 - DNA, 75 bp, synthetic construct
  source 1..75: mol_type = other DNA
tgcgcaaaccatcagcggccaggtgacgggggccgcggcgggagataccgttaccgtgacgctgggcggcaacac

SEQ ID NO: 523020 - DNA, 75 bp, synthetic construct
  source 1..75: mol_type = other DNA
ctttctgccggtgagttcgcgcaaatcagcattgatggcggcaccacctggcagaatctttcggtaagcggtttg

SEQ ID NO: 523021 - DNA, 75 bp, synthetic construct
  source 1..75: mol_type = other DNA
gcatcgagcacgctcaggcgctggtgataactggtagcagcagcgggctggcggcgggcgcggcgctgacggtgg

SEQ ID NO: 523022 - DNA, 75 bp, synthetic construct
  source 1..75: mol_type = other DNA
attacaccactactgtggaagctaacggtagctggacggtgaatgtgccgcctgccgatctcgctgcgctgccgg

SEQ ID NO: 523023 - DNA, 75 bp, synthetic construct
  source 1..75: mol_type = other DNA
atttgcagctctccggcaccacctccggcgtggaagcggggcaaaccatcaccgttatcttcggcggcaaaagct

SEQ ID NO: 523024 - DNA, 75 bp, synthetic construct
  source 1..75: mol_type = other DNA
ccggcagcagctccggctttgccgcaggcacggcgttgacggtggtgattaacaaccaaacttacgccgccacgg

SEQ ID NO: 523025 - DNA, 75 bp, synthetic construct
  source 1..75: mol_type = other DNA
cataatctggcggtagacaccaccgcgccggttcttaccataaataccgtggcgggcgatgacatcatcaacgac

SEQ ID NO: 523026 - DNA, 75 bp, synthetic construct
  source 1..75: mol_type = other DNA
atatcacgatcgacgccaatctgcctggcctgcgggtcgataccgtggcgggcgatgatgttattaacagcattg

SEQ ID NO: 523027 - DNA, 75 bp, synthetic construct
  source 1..75: mol_type = other DNA
tagcagcagcgggctggcggcgggcgcggcgctgacggtggtgattaacacggtcacttacgctgcaacagtatt

SEQ ID NO: 523028 - DNA, 75 bp, synthetic construct
  source 1..75: mol_type = other DNA
aacccggcgcaggtgctcaccatcgccagcattagcaccgacacggggagttcggcaactgactttatcaccagc

SEQ ID NO: 523029 - DNA, 75 bp, synthetic construct
  source 1..75: mol_type = other DNA
gaaaatcccggtatatgttgtatttattaccgatggcgggatcagcaagacccgggcgattaaagatgcaatccg

SEQ ID NO: 523030 - DNA, 75 bp, synthetic construct
  source 1..75: mol_type = other DNA
atgccaccgcgccgcttgtgaccatcaacaccatcgccagcgacgatatccttaacgtgagcgaagctggcgcgg

SEQ ID NO: 523031 - DNA, 75 bp, synthetic construct
  source 1..75: mol_type = other DNA
gcggcggatattcaggcgctgggcaacggcgacctgacggttaatgcctcggtcaccaatggcgtcggcaacacc

SEQ ID NO: 523032 - DNA, 75 bp, synthetic construct
  source 1..75: mol_type = other DNA
accgatgacgtgattaacgccaccgaaaaaggcgcggatctgcaaatttccggcaccagtaatcagccagccaat

SEQ ID NO: 523033 - DNA, 75 bp, synthetic construct
  source 1..75: mol_type = other DNA
aggccagcgtcagcaatgttaacggcaacagcgccaccacgacccacgcttacagcgtcgatgccagcgcgccaa

SEQ ID NO: 523034 - DNA, 75 bp, synthetic construct
  source 1..75: mol_type = other DNA
gggcgcggcggcgggcgatgtggtcacggttaacctgaacggtaaaaactacaccaccacgctggacgcctccgg

SEQ ID NO: 523035 - DNA, 75 bp, synthetic construct
  source 1..75: mol_type = other DNA
gcgcatggcctgcgggggcgttaaccgttgacgtggcaggccagagcagcgccggaaatccggtcagcgtcagcc

SEQ ID NO: 523036 - DNA, 75 bp, synthetic construct
  source 1..75: mol_type = other DNA
acaccaacacggtgagctacggcacttcgctacacctgcgcatcaccgatcccaacggcattaacgtctattacg

SEQ ID NO: 523037 - DNA, 75 bp, synthetic construct
  source 1..75: mol_type = other DNA
gctggtgattaccggcagcagctcggggctggctgaaggcacgccgcttaccgtcacgattaataatgtggaata

SEQ ID NO: 523038 - DNA, 75 bp, synthetic construct
  source 1..75: mol_type = other DNA
gaccattactgccagcctgagcgatcgcgcgggcaacagcgacagcgctacccataatgtcaccgttgatcttag

SEQ ID NO: 523039 - DNA, 75 bp, synthetic construct
  source 1..75: mol_type = other DNA
cgcagattatcagcggctcggcaacgggcgcgactaccggtaatacggtttccgtgacgattggcacgaccacct

SEQ ID NO: 523040 - DNA, 75 bp, synthetic construct
  source 1..75: mol_type = other DNA
gcgtcagcgatcgggcgggcaacagcgacgacgccagccgcaccgtgaccgtcagcctcagcgcgccagtgatta

SEQ ID NO: 523041 - DNA, 75 bp, synthetic construct
  source 1..75: mol_type = other DNA
gcaccagcgggattgaaagcggtcaaaccgttaccgtcacctttggcggtaaaacctacaccgcaagcgtcgccg

SEQ ID NO: 523042 - DNA, 75 bp, synthetic construct
  source 1..75: mol_type = other DNA
ctcagtgatggcaccagctacacggttagcgcctccgctcaggacagtgccggaaacagcgccacggcctcgcgc

SEQ ID NO: 523043 - DNA, 75 bp, synthetic construct
  source 1..75: mol_type = other DNA
cgcgcttgccagtgggcagtatgttgaagtggtgatcaacggcaaaacctacacctctgaaccgggcggcgcggt

SEQ ID NO: 523044 - DNA, 75 bp, synthetic construct
  source 1..75: mol_type = other DNA
aggtgcggtgacgatggtcggcgctctgaactggacctacagcgacagcgggctggtgagcggtgcctataccta

SEQ ID NO: 523045 - DNA, 75 bp, synthetic construct
  source 1..75: mol_type = other DNA
gtatgttgaagtggtgatcaacggcaaaacctacacctctgaaccgggcggcgcggtagtggtcgatccggcgca

SEQ ID NO: 523046 - DNA, 75 bp, synthetic construct
  source 1..75: mol_type = other DNA
agaccggacaatcgtatctttacaccaacgttggtggtgccagcaactggacgcaatcaaccctcggcggtagcc

SEQ ID NO: 523047 - DNA, 75 bp, synthetic construct
  source 1..75: mol_type = other DNA
atcagacagggaaatacagtgatatatataaaatcacttcaagtgattttcagactgccacatctgaaaaaaatt

SEQ ID NO: 523048 - DNA, 75 bp, synthetic construct
  source 1..75: mol_type = other DNA
ttatgattcttcccgcagtggcctgccctgtgcggtggaagacggaaccggggtgaggcggagaataacgcgaaa

SEQ ID NO: 523049 - DNA, 75 bp, synthetic construct
  source 1..75: mol_type = other DNA
gaagcgggtggtgaaaaaggagcatgcggacgggagcatcacccgcagcgagtatgatgaggcggggaggctgaa

SEQ ID NO: 523050 - DNA, 75 bp, synthetic construct
  source 1..75: mol_type = other DNA
ccaacagcatctccaggggatcgagcagcagcagaaaacgttcttcaggatttacagaatgctttgggaggcaag

SEQ ID NO: 523051 - DNA, 75 bp, synthetic construct
  source 1..75: mol_type = other DNA
ccacaccacggcagcgaacctggacattgatatcccgtatgcgacggacccggcaggaaaccggctgccggaccc

SEQ ID NO: 523052 - DNA, 75 bp, synthetic construct
  source 1..75: mol_type = other DNA
aggtgttgcaggaattgaatataaaccagtcagagctgggaagacgtcttggtgtaaaaccccaatccgtgcaag

SEQ ID NO: 523053 - DNA, 75 bp, synthetic construct
  source 1..75: mol_type = other DNA
cgctgaactttcagtagttgagccagacggcggacttttcgcaactttcaatggtcacacaaggcttgttgatgt

SEQ ID NO: 523054 - DNA, 75 bp, synthetic construct
  source 1..75: mol_type = other DNA
gcaaaaacaaagatgatttttacgcgcaccggcttgaggtcataaacattgataccggagaggtgttgatgtccg

SEQ ID NO: 523055 - DNA, 75 bp, synthetic construct
  source 1..75: mol_type = other DNA
tgccagacagcaaattggcagcacgctattttacgatcgcagcttacctatcctggcggtgatgttccgcaagaa

SEQ ID NO: 523056 - DNA, 75 bp, synthetic construct
  source 1..75: mol_type = other DNA
atgagcggaaaaccggcggcgcggcagggcgacatgacccgcaagggactggatattgtgcagggttcagcgggt

SEQ ID NO: 523057 - DNA, 75 bp, synthetic construct
  source 1..75: mol_type = other DNA
attcgagcaaccgggaaaagttacttttcgcattccagtctctgatacccaggcctatcgccagttcggcaattc

SEQ ID NO: 523058 - DNA, 75 bp, synthetic construct
  source 1..75: mol_type = other DNA
ggctctgaaattttgctagaccgtggatgggatcacagcataggcgaaaaggactttaatgatcctgtaaatatg

SEQ ID NO: 523059 - DNA, 75 bp, synthetic construct
  source 1..75: mol_type = other DNA
gcagccggaaatatgaccgtcagggccgactggcagaagagatctcgcgcaacggtaacattacgcgctggtttt

SEQ ID NO: 523060 - DNA, 75 bp, synthetic construct
  source 1..75: mol_type = other DNA
gaaaatgatggggggtatattactatatctaagttgaaaacgattgcttacgatctgaaaaatacctttcttgag

SEQ ID NO: 523061 - DNA, 75 bp, synthetic construct
  source 1..75: mol_type = other DNA
ataatcagcatatgaatggcggcattgaagtggatatctggggacaaacatctctgcccggttgttttgcagtgg

SEQ ID NO: 523062 - DNA, 75 bp, synthetic construct
  source 1..75: mol_type = other DNA
atgacagattcaataaatgccaatgtgatcgtatcgatgccttcgcaactcttcactatggcgcgttcttttaaa

SEQ ID NO: 523063 - DNA, 75 bp, synthetic construct
  source 1..75: mol_type = other DNA
ggatattaatagagaacttgaaataatacagtataatattaataagtttaattgtgagattagtaacttaaaaat

SEQ ID NO: 523064 - DNA, 75 bp, synthetic construct
  source 1..75: mol_type = other DNA
tatgcctgatagttttctttctgaaatagtaatgaattattcagggtgttctgaatacactcctgattcaacaga

SEQ ID NO: 523065 - DNA, 75 bp, synthetic construct
  source 1..75: mol_type = other DNA
actgatgccgcacatcatgattcaggatcacatgatgcgaaagatattcggtcttttagcagtggtttacctacg

SEQ ID NO: 523066 - DNA, 75 bp, synthetic construct
  source 1..75: mol_type = other DNA
agtgccggaacagtccatccagtggctgacagataacggttcagcgtacagagcgcatgaaacacggcagttcgc

SEQ ID NO: 523067 - DNA, 75 bp, synthetic construct
  source 1..75: mol_type = other DNA
ctggaaggacgaccgccgcagccgtcctacggatgatacggatgtgcttcgccgtatacactatgttatcggaga

SEQ ID NO: 523068 - DNA, 75 bp, synthetic construct
  source 1..75: mol_type = other DNA
ggaagcggtaccactggtatagtttgtcaaaagcaaaccataaagtgtattggagcagatattaatcctgtaatg

SEQ ID NO: 523069 - DNA, 75 bp, synthetic construct
  source 1..75: mol_type = other DNA
cgggggttttctctttccagcaaccaatgccaccagggataaagccccgcaacattgcgcctcaccggataacgc

SEQ ID NO: 523070 - DNA, 75 bp, synthetic construct
  source 1..75: mol_type = other DNA
ccttgttgtaatgacaacattttgcggctattcttgaagtgtctggtttcaagattagcccccgttttgttgtca

SEQ ID NO: 523071 - DNA, 75 bp, synthetic construct
  source 1..75: mol_type = other DNA
aaagtaatcagcgatggtgctctgacgggtttgagttccgctgtgataacggagaaaaactgcgggtcacgttcg

SEQ ID NO: 523072 - DNA, 75 bp, synthetic construct
  source 1..75: mol_type = other DNA
atgaaagcttcactggcgctggtcagcctgctaacggcgtttaccagcaactccttaaaatctccggccgttcca

SEQ ID NO: 523073 - DNA, 75 bp, synthetic construct
  source 1..75: mol_type = other DNA
atgattacttttgatcaggcaaccgttgacagctctggtgcctttctcatcggggagctggagcgactcgaccag

SEQ ID NO: 523074 - DNA, 75 bp, synthetic construct
  source 1..75: mol_type = other DNA
atccggtgcgcctgcatgggcgtctgaacatcagtccacgctgagcgcgggggtatcttcatgtctcgacgaacg

SEQ ID NO: 523075 - DNA, 75 bp, synthetic construct
  source 1..75: mol_type = other DNA
gagaccgtaaaagaaaacgtgcgtaaaaaaatcgctgctctgcgctcttctctgccgctgagtgttggatctgac

SEQ ID NO: 523076 - DNA, 75 bp, synthetic construct
  source 1..75: mol_type = other DNA
gagttttctgtatttaatcgttgcttgcagtttggtattgtttaccatgattgtttgttaagtgctttaaaggtg

SEQ ID NO: 523077 - DNA, 75 bp, synthetic construct
  source 1..75: mol_type = other DNA
atacgtccgctacccgctggttccgcttcagagcgtgccggtgcagtatcgcggtctgtaccagattgcgaccta

SEQ ID NO: 523078 - DNA, 75 bp, synthetic construct
  source 1..75: mol_type = other DNA
ttgacagctctggtgcctttctcatcggagagctggagcgactcgaccagactctgaacctgccactggtggggt

SEQ ID NO: 523079 - DNA, 75 bp, synthetic construct
  source 1..75: mol_type = other DNA
tcaaaaagatttagcaagccacttaggtgtttcctcaacacaaattagcaagtggaaaaaaggggaacacatgtc

SEQ ID NO: 523080 - DNA, 75 bp, synthetic construct
  source 1..75: mol_type = other DNA
cgtaacagtaaaggctggctcaatgaaactcacggtggcggattttatatgtccgatggatcatgggttcgaagt

SEQ ID NO: 523081 - DNA, 75 bp, synthetic construct
  source 1..75: mol_type = other DNA
aaaacacacaggtcttagggaggtttaaactgtgtattaacacctatcgtattgacgggcgtgaaatggcagaaa

SEQ ID NO: 523082 - DNA, 75 bp, synthetic construct
  source 1..75: mol_type = other DNA
cgctggccagactgtcagggtttcgtcataaaacggtgaaggtgccggaatgggggaatgtcagcgtggtgctgc

SEQ ID NO: 523083 - DNA, 75 bp, synthetic construct
  source 1..75: mol_type = other DNA
tgaagctgcgcttagttacgcatacacgtctgttagagaattgccaccggatagtggcgctgtgttcggtattga

SEQ ID NO: 523084 - DNA, 75 bp, synthetic construct
  source 1..75: mol_type = other DNA
gaaaattggttgaatcaactcaagatgatggcattcagggcgggaattccgttaagagccgaacttctggaaatg

SEQ ID NO: 523085 - DNA, 75 bp, synthetic construct
  source 1..75: mol_type = other DNA
agataaaaatcacagactaactctctccttttcacaaggtttatttattaatgaaattaagttcttgagaaactt

SEQ ID NO: 523086 - DNA, 75 bp, synthetic construct
  source 1..75: mol_type = other DNA
attcggccacagagattccttttagcaatatatcatcggcaatggacatgctctgcgattctggggctcccttgc

SEQ ID NO: 523087 - DNA, 75 bp, synthetic construct
  source 1..75: mol_type = other DNA
atggacaggtgaaagaccttatccggtccgagattgaacataacgatcaggcagcacttaacatgctgaccgcag

SEQ ID NO: 523088 - DNA, 75 bp, synthetic construct
  source 1..75: mol_type = other DNA
ggttgccagccgtcgcgccgttccatgatttggctgtgaagcctgttccaacgtttgatcactccaaactgggga

SEQ ID NO: 523089 - DNA, 75 bp, synthetic construct
  source 1..75: mol_type = other DNA
ataccaaccttgccatcgcagacggtgccagacagcaaatcggcagcacgctatttttacgatccggcgtatatg

SEQ ID NO: 523090 - DNA, 75 bp, synthetic construct
  source 1..75: mol_type = other DNA
atgaaagcttcactggcgctgctcagcctgctaacggcatttaccagccactccttaaaatctcccgccgttcca

SEQ ID NO: 523091 - DNA, 75 bp, synthetic construct
  source 1..75: mol_type = other DNA
ggcgctttcgttcagagcgtactgaggataaaaaagataaactacttattcattattgcaacggtatctttcacg

SEQ ID NO: 523092 - DNA, 75 bp, synthetic construct
  source 1..75: mol_type = other DNA
gataaacggatcacccggattgcaccattgtttgtggacgagctgattgcccgggaactggctaagcgaccggat

SEQ ID NO: 523093 - DNA, 75 bp, synthetic construct
  source 1..75: mol_type = other DNA
ctgaatcggtgatggcccgctgggtggcgggagcagggtatgcggtgtgtgtcgattttctggatgaaaggcaga

SEQ ID NO: 523094 - DNA, 75 bp, synthetic construct
  source 1..75: mol_type = other DNA
atgatgattataaaaaactagaaagatatattgaagagtatattataaggaatagtctaggcactcaggtatata

SEQ ID NO: 523095 - DNA, 75 bp, synthetic construct
  source 1..75: mol_type = other DNA
atgattcagttatggtggtcagtctggttatgttggccagtattatcgctactcattattggccgtgggtacggt

SEQ ID NO: 523096 - DNA, 75 bp, synthetic construct
  source 1..75: mol_type = other DNA
tttttgattctccatattgcttgcttatttattgtatattatttaaccatcaattgcatgatactatatatatat

SEQ ID NO: 523097 - DNA, 75 bp, synthetic construct
  source 1..75: mol_type = other DNA
acttcccgaagccaatcaggaccaggccaaaggcataccttcgggaagctgttaacgagtggatcatcaaaggcg

SEQ ID NO: 523098 - DNA, 75 bp, synthetic construct
  source 1..75: mol_type = other DNA
ttacaggaacatatggattatatgtattatggtatcaaaatagtattgatacgtttaatgaatacataataaatt

SEQ ID NO: 523099 - DNA, 75 bp, synthetic construct
  source 1..75: mol_type = other DNA
gcaacatattccatacgagcttgatcagcaatttgaaaatctaaaaaaaaatccaccaccaggtacatgtgtcgt

SEQ ID NO: 523100 - DNA, 75 bp, synthetic construct
  source 1..75: mol_type = other DNA
atccaccacccggtacatgcgttgttgcctgtgataagtttggggaggcattatcagtcttttttcacagaatgg

SEQ ID NO: 523101 - DNA, 75 bp, synthetic construct
  source 1..75: mol_type = other DNA
gaattgtggcccaacacctgccgtaaaagtaagctggacgggaaaagctgatattataaatagtaaattgttttc

SEQ ID NO: 523102 - DNA, 75 bp, synthetic construct
  source 1..75: mol_type = other DNA
agcggggaagaccgccggactctggacgtatcctggaatggccggacacactgcaggctgacgctgcctgagagc

SEQ ID NO: 523103 - DNA, 75 bp, synthetic construct
  source 1..75: mol_type = other DNA
taacagatatttgctccgagtgtgtaggaataaccccttatctccctcgagaacaagcccatttattaagtggta

SEQ ID NO: 523104 - DNA, 75 bp, synthetic construct
  source 1..75: mol_type = other DNA
gtgtatgtgcacaatctccttctttcatgcctgagttggatggagaaaaaaataaaactcaattgatcattgatg

SEQ ID NO: 523105 - DNA, 75 bp, synthetic construct
  source 1..75: mol_type = other DNA
atatagtggcgtatcttaaaaatccttcagtttattcacttgaaaaagaggggccgttaaattattttgttaatc

SEQ ID NO: 523106 - DNA, 75 bp, synthetic construct
  source 1..75: mol_type = other DNA
atgagtcagcttgatgaggccatccttgatgcactgacgcacgttactttcccaaaggggtttgcgtcagcagag

SEQ ID NO: 523107 - DNA, 75 bp, synthetic construct
  source 1..75: mol_type = other DNA
ttgtatagattcaatgaatgaaaatacaggtaaagttccattgaaggaatgctattcaactccagaagggataca

SEQ ID NO: 523108 - DNA, 75 bp, synthetic construct
  source 1..75: mol_type = other DNA
ctggaaactctactccttgcgaaagataaccgtggtgtgagcgcgatttctgtagctttatcaaaaaataaaaaa

SEQ ID NO: 523109 - DNA, 75 bp, synthetic construct
  source 1..75: mol_type = other DNA
attatcaccatcagcattatatctattaatgcaaatggggacgtatgaaaatattgttatttttttcgataagtt

SEQ ID NO: 523110 - DNA, 75 bp, synthetic construct
  source 1..75: mol_type = other DNA
tagtgaggctgattctgaatcagggaaacatgctgtaactcgtcaggtaactaatttagctgcagggacaaaaga

SEQ ID NO: 523111 - DNA, 75 bp, synthetic construct
  source 1..75: mol_type = other DNA
ctcccgagtagattgaagaaatatgaggagatgtatgacacggaagttgaaggcggaaaaggtaagttaaagcaa

SEQ ID NO: 523112 - DNA, 75 bp, synthetic construct
  source 1..75: mol_type = other DNA
gagaaacccgatatcagaaactgatgaataaagttattcgggctggcgtgaaaaccaaagtcctgatgctatcag

SEQ ID NO: 523113 - DNA, 75 bp, synthetic construct
  source 1..75: mol_type = other DNA
ttgatgactttgaattgctggcatttattgtgatccagcaaaagcagctgatggaaaacagtgcccaggatgagg

SEQ ID NO: 523114 - DNA, 75 bp, synthetic construct
  source 1..75: mol_type = other DNA
gattttgtgctggtcaggatcttaacgatcgtaacgttgatcccacaggccccgcaccggatttagggatgtcag

SEQ ID NO: 523115 - DNA, 75 bp, synthetic construct
  source 1..75: mol_type = other DNA
gctcaaccgcccggaacgcctgaacagttttaatgatgagatgcacgcacaactggcagagtgcctgaaacaggc

SEQ ID NO: 523116 - DNA, 75 bp, synthetic construct
  source 1..75: mol_type = other DNA
gccgtctgattcaggaaactgcccctgacggcgatatcatccgctaccgttatgataatccacacagtgacttac

SEQ ID NO: 523117 - DNA, 75 bp, synthetic construct
  source 1..75: mol_type = other DNA
ctggtgttatgccccaaaaaacttgcgggcaactggctgaactataaccgcaaccttaagaccaacatatttgct

SEQ ID NO: 523118 - DNA, 75 bp, synthetic construct
  source 1..75: mol_type = other DNA
atgctctctttatctgttcctttatcgggctggtggggtaatagttacgccacctattctgtttcgcaaaacgat

SEQ ID NO: 523119 - DNA, 75 bp, synthetic construct
  source 1..75: mol_type = other DNA
acgaatcaacaggggccgtccttaataccgtctctgttggagataaatctgcagctaaaggcgtagccagtgttg

SEQ ID NO: 523120 - DNA, 75 bp, synthetic construct
  source 1..75: mol_type = other DNA
attttgaagtcagaaaacaactatttgaacaatattcaaacataaaagccacatatgacgattttgttgatgacc

SEQ ID NO: 523121 - DNA, 75 bp, synthetic construct
  source 1..75: mol_type = other DNA
cccaaaagatttacaatacgaaagatagcaaaaatactagggctttcaaatgctaaagtgtcaaggctaactaag

SEQ ID NO: 523122 - DNA, 75 bp, synthetic construct
  source 1..75: mol_type = other DNA
catccaactggttaactactggccagacatctcactcgacgaatatatcaatctgaaggaacgagttgagagccg

SEQ ID NO: 523123 - DNA, 75 bp, synthetic construct
  source 1..75: mol_type = other DNA
gtggcgggggtgaaaaatctggaggattttgaagtgcgcagcccgctgacgtcggttcaggcgggagacagtgag

SEQ ID NO: 523124 - DNA, 75 bp, synthetic construct
  source 1..75: mol_type = other DNA
gaacgggctttccgtttcgctggaatacgcgtttgagtggcaggatcacgacgaaggcgacagcgataaattcca

SEQ ID NO: 523125 - DNA, 75 bp, synthetic construct
  source 1..75: mol_type = other DNA
ctatatgatgccttgctgttatgtagcaaagaattatctaatcagccttatctgttaccaactcctggatatgca

SEQ ID NO: 523126 - DNA, 75 bp, synthetic construct
  source 1..75: mol_type = other DNA
ggcattcaatttttcaggttggttatctgtctgacaaagagaagcgtgtcgggctgagcgaagacgaaaaagcgc

SEQ ID NO: 523127 - DNA, 75 bp, synthetic construct
  source 1..75: mol_type = other DNA
aacactgcctgacgctttctgctcatgcgaccgttcgccgccgtcgtttaccgggggacatggttatctggatgg

SEQ ID NO: 523128 - DNA, 75 bp, synthetic construct
  source 1..75: mol_type = other DNA
gtggatgggcagactatcaggcagagtttggtaagtaaccgttatggtacgacgaaagtgtttgaaagccagaat

SEQ ID NO: 523129 - DNA, 75 bp, synthetic construct
  source 1..75: mol_type = other DNA
accgctgaaagaggttcggccggggatctatactgcaaagctggataacggaacatcgatcacgttgcgaaattt

SEQ ID NO: 523130 - DNA, 75 bp, synthetic construct
  source 1..75: mol_type = other DNA
tggggttttgatgactctttttataaattatttagggcaaccggaggttgcactggaattcaagagagttatacc

SEQ ID NO: 523131 - DNA, 75 bp, synthetic construct
  source 1..75: mol_type = other DNA
tgacggaaatgcttatcaattattccgggtgttcggaaattacgccggattcaacagactcctggactcaactca

SEQ ID NO: 523132 - DNA, 75 bp, synthetic construct
  source 1..75: mol_type = other DNA
acattaaaaatgttattcctgccatacagacattacctgatgatgaaaaaacttactcctcattaactttactgg

SEQ ID NO: 523133 - DNA, 75 bp, synthetic construct
  source 1..75: mol_type = other DNA
gtgcctgtaattggatgggggaagtattttggcctgctgcacactttttcctgtaattttagaggaagaatcatc

SEQ ID NO: 523134 - DNA, 75 bp, synthetic construct
  source 1..75: mol_type = other DNA
agccgcccgtcagataacggagcgcggttattccgtcgctgaagtatctgaccgtctgggcgtctctacacacag

SEQ ID NO: 523135 - DNA, 75 bp, synthetic construct
  source 1..75: mol_type = other DNA
tgagtgatgctcaggggctccgtgacctcgcgattgagcaattaggtacagatgaccgtgaaaaccctgtgacgg

SEQ ID NO: 523136 - DNA, 75 bp, synthetic construct
  source 1..75: mol_type = other DNA
aaaagcaatccggtaattataactgtcctgtccggggaagtattccttcatataagttaatgcaggccacagata

SEQ ID NO: 523137 - DNA, 75 bp, synthetic construct
  source 1..75: mol_type = other DNA
cacagttaatcacgcagacacagcaggatatcagccagcgtcttcccggttcgcagccgggcgtgaatgaaacca

SEQ ID NO: 523138 - DNA, 75 bp, synthetic construct
  source 1..75: mol_type = other DNA
acatttctatcctgtcattgttgcctgcgtatgcattaagtgaaataaaaagtgcattcatcataggattttata

SEQ ID NO: 523139 - DNA, 75 bp, synthetic construct
  source 1..75: mol_type = other DNA
acattaaatggcgttgcacttttgttgtcaatgtttgtaatgttgcctgtcgggaaagaaatttattataacggc

SEQ ID NO: 523140 - DNA, 75 bp, synthetic construct
  source 1..75: mol_type = other DNA
tcagtatcaggatcatcccgaaaacaccggagaatcaggcggcagtaaaacaggcactgaccgacctgttataca

SEQ ID NO: 523141 - DNA, 75 bp, synthetic construct
  source 1..75: mol_type = other DNA
cgggggtgacgcgggcatggtgccgcccggaatggccgcaggcgggcagcgtgggggtgacgttcgttcaggaca

SEQ ID NO: 523142 - DNA, 75 bp, synthetic construct
  source 1..75: mol_type = other DNA
cctcacggggtgacgggccggttcagctgatgctgaccacggatgcggggatcacggaaggtgtgcttctccagc

SEQ ID NO: 523143 - DNA, 75 bp, synthetic construct
  source 1..75: mol_type = other DNA
tgtggaaaccatctacaccctgtcatatctgcgttattctctgcgcacctttatcacgcagcgtttcccgcgcca

SEQ ID NO: 523144 - DNA, 75 bp, synthetic construct
  source 1..75: mol_type = other DNA
ctgcgttcacttcacctggcggcgcactgatttcactggggcgcggtatcggaatactggcgctcagactgtcag

SEQ ID NO: 523145 - DNA, 75 bp, synthetic construct
  source 1..75: mol_type = other DNA
gggcaggttgatcaggtatctttcttcaaaaacatcgccggtgaagaggcctttgtgggccttcagacactggta

SEQ ID NO: 523146 - DNA, 75 bp, synthetic construct
  source 1..75: mol_type = other DNA
cgatattatcgttatttacattattgccatttttcattgcatcaggtacttgctttattaaattctctatcgtat

SEQ ID NO: 523147 - DNA, 75 bp, synthetic construct
  source 1..75: mol_type = other DNA
ttctcctctgctctataaaataaatcaactatcatcacactgcgagttcatatgtaccgccagtgacgcatctga

SEQ ID NO: 523148 - DNA, 75 bp, synthetic construct
  source 1..75: mol_type = other DNA
atgacgaaggctatccggaaattgcccgctgtacggagtgggtgtttgcgaccattcttgccggtatcagcgccg

SEQ ID NO: 523149 - DNA, 75 bp, synthetic construct
  source 1..75: mol_type = other DNA
taacgctcaatagcccgaccgtgcagacgtatcaggcaacggtgcaggcggacggcagctggagcatcaatattc

SEQ ID NO: 523150 - DNA, 75 bp, synthetic construct
  source 1..75: mol_type = other DNA
tcactaacgattttgtcaccagcgacacgacgcttgcggtgagcggcacgctgggggcgacgctttctgccggtg

SEQ ID NO: 523151 - DNA, 75 bp, synthetic construct
  source 1..75: mol_type = other DNA
acattattaacgccaccgaacacgggcaggcgctggtgatttccggttccagcaccggcggagaagcgggggatg

SEQ ID NO: 523152 - DNA, 75 bp, synthetic construct
  source 1..75: mol_type = other DNA
cagtggtggctccagcggtctggcgaccggcaccacggtcaccgtgatgctcaatggtctggcttacagcgccac

SEQ ID NO: 523153 - DNA, 75 bp, synthetic construct
  source 1..75: mol_type = other DNA
aaaaaggcaccgacctgaccctttctggcagcaccagcggaattgaaagcgggcaaaccgttaccgtcacttttg

SEQ ID NO: 523154 - DNA, 75 bp, synthetic construct
  source 1..75: mol_type = other DNA
ggcgcagcgcagggggatacggttaccgttacgctgggcggcaacacctacaccgccacggtgcaggctaattta

SEQ ID NO: 523155 - DNA, 75 bp, synthetic construct
  source 1..75: mol_type = other DNA
cagcgtcagccatccgttcaccgtcgatttaacggcggtggcaatcagcatcaacaccgttgccagcgacgacgt

SEQ ID NO: 523156 - DNA, 75 bp, synthetic construct
  source 1..75: mol_type = other DNA
gacgctcaccattaacaccatcgccagcgacgatatccttaacgccacagaggcgggaagcccgctcaccatcag

SEQ ID NO: 523157 - DNA, 75 bp, synthetic construct
  source 1..75: mol_type = other DNA
tcaccagcgataccacgctcacgttgacggggtcactggggacagggcttgccagcggcgaagtggcgcagatta

SEQ ID NO: 523158 - DNA, 75 bp, synthetic construct
  source 1..75: mol_type = other DNA
tccggcgatgatgtgatcaacgccgttgaaaaaggcgaaacgctggtcgtaagcggcagcaccagcggtgtggaa

SEQ ID NO: 523159 - DNA, 75 bp, synthetic construct
  source 1..75: mol_type = other DNA
ctttggcggcaaaacctataccgccacggttgccgccaatggcacctgggcgctgaacgtgcctgcggcggatct

SEQ ID NO: 523160 - DNA, 75 bp, synthetic construct
  source 1..75: mol_type = other DNA
gtgacggcgatgccagcgcccaggtgcgggtgactaacgtcaacggcaacagcgccacggcaacgcatgaataca

SEQ ID NO: 523161 - DNA, 75 bp, synthetic construct
  source 1..75: mol_type = other DNA
aatcacgggcagtagcagcggactgacagcgggaacgccgctgactgtcgtcatcaacaacgtcacctacggcgc

SEQ ID NO: 523162 - DNA, 75 bp, synthetic construct
  source 1..75: mol_type = other DNA
ccctaggtcaggctaactataccgtcagcgccagcgccaccagtgcggcaggcaacaccgccagtagccaggcga

SEQ ID NO: 523163 - DNA, 75 bp, synthetic construct
  source 1..75: mol_type = other DNA
cactggcagcagcacggcggaagcggggcagacggtgaccgtcaccctcaatggcgaaaactataccggcacggt

SEQ ID NO: 523164 - DNA, 75 bp, synthetic construct
  source 1..75: mol_type = other DNA
caacaccattgcgggcgacgatattattaacgccgccgaacacgggcaggcgctggtgatttccggttccagcac

SEQ ID NO: 523165 - DNA, 75 bp, synthetic construct
  source 1..75: mol_type = other DNA
tacggtgagcgcggcggtcagcgacaaagccggaaatccggcttcagcaacgcataatctgacggtggaccttgc

SEQ ID NO: 523166 - DNA, 75 bp, synthetic construct
  source 1..75: mol_type = other DNA
gtcgaagccgggcagacagtgaccgtcacctttggcggcaaaagttacaccaccaccgttgaagccaacggcagc

SEQ ID NO: 523167 - DNA, 75 bp, synthetic construct
  source 1..75: mol_type = other DNA
agcaactggacgcagtcggtactcggcggcagccagagcggcactaccagcggcgtggcggcaatggactacgac

SEQ ID NO: 523168 - DNA, 75 bp, synthetic construct
  source 1..75: mol_type = other DNA
gcgtgcctgcggcagatttacaggcgctgacgccgggtacgatagtggttaatgccagcgcaacggaccccgccg

SEQ ID NO: 523169 - DNA, 75 bp, synthetic construct
  source 1..75: mol_type = other DNA
gttagcggcggcgtctggtcgttgaacgttccggtgagcgatgttgtgaacctggcgaacaccaattacaccgtc

SEQ ID NO: 523170 - DNA, 75 bp, synthetic construct
  source 1..75: mol_type = other DNA
tcagcggcgataacgtcctgaatgcacaggaatccgggcagccgctaacgttaagcggcaccagcaatttaccgg

SEQ ID NO: 523171 - DNA, 75 bp, synthetic construct
  source 1..75: mol_type = other DNA
ccaggctgatttaagctggaatgtgagcgtacctgccgccgactggcaggcgctgggtaacggtgagttaacggt

SEQ ID NO: 523172 - DNA, 75 bp, synthetic construct
  source 1..75: mol_type = other DNA
ttacaccgccactaccgatagcaacggcaactggagcgccacggtgccagcctcggcggttagcgcgctggggga

SEQ ID NO: 523173 - DNA, 75 bp, synthetic construct
  source 1..75: mol_type = other DNA
gctgacagtttccgcgaccgcctataccgttactgcgcaggtaaaaagttcggcgggtaacggcaataacgccaa

SEQ ID NO: 523174 - DNA, 75 bp, synthetic construct
  source 1..75: mol_type = other DNA
cggcggcagtagcggcctgaatgcaggtgtgccgttgacgatcacgattaacggtacgacttattccgccacggt

SEQ ID NO: 523175 - DNA, 75 bp, synthetic construct
  source 1..75: mol_type = other DNA
catcagcggcggctccagcggtctggcgactggcaccacggtcaccgtgatgttgaacggcctggcgtacagcgc

SEQ ID NO: 523176 - DNA, 75 bp, synthetic construct
  source 1..75: mol_type = other DNA
gtaccaccacggcgcaggccgggcagacgctgaccgtcacgctcaataacaacacgtaccagaccaccgttcagg

SEQ ID NO: 523177 - DNA, 75 bp, synthetic construct
  source 1..75: mol_type = other DNA
acggtcaccgtaaatctcgccgcgccaaccattggcatcaacaccatcgccagcgatgacgtgattaacgccacg

SEQ ID NO: 523178 - DNA, 75 bp, synthetic construct
  source 1..75: mol_type = other DNA
cgctaccgtacaggctaatttaagctggagcgttagcgtgccagcggcggatattcaggcgctgggcaacggcga

SEQ ID NO: 523179 - DNA, 75 bp, synthetic construct
  source 1..75: mol_type = other DNA
cgccttgcctgccgtcaccattaacgcggtggcgaccgacgatattattaacgctgccgaagcgggcaatgcgca

SEQ ID NO: 523180 - DNA, 75 bp, synthetic construct
  source 1..75: mol_type = other DNA
ttgacaccgttgcgccaacggtcaccatcgccaccgtggcgggtgacgatattataaacaacgccgagcagcttg

SEQ ID NO: 523181 - DNA, 75 bp, synthetic construct
  source 1..75: mol_type = other DNA
gtcgcgggtaacaacgcccaggcaacgcatgtttatagcgtcgatgccaccgcgccctccgtcaccatcaacacc

SEQ ID NO: 523182 - DNA, 75 bp, synthetic construct
  source 1..75: mol_type = other DNA
tcacctttggcgggaaaaattacaccgccagcgtggcgagcgatggtagctggactgccaccgttcctgccgccg

SEQ ID NO: 523183 - DNA, 75 bp, synthetic construct
  source 1..75: mol_type = other DNA
gtagaacccggtcaaaccgtcaccgtcacctttggcgggaaaaattacaccgccagcgtggcgagcgatggtagc

SEQ ID NO: 523184 - DNA, 75 bp, synthetic construct
  source 1..75: mol_type = other DNA
gccagcaatatcgaccagacggtaaacaccacatggggcggcttacaggccaccgatgctactcacgcttacgat

SEQ ID NO: 523185 - DNA, 75 bp, synthetic construct
  source 1..75: mol_type = other DNA
tggcgattaccgcttctgtgacggatctcagcggcaataccggcaacacctcccgcaccattaccgtcgacagcc

SEQ ID NO: 523186 - DNA, 75 bp, synthetic construct
  source 1..75: mol_type = other DNA
caaataccttcaccacggtgctggatgccagcggcaactggagcgtcggcgtcccggcaagcgttgtttcggcac

SEQ ID NO: 523187 - DNA, 75 bp, synthetic construct
  source 1..75: mol_type = other DNA
tgacagcaacggcaacaccatcgccagtacccaggtagacagcaacgggcactggagcgtctctttacccacgca

SEQ ID NO: 523188 - DNA, 75 bp, synthetic construct
  source 1..75: mol_type = other DNA
atttactggtcgacagcggtctgccgggcgtcaccatcaacacggttgcgggcgacgatattatcaacgcggctg

SEQ ID NO: 523189 - DNA, 75 bp, synthetic construct
  source 1..75: mol_type = other DNA
ggaaacccggcctcggttaatcacaacctgacgctggatacttccgttccggtggtcaccatcaacactgtcgcg

SEQ ID NO: 523190 - DNA, 75 bp, synthetic construct
  source 1..75: mol_type = other DNA
ttggcggtaaaaactacactgcaagcgtcgcggcagatggttcctggagcaccacggttccggcggcggatatgg

SEQ ID NO: 523191 - DNA, 75 bp, synthetic construct
  source 1..75: mol_type = other DNA
caccaccgcggtgcaggccgatggtagctggagcgtgggcgtcacggcggcgcaggttagcgcctggcctgcggg

SEQ ID NO: 523192 - DNA, 75 bp, synthetic construct
  source 1..75: mol_type = other DNA
tacgctcaccactaacggcacgcaatggacttacaccgacagccgcacgctgaccgacggtagctatgtttatca

SEQ ID NO: 523193 - DNA, 75 bp, synthetic construct
  source 1..75: mol_type = other DNA
ggtagcaccgtgacggtgactatcggcacaaatacctttaccacggtgctggatgccagcggcaactggagcgtc

SEQ ID NO: 523194 - DNA, 75 bp, synthetic construct
  source 1..75: mol_type = other DNA
ttaagctggagcgtggacgttccggcggcggatattcaggccatcggcaatggcgacctgacagttaatgcctcg

SEQ ID NO: 523195 - DNA, 75 bp, synthetic construct
  source 1..75: mol_type = other DNA
cgataccgccgctccgatgattggtattaacactattgcgggcgatgatgtgattaacgccagcgaaaaaggggc

SEQ ID NO: 523196 - DNA, 75 bp, synthetic construct
  source 1..75: mol_type = other DNA
ttacccatccggttaccgtcgatctgtcggcagtcgccatcaccattaacactctctctggtgatgatgtgatca

SEQ ID NO: 523197 - DNA, 75 bp, synthetic construct
  source 1..75: mol_type = other DNA
attaatccagtggcgaccgacgatattattaacgccgccgaatcgggcgtggcgcagactatcagcgggcaggtg

SEQ ID NO: 523198 - DNA, 75 bp, synthetic construct
  source 1..75: mol_type = other DNA
ccgtgatgttgaacggcctggcgtacagcgccaccaccgatagttccggcaactggagcgttaccgtgcctgctt

SEQ ID NO: 523199 - DNA, 75 bp, synthetic construct
  source 1..75: mol_type = other DNA
ggtgctactagcgcaggaaacccggtcactatcactcatccggtcaccgtcgatctggcagcggtggcgatttcc

SEQ ID NO: 523200 - DNA, 75 bp, synthetic construct
  source 1..75: mol_type = other DNA
gggagccattaaccgtcacaataacgttgcgggatgagtttggtaaccctgctttagggctgacatcagaagtca

SEQ ID NO: 523201 - DNA, 75 bp, synthetic construct
  source 1..75: mol_type = other DNA
ggacctggtggttattaaggatggttcagaggcagacggttcgacggcgaacacgctgcaggtgaaggtcaccga

SEQ ID NO: 523202 - DNA, 75 bp, synthetic construct
  source 1..75: mol_type = other DNA
cagtactgtcactgccagcattaacagcagcagcctgagccggaacgtaacgtttgtcgcggatgtcaggacggc

SEQ ID NO: 523203 - DNA, 75 bp, synthetic construct
  source 1..75: mol_type = other DNA
gaaggagaaggtgaaagccgcggctaagcgcatcaaggagcaaaaagaggctgaaaaggacgggcgcaaacgccg

SEQ ID NO: 523204 - DNA, 75 bp, synthetic construct
  source 1..75: mol_type = other DNA
ggaagtcgagtcgctgagtgttaatggtgcaaaattcagggcggtagatggttttccagaaacagggtttgatgg

SEQ ID NO: 523205 - DNA, 75 bp, synthetic construct
  source 1..75: mol_type = other DNA
cagcagcctgagccggaacgtcacctttgtaccgggtgacgcatcgcagctcacttcaaccgttgaaacaaataa

SEQ ID NO: 523206 - DNA, 75 bp, synthetic construct
  source 1..75: mol_type = other DNA
agaaatttaatgccaataaattaacatttaatggcaactatccttatgttgccagaggaagtaacaataacggca

SEQ ID NO: 523207 - DNA, 75 bp, synthetic construct
  source 1..75: mol_type = other DNA
aggttctcctggcatgtggcggataaggggttccgtatggtgaggtactacggtttcctgagtccggtgaagcgc

SEQ ID NO: 523208 - DNA, 75 bp, synthetic construct
  source 1..75: mol_type = other DNA
gtcttcaggagctggcggcagcactcgggcgcgatgccgatatttcaggctctaaagctgatcttgaacaacgcc

SEQ ID NO: 523209 - DNA, 75 bp, synthetic construct
  source 1..75: mol_type = other DNA
ccagtcagaccgccggaatcagtgcggtcaccgtcagcatcaataacagcaccctgagccgggacgtgacattta

SEQ ID NO: 523210 - DNA, 75 bp, synthetic construct
  source 1..75: mol_type = other DNA
gtgttaatggtgcaaaattcagggcggcagatggttttccaaaaacagggtttgatggtgctaaatttacactga

SEQ ID NO: 523211 - DNA, 75 bp, synthetic construct
  source 1..75: mol_type = other DNA
ctcgcggactcgcggactcgcggactcgcggactcgcggactcgcggactcgcggactcgcggactcgcggactc

SEQ ID NO: 523212 - DNA, 75 bp, synthetic construct
  source 1..75: mol_type = other DNA
ttattaaagttaaaatcgatggtaaagagctcaagggggcatctgaagaagatacttataaagactggatggaag

SEQ ID NO: 523213 - DNA, 75 bp, synthetic construct
  source 1..75: mol_type = other DNA
ctgaaaggtacaaaagcaggcgctcatactgttacagcatcgatgactggcggtaagagtgagcagttggtggtg

SEQ ID NO: 523214 - DNA, 75 bp, synthetic construct
  source 1..75: mol_type = other DNA
ctgtatattgaggtgaaggataattacggcaacggtgtaccccagcaggaggtaaccctcagagtatcaccaagt

SEQ ID NO: 523215 - DNA, 75 bp, synthetic construct
  source 1..75: mol_type = other DNA
gatgagaacgaaattgatgaagtggaacagatcattagccagttgatcgaggattgcgctaaggcggtagacaac

SEQ ID NO: 523216 - DNA, 75 bp, synthetic construct
  source 1..75: mol_type = other DNA
atgttcgcctaacggccttgtaggccgcgataatacaggggcaatactttcgtgccaatccggtacctggaaatc

SEQ ID NO: 523217 - DNA, 75 bp, synthetic construct
  source 1..75: mol_type = other DNA
ggaggtaatggaggatctgccggaggtgcatgtgcaaatacatcccgactgcagggatatgttggtgggacgcta

SEQ ID NO: 523218 - DNA, 75 bp, synthetic construct
  source 1..75: mol_type = other DNA
ggagatacctgaaggtcaggtcatggtcgcacaagacgtagcagttaaagctcacgtcaacgaccagtttggcaa

SEQ ID NO: 523219 - DNA, 75 bp, synthetic construct
  source 1..75: mol_type = other DNA
ggagatgatgaagggaataaaggggcgctggcattaccgcgtatagagcatgtcatctatgtcgcttttgtggtg

SEQ ID NO: 523220 - DNA, 75 bp, synthetic construct
  source 1..75: mol_type = other DNA
cagaaacaaccagttcggcgcgtctgagcgtagtaagccaaatagaaggtgaattagcaagtcagcaagcgcaat

SEQ ID NO: 523221 - DNA, 75 bp, synthetic construct
  source 1..75: mol_type = other DNA
acatttataaaatgagtgctaacccgtttttgacctctttcgcctcgttatttcattcggtttatcacacctact

SEQ ID NO: 523222 - DNA, 75 bp, synthetic construct
  source 1..75: mol_type = other DNA
actttgagcagcaactgattatgacatctccgaattcttcatcctcaatatctcgccttacgcgaaagttaagaa

SEQ ID NO: 523223 - DNA, 75 bp, synthetic construct
  source 1..75: mol_type = other DNA
cctttcaatgctgggaattggaggcagtaaccatgaagatatactgatcatccaggattatcttaaatcccccga

SEQ ID NO: 523224 - DNA, 75 bp, synthetic construct
  source 1..75: mol_type = other DNA
aggagcattatcttcagcagttgataatgccagcaaaggttcgcaacaggctggagctaaaggacctggcgttgc

SEQ ID NO: 523225 - DNA, 75 bp, synthetic construct
  source 1..75: mol_type = other DNA
gcacgcgagcaaacgtatttcgtcgacaagacggcagatcatagagaaaaccgcctgtggatgatggccaacatg

SEQ ID NO: 523226 - DNA, 75 bp, synthetic construct
  source 1..75: mol_type = other DNA
tactattgatgattcttattataccgagccaaaaacagaggatccgagattccgttacgtaagtagtaattggaa

SEQ ID NO: 523227 - DNA, 75 bp, synthetic construct
  source 1..75: mol_type = other DNA
gtcacaaactggcctgcggggacggtcaatattgccgtctctggcactaacactgccggaaccacaaccagcatt

SEQ ID NO: 523228 - DNA, 75 bp, synthetic construct
  source 1..75: mol_type = other DNA
gatcaccgccagcctgagcgatcgcgcgggcaacagcgacagcacgactcacgatgtgaccgttgatctcagcgg

SEQ ID NO: 523229 - DNA, 75 bp, synthetic construct
  source 1..75: mol_type = other DNA
tgaggggcttttttatgcaggaaaaacgctgtgttgtgaaatgttaaattcctcacagttcagatggttgatgct

SEQ ID NO: 523230 - DNA, 75 bp, synthetic construct
  source 1..75: mol_type = other DNA
gaagcagaagttgagcaagcggtgccttcaaccgatgacgatatcactgaagaggaaacagataccccctccaac

SEQ ID NO: 523231 - DNA, 75 bp, synthetic construct
  source 1..75: mol_type = other DNA
gctgactgcccggatagaacttccggggggaagcatctccgatgtgaaggcgggccagaacatccccggaaccac

SEQ ID NO: 523232 - DNA, 75 bp, synthetic construct
  source 1..75: mol_type = other DNA
tggtagctggagcttaacgctgcctgccagcgccttaaccacgcttgctaataatggttacaccctgactgccac

SEQ ID NO: 523233 - DNA, 75 bp, synthetic construct
  source 1..75: mol_type = other DNA
ggaaatccggtcaacgtcagccatccgttcaccgtcgatttaacggcggtagctatcagcatcaacaccgttgcc

SEQ ID NO: 523234 - DNA, 75 bp, synthetic construct
  source 1..75: mol_type = other DNA
cgccgccaacggaagctggagtgtgaacgttccggcggcagatctggcaactctgccagacggcgcggcgaacgt

SEQ ID NO: 523235 - DNA, 75 bp, synthetic construct
  source 1..75: mol_type = other DNA
aacaccgtttccggcgacgatgtgattaacgccgccgaaaaaggggcagatttaaccctttccggcagcacctcc

SEQ ID NO: 523236 - DNA, 75 bp, synthetic construct
  source 1..75: mol_type = other DNA
acatcatcaacgccgccgaaagtggtcaggatctgcaaatcactggcaccaccgacgcccagccggggcagacgg

SEQ ID NO: 523237 - DNA, 75 bp, synthetic construct
  source 1..75: mol_type = other DNA
tgaccgacggcagctacgtttatcaggtgcgggtgttggatcaggcggggaacatcggtccggtggtgtcgaaaa

SEQ ID NO: 523238 - DNA, 75 bp, synthetic construct
  source 1..75: mol_type = other DNA
tgatgcacactgttgctgatgtgatgacaggaaacgatggtgaatactgtttccatgcgcggactggaaaatatg

SEQ ID NO: 523239 - DNA, 75 bp, synthetic construct
  source 1..75: mol_type = other DNA
gcaaccaaacacctggatgattaccctgtcacccgcgcactccagcgtcacggagtgtttgctggagctggccga

SEQ ID NO: 523240 - DNA, 75 bp, synthetic construct
  source 1..75: mol_type = other DNA
gcaagatttttaccgttgatgttgatgttgatggtgcatttttatgctcgcaaattgcggctcgtcagatggtga

SEQ ID NO: 523241 - DNA, 75 bp, synthetic construct
  source 1..75: mol_type = other DNA
ggtgccattcaggatgcgcaggcgttgtccgaaggtgtggtggcctcttcccgttatccgaaacactggctgacg

SEQ ID NO: 523242 - DNA, 75 bp, synthetic construct
  source 1..75: mol_type = other DNA
gcacgcgagcaaacgtatttcgtcgacaacacggcagatcatagagaaaaccggctgtggatgatggccaacatg

SEQ ID NO: 523243 - DNA, 75 bp, synthetic construct
  source 1..75: mol_type = other DNA
gcacgcgagcaaacgtatttcgtcgacaatacggctgatcatagagaaaaccgactgtggatgatggccaacatg

SEQ ID NO: 523244 - DNA, 75 bp, synthetic construct
  source 1..75: mol_type = other DNA
gcacgcgagcaaacgtatttcgtcgacaaaacggctgatcatagagaaaaccgtctgtggatgatggccaacatg

SEQ ID NO: 523245 - DNA, 75 bp, synthetic construct
  source 1..75: mol_type = other DNA
cttctcaatagcctggagacgctacctgatcttcccccggctctacaaaaactttctgttggcaacaaccagctt

SEQ ID NO: 523246 - DNA, 75 bp, synthetic construct
  source 1..75: mol_type = other DNA
caaaaacaccatcatacactaaatcagtaagttggcagcatcacctgcaatgcgatacagatgatttacttcact

SEQ ID NO: 523247 - DNA, 75 bp, synthetic construct
  source 1..75: mol_type = other DNA
ctatatttccagacatctgttatcacttaacccattacaagcccgctgccgcagatattcccgtggcgagcgata

SEQ ID NO: 523248 - DNA, 75 bp, synthetic construct
  source 1..75: mol_type = other DNA
aatagaatactatgcagaatcaggtagctggcgtggatctgaggggaactttatttctctcgtcataccgttttc

SEQ ID NO: 523249 - DNA, 75 bp, synthetic construct
  source 1..75: mol_type = other DNA
taacagattacaagagctaccgccccttcctcaaaatctgaggcttttaaacgttggggaaaaccaactacacag

SEQ ID NO: 523250 - DNA, 75 bp, synthetic construct
  source 1..75: mol_type = other DNA
ccatggtcagaagccgtgaagagaatgaatttacggactggttctccctctggggaccatggcatgctgtactga

SEQ ID NO: 523251 - DNA, 75 bp, synthetic construct
  source 1..75: mol_type = other DNA
cgtatctgtgggacggcgacagtattgcggaaatccgggaataccgcgatgataaactgtacagcgtacggcacc

SEQ ID NO: 523252 - DNA, 75 bp, synthetic construct
  source 1..75: mol_type = other DNA
attgcggaaatccgggaataccgcgatgataaactgtacagcgtaaggcacctggtgtttaacggctttgagctg

SEQ ID NO: 523253 - DNA, 75 bp, synthetic construct
  source 1..75: mol_type = other DNA
acggcgttgtctggacaatggaatacggcccgttcgatttgccggtggcgcgaacggacggtgaaggccaccgct

SEQ ID NO: 523254 - DNA, 75 bp, synthetic construct
  source 1..75: mol_type = other DNA
ttggcgaatatttttccaaaagagaaatttataaaaatctgtttgtagtggcaagagagttagaaagcctagcaa

SEQ ID NO: 523255 - DNA, 75 bp, synthetic construct
  source 1..75: mol_type = other DNA
aagagtatgattttttgttttcttgactactggaacgtgccaagaaaaaactttactgatgcattcactatttga

SEQ ID NO: 523256 - DNA, 75 bp, synthetic construct
  source 1..75: mol_type = other DNA
gcgacccgtatctttatcctggcctcgacatcatgcgtaaccgactggatatccgccaacagcagcgactggagc

SEQ ID NO: 523257 - DNA, 75 bp, synthetic construct
  source 1..75: mol_type = other DNA
aacgtgagttcattgaacgaaagcattcgtcacgacttacactacgaaaagacaagaacagaaaaggcattgtaa

SEQ ID NO: 523258 - DNA, 75 bp, synthetic construct
  source 1..75: mol_type = other DNA
gtcagcgatcgcaacggtaaaccgttgccctttggcgctcttgccagcaacgatgagacggggcaacaaagtatc

SEQ ID NO: 523259 - DNA, 75 bp, synthetic construct
  source 1..75: mol_type = other DNA
tggaatacagctgcgaaggtggatcgccgcccactcagtgaaatcctgaatcactggtttttatgtcatggtcag

SEQ ID NO: 523260 - DNA, 75 bp, synthetic construct
  source 1..75: mol_type = other DNA
ctgccggtgaagatgcgcggccccggcggtcagtcagtgcggttacagtggcagcagcaccataaactgagtggc

SEQ ID NO: 523261 - DNA, 75 bp, synthetic construct
  source 1..75: mol_type = other DNA
taagattaaaaacaaccaattcaccagaaggccataaaatgagtcgtggttgtttttctcttactaaagttttcg

SEQ ID NO: 523262 - DNA, 75 bp, synthetic construct
  source 1..75: mol_type = other DNA
gaattagacccagaacataaaacaataagaataaaaacaacaaacatttcaacagcaaaaggccttaagatgagt

SEQ ID NO: 523263 - DNA, 75 bp, synthetic construct
  source 1..75: mol_type = other DNA
ggtgctggcgctttggggcgtggtgcagtggctggcgctaagtgcactaaatcagtggctggcacctgagcgcaa

SEQ ID NO: 523264 - DNA, 75 bp, synthetic construct
  source 1..75: mol_type = other DNA
agcggtggtaactcgacgtctgtctccatgacctgggcggatttcgatggtgatggcgatatggatctcttcctg

SEQ ID NO: 523265 - DNA, 75 bp, synthetic construct
  source 1..75: mol_type = other DNA
aggtacgctggtaggtaactccaccacgtcgaacagcggcggtagcgccacggtggacggggcggtgacggggta

SEQ ID NO: 523266 - DNA, 75 bp, synthetic construct
  source 1..75: mol_type = other DNA
cagattagcctcgacggcggcgcgacctggaccacgctcaccaccaacggtacacagtggacctacaccgacagc

SEQ ID NO: 523267 - DNA, 75 bp, synthetic construct
  source 1..75: mol_type = other DNA
atgatgtgattaacagcattgagcacactcaggcgctggtggtcaccggtagcagtagcggactggcggcgggcg

SEQ ID NO: 523268 - DNA, 75 bp, synthetic construct
  source 1..75: mol_type = other DNA
gggcaacggtgaactgaccatcagcgcctcggtgaccaattccgcaaataataccggcaccgcgacgcgcgacat

SEQ ID NO: 523269 - DNA, 75 bp, synthetic construct
  source 1..75: mol_type = other DNA
tggtcagtgggctggcggacggcagttatcctgtcagcgtctcagtaaccgatcgtgccggaaacacgggcagcc

SEQ ID NO: 523270 - DNA, 75 bp, synthetic construct
  source 1..75: mol_type = other DNA
gttttcggggtctggtcgccgcgtctgggggatgcctcccgtatttgcacccgtctggttaagtggaaaattcga

SEQ ID NO: 523271 - DNA, 75 bp, synthetic construct
  source 1..75: mol_type = other DNA
tgtcatctgggccgcgaaatgctggcgcttcgcattgtgccgcctgcatggtatgcgccgtgggaacgtgatcgg

SEQ ID NO: 523272 - DNA, 75 bp, synthetic construct
  source 1..75: mol_type = other DNA
gcggcggatgtccgtccgctggtgcgtctttccgtgagcgttctggtcgaagaagatggcaaacgcgaacgcggt

SEQ ID NO: 523273 - DNA, 75 bp, synthetic construct
  source 1..75: mol_type = other DNA
ttacgttgacggacgcacgctaacgaatggcacgacgacctggcaggtgcgggtggtcgatcttgcgggcaacgt

SEQ ID NO: 523274 - DNA, 75 bp, synthetic construct
  source 1..75: mol_type = other DNA
gctggcgatggtggcaatggacctggggcatggcgacgggcgcggtcgctgggtgaaacaggtgtatgcacacga

SEQ ID NO: 523275 - DNA, 75 bp, synthetic construct
  source 1..75: mol_type = other DNA
ggccccgtgatactcttattcaggatgctggcgcagttaaacaggcgctggataatgccatcgcggtgacagaac

SEQ ID NO: 523276 - DNA, 75 bp, synthetic construct
  source 1..75: mol_type = other DNA
gcttatttgtcaccaaagggctcgattacaataatagaacaaccagaaatacatttgcatcctaaaatgcaggca

SEQ ID NO: 523277 - DNA, 75 bp, synthetic construct
  source 1..75: mol_type = other DNA
atggctgatttgagaaaagcagcgcgtagtcgggaatgccaagtaagaatccctggcgtatgtaatggcaaccct

SEQ ID NO: 523278 - DNA, 75 bp, synthetic construct
  source 1..75: mol_type = other DNA
ggatcatgtgcttaattataatgtcgaggtttcattggtgggaacattagcaagaaaaattgtcgctgcagttga

SEQ ID NO: 523279 - DNA, 75 bp, synthetic construct
  source 1..75: mol_type = other DNA
actcacgcaaaatggtgtcgatgtgcatgaggatgctttggatacagatttggcctatctcagagaacttgagtt

SEQ ID NO: 523280 - DNA, 75 bp, synthetic construct
  source 1..75: mol_type = other DNA
aaataaaactgcattgcttcatcagaaatcagcagttttaattcatcagatatcaggagcattagttttcaatag

SEQ ID NO: 523281 - DNA, 75 bp, synthetic construct
  source 1..75: mol_type = other DNA
atgctggctcttacacctgcgaagtcactgacgcggcgggcaaaactatcacctctgctgcttgcaccgtcacgg

SEQ ID NO: 523282 - DNA, 75 bp, synthetic construct
  source 1..75: mol_type = other DNA
ggatgagacagcagcagagggcgacaacattcctcctgaaaatcagctttcactggagcttgaggttccgcctgt

SEQ ID NO: 523283 - DNA, 75 bp, synthetic construct
  source 1..75: mol_type = other DNA
ctatcttccctgcattacgtcagagtgtagcaactggcgagatcatcaagtacagcaatattacaatcacaggca

SEQ ID NO: 523284 - DNA, 75 bp, synthetic construct
  source 1..75: mol_type = other DNA
aagtatctggattcagtttgaaatctacgcaaccaatgtacgaacatcaatcatggacaggtaaagttttacagc

SEQ ID NO: 523285 - DNA, 75 bp, synthetic construct
  source 1..75: mol_type = other DNA
atgatagtaaaaacattgagttactaatggcaatgaggcggacttactcacaggttaaatttgttaactgggtag

SEQ ID NO: 523286 - DNA, 75 bp, synthetic construct
  source 1..75: mol_type = other DNA
cgttcaggtcacagcacttgataagctcaatgctagtaaagttgttaccgaacccgtccgtgacagacttatttt

SEQ ID NO: 523287 - DNA, 75 bp, synthetic construct
  source 1..75: mol_type = other DNA
aggaatcagaacgcgtattattttcagttcatgaaaatctgcttaataatgacacgccgttacggtatgcggctg

SEQ ID NO: 523288 - DNA, 75 bp, synthetic construct
  source 1..75: mol_type = other DNA
tattagatccagacaatgattattcattgcctattgggaacatcatgaatattacattgaaagcaacggagaata

SEQ ID NO: 523289 - DNA, 75 bp, synthetic construct
  source 1..75: mol_type = other DNA
tcatcgataaattattaatgcctctttctgaaaagtattgtggaaaatattctgacaaaatgacttttataactg

SEQ ID NO: 523290 - DNA, 75 bp, synthetic construct
  source 1..75: mol_type = other DNA
tgcgcaaagaatttgtcgatgataaccgggtgaaagtgaataatgacggtaattttgtcaatgatttgtcgggca

SEQ ID NO: 523291 - DNA, 75 bp, synthetic construct
  source 1..75: mol_type = other DNA
caggctcccggggcgatcaactgatcgtcaacaacaacgccactggtaattttaaaatctttgttcaggataccg

SEQ ID NO: 523292 - DNA, 75 bp, synthetic construct
  source 1..75: mol_type = other DNA
ttgaaaccgggatgcgatttaccgatggtaactggaacctgacgccgtatgcatcgttaacggggttcaccgctg

SEQ ID NO: 523293 - DNA, 75 bp, synthetic construct
  source 1..75: mol_type = other DNA
gaataaccgcaccacggatgtgataaacaaccatgctgagaccattggcaacaatcagatgattgcggttaccaa

SEQ ID NO: 523294 - DNA, 75 bp, synthetic construct
  source 1..75: mol_type = other DNA
cgataccgcgtgtgggtcaggaggtgattgtggacttcctcaacggcgacccggaccagccgattattatggggc

SEQ ID NO: 523295 - DNA, 75 bp, synthetic construct
  source 1..75: mol_type = other DNA
ccgtgctgcgctttgccgatggttcgcaggtagaacttacccctggcgtgcacagcttcgataagcgcgttaccg

SEQ ID NO: 523296 - DNA, 75 bp, synthetic construct
  source 1..75: mol_type = other DNA
ccgaaatgacgaatggcggtcaagccgtgacgaacgaacagggtaaggctaccgtcacttataccaatacccgct

SEQ ID NO: 523297 - DNA, 75 bp, synthetic construct
  source 1..75: mol_type = other DNA
gcgatgctttcatgatatacagccttgctgaaaatttttgcagtagcaatggctacacacttccccgtgcagatc

SEQ ID NO: 523298 - DNA, 75 bp, synthetic construct
  source 1..75: mol_type = other DNA
tggagcctcacttgagaaacaactggaggctattgatgaaaaactgacactcacggcgtccagtccgcttatcgg

SEQ ID NO: 523299 - DNA, 75 bp, synthetic construct
  source 1..75: mol_type = other DNA
cccaaatccgaacccaaacccaaatccgaacccaaacccaaatccgaacctgaaccgccccggaaatcctggaga

SEQ ID NO: 523300 - DNA, 75 bp, synthetic construct
  source 1..75: mol_type = other DNA
gacgataattaacgataaaggaacaatgtcagttttaacgaatgctaaagctgatgcgacccgaatagataacgg

SEQ ID NO: 523301 - DNA, 75 bp, synthetic construct
  source 1..75: mol_type = other DNA
gatacgaagatagtcaatattgcgcccgatgccagcaacgcgcaggtcaccctgaacatcccggctcaacaggtg

SEQ ID NO: 523302 - DNA, 75 bp, synthetic construct
  source 1..75: mol_type = other DNA
cagtgcgctgcccggtgtgaccattaacccggtggcaaccgacgatattattaacgccgccgaagcgggtggtgc

SEQ ID NO: 523303 - DNA, 75 bp, synthetic construct
  source 1..75: mol_type = other DNA
cacggttactggcgctcaggcgggcgatatcgtcaccgtgacgctgaataatgtggattacaccacggtggtgga

SEQ ID NO: 523304 - DNA, 75 bp, synthetic construct
  source 1..75: mol_type = other DNA
ccgtgacgctgaacgggcaaaactatacggcgacgaccgacgcctccggcaactggagcgtcaccgttccggcct

SEQ ID NO: 523305 - DNA, 75 bp, synthetic construct
  source 1..75: mol_type = other DNA
ggtcagcggcaccagtacgggcgcggaacccggcgatgtagtgaccgtcacgctgaacggcaaaaactacaccac

SEQ ID NO: 523306 - DNA, 75 bp, synthetic construct
  source 1..75: mol_type = other DNA
cgccacggtacaggctaatttaagctggagcgttagcgtgccagcggcggatattcaggcgctgggtaacggcaa

SEQ ID NO: 523307 - DNA, 75 bp, synthetic construct
  source 1..75: mol_type = other DNA
ggcggtgaccagcgatatcggcaacagcgccaccgccagccataacgtgctggtcgacagcgcgctgcccggtgt

SEQ ID NO: 523308 - DNA, 75 bp, synthetic construct
  source 1..75: mol_type = other DNA
ggtacggtggtgaccgtgttgcttaacggcaaaggttacagcgccaccattcagagcaacgggagctggagcgtg

SEQ ID NO: 523309 - DNA, 75 bp, synthetic construct
  source 1..75: mol_type = other DNA
cgcacaggccagcgtcagcaatgttaacggcaacagcgccaccactactcacgcttacagcgtcgatgccagcgc

SEQ ID NO: 523310 - DNA, 75 bp, synthetic construct
  source 1..75: mol_type = other DNA
cagttagcgcattgggtgaagctaactacacggtaacggcaaacgtcactgatacggcaggcaacagtaattccg

SEQ ID NO: 523311 - DNA, 75 bp, synthetic construct
  source 1..75: mol_type = other DNA
gttgggcgcggcgctcggcgctaatgagttcgcacaaatcagtaccgacaacggcgcaacctgggtgaacgtgac

SEQ ID NO: 523312 - DNA, 75 bp, synthetic construct
  source 1..75: mol_type = other DNA
gcgactttatcaccagcgtcagtccggtagtggtcaacggctcgctcaccgccgcgcttgccagtaacgagacgg

SEQ ID NO: 523313 - DNA, 75 bp, synthetic construct
  source 1..75: mol_type = other DNA
tccgttaaccatcagcggtagcagcaccgccgaagcggggcagacggtaaccgtcacgcttaatggtgtgactta

SEQ ID NO: 523314 - DNA, 75 bp, synthetic construct
  source 1..75: mol_type = other DNA
cctgcctggggtaatcattaataccgtggcgggcgatgacattatcaacgccgctgaaattggtgttaaccagac

SEQ ID NO: 523315 - DNA, 75 bp, synthetic construct
  source 1..75: mol_type = other DNA
ccgaaaaaggcgcggcgttaacgctctctggcagcactactggtgtggaggccggacaaacggtcaccgtcacct

SEQ ID NO: 523316 - DNA, 75 bp, synthetic construct
  source 1..75: mol_type = other DNA
cgtgctggacgccaacggtaactggagcatcggcgtgcctgccagcgtcatttccgcgctggcgcaaggcgatgt

SEQ ID NO: 523317 - DNA, 75 bp, synthetic construct
  source 1..75: mol_type = other DNA
gaccacagtacagaacgacggttcctggagcctgaccgtacccgccagtacagtcagtagcctgtcagatggcgc

SEQ ID NO: 523318 - DNA, 75 bp, synthetic construct
  source 1..75: mol_type = other DNA
aaaattacaccgcgacgacagacgccgcaggcaactggagtaccacagtgccagcctctgctgtcggcgcgctgg

SEQ ID NO: 523319 - DNA, 75 bp, synthetic construct
  source 1..75: mol_type = other DNA
ccacgcataatctggcggtggatctcaccgttccggtactcaccatcaacaccattgcgggcgacgatattatta

SEQ ID NO: 523320 - DNA, 75 bp, synthetic construct
  source 1..75: mol_type = other DNA
tggcgatttgaccattaccgcctcagtcaccaacgcaaatggcaacactggcagcggtacgcgggatatcaccat

SEQ ID NO: 523321 - DNA, 75 bp, synthetic construct
  source 1..75: mol_type = other DNA
ctccggcagcacttccggcgtggaggccgggcaaacggtcactgtgatctttggcggcaaaacctacacggcaag

SEQ ID NO: 523322 - DNA, 75 bp, synthetic construct
  source 1..75: mol_type = other DNA
gcgcctggcctgcggggacggtcacaattacggcgagcggcaacaccaccgccggaaacccggtgagcgttacgc

SEQ ID NO: 523323 - DNA, 75 bp, synthetic construct
  source 1..75: mol_type = other DNA
cagcgggcaggtgacgggtgcggcggcaggcgacacggtgaccgtcacgctcggcggggcgacttacactgccac

SEQ ID NO: 523324 - DNA, 75 bp, synthetic construct
  source 1..75: mol_type = other DNA
ggtggtcaccggtagcagtaccggactggcggcgggaacggcgttgacggtggttatcaatagcgtcacctacgg

SEQ ID NO: 523325 - DNA, 75 bp, synthetic construct
  source 1..75: mol_type = other DNA
ccatacagcaatcgtcggtagcgacggcacatggcaggtgacgctgcctgccgcagaagtgcaggcactgacgga

SEQ ID NO: 523326 - DNA, 75 bp, synthetic construct
  source 1..75: mol_type = other DNA
tcaccgtcacctttgacggcaaaacctacaccgccaccgtagcaggcgatggtagctggacaaccaccgtccctg

SEQ ID NO: 523327 - DNA, 75 bp, synthetic construct
  source 1..75: mol_type = other DNA
acatcattaacgccgccgaaagcgggcaggatctgcccatcaccggcaccaccgacgcccagccagggcagacgg

SEQ ID NO: 523328 - DNA, 75 bp, synthetic construct
  source 1..75: mol_type = other DNA
tggagttacgttgacggacgaaccctcaccaacggcaccaccacctggcaggtgcgggtggtcgatctggcgggc

SEQ ID NO: 523329 - DNA, 75 bp, synthetic construct
  source 1..75: mol_type = other DNA
acgggcaaacctggagcgcaacggttggcagcggcggaagctggtcggtgtttattccggcgcagcagtttgccg

SEQ ID NO: 523330 - DNA, 75 bp, synthetic construct
  source 1..75: mol_type = other DNA
aacgtacctgcggcggatctggcaacgctcgggcagggcgcgcagaccatcaccgccagcgtgaacgatcgcgcg

SEQ ID NO: 523331 - DNA, 75 bp, synthetic construct
  source 1..75: mol_type = other DNA
tggcgatcactgaggtcatcctccaacgcgctacccaatttgagcgtgactatcgccgcacggtggaaacttccc

SEQ ID NO: 523332 - DNA, 75 bp, synthetic construct
  source 1..75: mol_type = other DNA
ggcagcggctacaccggaaacggcaaagccagctacgtcaacggcgtagcaacgctggatgcgcaggccggaaac

SEQ ID NO: 523333 - DNA, 75 bp, synthetic construct
  source 1..75: mol_type = other DNA
gcgctctgaactggacctacagcgacagcgggctggtgagcggtgcctatacctacagcgcgcgagtggtggatt

SEQ ID NO: 523334 - DNA, 75 bp, synthetic construct
  source 1..75: mol_type = other DNA
actggtggtcaccggcagcagttcggggctggctgaaggcacgccgctaaccgtcacaattaataacgtcgaata

SEQ ID NO: 523335 - DNA, 75 bp, synthetic construct
  source 1..75: mol_type = other DNA
ttctatcgccgattacgaccgtaacggtacgggcgatctgtttattacccgtgatgattacggcacgggctatat

SEQ ID NO: 523336 - DNA, 75 bp, synthetic construct
  source 1..75: mol_type = other DNA
aacctttgccgatgctgccgcaggtggattagcccccgtagaactgaccgcccagaccaccgctattgaaagcat

SEQ ID NO: 523337 - DNA, 75 bp, synthetic construct
  source 1..75: mol_type = other DNA
caccgcgccgcttgtgaccatcaacaccatcgccagcgacgatatccttaacgtgagcgaagcgggcgcgggtat

SEQ ID NO: 523338 - DNA, 75 bp, synthetic construct
  source 1..75: mol_type = other DNA
gtcgataccgtggcgggcgatgatgtggtcaacagcatcgagcacggtcaggcactggtgataactggtagcagc

SEQ ID NO: 523339 - DNA, 75 bp, synthetic construct
  source 1..75: mol_type = other DNA
cgtcaaccttaccgcgccaaccattggcattaacagcatcgccaccgatgacgtgattaacgccacggaaaaagg

SEQ ID NO: 523340 - DNA, 75 bp, synthetic construct
  source 1..75: mol_type = other DNA
tggcggaggccctctttgagcgtaaggtgagcgcaccccataccgatgacggcgacatctccttcgatcaggtgt

SEQ ID NO: 523341 - DNA, 75 bp, synthetic construct
  source 1..75: mol_type = other DNA
acggcgaagtatgtgattgtcgccgggaatgcgtacctgggcgataaagtagagccggaactggcgaaacgcagc

SEQ ID NO: 523342 - DNA, 75 bp, synthetic construct
  source 1..75: mol_type = other DNA
tttgtggcgatgaatgataaacagctcgccacactcgaagagcagaaagagaactgggaacgctacggcaataaa

SEQ ID NO: 523343 - DNA, 75 bp, synthetic construct
  source 1..75: mol_type = other DNA
cccggcgggcgcacgctgcgcgtaccgtttaccgcgatgggcgcagcctggtacagcctgcgcgatcgtctgggc

SEQ ID NO: 523344 - DNA, 75 bp, synthetic construct
  source 1..75: mol_type = other DNA
tgtcctgacgggcatcgtgctggcagatggcagctggaatgtggcgttggacccggcggtaacccgcacgctgga

SEQ ID NO: 523345 - DNA, 75 bp, synthetic construct
  source 1..75: mol_type = other DNA
gccgaaactgctgaaaaccttcccgcagttgaagggcgtgaaaattgattaccgctggacgggcaacttcctgct

SEQ ID NO: 523346 - DNA, 75 bp, synthetic construct
  source 1..75: mol_type = other DNA
agctcgttcgctgatcccgaaaaactattgcgtggaagactgtaattatctgctcgattactaccgtcttaccgc

SEQ ID NO: 523347 - DNA, 75 bp, synthetic construct
  source 1..75: mol_type = other DNA
tactgtgtggaagactgtaactatctgcttgattactaccgtcttaccgccgacaaccgcctgctgtacggcggc

SEQ ID NO: 523348 - DNA, 75 bp, synthetic construct
  source 1..75: mol_type = other DNA
ttcgaaggtggtgagatcatccgcgaacgtatcaaacgttatcagattgactgcgactaccgccccggcggcctg

SEQ ID NO: 523349 - DNA, 75 bp, synthetic construct
  source 1..75: mol_type = other DNA
acggcgaagtatgtgattgtcgccgggaatgcgtatctgggcgataaagtggagccggaactggcgaagcgcagt

SEQ ID NO: 523350 - DNA, 75 bp, synthetic construct
  source 1..75: mol_type = other DNA
tcgaaaaaagctacggcatggacaccgcccgtatgctcggcagcatgatgtttgagggtggcgagatcatccgcg

SEQ ID NO: 523351 - DNA, 75 bp, synthetic construct
  source 1..75: mol_type = other DNA
gaccctgtcacgcatgccgcagtttggtcgcctcgataccaacatctactacatgcagggctacagcggccacgg

SEQ ID NO: 523352 - DNA, 75 bp, synthetic construct
  source 1..75: mol_type = other DNA
cgcgctgcatctggcggaagcgggctttgacgtggtggttcttgaagcctcacgcatcggcttcggcgcaagcgg

SEQ ID NO: 523353 - DNA, 75 bp, synthetic construct
  source 1..75: mol_type = other DNA
gtattcatgtgtttttaatactcctgaacggcgttttttttagattggctccattatttttctttcttccatttt

SEQ ID NO: 523354 - DNA, 75 bp, synthetic construct
  source 1..75: mol_type = other DNA
ctgggtgttccatgccatcggatgtatctttgacaaccagaggggagcaaccctgagcagcagcattgatccggc

SEQ ID NO: 523355 - DNA, 75 bp, synthetic construct
  source 1..75: mol_type = other DNA
cacatgcataccatcagagggaggaagaattggggtaccgtgtacatccatcctatgacagtctagctcccgtcg

SEQ ID NO: 523356 - DNA, 75 bp, synthetic construct
  source 1..75: mol_type = other DNA
ttttaggagccatgattccgaatatggaagacggttttgaaattaaaacccgcgacggtgcaatacttcgtgttg

SEQ ID NO: 523357 - DNA, 75 bp, synthetic construct
  source 1..75: mol_type = other DNA
acccttataagctccatacctataccagtcaggagtcatttcaggatgccatgtcgcggatctcgtttgcggcgg

SEQ ID NO: 523358 - DNA, 75 bp, synthetic construct
  source 1..75: mol_type = other DNA
tttattattttcatctgttcttctactatttacttttctaaagttcaatttttcctcggtgaacataaatttttc

SEQ ID NO: 523359 - DNA, 75 bp, synthetic construct
  source 1..75: mol_type = other DNA
tgtagtagatagttttagcacaatctgtaaaaaaatagaaaatatgtcaccggagattattaatacagaaacagc

SEQ ID NO: 523360 - DNA, 75 bp, synthetic construct
  source 1..75: mol_type = other DNA
ggcgttttccagcagtcggaaaaactgacggaagaggaaatgacgcaatacgactaccagtgggaatttaccggg

SEQ ID NO: 523361 - DNA, 75 bp, synthetic construct
  source 1..75: mol_type = other DNA
ggaaatcctcaaggtatggttgcgcacggtggatttatccacttcctttccgataacggtatatatgtgttcaaa

SEQ ID NO: 523362 - DNA, 75 bp, synthetic construct
  source 1..75: mol_type = other DNA
agactcacaaaaaatcatatcttttgagattattattcggctgagagatataaaaagattggaaactgaaaaaaa

SEQ ID NO: 523363 - DNA, 75 bp, synthetic construct
  source 1..75: mol_type = other DNA
gctggacggcagttcaatcgactattttgttcctttatatgattctcaaaaaagtgtttatttcagccagttatc

SEQ ID NO: 523364 - DNA, 75 bp, synthetic construct
  source 1..75: mol_type = other DNA
cagctgaatcgtcttcctgactgcgactgggtacatctggtcttcaccctgccggacacgctgtggccggtgttc

SEQ ID NO: 523365 - DNA, 75 bp, synthetic construct
  source 1..75: mol_type = other DNA
gtttaaggatggcctgaaagctgaaattatcagccagttaaaaagtaaacctgccgttgtatttggctatagcta

SEQ ID NO: 523366 - DNA, 75 bp, synthetic construct
  source 1..75: mol_type = other DNA
acccatgtggaaaccatgaagtcaatagacgcctaccgttctgttgcacttcaacccgcggatattgcccgtgct

SEQ ID NO: 523367 - DNA, 75 bp, synthetic construct
  source 1..75: mol_type = other DNA
ccgctgatattgcccgtgccgtacgacatgtaattgaggctccggaaagcgttgatacaacagaaataaccatca

SEQ ID NO: 523368 - DNA, 75 bp, synthetic construct
  source 1..75: mol_type = other DNA
gtgaactggcttcaaccattacccatgtggaaaccatgaaggcaatggacgcctaccgttctgttgcacttcaac

SEQ ID NO: 523369 - DNA, 75 bp, synthetic construct
  source 1..75: mol_type = other DNA
atgttgcgatggatacgctattttatgctaatttttatctctggtgctgcttatgcgacaccagagataaatgtt

SEQ ID NO: 523370 - DNA, 75 bp, synthetic construct
  source 1..75: mol_type = other DNA
caaacatgatctcatatcagggacttgttcgcaccttccttagcgatatcgtcgaaaacccgaaaaagctgaagt

SEQ ID NO: 523371 - DNA, 75 bp, synthetic construct
  source 1..75: mol_type = other DNA
aacgccaactacgccatcgatgccgggctggatccagtgaaagatcctattgccgttgaaagtggtgaaaacaac

SEQ ID NO: 523372 - DNA, 75 bp, synthetic construct
  source 1..75: mol_type = other DNA
ggctgatccgatcatcgatgagatcaagttcgcgaatccacagtaccaacacgaaacgctctatgttttcgattt

SEQ ID NO: 523373 - DNA, 75 bp, synthetic construct
  source 1..75: mol_type = other DNA
gccaggtaagagtacgcccggacatcctatggatacgtccaggtggcactggtgcgccgctgattagcaatggca

SEQ ID NO: 523374 - DNA, 75 bp, synthetic construct
  source 1..75: mol_type = other DNA
atttaaagatggattaaaggccgaaatcatcaaacagttaaaaagcaaacctgctgttgtatttggatatagtta

SEQ ID NO: 523375 - DNA, 75 bp, synthetic construct
  source 1..75: mol_type = other DNA
gaagcacagggttccggtcagataatcaatcttggttctattggtgccctttctgttgtgcccacaggcgcagtc

SEQ ID NO: 523376 - DNA, 75 bp, synthetic construct
  source 1..75: mol_type = other DNA
ttgaaaatcatgctgatttcagattgttaagtcgacgcgcacttctggcattactcaattatgaagagaggaacg

SEQ ID NO: 523377 - DNA, 75 bp, synthetic construct
  source 1..75: mol_type = other DNA
ctttttgtagatgatggaagcagagatgatacctgggaacaaattaaggccgcatcctgcaaaaattcttttgtc

SEQ ID NO: 523378 - DNA, 75 bp, synthetic construct
  source 1..75: mol_type = other DNA
tttcatctgatggaaaatcaattcaagaaatatgggatttaactcagtatggtatgggggcaattataagcattg

SEQ ID NO: 523379 - DNA, 75 bp, synthetic construct
  source 1..75: mol_type = other DNA
atgtcccacaggtacagatagagttgctgcttatcatactcacggtgcagatagtcatggcgattatgttgatga

SEQ ID NO: 523380 - DNA, 75 bp, synthetic construct
  source 1..75: mol_type = other DNA
attgtgggcggcgttcctgaaacagatattcacggcaggctgatggcggggacgctggacagccagagcagttgc

SEQ ID NO: 523381 - DNA, 75 bp, synthetic construct
  source 1..75: mol_type = other DNA
gaattgtcgccgcgtgaccaggcgctggtgaccgatatgtgggaaaacctgtttcagcaggcgtcacagcagtaa

SEQ ID NO: 523382 - DNA, 75 bp, synthetic construct
  source 1..75: mol_type = other DNA
cctgccgaccagatctcggcattcaacaaagcacttgcaacattttcaggaagtatcgtatcgctcattgcgacc

SEQ ID NO: 523383 - DNA, 75 bp, synthetic construct
  source 1..75: mol_type = other DNA
aaaaatgtttgatgacgacattttacccatcatcagcggtcttgagattcaggatattgagccgatgcaactgct

SEQ ID NO: 523384 - DNA, 75 bp, synthetic construct
  source 1..75: mol_type = other DNA
aatgttctggaatttgcagggggatttgaatctgacatgttggtttcattataaagacgggcaatggagagtgat

SEQ ID NO: 523385 - DNA, 75 bp, synthetic construct
  source 1..75: mol_type = other DNA
atgagtatcaaagttcagcacgtcggcaaggcgtataaatattatccatctaaatggaaccgggtcattgagaaa

SEQ ID NO: 523386 - DNA, 75 bp, synthetic construct
  source 1..75: mol_type = other DNA
gagtgagttcgaagcagacggcatcattctgaacccggcggactggcaccgtattgccctgctgaaggacgctaa

SEQ ID NO: 523387 - DNA, 75 bp, synthetic construct
  source 1..75: mol_type = other DNA
ctcacgctatttaccaggtgacagagtctgagtttagcgcttccggtatcgtcctgaacccgcgcgactggcaca

SEQ ID NO: 523388 - DNA, 75 bp, synthetic construct
  source 1..75: mol_type = other DNA
gatgcgtaaaaagaacctgaaaacgatgttatttatcagtcagttgaaagcaaaaacgaattttcaggttgttgg

SEQ ID NO: 523389 - DNA, 75 bp, synthetic construct
  source 1..75: mol_type = other DNA
cgtcgatgaagcgctctccgtgggtgactcccgttttcaggcgaaatgctatgctcgcatcgcggacttcaaaga

SEQ ID NO: 523390 - DNA, 75 bp, synthetic construct
  source 1..75: mol_type = other DNA
tcggcgactacattgaagagcccgtacgcatctattccagcgggatgcaaatgcgcctggcgttcgctgtcgcca

SEQ ID NO: 523391 - DNA, 75 bp, synthetic construct
  source 1..75: mol_type = other DNA
aggattatcaccatcgacgccagtgtgatgaagggacgcaaaattcatgttgtcccgatgtcagaccaggtggtt

SEQ ID NO: 523392 - DNA, 75 bp, synthetic construct
  source 1..75: mol_type = other DNA
gaaaaatatccacaactggaaaaagccagtgcggaacagaaaagattaatggacccggagaataaggagggcggc

SEQ ID NO: 523393 - DNA, 75 bp, synthetic construct
  source 1..75: mol_type = other DNA
ttgattatggtcgcagtaaccttagtgctgggtgcgggtgattttgctctcacactgggcggttttacgttggga

SEQ ID NO: 523394 - DNA, 75 bp, synthetic construct
  source 1..75: mol_type = other DNA
aactggcggcgggaatgcgtattccggtctcatggatacaggaaaaactccatattccacagccggtcggtgatg

SEQ ID NO: 523395 - DNA, 75 bp, synthetic construct
  source 1..75: mol_type = other DNA
cactgaaagtgggcgcgatcacggcggcaaaccgtatttttatggcaccgctgacgcgtctgcgcagtattgaac

SEQ ID NO: 523396 - DNA, 75 bp, synthetic construct
  source 1..75: mol_type = other DNA
gcaaaaactatagttgaaccagatatacatagaactgtagcaaaaagcatggcgttaatagaaactacggatgat

SEQ ID NO: 523397 - DNA, 75 bp, synthetic construct
  source 1..75: mol_type = other DNA
tctactttagaaaaagaatggccgctagattggaggctaatccaaaaaatggcagcggatctaggagttgcactt

SEQ ID NO: 523398 - DNA, 75 bp, synthetic construct
  source 1..75: mol_type = other DNA
aactctattattgatagaacatgtagtcgcatagttaactgcaatataatagaagttcctgcagattttttatct

SEQ ID NO: 523399 - DNA, 75 bp, synthetic construct
  source 1..75: mol_type = other DNA
agtctcaagcaaataaatatttggcaatgctgtttattctgattgcaatagttattatagtattgtctgttcgtt

SEQ ID NO: 523400 - DNA, 75 bp, synthetic construct
  source 1..75: mol_type = other DNA
aaaacctcgtattgctatgggaaacgcccctggtttaaattcgtgttttatgactgtggataacacgttaatttc

SEQ ID NO: 523401 - DNA, 75 bp, synthetic construct
  source 1..75: mol_type = other DNA
tggtttcatgcttatcaacccgaagatctttgtaccatccataatccaatgggagatttgcaggattttattgca

SEQ ID NO: 523402 - DNA, 75 bp, synthetic construct
  source 1..75: mol_type = other DNA
cctaccagcagatcagagaaaatatgtctgaatttgcacgttgccattatgggtatatacaaatccctccagtga

SEQ ID NO: 523403 - DNA, 75 bp, synthetic construct
  source 1..75: mol_type = other DNA
atatgatgctgccatgtctggcaactcctacaatggcggacaggggaaagcagggattgtatatattgaggaata

SEQ ID NO: 523404 - DNA, 75 bp, synthetic construct
  source 1..75: mol_type = other DNA
gccaaagcaatatcatggttttgaaagtcgattgcttccatatatctttcaatctgaaagttttgctgagcatac

SEQ ID NO: 523405 - DNA, 75 bp, synthetic construct
  source 1..75: mol_type = other DNA
tgctgacgagaccggactttgagatgacgagcgagagtgcggcagtgatgtacagcctgatcggtagctgcaaac

SEQ ID NO: 523406 - DNA, 75 bp, synthetic construct
  source 1..75: mol_type = other DNA
gacacgcgagtggtcagcgacaaaaagaccatcgatatctttgccgccacccgcccgcaggcaaaatggctgaaa

SEQ ID NO: 523407 - DNA, 75 bp, synthetic construct
  source 1..75: mol_type = other DNA
tctgctcagtaataactatgtcagggtcgaagttgacagccggaaggttattcctgcgtggtttgtatggcactt

SEQ ID NO: 523408 - DNA, 75 bp, synthetic construct
  source 1..75: mol_type = other DNA
gtctacgagtcttttgatgaggaaccttataaaatcgaggtgatagtgatcaatgttggtaggcgtgatgcagtt

SEQ ID NO: 523409 - DNA, 75 bp, synthetic construct
  source 1..75: mol_type = other DNA
gtttcgttcactggaccatggatggacttcattttgccaacgttggtgcttcgtagtgaggataaaatgaccctg

SEQ ID NO: 523410 - DNA, 75 bp, synthetic construct
  source 1..75: mol_type = other DNA
cgcatattttaggttatgcaaatctgtcggtagaagataatggggagcttattgcatataaaggattacaaagcg

SEQ ID NO: 523411 - DNA, 75 bp, synthetic construct
  source 1..75: mol_type = other DNA
tatacaggtctgtttatctcacatactaatttaaatggctcgaactcaatggttaatagtgatacaaaatcatat

SEQ ID NO: 523412 - DNA, 75 bp, synthetic construct
  source 1..75: mol_type = other DNA
gtcggaagagtgggggttgttgcaggcaaacagatttcaaacgagaaatttgattttggattccatttgggaagt

SEQ ID NO: 523413 - DNA, 75 bp, synthetic construct
  source 1..75: mol_type = other DNA
aagtgacctggtacggctgggacggcgaccgcctgaccacaatacagaacgacagaacccgcatccagacgattt

SEQ ID NO: 523414 - DNA, 75 bp, synthetic construct
  source 1..75: mol_type = other DNA
ggaacgccttcaactacagcaccaattgccaaaggcaatgtaatgcctccgtataacggaaaagccgtaacttgg

SEQ ID NO: 523415 - DNA, 75 bp, synthetic construct
  source 1..75: mol_type = other DNA
ccggagcgggtgccgggggcggacgaggtgctgccgccggagccgcccgcataccgggtgctgacgggcgtggtg

SEQ ID NO: 523416 - DNA, 75 bp, synthetic construct
  source 1..75: mol_type = other DNA
agcgtaatgattgatgacttactacaactcttaaggtcacgagatatgagtagctttgtacaagtttcgcacttg

SEQ ID NO: 523417 - DNA, 75 bp, synthetic construct
  source 1..75: mol_type = other DNA
tgcacccattccgcgcgggaagtggccttgcgcagcgtatcttcttcgaacaactggcgattcatgctggctatc

SEQ ID NO: 523418 - DNA, 75 bp, synthetic construct
  source 1..75: mol_type = other DNA
atacgcagaacacctggcgttcgtgaagagaaactaaaaaatattaatagggatgataaggatggaataaaacaa

SEQ ID NO: 523419 - DNA, 75 bp, synthetic construct
  source 1..75: mol_type = other DNA
actcctgcactgggaacaaacacttcatcaactgaatacagaacagcggaagccgctgaacctaaaagcataata

SEQ ID NO: 523420 - DNA, 75 bp, synthetic construct
  source 1..75: mol_type = other DNA
tctgctggatgctgcagctcccccaatatatttcttgttgttcctgttgttttgtgcgggtttttccttatcaat

SEQ ID NO: 523421 - DNA, 75 bp, synthetic construct
  source 1..75: mol_type = other DNA
aggccgcccatcatggtctttggttttttctttgcttctgttgccatcatcgccgtaggcacaatactgaatgca

SEQ ID NO: 523422 - DNA, 75 bp, synthetic construct
  source 1..75: mol_type = other DNA
tggaaataccaatatgcgtaagacacctggcgtcagggaagataaactaaaaaatattaaaggagatgataaaga

SEQ ID NO: 523423 - DNA, 75 bp, synthetic construct
  source 1..75: mol_type = other DNA
ccttggctatagctggttatacggcacctttaaagatttcgacggtacttttacctttgacgaaaaaaaattcgg

SEQ ID NO: 523424 - DNA, 75 bp, synthetic construct
  source 1..75: mol_type = other DNA
cctttgttaatttccgcatccagcaccttggctatagctggttatacggcacctttaaagatttcgacggtactt

SEQ ID NO: 523425 - DNA, 75 bp, synthetic construct
  source 1..75: mol_type = other DNA
tgatttcaaagaggtaatgggagttccggtagcactctttcgatactggggaagtgacctcagaaagattatcaa

SEQ ID NO: 523426 - DNA, 75 bp, synthetic construct
  source 1..75: mol_type = other DNA
tgctgcactgatgaatgtccagataaactctgtgacgggcgtgttcagcatggcgggatttttgatgatttatgc

SEQ ID NO: 523427 - DNA, 75 bp, synthetic construct
  source 1..75: mol_type = other DNA
cgggccgcttacggttacatctacctgatagacagcatgatcagaccgctgctgatggtgttcgggttctttttt

SEQ ID NO: 523428 - DNA, 75 bp, synthetic construct
  source 1..75: mol_type = other DNA
tctcgacaaactcaccgtcgcggcgctggaagggaaaactgaactcaaggcgttgctcgactggcaacaggccat

SEQ ID NO: 523429 - DNA, 75 bp, synthetic construct
  source 1..75: mol_type = other DNA
aggaggttatttatatatctctccccatactgcatattgctcaacagttagtgctgaaatttcatatcaaacttt

SEQ ID NO: 523430 - DNA, 75 bp, synthetic construct
  source 1..75: mol_type = other DNA
ttgagcttgtagcgcttcagctatatttataccttctatatgccagagataacttccaggagcatgtgttagcta

SEQ ID NO: 523431 - DNA, 75 bp, synthetic construct
  source 1..75: mol_type = other DNA
ggtacagtcttatgtacggacaacggcattcagggcaaatgcaaaaaatatccgtcttgataatggtatggcagc

SEQ ID NO: 523432 - DNA, 75 bp, synthetic construct
  source 1..75: mol_type = other DNA
gtggtaatgctataaacactataattaacgataaagggaagcagtatgtctacaatggtggcaatgcaatatcta

SEQ ID NO: 523433 - DNA, 75 bp, synthetic construct
  source 1..75: mol_type = other DNA
tggcatcagtagcgcaactcttgcctcaatcgcatgtggactgaaaaagaatatctatggtcatcacttcggcgc

SEQ ID NO: 523434 - DNA, 75 bp, synthetic construct
  source 1..75: mol_type = other DNA
gttcgtttagtcgtagaaccttaaaactattatccactataagcaaagaagaagcgaaccttattacttattttg

SEQ ID NO: 523435 - DNA, 75 bp, synthetic construct
  source 1..75: mol_type = other DNA
tttatgtaaaaacaggagcaagcaatgcgcttacattcaaaaagcaacctcttgttaaccctccagaaaaagaaa

SEQ ID NO: 523436 - DNA, 75 bp, synthetic construct
  source 1..75: mol_type = other DNA
atcacgctgctttctgaaacactgcccctgccgacaaagggggcgcgtctgcgggtggcgctggggtttaacggt

SEQ ID NO: 523437 - DNA, 75 bp, synthetic construct
  source 1..75: mol_type = other DNA
atgggactgaatgaatatcagccggatttcagcctgacagcggaaggccaggatatcacgaaggccctgaaacgg

SEQ ID NO: 523438 - DNA, 75 bp, synthetic construct
  source 1..75: mol_type = other DNA
attgaatataataagattgaggttattcctgcgatacctggcaatttaaaattactttgtatgaaatgtaatcct

SEQ ID NO: 523439 - DNA, 75 bp, synthetic construct
  source 1..75: mol_type = other DNA
agataaacgcatcagtggtgcagttggtgctggctatacgttgacacagaacggaatggaaacaggcggagataa

SEQ ID NO: 523440 - DNA, 75 bp, synthetic construct
  source 1..75: mol_type = other DNA
tgaccctgttgaccctgttgaccctgttgaccctgttgaccctgttgaccctgttgaccctgttgaccccgttga

SEQ ID NO: 523441 - DNA, 75 bp, synthetic construct
  source 1..75: mol_type = other DNA
attaccctgctttctgaaacgctgacacttccgcccagaggggcgcgactacaggttgcgctgggatttaatgag

SEQ ID NO: 523442 - DNA, 75 bp, synthetic construct
  source 1..75: mol_type = other DNA
attccctcgttgctctgttgaagtctgaaatgaagatacacggaaacaaagcaccagagacttacagaagaatta

SEQ ID NO: 523443 - DNA, 75 bp, synthetic construct
  source 1..75: mol_type = other DNA
ttttttatcgtccgctggggcttgctgatgatgccaataccgcctatagcaaaatcgctttccggatacaaggca

SEQ ID NO: 523444 - DNA, 75 bp, synthetic construct
  source 1..75: mol_type = other DNA
aagcgcaggacaatgtccaacggcaagccattgttgagactgtttgtcaggttttcgctaccatattgggatgca

SEQ ID NO: 523445 - DNA, 75 bp, synthetic construct
  source 1..75: mol_type = other DNA
tgcggcgtttaatgcgtttttgcgccgtggtcttggcgagatgagcgctgaagaacgccaggctttaaaggagct

SEQ ID NO: 523446 - DNA, 75 bp, synthetic construct
  source 1..75: mol_type = other DNA
ctaataatggttttgacttcaaacaaactatcagtactaatctatccataggagaaactaaatttacaggtggca

SEQ ID NO: 523447 - DNA, 75 bp, synthetic construct
  source 1..75: mol_type = other DNA
ggttacggcagcgatcttattgttactgtcgaagaatccgatggctcaaagcggacattctcgcaacctttttca

SEQ ID NO: 523448 - DNA, 75 bp, synthetic construct
  source 1..75: mol_type = other DNA
agtgcttccggtaataatgcaaaagttagaaattacagatttcaaactagatgaaacagatttatgcctgggcaa

SEQ ID NO: 523449 - DNA, 75 bp, synthetic construct
  source 1..75: mol_type = other DNA
tcattgccggattcctttgcggctggtctgcggggatgacattaccgcaggcgatggcgcagggaacggcgtgcg

SEQ ID NO: 523450 - DNA, 75 bp, synthetic construct
  source 1..75: mol_type = other DNA
ggtctgcggggatgacattaccgcaggcgatggcgcagggaacggcgtgcgcggcgaaaaccattcagtaccacg

SEQ ID NO: 523451 - DNA, 75 bp, synthetic construct
  source 1..75: mol_type = other DNA
tgccgtcgaaaaatgaccatttcgtgagcggaaaaatcacgcgtacatttagtaccagcaagcctggtgtctata

SEQ ID NO: 523452 - DNA, 75 bp, synthetic construct
  source 1..75: mol_type = other DNA
ctggcggtgctgctgggcggcatggttggcgcggggattgtgttggggcgtaacgctctgcgtaattacaacgcg

SEQ ID NO: 523453 - DNA, 75 bp, synthetic construct
  source 1..75: mol_type = other DNA
cgacgttacctattcgtcgcgatagcccgaaaaaggcaattaccttgattctggcggtgctgctgggcggcatgg

SEQ ID NO: 523454 - DNA, 75 bp, synthetic construct
  source 1..75: mol_type = other DNA
ctgagtgtgaaaaacttgcaggattctttgaaaacgcaggaagtggtggcacaggagcagaaagatctgcgtatc

SEQ ID NO: 523455 - DNA, 75 bp, synthetic construct
  source 1..75: mol_type = other DNA
ggcggcaacacctacaccgccacggtgcaggctaatttaagctggaatgtcagcgttccggcggcagatattcag

SEQ ID NO: 523456 - DNA, 75 bp, synthetic construct
  source 1..75: mol_type = other DNA
gtgctgataggtgcgccgacgggagtggcctgctcggtgtgtcccaacagcccggtggaggagcagaagggtaac

SEQ ID NO: 523457 - DNA, 75 bp, synthetic construct
  source 1..75: mol_type = other DNA
gtacggtatggttacaacaaccagttgcaactgacgtcagtgacgtacccggacgggctgcgccgcagccggaaa

SEQ ID NO: 523458 - DNA, 75 bp, synthetic construct
  source 1..75: mol_type = other DNA
gcgcttatcagcccggaaggggaaacggcgtggtgcggggagtatgacgaatggggaaacctgctgggcgaaacc

SEQ ID NO: 523459 - DNA, 75 bp, synthetic construct
  source 1..75: mol_type = other DNA
ctaccactacgacagccagcaccgtctggtgttctacacgcggatacagcacggtgagcctcaggtagagagccg

SEQ ID NO: 523460 - DNA, 75 bp, synthetic construct
  source 1..75: mol_type = other DNA
ctaccactacgacagccagcaccgtctggtgttctacacgcggatacagcacggtgagccaccggttgagagccg

SEQ ID NO: 523461 - DNA, 75 bp, synthetic construct
  source 1..75: mol_type = other DNA
ctaccactacgacagccagcaccgtctggtgttctacacgcggatacagcacggtgagccactggtcgagagccg

SEQ ID NO: 523462 - DNA, 75 bp, synthetic construct
  source 1..75: mol_type = other DNA
agatggctctgaaagacggcaatgcgttctcgaacccgcgtaaaggcaacgagcaggagattgccgcgattttcc

SEQ ID NO: 523463 - DNA, 75 bp, synthetic construct
  source 1..75: mol_type = other DNA
tggggcatcgactggggatgtccaccatggtggtgtttctgtcgttgttggtttggggatggttactcggtccgg

SEQ ID NO: 523464 - DNA, 75 bp, synthetic construct
  source 1..75: mol_type = other DNA
cggcggtgcaccgcgaggaaggcctgagccagtaccgcgcatacgacagccgtggacagttaattgcggtgaaag

SEQ ID NO: 523465 - DNA, 60 bp, synthetic construct
  source 1..60: mol_type = other DNA
atgacgctcgcgcagtttgccatgactttctggcacgacctggcagcaccgatcctggcg

SEQ ID NO: 523466 - DNA, 75 bp, synthetic construct
  source 1..75: mol_type = other DNA
gaagccgatttcccgtatatggcggaaatggcgctgaaagacggcaatgccttctccaacccgcgcaaagggaac

SEQ ID NO: 523467 - DNA, 75 bp, synthetic construct
  source 1..75: mol_type = other DNA
gaacgctgcaaactgttgggcggtaaaaaagcgctgctggtgactgataaaggtctgcgagccattaaggacggc

SEQ ID NO: 523468 - DNA, 75 bp, synthetic construct
  source 1..75: mol_type = other DNA
catcccggaaggggtgatacggacggacgacgagcggacccaccactatcactacgacagccagcaccggctggt

SEQ ID NO: 523469 - DNA, 75 bp, synthetic construct
  source 1..75: mol_type = other DNA
atggtttcaatcggcagaaatattattcttgttttttgttggaatatcttcagaatacataaaacgatactgctt

SEQ ID NO: 523470 - DNA, 75 bp, synthetic construct
  source 1..75: mol_type = other DNA
ctgtaatttcagtccctgccaatgccccgcatcaggatattgatgattttgttgaaagtaaattcgggcaagaca

SEQ ID NO: 523471 - DNA, 75 bp, synthetic construct
  source 1..75: mol_type = other DNA
ggcaccggcatccggttctgcgctggcccgccggttacagctgaagtcttacccggtactgataacggacaacgg

SEQ ID NO: 523472 - DNA, 75 bp, synthetic construct
  source 1..75: mol_type = other DNA
aatttagctgggatgtgcttgaccgcctgatacagcagcgcggctttgacgggcggacgcagcgttaccgttatg

SEQ ID NO: 523473 - DNA, 75 bp, synthetic construct
  source 1..75: mol_type = other DNA
agtcggggctgtactataaccgtcaccggtactacgatccgttgcaggggcggtatatcaccccggacccgattg

SEQ ID NO: 523474 - DNA, 75 bp, synthetic construct
  source 1..75: mol_type = other DNA
aattcgactatatatatatatatatatagcggtgcaaagttaattccgctaacgataatatgttgttttcttttt

SEQ ID NO: 523475 - DNA, 75 bp, synthetic construct
  source 1..75: mol_type = other DNA
gtggtgcggggagtatgacgagtgggggaaccagcttaatgaggagaacccgcatcacctgtaccagccgtaccg

SEQ ID NO: 523476 - DNA, 75 bp, synthetic construct
  source 1..75: mol_type = other DNA
accagggctagagaaggatatgggcattcaagatgtaataattactatacctgatgatatgagttgtccgagtgg

SEQ ID NO: 523477 - DNA, 75 bp, synthetic construct
  source 1..75: mol_type = other DNA
tgactaacgagaacggcagccagtccacgttccggtatgacccggtggacaggctgacggagcagcgcggctttg

SEQ ID NO: 523478 - DNA, 75 bp, synthetic construct
  source 1..75: mol_type = other DNA
acttttccttgtgggggatgatgcgtattcccgcgagtggctgcagaaaaatgctgctgcgctccgggcgcgcca

SEQ ID NO: 523479 - DNA, 75 bp, synthetic construct
  source 1..75: mol_type = other DNA
aactggtggggctgctggacaggctggagggggaaatccgggcaaactgcgtgagcagtgaaagccgccagtggc

SEQ ID NO: 523480 - DNA, 75 bp, synthetic construct
  source 1..75: mol_type = other DNA
cgagttataagtgtatatgggcctcccgctccagaccgggcaggtgctgaaactcctcttgttcttactgatatg

SEQ ID NO: 523481 - DNA, 75 bp, synthetic construct
  source 1..75: mol_type = other DNA
cttcactgactgttccggttatgtaacccgctatgaccatgaccgttttggtcaggtgacggcggtgcaccgcga

SEQ ID NO: 523482 - DNA, 75 bp, synthetic construct
  source 1..75: mol_type = other DNA
gacattcttattagatattttcagaaaataaggggaaaagttcagcctgcaccttactggttaagtgaacatcaa

SEQ ID NO: 523483 - DNA, 75 bp, synthetic construct
  source 1..75: mol_type = other DNA
tgaccagtcaccgataggcggcgcactgcctgccgacagcgatatgaccgagcaaaccgccaaagcgctgcagca

SEQ ID NO: 523484 - DNA, 75 bp, synthetic construct
  source 1..75: mol_type = other DNA
atataatttggcacataccgcaaccaaacacccctcaaatcacatgattcagataatctcctgttcaaaaaacta

SEQ ID NO: 523485 - DNA, 75 bp, synthetic construct
  source 1..75: mol_type = other DNA
cgggaaggctctgagcgatgggcagttaataaattctcaggctgaaatgtgttactggaccagtagttgtccttt

SEQ ID NO: 523486 - DNA, 75 bp, synthetic construct
  source 1..75: mol_type = other DNA
gctgcaggcgacctgacagcaacgatatcaccggacggtaaacgcagcgccaccgaatatgataaacgtgggcgt

SEQ ID NO: 523487 - DNA, 75 bp, synthetic construct
  source 1..75: mol_type = other DNA
tcacggacagcctgaaccggcgggaggtgctgtacacggagggcgaaggcggcctgaagcgggtggtgaagaagg

SEQ ID NO: 523488 - DNA, 75 bp, synthetic construct
  source 1..75: mol_type = other DNA
cggtaccttccgtcagcgtttcccgcaatgtacagccggtgtcacaggatatttatgcgcagccggcaccggaag

SEQ ID NO: 523489 - DNA, 75 bp, synthetic construct
  source 1..75: mol_type = other DNA
accgcctgttgatccagtgtctttcatttttgtcgctagatttttacaagaaaagggagtttatgaatttattga

SEQ ID NO: 523490 - DNA, 75 bp, synthetic construct
  source 1..75: mol_type = other DNA
gggaagcttaactatagaacgacttaatgatttgaaatgtaataacatcattgagttacctggtcatgttgataa

SEQ ID NO: 523491 - DNA, 75 bp, synthetic construct
  source 1..75: mol_type = other DNA
tatccggtttatcgttgacaacctggcacgttcacagctggacgagcgcattgtggcaatggttgagacggcgaa

SEQ ID NO: 523492 - DNA, 75 bp, synthetic construct
  source 1..75: mol_type = other DNA
ggataaggaggttgtggggatactgccgcgactggggattaatcacccgaccgggattgccggtaatccgcaggg

SEQ ID NO: 523493 - DNA, 75 bp, synthetic construct
  source 1..75: mol_type = other DNA
caatgtgcagccggtgtcacaggatatttatgcgcagcagccggcaccggaggtggtgcgttacgaccgttacct

SEQ ID NO: 523494 - DNA, 75 bp, synthetic construct
  source 1..75: mol_type = other DNA
cagcagtcactccgtctgccgggacagcagtatgatgaggagtcggggctgtactacaaccgcaaccggtactat

SEQ ID NO: 523495 - DNA, 75 bp, synthetic construct
  source 1..75: mol_type = other DNA
tgcaggtggcaaagttccgttcgaatgtggcgttgaagaaatcactaaagtcggaaaagtgatagggaagtacag

SEQ ID NO: 523496 - DNA, 75 bp, synthetic construct
  source 1..75: mol_type = other DNA
aaagttcatctttaccactgtgaccaccgggggctgccgctggcgctcatcagcgaagacggcaatacggcgtgg

SEQ ID NO: 523497 - DNA, 75 bp, synthetic construct
  source 1..75: mol_type = other DNA
tgggatatattatctgatacttatgatgatatgaagagattaaatttaggtgggactgatcaatttttccattgt

SEQ ID NO: 523498 - DNA, 75 bp, synthetic construct
  source 1..75: mol_type = other DNA
cgtacaacgcgcaggggctggcgaaccgctgtataccggacagcctgcccgccgtggaatggctgacctacggca

SEQ ID NO: 523499 - DNA, 75 bp, synthetic construct
  source 1..75: mol_type = other DNA
ctctggcagcatgagaccagacatgcgtacaacgcgcaggggctggcgaaccgctgtataccggacagcctgccc

SEQ ID NO: 523500 - DNA, 75 bp, synthetic construct
  source 1..75: mol_type = other DNA
cgtcccttacaaaatgcgttttgcgctgaataacccacagattcacatcgcgggattacaccgcgcacttaaagg

SEQ ID NO: 523501 - DNA, 75 bp, synthetic construct
  source 1..75: mol_type = other DNA
tgagatgattgaagataataaaaaagacttggctgtaaatgaacatgggttgacatgtccattaacacaagattg

SEQ ID NO: 523502 - DNA, 75 bp, synthetic construct
  source 1..75: mol_type = other DNA
gcaggaaaccggctgccggacccggaactgcacccggacagcaccctcacggcgtggccggataaccgcatcgcg

SEQ ID NO: 523503 - DNA, 75 bp, synthetic construct
  source 1..75: mol_type = other DNA
tatatattggaatggtaaggcggctttattttgttcaactgatttaaaatcgaaatcacaatcacctgcattagg

SEQ ID NO: 523504 - DNA, 75 bp, synthetic construct
  source 1..75: mol_type = other DNA
ataaagaagaggcaagggttattacaataattgaatcgcgtgcggcgaaaactttaggtgagtgtaccagaggag

SEQ ID NO: 523505 - DNA, 75 bp, synthetic construct
  source 1..75: mol_type = other DNA
gcagccgggagtatgatgagaagggaaggctgacggcggagacctcgcgcagcggtgagacaacgcggtacagct

SEQ ID NO: 523506 - DNA, 75 bp, synthetic construct
  source 1..75: mol_type = other DNA
cgtcagggcgacatgacgcagtatggcggtagcattgttcagggttcagccggggtacgtattggtgcccccacc

SEQ ID NO: 523507 - DNA, 75 bp, synthetic construct
  source 1..75: mol_type = other DNA
aacagcgcatgcacaccacttcaggatcgtttggctgacgcatcatctgagtttgatgttggtcagcaacatctg

SEQ ID NO: 523508 - DNA, 75 bp, synthetic construct
  source 1..75: mol_type = other DNA
caacgccactgattacgtccaatgcgcagttgcgctggaacattgatacatcgtccaaccaggcgcccttaacgc

SEQ ID NO: 523509 - DNA, 75 bp, synthetic construct
  source 1..75: mol_type = other DNA
cggaatacgacgtctccaccgtgccagatgtgatggtgggtgaaaaactgatgatcacccgcaatccgtggcgca

SEQ ID NO: 523510 - DNA, 75 bp, synthetic construct
  source 1..75: mol_type = other DNA
tggggtgaagtggtctgcaatccattaaaggcgcagagactcgctgaggaatatcgggaaaggcaggaggcggca

SEQ ID NO: 523511 - DNA, 75 bp, synthetic construct
  source 1..75: mol_type = other DNA
tctaatgttgataactggtggtggtataataataaaatctacaccggtggtagcggcactcttccgtcatctcct

SEQ ID NO: 523512 - DNA, 75 bp, synthetic construct
  source 1..75: mol_type = other DNA
gcatcatctcatagcaatggtaatccgaaggcattacatattactatacccggcgaaggattatttgagataggc

SEQ ID NO: 523513 - DNA, 75 bp, synthetic construct
  source 1..75: mol_type = other DNA
aaaagttcctctctggaactggtttgccggtctctgtggagcgatggtggtattttctgaaggcgcatcagccag

SEQ ID NO: 523514 - DNA, 75 bp, synthetic construct
  source 1..75: mol_type = other DNA
tttactgatgaacgtataaaacttttgaatattacaaactctggagtatcagttgctagaaataccggtataaga

SEQ ID NO: 523515 - DNA, 75 bp, synthetic construct
  source 1..75: mol_type = other DNA
gcttaccgttaagtcaggcggattttggcttatggtttaaccataaaggtcgtcattattttagcggcattgccg

SEQ ID NO: 523516 - DNA, 75 bp, synthetic construct
  source 1..75: mol_type = other DNA
cgtgggtggtgaaattgctttcggttccgactctgccattaatatggcaagtcagcacattaatatccataacag

SEQ ID NO: 523517 - DNA, 75 bp, synthetic construct
  source 1..75: mol_type = other DNA
tgatggtgcgcgaaatctcggtgaagtacgtaccggggttgaggcgaaagtaaataacaaccttagcctgtgggg

SEQ ID NO: 523518 - DNA, 75 bp, synthetic construct
  source 1..75: mol_type = other DNA
cgatactagcggcacgactgccgttacggtgaataacgctggcggtacaggtgcgaaaacccttaacggtatcga

SEQ ID NO: 523519 - DNA, 75 bp, synthetic construct
  source 1..75: mol_type = other DNA
atgtcgttaacgtcaatttttagacgcattgcatttagctattatgattattcatgtgaagatattgatattgca

SEQ ID NO: 523520 - DNA, 75 bp, synthetic construct
  source 1..75: mol_type = other DNA
aaaacgccttggttggtgcaggcttgggtggaagattataaagaaaataaaataaaagactttacaccgacaccc

SEQ ID NO: 523521 - DNA, 75 bp, synthetic construct
  source 1..75: mol_type = other DNA
tggggcgctggtttggctatcgacagggatatctggatgtatgtcggctgtataccaccgatgagctgattgaat

SEQ ID NO: 523522 - DNA, 75 bp, synthetic construct
  source 1..75: mol_type = other DNA
aaatgtctttatatatcaatgtatttttattgtttgttttgttcctattatcgcaccattaagaaaatcaataac

SEQ ID NO: 523523 - DNA, 75 bp, synthetic construct
  source 1..75: mol_type = other DNA
cgccaccagagaacagcagcggtgagtgggtggaagacgtggtgccgggctgaaattctgatactccggcagtgc

SEQ ID NO: 523524 - DNA, 75 bp, synthetic construct
  source 1..75: mol_type = other DNA
tggttgggatttagtatgggattcaggacagacatataaattacgggctgcagcatcatttgaacatcttcgctt

SEQ ID NO: 523525 - DNA, 75 bp, synthetic construct
  source 1..75: mol_type = other DNA
cttttacctccctctaacccggactggactgtaattaaaggtcaggacctgtttaatgttttgtctcaatggtca

SEQ ID NO: 523526 - DNA, 75 bp, synthetic construct
  source 1..75: mol_type = other DNA
acgcgcagtacgtgaactcaaccagcctgcggtcactgattgacacctttaacgcttctgtagcgccagaggact

SEQ ID NO: 523527 - DNA, 75 bp, synthetic construct
  source 1..75: mol_type = other DNA
agaagggtctgagcgtaaacgattttttggagaagtacggcacggaagagctgtgcgagaaagctctctttaagt

SEQ ID NO: 523528 - DNA, 75 bp, synthetic construct
  source 1..75: mol_type = other DNA
gccatgcgggggtttacatcgccttgcagcaaatcgcgccggtactgctgcttaagtcccgcaacgaaacctacg

SEQ ID NO: 523529 - DNA, 75 bp, synthetic construct
  source 1..75: mol_type = other DNA
attagataccatgatgagcaaactgaataacaccagtacctacctcagccaacaatttactgcaatgagtaattc

SEQ ID NO: 523530 - DNA, 75 bp, synthetic construct
  source 1..75: mol_type = other DNA
tcggtggatatcccgcatgctgcaaccggggatatcagttttcagacgatcaatgattacggtgcattaactccg

SEQ ID NO: 523531 - DNA, 75 bp, synthetic construct
  source 1..75: mol_type = other DNA
ttgcgcagtatgctgccagcccccgactcaatgccctcattaacagctttaacgcagcgctttcccccgacagtt

SEQ ID NO: 523532 - DNA, 75 bp, synthetic construct
  source 1..75: mol_type = other DNA
gtatatcgccaaaagacggccaccagctgacggtggaaatcacggaaagcatgatgatggaacacgataccgaaa

SEQ ID NO: 523533 - DNA, 75 bp, synthetic construct
  source 1..75: mol_type = other DNA
tcggttatctggctgattttcgccgcctttatgtttggcacaggctatgaaaaaccgggctggggcgacgtatcg

SEQ ID NO: 523534 - DNA, 75 bp, synthetic construct
  source 1..75: mol_type = other DNA
tctcaggatcacaccaaatatatggaggaggacaggtatatatagacgaaattaatgaaaaactatcatcgcaag

SEQ ID NO: 523535 - DNA, 75 bp, synthetic construct
  source 1..75: mol_type = other DNA
ttgccatatctgcgcttgcggcgacttctgcgtgggctgcacctgtacaggtgggcgaagcggcaggatcggcag

SEQ ID NO: 523536 - DNA, 75 bp, synthetic construct
  source 1..75: mol_type = other DNA
tattgcctccaatttacgcccggcacaattaacggattccggcatgagcagccacggagcgccgatagttggtcc

SEQ ID NO: 523537 - DNA, 75 bp, synthetic construct
  source 1..75: mol_type = other DNA
gtaggattagccccccaaaaggcactaaatgatacatttaagatattgtcagcatcatgttctggttctcctacc

SEQ ID NO: 523538 - DNA, 75 bp, synthetic construct
  source 1..75: mol_type = other DNA
tcatttttgtcacacaaacaaaaaatgaaagatgtaacagaaggcgacatcacctggaagattagtgcacaaata

SEQ ID NO: 523539 - DNA, 75 bp, synthetic construct
  source 1..75: mol_type = other DNA
gcgattatttcccctgaatttctgcgctattttaatcagtccatttactcacgcctgccggatattgcccataaa

SEQ ID NO: 523540 - DNA, 75 bp, synthetic construct
  source 1..75: mol_type = other DNA
ccagaaaatgacacggtcagcaacatggttccagcatgcattccatgcaacttgttcaaaatgtgcagcacagta

SEQ ID NO: 523541 - DNA, 75 bp, synthetic construct
  source 1..75: mol_type = other DNA
tgaggcggggaggctgaaggcgcagacggatgcggcggggcggcggacggagtaccggctgcatatggcgtcggg

SEQ ID NO: 523542 - DNA, 75 bp, synthetic construct
  source 1..75: mol_type = other DNA
atgattaagcttcttatcggtatggcttgcgctgccatgctttcaggttgcgctggtgtacttgagaaacaggaa

SEQ ID NO: 523543 - DNA, 75 bp, synthetic construct
  source 1..75: mol_type = other DNA
ctgggcgctggcggacgagtacatgaataacggcgggacgctgcaacctaccgggcggaaaatgccatctcagga

SEQ ID NO: 523544 - DNA, 75 bp, synthetic construct
  source 1..75: mol_type = other DNA
aaaaacgatgaggtcaggcagaacctgatcccactcagcaagcagtatatgaatgaggcggcagcgcaggcagat

SEQ ID NO: 523545 - DNA, 75 bp, synthetic construct
  source 1..75: mol_type = other DNA
agccagcgtcggagttagctccgaactaacggcagaggagatcgctgatgcgtatattgagacacttgtcaggct

SEQ ID NO: 523546 - DNA, 75 bp, synthetic construct
  source 1..75: mol_type = other DNA
cgtatcatggcatcctccagttacaggcgtcactataagcgccgtaaggaatgctgcgtcatcaagccctgttgg

SEQ ID NO: 523547 - DNA, 75 bp, synthetic construct
  source 1..75: mol_type = other DNA
gttaagccggcaatcagaaaagaagttatagaagctatgtatggcttcaaagcaccagcatttatcaatgtggtt

SEQ ID NO: 523548 - DNA, 75 bp, synthetic construct
  source 1..75: mol_type = other DNA
aagactcgccgaaagacgctttcttcgatgatccgaaatcggaccgcgcaaaagacttcctcgcgaaaatcctgc

SEQ ID NO: 523549 - DNA, 75 bp, synthetic construct
  source 1..75: mol_type = other DNA
taccgtggctgaagtccatgctcgtattggcattcccgtggaaattgtcgagatgggttttcgcgtgctgaaaaa

SEQ ID NO: 523550 - DNA, 75 bp, synthetic construct
  source 1..75: mol_type = other DNA
attcaaatagccgatgaagctctgtatatcgccaaaagacgaggtagaaaccgtgttgaactctggaaagccagt

SEQ ID NO: 523551 - DNA, 75 bp, synthetic construct
  source 1..75: mol_type = other DNA
catgcagaagagtttctgagcaacgaacaggttgaaaagcaacttaagaatgcaatggaacactggatcattaat

SEQ ID NO: 523552 - DNA, 75 bp, synthetic construct
  source 1..75: mol_type = other DNA
gttcgaatggaaaattttcaaagaaagaggctgaaaccaatggcctacgttctcattatagtttcactggcgacg

SEQ ID NO: 523553 - DNA, 75 bp, synthetic construct
  source 1..75: mol_type = other DNA
cgtggttatatgacgacagagaacggtgaagtgaagcggcatacgcttcacggctctgtgaggattgaaccatgc

SEQ ID NO: 523554 - DNA, 75 bp, synthetic construct
  source 1..75: mol_type = other DNA
gctaccgccatagctaatctgggcacgacagtaggcatggagaaggtgcgtaatagcgtcgcttctcgtgtgttg

SEQ ID NO: 523555 - DNA, 75 bp, synthetic construct
  source 1..75: mol_type = other DNA
ttgcttacctgggataaaagcgaacgcagggatgcaacaaattcacccggtaatattataaggaaattatcatca

SEQ ID NO: 523556 - DNA, 75 bp, synthetic construct
  source 1..75: mol_type = other DNA
tggattaattattatatggatgatgcttaacattgcgctttctgtctggttctttgtgcaaagcttcagtgtgct

SEQ ID NO: 523557 - DNA, 75 bp, synthetic construct
  source 1..75: mol_type = other DNA
tggaataagtattatttggatgatgcttaacattgcactttctgtctggttctttgtgcaaagcctcagtgtcct

SEQ ID NO: 523558 - DNA, 75 bp, synthetic construct
  source 1..75: mol_type = other DNA
gctaaaggtgatgctaccgttggtacacgtaacgtattcgaagtatcccccgatggtactttatatgtagcacgt

SEQ ID NO: 523559 - DNA, 75 bp, synthetic construct
  source 1..75: mol_type = other DNA
agaagaagaagtatcagtactaaatactaagttggaagatcaacagaaacaaattgatgaattaatggcagttgt

SEQ ID NO: 523560 - DNA, 75 bp, synthetic construct
  source 1..75: mol_type = other DNA
aaaaagcccgccagttgaagaaaaagcaggcttataaaccggatcctgaagcgtcatttagctggtcagcaaata

SEQ ID NO: 523561 - DNA, 75 bp, synthetic construct
  source 1..75: mol_type = other DNA
catggtttaacgaagaagcggaagaagatttgcgttttgatagtaaagaggagcagttgcctgaagagcgggaac

SEQ ID NO: 523562 - DNA, 75 bp, synthetic construct
  source 1..75: mol_type = other DNA
agaaacagccagtacatcgtgaaaggcacctccagtgcgggtgggagcacgtgggacgatcagccagtcaaagtg

SEQ ID NO: 523563 - DNA, 75 bp, synthetic construct
  source 1..75: mol_type = other DNA
ctgagtcgatggatatgcctgaaaccagtgcgaaaaaagcaggcaagaaaggcaagagatcaaaggcaaaaacgg

SEQ ID NO: 523564 - DNA, 75 bp, synthetic construct
  source 1..75: mol_type = other DNA
agtcaatctcaacacaaagaattccggtgataaactaactttcactgatgatgaattttgggatgatgaattatt

SEQ ID NO: 523565 - DNA, 75 bp, synthetic construct
  source 1..75: mol_type = other DNA
cagataatgctctgacattgatagccgagaatgagttgcaaccattcatcaaagagcaggatgctgccgcatcag

SEQ ID NO: 523566 - DNA, 75 bp, synthetic construct
  source 1..75: mol_type = other DNA
cgaataatgaagaatacaatggacctgaaggagatgcgtcaggatggtttctggggcctcaactcagagttagag

SEQ ID NO: 523567 - DNA, 75 bp, synthetic construct
  source 1..75: mol_type = other DNA
ggtgcgcctgaatgtggaatcgcgcggtgatgtgccgctgatggaagcgcgaacgcgaactctgctgacgttgct

SEQ ID NO: 523568 - DNA, 75 bp, synthetic construct
  source 1..75: mol_type = other DNA
agtggggcaatgggggatctcaccgcgctgcagacgatatttagcaaagtggtaagcgaagccggggaatctgag

SEQ ID NO: 523569 - DNA, 75 bp, synthetic construct
  source 1..75: mol_type = other DNA
tttaataacgaatggcatacgctgggcttccgttttgccggtaacaacagtattgaggtgacgccggtcattgat

SEQ ID NO: 523570 - DNA, 75 bp, synthetic construct
  source 1..75: mol_type = other DNA
tacctgggggcacaataccggtgatgagatccttcgtcaggtgtctcaggctttttatgacaacgttcgcagcag

SEQ ID NO: 523571 - DNA, 75 bp, synthetic construct
  source 1..75: mol_type = other DNA
gatgaaagtgaaacacttacccgtagaaatgacgctatcttcggcaaccacgtatggcaaacatttgcgcaatac

SEQ ID NO: 523572 - DNA, 75 bp, synthetic construct
  source 1..75: mol_type = other DNA
accagccgtatcgcgcaggttaaccttagtcgttcctggtatgggttgtggatgccaaagctgattcaggcattt

SEQ ID NO: 523573 - DNA, 75 bp, synthetic construct
  source 1..75: mol_type = other DNA
accaccttaggtaatcttgtttttattgatgaaacagagtccgttcttatttgcaaccatacaaactgtacattt

SEQ ID NO: 523574 - DNA, 75 bp, synthetic construct
  source 1..75: mol_type = other DNA
ttttattccgggttcaataaaaattgaattcgtccatagagaatcagaacataaaacaatagaagtaaaaaaatc

SEQ ID NO: 523575 - DNA, 75 bp, synthetic construct
  source 1..75: mol_type = other DNA
gttgtagccgtacagactcaccacttgcggatagtaagcagcataatagaaaatttcaacgacaagattttgagc

SEQ ID NO: 523576 - DNA, 75 bp, synthetic construct
  source 1..75: mol_type = other DNA
actaagtgtgacaataaaattctgaaacgagacaatattccggtaattagcttttttttattgaaaggtaaatgt

SEQ ID NO: 523577 - DNA, 75 bp, synthetic construct
  source 1..75: mol_type = other DNA
cacctgttcatcttaaagatgccgttattggagtttgtggaacgtggttatttcttactgtaattacatatcttt

SEQ ID NO: 523578 - DNA, 75 bp, synthetic construct
  source 1..75: mol_type = other DNA
aatggtcatccggattatgaacgtttaattcagatagcagacgaagcgttatataccgcaaaaagacggggcaga

SEQ ID NO: 523579 - DNA, 75 bp, synthetic construct
  source 1..75: mol_type = other DNA
aagatgagtggaccggacttgtcgaacaggcagatccgctcattcgtgccaaagccgcggaaattgccgttgcgc

SEQ ID NO: 523580 - DNA, 75 bp, synthetic construct
  source 1..75: mol_type = other DNA
gtagagaaaaccaaactgaaagccgcgaacggcgaagatattgccctctcactttccatcggtgccgccatgttt

SEQ ID NO: 523581 - DNA, 75 bp, synthetic construct
  source 1..75: mol_type = other DNA
atttttattacagataagaaataccgtatcgcaaattattaccttgctgcgtgaattgtttgaagaagtatcgcg

SEQ ID NO: 523582 - DNA, 75 bp, synthetic construct
  source 1..75: mol_type = other DNA
gttgcgtatatttttcccggcgacgctggagctggcttttggtgccctgctgctggcactcctgattggcatccc

SEQ ID NO: 523583 - DNA, 75 bp, synthetic construct
  source 1..75: mol_type = other DNA
cattaacggtcgtgattaacaacgtcacttacgctgccacggtgttagctgacggtacatggagcctcggtgttc

SEQ ID NO: 523584 - DNA, 75 bp, synthetic construct
  source 1..75: mol_type = other DNA
ttattagtccaagctggttgtgctgttgagctttctcaaaaacttacctcttgtgccaaaaccctggtcgaagcc

SEQ ID NO: 523585 - DNA, 75 bp, synthetic construct
  source 1..75: mol_type = other DNA
tcatcgccgtcactctgtttgcaactgccaatacctatgcagcaacaaccaacggtggcgttattcactttgaag

SEQ ID NO: 523586 - DNA, 75 bp, synthetic construct
  source 1..75: mol_type = other DNA
gacatttaccaatatcgaaggcatttccggctcgaattttaacgacactctgaccggcagcagcggcgataacca

SEQ ID NO: 523587 - DNA, 75 bp, synthetic construct
  source 1..75: mol_type = other DNA
cgttgacgatcacgatcaacggcacagtttattccgccacggtacaggcggacggaagctggagcgtcggcattc

SEQ ID NO: 523588 - DNA, 75 bp, synthetic construct
  source 1..75: mol_type = other DNA
ggccgatcaaaccatcagcggggtggtcactcgtgccgccgctggcgatacggttaccgtcacgctgggcggcaa

SEQ ID NO: 523589 - DNA, 75 bp, synthetic construct
  source 1..75: mol_type = other DNA
gacatcgtgatagacgctaacctgcctggtctgcgcgtcgataccgtggcaggcgatgatgtggttaatattatc

SEQ ID NO: 523590 - DNA, 75 bp, synthetic construct
  source 1..75: mol_type = other DNA
cgcttgtgaccatcaacaccatcgctggcgacgatattctcaacgtaagcgaagctggcgcggggataaccatca

SEQ ID NO: 523591 - DNA, 75 bp, synthetic construct
  source 1..75: mol_type = other DNA
cggcaacaccggcagcggttcgcgagacatcactatcgatgccaatctgcctggcttacgcgtcgatacggtggc

SEQ ID NO: 523592 - DNA, 75 bp, synthetic construct
  source 1..75: mol_type = other DNA
ttaacggacaaacctggacggcgacggtgggcagcggtggcgcctggtcagtgtttatccccggacaacaatttt

SEQ ID NO: 523593 - DNA, 75 bp, synthetic construct
  source 1..75: mol_type = other DNA
caagcgccgaccacgcgctggcggtggatgtcaccgcgccggatctcaccattaataccgtcgcaggtgatgaca

SEQ ID NO: 523594 - DNA, 75 bp, synthetic construct
  source 1..75: mol_type = other DNA
accttgccagatggcgcagcaaacgtacaagccagcgtcagcaatgtagctggtaacaacgcccaggcaacgcat

SEQ ID NO: 523595 - DNA, 75 bp, synthetic construct
  source 1..75: mol_type = other DNA
ggatgtcaccgcgccggatctcaccattaataccgtcgcaggtgatgacattatcaacgccatcgaacatggtca

SEQ ID NO: 523596 - DNA, 75 bp, synthetic construct
  source 1..75: mol_type = other DNA
cagcggcaccagcaccgccgaaaccgggcagacggtgaccgtcacccttaacggtacaacctacaccggcaatgt

SEQ ID NO: 523597 - DNA, 75 bp, synthetic construct
  source 1..75: mol_type = other DNA
acgccgccgaaaaaggcactggcctgaccctttccggcagcaccagcgggattgaaagcgggcaaaccgtcactt

SEQ ID NO: 523598 - DNA, 75 bp, synthetic construct
  source 1..75: mol_type = other DNA
aaaccatcgccattgcgggcattagcgatgacaccgggttaagcagcagcgattttgttactcgcgacactacgc

SEQ ID NO: 523599 - DNA, 75 bp, synthetic construct
  source 1..75: mol_type = other DNA
ccctttccactgacgatgtcattaacgccgccgaaaaaggcagcgatttgcagctctccggtaccacctccgatg

SEQ ID NO: 523600 - DNA, 75 bp, synthetic construct
  source 1..75: mol_type = other DNA
gtgcttgccatcaacaccattgccgtcgatgacatcatcaacgccacggagaaaggcgcggatctggcgatttct

SEQ ID NO: 523601 - DNA, 75 bp, synthetic construct
  source 1..75: mol_type = other DNA
aggctacagcgctaccattcagaacaacgggagctggagcgtgaatgtgccggcggcagacgttgcggcgcttgc

SEQ ID NO: 523602 - DNA, 75 bp, synthetic construct
  source 1..75: mol_type = other DNA
aagcaattacaccgtcagcgccacggtcaacgacaaagcgggcaaccccggcagcgccagccataatctggcggt

SEQ ID NO: 523603 - DNA, 75 bp, synthetic construct
  source 1..75: mol_type = other DNA
ggtagctggagcatcagcgttcccacctcagccctgggtgtgctgagtgcaagcaattacaccgtcagcgccacg

SEQ ID NO: 523604 - DNA, 75 bp, synthetic construct
  source 1..75: mol_type = other DNA
ctacaccaccacgctggacgcctccggtaactggactgtgggcattccggcggcggatgtcacggcgctggcgac

SEQ ID NO: 523605 - DNA, 75 bp, synthetic construct
  source 1..75: mol_type = other DNA
acgaacagcgtaggtaataccggtaacggcacgcgtgaaatcaccatcgacgcgaatctgcccggtctgcgggtc

SEQ ID NO: 523606 - DNA, 75 bp, synthetic construct
  source 1..75: mol_type = other DNA
ccgtcacgctcggcggggcgacttacactgccacggtgcaggcgaatttaagctggagtattaatgttccggcag

SEQ ID NO: 523607 - DNA, 75 bp, synthetic construct
  source 1..75: mol_type = other DNA
gctggtcggcgtttctccgttgatcaccattaacaccgtctccggcgatgacattatcagtggcgcagaaaaagg

SEQ ID NO: 523608 - DNA, 75 bp, synthetic construct
  source 1..75: mol_type = other DNA
gttcgccattgccattcgccatttcgccccttctggcaactggcgcacagtagcgcagacaattttccggctctg

SEQ ID NO: 523609 - DNA, 75 bp, synthetic construct
  source 1..75: mol_type = other DNA
gacccggcatgattactgcccccagtcgtccatgatccggggggtgatgtcaccgggtctggtggggcgctggta

SEQ ID NO: 523610 - DNA, 75 bp, synthetic construct
  source 1..75: mol_type = other DNA
tatacctattattttagctctcaccctaatatacacaacatctagcggaatatctatacctaataattggtttgt

SEQ ID NO: 523611 - DNA, 75 bp, synthetic construct
  source 1..75: mol_type = other DNA
tgtggtggtggtgatgctgatcgcacttaccgcactggtcggtgtactggcagcttcgtttaacgaatttatctc

SEQ ID NO: 523612 - DNA, 75 bp, synthetic construct
  source 1..75: mol_type = other DNA
tcatgattaaatcacattgtaaggataaaataataaacaatattgttattaatgctacctttgtttgttgtatcg

SEQ ID NO: 523613 - DNA, 75 bp, synthetic construct
  source 1..75: mol_type = other DNA
ttattattacttttaacctactgtagcataagaaattatatcggcagagtgtcttcatataattatttatcgctt

SEQ ID NO: 523614 - DNA, 75 bp, synthetic construct
  source 1..75: mol_type = other DNA
tactactcacatgatgacttataacggtgaatttgataaatttgccttgagtgagttcgaacggccatggacatt

SEQ ID NO: 523615 - DNA, 75 bp, synthetic construct
  source 1..75: mol_type = other DNA
aaagatttatgcaggagtgaaagaatatctacgggaatatattcgcacacttgattttcactacacggatcatct

SEQ ID NO: 523616 - DNA, 75 bp, synthetic construct
  source 1..75: mol_type = other DNA
gacaaatgcacactttataatttcctgagtagcatcaatgtttttattagttatttgagatgccctggagaagaa

SEQ ID NO: 523617 - DNA, 75 bp, synthetic construct
  source 1..75: mol_type = other DNA
aaaaatattgcgctaccgtctcacacccaccagcaacagaacccaccacaggaaaagacggtggtcagcattgcc

SEQ ID NO: 523618 - DNA, 75 bp, synthetic construct
  source 1..75: mol_type = other DNA
agccagctttgcatcccgttcccactcaacgaacatgagcttgatcagcttgataatatcattgagcggaagaag

SEQ ID NO: 523619 - DNA, 75 bp, synthetic construct
  source 1..75: mol_type = other DNA
ttcactgtcgatgagtctttacagggtttcgactcgtacccaggaaaaatacaatctgattgccaaacctcaaga

SEQ ID NO: 523620 - DNA, 75 bp, synthetic construct
  source 1..75: mol_type = other DNA
atttggggatggctgctcggcccggtagggatgctactttcggtgccattaaccagcgtgtgtaaaatctggatg

SEQ ID NO: 523621 - DNA, 75 bp, synthetic construct
  source 1..75: mol_type = other DNA
tcaaacgaaattgttgagaaaatggtgaagggcatccccatccttgaggaagaaccagcgccagagttacatctt

SEQ ID NO: 523622 - DNA, 75 bp, synthetic construct
  source 1..75: mol_type = other DNA
tgctttgacaggatgaaaaagaaaacgccggttgctgcgggttatgtgttccagatgtgtaagcaggctttgaaa

SEQ ID NO: 523623 - DNA, 75 bp, synthetic construct
  source 1..75: mol_type = other DNA
ggaagatattgcccagggtgccgcggcgagtgccacagtcacgatgctcggcaccgccactcaggctggtacgct

SEQ ID NO: 523624 - DNA, 75 bp, synthetic construct
  source 1..75: mol_type = other DNA
aatataatgaattatgtgaagctgcagaaggtcgtaattttggggctgttttttcctatagtgaaccagaagaac

SEQ ID NO: 523625 - DNA, 75 bp, synthetic construct
  source 1..75: mol_type = other DNA
tgttggagcaggtaatgctacagataaaagaatttccattggtacagaaagtgaatatactaataaaagtgtagg

SEQ ID NO: 523626 - DNA, 75 bp, synthetic construct
  source 1..75: mol_type = other DNA
gtcagccagtgggggcgtatcttatacagacgattagagcattcaacgccgtggacgttgcatgacctgcgccgc

SEQ ID NO: 523627 - DNA, 75 bp, synthetic construct
  source 1..75: mol_type = other DNA
tgagcacaatatatctcagggaatatcaatcaaaagttaagaggcagatattttcagactatcagtcagaggttg

SEQ ID NO: 523628 - DNA, 75 bp, synthetic construct
  source 1..75: mol_type = other DNA
cgcggaggcgctgccgctgcgcgagcaggtggcccgcctgaccgccaccggcgaacacctggcggcgcagctgca

SEQ ID NO: 523629 - DNA, 75 bp, synthetic construct
  source 1..75: mol_type = other DNA
aacccgaccaacgagcaggtccgtcagcacctcggcggcggctccctgtcccacatctccccggtgatgcgcgcg

SEQ ID NO: 523630 - DNA, 75 bp, synthetic construct
  source 1..75: mol_type = other DNA
gaggatttggggatattgattgtatttttgccgtgcacccgcttgatcataaggatgcccaggaagccatgagtg

SEQ ID NO: 523631 - DNA, 75 bp, synthetic construct
  source 1..75: mol_type = other DNA
atgcaaaacaaaaaaatatttttaattctacaggggcaaaacctggtggaaaatgtaggttatgtgccgataaat

SEQ ID NO: 523632 - DNA, 75 bp, synthetic construct
  source 1..75: mol_type = other DNA
ttacttgaaggggtaaacttacccacaaagaatgtttttatttatccattccctaaaaagactgttaacgatgaa

SEQ ID NO: 523633 - DNA, 75 bp, synthetic construct
  source 1..75: mol_type = other DNA
agccaaaaatatagaaaacatgatccccaaaaaatacatctctgctcacgaacataatttagacatcattgagca

SEQ ID NO: 523634 - DNA, 75 bp, synthetic construct
  source 1..75: mol_type = other DNA
agaattccgccgctgggtgctggatattcttgatcgagaaattcaacaatccccaatcacaaaacaattcactga

SEQ ID NO: 523635 - DNA, 75 bp, synthetic construct
  source 1..75: mol_type = other DNA
aggatttctctgtgaagaaaaaaatgttgaagaactcgttgaaaaaatcaagtttattaactcgctgggaacgcg

SEQ ID NO: 523636 - DNA, 75 bp, synthetic construct
  source 1..75: mol_type = other DNA
cagtctgggtcgtaaaaacttcctgttcttcggctctgaccatggtggtggagcgggagcgctactgtacagcct

SEQ ID NO: 523637 - DNA, 75 bp, synthetic construct
  source 1..75: mol_type = other DNA
ccgcctgccagaacgttactccacttcttcaggttgcggaacaccgcgaagccggtcgctttacttctatcgagc

SEQ ID NO: 523638 - DNA, 75 bp, synthetic construct
  source 1..75: mol_type = other DNA
acggcacatgtaaaattccggccgtggcaggatgataagtggagtcgagtattgacgcatttacgttctgaacgg

SEQ ID NO: 523639 - DNA, 75 bp, synthetic construct
  source 1..75: mol_type = other DNA
tttattgaagttaagccatcgataactggtttccctcgcgataaaaaagattttgatgatggtgaggatgtattg

SEQ ID NO: 523640 - DNA, 75 bp, synthetic construct
  source 1..75: mol_type = other DNA
attaccccccagcgaagcatctatcatcgcatgcgatatcgccacaaaatcaggcgctgtagagatcggttttct

SEQ ID NO: 523641 - DNA, 75 bp, synthetic construct
  source 1..75: mol_type = other DNA
gaactggaagtcggttattattcattatatagggttgttaatatctaaacctttacagataccatttttttctta

SEQ ID NO: 523642 - DNA, 75 bp, synthetic construct
  source 1..75: mol_type = other DNA
tacatgcttaatgatataaataattacaatttagaaatggtattaaattctattaatagaaaaattgaagcaggt

SEQ ID NO: 523643 - DNA, 75 bp, synthetic construct
  source 1..75: mol_type = other DNA
cccggagaggaaacttcatctttaccactgtgaccaccgtggactgccgcaggcgctcatcaccccggaaggcga

SEQ ID NO: 523644 - DNA, 75 bp, synthetic construct
  source 1..75: mol_type = other DNA
cggggagcttcacgccgctcctgagaatcgaaacagagaatggcgaacaggcgaaggcgcggcaccgtagcctgg

SEQ ID NO: 523645 - DNA, 75 bp, synthetic construct
  source 1..75: mol_type = other DNA
aatatcaaagacagtatatggcacattttgcggaagcgaatttgaatgcgcaactgaagatggctggttggagcg

SEQ ID NO: 523646 - DNA, 75 bp, synthetic construct
  source 1..75: mol_type = other DNA
aaagcgattcatctttcggcgttcgcgtccccgacattcccggctgcttctctggtggcaacaactatcaggatg

SEQ ID NO: 523647 - DNA, 75 bp, synthetic construct
  source 1..75: mol_type = other DNA
acattatttctgtttataaaattgccagaatgtctccagcaagacgaacagcgatgctggttgcatttgttcgtt

SEQ ID NO: 523648 - DNA, 75 bp, synthetic construct
  source 1..75: mol_type = other DNA
aggtaacgttcgccgcgccggtgaaatttattttaaaccactacatatggaagaaatgaaagagcgattcagata

SEQ ID NO: 523649 - DNA, 75 bp, synthetic construct
  source 1..75: mol_type = other DNA
ttgtgcagctgttactggcgctgttttttgccatcgtcctcaacccactggtcacctggtttattcgtcgcggtg

SEQ ID NO: 523650 - DNA, 75 bp, synthetic construct
  source 1..75: mol_type = other DNA
aaaatgggagttccctctattctattggtaagcgtaaactgaccgccgtatgtagccatcagacgagaattggta

SEQ ID NO: 523651 - DNA, 75 bp, synthetic construct
  source 1..75: mol_type = other DNA
aacgtctggcgcgatcagcaagaaacattactgacttacctgcaaagcgtgaaccgccccgggaatcctggagac

SEQ ID NO: 523652 - DNA, 75 bp, synthetic construct
  source 1..75: mol_type = other DNA
cgtttccgctctgtttgctgctggcgctcgatcactctgtgcaaccggctattgctggcaagctggtggcgttta

SEQ ID NO: 523653 - DNA, 75 bp, synthetic construct
  source 1..75: mol_type = other DNA
aaacattagattgctttttattggtgtattggatcgtgattttaaagggcttgatgttttccttaaccttatatc

SEQ ID NO: 523654 - DNA, 75 bp, synthetic construct
  source 1..75: mol_type = other DNA
tctaccgcacagagcgggcattgcagcttatctgcgataagctccagcaggtggaactgaagcgcgttccgcgcg

SEQ ID NO: 523655 - DNA, 75 bp, synthetic construct
  source 1..75: mol_type = other DNA
ctgatccgccgcatcgatcagtttgttgctgcacatcctgaatatggcagccgctccggttttctgtcccgcgtg

SEQ ID NO: 523656 - DNA, 75 bp, synthetic construct
  source 1..75: mol_type = other DNA
tctggtattctggatatactcatttctgataatgaactcaaagagagatttattgaggcacttaattccaataaa

SEQ ID NO: 523657 - DNA, 75 bp, synthetic construct
  source 1..75: mol_type = other DNA
ggctgggaaatatttaatagtaattttgaacggatgattaaagaaaataaggccatgctgctttgtaagtggggg

SEQ ID NO: 523658 - DNA, 75 bp, synthetic construct
  source 1..75: mol_type = other DNA
cacctattcaaagggggttttgattcagtcaaagagagttgatgaaggtattgcaatgacagcacaaggtcacaa

SEQ ID NO: 523659 - DNA, 75 bp, synthetic construct
  source 1..75: mol_type = other DNA
tcattgaaagtgagaaatatcgttttcatagttagtttgattttcatttttattggtgcaattattttaatagtc

SEQ ID NO: 523660 - DNA, 75 bp, synthetic construct
  source 1..75: mol_type = other DNA
tcactgggaaatcagcaatggaataacctgagtattgtttcgcaaccgacggcaaatggcaccctggttgaagcg

SEQ ID NO: 523661 - DNA, 75 bp, synthetic construct
  source 1..75: mol_type = other DNA
cataacgttacgtacgcctatgttgtcactgggaaatcagcaatggaataacctgagtattgtttcgcaaccgac

SEQ ID NO: 523662 - DNA, 75 bp, synthetic construct
  source 1..75: mol_type = other DNA
tagcgcaggcaaaagaactgaaggatgatgcatgggttatccttgaagggagcatcgttaaaaaagtgggtaatg

SEQ ID NO: 523663 - DNA, 75 bp, synthetic construct
  source 1..75: mol_type = other DNA
atggcaagaccagcaaaaagtaaagataatgaaaaagtaaaaaactttcttcaaggtaaaaacttcaaccgcata

SEQ ID NO: 523664 - DNA, 75 bp, synthetic construct
  source 1..75: mol_type = other DNA
agacatacatcagatggaaaaatcacaacaggtgtgtcatacaccacgtcagcggtggggacgggatactggtta

SEQ ID NO: 523665 - DNA, 75 bp, synthetic construct
  source 1..75: mol_type = other DNA
gctgtttggtctgctgacgtacctgacgaacctgtatttcaaaatcagagaggacaggcgtaaggcggcacgggg

SEQ ID NO: 523666 - DNA, 75 bp, synthetic construct
  source 1..75: mol_type = other DNA
caaaaagctggtcagttcagtaagcgggttgtgtgatgtaacatccagtttttccatggaggaaataaaatacac

SEQ ID NO: 523667 - DNA, 75 bp, synthetic construct
  source 1..75: mol_type = other DNA
tgctgatgacattagtttacctgagcgattaactaaacagttggaatatttaaggtcacataatttagatatggt

SEQ ID NO: 523668 - DNA, 75 bp, synthetic construct
  source 1..75: mol_type = other DNA
taggttcttcaattggtacagaaggatcaggagctataatccaagaacagttaaaaaatcaacaggagaagaaat

SEQ ID NO: 523669 - DNA, 75 bp, synthetic construct
  source 1..75: mol_type = other DNA
ccgccaacgctcaaaaaacagaatcagacaaaaacgcggcggcggcatcaaaaacagcagcggcaaactcagcga

SEQ ID NO: 523670 - DNA, 75 bp, synthetic construct
  source 1..75: mol_type = other DNA
actgcgttactaccagggcaaggaaacagagatcgccgcagccgtcgagtggtggaaagatttcggcggagatgg

SEQ ID NO: 523671 - DNA, 75 bp, synthetic construct
  source 1..75: mol_type = other DNA
ccatcaatggcaacacagttacaggcacgggaacaaacttttccgcgcctctttctctcatccgtgtagggtgca

SEQ ID NO: 523672 - DNA, 75 bp, synthetic construct
  source 1..75: mol_type = other DNA
gagtttggactcaatgtcatgatggttgatgactattttttaagaatatataaatatatacaattaataagaggg

SEQ ID NO: 523673 - DNA, 75 bp, synthetic construct
  source 1..75: mol_type = other DNA
ttgataccctgaaaagtcaggctgaaatgacaagatttggtactcaatatcaaattgacgtcaaacttcgggagt

SEQ ID NO: 523674 - DNA, 75 bp, synthetic construct
  source 1..75: mol_type = other DNA
cagcaaaaaacaggcgcgttgcaggtgaactacgctcctctgtttgttacgcaataaaaactggtgttttcgact

SEQ ID NO: 523675 - DNA, 75 bp, synthetic construct
  source 1..75: mol_type = other DNA
ttgttcttgatataaaacttgaaaactggtttttgtctgccggatacagacagaatgtgttagggcaggaatgtt

SEQ ID NO: 523676 - DNA, 75 bp, synthetic construct
  source 1..75: mol_type = other DNA
gctttgattatgctgcacagttccctgactcccctaaccttcaggcttttggggtaagtaaaaaagaaattacgg

SEQ ID NO: 523677 - DNA, 75 bp, synthetic construct
  source 1..75: mol_type = other DNA
tataggggaaaatcgactggcttcatctgtaacaaaagaagatttactctttatcaggaaagatttattgaccgg

SEQ ID NO: 523678 - DNA, 75 bp, synthetic construct
  source 1..75: mol_type = other DNA
gtgaaaaagtgccagcaagccggttaccactacaaagcggactccatcagggattcatgggcatcagccctgaga

SEQ ID NO: 523679 - DNA, 75 bp, synthetic construct
  source 1..75: mol_type = other DNA
tagtttttgataaacatggaatgccgagagaattggataaaaatacttgtgcaataactacatccctgcctgaaa

SEQ ID NO: 523680 - DNA, 75 bp, synthetic construct
  source 1..75: mol_type = other DNA
gtcttcagcaggcaatggcggacacctctgtccggggcgtactgctggatattgacagtccgggcgggcaggccg

SEQ ID NO: 523681 - DNA, 75 bp, synthetic construct
  source 1..75: mol_type = other DNA
ccggcagcggtgcggggtggcgtgtcacagacgtcggcagacggtgatgcggacgtgaaaatgctcatggccatg

SEQ ID NO: 523682 - DNA, 75 bp, synthetic construct
  source 1..75: mol_type = other DNA
tttatgctcctacgcgttctggtaaaggtgttggtattgttatacctaactgtgtgaattacccggattcgatgg

SEQ ID NO: 523683 - DNA, 75 bp, synthetic construct
  source 1..75: mol_type = other DNA
ctcggcgttgaggaagttgtcgccaaagttttcgatgtcaatgagccacttagtcaaatcaatcaggcaaaactc

SEQ ID NO: 523684 - DNA, 75 bp, synthetic construct
  source 1..75: mol_type = other DNA
tctgtataaatatccattaaaccctgttcggtttatagattctttgggtttaaaattccatgttaacggtgatcc

SEQ ID NO: 523685 - DNA, 75 bp, synthetic construct
  source 1..75: mol_type = other DNA
cagtataccagctggcacgcgaacagcatcctgaacgttggggaaagcatctacgtaactgggactacatatcag

SEQ ID NO: 523686 - DNA, 75 bp, synthetic construct
  source 1..75: mol_type = other DNA
caatgcgcagtcaggtgataagggggcttatacctgcgaggtaacggattctgcagaacagccgcagagcattac

SEQ ID NO: 523687 - DNA, 75 bp, synthetic construct
  source 1..75: mol_type = other DNA
ggcgtcgtccgagatttccatgtcgggtaatttttatctgaatcaggcccagaacgccctgcgtgatgcttatga

SEQ ID NO: 523688 - DNA, 75 bp, synthetic construct
  source 1..75: mol_type = other DNA
gaaaaaaagaaaaactacaaactgaagcaaataaagcgtggaataatatcttctcccgcattaataacaataagg

SEQ ID NO: 523689 - DNA, 75 bp, synthetic construct
  source 1..75: mol_type = other DNA
aagccaaaagttcctgcccctcctttgatcgagtgggcagcccgaaagatggcattcaattgttcggcatctggc

SEQ ID NO: 523690 - DNA, 75 bp, synthetic construct
  source 1..75: mol_type = other DNA
tggcgttcatcattgatgtgtttgccggatgtatcgtggggtggcgagtctcatcgtctatggaaacgacattcg

SEQ ID NO: 523691 - DNA, 75 bp, synthetic construct
  source 1..75: mol_type = other DNA
gcgtaaagtctggcgccagttgttacgcgaaggtatcagggtggccagatgtacagtggctcgtctcatggcggt

SEQ ID NO: 523692 - DNA, 75 bp, synthetic construct
  source 1..75: mol_type = other DNA
gtgcgcagtgcgaaacttgcgggtatgtgccctgtgcagaccgaccaacatgttctgaatgtcgtgtcgcatcag

SEQ ID NO: 523693 - DNA, 75 bp, synthetic construct
  source 1..75: mol_type = other DNA
ttggctcatgggctgcaagccctcagagttactggcagtacgggcattccgcgctgtgcgcctccgcgtttcagg

SEQ ID NO: 523694 - DNA, 75 bp, synthetic construct
  source 1..75: mol_type = other DNA
cgttagctgggtcccactaacacgtgatggtggtcaaatgcttaatcgccgctttggtctttacaaccttaccag

SEQ ID NO: 523695 - DNA, 75 bp, synthetic construct
  source 1..75: mol_type = other DNA
aatttctgtgggtcaatcaggcggttgcgattggcgataatctcgaggcggatttaggccaagtctataacatta

SEQ ID NO: 523696 - DNA, 75 bp, synthetic construct
  source 1..75: mol_type = other DNA
atttctatattaagactacaaccttcgattcattaattagtgtctttgaagcagggagagaggcagatgattcga

SEQ ID NO: 523697 - DNA, 75 bp, synthetic construct
  source 1..75: mol_type = other DNA
atatttttttaggccaaataagacaaggcatttcactttcgttaggcttactggctatatcttatttgttggagg

SEQ ID NO: 523698 - DNA, 75 bp, synthetic construct
  source 1..75: mol_type = other DNA
cgaagaaaaagaatttgtctggcgttcaccgcaaacttatctcaatccgcagttcctggaacgttgcgccggagt

SEQ ID NO: 523699 - DNA, 75 bp, synthetic construct
  source 1..75: mol_type = other DNA
ggctgctggtgtagtcgcagatgatctacaagaccaatatattccagagctattaaagctatctgctcttggtga

SEQ ID NO: 523700 - DNA, 75 bp, synthetic construct
  source 1..75: mol_type = other DNA
ggttagcagatgaagtacaggtagttgtttctgaattcgttgcagatggtgagatcctaattggtgatttcagta

SEQ ID NO: 523701 - DNA, 75 bp, synthetic construct
  source 1..75: mol_type = other DNA
cagggcgcagctgattgcccgtacagagattggacgtgctaccggcgcgctgacgcaggccagagccctttcggt

SEQ ID NO: 523702 - DNA, 75 bp, synthetic construct
  source 1..75: mol_type = other DNA
tatcgtttttcatgacgcatcaatttactggacgaaatccgcagctgattttatatatagatgtaggaataaaat

SEQ ID NO: 523703 - DNA, 75 bp, synthetic construct
  source 1..75: mol_type = other DNA
cgttgccggagcgtcagcctctgcctcgaccggatttgcgccagtataaaacggctctcgggccggtggcggtat

SEQ ID NO: 523704 - DNA, 75 bp, synthetic construct
  source 1..75: mol_type = other DNA
atggataataaaaatctattaaaagatatggtacgtgccattaaaactggcgataaatctgctcttgaagcatat

SEQ ID NO: 523705 - DNA, 75 bp, synthetic construct
  source 1..75: mol_type = other DNA
ctgcaacatttcttctgatgtggatattcacccttccaggtgatttctatagaaaaaagccagacattgatacaa

SEQ ID NO: 523706 - DNA, 75 bp, synthetic construct
  source 1..75: mol_type = other DNA
aattgacgtgcgcaataatgaaaatatggtctggaacagtattaacctgaagcgcgttcgtccggttgtactgcc

SEQ ID NO: 523707 - DNA, 75 bp, synthetic construct
  source 1..75: mol_type = other DNA
tgccgtcagctgagggacgcaacggatgcgtatctccgtacacagagccggcggctgaaactgagcacccgccgc

SEQ ID NO: 523708 - DNA, 75 bp, synthetic construct
  source 1..75: mol_type = other DNA
ttcacaactgcagttgtaggtaatagtaaatttatattagatttgcacctacggaatggttattttaaaaattca

SEQ ID NO: 523709 - DNA, 75 bp, synthetic construct
  source 1..75: mol_type = other DNA
tccgttgtctattttggttcttactgcaaaacaccttgaaaaccaatcttcacagaagcagacaaagctatttct

SEQ ID NO: 523710 - DNA, 75 bp, synthetic construct
  source 1..75: mol_type = other DNA
caacccggaaaccggtgggcaaattgatgtgcgcaataatgaaaatatggtctggaacagcattaacctgaaacg

SEQ ID NO: 523711 - DNA, 75 bp, synthetic construct
  source 1..75: mol_type = other DNA
ttccgctctcgggagaatgggcaaaagacgaatctggtaagtttaagccctcgcgtagctataaactacacattg

SEQ ID NO: 523712 - DNA, 75 bp, synthetic construct
  source 1..75: mol_type = other DNA
taattcgtattgatgaagatgaatcaattgatcatggacaaaaaactagagatacatatcaccttgctgactttt

SEQ ID NO: 523713 - DNA, 75 bp, synthetic construct
  source 1..75: mol_type = other DNA
ggcggtggtatccttgattgggataaagcatctgcccctattaggacacctttattatcaaagtcttatatagaa

SEQ ID NO: 523714 - DNA, 75 bp, synthetic construct
  source 1..75: mol_type = other DNA
gctgcagccacacatcctgaaattaaattattacaatttaaattaataccagggcagggtattaatagactggcc

SEQ ID NO: 523715 - DNA, 75 bp, synthetic construct
  source 1..75: mol_type = other DNA
gtataaaaaatattggttatgttgcttctttatagctgtttttgttgccctgtttttaatcgctggctgtgtaaa

SEQ ID NO: 523716 - DNA, 75 bp, synthetic construct
  source 1..75: mol_type = other DNA
attaattcgtcaactggcgcggcaaggtaaaacacgaactattcgggaacaggcaatgaagaagttggatatgat

SEQ ID NO: 523717 - DNA, 75 bp, synthetic construct
  source 1..75: mol_type = other DNA
cgtatcgctcagcagcacaatctctgtttaaacaatcatcaatcacgacgtttaaccagtgaattatgtaaagaa

SEQ ID NO: 523718 - DNA, 75 bp, synthetic construct
  source 1..75: mol_type = other DNA
gcagctctactaagaggcatgtctgtagaagaaatagctgaagcgtgtggggtttctgcacacgcagcagattat

SEQ ID NO: 523719 - DNA, 75 bp, synthetic construct
  source 1..75: mol_type = other DNA
gtggtgagctattagtaccggctattcatgccaatgttctgaaaggtatgagtgctgaaaatgtagctgaggcat

SEQ ID NO: 523720 - DNA, 75 bp, synthetic construct
  source 1..75: mol_type = other DNA
gccggtgttctggacgatgccgacacaactgctttccggtacggcgctggctgcggggattggttttgtaaacct

SEQ ID NO: 523721 - DNA, 75 bp, synthetic construct
  source 1..75: mol_type = other DNA
tacacaaaacacttaccagcagaaaattaaaataggggtagtgcaggttgggctttattatcaattgggagggaa

SEQ ID NO: 523722 - DNA, 75 bp, synthetic construct
  source 1..75: mol_type = other DNA
ttgataaacaaagcaaaaagtaattatatcgcattttgcgatgatgatatatattatttcccgaatgcaatttca

SEQ ID NO: 523723 - DNA, 75 bp, synthetic construct
  source 1..75: mol_type = other DNA
tgcaggtagtcgggttgtgaaatatcatgtgggatatatggggcaatttggtgaggcgctcaccgaggcctggtc

SEQ ID NO: 523724 - DNA, 75 bp, synthetic construct
  source 1..75: mol_type = other DNA
gatgaacgggggacaactaatgatactcatatcattaatcacggccaccagactgtatttggtggggtgtctaat

SEQ ID NO: 523725 - DNA, 75 bp, synthetic construct
  source 1..75: mol_type = other DNA
gggcaatatacccttggtcggtcaaaagatgagtttcaggctctggcccgggcagaagatctccaggtcgctggc

SEQ ID NO: 523726 - DNA, 75 bp, synthetic construct
  source 1..75: mol_type = other DNA
ctcatattatcaaccatggccagcagaatgtttatggcggggtatctaatggaagtcttattgaatctggtggat

SEQ ID NO: 523727 - DNA, 75 bp, synthetic construct
  source 1..75: mol_type = other DNA
tggtttctatctggacggtgtcgtgaagctgaaccgttttgaaagtaacgtagccggtaaaatgagcagcggtgg

SEQ ID NO: 523728 - DNA, 75 bp, synthetic construct
  source 1..75: mol_type = other DNA
acgattgaaggcggaactcagtctctgaatagtaagtcaacggcaaaaaatacgcagatctattctggtggcacg

SEQ ID NO: 523729 - DNA, 75 bp, synthetic construct
  source 1..75: mol_type = other DNA
cggtacgaatagtgaaggtgcattctccatccacaataaagtggcagacaatgtgttgctggaaaatggaggcca

SEQ ID NO: 523730 - DNA, 75 bp, synthetic construct
  source 1..75: mol_type = other DNA
tcggtgcttaatgacggcggcacactcgatgtgcgggagaaaggcagcgcaacggggatacagcagagtagccag

SEQ ID NO: 523731 - DNA, 75 bp, synthetic construct
  source 1..75: mol_type = other DNA
gctggctcattaacagtcgtcactggttcccgcgcagttgacacgattattaatgccaacggcaaaatggatgtt

SEQ ID NO: 523732 - DNA, 75 bp, synthetic construct
  source 1..75: mol_type = other DNA
cctcagtatctgagagagtacgtctgtgcggaactggacgaaccgggaccattcacccgagcgctgtggtttcat

SEQ ID NO: 523733 - DNA, 75 bp, synthetic construct
  source 1..75: mol_type = other DNA
gtcgccgctcagtactttccttattgatatctgccttgatatatgccccgcccgggatggcggcctttactacta

SEQ ID NO: 523734 - DNA, 75 bp, synthetic construct
  source 1..75: mol_type = other DNA
gggagatcgtcaaaacaaaagccactgcgactggcacgatgcttaccggcggtgaacaaatcgtcgagggtgtgg

SEQ ID NO: 523735 - DNA, 75 bp, synthetic construct
  source 1..75: mol_type = other DNA
tagttaatgagggcggtctggctgaaaactcggtgcttaatgaaggcggcactctcgatgtgcgggagaaaggca

SEQ ID NO: 523736 - DNA, 75 bp, synthetic construct
  source 1..75: mol_type = other DNA
gcatgccagtattttaaaaggtatgacggctgaggatgttgctgaggcatgcggagtttcattagtggcagcgcg

SEQ ID NO: 523737 - DNA, 75 bp, synthetic construct
  source 1..75: mol_type = other DNA
aatggatcgtggtggaataaacaggaacgtatacctgataaattttttgtattatgtcggaactatgatgtgaac

SEQ ID NO: 523738 - DNA, 75 bp, synthetic construct
  source 1..75: mol_type = other DNA
atgaaatggttaattatcagaattgtcatgttctttcttctgtctggttaccagaatatttcccattctgctcat

SEQ ID NO: 523739 - DNA, 75 bp, synthetic construct
  source 1..75: mol_type = other DNA
accggtacaactgctattgcagccagattccggtgctgctcaacgacgacggcagtatcttcaatgaggggctgg

SEQ ID NO: 523740 - DNA, 75 bp, synthetic construct
  source 1..75: mol_type = other DNA
cgattttgccagtttccgcacgctttcactttctccggtgctggcgtcggcggtgtttctgctggcctttttcgg

SEQ ID NO: 523741 - DNA, 75 bp, synthetic construct
  source 1..75: mol_type = other DNA
ctacttaatgacgatggcagtatcttcaatgaagggttggcagataagctgaagaaagaacgccagaagtggtcc

SEQ ID NO: 523742 - DNA, 75 bp, synthetic construct
  source 1..75: mol_type = other DNA
ttctgccaaatggcatgcatataaagtctgggatttagacaagcaagagtgggaaacctgcacccttgcttttca

SEQ ID NO: 523743 - DNA, 75 bp, synthetic construct
  source 1..75: mol_type = other DNA
ctgaaaacatatttaaatatgtaaatcatttgataccagataattttcatattggtatcaatgttaattcagaca

SEQ ID NO: 523744 - DNA, 75 bp, synthetic construct
  source 1..75: mol_type = other DNA
attggttctatcgtattggaaccttttttaaaactatcgcgtttgattaagtttgctccttataaagattatgtg

SEQ ID NO: 523745 - DNA, 75 bp, synthetic construct
  source 1..75: mol_type = other DNA
cagtctggcttcgctgtttttactcggtctggacagactggctattaagctttccggcatcacatcgctggtggg

SEQ ID NO: 523746 - DNA, 75 bp, synthetic construct
  source 1..75: mol_type = other DNA
atgacgattatgttcgttctgttcttgagtatgctatttatatgataaccatgttacgcgtttttgttatttctc

SEQ ID NO: 523747 - DNA, 75 bp, synthetic construct
  source 1..75: mol_type = other DNA
tattgacaaactggtaaatacaaataatggaactgctcttccttttactttacaatttagctttaatcttccgtt

SEQ ID NO: 523748 - DNA, 75 bp, synthetic construct
  source 1..75: mol_type = other DNA
agaatactcatgatatcaataacaaggaaatgatcttcagcgcattaaaagaaatatatgatggagatcctggtt

SEQ ID NO: 523749 - DNA, 75 bp, synthetic construct
  source 1..75: mol_type = other DNA
ttacctattacgattctgtataaccggtcaggttataaagagactgcggagtcagccatcattcttgatgccatt

SEQ ID NO: 523750 - DNA, 75 bp, synthetic construct
  source 1..75: mol_type = other DNA
tccgtactatcattaatgacaacatagttgagaagactcatgatgatataaataatgctgaatttactgatggta

SEQ ID NO: 523751 - DNA, 75 bp, synthetic construct
  source 1..75: mol_type = other DNA
aggtaaaattgaagaaaggcttcaaaattgccagacggaatatcaaaatgaaattaatcaactatctgcgttagg

SEQ ID NO: 523752 - DNA, 75 bp, synthetic construct
  source 1..75: mol_type = other DNA
tgcgtcctcagatctaccagagcacaagagaatggcgagagaaagaggtgcaattggctccactaatcgagcaga

SEQ ID NO: 523753 - DNA, 75 bp, synthetic construct
  source 1..75: mol_type = other DNA
aatctgaagtaaacatcataaatagtattctagcgaataatgagaactgtaataattattgcaacagaataatct

SEQ ID NO: 523754 - DNA, 75 bp, synthetic construct
  source 1..75: mol_type = other DNA
tccacgtattgcggcattccagcatttattcacaagcgctgatttacatgcccgtatctataacggacaaatagt

SEQ ID NO: 523755 - DNA, 75 bp, synthetic construct
  source 1..75: mol_type = other DNA
gcaataagatatgattttcaagtggacgatgcaaaatataaatgcgaccatctaaaagaaatagtttctacttta

SEQ ID NO: 523756 - DNA, 75 bp, synthetic construct
  source 1..75: mol_type = other DNA
caaaatcgccagactgaatatcaaaatgaaattaatcaaccatctgcgccaggtgttaattttgatgatatttaa

SEQ ID NO: 523757 - DNA, 75 bp, synthetic construct
  source 1..75: mol_type = other DNA
gatacagacgatattacttttgatattgatattgaaaatcaagaaccaacaaaatcacctgcgaacgatgaaaac

SEQ ID NO: 523758 - DNA, 75 bp, synthetic construct
  source 1..75: mol_type = other DNA
aaaataaaaacggaaatgattacttatctctcggttactacgatcaggacgactaccacattcaaagaggaattc

SEQ ID NO: 523759 - DNA, 75 bp, synthetic construct
  source 1..75: mol_type = other DNA
cagactatattactattggtatcgataaccaagaaccaataaaattacttgcgagctataaagacaaagaactcg

SEQ ID NO: 523760 - DNA, 75 bp, synthetic construct
  source 1..75: mol_type = other DNA
caaaatcgccaggctaaatatcaaaatgaaattaatcaactatctgcattgggtgttaattttgatgataattaa

SEQ ID NO: 523761 - DNA, 75 bp, synthetic construct
  source 1..75: mol_type = other DNA
aatattcgcatcctaccttcattattactgagtatggtgcaggttttggtttagccgataaaaaatttaatgatg

SEQ ID NO: 523762 - DNA, 75 bp, synthetic construct
  source 1..75: mol_type = other DNA
gaaaaccctcaagctggagtcgagcagctttattgatgacgatctgcgtgaaagctattccgatgtgctgtggtc

SEQ ID NO: 523763 - DNA, 75 bp, synthetic construct
  source 1..75: mol_type = other DNA
tcctctcatccggaactgtgatacaaatcctgcatacaggattgaccgccggttcctgcaaatggcacattttca

SEQ ID NO: 523764 - DNA, 75 bp, synthetic construct
  source 1..75: mol_type = other DNA
tagcattccttgctctaaatcaccctatgcctaatgattatgacatcacacaggaacttatcaataaatatgacg

SEQ ID NO: 523765 - DNA, 75 bp, synthetic construct
  source 1..75: mol_type = other DNA
tcaagtacatcaaatctctgcctctcgaggccgcagacagggtgtacgacatccagaacaaagcgatagaggctg

SEQ ID NO: 523766 - DNA, 75 bp, synthetic construct
  source 1..75: mol_type = other DNA
gcgggtttgaacgacgcaaatatgcccgatgtgcaggtttatcgggcatgagttttgtgcacaaattattaatca

SEQ ID NO: 523767 - DNA, 75 bp, synthetic construct
  source 1..75: mol_type = other DNA
tctcaaaagtaatattgagcgttctgatattattgattttaggatcaatgaacaaagaaacctaccttcagaaat

SEQ ID NO: 523768 - DNA, 75 bp, synthetic construct
  source 1..75: mol_type = other DNA
cgctgaagatgattctccctatgtacattccgatgagagttatagacacaaagatgattattgggcaagggataa

SEQ ID NO: 523769 - DNA, 75 bp, synthetic construct
  source 1..75: mol_type = other DNA
ccgccagaagtcgagaaagcgatggaagctaatcaccgtcgcccggcgagtgtttataaggacccagcatcatga

SEQ ID NO: 523770 - DNA, 75 bp, synthetic construct
  source 1..75: mol_type = other DNA
tgcaggggcgatatatcactcaggatccgattggactgaaggggggatggaacctgtatggatatcaattgaatc

SEQ ID NO: 523771 - DNA, 75 bp, synthetic construct
  source 1..75: mol_type = other DNA
ctacaccgtccctccagcgccggtatctgtgcccgctgcgatggaaatggatgatgactttgacagcgcgtttga

SEQ ID NO: 523772 - DNA, 75 bp, synthetic construct
  source 1..75: mol_type = other DNA
atagctggttggcattctggctcgacgggcaatggcgacaagcactgatcgccacgttgacttcatcgctgatcg

SEQ ID NO: 523773 - DNA, 75 bp, synthetic construct
  source 1..75: mol_type = other DNA
atggcttaggagtatatcagttggttgaagattttttgtttaaatgtgatgaaaatattgtagtatccaatatag

SEQ ID NO: 523774 - DNA, 75 bp, synthetic construct
  source 1..75: mol_type = other DNA
gatgatcgtctccacgtcaggcaaattaagacaggaatgatgattgctatccccctgtcactcagccttcctgtc

SEQ ID NO: 523775 - DNA, 75 bp, synthetic construct
  source 1..75: mol_type = other DNA
agagctgaagccaaacacgatgaaggtcaggcgaaatcagatcgccactattaatgatgagttcggccgcacgcc

SEQ ID NO: 523776 - DNA, 75 bp, synthetic construct
  source 1..75: mol_type = other DNA
tatggggtacttcgagcgacttacctctgatgaaaaagaagtcgtgtttagtgattacctgcgcactctcgctga

SEQ ID NO: 523777 - DNA, 75 bp, synthetic construct
  source 1..75: mol_type = other DNA
cggctgccacacctgttcagttacctgtaaaaacgtctggaccagccgtgaaggcgtggaatacgcgtggttcaa

SEQ ID NO: 523778 - DNA, 75 bp, synthetic construct
  source 1..75: mol_type = other DNA
ataaccctggcggtgcttataacccgttgttcctttatggcggcacgggtttgggtaaaactcacctgctgcatg

SEQ ID NO: 523779 - DNA, 75 bp, synthetic construct
  source 1..75: mol_type = other DNA
ttgaaatcattattcaatcggttaacggaaaaagcggttagtcggacagctttcgtcgaacaccttggtcaggaa

SEQ ID NO: 523780 - DNA, 75 bp, synthetic construct
  source 1..75: mol_type = other DNA
cggggctggtattggtgctggtctgggtggggcatttgggaagtatgcgccagttggtgtagataaagtattaaa

SEQ ID NO: 523781 - DNA, 75 bp, synthetic construct
  source 1..75: mol_type = other DNA
cagcatgtttacccactctgtaatcaaactctctgataatgctcaactgacaagcactgccggtttgcaatcgga

SEQ ID NO: 523782 - DNA, 75 bp, synthetic construct
  source 1..75: mol_type = other DNA
aaaaataaacaaagttattatactctgaacggtgcttatagttatcttactggggggattgttcctacgccatca

SEQ ID NO: 523783 - DNA, 75 bp, synthetic construct
  source 1..75: mol_type = other DNA
ccggcctgtattacaaccgccaccgctattatgacccgctgcaggggcgatatatcactcaggatccgattggac

SEQ ID NO: 523784 - DNA, 75 bp, synthetic construct
  source 1..75: mol_type = other DNA
cacacagatgtacggtaagccggtgagtgaactgagcgagacagagaagcagacggtctcgacactggcaacggt

SEQ ID NO: 523785 - DNA, 75 bp, synthetic construct
  source 1..75: mol_type = other DNA
tacaacaggtatgatggctcccgatcgtggtgtccttgcgaacacaggtatcgcaatgggtggggcattctttac

SEQ ID NO: 523786 - DNA, 75 bp, synthetic construct
  source 1..75: mol_type = other DNA
gttactataactacatttggaccatcaactactgttgtatcgtcaacaacaccaataacattgggcgcaaacgta

SEQ ID NO: 523787 - DNA, 75 bp, synthetic construct
  source 1..75: mol_type = other DNA
gggactggcatctaaatatggacacttaaataatggcggatatggagcgagacccaacaaaccgcctacgcccga

SEQ ID NO: 523788 - DNA, 75 bp, synthetic construct
  source 1..75: mol_type = other DNA
cggcaggcaggacaacagagtacagcccggatgtggtgacgggcctcatcacgcgcatcaccacgccggatggca

SEQ ID NO: 523789 - DNA, 75 bp, synthetic construct
  source 1..75: mol_type = other DNA
gacaggaatactggcagaccgatgaggtcgaacgtttattacagttcggctataacaacaactggcgaaacatct

SEQ ID NO: 523790 - DNA, 75 bp, synthetic construct
  source 1..75: mol_type = other DNA
cgccctccgggtagttgcactggggcggcgtaactacatgttcttcggctctgatggaggaggcgagagtgcggc

SEQ ID NO: 523791 - DNA, 75 bp, synthetic construct
  source 1..75: mol_type = other DNA
aatccacctgtaccactgcgaccatcgcggcctgccgctggcgcttgtcagcacggaaggggcaacagaatggtg

SEQ ID NO: 523792 - DNA, 75 bp, synthetic construct
  source 1..75: mol_type = other DNA
gcagaatacgatgaatggggcaacctgctgaatgaagagaacccgcaccagctgcagcagctcatccgcctgccg

SEQ ID NO: 523793 - DNA, 75 bp, synthetic construct
  source 1..75: mol_type = other DNA
tccccaaatctacatggacgcgatggcttacgattatataagccccacgcgttgggatgaggggattaatgcgct

SEQ ID NO: 523794 - DNA, 75 bp, synthetic construct
  source 1..75: mol_type = other DNA
aaacctccgttcagttacggttatcactggcgctgggtatcgctatcctgcttaccgccgttatttccggaggga

SEQ ID NO: 523795 - DNA, 75 bp, synthetic construct
  source 1..75: mol_type = other DNA
atgcgtttgccgactttaccctgtcccgtttttccagcgaacaactccggcagtggcttaagcaagccgtggata

SEQ ID NO: 523796 - DNA, 75 bp, synthetic construct
  source 1..75: mol_type = other DNA
cagaccgatgtagaccttagcattggagaagtgcgcgacgaaagcggctttacgcctgaggtcttgcagttacaa

SEQ ID NO: 523797 - DNA, 75 bp, synthetic construct
  source 1..75: mol_type = other DNA
atacctcgacgcttgccgatcctggcgtagtcgagaagctgcttgaagagaagcaggctatcgcgatgccatcgt

SEQ ID NO: 523798 - DNA, 75 bp, synthetic construct
  source 1..75: mol_type = other DNA
ggcccgcgaccccacttttcagctggaaacgcccatgcatgaaggttttcagaacgtaatttccggcggagaatc

SEQ ID NO: 523799 - DNA, 75 bp, synthetic construct
  source 1..75: mol_type = other DNA
gcactgtacgctatcgagtctgagatccgcggcagtccggcagaagagcgactggcggtcagaaaagccagaacg

SEQ ID NO: 523800 - DNA, 75 bp, synthetic construct
  source 1..75: mol_type = other DNA
gaacggtaccgctaatgcagtcgttgtatgagtggctccaggggcagatgagcacgctgtcgcgtcactcggata

SEQ ID NO: 523801 - DNA, 75 bp, synthetic construct
  source 1..75: mol_type = other DNA
atttctgaggcgtttcagttttttgactcacaaaacagccgtggccgcgacttaaacccgcacgacttactcaag

SEQ ID NO: 523802 - DNA, 75 bp, synthetic construct
  source 1..75: mol_type = other DNA
atggtgcggatgcacttccgtttataccaaaatgtgtcgcgagaaaatattagtgatgcgatgactggactgtat

SEQ ID NO: 523803 - DNA, 75 bp, synthetic construct
  source 1..75: mol_type = other DNA
acaacacatgcaccatctttacttaatagagtagagcctgaaaatataaggtatttccgtcttaatgataataaa

SEQ ID NO: 523804 - DNA, 75 bp, synthetic construct
  source 1..75: mol_type = other DNA
caaaaatggaagacgataagttaagagatgatagtcctgaagttcttaatgaaattatcgaaacagtaagaggat

SEQ ID NO: 523805 - DNA, 75 bp, synthetic construct
  source 1..75: mol_type = other DNA
tttaagcatttggtctcaaatgaagcagaccagatcccatactgtatagcaaaattaaaagctaaatggacaaaa

SEQ ID NO: 523806 - DNA, 75 bp, synthetic construct
  source 1..75: mol_type = other DNA
tttggtcgttactctgtaattctaataactgcgacattacttcaagtcgtgacagattatggttttatgtttatc

SEQ ID NO: 523807 - DNA, 75 bp, synthetic construct
  source 1..75: mol_type = other DNA
aacgttgcattaaaaattttatatttattgccattcttaggcggcgcgataatttttaaaatatacttaaaaagc

SEQ ID NO: 523808 - DNA, 75 bp, synthetic construct
  source 1..75: mol_type = other DNA
cgcgccccggtaggccaggtgatgaaatccatcgtcgccgagcaaattaagtacatcaaatcgctgcctcttgag

SEQ ID NO: 523809 - DNA, 75 bp, synthetic construct
  source 1..75: mol_type = other DNA
gtccgttaaactcaggctacctcagcattcgtgtctcgttatccattgatattctttactttatcacgtcttcgt

SEQ ID NO: 523810 - DNA, 75 bp, synthetic construct
  source 1..75: mol_type = other DNA
ggccgcgtggtgaaaccggcgggcaggggccacggggggaacggggtgagcaggggcctgtcggaccgaaaggtg

SEQ ID NO: 523811 - DNA, 75 bp, synthetic construct
  source 1..75: mol_type = other DNA
aatgcgatagtccggatcagtgcaggtgatgaccggccctgggatatgttttatggcacggactgcacctgcgtg

SEQ ID NO: 523812 - DNA, 75 bp, synthetic construct
  source 1..75: mol_type = other DNA
gaaacgaaaatttgtggccagccgactggcgtcacagatgtttgcctgctggctggaagaagcccttattcgtgg

SEQ ID NO: 523813 - DNA, 75 bp, synthetic construct
  source 1..75: mol_type = other DNA
cgtaccggggatggggcggcggggcagcccctgcttgataaggttaacagcacactgaatgcggatgaaatccgc

SEQ ID NO: 523814 - DNA, 75 bp, synthetic construct
  source 1..75: mol_type = other DNA
cagccggtgcgaaaaatgcttaccattattttgcacagagtgctgatcctgatgtgctggatgtgaaagcctacg

SEQ ID NO: 523815 - DNA, 75 bp, synthetic construct
  source 1..75: mol_type = other DNA
gttcaggatgatgactggccgggttacagtgtcagtaactggacacggattacggcgactctgccctccggaaga

SEQ ID NO: 523816 - DNA, 75 bp, synthetic construct
  source 1..75: mol_type = other DNA
aaaaagcgtttgaatatatcgccggggtgggagatggcggtaaaaatcccctgaacaccatcatgaaaggctacg

SEQ ID NO: 523817 - DNA, 75 bp, synthetic construct
  source 1..75: mol_type = other DNA
ggtggtgccgtgccgagtggattggtgccggtcgcatggcgattgatggccttaaggaagtgcaggaagcggtga

SEQ ID NO: 523818 - DNA, 75 bp, synthetic construct
  source 1..75: mol_type = other DNA
ggtaacaaagttaacgttggccattctcaaaaaatatataagcattttaaggatctcgaaggtaaaattgaagaa

SEQ ID NO: 523819 - DNA, 75 bp, synthetic construct
  source 1..75: mol_type = other DNA
gaaaggcttcaaaatcgccaggctgaatatcaaaatgaaattaatcaaccatctgcgccaggtgttaattttgat

SEQ ID NO: 523820 - DNA, 75 bp, synthetic construct
  source 1..75: mol_type = other DNA
tgatagtctcacccaatattgtagtgaaaacgccaggagtgcttcagcgtggtttgaaagcagtaaagctatcat

SEQ ID NO: 523821 - DNA, 75 bp, synthetic construct
  source 1..75: mol_type = other DNA
aagcaaaccaacggacttatttacctggcacggtaaagataaaaaatacaacactctcgccattgtaattaaaaa

SEQ ID NO: 523822 - DNA, 75 bp, synthetic construct
  source 1..75: mol_type = other DNA
gatacagacgatattacttttgatattgatattgatattgatattgatattgatattgaaaatcaagaaccaata

SEQ ID NO: 523823 - DNA, 75 bp, synthetic construct
  source 1..75: mol_type = other DNA
aggaatgcttcagcgtcgtttgaaagcaataaagctatcatggcagaattatttgcaacaggtataaatcatcaa

SEQ ID NO: 523824 - DNA, 75 bp, synthetic construct
  source 1..75: mol_type = other DNA
atgtcgaaaataaattttgtgacactattgttttttattttaaatattcaaaatgcaattggtaaaaatgaagat

SEQ ID NO: 523825 - DNA, 75 bp, synthetic construct
  source 1..75: mol_type = other DNA
gctctgtctctcagtttttacaccatggacaacggggaagtaccagatgaaatcctcgtcaccaaatcagttgat

SEQ ID NO: 523826 - DNA, 75 bp, synthetic construct
  source 1..75: mol_type = other DNA
gtatggtgcgatctcgatagctggttcgacttctctgatatggaaaaatttcatgaaactttacgaaccagcccc

SEQ ID NO: 523827 - DNA, 75 bp, synthetic construct
  source 1..75: mol_type = other DNA
tgagcgatgctcaggggctccgtgaccttgcgattgagcaattaggtacagatgaccgtgaaaaccctgtgacgg

SEQ ID NO: 523828 - DNA, 75 bp, synthetic construct
  source 1..75: mol_type = other DNA
ttgattcagctcgttcagccaatagtgatcaacctctgggaagaacaacaaaactacagtcagatttaaatacgg

SEQ ID NO: 523829 - DNA, 75 bp, synthetic construct
  source 1..75: mol_type = other DNA
cattagcggtatcaaccgcgtgtgttgctgcccccagttatgatgacccctacgggccatcacaaaatgattttg

SEQ ID NO: 523830 - DNA, 75 bp, synthetic construct
  source 1..75: mol_type = other DNA
tccagggttcggcaggtgtaagaattggcgcgcccaccggcgtggcgtgctcggtgtgtccgggcgggatgactt

SEQ ID NO: 523831 - DNA, 75 bp, synthetic construct
  source 1..75: mol_type = other DNA
ttaagtgcgggtgcgttgaggatgcctgactcatcagaggtggcgagggatttctccctcgcctggtctcttact

SEQ ID NO: 523832 - DNA, 75 bp, synthetic construct
  source 1..75: mol_type = other DNA
tatccagcgggatgcacaggtcggcagcacgattgccactgccattacaggggcatacaacaatggcgacggcat

SEQ ID NO: 523833 - DNA, 75 bp, synthetic construct
  source 1..75: mol_type = other DNA
tatccagcgggatgcacaggtcggcagcacgattgccactgccatcaccgggccttataacggtggcaatggcat

SEQ ID NO: 523834 - DNA, 75 bp, synthetic construct
  source 1..75: mol_type = other DNA
gaatcatggcctacacgacctgttatgcgacgaggatacaatcttgcgttggaatgggacgaggtatgaaggtta

SEQ ID NO: 523835 - DNA, 75 bp, synthetic construct
  source 1..75: mol_type = other DNA
taaaacttccttccctgataaagacgggaaaccactaacggagaagcaaccagcgggaggagcaagtgaccgcct

SEQ ID NO: 523836 - DNA, 75 bp, synthetic construct
  source 1..75: mol_type = other DNA
ggagccgctgcgttgattattgccagtgaacagatggcagcagcgcaaggactgacaccgcgggcgcgaatcgta

SEQ ID NO: 523837 - DNA, 75 bp, synthetic construct
  source 1..75: mol_type = other DNA
ggacgatttatgctgttgatccgcaagaaatcaaactgaaaaggcggttgaaggctctgaagaagcaagccgaag

SEQ ID NO: 523838 - DNA, 75 bp, synthetic construct
  source 1..75: mol_type = other DNA
tgggttgaaagagttcgataaatataaaacacggatactggattcggggattaactgtaaaaaacatccgtggtt

SEQ ID NO: 523839 - DNA, 75 bp, synthetic construct
  source 1..75: mol_type = other DNA
aactaacacgttatatcagaacatatccattatcagacgcggatttcgcgctgttggtgataccacccactcgct

SEQ ID NO: 523840 - DNA, 75 bp, synthetic construct
  source 1..75: mol_type = other DNA
acccactcgctaattgcaaccgtgccgagaagaggattcaagatccataatgacattaacatacaaaatcatgta

SEQ ID NO: 523841 - DNA, 75 bp, synthetic construct
  source 1..75: mol_type = other DNA
gccctgctgggctacgttgtttcaaagattggcctgcgtccggtgggaatgctcagtaagcaggcgcaacatctc

SEQ ID NO: 523842 - DNA, 75 bp, synthetic construct
  source 1..75: mol_type = other DNA
taatgccgatgttgcgcatgaactccggactccgctgactaacctgatcggccagacgcagctggggctttcgcg

SEQ ID NO: 523843 - DNA, 75 bp, synthetic construct
  source 1..75: mol_type = other DNA
atacttccctcttgcaaaatcctcaccggggatgattgttatggcatgcaataaaaactataaccaacatgaagt

SEQ ID NO: 523844 - DNA, 75 bp, synthetic construct
  source 1..75: mol_type = other DNA
attagatgcaaaagcgattaaagttcctgacttcatatataagttcgtattggcactttcatatattgaaggtgg

SEQ ID NO: 523845 - DNA, 75 bp, synthetic construct
  source 1..75: mol_type = other DNA
ccatcgttgccaactacatttatgccgaaaacaatctcttctttttacgcctgaacaaccctaaagcgatctggt

SEQ ID NO: 523846 - DNA, 75 bp, synthetic construct
  source 1..75: mol_type = other DNA
ccgaccgatcctcagtccggccagcctgcgggtcagcgtgctcacaagccgttcatttttaccgtggcgctgaac

SEQ ID NO: 523847 - DNA, 75 bp, synthetic construct
  source 1..75: mol_type = other DNA
gtgaaaaccggagaggctatagggttcagattgttgaacaacaaaaccctgaccatggctccgggacccgttatt

SEQ ID NO: 523848 - DNA, 75 bp, synthetic construct
  source 1..75: mol_type = other DNA
tgcggggaatcgcctgctatattgcgctggcaatctctggtgggtcagtcaatgcatgggctgatgattcaattc

SEQ ID NO: 523849 - DNA, 75 bp, synthetic construct
  source 1..75: mol_type = other DNA
gaagaaatcgcagcctcttatggagaagtctttaaagataaaataaattttttattccacaggaatcagataaat

SEQ ID NO: 523850 - DNA, 75 bp, synthetic construct
  source 1..75: mol_type = other DNA
aacgaaacctacactaccgaatctcatacttgggataacaatatctctgtaaaaagattccacagtgacttcggg

SEQ ID NO: 523851 - DNA, 75 bp, synthetic construct
  source 1..75: mol_type = other DNA
taacgcctgccaggtagggataaaaagatcaaatggtaaccatatgcaaattatgttcgattgggtaagcagagt

SEQ ID NO: 523852 - DNA, 75 bp, synthetic construct
  source 1..75: mol_type = other DNA
gttcagccatgtgaaccaacaaggaaagactttttttctatctgcaataagtgtttcaaacaaggggtgggtata

SEQ ID NO: 523853 - DNA, 75 bp, synthetic construct
  source 1..75: mol_type = other DNA
aagactttttctctatctgcaataagtgtttcaaacaaggggtgggtataaaagtacatatgctagatgggcgca

SEQ ID NO: 523854 - DNA, 75 bp, synthetic construct
  source 1..75: mol_type = other DNA
ctcgctatataagtagtgggtatggatttcagcgtttaagtgctaatgagcgacaggtgataaatgcacttcttg

SEQ ID NO: 523855 - DNA, 75 bp, synthetic construct
  source 1..75: mol_type = other DNA
cagcagttcctgaataaccctgtcatcaaagagtttctgaacacttcgggactagagtcccttccagtgaccttg

SEQ ID NO: 523856 - DNA, 75 bp, synthetic construct
  source 1..75: mol_type = other DNA
ttaaatttaattggactaataataggtgttattaatatttatagattgcaaggtcatcttgttatattaaattta

SEQ ID NO: 523857 - DNA, 75 bp, synthetic construct
  source 1..75: mol_type = other DNA
aaaacggagcggtttgttttttctgaaaacgaagctgtccggctggaaactgggtacagaagtggctcacagggt

SEQ ID NO: 523858 - DNA, 75 bp, synthetic construct
  source 1..75: mol_type = other DNA
aaattgaggatctaggtaaagttatcactggtaaaacaccgccttccaaaattagtgatgcttttagcgcacaag

SEQ ID NO: 523859 - DNA, 75 bp, synthetic construct
  source 1..75: mol_type = other DNA
tctccccaaactcctttcgggcgaaatcaccctgcctgaagcggagcaggcggtaagcgaggtggaaaatgtata

SEQ ID NO: 523860 - DNA, 75 bp, synthetic construct
  source 1..75: mol_type = other DNA
gccgccgatcgggtgtatgacattcagaacaaagccatcgaggccgttgtgactggtggccgcgctgagccattc

SEQ ID NO: 523861 - DNA, 75 bp, synthetic construct
  source 1..75: mol_type = other DNA
ttacagacttaacgacactattacgccaacccaatcaagcaccgcgattaagactgcagagaaattaatccagcg

SEQ ID NO: 523862 - DNA, 75 bp, synthetic construct
  source 1..75: mol_type = other DNA
taggcaaaaatagcgactccaacttactcatcaaaaagtttgatgaaatagcctcctatattgtggagcattttc

SEQ ID NO: 523863 - DNA, 75 bp, synthetic construct
  source 1..75: mol_type = other DNA
ggcagaaagtaacaactcaggggcatgttgatggtacaacgataaataagtccggttatcaggacatcacgcaag

SEQ ID NO: 523864 - DNA, 75 bp, synthetic construct
  source 1..75: mol_type = other DNA
atggaaatctctgccaggatgatgatcaccggcggtgatccgaaggaagaggcctcactcaaacgtgcggaccgg

SEQ ID NO: 523865 - DNA, 75 bp, synthetic construct
  source 1..75: mol_type = other DNA
gtacggacgggaaaccggcaccgggcatccgggaatttgctacttcaaccggggcggcacgccgctgtgcttcga

SEQ ID NO: 523866 - DNA, 75 bp, synthetic construct
  source 1..75: mol_type = other DNA
gatcgagcaggtttgtcggtttaaagctttaaatgaagagcagcgacagttgctacgctcggcggtgaagtcgcc

SEQ ID NO: 523867 - DNA, 75 bp, synthetic construct
  source 1..75: mol_type = other DNA
agatctctgcccgcatgatgatcaccgggggggatccgaaggaagagacggcactcaaacggacggacagggcga

SEQ ID NO: 523868 - DNA, 75 bp, synthetic construct
  source 1..75: mol_type = other DNA
gatttgcctcaccatgccaccggaagaggtgaaagacatcagccggttccgtgcactcacacctgaacaggaagc

SEQ ID NO: 523869 - DNA, 75 bp, synthetic construct
  source 1..75: mol_type = other DNA
gcgatgccctgttcacgctggcacaggatgcagcgctaccggaatcccgccgtaaccgactgtgggagatgggcg

SEQ ID NO: 523870 - DNA, 75 bp, synthetic construct
  source 1..75: mol_type = other DNA
ttcactgactaatcaggaagtgaaggattacgtggctgaaggcaacagctacgacctgaactatctgaacagtaa

SEQ ID NO: 523871 - DNA, 75 bp, synthetic construct
  source 1..75: mol_type = other DNA
gacagagaaatgacggcctgtcgtaaagcgggtggagactgcggcgatattcagaataaatatgctgtattaagc

SEQ ID NO: 523872 - DNA, 75 bp, synthetic construct
  source 1..75: mol_type = other DNA
atcattacataacataattttggtgagttttaggttggtttttcatttgttaccaactagtttgttgaaggtgct

SEQ ID NO: 523873 - DNA, 75 bp, synthetic construct
  source 1..75: mol_type = other DNA
acccggccagaccgggcgatgatccgccaggccatcatcgcggcggcgcacgtctgctatgcggaaaagcgccag

SEQ ID NO: 523874 - DNA, 75 bp, synthetic construct
  source 1..75: mol_type = other DNA
atgttactggcgactcagcattctgctacgggtcaggtgacgcagtggattaaaaaacaatttgcgccaaatggc

SEQ ID NO: 523875 - DNA, 75 bp, synthetic construct
  source 1..75: mol_type = other DNA
ctggctttcttcggggaaccggaaaattactggggtacggttgccggagcgggttcattgttaacatcatcagcc

SEQ ID NO: 523876 - DNA, 75 bp, synthetic construct
  source 1..75: mol_type = other DNA
acggtcaacccgctgttatccccctatgtgaccaaagtggtgaaaatgtggcggaaactgggggcctggctgtgg

SEQ ID NO: 523877 - DNA, 75 bp, synthetic construct
  source 1..75: mol_type = other DNA
ccgcgaacagcagcggttatggacaatattgaacggttaatctccgcacagcggttgcaggctatttctggcgtc

SEQ ID NO: 523878 - DNA, 75 bp, synthetic construct
  source 1..75: mol_type = other DNA
ttgaaggcgtcctccatccggacaaaacgagtcacaacaaagatcaaatgtgcacgggtatggcacaattcactg

SEQ ID NO: 523879 - DNA, 75 bp, synthetic construct
  source 1..75: mol_type = other DNA
tttgccggtgagtcgcagttcgtgaataaagcctgcagtatcgtaccgtggtttaacgagggcagtgaaaagccg

SEQ ID NO: 523880 - DNA, 75 bp, synthetic construct
  source 1..75: mol_type = other DNA
ctgagcacacaggcgcagcgggcagaagccttccgtaaacagcgcgagtcttccttatcttctccagccggtccc

SEQ ID NO: 523881 - DNA, 75 bp, synthetic construct
  source 1..75: mol_type = other DNA
cctgagtccgcatatgtacctggcgacaaacagccttcaggggccgtggtggatactcaactggccggagcgggt

SEQ ID NO: 523882 - DNA, 75 bp, synthetic construct
  source 1..75: mol_type = other DNA
agattatcatatgaaaatagtagtgaaggattaagagattttataaagactcgtagatcaatcaccaataattca

SEQ ID NO: 523883 - DNA, 75 bp, synthetic construct
  source 1..75: mol_type = other DNA
ttcaatcagcaagtagaagttttaggtctcaaatttgctgtaaaagaaaaaaatgaagtttggcaggcagtattc

SEQ ID NO: 523884 - DNA, 75 bp, synthetic construct
  source 1..75: mol_type = other DNA
aatccaccgaccggcagacgccgcctgatgatggccagtctgttcaggcagatgaaaccctgaccgcggtcgtga

SEQ ID NO: 523885 - DNA, 75 bp, synthetic construct
  source 1..75: mol_type = other DNA
ccacctcacaggtgaaacccgcaaaggtggcgacgccatcaatgccctgttcgatcagatgcccgaggacacggc

SEQ ID NO: 523886 - DNA, 75 bp, synthetic construct
  source 1..75: mol_type = other DNA
gtgtttataaggcatttagttatctcgtgtggctttatctttatattaagtacaatatcatcagttaccttagtt

SEQ ID NO: 523887 - DNA, 75 bp, synthetic construct
  source 1..75: mol_type = other DNA
cagtaagctgtttaagtatgtaatgcttttttttttgctatcattttctttgctttttatattgttaatgccagt

SEQ ID NO: 523888 - DNA, 75 bp, synthetic construct
  source 1..75: mol_type = other DNA
agaatctgaagatagaacgttaacattgaatcagcaaatagaagttttaggcctcaaatttgctgtaaaagtaaa

SEQ ID NO: 523889 - DNA, 75 bp, synthetic construct
  source 1..75: mol_type = other DNA
agtgaattggacatgtttttgaataattatgcttttaataatcatgtcgttattgttggcagtgaacagaatata

SEQ ID NO: 523890 - DNA, 75 bp, synthetic construct
  source 1..75: mol_type = other DNA
cacgactttacctcagtctgaatgggctgcattcctttacagaaaaaatgaacgcgatatttacagcgcggagag

SEQ ID NO: 523891 - DNA, 75 bp, synthetic construct
  source 1..75: mol_type = other DNA
attgagtgaatattgtccggatgtaatggttgtggataatgtacctgctggggcgttatcagaactgctgccggt

SEQ ID NO: 523892 - DNA, 75 bp, synthetic construct
  source 1..75: mol_type = other DNA
accacagtcaataactgattggctgatttccgactggtgtccttcagatccacgactttacctcagtctgaatgg

SEQ ID NO: 523893 - DNA, 75 bp, synthetic construct
  source 1..75: mol_type = other DNA
cggaactctcatttttcgcgcatcctgttgatatggatgatttttcagatttccggaagtccgtattttgcccgg

SEQ ID NO: 523894 - DNA, 75 bp, synthetic construct
  source 1..75: mol_type = other DNA
atactgtcacggaaagtgcaggcctggatgtgatggaaatcatgtttccggcgcatcctgttgatgtggataatt

SEQ ID NO: 523895 - DNA, 75 bp, synthetic construct
  source 1..75: mol_type = other DNA
tatatcactggcgctgacaaaggctttttcggcaggctgaaaactgaaatgtattatgggcgtaaatggtcaggc

SEQ ID NO: 523896 - DNA, 75 bp, synthetic construct
  source 1..75: mol_type = other DNA
actacgaggtcgatgcccgcactgggaaacttcttatcgcgcaacagcaggcggaagaggcgttcgatcgcattg

SEQ ID NO: 523897 - DNA, 75 bp, synthetic construct
  source 1..75: mol_type = other DNA
tcagccggatacacaggcgcaaatggcaacgctagctaagtccgtgatgtacgttggcgaagaatacgatctgac

SEQ ID NO: 523898 - DNA, 75 bp, synthetic construct
  source 1..75: mol_type = other DNA
gctgatagtgcagccggatcaattgagtacctggataaagcgataaccaagctaaacgacgtcatcgctgtaaat

SEQ ID NO: 523899 - DNA, 75 bp, synthetic construct
  source 1..75: mol_type = other DNA
cacgactttacctcagtctgaatgggctacattcctttacagaaaaaatgaacgcgatatttacagcgcggagaa

SEQ ID NO: 523900 - DNA, 75 bp, synthetic construct
  source 1..75: mol_type = other DNA
tattcttagtaattgtaagtataatatcagcaggatttgataaaaaaacacactttaactatttcttggctttta

SEQ ID NO: 523901 - DNA, 75 bp, synthetic construct
  source 1..75: mol_type = other DNA
ggaataagaatatccattggtagtggccaatattctgttcactatgtccaactactggatggattttcagtttaa

SEQ ID NO: 523902 - DNA, 75 bp, synthetic construct
  source 1..75: mol_type = other DNA
gcggctccggacagatagcgcagatcgttgagtcggaaaagtggatcaacggggacggcatctgcgaccggactt

SEQ ID NO: 523903 - DNA, 75 bp, synthetic construct
  source 1..75: mol_type = other DNA
cgacgagcggacccaccactaccactacgacagccagcaccgcctagagttctacacgcggatacagcatggcga

SEQ ID NO: 523904 - DNA, 75 bp, synthetic construct
  source 1..75: mol_type = other DNA
gtctgtaaagatactaatggaaaatattttgcatctaaggcagaaactgataatttaagaaaggagtcatatcct

SEQ ID NO: 523905 - DNA, 75 bp, synthetic construct
  source 1..75: mol_type = other DNA
tggctgtaaatgaccatgggttgacatgtccatcaacaatagattgctcagatagatgtagtgattatattaatc

SEQ ID NO: 523906 - DNA, 75 bp, synthetic construct
  source 1..75: mol_type = other DNA
tgctatgttgaaaagaagaaatggttttagaaaagctctcagtgagataacaatacgtatgaaatacatggtcag

SEQ ID NO: 523907 - DNA, 75 bp, synthetic construct
  source 1..75: mol_type = other DNA
ttccccgacacactgcccggtaccgaatacggccccgacaggggtatccgcctttcggcggtgtggctgatgcac

SEQ ID NO: 523908 - DNA, 75 bp, synthetic construct
  source 1..75: mol_type = other DNA
atgttgtacatgcaatatgtgcggattattattcatttttcggcggtgtggctgatgcacgacccggcatacccg

SEQ ID NO: 523909 - DNA, 75 bp, synthetic construct
  source 1..75: mol_type = other DNA
gtttccgggctttccggagtacattttactatcatgtcagacggcttgctgctcctgaccggtatcagtctgcca

SEQ ID NO: 523910 - DNA, 75 bp, synthetic construct
  source 1..75: mol_type = other DNA
ttgttcacccggcgcgccatagagcaatcgaaggaaggcagacggcaggagtgcattgcccgcgccgcccgccgt

SEQ ID NO: 523911 - DNA, 75 bp, synthetic construct
  source 1..75: mol_type = other DNA
cattacgccgcagggtaaatctcggctgttcacccggcgcgccatagagcagtcgcaggaaggcaggcggcagga

SEQ ID NO: 523912 - DNA, 75 bp, synthetic construct
  source 1..75: mol_type = other DNA
tgcaccgtgagacggtgcgcagcttcggcagcatggcaggcagtaatgccgcatataaactgaccagcacataca

SEQ ID NO: 523913 - DNA, 75 bp, synthetic construct
  source 1..75: mol_type = other DNA
cggacgggctggagagccgccgggcgtatgatgagcgggacaggctggtatcggagacatcgcgcagcggggacg

SEQ ID NO: 523914 - DNA, 75 bp, synthetic construct
  source 1..75: mol_type = other DNA
agtacgatgcgtggggaaaggcggtcagcaccacgcagggcgggctgacgcgcagtatggagtacgatgctgccg

SEQ ID NO: 523915 - DNA, 75 bp, synthetic construct
  source 1..75: mol_type = other DNA
aacacgtctatgccgagtttgaaagtcgtggaattaacgtttctatatcaggttaccatggcactggcgtttttt

SEQ ID NO: 523916 - DNA, 75 bp, synthetic construct
  source 1..75: mol_type = other DNA
ctgatgttgccggtactactgaaccgtcagactgggataatgcagaaacacatacccgtccggcaggaaatgaaa

SEQ ID NO: 523917 - DNA, 75 bp, synthetic construct
  source 1..75: mol_type = other DNA
atgatgtgatgatcaatgcgctggccgtagtactggtcttcgactcagcattaggcgttttcaaaggagtcgtgg

SEQ ID NO: 523918 - DNA, 75 bp, synthetic construct
  source 1..75: mol_type = other DNA
ttggaacgcctggcgcaaacggagggataaatatcgatcagacacttagcgggccatgggctgttgcacctgcac

SEQ ID NO: 523919 - DNA, 75 bp, synthetic construct
  source 1..75: mol_type = other DNA
acgctggaagccttagccgaccatgtggcgatgagtccgttccatctgcatcggttgtttaaagcgactaccgga

SEQ ID NO: 523920 - DNA, 75 bp, synthetic construct
  source 1..75: mol_type = other DNA
tggcgatgagtccatttcatctacatcggttgtttaaagcgactaccggaatgacgcctaaagcctggcaacagg

SEQ ID NO: 523921 - DNA, 75 bp, synthetic construct
  source 1..75: mol_type = other DNA
tctaaacgacagtaaaataaaaataaaaaaacgaaatacagggggagtgccggtgtccattccttctgaaggaaa

SEQ ID NO: 523922 - DNA, 75 bp, synthetic construct
  source 1..75: mol_type = other DNA
aggaggtgtatatctggagccatttacatcaattccttcgccaggtgataagcgttgtcttgatgacgattgtaa

SEQ ID NO: 523923 - DNA, 75 bp, synthetic construct
  source 1..75: mol_type = other DNA
gagtgtcaactcaaccgttagctgcagagcccggttatggtgagcacacgggggcattaatgctggaagtaaact

SEQ ID NO: 523924 - DNA, 75 bp, synthetic construct
  source 1..75: mol_type = other DNA
gcccgtgacgcgcactatctttaccggtatgaccgtcacggcagactgacggagaaaaccgacctcatcccggaa

SEQ ID NO: 523925 - DNA, 75 bp, synthetic construct
  source 1..75: mol_type = other DNA
atgctgccggacgggtcatccgcctgaccagtgaaaacggcagccacaccaccttccgttacgatgtacttgacc

SEQ ID NO: 523926 - DNA, 75 bp, synthetic construct
  source 1..75: mol_type = other DNA
ccatcaccgacagcctggaccgccgtgaagtcctgcacacgcagggcgaaggcgggctgaagcgggtggtgaaaa

SEQ ID NO: 523927 - DNA, 75 bp, synthetic construct
  source 1..75: mol_type = other DNA
gcaccactttgcctgctgctgacatgtcctctcgtacaccgcaccggcagactgattgcccgtaagcgcaccgtg

SEQ ID NO: 523928 - DNA, 75 bp, synthetic construct
  source 1..75: mol_type = other DNA
caaatgcgttacaaaacgagccaaaaacaaaacaacctgaaccgccccgggtttcctggagagtgttttatctgt

SEQ ID NO: 523929 - DNA, 75 bp, synthetic construct
  source 1..75: mol_type = other DNA
caccagcaggacgtgtgaccatctaatgatcgaccttaaaaccatgggaaaaaatcctgatgccccgattatctc

SEQ ID NO: 523930 - DNA, 75 bp, synthetic construct
  source 1..75: mol_type = other DNA
aactgatggataacgcccgcgaactggcgcagcagctggttaacagcgccccgctggcgattgcggcgctgaaag

SEQ ID NO: 523931 - DNA, 75 bp, synthetic construct
  source 1..75: mol_type = other DNA
tgggcgaagtatttctaaatttccgtgacgatccgcaattacgtgtcgccattattaccggtgccggagagaagt

SEQ ID NO: 523932 - DNA, 75 bp, synthetic construct
  source 1..75: mol_type = other DNA
gtcaaccgcgtggttagccaggcggaactgatggataacgcccgcgaactggcgcagcagctggttaacagcgcc

SEQ ID NO: 523933 - DNA, 75 bp, synthetic construct
  source 1..75: mol_type = other DNA
tattttctcgggacagagagaaaaataataaatgcgatatgtaatattaataagaaaaatattagtgaattatat

SEQ ID NO: 523934 - DNA, 75 bp, synthetic construct
  source 1..75: mol_type = other DNA
acggtggcaatgtggtgttcccgccggtgctggtgcagatgctcgaccggctggaaagtgaaatcctggctgacc

SEQ ID NO: 523935 - DNA, 75 bp, synthetic construct
  source 1..75: mol_type = other DNA
ccccgcagacacacaactgagcctgaacgcgcgtaatactaatgagaacggtattgctgaagttacccttaaggg

SEQ ID NO: 523936 - DNA, 75 bp, synthetic construct
  source 1..75: mol_type = other DNA
ctccatgaagcccggaaaaacattccgccccaaaatcctgtcgatgcagacaaattactggctgcctctcgcgga

SEQ ID NO: 523937 - DNA, 75 bp, synthetic construct
  source 1..75: mol_type = other DNA
atagacaggacgagcccatatatttgtacattgaaacaatttctcgacggtgtatatgtaaaaattgatacttta

SEQ ID NO: 523938 - DNA, 75 bp, synthetic construct
  source 1..75: mol_type = other DNA
atggctaaacacaactctattgatctgcctgttggatctcaagaactttcctcacttttttatcaatatcaccgc

SEQ ID NO: 523939 - DNA, 75 bp, synthetic construct
  source 1..75: mol_type = other DNA
acgacattccattcaccgcaatgaaaaatgattgcgaggaacacggtagggttttatatgaaagagcgctgagcg

SEQ ID NO: 523940 - DNA, 75 bp, synthetic construct
  source 1..75: mol_type = other DNA
acgagaaaaacacctcaataaaacaagaaacacggatgatataaaagaaaaattaattcaaagacacgctgtttt

SEQ ID NO: 523941 - DNA, 75 bp, synthetic construct
  source 1..75: mol_type = other DNA
gtgagacggcccgcagcttcggcggggaggcatatgaacttgccaccgcctggaataccagcggccagctccgga

SEQ ID NO: 523942 - DNA, 75 bp, synthetic construct
  source 1..75: mol_type = other DNA
ttttgttcaactgaattaaactcgaaatcacaatcgcctgcattaggtttgggacatgagtttgctcatgcgcag

SEQ ID NO: 523943 - DNA, 75 bp, synthetic construct
  source 1..75: mol_type = other DNA
cactgatgatctgagaaagtgcgcattatctgtccttgacaaaattgaaaaaattggagttgaggctatatctga

SEQ ID NO: 523944 - DNA, 75 bp, synthetic construct
  source 1..75: mol_type = other DNA
cggggaacacaatactgactataaaaattatgtgctggctgacggtttatccccgctggcgcggggaacactttc

SEQ ID NO: 523945 - DNA, 75 bp, synthetic construct
  source 1..75: mol_type = other DNA
ttatcatatgaaaatagtagtgaaggattaagagattttataaagacacgtagatcaatcaccaataattcataa

SEQ ID NO: 523946 - DNA, 75 bp, synthetic construct
  source 1..75: mol_type = other DNA
gcatcccctgtaccagccgtaccgtttgccggggcagcagtatgatgaggagtcgggactgtattacaaccgtca

SEQ ID NO: 523947 - DNA, 75 bp, synthetic construct
  source 1..75: mol_type = other DNA
ccggcgagacggaccttgcgctgcccggcccgctgccgttcattctctcccgcacctacagcagctaccggaccc

SEQ ID NO: 523948 - DNA, 75 bp, synthetic construct
  source 1..75: mol_type = other DNA
tggaggtgatttacggcatcagcttgaaagagaaacggtcaggggaactatgatgtcatgtactacattggctgt

SEQ ID NO: 523949 - DNA, 75 bp, synthetic construct
  source 1..75: mol_type = other DNA
tcggtattgcttgtggcgatttttctgccaaatgtagcgatgcatgtattgaaaaatataacattgggcaactct

SEQ ID NO: 523950 - DNA, 75 bp, synthetic construct
  source 1..75: mol_type = other DNA
gaggcccctggactttctgattattcttcaatgtataataatggaagtacaacattcactatcggtgatataggg

SEQ ID NO: 523951 - DNA, 75 bp, synthetic construct
  source 1..75: mol_type = other DNA
ggcgggcgctgccggaagcggtccgtctgagtccacacacctatatgatggctgtcagcacaaccgggcagtggc

SEQ ID NO: 523952 - DNA, 75 bp, synthetic construct
  source 1..75: mol_type = other DNA
gattgagggagctacgttcgggctggataacgttgatccggctgtttttattgatgctgaggtggataccttcga

SEQ ID NO: 523953 - DNA, 75 bp, synthetic construct
  source 1..75: mol_type = other DNA
ggagcggtgagtgcggagagtgaggcatggcttgcgcagtgcgggctgacggcggaacagatggccgcgcagatg

SEQ ID NO: 523954 - DNA, 75 bp, synthetic construct
  source 1..75: mol_type = other DNA
acgggcagtacaaaacagatggcatggagccgttacggtcaactgctggcctttacggactgctcggggtacacg

SEQ ID NO: 523955 - DNA, 75 bp, synthetic construct
  source 1..75: mol_type = other DNA
cccgttgccaaacttaaaacgcaggatttcactgccctgctgagggttattgaggataagggctttctggaagtc

SEQ ID NO: 523956 - DNA, 75 bp, synthetic construct
  source 1..75: mol_type = other DNA
taaagcaagtaatgatacaaaagaagctgctggccgttgtgacctcgttgaaaccgataatagttgtgtggagaa

SEQ ID NO: 523957 - DNA, 75 bp, synthetic construct
  source 1..75: mol_type = other DNA
gtaagcgactcgtcagaaccgtattgatatttactgagagctcagatcaactttccagggcaacagatcgcgtac

SEQ ID NO: 523958 - DNA, 75 bp, synthetic construct
  source 1..75: mol_type = other DNA
gaggcggagaataacgcgaaaccggtacggtcagcttcaggcctttacggactgctcggggtacgcgacgcggta

SEQ ID NO: 523959 - DNA, 75 bp, synthetic construct
  source 1..75: mol_type = other DNA
ttttattgtttgtgccgataacgccagcttcgccctgccggaagccaaactgggcatcgttcctgacagcggcgg

SEQ ID NO: 523960 - DNA, 75 bp, synthetic construct
  source 1..75: mol_type = other DNA
agagatccggggtaaaggtgacaaggaacctctggttgtctgtgaaaatacgggggatgaggttatgaaggaatg

SEQ ID NO: 523961 - DNA, 75 bp, synthetic construct
  source 1..75: mol_type = other DNA
ggatagcgggtgtgagggaatgggattatctctttaatttcaccggacctgacggagattatgtctgccagttca

SEQ ID NO: 523962 - DNA, 75 bp, synthetic construct
  source 1..75: mol_type = other DNA
tatcgttgggacagtctaaaataccggagcatgctttttttcacttggctgcatcgtcactgctacccaacactt

SEQ ID NO: 523963 - DNA, 75 bp, synthetic construct
  source 1..75: mol_type = other DNA
gaatagcactttatttggtttagagtttcatcactatgataaagctgttttaatgaagcaatttatatcagatct

SEQ ID NO: 523964 - DNA, 75 bp, synthetic construct
  source 1..75: mol_type = other DNA
tccgaagtggaacagtggattgcggatcgtaaatcagcaatgtttaaagcggccagacccggtgttgttttaggt

SEQ ID NO: 523965 - DNA, 75 bp, synthetic construct
  source 1..75: mol_type = other DNA
gattgccagaaagtcttctctgtatggtgtggcggaagctgaactgaaaaacaaaaccaggagggattccggtaa

SEQ ID NO: 523966 - DNA, 75 bp, synthetic construct
  source 1..75: mol_type = other DNA
tatatccccaagcagttcactggatcttgtatatcattattatagacaatcagacagggattttttatcttctca

SEQ ID NO: 523967 - DNA, 75 bp, synthetic construct
  source 1..75: mol_type = other DNA
catcagaccggattgcagtcgaatgaagccagctttggtggaaatactaaattcagtatttatggtaatacatta

SEQ ID NO: 523968 - DNA, 75 bp, synthetic construct
  source 1..75: mol_type = other DNA
accgcctttccgataccgtctctgcacgcaatacctccggattccgtgaacaggtcgctgcatggctggaaaaac

SEQ ID NO: 523969 - DNA, 75 bp, synthetic construct
  source 1..75: mol_type = other DNA
tttttgtcgcaaatgcctcatataattacgcaaatagttgctgtgtccgaccgcgtttggatcctacacctgccg

SEQ ID NO: 523970 - DNA, 75 bp, synthetic construct
  source 1..75: mol_type = other DNA
atgattaccccacaggaagcacgacagcgcacccgaactcttgttgaacactatgtcaacgagtgtgaatgccgc

SEQ ID NO: 523971 - DNA, 75 bp, synthetic construct
  source 1..75: mol_type = other DNA
aatcctgaggattatgctgccgccgaagagcagggcactgtggtggcgatcgtccacagccatcccggcgacggg

SEQ ID NO: 523972 - DNA, 75 bp, synthetic construct
  source 1..75: mol_type = other DNA
agggggagcagttcgccgacccggtttatcggccagtcggctatgacgtcaaggacatagcggaggtagctttct

SEQ ID NO: 523973 - DNA, 75 bp, synthetic construct
  source 1..75: mol_type = other DNA
agctggcacgaacagtatgggcgatagctgcccatgaccgtaagtatgacaggaaccatgtcagtatcagaccat

SEQ ID NO: 523974 - DNA, 75 bp, synthetic construct
  source 1..75: mol_type = other DNA
gttgccgtactggccgcgcttgctgccgccgcctggcaggcagagcaggctgaccgggccttattgcgttcactg

SEQ ID NO: 523975 - DNA, 75 bp, synthetic construct
  source 1..75: mol_type = other DNA
cttcttcaaggctcgagttatgcgccgcaacaatctggtctttagttcatcaaaatatgcttcctgataaaataa

SEQ ID NO: 523976 - DNA, 75 bp, synthetic construct
  source 1..75: mol_type = other DNA
ttctggcgcacgcggccgcatcgtgtccagacgaatgctgtggcgttgtcatacagaagtggcgagtagagaaat

SEQ ID NO: 523977 - DNA, 75 bp, synthetic construct
  source 1..75: mol_type = other DNA
agggaagcaggagcacaggtgatgcgtgagactgaacagcagatttaccgtcagctgactgacgaggtactggcc

SEQ ID NO: 523978 - DNA, 75 bp, synthetic construct
  source 1..75: mol_type = other DNA
acggtacttgtcgctgaagaagcacatacatttattaaacggtatcgtgatgactctgaaaatcaggatgtcgca

SEQ ID NO: 523979 - DNA, 75 bp, synthetic construct
  source 1..75: mol_type = other DNA
aaatcaggatgtcgcagctgtttgctgccaagtgtttgagaaaattgcacgagaaggcagaaaatttggtcttgg

SEQ ID NO: 523980 - DNA, 75 bp, synthetic construct
  source 1..75: mol_type = other DNA
aaattaattttatttatattaaaagtacaatctctataagatgttttctaaaaaatatgaatgagatagttaaat

SEQ ID NO: 523981 - DNA, 75 bp, synthetic construct
  source 1..75: mol_type = other DNA
cggggccgccatcgcaacggatggctcctttactgcaccaacttatcagattcagggcagtggccgctcaactgt

SEQ ID NO: 523982 - DNA, 75 bp, synthetic construct
  source 1..75: mol_type = other DNA
gggatgtttggacaagaaaggatgctgatgggaaattggtcgagagaacggccaattgggaagctgttgtaaagg

SEQ ID NO: 523983 - DNA, 75 bp, synthetic construct
  source 1..75: mol_type = other DNA
acttctgggatgtttggacaagaaagtatgcggatgggaagttggtcgagagaactgtcgattgggaagctgttg

SEQ ID NO: 523984 - DNA, 75 bp, synthetic construct
  source 1..75: mol_type = other DNA
ggacaggatggatctccgcgtttcagagttggcaatcgaaatatgaatgccagtgattttttaactaaacatctg

SEQ ID NO: 523985 - DNA, 75 bp, synthetic construct
  source 1..75: mol_type = other DNA
gacaggaccgacgacagaatagtgaccagtccggtattaaatacaataccggaaagtttgtatccggtaagacaa

SEQ ID NO: 523986 - DNA, 75 bp, synthetic construct
  source 1..75: mol_type = other DNA
gataaaacatattcatccggcagggcaaaaaattcgtaaagaatatgcagcacttgctggtgaagataagcaaat

SEQ ID NO: 523987 - DNA, 75 bp, synthetic construct
  source 1..75: mol_type = other DNA
agggttggtgtgatgagcaataccgtgtgactcagttaggtcgggcaaatatcgcctgggcgggtggcaatactc

SEQ ID NO: 523988 - DNA, 75 bp, synthetic construct
  source 1..75: mol_type = other DNA
tccagcctcatagcgcagaatcagataatcattatgcctgggttgtcttcccctcggggtccgcatccccttccg

SEQ ID NO: 523989 - DNA, 75 bp, synthetic construct
  source 1..75: mol_type = other DNA
aagaggttgatctgctttcgaaaggggttaacagtatttcggcccgtgctcagacgattaatgaacagattaaag

SEQ ID NO: 523990 - DNA, 75 bp, synthetic construct
  source 1..75: mol_type = other DNA
atgagtcagaaatacctcattcgcatcgctgagctggaaaggctgctctctgagcaggctgaagccctgctgaaa

SEQ ID NO: 523991 - DNA, 75 bp, synthetic construct
  source 1..75: mol_type = other DNA
atatgaaccaaattttatacgaactttctgctctgggtagatggtcgagcaccggggcgctgaatacttttgatt

SEQ ID NO: 523992 - DNA, 75 bp, synthetic construct
  source 1..75: mol_type = other DNA
atgaatcgttctgactcacctaaaaaacaacccaagccatttggggttaatggacagagaggggcaatattgcca

SEQ ID NO: 523993 - DNA, 75 bp, synthetic construct
  source 1..75: mol_type = other DNA
tcaggctgccggtatcctgcaagccctgggcggggtcggcaatatctccagcattaacaattgcgcgacgcgtct

SEQ ID NO: 523994 - DNA, 75 bp, synthetic construct
  source 1..75: mol_type = other DNA
cttcggtggatatcaaagaggccgcaggtaaagccgattccagcgatatttaccagaacctgatcacaatgtcgc

SEQ ID NO: 523995 - DNA, 75 bp, synthetic construct
  source 1..75: mol_type = other DNA
tcattgaatgctgaagtagatatatcaaaggatcctagagttgctttcaaaaagggtaataatcaaaaaaaaata

SEQ ID NO: 523996 - DNA, 75 bp, synthetic construct
  source 1..75: mol_type = other DNA
tttcaccgcgtggcatctatggccagtggcggcatggatacattgccccataacggcgctgtgatcaccctgctg

SEQ ID NO: 523997 - DNA, 75 bp, synthetic construct
  source 1..75: mol_type = other DNA
gccagtctggatttaacaagagcggcagcttttgccattcgtattgtggccattgctgttctggtctgggcaatc

SEQ ID NO: 523998 - DNA, 75 bp, synthetic construct
  source 1..75: mol_type = other DNA
atgaaaggcattgaagtggagagccagtctggatttaacaagagcggcagcttttgccattcgtattgtggccat

SEQ ID NO: 523999 - DNA, 75 bp, synthetic construct
  source 1..75: mol_type = other DNA
cgcacaactggctggaaaaacagggatggctatgtggctttaattacttgccagggacagctgtaaactggacgg

SEQ ID NO: 524000 - DNA, 75 bp, synthetic construct
  source 1..75: mol_type = other DNA
atcccgatgttcagcaaccacgcggatatgatgctgacccaaatcgccattgggttgtgctttaccctgctgtac

SEQ ID NO: 524001 - DNA, 75 bp, synthetic construct
  source 1..75: mol_type = other DNA
gataactgccagttactacgtctacgatacaaacaaagttaaatctggcgcactggaggcaaccgcattaatcaa

SEQ ID NO: 524002 - DNA, 75 bp, synthetic construct
  source 1..75: mol_type = other DNA
ttgcgttagctggcgtaatcatgctgttgctgctggtcatcaaggcaaaggtacaaccattcgttgctttgctcc

SEQ ID NO: 524003 - DNA, 75 bp, synthetic construct
  source 1..75: mol_type = other DNA
aggtgcaggccggacgcgaccagaaactgtcgcagtcaggcgtcaagttcaccccgcaatactggaagcgcgagt

SEQ ID NO: 524004 - DNA, 75 bp, synthetic construct
  source 1..75: mol_type = other DNA
actttcaaaaaccagaatatatttatgatctaggtccctatatcattagcgatggtaaatgcgccaaagttacaa

SEQ ID NO: 524005 - DNA, 75 bp, synthetic construct
  source 1..75: mol_type = other DNA
agaaatatatgattccgggacttacgatgcattgacgcgagcttctgggcgtcgtgtttttgataataatatcag

SEQ ID NO: 524006 - DNA, 75 bp, synthetic construct
  source 1..75: mol_type = other DNA
ttttttgcgatgaattgaaacagttagggtatttcattgattcaacctctgttgcgattgaagatgcttctaact

SEQ ID NO: 524007 - DNA, 75 bp, synthetic construct
  source 1..75: mol_type = other DNA
cctttgaagggtgggactcccctgaacgtagtaccttcccactgcaactgtttggtttccattacaaatcccgta

SEQ ID NO: 524008 - DNA, 75 bp, synthetic construct
  source 1..75: mol_type = other DNA
ctcgacacccaggaagtggagttactgtttgacctgatgcgtcagttgcgcgatcgcggcgtcagcctgatcttt

SEQ ID NO: 524009 - DNA, 75 bp, synthetic construct
  source 1..75: mol_type = other DNA
aaaatctttagtttcgcggaacccttatcacattcactcgagacaggaaacatcctgtttattgatgaattaaat

SEQ ID NO: 524010 - DNA, 75 bp, synthetic construct
  source 1..75: mol_type = other DNA
cgccgctgagatgaccagcaatgcggtgatcatcgacactgcgcggcaagtgaaagaagtcatcatcgatccgaa

SEQ ID NO: 524011 - DNA, 75 bp, synthetic construct
  source 1..75: mol_type = other DNA
ggttttcagtgcgtaatgctcactgaaaaaatgatggaagagatgaaaaagaacaacgccggatcgcttcactga

SEQ ID NO: 524012 - DNA, 75 bp, synthetic construct
  source 1..75: mol_type = other DNA
atgaaaactaaatttatatttacaggtataaaacctttaagtcagttaccaagtgagaaagtgaaagaagatatt

SEQ ID NO: 524013 - DNA, 75 bp, synthetic construct
  source 1..75: mol_type = other DNA
ttcttcggttaccgatgaacggaatgatttaatattttcgtttttggaatttgttaaatactttcttcctaaagt

SEQ ID NO: 524014 - DNA, 75 bp, synthetic construct
  source 1..75: mol_type = other DNA
gacataagggagttgtcccccaaaaaaatcatgattgaacttggtctccagcaagggcaacttgacttgcttgca

SEQ ID NO: 524015 - DNA, 75 bp, synthetic construct
  source 1..75: mol_type = other DNA
taaaactgaatctgcgggaaaaaatcgcctatggtatgggcgacgtcggttcgaatttaatgctctgcactgatg

SEQ ID NO: 524016 - DNA, 75 bp, synthetic construct
  source 1..75: mol_type = other DNA
gcctctgcgatgaaagagtgtgccgaggctaaacaggccgtgctgctggacgctccagagcatcagaagctcaaa

SEQ ID NO: 524017 - DNA, 75 bp, synthetic construct
  source 1..75: mol_type = other DNA
atgcattcacttgcgtatcaacaaggtaacaaattttcgccaacggcgatgatttaccagaatcgccgggagcct

SEQ ID NO: 524018 - DNA, 75 bp, synthetic construct
  source 1..75: mol_type = other DNA
aaaaccgcgatggcaatagcttcggtaatacgtacggtgtgtattttggtatgtcgcaacaaacgggcgggatgg

SEQ ID NO: 524019 - DNA, 75 bp, synthetic construct
  source 1..75: mol_type = other DNA
tgagtacggagagagccgggtaatcatcacggacagcctgaaccggcgggaggggctgtacacggaaggcgaggg

SEQ ID NO: 524020 - DNA, 75 bp, synthetic construct
  source 1..75: mol_type = other DNA
gcagcatgaacggtataaagatgaattgcgacagaaaatgggaaaacccgacgttacagattcaaatttgaaaaa

SEQ ID NO: 524021 - DNA, 75 bp, synthetic construct
  source 1..75: mol_type = other DNA
gatggcagttggcatcatacatctgatttgaaaactaaaagtccgaattataatccaggagctgcaaatgatact

SEQ ID NO: 524022 - DNA, 75 bp, synthetic construct
  source 1..75: mol_type = other DNA
aaaaccgcgatggcaataacttcggtaatgcttatggtctgtacttcggcatgcctcagcaaacgggtggaatgg

SEQ ID NO: 524023 - DNA, 75 bp, synthetic construct
  source 1..75: mol_type = other DNA
tggcgctgaaaaccggaacgctcaacaacagcaatggtcagattcgcggtggctatgtgggtcttgaatccgctg

SEQ ID NO: 524024 - DNA, 75 bp, synthetic construct
  source 1..75: mol_type = other DNA
cagaagtatgttaccaacaacagcaacagtaatatgttgggacaaaccatcgcgatcaatgccgtgaatgacatt

SEQ ID NO: 524025 - DNA, 75 bp, synthetic construct
  source 1..75: mol_type = other DNA
ctacggctggatcagcggtaaaggcgatgttgatgtcacggtgaataacggcaacctgtataaccgcaataccat

SEQ ID NO: 524026 - DNA, 75 bp, synthetic construct
  source 1..75: mol_type = other DNA
ctacggctggatcagcggtaaaggcgatgttgatgtcacggtgaataacggcaacctgtacaaccgcaatactat

SEQ ID NO: 524027 - DNA, 75 bp, synthetic construct
  source 1..75: mol_type = other DNA
atgcctcagcaaacgggtggaatggtcggcaaggaaggcatcgagctttccgggcagaacatctataacaacaac

SEQ ID NO: 524028 - DNA, 75 bp, synthetic construct
  source 1..75: mol_type = other DNA
acagccagcaccgcctggtgttctacacgcggatacagcatggcgagccactggtcgagagccgctacctctacg

SEQ ID NO: 524029 - DNA, 75 bp, synthetic construct
  source 1..75: mol_type = other DNA
aaacgggatgcctactggccgaaaaaagcagaactgttactgaacagagtggaggatatctgtgcgtcagctaca

SEQ ID NO: 524030 - DNA, 75 bp, synthetic construct
  source 1..75: mol_type = other DNA
tgacgggaaaaataccagtgactggcctgaaacccctgtattacttgatgaactggctgcatttatttcttcacc

SEQ ID NO: 524031 - DNA, 75 bp, synthetic construct
  source 1..75: mol_type = other DNA
gagcaggttcttttgcacggagatttttctgctgatcaggttatcgttgcagaggatggccggagtgtgaatatc

SEQ ID NO: 524032 - DNA, 75 bp, synthetic construct
  source 1..75: mol_type = other DNA
tttccagccggtccccggaaagagcaaaaggatgtcgccgcaggctccgctttacccggccatgcggggcatggc

SEQ ID NO: 524033 - DNA, 75 bp, synthetic construct
  source 1..75: mol_type = other DNA
cttcaactggaaatcaattctttatctattttttagcaaatcaaacataatagataaaatttcatatatctcaga

SEQ ID NO: 524034 - DNA, 75 bp, synthetic construct
  source 1..75: mol_type = other DNA
cactggcggtaaaaaaggactgcataccgaacaccttgggcccatgctggcagaaatgcagtatctccagcgtgt

SEQ ID NO: 524035 - DNA, 75 bp, synthetic construct
  source 1..75: mol_type = other DNA
cctctgacgctcacaacgtcatttccaagcctcgatctggcagcaaatggacagacatgaaaatgtcctacttcc

SEQ ID NO: 524036 - DNA, 75 bp, synthetic construct
  source 1..75: mol_type = other DNA
ggggagatactgtgggagcatgagacggggcatgcatacagcgaacaggggctggcgacccgtcaggagccggac

SEQ ID NO: 524037 - DNA, 75 bp, synthetic construct
  source 1..75: mol_type = other DNA
cccgcagcgagtatgatgaggcggggaggctgaaggcgcagacggatgcggcggggcggcggacggagtaccggc

SEQ ID NO: 524038 - DNA, 75 bp, synthetic construct
  source 1..75: mol_type = other DNA
atttgatccctctgttccagacacacagcacgcgtaacttcctgctctctactcttgattttacggattctgtag

SEQ ID NO: 524039 - DNA, 75 bp, synthetic construct
  source 1..75: mol_type = other DNA
cgcggtacagctatgatgacccggcgagtgagctgccgacagggatacaggacgcgacgggcagtacaaaacaga

SEQ ID NO: 524040 - DNA, 75 bp, synthetic construct
  source 1..75: mol_type = other DNA
agcaggtcaacccggaggggctggactatcgctttgagtacgggcaggaccgtgtgaccatcacggacagcctga

SEQ ID NO: 524041 - DNA, 75 bp, synthetic construct
  source 1..75: mol_type = other DNA
cgccgcttcggtcgttatgaactcaccaccgcttacacccctgccgggcagttacagcgtcagcacctgaacagc

SEQ ID NO: 524042 - DNA, 75 bp, synthetic construct
  source 1..75: mol_type = other DNA
ctgccgggcgcatcaccgtgctgaccaacgagaacggcagccagtccacgttccggtatgacccggtggacaggc

SEQ ID NO: 524043 - DNA, 75 bp, synthetic construct
  source 1..75: mol_type = other DNA
ttcacaaatgaaagaaactatagattttttatcaagctctgaagaaactataaatatagagtatattgaaggaac

SEQ ID NO: 524044 - DNA, 75 bp, synthetic construct
  source 1..75: mol_type = other DNA
gctgaaggcgcagacggatgcggcggggcggcggacggagtaccggctgcatatggcgtcgggcgcggtgacagc

SEQ ID NO: 524045 - DNA, 75 bp, synthetic construct
  source 1..75: mol_type = other DNA
tcaccggcactacgatccgttgcaggggcggtatatcaccccggacccgattgggttgagaggtggatggaatat

SEQ ID NO: 524046 - DNA, 75 bp, synthetic construct
  source 1..75: mol_type = other DNA
gccggtgaactgctggcggtatatgaccgcagcaatacgcaggtgcgcgctttcacgtatgacgcgcagcatccg

SEQ ID NO: 524047 - DNA, 75 bp, synthetic construct
  source 1..75: mol_type = other DNA
gagccggacggtctgccgccggtggagtggctgacgtatggcagcggttatcttgcggggatgaagctgggcgga

SEQ ID NO: 524048 - DNA, 75 bp, synthetic construct
  source 1..75: mol_type = other DNA
cggctgacaaggaattatctaaaaataaagctatttcgagttaccttggtacacctaaaggttcattccagaaag

SEQ ID NO: 524049 - DNA, 75 bp, synthetic construct
  source 1..75: mol_type = other DNA
tagcagccctgagtattggtgatacagggaaagaacgtcagctgcaaaatgttgcagccggacgaatatccggaa

SEQ ID NO: 524050 - DNA, 75 bp, synthetic construct
  source 1..75: mol_type = other DNA
tcagctctggcatccgggacgaccagtctggccattggggtcggtgctgaagctgcgggtgattccagtatttct

SEQ ID NO: 524051 - DNA, 75 bp, synthetic construct
  source 1..75: mol_type = other DNA
ttaaaacaagattcacaaatgaaagaaactatagattttttatcaagctctgaagaaactataaatatagagtat

SEQ ID NO: 524052 - DNA, 75 bp, synthetic construct
  source 1..75: mol_type = other DNA
gctgttcgttatgaattggccacaggtgaaaaagttggtggtagaggacatgtattgaaagcacaggattataca

SEQ ID NO: 524053 - DNA, 75 bp, synthetic construct
  source 1..75: mol_type = other DNA
cattgccccgaacggcagccggagtgagacacagtatgatgcgtggggaaaggccgtcagcaccacgcagggcgg

SEQ ID NO: 524054 - DNA, 75 bp, synthetic construct
  source 1..75: mol_type = other DNA
tgagaacggccacggcgtggtgttcccggctgaactggtgcggctgctggacaggctggaggaagaaatccgggc

SEQ ID NO: 524055 - DNA, 75 bp, synthetic construct
  source 1..75: mol_type = other DNA
ccgttcatcctctcccgcacctacagcagttaccggacaaaaacgcccgcgccggtggggagcctcggccccggc

SEQ ID NO: 524056 - DNA, 75 bp, synthetic construct
  source 1..75: mol_type = other DNA
cccctgcgcaacggaagatgccaccggcagccggaaaaccatgacgtggagccgttacggtcagttgctgagctt

SEQ ID NO: 524057 - DNA, 75 bp, synthetic construct
  source 1..75: mol_type = other DNA
gaaatggtgccggagttcatcgagaagatggacgaggcgctggcagagatcggcttcacgttcggggaacagtgg

SEQ ID NO: 524058 - DNA, 75 bp, synthetic construct
  source 1..75: mol_type = other DNA
atttacccatgaatccgataagttcaaatgataatgatagtgtagacttgcgaaatataaaatgccctgaaggtt

SEQ ID NO: 524059 - DNA, 75 bp, synthetic construct
  source 1..75: mol_type = other DNA
atgccaaatcatgatcgattcgaatgccaaactgcgatcgattcagatgccattttgcattacagccgcagcgaa

SEQ ID NO: 524060 - DNA, 75 bp, synthetic construct
  source 1..75: mol_type = other DNA
cgtatcagtatgagaaagaccgcatcaccatcaccgacagcctggaccgccgtgaagtgctgcacacgcagggcg

SEQ ID NO: 524061 - DNA, 75 bp, synthetic construct
  source 1..75: mol_type = other DNA
tggcaaaccgcgtcacgccggacagtctgccgccggtggagtggctgacctacggcagcggctatcttgcgggca

SEQ ID NO: 524062 - DNA, 75 bp, synthetic construct
  source 1..75: mol_type = other DNA
aaactcacacagagtgaggatgagggacttgtcatcctctggtactacgatgaatcggaccgtatcactcaccgc

SEQ ID NO: 524063 - DNA, 75 bp, synthetic construct
  source 1..75: mol_type = other DNA
tggcggggggatggaatctgtataattacccactgaatccgataataaggatggatcctttgggtttgtataatt

SEQ ID NO: 524064 - DNA, 75 bp, synthetic construct
  source 1..75: mol_type = other DNA
gaggatgcaaaatcgggggcatgtactaatggtctttgcggcacactatccgctatgataggtccagataaattt

SEQ ID NO: 524065 - DNA, 75 bp, synthetic construct
  source 1..75: mol_type = other DNA
acatcacggacatcaccacgccggacgggcgggagacgaaattttactataacgacgggaacctggtgacggcgg

SEQ ID NO: 524066 - DNA, 75 bp, synthetic construct
  source 1..75: mol_type = other DNA
gcatggcaggcagtaatgccgcatataaactgaccagcacatacaccccgcaggccagttacagagccagcacct

SEQ ID NO: 524067 - DNA, 75 bp, synthetic construct
  source 1..75: mol_type = other DNA
gggagatcgcagaaagctggcgcttgccggcgaaacaattagcttattacagcaagccgagcagaccagcgtttt

SEQ ID NO: 524068 - DNA, 75 bp, synthetic construct
  source 1..75: mol_type = other DNA
atgctaaaaagaatgacaataaacgcaatgctatggcatattgagtcaaatattgaaaacacacctttgggcata

SEQ ID NO: 524069 - DNA, 75 bp, synthetic construct
  source 1..75: mol_type = other DNA
ggcggcacttttgcgacaactaacgtggtcacgctgacgggcgtgcacaccgacctcgccaccttgctggcgaat

SEQ ID NO: 524070 - DNA, 75 bp, synthetic construct
  source 1..75: mol_type = other DNA
gatggtggagctcaattgtacttaaagaacagagcaacactttatggagttaaaaacatcatgctagctccaggg

SEQ ID NO: 524071 - DNA, 75 bp, synthetic construct
  source 1..75: mol_type = other DNA
gcgaagcgattgagctagactatggcatgacggggggcgctctaaaggttgagattagagcggcctcggcaggct

SEQ ID NO: 524072 - DNA, 75 bp, synthetic construct
  source 1..75: mol_type = other DNA
cactgcaaaacaatggcgaatgatttaccgcgtattaggtgataaccgcccccggaaatgcagcttgccgtggtg

SEQ ID NO: 524073 - DNA, 75 bp, synthetic construct
  source 1..75: mol_type = other DNA
agacggtgcaatggcgaacacgctgcgggtgagggtcacagatgcgttcgggaatacgcttgccgggcagacggt

SEQ ID NO: 524074 - DNA, 75 bp, synthetic construct
  source 1..75: mol_type = other DNA
gcgatcgtcggggcgataacaccatatgtggattgggggatcgtttacgtcgtctgaccgccggtatttgcctaa

SEQ ID NO: 524075 - DNA, 75 bp, synthetic construct
  source 1..75: mol_type = other DNA
taagtcccgcagatgtagcgctaataagaagaaaagatcaactaaaccatcaaagagcatggggatatattatct

SEQ ID NO: 524076 - DNA, 75 bp, synthetic construct
  source 1..75: mol_type = other DNA
gtaaaattatgattgttggtactgtacccggcgattcggcaatcaatttcctcaaaatcaatcgcgaagtcacta

SEQ ID NO: 524077 - DNA, 75 bp, synthetic construct
  source 1..75: mol_type = other DNA
accgccagcatcaacaacagcagccagagccagaacgtcacctttgtaccgggtgatgcatcgcagctcacttca

SEQ ID NO: 524078 - DNA, 75 bp, synthetic construct
  source 1..75: mol_type = other DNA
ggacggctgggatttatggaattaatgttgatagtaatggagaagtaacattatctgtgctgataagaagtgaag

SEQ ID NO: 524079 - DNA, 75 bp, synthetic construct
  source 1..75: mol_type = other DNA
aacgcaaaagtaaaatatcatgatgttatcaattataatacaaaagatgttctggaaggagcattaattatttct

SEQ ID NO: 524080 - DNA, 75 bp, synthetic construct
  source 1..75: mol_type = other DNA
aagttagcagatgctgacaataatgatttactaacaaaagaaggtggttcagggttatacaaatcacttcatggg

SEQ ID NO: 524081 - DNA, 75 bp, synthetic construct
  source 1..75: mol_type = other DNA
ggtcgtttgcctgaacgacgtgaaattcgctgtgtcacagcctttggaggcccagggggtagagatgcgattgag

SEQ ID NO: 524082 - DNA, 75 bp, synthetic construct
  source 1..75: mol_type = other DNA
caatggcgacgttccgtcgtattaccggtgacaatccagacgcacctcgttggttaagttatcccggattcgttc

SEQ ID NO: 524083 - DNA, 75 bp, synthetic construct
  source 1..75: mol_type = other DNA
gcagcttaacatcctgcaaaaccagactggcatcacatttaaggggcaggacgctgcttatctgaaaggattgaa

SEQ ID NO: 524084 - DNA, 75 bp, synthetic construct
  source 1..75: mol_type = other DNA
agttgtcaacaacatgctattcagcaagaacaaatcggaaattaagacgctgtataactcagttggtcgtgttgg

SEQ ID NO: 524085 - DNA, 75 bp, synthetic construct
  source 1..75: mol_type = other DNA
aatgggaggttaattttggtgataaaacgtttactgtagattttgaaccaactcctgataatccttttgtcatca

SEQ ID NO: 524086 - DNA, 75 bp, synthetic construct
  source 1..75: mol_type = other DNA
atgtaagtgatcgcttaggtatgtactttatctctgtctgggaagattgcgataccgttgttgccgctggcatac

SEQ ID NO: 524087 - DNA, 75 bp, synthetic construct
  source 1..75: mol_type = other DNA
atagatggagaatcagagatgattttaaagagtcttttgaaataattaaaaatatctatagtaataaattaagtt

SEQ ID NO: 524088 - DNA, 75 bp, synthetic construct
  source 1..75: mol_type = other DNA
aacagatattatctttaataaagaaaataataacattactatagaaattataggtgatggtgaagctaaaaataa

SEQ ID NO: 524089 - DNA, 75 bp, synthetic construct
  source 1..75: mol_type = other DNA
cttttatgaacggacatgtagacacaataaaagcctatggggaaatagtctttaaaaccccgttaacttccgata

SEQ ID NO: 524090 - DNA, 75 bp, synthetic construct
  source 1..75: mol_type = other DNA
gttttgatatggccggaaccgtgaacagttttatgtcacaggctgcggcgcaggcactggatgaagctcaggtaa

SEQ ID NO: 524091 - DNA, 75 bp, synthetic construct
  source 1..75: mol_type = other DNA
acacggagtgaccatggacttctcgcgccccggaaagcctacagataacccgtttattgaatcatttaacggcag

SEQ ID NO: 524092 - DNA, 75 bp, synthetic construct
  source 1..75: mol_type = other DNA
tcccgtatgcaacggacccggcaggaaaccggctgccggacccggaactgcatccggacagcacgctcacggcgt

SEQ ID NO: 524093 - DNA, 75 bp, synthetic construct
  source 1..75: mol_type = other DNA
ttgctggataatgcagtgtacttacaaaatgtggagaagaaagaaggggctaaatggatatatttgggtgatggc

SEQ ID NO: 524094 - DNA, 75 bp, synthetic construct
  source 1..75: mol_type = other DNA
gtcaccagccagacggcaggaatcagtgtggtcaccgccagcatcaacagcagcagccagagccgggatgtgacg

SEQ ID NO: 524095 - DNA, 75 bp, synthetic construct
  source 1..75: mol_type = other DNA
ggacatttgtaggtgatggcagatatgagcgtacctatatggcctacaaagaaggagaaaacttaaactcatatc

SEQ ID NO: 524096 - DNA, 75 bp, synthetic construct
  source 1..75: mol_type = other DNA
gtaatggagaagtaacattatctgtgctgataagaagtgaagttactattaccgggaaacccaagaatggtaaag

SEQ ID NO: 524097 - DNA, 75 bp, synthetic construct
  source 1..75: mol_type = other DNA
taccaagaaggagaaaatttaacttcatttatggagattaaaggttggcgtatatacggacaaccatcctatacc

SEQ ID NO: 524098 - DNA, 75 bp, synthetic construct
  source 1..75: mol_type = other DNA
ccgcgaagatcgcggatctggtggtcattaaggacggctcagtggcagacggttcgacggcgaacacgctgcggg

SEQ ID NO: 524099 - DNA, 75 bp, synthetic construct
  source 1..75: mol_type = other DNA
cagcctgagccgggacgtgacatttatcgccgatgtcagcacggcgcagatcgcgagtctggaggtgacgcagga

SEQ ID NO: 524100 - DNA, 75 bp, synthetic construct
  source 1..75: mol_type = other DNA
agtccgcttggttcacagcttcgtatacgagaagttttagtagtggaaggggcggatttacctgtcagtgcttta

SEQ ID NO: 524101 - DNA, 75 bp, synthetic construct
  source 1..75: mol_type = other DNA
gctgaactggaggtcatccgggataacgcggtggcagacggttcgacggcgaatacgctgcaggtgaaggtcacc

SEQ ID NO: 524102 - DNA, 75 bp, synthetic construct
  source 1..75: mol_type = other DNA
tcagcttaatgaggaaaacgtacaagtcaggaatgcggatcctatccagggcaataattgggtttacaacggcaa

SEQ ID NO: 524103 - DNA, 75 bp, synthetic construct
  source 1..75: mol_type = other DNA
acggtgcaatggcgaatatgctgcgggcgagagtcaccgatgcgttcggtaatgcgcttgccgggcagacggtca

SEQ ID NO: 524104 - DNA, 75 bp, synthetic construct
  source 1..75: mol_type = other DNA
aacggcgtaacgactgccccaacggtgatcaccgagccggacggcacggtggaaatcagtgtcaccagccagacg

SEQ ID NO: 524105 - DNA, 75 bp, synthetic construct
  source 1..75: mol_type = other DNA
tgcgctggccggacagacggtcagcgtctcagcggacaacggggcagcggttgccgcgacggttatcaccgggcc

SEQ ID NO: 524106 - DNA, 75 bp, synthetic construct
  source 1..75: mol_type = other DNA
gaatattgaaacggcgaagggcattttccccttcacgctggagaatgccaggctgcgcagcgatttgccggtcgc

SEQ ID NO: 524107 - DNA, 75 bp, synthetic construct
  source 1..75: mol_type = other DNA
attaccaatgaaatgattgttctgcagtacaatctttcagttgaacattttaatctgaatagttcacttatttaa

SEQ ID NO: 524108 - DNA, 75 bp, synthetic construct
  source 1..75: mol_type = other DNA
tatatgatccaattagttgtattcatcctcaacgagtaagcttgaataatacacctattaacaatccggtgctga

SEQ ID NO: 524109 - DNA, 75 bp, synthetic construct
  source 1..75: mol_type = other DNA
ggatgctggacaggctggaggaagaaatccgggcagaccgcgtgagcagtgaaagccgggcgtggcttgcgcagt

SEQ ID NO: 524110 - DNA, 75 bp, synthetic construct
  source 1..75: mol_type = other DNA
tgcttttcaatggtgatggtttcttcctgatagaccatgaatcggcaattccccaaggtcttgcccctgaccttt

SEQ ID NO: 524111 - DNA, 75 bp, synthetic construct
  source 1..75: mol_type = other DNA
agcttgatgaatggctggctcactataataatgaagcgaacccatcagggaaaaatgtgcaatgggcagacgcca

SEQ ID NO: 524112 - DNA, 75 bp, synthetic construct
  source 1..75: mol_type = other DNA
agtggaaggggcggatttacctgtcagtgctttattagttgatgattttggaaatccggtggataacggtctgga

SEQ ID NO: 524113 - DNA, 75 bp, synthetic construct
  source 1..75: mol_type = other DNA
cgcgacgctgaagttgtctgaatggggcagcagtaaacaatcagagagttattccatccacagcggtgctccggt

SEQ ID NO: 524114 - DNA, 75 bp, synthetic construct
  source 1..75: mol_type = other DNA
gcaacgatcgtcccgacggtcaccacgcagccggacggtacggtggagatctctgttaccagccagacggcgggg

SEQ ID NO: 524115 - DNA, 75 bp, synthetic construct
  source 1..75: mol_type = other DNA
gactggaaagtggggcaacgcgtcgtgtcggataacagcggtcacgtttgcggcgtttgtccggcctgtgaacaa

SEQ ID NO: 524116 - DNA, 75 bp, synthetic construct
  source 1..75: mol_type = other DNA
agatcgctgagctggtggtcattaaggacgactcagtggcagacggtgcaatggcgaatatgctgcgggcgagag

SEQ ID NO: 524117 - DNA, 75 bp, synthetic construct
  source 1..75: mol_type = other DNA
agatcgcagatctggtggtcattaaggacgactcagtggcagacggtgcaatggcgaatatgctgcgggcgagag

SEQ ID NO: 524118 - DNA, 75 bp, synthetic construct
  source 1..75: mol_type = other DNA
gttcttagtccgtggctattgcaccaccatcacgcgaaagggacagctaagcgcggcgggatggttaagccagca

SEQ ID NO: 524119 - DNA, 75 bp, synthetic construct
  source 1..75: mol_type = other DNA
tatactaggcagaaaagtaaaatacagcagtaactggctaaaaactaaaaagaaaattgacggcgtaaaagcaag

SEQ ID NO: 524120 - DNA, 75 bp, synthetic construct
  source 1..75: mol_type = other DNA
gtagaaaaccagcaggattatcctgttcttgttgaaacaaaaataatggatgaaaactctgaagcaaggtcctca

SEQ ID NO: 524121 - DNA, 75 bp, synthetic construct
  source 1..75: mol_type = other DNA
acagcctgtcgggctgtcgctcctgctcgacaccatcactctgaccgaacgcgcagacatgcccgatatcgtgcg

SEQ ID NO: 524122 - DNA, 75 bp, synthetic construct
  source 1..75: mol_type = other DNA
tttatctgatggcacgcaatatattccacctcaaagcctcataacgttgccgaaacagatccagcgactcactaa

SEQ ID NO: 524123 - DNA, 75 bp, synthetic construct
  source 1..75: mol_type = other DNA
aattcattatgaattaatacgtcagctaacttataaacaagaatggcttggtgggcttgttatcaagcttccggc

SEQ ID NO: 524124 - DNA, 75 bp, synthetic construct
  source 1..75: mol_type = other DNA
actcgattttcaccaataccgcgtcgttttcaccagcgcagggcgtcggcgtacagttgacgcgcaacggtacga

SEQ ID NO: 524125 - DNA, 75 bp, synthetic construct
  source 1..75: mol_type = other DNA
ggcgaaccacaggtggagagccggtacctctatgacccgctgggccgccggacgggaaaacgggtatggcggcgg

SEQ ID NO: 524126 - DNA, 75 bp, synthetic construct
  source 1..75: mol_type = other DNA
aaactttcagaatataatttatacagaaatgcgcagtcaaatacggtaaaagtctttaaagatatcggtgcagca

SEQ ID NO: 524127 - DNA, 75 bp, synthetic construct
  source 1..75: mol_type = other DNA
gatttctattataaaggcaaatgatagctttccagagcaagtggaatcaatgaattggatttgtgtaaagagtat

SEQ ID NO: 524128 - DNA, 75 bp, synthetic construct
  source 1..75: mol_type = other DNA
agatggtagggaaggcctatcactagttacacttcttccaggtgaggcgatattaaattttggatgtgttttttt

SEQ ID NO: 524129 - DNA, 75 bp, synthetic construct
  source 1..75: mol_type = other DNA
ttgtattacatcttcttttatgttttttcaaaatcaaatcagatgtaaggagtcaaagatttgggttaataacgg

SEQ ID NO: 524130 - DNA, 75 bp, synthetic construct
  source 1..75: mol_type = other DNA
ctggaaatcgcccgctacgcgatgacgtatggcctgaccatgccgaccggcggccaccgccgcacaacgcactat

SEQ ID NO: 524131 - DNA, 75 bp, synthetic construct
  source 1..75: mol_type = other DNA
aaagagaacccaaaaaatcaagctcagtgcaatgaatgatagtcagtacaaagtgtttagaaatacacctattga

SEQ ID NO: 524132 - DNA, 75 bp, synthetic construct
  source 1..75: mol_type = other DNA
cgccgtggcgatggaaggcgataaaaacgcacagctggttaacaacggcgttatcaatctcggtaccgaaggcac

SEQ ID NO: 524133 - DNA, 75 bp, synthetic construct
  source 1..75: mol_type = other DNA
gtcccaatgatttattcttcttgggagggtttttttactgaaacaatgtcagtttgcttaaatacattgaaactc

SEQ ID NO: 524134 - DNA, 75 bp, synthetic construct
  source 1..75: mol_type = other DNA
atatgaaccacatcctggcactggaaatggtgcctgcgactatattctcaaaacgacgccccctgctgttttgct

SEQ ID NO: 524135 - DNA, 75 bp, synthetic construct
  source 1..75: mol_type = other DNA
ctctccgatgcgcgccgggcgcagctttatggcctcccgttaccgttgaaccagtaccacaccggcccgctgcgc

SEQ ID NO: 524136 - DNA, 75 bp, synthetic construct
  source 1..75: mol_type = other DNA
atagacggatttatcttgcgcgaaggtgagtttgtcacttcattacaggcactgaaagagattggaataaaagca

SEQ ID NO: 524137 - DNA, 75 bp, synthetic construct
  source 1..75: mol_type = other DNA
tggcaggacagttacagcagcttgcaacgcatgttcgagactacctcacaggcactggagcgcaacgacagggta

SEQ ID NO: 524138 - DNA, 75 bp, synthetic construct
  source 1..75: mol_type = other DNA
gaggctggctcttgccggcggaggaataacaattgccactcaggaaactttcaggctggatttgcccctatattt

SEQ ID NO: 524139 - DNA, 75 bp, synthetic construct
  source 1..75: mol_type = other DNA
ctaatgatctgcgtctgatgttgaggctggctcttgccggcggaggaataacaattgccactcaggaaactttca

SEQ ID NO: 524140 - DNA, 75 bp, synthetic construct
  source 1..75: mol_type = other DNA
tcaaggtgatgttggaaaagacgaaaaatgaaagtcttggattccttgagagcataaagtctattaatgagttta

SEQ ID NO: 524141 - DNA, 75 bp, synthetic construct
  source 1..75: mol_type = other DNA
tctgctgttacagcaggcgcaatttgtgttggcatcggtacagacagtctgaaagagtgcggtgccgtgcttgca

SEQ ID NO: 524142 - DNA, 75 bp, synthetic construct
  source 1..75: mol_type = other DNA
aacgtggatggtggggacagcaactgatggatgacccactgaccggtgaaacccgtactgttcagctcggcagtg

SEQ ID NO: 524143 - DNA, 75 bp, synthetic construct
  source 1..75: mol_type = other DNA
tggatatcagcaaacaatttgatcagggcgttgatgatctgaaccagcaagttgaaaaagcgttggaggttttag

SEQ ID NO: 524144 - DNA, 75 bp, synthetic construct
  source 1..75: mol_type = other DNA
agaagacgtaataaaattatcggcaacggaagccttcacgttctaccctttcttatgggtacaaagtgaagaagc

SEQ ID NO: 524145 - DNA, 75 bp, synthetic construct
  source 1..75: mol_type = other DNA
taacggttggttacgcatagcaggctctggtcacccccggttaccacgagatccagcaagttggacacaacgccc

SEQ ID NO: 524146 - DNA, 75 bp, synthetic construct
  source 1..75: mol_type = other DNA
cgtatcaatgaagccatgtttatgatgatgataatattgtcaaatcagaacggtaattcagtatctccgtccgat

SEQ ID NO: 524147 - DNA, 75 bp, synthetic construct
  source 1..75: mol_type = other DNA
agcgcaggactgtacgcgacctggtatcagaacgatgcgaataagaccggcgcttatgttgacagctgggcgctg

SEQ ID NO: 524148 - DNA, 75 bp, synthetic construct
  source 1..75: mol_type = other DNA
ttgtaagtgagccaaatattttttatcacttcaaaaagcaggtagatgataaaaataacgataatcagcagtcat

SEQ ID NO: 524149 - DNA, 75 bp, synthetic construct
  source 1..75: mol_type = other DNA
acttatcaacatagatctattaacaaaccaaaagaacatccttttaaacttgagaaagggacatcatgatttaca

SEQ ID NO: 524150 - DNA, 75 bp, synthetic construct
  source 1..75: mol_type = other DNA
agcggtcctttcagcctgaatatcaatcaggaaagcggattactgattgatgaaccgccccgggaatcctggaga

SEQ ID NO: 524151 - DNA, 75 bp, synthetic construct
  source 1..75: mol_type = other DNA
gaaccagattgagcggttgtggcatgccctccatgaaacgatcacccggaaccaccaatgctgcacattgggtga

SEQ ID NO: 524152 - DNA, 75 bp, synthetic construct
  source 1..75: mol_type = other DNA
tgatccagctgttgttattgacagccttaaagcgaaaacatcaggaattcgtcgtgctgcagggaaccgtcttga

SEQ ID NO: 524153 - DNA, 75 bp, synthetic construct
  source 1..75: mol_type = other DNA
ttcttgttagcggctacattttagtagtcgctaatttatatcattactatcaattgcatcgatacgatggccaac

SEQ ID NO: 524154 - DNA, 75 bp, synthetic construct
  source 1..75: mol_type = other DNA
ttttgtctatgctttcaggaacagcctcgacgaagaagacacatgttttcactatgcctgtcccaattgctatca

SEQ ID NO: 524155 - DNA, 75 bp, synthetic construct
  source 1..75: mol_type = other DNA
tatcaagcactgattgcgtcaaccggacaggcgcaggttgataaagagcaggtaaaaaaaagccgcccggcagaa

SEQ ID NO: 524156 - DNA, 75 bp, synthetic construct
  source 1..75: mol_type = other DNA
agggtgctttttgaaaggacggcgctggctgagtctcaggtgtattcaggggtgattgatatgcctgcaggaagg

SEQ ID NO: 524157 - DNA, 75 bp, synthetic construct
  source 1..75: mol_type = other DNA
ctaatctttcaaacactattcttcctgacatcgtcatgatgaaagacacgaaactttaccgtaccgaccttttta

SEQ ID NO: 524158 - DNA, 75 bp, synthetic construct
  source 1..75: mol_type = other DNA
actgtaactgctcaaatgtcaacttcgaacatacttattttgatagcgtcaagtttacaaatacgaattgtacaa

SEQ ID NO: 524159 - DNA, 75 bp, synthetic construct
  source 1..75: mol_type = other DNA
tagttccgactaacgatggtggtatttcattggggcaagtggttattgctaccgcatacactcgcgcaacgcgca

SEQ ID NO: 524160 - DNA, 75 bp, synthetic construct
  source 1..75: mol_type = other DNA
gaccacaactatggtaggcgaaaagtccagaatggacagggcatataccgagcaactgacgtctgaaaaccgccg

SEQ ID NO: 524161 - DNA, 75 bp, synthetic construct
  source 1..75: mol_type = other DNA
ctgaccagacggcagaaaagctgcgtggagaaatgagaagtgaaggagacagcctccgtggagaaatcggtggtg

SEQ ID NO: 524162 - DNA, 75 bp, synthetic construct
  source 1..75: mol_type = other DNA
gtactgcactctgtctctgtgcttctctcttccacccggcttatgctgtccgttctccggctcccgtatcggcgt

SEQ ID NO: 524163 - DNA, 75 bp, synthetic construct
  source 1..75: mol_type = other DNA
ttgatttgtctggtatatcttttattcagcgtgaaactaaccaggcattaggattaaaatatgctcctgtagatg

SEQ ID NO: 524164 - DNA, 75 bp, synthetic construct
  source 1..75: mol_type = other DNA
atgggtaatatacatggaattagttgcactgcaaataattatttgaaagaagcctggagcaatataaaaaatgag

SEQ ID NO: 524165 - DNA, 75 bp, synthetic construct
  source 1..75: mol_type = other DNA
agcatcggtgcgaatcataactacaacaaagacacactgatcaactatttaaaatcccagggggcgacgccagtc

SEQ ID NO: 524166 - DNA, 75 bp, synthetic construct
  source 1..75: mol_type = other DNA
ccagccagagcggataaatacgccgggaatatctgatttggattctggcattgatttgtctggtatatcttttat

SEQ ID NO: 524167 - DNA, 75 bp, synthetic construct
  source 1..75: mol_type = other DNA
gaaatcatgcggaaagaagaaaatatttcatgcctggtgtgtgaatcactagaaacagaattagaggaaatgcaa

SEQ ID NO: 524168 - DNA, 75 bp, synthetic construct
  source 1..75: mol_type = other DNA
ttttgaaaacattgcatgctaaagatacgaaaatttattcaggagtttcaggaggttttacatatactataaaat

SEQ ID NO: 524169 - DNA, 75 bp, synthetic construct
  source 1..75: mol_type = other DNA
gtgactgaattaaccaaagagaaattaatcgaagaagccaaattaaaaatagcgattgcgaaatgctactccaat

SEQ ID NO: 524170 - DNA, 75 bp, synthetic construct
  source 1..75: mol_type = other DNA
ctggctcactggctcattgtaatatcctcgcgaatacactgtttggtgcgatttcaggttcagccgttgcgtcag

SEQ ID NO: 524171 - DNA, 75 bp, synthetic construct
  source 1..75: mol_type = other DNA
attattaaacttttatacgacgcacaggagcacgacacctatgatccaaaagacgaccacacacacaaccacacc

SEQ ID NO: 524172 - DNA, 75 bp, synthetic construct
  source 1..75: mol_type = other DNA
cgcagcaaccggcaagatcgcgccaaaggatgttgctgccacttgggcaatggcacgcttgccagctcaacatca

SEQ ID NO: 524173 - DNA, 75 bp, synthetic construct
  source 1..75: mol_type = other DNA
ataaaacactctccaggaaacccggggcggttcagaagatcctggatcatatgggttcaacagaactggcggcta

SEQ ID NO: 524174 - DNA, 75 bp, synthetic construct
  source 1..75: mol_type = other DNA
ctttcgggaaaataagaattcgtcaaccaataattttcggataacctcggaaacgtcaaccaactctccggcaat

SEQ ID NO: 524175 - DNA, 75 bp, synthetic construct
  source 1..75: mol_type = other DNA
cctgttgataaagattattccgatctcaaaaatgccatgaaaacatacagcttatcaatgttgtcgggtgaaata

SEQ ID NO: 524176 - DNA, 75 bp, synthetic construct
  source 1..75: mol_type = other DNA
atttcggattagaccatcctttagttcaagagtgtgatgatcttatatctgttttggagttcaaaaataagataa

SEQ ID NO: 524177 - DNA, 75 bp, synthetic construct
  source 1..75: mol_type = other DNA
cctggccaatctgtcatcaccgccaaaggcagcggcagaagcactgaaagagctgggggtgtcagttgctgacgc

SEQ ID NO: 524178 - DNA, 75 bp, synthetic construct
  source 1..75: mol_type = other DNA
cgaacaccgttcacgcgcagcacagattattaaacttttatacgacgcacaggagcacgacacctatgatccaaa

SEQ ID NO: 524179 - DNA, 75 bp, synthetic construct
  source 1..75: mol_type = other DNA
tacttaatgatgattcacttgagagaattgttgataataaagagcttaagaatacctacgatatatttaattaca

SEQ ID NO: 524180 - DNA, 75 bp, synthetic construct
  source 1..75: mol_type = other DNA
caagatgttcttcttgtcggacatttcagtaactatgaggaaattgaaaaaatctcatctcatatcaattggtta

SEQ ID NO: 524181 - DNA, 75 bp, synthetic construct
  source 1..75: mol_type = other DNA
tgtaatctttattaaccagttagaaggattatggccggttgagcgttatctatcactgcttaccggtgagatgcc

SEQ ID NO: 524182 - DNA, 75 bp, synthetic construct
  source 1..75: mol_type = other DNA
tgtattcctggttcagataagaatgatgtaaaaatatttaaagttgcaagcatagatagcgcgtctaaaaaagat

SEQ ID NO: 524183 - DNA, 75 bp, synthetic construct
  source 1..75: mol_type = other DNA
tgaagactgactcttattttgataaattaaagattttaccctatcttaataagattagacgcagaccaagagatc

SEQ ID NO: 524184 - DNA, 75 bp, synthetic construct
  source 1..75: mol_type = other DNA
ctccatggagttggtgaagttgactatctttgctgctactggagaagctgattgtgataatactgcactggcact

SEQ ID NO: 524185 - DNA, 75 bp, synthetic construct
  source 1..75: mol_type = other DNA
gctaaccgcttcacatctaatatcaaaggtcttactcaggcttcccgaaacgccaacgatggtatctctatcgct

SEQ ID NO: 524186 - DNA, 75 bp, synthetic construct
  source 1..75: mol_type = other DNA
ctgcagcaactacttcagtaaatattgaaaaagcgactattagtgctgcagaactttccaaagcagtaggtacag

SEQ ID NO: 524187 - DNA, 75 bp, synthetic construct
  source 1..75: mol_type = other DNA
tgaaaaagcgactattagtgctgcagaactttccaaagcagtaggtacaggcaactttactttaactactggtaa

SEQ ID NO: 524188 - DNA, 75 bp, synthetic construct
  source 1..75: mol_type = other DNA
ctttttatgttcttggctctattcatccattacgagataatatagaaatacaccacgaagctggggttacagtta

SEQ ID NO: 524189 - DNA, 75 bp, synthetic construct
  source 1..75: mol_type = other DNA
atgacagatatcaccgcaaatgttgtggtaagcatgccttcgcaactcttcactatggcgcgttcttttaaagcg

SEQ ID NO: 524190 - DNA, 75 bp, synthetic construct
  source 1..75: mol_type = other DNA
tctaagtacatgaaacagattgctgaagagcgttatacatggaaagttatcactgatatgtatgaggcaacttat

SEQ ID NO: 524191 - DNA, 75 bp, synthetic construct
  source 1..75: mol_type = other DNA
gtctgatcaggacgacgtgtggcgaaaaaacaaactagaacgtgcatgtgagtttttaaaaaataacgattttta

SEQ ID NO: 524192 - DNA, 75 bp, synthetic construct
  source 1..75: mol_type = other DNA
gtccactacggctacgacgataagggccgcctgacgggcgaacggcagacggtggagaacccggagacgggggaa

SEQ ID NO: 524193 - DNA, 75 bp, synthetic construct
  source 1..75: mol_type = other DNA
agttacattgcaggaactagcaacttaagtgtgactagagtgggagatacgttatctgcagtattaagcgcaggt

SEQ ID NO: 524194 - DNA, 75 bp, synthetic construct
  source 1..75: mol_type = other DNA
ctggtccctgttgttgcggccagctcccgcccggtggcggaggccatacgatcgccagtggcatcagttcctgca

SEQ ID NO: 524195 - DNA, 75 bp, synthetic construct
  source 1..75: mol_type = other DNA
atttgaaccgtccgtgccggacggcaatacagaacgagtgggtttttctttttcatttaaccatgatccgagaat

SEQ ID NO: 524196 - DNA, 75 bp, synthetic construct
  source 1..75: mol_type = other DNA
atgagtcagcttgatgacaccatccttgatgcgctgacgcacgtcactttcccaaaggggtttgtgtcagcagag

SEQ ID NO: 524197 - DNA, 75 bp, synthetic construct
  source 1..75: mol_type = other DNA
aaccgttatatgccggagatcgccaaagctgccaccgccacgcgcgaaagtgctgaaacgtgggcgaatgccgcg

SEQ ID NO: 524198 - DNA, 75 bp, synthetic construct
  source 1..75: mol_type = other DNA
cgcggacgaatcacgcggtgagcgacccgacgggccgcccgctgatgctctttaacagtgaaggtaaaaccgtct

SEQ ID NO: 524199 - DNA, 75 bp, synthetic construct
  source 1..75: mol_type = other DNA
cgccgcaggccggatggtcagccggacaaaacaccgtgacggctatcgcccggaaacagagcggttccggtggga

SEQ ID NO: 524200 - DNA, 75 bp, synthetic construct
  source 1..75: mol_type = other DNA
tacggtccccgcgggcgagattttatcgttcacgttgattttccggcagaagtcatccaggcatggcaaacgctg

SEQ ID NO: 524201 - DNA, 75 bp, synthetic construct
  source 1..75: mol_type = other DNA
atgtcatcgtatatgggattaccaacaaatcagcacgatgctcttgagaatattcagctcttagtagggactggt

SEQ ID NO: 524202 - DNA, 75 bp, synthetic construct
  source 1..75: mol_type = other DNA
tattatcggcggttattcggcggtagtgtggacagatactattcaggccctaattctgttctttggctttatatt

SEQ ID NO: 524203 - DNA, 75 bp, synthetic construct
  source 1..75: mol_type = other DNA
aaaacaggttgcgccacgcagtcagaaaatgatcaaaaaccgtgtcctgaatgcttttatcattcgtcgaaatgg

SEQ ID NO: 524204 - DNA, 75 bp, synthetic construct
  source 1..75: mol_type = other DNA
ggtgctatcggcggttaagtcattgggtggcggcgcaaaatggctaacgcaactgcttggtcgtggcctgatcgg

SEQ ID NO: 524205 - DNA, 75 bp, synthetic construct
  source 1..75: mol_type = other DNA
ccgctttatgaaaaacctgggttctctaagttttcattcattattgttcttagcttgttcttattgcaaaatggc

SEQ ID NO: 524206 - DNA, 75 bp, synthetic construct
  source 1..75: mol_type = other DNA
gcgatcgttttttcaattgtaagagtgattccattgatcttcagctcaaacaaattttccggcgtttgaaagagc

SEQ ID NO: 524207 - DNA, 75 bp, synthetic construct
  source 1..75: mol_type = other DNA
ttattcaatgaagcggaaatagctcatgccataaaatatgttgagggattgagagaaaaattcatgatgggacta

SEQ ID NO: 524208 - DNA, 75 bp, synthetic construct
  source 1..75: mol_type = other DNA
tgacggctccttacccaaactgagaaaagaacttgaaggcgcgcgcggtgaggctgaacgcacggcaaaggttat

SEQ ID NO: 524209 - DNA, 75 bp, synthetic construct
  source 1..75: mol_type = other DNA
tgcagatctgattgacggtccgctgcgttctgtcacgcagtggctcacgcgggtggtatcaaaggtgacggcgct

SEQ ID NO: 524210 - DNA, 75 bp, synthetic construct
  source 1..75: mol_type = other DNA
ttcttcaggacaaggttgccttgcttcagggggacctggcgaaaatcaatccgccgaagcctgtggaaaatggca

SEQ ID NO: 524211 - DNA, 75 bp, synthetic construct
  source 1..75: mol_type = other DNA
ccacccgtaaatacggggaagttgaccgggtatcgttctttaaggacattgccggggaagaggctttcacgtcgt

SEQ ID NO: 524212 - DNA, 75 bp, synthetic construct
  source 1..75: mol_type = other DNA
acgcagtggctcacgcgggtggtatcaagggtgacggcgctggcgcaggcccatccggcactgacgcgccagcta

SEQ ID NO: 524213 - DNA, 75 bp, synthetic construct
  source 1..75: mol_type = other DNA
ttgagcgcgcccgcgacgctgtcagtaagcggatgcgggtatcgtgaagcacgacgccagcttaacgcccttaat

SEQ ID NO: 524214 - DNA, 75 bp, synthetic construct
  source 1..75: mol_type = other DNA
tgacagcacaggctatctcacttgaaatagctgggcaccgtattttgtcggattgtcacctcaagctttatcctt

SEQ ID NO: 524215 - DNA, 75 bp, synthetic construct
  source 1..75: mol_type = other DNA
aggattccgctatgaccgccacggcaacctgctggcgtacacggacggtaacggcgttgtctggacaatggaata

SEQ ID NO: 524216 - DNA, 75 bp, synthetic construct
  source 1..75: mol_type = other DNA
agctatcattaatgctaaaagaggaaacggcttcacaaatatccagaatagtatagatcctgctaaagatcattt

SEQ ID NO: 524217 - DNA, 75 bp, synthetic construct
  source 1..75: mol_type = other DNA
gtaggtcaggatataggacgttcgtatagtactggatacactgataagaagtatctaacagatatgggggatggt

SEQ ID NO: 524218 - DNA, 75 bp, synthetic construct
  source 1..75: mol_type = other DNA
ttcacaccggaaggccttgatgaagccctctatcatggtgccgtactgcgtgtccggccgaaagccatgaccgtg

SEQ ID NO: 524219 - DNA, 75 bp, synthetic construct
  source 1..75: mol_type = other DNA
ctgaatatacttgctggacgacagctatctaacaactgtcaggctctttcccttttaggccaggatttactacgt

SEQ ID NO: 524220 - DNA, 75 bp, synthetic construct
  source 1..75: mol_type = other DNA
tccggcttccgtgctgtaatgcatcacaagagcaagcgtaacgaatacggcgtagagacccaggaagttgctaaa

SEQ ID NO: 524221 - DNA, 75 bp, synthetic construct
  source 1..75: mol_type = other DNA
ttcctgggtgcagctgccactatctatctgacagctgtgctcctcaatcgccagactgagcttgagttaagaaaa

SEQ ID NO: 524222 - DNA, 75 bp, synthetic construct
  source 1..75: mol_type = other DNA
cggtccccttggccgcgatttacacgttcgagcaaaacaaatcaaagttggtgctaaaattggtcggtcccaaat

SEQ ID NO: 524223 - DNA, 75 bp, synthetic construct
  source 1..75: mol_type = other DNA
gaacaaaaaaggcgtgactttcttttggttatggccactggcacaggtaaaacgcgcacttgcattgccatggtt

SEQ ID NO: 524224 - DNA, 75 bp, synthetic construct
  source 1..75: mol_type = other DNA
ggtgaaaaatttcattcttcactgactagctctatggtgtatggcttggcgagtatgcatgagtcatttcaacgt

SEQ ID NO: 524225 - DNA, 75 bp, synthetic construct
  source 1..75: mol_type = other DNA
atccgcgaagcacagatggcactgcatgacgctatctacgacaccaactacagcgcctacgcatacgcagcttaa

SEQ ID NO: 524226 - DNA, 75 bp, synthetic construct
  source 1..75: mol_type = other DNA
catgcaagaaatggaagtcgatgcggtgggcgtagtgcgtacagccgtagcggaggatataacgtgatttgttat

SEQ ID NO: 524227 - DNA, 75 bp, synthetic construct
  source 1..75: mol_type = other DNA
cggaggatataacgtgatttgttatgcgagtgatgttactgatgaaatggttaggcaatggagacaagagcataa

SEQ ID NO: 524228 - DNA, 75 bp, synthetic construct
  source 1..75: mol_type = other DNA
gtcgaagccagggatttagctcctgctcgcagtctggaattcacgaatatcgttgcaagctgcaaaacaaaaggc

SEQ ID NO: 524229 - DNA, 75 bp, synthetic construct
  source 1..75: mol_type = other DNA
atagagaagctatgcagacccttaaaaagattggtaaacgtgttgacggcaggaagcctgagcgcatctacaagg

SEQ ID NO: 524230 - DNA, 75 bp, synthetic construct
  source 1..75: mol_type = other DNA
catgcaaggaatggtagtagatgtggtggacgcagtgcatatagccgtaatggagggtatgacgtggtatgttat

SEQ ID NO: 524231 - DNA, 75 bp, synthetic construct
  source 1..75: mol_type = other DNA
tactaaccagaataaaagacgacaaatttagtgatactgctatagatttaactaatgtcctggatgcaatgaaag

SEQ ID NO: 524232 - DNA, 75 bp, synthetic construct
  source 1..75: mol_type = other DNA
ctggaggaagaaatccgggcagaccgcgtgagcagtgaaagccgggcgtggcttgcgcagtgcgggctgacggtg

SEQ ID NO: 524233 - DNA, 75 bp, synthetic construct
  source 1..75: mol_type = other DNA
ggggccggtggtgttagtgcgacgaacggcaccagtggcgggaatagcgtattcgcatcgttaattgctcctggt

SEQ ID NO: 524234 - DNA, 75 bp, synthetic construct
  source 1..75: mol_type = other DNA
aacggtgttaagtttgatggttctgcgaacatttcgataccaacaattacgtccagagggcgtgttactgcgctc

SEQ ID NO: 524235 - DNA, 75 bp, synthetic construct
  source 1..75: mol_type = other DNA
ggcgttgcccctcacatcccggcggccttttgccgggatgccaggagcgcaggtcacggcgcgacagaggcggcg

SEQ ID NO: 524236 - DNA, 75 bp, synthetic construct
  source 1..75: mol_type = other DNA
agtgatattggttgtctggagattcagggggccagtctagctgtcaactatggcaaggtaggtagtattggtaaa

SEQ ID NO: 524237 - DNA, 75 bp, synthetic construct
  source 1..75: mol_type = other DNA
tcaaatgttaattgaaactgtgtggggtatgaaatacatcgctatggacagtattcttgaagaggatgttcgtgc

SEQ ID NO: 524238 - DNA, 75 bp, synthetic construct
  source 1..75: mol_type = other DNA
gcctcaagggcggtgatagctcgttcggatcggtaatagcccctggtggtgaaggtggcgggaaagtgggagtta

SEQ ID NO: 524239 - DNA, 75 bp, synthetic construct
  source 1..75: mol_type = other DNA
ggttattctaacctcaattggcactgccattggtatttacgattttcataggcaaagtattatatcagcagttat

SEQ ID NO: 524240 - DNA, 75 bp, synthetic construct
  source 1..75: mol_type = other DNA
tctacttcttttgtggcattgttaggtattcctgttgcggagtatattcttaaggggaaaatagatgtaatatcc

SEQ ID NO: 524241 - DNA, 75 bp, synthetic construct
  source 1..75: mol_type = other DNA
gttatgctgtgattattacttttttgtttatacctatacaagttattctgtcgttaatttttaactattatttag

SEQ ID NO: 524242 - DNA, 75 bp, synthetic construct
  source 1..75: mol_type = other DNA
ctggactggcggagacggttgtggctgtctgtgcccccggcgacaggggcttaaacaggtgtatggcaccggaca

SEQ ID NO: 524243 - DNA, 75 bp, synthetic construct
  source 1..75: mol_type = other DNA
gaaagatatattttatgtgttttttctttcttcatatttacattatgctcagtacagggcgtatttcactcttct

SEQ ID NO: 524244 - DNA, 75 bp, synthetic construct
  source 1..75: mol_type = other DNA
tgacattaaatagtgcccagaaatgtctactgacaggattaattattatacttttggggccgtatggtggggcgt

SEQ ID NO: 524245 - DNA, 75 bp, synthetic construct
  source 1..75: mol_type = other DNA
gccaatcagtggtttcaggaactttatgcgcaaaaaaaatgggatatcgttggcgatctcagccagcagtgcgct

SEQ ID NO: 524246 - DNA, 75 bp, synthetic construct
  source 1..75: mol_type = other DNA
agagataaaacaagggtagaagttcttgatgtttctcctgtgtctaagttttatgcagagtctctggctaagatt

SEQ ID NO: 524247 - DNA, 75 bp, synthetic construct
  source 1..75: mol_type = other DNA
tacaaacaaaaacaatttattaaatctttatttttcatttggttaataattttttctcaattctggcacgcttct

SEQ ID NO: 524248 - DNA, 75 bp, synthetic construct
  source 1..75: mol_type = other DNA
atgagtaaggccggacatgtgtcgcttcgcagggcgttgtatatgcccgcaatggtagccaccagtaagtacgag

SEQ ID NO: 524249 - DNA, 75 bp, synthetic construct
  source 1..75: mol_type = other DNA
cgctccggcagttgccctcgcggcgctggcggcaaaacgcagtcgcccggactgtgatccgttgatgctggttct

SEQ ID NO: 524250 - DNA, 75 bp, synthetic construct
  source 1..75: mol_type = other DNA
actttgatgtgtaatgatccgattattatatgcaacgaacagcaccgctttattgttgcagagcaggtgcgccag

SEQ ID NO: 524251 - DNA, 75 bp, synthetic construct
  source 1..75: mol_type = other DNA
tgaattgtacatctgtaattttcgtcggtaagacaggaaagaggattgaaactctcattaacgcttgtttcagga

SEQ ID NO: 524252 - DNA, 75 bp, synthetic construct
  source 1..75: mol_type = other DNA
ccagcccaccttcactttattctcccggcgcctctgccgatccgaaattcaataaaccgctggtcgatactaccc

SEQ ID NO: 524253 - DNA, 75 bp, synthetic construct
  source 1..75: mol_type = other DNA
tgctgactatgcgacagaagtgtctaacatgtctcgtgcacagatcctgcaacaggcgggtacttctgttctggc

SEQ ID NO: 524254 - DNA, 75 bp, synthetic construct
  source 1..75: mol_type = other DNA
caacactgcggttaagtcctctattactaccgaatcaggcaccaaaattgcaattgctggtagtactgacggcac

SEQ ID NO: 524255 - DNA, 75 bp, synthetic construct
  source 1..75: mol_type = other DNA
taaagagtggcggataagctgtagtccggcactgaatatagcactccccaataatctgttctccagactgggcct

SEQ ID NO: 524256 - DNA, 75 bp, synthetic construct
  source 1..75: mol_type = other DNA
acgtctgctgctcagcgcggcattattccgtacggatattgaaaacgaagtggccgccaacgatgacgggacttg

SEQ ID NO: 524257 - DNA, 75 bp, synthetic construct
  source 1..75: mol_type = other DNA
ataccaaatatgaccgcgccaccgcctgcggcggcagcggacgccgggctgtcgcctgcccgcccggccagtcga

SEQ ID NO: 524258 - DNA, 75 bp, synthetic construct
  source 1..75: mol_type = other DNA
cattagaatatctaaactgtataacaaatattattaattcttgtggagtttatcctcaggatttaaaacacagag

SEQ ID NO: 524259 - DNA, 75 bp, synthetic construct
  source 1..75: mol_type = other DNA
tcttggtccgttgtatccatcgggggtggaaatcgtcttgccggactggacatatgaaccggaagagaaggaggt

SEQ ID NO: 524260 - DNA, 75 bp, synthetic construct
  source 1..75: mol_type = other DNA
aaacatggatttatcaaagagatacaatgaatgaaagagaatataataagggggttcaccagtatggtcctgctg

SEQ ID NO: 524261 - DNA, 75 bp, synthetic construct
  source 1..75: mol_type = other DNA
tatatagccgctctgccgttcagcaggcctttagtttactgggatggccaagtaggtgatgctgccaacttactg

SEQ ID NO: 524262 - DNA, 75 bp, synthetic construct
  source 1..75: mol_type = other DNA
atgcgcgaaataactaaagggcaaccgccggccagtttgcaacagtgggtgagagcaaaaccacgggataaaaat

SEQ ID NO: 524263 - DNA, 75 bp, synthetic construct
  source 1..75: mol_type = other DNA
tactacagcacaccagaaatgcggaatattttgctgcaaaatgtcgttggccacgctgtccggaaagcaaaaaat

SEQ ID NO: 524264 - DNA, 75 bp, synthetic construct
  source 1..75: mol_type = other DNA
cgagcgaagtggtgcagaaaaagattctcggtcttcgcgtagatcctgaaacgccggaatcattcatgctgcgac

SEQ ID NO: 524265 - DNA, 75 bp, synthetic construct
  source 1..75: mol_type = other DNA
tagtggtaaaaatgacctggattatccctctgctgatatacgagcgaagatcagtaaagatatagaaggtggtat

SEQ ID NO: 524266 - DNA, 75 bp, synthetic construct
  source 1..75: mol_type = other DNA
tccatccagaagatatacatctcactgcaaaagacttcgaagcaagtaaagataacatctctaaggatgaatggg

SEQ ID NO: 524267 - DNA, 75 bp, synthetic construct
  source 1..75: mol_type = other DNA
ccgttcagcaggcctttagtttactgggatggccaagtattaaaatcaacgactgagattaaaaatgatgatggg

SEQ ID NO: 524268 - DNA, 75 bp, synthetic construct
  source 1..75: mol_type = other DNA
cctggcctaacaaattgcaaccaggaatatataaaaacatggggagtaatagcgttaacattattattaataata

SEQ ID NO: 524269 - DNA, 75 bp, synthetic construct
  source 1..75: mol_type = other DNA
taacttgtcagttggatgaacaacaaatgtcatcgctgctttatgaaagagatgatttaagcgccattgattttt

SEQ ID NO: 524270 - DNA, 75 bp, synthetic construct
  source 1..75: mol_type = other DNA
caatctcaagcatcccatcagaaagacggatattgattaacattaaccacgattttcctaacaatggtaatcttt

SEQ ID NO: 524271 - DNA, 75 bp, synthetic construct
  source 1..75: mol_type = other DNA
aatgggtgcctgcgactatattctcaaaacgacgcccccctgctgttttgctagcgcgtttacgtttgcatttgc

SEQ ID NO: 524272 - DNA, 75 bp, synthetic construct
  source 1..75: mol_type = other DNA
aagcacaacttttggctaaaattggctcaaccgctttttatatggctaaacgttttaaccctaaagaatttccaa

SEQ ID NO: 524273 - DNA, 75 bp, synthetic construct
  source 1..75: mol_type = other DNA
atcattactttaccgcgccatagcggaagaaggtatgaagcacgggcaaggggggcattcatcattgcgacgaag

SEQ ID NO: 524274 - DNA, 75 bp, synthetic construct
  source 1..75: mol_type = other DNA
tttgctgtttcttttttatttcttgtttttttttcttataagagaaattatatatccattaatccaaaatatttc

SEQ ID NO: 524275 - DNA, 75 bp, synthetic construct
  source 1..75: mol_type = other DNA
ttgtctctctgcttgtagaaacggtgggcttgttgctgctctggcaagccccaggtgcatgggtcgcattagcgg

SEQ ID NO: 524276 - DNA, 75 bp, synthetic construct
  source 1..75: mol_type = other DNA
gggcaggccgtaaaatacgctaagacaggagaaagtgttgattctatatccaaagcttcggttgtgtcatgcgag

SEQ ID NO: 524277 - DNA, 75 bp, synthetic construct
  source 1..75: mol_type = other DNA
tggcaaaactgctgcggtaaaagaagcggcgtttgcggtcccacactcagcgagccgcttcagtgggaaggcgtt

SEQ ID NO: 524278 - DNA, 75 bp, synthetic construct
  source 1..75: mol_type = other DNA
tcagtaagttggcagcatcaccaatttcttgtattaacattaggcattatctcttgccaggcttacgcagaagat

SEQ ID NO: 524279 - DNA, 75 bp, synthetic construct
  source 1..75: mol_type = other DNA
tccgcgtatccaccaggccagcccgagcaatccggcagtgaacagcaaaaataccaggttcggcattccaggcac

SEQ ID NO: 524280 - DNA, 75 bp, synthetic construct
  source 1..75: mol_type = other DNA
ctttatatggtttaaaaggtgttactctggcgtattgtataacctatttttgttactggattatgatgatagttg

SEQ ID NO: 524281 - DNA, 75 bp, synthetic construct
  source 1..75: mol_type = other DNA
gttggattttttgcgaaaaatttatacgaatagccgtgggttttatattatttgcattaatttcaagagtgctta

SEQ ID NO: 524282 - DNA, 75 bp, synthetic construct
  source 1..75: mol_type = other DNA
ccgctgaacgtgcgcaccagacagaaattatttgccgacttcttgaggtgtaccctaataaattaaatgatggtg

SEQ ID NO: 524283 - DNA, 75 bp, synthetic construct
  source 1..75: mol_type = other DNA
atcataatacgcatatagttttatatgatgaggtaagtggtctttgcccaaaatgctttaaacctttaatggttc

SEQ ID NO: 524284 - DNA, 75 bp, synthetic construct
  source 1..75: mol_type = other DNA
tggtaagcatgccttcgcaactcttcactatggcgcgttcttttaaagccgttgccaatggcaaaatttatatcg

SEQ ID NO: 524285 - DNA, 75 bp, synthetic construct
  source 1..75: mol_type = other DNA
tcaacagaccatgaatggtggcgtgaacaagcactttcctgtgatatgcgcaaaaaacctgagcgcccgacacta

SEQ ID NO: 524286 - DNA, 75 bp, synthetic construct
  source 1..75: mol_type = other DNA
tcaacaggccatgaatggtggcgagaacaaacactttgctgtgataagcgcagaaatccccagcgccccacacta

SEQ ID NO: 524287 - DNA, 75 bp, synthetic construct
  source 1..75: mol_type = other DNA
tcataagaattctcgaatatattgataatacgttaattacctttagcaatgaagaaataattaaatgtcaaattg

SEQ ID NO: 524288 - DNA, 75 bp, synthetic construct
  source 1..75: mol_type = other DNA
tccattgcaggggagatatatcacccaggacccgatagggctgagaggtgaatggaatctgtataaatatccatt

SEQ ID NO: 524289 - DNA, 75 bp, synthetic construct
  source 1..75: mol_type = other DNA
gctggactctctcatcgattgctatttagatgagaaattttatcttactaaatctcgtaaaaaacacgttttact

SEQ ID NO: 524290 - DNA, 75 bp, synthetic construct
  source 1..75: mol_type = other DNA
tcaacagaccatgaatggtggcgtgaacaggcactttcctgtgatatgcgcaaaaaacctgaacgcccgacacta

SEQ ID NO: 524291 - DNA, 75 bp, synthetic construct
  source 1..75: mol_type = other DNA
agggtgctttacatcagagtcagcaactaaagctcataatcgaaatatggaaaataaattacatgatgctgaatt

SEQ ID NO: 524292 - DNA, 75 bp, synthetic construct
  source 1..75: mol_type = other DNA
tatgggataccgccgatttatttattagtgaatgctcaatgtttgctggagattttgcggtaagaacacgcacaa

SEQ ID NO: 524293 - DNA, 75 bp, synthetic construct
  source 1..75: mol_type = other DNA
caaacaacgcccgtggaattaatattaaaggcgctagaaacctgacgtttacaggaaacactatcacctactgtg

SEQ ID NO: 524294 - DNA, 75 bp, synthetic construct
  source 1..75: mol_type = other DNA
cttgcacaatgtcaaattcagttcggtgtaattgacagaccaacgcatagcgctgagagatcccctcataatttc

SEQ ID NO: 524295 - DNA, 75 bp, synthetic construct
  source 1..75: mol_type = other DNA
aaagctctcacaaaacaagattaataaatttaataattaccttttccgctggcaaggcctggatggctcagaaat

SEQ ID NO: 524296 - DNA, 75 bp, synthetic construct
  source 1..75: mol_type = other DNA
acatttgccaccgccctggcaaacattgaaaaatatcctgattacatttttggcgctagtcagtaccaacttttt

SEQ ID NO: 524297 - DNA, 75 bp, synthetic construct
  source 1..75: mol_type = other DNA
attcttctcattaacaataattgttttttctgaatatttttcgttaaaattattgggcactattaattatagtgg

SEQ ID NO: 524298 - DNA, 75 bp, synthetic construct
  source 1..75: mol_type = other DNA
gtggtctgaaagttggtgatattgcggttgccctgaacggacaggattttacgcagccgggagcaacaagcatct

SEQ ID NO: 524299 - DNA, 75 bp, synthetic construct
  source 1..75: mol_type = other DNA
atcacgtaccgcctgatttacagactgtgcatgacgacgtaacatttcttggaatttttgatcatcgtccgatac

SEQ ID NO: 524300 - DNA, 75 bp, synthetic construct
  source 1..75: mol_type = other DNA
agttgcagtggcgtcacctggcggttaaacaattcaacgccaatcgcctgttccagtgcacggatgcggcggctg

SEQ ID NO: 524301 - DNA, 75 bp, synthetic construct
  source 1..75: mol_type = other DNA
tactgccagcgctaatggttaaaatggcatcgcatgttaatgcccgctacgccagttatatggtgctgtttattg

SEQ ID NO: 524302 - DNA, 75 bp, synthetic construct
  source 1..75: mol_type = other DNA
gcagccagcgatatcactctggataatgccagtgatagttctctgcaaaatttaagcgcaagaggaaagcaactc

SEQ ID NO: 524303 - DNA, 75 bp, synthetic construct
  source 1..75: mol_type = other DNA
acctccgctgcaccgacgttctttgcaccacaccattgtgaagaccttggttcttattttgctgatggaggtctg

SEQ ID NO: 524304 - DNA, 75 bp, synthetic construct
  source 1..75: mol_type = other DNA
aattactagatgtgaagaaaaaaagagataaaaaactgtatttactttcaaatgaaattttgaaaaccttaaact

SEQ ID NO: 524305 - DNA, 75 bp, synthetic construct
  source 1..75: mol_type = other DNA
gcagcttccacggcatcgatgaagctattaaatttagggcagagattgaagagccgcgtcgccaggagctgaggg

SEQ ID NO: 524306 - DNA, 75 bp, synthetic construct
  source 1..75: mol_type = other DNA
attaaccagaacgcaacacatgcgcatccatcaatatcagtgcgaagatccaatgcgcggtattgatttgtataa

SEQ ID NO: 524307 - DNA, 75 bp, synthetic construct
  source 1..75: mol_type = other DNA
atcgtagggccacaaacctggcggaaattgggtgttcctgaacttttaacgcgaagttcatcaggctctcccgcc

SEQ ID NO: 524308 - DNA, 75 bp, synthetic construct
  source 1..75: mol_type = other DNA
aaatcccacgtgagaaaatctatcctgaagaatttgcctctctggagggcgtttctcttagtactgttcgccgtt

SEQ ID NO: 524309 - DNA, 75 bp, synthetic construct
  source 1..75: mol_type = other DNA
gaacgttcaaggggatgagcgtgatgtaatctttatttcctttacctatggaccttctgagcatggtggaaaggt

SEQ ID NO: 524310 - DNA, 75 bp, synthetic construct
  source 1..75: mol_type = other DNA
agtacgtctgtgagtacgagtaaagacggtggcacaggcttcagcaccggtgtgtccggctcgctgaatgaccgt

SEQ ID NO: 524311 - DNA, 75 bp, synthetic construct
  source 1..75: mol_type = other DNA
caattttgattcgcccagcaagtttaacggttgtcaccgatgcctggaagtatctggaatggtccagagaaggtg

SEQ ID NO: 524312 - DNA, 75 bp, synthetic construct
  source 1..75: mol_type = other DNA
acaaatatttgttggctgtagtattggttgcgggtaatacattggcctacgcagatggcatgttacccgaaacca

SEQ ID NO: 524313 - DNA, 75 bp, synthetic construct
  source 1..75: mol_type = other DNA
atttgacccggataaaatgactatatattggaatagtaaggcggctttattttgttcaactgatttaaaatcgaa

SEQ ID NO: 524314 - DNA, 75 bp, synthetic construct
  source 1..75: mol_type = other DNA
cggcagtgtctatcggccttgccagttatattgggatgcccgtctccacaacacacgtactctcgtctgcagtag

SEQ ID NO: 524315 - DNA, 75 bp, synthetic construct
  source 1..75: mol_type = other DNA
gcaccccgcttgagaaagccattaatgcagtgggcggctctcaaaaggtgcttgctgaaaaggtcggcgtaacgc

SEQ ID NO: 524316 - DNA, 75 bp, synthetic construct
  source 1..75: mol_type = other DNA
tgaccgcagcaatacgcaggtgcgcgctttcacgtatgacgcgcagcacccgggccggatggtggcgcaccgtta

SEQ ID NO: 524317 - DNA, 75 bp, synthetic construct
  source 1..75: mol_type = other DNA
aggtgcgttgagtaaaataacaggtgcacaatttagccgattttgtcaacgtataggtgttgaatgtgaagatgc

SEQ ID NO: 524318 - DNA, 75 bp, synthetic construct
  source 1..75: mol_type = other DNA
ctgaacagctatgactggaacacggtgacgattgatgcgggcacactgccgctgagcacagaactgacgaatacc

SEQ ID NO: 524319 - DNA, 75 bp, synthetic construct
  source 1..75: mol_type = other DNA
ttatctgaatgcgtcgtacagtggtgaccgggcttatctgaatggtgccctgaaccactcgcagtccggcggaac

SEQ ID NO: 524320 - DNA, 75 bp, synthetic construct
  source 1..75: mol_type = other DNA
gtcccgcagatgtagcgctaataagaagaaaagatcaactaaaccatcaaagagcatgggatatattatctgata

SEQ ID NO: 524321 - DNA, 75 bp, synthetic construct
  source 1..75: mol_type = other DNA
ggggcaaccagcttaatgaggagaacccgcatcacctgcaccagccgtaccggctgccggggcagcagtatgata

SEQ ID NO: 524322 - DNA, 75 bp, synthetic construct
  source 1..75: mol_type = other DNA
agatccgagaaattttaatcagcgagtcagcttgggaagaaatgacctgcttattcgcaccttccctaaagagac

SEQ ID NO: 524323 - DNA, 75 bp, synthetic construct
  source 1..75: mol_type = other DNA
agagaagtattgtcaccaatcacgttgtgacgcagagtatctcagaactagactggccccatgaatctccagaca

SEQ ID NO: 524324 - DNA, 75 bp, synthetic construct
  source 1..75: mol_type = other DNA
ttgctctacaaaaaggagagggtggtttatataatttaggtgggttggattttaagggatgcttcttttctggac

SEQ ID NO: 524325 - DNA, 75 bp, synthetic construct
  source 1..75: mol_type = other DNA
atgaacaggcccttttcgataatataataaaaagtgattttcatgttgcttcacttcagccaggtagtacgcgta

SEQ ID NO: 524326 - DNA, 75 bp, synthetic construct
  source 1..75: mol_type = other DNA
ttaagagcgactgcgagacgctggcggataacgtacagcagaacgcagaggccgttgccgaagacaaaaaacagg

SEQ ID NO: 524327 - DNA, 75 bp, synthetic construct
  source 1..75: mol_type = other DNA
gctgtttatgacgattcaaagcccggcacgctgaacgactttctgaccgcccccgatgaaggcgacctcaaaccc

SEQ ID NO: 524328 - DNA, 75 bp, synthetic construct
  source 1..75: mol_type = other DNA
gtcaggcaggatgctgaagccgccaaacaggccgcatccgatgcagagcaggccagagatgatattgatgttgcg

SEQ ID NO: 524329 - DNA, 75 bp, synthetic construct
  source 1..75: mol_type = other DNA
tgtttgttgatgagaatggaattctgcaacaggtaaacctttcaatcacaagagatgacgttaaggtgacatgtc

SEQ ID NO: 524330 - DNA, 75 bp, synthetic construct
  source 1..75: mol_type = other DNA
gttcagtggttagagttatctgaaagtgaaaaagaacatttaaatccagattatattgttggtgcatctatgttt

SEQ ID NO: 524331 - DNA, 75 bp, synthetic construct
  source 1..75: mol_type = other DNA
tggggattggcgggctggaaggccgtttactgaaggatggtgaccgactcccgatgggtaaatcgaagcgtgatt

SEQ ID NO: 524332 - DNA, 75 bp, synthetic construct
  source 1..75: mol_type = other DNA
atggaaattgttcagaacgtttattcaatttttatgagtgctgcttttgtgaaagaattccggggggtattaatt

SEQ ID NO: 524333 - DNA, 75 bp, synthetic construct
  source 1..75: mol_type = other DNA
ttatataatttaggtggattggattttaagggatgcttcttttctggacagaacttcagtaactatgatattcaa

SEQ ID NO: 524334 - DNA, 75 bp, synthetic construct
  source 1..75: mol_type = other DNA
aagtcaagctgtctggtgaaaatcttgaaacggtattcaaatacaaaaaaggaagttttgtccgggagatagcca

SEQ ID NO: 524335 - DNA, 75 bp, synthetic construct
  source 1..75: mol_type = other DNA
tgaatacgtctcccttgcgcccctgtcagaaaagggacgctcactgctggcgcaggaaacgccggaagccatgcg

SEQ ID NO: 524336 - DNA, 75 bp, synthetic construct
  source 1..75: mol_type = other DNA
agcagattaatagttttgaagacttgcctgtaaaaattgagtttgttcttggaaagaaaataatgaatctatatg

SEQ ID NO: 524337 - DNA, 75 bp, synthetic construct
  source 1..75: mol_type = other DNA
tctggacgaaatgaccgggcatgccggatgcctgccgaactgcaaatgctggccggagattcaagtgccgcctcc

SEQ ID NO: 524338 - DNA, 75 bp, synthetic construct
  source 1..75: mol_type = other DNA
gccgccgctggcgcttatcagtgcggaaggggcaacagaatggtgcgcagaatacgatgaatggggcaacctgct

SEQ ID NO: 524339 - DNA, 75 bp, synthetic construct
  source 1..75: mol_type = other DNA
attggcaacgttaccggaccattgatgggagcagcgatttcagcgaactacggtttcagagcggtatttctcgtc

SEQ ID NO: 524340 - DNA, 75 bp, synthetic construct
  source 1..75: mol_type = other DNA
ttcccttaatttctgccgagctcgctgggatggctttaatgccagaaacggaaaggttaataggggaatggctca

SEQ ID NO: 524341 - DNA, 75 bp, synthetic construct
  source 1..75: mol_type = other DNA
actaataagaatatggacaggggaattaaatgtttggttagataaagtcacggtctgccaatacgaaaacgctcc

SEQ ID NO: 524342 - DNA, 75 bp, synthetic construct
  source 1..75: mol_type = other DNA
atttaaccccgccaccgggtaatagcgtaagcgtaaagccaatgccgtctgtaacacctgctccttgcagactaa

SEQ ID NO: 524343 - DNA, 75 bp, synthetic construct
  source 1..75: mol_type = other DNA
cggatgtagtgaaacgctttgaggaaatggtggcgcaggcgcagcagagcgcggaagcggcagcggaaagcgaac

SEQ ID NO: 524344 - DNA, 75 bp, synthetic construct
  source 1..75: mol_type = other DNA
tgatgtttatcttcggtcgtgtattgaaagagaatattgtgtcggtgatatttcggtttacgacgactccaggtc

SEQ ID NO: 524345 - DNA, 75 bp, synthetic construct
  source 1..75: mol_type = other DNA
atcctttcagatatggatgctgaactcacagcgctagagcggaaactagccaaggtccgcgatataaaacaagga

SEQ ID NO: 524346 - DNA, 75 bp, synthetic construct
  source 1..75: mol_type = other DNA
tggaataataagcttgacgctagtgccgtaaaattgccaaagatatcaaaaaaattagtatcctcttcgttttta

SEQ ID NO: 524347 - DNA, 75 bp, synthetic construct
  source 1..75: mol_type = other DNA
cagtttggctctttttcggagtgtataattctccacacagtgtcaccctgggaagggatgccggtcaggctgagt

SEQ ID NO: 524348 - DNA, 75 bp, synthetic construct
  source 1..75: mol_type = other DNA
atgtgtcacggtctgtttatcgaattaattgcagatataaaaaaaccaaccgtaagggttggttttttcttggga

SEQ ID NO: 524349 - DNA, 75 bp, synthetic construct
  source 1..75: mol_type = other DNA
gtaataccgttcttcttatctatcaaagaaaaaggagaattgcctattactgatgatcgtatgactcgctttatg

SEQ ID NO: 524350 - DNA, 75 bp, synthetic construct
  source 1..75: mol_type = other DNA
taactggtggtactggctcattcggcaataagtttgtgcgcatgacattagataaatataaccctaaaaagatta

SEQ ID NO: 524351 - DNA, 75 bp, synthetic construct
  source 1..75: mol_type = other DNA
gtacaatcccttcgaatgtgtaaaaacaaatatcaatggtgcgattaacgtgattgatgcttgtattgacaaagg

SEQ ID NO: 524352 - DNA, 75 bp, synthetic construct
  source 1..75: mol_type = other DNA
taaacaacattttaaaattccttatgtcggtctgacaggaaactaccgttacgataattttgagtttggtggtgc

SEQ ID NO: 524353 - DNA, 75 bp, synthetic construct
  source 1..75: mol_type = other DNA
tggtaaaacaaaagaacgtgtttatgatcctgaagaaggcggacgtaaagtcagccaactggactggaaataccg

SEQ ID NO: 524354 - DNA, 75 bp, synthetic construct
  source 1..75: mol_type = other DNA
gtgacgctcccggcggagctggcggtgatgctggggaggctggagcgggaactgcgcgcgggagcggtgagtgcg

SEQ ID NO: 524355 - DNA, 75 bp, synthetic construct
  source 1..75: mol_type = other DNA
aatatgatgttgatgaaaataacttaaaagtattcaacgtatactttgataataatgaagagttagttactgatg

SEQ ID NO: 524356 - DNA, 75 bp, synthetic construct
  source 1..75: mol_type = other DNA
ataacgttaatacagttttgggtagtagaagttgtaatgaaaacaattcttccaaccccatggggctactagctc

SEQ ID NO: 524357 - DNA, 75 bp, synthetic construct
  source 1..75: mol_type = other DNA
caaccaaatagataagatttcacctgtagctaaaaactcgcagcaagttaaaggtcactatggagataaatttaa

SEQ ID NO: 524358 - DNA, 75 bp, synthetic construct
  source 1..75: mol_type = other DNA
gtccgtggtttcatgaaaaccggtcttgctgctgaacatcatcgtgttggtcatttgcttaatgagtttctgaat

SEQ ID NO: 524359 - DNA, 75 bp, synthetic construct
  source 1..75: mol_type = other DNA
gcagtgaaagccgccagtggcttgcgcagtgcgggctgacggtggagcggctggcggcacagatagagccggttt

SEQ ID NO: 524360 - DNA, 75 bp, synthetic construct
  source 1..75: mol_type = other DNA
tgttcggtatgtacggcagaaaagtaaagctatcccattctgaaatgattgaagataataaaaaagacttggctg

SEQ ID NO: 524361 - DNA, 75 bp, synthetic construct
  source 1..75: mol_type = other DNA
gcgaggcagctcacgccataacggactatatcgttggatattacagcgcactaagaccgcacgaatataacggtg

SEQ ID NO: 524362 - DNA, 75 bp, synthetic construct
  source 1..75: mol_type = other DNA
cactggatggtatccaggtaccggaagtgaacgatcaggacggcaacggcaaggcggatgcagaggaagcggcag

SEQ ID NO: 524363 - DNA, 75 bp, synthetic construct
  source 1..75: mol_type = other DNA
caaggctgcgaaggacaagcttgcagagctgaatgcagacaagctgatcacgccggaagagaaggcgcagctgga

SEQ ID NO: 524364 - DNA, 75 bp, synthetic construct
  source 1..75: mol_type = other DNA
tggcaaggcaaaaacttctcgcccctgttcaagcgcacaacgcgctgtcaccagcgaaccactgcgcaaagcagc

SEQ ID NO: 524365 - DNA, 75 bp, synthetic construct
  source 1..75: mol_type = other DNA
gatatggagattgcagctatagcaagaaaattcggcgccgaagttccgtttatgcggccagaagaactttcgaat

SEQ ID NO: 524366 - DNA, 75 bp, synthetic construct
  source 1..75: mol_type = other DNA
ctgtagcgactattatcaaatcgctatctgaaaaaactgctgcgttagaaacacattctgctgacacggttttga

SEQ ID NO: 524367 - DNA, 75 bp, synthetic construct
  source 1..75: mol_type = other DNA
aactggagaggatgagtatatcgaaataaaacaaacaggtgataagtcatttaatattactctggttggtagaga

SEQ ID NO: 524368 - DNA, 75 bp, synthetic construct
  source 1..75: mol_type = other DNA
cccgtttctcttaacgccacgctgcggccctatcagcaaacgggttttgcctggctgacgcataacctggcgctg

SEQ ID NO: 524369 - DNA, 75 bp, synthetic construct
  source 1..75: mol_type = other DNA
aaaagcgctggcggagatgactgtcggcagcggcgagcagtggttgggtaagatgacggatgatgaactggaaga

SEQ ID NO: 524370 - DNA, 75 bp, synthetic construct
  source 1..75: mol_type = other DNA
tctgggcgatctcgttgcagatggatatcaggttgctgacgatgttgaaaaatatggcgcaatcctgttttgtac

SEQ ID NO: 524371 - DNA, 75 bp, synthetic construct
  source 1..75: mol_type = other DNA
tgttttgggggattttgttgaaaacccattggctcggatatattatttgctaaattatattgttatcggtataaa

SEQ ID NO: 524372 - DNA, 75 bp, synthetic construct
  source 1..75: mol_type = other DNA
tgatatatgggcatctgataaaatagaaaaacaactttcatttatgataaagaatgactgtgatttctcttatgg

SEQ ID NO: 524373 - DNA, 75 bp, synthetic construct
  source 1..75: mol_type = other DNA
taagcagatggatgcggcgctttctggcaaggcgcaactgttattggatcttctggacagcattgaagagacaac

SEQ ID NO: 524374 - DNA, 75 bp, synthetic construct
  source 1..75: mol_type = other DNA
cagatggaaggcttcttctacatggcaagccagtacaaagagaagattgctaacggtactgacctgacggcgcag

SEQ ID NO: 524375 - DNA, 75 bp, synthetic construct
  source 1..75: mol_type = other DNA
ttctatctggacggtgtcgtgaagctgaaccgttttgaaagtaacgtagccggtaaaatgagcagcggtggagcc

SEQ ID NO: 524376 - DNA, 75 bp, synthetic construct
  source 1..75: mol_type = other DNA
ctcatattatcaaccatggccggcaggaggtctatggtgggatatctaatagtagtattattgaaactggtggcg

SEQ ID NO: 524377 - DNA, 75 bp, synthetic construct
  source 1..75: mol_type = other DNA
gtgatcgccagagcgatccatcaacttagcccgcgacacgacaagccgctggtcaaaatcaactgcgctgccatc

SEQ ID NO: 524378 - DNA, 75 bp, synthetic construct
  source 1..75: mol_type = other DNA
cagttgcgttcttctatttataatccactgactatatttaagctcttgaatgtcataataaaagaaaaaccagat

SEQ ID NO: 524379 - DNA, 75 bp, synthetic construct
  source 1..75: mol_type = other DNA
atgtttatcacgaataaagctatttatgttaccaatatcatttcgagtgcgcacactatctatctgttttttcag

SEQ ID NO: 524380 - DNA, 75 bp, synthetic construct
  source 1..75: mol_type = other DNA
tggtggtacggcaacaaatgttacccagcacgatggtgcaattttaaaaactaacactaacggtacgacggtgag

SEQ ID NO: 524381 - DNA, 75 bp, synthetic construct
  source 1..75: mol_type = other DNA
ttgtctggtgattcagggggccagtctaatgagactgtagatggcaaccaaaaagtggatgaacgaggtacaaca

SEQ ID NO: 524382 - DNA, 75 bp, synthetic construct
  source 1..75: mol_type = other DNA
tcgcagcaacgggctgggcggtcacattgaaaccgggatgcgatttaccgatggtaactggaacctgacgccgta

SEQ ID NO: 524383 - DNA, 75 bp, synthetic construct
  source 1..75: mol_type = other DNA
cagtcgatacccgcagtatatatcgtgaactgggcgcaacgctgagttacaacatgcgtctggggaacggtatgg

SEQ ID NO: 524384 - DNA, 75 bp, synthetic construct
  source 1..75: mol_type = other DNA
ttattctctgggcggctatgccagttgggaacatgaaagtggtttctatctggacggtgtcgtgaagctgaaccg

SEQ ID NO: 524385 - DNA, 75 bp, synthetic construct
  source 1..75: mol_type = other DNA
tcccattcacatatcggttttgatcgcggaggacatggcagtgtgggcagttattctctgggcggctatgccagt

SEQ ID NO: 524386 - DNA, 75 bp, synthetic construct
  source 1..75: mol_type = other DNA
cgcgccatatgaatcgcgcaattgacgccatcccgaccgaggcactacgccagttgatgtcgtgggattggccgg

SEQ ID NO: 524387 - DNA, 75 bp, synthetic construct
  source 1..75: mol_type = other DNA
tattataaccgtagtcttaaaacaatttcttgtcataagataaaactctataagaaaattggagtgaaaagtgat

SEQ ID NO: 524388 - DNA, 75 bp, synthetic construct
  source 1..75: mol_type = other DNA
tacctcaacagccacgacgtcaccacgctgatttgcaacggcggctatcgcttctggggatcgcgcacctgcagc

SEQ ID NO: 524389 - DNA, 75 bp, synthetic construct
  source 1..75: mol_type = other DNA
tgcgtgcaaaaattgatgaagaaatcggctggcataaaacgctgtccaacgttgacgtcaacggcgtgaccggca

SEQ ID NO: 524390 - DNA, 75 bp, synthetic construct
  source 1..75: mol_type = other DNA
gcaaatcaggttaaagtgtatgaggcggcaaatgaaacaaaaaaatcaataaaggttattttgtattttactgat

SEQ ID NO: 524391 - DNA, 75 bp, synthetic construct
  source 1..75: mol_type = other DNA
tagcatggttgggaacggtgggagtggattgggtattgattttgcaaattccttaaccacctcattttcaagtat

SEQ ID NO: 524392 - DNA, 75 bp, synthetic construct
  source 1..75: mol_type = other DNA
ggacaaagattattccactaacacaggccatgagtggccaactccctgagtttactgcaacagatgattacttga

SEQ ID NO: 524393 - DNA, 75 bp, synthetic construct
  source 1..75: mol_type = other DNA
gattatttcagcaaacttaacacagaccagcgagaaaaattttccccctttgcactgccgcgcgtgtccgacgat

SEQ ID NO: 524394 - DNA, 75 bp, synthetic construct
  source 1..75: mol_type = other DNA
atctctctggatgaactgatcgccacgctcgacccggttcttcagacaataccgctgacgtttctggactcgcct

SEQ ID NO: 524395 - DNA, 75 bp, synthetic construct
  source 1..75: mol_type = other DNA
cacgacgcagccatacattattttctgaacttacccagcgtgaagaacgagggaactggttcaggattgaagatt

SEQ ID NO: 524396 - DNA, 75 bp, synthetic construct
  source 1..75: mol_type = other DNA
tacgccaccgcccgcgccgtgggcctgcgtgcaaaaattgatgaagaaatcggctggcataaaacgctgtccaac

SEQ ID NO: 524397 - DNA, 75 bp, synthetic construct
  source 1..75: mol_type = other DNA
ttaaccgacgtgcgatctgcgctgggtaaagccggtgatagcggtacgctggcgcactctctggatgccatcgcc

SEQ ID NO: 524398 - DNA, 75 bp, synthetic construct
  source 1..75: mol_type = other DNA
ctctcagttggtcgaactacagcagcaaattttcactcagcgacatgacttttccaggcaacatatccgcacaaa

SEQ ID NO: 524399 - DNA, 75 bp, synthetic construct
  source 1..75: mol_type = other DNA
caggcacgacgctcaccggcggtgaacaaattgtcgagggtgtggcgaatgagacaacaattaacgacggcggaa

SEQ ID NO: 524400 - DNA, 75 bp, synthetic construct
  source 1..75: mol_type = other DNA
tggtgggcgccgttgttggcggagccagcgcaatcactattgcagctgtgatgctgggcaatgcggatggacttg

SEQ ID NO: 524401 - DNA, 75 bp, synthetic construct
  source 1..75: mol_type = other DNA
ccacatttggccttaactggctttcagtgcgggcttgttcaccgactgttgaggacgaaagccggattgctgaca

SEQ ID NO: 524402 - DNA, 75 bp, synthetic construct
  source 1..75: mol_type = other DNA
ggccggtgccggtagtccagataaccttgcgcgccgtcctatccgtgttctgctggcggatgaggtggataaata

SEQ ID NO: 524403 - DNA, 75 bp, synthetic construct
  source 1..75: mol_type = other DNA
gaacccggtgatgccggtcgctacagtatgtcagtggagccggggaattacagcgtcattctgcagacagaaggg

SEQ ID NO: 524404 - DNA, 75 bp, synthetic construct
  source 1..75: mol_type = other DNA
cgcaaggaccggaacaggctcgcttcttgaatgcggaagagaagagctggttgattaaaaaactggccgccgaac

SEQ ID NO: 524405 - DNA, 75 bp, synthetic construct
  source 1..75: mol_type = other DNA
ttcaccgctgcaatatgtctgctgctctcggtctggacattcgcccagccggttattagcttcatctgtatttgc

SEQ ID NO: 524406 - DNA, 75 bp, synthetic construct
  source 1..75: mol_type = other DNA
gaaaaaagcgggagcgtaataatgaatctggaacaggtaacggagctgctgccatcagcagtgattcaaatagct

SEQ ID NO: 524407 - DNA, 75 bp, synthetic construct
  source 1..75: mol_type = other DNA
gttcggtaataccaacgttggtgttgtgcgtttccctatggatgcagaaattaaactttttgacggacagcatcg

SEQ ID NO: 524408 - DNA, 75 bp, synthetic construct
  source 1..75: mol_type = other DNA
tgcaaaattctctgtcaatggggatgagcttgctactagtgacatctatgacatttgggaggcatggctcaagct

SEQ ID NO: 524409 - DNA, 75 bp, synthetic construct
  source 1..75: mol_type = other DNA
cgcgcatgacgttatttatggtgaccttgagacggaagaaccctggaagcgactggatgcatacctgaaacagat

SEQ ID NO: 524410 - DNA, 75 bp, synthetic construct
  source 1..75: mol_type = other DNA
cgaaaaaatatatcgatgcgaagggcgatccggataaggaacaggcgtggtggaatacccagatggggcttccgc

SEQ ID NO: 524411 - DNA, 75 bp, synthetic construct
  source 1..75: mol_type = other DNA
agtattaagcgttgcacctcttcctgtttttatcgcaatggaaattgcctatctgtgtgcagcgagggtttccga

SEQ ID NO: 524412 - DNA, 75 bp, synthetic construct
  source 1..75: mol_type = other DNA
atggcagataaaaaaacggcgccactactgcttaacgtagacgccagcgaggtgcttacccaggccggggagctt

SEQ ID NO: 524413 - DNA, 75 bp, synthetic construct
  source 1..75: mol_type = other DNA
ggctgaaggggggatggaacctgtatacatatccgctgagcccggtgaatagcatggatccattaggattatatg

SEQ ID NO: 524414 - DNA, 75 bp, synthetic construct
  source 1..75: mol_type = other DNA
ctgcactggcgtctggacgtggtaatgaatgaagacgactgcaaaataagaagaggaaatgcagcagaattattt

SEQ ID NO: 524415 - DNA, 75 bp, synthetic construct
  source 1..75: mol_type = other DNA
tttcacagtcatcaaataaggcatttgcttaacactatggctcaacggagtgcattgtctcaggtgcaaatagct

SEQ ID NO: 524416 - DNA, 75 bp, synthetic construct
  source 1..75: mol_type = other DNA
ttattattttaagcgtatacatgacagggtgtactaataataatttaaagaaagaagatatccccgaagatatgt

SEQ ID NO: 524417 - DNA, 75 bp, synthetic construct
  source 1..75: mol_type = other DNA
atgtacgcactgaaaaaaatcacggtaactgaagatggtcgtcaggttgaagaagtgcatgttctggggaatatg

SEQ ID NO: 524418 - DNA, 75 bp, synthetic construct
  source 1..75: mol_type = other DNA
tatcactacgctgaacggcgatacgatgcgttgcatctgtcgcggcgacagtaaagcccggaatgaaatagccag

SEQ ID NO: 524419 - DNA, 75 bp, synthetic construct
  source 1..75: mol_type = other DNA
ttctccctctgctgtaagtcgcatgtttggtttcaaatcgcctcaatccatttttaattggattatcaggaacag

SEQ ID NO: 524420 - DNA, 75 bp, synthetic construct
  source 1..75: mol_type = other DNA
tttgcaccctactccagttagtgggattccagaagaagttatcagatccaaaaaaatagggttgattcatgaaaa

SEQ ID NO: 524421 - DNA, 75 bp, synthetic construct
  source 1..75: mol_type = other DNA
gggatatagcccagttgcttgacgagtatatcgccgccggacagccgagaatggcgcaagtagttcgttccgtac

SEQ ID NO: 524422 - DNA, 75 bp, synthetic construct
  source 1..75: mol_type = other DNA
cgaaatgttgccagaatccattacacgatggtcatatccatttaaggcatatgatgcttacacaaatagcacaat

SEQ ID NO: 524423 - DNA, 75 bp, synthetic construct
  source 1..75: mol_type = other DNA
aggttatcggcgcggttgagaagcgtcgcatgtatgacatgagccttgcagtcgacaacgcagaacctgtcgatg

SEQ ID NO: 524424 - DNA, 75 bp, synthetic construct
  source 1..75: mol_type = other DNA
gtgaagccgcgattttactggtccgaggctatgcttataattatataattagtaagaagttaagagagtccagtt

SEQ ID NO: 524425 - DNA, 75 bp, synthetic construct
  source 1..75: mol_type = other DNA
ggagtttatacagcactaagtggggccgccggcaatgctactggtgataaagcgattattggtctttttatgcga

SEQ ID NO: 524426 - DNA, 75 bp, synthetic construct
  source 1..75: mol_type = other DNA
tgtctatgggaataccctgcctggcacatacttcgctttatcaggaggcccggatgtcacgttttatgatcgggg

SEQ ID NO: 524427 - DNA, 75 bp, synthetic construct
  source 1..75: mol_type = other DNA
agtgatgaaccgatcacccttcgtctggtggcggggcgtgtcattgtgggcagcgggctgtcactgattgccggg

SEQ ID NO: 524428 - DNA, 75 bp, synthetic construct
  source 1..75: mol_type = other DNA
atgaaccaatcacaatttcaacaggcggctggtgtcagcaccgggttagcttcgcgctggtttccgcacattgac

SEQ ID NO: 524429 - DNA, 75 bp, synthetic construct
  source 1..75: mol_type = other DNA
cggctgtaattagcgccgggttagctgcgcgctggtttcagccgattacggatgcaatgaaagagttcggcatca

SEQ ID NO: 524430 - DNA, 75 bp, synthetic construct
  source 1..75: mol_type = other DNA
cggctgttattagcgccgggttagctgcgcgctggtttccgcacattgatgcggcgatgaaggaattcggcatta

SEQ ID NO: 524431 - DNA, 75 bp, synthetic construct
  source 1..75: mol_type = other DNA
taagtgcgctttggcggaattactgggggcgaagtggaaatgctaaagattaccaattcagttactccaataact

SEQ ID NO: 524432 - DNA, 75 bp, synthetic construct
  source 1..75: mol_type = other DNA
gagcagtggcagtatgatgagcacgggtggttaaccaccctcagccatacctgtgaaggccaccgcgtgtcggtc

SEQ ID NO: 524433 - DNA, 75 bp, synthetic construct
  source 1..75: mol_type = other DNA
gcccggaaggggaaacggcgtggcagggggagtatgacgagtggggaaacctgctgggcgaggaaagcgcgcagc

SEQ ID NO: 524434 - DNA, 75 bp, synthetic construct
  source 1..75: mol_type = other DNA
cactggaagaggcactgaaagcgcggcaagatcagcaacgttatttcgaacaattagcgtggcggctgcacaatg

SEQ ID NO: 524435 - DNA, 75 bp, synthetic construct
  source 1..75: mol_type = other DNA
tgaaaaaccagatggacccggtgtacacgccggcgcgaaaaatccacctgtaccactgcgaccatcgcggcctgc

SEQ ID NO: 524436 - DNA, 75 bp, synthetic construct
  source 1..75: mol_type = other DNA
ttgaagtgttgagtattcctgttgcaattggggtgacagaagacacagcagcctccaataaaatgacatatataa

SEQ ID NO: 524437 - DNA, 75 bp, synthetic construct
  source 1..75: mol_type = other DNA
gcaggatttaccgcgctggtggagagcttcaactacacccctgctgctctgctgaccacctttggacgccgcatt

SEQ ID NO: 524438 - DNA, 75 bp, synthetic construct
  source 1..75: mol_type = other DNA
ccagcgtgacgataccggcgaaacggtggccgtcgaggtggtcatgcgtggacgtcagaaagaaatcgacaccgg

SEQ ID NO: 524439 - DNA, 75 bp, synthetic construct
  source 1..75: mol_type = other DNA
ttcacggggaggcaccttatatgacgttcaggcccagctcggacaccgtagtattcagtcgtcacagcgttatgc

SEQ ID NO: 524440 - DNA, 75 bp, synthetic construct
  source 1..75: mol_type = other DNA
gcgtaccagtaatcatcgtctggatgaacagccagtgtctgtgcacactccagaaggtattatcgctaccggatg

SEQ ID NO: 524441 - DNA, 75 bp, synthetic construct
  source 1..75: mol_type = other DNA
acccgctattccgcactggtggaagcgtcaaccgcttattcccaaccttctgtcacaggaactgaaaaactatct

SEQ ID NO: 524442 - DNA, 75 bp, synthetic construct
  source 1..75: mol_type = other DNA
gatactaaacttggcccacacattatagtagaacgcaacttagctgctggaaattattctctccggcaagagctt

SEQ ID NO: 524443 - DNA, 75 bp, synthetic construct
  source 1..75: mol_type = other DNA
gtaccgcaactggtgcaggacgaactgctcggcgagatgagctgtcgcagcggcatgagctggaatacgttactg

SEQ ID NO: 524444 - DNA, 75 bp, synthetic construct
  source 1..75: mol_type = other DNA
gctggcttcacggtgccagcactaccggagaacaggagatagtccaggtcagtctggagcaaatccagccgttct

SEQ ID NO: 524445 - DNA, 75 bp, synthetic construct
  source 1..75: mol_type = other DNA
atcatcaatggtggacagaacggcattaacgaccgtcgtgcacgctacgccaaagcaaaatcggtgctctcatga

SEQ ID NO: 524446 - DNA, 75 bp, synthetic construct
  source 1..75: mol_type = other DNA
aaaccaattttaccttcctttcttacttccagaacgagccggaaaccggttattacggctggttgccgaaagagg

SEQ ID NO: 524447 - DNA, 75 bp, synthetic construct
  source 1..75: mol_type = other DNA
ccccggctatgacgtgctgaaggcgtcaattcttgcccgtgggctggataacccgccggtactgacccgccgccc

SEQ ID NO: 524448 - DNA, 75 bp, synthetic construct
  source 1..75: mol_type = other DNA
ccgccggaagcggaaaaagcaccactaccagagcctgagccaccgactgaacccgctgcgcccggcgagccaaag

SEQ ID NO: 524449 - DNA, 75 bp, synthetic construct
  source 1..75: mol_type = other DNA
cagcatatgaactgaccagcacatacaccctcacagggcagctacagagcaggcacctgaacctcccgcagcttg

SEQ ID NO: 524450 - DNA, 75 bp, synthetic construct
  source 1..75: mol_type = other DNA
cttgatgcctatataagcccaattgttgaaggacgtagtgaagaagacctacttgctgaattaatgcttaaacgt

SEQ ID NO: 524451 - DNA, 75 bp, synthetic construct
  source 1..75: mol_type = other DNA
tggagggagaatctgtattctttgacacgcctaaaccattgagattattagatagaatattacacttagcaacaa

SEQ ID NO: 524452 - DNA, 75 bp, synthetic construct
  source 1..75: mol_type = other DNA
atttattaagtgaagatggcattatttttgtttcaatagatgacattgaagcatcgaaacttaaaattataatgg

SEQ ID NO: 524453 - DNA, 75 bp, synthetic construct
  source 1..75: mol_type = other DNA
gagcaggtaaaaaggttcgtgaagataatccagactggaatggtgatattggttttcgtgtatttaaacttgata

SEQ ID NO: 524454 - DNA, 75 bp, synthetic construct
  source 1..75: mol_type = other DNA
cctcggcactctggtttgggatagaaatagaaaaaatgatgccaagtttatttctgtaggccatgagtatatgtt

SEQ ID NO: 524455 - DNA, 75 bp, synthetic construct
  source 1..75: mol_type = other DNA
ctgataacttccaagataatatgaaaaattatctcgaacttactggacaaacagaagatggaacacgtttaagca

SEQ ID NO: 524456 - DNA, 75 bp, synthetic construct
  source 1..75: mol_type = other DNA
cagtgcgtgcagtgcagggaaagatcatcagaagtacactttttgtactaaataattcgcattttatgtttaaaa

SEQ ID NO: 524457 - DNA, 75 bp, synthetic construct
  source 1..75: mol_type = other DNA
taccaggaaacgctggcgttgtaccagggcaaacttgatgggtacaccgaacatgcctgccgggaaatcactctg

SEQ ID NO: 524458 - DNA, 75 bp, synthetic construct
  source 1..75: mol_type = other DNA
agggcaaacttgatgggtacaccgaacatgcctgccgggaaatcactctggcagaggccccggcctggctgctgg

SEQ ID NO: 524459 - DNA, 75 bp, synthetic construct
  source 1..75: mol_type = other DNA
ctggacggtatgaccggccatgccggatgcctcccgaactgcaaatgctgggcggaagtgcatatcccggatcca

SEQ ID NO: 524460 - DNA, 75 bp, synthetic construct
  source 1..75: mol_type = other DNA
gcacaagctgtaatggaaaaaaatctagaagataatggtagtcggcgttttatattagttcaacttccagagccg

SEQ ID NO: 524461 - DNA, 75 bp, synthetic construct
  source 1..75: mol_type = other DNA
tcacaccactcatcagagttgaaactgccaccggtgaactggccagaacgcagcgccgcagcctggcggatgcgc

SEQ ID NO: 524462 - DNA, 75 bp, synthetic construct
  source 1..75: mol_type = other DNA
atgcgtcttatccgacctacagttcagttcaccccgtaggcctgataagccgcgtcagcggcgcatcaggcatcg

SEQ ID NO: 524463 - DNA, 75 bp, synthetic construct
  source 1..75: mol_type = other DNA
acgctgctttacaacggttattgacacgtttcaacgatcctacggggtggagtaatctggcgaaaaatcagtatc

SEQ ID NO: 524464 - DNA, 75 bp, synthetic construct
  source 1..75: mol_type = other DNA
ttatttttagcattgccagataacttacagtttaattttgttaaaaggatggagaaaaaatcccctgcctacttt

SEQ ID NO: 524465 - DNA, 75 bp, synthetic construct
  source 1..75: mol_type = other DNA
acgccacaagagagtgacaaagttgcagtatatttataccaaaaattcgagaatgacgatgatctaatacgtgtg

SEQ ID NO: 524466 - DNA, 75 bp, synthetic construct
  source 1..75: mol_type = other DNA
gcgcgattcattaaaaataggttttctgaagatgataaaatgaaacatttaaacctaatcgaaaatgagaattta

SEQ ID NO: 524467 - DNA, 75 bp, synthetic construct
  source 1..75: mol_type = other DNA
tccagttgatgtattgaaggcgaggctgaaacgtgatcctttgctggcgttagagcttgttaaccctgaactgga

SEQ ID NO: 524468 - DNA, 75 bp, synthetic construct
  source 1..75: mol_type = other DNA
gatgacgccacaagagagtgacaaaatagcagtatatttataccaaaaattcgagaatgacgatgatctaatagg

SEQ ID NO: 524469 - DNA, 75 bp, synthetic construct
  source 1..75: mol_type = other DNA
gtggtttatatcaatgacgccaatgataaagtcattctggatggacatcttcgcgttgaagttttgaaagaactc

SEQ ID NO: 524470 - DNA, 75 bp, synthetic construct
  source 1..75: mol_type = other DNA
agccaaatcaggtgtggtgcggtgatgtgacctatagtgtgcccggagttcagggcgggcatggatgcttaaatg

SEQ ID NO: 524471 - DNA, 75 bp, synthetic construct
  source 1..75: mol_type = other DNA
cttatctacgggcgtcacatacgaaatggcgcggcgctacaccctaggtacagctaaaccccgcgacgaaaaact

SEQ ID NO: 524472 - DNA, 75 bp, synthetic construct
  source 1..75: mol_type = other DNA
cacaactggatgtactggcaaaacaaccggatcgtatatggtggagtacgctggcgaaaagcaatcttacatttt

SEQ ID NO: 524473 - DNA, 75 bp, synthetic construct
  source 1..75: mol_type = other DNA
tggtcacccttatcaggcaatcaagtatttaggaaaatcatttataccactctataaagaggaatcacgagataa

SEQ ID NO: 524474 - DNA, 75 bp, synthetic construct
  source 1..75: mol_type = other DNA
agaacagaataagcttctttggttcgaaggcgttaatgaagcatcaaatagagaacgctgggcctttgcggtaag

SEQ ID NO: 524475 - DNA, 75 bp, synthetic construct
  source 1..75: mol_type = other DNA
aatggactggatataccatctgttgtttatgctatattgaatagcgttgcagatagtacagcaattccttttggt

SEQ ID NO: 524476 - DNA, 75 bp, synthetic construct
  source 1..75: mol_type = other DNA
ttactgcaaagcaatttttctgtagatactgttatggcctgtaagttttttcctggtccggtttcccggattgca

SEQ ID NO: 524477 - DNA, 75 bp, synthetic construct
  source 1..75: mol_type = other DNA
cgcggccggcacccagacgtacttcattcagccgaaagcccaggtcacctggatgggcgtgaaagctgacacgca

SEQ ID NO: 524478 - DNA, 75 bp, synthetic construct
  source 1..75: mol_type = other DNA
atgaaagcctgtcctcagcatagtaccgggaaggagggagtgaccatctcattagatatgggcgagatgttgcag

SEQ ID NO: 524479 - DNA, 75 bp, synthetic construct
  source 1..75: mol_type = other DNA
tgcgattctggggctcccttgcagcagaatattgatgccctgcaggcaaatatcgccattacacgtgaaacggct

SEQ ID NO: 524480 - DNA, 75 bp, synthetic construct
  source 1..75: mol_type = other DNA
aaaaaaggggtaccattacgtagctctggttatacggacagtttgcccttagatccgaaatcaaggatgccttta

SEQ ID NO: 524481 - DNA, 75 bp, synthetic construct
  source 1..75: mol_type = other DNA
ggctcgctgccaaatctgcaggtcagccgtatcgatccgaaggtggagacagagcgttatcgccgttttgtactg

SEQ ID NO: 524482 - DNA, 75 bp, synthetic construct
  source 1..75: mol_type = other DNA
atgctctggatttaccgaaactttcctcgttagtggatgaactcagtctgacaggcaaagggctggtaatgacga

SEQ ID NO: 524483 - DNA, 75 bp, synthetic construct
  source 1..75: mol_type = other DNA
gaccgttgcggcatcagtcgcggtatcgctggcgaaacgtggccacaaagtccacctgaccacatccgatccggc

SEQ ID NO: 524484 - DNA, 75 bp, synthetic construct
  source 1..75: mol_type = other DNA
gttatgaatttacccccgctcacgatgtcgatggccccctgattacctggacgccggaaaatccggaacatggga

SEQ ID NO: 524485 - DNA, 75 bp, synthetic construct
  source 1..75: mol_type = other DNA
ttcttatattggtgggttaactcaagcagtgcctgttggtacaacttatacatcggtaagaatagtggacattat

SEQ ID NO: 524486 - DNA, 75 bp, synthetic construct
  source 1..75: mol_type = other DNA
cacaagcctatcgtgaccgagtgctcgaccctgttcgtgggctgatgcctgccgatgtagtcagcagtattgaag

SEQ ID NO: 524487 - DNA, 75 bp, synthetic construct
  source 1..75: mol_type = other DNA
gcgaactcgtatttaccttcgaactggctttctgcgttggggctgtacgcctgggcacaggtggatgaatcttca

SEQ ID NO: 524488 - DNA, 75 bp, synthetic construct
  source 1..75: mol_type = other DNA
cgagtaacaactcagcaatctatttcgctgcgaacaagttcatagtctccggtactgacactgctactgtaggtg

SEQ ID NO: 524489 - DNA, 75 bp, synthetic construct
  source 1..75: mol_type = other DNA
ataaaaaactgccggtttttctcggcattttccaggggacgtcttatgtggtgattatcgccttcctggtgatga

SEQ ID NO: 524490 - DNA, 75 bp, synthetic construct
  source 1..75: mol_type = other DNA
ccccggttaaggatattgctgtcagagtaaaaagaagttactggggagtatataaccggattgttttattacgcg

SEQ ID NO: 524491 - DNA, 75 bp, synthetic construct
  source 1..75: mol_type = other DNA
actactcgccggagttaaccggcatcggcaaatacaccggcgagatggtggaatggctggcggcgcaaggtcatg

SEQ ID NO: 524492 - DNA, 75 bp, synthetic construct
  source 1..75: mol_type = other DNA
tcctgaaattcactctcggtccactggagctgtgggcactgaattcctcacccaaagacagcgccctgagacgtg

SEQ ID NO: 524493 - DNA, 75 bp, synthetic construct
  source 1..75: mol_type = other DNA
ttgatgattctgcgctgatgcgccagataatgacggaaatcattaacagtcatagtgatatggaaatggtggcga

SEQ ID NO: 524494 - DNA, 75 bp, synthetic construct
  source 1..75: mol_type = other DNA
aaacttatcattggtgataaagaaatatttggcatttcacgcggaatagacaaacagggggctttattacttgag

SEQ ID NO: 524495 - DNA, 75 bp, synthetic construct
  source 1..75: mol_type = other DNA
atcagtcgacctggctgatattgcccgtatgaatgactggctggacctgaaagccgataacgaaaaccgtatagc

SEQ ID NO: 524496 - DNA, 75 bp, synthetic construct
  source 1..75: mol_type = other DNA
tgtacgccatgcagagcgagatgtggttctacagcaataccatggctgacaacattgcctaccgtgagcaaatcg

SEQ ID NO: 524497 - DNA, 75 bp, synthetic construct
  source 1..75: mol_type = other DNA
ctactgattgcgctttattcatccaccccggttaaggatattgctgccagaataaaaagaactgtctgggctgta

SEQ ID NO: 524498 - DNA, 75 bp, synthetic construct
  source 1..75: mol_type = other DNA
caccgcagcgaatctggatatccgcatcccgtatgccacagacccggcaggtaaccgcctgcccgacccggagct

SEQ ID NO: 524499 - DNA, 75 bp, synthetic construct
  source 1..75: mol_type = other DNA
tggcatcggagttattccatcagtcagcagttacataacaacatcattaagtgttgatacccgaaatctgccaga

SEQ ID NO: 524500 - DNA, 75 bp, synthetic construct
  source 1..75: mol_type = other DNA
cagctgtatctgaagccatttaacctggtcggtctggaagcattgcgggagttatttacagagagcaaagccgca

SEQ ID NO: 524501 - DNA, 75 bp, synthetic construct
  source 1..75: mol_type = other DNA
agactataacaagtcttatctggaatgcgatcgaaagatttatggtacagggagggcaatttgtaataaagattt

SEQ ID NO: 524502 - DNA, 75 bp, synthetic construct
  source 1..75: mol_type = other DNA
gtcaaacaaggctgttgttatgctgacattgatgtcatccaaccttcgactgatggtctaaaacttcgctgcttc

SEQ ID NO: 524503 - DNA, 63 bp, synthetic construct
  source 1..63: mol_type = other DNA
atgcgcttcgcttatcaggccttgtattatccctccagtgcagagaaaatcggccagttttct

SEQ ID NO: 524504 - DNA, 75 bp, synthetic construct
  source 1..75: mol_type = other DNA
ggcgcgttaagcgatgccgaaggctgctggcacctggaacaggcggtgatgcgcggcgccccgtggcgactggcg

SEQ ID NO: 524505 - DNA, 75 bp, synthetic construct
  source 1..75: mol_type = other DNA
ggctggcccagcagttttccgcccttgatgcgccgaaaacgctctctgtcgcctggggcgcatggggagaaagcg

SEQ ID NO: 524506 - DNA, 75 bp, synthetic construct
  source 1..75: mol_type = other DNA
aaaacaataccgctccggcaccgtggacgtacgacaacatcgcgtatatgaaaaaccagctcaaaatgctgggct

SEQ ID NO: 524507 - DNA, 75 bp, synthetic construct
  source 1..75: mol_type = other DNA
cggcggttatttcatcggcaaaatggggggagttggaaacggctcagcaggagaaagctatctcaggggtaacca

SEQ ID NO: 524508 - DNA, 75 bp, synthetic construct
  source 1..75: mol_type = other DNA
atctcgatttaatggctcaacgtacaccacgcgccgaacatgccaacgagaaagaagaatttagccgcttattac

SEQ ID NO: 524509 - DNA, 75 bp, synthetic construct
  source 1..75: mol_type = other DNA
gcaggcatatctggcaaaactgcgtgatacgccggaatacaaaaaggaacaggaaaagtatggtaccggcagcga

SEQ ID NO: 524510 - DNA, 75 bp, synthetic construct
  source 1..75: mol_type = other DNA
atatcaagatcagtaccgagtttggcggtaagacacaacttaatcttggtcataatgttaatgcctcccggaaac

SEQ ID NO: 524511 - DNA, 75 bp, synthetic construct
  source 1..75: mol_type = other DNA
gattactggcacatgcaccttctggaataggtattcttagcccacagaccgttcgtctggcgtcaggagaacaaa

SEQ ID NO: 524512 - DNA, 75 bp, synthetic construct
  source 1..75: mol_type = other DNA
atggaggacaaacgcggtgaggagcatatcaagctcagtaccgagtatggcggtaagacacaacttaatcttggc

SEQ ID NO: 524513 - DNA, 75 bp, synthetic construct
  source 1..75: mol_type = other DNA
ggcgcgggccgccagagaggcgggcatcggctatatacagagtacggtttcgacggcctccattgaagagatcgc

SEQ ID NO: 524514 - DNA, 75 bp, synthetic construct
  source 1..75: mol_type = other DNA
tgatgcaattgcaggacccggagaagacgaaggtgattatcgtgacgcttgccgaaacgacacctgtactggaag

SEQ ID NO: 524515 - DNA, 75 bp, synthetic construct
  source 1..75: mol_type = other DNA
cggaaggactggcggtgctggaagaagatctccgctcgccatgtactgaagagatcgccgtcttccaggcattct

SEQ ID NO: 524516 - DNA, 75 bp, synthetic construct
  source 1..75: mol_type = other DNA
cttacctgttttttaccggtaaagggggcgtcggtaaaacctctatttcctgtgccaccgctatcagcctggcgg

SEQ ID NO: 524517 - DNA, 75 bp, synthetic construct
  source 1..75: mol_type = other DNA
gaaccctgatgccgccgctaacctcgggccgctggtggggctggagaaacaacagcaccagtactcagacgcggt

SEQ ID NO: 524518 - DNA, 75 bp, synthetic construct
  source 1..75: mol_type = other DNA
ggaaatcgcggcatttgatgagtttactggtcttcttaccaaccatgagttgcgggaaaagtatgaccatatcgt

SEQ ID NO: 524519 - DNA, 75 bp, synthetic construct
  source 1..75: mol_type = other DNA
tcgcgctggcattgagccgtgggcatgggttgtgaataacagcctggcagctgctgagccgtcttcacctttcct

SEQ ID NO: 524520 - DNA, 75 bp, synthetic construct
  source 1..75: mol_type = other DNA
tcattagagatgatcaattataaaggttatgctggatttaaaataaaaacattagggagaccttcttctgggttt

SEQ ID NO: 524521 - DNA, 75 bp, synthetic construct
  source 1..75: mol_type = other DNA
aagagtataataaaactcataagaaacctgaggaagttatcagagaattatcaaacaagaacgctaataaagttc

SEQ ID NO: 524522 - DNA, 75 bp, synthetic construct
  source 1..75: mol_type = other DNA
atggtaaatatcataaacaaaaaatctttattcattctatcaatgatggcttgcagtacaagttatgcagcttct

SEQ ID NO: 524523 - DNA, 75 bp, synthetic construct
  source 1..75: mol_type = other DNA
catatcctattgaccaggccagtagtgcgcctaatgttttcaaaacattcttcagagcattaagcccttacgact

SEQ ID NO: 524524 - DNA, 75 bp, synthetic construct
  source 1..75: mol_type = other DNA
ttttttaagaataatgctcttgcaaatatttctctctcttttcttgtgttaggttacatatctgcagcatttgtg

SEQ ID NO: 524525 - DNA, 75 bp, synthetic construct
  source 1..75: mol_type = other DNA
atgtatcatcattgatgatgttattttttttgtttgcatggggagggtgtttttttatttttgtatacagagtgc

SEQ ID NO: 524526 - DNA, 75 bp, synthetic construct
  source 1..75: mol_type = other DNA
agacagcagcaaaacgggcagaggatattgcatacgccgtggcgcttgaggatgcgagcacgacgaaaaagggga

SEQ ID NO: 524527 - DNA, 75 bp, synthetic construct
  source 1..75: mol_type = other DNA
atgtatgaaaacacataccctattgatacagccgccagcatactggggtgtactcaaaaaaaaatactgactgaa

SEQ ID NO: 524528 - DNA, 75 bp, synthetic construct
  source 1..75: mol_type = other DNA
aaagtcagccgcgaaacgcctgatttgctcaactttgaaaaaagcatgttgatcaaagagggcgcagaaaaaatc

SEQ ID NO: 524529 - DNA, 75 bp, synthetic construct
  source 1..75: mol_type = other DNA
aacctaagcgaagaagaaaaaaggaaattaattttttccttatctacagatgagtgtaaccagttatggcagaaa

SEQ ID NO: 524530 - DNA, 75 bp, synthetic construct
  source 1..75: mol_type = other DNA
acgatgaaatgctctcccctgtaccattcaaatggcacgatgcacgccggacgttcggaacggttgccgaactgg

SEQ ID NO: 524531 - DNA, 75 bp, synthetic construct
  source 1..75: mol_type = other DNA
ttgttaactcccagtcaattcacattcgtcttccagcaaccacaacgggctggcacgccgcaaattaccattctc

SEQ ID NO: 524532 - DNA, 75 bp, synthetic construct
  source 1..75: mol_type = other DNA
tgctgcacacaatcgacggtgacttttcatattcagcagcttgagcaggagttctcagtccagttatttgagaaa

SEQ ID NO: 524533 - DNA, 75 bp, synthetic construct
  source 1..75: mol_type = other DNA
ggcagttatcaagcagttaggccgatccatccaacgcaggctagagttattactccacgtgaggctgctcgatta

SEQ ID NO: 524534 - DNA, 75 bp, synthetic construct
  source 1..75: mol_type = other DNA
caaaagcactggtctgggcatcatatctggacgtgcgtcgcaacaaggaagccccccggatgcgacgggcagatt

SEQ ID NO: 524535 - DNA, 75 bp, synthetic construct
  source 1..75: mol_type = other DNA
cacaaggagaacactggcagcgatcagtatcacgccagcgataataaaactggcgaaacagcaaatcccttaatt

SEQ ID NO: 524536 - DNA, 75 bp, synthetic construct
  source 1..75: mol_type = other DNA
aatggcctgaaattcaggcagagatgcgcatctggaaaaaacgtcgcgaaggtgaacgcaaggaaaccggaaaat

SEQ ID NO: 524537 - DNA, 75 bp, synthetic construct
  source 1..75: mol_type = other DNA
tacggtcgcgcaaacaaactttctggtctggataaggcgctgtctgctggggctactgaaatcacgaaagaagaa

SEQ ID NO: 524538 - DNA, 75 bp, synthetic construct
  source 1..75: mol_type = other DNA
gtttcctttcatctcacccagtcactctcttcgctcttttccctcgatctctccctggtcagccagcagtttctc

SEQ ID NO: 524539 - DNA, 75 bp, synthetic construct
  source 1..75: mol_type = other DNA
aacgctgatgatgttctggtgtttcctggtgtgaagggagtgattcaggagacacggcacatcatagaccggata

SEQ ID NO: 524540 - DNA, 75 bp, synthetic construct
  source 1..75: mol_type = other DNA
attgtgcagggttcagcaggggtgctgataggcgcgccgacgggggttgcctgctcggtgtgtcctaaaaaaaag

SEQ ID NO: 524541 - DNA, 75 bp, synthetic construct
  source 1..75: mol_type = other DNA
ttgcctgctcggtgtgtcctaaaaaaaaggacagtccaaattatggcaacccggtgaacccggtgctgggtgcaa

SEQ ID NO: 524542 - DNA, 75 bp, synthetic construct
  source 1..75: mol_type = other DNA
accggactattactctctacaaccttcgtgcagatacaaatgaatatattgggaaatgtgatgggtttatcccgg

SEQ ID NO: 524543 - DNA, 75 bp, synthetic construct
  source 1..75: mol_type = other DNA
gccgtgaccagctgaccgggtattgcagcgcacagggtgagcagtgggaataccgccacgacgccagcggcagac

SEQ ID NO: 524544 - DNA, 75 bp, synthetic construct
  source 1..75: mol_type = other DNA
gggctgtgctataaccggttccggtattacgagccggaaaccggaatgtacctggtgagtgatccgctggggttg

SEQ ID NO: 524545 - DNA, 75 bp, synthetic construct
  source 1..75: mol_type = other DNA
aggaaatcagaaatttttggccttacgtgggatcgcgtgaatatgggcggtcgtttttttctggatagacaccac

SEQ ID NO: 524546 - DNA, 75 bp, synthetic construct
  source 1..75: mol_type = other DNA
tcattagataaacacatcaacaccagtgctactgatacagatcaaatacaagcatttatagtttcaacatggatg

SEQ ID NO: 524547 - DNA, 75 bp, synthetic construct
  source 1..75: mol_type = other DNA
atggtatttgtacttagttgaatctttggctgatcgcccaacagtagatgagccagctcagtcgtcaagaatttg

SEQ ID NO: 524548 - DNA, 75 bp, synthetic construct
  source 1..75: mol_type = other DNA
tgaaagcgatctgaaacaacgtaatattattgccattgatgagcatatgacgattcttagcgcgctaatttgccg

SEQ ID NO: 524549 - DNA, 75 bp, synthetic construct
  source 1..75: mol_type = other DNA
tacacgccggcgcgaaaaatccacctgtaccactgcgaccatcgcggcctgccgctggcccttatcagtaaggaa

SEQ ID NO: 524550 - DNA, 75 bp, synthetic construct
  source 1..75: mol_type = other DNA
agagtttctcagagttgtgaatgcgaaaaagccaaaattcttttttgctgaaaatgtaagggggattttaagcct

SEQ ID NO: 524551 - DNA, 75 bp, synthetic construct
  source 1..75: mol_type = other DNA
gggagttatcaggccgttaggccaattcaccctactcaagctagggtgataactcctcgtgaagcagctaggtta

SEQ ID NO: 524552 - DNA, 75 bp, synthetic construct
  source 1..75: mol_type = other DNA
ctcctgcacggtctgtttctgtgcgtattccgctctattcgatcacggattggccccctgtgtcagcatagttgt

SEQ ID NO: 524553 - DNA, 75 bp, synthetic construct
  source 1..75: mol_type = other DNA
cgtttggcaatggttaatcttgagcgggctttacacgcaacctttttcccctggaatgcgccgtgggagaaaagc

SEQ ID NO: 524554 - DNA, 75 bp, synthetic construct
  source 1..75: mol_type = other DNA
tcgatgaaataacgaatcacttaagaaatctaatcgaaataaacgatgacactgctagctctactgatcatggag

SEQ ID NO: 524555 - DNA, 75 bp, synthetic construct
  source 1..75: mol_type = other DNA
tcaccaccgatgcgggggccgggtttgagcagacgctgaccggaatgacagtggggatcgacagccctaatgata

SEQ ID NO: 524556 - DNA, 75 bp, synthetic construct
  source 1..75: mol_type = other DNA
catttgctagccaattagctaaagagttacatacaaatgtaataggacctgacacgctatggacgtggtgggggc

SEQ ID NO: 524557 - DNA, 75 bp, synthetic construct
  source 1..75: mol_type = other DNA
catacacccccgcaggccagttacagagccagcacctgaacagcctggtgtatgaccgtgactacgggtggaatg

SEQ ID NO: 524558 - DNA, 75 bp, synthetic construct
  source 1..75: mol_type = other DNA
gagtatcaaaaccgtggaacagaaaacgatatgattgttttctcaccaacgacaagcgatcgtcctgtgcttgcc

SEQ ID NO: 524559 - DNA, 75 bp, synthetic construct
  source 1..75: mol_type = other DNA
ggacgccatgctggggctgggtcttgccggaaaaggcaacggcggcaaagtggcccgcctggcaacagcgttcga

SEQ ID NO: 524560 - DNA, 75 bp, synthetic construct
  source 1..75: mol_type = other DNA
ctgctgaagatgggcgattgccatctggtggtgcaaaaacgcggtgcggcagatgccgtattgccgtcgaaactg

SEQ ID NO: 524561 - DNA, 75 bp, synthetic construct
  source 1..75: mol_type = other DNA
attcgtctttagagatggagagatcgtcagtattcgcgaggaaagtgaaactaacttaaatatagagtttggttt

SEQ ID NO: 524562 - DNA, 75 bp, synthetic construct
  source 1..75: mol_type = other DNA
atgatgaatcaaaacaaagaatttctgggtaatctgatgttagaaattaccaaaatgaaagaaagaatggtagcg

SEQ ID NO: 524563 - DNA, 75 bp, synthetic construct
  source 1..75: mol_type = other DNA
cattaccagggattgctgcatgtattgcagcggctgatttacacctcgatggtacagtatctttgcgccaaaatg

SEQ ID NO: 524564 - DNA, 75 bp, synthetic construct
  source 1..75: mol_type = other DNA
catcgtctggaccgacccacttctggtgtgttgttgatgggattatccagcgaggccggacggctgctggcacaa

SEQ ID NO: 524565 - DNA, 75 bp, synthetic construct
  source 1..75: mol_type = other DNA
acgcaaatcgcctccggtacgcttgaagtcagcgataattcgcaattgggggacacaagttacaaccgttcagtg

SEQ ID NO: 524566 - DNA, 75 bp, synthetic construct
  source 1..75: mol_type = other DNA
cctgtttgggctctatggcatgtagttaaagaatatactaattttattgaagggcgcttgagagaaatgaaagtg

SEQ ID NO: 524567 - DNA, 75 bp, synthetic construct
  source 1..75: mol_type = other DNA
tgttttccgaactgtttatgtctatgtttactattttaaagcagttttgaagtatttgctttcacaagttaaaag

SEQ ID NO: 524568 - DNA, 75 bp, synthetic construct
  source 1..75: mol_type = other DNA
caccgcattatgggcagtactggcactggtatatgtttcactggcgctgttcaccagaaaagattcggagaacag

SEQ ID NO: 524569 - DNA, 75 bp, synthetic construct
  source 1..75: mol_type = other DNA
atttttgcgccaggagatgcgcgaacccgcctccctcgaactggtgcaaagccgcctgcaaatcctctttccttg

SEQ ID NO: 524570 - DNA, 75 bp, synthetic construct
  source 1..75: mol_type = other DNA
tgttacccgtgagctggactggttgtggtttcatagtgggtctaacgagcagatccagcatgagctttccaggct

SEQ ID NO: 524571 - DNA, 75 bp, synthetic construct
  source 1..75: mol_type = other DNA
gttcagtcatacagcttgatatcaggacttgccgatgctttacatgttgagccagacccggcacctgactggtgg

SEQ ID NO: 524572 - DNA, 75 bp, synthetic construct
  source 1..75: mol_type = other DNA
ggcactgttgccggatgcggcgtaaacgccttatccggcctacggagggtgcgggaatttgtaggcctgataaga

SEQ ID NO: 524573 - DNA, 75 bp, synthetic construct
  source 1..75: mol_type = other DNA
tattactttgagccagtgatgatacaggagtcaggaaccagcatattaaaaaatgatttagaaaacagtgaggac

SEQ ID NO: 524574 - DNA, 75 bp, synthetic construct
  source 1..75: mol_type = other DNA
tgagttaacctttgaatactccgatgatattgacattatcgaatggttagagagaatcaaagaaaataaaattcc

SEQ ID NO: 524575 - DNA, 75 bp, synthetic construct
  source 1..75: mol_type = other DNA
ggaaaatttatctctgacgtatatatcaatactaatattggtgatttttatatagaaatatgtgtcacccataaa

SEQ ID NO: 524576 - DNA, 75 bp, synthetic construct
  source 1..75: mol_type = other DNA
gcttgaaactgctgctgcagatatggagtacattgcacagcaggcacactatgcgaaagataatactgatcctgt

SEQ ID NO: 524577 - DNA, 75 bp, synthetic construct
  source 1..75: mol_type = other DNA
cgatgaaaggtttgctgagcgcagtcgagctcttgcagcagacggaaggctatattcattacgatgacttccttg

SEQ ID NO: 524578 - DNA, 75 bp, synthetic construct
  source 1..75: mol_type = other DNA
ggcgcattattttgtggtgatgcgtgggcaaattaatcttgatgaactgtataccgcacctggcgattataaata

SEQ ID NO: 524579 - DNA, 75 bp, synthetic construct
  source 1..75: mol_type = other DNA
gccggatcgctggcctgcttgatcctgattggcaaaatctggccgggatttttaactctcggtggtgattttacc

SEQ ID NO: 524580 - DNA, 75 bp, synthetic construct
  source 1..75: mol_type = other DNA
gcgcgacgcacaacggagacggtgattgtcactacggtggcgtatggtcagccgggggaaaccggcagttacagt

SEQ ID NO: 524581 - DNA, 75 bp, synthetic construct
  source 1..75: mol_type = other DNA
tgctgacgctgggtgctaacgaagggatgaatcatgtgaaagtcttctcgcagctggcgcgtaaactggtgaata

SEQ ID NO: 524582 - DNA, 75 bp, synthetic construct
  source 1..75: mol_type = other DNA
tgtgagcctgacctggacgagtgataaattcaccaacgatggtctcggcgctatgtccggtgcagcaactgacgc

SEQ ID NO: 524583 - DNA, 75 bp, synthetic construct
  source 1..75: mol_type = other DNA
agctaaaggttacagtctggagatatatggaaaatttgatagagataagaaatatcttataaatatgttccagcg

SEQ ID NO: 524584 - DNA, 75 bp, synthetic construct
  source 1..75: mol_type = other DNA
tggtacgtcgcgacctgaatatggaagcggttgtcgcaccagagatttctgcgacggtgggcgtggctgcggctt

SEQ ID NO: 524585 - DNA, 75 bp, synthetic construct
  source 1..75: mol_type = other DNA
cctgatggcgatgctgccagctaacgcttccatttccggcgtcacctccacctcgccgctgaatatcggcgttca

SEQ ID NO: 524586 - DNA, 75 bp, synthetic construct
  source 1..75: mol_type = other DNA
gcggttgccggggtatgtattattgccggagccagtattcattacggcgctgatacctggaacgtgctggatatt

SEQ ID NO: 524587 - DNA, 75 bp, synthetic construct
  source 1..75: mol_type = other DNA
tgctgatctgcccgtggaaattaatggaaaatcaggacagcatttatctgttcctcgatattatcggcggaatgc

SEQ ID NO: 524588 - DNA, 75 bp, synthetic construct
  source 1..75: mol_type = other DNA
ctagtgatgcagcgcgagaaagagggactaaccctttcctatatcaaaaatgtcatctggcaggcggagcgggga

SEQ ID NO: 524589 - DNA, 75 bp, synthetic construct
  source 1..75: mol_type = other DNA
aggatgaaaccgtagaatgtggtttggcgtgcatatgcatggtattgcagttctttggccataatatccaactat

SEQ ID NO: 524590 - DNA, 75 bp, synthetic construct
  source 1..75: mol_type = other DNA
tgtagaaacatattatgctgctataaatgtaatcagccaaagcctgagttttagtgctgatgaactaaagacgta

SEQ ID NO: 524591 - DNA, 75 bp, synthetic construct
  source 1..75: mol_type = other DNA
gacaacatgtcagctgttcatatagccattcatcataatcattataaaactgtagaaacatattatgctgctata

SEQ ID NO: 524592 - DNA, 75 bp, synthetic construct
  source 1..75: mol_type = other DNA
gttgttccgtgcatccggagagggtcgtggtgcctccgtggcggaggaggcctgtgctgacctgacggcgatacc

SEQ ID NO: 524593 - DNA, 75 bp, synthetic construct
  source 1..75: mol_type = other DNA
gaggcgcgcgtcaagcgtcaattgctggatgaggtgcgctccatctgtccgccgggggtgaccatcaacagcgtg

SEQ ID NO: 524594 - DNA, 75 bp, synthetic construct
  source 1..75: mol_type = other DNA
caagaaagtcaagcaaaagacggctgggggaggcggcggaaaaggctggctcgatgaaatcaaggcaaagctgtc

SEQ ID NO: 524595 - DNA, 75 bp, synthetic construct
  source 1..75: mol_type = other DNA
ttccggacgcaatagtgccgtatatcttttccaattcctgccacacgcgcgttgttccagcccgatttggcgatg

SEQ ID NO: 524596 - DNA, 75 bp, synthetic construct
  source 1..75: mol_type = other DNA
tgtagctgctcgtatccagcaaccagtgtggattgccaatgacgccgattgtttcaccctctcagaagctgtgga

SEQ ID NO: 524597 - DNA, 75 bp, synthetic construct
  source 1..75: mol_type = other DNA
atgacatttactcagggtattgacccgctagaaacgaataatgctgtgttttgtctggcatatgaattgtctgta

SEQ ID NO: 524598 - DNA, 75 bp, synthetic construct
  source 1..75: mol_type = other DNA
acagtacatggaacccctgctttatacatcgctatgagcaagggtaataaagacgtcatgttatcttatatatcg

SEQ ID NO: 524599 - DNA, 75 bp, synthetic construct
  source 1..75: mol_type = other DNA
gtcgcaaaataaacaagagctgaaagcaacaatggatttggtgcggttgaccagagacaagctgacggcacggtg

SEQ ID NO: 524600 - DNA, 75 bp, synthetic construct
  source 1..75: mol_type = other DNA
atttccacgcctcgcaggatgagtttgtgaacctgttcggcggcagtaagttcaaggataaaacggaaacctact

SEQ ID NO: 524601 - DNA, 75 bp, synthetic construct
  source 1..75: mol_type = other DNA
ctgcaacccgttttaaccgcctggatgatgcctgtaaaaaggtgattttcatcctggcaaacgatgcgtccagat

SEQ ID NO: 524602 - DNA, 75 bp, synthetic construct
  source 1..75: mol_type = other DNA
tattgtgctcgtgtttctggtggggcttattctaataatgatcggtgcggcattaatctaacttcttttggtact

SEQ ID NO: 524603 - DNA, 75 bp, synthetic construct
  source 1..75: mol_type = other DNA
taccaccgctgcttggcaaaattaaagatgcgacgaacagctatcactacgggctgctgattgttgctgtggcgc

SEQ ID NO: 524604 - DNA, 75 bp, synthetic construct
  source 1..75: mol_type = other DNA
tcgtatgggtgttaaagtttattctggtatgaccaaccgtgaatttactattccacgtctaactggtatcgattc

SEQ ID NO: 524605 - DNA, 75 bp, synthetic construct
  source 1..75: mol_type = other DNA
aaccgaattagggcagttatgcctgaatgaaccggggatcgccgtgtgcgtcgagccggaatcggttccggcgtt

SEQ ID NO: 524606 - DNA, 75 bp, synthetic construct
  source 1..75: mol_type = other DNA
aacgtctcaactatctcgcgctcaatgatgaacaaagcctgtgagaagggcgtaccggaagagaaggtgattttc

SEQ ID NO: 524607 - DNA, 75 bp, synthetic construct
  source 1..75: mol_type = other DNA
cgtcacaacgatgtagcgatcaaatatgcaaatgcctcacttgatatgaataatgtcctttcaaaattcatagtg

SEQ ID NO: 524608 - DNA, 75 bp, synthetic construct
  source 1..75: mol_type = other DNA
agaattgcatcgatcctgcatttcaattaacacgggagcaggcatgttgggtcatatgcgaagataatcccagtt

SEQ ID NO: 524609 - DNA, 75 bp, synthetic construct
  source 1..75: mol_type = other DNA
ctttgagctcggcagcctcaacgtgatggaaatcgctgcaatatccggccaccgctcaatgaatatgctcaaacg

SEQ ID NO: 524610 - DNA, 75 bp, synthetic construct
  source 1..75: mol_type = other DNA
gaaaacagggtaacgatgaacttctcccgccccgggaagcccactgataacgccctggttgagtcatttaacggc

SEQ ID NO: 524611 - DNA, 75 bp, synthetic construct
  source 1..75: mol_type = other DNA
ttaacggcgacgacgccacggcgaataacagcggcaaaaccatcgttgacggtaaagacgccaccggtacggaaa

SEQ ID NO: 524612 - DNA, 75 bp, synthetic construct
  source 1..75: mol_type = other DNA
tcaacaaaaactggcaactggcgtgtgagtgtatgcgccaggcgctgcacaacgccggcatagccccggagtata

SEQ ID NO: 524613 - DNA, 75 bp, synthetic construct
  source 1..75: mol_type = other DNA
ttcgcctattactatctctgttatctaaaggtaacttaaaaaaagacgattacaataaactttctggctatattt

SEQ ID NO: 524614 - DNA, 75 bp, synthetic construct
  source 1..75: mol_type = other DNA
tcaccttattcttcttggaaatataagaaagaggtcatatcaaacgtaactgtctttcgttgtcctctttatgtt

SEQ ID NO: 524615 - DNA, 75 bp, synthetic construct
  source 1..75: mol_type = other DNA
ttttcgactctttccatttttctggcgtttcgttgaaaagcgatgagaatatgttgccgcctgatctacgtggtt

SEQ ID NO: 524616 - DNA, 75 bp, synthetic construct
  source 1..75: mol_type = other DNA
tcaatcatttaacaatggcaaaagccaggcgaacaacctggattttccgcgtatttatttgtttcgcccaatccc

SEQ ID NO: 524617 - DNA, 75 bp, synthetic construct
  source 1..75: mol_type = other DNA
caacttatctcgataaagggaaaatgcaattatccatatctgcacctcaggcatggttaaaatacaaagatgcaa

SEQ ID NO: 524618 - DNA, 75 bp, synthetic construct
  source 1..75: mol_type = other DNA
aaagggtgaaatcatcaaactcaggcgtcagcaggaaatcgatgctgaggaagcaagggatatgtgggtagaggc

SEQ ID NO: 524619 - DNA, 75 bp, synthetic construct
  source 1..75: mol_type = other DNA
cgatgacgccattaagttgctcaacatccgcgtgcctcatgcccaggtgcgagcaggtgggctttcgggcggtaa

SEQ ID NO: 524620 - DNA, 75 bp, synthetic construct
  source 1..75: mol_type = other DNA
gctgaccattgccgagcaacagcaggtcgaaatcgcccgcgcactacatcgcaacagccgcattctggtgatgga

SEQ ID NO: 524621 - DNA, 75 bp, synthetic construct
  source 1..75: mol_type = other DNA
gaagtcgtggtgaacgttggcggcaccatgcagatgctgggtggtcgtcagggtggtggcgctccggcaggtggt

SEQ ID NO: 524622 - DNA, 75 bp, synthetic construct
  source 1..75: mol_type = other DNA
gtttatacgtctgacattacgaaagaatgtactcctggagatattcttctaagtgtcagggcacctgtaggtact

SEQ ID NO: 524623 - DNA, 75 bp, synthetic construct
  source 1..75: mol_type = other DNA
taaaattatcagtgcccaattttgaagaacaacaaaaaattgccgccgttctgtccgctgccgacaccgaaatct

SEQ ID NO: 524624 - DNA, 75 bp, synthetic construct
  source 1..75: mol_type = other DNA
cttttatcggcgatgcagttattgaaccggtcaccagccgtcaggatttgcgagacaagctgaccggatgcgcta

SEQ ID NO: 524625 - DNA, 75 bp, synthetic construct
  source 1..75: mol_type = other DNA
ctgccactggctcagcaacggctttttacttaaacgtgaagatcgtaataagaaagacctctatatcgagctgat

SEQ ID NO: 524626 - DNA, 75 bp, synthetic construct
  source 1..75: mol_type = other DNA
gtggtttattttccgaattccaagcagacccctttatggcttgcagttactgagaacgacttgctcttttccgcc

SEQ ID NO: 524627 - DNA, 75 bp, synthetic construct
  source 1..75: mol_type = other DNA
tggctttgtttctgagttaataaactacggtattaaaaattatcctactcctactaataaggagccagaacatga

SEQ ID NO: 524628 - DNA, 75 bp, synthetic construct
  source 1..75: mol_type = other DNA
aagaacagcgatttcccgggcaactggtggattatcgagacaaaacacaacgtggcggacgttctggccgtcatc

SEQ ID NO: 524629 - DNA, 75 bp, synthetic construct
  source 1..75: mol_type = other DNA
ggggaagctacttcggcgtcgatttcactcaggacgcggtggcaggtagcggtctgacaatgatggcggggatta

SEQ ID NO: 524630 - DNA, 75 bp, synthetic construct
  source 1..75: mol_type = other DNA
tgatatattgaaaagtgtgagccgcgtatttgggcaagttacagatgaaaaacacagaaaatttgcagcacgggt

SEQ ID NO: 524631 - DNA, 75 bp, synthetic construct
  source 1..75: mol_type = other DNA
atcgaatcatcatgtcgcaggaagtagtggtcgtcgtggaggaagagaaacccgcgcccgcgcttggccaacctg

SEQ ID NO: 524632 - DNA, 75 bp, synthetic construct
  source 1..75: mol_type = other DNA
tcaggcggttgcctcctggaatcagtatgctgatgccaataatctcaccccggaacagaagcaggcaggactgga

SEQ ID NO: 524633 - DNA, 75 bp, synthetic construct
  source 1..75: mol_type = other DNA
ataccgaaaaagttcaaggggatatgtatgaaattaaaacacatagtcagagccattggttaaggggtttttatt

SEQ ID NO: 524634 - DNA, 75 bp, synthetic construct
  source 1..75: mol_type = other DNA
ggctcaggcggcgagcacgttagtaaatacgctgatggctcagaagatccagatggaagcagatctgcgtaattt

SEQ ID NO: 524635 - DNA, 75 bp, synthetic construct
  source 1..75: mol_type = other DNA
atcgcttccacagccaatcagcgaatagctgcagcagaggctgaatatttcatgcgcaaaattgatgaaagtccg

SEQ ID NO: 524636 - DNA, 75 bp, synthetic construct
  source 1..75: mol_type = other DNA
tgccgcgctttctgaccgtgtttcccggctggagcaccaacttgcagctgaaaaaaagagtgactattccacgtt

SEQ ID NO: 524637 - DNA, 75 bp, synthetic construct
  source 1..75: mol_type = other DNA
cacacaaacccattatattgtaaaagccgaaataaatgaagctggtaacgattttaatattgctaatttcattta

SEQ ID NO: 524638 - DNA, 75 bp, synthetic construct
  source 1..75: mol_type = other DNA
cagtgaaaaatggtctctggctggagtcaccctgcataataatggtgttaatggccaaaaaaacaactggttgtt

SEQ ID NO: 524639 - DNA, 75 bp, synthetic construct
  source 1..75: mol_type = other DNA
tgatttttcatcagttgaccgatgtaatgctgcgttaatggcaacaacgatagccgaatatttccgggatcgagg

SEQ ID NO: 524640 - DNA, 75 bp, synthetic construct
  source 1..75: mol_type = other DNA
tgcaagatggtatcctgaaatacacaccaggaatagtggttagggtaacacctgagcagaatgagctaattgaca

SEQ ID NO: 524641 - DNA, 75 bp, synthetic construct
  source 1..75: mol_type = other DNA
tattatctaaagatggtgcaagagattacgatatcaatttattaccaaagaatagttggttcgatttacatgtaa

SEQ ID NO: 524642 - DNA, 75 bp, synthetic construct
  source 1..75: mol_type = other DNA
cggtatatcactcaggatccgattgggctgaaggggggatggaatttttatcagtatccgttgaatccggttcag

SEQ ID NO: 524643 - DNA, 75 bp, synthetic construct
  source 1..75: mol_type = other DNA
gggcttatcagtgacataggcagtcaggtggcggatatcgcgcggacgcagggggaactgaatgcgttgaaggct

SEQ ID NO: 524644 - DNA, 75 bp, synthetic construct
  source 1..75: mol_type = other DNA
gagtgcagggaaagctgaaatttcagaccgttaatgattatggttcagtaaccccggtcagagaagtgaacttaa

SEQ ID NO: 524645 - DNA, 75 bp, synthetic construct
  source 1..75: mol_type = other DNA
ttcggccagcgcccatgctgccggagggatcgcattaggtgccacgcgtattatttatcccgctgatgctaaaca

SEQ ID NO: 524646 - DNA, 75 bp, synthetic construct
  source 1..75: mol_type = other DNA
acgcctgattgatgaactgccaccgtcgtatcaggaacgtcgagttattaatacaccactagagacacgcataag

SEQ ID NO: 524647 - DNA, 75 bp, synthetic construct
  source 1..75: mol_type = other DNA
cagctattgcgatttatatttttgcttcacgccgtgctggtgtagcgcttgaccgcatgcttattgcgctggggg

SEQ ID NO: 524648 - DNA, 75 bp, synthetic construct
  source 1..75: mol_type = other DNA
tcgtggactttcacggcaaacgttgattaagcccactgcccagtttcttcatacgcaagtcggccgtggattatt

SEQ ID NO: 524649 - DNA, 75 bp, synthetic construct
  source 1..75: mol_type = other DNA
gacgacgtttcagtgggtgaagtatgcgaaatttatgcgagctggcaagcaaatgaacgtatagccagggctcag

SEQ ID NO: 524650 - DNA, 75 bp, synthetic construct
  source 1..75: mol_type = other DNA
gcattggtcaacgtgttgggatttttgcatcggctggctgtggcaaaacggttttaatgcatatgctcgtaaaca

SEQ ID NO: 524651 - DNA, 75 bp, synthetic construct
  source 1..75: mol_type = other DNA
tgaaaatgattttgctatgaatgcccggcctaaactcacaaattggttgaaacagtcagttaatgaaaaaatgcc

SEQ ID NO: 524652 - DNA, 75 bp, synthetic construct
  source 1..75: mol_type = other DNA
ggcaaatttttctggtggcattaagcgcggcgctggtggtggtatttttgttctggttagttcttcctcaactct

SEQ ID NO: 524653 - DNA, 75 bp, synthetic construct
  source 1..75: mol_type = other DNA
ctggcgcagcgcacctgaactggacaacgattatgaagcacgcccggccaatggctgggatgtacgcgcagaagg

SEQ ID NO: 524654 - DNA, 75 bp, synthetic construct
  source 1..75: mol_type = other DNA
gcagcagatcaccgacgagaaagagaagtggatcgacgaccgggcgcagaaaatcatcgacatgatgcctaaaga

SEQ ID NO: 524655 - DNA, 75 bp, synthetic construct
  source 1..75: mol_type = other DNA
tgcccgatgacgttcagtatctttctcccccccctcgtgatcacaccccgccaccagtgctgtactggctttccg

SEQ ID NO: 524656 - DNA, 75 bp, synthetic construct
  source 1..75: mol_type = other DNA
cactgttacaggcggcggagagggtatcgcaacgctgatccccgtgttgaatggtgttcaccaggcgggtctgag

SEQ ID NO: 524657 - DNA, 75 bp, synthetic construct
  source 1..75: mol_type = other DNA
ctaatcaacaggtgaattttatcggtgatcaaagtactgctgccctgaccctcagtgtgccttcaggtgatatca

SEQ ID NO: 524658 - DNA, 75 bp, synthetic construct
  source 1..75: mol_type = other DNA
aacggatgctcagggtaaggcagaagttcttgtgacaagcaccattgcaggaacgaaagtagttacagctaatct

SEQ ID NO: 524659 - DNA, 75 bp, synthetic construct
  source 1..75: mol_type = other DNA
caaggcaataccaacgtcaacggcgaagacatgactgagattgaggagaatatgctaatcccaatttctggccag

SEQ ID NO: 524660 - DNA, 75 bp, synthetic construct
  source 1..75: mol_type = other DNA
ttactttatcgaccggggctggaataccaacagcgacgaccagaccggtgagttctgccgctcgcagctacgccc

SEQ ID NO: 524661 - DNA, 75 bp, synthetic construct
  source 1..75: mol_type = other DNA
acgctggattacgcctatgaagtgcaggctcggcatgatttatctcccggcgataagcctattgtgaagttccac

SEQ ID NO: 524662 - DNA, 75 bp, synthetic construct
  source 1..75: mol_type = other DNA
accactaacgtttttggtaggattaatcttgatctaggttcattttaccagactctaacatgtacaatgaatcca

SEQ ID NO: 524663 - DNA, 75 bp, synthetic construct
  source 1..75: mol_type = other DNA
tcgaaagtgatggagtgctttcactaccaaactttgagcgtcataacggaaaaagctcgaaaaaaacgggcggtt

SEQ ID NO: 524664 - DNA, 75 bp, synthetic construct
  source 1..75: mol_type = other DNA
ctggcgaccatgaatgacggtctttcttttgagggtgatgacggaaaggttattcataaaaaactgaatgaaaaa

SEQ ID NO: 524665 - DNA, 75 bp, synthetic construct
  source 1..75: mol_type = other DNA
taaaaagcggctctgccacattaacgtcattaacagcggtgaccgatcaaaacggaatcgcgacaacaagcgtga

SEQ ID NO: 524666 - DNA, 75 bp, synthetic construct
  source 1..75: mol_type = other DNA
atgcaaggtacagaaaagacgaaaccccgcagtgctggaacacatacggggcttctaaccaacaacgtaaactag

SEQ ID NO: 524667 - DNA, 75 bp, synthetic construct
  source 1..75: mol_type = other DNA
agacaccgttgttttgcattgtgtcttacaccttgttaatgcaaggtacagaaaagacgaaaccccgcagtgctg

SEQ ID NO: 524668 - DNA, 75 bp, synthetic construct
  source 1..75: mol_type = other DNA
ccatgttgagcacccctcataaaaaacaaatgcagtatgcaggaaaaaaaacaagtgttcaacacttgacgtgtt

SEQ ID NO: 524669 - DNA, 75 bp, synthetic construct
  source 1..75: mol_type = other DNA
tgttcgttttttgcgatggtgtattggttgattctttgttggtcattgtgtgtacctgtaaagcaatgcgccgga

SEQ ID NO: 524670 - DNA, 75 bp, synthetic construct
  source 1..75: mol_type = other DNA
cgcatggcagtaacgataaattgtgcgtctgtttcgttttcttcttttaccaaattcatttcgcttaaaacgtct

SEQ ID NO: 524671 - DNA, 75 bp, synthetic construct
  source 1..75: mol_type = other DNA
tgacttgcaccaaaaaaacaacgccccacagtgctggaacacatgcagggcgtctaaccacaaacactatagaga

SEQ ID NO: 524672 - DNA, 75 bp, synthetic construct
  source 1..75: mol_type = other DNA
cgttacaggcggtggagagggtattgcaaagctgatccccgtgttgaatggtgttcatcaagctgatctgagtac

SEQ ID NO: 524673 - DNA, 75 bp, synthetic construct
  source 1..75: mol_type = other DNA
atggcgtgaaacaaacgttaatcgtcagttttgtcggcgactcaagtaccgcgcaggttgatctgcagaagtcga

SEQ ID NO: 524674 - DNA, 75 bp, synthetic construct
  source 1..75: mol_type = other DNA
ttatcgagttgacgcctaacccaggcagcataatcgccggtaccccacagaacagcaccggtagcgtaatcaccg

SEQ ID NO: 524675 - DNA, 75 bp, synthetic construct
  source 1..75: mol_type = other DNA
aacaggtggtgacgaataacaacgacagtgtgcagctgacggcaatcgtgaaagatccgttgaatcatcccgtgg

SEQ ID NO: 524676 - DNA, 75 bp, synthetic construct
  source 1..75: mol_type = other DNA
ctaccggtaaagtgacatttaaaaatgtcggaagcagttgggtaacgattacagcgacgccaaaatcaggaggcc

SEQ ID NO: 524677 - DNA, 75 bp, synthetic construct
  source 1..75: mol_type = other DNA
aacagcaactgaataacgcagtcagcatcgacaacgtgaaaccaggagtcactacagactggaaagaaaccgcag

SEQ ID NO: 524678 - DNA, 75 bp, synthetic construct
  source 1..75: mol_type = other DNA
gaagaaataccgtgtcttgcttaacagggtagatacctcaaaacctgaatggcctacgcccccgaatattcaggc

SEQ ID NO: 524679 - DNA, 75 bp, synthetic construct
  source 1..75: mol_type = other DNA
atgaatagaatctatcgcgtgatatggaattgcaccctacaggtatttcaggcctgctcggaattgactcgcagg

SEQ ID NO: 524680 - DNA, 75 bp, synthetic construct
  source 1..75: mol_type = other DNA
ggaggatatgtgtcagacattcggtttaccttcatcggtgaaatatgaatcagatggaggcccaggcatcgcgcg

SEQ ID NO: 524681 - DNA, 75 bp, synthetic construct
  source 1..75: mol_type = other DNA
acttcagctacgatgcgctggaccggctggtacagcagggcggctttgacgggcggacgcaacgttatcattatg

SEQ ID NO: 524682 - DNA, 75 bp, synthetic construct
  source 1..75: mol_type = other DNA
ggagtggtaaatctaatacactagctaaactttacactacactttttaatgagcggctccaagcattacagcaca

SEQ ID NO: 524683 - DNA, 75 bp, synthetic construct
  source 1..75: mol_type = other DNA
gaccacgctcgactacgaaaactatcatatctttgttggcacctaccccaacgacccgatactcagcgtgatgtt

SEQ ID NO: 524684 - DNA, 75 bp, synthetic construct
  source 1..75: mol_type = other DNA
catcgtaaatgtcagtaatggtgccacccttaattcaacgggctatggatttatcggaggaaatgccagcccgaa

SEQ ID NO: 524685 - DNA, 75 bp, synthetic construct
  source 1..75: mol_type = other DNA
cattcctgcttccagcctttcactttttcatagccgctttgcttttagcgatcgccagcgaattgaaacggaaac

SEQ ID NO: 524686 - DNA, 75 bp, synthetic construct
  source 1..75: mol_type = other DNA
gctctctccgcgcaaacttaggcgagtgatagaaatgtggatgcccgtgacgacagggcatcatggtcggccccc

SEQ ID NO: 524687 - DNA, 75 bp, synthetic construct
  source 1..75: mol_type = other DNA
gcgggcgcttggtgcggttggtgttccggcggcaatcaaagagtggtggcaggattcaccgcgcaaaaaaccgta

SEQ ID NO: 524688 - DNA, 75 bp, synthetic construct
  source 1..75: mol_type = other DNA
accacgcgtatccagacggtctaccagccggggagcttcacgccgctcatccgtatcgagacagagaacggcgaa

SEQ ID NO: 524689 - DNA, 75 bp, synthetic construct
  source 1..75: mol_type = other DNA
tcacgcatcaccgcttccgctataaccgacatattcatccactctttgaacgctacgccgatggcagccaattca

SEQ ID NO: 524690 - DNA, 75 bp, synthetic construct
  source 1..75: mol_type = other DNA
cgggaaggtgaaatcgccggtgaattgttacacgagcaggcagatgagcgtcaggcactgagccttgcgatgcct

SEQ ID NO: 524691 - DNA, 75 bp, synthetic construct
  source 1..75: mol_type = other DNA
gagccctccaagccggactcttcaccttatcattgatgaggcacacaatattttgtcagagcagtccacccgtga

SEQ ID NO: 524692 - DNA, 75 bp, synthetic construct
  source 1..75: mol_type = other DNA
ataacttcagggctatttcagggggccttgataataataaaatcatttttaaagatacgaacacgctttttatat

SEQ ID NO: 524693 - DNA, 75 bp, synthetic construct
  source 1..75: mol_type = other DNA
aagaaagaatagaagccaaagcaccgaagcaaaaggaaagttataagaagtatttaaataatgattttattagaa

SEQ ID NO: 524694 - DNA, 75 bp, synthetic construct
  source 1..75: mol_type = other DNA
acgtggactggtgattgtggatgaggcggatcatcttggtattgacggcctggaacaactgcgtgcaatccagga

SEQ ID NO: 524695 - DNA, 75 bp, synthetic construct
  source 1..75: mol_type = other DNA
ttgaagcatatagaaaaaaacattaatgataatattatttatcatccgagtaataatgctaatttctattctgta

SEQ ID NO: 524696 - DNA, 75 bp, synthetic construct
  source 1..75: mol_type = other DNA
attcttcgatattctttaaatatacgacagggaattaaacatgatgatgttaatagaatagcggaaaatataata

SEQ ID NO: 524697 - DNA, 75 bp, synthetic construct
  source 1..75: mol_type = other DNA
aaaggaagaaaagactatatggtgctatttgaagaaccagagttgtttctttatccaagaatagttaaagagtta

SEQ ID NO: 524698 - DNA, 75 bp, synthetic construct
  source 1..75: mol_type = other DNA
taagcaaggtacaggtgttaacgtactgtctgaactttccagctctcagcagataaaaaatccaatccggatgcc

SEQ ID NO: 524699 - DNA, 75 bp, synthetic construct
  source 1..75: mol_type = other DNA
tatgcagggaagccaactatcgtaagtaagatagcgatgaaaaagcaaattagtggcaactttgatttaacagat

SEQ ID NO: 524700 - DNA, 75 bp, synthetic construct
  source 1..75: mol_type = other DNA
tattatttgttgcgattttttttatcttcccggtatttgctacatctatggttgcggcaacaacagctaatgggt

SEQ ID NO: 524701 - DNA, 75 bp, synthetic construct
  source 1..75: mol_type = other DNA
ctcacttgctaaaggtgagtatatcatttttacaaactctggtgatgaattaagaaaaaatagcattgaaatttt

SEQ ID NO: 524702 - DNA, 75 bp, synthetic construct
  source 1..75: mol_type = other DNA
gactacacaaataatcccatctgaaactactttgctggaagacgaaaaatcattggtttcatacttaaattacta

SEQ ID NO: 524703 - DNA, 75 bp, synthetic construct
  source 1..75: mol_type = other DNA
aagttgtcacgtatggagctgccacttttgcaacgtgcggcaatggtagcaagcggtctggcgcagatcgccacg

SEQ ID NO: 524704 - DNA, 75 bp, synthetic construct
  source 1..75: mol_type = other DNA
ttgccctttgggaacatgtttgccacacagagaatgataaagaattgtgtgaagaggcattcataagattacgcc

SEQ ID NO: 524705 - DNA, 75 bp, synthetic construct
  source 1..75: mol_type = other DNA
atgctgaaaggcagtccgctcaccgtgaccagcgcagtcatcattgtattaatgctattgatgatgattttttca

SEQ ID NO: 524706 - DNA, 75 bp, synthetic construct
  source 1..75: mol_type = other DNA
ccgtacgcccacaaaaacaaacgcgatttaacggtgcaaaactggtatggatgctgaaaggcagtccgctcaccg

SEQ ID NO: 524707 - DNA, 63 bp, synthetic construct
  source 1..63: mol_type = other DNA
atgttactggctggtctgagagtgctgacaaacgcaaaactgcctgatgcgctacgcttatca

SEQ ID NO: 524708 - DNA, 75 bp, synthetic construct
  source 1..75: mol_type = other DNA
cgacatcatgcatcaggccaataataattacaatgcggtcgataaaaaggtgcaatcgctggagaaaaaagtcaa

SEQ ID NO: 524709 - DNA, 75 bp, synthetic construct
  source 1..75: mol_type = other DNA
atggatgctgatgctgcgatcggccaaagtatggaaatttttgacgaaattcaacagcaagaacagattaataac

SEQ ID NO: 524710 - DNA, 75 bp, synthetic construct
  source 1..75: mol_type = other DNA
cttgcgctggccgcacggcagtattacggacagcgccttggagaactgtcacaggccatgagccaggggagcgta

SEQ ID NO: 524711 - DNA, 75 bp, synthetic construct
  source 1..75: mol_type = other DNA
gaggtggagtgtccagccgatgtccagccagtgtccacagataacaatatattaaataacttactacctaacggt

SEQ ID NO: 524712 - DNA, 75 bp, synthetic construct
  source 1..75: mol_type = other DNA
tgagcgacgcaatctgatccgcacattctggggtaaggctaataagattgcccgcaacctggacggcaagccgat

SEQ ID NO: 524713 - DNA, 75 bp, synthetic construct
  source 1..75: mol_type = other DNA
gcaaggctggtgctgacgaaggacggaagcatatttctcaatggtacgcacattcatctggaaggggagtcggat

SEQ ID NO: 524714 - DNA, 75 bp, synthetic construct
  source 1..75: mol_type = other DNA
taaattcgaacagcatccagaactgcgtgcgctcttgctggcaaccgcgcccgcaaaactggttgagcatacgga

SEQ ID NO: 524715 - DNA, 75 bp, synthetic construct
  source 1..75: mol_type = other DNA
attttgtaaatatgatatttttcatattgccgcttatattttcatatttagtggttataaaaactatatgcgcta

SEQ ID NO: 524716 - DNA, 75 bp, synthetic construct
  source 1..75: mol_type = other DNA
tttgtcatgcgatgaagtatggcaatgcctgaaagacgaactgcctgaagcccggggatggagatgcctcactga

SEQ ID NO: 524717 - DNA, 75 bp, synthetic construct
  source 1..75: mol_type = other DNA
tcaatctgaggtaatgaaagagattaaccatgtcagggaaaataaactcaatgaaacagcgcgtaaatatactac

SEQ ID NO: 524718 - DNA, 75 bp, synthetic construct
  source 1..75: mol_type = other DNA
aatcccacgcattgccgcactggatcctgaatgtaagttattcggttctgaaggttggaaatatcaatggccgaa

SEQ ID NO: 524719 - DNA, 75 bp, synthetic construct
  source 1..75: mol_type = other DNA
acttgatgtgcccctggcgctggcgcattccatattgatccctaatctcaggcattttcaggcactgtatccagg

SEQ ID NO: 524720 - DNA, 75 bp, synthetic construct
  source 1..75: mol_type = other DNA
acccgaaagctgagcgttactgctgaaggggatgagttctatcatcatgctaggcatgttctggccgaagttaat

SEQ ID NO: 524721 - DNA, 75 bp, synthetic construct
  source 1..75: mol_type = other DNA
gttgatgaagctgcaactcgtttccctgaactgaccattttacgagaaaactactatctcaggacgtggggacat

SEQ ID NO: 524722 - DNA, 75 bp, synthetic construct
  source 1..75: mol_type = other DNA
cactgatgaccgtcagcaaacattattgtgggcgatgagtaaggcgcctgatttcaatgaaagccgaggattcgt

SEQ ID NO: 524723 - DNA, 75 bp, synthetic construct
  source 1..75: mol_type = other DNA
ctttgccatgggaatatcgaatttttcttcgctatatcgctaatggggggccggcacatgcctatggtctcgaat

SEQ ID NO: 524724 - DNA, 75 bp, synthetic construct
  source 1..75: mol_type = other DNA
tccgatgatgcgtgccattgataaaggattagcaaactctcgaatcggcttggttttagtgacacctgcattgtt

SEQ ID NO: 524725 - DNA, 75 bp, synthetic construct
  source 1..75: mol_type = other DNA
cggagattataacgcactggctgttggtattggtcgtgatctcagtcagttcgggacattgtcggcggatgtaac

SEQ ID NO: 524726 - DNA, 75 bp, synthetic construct
  source 1..75: mol_type = other DNA
tgtaagggaaaataaactcaatgaaacagcgcgtaaatatactaccacgactaaagttttaaaaatcattaatga

SEQ ID NO: 524727 - DNA, 75 bp, synthetic construct
  source 1..75: mol_type = other DNA
atgaaaaatatccttattgtttcaggccatcctgagcttacccattccgtcgccaatgccacgatccttgatgaa

SEQ ID NO: 524728 - DNA, 75 bp, synthetic construct
  source 1..75: mol_type = other DNA
gctccgtgaactggtaagaatcactgcgcaaatgaactggcagctgaacgatctgaaagaacagatccgccaggg

SEQ ID NO: 524729 - DNA, 75 bp, synthetic construct
  source 1..75: mol_type = other DNA
ttgctcgcatcccgaagcggtctggacacgggagaagacacgctggaagttgtcgcaacaaaaattgcagaattg

SEQ ID NO: 524730 - DNA, 75 bp, synthetic construct
  source 1..75: mol_type = other DNA
tacgtatttaacgcatcttacgttaaagcaccgaacagcccggctgtaactgctggtcatgtaaccactaacgcg

SEQ ID NO: 524731 - DNA, 75 bp, synthetic construct
  source 1..75: mol_type = other DNA
ccggattttctttcctgagcggaatattacaatgtctgctctgacagaagcgacgattattatcgaagcgtcaga

SEQ ID NO: 524732 - DNA, 75 bp, synthetic construct
  source 1..75: mol_type = other DNA
tcaagtagctcatcaacttggaaaaccaatcataggtgtatatgaaaatgggttaaaaggcgatgtaaaactacc

SEQ ID NO: 524733 - DNA, 75 bp, synthetic construct
  source 1..75: mol_type = other DNA
tgatgaagttcgcggggcaaatatcgatcagttgattcaccgctattcgaaggctggacaaaatcacacgcgtgt

SEQ ID NO: 524734 - DNA, 75 bp, synthetic construct
  source 1..75: mol_type = other DNA
aactacaaccagaattaaaaccacatgaagtaatgggtgaaatcatctttattcatcgtccaaatggtcaggatt

SEQ ID NO: 524735 - DNA, 75 bp, synthetic construct
  source 1..75: mol_type = other DNA
aaacgcacgttttcagcgattcagaacatcagatttatgcataagttattcagcctgccggatgcattgtgtgag

SEQ ID NO: 524736 - DNA, 75 bp, synthetic construct
  source 1..75: mol_type = other DNA
gggcacatatcttcaaactattcattttccaatgcaaatacaggaacggcaaccagttctgtaggtgtaaacggt

SEQ ID NO: 524737 - DNA, 75 bp, synthetic construct
  source 1..75: mol_type = other DNA
ggatgggcctcttctcaggcttcaggcgcaatgacagactggttaagccgcttcagtaccgcaagaatcacgctg

SEQ ID NO: 524738 - DNA, 75 bp, synthetic construct
  source 1..75: mol_type = other DNA
atggccagggtagagggtgagctattcaaaattgcactggcatcgctggaagcagaaccgatagcgtgggaatgc

SEQ ID NO: 524739 - DNA, 75 bp, synthetic construct
  source 1..75: mol_type = other DNA
aggaagccccagccatacttaccgccgcgccatttcgcggattgccacaaccggaagcgcacgatcgaattacat

SEQ ID NO: 524740 - DNA, 75 bp, synthetic construct
  source 1..75: mol_type = other DNA
ggggggggggggggggggggggggggggggggaaacaggccggcactggcgcgaatatttaccctcaccccggcc

SEQ ID NO: 524741 - DNA, 75 bp, synthetic construct
  source 1..75: mol_type = other DNA
caccattttaattaatgataaaggaattccagacgatattgctcttgctaatataaaaaaacaagtttatcccat

SEQ ID NO: 524742 - DNA, 75 bp, synthetic construct
  source 1..75: mol_type = other DNA
tcctgacggcgttgctgaatacagcgtgtgggggctgaagctgccgacgctgcgccagcgcctgttccgctgcgt

SEQ ID NO: 524743 - DNA, 75 bp, synthetic construct
  source 1..75: mol_type = other DNA
cagcaacagcgtcagttccggcgtcaccgacagcgccgacgctcagggcaacatcgggttttccagcaataccta

SEQ ID NO: 524744 - DNA, 75 bp, synthetic construct
  source 1..75: mol_type = other DNA
cgggcgtacaggtcacggcctacacccagacgctctccgatatcgaagcccgcatcggcgaccgcgccaaagcgg

SEQ ID NO: 524745 - DNA, 75 bp, synthetic construct
  source 1..75: mol_type = other DNA
ggatcgggtaagcagcgtacaggtgccgctactggaacccgcctcactggtacagctacccaaaggccaggcgtt

SEQ ID NO: 524746 - DNA, 75 bp, synthetic construct
  source 1..75: mol_type = other DNA
ggggagaagaggaaaatgctcactgtgtcgccaattatcaactgccaccagagagtcagcagcagttattaaccc

SEQ ID NO: 524747 - DNA, 75 bp, synthetic construct
  source 1..75: mol_type = other DNA
atggcgttgactaccttggccataatgctcttgccaataacaaaatcattcatatcaaaacaactccatcatcaa

SEQ ID NO: 524748 - DNA, 75 bp, synthetic construct
  source 1..75: mol_type = other DNA
acacgacccgatcctcgacggcctgcgttctgccgtccgctatgacaaaacctattttgataagatcgtcgcctc

SEQ ID NO: 524749 - DNA, 75 bp, synthetic construct
  source 1..75: mol_type = other DNA
agccacgtcgcaaggccgcggtgtataccagctggcgctgtggcgtgcaccagacgcctacagcaagtatggtca

SEQ ID NO: 524750 - DNA, 75 bp, synthetic construct
  source 1..75: mol_type = other DNA
tttaaaagatataccatcgaaagccccattaagagatgattatataaataataaagatgggcaattgtatgatct

SEQ ID NO: 524751 - DNA, 75 bp, synthetic construct
  source 1..75: mol_type = other DNA
gcttttcgtattatcggagatggtgcaaccattaagacgaatattgcaccgggaactctgctggatgccagtggg

SEQ ID NO: 524752 - DNA, 75 bp, synthetic construct
  source 1..75: mol_type = other DNA
atcgccaccgccgaactgctgaccagacaactgccgcaggtggatgtgctcagcaacagcgtcagctccggtgtc

SEQ ID NO: 524753 - DNA, 75 bp, synthetic construct
  source 1..75: mol_type = other DNA
gaaatgcaccggaaagccatttatttcgtcctgttatcactggttccgttatttatctgtctacttattctgcta

SEQ ID NO: 524754 - DNA, 75 bp, synthetic construct
  source 1..75: mol_type = other DNA
ctgatgcgtgagcagcagatttccagtatgatgagtactcatcagtttgtcacggtccccggtcaactgatggaa

SEQ ID NO: 524755 - DNA, 75 bp, synthetic construct
  source 1..75: mol_type = other DNA
ggtgtttgtgaatggtgagcgtaatgccgggctcgtaaaccgccgctttcgtgagcgcacctactgcctgaaggg

SEQ ID NO: 524756 - DNA, 75 bp, synthetic construct
  source 1..75: mol_type = other DNA
atttttcaatacacaagggaaaattaacatcaccattatttatgttttgctttatatggtttagtgtttttatcc

SEQ ID NO: 524757 - DNA, 75 bp, synthetic construct
  source 1..75: mol_type = other DNA
ctgccggtaatggcaacgaagcggcaattgaagcgcaggcagctggcgttgaacaacgtctgaaagatctggtta

SEQ ID NO: 524758 - DNA, 75 bp, synthetic construct
  source 1..75: mol_type = other DNA
cccccagcaaatggtgtacggagagagtccttattgcatcaacagggctaaagcccggcaccatcgagcgggcta

SEQ ID NO: 524759 - DNA, 75 bp, synthetic construct
  source 1..75: mol_type = other DNA
cgctggcgcttgtcagcacggaaggggcaacagaatggtgcgcagaatacgatgaatggggcaacctgctgaatg

SEQ ID NO: 524760 - DNA, 75 bp, synthetic construct
  source 1..75: mol_type = other DNA
caatggctttgaggtcggggaatataacacatatgaagcatataactcagagaatcaatattttaccagagagga

SEQ ID NO: 524761 - DNA, 75 bp, synthetic construct
  source 1..75: mol_type = other DNA
ctctagctcagaagagttactttcagataatggtatcgagaaagacgataattcttctgacaattactttgaggt

SEQ ID NO: 524762 - DNA, 75 bp, synthetic construct
  source 1..75: mol_type = other DNA
cgctgagcacagaactgacgaacaccagtcagaaggtggtgccgacggacaaggcggtggtgtggatgccgtttg

SEQ ID NO: 524763 - DNA, 75 bp, synthetic construct
  source 1..75: mol_type = other DNA
gctgcgcttttcgcgatcgttgctatgcggcaggtgcacagtgtgaaaacgtcccggcgctgacagcgtgtggtg

SEQ ID NO: 524764 - DNA, 75 bp, synthetic construct
  source 1..75: mol_type = other DNA
gaagatgttcttaacgctcgggaaaaacagcttcgtcagtggcgcggcgcacgagtggcgatgatctttcaggaa

SEQ ID NO: 524765 - DNA, 75 bp, synthetic construct
  source 1..75: mol_type = other DNA
gatactctcgttgttactgctaaccgttttgaacagccgcgcagcactgtgcttgcaccaaccaccgttgtgacc

SEQ ID NO: 524766 - DNA, 75 bp, synthetic construct
  source 1..75: mol_type = other DNA
gcgcgacaacaataaagacggtgtcttccagcaggtcgaaaaactgactgacgaagagatggcgcagtacgacta

SEQ ID NO: 524767 - DNA, 75 bp, synthetic construct
  source 1..75: mol_type = other DNA
ggcgaatcaaatacgcggtgacactggcgaaatacagaaccaatagtaatgaacagcaggagagcaaatttgcct

SEQ ID NO: 524768 - DNA, 75 bp, synthetic construct
  source 1..75: mol_type = other DNA
cggcgcagatgggacttatttggtacgatgatggcaaagctatttatatctatgactcatcagagatgcgtaatg

SEQ ID NO: 524769 - DNA, 75 bp, synthetic construct
  source 1..75: mol_type = other DNA
ttgcaatttactctttacgccaacaatttatcttctactcaacgtctttatgctgacgctgggcgcattactgct

SEQ ID NO: 524770 - DNA, 75 bp, synthetic construct
  source 1..75: mol_type = other DNA
cagtgtaaccaccacgaccatttaccgtggtggggagcagagtattactaatgcaggccttgctaccgggaccat

SEQ ID NO: 524771 - DNA, 75 bp, synthetic construct
  source 1..75: mol_type = other DNA
tttttgatggcggaagtgttaatggcacgatcattgatggtggggagcagcacatttccagtgggggaagtgcga

SEQ ID NO: 524772 - DNA, 75 bp, synthetic construct
  source 1..75: mol_type = other DNA
acccggtcgtccccggaactggagaatgtgcagtgtggtgaagaaattcatctgcaatccgggacaacccgtgga

SEQ ID NO: 524773 - DNA, 75 bp, synthetic construct
  source 1..75: mol_type = other DNA
tcaaaataatggtggcgcaatcagagcgaacacatcggccatcctgagtggaacgaacgtaaatggtagcttcag

SEQ ID NO: 524774 - DNA, 75 bp, synthetic construct
  source 1..75: mol_type = other DNA
caggtggtagtggaacgggaataattcaaaataatggtggcgcaatcagagcgaacacatcggccatcctgagtg

SEQ ID NO: 524775 - DNA, 75 bp, synthetic construct
  source 1..75: mol_type = other DNA
atcgcctacgaaatgtatcccgactatgctattaccagtggcgcatattcaacaccctatacctacactaataat

SEQ ID NO: 524776 - DNA, 75 bp, synthetic construct
  source 1..75: mol_type = other DNA
aataaagtaggaataattcatctggtcaacacattcgttaatgaccggacttatgagttacgtggcgaaaagata

SEQ ID NO: 524777 - DNA, 75 bp, synthetic construct
  source 1..75: mol_type = other DNA
tgacgatatacaaattattgcatatcctgataccaacagtttacttgttaaaggaacagtatctcaggttgattt

SEQ ID NO: 524778 - DNA, 75 bp, synthetic construct
  source 1..75: mol_type = other DNA
tgcagactgttttcggtggcggaagtgtctccgggactcacattagcggaggtgagcagaacatttccagcggtg

SEQ ID NO: 524779 - DNA, 75 bp, synthetic construct
  source 1..75: mol_type = other DNA
agtggtggctctgcaactgagacggccataaatggaggcattcagtggatttacgatggaggctcagcttcagat

SEQ ID NO: 524780 - DNA, 75 bp, synthetic construct
  source 1..75: mol_type = other DNA
atgtatcagggacactcattagcggaggagagcagcgagtttccagcggtggtagtgctgtagacaccaccattg

SEQ ID NO: 524781 - DNA, 75 bp, synthetic construct
  source 1..75: mol_type = other DNA
ggtattccagagcgtgttcggcatgatcatgacgctcttgatcgcgatggagttcaagcattccatcgggcactg

SEQ ID NO: 524782 - DNA, 75 bp, synthetic construct
  source 1..75: mol_type = other DNA
ttcaggtcttacgtgaccaattggccatcatgagtttttacgagcgcttcgagcaggttgtcgcgctcgtgctgt

SEQ ID NO: 524783 - DNA, 75 bp, synthetic construct
  source 1..75: mol_type = other DNA
caagccagccaatgtacaggtggcattggatctggatgtgaaaggcttccagcagtgggtggctgaggtgctggc

SEQ ID NO: 524784 - DNA, 75 bp, synthetic construct
  source 1..75: mol_type = other DNA
ggtcctcctgataccagtgaaacttatgtagctgctggttttgattcgtcacgtcctccggtttctctcaataag

SEQ ID NO: 524785 - DNA, 75 bp, synthetic construct
  source 1..75: mol_type = other DNA
gtagaaattattcaagaaataataaaaagtgataagagggtatgtttgattaatgatgatcttccttcaaatggc

SEQ ID NO: 524786 - DNA, 75 bp, synthetic construct
  source 1..75: mol_type = other DNA
gcgccacgctggctctgggtgcgacctactggctgctgcgcaagcgcggcgaccgcgccgccgagacctctgagc

SEQ ID NO: 524787 - DNA, 75 bp, synthetic construct
  source 1..75: mol_type = other DNA
ggagcgacgcgatgcttcatggtgccgaacctgtaagccaaacttacaagttgccagttaatacaccttgcaaag

SEQ ID NO: 524788 - DNA, 75 bp, synthetic construct
  source 1..75: mol_type = other DNA
ctgagattatgcgcggtcatatcgctgtattcgagcgatatggaatagccccaaacgatagctccaccacaattc

SEQ ID NO: 524789 - DNA, 75 bp, synthetic construct
  source 1..75: mol_type = other DNA
tgcgtgagttagcaaaacaggcaacacaaggagaatgggttgcatttatttcgacgggtactggtacgtatgcgg

SEQ ID NO: 524790 - DNA, 75 bp, synthetic construct
  source 1..75: mol_type = other DNA
caaaccagccaatgtacaggtggcattggatctgaatgtaaaagggttccagcagtgggtagctgaggtgctggc

SEQ ID NO: 524791 - DNA, 75 bp, synthetic construct
  source 1..75: mol_type = other DNA
cggtagtgccggataatgcatcagggtcgcttgcttatgcttacaaagagcttacgcctgagattatgcgcggtc

SEQ ID NO: 524792 - DNA, 75 bp, synthetic construct
  source 1..75: mol_type = other DNA
gacgctaatgatgggtggataattcctggtgcgtcgtggataccatcacactggatgccgctaccagaaccgccg

SEQ ID NO: 524793 - DNA, 75 bp, synthetic construct
  source 1..75: mol_type = other DNA
tcgcttcgtcaggccttccagttgcaacgactgcttgagcgagatgcccgtggtggtacccgttatattgagatt

SEQ ID NO: 524794 - DNA, 75 bp, synthetic construct
  source 1..75: mol_type = other DNA
ctaagtatcgggataatcattctgacgattggcgttatggcccccatcgccagcgggacgctaccgccctcaacc

SEQ ID NO: 524795 - DNA, 75 bp, synthetic construct
  source 1..75: mol_type = other DNA
tttgctcggtgttcgttaaggacgcgacggttgtcgggctggacgatggcgacatcgttacggtgaaagaagcga

SEQ ID NO: 524796 - DNA, 75 bp, synthetic construct
  source 1..75: mol_type = other DNA
ccgtgctggcgatgctggatgagttggaagccgcagagaagcgcatagcagaactggagggggacgcattcaatc

SEQ ID NO: 524797 - DNA, 75 bp, synthetic construct
  source 1..75: mol_type = other DNA
atcttaaaagcggtggcgatccccggttatcaggtgccgtttggcgggcgcgagatgccgatgccgtacggctgg

SEQ ID NO: 524798 - DNA, 75 bp, synthetic construct
  source 1..75: mol_type = other DNA
cgtcgatttccaggccgaactggagctactcaaacgtctgcaacaggagcagaaccatggctaatctgagcggct

SEQ ID NO: 524799 - DNA, 75 bp, synthetic construct
  source 1..75: mol_type = other DNA
tccgcgtcacaccgttaagcaccttttttccgtggatcgaaaaacagggactgagtatcgggataatcattctga

SEQ ID NO: 524800 - DNA, 75 bp, synthetic construct
  source 1..75: mol_type = other DNA
gaaattaagcctacatccaagaaactggatacgcagcttgcgcagttgattacatcgaatatatcaccacagacg

SEQ ID NO: 524801 - DNA, 75 bp, synthetic construct
  source 1..75: mol_type = other DNA
tggggcatttaaatatctacagtgaacatgataaagtacttaacacgatataccctctcgtagagtcagtaacgc

SEQ ID NO: 524802 - DNA, 75 bp, synthetic construct
  source 1..75: mol_type = other DNA
ccggtacgttcgatatcaatgtgaaccctgttcttcaaaattctgcgactaccgacacaaccccgcaaggtaact

SEQ ID NO: 524803 - DNA, 75 bp, synthetic construct
  source 1..75: mol_type = other DNA
ctggacaccaaagaagaactggcaaactccacgctcccatcggctgatgggatttctggcgagtacgcagagaag

SEQ ID NO: 524804 - DNA, 75 bp, synthetic construct
  source 1..75: mol_type = other DNA
cgttctgctggaatcacgattgacaaccttgaatccaagtgcgcggcgctggctgctgaaaaagagacatttgct

SEQ ID NO: 524805 - DNA, 75 bp, synthetic construct
  source 1..75: mol_type = other DNA
acaggtgctggatgcgttggtggaacagtggcagcgaacgcctgcggacgttgttctctttccgccgggaacgtt

SEQ ID NO: 524806 - DNA, 75 bp, synthetic construct
  source 1..75: mol_type = other DNA
ccacggcccgtaattactgtcaggagcaaccgaacacctggatgataaccctgtctcccgcgcattccagcgtca

SEQ ID NO: 524807 - DNA, 75 bp, synthetic construct
  source 1..75: mol_type = other DNA
cttaatcccttccctgctggagaagttcaattcagaaattatttaatctgtcgtcttcttttgaattatggtttg

SEQ ID NO: 524808 - DNA, 75 bp, synthetic construct
  source 1..75: mol_type = other DNA
atgttcgccgacctggaagaggcaactgacgtggaaacccgtgttgctctttacgacaaaatactcaaagctgaa

SEQ ID NO: 524809 - DNA, 75 bp, synthetic construct
  source 1..75: mol_type = other DNA
tagttctggatactattgataaaaatatagatttagagtatttgctttcagcatttaaatatgaggcgcatagct

SEQ ID NO: 524810 - DNA, 75 bp, synthetic construct
  source 1..75: mol_type = other DNA
gcttggcggctggagtcacaatagccatatgcctgatgtttatgccaaaagatttctatcacagcaggctaatac

SEQ ID NO: 524811 - DNA, 75 bp, synthetic construct
  source 1..75: mol_type = other DNA
atgtatatactcgaccagttgagtgttgctccaaaccggcggatttggacattggttgacgccactactaactta

SEQ ID NO: 524812 - DNA, 75 bp, synthetic construct
  source 1..75: mol_type = other DNA
cgaatccacgcagtcatctacgctacaggctctaaagtttttttatgagtactggtatcaaaaacatgatgtcac

SEQ ID NO: 524813 - DNA, 75 bp, synthetic construct
  source 1..75: mol_type = other DNA
gcgtcatctgtgcccggatttctacggtgcgacttacgagaaaatgggcgaactgggcttcattcagtggccttg

SEQ ID NO: 524814 - DNA, 75 bp, synthetic construct
  source 1..75: mol_type = other DNA
tttggaacgggaggcaaataccagcaggcgatacaggctgcaacggcagcagtacagggactggccggcggtaat

SEQ ID NO: 524815 - DNA, 75 bp, synthetic construct
  source 1..75: mol_type = other DNA
ccctgatgttagtcgtcagttatggcgtgcaggctaaacagaaaggaatctctgtcccggatgtgaagcacctgg

SEQ ID NO: 524816 - DNA, 75 bp, synthetic construct
  source 1..75: mol_type = other DNA
tgaaaatctaatttcagctacggagattaattattgcaatcttattcaagggcatttttttgaatatatgacatt

SEQ ID NO: 524817 - DNA, 75 bp, synthetic construct
  source 1..75: mol_type = other DNA
aaatgctgtggactatgggaacagttattctcttggtgatcatcattatattactcagttgggtcggattacgga

SEQ ID NO: 524818 - DNA, 75 bp, synthetic construct
  source 1..75: mol_type = other DNA
ctttgacagggaaaaagagcaacagcgactgcagcaggcgcaactcattggtgagattggtaaccaggtggcaga

SEQ ID NO: 524819 - DNA, 75 bp, synthetic construct
  source 1..75: mol_type = other DNA
tggactgcgataaaagtgcccgtatcaacgttcagatagatgccgtacaggatccgtccaacgtggctggcgtga

SEQ ID NO: 524820 - DNA, 75 bp, synthetic construct
  source 1..75: mol_type = other DNA
gggccaatactgcgtatccgccggtttatctgccaccaccagccggagaaccgtttgttgacagctttgtgcgcg

SEQ ID NO: 524821 - DNA, 75 bp, synthetic construct
  source 1..75: mol_type = other DNA
acgccagcgttaaatcactggtggcctttccacaattgatggcattgatgggcgaaaacccgcaatgggtgcaaa

SEQ ID NO: 524822 - DNA, 75 bp, synthetic construct
  source 1..75: mol_type = other DNA
tcggcactcgatccggagcgagtcagcgaagtactacaggtgattgaaaagctggcggaagaggggatcaccatg

SEQ ID NO: 524823 - DNA, 75 bp, synthetic construct
  source 1..75: mol_type = other DNA
ctggggtagtagaccagtacaacctggtcgccaggcgaagaagttcagacaatgtgcccgatgtcggtattcgta

SEQ ID NO: 524824 - DNA, 75 bp, synthetic construct
  source 1..75: mol_type = other DNA
cacaaagcgtgtttcatttggcagcagagacccttaacaatccgaacgcctcggcgattcagaaaagtttagcgg

SEQ ID NO: 524825 - DNA, 75 bp, synthetic construct
  source 1..75: mol_type = other DNA
atgaaaatgtgttttctgaaactaaaaaattatcgaataaaaataatgccgatcagttttttgaatgcgctaaaa

SEQ ID NO: 524826 - DNA, 75 bp, synthetic construct
  source 1..75: mol_type = other DNA
tggactgcgacaaaagcgcccgcatcaacgttcagatagatgccgagccggatcagtcaaaggcggaaggagtga

SEQ ID NO: 524827 - DNA, 75 bp, synthetic construct
  source 1..75: mol_type = other DNA
atccggctgataaaaaccggcgacattacgcccggaacgctgagcggcaacctggggcgttttatcgcggggaca

SEQ ID NO: 524828 - DNA, 75 bp, synthetic construct
  source 1..75: mol_type = other DNA
gatccgtccaacgtggctggcgtgatgaagctggacagcgcgcccggagacatggcggctacgggcatcggtgtc

SEQ ID NO: 524829 - DNA, 75 bp, synthetic construct
  source 1..75: mol_type = other DNA
acattgagtgatttagacttgttaccgaaaagtcatcaggccacgatcactgaagttctggcgttcattgaaaat

SEQ ID NO: 524830 - DNA, 75 bp, synthetic construct
  source 1..75: mol_type = other DNA
tactggctgaagctgtccgctgagcaaggtcattgtgaagcacagtattccttagggcaaaagtataccgaggat

SEQ ID NO: 524831 - DNA, 75 bp, synthetic construct
  source 1..75: mol_type = other DNA
atggctcatgcccggagaaaaatccacgatgtgcatgcaagagcgcccacctacatcaccacggaagccctgcag

SEQ ID NO: 524832 - DNA, 75 bp, synthetic construct
  source 1..75: mol_type = other DNA
ttaacctatatggcgctttagataacgttccccttgtagttaaggaatgcacaggtaaaaatcatcaaattaacg

SEQ ID NO: 524833 - DNA, 75 bp, synthetic construct
  source 1..75: mol_type = other DNA
aacgaagaccaatatctgaaatctccaagggatagagagaaatggcttagattatggctatctagtgaagatctg

SEQ ID NO: 524834 - DNA, 75 bp, synthetic construct
  source 1..75: mol_type = other DNA
gtttattggcgttcaggtaaaaaccacctcacgcacaatgagtagtagtctaggagtacagatcccctataaaaa

SEQ ID NO: 524835 - DNA, 75 bp, synthetic construct
  source 1..75: mol_type = other DNA
attaaggtccccgcaaaatatgatttcacacatccagtcaagaatcccattaataaatggagagcatttattgcc

SEQ ID NO: 524836 - DNA, 75 bp, synthetic construct
  source 1..75: mol_type = other DNA
aataataaaccaaaaacaatcatttttgatttacgttttcttagtgcaattaagcagaaagtttttttgggcagt

SEQ ID NO: 524837 - DNA, 75 bp, synthetic construct
  source 1..75: mol_type = other DNA
tgataatatagagcataatttgcagctaagttttctcgtggattcacggccgtcgatcaccaataaatactcagc

SEQ ID NO: 524838 - DNA, 75 bp, synthetic construct
  source 1..75: mol_type = other DNA
gttatatctatcctggatgccagtatgtgttgtttatttcttgctgacttatttttctatacccatgggcgttaa

SEQ ID NO: 524839 - DNA, 75 bp, synthetic construct
  source 1..75: mol_type = other DNA
gctgagtcgatgtccagaagcttatttcaggatttatctggtttttccgagtcagatatgtatgcagtgggtgga

SEQ ID NO: 524840 - DNA, 75 bp, synthetic construct
  source 1..75: mol_type = other DNA
ggtggaacgggaaccgtttatcactttaatggtgagcaatggaaaaaactcccttttccgacaaataaacttctg

SEQ ID NO: 524841 - DNA, 75 bp, synthetic construct
  source 1..75: mol_type = other DNA
gctggtgagtacttatttgcttattggatttctcgttatttcaaatggccttgtcgactgctggatattgatatg

SEQ ID NO: 524842 - DNA, 75 bp, synthetic construct
  source 1..75: mol_type = other DNA
gctgggcatctctacccacgaagagcattgcaattcgccattatctcagtgttatcgtccgcactcctctattcc

SEQ ID NO: 524843 - DNA, 75 bp, synthetic construct
  source 1..75: mol_type = other DNA
ttggcgaaatcatgaaaagactggagggaagtaaatcctcattactctatttttctgaccacggtctggagaaaa

SEQ ID NO: 524844 - DNA, 75 bp, synthetic construct
  source 1..75: mol_type = other DNA
gtgaataatgacggtaattttgtcaatgatttgtcgggcagacgtggaatatatcaggcaggtattaaagcctca

SEQ ID NO: 524845 - DNA, 75 bp, synthetic construct
  source 1..75: mol_type = other DNA
atgagtaataaacataaacatgcaggtcatattatcattattaaaggccacagctttaagtctaatgagaatggt

SEQ ID NO: 524846 - DNA, 75 bp, synthetic construct
  source 1..75: mol_type = other DNA
ggatacgggacatggtgtgatatgagaagggacggtgatatcacactggacggaaatatgtctgagtatgttatt

SEQ ID NO: 524847 - DNA, 75 bp, synthetic construct
  source 1..75: mol_type = other DNA
aaatgcggcgtctgccacgaaattacaaacggcaagaaccattggtggcgtttcatttgatggctccgccaatat

SEQ ID NO: 524848 - DNA, 75 bp, synthetic construct
  source 1..75: mol_type = other DNA
gaatgggctacagcgtcaatgtggggaataacgtcaccttctcggtgggcaagacaatgaaggaaaacaccggac

SEQ ID NO: 524849 - DNA, 75 bp, synthetic construct
  source 1..75: mol_type = other DNA
gccggatgggtctctgaagatttcgaggacatggtttatgcggcctttgaatctatccttgagatgcctgaagtt

SEQ ID NO: 524850 - DNA, 75 bp, synthetic construct
  source 1..75: mol_type = other DNA
tgctaataagatggtcgaacttggctatcacgctgaagctgagctattggaacgtcataaggacgactatagaga

SEQ ID NO: 524851 - DNA, 75 bp, synthetic construct
  source 1..75: mol_type = other DNA
tggacgccttgtaaacactcgaattttcacttcatcaggtacgtacaccccgacaccaggaactaaacgaatcag

SEQ ID NO: 524852 - DNA, 75 bp, synthetic construct
  source 1..75: mol_type = other DNA
ccaggtgatggcagcgaaagcggtggaaattggctacgacattttgcagggcaaacctgcgccgaaagagccggt

SEQ ID NO: 524853 - DNA, 75 bp, synthetic construct
  source 1..75: mol_type = other DNA
tacccgctggcaggggaaatccgtggtttttgatgccagtcataacatgtttgactacaaagtattacgaaagaa

SEQ ID NO: 524854 - DNA, 75 bp, synthetic construct
  source 1..75: mol_type = other DNA
ggtgatacctatgatgtttatgttgaaataggtaattacgccacgggtgtaaatatccagtgggattataccagt

SEQ ID NO: 524855 - DNA, 75 bp, synthetic construct
  source 1..75: mol_type = other DNA
ggatcaccggggcgctgacagggaacgccgacaccgcgacgaaattgaaaacagcacgcacgattggcggtgtgg

SEQ ID NO: 524856 - DNA, 75 bp, synthetic construct
  source 1..75: mol_type = other DNA
ccaataacgaaacgtttttcggtgcaggcggtggggccggcgggacagtaattgtcacgctgaccctgacgaagg

SEQ ID NO: 524857 - DNA, 75 bp, synthetic construct
  source 1..75: mol_type = other DNA
tattgatggcgtggcggtgagttatatcgatgctgccgtggcgggtaatgactccaacttattgatagtgtttta

SEQ ID NO: 524858 - DNA, 75 bp, synthetic construct
  source 1..75: mol_type = other DNA
ttgtttcattactaacaataagctttggcatttattggaagatatatacagcggaaaattcaatattattgatag

SEQ ID NO: 524859 - DNA, 75 bp, synthetic construct
  source 1..75: mol_type = other DNA
gctcgttttcttttgctctttttattatgatggtatatcttcattcgcttatataaagtcgaataaaaatattgt

SEQ ID NO: 524860 - DNA, 75 bp, synthetic construct
  source 1..75: mol_type = other DNA
tagtagtttgacaacgatggggtgggacgtatacatatatgaaataaataaaagaaagcaacagctaggtattgc

SEQ ID NO: 524861 - DNA, 75 bp, synthetic construct
  source 1..75: mol_type = other DNA
aaatccctccatcagatagtggttgtcgaacgtaagctactcacacaggaagaatgggagaagacattcaatctg

SEQ ID NO: 524862 - DNA, 75 bp, synthetic construct
  source 1..75: mol_type = other DNA
tgtccggcggtcagaagcagctggtggggcttgcacagtcgcttattcgccgccccgcattattattgctggatg

SEQ ID NO: 524863 - DNA, 75 bp, synthetic construct
  source 1..75: mol_type = other DNA
tattattgatagctttgcgtttgcaataaataattatatagaaaatcactatgaagattttgaattaaatgtttt

SEQ ID NO: 524864 - DNA, 75 bp, synthetic construct
  source 1..75: mol_type = other DNA
cttcgcacaggacgtcttgccacctggctgaacagtgccatgtgggatgccattcaggaggaaatctgtggtgtc

SEQ ID NO: 524865 - DNA, 75 bp, synthetic construct
  source 1..75: mol_type = other DNA
gctttatcgagccgcgcgaaacggaaacccgcaccatgcacgcgctggaagagtacggcgtgatgcaggtgaaac

SEQ ID NO: 524866 - DNA, 75 bp, synthetic construct
  source 1..75: mol_type = other DNA
gaccgaagatcagataattatcttccaggtgccaatccccgagccgctgcgctttatcgagccgcgcgaaacgga

SEQ ID NO: 524867 - DNA, 75 bp, synthetic construct
  source 1..75: mol_type = other DNA
atgagtaagcgcttgtggttagttgtttttatactggcttcactggccttttttagtgtttttgctgtatatttt

SEQ ID NO: 524868 - DNA, 75 bp, synthetic construct
  source 1..75: mol_type = other DNA
aactattgcggcgcgacagtctgctaccggcactaaaaccgatacgccgattcaaaaagtgccacagtctatttc

SEQ ID NO: 524869 - DNA, 75 bp, synthetic construct
  source 1..75: mol_type = other DNA
ttgttcttggcaactctctgttacagacattgattgaaaagcgcctcgctgagcatacaacaatagaaactctct

SEQ ID NO: 524870 - DNA, 75 bp, synthetic construct
  source 1..75: mol_type = other DNA
ggcgaaagaacatgatggagtattatcgccagaaaatatttgtccatgtggagattctttaaaaaaatatgcaga

SEQ ID NO: 524871 - DNA, 75 bp, synthetic construct
  source 1..75: mol_type = other DNA
caatgcgacttatctcggcccggttatgccgtggatagatccggtaaaagaggctgcggcatggctgaccattat

SEQ ID NO: 524872 - DNA, 75 bp, synthetic construct
  source 1..75: mol_type = other DNA
gttggtgttgcagggatatcactgcgcgagcaggcgcgggcgctggatgaagaccatgacattgtaattggtctg

SEQ ID NO: 524873 - DNA, 75 bp, synthetic construct
  source 1..75: mol_type = other DNA
gactggcgctgcgttcagcactgcgtgatggtgagatgttcacgcagctggtgcggggcccggttgccggactga

SEQ ID NO: 524874 - DNA, 75 bp, synthetic construct
  source 1..75: mol_type = other DNA
cggtctgacgggttgtgatgataaaaaagccgaaacagaaacgctcccgcctgccaatagtcaacctgccgcacc

SEQ ID NO: 524875 - DNA, 75 bp, synthetic construct
  source 1..75: mol_type = other DNA
tcatcctcattcagttgggttctggatcccgtagttctcacactctatccgtcctatatcgacgggatatccagc

SEQ ID NO: 524876 - DNA, 75 bp, synthetic construct
  source 1..75: mol_type = other DNA
tgatcggcgattttcttcatttgctggcggatggcgcgttcttttccgggactattcccccgtggctggcagaag

SEQ ID NO: 524877 - DNA, 75 bp, synthetic construct
  source 1..75: mol_type = other DNA
ccgaacgttcatctttatgaattccgtaacggtcagttgcgtgctgtggctgccggaacccgcggcagctattcc

SEQ ID NO: 524878 - DNA, 75 bp, synthetic construct
  source 1..75: mol_type = other DNA
gctttgatgctattttccagacggagaatatctattaataaaggagttataatagggggtgtagtcattttttta

SEQ ID NO: 524879 - DNA, 75 bp, synthetic construct
  source 1..75: mol_type = other DNA
gtaatacaacccgtagttttattaatgattgtggtcatgttaaaaataaactttataatggagttctgatcctac

SEQ ID NO: 524880 - DNA, 75 bp, synthetic construct
  source 1..75: mol_type = other DNA
gccgcaaccgctcagtctggacggtaagctgcatgaagaatttgcagcacagatatctgcactctggtcggaatg

SEQ ID NO: 524881 - DNA, 75 bp, synthetic construct
  source 1..75: mol_type = other DNA
gccctgaaagattatgaagattatgagctgactgcagcaaggatcgccgctgctctggggatgtacatccgcaaa

SEQ ID NO: 524882 - DNA, 75 bp, synthetic construct
  source 1..75: mol_type = other DNA
tgtccacgcttttcaatgccacttatcttggtccggtgatgccgtggattgatccggtgaaggaggctgcagcat

SEQ ID NO: 524883 - DNA, 75 bp, synthetic construct
  source 1..75: mol_type = other DNA
tccgatcatttctcgtcatacggcgattatcccgcgtaataaagaccggattggcgaaaatctcggtcagttcgt

SEQ ID NO: 524884 - DNA, 75 bp, synthetic construct
  source 1..75: mol_type = other DNA
tgtgcggaatattattgatgcttatggggagtttttctcaagcagcagatattacgttaatgaaccataagtata

SEQ ID NO: 524885 - DNA, 75 bp, synthetic construct
  source 1..75: mol_type = other DNA
tggaatactatgacgatatccggggtccagtggtcccccttccttgatgcagagctgaataatcaactgaccgcc

SEQ ID NO: 524886 - DNA, 75 bp, synthetic construct
  source 1..75: mol_type = other DNA
tgcgcggcgagggtgtgattcaggtttctgacagtgacgttgtccgctcagtatctcgtgatattgactctgcgt

SEQ ID NO: 524887 - DNA, 75 bp, synthetic construct
  source 1..75: mol_type = other DNA
acatcagtgccatagagtttgaactcaatactcaaaatgctgcaggtgaagtgctcacactgacctgcacaagcg

SEQ ID NO: 524888 - DNA, 75 bp, synthetic construct
  source 1..75: mol_type = other DNA
tcagtaaggaaggggcaacagaatggtgcgcagaatacgatgagtggggcaacctgctgaatgaagagaacccgc

SEQ ID NO: 524889 - DNA, 75 bp, synthetic construct
  source 1..75: mol_type = other DNA
atgtcgaagagagcgaggaaggaaatacccgggtttattacctgaaatatgctaaagcacgaatctggtggaagt

SEQ ID NO: 524890 - DNA, 75 bp, synthetic construct
  source 1..75: mol_type = other DNA
cccaccgaatggttgggcgaacatagcgcggagttggtttctgacgcggtgaattctttgcttgatgatatcagc

SEQ ID NO: 524891 - DNA, 75 bp, synthetic construct
  source 1..75: mol_type = other DNA
agacgttaaccctgctggatggtgccgcacgtcataacgtacaggtcctgataaccgacagcgggcagcgaaccg

SEQ ID NO: 524892 - DNA, 75 bp, synthetic construct
  source 1..75: mol_type = other DNA
ctgctctcgctggtagtaatggcgtagtcaatgccaatactgaaaaagcaattaatggcggtagtcagatattca

SEQ ID NO: 524893 - DNA, 75 bp, synthetic construct
  source 1..75: mol_type = other DNA
tacccgcattctcgaactgtggcgccgctgggaaaagtagaatcaaacatgaaattaaacttgggaattccaaaa

SEQ ID NO: 524894 - DNA, 75 bp, synthetic construct
  source 1..75: mol_type = other DNA
cttgcctatacaatacgcaaccaaacatctgtcattatgcccctccgcacagggggattcatcatgcaggatttt

SEQ ID NO: 524895 - DNA, 75 bp, synthetic construct
  source 1..75: mol_type = other DNA
agtgggtaagggcgctcactccattagcactttgggattctccggcggaaccgttgattttggtgccctgacagc

SEQ ID NO: 524896 - DNA, 75 bp, synthetic construct
  source 1..75: mol_type = other DNA
gggaatcagttgttcatgaacgatgtgttcctgaagcggctgtttgcggtgagtatcacctcgtccggcaacccc

SEQ ID NO: 524897 - DNA, 75 bp, synthetic construct
  source 1..75: mol_type = other DNA
aatctgcatttgtggaagacagaggacagacaagcaatgatgatgaaggatatctggaaattttccgggaaaaaa

SEQ ID NO: 524898 - DNA, 75 bp, synthetic construct
  source 1..75: mol_type = other DNA
atggccttttatcaacagaaaaaaattcagaccgtactggaatataagattccgaaaaaaactccggcaaaaata

SEQ ID NO: 524899 - DNA, 75 bp, synthetic construct
  source 1..75: mol_type = other DNA
ctgaagaaacaattgagatgcaacttaaagttagtaaacatgccagtcaaaatatataatattatgattccacgc

SEQ ID NO: 524900 - DNA, 75 bp, synthetic construct
  source 1..75: mol_type = other DNA
tggggaaatctgcttttgtggaagccagtggccgggccagcaatgatgcagaagggtatctggggctgtttcggg

SEQ ID NO: 524901 - DNA, 75 bp, synthetic construct
  source 1..75: mol_type = other DNA
agatatatctcggcttcagtccgcagccaggcaagccggtactgttaatgttgtgctcggccgcagagcatatac

SEQ ID NO: 524902 - DNA, 75 bp, synthetic construct
  source 1..75: mol_type = other DNA
gggaaaagtttcactgtcagatttaatggttcttgtcggcaatacagccctgtaaaaggctgcgagaagggcggg

SEQ ID NO: 524903 - DNA, 75 bp, synthetic construct
  source 1..75: mol_type = other DNA
taactggactccaacaaccagtatcagcgatctgctggttgtggtgatgaaaaaatccacagcaggtatcagtat

SEQ ID NO: 524904 - DNA, 75 bp, synthetic construct
  source 1..75: mol_type = other DNA
gataccgccagtgttattccgcggtggtaagcatgagaatttcaacagtaataaccaacagtcatactggtattc

SEQ ID NO: 524905 - DNA, 75 bp, synthetic construct
  source 1..75: mol_type = other DNA
gcaaccccccgacgttttccctgacgccggaagggaagctgacagccaggaacgcggatatcagcggagcaatta

SEQ ID NO: 524906 - DNA, 75 bp, synthetic construct
  source 1..75: mol_type = other DNA
tattattcctgagaatgatgtgcggtttggcgagcgcaagtttagcacccggttaaacacaattaagcatagagg

SEQ ID NO: 524907 - DNA, 75 bp, synthetic construct
  source 1..75: mol_type = other DNA
cgccgcgttggtcagcatctgttgcagatcatgagcggttttcttgaactaaccgatgatgcgcgtattcagcgc

SEQ ID NO: 524908 - DNA, 75 bp, synthetic construct
  source 1..75: mol_type = other DNA
tcccgctttgcgcctccgataccgtccgctggcagcgccgtacacccgacgtggaacacggtatctggcctgacg

SEQ ID NO: 524909 - DNA, 75 bp, synthetic construct
  source 1..75: mol_type = other DNA
aaaaaacgctgatggcggtagcgtgcctgagcgcagtaccggcagcccaggctgccatctcccttgaccgtacgc

SEQ ID NO: 524910 - DNA, 75 bp, synthetic construct
  source 1..75: mol_type = other DNA
ctgacgttattgctggtcttgagtggttagcatcaactcaagagaacaaacaacacttttaccagcgcttagcaa

SEQ ID NO: 524911 - DNA, 75 bp, synthetic construct
  source 1..75: mol_type = other DNA
gtgagttccatccttgagatttttttcccgctttgcgccgctgagcccatccgctggcagcgccgtacacccgac

SEQ ID NO: 524912 - DNA, 75 bp, synthetic construct
  source 1..75: mol_type = other DNA
tcagcgtcactttccgacatagagatgcgtggttttacctttgatcaaaaacgccagacacttcacctccagcta

SEQ ID NO: 524913 - DNA, 75 bp, synthetic construct
  source 1..75: mol_type = other DNA
gtgatatcattaaagcatatgaagtgttagattctttcattaataaaaataatatcaaaataaaatatcctagtc

SEQ ID NO: 524914 - DNA, 75 bp, synthetic construct
  source 1..75: mol_type = other DNA
atatcatatcttcgttataagaatttcagatcatatacattaagtgcattatctgaggcctataaaaaaccttca

SEQ ID NO: 524915 - DNA, 75 bp, synthetic construct
  source 1..75: mol_type = other DNA
tgcacgtaggggaggtgaaaaccactcttgcggtcgatgaatacgacgaacatcgcgcgcagctggcgttggagt

SEQ ID NO: 524916 - DNA, 75 bp, synthetic construct
  source 1..75: mol_type = other DNA
cggcattccccagctcagagcatcctcacagccggggctgacgcctttttcactgaacatgagctgtcagaacgt

SEQ ID NO: 524917 - DNA, 75 bp, synthetic construct
  source 1..75: mol_type = other DNA
ccctgacgggggatacggcgaacatgagcgacgttctgttcgtcagcgacatgagcgggttatctttcttggaaa

SEQ ID NO: 524918 - DNA, 75 bp, synthetic construct
  source 1..75: mol_type = other DNA
ctttgtgtgaagttaacctcacctgggcccattattttcaagcaaacccgctatggaatggatgggaagccaata

SEQ ID NO: 524919 - DNA, 75 bp, synthetic construct
  source 1..75: mol_type = other DNA
tctaggcgtagggcatatagctttggatgtagatattcaaaaggatgttgccgataaacgaagggaaaaaaacta

SEQ ID NO: 524920 - DNA, 75 bp, synthetic construct
  source 1..75: mol_type = other DNA
actaatttaattaagtcgatgagacatgacaataaaccatcaatagataattatgaacaaatagaaatagaacgc

SEQ ID NO: 524921 - DNA, 75 bp, synthetic construct
  source 1..75: mol_type = other DNA
tctggatgcaggaaacccaattccggaagccctgcaatctcgcgccgaattgcgtcaaaaagtacgtaattgtgc

SEQ ID NO: 524922 - DNA, 75 bp, synthetic construct
  source 1..75: mol_type = other DNA
gcgacgatgtataacgcctacacacagcgatattgtactttacaggttacaagtcaatgtcggtgtataagcgct

SEQ ID NO: 524923 - DNA, 75 bp, synthetic construct
  source 1..75: mol_type = other DNA
aaataacttacgaagcattgcgtgtttgccatgcggtgcgcaaagagccggatattctggtaatgactccaactt

SEQ ID NO: 524924 - DNA, 75 bp, synthetic construct
  source 1..75: mol_type = other DNA
ctgccacaccaaatggcaatggaagtactcagtttcattgtaaaaaccttaatacgatcgaggttgatctctctt

SEQ ID NO: 524925 - DNA, 75 bp, synthetic construct
  source 1..75: mol_type = other DNA
accacctccgcaccatcatggacacaaatcagccgagttgtggtagataagattattcaaaatgaaaatggaaat

SEQ ID NO: 524926 - DNA, 75 bp, synthetic construct
  source 1..75: mol_type = other DNA
tattacgctaaccagttgttgggtgctggtagtgcttacatgggcagccagattgaaggccaggacagtaccgca

SEQ ID NO: 524927 - DNA, 75 bp, synthetic construct
  source 1..75: mol_type = other DNA
gggggctgtctcaggagaagttactggcaaccaagtaaaagataaactggacaaggtagggaataaaaatgggag

SEQ ID NO: 524928 - DNA, 75 bp, synthetic construct
  source 1..75: mol_type = other DNA
cgtttccgggattatcagtttttgatgcaaaatgccccaacgagaagtgggttacagatgtcactgaatttaaag

SEQ ID NO: 524929 - DNA, 75 bp, synthetic construct
  source 1..75: mol_type = other DNA
atattatttgtctaactggtatatctgaggtaaagccaacacaaaatattaatattcattatgttaatatggata

SEQ ID NO: 524930 - DNA, 75 bp, synthetic construct
  source 1..75: mol_type = other DNA
ttgatattacagggatagttcgccagacaacctcatctcataccatggaaccaggtacagttcagacaaaagcga

SEQ ID NO: 524931 - DNA, 75 bp, synthetic construct
  source 1..75: mol_type = other DNA
acagagaagcagacgctctcgacactggcaacggttgctgccggcctggccggtggtctaaccggaaacagcacc

SEQ ID NO: 524932 - DNA, 75 bp, synthetic construct
  source 1..75: mol_type = other DNA
atacgcaaagtttcgggtatggtcatgaaaaagtaacattttctatgctggaacagaccaattttgcattcgccg

SEQ ID NO: 524933 - DNA, 75 bp, synthetic construct
  source 1..75: mol_type = other DNA
gacagaagatttcgggaatttatcagcattatggtaaccggctcatttaaaccgtctggtctgtttcctccggct

SEQ ID NO: 524934 - DNA, 75 bp, synthetic construct
  source 1..75: mol_type = other DNA
agcttgcgtgctaaccgtgccactactgagcgcgatgttaaccagttaaccccacgcgagcgcgatattctcaag

SEQ ID NO: 524935 - DNA, 75 bp, synthetic construct
  source 1..75: mol_type = other DNA
tgctcacggtgaggtggcggcagatgccgggtttattaccaatgcgacgaaagtggagtttggtcttggcgaagg

SEQ ID NO: 524936 - DNA, 75 bp, synthetic construct
  source 1..75: mol_type = other DNA
atgaacgtagggacgactggcacaggtacgttaaccctgacgaataacggcacgctgaatgtcgaaggtggagaa

SEQ ID NO: 524937 - DNA, 75 bp, synthetic construct
  source 1..75: mol_type = other DNA
gaaataatgcaaggcctttaaatgtgggtcaatccggaacggggacgctgaatattaaacagaagggtcacgttg

SEQ ID NO: 524938 - DNA, 75 bp, synthetic construct
  source 1..75: mol_type = other DNA
agatgctgaaaccgcatcaggaaccgacgctgtacggggctaacggtcaaacctcaacgtcccatcgcggcagta

SEQ ID NO: 524939 - DNA, 75 bp, synthetic construct
  source 1..75: mol_type = other DNA
attttccaagattgtccgtcggaatcaattgattttgcagttatggaaaaaacaaaaaattgcatagttcgtcca

SEQ ID NO: 524940 - DNA, 75 bp, synthetic construct
  source 1..75: mol_type = other DNA
tatattcgtaaatcagatttgagttacgttacaaatcaatcagttatatgcaatcaatatgataaaaacaatccg

SEQ ID NO: 524941 - DNA, 75 bp, synthetic construct
  source 1..75: mol_type = other DNA
taagtcagcgattcggagcgagtccgagggcgacggaaacgaagcacaaatcaacgctctgcttcagagcattaa

SEQ ID NO: 524942 - DNA, 75 bp, synthetic construct
  source 1..75: mol_type = other DNA
gcactggcgaaccagacccgcaaagtggcgatgtttttcaaccacaagacgtgggagctgccggttggtaaatgg

SEQ ID NO: 524943 - DNA, 75 bp, synthetic construct
  source 1..75: mol_type = other DNA
aaagaaactaataatgatgagcctgtaagtcttgaagagatatcgcttgaaacggtcaaagattcaaatgaacgt

SEQ ID NO: 524944 - DNA, 75 bp, synthetic construct
  source 1..75: mol_type = other DNA
aggtggagaagtttacttaggtgtttttgagcctgctgtaggaacgctaaacattggtgctgctcacggtgaggc

SEQ ID NO: 524945 - DNA, 75 bp, synthetic construct
  source 1..75: mol_type = other DNA
cctatgaagcctgtcagacgaacaaaaccgcgtggctgaaccgtaaagccgaactggccgccgcagtgcaggaat

SEQ ID NO: 524946 - DNA, 75 bp, synthetic construct
  source 1..75: mol_type = other DNA
gagcggcaaatatacaactgtttatccgaagtggtagttggtgctatataacttcattactgttatgtattaaaa

SEQ ID NO: 524947 - DNA, 75 bp, synthetic construct
  source 1..75: mol_type = other DNA
ctaaccttgaactggatttactacgcacgtttgttgccgttgctaatggtaacagttttgctgcagcggcagaat

SEQ ID NO: 524948 - DNA, 75 bp, synthetic construct
  source 1..75: mol_type = other DNA
ctgttacgccggaaagctgctgcaacaggcggagatgaacaacccgaccatcgtggtggtgacggatcgtaacga

SEQ ID NO: 524949 - DNA, 75 bp, synthetic construct
  source 1..75: mol_type = other DNA
cggcgcggagttggccgccgcccttgcccctgaactgatgaattattccgggcaacattccgccgttcagcgctg

SEQ ID NO: 524950 - DNA, 75 bp, synthetic construct
  source 1..75: mol_type = other DNA
atgcggcctcgcgggatgataatcgccagaaattcaccccggcacagaacctgatttacacccgccgacgtgcag

SEQ ID NO: 524951 - DNA, 75 bp, synthetic construct
  source 1..75: mol_type = other DNA
atttctgcgctggttgcgggtggaatgttgtcgtcgtttggggcattggcgaatgccgggaatgacaacggttag

SEQ ID NO: 524952 - DNA, 75 bp, synthetic construct
  source 1..75: mol_type = other DNA
attatctatggtgataaatatgctgctatttattaccgtgagagcgaacgaccctacatcatgaaaacgaccgga

SEQ ID NO: 524953 - DNA, 75 bp, synthetic construct
  source 1..75: mol_type = other DNA
atgacaaaagaaatgtctgtattagcgcctgttggtaacctggattcttatattcgcgcggcatatgcctgtcct

SEQ ID NO: 524954 - DNA, 75 bp, synthetic construct
  source 1..75: mol_type = other DNA
cgcactccagcgaattaaaagcgcgggcacggcgagtggttgaaattcaggatggagtattgattcatgactcag

SEQ ID NO: 524955 - DNA, 75 bp, synthetic construct
  source 1..75: mol_type = other DNA
taccagtatgagcaggaccgcatcaccgtcaccgacagcctgaaccggcgtgaggtactgcatacagaaggcggg

SEQ ID NO: 524956 - DNA, 75 bp, synthetic construct
  source 1..75: mol_type = other DNA
cagcacaccgcttccttatcttcccctgacacaccccgtcctctctcagcctcagcgttccccgacacgctgccc

SEQ ID NO: 524957 - DNA, 75 bp, synthetic construct
  source 1..75: mol_type = other DNA
tcgttacagttatggctggtttctggctttgctggaacttgagtgcttagcaaccagaacaaagaatgctgacag

SEQ ID NO: 524958 - DNA, 75 bp, synthetic construct
  source 1..75: mol_type = other DNA
ttacccggagtgtaaaggcgtgatttcagagcagaaaacgtcacacagtaaacgcggcggcagaaaaattaaaaa

SEQ ID NO: 524959 - DNA, 75 bp, synthetic construct
  source 1..75: mol_type = other DNA
aaatagtggatttatcaggccgccgaaacttactcacgctgatacacgtattcgtatagagcccttttttaacgc

SEQ ID NO: 524960 - DNA, 75 bp, synthetic construct
  source 1..75: mol_type = other DNA
tgtttgaacaactttatcaggcactgtacgaagaaggtgacaaactgacatcactactttatgcacttatttgtg

SEQ ID NO: 524961 - DNA, 75 bp, synthetic construct
  source 1..75: mol_type = other DNA
gtctcgggattagggattgaactccagcaaaacggtcagccctttaagctgaataccccgcttaacgtgacaccc

SEQ ID NO: 524962 - DNA, 75 bp, synthetic construct
  source 1..75: mol_type = other DNA
actgaattttaattgtaaagacgatttttctcccgataatgtgattcaacaggttgattgtctcagaaaattatc

SEQ ID NO: 524963 - DNA, 75 bp, synthetic construct
  source 1..75: mol_type = other DNA
atggtggtgagagtaaggatttacttatgaaaatgcttgataagctcatctcttctagatttgtatttgagtcaa

SEQ ID NO: 524964 - DNA, 75 bp, synthetic construct
  source 1..75: mol_type = other DNA
acacaaaccagatacagatcaacgatagcgggaagggcgtttattatgcgcttatctggttctggaagggcagaa

SEQ ID NO: 524965 - DNA, 75 bp, synthetic construct
  source 1..75: mol_type = other DNA
tatcgacgatgaaagccattatctatcattcacgctgaaacacatcgaacgagacaatgtagaatttatctactc

SEQ ID NO: 524966 - DNA, 75 bp, synthetic construct
  source 1..75: mol_type = other DNA
caatggttcttggagtaattccgaatatgtattagatattgcaaaaaaagagctggggataaacttaactttata

SEQ ID NO: 524967 - DNA, 75 bp, synthetic construct
  source 1..75: mol_type = other DNA
attactgatatgcagatacgccagcgtgatgttgctgcacttgatgccagatatcagcggagcaattaccgcgaa

SEQ ID NO: 524968 - DNA, 75 bp, synthetic construct
  source 1..75: mol_type = other DNA
aatccgtgggaagtgaaagttggtccgaatgtaactaatttggatggaaagattaatcaaggagacagcgaagtt

SEQ ID NO: 524969 - DNA, 75 bp, synthetic construct
  source 1..75: mol_type = other DNA
tatagtttcgcttatgagtgggatggaaaggattggaaaatatcatcccatcattcatctgtagtgccaacaaca

SEQ ID NO: 524970 - DNA, 75 bp, synthetic construct
  source 1..75: mol_type = other DNA
tggaggccgtaccggtaaaagcgaacgatgcagtcctgaatgacgggccattttctgcttacgccacattacggg

SEQ ID NO: 524971 - DNA, 75 bp, synthetic construct
  source 1..75: mol_type = other DNA
gcactgtgaaggtgaagacgctggcaacggtgctttaggacatattaattcaatcacctccatcgctaactcaag

SEQ ID NO: 524972 - DNA, 75 bp, synthetic construct
  source 1..75: mol_type = other DNA
ctcaagaatccgcaggagtatggacggctcggggcgcgcattcccaagggcgtgttgctggtcggcccaccgggc

SEQ ID NO: 524973 - DNA, 75 bp, synthetic construct
  source 1..75: mol_type = other DNA
aacaccggtgtgacgttcgccgatgtggcgggggggatgaggccaaggcggagctggtcgcgatcgtcgatttcc

SEQ ID NO: 524974 - DNA, 75 bp, synthetic construct
  source 1..75: mol_type = other DNA
aaaatgagttttctcatggcaaagccgatgacatctatatgccgaccgaggatttgcaaacctggttcacgacca

SEQ ID NO: 524975 - DNA, 75 bp, synthetic construct
  source 1..75: mol_type = other DNA
agacttattcagcattgttcactttcgagtttgttcgctggctgtcagggaagatacagagaaaaaattcagaga

SEQ ID NO: 524976 - DNA, 75 bp, synthetic construct
  source 1..75: mol_type = other DNA
ttacacacaatcacgcgaacagaaatgcctgcacaatcgggtatgcaattggagaagacgggaaactcgagcctg

SEQ ID NO: 524977 - DNA, 75 bp, synthetic construct
  source 1..75: mol_type = other DNA
aaaaaagattaatccaatatgtagaacgggacaatacccatcttttaacaatgaacttcgtaatttttatcttag

SEQ ID NO: 524978 - DNA, 75 bp, synthetic construct
  source 1..75: mol_type = other DNA
atcatcgacagcatcaacggggactatggtcgcaaggaagtggagtatgacctgagctgtgactccgcagtacgc

SEQ ID NO: 524979 - DNA, 75 bp, synthetic construct
  source 1..75: mol_type = other DNA
aaggaactgctgagaacattggctttgccattttcctcgatgatgggactttgaccagaatgagaccagggttaa

SEQ ID NO: 524980 - DNA, 75 bp, synthetic construct
  source 1..75: mol_type = other DNA
agggtaactcacgatggatatgagcaggctgtattcactgctaaaggacaagtatggatcactgagcttttaact

SEQ ID NO: 524981 - DNA, 75 bp, synthetic construct
  source 1..75: mol_type = other DNA
gttggtgtttacgatcttcgctgtcgccgccgtgtattcagtcagtggtttattgatgaggggtacggtgaaatg

SEQ ID NO: 524982 - DNA, 75 bp, synthetic construct
  source 1..75: mol_type = other DNA
agcagtctgctgagttctacgaaatgatgttctcctgccggcgctcatcgttccggccggagaactacccgctgg

SEQ ID NO: 524983 - DNA, 75 bp, synthetic construct
  source 1..75: mol_type = other DNA
tgttcgcgctattgatttttgcaatattggaattaatgaatacatgcagagaaataagaagtatctgcatacagc

SEQ ID NO: 524984 - DNA, 75 bp, synthetic construct
  source 1..75: mol_type = other DNA
tcatatgccagaagatgacggtatatctaaatatgtttacttatgtataaaaaagcatcctgttgaaaagttcga

SEQ ID NO: 524985 - DNA, 75 bp, synthetic construct
  source 1..75: mol_type = other DNA
gattcttacaaaaaagaatttaaggcaaagatagaagaaaatattgaagttcatatgccagaagatgacggtata

SEQ ID NO: 524986 - DNA, 75 bp, synthetic construct
  source 1..75: mol_type = other DNA
gggcacgctgtttctcgatgaaataggtgatatgccattaatgttgcaggctaaattactgcgcgctattgaggc

SEQ ID NO: 524987 - DNA, 75 bp, synthetic construct
  source 1..75: mol_type = other DNA
gtgaaaagcggcacgggtaaagaagtcgtcgcccgagcaatccataagttgagcggaagacggaataaacccttt

SEQ ID NO: 524988 - DNA, 75 bp, synthetic construct
  source 1..75: mol_type = other DNA
tcgaaacgcagcagcataaagatgactccacgcttaaatatattcactccctgtccagtaagcttatttttgatg

SEQ ID NO: 524989 - DNA, 75 bp, synthetic construct
  source 1..75: mol_type = other DNA
atgttcgttctgattcaacgtggtcagaggtatgttgatgccgcaggttatccggtggaaatttgtttttgttct

SEQ ID NO: 524990 - DNA, 75 bp, synthetic construct
  source 1..75: mol_type = other DNA
gtaaaggcagccgtgtttacgcttaacggtgcggggaaggtccttcccgcgttcggggacagcggctgtctgccg

SEQ ID NO: 524991 - DNA, 75 bp, synthetic construct
  source 1..75: mol_type = other DNA
tacctgacctgcgaagacaccggctcacaagcggccaccctgaccttcaccgacgcaaacggtcatcaggtcagg

SEQ ID NO: 524992 - DNA, 75 bp, synthetic construct
  source 1..75: mol_type = other DNA
ctgggttgatagtgtcttctttagcggcaattgtaggcttagctacatctatcatgcatactcgtaaaaaagtta

SEQ ID NO: 524993 - DNA, 75 bp, synthetic construct
  source 1..75: mol_type = other DNA
tctaaacgcagagaacgccatcaagaaattctgtcagagcaattgaaatctgatgtcagtaatagccgtctgatg

SEQ ID NO: 524994 - DNA, 75 bp, synthetic construct
  source 1..75: mol_type = other DNA
gatggtgccgatgacatcgttaagatgctcaatgatccagcacttaaccggcacaatatcgctttactactactg

SEQ ID NO: 524995 - DNA, 75 bp, synthetic construct
  source 1..75: mol_type = other DNA
attgctcccgatgtcgtcgaaatattgcgtaagcatcgttggcccggaaacctgcgcgagttaagcaatttgatg

SEQ ID NO: 524996 - DNA, 75 bp, synthetic construct
  source 1..75: mol_type = other DNA
caaaattgcaccgtgcgtcaggttgctatccctgatttgcaaaacacgctgcaacagcagggcgtacgtctggca

SEQ ID NO: 524997 - DNA, 75 bp, synthetic construct
  source 1..75: mol_type = other DNA
ccggttatctcattttgccaacgaccgggcgtttctttcagatcccttatggttgtctggtgccgcaaaaagtgg

SEQ ID NO: 524998 - DNA, 75 bp, synthetic construct
  source 1..75: mol_type = other DNA
aatataatcgcgaaaatagtgataacactatcgcgatgattgtgggtattgattattaccgtgctccggttatgg

SEQ ID NO: 524999 - DNA, 75 bp, synthetic construct
  source 1..75: mol_type = other DNA
ttacttaccgactggcaggaagaagctgcgcggcaatccaacgatggcggcagcagtcagggcttcggctacacg

SEQ ID NO: 525000 - DNA, 75 bp, synthetic construct
  source 1..75: mol_type = other DNA
cgcgtcggtgctgccagccgtcaggtcgccagcggtgacgttggtgattttgctggtggcatcagtactgtgtgc

SEQ ID NO: 525001 - DNA, 75 bp, synthetic construct
  source 1..75: mol_type = other DNA
ccataaagttattgccggatgccattaccactaccgataggcaataccgactggagacgcagggaggcaatgcct

SEQ ID NO: 525002 - DNA, 75 bp, synthetic construct
  source 1..75: mol_type = other DNA
ttgttatggcatgcaataaaaactataaccaacatgaagtggcaaactgtttaaccctgtcttaccgtgaggtta

SEQ ID NO: 525003 - DNA, 75 bp, synthetic construct
  source 1..75: mol_type = other DNA
tttctcatcatctgtaacatccatcctggaaaatcagggggggtacgctgactatattcccgtcagtcaggctta

SEQ ID NO: 525004 - DNA, 75 bp, synthetic construct
  source 1..75: mol_type = other DNA
atacaagctacttcgatatccatcatgtctcctgggatggatatatcgaggttggcggaaaccgttacagcgtgc

SEQ ID NO: 525005 - DNA, 75 bp, synthetic construct
  source 1..75: mol_type = other DNA
taatgtaaattttcgtggaacggtaaatgaatttattcgttatatctctgcattatatgatgtcagtgtaaaact

SEQ ID NO: 525006 - DNA, 75 bp, synthetic construct
  source 1..75: mol_type = other DNA
tagttttgttagcattacagggatgttcatcatttgatgagaaattttcaattgagaaaaaactttcaccagaag

SEQ ID NO: 525007 - DNA, 75 bp, synthetic construct
  source 1..75: mol_type = other DNA
gaccgaaccttaaaacttatggttttgtcgagtctctatatgatttctacgaaaatattgatgtggttatttctc

SEQ ID NO: 525008 - DNA, 75 bp, synthetic construct
  source 1..75: mol_type = other DNA
gtcgcttagctcgaaacccaaaaatcaccataacgatgccggcagctgtaccgcctgcggtagcgcgttcattta

SEQ ID NO: 525009 - DNA, 75 bp, synthetic construct
  source 1..75: mol_type = other DNA
gagagaccgggctgacaggaagtacaggtccacagggtccaaagggagacaccggggcagcaggcccggcaggcc

SEQ ID NO: 525010 - DNA, 75 bp, synthetic construct
  source 1..75: mol_type = other DNA
acttgctaacgggttatttgtatgaaatacagaatgctgatggcagttggcaacaatctgtgggattatttgcac

SEQ ID NO: 525011 - DNA, 75 bp, synthetic construct
  source 1..75: mol_type = other DNA
cggctgaagccggacaaaaagccagtgaagctgcagaagcggcgacccgggcatgcgaatctgaaaaggccgcgg

SEQ ID NO: 525012 - DNA, 75 bp, synthetic construct
  source 1..75: mol_type = other DNA
atatactgtctcaggctgacatcgctttttcaccacgtgttttttgtgcaacccacagtcagttagactttttaa

SEQ ID NO: 525013 - DNA, 75 bp, synthetic construct
  source 1..75: mol_type = other DNA
taggcacatggagaaaagacaatcctaaaaatattgccgtattgccttcaggtgttgtgcttgcgcataacgagt

SEQ ID NO: 525014 - DNA, 75 bp, synthetic construct
  source 1..75: mol_type = other DNA
gataaacgcaacaagcgaaatctggtaaaactggataatgcgttagatcgtctggaggcacttactggttatctt

SEQ ID NO: 525015 - DNA, 75 bp, synthetic construct
  source 1..75: mol_type = other DNA
gatttggttcatttctttaatctaagaaatccgcaagatattcttcatcttgttagaaaaacaaaaaaatttaat

SEQ ID NO: 525016 - DNA, 75 bp, synthetic construct
  source 1..75: mol_type = other DNA
actctccaggaaacccggggcggttcaggtgaccaaataccgaattacctttgtaagaacgaaggggaagaaaaa

SEQ ID NO: 525017 - DNA, 75 bp, synthetic construct
  source 1..75: mol_type = other DNA
gcaggcgattgttactcctgccgttatcaaaggggagcttctggcgacatatcgtcagatggagcgtgccggtat

SEQ ID NO: 525018 - DNA, 75 bp, synthetic construct
  source 1..75: mol_type = other DNA
ggggcccgcaggcccacggggaccggctggtgcagctggtcccaaaggtgatgcaggcccggccggaccccgggg

SEQ ID NO: 525019 - DNA, 75 bp, synthetic construct
  source 1..75: mol_type = other DNA
tatggaaataaattcgcgtaacttcgataaagtaaaaattatagataaatatcacgtctttatgaaaaataaaga

SEQ ID NO: 525020 - DNA, 75 bp, synthetic construct
  source 1..75: mol_type = other DNA
caggacagctaatcacacagccggagaaatccggctttttttgcaccagttgaaacggtatggcgcattaccggg

SEQ ID NO: 525021 - DNA, 75 bp, synthetic construct
  source 1..75: mol_type = other DNA
aaataaaaggctttgatcaatataaaattgctcaaactgtgctcggactgcgtctgaaactacattttttagata

SEQ ID NO: 525022 - DNA, 75 bp, synthetic construct
  source 1..75: mol_type = other DNA
ttcgccgcgcagaacctgaccagtgccgataacgaaaagatgtggcaggcgcaggggcgaatgctcaccgcataa

SEQ ID NO: 525023 - DNA, 75 bp, synthetic construct
  source 1..75: mol_type = other DNA
cgttcccgtagtgccaaaactgtatcaatacaaaaacatcagatatataaaaaacttgggatacgtaatgatgtt

SEQ ID NO: 525024 - DNA, 75 bp, synthetic construct
  source 1..75: mol_type = other DNA
ttgcaggcgctggatgcgttcgggaaggaatgggatgcacggtacccgcagataagtcgcagctggcaggcaaac

SEQ ID NO: 525025 - DNA, 75 bp, synthetic construct
  source 1..75: mol_type = other DNA
agagtggctgagcggatcgataacatctctgtatttggcggtctggatcaggttctgcatgggttggttaatatc

SEQ ID NO: 525026 - DNA, 75 bp, synthetic construct
  source 1..75: mol_type = other DNA
catgcaggcgagcatcttttaccctggttaaatacgccagaagtcttgctgattacgctcgatggcagcgaagtt

SEQ ID NO: 525027 - DNA, 75 bp, synthetic construct
  source 1..75: mol_type = other DNA
atgcagaaaatgtacctaccctgcgcatcaacgaggtgaatgtcaccgaattgcctgtgcagactaatgttgagt

SEQ ID NO: 525028 - DNA, 75 bp, synthetic construct
  source 1..75: mol_type = other DNA
aggcggagctggcgaccgccaccgtcaatatgcatcaggcgtctcagcaggcgattgaagacccgaacgcccgtg

SEQ ID NO: 525029 - DNA, 75 bp, synthetic construct
  source 1..75: mol_type = other DNA
gttttgttaagcaacgcttcaccactcgcggagagttctcctccggtagtcatctcgtcactctgtatttttacc

SEQ ID NO: 525030 - DNA, 75 bp, synthetic construct
  source 1..75: mol_type = other DNA
ccctctgatgttcgtgcgcataatcgtgccgtcaacggcacgtgtgatgaatacaaacaactcaaggtgctctcc

SEQ ID NO: 525031 - DNA, 75 bp, synthetic construct
  source 1..75: mol_type = other DNA
agcaaacaaatttttagaaggagaatcaagagaacaggatgtcattaatgaaataatgctttgtctttatacagt

SEQ ID NO: 525032 - DNA, 75 bp, synthetic construct
  source 1..75: mol_type = other DNA
ttaatgtggcacttaacagagaaagaatatcatgggattcaattcataaagcggaggcagtctattccttaaagc

SEQ ID NO: 525033 - DNA, 75 bp, synthetic construct
  source 1..75: mol_type = other DNA
ttccaagcacgccattgcatcttactatcatcgcgtcgcaagacctcgcaagatgttatgccggggcggcgggcg

SEQ ID NO: 525034 - DNA, 75 bp, synthetic construct
  source 1..75: mol_type = other DNA
ttttaaaagtctgagtataataaatggagctcaaactgtaagcactattggtgaagtgttcaactctttacccga

SEQ ID NO: 525035 - DNA, 75 bp, synthetic construct
  source 1..75: mol_type = other DNA
gaagaaagcatgatcaacttaagtacaagcaggaagtacgggctatttagttttaaaagtctgagtataataaat

SEQ ID NO: 525036 - DNA, 75 bp, synthetic construct
  source 1..75: mol_type = other DNA
tgtaggcatgataagacgcgccagcgtcgcatcaggcaccggtgcacaattgccggatgcggtgtgaacgcctta

SEQ ID NO: 525037 - DNA, 75 bp, synthetic construct
  source 1..75: mol_type = other DNA
atgaccgtgactacgggtggaatgacaacggcaaaactcacacagagtgaagacgaggggcttatcaccctctgg

SEQ ID NO: 525038 - DNA, 75 bp, synthetic construct
  source 1..75: mol_type = other DNA
aaaggctagcggtcaaagtgttgtaaatccaggtgacttcagtgctgtaacaaactttgttcttacttatcaata

SEQ ID NO: 525039 - DNA, 75 bp, synthetic construct
  source 1..75: mol_type = other DNA
aaggttcagaatcggtctctattatttaaagatatagagaatagagatgagtattcagtgctattcgagccggca

SEQ ID NO: 525040 - DNA, 75 bp, synthetic construct
  source 1..75: mol_type = other DNA
ggcgcagataggtattggcgaagcgcaaatcgatgaagccaaaagtgcctggtatccgcacgttggcttaaccgg

SEQ ID NO: 525041 - DNA, 75 bp, synthetic construct
  source 1..75: mol_type = other DNA
tatgccgctgcggttaataacctgattccattagcgggaattaaacaaggcttatacaacgaattacccgacttg

SEQ ID NO: 525042 - DNA, 75 bp, synthetic construct
  source 1..75: mol_type = other DNA
agacgcgtattgccggaatgcgctcaacgctggagcaatatcaggcgcagatggcgagcgccaaagcgcaactgg

SEQ ID NO: 525043 - DNA, 75 bp, synthetic construct
  source 1..75: mol_type = other DNA
aaccatgaacaaaagcaaatgttcattcagcatttaacatcaaccttgtataataacaaggtattaaacaatcct

SEQ ID NO: 525044 - DNA, 75 bp, synthetic construct
  source 1..75: mol_type = other DNA
gctaatactgactttaatacgaacaaactaaaaaatgcaagctctgacggagcacaaaatgttcaaattcagtta

SEQ ID NO: 525045 - DNA, 75 bp, synthetic construct
  source 1..75: mol_type = other DNA
ggagatcgataaagaaaaagaagagggtaatgactccaacttattgatagtgttttatgttcagataatgcccga

SEQ ID NO: 525046 - DNA, 75 bp, synthetic construct
  source 1..75: mol_type = other DNA
acagagaaagtaaatcaatacggcgaaatattgaatacacatggattgaaaactatgacacagcccatttaacat

SEQ ID NO: 525047 - DNA, 75 bp, synthetic construct
  source 1..75: mol_type = other DNA
caacctatgttcgtttaagcaccacgctggaaatcacagcgggcgacgcagtggttaagttacaggctgatgtta

SEQ ID NO: 525048 - DNA, 75 bp, synthetic construct
  source 1..75: mol_type = other DNA
aaaatggcgcgtggtgcagccgaatccggttaagcctgccgatgtgctgatttcctacaacatccaactgagggc

SEQ ID NO: 525049 - DNA, 75 bp, synthetic construct
  source 1..75: mol_type = other DNA
agagtcttggacattctcccgacctttgcggtttgttcttttcaattcttaaccagtttaccagtacatctactt

SEQ ID NO: 525050 - DNA, 75 bp, synthetic construct
  source 1..75: mol_type = other DNA
aaaatagacaacgattacgggacaaagctgatccagacagtccggggcgtgggctacatgctggaggtcccggat

SEQ ID NO: 525051 - DNA, 75 bp, synthetic construct
  source 1..75: mol_type = other DNA
tcgggaacgttgagaccagcctggcgacggatggctatgacgaacagcgcgcggcgcaggtgctggcgtttttgc

SEQ ID NO: 525052 - DNA, 75 bp, synthetic construct
  source 1..75: mol_type = other DNA
atgggttttttaagccgaatgggcgtacttaataactggttgagtgaagaagaaagtctatggatccagtcgcgt

SEQ ID NO: 525053 - DNA, 75 bp, synthetic construct
  source 1..75: mol_type = other DNA
tcagcgcgctggcagaagccgccgcgctctccgtggtgtccgacctgcataaagcggcaggcgacaccggcgtga

SEQ ID NO: 525054 - DNA, 75 bp, synthetic construct
  source 1..75: mol_type = other DNA
gcggagcggtgcacttaaccggtactggcgtacccacagtggtaatggggcctgccacccgccacggacattgcg

SEQ ID NO: 525055 - DNA, 75 bp, synthetic construct
  source 1..75: mol_type = other DNA
tgcaggcggatatgttcagcaacggcggcacagatggcggagcggtgcatttaactggcaccggcatacccacgg

SEQ ID NO: 525056 - DNA, 75 bp, synthetic construct
  source 1..75: mol_type = other DNA
gtgtgttttgttggtattcctggtgaaggaaaatttacacaattttctgatagtgcggtgaactcagcagtggaa

SEQ ID NO: 525057 - DNA, 75 bp, synthetic construct
  source 1..75: mol_type = other DNA
ctccactacaaagaattgaattagaaaaacgtatcaggaatgaatttactgtcaggaatgctcaatgcgacagat

SEQ ID NO: 525058 - DNA, 75 bp, synthetic construct
  source 1..75: mol_type = other DNA
aacatcgccgaagagcgtcgccgcaaggtattgcagaatattgtccaggaggtgcgcgacgcgtactggcgcgcg

SEQ ID NO: 525059 - DNA, 75 bp, synthetic construct
  source 1..75: mol_type = other DNA
tacagccggaggcgatagccgcgccgccaggcgaattagccgaacagccagtatcgctaaaaaatatcgattatc

SEQ ID NO: 525060 - DNA, 75 bp, synthetic construct
  source 1..75: mol_type = other DNA
gatctgcgccgcaagatgctgttggccacactgtggaacaccgatgcgcgcattaatgaagcactggcgctgacg

SEQ ID NO: 525061 - DNA, 75 bp, synthetic construct
  source 1..75: mol_type = other DNA
gactgccgatgccgtcgctcatctcattgagttgggatacgccgatcagcttgttctcagccacgatgtcttcct

SEQ ID NO: 525062 - DNA, 75 bp, synthetic construct
  source 1..75: mol_type = other DNA
ctgctgccaggcacctggctcggtgcgctgtatccggctctcggcgttcaggggctcagctacgcactcggcgtg

SEQ ID NO: 525063 - DNA, 75 bp, synthetic construct
  source 1..75: mol_type = other DNA
ggttatgattacccggatattcagcgggcgattctggcagaaaaagccgatgccccgctggttcagtgggatgca

SEQ ID NO: 525064 - DNA, 75 bp, synthetic construct
  source 1..75: mol_type = other DNA
atctaaacaaactgaacggttatttggacagcctagatgaaagaggcctaatattgtctctagcggctttctctg

SEQ ID NO: 525065 - DNA, 75 bp, synthetic construct
  source 1..75: mol_type = other DNA
agaaatggacgatgccgttgaaggactggcgtatggaaatgagccgctttattatcaagttcagtgaccgcctgg

SEQ ID NO: 525066 - DNA, 75 bp, synthetic construct
  source 1..75: mol_type = other DNA
gcggtagcggtatcacgctgaacgtgacaaacaacatacaggccaataacggctggaccgaacaggacagcaagg

SEQ ID NO: 525067 - DNA, 75 bp, synthetic construct
  source 1..75: mol_type = other DNA
tggataaggcagaggcaatccgcaagcagaaagctaaatgggacgcgcttgttagcgagcaggataagcagaaag

SEQ ID NO: 525068 - DNA, 75 bp, synthetic construct
  source 1..75: mol_type = other DNA
cctcaaagccatgcagccagcaactgagcttggtcgcgttgaactggagaaatatattgacgccctgctccgcta

SEQ ID NO: 525069 - DNA, 75 bp, synthetic construct
  source 1..75: mol_type = other DNA
attgcgcgcggcgtgagtggaacctggtattttggtgccaatatggaatttattggcgcgacaatgcagcaaacc

SEQ ID NO: 525070 - DNA, 75 bp, synthetic construct
  source 1..75: mol_type = other DNA
attaaacaggagcagatcaagcaagagaagctaaaaggcaatgagaacgctgcgcttgatatggcgctggctgag

SEQ ID NO: 525071 - DNA, 75 bp, synthetic construct
  source 1..75: mol_type = other DNA
aacgaatgaaagaagcattatcatcaatagacgccgtgatcggtaaatcaactcaaggcgttaatgctttcagtg

SEQ ID NO: 525072 - DNA, 75 bp, synthetic construct
  source 1..75: mol_type = other DNA
actgacgccgatcatgccgatgccgttgtgcgctttcgtatctttaaagatgataaagaaaagaccacgcataga

SEQ ID NO: 525073 - DNA, 75 bp, synthetic construct
  source 1..75: mol_type = other DNA
accggctggctgtcaggctgtcactgataatcagccgcctggttgcaggtgaaacgctgaatatggcgcggctgg

SEQ ID NO: 525074 - DNA, 75 bp, synthetic construct
  source 1..75: mol_type = other DNA
catcaggcaaattaagacaggaatgatgattgctatccccctgtcactcagccttcctgtcgctggtctacggct

SEQ ID NO: 525075 - DNA, 75 bp, synthetic construct
  source 1..75: mol_type = other DNA
cgatcctaatttaacccttgtagaacagcaacgctatagagaagcactgcaaaagaaagaagatgaatacggctc

SEQ ID NO: 525076 - DNA, 75 bp, synthetic construct
  source 1..75: mol_type = other DNA
tacagccggaggcgatagccgcgccacctgctgaattagccgagcagccggtatcgctaaaaaatattgattacc

SEQ ID NO: 525077 - DNA, 75 bp, synthetic construct
  source 1..75: mol_type = other DNA
cagtcgttatcaggctttgtgcgatgcggctcaacgcaatattcactcgctggaaaacgtctacaacatggcggc

SEQ ID NO: 525078 - DNA, 75 bp, synthetic construct
  source 1..75: mol_type = other DNA
gttgtgcgacgctgcgcagcgtaatattcactctctggaaaatgtctacaacatggcggcactgcgcgccaacgc

SEQ ID NO: 525079 - DNA, 75 bp, synthetic construct
  source 1..75: mol_type = other DNA
taaagatataaacgtaatttatgattctattggagaattaactgctactggaggctggaatctaattgttgataa

SEQ ID NO: 525080 - DNA, 75 bp, synthetic construct
  source 1..75: mol_type = other DNA
tcatacgaagtatttgatactgatggtaatttaattacacaagcaggaagtattgatagtttgttagcaaatcat

SEQ ID NO: 525081 - DNA, 75 bp, synthetic construct
  source 1..75: mol_type = other DNA
accattatgttaacaaaaaaggtaacaatgctataaactacttcgcaccaatattttctttaattaatggggaat

SEQ ID NO: 525082 - DNA, 75 bp, synthetic construct
  source 1..75: mol_type = other DNA
gataacgcaatgcaatgtttctatcatattattaacaattgtgaggatgatagtgttaagagtaaagcgcaggca

SEQ ID NO: 525083 - DNA, 75 bp, synthetic construct
  source 1..75: mol_type = other DNA
gtttgactcctgatatccttgatagaatatatgcatatgcattcgactaccatgaaaagggtaatataacggacg

SEQ ID NO: 525084 - DNA, 75 bp, synthetic construct
  source 1..75: mol_type = other DNA
gaatgtatcattctgcagccacttccggaaacagggaagtggttcgtctggttgcggcaaccccgttttttgcgt

SEQ ID NO: 525085 - DNA, 75 bp, synthetic construct
  source 1..75: mol_type = other DNA
gctcgatccgaaggcaaagtttagccagtcagaaaaaaactctctgctgagcaagatcctcgataacgcggttgt

SEQ ID NO: 525086 - DNA, 75 bp, synthetic construct
  source 1..75: mol_type = other DNA
gatgtcggtaggcgactttaacatcggttttaacctggtgctggacggtctgtcgctgaccatgctctcggtggt

SEQ ID NO: 525087 - DNA, 75 bp, synthetic construct
  source 1..75: mol_type = other DNA
tattgataatcaagtgcagattggacatgactgcataatcggcaataaatgcctgattgtttcacaatgcggttt

SEQ ID NO: 525088 - DNA, 75 bp, synthetic construct
  source 1..75: mol_type = other DNA
actgtcgaaacttgaggctgtcgcaaggcgtgagctggcttatctgcgggccgtcggcgatttaccgcgcgatta

SEQ ID NO: 525089 - DNA, 75 bp, synthetic construct
  source 1..75: mol_type = other DNA
aagggattgctggcgtgccgggcgtgtcgtttgtggtgctgctggcaacgctgggtagcgtaggtattccgctgg

SEQ ID NO: 525090 - DNA, 75 bp, synthetic construct
  source 1..75: mol_type = other DNA
ctggtgattgccaagtgggaacacaaatttgaccgcaaaaaggcgctggcttatgagcgtgaagtgctgggctaa

SEQ ID NO: 525091 - DNA, 75 bp, synthetic construct
  source 1..75: mol_type = other DNA
ggatggtgtgcatttgatatgcaccactgccaaagtggatcgtagttttggcgatattccgttagggaaggtgcg

SEQ ID NO: 525092 - DNA, 75 bp, synthetic construct
  source 1..75: mol_type = other DNA
tctgacattccagcgcggctggtggttaaactccagagcctgatcctagacggctggcggttttgcccttcagct

SEQ ID NO: 525093 - DNA, 75 bp, synthetic construct
  source 1..75: mol_type = other DNA
gctcaggtaagagcacgataattcaaagtgtttttgccctcttaaaacaagaattaaatgaaagtttaagtaatg

SEQ ID NO: 525094 - DNA, 75 bp, synthetic construct
  source 1..75: mol_type = other DNA
tgctcgaaagaattccctatattcgcatgggtgatcaaactgatcccgtgatcgtgatcaacggtgggcaaggtt

SEQ ID NO: 525095 - DNA, 75 bp, synthetic construct
  source 1..75: mol_type = other DNA
attgatcggacgagcgagttcgcttttgcatttgacctgctgaaggacatgccgcgtttgtggcggcgcattttt

SEQ ID NO: 525096 - DNA, 75 bp, synthetic construct
  source 1..75: mol_type = other DNA
tccgttgctacaacaagaataatgaatcgaaaaatgttgaagaacgttacgattttttgaacagaataggccagt

SEQ ID NO: 525097 - DNA, 75 bp, synthetic construct
  source 1..75: mol_type = other DNA
tcggacattccagcgcggctggtggataaactccagaccttgatcctgaacggctggcggttttgcccttctgct

SEQ ID NO: 525098 - DNA, 75 bp, synthetic construct
  source 1..75: mol_type = other DNA
cggcaaatctcgccgcgtaatgcagcgtactttctcttctcagtcacggcagaatgtgactcaggcattacccga

SEQ ID NO: 525099 - DNA, 75 bp, synthetic construct
  source 1..75: mol_type = other DNA
tgacggtgaaaaattacagtcacttggggcctcgctcattaattttcgtctttatgatgaggcatttatttgtgg

SEQ ID NO: 525100 - DNA, 75 bp, synthetic construct
  source 1..75: mol_type = other DNA
acagtacaacaaccagcttgaacgcgaacggcagtcgcttgcgcgtgtaacgcgggcgcgtgagcggtattcgcg

SEQ ID NO: 525101 - DNA, 75 bp, synthetic construct
  source 1..75: mol_type = other DNA
cattcagtgcggacacgggggccagccaggattcggcgcgctggggtgtgggtaaaccgttatatcaggacctga

SEQ ID NO: 525102 - DNA, 75 bp, synthetic construct
  source 1..75: mol_type = other DNA
cggcctaaactcacaaattggttaaaacagtcagttaatgaaaaaatgccaatgagtgaaacgctaaaagagctt

SEQ ID NO: 525103 - DNA, 75 bp, synthetic construct
  source 1..75: mol_type = other DNA
aagccgttctgaacgtcatcggcgtagccgacaagatgacgaagaacaacgcaagccaactgaccgacgcacaaa

SEQ ID NO: 525104 - DNA, 75 bp, synthetic construct
  source 1..75: mol_type = other DNA
gtgcttaatgccgacgatgaaagcattctcgatgcggcattgcgccagggggcggatctgccctatgcctgcaaa

SEQ ID NO: 525105 - DNA, 75 bp, synthetic construct
  source 1..75: mol_type = other DNA
aagagcaattaaccgaaatcgcccggaaaattcgcccggaactggtgacactggaggactggcaaaaatgccagc

SEQ ID NO: 525106 - DNA, 75 bp, synthetic construct
  source 1..75: mol_type = other DNA
ggagcagtaccactaatccggatgtaccgccttatgttgacgcaaatgggcaggtgcgcattaccatcacaaatg

SEQ ID NO: 525107 - DNA, 75 bp, synthetic construct
  source 1..75: mol_type = other DNA
agaatgtgactcaggcattacccgaattacatctcggcatgccattattaaaccttcccgttatgtacagaacaa

SEQ ID NO: 525108 - DNA, 75 bp, synthetic construct
  source 1..75: mol_type = other DNA
cgcttgggcacaggataccagcccggatactctcgtcgttactgctaaccgttttgaacagccgcgcgcagcact

SEQ ID NO: 525109 - DNA, 75 bp, synthetic construct
  source 1..75: mol_type = other DNA
aacaaagcaatatccacaggccgtgaacgtcaccggtccagaatcttccgcaatggattgcaaagcggtagctct

SEQ ID NO: 525110 - DNA, 75 bp, synthetic construct
  source 1..75: mol_type = other DNA
aaatcagggtccgccctgatatcgaaatccgactgccatacgaaagcatctgcgccgacgtgaaatcagtaagct

SEQ ID NO: 525111 - DNA, 75 bp, synthetic construct
  source 1..75: mol_type = other DNA
ggtccagaagcgactcaatacactacacttgaagatgcacaaggtttctgtaacaattataataaacagctaaat

SEQ ID NO: 525112 - DNA, 75 bp, synthetic construct
  source 1..75: mol_type = other DNA
atgagttcatcacaatcgaacaactggatgcatgcgacgccatgctgcgccgccttgccggatggatgagtctga

SEQ ID NO: 525113 - DNA, 75 bp, synthetic construct
  source 1..75: mol_type = other DNA
gccaatctttatgcgcggcttggcccggccggaagcggcggcatactgctctcaggccacagcgatgtggtgccg

SEQ ID NO: 525114 - DNA, 75 bp, synthetic construct
  source 1..75: mol_type = other DNA
tatcccggtttgtacaccgccgcgcaaagcgccgccgcgcagctgctcgcccatctcaccggctctgaggcgttc

SEQ ID NO: 525115 - DNA, 75 bp, synthetic construct
  source 1..75: mol_type = other DNA
ccggggcgtattatcagttgaataatgacaactttgcaccaggaaaaacggcggctgattatgcgttttcaagct

SEQ ID NO: 525116 - DNA, 75 bp, synthetic construct
  source 1..75: mol_type = other DNA
ctttttgatacagtctccgcaggcgagacaaccagtctgtatattgaggtgaaggataattacggcaacggtgtc

SEQ ID NO: 525117 - DNA, 75 bp, synthetic construct
  source 1..75: mol_type = other DNA
acagtcaatattgcgcccgatgccagcaacgcgcaggtcacgctgaatatccctgctcaacaggtggtgacgaat

SEQ ID NO: 525118 - DNA, 75 bp, synthetic construct
  source 1..75: mol_type = other DNA
tatctgaaaccagaacattttgaattagaagaagaaatttatgaatatagtgaggtaaaaaaagaatcaacagca

SEQ ID NO: 525119 - DNA, 75 bp, synthetic construct
  source 1..75: mol_type = other DNA
cttcatgataattcattgcttaacagagcgctgcttctttcagaaaaaaattcgctgcttgatgaggcaaactct

SEQ ID NO: 525120 - DNA, 75 bp, synthetic construct
  source 1..75: mol_type = other DNA
caagaacctcgttgcgtgctggcccaattcacctgcagagatagccaagtgtgccgggatcaccctgcggaaact

SEQ ID NO: 525121 - DNA, 75 bp, synthetic construct
  source 1..75: mol_type = other DNA
aatattggtggggcgcataacgcatatttcactcgcaatattgtggtactcaccgataacgccgggcataccggc

SEQ ID NO: 525122 - DNA, 75 bp, synthetic construct
  source 1..75: mol_type = other DNA
agattatctggccagcgacgagggaatgcaacattttgaacaattacgactttttttcgagttaatgttagtcag

SEQ ID NO: 525123 - DNA, 75 bp, synthetic construct
  source 1..75: mol_type = other DNA
tgatatcaccatagcattagataatgagaaatttagcgaaattcagaaagagataaatactgagcttcaagagtt

SEQ ID NO: 525124 - DNA, 75 bp, synthetic construct
  source 1..75: mol_type = other DNA
tcacggtaagcgcagaaacgagctatggtggggcgcaaacagtagatataacgctggtggcaggcccggcagacg

SEQ ID NO: 525125 - DNA, 75 bp, synthetic construct
  source 1..75: mol_type = other DNA
cgaagcggcggcgcgcgctgcgtacctaaaagcaaaagccagataccatcccacaacgcctgccgacttgttaag

SEQ ID NO: 525126 - DNA, 75 bp, synthetic construct
  source 1..75: mol_type = other DNA
gtactacagtattttgttgatatgtcattttttaattatatcttgtgcgataataatatcagcctgactgaaata

SEQ ID NO: 525127 - DNA, 75 bp, synthetic construct
  source 1..75: mol_type = other DNA
gacgtggttgatttccgcctctcgacggtgggcgtgaccgcgaacttaagcagcaccgccgcacaggccaccggc

SEQ ID NO: 525128 - DNA, 75 bp, synthetic construct
  source 1..75: mol_type = other DNA
agatatacttttatttcaatttcagcattgttatttataataacagcagcctcagtttttttgaatttcgatgtg

SEQ ID NO: 525129 - DNA, 75 bp, synthetic construct
  source 1..75: mol_type = other DNA
agaggggccaatgcaattctagctgataatacaggtggtggttatggcttgtatttttcaaaactcgtctgtgac

SEQ ID NO: 525130 - DNA, 75 bp, synthetic construct
  source 1..75: mol_type = other DNA
tggtttaataatggtatttatggtgttgattccactagcgtttgataaatttgatttaatcgatgctttaaaaaa

SEQ ID NO: 525131 - DNA, 75 bp, synthetic construct
  source 1..75: mol_type = other DNA
tgatgaatgatattagagactcaataaatctattgagtaaacataattttgatttagttgtaggcattccaagaa

SEQ ID NO: 525132 - DNA, 75 bp, synthetic construct
  source 1..75: mol_type = other DNA
atcattctctggttaccaatactaatatataaaaatattcctaagccatatcagaaaattattcggcgtttgata

SEQ ID NO: 525133 - DNA, 75 bp, synthetic construct
  source 1..75: mol_type = other DNA
gcatggctacgaagaagagaagtggagaagaaataaatgacagacaaattttatgcgggatgggaattaaactac

SEQ ID NO: 525134 - DNA, 75 bp, synthetic construct
  source 1..75: mol_type = other DNA
caatcatgatgtggacagaagtaaagttcatccacttgaaaaacaactgcgaactggttcggacgaaaatttcat

SEQ ID NO: 525135 - DNA, 63 bp, synthetic construct
  source 1..63: mol_type = other DNA
atgtcgattaaacattatgatgttgtcagggcggcgtcgccgtcagaccttgcggaaaagctg

SEQ ID NO: 525136 - DNA, 75 bp, synthetic construct
  source 1..75: mol_type = other DNA
tagtttcccaactttccagacgcggcgggcacggacaaccgttgaacttgctgatggcgaaagcttcttactcgg

SEQ ID NO: 525137 - DNA, 75 bp, synthetic construct
  source 1..75: mol_type = other DNA
agcagcagctcaatgaatatgccgcattgatcaataaccaatgggcgcaaacaggcaaaacgatccatcagattt

SEQ ID NO: 525138 - DNA, 75 bp, synthetic construct
  source 1..75: mol_type = other DNA
aagatgatgatgtatcttgacctcgatcctgcccgctggccttgtgacaagcgcaatatattgtctcatgaagta

SEQ ID NO: 525139 - DNA, 75 bp, synthetic construct
  source 1..75: mol_type = other DNA
tggtgcactacacgcggacacaatatgaagagccgctggtcgaaagtcgctatctttacgacccgctgggccgca

SEQ ID NO: 525140 - DNA, 75 bp, synthetic construct
  source 1..75: mol_type = other DNA
aggacaatcgtgtgactttcctcgtgaagagctggaaaaatatggtgcagcagaggatttcactttacgtgattt

SEQ ID NO: 525141 - DNA, 75 bp, synthetic construct
  source 1..75: mol_type = other DNA
tctggagcgtttgggttggagaattagccgcatttggtccactgattggttcagtaatcctgatgaggttctatc

SEQ ID NO: 525142 - DNA, 75 bp, synthetic construct
  source 1..75: mol_type = other DNA
aatatatgagcacccttggagcggtgtgaataacacacaaattcaattgtttgacagcgctcgtatagtcgattt

SEQ ID NO: 525143 - DNA, 75 bp, synthetic construct
  source 1..75: mol_type = other DNA
agtgcgggctgacggtggagcaactggaaaaacaggtggagccggaatacacaccggcgcgaaaagttcatcttt

SEQ ID NO: 525144 - DNA, 75 bp, synthetic construct
  source 1..75: mol_type = other DNA
tgcggctgctggacaggctggagggggaaatccgggcagaccgcgtgagcagtgaaagccgggcgtggcttgcgc

SEQ ID NO: 525145 - DNA, 75 bp, synthetic construct
  source 1..75: mol_type = other DNA
caccgctattatgacccgctgcaggggcggtatatcactcaggatccgattggactgaaggggggatggaatttt

SEQ ID NO: 525146 - DNA, 75 bp, synthetic construct
  source 1..75: mol_type = other DNA
gcagcgaatctggatatccgcatcccgtatgccacggacccggcgggtaaccgcctgcccgacccggagctgcac

SEQ ID NO: 525147 - DNA, 75 bp, synthetic construct
  source 1..75: mol_type = other DNA
ttgaatcaggctataccgatgacatgtaccagtccctgcaggataatggtatcagatacacccctattgcagctt

SEQ ID NO: 525148 - DNA, 75 bp, synthetic construct
  source 1..75: mol_type = other DNA
tgagctggcgaaaacgcagcgccgcagcctggcggatacccttcagcagtccggcggcgaagacggtggcaatgt

SEQ ID NO: 525149 - DNA, 75 bp, synthetic construct
  source 1..75: mol_type = other DNA
tgaaaaagttgaattgggtttagcattagcaattcatgaccagctggcgcgggaggttattcacatccaccctga

SEQ ID NO: 525150 - DNA, 75 bp, synthetic construct
  source 1..75: mol_type = other DNA
agaaacccgacttgatgaagaagcatacgacatcaaggaagttctcacagtagacaatgatgaaaatggtggcgt

SEQ ID NO: 525151 - DNA, 75 bp, synthetic construct
  source 1..75: mol_type = other DNA
tctaccaaaattggcaagcgattttactaatatgttctcttttatcgcggaacggagccgattctccagaagttg

SEQ ID NO: 525152 - DNA, 75 bp, synthetic construct
  source 1..75: mol_type = other DNA
gtagcttttgcaaccgaaacacctgtttcacgaattatcgacgatgaactatattacgaaattctagtatgtgat

SEQ ID NO: 525153 - DNA, 75 bp, synthetic construct
  source 1..75: mol_type = other DNA
tagtacgacactatgatgtgggtgatgccgggattgagcagatcatcaatgatttctgggatggtatggttagcg

SEQ ID NO: 525154 - DNA, 75 bp, synthetic construct
  source 1..75: mol_type = other DNA
gtaggtggcattatgaacacttcggtggctctgatgcagtcctcgcagatcggtttgcataaatcgttgagggtc

SEQ ID NO: 525155 - DNA, 75 bp, synthetic construct
  source 1..75: mol_type = other DNA
acaacaaattgtttgggagggtaatcgggtactcttggccagcgggcctgcgcccgcatcctggtggcaatcttc

SEQ ID NO: 525156 - DNA, 75 bp, synthetic construct
  source 1..75: mol_type = other DNA
acaaatgggattcctcgaaaaaattattgatgtatttaaggatgaacgtgtagtgtgtgcgtatggaagacaaat

SEQ ID NO: 525157 - DNA, 75 bp, synthetic construct
  source 1..75: mol_type = other DNA
ccctcttgatggttttgtaaacaaaattttgtctgcatttgaagatccattagtagcttgcgcctatggtcgtca

SEQ ID NO: 525158 - DNA, 75 bp, synthetic construct
  source 1..75: mol_type = other DNA
tgaatgtacagctttcagtgagcagctgcatcaagctgtttgttcgtccgccggcggtgaaggggcgaccggatg

SEQ ID NO: 525159 - DNA, 75 bp, synthetic construct
  source 1..75: mol_type = other DNA
ttgcgcattgcgatatcaacctgccggacccgctgcctgccgatctgtttaacggcttgttactgccatgccagc

SEQ ID NO: 525160 - DNA, 75 bp, synthetic construct
  source 1..75: mol_type = other DNA
tcaaacacgatactttgtgaagatatgtatttcacggcaaaggcggtattagcagggtacaaagtagcatatgta

SEQ ID NO: 525161 - DNA, 75 bp, synthetic construct
  source 1..75: mol_type = other DNA
acactgacaagagctacatttgtagtcaggaagatgtatcgagaatgggtttaaagacagtttttatgtcaaact

SEQ ID NO: 525162 - DNA, 75 bp, synthetic construct
  source 1..75: mol_type = other DNA
ccggcgagacagacatcgccctgcccggcccgctgccgttcatcctctcccgtacctacagcagttaccggacaa

SEQ ID NO: 525163 - DNA, 75 bp, synthetic construct
  source 1..75: mol_type = other DNA
aacgagcttgtcggtaaggacggcggcgcaattcagattgaaacatcaccgatgagcactctattcggaaaatga

SEQ ID NO: 525164 - DNA, 75 bp, synthetic construct
  source 1..75: mol_type = other DNA
tggggacatgtcaggcatcggatcctcagaaggcgctattaaattatgagcccgttggcggcgatatttatagtg

SEQ ID NO: 525165 - DNA, 75 bp, synthetic construct
  source 1..75: mol_type = other DNA
aaaatttacggtgcgcgacgaaccgatgatcaccttacctcgacaatttgcttcccgagaatggtatgtgattaa

SEQ ID NO: 525166 - DNA, 75 bp, synthetic construct
  source 1..75: mol_type = other DNA
ggctgggcatgcactcgcagaggatggtgttgttcactttgttggtgaaatagtcgatagtacttgcgaagtgac

SEQ ID NO: 525167 - DNA, 75 bp, synthetic construct
  source 1..75: mol_type = other DNA
aaatgaagtttatcgcacgctatgttgcaacaaatgcgaccgtaacggcgggtacggcgaacgctgattcacaat

SEQ ID NO: 525168 - DNA, 75 bp, synthetic construct
  source 1..75: mol_type = other DNA
aaatgaagtttatcgcacgctatgttgcaacaaatgcgaccgtaacggcgaacgctgattcacaatttaccatcg

SEQ ID NO: 525169 - DNA, 75 bp, synthetic construct
  source 1..75: mol_type = other DNA
ccgctgctcggtgcaaaggtccttcccggtgaaaccgacatcgccctggcagggcatcggcgttttactataacc

SEQ ID NO: 525170 - DNA, 75 bp, synthetic construct
  source 1..75: mol_type = other DNA
acggataatggttcaagctaccgggctaatgaaatacgtcagttcgcccggatgttgggacttaacccgaagaac

SEQ ID NO: 525171 - DNA, 75 bp, synthetic construct
  source 1..75: mol_type = other DNA
atgaaaaaattaaaactattaaataaatacagctacttacatagcataaacggagcgctcattgaagcagagctt

SEQ ID NO: 525172 - DNA, 75 bp, synthetic construct
  source 1..75: mol_type = other DNA
ttgtactctggtcgctgcgacgaaagattccgtggtgactttgccagatgttagtgccacgaagttgcaaaccaa

SEQ ID NO: 525173 - DNA, 75 bp, synthetic construct
  source 1..75: mol_type = other DNA
gtgatattaccgtaacaaaaaatgcaacgttcacctttaatggcactgcggatactacgcagattacagcgtttg

SEQ ID NO: 525174 - DNA, 75 bp, synthetic construct
  source 1..75: mol_type = other DNA
gcgtaaatctattccgctggtttatctctgcttcctggtgggcggcgcagcactgtcggcactgccgctggtcac

SEQ ID NO: 525175 - DNA, 75 bp, synthetic construct
  source 1..75: mol_type = other DNA
attaaaaaagcagcatcggttttggtggaattagccaaagagtattcatcttataatgggtgtagacgaaggcaa

SEQ ID NO: 525176 - DNA, 75 bp, synthetic construct
  source 1..75: mol_type = other DNA
agcctgcaaatcccattttttacacttacaaaagtggattggttgaatactgtttccgtgatttctcgggagcat

SEQ ID NO: 525177 - DNA, 75 bp, synthetic construct
  source 1..75: mol_type = other DNA
ggtgtcatggcgaacggagacttctttgatgagcgccacggcctggactggctgcagaactacgtgcagaccaac

SEQ ID NO: 525178 - DNA, 75 bp, synthetic construct
  source 1..75: mol_type = other DNA
tacctacgagacgctgacaaccgcacaggccgcagccattgatgccattaacggtaacgtctacgtctactacgc

SEQ ID NO: 525179 - DNA, 75 bp, synthetic construct
  source 1..75: mol_type = other DNA
tggaggatttaagcactattgctgaatacatgcgcggcgatgatcctgataaacctgtcacggttgacatgaaat

SEQ ID NO: 525180 - DNA, 75 bp, synthetic construct
  source 1..75: mol_type = other DNA
tgcatgcgcgttaatttcaaaacattaccgcgaggcgaccgcatataacctccataaacatattgcagagttcgc

SEQ ID NO: 525181 - DNA, 75 bp, synthetic construct
  source 1..75: mol_type = other DNA
cgcctccagcagtatcgaggtggacttcaccagtcatcacttccgccatacgctcaatactctgcttgatgaggg

SEQ ID NO: 525182 - DNA, 75 bp, synthetic construct
  source 1..75: mol_type = other DNA
tgtatggaacggcggcccgatcgggcagctggattccggcgatacgctgacaaaaggctattacgtctacgcgca

SEQ ID NO: 525183 - DNA, 75 bp, synthetic construct
  source 1..75: mol_type = other DNA
agattatcagcacgacttcgacgaccgatgttgcgtcgaaattaaaggctggcaagtatgcccgtacctttattc

SEQ ID NO: 525184 - DNA, 75 bp, synthetic construct
  source 1..75: mol_type = other DNA
gtatcgacctgtcagcggtgaccgatctggccggagtagcgacggccatcactgcgaaacttaccggcaccgccg

SEQ ID NO: 525185 - DNA, 75 bp, synthetic construct
  source 1..75: mol_type = other DNA
atttcttcgacgagcgccatggcctcgactggttgcagaacgccgtgcagacggctgactacaacacgctctata

SEQ ID NO: 525186 - DNA, 75 bp, synthetic construct
  source 1..75: mol_type = other DNA
ctgtacaacctgctctacaccagcacaaccaaagtcccgcagaccgatgctggcgttacgcgtctgctttccaat

SEQ ID NO: 525187 - DNA, 75 bp, synthetic construct
  source 1..75: mol_type = other DNA
ccgaaacctcagcaggtgtatgtcggtcgctgggctaaaacgctggtatcggctgaaagcggttcgacggaaacg

SEQ ID NO: 525188 - DNA, 75 bp, synthetic construct
  source 1..75: mol_type = other DNA
ttgctcaggttgttcgtttagcgaaatattgggctcgtttgatgaagcaagagcgaccgaattttcgctttaaat

SEQ ID NO: 525189 - DNA, 75 bp, synthetic construct
  source 1..75: mol_type = other DNA
attttggattactaaatagagatctttctgaaaagccgctgatgaaaagtttttcatctagtctatcagcaaact

SEQ ID NO: 525190 - DNA, 75 bp, synthetic construct
  source 1..75: mol_type = other DNA
cagtatcagcccgatatttgacaaggagaaagagcagaggcgtctgcagacagtggggcttatcagtgacatagg

SEQ ID NO: 525191 - DNA, 75 bp, synthetic construct
  source 1..75: mol_type = other DNA
gtgagagtttagccacagtttttattgatcaacttgaggatgcctcaaaggcgatgaattaccttccaaactcaa

SEQ ID NO: 525192 - DNA, 75 bp, synthetic construct
  source 1..75: mol_type = other DNA
tcgttgctaataatatctactgctaaaaatcaatttatattaaccccactaatagtgtattcatattatattttt

SEQ ID NO: 525193 - DNA, 75 bp, synthetic construct
  source 1..75: mol_type = other DNA
gttaataatgttgctcgtttatatacgcagtctaatgtggacgccatcattgacgccgcaatggatgccggtgac

SEQ ID NO: 525194 - DNA, 75 bp, synthetic construct
  source 1..75: mol_type = other DNA
gcgctagtggagtcgggcctgtggtcaagcgacgcggtagagcgccagatgagccatcaggagcgcaagcgcgtg

SEQ ID NO: 525195 - DNA, 75 bp, synthetic construct
  source 1..75: mol_type = other DNA
acgtgaactggtcggcggaacataagaagcgggtgctgcgttatttcgaactttacgtctttcccacgaacggca

SEQ ID NO: 525196 - DNA, 75 bp, synthetic construct
  source 1..75: mol_type = other DNA
gaaagcggccgggaagatattttcgctgaaggtcgacggggaggatttgtacccggattatgttctggatgagaa

SEQ ID NO: 525197 - DNA, 75 bp, synthetic construct
  source 1..75: mol_type = other DNA
cgctaacgagaaccttccaggaacacgtttacgttaccccgtcaggtatgctgacactgccgcacttcaagttta

SEQ ID NO: 525198 - DNA, 75 bp, synthetic construct
  source 1..75: mol_type = other DNA
caaaaccagccacctgttagccccaattaaaaaagttgacgctagtggaaaacacgacgtcgctcagcgcctgca

SEQ ID NO: 525199 - DNA, 75 bp, synthetic construct
  source 1..75: mol_type = other DNA
gatgcagtggtgggccgattacctggatgcgaaccgctttaggcatgtggtgccgtatggcttcaaaaaatcgcc

SEQ ID NO: 525200 - DNA, 75 bp, synthetic construct
  source 1..75: mol_type = other DNA
gtacggcaacaacgacgagcgcgtagacagcattgcctgcgacctggttgaacgctttatgaagaaaattaaagc

SEQ ID NO: 525201 - DNA, 75 bp, synthetic construct
  source 1..75: mol_type = other DNA
agcactgtaagtaaagccaactaccgcttttttatggttcgcatttcaggaaatccgggaagccgcacgatcacg

SEQ ID NO: 525202 - DNA, 75 bp, synthetic construct
  source 1..75: mol_type = other DNA
atgacacgtcttgcagagatcctcgaccagatgtccgctgtgcttaacgatctcaaaacggtaatggatcaagag

SEQ ID NO: 525203 - DNA, 75 bp, synthetic construct
  source 1..75: mol_type = other DNA
aggaatacacccttgcactttgtcccgtttgtgagagtttttcacattttatcctttaccaaagtgaaagctttc

SEQ ID NO: 525204 - DNA, 75 bp, synthetic construct
  source 1..75: mol_type = other DNA
gggtctgtatgacgatgccggaacactgattgcggtcgctaacatggcggaaagctataaacctgaactcgctga

SEQ ID NO: 525205 - DNA, 75 bp, synthetic construct
  source 1..75: mol_type = other DNA
actaaatcaacgaataacacaggtgcacatacccacaatgtatctggtactgcaaatagtgctggcgcacatact

SEQ ID NO: 525206 - DNA, 75 bp, synthetic construct
  source 1..75: mol_type = other DNA
gcaaacccgccagtggtcgggccgtattgtctcaggaacaggatggcattaaatcgcacacccacagtgccagcg

SEQ ID NO: 525207 - DNA, 75 bp, synthetic construct
  source 1..75: mol_type = other DNA
aaaaccccgctttttccagagtacattactccacggccttccggctggctggacaatatatggtggaacgcaact

SEQ ID NO: 525208 - DNA, 75 bp, synthetic construct
  source 1..75: mol_type = other DNA
cgaaaggcaggggctaaggcagtatttattgtatatgatatactaccaattcttcatcctgaatggtgtgcggaa

SEQ ID NO: 525209 - DNA, 75 bp, synthetic construct
  source 1..75: mol_type = other DNA
ttattttgctcctgatagtgtcatcgctgatattatttatgactggcaacagtcagatatgtcagaaaaaatgtt

SEQ ID NO: 525210 - DNA, 75 bp, synthetic construct
  source 1..75: mol_type = other DNA
atcctcgttccgaaaatatcaactggttaacctggaaacagagcgcggaatttctcctgaaaaccctgccgatta

SEQ ID NO: 525211 - DNA, 75 bp, synthetic construct
  source 1..75: mol_type = other DNA
agtcggccaaattctcgtgggccaataccgcccatctggcgatcgagggtttcactcgtctgctgcagtcgtccc

SEQ ID NO: 525212 - DNA, 75 bp, synthetic construct
  source 1..75: mol_type = other DNA
atccgatggtgctggcgtataaagtgcagccagaacaactggagcggatcctgcgtctggcggaaagctatggtt

SEQ ID NO: 525213 - DNA, 75 bp, synthetic construct
  source 1..75: mol_type = other DNA
tatggcctgtagcgcgctggtggagtcgggccagtggtcaagcgacgcggtagagcgccagatgagccatcagga

SEQ ID NO: 525214 - DNA, 75 bp, synthetic construct
  source 1..75: mol_type = other DNA
tccatggacatcgcggagttgccgaagtcattgctgaccgtcacggatcaggacgtgctgatcgttttctcatac

SEQ ID NO: 525215 - DNA, 75 bp, synthetic construct
  source 1..75: mol_type = other DNA
cgatgtagctaatagtggatggaacacaaatagtgaatgtgcgggcatttgtagaatttacgcttttaataaaga

SEQ ID NO: 525216 - DNA, 75 bp, synthetic construct
  source 1..75: mol_type = other DNA
aaaacttccgggcactcaaagacgtcacgattcctttcgactccgttacgacattcatagggccgaacggcgctg

SEQ ID NO: 525217 - DNA, 75 bp, synthetic construct
  source 1..75: mol_type = other DNA
tttgcaaatagtgacaatcaatataatcctgacgatccagatgacaaacttaacttcactcatgacatggctcca

SEQ ID NO: 525218 - DNA, 75 bp, synthetic construct
  source 1..75: mol_type = other DNA
ttcgtcagtctcggggaaggcgtgtggttgtcaaaggttattccatcagtactatcggcgatagccgcattttct

SEQ ID NO: 525219 - DNA, 75 bp, synthetic construct
  source 1..75: mol_type = other DNA
aggcgcgacggtggtgctgatcaccaactcagagtccaacccgtacggcaaattttgtgacctgcagtttgtgct

SEQ ID NO: 525220 - DNA, 75 bp, synthetic construct
  source 1..75: mol_type = other DNA
ggcggcgtttaaccagttacagacctataaaaacgaattgagcgatctgtttatctgtaacgaagcgctggtggt

SEQ ID NO: 525221 - DNA, 75 bp, synthetic construct
  source 1..75: mol_type = other DNA
attgcgcgcgtcaaccgcgtcttcaaagataaaccgggcggtttagtggtggattacatcggtatcgccaatgaa

SEQ ID NO: 525222 - DNA, 75 bp, synthetic construct
  source 1..75: mol_type = other DNA
cgctgtctaatcaggtggatgagctggtcgaagatgaagagaccgatcagaaagagaaaaccaaaagtgactgga

SEQ ID NO: 525223 - DNA, 75 bp, synthetic construct
  source 1..75: mol_type = other DNA
aattccgtagtaccgactggatttggctggttaggcaataaagggcaaatcaaagaagagatgggcacccatctg

SEQ ID NO: 525224 - DNA, 75 bp, synthetic construct
  source 1..75: mol_type = other DNA
attatcgagagaaaataatattgatcagtatgttcaatccgctaaaaaaatgaacaggcccttttcgataatata

SEQ ID NO: 525225 - DNA, 75 bp, synthetic construct
  source 1..75: mol_type = other DNA
ggaaaagataagaatcaatattatctatgggccgcaaaaaaagtacaagtgagcgttttagaaaaccaacaggag

SEQ ID NO: 525226 - DNA, 75 bp, synthetic construct
  source 1..75: mol_type = other DNA
gtttgtataacattacacgagggaaaagcgaacctgattatgaaggtcctggtaatggttttcgctgtgtagaga

SEQ ID NO: 525227 - DNA, 75 bp, synthetic construct
  source 1..75: mol_type = other DNA
attcatcaacgcacaatccaaatctttacttcaacgcctcaaagaagcaaaaaccatagccgttccaaattcttc

SEQ ID NO: 525228 - DNA, 75 bp, synthetic construct
  source 1..75: mol_type = other DNA
aatctgaatttatattttatgatgatattaaggctcatgaacttgatcaaaaggtttgggttgctggaaatataa

SEQ ID NO: 525229 - DNA, 75 bp, synthetic construct
  source 1..75: mol_type = other DNA
aagaaaaagattcatttgctctgaagttaatgcatctggatcttgatgaaaaatatttcagtaattttttaaata

SEQ ID NO: 525230 - DNA, 75 bp, synthetic construct
  source 1..75: mol_type = other DNA
gttccagcgagctgcgctttgcccgctgggatgaaattgacctgcataactccatgtggaccattcctgccgaac

SEQ ID NO: 525231 - DNA, 75 bp, synthetic construct
  source 1..75: mol_type = other DNA
aaatccaccaaaacactgatggttctctggatttgggtaaacttgccgttggcaaaaccgacagaagcgagatgg

SEQ ID NO: 525232 - DNA, 75 bp, synthetic construct
  source 1..75: mol_type = other DNA
atgacgttgcaattgtcctcagtattacaaggaatgccctggcagacgcacgggattatattgcggcaaacctgc

SEQ ID NO: 525233 - DNA, 75 bp, synthetic construct
  source 1..75: mol_type = other DNA
tgcacagattaaccttatactcatcaataacaatttgaataattttttttctaaagttgaaaaagaggctgatgc

SEQ ID NO: 525234 - DNA, 75 bp, synthetic construct
  source 1..75: mol_type = other DNA
cttgctgaacgcatcggtgttgctgccgctacccgtgaactcagcctgtatgaatctcagctctatgcgtggcgc

SEQ ID NO: 525235 - DNA, 75 bp, synthetic construct
  source 1..75: mol_type = other DNA
actggaaagatgcttttgatttttgtcactgggttggcgacgttacaggaaaaaaaatcgccttacctactgagg

SEQ ID NO: 525236 - DNA, 75 bp, synthetic construct
  source 1..75: mol_type = other DNA
atacccgcgttttgaatttaattaataaatttggcgtaaatacggaacaaatctgtctggagatcaccgagtcag

SEQ ID NO: 525237 - DNA, 75 bp, synthetic construct
  source 1..75: mol_type = other DNA
aataataatttgaataactttttttctaaagttgaaaaagaggcggatgctttaaaagatgccatttatctgtta

SEQ ID NO: 525238 - DNA, 75 bp, synthetic construct
  source 1..75: mol_type = other DNA
gggaagttataacataagcaataatagtggcaactatacagacaatgttatctcactccccaggcttcctgatgt

SEQ ID NO: 525239 - DNA, 75 bp, synthetic construct
  source 1..75: mol_type = other DNA
tttgcgttttgttgtgctgttgccaactgaaaccgtattgcttgcatctgtggtcgatcctgcgccgatagcgac

SEQ ID NO: 525240 - DNA, 75 bp, synthetic construct
  source 1..75: mol_type = other DNA
ttccatcaacaaggtgcccgaaactggtctttctccacggctaccggagaactccttgccaacggtaagcctcag

SEQ ID NO: 525241 - DNA, 75 bp, synthetic construct
  source 1..75: mol_type = other DNA
tgcggaaatggctgcaatctggttattgtgaaggaatgtctttctatcccacgaaaggcggaacgcctcagggag

SEQ ID NO: 525242 - DNA, 75 bp, synthetic construct
  source 1..75: mol_type = other DNA
tcaatggtacaacttacttaaccggtgataactccgcctttagcggcaaagtcaaaattgagaaaaacggggctt

SEQ ID NO: 525243 - DNA, 75 bp, synthetic construct
  source 1..75: mol_type = other DNA
ttccgcggatattgtcagtggcagcgagggcctgggctatatcaatgcgctcaatggcacgacttacttaaccgg

SEQ ID NO: 525244 - DNA, 75 bp, synthetic construct
  source 1..75: mol_type = other DNA
ttacacctgaaggctgacgatagcatgacctttgccaataagatttccggcaacggtacaataagtatcgacagt

SEQ ID NO: 525245 - DNA, 75 bp, synthetic construct
  source 1..75: mol_type = other DNA
tgcgttattgaggttatgggtaataaaggtgccatgaccatccgtgtaacaacaccaagcacttccaccggaggt

SEQ ID NO: 525246 - DNA, 75 bp, synthetic construct
  source 1..75: mol_type = other DNA
gggaaccgtgatgaattaattgatacaacacaggcaaggccaattcagtattgcattaatgggacgtggtataac

SEQ ID NO: 525247 - DNA, 75 bp, synthetic construct
  source 1..75: mol_type = other DNA
aatgctcatggtcatacggcaataataaaattattactgacaccggatgtggacttattcaccttgcgggttgcg

SEQ ID NO: 525248 - DNA, 75 bp, synthetic construct
  source 1..75: mol_type = other DNA
aactctgcaaccatccgtattggaggccagactacagcagggttacgtcatttatttggtcatatcagaaatttc

SEQ ID NO: 525249 - DNA, 75 bp, synthetic construct
  source 1..75: mol_type = other DNA
cgtgaattacagaaatggcggtatcttttatcgttcagcgcgtgatggttatggctttgaagctgactggtcaga

SEQ ID NO: 525250 - DNA, 75 bp, synthetic construct
  source 1..75: mol_type = other DNA
cccaggctggcggcgcgactacagcacaaaaaaccagcaacctgcatttgctttagggcagacaggaagcacagt

SEQ ID NO: 525251 - DNA, 75 bp, synthetic construct
  source 1..75: mol_type = other DNA
taaccgataaattggttgtcgagggcgatactagcggcacgactgccgttacggtgaataacgctggcggtacag

SEQ ID NO: 525252 - DNA, 75 bp, synthetic construct
  source 1..75: mol_type = other DNA
gggacggttgctttgaccggtaataattatgcattcagcggatatattgatgttgcctccgatgctgtagctgtt

SEQ ID NO: 525253 - DNA, 75 bp, synthetic construct
  source 1..75: mol_type = other DNA
gagtttctgcagagaggcgggatcactgcgggtcagggaagtcaggtaacagtaggtaagggcgttcattctatt

SEQ ID NO: 525254 - DNA, 75 bp, synthetic construct
  source 1..75: mol_type = other DNA
gacctgcgaccggaggcgggtagctacattgcgaaccttgcagcagcgaataccatgttcaccacgcgtctgcat

SEQ ID NO: 525255 - DNA, 75 bp, synthetic construct
  source 1..75: mol_type = other DNA
acgccagagccaacgcctgttcctgaccagaatctggataatgacctgcgcccggaggctggtggttacatcgcg

SEQ ID NO: 525256 - DNA, 75 bp, synthetic construct
  source 1..75: mol_type = other DNA
tgaatttaatggcagccagggaacgcggaacgaatggtatatccagccacaagcacagattacctggatgggagt

SEQ ID NO: 525257 - DNA, 75 bp, synthetic construct
  source 1..75: mol_type = other DNA
aatgaatacggtactgaatggcgatgactcagtaaccgataaattggttgtcgagggcgatactagcggcacgac

SEQ ID NO: 525258 - DNA, 75 bp, synthetic construct
  source 1..75: mol_type = other DNA
actatgccttcagcggatatattgatgttgcttccgatgctgtcgcggttatttctgaagaaaaaaacattggca

SEQ ID NO: 525259 - DNA, 75 bp, synthetic construct
  source 1..75: mol_type = other DNA
aggacagctaaatgccaacctgaatgtctgggggaatgtgggcgttcaggttgccgataggggatataatgacac

SEQ ID NO: 525260 - DNA, 75 bp, synthetic construct
  source 1..75: mol_type = other DNA
ttatattcatctctggtattcgccgatgatgtcatcgtaaaccaggataaagctattgattttggcaaagagaac

SEQ ID NO: 525261 - DNA, 75 bp, synthetic construct
  source 1..75: mol_type = other DNA
ggtgcccaggaagggagcgatgcgaaagcagcagggattattgatgccgaaaaaattgagtttgtgtgggcaaaa

SEQ ID NO: 525262 - DNA, 75 bp, synthetic construct
  source 1..75: mol_type = other DNA
agcactctgggattctccggcggaacggttgattttggtgccctggcagctggtgcacagatgacagaagggacc

SEQ ID NO: 525263 - DNA, 75 bp, synthetic construct
  source 1..75: mol_type = other DNA
tcaatggctcgcttaactttttgctaaaagggacgggatttctgaacgtctccaatgccggtagtgagttatatg

SEQ ID NO: 525264 - DNA, 75 bp, synthetic construct
  source 1..75: mol_type = other DNA
agggcaaacaggaagcagggttgcaaatgataaagctgttggctggaactggaatagcggtgtttatgatgcaga

SEQ ID NO: 525265 - DNA, 75 bp, synthetic construct
  source 1..75: mol_type = other DNA
gtaagcggcacgaacaaccagcgttgtgtgaatcatatttctgaaccggataacgaaattccgccgggcttcagg

SEQ ID NO: 525266 - DNA, 75 bp, synthetic construct
  source 1..75: mol_type = other DNA
gggcaaacccgaagaaatccgctttcagtgcctggaaggccagattacgcgagggggtgccaccagaggccatgc

SEQ ID NO: 525267 - DNA, 75 bp, synthetic construct
  source 1..75: mol_type = other DNA
aatgtcggtaattttggtagcggcatcgtaaatgtcagtaatggcgctacccttaattcaacgggctatggattt

SEQ ID NO: 525268 - DNA, 75 bp, synthetic construct
  source 1..75: mol_type = other DNA
atgaaagcagatattcagaagtccgttaccgaaatcatcgacaaatcaggcgtagaaattgatacagaagagcgc

SEQ ID NO: 525269 - DNA, 75 bp, synthetic construct
  source 1..75: mol_type = other DNA
tgatatggagcttgaacccggctttattgatcgcgcggtgacctttctggaagcaaattcagagtatgctggcgt

SEQ ID NO: 525270 - DNA, 75 bp, synthetic construct
  source 1..75: mol_type = other DNA
caactggcgggtgacaaaggggtaatggtggtttcgctcaccgagccgggcgatcgctgttgcggcgttggacat

SEQ ID NO: 525271 - DNA, 75 bp, synthetic construct
  source 1..75: mol_type = other DNA
ggcagtttgatcaccgttcggctggatgacatgaccaacattcctgacagcatggactggggggttatcgatggc

SEQ ID NO: 525272 - DNA, 75 bp, synthetic construct
  source 1..75: mol_type = other DNA
tgggttgtttgatgactcgggaacgctgatcgctgttgccaatatggccgaaagctacaaaccgctgctgtctga

SEQ ID NO: 525273 - DNA, 75 bp, synthetic construct
  source 1..75: mol_type = other DNA
tgaatcaaactctgataatcttagcattgaccgcctttatatagaagctgttattcaagaagcattttcaagcag

SEQ ID NO: 525274 - DNA, 75 bp, synthetic construct
  source 1..75: mol_type = other DNA
taagtccactgttttccgctggttggcaaagcatgaggattttcgcgacaagtacgcgaaggcaactgaggcacg

SEQ ID NO: 525275 - DNA, 75 bp, synthetic construct
  source 1..75: mol_type = other DNA
gacagtgaaaataccacatcggtaaaagtgggagagcaatccattggtggactggccatgaatggcggtacgctc

SEQ ID NO: 525276 - DNA, 75 bp, synthetic construct
  source 1..75: mol_type = other DNA
cagattcactgcattctcaggggtcggcaagcagtatgtggatgcgtcatgtcggagggcacgaacgttcaaggg

SEQ ID NO: 525277 - DNA, 75 bp, synthetic construct
  source 1..75: mol_type = other DNA
gagcaccctgcgctgaccggatcgggctaatgaacgttatcttggcggaagggatcaacctcggcttgcgcaaaa

SEQ ID NO: 525278 - DNA, 75 bp, synthetic construct
  source 1..75: mol_type = other DNA
gaccggcaagctcgcctcgacatgcggttgcgcgagcttggccgtgccgctcgcgcaggcacgatcccgggcggg

SEQ ID NO: 525279 - DNA, 75 bp, synthetic construct
  source 1..75: mol_type = other DNA
agataaacgatttgaattagtaaaaaaagcaaagtgtttaattatgcctagccaattcgaaaactgtagtatggt

SEQ ID NO: 525280 - DNA, 75 bp, synthetic construct
  source 1..75: mol_type = other DNA
acaacctgctgctgatgtacctcggctgggaaggcgtgggtctgtgctcctatctgctgatcggtttctattaca

SEQ ID NO: 525281 - DNA, 75 bp, synthetic construct
  source 1..75: mol_type = other DNA
aaaggcattgcgatggcacaaggcaagttcgcgttgtttctcaactcgggcgatatttttcatcaggatgccgca

SEQ ID NO: 525282 - DNA, 75 bp, synthetic construct
  source 1..75: mol_type = other DNA
aattttgtccgtaagttaaaagtacaaaaagataacgtgatgatcaccggcgatgcgctgctggattttggcgac

SEQ ID NO: 525283 - DNA, 75 bp, synthetic construct
  source 1..75: mol_type = other DNA
gcgttctcaacaatgcacagtctggtcatcggacagatcaagacggataagaaatccaatgagattacagctatc

SEQ ID NO: 525284 - DNA, 75 bp, synthetic construct
  source 1..75: mol_type = other DNA
aagaaatccgtattcatattgtttgcgatgtccctgatgaacttattgatttcacgtttgaatggaaaggactga

SEQ ID NO: 525285 - DNA, 75 bp, synthetic construct
  source 1..75: mol_type = other DNA
ttccaagattgggaatttgcattaagaatagcatgtaaatctcaaggcttctatatatcggaacctttagcttta

SEQ ID NO: 525286 - DNA, 75 bp, synthetic construct
  source 1..75: mol_type = other DNA
agcagagaaaatctggtcggtgtcatgccttttaacctcgggactttaatcaattatcaggccttactgggggta

SEQ ID NO: 525287 - DNA, 75 bp, synthetic construct
  source 1..75: mol_type = other DNA
ggctttggcaacctggcgataccgcgagtgggtcaggaggtgattgtggacttcctcaacggcgacccggaccag

SEQ ID NO: 525288 - DNA, 75 bp, synthetic construct
  source 1..75: mol_type = other DNA
atccagatcgcttctcggttgctgtatccatcgacgggaagctccagaatgaccccgcatggaaagacaaaacgc

SEQ ID NO: 525289 - DNA, 75 bp, synthetic construct
  source 1..75: mol_type = other DNA
aatatacaacaaagtttgaattattcaatttatagcagcacaaccaaacgcaaaaaaaataataaccaagagcta

SEQ ID NO: 525290 - DNA, 75 bp, synthetic construct
  source 1..75: mol_type = other DNA
ctacagctttgtgcgggccatcacgacggtcagcgccatcgtctttctcgtcacgccggacatccgcgtggcaac

SEQ ID NO: 525291 - DNA, 75 bp, synthetic construct
  source 1..75: mol_type = other DNA
gcggaggatggattcgcatggtgcggctgtggaacggcgaactctgaggcggagggaataactctttctcgcctc

SEQ ID NO: 525292 - DNA, 75 bp, synthetic construct
  source 1..75: mol_type = other DNA
cccggcgaacagctggatcgatgttcgtctggatatgccagtggatagcatctggaaccccaaagtttccggttc

SEQ ID NO: 525293 - DNA, 75 bp, synthetic construct
  source 1..75: mol_type = other DNA
tgaggccgaaatcaatcgtatggcccgtgaacgtaaattacgtgaggaagcagcacaaataaaatatactgaaag

SEQ ID NO: 525294 - DNA, 75 bp, synthetic construct
  source 1..75: mol_type = other DNA
cgcctggaagggatcaccgattattctgccatttttggcagtgctgaatcctacatgaaagacttctggaatgat

SEQ ID NO: 525295 - DNA, 75 bp, synthetic construct
  source 1..75: mol_type = other DNA
ctgggattaaaagtcgctaatgttgaatatacacacaagtatgtagaggaaataaaaaaactcagacaaataaaa

SEQ ID NO: 525296 - DNA, 75 bp, synthetic construct
  source 1..75: mol_type = other DNA
tttcagaacaggttcgcattgcgagacaataccaacgttccatccgtattgatgctgatcttggccgcgaagatg

SEQ ID NO: 525297 - DNA, 75 bp, synthetic construct
  source 1..75: mol_type = other DNA
agcacctgaacagcctggtatatgaccgtgactacgggtggaatgacaacggcgacctggtgcgcatcagcggcc

SEQ ID NO: 525298 - DNA, 75 bp, synthetic construct
  source 1..75: mol_type = other DNA
gtgcgatacggttatggaatacgccgcagcacaggaccgcggagttgaatgccctgttgggggacgaacaacacc

SEQ ID NO: 525299 - DNA, 75 bp, synthetic construct
  source 1..75: mol_type = other DNA
aatgttccaagccaggatggccgtttgtaaatcattgtatgggtataccaatacaatggaaaaaacagcagatag

SEQ ID NO: 525300 - DNA, 75 bp, synthetic construct
  source 1..75: mol_type = other DNA
taacaaaaaagatttatttgctaattatttcaaagatgttccaaattcccatgatatatataatattgtaaaggt

SEQ ID NO: 525301 - DNA, 75 bp, synthetic construct
  source 1..75: mol_type = other DNA
aggtacgagatacactattaaaagctagcgatcctcataaagttttatttattgatttagccgcggctctaaatg

SEQ ID NO: 525302 - DNA, 75 bp, synthetic construct
  source 1..75: mol_type = other DNA
caggaaatgatggtagtgctgatggaccaactggagcgccgatttggtagtaaacagccggaacagccagaagaa

SEQ ID NO: 525303 - DNA, 75 bp, synthetic construct
  source 1..75: mol_type = other DNA
aaacctaaaagagaaactgaaagttatgatgatgtgactttttggaaatatacatcaggttcttgttctgagcct

SEQ ID NO: 525304 - DNA, 75 bp, synthetic construct
  source 1..75: mol_type = other DNA
gggcaccggcaagcccgtttccgctgccgacattataaccagtctggaatgctcagagccgacattaacccgggc

SEQ ID NO: 525305 - DNA, 75 bp, synthetic construct
  source 1..75: mol_type = other DNA
tagggctggcggggggaataaacccgtacagttatgttatgaacaatcctgtgcaatggattgatccattgggat

SEQ ID NO: 525306 - DNA, 75 bp, synthetic construct
  source 1..75: mol_type = other DNA
tatattaatagattatctttctgatggtgctggtgattgggaactatatgataatgagttaattacatcattaaa

SEQ ID NO: 525307 - DNA, 75 bp, synthetic construct
  source 1..75: mol_type = other DNA
ttgcagcatgagcagtacctgcaaattacattgtccatgcttgagcaggctgatgctgttttcctcctgaacggg

SEQ ID NO: 525308 - DNA, 75 bp, synthetic construct
  source 1..75: mol_type = other DNA
tacatgacaaaaatcttacagtggtaatatgtgataaaggagtgggaataccttcaacattgcctaaaacacaag

SEQ ID NO: 525309 - DNA, 75 bp, synthetic construct
  source 1..75: mol_type = other DNA
tgtattcacactggatgataagccggaattacttgtaagacctacatcacaggaagttgcagcctcagtaagaca

SEQ ID NO: 525310 - DNA, 75 bp, synthetic construct
  source 1..75: mol_type = other DNA
ttgaaaatctaggggaaatattaaagggagataaagactattaccgcggcttgaaaacactaaccaaaacgatgt

SEQ ID NO: 525311 - DNA, 75 bp, synthetic construct
  source 1..75: mol_type = other DNA
cttgagtcttatttttccacgcctacccggaaaacttatgccgggacaccggatattggaagctatttcgactaa

SEQ ID NO: 525312 - DNA, 75 bp, synthetic construct
  source 1..75: mol_type = other DNA
tgtcggcaaaaagtgaatggtttaaaaactatttacaacagcatccaggttttgaagtatttttttattgccgtt

SEQ ID NO: 525313 - DNA, 75 bp, synthetic construct
  source 1..75: mol_type = other DNA
ctaaccagatatcagaatatatgacaggattcttcaacaggcatcatgagcagattcagggggagggggggggtt

SEQ ID NO: 525314 - DNA, 75 bp, synthetic construct
  source 1..75: mol_type = other DNA
ggaggacaacttcacggaaaccccagccaccgatgctttcctggctgaagtacgggcgcagggggtagagatgta

SEQ ID NO: 525315 - DNA, 75 bp, synthetic construct
  source 1..75: mol_type = other DNA
cggaatttaataaggtcatcacggatgtcggaccgggaaaactcaatctgggaggctgcgccattgaggtgatgg

SEQ ID NO: 525316 - DNA, 75 bp, synthetic construct
  source 1..75: mol_type = other DNA
gtgcggctggatgaaaatatcatccgcagatatctggagagttgtggcggcaaccgggaggcagacaacacggtt

SEQ ID NO: 525317 - DNA, 75 bp, synthetic construct
  source 1..75: mol_type = other DNA
tggctgacagggcattcaccctgcagtttgccgggaaaatgctgtccctttctgcaggagatgtgcttctgattg

SEQ ID NO: 525318 - DNA, 75 bp, synthetic construct
  source 1..75: mol_type = other DNA
ctcatatcttcttgtctgaaaaaatggctaatgatttttcaaagaaatatcgagtagataaatattatattgttt

SEQ ID NO: 525319 - DNA, 75 bp, synthetic construct
  source 1..75: mol_type = other DNA
tggtttagctatcatgacagctcttgatgctctaaaggaacgctctatttcagcgtttaactcacaccttgttaa

SEQ ID NO: 525320 - DNA, 75 bp, synthetic construct
  source 1..75: mol_type = other DNA
gatccaaatgcaggttatcgtataggtagagctctacagcaccattatgaaacggtaacacttttagttgttgga

SEQ ID NO: 525321 - DNA, 75 bp, synthetic construct
  source 1..75: mol_type = other DNA
caacacctgaacgagatcaagaaggaattggagccgtatcaattcaaccaccagatgaacagcaacctaatgcat

SEQ ID NO: 525322 - DNA, 75 bp, synthetic construct
  source 1..75: mol_type = other DNA
ttcaatgatgtcctatcccatacgcttgtgattgataacaagcggggcgggggtgaagtactacatgagatcgta

SEQ ID NO: 525323 - DNA, 75 bp, synthetic construct
  source 1..75: mol_type = other DNA
tcgacagcgacggggccagcgacacacattacattcccggcgaaggcaaaatgccgctgcgggagttgatgcgcg

SEQ ID NO: 525324 - DNA, 75 bp, synthetic construct
  source 1..75: mol_type = other DNA
acgccgtatgaatcgaacgtcgtgtgtaatgccaatgatgtgcttcatgcgctggcgctggtgccttcgccgcgt

SEQ ID NO: 525325 - DNA, 75 bp, synthetic construct
  source 1..75: mol_type = other DNA
ctgactaaaataaaaaaagttttaatagctttaagtaaaataatttctataaaaaaagcggatagaaatgaaaaa

SEQ ID NO: 525326 - DNA, 75 bp, synthetic construct
  source 1..75: mol_type = other DNA
tattgtcatcacgcctctgtccgggttgacgaaaaagagcgtcaggtccgctgtaaaatctgcggtgcagttgtg

SEQ ID NO: 525327 - DNA, 75 bp, synthetic construct
  source 1..75: mol_type = other DNA
actgggcgcaacgctgagttacaacatgcgtctggggaacggcatggaagttgagccgtggctgaaggcggctgt

SEQ ID NO: 525328 - DNA, 75 bp, synthetic construct
  source 1..75: mol_type = other DNA
tcgtcagtccgcctttttgctaaacctcaggggagtgttaaatacagcacagatggtggagttaactggacaact

SEQ ID NO: 525329 - DNA, 75 bp, synthetic construct
  source 1..75: mol_type = other DNA
ccggcaggcgaggaaatcttctgcgacgaacatggtcgcgtgcgggtgaagttcaactgggaccgttataacccg

SEQ ID NO: 525330 - DNA, 75 bp, synthetic construct
  source 1..75: mol_type = other DNA
atggtgcattgctggttgggattttgtatttcctggcagggtcggtgatgcatcattctggtgttgtaaataaca

SEQ ID NO: 525331 - DNA, 75 bp, synthetic construct
  source 1..75: mol_type = other DNA
atcgtgaaagaggcgctgcctggctggagcggcgtggattccacccgtcttgatacccctggaaaaatcgaccca

SEQ ID NO: 525332 - DNA, 75 bp, synthetic construct
  source 1..75: mol_type = other DNA
tggtggattcgaaagccgacatgctgatgtttggtaacggtgagcgtccgctggtggaggtggcgcaccgtctgg

SEQ ID NO: 525333 - DNA, 75 bp, synthetic construct
  source 1..75: mol_type = other DNA
ggcgcactccgggccatcgcaccccgctttggcaacaacggctgcgcgccagtcagttgctggaaatcgctcagg

SEQ ID NO: 525334 - DNA, 75 bp, synthetic construct
  source 1..75: mol_type = other DNA
gtgagcgcgattttactctcattgatgaggatgttgctgatgcagcggcttatgaagaatgcgtaaaaagagcgg

SEQ ID NO: 525335 - DNA, 75 bp, synthetic construct
  source 1..75: mol_type = other DNA
gcgctggcagcggagaatgcggggctgaaggctggaatactgcatgcctcagaagatatggaagcacaccatgat

SEQ ID NO: 525336 - DNA, 75 bp, synthetic construct
  source 1..75: mol_type = other DNA
attgatacggcagaaatattggcacagattacccccttcgatttccatgctctccagggatgcctgtggcctgcc

SEQ ID NO: 525337 - DNA, 75 bp, synthetic construct
  source 1..75: mol_type = other DNA
gtggttaacatggaacaaatgaaagttactccttctgtaattgttatgtcttatggcctgctggataaaagtttt

SEQ ID NO: 525338 - DNA, 75 bp, synthetic construct
  source 1..75: mol_type = other DNA
gtgaatgatctaccggtccggcaaacgccgatgtttacgctgctgcgtgaggcgggattttcaagttcgccacaa

SEQ ID NO: 525339 - DNA, 75 bp, synthetic construct
  source 1..75: mol_type = other DNA
gcggggatagccgacgtcatcctgcgctttgctgagcaggtgtccggagcaaccggtatcccgctggtacgcctg

SEQ ID NO: 525340 - DNA, 75 bp, synthetic construct
  source 1..75: mol_type = other DNA
tgagaaaagcaaaatcctggcggtcttcaggtctgaaggaaaattgcttacagaccggcctgtaaaaacagttga

SEQ ID NO: 525341 - DNA, 75 bp, synthetic construct
  source 1..75: mol_type = other DNA
tagcgcaagatatccagacagctagagaacatagccttcgagagttggggaaacgacttgaagtcacctatggaa

SEQ ID NO: 525342 - DNA, 75 bp, synthetic construct
  source 1..75: mol_type = other DNA
tgtggagcgtattttcgagcgtatcgaggcgtttgatactgcgaccgtcggcaccacacagctgatccacaaagc

SEQ ID NO: 525343 - DNA, 75 bp, synthetic construct
  source 1..75: mol_type = other DNA
agcagcgcccgacgcgaggtctgtacgacaccatcacgttctaccatccatcatttggttatgtccgcctggtcg

SEQ ID NO: 525344 - DNA, 75 bp, synthetic construct
  source 1..75: mol_type = other DNA
caatacgtgcaacagaggttttgggacttagctttaacgccaatgttatccatttcgccggtcaggaatgcatgt

SEQ ID NO: 525345 - DNA, 75 bp, synthetic construct
  source 1..75: mol_type = other DNA
atggtggcacttcgaattaccccaggcagcgagttaccctctgctcgctgatcaattcacctgttttatatcccc

SEQ ID NO: 525346 - DNA, 75 bp, synthetic construct
  source 1..75: mol_type = other DNA
gacggtcggttctaatcacagccgtggcacggcgatcgacctgacgcttcgtgatgagcacgggaacatcctgga

SEQ ID NO: 525347 - DNA, 75 bp, synthetic construct
  source 1..75: mol_type = other DNA
agtacatgaaagagaaggatgttgccagcatgtcaggtcgcctgctaaatcgctggggcaaaattaagaagccac

SEQ ID NO: 525348 - DNA, 75 bp, synthetic construct
  source 1..75: mol_type = other DNA
gaaccggatacgctaaaagaattagttgttacagatccactctccacattgcttaatgaaattttacaattgaaa

SEQ ID NO: 525349 - DNA, 75 bp, synthetic construct
  source 1..75: mol_type = other DNA
atgctgcgaagatttgcttaatgcattaaataaaaataaactaagagattatgatgctttaatcattgatgaagc

SEQ ID NO: 525350 - DNA, 75 bp, synthetic construct
  source 1..75: mol_type = other DNA
ttcaggggaatatttgttgataaaagccaactcccggaaatggcaaagcatactattgatataatgcaatactgg

SEQ ID NO: 525351 - DNA, 75 bp, synthetic construct
  source 1..75: mol_type = other DNA
gcggttatgcaacttagtgctgatatggcgctgaatgaggcaggtaaaattcttaccgcagatattcagagggta

SEQ ID NO: 525352 - DNA, 75 bp, synthetic construct
  source 1..75: mol_type = other DNA
ttctattactggcacggtgacaatacccacaacggaagtcgcctggttgtacgcgggcatgtccgatcattttcc

SEQ ID NO: 525353 - DNA, 75 bp, synthetic construct
  source 1..75: mol_type = other DNA
attgatttctccgaccaccttaattactggcagcaggatattcccgccgtcatgattacagacacagctttttat

SEQ ID NO: 525354 - DNA, 75 bp, synthetic construct
  source 1..75: mol_type = other DNA
agtggccagcaacacaggatgcgttctgccagcttatttcagccagcgataatgtggatattattctctggcaca

SEQ ID NO: 525355 - DNA, 75 bp, synthetic construct
  source 1..75: mol_type = other DNA
atttttagtaaaaaacacggtagtgtgattacaaagataaagtcaattggcggaggattatccaaggctaaggta

SEQ ID NO: 525356 - DNA, 75 bp, synthetic construct
  source 1..75: mol_type = other DNA
ggttatcgggatagcggttatgcagctgctggttgagaagcgcgagccatcaagagaggcgctgatagagatgat

SEQ ID NO: 525357 - DNA, 75 bp, synthetic construct
  source 1..75: mol_type = other DNA
aactgaggactgtacccaaagctattcttatagctccggcctcagccgttggctgttcctgaaaatatcagtcag

SEQ ID NO: 525358 - DNA, 75 bp, synthetic construct
  source 1..75: mol_type = other DNA
agcctctatgaatattaatggaacgtttttgaatttaaatccatatatgaaaaatttgagagttgctctccgcac

SEQ ID NO: 525359 - DNA, 75 bp, synthetic construct
  source 1..75: mol_type = other DNA
tggaagagcaacttcttgccacttctaaaattccggcaaattctggtcactctttgcacaaaggaacgccgagag

SEQ ID NO: 525360 - DNA, 75 bp, synthetic construct
  source 1..75: mol_type = other DNA
gcgaatattatcaaaaggattgactatccgacacaagatggtattcccccacaattgggtgcgtacaataaaata

SEQ ID NO: 525361 - DNA, 75 bp, synthetic construct
  source 1..75: mol_type = other DNA
aaagctatgtaaaaaagacgatattagttttctgattaaaaaggaaaatgctgctgaacttgaagaagccaatat

SEQ ID NO: 525362 - DNA, 75 bp, synthetic construct
  source 1..75: mol_type = other DNA
catggtaattatgttgcttccgttagtttaaatattccgttaagtggattacttaaactggcagtaaaaaaagaa

SEQ ID NO: 525363 - DNA, 75 bp, synthetic construct
  source 1..75: mol_type = other DNA
aggcagtacggaataactcatgcgtatctggagcaggtgggcgcaatgccaggacagggaacggcgagcatgttc

SEQ ID NO: 525364 - DNA, 75 bp, synthetic construct
  source 1..75: mol_type = other DNA
accggtttaccggtgaccaccgcctgcggtggctatgacggttggattggcgactttatcgaagagcgtcgtctt

SEQ ID NO: 525365 - DNA, 75 bp, synthetic construct
  source 1..75: mol_type = other DNA
atgtcattagtaggatataatagtaacatcataataaccatcgcgctgatatcgttgctctctgcatgcaccaga

SEQ ID NO: 525366 - DNA, 75 bp, synthetic construct
  source 1..75: mol_type = other DNA
gaatcaacagagtgcgttactaagttcacaaactgaattaaccgttaaattaagttcctctgaacaggaactggt

SEQ ID NO: 525367 - DNA, 75 bp, synthetic construct
  source 1..75: mol_type = other DNA
gaccgatgcgctgggtgattttgtcacgacaggcaaggcaaattttcgttctttcgctacttccgtgatttcgga

SEQ ID NO: 525368 - DNA, 75 bp, synthetic construct
  source 1..75: mol_type = other DNA
caacagtggatgttttaaactttaatcacagggagcacaagtttataccgcgttgtaaagcaggggaacttatag

SEQ ID NO: 525369 - DNA, 75 bp, synthetic construct
  source 1..75: mol_type = other DNA
atgtcgatagtattagtaatggtgagcattgttatttattgtcagtttgacagcactcttggctatccagatttg

SEQ ID NO: 525370 - DNA, 75 bp, synthetic construct
  source 1..75: mol_type = other DNA
cgcctgttttttttcatcctgctagggttgctgaactaacccaattatataaatccaataacactcatgtgtggc

SEQ ID NO: 525371 - DNA, 75 bp, synthetic construct
  source 1..75: mol_type = other DNA
atgacttcgggcaacccggtaaatccgctgctgggggcgaaggtgctgcccggcgagacggaccttgcgctgccc

SEQ ID NO: 525372 - DNA, 75 bp, synthetic construct
  source 1..75: mol_type = other DNA
tgggattcacctgttacgcctcacgcgggctgtactgggcctgccccggcgaagcgagaacaccgtcttacatta

SEQ ID NO: 525373 - DNA, 75 bp, synthetic construct
  source 1..75: mol_type = other DNA
ccaccacaaaaccaccaccaacatacccccgcgcaagggaacattcgttggcaattgtttgtttatgctcagtga

SEQ ID NO: 525374 - DNA, 75 bp, synthetic construct
  source 1..75: mol_type = other DNA
tcctcaggcaataaaagcacttatggggatggttgatcagcgggtgcagggcgctctgttaaatatgcgacgtga

SEQ ID NO: 525375 - DNA, 75 bp, synthetic construct
  source 1..75: mol_type = other DNA
tgcaacttgaacgtgactatgcagataaatcccgtgggatgtcaaatcatgtttttcaggagaaaatgcaggctc

SEQ ID NO: 525376 - DNA, 75 bp, synthetic construct
  source 1..75: mol_type = other DNA
atataataatcttatcgctcaaataaatgagcgttataaagatccaaagcaaccaaaggcgaaaggttattcgga

SEQ ID NO: 525377 - DNA, 75 bp, synthetic construct
  source 1..75: mol_type = other DNA
aaggagcaacatcgttcaaaattctgtcaaccacggggaataaccggctgcacggggttgctgaaatctataagt

SEQ ID NO: 525378 - DNA, 75 bp, synthetic construct
  source 1..75: mol_type = other DNA
ggtactacgatccgttgcaggggcggtatatcaccccggacccgattgggttgagaggtggatggaatatgtatc

SEQ ID NO: 525379 - DNA, 75 bp, synthetic construct
  source 1..75: mol_type = other DNA
tctaggtatatttgtagtaaaatagctgtttctggtgagattaaagttgtgatgctttccggatatattgaggat

SEQ ID NO: 525380 - DNA, 75 bp, synthetic construct
  source 1..75: mol_type = other DNA
tacaaagattgcttggagaaaatatttctgttcgcaatttaaaacttattatggagtctttggcgctttgggctc

SEQ ID NO: 525381 - DNA, 75 bp, synthetic construct
  source 1..75: mol_type = other DNA
cgatttacatgctgaaaggctggcagcggtcagcaggtgctaaggcagaactggcgctggcggagaaactggggc

SEQ ID NO: 525382 - DNA, 75 bp, synthetic construct
  source 1..75: mol_type = other DNA
tttgcagctatgaccatgattctgaggttgtatgggtgcatgaaatggcagcatggcaggttggtgaatcgctga

SEQ ID NO: 525383 - DNA, 75 bp, synthetic construct
  source 1..75: mol_type = other DNA
tcggcatttacggctattgcatgtctgacatctctgggctcctggatgatgctggttggacaggcaggacgtcgt

SEQ ID NO: 525384 - DNA, 75 bp, synthetic construct
  source 1..75: mol_type = other DNA
atcttttaggttatggtgttaagattggtattagtaatgatgcctgtactattactactgtggtaatggataaaa

SEQ ID NO: 525385 - DNA, 75 bp, synthetic construct
  source 1..75: mol_type = other DNA
ggaagggggtctctatactgactctgggtgatggtgaactctacgacaagtcagccttaacagaccctgtgaagt

SEQ ID NO: 525386 - DNA, 75 bp, synthetic construct
  source 1..75: mol_type = other DNA
cagtagggctgatatcgacacagctatagatgatgtcaggcagatactgaggaaaggagtctctatactgactct

SEQ ID NO: 525387 - DNA, 75 bp, synthetic construct
  source 1..75: mol_type = other DNA
tgccgccacgcaacagcaactggataatctggttgccgaacagcctggcgtgaccttaattcgcctggcagaaaa

SEQ ID NO: 525388 - DNA, 75 bp, synthetic construct
  source 1..75: mol_type = other DNA
cgaggctaagcaagtttaataatgtctatatttttagtatcccggggttgatcattaacacatgtgctccaatat

SEQ ID NO: 525389 - DNA, 75 bp, synthetic construct
  source 1..75: mol_type = other DNA
acgggagcacgtgtgcagctatagagaaacgacggaatgtattgtgagaaagcgggagattcttcaaaacaggta

SEQ ID NO: 525390 - DNA, 75 bp, synthetic construct
  source 1..75: mol_type = other DNA
tgaggagagcaataccggtgataaccaggtggtttataacggtaatctggtctcttacgatagcgttccagtggc

SEQ ID NO: 525391 - DNA, 75 bp, synthetic construct
  source 1..75: mol_type = other DNA
cacggacggaagagtgcacgacagattcatggtctcagtttgaacggaatttacaaatcttgctacagaagccgg

SEQ ID NO: 525392 - DNA, 75 bp, synthetic construct
  source 1..75: mol_type = other DNA
aaggcaacgggctggaacaggaaggcttacccttcccgattcgccagagcgatgccctgggtgagtttatcgaga

SEQ ID NO: 525393 - DNA, 75 bp, synthetic construct
  source 1..75: mol_type = other DNA
caacccgggtcatacctgagcgcacgccattcagggagaggtcaaaagctgcatggccgagggaactgccggtaa

SEQ ID NO: 525394 - DNA, 75 bp, synthetic construct
  source 1..75: mol_type = other DNA
catgttgatgacgataaaatggctaaatccagcgatcttgatgcacgctttcaagaggtttatgccttcttacgt

SEQ ID NO: 525395 - DNA, 75 bp, synthetic construct
  source 1..75: mol_type = other DNA
ggaaaacaactgatagtcgcagtaagagaacaggatatgaaaaaaatggaagcagagtttggaaggatcataaaa

SEQ ID NO: 525396 - DNA, 75 bp, synthetic construct
  source 1..75: mol_type = other DNA
taccgacgccaccgacagctattattactgacaatgacctgagtggtgatggtgcggctatggcgctgcagttga

SEQ ID NO: 525397 - DNA, 75 bp, synthetic construct
  source 1..75: mol_type = other DNA
atggaagagtaccggcgctggcgcaatgaatcctggcgatacgacgggagtgataaatacccgtggccacagcct

SEQ ID NO: 525398 - DNA, 75 bp, synthetic construct
  source 1..75: mol_type = other DNA
ctggggccggtgacgcgtatctgttgccagcctcagcgtgtgggggtgaacagcagcgtggcggtggcactggaa

SEQ ID NO: 525399 - DNA, 75 bp, synthetic construct
  source 1..75: mol_type = other DNA
aacacgaagtctcgttggtcgtcagatttctgacatggtgtaccagataatcaatgatgcatcaccagaatcact

SEQ ID NO: 525400 - DNA, 75 bp, synthetic construct
  source 1..75: mol_type = other DNA
ggtgcggctatggcgctgcagttgagagggcgtctttcagggaaggaagctgtatctctggttgtatatgatggt

SEQ ID NO: 525401 - DNA, 75 bp, synthetic construct
  source 1..75: mol_type = other DNA
cactcggtatttctgtcaccactgtaagtcgggctcttggaggcttttcagatgtggctgcttctacccgtgagc

SEQ ID NO: 525402 - DNA, 75 bp, synthetic construct
  source 1..75: mol_type = other DNA
gtggaatggtcctatcgttcgtcctggatcatcggcgaagcggtcgacgctatcccggatgatatgacccgcaaa

SEQ ID NO: 525403 - DNA, 75 bp, synthetic construct
  source 1..75: mol_type = other DNA
tatttttatcatcaacgataaaaagtatccggccccatctgtcgacggaacacgaatgaataagaatgcatgggt

SEQ ID NO: 525404 - DNA, 75 bp, synthetic construct
  source 1..75: mol_type = other DNA
ttcaggtaatagatcaagctgaaatcattgatgatattaaccttgccgggtacaggctgcaccagttgcaggggg

SEQ ID NO: 525405 - DNA, 75 bp, synthetic construct
  source 1..75: mol_type = other DNA
agagcgtatctgggatcgtcttaccgcgttcgacagcgctactgtcggcgcggcgcagctggtctacaaggcgca

SEQ ID NO: 525406 - DNA, 75 bp, synthetic construct
  source 1..75: mol_type = other DNA
aatattgccttgtcgatcatggtgttgctggtggcgatgtttacccagcgcacgcttgagtttgctgcgtttccg

SEQ ID NO: 525407 - DNA, 75 bp, synthetic construct
  source 1..75: mol_type = other DNA
ttcctgcgtgaatacaacaagggtacagcgctcaagctgggcaaacatgtggtcgttgtcggggcgggtaacacc

SEQ ID NO: 525408 - DNA, 75 bp, synthetic construct
  source 1..75: mol_type = other DNA
aggcgtatttcacttctggaattccaacttgggttattggctgaatatgcacttttttttctgtgccatgtgttg

SEQ ID NO: 525409 - DNA, 75 bp, synthetic construct
  source 1..75: mol_type = other DNA
aaagtggccattaacttcggtaaagagaatgaacagtggctcgatcgcctgtcattaagtgatgctgaacgcttt

SEQ ID NO: 525410 - DNA, 75 bp, synthetic construct
  source 1..75: mol_type = other DNA
ccgcctgggcgccggggatgacggcagaggagataaatccccatctgtgcacccgtattgccggggctatcacgg

SEQ ID NO: 525411 - DNA, 75 bp, synthetic construct
  source 1..75: mol_type = other DNA
ttttttgccctgatgagcggtcgtgcgctgccgacgccggcggcacaccataagcgggagcagcttctggcatgg

SEQ ID NO: 525412 - DNA, 75 bp, synthetic construct
  source 1..75: mol_type = other DNA
tccccgaaaggattttctaccggtgatgcagaccttgccaactattacgaccgggtaagctcgttgcaggagagg

SEQ ID NO: 525413 - DNA, 75 bp, synthetic construct
  source 1..75: mol_type = other DNA
tttctcataccgtagttgtgcggctggataacagcgaaaatattccgttctgctccttgccaggactggctctgt

SEQ ID NO: 525414 - DNA, 75 bp, synthetic construct
  source 1..75: mol_type = other DNA
agtatctgatccactatcagactgctgacggccgcgcatctgatgcgtggtttgaagaaggtgagattcaggccg

SEQ ID NO: 525415 - DNA, 75 bp, synthetic construct
  source 1..75: mol_type = other DNA
tgtagtgctaatctatatgctgcatttacagcaacaccaagctttgggcttcattttgacaatcatgatgtaata

SEQ ID NO: 525416 - DNA, 75 bp, synthetic construct
  source 1..75: mol_type = other DNA
cccgaccggcgatttagctaacctcactgccagcccctatacggtgagcgcagcggtcagcgacaaagccggaaa

SEQ ID NO: 525417 - DNA, 75 bp, synthetic construct
  source 1..75: mol_type = other DNA
caataccggcagcggctcgcgcgatatcacgatcgacgccaatctgcctggcctgcgggtcgataccgtggcggg

SEQ ID NO: 525418 - DNA, 75 bp, synthetic construct
  source 1..75: mol_type = other DNA
gcctggcctgcggggacggttaatattgccgtttcaggggaaagtagcgccgaaaatccggtgagcattacgcat

SEQ ID NO: 525419 - DNA, 75 bp, synthetic construct
  source 1..75: mol_type = other DNA
ggatctgcaaatcactggcatcaccgacgcccagtcggggcagacggtgaccgtcacgcttaatgggcagaccta

SEQ ID NO: 525420 - DNA, 75 bp, synthetic construct
  source 1..75: mol_type = other DNA
gtgacggatctcagcggcaataccggcaacacctcccgcaccattaccgtcgacagccaggccccggccttaagc

SEQ ID NO: 525421 - DNA, 75 bp, synthetic construct
  source 1..75: mol_type = other DNA
ccacggtcaccgactccgcaggcaacagcggcacggcctcgcacactgtcaccgtggcgctcggcgcgccgatac

SEQ ID NO: 525422 - DNA, 75 bp, synthetic construct
  source 1..75: mol_type = other DNA
gaaactgcgctggcgcgcgagatgctcggtggcggcatcggcaagggcgatcacgccagcgcacgctgggacgac

SEQ ID NO: 525423 - DNA, 75 bp, synthetic construct
  source 1..75: mol_type = other DNA
ctacggcgatgagcacgccctgttgcgcatcgacatgtcggaatatggcgaacgccataccgtggcgcggctggt

SEQ ID NO: 525424 - DNA, 75 bp, synthetic construct
  source 1..75: mol_type = other DNA
gggcggtggcgaaggcgggctggacgtggccaacgtgttcaaaccgatgatggcgcgcggtgaactcaacctgat

SEQ ID NO: 525425 - DNA, 75 bp, synthetic construct
  source 1..75: mol_type = other DNA
aagtgcaggtgaacatacctggtcagtggtgcaaattgtcggcagtaccatcactgacgccggttcgataacgtt

SEQ ID NO: 525426 - DNA, 75 bp, synthetic construct
  source 1..75: mol_type = other DNA
ggtgccgcggcgggcgacacagttaccgttacactgggtggcaacacctacaccgctacggtgcaggctaattta

SEQ ID NO: 525427 - DNA, 75 bp, synthetic construct
  source 1..75: mol_type = other DNA
agggcgatcagcgcggcattctcgccaccaatgacatcaccgatgacaccacgccaacctttagcggcagcgggc

SEQ ID NO: 525428 - DNA, 75 bp, synthetic construct
  source 1..75: mol_type = other DNA
agctggactgccaccgtacccgccgccgatctggcgtcattacccgagggcagcgcctccgcacaggccagcgtc

SEQ ID NO: 525429 - DNA, 75 bp, synthetic construct
  source 1..75: mol_type = other DNA
gtggcgggcgatgacattatcaacgccgctgaaatcgctgtggcgcagaccatcagcggtcaggtcacgggaacg

SEQ ID NO: 525430 - DNA, 75 bp, synthetic construct
  source 1..75: mol_type = other DNA
ttaacgccgccgaagcgggcgtcgcgcaaaccatcagcgggcaggttactggagccgccgttggcgacacggtaa

SEQ ID NO: 525431 - DNA, 75 bp, synthetic construct
  source 1..75: mol_type = other DNA
tccgctaaccatcagcggcagtagcaccgccgaagcggggcagacggtaaccgtcacgcttaatggcgtgactta

SEQ ID NO: 525432 - DNA, 75 bp, synthetic construct
  source 1..75: mol_type = other DNA
acgccgacgaagcgggatcggcgctgaccatcagcggtaccagcacggcggaagccgggcagacggtgaccgtca

SEQ ID NO: 525433 - DNA, 75 bp, synthetic construct
  source 1..75: mol_type = other DNA
cacggtgagcgacaaagcgggtaacccggcaagcgccgaccacgcgctggcggtagatatcaccgcgccggatct

SEQ ID NO: 525434 - DNA, 75 bp, synthetic construct
  source 1..75: mol_type = other DNA
tgcgccggtcgttaccatcaacacggtagcgggcgatgacatcattaactccacggaacacggacaggcgcagat

SEQ ID NO: 525435 - DNA, 75 bp, synthetic construct
  source 1..75: mol_type = other DNA
gcgccggaaactcggtgagcattacgcatccggtgacggtggatctcactccggcagcgatcaccatcaacacca

SEQ ID NO: 525436 - DNA, 75 bp, synthetic construct
  source 1..75: mol_type = other DNA
gtcaccgatagcgcaggcaacagcaattccgccagccataacgtgcaggtcaataccgcgctgcctggtgtcacc

SEQ ID NO: 525437 - DNA, 75 bp, synthetic construct
  source 1..75: mol_type = other DNA
tcaccgtgacgttgaataatgtgaattacaccaccgtggtggatgcttctggcaactggagtctgggcgttccgg

SEQ ID NO: 525438 - DNA, 75 bp, synthetic construct
  source 1..75: mol_type = other DNA
gtgaccaacggcgttggtaataccggcagcggttcgcgagatattactatcgacgctaatttgcctggcctgcgc

SEQ ID NO: 525439 - DNA, 75 bp, synthetic construct
  source 1..75: mol_type = other DNA
tccggcaccacctccggcgtggaagcggggcaaaccatcaccgttatcttcggcggcaaaagctacaccaccacg

SEQ ID NO: 525440 - DNA, 75 bp, synthetic construct
  source 1..75: mol_type = other DNA
accggtagcagtagcggactggcggcgggcgcggcgttgacggtggttatcaatagcgtcacctacggcgcaacg

SEQ ID NO: 525441 - DNA, 75 bp, synthetic construct
  source 1..75: mol_type = other DNA
atgctgacaggttttgatgagcaagttgctcgagtgattcggatatccgaagagcagttaattgcgctgaaagga

SEQ ID NO: 525442 - DNA, 75 bp, synthetic construct
  source 1..75: mol_type = other DNA
acttatgtagcaggccacaaacctgaattgtcagattctcttattttagctgagaacttccatgactacttcaga

SEQ ID NO: 525443 - DNA, 75 bp, synthetic construct
  source 1..75: mol_type = other DNA
ttggaagtttaagaaagatgaagttgatgagtgggtcaagggtggcggcgcggcggacaggagcaagatgaatga

SEQ ID NO: 525444 - DNA, 75 bp, synthetic construct
  source 1..75: mol_type = other DNA
cattatcgctacgcatgcggattctaagaaaaattgaccgtctggctgcgctgagtggctcgacccgaagtgaag

SEQ ID NO: 525445 - DNA, 75 bp, synthetic construct
  source 1..75: mol_type = other DNA
gatgatgggcgttatctattatttgtgacagaagatgtaccttatgatgaatctcttgaattgttattgataaat

SEQ ID NO: 525446 - DNA, 75 bp, synthetic construct
  source 1..75: mol_type = other DNA
cggaaccttatgtgaaatgaggttatatgaaaactatattgaatttagttatttttctgatgaagtatggagagt

SEQ ID NO: 525447 - DNA, 75 bp, synthetic construct
  source 1..75: mol_type = other DNA
gttacagaggctatacagtcgctttctgaggtcactgagaggggtttaatagatgttgatgaggttatcatatag

SEQ ID NO: 525448 - DNA, 75 bp, synthetic construct
  source 1..75: mol_type = other DNA
gtaagtctatctgggagattgtcagaactcttaatgatgaaggtcaccagtcgatgagccagtataagccgggtt

SEQ ID NO: 525449 - DNA, 75 bp, synthetic construct
  source 1..75: mol_type = other DNA
aaagcttctctgtaatccctgagaaggtagaaactgtgaagaggtgctttcagctacgattagagggtaagtcta

SEQ ID NO: 525450 - DNA, 75 bp, synthetic construct
  source 1..75: mol_type = other DNA
accaacaccattccgttccaggcgcgttattatgcaatcggcgaggcaacccctggcgcagctaatgcggatgcg

SEQ ID NO: 525451 - DNA, 75 bp, synthetic construct
  source 1..75: mol_type = other DNA
aatcaaaagaagaacaggacaaggtgaacgttgaccttgctgcttctggtgtggcgtacaaagaacgcctaaaca

SEQ ID NO: 525452 - DNA, 75 bp, synthetic construct
  source 1..75: mol_type = other DNA
agtggaagttgttaaacgagcatttgacctgagattacaggggttaagcttttgggctatcaccagaactttaaa

SEQ ID NO: 525453 - DNA, 75 bp, synthetic construct
  source 1..75: mol_type = other DNA
ccgtcgccgctaactggttccagcttaaaagcaaaagcgttacccctgattacgcaaaagacatttggcgctcac

SEQ ID NO: 525454 - DNA, 75 bp, synthetic construct
  source 1..75: mol_type = other DNA
taaccctgaagtcgcagtaatcaaagattttgagcgaaaattgaacaagcgttatctacgaaaagaaggggaaat

SEQ ID NO: 525455 - DNA, 75 bp, synthetic construct
  source 1..75: mol_type = other DNA
cgttgggagtacaactcaaataacaaaaggcaaccgggctatacacaggcattggagcacatccgcttagctcat

SEQ ID NO: 525456 - DNA, 75 bp, synthetic construct
  source 1..75: mol_type = other DNA
ttacctcacctgaaaactacgctgagggtgcaaaaaagcaagttacagtaaactcctacgagcgtgatccaaaag

SEQ ID NO: 525457 - DNA, 75 bp, synthetic construct
  source 1..75: mol_type = other DNA
tagctttaagccgcacacgtacaattgatagcattggcaattgcctaagcctccttgctcgtgaaggttttgaga

SEQ ID NO: 525458 - DNA, 75 bp, synthetic construct
  source 1..75: mol_type = other DNA
aaaaacaaccgggatacacccaggctctggaacacatcaggttagtccatgaaggctacgaactttacaccttca

SEQ ID NO: 525459 - DNA, 75 bp, synthetic construct
  source 1..75: mol_type = other DNA
ccatgcaatggtacatcacggaagcgaagtacttccaattgcagatttgaaaaagaaaatgacattctggagcga

SEQ ID NO: 525460 - DNA, 75 bp, synthetic construct
  source 1..75: mol_type = other DNA
atggatatgacattgaagccatcaaggaacattctgatgatatgttggagtttaattattttctcccggtaatga

SEQ ID NO: 525461 - DNA, 75 bp, synthetic construct
  source 1..75: mol_type = other DNA
agaactacctaagctgatgcgctctttggttatgtcaaacttgtctgttccgacgcgttgtcttattgagtggca

SEQ ID NO: 525462 - DNA, 75 bp, synthetic construct
  source 1..75: mol_type = other DNA
tgaagttgcagaggaagagcagcaaattgctctggatagtattttttctactgttgccgctaactggttccaact

SEQ ID NO: 525463 - DNA, 75 bp, synthetic construct
  source 1..75: mol_type = other DNA
ggcagcggcatgctttgcactaccgctaacgccgaagagtattatttcgaccccattatgctggaaactacataa

SEQ ID NO: 525464 - DNA, 75 bp, synthetic construct
  source 1..75: mol_type = other DNA
caaaggttccgtggacgttcaggggcgcgaaggcagcatcgaagtggtggcgctggatcacgatgtgtacatccc

SEQ ID NO: 525465 - DNA, 75 bp, synthetic construct
  source 1..75: mol_type = other DNA
ggctgggtattgggtttccatgctgcgatcttcggtatgactcttttgcttcttagttggcgtttgcgcaaagcg

SEQ ID NO: 525466 - DNA, 75 bp, synthetic construct
  source 1..75: mol_type = other DNA
ggatttccggggcggttcactgattggcttaaggctcatcctgagtactaccttgaccaagatttatcttttcgt

SEQ ID NO: 525467 - DNA, 75 bp, synthetic construct
  source 1..75: mol_type = other DNA
tgcttgatttacaggacagttctctggtttcaaaacaatatgcagcactgaactttactaatcagggaaacagtc

SEQ ID NO: 525468 - DNA, 75 bp, synthetic construct
  source 1..75: mol_type = other DNA
acagacaaacttattgtacagggcaataccagcggcaaaacctttgttaccgtaaaccacacgggcggttccgga

SEQ ID NO: 525469 - DNA, 75 bp, synthetic construct
  source 1..75: mol_type = other DNA
tttttccaatcgccactaattgttccatgcacatttgtagtaaaaacagtggactgccttctaccggcttttctt

SEQ ID NO: 525470 - DNA, 75 bp, synthetic construct
  source 1..75: mol_type = other DNA
agcccaaacctgtaccactgcgaccatcgcggcctgccgctggcgcttgtcagcacggaaggggcaacagaatgg

SEQ ID NO: 525471 - DNA, 75 bp, synthetic construct
  source 1..75: mol_type = other DNA
gaggaaagccgccgctggctggcatcgtgcggcctgacggtggagcagatgcaaaaccagatggacccggtgtac

SEQ ID NO: 525472 - DNA, 75 bp, synthetic construct
  source 1..75: mol_type = other DNA
ccgctggcgcttgtcagcacggaaggggcaacagaatggtgcgcagaatacgatgaatggggcaacctgctgaat

SEQ ID NO: 525473 - DNA, 75 bp, synthetic construct
  source 1..75: mol_type = other DNA
acattaaaagcaagtcatgtaggtgcgtttgctctagggcaaacaggaagcagggttgcaaatgataaagctgtt

SEQ ID NO: 525474 - DNA, 75 bp, synthetic construct
  source 1..75: mol_type = other DNA
aggagtgacaaccgctcatggctgacgttacatctacaatctgataccaacaccaataaatatgccggattagac

SEQ ID NO: 525475 - DNA, 75 bp, synthetic construct
  source 1..75: mol_type = other DNA
tggtgtgaaactgccctaccagcagaaaatcaccgaaaacgagtggggcatgtccattgtcgagcgcatcttcga

SEQ ID NO: 525476 - DNA, 75 bp, synthetic construct
  source 1..75: mol_type = other DNA
tgatgcaaaaaataaagcacagggcaacccttatatgagcttggttagtgccgaagatggtactgtacaatctga

SEQ ID NO: 525477 - DNA, 75 bp, synthetic construct
  source 1..75: mol_type = other DNA
gggcgataccaccgctgagtaccgggcgtttctgcattctcagggaatgacttttaactcgcgtcagaatgaacc

SEQ ID NO: 525478 - DNA, 75 bp, synthetic construct
  source 1..75: mol_type = other DNA
atcctgtagtcatcaagagatctgcaacgagcaatggtgaacttgcttctcgggttattatttccactgcgccgc

SEQ ID NO: 525479 - DNA, 75 bp, synthetic construct
  source 1..75: mol_type = other DNA
tgcttgtcgcaatatgggtgttatcctctgagtcttttattatttataacataataggggttttccataaggtgt

SEQ ID NO: 525480 - DNA, 75 bp, synthetic construct
  source 1..75: mol_type = other DNA
ggactggaggacattagcgaaggggaagtgttaattggtgacgaggtgatgaacgacgttgccccctcccaccgc

SEQ ID NO: 525481 - DNA, 75 bp, synthetic construct
  source 1..75: mol_type = other DNA
ggatagttaatatttcaacggatagtctctggaatttaaaaacgtcatctactaacgcccaattgctacaggtcg

SEQ ID NO: 525482 - DNA, 75 bp, synthetic construct
  source 1..75: mol_type = other DNA
ctatctcgtcttgaccgatttgatagcgatatgacgaataccatagacacactgaagctacaccgtgaacacatc

SEQ ID NO: 525483 - DNA, 75 bp, synthetic construct
  source 1..75: mol_type = other DNA
ggctgaagctggtgctggcgcgccggacctgaaactttatcgcgcggattaccctgagcatgttccaactcatta

SEQ ID NO: 525484 - DNA, 75 bp, synthetic construct
  source 1..75: mol_type = other DNA
acgtcaataaataaagatagttttcaacgtaaccagataacttggcagaaagttgtattatcaaaaaataatgag

SEQ ID NO: 525485 - DNA, 75 bp, synthetic construct
  source 1..75: mol_type = other DNA
ggccagtagtgctcctaatgttttcaaaacattcttcagagcattaagcccttacgactacacactgtattgcag

SEQ ID NO: 525486 - DNA, 75 bp, synthetic construct
  source 1..75: mol_type = other DNA
gtacgtcatagaaacaacgccattcggcgagcgtaatctgaatattgttacgcttgatgacccgaaactgattat

SEQ ID NO: 525487 - DNA, 75 bp, synthetic construct
  source 1..75: mol_type = other DNA
tctgtggatcccaatgagtatcagcaacagggaaaaggcgtggtgtacctgcgccctaatcaaaacaccaatctt

SEQ ID NO: 525488 - DNA, 75 bp, synthetic construct
  source 1..75: mol_type = other DNA
atcattgttcgatactgtaggtattaatgtcggtaattttggtagcggcatcgtaaatgtcagtaatggtgccac

SEQ ID NO: 525489 - DNA, 75 bp, synthetic construct
  source 1..75: mol_type = other DNA
ttaagcccttacgactacacactgtattgcaggaagtgggtaaaaccaaatctgacttgtacgccacaggatgat

SEQ ID NO: 525490 - DNA, 75 bp, synthetic construct
  source 1..75: mol_type = other DNA
ccgcatcagctgcagcagcttatccggctgccggggcagcagtatgatgaggagtccggcctgtattacaaccgc

SEQ ID NO: 525491 - DNA, 75 bp, synthetic construct
  source 1..75: mol_type = other DNA
ccggtggactgacttttgaaaacgactcaatcctcgcctggattcggaatactgactgggcgaagattggattta

SEQ ID NO: 525492 - DNA, 75 bp, synthetic construct
  source 1..75: mol_type = other DNA
aggccgtaaatacgttacgagaagggaagagtgactttattatttcatttcgagatgaggagtttatgcaatcgc

SEQ ID NO: 525493 - DNA, 75 bp, synthetic construct
  source 1..75: mol_type = other DNA
tgcctgcttttacgcgtaaggatttagagggtgtattagctaactatgctcaagagattgttcctgaacaccgtc

SEQ ID NO: 525494 - DNA, 75 bp, synthetic construct
  source 1..75: mol_type = other DNA
ggtgtggctgcctatgagcactggcagggaaaccggcaaaagaatatcccgctgaatgatacgttaatgaggatt

SEQ ID NO: 525495 - DNA, 75 bp, synthetic construct
  source 1..75: mol_type = other DNA
agctgcaggctaacgaacctaacagctctacctacatcaacgcctcccgctcggtcctagccatcggtatagacg

SEQ ID NO: 525496 - DNA, 75 bp, synthetic construct
  source 1..75: mol_type = other DNA
agcaacagcagtaactggtatctgagtaatacaacacctacacctacaacacctacaacacctacaacacctaca

SEQ ID NO: 525497 - DNA, 75 bp, synthetic construct
  source 1..75: mol_type = other DNA
ttcgaatagacctgatttacctcctgttgattatgcaccgccagagttaccgagtgtggactataacaggttgcc

SEQ ID NO: 525498 - DNA, 75 bp, synthetic construct
  source 1..75: mol_type = other DNA
tagaacgcgaccaatacggctactggactcaccccgtctatgagcaattttgcgatggtcgtgaatttatctcac

SEQ ID NO: 525499 - DNA, 75 bp, synthetic construct
  source 1..75: mol_type = other DNA
gcttcgagcccgacagcctgcaaagagaagtacggtgacatccctgctaacagtttgttggttcacgaagccata

SEQ ID NO: 525500 - DNA, 75 bp, synthetic construct
  source 1..75: mol_type = other DNA
caggtacttcaacggcaagtaaaaacatcgttgtggttgattctggtaagaaaggggcctggaaccaagcaatga

SEQ ID NO: 525501 - DNA, 75 bp, synthetic construct
  source 1..75: mol_type = other DNA
gctgcttatttttgctggcgtttttgcctgtctggtcggcgcgggatgggtgcttacagcgctgctgtatctgat

SEQ ID NO: 525502 - DNA, 75 bp, synthetic construct
  source 1..75: mol_type = other DNA
ctgatttgcgctggattcatggcgttatagttcaggcagcgtggtttgtaaaagcaacactggagcagaatgcac

SEQ ID NO: 525503 - DNA, 75 bp, synthetic construct
  source 1..75: mol_type = other DNA
gtgaatatttatcgactctcttttgtatcctgcctggtcatggcgatgccttgcgcattggcggtcgaatttaat

SEQ ID NO: 525504 - DNA, 75 bp, synthetic construct
  source 1..75: mol_type = other DNA
acggctcgacttggaacctcgcagagaaggcgacaggcactgtggcaacctcggccttcgatacgctggcaatga

SEQ ID NO: 525505 - DNA, 75 bp, synthetic construct
  source 1..75: mol_type = other DNA
tgttgttgcgcccacagctacaacaactcccgttggcagtcattgacgaagtgattgtccgcgcgggggactata

SEQ ID NO: 525506 - DNA, 75 bp, synthetic construct
  source 1..75: mol_type = other DNA
ggctgtgtcgggtactgaatatcgatatcggcggtggcaccgcgaactacgccctgttcgatgccggaaaaatca

SEQ ID NO: 525507 - DNA, 75 bp, synthetic construct
  source 1..75: mol_type = other DNA
atttcgtcgcgcgttttccgaatccgcatcccctgctggtggtggccgggcaggactttggtaaagctctgggca

SEQ ID NO: 525508 - DNA, 75 bp, synthetic construct
  source 1..75: mol_type = other DNA
atcgatcatgctcagataaaaagtgacttactggaatggattggcggtgaaaacctcagggaactgggatttgac

SEQ ID NO: 525509 - DNA, 75 bp, synthetic construct
  source 1..75: mol_type = other DNA
atgaatgtgtgggtcactgccgaatctgcctggatggatatgattaagtgggagaagtgcgaatacattgctcca

SEQ ID NO: 525510 - DNA, 75 bp, synthetic construct
  source 1..75: mol_type = other DNA
tagttgcaattcgggatagttttggtttgtggaaaatcaaacctaatcattcagaccttctaaataatctcatca

SEQ ID NO: 525511 - DNA, 75 bp, synthetic construct
  source 1..75: mol_type = other DNA
gcatcaaaaccgcgattgttaactggcttggcgaaacaattgggctgaatgacgcagccttttggcaggagtggt

SEQ ID NO: 525512 - DNA, 75 bp, synthetic construct
  source 1..75: mol_type = other DNA
agaatgtcactatgaacccggaggccgctcagctccttgaaagccgttcattcagtattgaggaaatttgtcgct

SEQ ID NO: 525513 - DNA, 75 bp, synthetic construct
  source 1..75: mol_type = other DNA
gtaggcgagcgcagcctgcgcagtgaagaagcggcccgtatgggtgggccgcacgtacaggaggtcggtacgtac

SEQ ID NO: 525514 - DNA, 75 bp, synthetic construct
  source 1..75: mol_type = other DNA
acggtgattggcgcgggtgcacataccctttcgctctctggcagcacaatctggctggagggcgtacaactgccg

SEQ ID NO: 525515 - DNA, 75 bp, synthetic construct
  source 1..75: mol_type = other DNA
tcaggagtaaagacaccgactccgaaagatgagtcgctaataagccggtttgtcggtttcatctcgggaggttaa

SEQ ID NO: 525516 - DNA, 75 bp, synthetic construct
  source 1..75: mol_type = other DNA
ccaggaataatacgtttttctttgaatccatgaaaccggactatgaaaaatcaggcgcatggcctgacgatttgg

SEQ ID NO: 525517 - DNA, 75 bp, synthetic construct
  source 1..75: mol_type = other DNA
agcaggaaatgatagctgtctgtgcaacaaaccctgcagcctgcaaagagaaatacggcgatataccagctaaag

SEQ ID NO: 525518 - DNA, 75 bp, synthetic construct
  source 1..75: mol_type = other DNA
atgccgctatcgatgaatatttcaacggaccaaaagaactacgcgatcaattagatgactatttctatatggggg

SEQ ID NO: 525519 - DNA, 75 bp, synthetic construct
  source 1..75: mol_type = other DNA
gaacatggcagatcgccggaaaatgctggctgtaatggggacaaatagctccctcggcgtgtatttagcaaacgt

SEQ ID NO: 525520 - DNA, 75 bp, synthetic construct
  source 1..75: mol_type = other DNA
atggctgcaagagaaaaatggacgggggagtcagacaaatggacgaaggcatcaggcttatattctgcgatagtg

SEQ ID NO: 525521 - DNA, 75 bp, synthetic construct
  source 1..75: mol_type = other DNA
gtaaaaggttatactcctttcgtatttttcacatatcaattaatcgttgcgatcattgagtatttgtctttatta

SEQ ID NO: 525522 - DNA, 75 bp, synthetic construct
  source 1..75: mol_type = other DNA
tattttttcagggttcgacagattttggttggcttttccctactcctcgccagtacacaacatcacctatgagaa

SEQ ID NO: 525523 - DNA, 75 bp, synthetic construct
  source 1..75: mol_type = other DNA
ggtgaaattaatccatttggagttgccaaaagggaagactaccttgagccaggcgatattatttttgtccgttct

SEQ ID NO: 525524 - DNA, 75 bp, synthetic construct
  source 1..75: mol_type = other DNA
aatccaggaaagaagctctcaagtcttatctcacaacctatggatgggtaacgcttggcgcgtggtatcagacct

SEQ ID NO: 525525 - DNA, 75 bp, synthetic construct
  source 1..75: mol_type = other DNA
ccttcagtaaaaacgagtatagcggtgttatctcagcacaacgtgcagccatggataatatgattagcgacatgg

SEQ ID NO: 525526 - DNA, 75 bp, synthetic construct
  source 1..75: mol_type = other DNA
cctgcggcggcgcgctacggttcgggggcagccgggggggtggtgaacatcattaccaaacgtcccaccaacgac

SEQ ID NO: 525527 - DNA, 75 bp, synthetic construct
  source 1..75: mol_type = other DNA
cttgcggtaatggggtcaaatagcgctttgggcgtgtatttagcaaacgtcgataaactacaagggcataaatct

SEQ ID NO: 525528 - DNA, 75 bp, synthetic construct
  source 1..75: mol_type = other DNA
acggtgacgatctggtcaataaaagtatccgtgaatatttcgatggcagcgacgagtttaatcgccgcttagatg

SEQ ID NO: 525529 - DNA, 75 bp, synthetic construct
  source 1..75: mol_type = other DNA
cggcagctccggagccggaaggcatcgcgggtgaggggagtgcttcagatagcggtgaccccacaccggacagcg

SEQ ID NO: 525530 - DNA, 75 bp, synthetic construct
  source 1..75: mol_type = other DNA
atgactacattattcagaaaaaaatatccgcgaaaaagtagaacaacagaatttctgtttctcattctgtttatc

SEQ ID NO: 525531 - DNA, 75 bp, synthetic construct
  source 1..75: mol_type = other DNA
atacccaaacgaatattgcagatttcaaacaatacttcaacgaagtgtggctgcctcagtacgctcctaaatatt

SEQ ID NO: 525532 - DNA, 75 bp, synthetic construct
  source 1..75: mol_type = other DNA
taatttaaaatcaaattttgaggaagctaggaaaaactggctacgcaaagaaaacaaaagaagattatctgccgg

SEQ ID NO: 525533 - DNA, 75 bp, synthetic construct
  source 1..75: mol_type = other DNA
tgacctgcgggatcagatagccctgaaggttgagcaggcagatacgccggaacaggaggacagttcgccagaaga

SEQ ID NO: 525534 - DNA, 75 bp, synthetic construct
  source 1..75: mol_type = other DNA
aatactggtaaagcatatgatatgaaaattgttacaccacaaaggaatccgttacaaccaggtccttcactgacc

SEQ ID NO: 525535 - DNA, 75 bp, synthetic construct
  source 1..75: mol_type = other DNA
ggtggtgtgacagcagcccttcagggcaacagtgcggcagcaggcgcaattggcgcgggtactggcgaagtgatc

SEQ ID NO: 525536 - DNA, 75 bp, synthetic construct
  source 1..75: mol_type = other DNA
cgaggccttaagttatgcgggtgttcgttctaatgtaaactactttaatttgaatcctaatctggatgttggaat

SEQ ID NO: 525537 - DNA, 75 bp, synthetic construct
  source 1..75: mol_type = other DNA
gctgccataaatgtatcaacttatgcggatataattattattgatggtggcagcaccgatggttctctgaatccc

SEQ ID NO: 525538 - DNA, 75 bp, synthetic construct
  source 1..75: mol_type = other DNA
acacacccggtgcaatgagcttcattccagatatgcataacatatccatacttacccgggagaaaaatcatgaga

SEQ ID NO: 525539 - DNA, 75 bp, synthetic construct
  source 1..75: mol_type = other DNA
gtgcgcttgaaaaagccctggccattgcgcgtcagcttcagaaaatggggatgacacctgagcagattaagcagg

SEQ ID NO: 525540 - DNA, 75 bp, synthetic construct
  source 1..75: mol_type = other DNA
agctagtcagactactgacctagtacgacaggctgtgattgacgaacttaataaaactcgtgctgaaagcaggaa

SEQ ID NO: 525541 - DNA, 75 bp, synthetic construct
  source 1..75: mol_type = other DNA
gcgtcggctgaaggaagattacccggacaaagtattgatcgcttcgatcatgggggaaaatgagcagcaatggga

SEQ ID NO: 525542 - DNA, 75 bp, synthetic construct
  source 1..75: mol_type = other DNA
taacggaaatctgagtgttttgataatactttttaaaacatgttttggacgatacaattctaatcggtgtaacta

SEQ ID NO: 525543 - DNA, 75 bp, synthetic construct
  source 1..75: mol_type = other DNA
caggggccgaaaggggatacgggagctgcaggcccggcagggcctcaggggccaaaaggggatacgggagccaca

SEQ ID NO: 525544 - DNA, 75 bp, synthetic construct
  source 1..75: mol_type = other DNA
atggaaaataaagaaatcagaaaagccaacctggaagcgctgtacgagaagcgtcagcacgagtctggaatgacc

SEQ ID NO: 525545 - DNA, 75 bp, synthetic construct
  source 1..75: mol_type = other DNA
ttagcaatttgcacatttatcattttgctaaaagcagtaacaatgcaggtatggaaaataaagaaatcagaaaag

SEQ ID NO: 525546 - DNA, 75 bp, synthetic construct
  source 1..75: mol_type = other DNA
gcgtaaaggaatgaataaaagctggaaggatcacttccactatttgctgatgccgctggttggcgcgctgacggt

SEQ ID NO: 525547 - DNA, 75 bp, synthetic construct
  source 1..75: mol_type = other DNA
gcgatgtcggcgctgttcttcgatttagttaccgccacagcgttaattaacttcggcgcgttggtagcgtttacc

SEQ ID NO: 525548 - DNA, 75 bp, synthetic construct
  source 1..75: mol_type = other DNA
gttcggcctatacctacgcgcaaaagtcgattaatccgcacgtcggatttatggtcggctggtcatcactgctgg

SEQ ID NO: 525549 - DNA, 75 bp, synthetic construct
  source 1..75: mol_type = other DNA
gtgacgggatggaaatctatggccgggctgtagcctcgcgtgaccgtcagctggtctcattagccgatttttcgc

SEQ ID NO: 525550 - DNA, 75 bp, synthetic construct
  source 1..75: mol_type = other DNA
gtaaaaccgcagctgaagcaggtcgtgatgatcaaacacaacgaggctggcgtaaagcgctctattgcgcgctat

SEQ ID NO: 525551 - DNA, 75 bp, synthetic construct
  source 1..75: mol_type = other DNA
aaacaggcaaaacgttctacaaagcaatttgagcaagaagtcttgaggctacggagacaaattgcccatccagat

SEQ ID NO: 525552 - DNA, 75 bp, synthetic construct
  source 1..75: mol_type = other DNA
gttcccctgactatctgatgaaaggagaggaaagtctttcaaacattgcctatcacagtaggcatgatccaagag

SEQ ID NO: 525553 - DNA, 75 bp, synthetic construct
  source 1..75: mol_type = other DNA
gccgtctttattggcggtgaacaggtgacctatctggatatccagccagagttcccgccgtggcagagaatgatc

SEQ ID NO: 525554 - DNA, 75 bp, synthetic construct
  source 1..75: mol_type = other DNA
aaatattgaccataaaaaaacatactgccgagaattatttcgagtggccttgcgttattccggaacaactgagct

SEQ ID NO: 525555 - DNA, 75 bp, synthetic construct
  source 1..75: mol_type = other DNA
aggctgcctggctgcatccaaaaattcaggtgaaaaccctgcgccagcgcattgccgcaagactgcgcgcgttgc

SEQ ID NO: 525556 - DNA, 75 bp, synthetic construct
  source 1..75: mol_type = other DNA
gagttcgggaactggggatgagatgggagcctctgtctctgattattttaaaaagatgcaaccccgcagagatac

SEQ ID NO: 525557 - DNA, 75 bp, synthetic construct
  source 1..75: mol_type = other DNA
cggctattacccgaagattaaccagcttatttccgggctgattcatcatcatattcagcagtcatcaattaccac

SEQ ID NO: 525558 - DNA, 75 bp, synthetic construct
  source 1..75: mol_type = other DNA
tagttgtatttttctcgatgcgacaagatataagaagtatttgctacgtctatgctttttatcattccctatcta

SEQ ID NO: 525559 - DNA, 75 bp, synthetic construct
  source 1..75: mol_type = other DNA
atgaagcagcgtattacagtgacagttgacagcgacagctatcagctgctcagggcgtatgacgtgaatatctcc

SEQ ID NO: 525560 - DNA, 75 bp, synthetic construct
  source 1..75: mol_type = other DNA
tgtttctaacagtgacacatccctgatccgttcgctgtatcgcaatttcactcaccactacatcaaggcaaaacg

SEQ ID NO: 525561 - DNA, 75 bp, synthetic construct
  source 1..75: mol_type = other DNA
acaaatgggttattactagcgaccaatatcaattcatcctgaatgaaaagaaagtcgttaagtccggtaaaaaag

SEQ ID NO: 525562 - DNA, 75 bp, synthetic construct
  source 1..75: mol_type = other DNA
gcttggtctgtgggatgaagtcaaaatcaagccgaagaaagagcatgtggcatttgcggtaagcggctatgaagg

SEQ ID NO: 525563 - DNA, 75 bp, synthetic construct
  source 1..75: mol_type = other DNA
cgttccagaagccctcctttccgcaaatcgtgccggaaaccacaggattgcagcaaattcactcctcagcctata

SEQ ID NO: 525564 - DNA, 75 bp, synthetic construct
  source 1..75: mol_type = other DNA
taacgatatccggcagctgcggaacatggagctgctgagtgaccgactggcgttcaagcgtgacgtcctgctgcc

SEQ ID NO: 525565 - DNA, 75 bp, synthetic construct
  source 1..75: mol_type = other DNA
aattctggcagccgcgatgttgatctcaagcgtatatttctctgtccttaagcctaacccgggcctggcactggt

SEQ ID NO: 525566 - DNA, 75 bp, synthetic construct
  source 1..75: mol_type = other DNA
tattgctcagggctgttgaccaggcatcccgcccgtttaaatccatccgcacagcgagcaaatcgctgtcggggg

SEQ ID NO: 525567 - DNA, 75 bp, synthetic construct
  source 1..75: mol_type = other DNA
gatcgtattgatgcgtttactattaatagtaaacgcccattgataattagaaattccgcgaaaaagagtgtgtgt

SEQ ID NO: 525568 - DNA, 75 bp, synthetic construct
  source 1..75: mol_type = other DNA
atgcgcaaaaaagactagggctgtattacatccctgtttgggaacatactgatgaaacggtagtgcatgccatcc

SEQ ID NO: 525569 - DNA, 75 bp, synthetic construct
  source 1..75: mol_type = other DNA
aaatccactcttgcggctggccgctttttaaatgatctgaatcggcgttataaaggcgatgtggcaaaaatgctt

SEQ ID NO: 525570 - DNA, 75 bp, synthetic construct
  source 1..75: mol_type = other DNA
ttatcaggacacggtgagtaacctgatggtaaatggaaacagaatatcaaattcctggtatgcagctctcgccag

SEQ ID NO: 525571 - DNA, 75 bp, synthetic construct
  source 1..75: mol_type = other DNA
aataccttcaaatacaggtccgggaggtggcgtccggcagacaactacaggcggagaagccaatcaggctcccag

SEQ ID NO: 525572 - DNA, 75 bp, synthetic construct
  source 1..75: mol_type = other DNA
atctccttaagctcatggcacagataccagccatgagagagcagaggccgatgcttgaaggtaaattactaaatg

SEQ ID NO: 525573 - DNA, 75 bp, synthetic construct
  source 1..75: mol_type = other DNA
ctatggatattccgggagtggcgactgcaaacggattgcaggaatatgtaagaaaggtaaatcgggcgtcattgt

SEQ ID NO: 525574 - DNA, 75 bp, synthetic construct
  source 1..75: mol_type = other DNA
gtttggctacggctatatggcaagtaaagtcgcggcacagtatagcgtggctcaggggttagggatggaaaccgc

SEQ ID NO: 525575 - DNA, 75 bp, synthetic construct
  source 1..75: mol_type = other DNA
attcatttttgatgtctaaaataatatttaacaaactgaatgaaatagatgatctaaaaattgaaaaggataaaa

SEQ ID NO: 525576 - DNA, 75 bp, synthetic construct
  source 1..75: mol_type = other DNA
ggacagacccagaaccacccaccttttcaggctgtggtggcttgtgatgggaattcggaagtgaagaccgcattg

SEQ ID NO: 525577 - DNA, 75 bp, synthetic construct
  source 1..75: mol_type = other DNA
gctgaaaacgtatcccatgtgggtcggcgttgaccttgctcataagattgatatctgtgcggcggcaaaactctg

SEQ ID NO: 525578 - DNA, 75 bp, synthetic construct
  source 1..75: mol_type = other DNA
tgaacagagaaattatgcgtcagctttctgatgaatcggtgatgcgtaaaatctgtactgttaaaaccattcaca

SEQ ID NO: 525579 - DNA, 75 bp, synthetic construct
  source 1..75: mol_type = other DNA
tggtggggtgggcctgaacacggggcgggcggcgcggaaagaagcgcatttttttgattttatcgtcatcatcat

SEQ ID NO: 525580 - DNA, 75 bp, synthetic construct
  source 1..75: mol_type = other DNA
gacattgcgtaaggtaaacataacgttgtcgttgttgcgtgggctggtgggtaaagtgcctgaagacacgcttag

SEQ ID NO: 525581 - DNA, 75 bp, synthetic construct
  source 1..75: mol_type = other DNA
gaaaccatcttcacctgctcccaccgatggacgagtgagggatgaaaacggtcgctttgttggcagaggaaaaac

SEQ ID NO: 525582 - DNA, 75 bp, synthetic construct
  source 1..75: mol_type = other DNA
gttaatagttcaaaacgattgtctgagcttgttgatatttggtacgagatgcacggtaaaacattgactacgggt

SEQ ID NO: 525583 - DNA, 75 bp, synthetic construct
  source 1..75: mol_type = other DNA
gtttcaacctatcttggtaatggtctggcaattccccatggcactgatggttcagattgcgagattgttaaatct

SEQ ID NO: 525584 - DNA, 75 bp, synthetic construct
  source 1..75: mol_type = other DNA
tagttcccgaaggtcgcgcgatgcgtctacaggaggcatctggcggggagcttcagtatgatcccaaagtttatg

SEQ ID NO: 525585 - DNA, 75 bp, synthetic construct
  source 1..75: mol_type = other DNA
cagaagcgctgcatccaaaaattcaggtaaaaacacaccgtcagcgtatcgcgatgcgactgcgggcgttactgg

SEQ ID NO: 525586 - DNA, 75 bp, synthetic construct
  source 1..75: mol_type = other DNA
gtttgatgcgtggctgatggaaaacgcactgccgtcggggtttgaggcggggtttgatgggatggagattggggt

SEQ ID NO: 525587 - DNA, 75 bp, synthetic construct
  source 1..75: mol_type = other DNA
gacgccggagaacttcaaaagcgagctgccaacgtttgtggcccatttcattcttgaatgggcagaaaccgaagc

SEQ ID NO: 525588 - DNA, 75 bp, synthetic construct
  source 1..75: mol_type = other DNA
taaaagaattttgactgatgttgaaacaggtctggataaacttggtaagtatgtaaatggcccggattttaataa

SEQ ID NO: 525589 - DNA, 75 bp, synthetic construct
  source 1..75: mol_type = other DNA
cttggtaagtacgttaatggcccggattttaataacgacctgaataactttgccggaaatgttgcaaaggtcact

SEQ ID NO: 525590 - DNA, 75 bp, synthetic construct
  source 1..75: mol_type = other DNA
aatcagaatttctaatggcaccacgaatgctgccctgaatttcatgaacggtgagaactttaaaaggattctgac

SEQ ID NO: 525591 - DNA, 75 bp, synthetic construct
  source 1..75: mol_type = other DNA
ctgtgttgttagaaagagttgctgctcttgcaaaggagtatgagggaacaggattaactcaagggatgttaaacg

SEQ ID NO: 525592 - DNA, 75 bp, synthetic construct
  source 1..75: mol_type = other DNA
gtggggaacaaaactctcggttatgggcgttgccggaccgtttggctttggcatgatgtcccgtagtgttgtaga

SEQ ID NO: 525593 - DNA, 75 bp, synthetic construct
  source 1..75: mol_type = other DNA
acaacctgtttaaaacaaccgtatcgtggggaacaaaactctcggttatgggcgttgccggaccgtttggctttg

SEQ ID NO: 525594 - DNA, 75 bp, synthetic construct
  source 1..75: mol_type = other DNA
cggttatagttccatgctataacgtggtttcgcatataaatgagactgtagcttcacttaataaagctatcgatt

SEQ ID NO: 525595 - DNA, 75 bp, synthetic construct
  source 1..75: mol_type = other DNA
gaaagagctttcacaaaaaacgttgactaaaacatcgctagaagaaatagcattacattcatctcagattagcat

SEQ ID NO: 525596 - DNA, 75 bp, synthetic construct
  source 1..75: mol_type = other DNA
aggcagaggaaatattgccaataacggtctgttaacgctaaaaaacgtgactggcgaactgcgcaatagcataag

SEQ ID NO: 525597 - DNA, 75 bp, synthetic construct
  source 1..75: mol_type = other DNA
ttcgcagagtaagaaaacaaccaatcttcaggccagagttatcaaaagactaatcaccgccatagccggagaaga

SEQ ID NO: 525598 - DNA, 75 bp, synthetic construct
  source 1..75: mol_type = other DNA
gtaagcggcacgaacaaccagcgttgtgtgaatcatatttctgaaccggataccgaaattccgccgggattcagg

SEQ ID NO: 525599 - DNA, 75 bp, synthetic construct
  source 1..75: mol_type = other DNA
aatatttttttcgatgaaagtattcaacattgtgaggatcttcaattcatcattaaaatgattacttattcaaaa

SEQ ID NO: 525600 - DNA, 75 bp, synthetic construct
  source 1..75: mol_type = other DNA
cagcagcggccattcttctgatggccctgtgggggcctttgtccggcaccagttacggcattgccgggctgctga

SEQ ID NO: 525601 - DNA, 75 bp, synthetic construct
  source 1..75: mol_type = other DNA
aactaataactgaatcaatgattatggaaaaagataaatgtcattttgatcataaaagagacacttttgttgtaa

SEQ ID NO: 525602 - DNA, 75 bp, synthetic construct
  source 1..75: mol_type = other DNA
accttataagaacagctataggtttagctcttagtggtaaaaagtcaaatactatgaaagtttcaataaaaggat

SEQ ID NO: 525603 - DNA, 75 bp, synthetic construct
  source 1..75: mol_type = other DNA
tgcctaaaccgtggaatgatcccatggcgaataaccctctgacgacgctcaatttgctggaacacgatgatagcc

SEQ ID NO: 525604 - DNA, 75 bp, synthetic construct
  source 1..75: mol_type = other DNA
tcatttgcattagttcaacattttcattatgaattacttactttaaataaaataaatatagccttgattgcaagc

SEQ ID NO: 525605 - DNA, 75 bp, synthetic construct
  source 1..75: mol_type = other DNA
cgtatagcaaatggtcagcaaataccgctgccaacaggattttctgccagtcagtgctcatggagtgtgagcaat

SEQ ID NO: 525606 - DNA, 75 bp, synthetic construct
  source 1..75: mol_type = other DNA
acaactggaagaagagattgtcaaattcgaacatttatcgccgcattaccaactggaggtgaaccgccgggggca

SEQ ID NO: 525607 - DNA, 75 bp, synthetic construct
  source 1..75: mol_type = other DNA
actgacgtcggatgaaatccctgatggcactcgtgaccgccggggatggtggggagacagctttcgccagcgtcc

SEQ ID NO: 525608 - DNA, 75 bp, synthetic construct
  source 1..75: mol_type = other DNA
gaacggtgcagacctgctgacagatgacagcctgatgacagcggttctgatttcactgttcactgaccgccgggc

SEQ ID NO: 525609 - DNA, 75 bp, synthetic construct
  source 1..75: mol_type = other DNA
cgcgcgactggcgctttcggtgcatataaccctgcccgatggttcggtgagacccatgattttttacgctgatct

SEQ ID NO: 525610 - DNA, 75 bp, synthetic construct
  source 1..75: mol_type = other DNA
tacaggcatgtttttcccgtaccgtccggataacccggaaggcgctacgcatcaactccagctgttcggcggtat

SEQ ID NO: 525611 - DNA, 75 bp, synthetic construct
  source 1..75: mol_type = other DNA
ttaaccctaaaactggtaagccgccagtggatagcaatgggaaccccattgggccttttgataccagtgaaacac

SEQ ID NO: 525612 - DNA, 75 bp, synthetic construct
  source 1..75: mol_type = other DNA
tcggatcggatacttcggaagctgaaggagctggcgcaggagcgggaattaccgtcagacgggcttgggcgaggg

SEQ ID NO: 525613 - DNA, 75 bp, synthetic construct
  source 1..75: mol_type = other DNA
gtgaaagactatacagaaaacataaagatgcaaaccaaggcgttaggagcatcacgcggcgagatcatgcggtta

SEQ ID NO: 525614 - DNA, 75 bp, synthetic construct
  source 1..75: mol_type = other DNA
ttgcaacagactatagaaaacacagcaatgcgcctgatgcagcgcgagtcgcaaagacctggaggcatgttacaa

SEQ ID NO: 525615 - DNA, 75 bp, synthetic construct
  source 1..75: mol_type = other DNA
tggaacaagtggtgcgcattcatgcttcttcgggaaccacaggtaaaccgacagttgtcggctatacgcaaaacg

SEQ ID NO: 525616 - DNA, 75 bp, synthetic construct
  source 1..75: mol_type = other DNA
caggatggcgtggcgtcatccgtggcgtgttatgcagaacgcgtgggacacgcgcgactggcgctttcggtgcat

SEQ ID NO: 525617 - DNA, 75 bp, synthetic construct
  source 1..75: mol_type = other DNA
acggcgatgctgtttccgccctgaccaccgagcgtgacggcctcagggcacgcgtcagcgagctggaggcgacgg

SEQ ID NO: 525618 - DNA, 75 bp, synthetic construct
  source 1..75: mol_type = other DNA
cgtgatgcactgagtcagaagctggatgcgctgcaggccggttcggaaaacacggacaaaaaggccaaggggtaa

SEQ ID NO: 525619 - DNA, 75 bp, synthetic construct
  source 1..75: mol_type = other DNA
gttgaccacgtacactttaacttaataaaggaaaataaaaacgtagggttggccactgcgcaaaataatggaatt

SEQ ID NO: 525620 - DNA, 75 bp, synthetic construct
  source 1..75: mol_type = other DNA
cccccacggaagcaggggagagaataattgcctgtcttgagccacgtatagatgagcttgagcgcgagctggaat

SEQ ID NO: 525621 - DNA, 75 bp, synthetic construct
  source 1..75: mol_type = other DNA
tgtcgatattgttgacggtcgttttgatgccgggatacgcctgggtgaaattgtggataatgatatggttgcagt

SEQ ID NO: 525622 - DNA, 75 bp, synthetic construct
  source 1..75: mol_type = other DNA
tgtcgatattgttgatggtcgttttgatgccgggatacgcctgggtgaaattgtcgataaggatatggttgcagt

SEQ ID NO: 525623 - DNA, 75 bp, synthetic construct
  source 1..75: mol_type = other DNA
aaaaatcacataaattctgggcggtggagcagcagggaaacgagctgcatattaactggggtaaagtcggtacca

SEQ ID NO: 525624 - DNA, 75 bp, synthetic construct
  source 1..75: mol_type = other DNA
gagagcacacttaaggatggtgatgacccagagtttcatgcctttttagttgatctgtttgatggaccagagaaa

SEQ ID NO: 525625 - DNA, 75 bp, synthetic construct
  source 1..75: mol_type = other DNA
tgaactgctagctacatttaagaatggagttccaaaatttcctcatcctttgcattatgaagatgaagttcgttg

SEQ ID NO: 525626 - DNA, 75 bp, synthetic construct
  source 1..75: mol_type = other DNA
attaccggtgtgccgccgttcaacggcttcttcagtaaattcccgctgtttgctgccggttttgcgttgtcagtg

SEQ ID NO: 525627 - DNA, 75 bp, synthetic construct
  source 1..75: mol_type = other DNA
gaagtagatggcgatgatgaggccatcttcaggccgatacaaaaatacatcaatggcacatggtataacgttgcg

SEQ ID NO: 525628 - DNA, 75 bp, synthetic construct
  source 1..75: mol_type = other DNA
ctcaatcctcgcctggattcggaatactgactgggcgaagattggatttaaaaatgattcggatgcagacaccga

SEQ ID NO: 525629 - DNA, 75 bp, synthetic construct
  source 1..75: mol_type = other DNA
atacaaatctcccatctttactttacatgttgacaatgaaaaaaataacgctactagatcctaagtcatgggatg

SEQ ID NO: 525630 - DNA, 75 bp, synthetic construct
  source 1..75: mol_type = other DNA
cgccggtgaaattgaggtcatctgcatcgatccggttgtcacatccacccatgagtatctggggcgcgagcatgt

SEQ ID NO: 525631 - DNA, 75 bp, synthetic construct
  source 1..75: mol_type = other DNA
gattttactttcgagtttaacaagctctgggagatgtcagacgtggaccgtgcaacgatggcgaacaatgtggtt

SEQ ID NO: 525632 - DNA, 75 bp, synthetic construct
  source 1..75: mol_type = other DNA
gcggaaggcgtcgacaaaacccaaccgggacgcgaactcgccgagcaaaatgcattagcgcaaatccctgatctt

SEQ ID NO: 525633 - DNA, 75 bp, synthetic construct
  source 1..75: mol_type = other DNA
aggtgagttcttcatgtccggcggtgcccctggcaccgtatgatgtttcctggaatgaaaattatgttgtacata

SEQ ID NO: 525634 - DNA, 75 bp, synthetic construct
  source 1..75: mol_type = other DNA
gatgtttgtttattacgatgggaatttacatggttgtccgtggattgtgtcgtcgtttgttaagagtagagatcc

SEQ ID NO: 525635 - DNA, 75 bp, synthetic construct
  source 1..75: mol_type = other DNA
gtcttttattgctgttaatgttcaatacatgcggccaggcggcgacgaaagttggtgagttatatgtgccagctg

SEQ ID NO: 525636 - DNA, 75 bp, synthetic construct
  source 1..75: mol_type = other DNA
gagtgtgcctgacattttttttctgtaccggaaattgacgggaagccagcgcgaacgcaaaaatattcaggcgtt

SEQ ID NO: 525637 - DNA, 75 bp, synthetic construct
  source 1..75: mol_type = other DNA
gaaagacggattgaagaatggttcactgtcgtttaacaataaaggcgataaaattcatgtggttgccggctttgt

SEQ ID NO: 525638 - DNA, 75 bp, synthetic construct
  source 1..75: mol_type = other DNA
acttgagcctgtgggtgagtccgtcctcgggagaagtttttctgcgaaataactatgctccgactgacgaacgct

SEQ ID NO: 525639 - DNA, 75 bp, synthetic construct
  source 1..75: mol_type = other DNA
accgccattgagagcaaccgtcagcaggtaatggaaagcctggatcaggcaggttggcgtctggatgccctgcgt

SEQ ID NO: 525640 - DNA, 75 bp, synthetic construct
  source 1..75: mol_type = other DNA
gtcacaccggcagcaaactggttaacgccgtgcagcaggatgttcacgctatccttcaactgggtgaagcgcaga

SEQ ID NO: 525641 - DNA, 75 bp, synthetic construct
  source 1..75: mol_type = other DNA
gcccaatgcttaagcattcaagttcgcggaaattaagccaggcgctggtagaagcgctttgccaacactttcctc

SEQ ID NO: 525642 - DNA, 75 bp, synthetic construct
  source 1..75: mol_type = other DNA
tggtgcttactgccgttttgttgcacagcaggtgaccttctccacttcgggctgtgacgatgccaaagtgacggt

SEQ ID NO: 525643 - DNA, 75 bp, synthetic construct
  source 1..75: mol_type = other DNA
attgatttattgcaaatgaagtatttcagaaaagaaaaatataacaatataagatggggggttagtatcatttcg

SEQ ID NO: 525644 - DNA, 75 bp, synthetic construct
  source 1..75: mol_type = other DNA
catgctgccagccatcacgacgcagaacagggtattaactggttcacactggaagccgcactggaagccatccgg

SEQ ID NO: 525645 - DNA, 75 bp, synthetic construct
  source 1..75: mol_type = other DNA
gctaaagggaaggggaatgacgagaaaaactggtatctgaccagtaaatgggacggcgtaacgccagcggataca

SEQ ID NO: 525646 - DNA, 75 bp, synthetic construct
  source 1..75: mol_type = other DNA
accaacaccgacgcctgacccggactctaaacctgaagctgtgccgggtggttatgataatgacctgcgtccgga

SEQ ID NO: 525647 - DNA, 75 bp, synthetic construct
  source 1..75: mol_type = other DNA
aatggattacgcggtgattgtgaaagggctaaaccgtgaaggggtgcatctgcatgatgaggatccggcccgcgt

SEQ ID NO: 525648 - DNA, 75 bp, synthetic construct
  source 1..75: mol_type = other DNA
ttcttattgaaaaatacccaatattaattttaaatctattaatacacaacaaatgccatctctggattctgctgt

SEQ ID NO: 525649 - DNA, 75 bp, synthetic construct
  source 1..75: mol_type = other DNA
gtacgacggatatcgtgggtggtgaaattgctttcggttccgactctgccattaatatggcaagtcagcacatta

SEQ ID NO: 525650 - DNA, 75 bp, synthetic construct
  source 1..75: mol_type = other DNA
caagcagtatgtggatgcgtcatgtcggggggcacgaacgtttcaggaccggtgacggccagctaaatactcagg

SEQ ID NO: 525651 - DNA, 75 bp, synthetic construct
  source 1..75: mol_type = other DNA
aggccatacgccaaagaaggcatagggatcacgtcttttgagtgctcctattacacccttccgggcttcatcaaa

SEQ ID NO: 525652 - DNA, 75 bp, synthetic construct
  source 1..75: mol_type = other DNA
ctggcggagaagatacagcaggaagggagcgaagacggtcacggtgtggtgttcccggctgaactggtggggctg

SEQ ID NO: 525653 - DNA, 75 bp, synthetic construct
  source 1..75: mol_type = other DNA
tctcctttgatgaatatgaccccaagtgtcttcctgcaattcagtataaagaactcacccggaaaattattctac

SEQ ID NO: 525654 - DNA, 75 bp, synthetic construct
  source 1..75: mol_type = other DNA
tgcatgatgaggatccggcccgcgtctggcgaacgcagcgtgaaggaccggaaggctggcgtgaagggctggacc

SEQ ID NO: 525655 - DNA, 75 bp, synthetic construct
  source 1..75: mol_type = other DNA
gatgcctctgccggaaaagatcaggctgccaactggattatcgcgacctatcaacaattgtcaggcaaacgccca

SEQ ID NO: 525656 - DNA, 75 bp, synthetic construct
  source 1..75: mol_type = other DNA
gaacggtgttccttctgcatatcactggtataccgaacagtatggcgtgaagtggcctgtggggtatgaggtgaa

SEQ ID NO: 525657 - DNA, 75 bp, synthetic construct
  source 1..75: mol_type = other DNA
gctggtgactatgcctggtgctgtaatttccatctaaagggaattatacgtccggcaactcttattgagatatca

SEQ ID NO: 525658 - DNA, 75 bp, synthetic construct
  source 1..75: mol_type = other DNA
caaatcctctcaactggcgaaaaagtgctaactgaacagcagcgctcccaggtcgaagagaacttcaaagagatc

SEQ ID NO: 525659 - DNA, 75 bp, synthetic construct
  source 1..75: mol_type = other DNA
acctgcagccagttttatcgctaatcgatttacatcgcaatgcgatcccgctgcgctcgcggcggcggtaaaagt

SEQ ID NO: 525660 - DNA, 75 bp, synthetic construct
  source 1..75: mol_type = other DNA
tgtttggtttgaatgtaaagacacacatattgagcagaatgctatctccgaattaggtctgattacccggagggt

SEQ ID NO: 525661 - DNA, 75 bp, synthetic construct
  source 1..75: mol_type = other DNA
taagctctggtaagaatgcaccgaaaacggggggaggggcgaaagggaacaatgcttcgcctgccgggagtggta

SEQ ID NO: 525662 - DNA, 75 bp, synthetic construct
  source 1..75: mol_type = other DNA
caggttaatctccaccgtaacagcatctttaccactcgatgtttatcagaccaaaaatgatcagcgcacgaaagt

SEQ ID NO: 525663 - DNA, 75 bp, synthetic construct
  source 1..75: mol_type = other DNA
agggctcgcaaatggcgggtacgtcagcgcacggtgtggttggtgattctgttgtgactgatgagcgtaatatgc

SEQ ID NO: 525664 - DNA, 75 bp, synthetic construct
  source 1..75: mol_type = other DNA
gagtcgccgaccattgatgagcgggaacaggaagtgctggtgcgtactgcaatcagccagttcgaaggctacatc

SEQ ID NO: 525665 - DNA, 75 bp, synthetic construct
  source 1..75: mol_type = other DNA
gaacaggaagtgctggtgcgtactgcaatcagccagttcgaaggctacatcaagctgaacaaaaaatcccaccag

SEQ ID NO: 525666 - DNA, 75 bp, synthetic construct
  source 1..75: mol_type = other DNA
gtcatccccttatttgtcgggcgggaaaaatctatccgttgtctggaagcggcgatggaccatgataaaaaaatt

SEQ ID NO: 525667 - DNA, 75 bp, synthetic construct
  source 1..75: mol_type = other DNA
ggtctgacggagagagcttttcccgatgacttaccttatgagatagagcgtgaacctttaagtaacagtttcaca

SEQ ID NO: 525668 - DNA, 75 bp, synthetic construct
  source 1..75: mol_type = other DNA
gctattgcgtccgtgaaagatggcaatctgctatttctccggcagggccagggtaaaactgccagtggcaaagcg

SEQ ID NO: 525669 - DNA, 75 bp, synthetic construct
  source 1..75: mol_type = other DNA
agcgaaagaagggaaaccgctttccgataaaccattgctggcgaataccctgactatcagcgcaaaatcagcgcc

SEQ ID NO: 525670 - DNA, 75 bp, synthetic construct
  source 1..75: mol_type = other DNA
tctcatttgatgaatatgatcctaagtgtcttcctgcaattcagtataaagagcttacccagaaaattattcaga

SEQ ID NO: 525671 - DNA, 75 bp, synthetic construct
  source 1..75: mol_type = other DNA
ttgtttcttctgaccttgataaggttctggttaataaatacatagataaagtatcaatatcattaggtgggtatt

SEQ ID NO: 525672 - DNA, 75 bp, synthetic construct
  source 1..75: mol_type = other DNA
cggcatgattacttatgctatatccatttttgtatcgttatactttatttttaattatggttcaatgtatctgaa

SEQ ID NO: 525673 - DNA, 75 bp, synthetic construct
  source 1..75: mol_type = other DNA
cagctttgtctacgctgaactgatggagctgaacgcctactttgtgcatgaaatacagaaagcgcagtccactga

SEQ ID NO: 525674 - DNA, 75 bp, synthetic construct
  source 1..75: mol_type = other DNA
catcgtgcgcgggtggagaaggcacaggcccgccgaaactcactgattgagcaaattcttgatcaggccgagcgc

SEQ ID NO: 525675 - DNA, 75 bp, synthetic construct
  source 1..75: mol_type = other DNA
aacatgatttgcaatggactgtttgaaatggcttcgttgttacgcgatggcaaaagtttcagtcacagcgaagtg

SEQ ID NO: 525676 - DNA, 75 bp, synthetic construct
  source 1..75: mol_type = other DNA
tgcaatccattctattcattgattaataagagagaagtcttgcagtcaattgataaagtgcattattcaatgaat

SEQ ID NO: 525677 - DNA, 75 bp, synthetic construct
  source 1..75: mol_type = other DNA
tatggactacagatacaccggaaagcaatggcagtacgcaattccattgtgctcaaaagataccagtgcctgtga

SEQ ID NO: 525678 - DNA, 75 bp, synthetic construct
  source 1..75: mol_type = other DNA
ataaagttagaaaatcaagaagaattcgttattgccagatttgctgaattagtaaatgaaatatttccaaatagt

SEQ ID NO: 525679 - DNA, 75 bp, synthetic construct
  source 1..75: mol_type = other DNA
atggtacatgtaactttcaatcaatgccgccaggtagttatgtaaaacaatgtagtgaaatagttaatggtcagc

SEQ ID NO: 525680 - DNA, 75 bp, synthetic construct
  source 1..75: mol_type = other DNA
ctacgtatattccaaaggcaaagatctttatgctcgtgatggacataaaggtgttgatgctgaccgcgtaaatta

SEQ ID NO: 525681 - DNA, 75 bp, synthetic construct
  source 1..75: mol_type = other DNA
atttatgatattatgtgtttaattatttgtttattcaaaaggccagatgttgttttaatattgggggtgtctggt

SEQ ID NO: 525682 - DNA, 75 bp, synthetic construct
  source 1..75: mol_type = other DNA
ggaaccagacggcgaacctgaatttcttaaaaaggcgcttggggaagagtatcacagcgagtacatggatatagc

SEQ ID NO: 525683 - DNA, 75 bp, synthetic construct
  source 1..75: mol_type = other DNA
cactggagggataatacaaggcctgataagacgcggacagcgtcgcatcaggcatcttgtgcaaatgtcggatgc

SEQ ID NO: 525684 - DNA, 75 bp, synthetic construct
  source 1..75: mol_type = other DNA
taaatgcttttgccatttcactgactgtcaaaagtgcgctggcattttttaatattaattatttattttgcccca

SEQ ID NO: 525685 - DNA, 75 bp, synthetic construct
  source 1..75: mol_type = other DNA
tggtttcactgaaagcttcagtttcgatatcgcatcagcgatgtcgcgtagggacggaatacgaaaacgtaaacc

SEQ ID NO: 525686 - DNA, 75 bp, synthetic construct
  source 1..75: mol_type = other DNA
catgcaagtatgttcaggtaaacaatcctgaacctgttttcacggttccccaggactacactccctggcctttct

SEQ ID NO: 525687 - DNA, 75 bp, synthetic construct
  source 1..75: mol_type = other DNA
gtcgtcgtattactgaatatcagggcgatccgaacgtctggctgaacgccttcaaaatccctccccgtcgcctgg

SEQ ID NO: 525688 - DNA, 75 bp, synthetic construct
  source 1..75: mol_type = other DNA
cactaaccagtgtatcgacagtaagaacattgacatttatacccctgagcagatcatcgcgatgggatggcagaa

SEQ ID NO: 525689 - DNA, 75 bp, synthetic construct
  source 1..75: mol_type = other DNA
acagctgaactttcgtccattgcaggtaccccatcgaggctgggcccttcgatacagtggtgctttttaaaatta

SEQ ID NO: 525690 - DNA, 75 bp, synthetic construct
  source 1..75: mol_type = other DNA
tcgccgtgctgttcatgatttttttccgcgaatccgacaacgaaattacggctatcaaggtcgatgatcgcgata

SEQ ID NO: 525691 - DNA, 75 bp, synthetic construct
  source 1..75: mol_type = other DNA
gtttccacgccctccttgactggaatttgccagccagagagggaatagacaagttggtacgacaacatctgagga

SEQ ID NO: 525692 - DNA, 75 bp, synthetic construct
  source 1..75: mol_type = other DNA
cattgacgaggattgcctgataacaggagacccctggctggcaacagaaagggatttagaaggcaaaacattttt

SEQ ID NO: 525693 - DNA, 75 bp, synthetic construct
  source 1..75: mol_type = other DNA
aaatggttgaggtttggtattttttcccagttgcaatcgtcagttctttatttccaaagataattaagcttagag

SEQ ID NO: 525694 - DNA, 75 bp, synthetic construct
  source 1..75: mol_type = other DNA
tgtccaaaaaaacaagagttgccttttatcaaaaaacgaaggcattatggattccaggggctttaatccggttag

SEQ ID NO: 525695 - DNA, 75 bp, synthetic construct
  source 1..75: mol_type = other DNA
ctgctctcaagagcaattaggcgatcgtgattatatcgctttatatgtagacagggcgatttttcattatgcgat

SEQ ID NO: 525696 - DNA, 75 bp, synthetic construct
  source 1..75: mol_type = other DNA
attctctgtacatgagtgagagtttactgaaaagaaaacttcaggaggaaaaagtttctttctcccaaatcctgc

SEQ ID NO: 525697 - DNA, 75 bp, synthetic construct
  source 1..75: mol_type = other DNA
cttttatgcaggattaccatatcgcgctttattaacgatgttttcagccatgctttcattttgttttattttttt

SEQ ID NO: 525698 - DNA, 75 bp, synthetic construct
  source 1..75: mol_type = other DNA
gaatactggggagaagaacacgtatggtgggacggcagggctacttttcatggtgaggttgtcagacctgcctgt

SEQ ID NO: 525699 - DNA, 75 bp, synthetic construct
  source 1..75: mol_type = other DNA
atgctgcgccgtatgggccttgagcgtttcatccgcacgaaagaggaagtgaataaggaagcggtcctggcggag

SEQ ID NO: 525700 - DNA, 75 bp, synthetic construct
  source 1..75: mol_type = other DNA
aggaagcggtcctggcggagccggatgcggtgaaagggattgccggtattaaggtgaataaaggcgctgaaagtt

SEQ ID NO: 525701 - DNA, 75 bp, synthetic construct
  source 1..75: mol_type = other DNA
actgatgtcagatggattaggaagaaaaaaatatatagatcgttgtttgatataatgaagtttcgggttggcata

SEQ ID NO: 525702 - DNA, 75 bp, synthetic construct
  source 1..75: mol_type = other DNA
ggatgccacccaggctgttcgcgatgcagtggagtccggaacggtcactgttacccaggcgcgtcagctggcatc

SEQ ID NO: 525703 - DNA, 75 bp, synthetic construct
  source 1..75: mol_type = other DNA
ttcgtgcaaataataattttcttgccacacataaaggaagtaaagtaactgatttcgtaataaacaggcaagaaa

SEQ ID NO: 525704 - DNA, 75 bp, synthetic construct
  source 1..75: mol_type = other DNA
ctgacgaagagatggcgcagtacgactacaagtgggaatttaccggcaagagcatcaatggtgaagtgggtgcac

SEQ ID NO: 525705 - DNA, 75 bp, synthetic construct
  source 1..75: mol_type = other DNA
atgaaaaaacaacctattgtattaactctaggctttttttcctttatggttcaggctgctacaacagttacttca

SEQ ID NO: 525706 - DNA, 75 bp, synthetic construct
  source 1..75: mol_type = other DNA
taacgattataacgctaggtatctatttaccatgggcattaatgaaatgtaagcgttatctctatgctaatatgg

SEQ ID NO: 525707 - DNA, 75 bp, synthetic construct
  source 1..75: mol_type = other DNA
gtgaaaagaccggtaacctcgcggttaaccaggcgcaatggcgcgcccttgaagttgagcgaaacgccagcgcac

SEQ ID NO: 525708 - DNA, 75 bp, synthetic construct
  source 1..75: mol_type = other DNA
gtgattgaagtggatttaaacggaggagataaggcattttactttgttgcgttcagggctttcagggaaaagaaa

SEQ ID NO: 525709 - DNA, 75 bp, synthetic construct
  source 1..75: mol_type = other DNA
ggcgagttggtggtcgcaggcctaagttcacggatgagcaatggcgggaaatgggggagcggatggcaaccggtg

SEQ ID NO: 525710 - DNA, 75 bp, synthetic construct
  source 1..75: mol_type = other DNA
atgaacaggtatgcagacgtggtgctggcactggtgctggctttcctgagcgtacaggcgcaggccgggatcgtg

SEQ ID NO: 525711 - DNA, 75 bp, synthetic construct
  source 1..75: mol_type = other DNA
tgagcttttggtcaagattgggcaggggtatcgccctaacaagcacgacaaaaatgctgttttgttacttgatga

SEQ ID NO: 525712 - DNA, 75 bp, synthetic construct
  source 1..75: mol_type = other DNA
tattggcctttgcgctaatatcacctttggccgccccggtagcgcgacgttttggtatggaacgtagcctgtttg

SEQ ID NO: 525713 - DNA, 75 bp, synthetic construct
  source 1..75: mol_type = other DNA
ccgtgaaaagaactgtgatttccctgttcctgttgatattgctgtcgggttgctcaactacgcgaaccgtttacg

SEQ ID NO: 525714 - DNA, 75 bp, synthetic construct
  source 1..75: mol_type = other DNA
aacaggaagcaggtggcaattatttatgatgtagcggtatgcactctttataagaagtttccagctaataaaact

SEQ ID NO: 525715 - DNA, 75 bp, synthetic construct
  source 1..75: mol_type = other DNA
atgttgatgatgcggggataatatggcgtagtggcacaacaccatggccggtaaaacttattgcaccaggcgaaa

SEQ ID NO: 525716 - DNA, 75 bp, synthetic construct
  source 1..75: mol_type = other DNA
aaaataacctgggtcgtatgtatgagaatggttcaggtgtcgcgcaggattacacccaagctttcttttggtaca

SEQ ID NO: 525717 - DNA, 75 bp, synthetic construct
  source 1..75: mol_type = other DNA
tactggtgattctggatggctatggctatcgtgaagaacagcaggataacgccatttttagtgctaaaaccccgg

SEQ ID NO: 525718 - DNA, 75 bp, synthetic construct
  source 1..75: mol_type = other DNA
gagggctgtgcatcagactttgcagaaaaatttctaaaaagattgacagcacaaacgcttgagaatcctttctat

SEQ ID NO: 525719 - DNA, 75 bp, synthetic construct
  source 1..75: mol_type = other DNA
acctcaggaatagaattaatgagggttacataactaagggaagtttatactattcaataggtaatggatttacag

SEQ ID NO: 525720 - DNA, 75 bp, synthetic construct
  source 1..75: mol_type = other DNA
cttaattcgttatatgaaaataatcatgatgatgtaataagtgctaattttgatgaattcttagctattttcggt

SEQ ID NO: 525721 - DNA, 75 bp, synthetic construct
  source 1..75: mol_type = other DNA
ctattgattcgatagctttagttagtccagttgatggggcaataagatactatactgaaagtggttttgagtaca

SEQ ID NO: 525722 - DNA, 75 bp, synthetic construct
  source 1..75: mol_type = other DNA
ctaacaacaccttccttcaggaaattacataatgcatctatccaagcaaagtaccgcacattaaactggagcgac

SEQ ID NO: 525723 - DNA, 75 bp, synthetic construct
  source 1..75: mol_type = other DNA
aattatatcaacatttttttggtgataaaactgttgattttgattcttccattgaagaacagagggttaaaatta

SEQ ID NO: 525724 - DNA, 75 bp, synthetic construct
  source 1..75: mol_type = other DNA
atctaaaaaaaatatggagcaaccttacagatgatgaaatcaagatatttaaaataatcagcaaaaaggttttat

SEQ ID NO: 525725 - DNA, 75 bp, synthetic construct
  source 1..75: mol_type = other DNA
taaagatggtgttttagcaattattgatgaggattatttcttcaaggaaaacgattcaaatttaatcgatactct

SEQ ID NO: 525726 - DNA, 75 bp, synthetic construct
  source 1..75: mol_type = other DNA
tcccactggagaattagagggacgtagttttcatattgataagaatatattaggtgagtacattaataacaatta

SEQ ID NO: 525727 - DNA, 75 bp, synthetic construct
  source 1..75: mol_type = other DNA
accgataacttattttctccaattgacacaacggtcattcgtgactccatgcttatgtctaaaaggtatcaatgg

SEQ ID NO: 525728 - DNA, 75 bp, synthetic construct
  source 1..75: mol_type = other DNA
aaggcgttaattacgatacggcgatgtggagttcggcaattaacacccgcaacaacgtgaccactgatgcgggcg

SEQ ID NO: 525729 - DNA, 75 bp, synthetic construct
  source 1..75: mol_type = other DNA
atatccagagtacaaatcaccaatgtactctgactcgttgcaacgattgactccgcatacaacccgacatacttg

SEQ ID NO: 525730 - DNA, 75 bp, synthetic construct
  source 1..75: mol_type = other DNA
aaaggtgatgttgttactgatatttatataaggccttttttattcctactgagaaggctagaggcggtagatggg

SEQ ID NO: 525731 - DNA, 75 bp, synthetic construct
  source 1..75: mol_type = other DNA
ggcataaatgatacaacacttatggttctggccctcttatccagtgctgataatttttgcttatctccaactgaa

SEQ ID NO: 525732 - DNA, 75 bp, synthetic construct
  source 1..75: mol_type = other DNA
cggcgagtcaaaaattgttttatcggcggatggactgcttcagatacgcgcgctttatattgacagtcaggcgca

SEQ ID NO: 525733 - DNA, 75 bp, synthetic construct
  source 1..75: mol_type = other DNA
aatacagagcgagttgttttgacagcgaaacaagaattagtgctccagtgcggcgagtcaaaaattgttttatcg

SEQ ID NO: 525734 - DNA, 75 bp, synthetic construct
  source 1..75: mol_type = other DNA
gtcttacaagctgataagaaagaaattacgataattaataaaaacgaaaacacgacacttactcaaaccattgcc

SEQ ID NO: 525735 - DNA, 75 bp, synthetic construct
  source 1..75: mol_type = other DNA
tgcaaacgctgaattcatagcagaggctaacccggctaccgtgctggaactgctggatgaacgggaaagaaacca

SEQ ID NO: 525736 - DNA, 75 bp, synthetic construct
  source 1..75: mol_type = other DNA
tggaaaaacaatgcgccgaatgggagcgaaaagcattaagcaactttgaagagtgtgctgcgatggctgaacgta

SEQ ID NO: 525737 - DNA, 75 bp, synthetic construct
  source 1..75: mol_type = other DNA
cgcgttgctgtgaaagatattgatgaattcgttacctgctgtttcaccgaacagggttgtaaagactacctggca

SEQ ID NO: 525738 - DNA, 75 bp, synthetic construct
  source 1..75: mol_type = other DNA
aggtcaccgcctacgatcttgaggaagttgttatctataccgatagcgatggcgaaccagtgacctcactggtgc

SEQ ID NO: 525739 - DNA, 75 bp, synthetic construct
  source 1..75: mol_type = other DNA
cggccccggcggctcttttaaatcctttctggcggtatcgctggcgtgccatattgccagcggtacgtcatgggg

SEQ ID NO: 525740 - DNA, 75 bp, synthetic construct
  source 1..75: mol_type = other DNA
tacagtaacggctcaagcatcagcaggtgaccctctgtataaccaatttaatgagggggataatatcggaattcg

SEQ ID NO: 525741 - DNA, 75 bp, synthetic construct
  source 1..75: mol_type = other DNA
tcaggcacagacttcaaccgaatgtggaaacaatggaaatctatccgcgccgctggcattcgcattaaaggagag

SEQ ID NO: 525742 - DNA, 75 bp, synthetic construct
  source 1..75: mol_type = other DNA
atgaaacggatctcgcttattttgctgtggggcttttgctcgatggcactctcaaacgtctcttttcacggttat

SEQ ID NO: 525743 - DNA, 75 bp, synthetic construct
  source 1..75: mol_type = other DNA
gttgggatgttgatggccgggccgattggcctttttcgccagcgttgccctgccagtagaagaaagcggcctgac

SEQ ID NO: 525744 - DNA, 75 bp, synthetic construct
  source 1..75: mol_type = other DNA
atgctgcgatggacacgctgtattatgctaacatttatctctggggctgcttttgcggctccagagataaatgtt

SEQ ID NO: 525745 - DNA, 75 bp, synthetic construct
  source 1..75: mol_type = other DNA
caatgcgccgaatgggagcgaaaagcattaagcaactttgaagagtgtgctgcgatggctgaacgtatcgaagag

SEQ ID NO: 525746 - DNA, 75 bp, synthetic construct
  source 1..75: mol_type = other DNA
atgtgtatccaccttaacttaatgatttttaccaaaatcattaggggattcatcagcgcctggcgttatgcttcg

SEQ ID NO: 525747 - DNA, 75 bp, synthetic construct
  source 1..75: mol_type = other DNA
aaaggtatctgcacctcagataatggggcctttcatagcacacttgatttttccggctatctgattacggcagac

SEQ ID NO: 525748 - DNA, 75 bp, synthetic construct
  source 1..75: mol_type = other DNA
atgaaaaatatcccgcttcctgataatatcgaccagctgaaagccctgttgcgtcagcagcaggttgctgtggaa

SEQ ID NO: 525749 - DNA, 75 bp, synthetic construct
  source 1..75: mol_type = other DNA
cgaaaaaggggatagttcagctcagcagtgcgactaacagcacttccgagtcactggcggcaacgccaaaagccg

SEQ ID NO: 525750 - DNA, 75 bp, synthetic construct
  source 1..75: mol_type = other DNA
attcctctatttattcgcccgcgtacatatggaaataatgtctcaagcgggcaaataatgagccgagtcaaaatc

SEQ ID NO: 525751 - DNA, 75 bp, synthetic construct
  source 1..75: mol_type = other DNA
aacagaatttattctgtactattacttttcaacacgttatcgatgaaaacaaaacatatatatgccagttaaagg

SEQ ID NO: 525752 - DNA, 75 bp, synthetic construct
  source 1..75: mol_type = other DNA
gacctaaaaatgggaatccacttgttccaccttgggcagatcaagcaaaaaatggaggaaataaaaatctaagcg

SEQ ID NO: 525753 - DNA, 75 bp, synthetic construct
  source 1..75: mol_type = other DNA
aggcagcagtggcactggttcttgccagtatccagccgcaacccaaagcggttgcgtgtcagcctacgattgtag

SEQ ID NO: 525754 - DNA, 75 bp, synthetic construct
  source 1..75: mol_type = other DNA
caggtaccagcccggtagctgccctgagtattggtgatacagggaaagaacgtcagctgcaaaatgttgcagccg

SEQ ID NO: 525755 - DNA, 75 bp, synthetic construct
  source 1..75: mol_type = other DNA
tttaaaagcaaaaatattacgctcacgtttattcaaatggatgatattgagtatacacagaatggaaagaatgct

SEQ ID NO: 525756 - DNA, 75 bp, synthetic construct
  source 1..75: mol_type = other DNA
tatttccatatttagggtatttccaattgatcacggcatcagatacattcgtgctttttgatgatgttaattata

SEQ ID NO: 525757 - DNA, 75 bp, synthetic construct
  source 1..75: mol_type = other DNA
ctgcaatgaatgatgctttagttgaagctttagatggaaagaccacgtttaacccacaagatattacagacgatg

SEQ ID NO: 525758 - DNA, 75 bp, synthetic construct
  source 1..75: mol_type = other DNA
ggttggtttattcagtatggttctggggctgtgtaccgaacgttccaggataaaatgcgtgatgctattagcccc

SEQ ID NO: 525759 - DNA, 75 bp, synthetic construct
  source 1..75: mol_type = other DNA
tatcacccgctttctgactggaaagactctgaagatttcgacttttatgaagaacgccctgcgcgcggttgggat

SEQ ID NO: 525760 - DNA, 75 bp, synthetic construct
  source 1..75: mol_type = other DNA
tcggatattgacctgggggagaccgagcttccggtgctcggcgagatcacctggcaggcttatgacccggcaagg

SEQ ID NO: 525761 - DNA, 75 bp, synthetic construct
  source 1..75: mol_type = other DNA
agccataccagagctattatcactacacaagaacggttgttttatacagggtgacgaatcagagtcggcattttc

SEQ ID NO: 525762 - DNA, 75 bp, synthetic construct
  source 1..75: mol_type = other DNA
gatccgtatagaaagagtgaagaagcttttgtctcagtgttcaaaatgttagagcttgctgcggaagaatggaca

SEQ ID NO: 525763 - DNA, 75 bp, synthetic construct
  source 1..75: mol_type = other DNA
cagaaacggtaaatcaggtgtttttgttataaaccttccttcaacaggaacaaactacgttagggccagtcatgg

SEQ ID NO: 525764 - DNA, 75 bp, synthetic construct
  source 1..75: mol_type = other DNA
gtcggatgcggcgtgagcgccttatccgacctacacacagcactgaactcgtaggcctgataagacacaacagcg

SEQ ID NO: 525765 - DNA, 75 bp, synthetic construct
  source 1..75: mol_type = other DNA
agctaagttcggtaacgatatccgtgcttttgtccccatgatatctatgtcagcagggactatgttggcttgttg

SEQ ID NO: 525766 - DNA, 75 bp, synthetic construct
  source 1..75: mol_type = other DNA
catctgctgccataacgaggagatgaaactttaccggcttagacgggtaagcgatccaggggaacaggatgtatt

SEQ ID NO: 525767 - DNA, 75 bp, synthetic construct
  source 1..75: mol_type = other DNA
aatacttttacagttacgacgcaaaatacccaggatgtggatcagaataacgagggtagatactggagttttggt

SEQ ID NO: 525768 - DNA, 75 bp, synthetic construct
  source 1..75: mol_type = other DNA
gcactccacgataataataatcatcatgacgatccgtctccggtgccggatgatggcggtgatacacccgtcccg

SEQ ID NO: 525769 - DNA, 75 bp, synthetic construct
  source 1..75: mol_type = other DNA
agaacgccgcgaagcgtgaagctcagcgcgagaaaaccatcacgagattactcaatgaaaacgaagatttccgcc

SEQ ID NO: 525770 - DNA, 75 bp, synthetic construct
  source 1..75: mol_type = other DNA
tacagtgaccacccgttcgcacatggtcgaccggcgaaggtgtttaaccgtcgcggtgaaaaatccacggcctcc

SEQ ID NO: 525771 - DNA, 75 bp, synthetic construct
  source 1..75: mol_type = other DNA
aacagtatcagcgttttattaaaaacgaagcattcaacaatagttatggtcagatttatcacccatatggaacct

SEQ ID NO: 525772 - DNA, 75 bp, synthetic construct
  source 1..75: mol_type = other DNA
ggttgatcgtactggataccctgagccgcattcatgacagggacgagaacagcaatggcgacatggcaaggcttg

SEQ ID NO: 525773 - DNA, 75 bp, synthetic construct
  source 1..75: mol_type = other DNA
ctgcagcggtattgggcggtgccagtttatcaggcggacgtggtacggtcattggtacgcttatgggcgtatttc

SEQ ID NO: 525774 - DNA, 75 bp, synthetic construct
  source 1..75: mol_type = other DNA
gttatccgcacggatgatgagcgcacccaccggtaccattacgacagtcagcaccggctggtgcactacacgcgg

SEQ ID NO: 525775 - DNA, 75 bp, synthetic construct
  source 1..75: mol_type = other DNA
accattactaaagcgtcagtgctttatttgcaccatgtcagcaaaggcagcgcccgcgacgggcaggccgatcag

SEQ ID NO: 525776 - DNA, 75 bp, synthetic construct
  source 1..75: mol_type = other DNA
aggtaatcgagcaatgcgaaggcgctcgactaatcgttctggacacgttgagccgtattcatacccttgatgaga

SEQ ID NO: 525777 - DNA, 75 bp, synthetic construct
  source 1..75: mol_type = other DNA
atcagcgccatgacggcggcgtgttgctgccggtggagttgttggacgccaagcaggacagcggaaaggggcgtc

SEQ ID NO: 525778 - DNA, 75 bp, synthetic construct
  source 1..75: mol_type = other DNA
caatgaaaaccatccgcatagtgcgttaggttatctctcaccaagggaatatcgacgtcagcgggtaacgtcaac

SEQ ID NO: 525779 - DNA, 75 bp, synthetic construct
  source 1..75: mol_type = other DNA
atcgacgaaagcgcggcggaattatttgagcagatgccggaatatatgcgaggtgaagatccagtaactcacgac

SEQ ID NO: 525780 - DNA, 75 bp, synthetic construct
  source 1..75: mol_type = other DNA
atgtactacccaaataacacttaccttaacctggttggcaataactataaaccatcctccgaagtaatggaaaaa

SEQ ID NO: 525781 - DNA, 75 bp, synthetic construct
  source 1..75: mol_type = other DNA
aggccgcctgaccggtgagcgccagacggtgcatcacccgcagacggaagcactgctctggcagcatgagaccag

SEQ ID NO: 525782 - DNA, 75 bp, synthetic construct
  source 1..75: mol_type = other DNA
gcgaaaagttcatttttaccactgcgaccaccggggcctgccgctggcgctcatcagcgaagaaggcaatacggt

SEQ ID NO: 525783 - DNA, 75 bp, synthetic construct
  source 1..75: mol_type = other DNA
atggcaggcagtaatgccgcatataaactgaccagcacatacacccccgcaggccagttacagagccagcacctg

SEQ ID NO: 525784 - DNA, 75 bp, synthetic construct
  source 1..75: mol_type = other DNA
ctcctggcgatacggtaacggtgaaattgggcactcatgtcctgacgggcatcgtgctggcagatggcagctgga

SEQ ID NO: 525785 - DNA, 75 bp, synthetic construct
  source 1..75: mol_type = other DNA
atctgggtggaaactgacaacaccggcaacgacgagtatggcaatcatcaagtacgcgcctgtttgcgcggtcgc

SEQ ID NO: 525786 - DNA, 75 bp, synthetic construct
  source 1..75: mol_type = other DNA
ccggtaacatgggaatctcattttcctccagccagtcaccagcgaaaaattcgaacgtaaaccgatttactggat

SEQ ID NO: 525787 - DNA, 75 bp, synthetic construct
  source 1..75: mol_type = other DNA
ccggtaagattgaaatttattccagcaagctggcggaaattgcccgtacctgggaactggaaaaagatgaagtga

SEQ ID NO: 525788 - DNA, 75 bp, synthetic construct
  source 1..75: mol_type = other DNA
ataattcattatcaacggcttttctgagcggtggtgtagccagtaaggaaaaagttgacgcaaggttagatgccg

SEQ ID NO: 525789 - DNA, 75 bp, synthetic construct
  source 1..75: mol_type = other DNA
gcgatgaagctcaacaaagccggattcaacgtgccggaaagttatagtttgttgaaaatgcccccagtgggatgc

SEQ ID NO: 525790 - DNA, 75 bp, synthetic construct
  source 1..75: mol_type = other DNA
tacagcaaagaccgtattcttgagctgtatatgaacgaggtgtatctcggtcagagcggcgacaacgaaatccgc

SEQ ID NO: 525791 - DNA, 75 bp, synthetic construct
  source 1..75: mol_type = other DNA
ctaaatacggattttttaaaacgtaacatagtaaaaaatgttagcttaaagctgcctttaacctactatggaaat

SEQ ID NO: 525792 - DNA, 75 bp, synthetic construct
  source 1..75: mol_type = other DNA
aatgatatgtttctcaatgctaatcggaaaaatgttatcagagaaatgaaagaatatgcttccagtagagttgtt

SEQ ID NO: 525793 - DNA, 75 bp, synthetic construct
  source 1..75: mol_type = other DNA
cattactgtcgacagccaggccccggccttaagcatcgactcgctgactgccgacaacatcatcaacgccgccga

SEQ ID NO: 525794 - DNA, 75 bp, synthetic construct
  source 1..75: mol_type = other DNA
cctgccgtcaggaggtgtggatcaaccctatagatgcgcagaaacgtgggattgccaacggcgatatggtgcggg

SEQ ID NO: 525795 - DNA, 75 bp, synthetic construct
  source 1..75: mol_type = other DNA
tgcccgactttttgggcgagctggatgccggtgtgttcatgaacaaaatcgcggcagcacttaacaccaccgcgc

SEQ ID NO: 525796 - DNA, 75 bp, synthetic construct
  source 1..75: mol_type = other DNA
aaataagtttattactgtgcaggcctgcccttataaggttaatttttctgctcaagatcttgcatatcaattaga

SEQ ID NO: 525797 - DNA, 75 bp, synthetic construct
  source 1..75: mol_type = other DNA
gtcagcaattcagtaggtgtaacggttggcggcggagttggggggcattttgcgtatacttatgtagtggatgtt

SEQ ID NO: 525798 - DNA, 75 bp, synthetic construct
  source 1..75: mol_type = other DNA
agcgtggagtcaatctggtggacgctcagggcatcttaggtcacagcagtcagtcaattacgtatgacctgtacg

SEQ ID NO: 525799 - DNA, 75 bp, synthetic construct
  source 1..75: mol_type = other DNA
ggtgtgtatcgacatcaatgaagacggtgaaggcaaatctgtgaagaacaaacattcagtccgactggtgccgct

SEQ ID NO: 525800 - DNA, 75 bp, synthetic construct
  source 1..75: mol_type = other DNA
tagccgacaggactttgtcgagcgtaataactttatcgtcctggaatataaagagaaagaccctctggatgtgac

SEQ ID NO: 525801 - DNA, 75 bp, synthetic construct
  source 1..75: mol_type = other DNA
acgacggtacagaccgacaccacgcgtatccagacggtataccagccggggagcttcgcgccgctcatccgcatc

SEQ ID NO: 525802 - DNA, 75 bp, synthetic construct
  source 1..75: mol_type = other DNA
aggtgcacttctggatgctgccgagcggtatctggagcaggtagccagtcgccgaattaccaatgggatcagcct

SEQ ID NO: 525803 - DNA, 75 bp, synthetic construct
  source 1..75: mol_type = other DNA
caaaaacaaacttccaaaagccccgccaaaatatcagtttgaagacaatggtgttgttaaatactggtctggtcg

SEQ ID NO: 525804 - DNA, 75 bp, synthetic construct
  source 1..75: mol_type = other DNA
ctgtacttatagtctggctgatggccctgacagcctccggctggctgggaagttttatactggtgaaaatcgcct

SEQ ID NO: 525805 - DNA, 75 bp, synthetic construct
  source 1..75: mol_type = other DNA
gctttttttgcctgtcagtatgctggcttagtcgccgtcccgttggcgattccaatgggcgtcggtcagcgggat

SEQ ID NO: 525806 - DNA, 75 bp, synthetic construct
  source 1..75: mol_type = other DNA
ccctgccagacgccgataacgtctcgcttcatagtctgaggcattggctggcgacccgtatgaaagagcgtggtg

SEQ ID NO: 525807 - DNA, 75 bp, synthetic construct
  source 1..75: mol_type = other DNA
gggcgcgctaatcgatgctgctgagcagtatctggaacaggttgcttaccggcgcgtcacgaatggtattagcct

SEQ ID NO: 525808 - DNA, 75 bp, synthetic construct
  source 1..75: mol_type = other DNA
tcttacagcgaccgtagcattgagcatcgcatctgcccgtggagacattggcacgaatgcagattatgtatggaa

SEQ ID NO: 525809 - DNA, 75 bp, synthetic construct
  source 1..75: mol_type = other DNA
aaaccgcacacataccgggatgggcttacagaaacctggcggtgagatgttcaggaactacccgaaaaaaaaggg

SEQ ID NO: 525810 - DNA, 75 bp, synthetic construct
  source 1..75: mol_type = other DNA
ctttcagcaaagaactattgccaattcgttttcttttgtcaaaattcattctcatttgtgaggataaaaaaaatc

SEQ ID NO: 525811 - DNA, 75 bp, synthetic construct
  source 1..75: mol_type = other DNA
agtatggaaagaaaaatcagtcccggatattattagtacaatcttgaatgagtacaatataagagacataaaatt

SEQ ID NO: 525812 - DNA, 75 bp, synthetic construct
  source 1..75: mol_type = other DNA
ccccactaaaagatatgcataaagtcactacaatgaatggttataatgttgagttatcttatcgaaaacctggat

SEQ ID NO: 525813 - DNA, 75 bp, synthetic construct
  source 1..75: mol_type = other DNA
caaagagaaagatccgctcgatgtcactttgtggctgaaagccgatgcgacgaatgaacatcccgagtgcgtgat

SEQ ID NO: 525814 - DNA, 75 bp, synthetic construct
  source 1..75: mol_type = other DNA
ctggcaacggtatccgtcgtattgggatcgatgggcgcaatccagcttgtcgactttgcccggcaaaaacgcttg

SEQ ID NO: 525815 - DNA, 75 bp, synthetic construct
  source 1..75: mol_type = other DNA
cggggaattcactcacgctgcgttcggagggggaacagtgctcggcatctgaaattaataaaaggaaatatgtaa

SEQ ID NO: 525816 - DNA, 75 bp, synthetic construct
  source 1..75: mol_type = other DNA
tgacaatgaatttgtcagaaaaaataccgaagttattgagagcggtgttcaacttcctgtaaatacacttactgc

SEQ ID NO: 525817 - DNA, 75 bp, synthetic construct
  source 1..75: mol_type = other DNA
aagttgacgatgaacaggcctttaaatggtgtcaaaaatcggcagaacaagggtacgctgaagcacaatatcacc

SEQ ID NO: 525818 - DNA, 75 bp, synthetic construct
  source 1..75: mol_type = other DNA
tatcgatgaatggcatatctcatctgaacttataccaggcgagttttctatttctggatatgatatgaataaagc

SEQ ID NO: 525819 - DNA, 75 bp, synthetic construct
  source 1..75: mol_type = other DNA
cactgaagttaagggaaccatgatgacagttcagggaagtgctataacacaaatcaaaggtggtgttataaatat

SEQ ID NO: 525820 - DNA, 75 bp, synthetic construct
  source 1..75: mol_type = other DNA
gatacatggtcaactagctgaaattctattgcctatttctattgtaggtcatgaaggtttttctgaaccattttg

SEQ ID NO: 525821 - DNA, 75 bp, synthetic construct
  source 1..75: mol_type = other DNA
aacgatcgagacctggcagacagcggttttttccccgacgaagaggaattgaaaaatctgaaacacccatcgctg

SEQ ID NO: 525822 - DNA, 75 bp, synthetic construct
  source 1..75: mol_type = other DNA
tacatataaaggagagatagatgggtatgccacttacatcaataatatctatatgaatatattgccttactatgg

SEQ ID NO: 525823 - DNA, 75 bp, synthetic construct
  source 1..75: mol_type = other DNA
ctcccggctgaaaacatcgttcaccgtcttctctgccggacagaacacatcatgcaggcacatgatgtctgcacc

SEQ ID NO: 525824 - DNA, 75 bp, synthetic construct
  source 1..75: mol_type = other DNA
cagtacagctctgacaaagctgagcaggaaaaactcaatacctggcgggtacggctggcgctggaagatgaaaaa

SEQ ID NO: 525825 - DNA, 75 bp, synthetic construct
  source 1..75: mol_type = other DNA
tgcaggggaggtatatcacccaggatcccattgggctggaggggggatggaatttatacatttatccgttgagtc

SEQ ID NO: 525826 - DNA, 75 bp, synthetic construct
  source 1..75: mol_type = other DNA
gccagaaaccggattttccatgcctcggggggcggaggcgtctgtctgccatcattcataggggttatctcattc

SEQ ID NO: 525827 - DNA, 75 bp, synthetic construct
  source 1..75: mol_type = other DNA
gtcacaacgaaaaggtagggctgcatgactatcaaatcaaatacaccagcacacgacaaggactgctggcaaacg

SEQ ID NO: 525828 - DNA, 75 bp, synthetic construct
  source 1..75: mol_type = other DNA
ggcgctgattgatgaaaaaaacctggaggcgggcatgaagttgcccgctgagcgccaactggcgaatgcaactcg

SEQ ID NO: 525829 - DNA, 75 bp, synthetic construct
  source 1..75: mol_type = other DNA
ctacccgacaacagatcgcagatgtgataggggtgggagtgaagacaatttataaatattttccggctcaatgca

SEQ ID NO: 525830 - DNA, 75 bp, synthetic construct
  source 1..75: mol_type = other DNA
ctacaggggatcaaaacctcgatttacagaaaaacgcgctgatccgcgcagaatgtgagctggtttttgaagaca

SEQ ID NO: 525831 - DNA, 75 bp, synthetic construct
  source 1..75: mol_type = other DNA
gacacgccatactatattagcggtgttatggactggtcatgcgatcttaatgaggagtttattaagctatcaggt

SEQ ID NO: 525832 - DNA, 75 bp, synthetic construct
  source 1..75: mol_type = other DNA
ccggaattgtcattctacaaccggtatgggccgaacccatcccgaaatcacatacaggcattgcgggggtagatt

SEQ ID NO: 525833 - DNA, 75 bp, synthetic construct
  source 1..75: mol_type = other DNA
tgtggctggcgggctcgacccacgcgggtcaggttatttcctggaacggcatggcgacctacggtgcgctggcta

SEQ ID NO: 525834 - DNA, 75 bp, synthetic construct
  source 1..75: mol_type = other DNA
atgtagtaaatcacagttatatgttacccggtctgattaccgttctggcttcaactatcttctgcttcctttttt

SEQ ID NO: 525835 - DNA, 75 bp, synthetic construct
  source 1..75: mol_type = other DNA
gcgcgaagcctttatggcccgctggattggatgggcgatgcagcaaaacaatggcgacgtgttagtcgtctgcgg

SEQ ID NO: 525836 - DNA, 75 bp, synthetic construct
  source 1..75: mol_type = other DNA
gaggctctgcgctctggtgacagccaggaaatagcgaaggcgcaaaagcttttctggagccggaagaactggcaa

SEQ ID NO: 525837 - DNA, 75 bp, synthetic construct
  source 1..75: mol_type = other DNA
gatgcgcttaagtcaggtaacccgctggctatatcgaaagcacagctcctgttctggagtaaagagaactggcag

SEQ ID NO: 525838 - DNA, 75 bp, synthetic construct
  source 1..75: mol_type = other DNA
atcagacatggagaaagatacgatcgctctcaaaataaatgcctgtcagcccacgaaggaatcacagtgaacgga

SEQ ID NO: 525839 - DNA, 75 bp, synthetic construct
  source 1..75: mol_type = other DNA
tcagacttatgagcgttctttctcttttattcagtttgtcagagattgcgcggaaatttttttagttcttatcgg

SEQ ID NO: 525840 - DNA, 75 bp, synthetic construct
  source 1..75: mol_type = other DNA
tggcacgctccggcactggcaaaaatgtggcgcgaatgcccgcaggacattaacaagccagaattgccctcgctg

SEQ ID NO: 525841 - DNA, 75 bp, synthetic construct
  source 1..75: mol_type = other DNA
ggcgtttatgagggcgtagatggcgtgatgcgggtgatcgaacagcttgccggagtcggtttacccgcctcactc

SEQ ID NO: 525842 - DNA, 75 bp, synthetic construct
  source 1..75: mol_type = other DNA
tccgaagtggaacagtggattgcggatcgtaaatcagcaatgtttaaagcagccagacccggtattgttttaggt

SEQ ID NO: 525843 - DNA, 75 bp, synthetic construct
  source 1..75: mol_type = other DNA
atggttacgctttggggaaattatgaggggatctctcagcgcagagttgcagaaggtgaatttgagtcagtaaaa

SEQ ID NO: 525844 - DNA, 75 bp, synthetic construct
  source 1..75: mol_type = other DNA
aatagtcaagagtgtcctacagaatcaaacaaaattacgaataaatgcatgcataagcattgcattatgcaaata

SEQ ID NO: 525845 - DNA, 75 bp, synthetic construct
  source 1..75: mol_type = other DNA
aagttgggaaattggtgataccgaaggcgacgtggatcttggaggattgggcgataacgcgaaaactatcgatac

SEQ ID NO: 525846 - DNA, 75 bp, synthetic construct
  source 1..75: mol_type = other DNA
tggggatgtatatcccttatctatgtgcctttgctttttttatcccttctttttttggcagtaataataaaatat

SEQ ID NO: 525847 - DNA, 75 bp, synthetic construct
  source 1..75: mol_type = other DNA
actatggtagaagctataactattgcggcaatgacaaaggcgattttagaaattgaatatcgaagcaaagccatc

SEQ ID NO: 525848 - DNA, 75 bp, synthetic construct
  source 1..75: mol_type = other DNA
cccgtgtcttagtgacgggctggggattagtgaaatcaatcacgccctgccgcctgtcgttggttctgccgaaat

SEQ ID NO: 525849 - DNA, 75 bp, synthetic construct
  source 1..75: mol_type = other DNA
atgaatgttaacaaaaagagactggcggagattttcggtgttgatccgcgcacaattgaacgctggcagacgcag

SEQ ID NO: 525850 - DNA, 75 bp, synthetic construct
  source 1..75: mol_type = other DNA
aatgttcgcattgtgaatcaggcaaacctgagcgccctgagcgcctcgcaacaaacattacttgaccttctcgat

SEQ ID NO: 525851 - DNA, 75 bp, synthetic construct
  source 1..75: mol_type = other DNA
atcgtaaaccgcccgtttgaaattattaccgaaggcgttaacggctgggaataccatgaagcccctggagcctca

SEQ ID NO: 525852 - DNA, 75 bp, synthetic construct
  source 1..75: mol_type = other DNA
accaataaccagatccagaacattggcgttaatcagatacagacggttggtgtcaaccaggtggaaacggtgggc

SEQ ID NO: 525853 - DNA, 75 bp, synthetic construct
  source 1..75: mol_type = other DNA
ggatgtcaacacgcttggaatgcagccgttacaactggcggactttgctcatgccttgcaacaaccacagggact

SEQ ID NO: 525854 - DNA, 75 bp, synthetic construct
  source 1..75: mol_type = other DNA
ccgttgccgccaattagcgatgaggaaaaaccgtttgaacttccggaagggtgggagtggtgtaaatttggttta

SEQ ID NO: 525855 - DNA, 75 bp, synthetic construct
  source 1..75: mol_type = other DNA
gtgctggcgatgtggtacaccggcacgcataaccaggaggcgatcgaactggccgaggcctggggctttaccgtt

SEQ ID NO: 525856 - DNA, 75 bp, synthetic construct
  source 1..75: mol_type = other DNA
gtactacagctaaaaggaaacccgtgtaaatacgtacattcagtggagttaagatataaagccgatcaggcactg

SEQ ID NO: 525857 - DNA, 75 bp, synthetic construct
  source 1..75: mol_type = other DNA
agtgattaaaaacgattcctaccgtgtgcgacaggtaaaaggaaacccgtgtaaatacgtaagttcagtggagtt

SEQ ID NO: 525858 - DNA, 75 bp, synthetic construct
  source 1..75: mol_type = other DNA
tgcattaggtgcgcataaggatccagaaaattccataaaagaatcaataagtgcaatagaaagcatgtgtcggac

SEQ ID NO: 525859 - DNA, 75 bp, synthetic construct
  source 1..75: mol_type = other DNA
ggcgtacagccccgatacctgattgaagcggcaatgcgtatgaaaccggatcatatctttctggcagaattacgt

SEQ ID NO: 525860 - DNA, 75 bp, synthetic construct
  source 1..75: mol_type = other DNA
tgaataacgccgccgcgaccatgaccgatattgtcagttcggtgacccgcgtgaacgacattatgggagaaattg

SEQ ID NO: 525861 - DNA, 75 bp, synthetic construct
  source 1..75: mol_type = other DNA
ctgaatgcggcagtggaagcggctcgcgccggagagcaggggcgtggttttgcggtagtggcagggggaagtgcg

SEQ ID NO: 525862 - DNA, 75 bp, synthetic construct
  source 1..75: mol_type = other DNA
cgggcaacgagcacgtcagggcattgcaaaaagagacggagaaaagttttgcccgctggcacaacgatctcgaac

SEQ ID NO: 525863 - DNA, 75 bp, synthetic construct
  source 1..75: mol_type = other DNA
agcctgaagaccatgcagcaggctttgcgtgggacggtaagtgatgtgcgtaagggaagccaggagatgcacatt

SEQ ID NO: 525864 - DNA, 75 bp, synthetic construct
  source 1..75: mol_type = other DNA
cggtatttacccttgaagaacatgaagtagcacgacatgagtcgcgcagttacaaattgcgccagtggtatcctg

SEQ ID NO: 525865 - DNA, 75 bp, synthetic construct
  source 1..75: mol_type = other DNA
taatgagatcaccgccatttttgccagcctgaagaccatgcagcaggctttgcgtgggacggtgagtgatgtgcg

SEQ ID NO: 525866 - DNA, 75 bp, synthetic construct
  source 1..75: mol_type = other DNA
tcatcaaactcaatgtcgaccttgaagttgcctgcgcgcgtaaacccgaccataaacgggaatcgctggcgagga

SEQ ID NO: 525867 - DNA, 75 bp, synthetic construct
  source 1..75: mol_type = other DNA
ccagcgcagaaaggcggggcaattaatgtgcgttattttatgccgcattcttgccatcgcgcgctggcgataacc

SEQ ID NO: 525868 - DNA, 75 bp, synthetic construct
  source 1..75: mol_type = other DNA
ccatcgatattgtggtgttcttcaaacacacacatatgacggagatctactacaacccaatggaaaaaaatcaat

SEQ ID NO: 525869 - DNA, 75 bp, synthetic construct
  source 1..75: mol_type = other DNA
tggtggcgcaggtgctggaacaccggggggatgggagccgcaggatgaggagaacgccaggaataatgaatcaat

SEQ ID NO: 525870 - DNA, 75 bp, synthetic construct
  source 1..75: mol_type = other DNA
tcagttgaatcgtgaacgctttaccgtacgcactgacagcgatgtggcgcaattgaaccttatccgcgcaggtgc

SEQ ID NO: 525871 - DNA, 75 bp, synthetic construct
  source 1..75: mol_type = other DNA
ttccatgggaatggtatcgaaccttcctggcggtgatgaaagaaggttccctctcgggggcagcacgcatgcttg

SEQ ID NO: 525872 - DNA, 75 bp, synthetic construct
  source 1..75: mol_type = other DNA
attccgatttttataaaaatatgattttgtcacctttgaattatgctgggcataatccgtacgtattcaggaaaa

SEQ ID NO: 525873 - DNA, 75 bp, synthetic construct
  source 1..75: mol_type = other DNA
acgataaatcctgtaaaactggttagtgcaagtagataccatgcggttaaccatacagccaatactgatgattat

SEQ ID NO: 525874 - DNA, 75 bp, synthetic construct
  source 1..75: mol_type = other DNA
gtattcagtgatccaaaaacacgcaagccgtgggctaattcagctgcgattcgtaagaaagcctggctcccgact

SEQ ID NO: 525875 - DNA, 75 bp, synthetic construct
  source 1..75: mol_type = other DNA
gcaatccgtaccagacacgccacacgttcgccactcggcacattagccagggcgttaacctgttctggcttgctg

SEQ ID NO: 525876 - DNA, 75 bp, synthetic construct
  source 1..75: mol_type = other DNA
gtcgcgctgctgattgcttatctggataaagccaatttctatgttatggaagattccggagcgtgggaagaagat

SEQ ID NO: 525877 - DNA, 75 bp, synthetic construct
  source 1..75: mol_type = other DNA
atattcagtgaccccaaaacgaaagagccttgggcgaacgctgatgcaatccgcaaaaaagcatgggttcccacc

SEQ ID NO: 525878 - DNA, 75 bp, synthetic construct
  source 1..75: mol_type = other DNA
cagaattgacgcctgcggtactaaaaaattggatagccagccgaaaaactaagctgaaaacaatcaggaataacc

SEQ ID NO: 525879 - DNA, 75 bp, synthetic construct
  source 1..75: mol_type = other DNA
ccgagaaagataaattggccgaacaggcgcaatgggatgcaccaatttggtttaccctatgtaataaaattatag

SEQ ID NO: 525880 - DNA, 75 bp, synthetic construct
  source 1..75: mol_type = other DNA
acaacgaaaagaagatcgtacgatcgggaatattgggcttggtgtaagacataattttgataaatggttgttggg

SEQ ID NO: 525881 - DNA, 75 bp, synthetic construct
  source 1..75: mol_type = other DNA
gatgtctaaaatgaaagatgttgatcaaaactttgatgctttatactggcatatactacaagcatatttaatttt

SEQ ID NO: 525882 - DNA, 75 bp, synthetic construct
  source 1..75: mol_type = other DNA
gccgtcatataaaaaaattgttattggtgatgatgaaataacgatgcctggcgacaaggttgttaagtttaaacg

SEQ ID NO: 525883 - DNA, 75 bp, synthetic construct
  source 1..75: mol_type = other DNA
aaaaacacggacctttattcgaattggaggtcaagccacatcgggaactcgtcatctattcggccatttgaggaa

SEQ ID NO: 525884 - DNA, 75 bp, synthetic construct
  source 1..75: mol_type = other DNA
acagaacagccgatatggtccagttacgtcgattacttactcacgccgaacccgtacttgactggccattaatgg

SEQ ID NO: 525885 - DNA, 75 bp, synthetic construct
  source 1..75: mol_type = other DNA
tcaagaaaagaagagtatttgaatgactcagtgcaatttatgaatagatcattggcccaaataacaggcgagaat

SEQ ID NO: 525886 - DNA, 75 bp, synthetic construct
  source 1..75: mol_type = other DNA
acaaactgcctgctgcaggatgggcggtgactgatgcgtatggcctgctgtcggctatggatcaggccacaccct

SEQ ID NO: 525887 - DNA, 75 bp, synthetic construct
  source 1..75: mol_type = other DNA
tggggcatctgtgactacataaccaaaccacgtgtacaggccgccatcacagggaaaacgccgaaaggacaacct

SEQ ID NO: 525888 - DNA, 75 bp, synthetic construct
  source 1..75: mol_type = other DNA
tggaaatacaataacgattacgttgagaaggacgatttatatcgccacagtaaatggttggcctttatggaacgc

SEQ ID NO: 525889 - DNA, 75 bp, synthetic construct
  source 1..75: mol_type = other DNA
ttcgacgtactgacgaatatctctattttgtgatgtttggagcttcatcacctgcacgcctccagcttggtgctg

SEQ ID NO: 525890 - DNA, 75 bp, synthetic construct
  source 1..75: mol_type = other DNA
ggctcactgatcgcaacaggtcgccgcgatactcgccgagttgccccctcacaatggaaaattgcgtctcataat

SEQ ID NO: 525891 - DNA, 75 bp, synthetic construct
  source 1..75: mol_type = other DNA
ttgagcaaggtagggttagactagggcgagccacttcctatggttttgtcgtaaattatcttcctgacggtgcgt

SEQ ID NO: 525892 - DNA, 75 bp, synthetic construct
  source 1..75: mol_type = other DNA
ctcggtgcaaaggtccttcccggtgaaaccgacatcgccctgcccggcccgctgccgttcatcctctcccgcacc

SEQ ID NO: 525893 - DNA, 75 bp, synthetic construct
  source 1..75: mol_type = other DNA
ataataaaagaaaacttgacacgcgagagtttcgtggtttctgtatatctgatagcgttgctccgatcatttttg

SEQ ID NO: 525894 - DNA, 75 bp, synthetic construct
  source 1..75: mol_type = other DNA
aggttgttgctacagacatagcaaacacaatacattttgatatacaaaaagagataaaaaatgtcacttttgaga

SEQ ID NO: 525895 - DNA, 75 bp, synthetic construct
  source 1..75: mol_type = other DNA
ttgcggcctattcgaaagggagacaaggttcgcgttctgccggagcgtggctcccctaagaaaggcgatcagcgg

SEQ ID NO: 525896 - DNA, 75 bp, synthetic construct
  source 1..75: mol_type = other DNA
aagccgcgtgtacaggcagctataacaggcaagacacctgaaggagaaccgattgatggcgactataagtttatc

SEQ ID NO: 525897 - DNA, 75 bp, synthetic construct
  source 1..75: mol_type = other DNA
cgcacctacagcagctaccggacgaagacgcctgcgccagtgggaactttttggccccggctggaaagcgccttc

SEQ ID NO: 525898 - DNA, 75 bp, synthetic construct
  source 1..75: mol_type = other DNA
acgattatcgccggacgcgacctgaacgccgaagcggcgcaggtgaccgccagcggggatatcggcgtggcggca

SEQ ID NO: 525899 - DNA, 75 bp, synthetic construct
  source 1..75: mol_type = other DNA
atttatgtggatctttggttaaagaaaatacgacttttgcttttcttgaacgatttgattatgtcagaagaaaat

SEQ ID NO: 525900 - DNA, 75 bp, synthetic construct
  source 1..75: mol_type = other DNA
gagaagtgattgaaagaaaactgaaaatacccaataagaaaatcaatgtcatatataatataattgactttgatg

SEQ ID NO: 525901 - DNA, 75 bp, synthetic construct
  source 1..75: mol_type = other DNA
gcaaaaataggaatacgggtattaataagtattctgaaggatatataaagaatattagggaaaatataaaggttg

SEQ ID NO: 525902 - DNA, 75 bp, synthetic construct
  source 1..75: mol_type = other DNA
taaaaataaaagaaatcaatatattgtatgaaaaaataacaacctttttcacgaaacagaaaaaatgctctttag

SEQ ID NO: 525903 - DNA, 75 bp, synthetic construct
  source 1..75: mol_type = other DNA
atgagttattgtgcggagatatcgcgccaagagacggaaacagagccgcgcacttggcagcgcccgttccttaaa

SEQ ID NO: 525904 - DNA, 75 bp, synthetic construct
  source 1..75: mol_type = other DNA
cgtgggtgggggaaaagccctggataccagtaaagccgtgggcgtggagacccgtgtcccggtggtcaccgtgcc

SEQ ID NO: 525905 - DNA, 75 bp, synthetic construct
  source 1..75: mol_type = other DNA
tcaggcgcaatggcaaagcagctggtttgctaataatctcggtgagcgttttgcttcaggcaatgataccggctg

SEQ ID NO: 525906 - DNA, 75 bp, synthetic construct
  source 1..75: mol_type = other DNA
gttgtatttaccgccggtagcctggcggccgcgtttgccgccacattacctcagctactgttggcgcggttcatt

SEQ ID NO: 525907 - DNA, 75 bp, synthetic construct
  source 1..75: mol_type = other DNA
ctgaatattaccggttgtttcatcaatcctaattttaatagagttgggattgttaatttgttaaatgagtcaaaa

SEQ ID NO: 525908 - DNA, 75 bp, synthetic construct
  source 1..75: mol_type = other DNA
gtgaatacctcatcagcaagggtaaaacgttcgccactccagcttgggtatccgcaccggcgggcgcgtgctggc

SEQ ID NO: 525909 - DNA, 75 bp, synthetic construct
  source 1..75: mol_type = other DNA
ttgttcgcaccttccttagatgtcagtgaaatcaccaccactgctcctgcgttttatgccattttgccgttcacg

SEQ ID NO: 525910 - DNA, 75 bp, synthetic construct
  source 1..75: mol_type = other DNA
tgctggcggggacagcttttgcttctcaggcgggaactttagtaagccagggtactgaagcgtcagctaatctta

SEQ ID NO: 525911 - DNA, 75 bp, synthetic construct
  source 1..75: mol_type = other DNA
gggggtgtagggaaaaacaattcaatatgcttattgagttatcatcaatcagaagtaataagatgataaatgcgc

SEQ ID NO: 525912 - DNA, 75 bp, synthetic construct
  source 1..75: mol_type = other DNA
tacaggtttttatgtccgctgccagatgtacgacggaagaccatcaacaagtgctttttcctggagagtttattg

SEQ ID NO: 525913 - DNA, 75 bp, synthetic construct
  source 1..75: mol_type = other DNA
gtttatccaattgcactacctaaactttcacgttttatcagcatagcggaaagaataagaacagattacgaagcc

SEQ ID NO: 525914 - DNA, 75 bp, synthetic construct
  source 1..75: mol_type = other DNA
gatagtcagtctggaaataaaataataaaaataagtttattcggctttaaaaccacatccagtattgatgaaatg

SEQ ID NO: 525915 - DNA, 75 bp, synthetic construct
  source 1..75: mol_type = other DNA
ggcgcgaaattctctgccactgattaccctgtgctggcgaaagtgtttccggcgctagcattacctgacgcacgg

SEQ ID NO: 525916 - DNA, 75 bp, synthetic construct
  source 1..75: mol_type = other DNA
gaggccggaataaatattgatgtgtggggctatgcagaatgtgacctctgtgaagccaggggggcatgggcacca

SEQ ID NO: 525917 - DNA, 75 bp, synthetic construct
  source 1..75: mol_type = other DNA
cgctgccgcccactaccaccatcccgccggaggcaggcccgccgccgtttaccgccagaaaatcagccagcaaat

SEQ ID NO: 525918 - DNA, 75 bp, synthetic construct
  source 1..75: mol_type = other DNA
actttaacaccaatggtttcggtgcgatggttaaaggcggttacacctgggaagacggtaatggcctgtttattc

SEQ ID NO: 525919 - DNA, 75 bp, synthetic construct
  source 1..75: mol_type = other DNA
ccatcaaagctgactttaacaccaatggtttcggtgcgatggttaaaggcggttacacatggaaagacggtaatg

SEQ ID NO: 525920 - DNA, 75 bp, synthetic construct
  source 1..75: mol_type = other DNA
ctgagccgccagtataacaacggtatcttcattgatactgctgcacagtttggtcactacagcaacacggcagat

SEQ ID NO: 525921 - DNA, 75 bp, synthetic construct
  source 1..75: mol_type = other DNA
ataatttaaattattatttaaatacaaacactccagaatatgctttcatgattactggtggatggggagcgggaa

SEQ ID NO: 525922 - DNA, 75 bp, synthetic construct
  source 1..75: mol_type = other DNA
caatagttgctgaatctttgccgctcttaagtgataagctttatatgacctataaagataatccggcagaagttg

SEQ ID NO: 525923 - DNA, 75 bp, synthetic construct
  source 1..75: mol_type = other DNA
ctcccctgttctagcaaatttagcatcagcctcactcgataaacacctaacccaactggcacgtagaaaaaacat

SEQ ID NO: 525924 - DNA, 75 bp, synthetic construct
  source 1..75: mol_type = other DNA
atgaaacgtaaaacactacctctactggcgctggttgcctccactctgtttctgagcgcttgcgatgacaggagt

SEQ ID NO: 525925 - DNA, 75 bp, synthetic construct
  source 1..75: mol_type = other DNA
gtgcagcttcctcggcaacggcggcaggaaattccgctacggcggcaaaaacgtccgagacgaaggccaggtcat

SEQ ID NO: 525926 - DNA, 75 bp, synthetic construct
  source 1..75: mol_type = other DNA
ccggacaggctgcgacgtcggctcaggatgcgtcttccggcgcagaaacggcatcagcaaaggccactgaggcat

SEQ ID NO: 525927 - DNA, 75 bp, synthetic construct
  source 1..75: mol_type = other DNA
gtgcagcttcctcggcaacggcggcagtaaattccgccacggcggcaaaaacgtccgagacgaaagccaggtcat

SEQ ID NO: 525928 - DNA, 75 bp, synthetic construct
  source 1..75: mol_type = other DNA
gccacgaatgcttcagaggcggccacctcagcccgagatgcggaggcctcaaaagacgcggcaaaatcatcagaa

SEQ ID NO: 525929 - DNA, 75 bp, synthetic construct
  source 1..75: mol_type = other DNA
gccacgaatgcttcagaggcggcaacctcagcccgcgatgcggaggcctcaaaagacgcggcaaaatcatcagaa

SEQ ID NO: 525930 - DNA, 75 bp, synthetic construct
  source 1..75: mol_type = other DNA
gggcaccggagcactccgtgacggagttcagtcacagccaggaagcgaaactggcagaagcgcagcagaaggcga

SEQ ID NO: 525931 - DNA, 75 bp, synthetic construct
  source 1..75: mol_type = other DNA
tagtaagggacatcaggtagttgccagcagctccctggtaccccataacgacccaactttgttgtttaccaacgc

SEQ ID NO: 525932 - DNA, 75 bp, synthetic construct
  source 1..75: mol_type = other DNA
ggaatattgtggtgctgatgaatatttatatcccggattggtggagaaaaagcttatttcatgcactatttttgc

SEQ ID NO: 525933 - DNA, 75 bp, synthetic construct
  source 1..75: mol_type = other DNA
attttctcacctaaagcggcaaacctcctctgtcttagctggaaaaacgacatcgctgtcgtttttaatccgagg

SEQ ID NO: 525934 - DNA, 75 bp, synthetic construct
  source 1..75: mol_type = other DNA
cccgtataccaaagaaaaatactttgagtacgcccatgacggcaaactgatggggcggctgctgataccctcgaa

SEQ ID NO: 525935 - DNA, 75 bp, synthetic construct
  source 1..75: mol_type = other DNA
gtggatatgcaggaaaaaaccgtccagccactgatgaatgcgctgtgtattgccgataacatcaaactggaatac

SEQ ID NO: 525936 - DNA, 75 bp, synthetic construct
  source 1..75: mol_type = other DNA
taacaatgttcacgctaacagccgagcttattttaatcatgatccaagtgctgttattggtttagataaaaagga

SEQ ID NO: 525937 - DNA, 75 bp, synthetic construct
  source 1..75: mol_type = other DNA
aaaaagaaacatcagagtacagtatgagatgtttaatgaacaataccctgatgctgatgccgttatcattaatgg

SEQ ID NO: 525938 - DNA, 75 bp, synthetic construct
  source 1..75: mol_type = other DNA
aacggggattgccgtgcaaattcttgatgcgcaaagtcagcaagaaatcccgctcaatcaggtccagcctcttac

SEQ ID NO: 525939 - DNA, 75 bp, synthetic construct
  source 1..75: mol_type = other DNA
tctcttttagcagtggtgatttagaagccagcggtaaacgctttccgattgatgtgaaaatgattgcaccattca

SEQ ID NO: 525940 - DNA, 75 bp, synthetic construct
  source 1..75: mol_type = other DNA
aagttctttcaaaaagcatttcaaaggccatttaattgcacgtaaagctatgttgcacaatatacctataatata

SEQ ID NO: 525941 - DNA, 75 bp, synthetic construct
  source 1..75: mol_type = other DNA
ggcaaaacgtgatcgtgttttaacttctgaagaacttagtggcctttggaatgcgctaaaaagcgaatatgcgtt

SEQ ID NO: 525942 - DNA, 75 bp, synthetic construct
  source 1..75: mol_type = other DNA
cggattaggcaaccacgacatgtataataactataatgattgtcatgaaaacaattgttttatacggagtataac

SEQ ID NO: 525943 - DNA, 75 bp, synthetic construct
  source 1..75: mol_type = other DNA
tgtctggtcagtgtccgtaagtggctgtttttattgccgctgtccggttgcagtcctatcaaaagtggtggagct

SEQ ID NO: 525944 - DNA, 75 bp, synthetic construct
  source 1..75: mol_type = other DNA
ttgccgccactaccaaagaaaaaggggctacgctttcacgtaaccccttgatttatttggtggagctggcgggag

SEQ ID NO: 525945 - DNA, 75 bp, synthetic construct
  source 1..75: mol_type = other DNA
atggtggtctttattactaataaatactttaaacttataagaggttattttatggctattacattttcaacaggt

SEQ ID NO: 525946 - DNA, 75 bp, synthetic construct
  source 1..75: mol_type = other DNA
cggcgataatattattaacgccgccgaagcgggcagtgcgctgaccctgagcggcaccggaacgaactttgccgc

SEQ ID NO: 525947 - DNA, 75 bp, synthetic construct
  source 1..75: mol_type = other DNA
atcaaaccatcagcggggtggtcactcgtgccgccgctggcgatacggttatcacgctgggcggcaatacttata

SEQ ID NO: 525948 - DNA, 75 bp, synthetic construct
  source 1..75: mol_type = other DNA
taaagctttctttggtggagttgccaaagatgaaaaaggtgtctggagtgacgctgctgcctatacttgggctac

SEQ ID NO: 525949 - DNA, 75 bp, synthetic construct
  source 1..75: mol_type = other DNA
ctggctcttggggtctaccctgcggtctctcttgctgatgcccgtaaccgtagagatgatgccagaagattaatt

SEQ ID NO: 525950 - DNA, 75 bp, synthetic construct
  source 1..75: mol_type = other DNA
tcagttgctgcggcggctgaaaaatggaaccggagagcaggagatgaagcaagcctttctgcttcgcaacgaagc

SEQ ID NO: 525951 - DNA, 75 bp, synthetic construct
  source 1..75: mol_type = other DNA
ttgttgaccgctggcgagaactcgaaggggcaaccgcgaaaataccacaaaccttttctgaggcattgcgccttg

SEQ ID NO: 525952 - DNA, 75 bp, synthetic construct
  source 1..75: mol_type = other DNA
actttgccctgattgccgatgaaggcagctacagccaggcggcgctgcgtgcgggcgtgtcgaaatcggtattaa

SEQ ID NO: 525953 - DNA, 75 bp, synthetic construct
  source 1..75: mol_type = other DNA
taccagagatcttcttgcccctatcaaggctgttgaagcttctgggcgactggaagttgcttcccgcctacagca

SEQ ID NO: 525954 - DNA, 75 bp, synthetic construct
  source 1..75: mol_type = other DNA
gacaaaggatctactcgccccgataaaggtagtcgaagcgagtgggcggtatgaagtagctttgcgtcttcaaca

SEQ ID NO: 525955 - DNA, 75 bp, synthetic construct
  source 1..75: mol_type = other DNA
ttcgcatggaggatcagcgcagctatgaatcgcacggtgatgggctgcaatcagaggatggcctgattcatactt

SEQ ID NO: 525956 - DNA, 75 bp, synthetic construct
  source 1..75: mol_type = other DNA
gacgtggccgaggcaccgcctggcgacgcgagcaagcctgcgcgcaagcctgcgcgcaagaagaagtcagcggat

SEQ ID NO: 525957 - DNA, 75 bp, synthetic construct
  source 1..75: mol_type = other DNA
gtggtggatttcaccaataccatcatcatcgccacctcgaacctgggctcggacatcatccagcgtcggctgaag

SEQ ID NO: 525958 - DNA, 75 bp, synthetic construct
  source 1..75: mol_type = other DNA
ggaagccaatctcaacggtcgtcacagcaccatgctgttgtgcgacgaccattaccggcaattagtgcgccagca

SEQ ID NO: 525959 - DNA, 75 bp, synthetic construct
  source 1..75: mol_type = other DNA
gcggccagcccgccacggtgcgggtggaagccaatctcaatggtcgtcacagcaccatgctgttgtgtgacgatc

SEQ ID NO: 525960 - DNA, 75 bp, synthetic construct
  source 1..75: mol_type = other DNA
gtactcgcgcgacctgaccaagatggcgcgcgacggcaagctcgacccggtgatcggccgcgcgcaggagatcga

SEQ ID NO: 525961 - DNA, 75 bp, synthetic construct
  source 1..75: mol_type = other DNA
tgagcctgaaaagcccgatgccgcggacgtggccgaggcaccgcctggcgacgcgagcaagcctgcgcgcaagaa

SEQ ID NO: 525962 - DNA, 75 bp, synthetic construct
  source 1..75: mol_type = other DNA
tcaaatccgctttaggcattgatgtgttccatgattatcatgttggtatctgggactggtggttaagcctaaaaa

SEQ ID NO: 525963 - DNA, 75 bp, synthetic construct
  source 1..75: mol_type = other DNA
tgtacgaagggcgtatccgggcggaagatcctgcccaggcgtaccgtgattcgttggcctggttgcgtacctgct

SEQ ID NO: 525964 - DNA, 75 bp, synthetic construct
  source 1..75: mol_type = other DNA
ggtaaatattttctattttattataatgcagggactctggttttgggtatggtttgctacagactgcctgcatga

SEQ ID NO: 525965 - DNA, 75 bp, synthetic construct
  source 1..75: mol_type = other DNA
agaaggtgcgtcgcaagccctacagcgtgttgctgctcgatgagatcgaaaaagcgcaccccgacgtctacaaca

SEQ ID NO: 525966 - DNA, 75 bp, synthetic construct
  source 1..75: mol_type = other DNA
ccgcaagatccacgatgtgcacgttcgcaccccgtcagcgctgacggaggaagccctgaaacggatcggtgagtt

SEQ ID NO: 525967 - DNA, 75 bp, synthetic construct
  source 1..75: mol_type = other DNA
gttgacccgtcaaattttgatggatcaactgttgataaaaaactgccgattaggggggcgatgattgaccccgat

SEQ ID NO: 525968 - DNA, 75 bp, synthetic construct
  source 1..75: mol_type = other DNA
aaaagccgcattgatgcggcaatggtaggtctggatatcttgagaaatgaacaggcctcattgagtgtgaggctg

SEQ ID NO: 525969 - DNA, 75 bp, synthetic construct
  source 1..75: mol_type = other DNA
tctctctcatgcaggcggtattaccgaatgctacaaaattgccggaatggcagaagcctatgacgtgacccttgc

SEQ ID NO: 525970 - DNA, 75 bp, synthetic construct
  source 1..75: mol_type = other DNA
cgtccttcaggaacaaagtatgggcattcattacaacaaaggcgcggagttactcgactttgtgaaaaacaaaga

SEQ ID NO: 525971 - DNA, 75 bp, synthetic construct
  source 1..75: mol_type = other DNA
atgagactgccagagaaagttctttttcctcctgtcactagtggcctgtcagggcaggaaaaacaaaaaaaccga

SEQ ID NO: 525972 - DNA, 75 bp, synthetic construct
  source 1..75: mol_type = other DNA
ggcaaaagtgtcagaaccacccgcagcaacaaagccgaaacaccgcaggatcgggtgaaccggcagttcgtggct

SEQ ID NO: 525973 - DNA, 75 bp, synthetic construct
  source 1..75: mol_type = other DNA
caaaatattcatattggtgattttaatatcagtgattttcagaccgcgaataccgtaagcactgctgctgatttg

SEQ ID NO: 525974 - DNA, 75 bp, synthetic construct
  source 1..75: mol_type = other DNA
tgttgcgcagacctgaatattccgttctttgtggatgccggaaacaaaaagctggtcttctggtttgtacgtgtt

SEQ ID NO: 525975 - DNA, 75 bp, synthetic construct
  source 1..75: mol_type = other DNA
cctgggttattcgtcgtcgtgtttctgccgatccaatcttcacttttttgcgacctgtcgcggacagaaaaagag

SEQ ID NO: 525976 - DNA, 75 bp, synthetic construct
  source 1..75: mol_type = other DNA
cagtatttacggtattaaaagaacgctggcgaaaattttctgtctgtcagttgtaattgaagcaatcctgctacg

SEQ ID NO: 525977 - DNA, 75 bp, synthetic construct
  source 1..75: mol_type = other DNA
caaatcctgaacagcgccgcacccttttagaagagtacggctttaagtttgatcgccgaatccgtgaagatgaat

SEQ ID NO: 525978 - DNA, 75 bp, synthetic construct
  source 1..75: mol_type = other DNA
gtcgcagaaggtgatgtgagcacacctgttgtggtgaagctgacaggtggagaaggtgcagtaatcagcgccacc

SEQ ID NO: 525979 - DNA, 75 bp, synthetic construct
  source 1..75: mol_type = other DNA
gagtcaggttagcatcggatgaacgaatgttacccggctctttacgtggctatgctcctgctgtccggggaatag

SEQ ID NO: 525980 - DNA, 75 bp, synthetic construct
  source 1..75: mol_type = other DNA
attaccactgtcagcaacagcgacatcatccggataaacgcagtgcccgtgcgcagcgcgatgactggctgaaga

SEQ ID NO: 525981 - DNA, 75 bp, synthetic construct
  source 1..75: mol_type = other DNA
aatcacgagaacatggcttcatctgcatacaagcataaaaataataaaggtgctctacgagttattaaatacgag

SEQ ID NO: 525982 - DNA, 75 bp, synthetic construct
  source 1..75: mol_type = other DNA
aaaatatttatcagcttttaattaaaccttacctactcgatctttctagccagtctggaaaaaaaatagaagtaa

SEQ ID NO: 525983 - DNA, 75 bp, synthetic construct
  source 1..75: mol_type = other DNA
cccgcgagcgccaggcgcacgaggccggcgcgcggacccgcgccacggcccacgagcggacgccgcagcaggagc

SEQ ID NO: 525984 - DNA, 75 bp, synthetic construct
  source 1..75: mol_type = other DNA
tggaagagttgatggagattggcgatttcatcaccattttccgtgatggtcgctttattagtgaacgcgccgtga

SEQ ID NO: 525985 - DNA, 75 bp, synthetic construct
  source 1..75: mol_type = other DNA
tcattgccggatttgttgttgcattttctttcgcgggactgattctgttaatcgcgagtatattgatcaatacag

SEQ ID NO: 525986 - DNA, 75 bp, synthetic construct
  source 1..75: mol_type = other DNA
aaggggccagcgtggcctacaagattaaggatctggaggggcaagttgagcttgatgcggccttcaccttctcat

SEQ ID NO: 525987 - DNA, 75 bp, synthetic construct
  source 1..75: mol_type = other DNA
gcgaaactgcgtgatacgccggaatacaaaaaggaacaggaaaagtatggcactggcagtgagattcagctgggt

SEQ ID NO: 525988 - DNA, 75 bp, synthetic construct
  source 1..75: mol_type = other DNA
gtgcagcaggcgcagcaacgggagagctggcagccagagcaattgccggaatgctgtatccgggcgtgaaacagt

SEQ ID NO: 525989 - DNA, 75 bp, synthetic construct
  source 1..75: mol_type = other DNA
ttggatggcgtgataaatcaggtctttggtaactggcagggtattgagttacgacttgacttcataatcgtggtt

SEQ ID NO: 525990 - DNA, 75 bp, synthetic construct
  source 1..75: mol_type = other DNA
acacacatcggagccttattttttttctcctttatgtgaggattcttttttaatatccacaagtggtttctatct

SEQ ID NO: 525991 - DNA, 75 bp, synthetic construct
  source 1..75: mol_type = other DNA
atctggaagctgatgcgcttgagcagttaggctatcaggctgaatctgggccgtggcgtaatttctatctcactg

SEQ ID NO: 525992 - DNA, 75 bp, synthetic construct
  source 1..75: mol_type = other DNA
tcaatagtgatcaagaacaaataaaaaattactacagattacaggctcatattttcttgaaagattcgaaccagg

SEQ ID NO: 525993 - DNA, 75 bp, synthetic construct
  source 1..75: mol_type = other DNA
agcaagtttttaaaactttcaaatgtaaactaactgatcaacaaaaagacttgtatgatgccacagatcctttca

SEQ ID NO: 525994 - DNA, 75 bp, synthetic construct
  source 1..75: mol_type = other DNA
tctggatgacctctgccaggtgcagacacatatccggaccatcacccacagggtgacggacactacccttaaggt

SEQ ID NO: 525995 - DNA, 75 bp, synthetic construct
  source 1..75: mol_type = other DNA
gcagattaatcctgataatatatcatggggatacagaggtggtactcttgacttaaatgggaataatattacatt

SEQ ID NO: 525996 - DNA, 75 bp, synthetic construct
  source 1..75: mol_type = other DNA
ggcgttggtgaaccgttgatttacggcgtcaccctgccccgcatgaaaccgtttattaccgcctgtttaggcggc

SEQ ID NO: 525997 - DNA, 75 bp, synthetic construct
  source 1..75: mol_type = other DNA
aaattagagattggtagtaatagtatttcacttagagatgctcactcagtggttcaatctgtagttaatgattat

SEQ ID NO: 525998 - DNA, 75 bp, synthetic construct
  source 1..75: mol_type = other DNA
caagcaatagctgacttgggaggccgatacacacccgaactcaacgtaaagctagaaatagcagagatatttgat

SEQ ID NO: 525999 - DNA, 75 bp, synthetic construct
  source 1..75: mol_type = other DNA
tacagtcacctctccttccatatccgactggtcatttgttacaaatacaggaaagtcatattttgagtcttatgg

SEQ ID NO: 526000 - DNA, 75 bp, synthetic construct
  source 1..75: mol_type = other DNA
ctgattggtcgtacaggtattgatgcaggcaagactttctccggtaaggaatggaaagtggctgcaaaagccggt

SEQ ID NO: 526001 - DNA, 75 bp, synthetic construct
  source 1..75: mol_type = other DNA
gtgttagggacgctggcagctgccgcgctgtggcgacgagactttttcggcaaaaacgccatttcgctgttactg

SEQ ID NO: 526002 - DNA, 75 bp, synthetic construct
  source 1..75: mol_type = other DNA
ggattaaaagtaggtgatggcactgtgttacttagtcaacacaaagatgctgaagggagagttcaggcatttagt

SEQ ID NO: 526003 - DNA, 75 bp, synthetic construct
  source 1..75: mol_type = other DNA
cggactccatgtgcagaaagatacaaaagctgttaatgccggaagaagtttcatgaaaatggcttataaaagtta

SEQ ID NO: 526004 - DNA, 75 bp, synthetic construct
  source 1..75: mol_type = other DNA
aaatgactcatcagttcatacactgaaacttgataatgctcaactgaattttaaacagagtgagagattttccgc

SEQ ID NO: 526005 - DNA, 75 bp, synthetic construct
  source 1..75: mol_type = other DNA
tcagataaggtgcttattactgcgtgtaatcattgggtgcttaattctagagatattatagacatattcaatcta

SEQ ID NO: 526006 - DNA, 75 bp, synthetic construct
  source 1..75: mol_type = other DNA
ccacacgaaatcgatgtcactctcccgctcggggaacgggtcggccactcgctggttctcggcaccactcgcgtc

SEQ ID NO: 526007 - DNA, 75 bp, synthetic construct
  source 1..75: mol_type = other DNA
gatctgctgaagcgtctgtggacagaggcgcagcacgccggacgcggcgaccgctttatcctgttccacctggcg

SEQ ID NO: 526008 - DNA, 75 bp, synthetic construct
  source 1..75: mol_type = other DNA
cgccgtgggaaactccatgtttgccgatctggtgagcgtggcgggtcatatctacaagcacggtattcatgccgg

SEQ ID NO: 526009 - DNA, 75 bp, synthetic construct
  source 1..75: mol_type = other DNA
gtgaaaccgacatcgccctgcccggcccgctgccgttcatcctctcccgcacctacagcagttaccggacaaaaa

SEQ ID NO: 526010 - DNA, 75 bp, synthetic construct
  source 1..75: mol_type = other DNA
gtgcctcgctgctcgtcgtactgaccagccttgaccgtcagcttggcgacctgctggagcagaaccgtgatcgtt

SEQ ID NO: 526011 - DNA, 75 bp, synthetic construct
  source 1..75: mol_type = other DNA
ttaagcacgccaatttatcaggcagatactctggtccaggttgagcagaaacagggcaacgccattctcagtggc

SEQ ID NO: 526012 - DNA, 75 bp, synthetic construct
  source 1..75: mol_type = other DNA
atggatttactgattattttgacctatgtggcttttgcatgggcaatgtttaagatcttcaaaattcccgtaaat

SEQ ID NO: 526013 - DNA, 75 bp, synthetic construct
  source 1..75: mol_type = other DNA
aaagaagacgaagctctggcatttgaaagattcaaacggattatgcgaaataagatactaccattgctggaagaa

SEQ ID NO: 526014 - DNA, 75 bp, synthetic construct
  source 1..75: mol_type = other DNA
aagatactgtcattaaaggtattgatctgcctcgtctattgcagacgcttaacgatcgcatccaggttttatacg

SEQ ID NO: 526015 - DNA, 75 bp, synthetic construct
  source 1..75: mol_type = other DNA
tgcccaaatcgagaatgcgcagaacgcgctgacggtcgaggatgtgccccgtcatctgcaaagtgatccgaaagc

SEQ ID NO: 526016 - DNA, 75 bp, synthetic construct
  source 1..75: mol_type = other DNA
cgggcactggttgctctgggggagcgtccggattatgccaaaattttacgttatgtcaccaatatcggggaactc

SEQ ID NO: 526017 - DNA, 75 bp, synthetic construct
  source 1..75: mol_type = other DNA
gaagcaaaccgacaagaagaaaggcgagaagcttaccttcgaagtggcaactccgtccgcgcaggcggcagacct

SEQ ID NO: 526018 - DNA, 75 bp, synthetic construct
  source 1..75: mol_type = other DNA
acatatagctggtaagtgggttgagcggcaaggagcccaggtcagagatatcgctcctgaaggaatggttgcact

SEQ ID NO: 526019 - DNA, 75 bp, synthetic construct
  source 1..75: mol_type = other DNA
gtcattttattatgatgaattttctgtccgatttcctaatgttgtcctatatccgtcatgctaccaattgcatgg

SEQ ID NO: 526020 - DNA, 75 bp, synthetic construct
  source 1..75: mol_type = other DNA
cagtgaatcggttgcgctatttaataaaacttaccgcgaattaaaagatattgtaaaatcatcaagagtacatat

SEQ ID NO: 526021 - DNA, 75 bp, synthetic construct
  source 1..75: mol_type = other DNA
attttatgagacttttaattatactgatttacttgacgtcatagatcagcttaattctataaaaacacaatatta

SEQ ID NO: 526022 - DNA, 75 bp, synthetic construct
  source 1..75: mol_type = other DNA
gtttcagaggccattgacaatacttcaagtactacatatgcattaaatgacataatcgaatttataaaggtgaat

SEQ ID NO: 526023 - DNA, 75 bp, synthetic construct
  source 1..75: mol_type = other DNA
aagcggtagtatacttttatatcaagaagacatttacaggaaaattgattattcctgaaacaaagatagtgacat

SEQ ID NO: 526024 - DNA, 75 bp, synthetic construct
  source 1..75: mol_type = other DNA
tgctatagatattcttggtgttgggtatgttaatgcgccttttgattatcatgctaacaaaccgtctggaggtac

SEQ ID NO: 526025 - DNA, 75 bp, synthetic construct
  source 1..75: mol_type = other DNA
aacgatgcagcgaaagccattgctcatgccattctcggcggtgtgactgcggctcttcagggaaataatgccgca

SEQ ID NO: 526026 - DNA, 75 bp, synthetic construct
  source 1..75: mol_type = other DNA
cagcaccggcgcgaagggcaaaacggacatcaccgccagcgggaagctgaccaatacaggctcgctggtgagcga

SEQ ID NO: 526027 - DNA, 75 bp, synthetic construct
  source 1..75: mol_type = other DNA
caagagcggcaacgacaccatgcttaacggggcacaggttaacggcaataaaattgtcgccgacgtgggtcatga

SEQ ID NO: 526028 - DNA, 75 bp, synthetic construct
  source 1..75: mol_type = other DNA
caatcacagccacgaagccagcgcacaggccgatggtgtagatggtgtagtgatggatctcgatgtaaccgacag

SEQ ID NO: 526029 - DNA, 75 bp, synthetic construct
  source 1..75: mol_type = other DNA
attgaaattactgaatcagaaagacagctactaattaaccaggccaacgaatacatgaacagtaagcaatggccc

SEQ ID NO: 526030 - DNA, 75 bp, synthetic construct
  source 1..75: mol_type = other DNA
aacgacctgaacgttacggcgagcgccatcgacgcaggcaaaaccgcgcagctggtggcgggcaatgacctgaac

SEQ ID NO: 526031 - DNA, 75 bp, synthetic construct
  source 1..75: mol_type = other DNA
tactcacgctatgaccgatcacatcatttttgacggcaaacgcgcggtgggcgtcgagtggcaggaaggcgacag

SEQ ID NO: 526032 - DNA, 75 bp, synthetic construct
  source 1..75: mol_type = other DNA
acttgggatgaaccaagaaaatgtaaatttattgagtcgctaatcataggtcttcctattccattcgtatttttc

SEQ ID NO: 526033 - DNA, 75 bp, synthetic construct
  source 1..75: mol_type = other DNA
agttattatgagaaattatgggagcaaggcagacctgcgccattcgtgcaagcaagagaagttttgaatagcaat

SEQ ID NO: 526034 - DNA, 75 bp, synthetic construct
  source 1..75: mol_type = other DNA
ttagttgtttcagccatttttattcttatacaatctcaattcatctatgttaataagcggtttaaggaaaaagat

SEQ ID NO: 526035 - DNA, 75 bp, synthetic construct
  source 1..75: mol_type = other DNA
gtttaagtattgaggctttgacgttgatcgctgactctgggcgaatacaagattctgtcagaagtgacgcgctaa

SEQ ID NO: 526036 - DNA, 75 bp, synthetic construct
  source 1..75: mol_type = other DNA
agagaagataacgagtagtgttaccctggtcagcctccttaaggctattgggatggagtgcttcgtaaactacta

SEQ ID NO: 526037 - DNA, 75 bp, synthetic construct
  source 1..75: mol_type = other DNA
ccatcaaagaagacttgattgtcaggagttcggcttcagtcaatgaagcggctatgcaaacccttccacccgaac

SEQ ID NO: 526038 - DNA, 75 bp, synthetic construct
  source 1..75: mol_type = other DNA
gctggcagggattctgggcggcctgtttgcctgcggcagcgtgctgctgcgtgaggcaatgctctcgcgtaatcc

SEQ ID NO: 526039 - DNA, 75 bp, synthetic construct
  source 1..75: mol_type = other DNA
ccagtcgcagcacggtgtgacctgtaagaacggtgacacctggtatctggtaccgcagctggaacaggcttccgc

SEQ ID NO: 526040 - DNA, 75 bp, synthetic construct
  source 1..75: mol_type = other DNA
cattgcttactgcaatattgccgctcttcggttacggggattgtgcctttcataaaatgaagatgacttttaacg

SEQ ID NO: 526041 - DNA, 75 bp, synthetic construct
  source 1..75: mol_type = other DNA
agcaatggaatgcgggcagtgacagccaatatggtggtgtgcatctcagcggtacggacaccggtccggttgcga

SEQ ID NO: 526042 - DNA, 75 bp, synthetic construct
  source 1..75: mol_type = other DNA
ttgtttgccggactgtatgagcttcttggagcgaagccgggtcaggcgccacgtgaaacggctccgtcgtatacc

SEQ ID NO: 526043 - DNA, 75 bp, synthetic construct
  source 1..75: mol_type = other DNA
gcatctgctgaattcatgggatgccatttcggccagccatgaggtcattcctggaagcagtcacggggtgatttc

SEQ ID NO: 526044 - DNA, 75 bp, synthetic construct
  source 1..75: mol_type = other DNA
ggtgatccgtatgctggaagcataacactggcagcctttaatagccgtggcagcactaaaacagctagcgtcgta

SEQ ID NO: 526045 - DNA, 75 bp, synthetic construct
  source 1..75: mol_type = other DNA
gccgctgttgcaggaagtctgggattcgggcatatcttcacaaaaggtgacgttctcagcttttcgtcgaaggaa

SEQ ID NO: 526046 - DNA, 75 bp, synthetic construct
  source 1..75: mol_type = other DNA
actggagatggcgaatgcggcgtttgtccgcaaactgctcgctgcgctggttggctcgtccccggaagccctgga

SEQ ID NO: 526047 - DNA, 75 bp, synthetic construct
  source 1..75: mol_type = other DNA
cggagctgagcgcttttggtttgacgcctgaggacgtggaggaagaggtggggatcctgccctctgtgtggaagt

SEQ ID NO: 526048 - DNA, 75 bp, synthetic construct
  source 1..75: mol_type = other DNA
ttgttaacataaaatcaagtaccgatagcttccttgatagcgaatcaataacctacactggctctggatacccaa

SEQ ID NO: 526049 - DNA, 75 bp, synthetic construct
  source 1..75: mol_type = other DNA
cgaccccggctggaaaatgcctgcggatatccgcttacagctgcgcgataacacactgatactcagtgataacgg

SEQ ID NO: 526050 - DNA, 75 bp, synthetic construct
  source 1..75: mol_type = other DNA
tagccagattctggctattatcctcatcatcgttttgattttgcttttaaggtcagtaaaaaatggaattatgca

SEQ ID NO: 526051 - DNA, 75 bp, synthetic construct
  source 1..75: mol_type = other DNA
gcctgccgtctcgccaggcagagtttgagaaccttgttttaaaccgcagggttgaagcgaaaagcccgttcgtta

SEQ ID NO: 526052 - DNA, 75 bp, synthetic construct
  source 1..75: mol_type = other DNA
gctaccgtatggggcgggctcgatctttccagcgtgtcagacctgaccgcactggtgctgaacaccacgcagggc

SEQ ID NO: 526053 - DNA, 75 bp, synthetic construct
  source 1..75: mol_type = other DNA
gaagaaggcaagccgcagctgtggaaccataaacaaaatgatgctttagggaaggtgcgaataagcaggtcattt

SEQ ID NO: 526054 - DNA, 75 bp, synthetic construct
  source 1..75: mol_type = other DNA
atcaccagaggtcaatcacaaagttatatttctgagaaatacggcttatcacgtagtcaatactacaagattaaa

SEQ ID NO: 526055 - DNA, 75 bp, synthetic construct
  source 1..75: mol_type = other DNA
ttaagctctctacaaaaagaaggtgaaatttttattccattagaaacagcgaccagattatcacttaacaacgaa

SEQ ID NO: 526056 - DNA, 75 bp, synthetic construct
  source 1..75: mol_type = other DNA
caactctcggtgctattgccagagcaacatttaatgcacaaatcggcgggaaagtattaatgacgttgaagtacg

SEQ ID NO: 526057 - DNA, 75 bp, synthetic construct
  source 1..75: mol_type = other DNA
tgctctcgcgctggcagcaggcgaaagtggcgcgtaacggcctcgatgaactgatgaagcgcccggtggatcagc

SEQ ID NO: 526058 - DNA, 75 bp, synthetic construct
  source 1..75: mol_type = other DNA
aactgttctggcgacccgctggaagcttatcaacaattacgctggacacggaagtcgcagggtgtacaactcact

SEQ ID NO: 526059 - DNA, 75 bp, synthetic construct
  source 1..75: mol_type = other DNA
atcaccaaaggacaatcacaaagttatatttctgagaaatacggcttatcacgcagtcaatactacaagattaaa

SEQ ID NO: 526060 - DNA, 75 bp, synthetic construct
  source 1..75: mol_type = other DNA
atgtcgtcaataccttgtttaagggcgatgatacctctcctccaagcggacgcatcctggttaaccctgtggaga

SEQ ID NO: 526061 - DNA, 75 bp, synthetic construct
  source 1..75: mol_type = other DNA
gtttattaccactgaaggtaacgaacatttagtttcaggtaattaccgtgcaaatataacaattacttcgacaat

SEQ ID NO: 526062 - DNA, 75 bp, synthetic construct
  source 1..75: mol_type = other DNA
cggcggtctgactgacggaaatgcgcaatggttcttacaggcaggtggatttgcccctatatttccagacatctg

SEQ ID NO: 526063 - DNA, 75 bp, synthetic construct
  source 1..75: mol_type = other DNA
cttatcaaggacgatatcattctgggtgtgcctgatgaagctggtgacttcgatacagtgtgggtacgccgtgct

SEQ ID NO: 526064 - DNA, 75 bp, synthetic construct
  source 1..75: mol_type = other DNA
gacgaagcgcacagggggatggggtcgtcaacgccttccggtgaagttgctaagagtactattgtgcaacgtcta

SEQ ID NO: 526065 - DNA, 75 bp, synthetic construct
  source 1..75: mol_type = other DNA
agcactggctgggattgcccgcgtgccgaagtgatggtttccttccgcgctgccagcgacagaacacatattacg

SEQ ID NO: 526066 - DNA, 75 bp, synthetic construct
  source 1..75: mol_type = other DNA
gttttgctggcgctgccgttgctggtgatccccggcctgctggtgcaacgcccgctggcgcggctggcgaacgaa

SEQ ID NO: 526067 - DNA, 75 bp, synthetic construct
  source 1..75: mol_type = other DNA
agataagaaatatgagaataaagaagaggcaagggttattacaataattgaatcgcgtgcggcgaaaactttagg

SEQ ID NO: 526068 - DNA, 75 bp, synthetic construct
  source 1..75: mol_type = other DNA
ccgtttattctttcccgcgcctacagcagctaccggaccagaacacccgcgccggtgggggtgtttggtcccggc

SEQ ID NO: 526069 - DNA, 75 bp, synthetic construct
  source 1..75: mol_type = other DNA
cacgccggcgcgaaaaattcacctgtaccactgcgaccatcgcggcctgccgctggcgctcatcagcacggaagg

SEQ ID NO: 526070 - DNA, 75 bp, synthetic construct
  source 1..75: mol_type = other DNA
gatggaattcccgtgcaaatgaatgctgtgcatatccgatttgacagcaactcccccgtgatggcagatgtgcag

SEQ ID NO: 526071 - DNA, 75 bp, synthetic construct
  source 1..75: mol_type = other DNA
ccgcagcgagtcaatgtggctggtgcgcggtggtaaggcagcgcagccggacggccacacgctggcgcggctgtg

SEQ ID NO: 526072 - DNA, 75 bp, synthetic construct
  source 1..75: mol_type = other DNA
cgccggtggggagcctcggccccggctggaaaatgcctgcggatatccgcttacagctgcgcgataacacactga

SEQ ID NO: 526073 - DNA, 75 bp, synthetic construct
  source 1..75: mol_type = other DNA
cgcccgctcagcgccattcccgatgcgcgggtggatgactacattcgcccgtatcaggcgaactggttctggaat

SEQ ID NO: 526074 - DNA, 75 bp, synthetic construct
  source 1..75: mol_type = other DNA
tacggctgaaaaataacgtgcgatcgaaatccaccggatcgtttatctcgcagatccgcgaactggaatcggtgc

SEQ ID NO: 526075 - DNA, 75 bp, synthetic construct
  source 1..75: mol_type = other DNA
gggctgctttatggtgatgaacggcgacatgaccaccggcgcactggtcgggacgacgatcctggcttcgcgcac

SEQ ID NO: 526076 - DNA, 75 bp, synthetic construct
  source 1..75: mol_type = other DNA
cgcgaaagaggccattttgcgtgaacagagcgaacccacggcgcgacgggtggtgttgcaggagaagaataaggg

SEQ ID NO: 526077 - DNA, 75 bp, synthetic construct
  source 1..75: mol_type = other DNA
gtcatctatcagcatgaagcaacgttttctcaccgggctactgctcacctggacccaggaagtgcaatccatcgt

SEQ ID NO: 526078 - DNA, 75 bp, synthetic construct
  source 1..75: mol_type = other DNA
gtatcaggcgaactggttctggaatctctcgctaaaagactggcggcgctatggcgatattatgctggcgtcact

SEQ ID NO: 526079 - DNA, 75 bp, synthetic construct
  source 1..75: mol_type = other DNA
ctccattctgaacgctcgtcacttcgagaaaccgattctgagagactcaatgtcaaatatacagaaaacaatcac

SEQ ID NO: 526080 - DNA, 75 bp, synthetic construct
  source 1..75: mol_type = other DNA
cctggatggaattatattcaccggcggaataggagagaattcaagtttaattcgtcgtctggtcatggaacattt

SEQ ID NO: 526081 - DNA, 75 bp, synthetic construct
  source 1..75: mol_type = other DNA
gctccggaagcttatttatacggcctgccgtggaaatattatgaagagttaggtgtgcgccgttatggtttccac

SEQ ID NO: 526082 - DNA, 75 bp, synthetic construct
  source 1..75: mol_type = other DNA
atgcaggcgattaatgccttccagatacgctttaacgccctcttccagccagaagaaggcgtgttttggttgcat

SEQ ID NO: 526083 - DNA, 75 bp, synthetic construct
  source 1..75: mol_type = other DNA
cgtcttgagtccaacccggaaaggcacgacttatcgccattggcagcagccactggtaactgatttagaggagtt

SEQ ID NO: 526084 - DNA, 75 bp, synthetic construct
  source 1..75: mol_type = other DNA
aactccgatgccgtaaacagatggcttgccttgccgcagggtaatgcggcttcggcaactgcagacatgaaaata

SEQ ID NO: 526085 - DNA, 75 bp, synthetic construct
  source 1..75: mol_type = other DNA
tcattaggtatggttttgcggttgtggcgatagttgccatactcattactactatcacaacccccaatcccacac

SEQ ID NO: 526086 - DNA, 75 bp, synthetic construct
  source 1..75: mol_type = other DNA
cgaactgattggtgttgcgatcgaccgtgggcagaatgccaaacatcagcagtctaaacgcgatatccctaacac

SEQ ID NO: 526087 - DNA, 75 bp, synthetic construct
  source 1..75: mol_type = other DNA
tgcacaactggcaattaaaacctttgttcaccgaattgcccgccatattgccggacacgctgcctcattacatcg

SEQ ID NO: 526088 - DNA, 75 bp, synthetic construct
  source 1..75: mol_type = other DNA
ttgcagtgtgcccgtgccggggatgatttgtacgtgcatagtctggacagattgggacgcagcttaaaaggcatc

SEQ ID NO: 526089 - DNA, 75 bp, synthetic construct
  source 1..75: mol_type = other DNA
ccagcgtggttctaaatggaatgacagaagtcgcggctgctcgtactgcgttacgaaatcttattagagaaaatc

SEQ ID NO: 526090 - DNA, 75 bp, synthetic construct
  source 1..75: mol_type = other DNA
tggcggtggtgtttgtaattggttttcgggtgctgacatccggggccagaaaggcgattcgccgtctcagcgatc

SEQ ID NO: 526091 - DNA, 75 bp, synthetic construct
  source 1..75: mol_type = other DNA
gcatgaatattatcaatggcggagttcatgcccgtgggcagggagctgattttcaggaatacatgattgcccctt

SEQ ID NO: 526092 - DNA, 75 bp, synthetic construct
  source 1..75: mol_type = other DNA
gaaggatgtgggcagggcgcatcgcgtcagcgcgcggctgcaatatggttgtacctgggtcaatacccatttcat

SEQ ID NO: 526093 - DNA, 75 bp, synthetic construct
  source 1..75: mol_type = other DNA
gtgaactgggcgaatgacagtcagtacggacttgcatcttcggtatggacgaaggatgtgggcagggcgcatcgc

SEQ ID NO: 526094 - DNA, 75 bp, synthetic construct
  source 1..75: mol_type = other DNA
tggtttccccgctattactgggactcctcttttttgtcgccatactggcgggatttatcgactctattgccgggg

SEQ ID NO: 526095 - DNA, 75 bp, synthetic construct
  source 1..75: mol_type = other DNA
tgttatcgtctcggcggtgatgagtgccaaattactttacgatagccatggacaggagatcctccactggttggg

SEQ ID NO: 526096 - DNA, 75 bp, synthetic construct
  source 1..75: mol_type = other DNA
attactaccaggcgctggttaaaaatttcccgattgccttgattgaagatggcctcgctgaagatgactgggctg

SEQ ID NO: 526097 - DNA, 75 bp, synthetic construct
  source 1..75: mol_type = other DNA
acagtgctgaatactatttagtaccagcgctcaaaaacattttacaggaacaatatagccatatcgccccggtgt

SEQ ID NO: 526098 - DNA, 75 bp, synthetic construct
  source 1..75: mol_type = other DNA
cgatgcagatgatccacgatgaattgccagggacgaccttctccaaccctgaccagcgcggggactacgattccg

SEQ ID NO: 526099 - DNA, 75 bp, synthetic construct
  source 1..75: mol_type = other DNA
gtgtcgaataaattaccggatgaagaagtcaaactgcgacgtcatcatttagtcagatgtatgaagaattttaag

SEQ ID NO: 526100 - DNA, 75 bp, synthetic construct
  source 1..75: mol_type = other DNA
taatgctcgtgtatctgaattgaaaccggggcaaattttgcgtctttgcttggatcttcaaaatgaatacgatgg

SEQ ID NO: 526101 - DNA, 75 bp, synthetic construct
  source 1..75: mol_type = other DNA
agcccaccagaaattgtagggtactgtcctcgttattttgccagtgatatcaagagaatgcttcttgataacgat

SEQ ID NO: 526102 - DNA, 75 bp, synthetic construct
  source 1..75: mol_type = other DNA
atatgcaaaagagactcaacctcacaggatgtatggaagtcaatataagcctgtatactttctgattaagacaca

SEQ ID NO: 526103 - DNA, 75 bp, synthetic construct
  source 1..75: mol_type = other DNA
ggatgtcagttggaaattttgaaacatgaactggaacaaagaagagtgccgttgaaaaacctgaatcggcttgaa

SEQ ID NO: 526104 - DNA, 75 bp, synthetic construct
  source 1..75: mol_type = other DNA
aaaagcgaagcagcaaatgctggagagcgtagtttgcagcagttgcgtgagcagtttgtcacgccccgccatgtg

SEQ ID NO: 526105 - DNA, 75 bp, synthetic construct
  source 1..75: mol_type = other DNA
gtgagcatatcacctctgttcaggtggccaaattcagtaaaccacttcaccctgcgcagtcacatcgacaactgg

SEQ ID NO: 526106 - DNA, 75 bp, synthetic construct
  source 1..75: mol_type = other DNA
acggttgcactccgtacatctacgatactaaacatggaccaacaagcgacggcgaagcgccgaagaaatcctgga

SEQ ID NO: 526107 - DNA, 75 bp, synthetic construct
  source 1..75: mol_type = other DNA
ggtagagttgtttttcatcctgttatctattcagaagaactgtttcgagaatatgtaagagaagcattgcatgat

SEQ ID NO: 526108 - DNA, 75 bp, synthetic construct
  source 1..75: mol_type = other DNA
tggtgattcattaaaccgccagagaaggcttattactgaatggctaaaggtaaatagtgattattaccttgatac

SEQ ID NO: 526109 - DNA, 75 bp, synthetic construct
  source 1..75: mol_type = other DNA
agcattatctgtcagcaatgaatgatgaccagagcaaagcaaatttggctatctggaatcgcgttcagcggaccg

SEQ ID NO: 526110 - DNA, 75 bp, synthetic construct
  source 1..75: mol_type = other DNA
gtggcaaccaccattactgagataacggattgctttgagtactttttcagctctctttaccggcgagaatttgtc

SEQ ID NO: 526111 - DNA, 75 bp, synthetic construct
  source 1..75: mol_type = other DNA
aatctggtgctggcgacagcgacgaaactgaaagcaaacccgcaaccagagctgttgaagcccaaagtcattacc

SEQ ID NO: 526112 - DNA, 75 bp, synthetic construct
  source 1..75: mol_type = other DNA
gaaagcgcagtttgttcttcgcgccagcgatctccacaacgccaaagccaatatgaaagtgctgcatccgctgcc

SEQ ID NO: 526113 - DNA, 75 bp, synthetic construct
  source 1..75: mol_type = other DNA
taccccggcagaagagactcctccacaagaaaaacttagcgagcaggtaaaggatctggtgcagaacgttgacgc

SEQ ID NO: 526114 - DNA, 75 bp, synthetic construct
  source 1..75: mol_type = other DNA
agtattcaacttatcttggttcgcgcctgcgccgtttgaatgaaatcaaaaccgaacgcctcgccgctctcgccg

SEQ ID NO: 526115 - DNA, 75 bp, synthetic construct
  source 1..75: mol_type = other DNA
agcatgacggcaaagccttgcttgtgctgtttgacttctctgacacgccctattcagaagaacagattgaatcct

SEQ ID NO: 526116 - DNA, 75 bp, synthetic construct
  source 1..75: mol_type = other DNA
atgaaatatcaggtgagaaaatttattactgataaatatgcgaaggctgttaatattttaaaggataatcttaaa

SEQ ID NO: 526117 - DNA, 75 bp, synthetic construct
  source 1..75: mol_type = other DNA
tttctgccaccggcctcgcagcgaaagatgttgatgcgattattctgtcgcattttcacgctgatcatattgctg

SEQ ID NO: 526118 - DNA, 75 bp, synthetic construct
  source 1..75: mol_type = other DNA
gttttgaagcggtaagtttgcccgcacaactggcaccgtttgagtatggttacttgctaccagaaagccgtggtg

SEQ ID NO: 526119 - DNA, 75 bp, synthetic construct
  source 1..75: mol_type = other DNA
cagaccccgacagggtgaaaactattgagctaatttttaaactcaggatggaaaggcgctcattgaatgcaatag

SEQ ID NO: 526120 - DNA, 75 bp, synthetic construct
  source 1..75: mol_type = other DNA
agtcaggtgaaaaaaatggaactaccagcgattaaaaacaaagctgaatttgacgacattaaatggccggagaag

SEQ ID NO: 526121 - DNA, 75 bp, synthetic construct
  source 1..75: mol_type = other DNA
agtcaggtgaaaaaaatggaaccatccgccattaaaactgaagctgaatttgatgccattaaatggcccgaacag

SEQ ID NO: 526122 - DNA, 75 bp, synthetic construct
  source 1..75: mol_type = other DNA
agctaaaccaattcaaactttcacacgggaagaactggagtcaattgctgatagtgagggtattgccggtttacg

SEQ ID NO: 526123 - DNA, 75 bp, synthetic construct
  source 1..75: mol_type = other DNA
aaggtagtagtacttatctgctgatgcgagaaacacattacaatgcgggtatattcgtttgggtgttaatgtttt

SEQ ID NO: 526124 - DNA, 75 bp, synthetic construct
  source 1..75: mol_type = other DNA
ttctttaaagaatttgaattaattaacagtgtaatacttccattagtaatatttgattttatagaccgaaagccg

SEQ ID NO: 526125 - DNA, 75 bp, synthetic construct
  source 1..75: mol_type = other DNA
aacagatattgtggttcttgaatgtagtaccctcgccgatcttctaacaaatgataatattgcttttttatataa

SEQ ID NO: 526126 - DNA, 75 bp, synthetic construct
  source 1..75: mol_type = other DNA
ttgttagttgaaagtctggacagactttcaagagaaaaagtcggtgaagcgattgaacgtctgaaattgattttg

SEQ ID NO: 526127 - DNA, 75 bp, synthetic construct
  source 1..75: mol_type = other DNA
cattgaatgcaatagccaagtatttaaatgatcatgctgtaaagaatttctcaggaaaagaaagtgcatggggac

SEQ ID NO: 526128 - DNA, 75 bp, synthetic construct
  source 1..75: mol_type = other DNA
cacgattatgacggcgtcttgtccgagatggctctccttagatgacaaaagaacggcttttgttccagaccccga

SEQ ID NO: 526129 - DNA, 75 bp, synthetic construct
  source 1..75: mol_type = other DNA
atctggcacggatttgtgctcggcggcagcgtgtgccatttcctggcgatctatttgtatattgggcaggcgtaa

SEQ ID NO: 526130 - DNA, 75 bp, synthetic construct
  source 1..75: mol_type = other DNA
gcgcggcagaagcacagcgtcagtcactgattgatactgcaatggcttccattagtctgattcaactgaaattgc

SEQ ID NO: 526131 - DNA, 75 bp, synthetic construct
  source 1..75: mol_type = other DNA
gcatagctatacatgcctttaaaaatggttccttagtaggaaaggcttctgtagttgatcttactctgaagttta

SEQ ID NO: 526132 - DNA, 75 bp, synthetic construct
  source 1..75: mol_type = other DNA
gttatgcaatctgtcgttctgtgaatttaaattcatgggaatatgtgccagatcatcgcggtgaaattgtctata

SEQ ID NO: 526133 - DNA, 75 bp, synthetic construct
  source 1..75: mol_type = other DNA
cgtaacatcggcgaaattctggaactggcaggctgcgaccgtctgaccatcgcaccggcactgctgaaagagctg

SEQ ID NO: 526134 - DNA, 75 bp, synthetic construct
  source 1..75: mol_type = other DNA
tcgccgtttgttggccgtattcttgactggtacaaagcgaataccgacaagaaagagtacgctccggcagaagat

SEQ ID NO: 526135 - DNA, 75 bp, synthetic construct
  source 1..75: mol_type = other DNA
atgaccacaacgcaaaaaacgactgatgttacagcccgtcaacgctgccactggtggtggatggtgccgggatgc

SEQ ID NO: 526136 - DNA, 75 bp, synthetic construct
  source 1..75: mol_type = other DNA
gaacacgccggtaaccgtcgccttcaacatgaaacagaccgtggatgcgttttttgacagcgccagccagaaaaa

SEQ ID NO: 526137 - DNA, 75 bp, synthetic construct
  source 1..75: mol_type = other DNA
ggcaaacaggacgacgactcagcgtgctgagccgatgacccgcagattaattcaggtcctgtttgatgaactccc

SEQ ID NO: 526138 - DNA, 75 bp, synthetic construct
  source 1..75: mol_type = other DNA
tcgccctgctgatcctgccactacttgaacatggcggctatgccatcacggaactgacgttacccggagaaacac

SEQ ID NO: 526139 - DNA, 75 bp, synthetic construct
  source 1..75: mol_type = other DNA
acggctggcaacgttatgaaatctggcaggcggaaaaagcggaacgggaagaaagcgcccggaaagcagctgaag

SEQ ID NO: 526140 - DNA, 75 bp, synthetic construct
  source 1..75: mol_type = other DNA
accggaatgcccggcggtttgcccggtcacagggcgcagaactgtatctttcctgccacaaccacgacggtgaaa

SEQ ID NO: 526141 - DNA, 75 bp, synthetic construct
  source 1..75: mol_type = other DNA
aaccgtcctacgtgctgcgcgcgctggggctgaacgacgagctggcacatagctctatccgtttctctttaggtc

SEQ ID NO: 526142 - DNA, 75 bp, synthetic construct
  source 1..75: mol_type = other DNA
actggcatatcttcgcaatcactatccagatttaagcgaagaagaggccgcgatgcttgcagctgacggaccgcg

SEQ ID NO: 526143 - DNA, 75 bp, synthetic construct
  source 1..75: mol_type = other DNA
gcggtcgtgaactgttgtctgacaagtattttccgctggtcaacaaagagcaggagaacagtgaaaaactggctg

SEQ ID NO: 526144 - DNA, 75 bp, synthetic construct
  source 1..75: mol_type = other DNA
aaactacgaatcgatgaacatcgattacgtggtcgaaacctacgccgccgggtgcttcattgaaaatatcaagct

SEQ ID NO: 526145 - DNA, 75 bp, synthetic construct
  source 1..75: mol_type = other DNA
tatgaaccgctgccggatacagaagggtttaccagttattcaggaaatagcttccgtttcgacgaacagaaacgg

SEQ ID NO: 526146 - DNA, 75 bp, synthetic construct
  source 1..75: mol_type = other DNA
atcaaagtaaccttgaatgatacgtgttatgccaattggcttaatgaacattttggcgagttaagccatgctaag

SEQ ID NO: 526147 - DNA, 75 bp, synthetic construct
  source 1..75: mol_type = other DNA
ccgtaaacgctttcaggatggcggcatttggggaatatattgacgatgaaaccgcatcgacagtaaaggcaagag

SEQ ID NO: 526148 - DNA, 75 bp, synthetic construct
  source 1..75: mol_type = other DNA
gttgaggactaccgctgcgctgcactggtggaaaacatccagattggcgatttcagcgccgctgcagcagaagtc

SEQ ID NO: 526149 - DNA, 75 bp, synthetic construct
  source 1..75: mol_type = other DNA
tgaaagaactcgaagcagcgatgcgtgacgacaccatccttgtttccatcatgcacgtaaataacgaaatcggcg

SEQ ID NO: 526150 - DNA, 75 bp, synthetic construct
  source 1..75: mol_type = other DNA
ccgatctggttggcgctgatccgcgtgaaattgtctttacctctggtgctaccgaatctgacaacctggcgatca

SEQ ID NO: 526151 - DNA, 75 bp, synthetic construct
  source 1..75: mol_type = other DNA
gcagcaccaccacgggcggtgaaaccacaccgggcgcagtgaaagtcggcaaaggtggcgaatatgccaacctgg

SEQ ID NO: 526152 - DNA, 75 bp, synthetic construct
  source 1..75: mol_type = other DNA
cgaaacgtgaccggattgaaaactttgaatccgttaacgaagcctacgtggttgaggactaccgctgcgccgcac

SEQ ID NO: 526153 - DNA, 75 bp, synthetic construct
  source 1..75: mol_type = other DNA
gcagcaccaccacgggcggtgaaaccactccgggtgcggtgaaagtcgggaaaggtggcgaatatgccaacctgg

SEQ ID NO: 526154 - DNA, 75 bp, synthetic construct
  source 1..75: mol_type = other DNA
ctggcaatggtgttactgaacgcagccgtcagttacggcattgtcagactgaacgcaccggtgactgccgccttc

SEQ ID NO: 526155 - DNA, 75 bp, synthetic construct
  source 1..75: mol_type = other DNA
acttaaaatagtagatgattttggttatgagttgacaacctcacataacagctatcataacagcgaattagaaaa

SEQ ID NO: 526156 - DNA, 75 bp, synthetic construct
  source 1..75: mol_type = other DNA
atgcaggatattaatgcttttcagatgcgctataacgcgttctttcagcctgccgagggcgttcacgccgcatcc

SEQ ID NO: 526157 - DNA, 75 bp, synthetic construct
  source 1..75: mol_type = other DNA
caagtacgactggctgacctcagacaccgctgtggatgaggcccttctcatcaacgaatataccttcaccgaagc

SEQ ID NO: 526158 - DNA, 75 bp, synthetic construct
  source 1..75: mol_type = other DNA
atgattcatgttcgtaccggacaatttgtggctatggtgaacggtaagcgctatgaatttaacccgtgtttcgct

SEQ ID NO: 526159 - DNA, 75 bp, synthetic construct
  source 1..75: mol_type = other DNA
gcttatgacgatggaatgaatggtgctatggagatactaaaaagaatgaaaaatcgcgagcaagaaaaagcccgg

SEQ ID NO: 526160 - DNA, 75 bp, synthetic construct
  source 1..75: mol_type = other DNA
gctcgcattctctattaatgcctttgagtcaatttgagtcacggctaatgacgctaacaaaactggcaagaaact

SEQ ID NO: 526161 - DNA, 75 bp, synthetic construct
  source 1..75: mol_type = other DNA
gtcataagtagaatgaaaaataataatgaaggtaatgtgaccgatttgtatctgcgcactttatcttttatctct

SEQ ID NO: 526162 - DNA, 75 bp, synthetic construct
  source 1..75: mol_type = other DNA
gttatttattgttttttttagaaaaatgttgattaatgatcttccttctgcgttatcaaataaaataacaaggat

SEQ ID NO: 526163 - DNA, 75 bp, synthetic construct
  source 1..75: mol_type = other DNA
tcagcggtgatgagtgccaaattactttacgatagccacggacaggagatcctccactggttggggatgaactaa

SEQ ID NO: 526164 - DNA, 75 bp, synthetic construct
  source 1..75: mol_type = other DNA
tgtggatgaggcccttctcatcaacgaatataccttcaccgaagccggtctgcgcgccggctgccccgtcatcgt

SEQ ID NO: 526165 - DNA, 75 bp, synthetic construct
  source 1..75: mol_type = other DNA
caggtcaggggcgaatgccgaagcggatctcaaatctgattgctgaaggtggggaattaaaagattttgaaatca

SEQ ID NO: 526166 - DNA, 75 bp, synthetic construct
  source 1..75: mol_type = other DNA
ggcgtgtggtagagccaatatattattttacctcggtgttgcagctgctgttttacaagtttctgcatttcttat

SEQ ID NO: 526167 - DNA, 75 bp, synthetic construct
  source 1..75: mol_type = other DNA
acgaaataggcccgttattgggcgaatgctggtttactccttcgggtaagttaaagttaaagcccggattaatgc

SEQ ID NO: 526168 - DNA, 75 bp, synthetic construct
  source 1..75: mol_type = other DNA
gattgatgctgcaatggcttccatcggtctgattcagctgaaattacaggccggacggaagctgatgcaggcaga

SEQ ID NO: 526169 - DNA, 75 bp, synthetic construct
  source 1..75: mol_type = other DNA
gacgctcctagtacatataaggctggttatacaatttgccgttctgtagatttaaattcatgggaatatgtgcca

SEQ ID NO: 526170 - DNA, 75 bp, synthetic construct
  source 1..75: mol_type = other DNA
caatgcggcgcatcttgataaaaacggcagtctgcttaccgttgaaggtaagtacaccagttacaataatgaatt

SEQ ID NO: 526171 - DNA, 75 bp, synthetic construct
  source 1..75: mol_type = other DNA
tatcggaagctggcgtcttcgggacaacaccagctggagttacagtgccggaaaggggtacagccagaataactg

SEQ ID NO: 526172 - DNA, 75 bp, synthetic construct
  source 1..75: mol_type = other DNA
ctggcacatgccaatggtctgacactgagccagcctctgggagatacgctgattcttgtccgtgcaccaggtgca

SEQ ID NO: 526173 - DNA, 75 bp, synthetic construct
  source 1..75: mol_type = other DNA
aaatcgcgtaagtctacgttgctgcgccacacgcgccatgagctggcaaacgatcggcagctgctcgaggagtag

SEQ ID NO: 526174 - DNA, 75 bp, synthetic construct
  source 1..75: mol_type = other DNA
gattttccggatattcatttgccgcaggtaaagttcaaacaacttcgccgcgtacccaacggcactgatggtgaa

SEQ ID NO: 526175 - DNA, 75 bp, synthetic construct
  source 1..75: mol_type = other DNA
cgcttgccaacggatacagacctccgcaatcgcattctggcgcgttgttatggtgagttagtgcaaacgtccatc

SEQ ID NO: 526176 - DNA, 75 bp, synthetic construct
  source 1..75: mol_type = other DNA
cattcgacatccttgaatatgtttactccgccgttgctcacctggggctatctgaatcagaagcatggggcatga

SEQ ID NO: 526177 - DNA, 75 bp, synthetic construct
  source 1..75: mol_type = other DNA
cgttattcgttcgggaaagattgccggagtacgtttgatctacagcgagataaagtaacatggttgacgcgtgat

SEQ ID NO: 526178 - DNA, 75 bp, synthetic construct
  source 1..75: mol_type = other DNA
gccgccatattttatgggcagggaaaatagttcagaacccgccgggaacaccgaaagtcgatgccgcaacattcc

SEQ ID NO: 526179 - DNA, 75 bp, synthetic construct
  source 1..75: mol_type = other DNA
tccgcggatgtgctgaaagatcgtcacaatatttactttcaggggcactggttgggcagtgcgcaagggtattct

SEQ ID NO: 526180 - DNA, 75 bp, synthetic construct
  source 1..75: mol_type = other DNA
ctggtggaaatatcacgggcaaaaccacgagcatgggacaaaagagtttaatcatctgctcaaaaccatcagcgg

SEQ ID NO: 526181 - DNA, 75 bp, synthetic construct
  source 1..75: mol_type = other DNA
tggcaggacaaaccggcagatcaaaggctcgtatctgaattgattactttatggtggagttatcacgggaaaaat

SEQ ID NO: 526182 - DNA, 75 bp, synthetic construct
  source 1..75: mol_type = other DNA
agctggttcatgatgaacggggggaacattattgcgttacagcaaattctggggcacgccagcatacaacagacg

SEQ ID NO: 526183 - DNA, 75 bp, synthetic construct
  source 1..75: mol_type = other DNA
gactattaccacgaaagatacagcgaccaataagcgcattgatgctactaacaccacggttagtaacttaaccca

SEQ ID NO: 526184 - DNA, 75 bp, synthetic construct
  source 1..75: mol_type = other DNA
aacttctaagatcggcgatcctgataagccagaagagatcttaacaatttctaactctgctgtcaacgctctttt

SEQ ID NO: 526185 - DNA, 75 bp, synthetic construct
  source 1..75: mol_type = other DNA
ggggcatgcgagcattcagcagacgatggcctatgcgcaccttgcgcctgattacctgcaaaacgcagtagcgtt

SEQ ID NO: 526186 - DNA, 75 bp, synthetic construct
  source 1..75: mol_type = other DNA
atgtaccaacgaggctcaatcatcgtagtgagccagttgccggtggaaaactggtacaaaatgatcggagactcc

SEQ ID NO: 526187 - DNA, 75 bp, synthetic construct
  source 1..75: mol_type = other DNA
ggggcggttcactatcaggggcatgctgatggaagatacagcaaacttttgaccaggctgaataatagcgatctg

SEQ ID NO: 526188 - DNA, 75 bp, synthetic construct
  source 1..75: mol_type = other DNA
gcactggattgcagacacaggcgtagctattctcctgaagataaactttgcgtggttctttatgctctcgggcat

SEQ ID NO: 526189 - DNA, 75 bp, synthetic construct
  source 1..75: mol_type = other DNA
gcatgggcaaatgatggcgtcgctttgaaactcgctgtgcaagtgtgcatggataacgtcattcagccgtcagat

SEQ ID NO: 526190 - DNA, 75 bp, synthetic construct
  source 1..75: mol_type = other DNA
atgacgttcctggaaaaagcagaaatcgaaaaactgttaaatgttttggctggtgatgacttacttgtcgcgctt

SEQ ID NO: 526191 - DNA, 75 bp, synthetic construct
  source 1..75: mol_type = other DNA
atgaccatgtttacccagcgtgaaacccgtatccttgaccaggcgcgtgacattatcagccggtactaccagcgt

SEQ ID NO: 526192 - DNA, 75 bp, synthetic construct
  source 1..75: mol_type = other DNA
gatcagacagcgcgagatcttaactactttggtgctttccgtaccaatggacaagatggactcatggatctgacc

SEQ ID NO: 526193 - DNA, 75 bp, synthetic construct
  source 1..75: mol_type = other DNA
cactgaccgtgttattgcttccaacaaacaagaggccgctaataatctggctagtgttaaagctgaactgaatca

SEQ ID NO: 526194 - DNA, 75 bp, synthetic construct
  source 1..75: mol_type = other DNA
catgatctacggtaaatatggtgcattctggcgtaatgacggcgttaaagtttatcttctttctactgccgaaga

SEQ ID NO: 526195 - DNA, 75 bp, synthetic construct
  source 1..75: mol_type = other DNA
gactattaccactaaagacaccgcaaccaataagcgcattgatgctaccaacaccactgttagtaacttaaccca

SEQ ID NO: 526196 - DNA, 75 bp, synthetic construct
  source 1..75: mol_type = other DNA
actggaatatgcgactgaggtggtgattgcacgccagtttattacacgatgttatgagagtgatcctctgctagt

SEQ ID NO: 526197 - DNA, 75 bp, synthetic construct
  source 1..75: mol_type = other DNA
ttcactggagtggcagtccgccattacgcaggccatcaacttgatcggcgaacacaaaccctcaatcccggcccg

SEQ ID NO: 526198 - DNA, 75 bp, synthetic construct
  source 1..75: mol_type = other DNA
gaagcatgtcgtgcaggtgtcagaatttgccagttagtcgataaccatgccatcacacattctgaagggcatatc

SEQ ID NO: 526199 - DNA, 75 bp, synthetic construct
  source 1..75: mol_type = other DNA
cctcattctggcggtaaagcacacggtcgcggttttgagttccactatgggtctagctcatctcaagttaaaacc

SEQ ID NO: 526200 - DNA, 75 bp, synthetic construct
  source 1..75: mol_type = other DNA
tgcggcgtcctgctggtcaatccaaccatattgcgtttcaagataatcgtactggagatattacccgtcaaggat

SEQ ID NO: 526201 - DNA, 75 bp, synthetic construct
  source 1..75: mol_type = other DNA
tgatttacaccaaagataaaaataataacgtagtccaaattagtgtttctccagaaaaacacgctgaactgaata

SEQ ID NO: 526202 - DNA, 75 bp, synthetic construct
  source 1..75: mol_type = other DNA
cctctggtggtagtgttgctaatactgttgttcgtatgcatgtacatgatgccaactttgattttgccgcatctg

SEQ ID NO: 526203 - DNA, 75 bp, synthetic construct
  source 1..75: mol_type = other DNA
gcattccgtatgatttacggtaactatggtgcattctggcgtaatgatggtgctaaagtttaccttctttcgacc

SEQ ID NO: 526204 - DNA, 75 bp, synthetic construct
  source 1..75: mol_type = other DNA
gctcaggatctggaaaaagtattgccggaagcagtaggtattcaatccaccgaagatccagaacatccagaagca

SEQ ID NO: 526205 - DNA, 75 bp, synthetic construct
  source 1..75: mol_type = other DNA
ttgccgctgtaaatcattacctggctggtcatgcaggcatcatttctacggtaaaactctttcaactttctcaca

SEQ ID NO: 526206 - DNA, 75 bp, synthetic construct
  source 1..75: mol_type = other DNA
gcaggctgtaccgcgtaacgtgcccaccagcagggagaaagcacgcgccaatattcaggaaataagaaagatgtt

SEQ ID NO: 526207 - DNA, 75 bp, synthetic construct
  source 1..75: mol_type = other DNA
tatgactgcgtgatgcctgcttatcagttccggcgtgatttcacgctggtgggccatcgtaaagccgtaaatcag

SEQ ID NO: 526208 - DNA, 75 bp, synthetic construct
  source 1..75: mol_type = other DNA
ccgttcaaactggcgatgaatgacggtttatcgctctacgccagcgtgatgcgcaactttgtcatcctgtttatc

SEQ ID NO: 526209 - DNA, 75 bp, synthetic construct
  source 1..75: mol_type = other DNA
atgatcttctctgactggccgtggcgtcactggcggcaagtgcggggagaagccatcgccttacgtctcaatgac

SEQ ID NO: 526210 - DNA, 75 bp, synthetic construct
  source 1..75: mol_type = other DNA
cgcgcgatcgcggcgagatgcataacggtaaactgaccattgtcgggcgcttagataatctgttcttcagtggtg

SEQ ID NO: 526211 - DNA, 75 bp, synthetic construct
  source 1..75: mol_type = other DNA
gtgctcgcgtcgatgaattagcgtcgggctttgcggcgcagggcgtagttgagggcagcggcgtgatgttgcggg

SEQ ID NO: 526212 - DNA, 75 bp, synthetic construct
  source 1..75: mol_type = other DNA
acctgttaattctcggcaagtttatccttacgttgctgccgatgcccgccgccgcactgctctcttcgctggtgc

SEQ ID NO: 526213 - DNA, 75 bp, synthetic construct
  source 1..75: mol_type = other DNA
tgcgcaggagattaataacccggaggtgatcggccagtttctgcgccatcacctgttaattctcggcaagtttat

SEQ ID NO: 526214 - DNA, 75 bp, synthetic construct
  source 1..75: mol_type = other DNA
tatggctggcagccgacagcatggacgaagccgaatggcgggatttacggcggatattgttgcaacaagagacgc

SEQ ID NO: 526215 - DNA, 75 bp, synthetic construct
  source 1..75: mol_type = other DNA
acctgttaattctcggcaagtttattcttaccttgctgccgatgcccgccgccgcgctgctctcctcgctggtgc

SEQ ID NO: 526216 - DNA, 75 bp, synthetic construct
  source 1..75: mol_type = other DNA
tggcgaaagccctgttcaccaaagggctgaagatgaccaagcaggagctgaaagaagagtacaaaaatcaggaag

SEQ ID NO: 526217 - DNA, 75 bp, synthetic construct
  source 1..75: mol_type = other DNA
tggcgaaagccctgttcaccaaagggctgaagatgaccaaacaggagctgaaagaagagtataaaaaccaggaag

SEQ ID NO: 526218 - DNA, 75 bp, synthetic construct
  source 1..75: mol_type = other DNA
ctgtactcacgcctcgctggtgccgacgcagctctggcgattgctggtaaatcgcagttcggtttccctgaaagc

SEQ ID NO: 526219 - DNA, 75 bp, synthetic construct
  source 1..75: mol_type = other DNA
aacttaccgccgtgaaggctacgaatatgattgcgttatgcctgtttatcagttcgaccgtgatttttatctggt

SEQ ID NO: 526220 - DNA, 75 bp, synthetic construct
  source 1..75: mol_type = other DNA
ccgcgtaacgtgcccaccagcagggagaaagcacgcgccaatattcagaagatgaaaaacatgattaacggattc

SEQ ID NO: 526221 - DNA, 75 bp, synthetic construct
  source 1..75: mol_type = other DNA
tatgattgcgtgatgcctgtttatcagtttgatcgtgatttttctctggtgcaggcagcgccccgtagtgtgccc

SEQ ID NO: 526222 - DNA, 75 bp, synthetic construct
  source 1..75: mol_type = other DNA
gatgccccgggcgcacataaagcgggctatgctatccgccgttcggagaatttaagctcatgggagtatgcgcca

SEQ ID NO: 526223 - DNA, 75 bp, synthetic construct
  source 1..75: mol_type = other DNA
atgaaaaagaaaatttctggctttactgccagcggccccgctcggcctgaaatccgccccggcgatattttccgg

SEQ ID NO: 526224 - DNA, 75 bp, synthetic construct
  source 1..75: mol_type = other DNA
gccagcatcagcggcgacacctcgcaacaaggactggcgcgccttccggctctgctgaaacagcatcagccgcgc

SEQ ID NO: 526225 - DNA, 75 bp, synthetic construct
  source 1..75: mol_type = other DNA
tacgactgcgtgatgcctgtttatcagttccggcgtgatttttcactgatacaggccacaccacgcaaacagccc

SEQ ID NO: 526226 - DNA, 75 bp, synthetic construct
  source 1..75: mol_type = other DNA
acggtctggcagacgtcggttcgccgctgccgggtcgggaagtgaaaatcgtaaacgacgaagtgtggctgcggg

SEQ ID NO: 526227 - DNA, 75 bp, synthetic construct
  source 1..75: mol_type = other DNA
ccgttgcagacaaggagtttggtcatcgaccggtagccgttgtggagtatgaccagcaaagtgttgatcttagcg

SEQ ID NO: 526228 - DNA, 75 bp, synthetic construct
  source 1..75: mol_type = other DNA
acaggcggtggcgagacgtgcagccacgaatattaaaaaaatccgggcaatgttggttgcgggaggtaagaagtg

SEQ ID NO: 526229 - DNA, 75 bp, synthetic construct
  source 1..75: mol_type = other DNA
atgttcagaccttttttaaactctcttatgctcggcagtttgttttttccttttattgccatcgcaggaagcacc

SEQ ID NO: 526230 - DNA, 75 bp, synthetic construct
  source 1..75: mol_type = other DNA
atggccaaattgtggaaccggcatgtgacgtcagcacccagtcatcacccgtagaaatgaactgcccacagaatg

SEQ ID NO: 526231 - DNA, 75 bp, synthetic construct
  source 1..75: mol_type = other DNA
attcccagcgggtagggtatgatgtagcgaccagtatgatcagtcagttgcaacgcattggcgaaatacataaac

SEQ ID NO: 526232 - DNA, 75 bp, synthetic construct
  source 1..75: mol_type = other DNA
atgatgtatcgcatcagaaattggttggtagcgacgttgctgctgctgtgcgcgccggtgggtgccgcgacgctc

SEQ ID NO: 526233 - DNA, 75 bp, synthetic construct
  source 1..75: mol_type = other DNA
tggtagcgacgttgctgctgctgtgcgcgcaggctggcgccgctacgctctctgatattcaggtttctaacggta

SEQ ID NO: 526234 - DNA, 75 bp, synthetic construct
  source 1..75: mol_type = other DNA
ctggccgaccttcccgcaactgtgggttgacggcgagctggtcggcggttgtgatatcgtgatcgaaatgtatca

SEQ ID NO: 526235 - DNA, 75 bp, synthetic construct
  source 1..75: mol_type = other DNA
tggaagcgcaactggcgaccgaagttcgccatcaggttgctgcctttatggagcgtcgcggcatgggcgggctga

SEQ ID NO: 526236 - DNA, 75 bp, synthetic construct
  source 1..75: mol_type = other DNA
ttcgttaaggcatttgtcatgggcaataagaatgatgtgatggatgccagggctatctggatggcagttcagcag

SEQ ID NO: 526237 - DNA, 75 bp, synthetic construct
  source 1..75: mol_type = other DNA
tggtggcggcattggtgctgttgtgcgcacaggctggtgccgctacgctctctgatattcaggtttctaatggca

SEQ ID NO: 526238 - DNA, 75 bp, synthetic construct
  source 1..75: mol_type = other DNA
atgatgtatcgcatcagaaattggttggtagcgacgctgctgctgtgcacgccggtgggtgccgcgacgctctct

SEQ ID NO: 526239 - DNA, 75 bp, synthetic construct
  source 1..75: mol_type = other DNA
cctcgagtttggtgaaaccctacacaaaggtcgggcagcgatggacagagagctaccggcagccctggagcgaat

SEQ ID NO: 526240 - DNA, 75 bp, synthetic construct
  source 1..75: mol_type = other DNA
tggtagcgacgttgctgctgctgtgcgcgcaggtgggcgccgcgacgctctctgatattcaggtttctaacggca

SEQ ID NO: 526241 - DNA, 75 bp, synthetic construct
  source 1..75: mol_type = other DNA
tatgggtgctctctaaccgtcgcgccaacagcgaaatggccagctggctggagcagcacgagaaacagtcggagc

SEQ ID NO: 526242 - DNA, 75 bp, synthetic construct
  source 1..75: mol_type = other DNA
cgttctgcgttcgccggatatcccatccgtactggttgaaaccggttttatcagcaacaacagtgaagaacgttt

SEQ ID NO: 526243 - DNA, 75 bp, synthetic construct
  source 1..75: mol_type = other DNA
gaagaaacgttatatatctggctgtcgttcaaggtagcaattatcttttaccattgcttacatttccatatcttg

SEQ ID NO: 526244 - DNA, 75 bp, synthetic construct
  source 1..75: mol_type = other DNA
aagtgccgccgagcgcagcattaagcgtgaaaaagaaatccgggccgcatttgctgaagagatggcgaacgccgt

SEQ ID NO: 526245 - DNA, 75 bp, synthetic construct
  source 1..75: mol_type = other DNA
cggctcaatgagtggcgcactgatggtgcaatacgttcaggctgatgtcttacggcagattttgccgatcctcgt

SEQ ID NO: 526246 - DNA, 75 bp, synthetic construct
  source 1..75: mol_type = other DNA
tgcaacacttccagcatgtctgattggaattgaagcatgtacaggtgcacatttctgggcaagagagttccagaa

SEQ ID NO: 526247 - DNA, 75 bp, synthetic construct
  source 1..75: mol_type = other DNA
gaagcatcaacccgcacccgcctctctttcgaaacctcgatgcaccgcctgggtgccagcgtggtgggattctcc

SEQ ID NO: 526248 - DNA, 75 bp, synthetic construct
  source 1..75: mol_type = other DNA
ctgaatgccggtgatggctccaaccaacatccgacgcaaaccttgctggacttattcaccattcaggaaacccag

SEQ ID NO: 526249 - DNA, 75 bp, synthetic construct
  source 1..75: mol_type = other DNA
cgtgatttacgcgagcagacaaaagccatgatggccgaactgggggacaagccgaccggtgaaaccacggcactg

SEQ ID NO: 526250 - DNA, 75 bp, synthetic construct
  source 1..75: mol_type = other DNA
attcttgatgcaatgatggaaaaaacacctgatgccgttgccggatttcaaaatagcggtgggatgcgagctgat

SEQ ID NO: 526251 - DNA, 75 bp, synthetic construct
  source 1..75: mol_type = other DNA
aggcaataaaaataataaaaaaatcgctacgctatgttggagggttagcttttttggggtcaatattcttatatc

SEQ ID NO: 526252 - DNA, 75 bp, synthetic construct
  source 1..75: mol_type = other DNA
ctatctggctgtttcagggaaaagaaaaaatgaaatggctgactttaagtagtattttatcccgcttggctatta

SEQ ID NO: 526253 - DNA, 75 bp, synthetic construct
  source 1..75: mol_type = other DNA
tctgtaatcaggttattggtgatcttcttaatgagctttatcacatagaagaaaagattaaaaacagtgaaaaac

SEQ ID NO: 526254 - DNA, 75 bp, synthetic construct
  source 1..75: mol_type = other DNA
ttggaattgaagcatgtacaggtgcacatttctgggcaagagagttccagaaaatggggcatacagttcgaatta

SEQ ID NO: 526255 - DNA, 75 bp, synthetic construct
  source 1..75: mol_type = other DNA
taccgggaacaacctcggcggaatctatcatcgattatttcaaaaatcacaagcctatcaccccagacttaacta

SEQ ID NO: 526256 - DNA, 75 bp, synthetic construct
  source 1..75: mol_type = other DNA
gccggctatctattacatgagtaaggaaaatacgctacaacaggccgtggggttgcccgatcagaaaacgcttaa

SEQ ID NO: 526257 - DNA, 75 bp, synthetic construct
  source 1..75: mol_type = other DNA
gcgaaatcgatcgcgggcggcttcccgctggcgggcgtcaccgggcgcgcggaagtgatggatgccgtcgctcca

SEQ ID NO: 526258 - DNA, 75 bp, synthetic construct
  source 1..75: mol_type = other DNA
tcgccagcatccaccgaatttttaaaaatgacgctgcgccggaagatatcgccgccatcgtgattgagccggttc

SEQ ID NO: 526259 - DNA, 75 bp, synthetic construct
  source 1..75: mol_type = other DNA
tgggcctgatgccagggcacgtttatcgcgcgctttatccttgcccactgcacggcatcagtgaagatgatgcta

SEQ ID NO: 526260 - DNA, 75 bp, synthetic construct
  source 1..75: mol_type = other DNA
gcctgaacctttaagtcttcgtaaggcaaaagagcttgcatcaaaatgtagaaaggaaaacgaaatggcagaggt

SEQ ID NO: 526261 - DNA, 75 bp, synthetic construct
  source 1..75: mol_type = other DNA
ttttacatcgtttaccttgcgcaacaacctgcaacaccagaacaactgacagagattttacaggaaactccctgt

SEQ ID NO: 526262 - DNA, 75 bp, synthetic construct
  source 1..75: mol_type = other DNA
tgtttgaagatggcgatcacagcaaaccggacgccaaactcaccgccgagatcgtggcgcgtgcccgcgataaag

SEQ ID NO: 526263 - DNA, 75 bp, synthetic construct
  source 1..75: mol_type = other DNA
aataaccaaagttcgccgcccttttattgcgctgatcctccccgaaaaaccagaaatcgccaatgagttggtaag

SEQ ID NO: 526264 - DNA, 75 bp, synthetic construct
  source 1..75: mol_type = other DNA
aaaactcgaacgctactggagccaggatatatttagcgatcgagaagccagctacatgtcgcatgaaaaccactt

SEQ ID NO: 526265 - DNA, 75 bp, synthetic construct
  source 1..75: mol_type = other DNA
ttgcgcgaacaaggactggcagccgttccgcgcctcgcgatatatgcccataaagaagattgcggcagtctgctg

SEQ ID NO: 526266 - DNA, 75 bp, synthetic construct
  source 1..75: mol_type = other DNA
gcattacacgctggcgctgaccggcaaggtgaatccgtactctgcgggcatgggcctgatgccagggcacgttta

SEQ ID NO: 526267 - DNA, 75 bp, synthetic construct
  source 1..75: mol_type = other DNA
tacacatcaataggactattgcgtacttatcacgcgggtaatgactccaacttactgatagtgttttatgttcag

SEQ ID NO: 526268 - DNA, 75 bp, synthetic construct
  source 1..75: mol_type = other DNA
tcgacgaaatcgtccaacaagaggggctggaatatgcgactgaggtggtgattgcacgccagtttattgcgcggt

SEQ ID NO: 526269 - DNA, 75 bp, synthetic construct
  source 1..75: mol_type = other DNA
tggcagaggcgcgacgggtaagagaaaacgagctcaataagatacgcgaaaaacaacttcaggcattaagtgatg

SEQ ID NO: 526270 - DNA, 75 bp, synthetic construct
  source 1..75: mol_type = other DNA
cccgtggataaccgaactgaaaaaacgtcgtccggccagtgtggcaatcgtcgccatggcaaacaagctggcacg

SEQ ID NO: 526271 - DNA, 75 bp, synthetic construct
  source 1..75: mol_type = other DNA
tgccagggctatctggatggcagttcagcaaccaggtaaagaaatcgccgttaaaacagaagaacagcagtcagt

SEQ ID NO: 526272 - DNA, 75 bp, synthetic construct
  source 1..75: mol_type = other DNA
catcagtgtttaaatcagggcgagagttcgcggcttatgttggtctggtgcccagacagacaggctcaggaggaa

SEQ ID NO: 526273 - DNA, 75 bp, synthetic construct
  source 1..75: mol_type = other DNA
tggcaaagtacagttgagaacattgttggttggggttatcaaaccagaaagtccggcgacagccgcggcaattct

SEQ ID NO: 526274 - DNA, 75 bp, synthetic construct
  source 1..75: mol_type = other DNA
atggaggcatgtggaggttcccagcactgggcgcgtgagctgaaaaaacagggtcataaagtccggttgttacag

SEQ ID NO: 526275 - DNA, 75 bp, synthetic construct
  source 1..75: mol_type = other DNA
ctgtttattcatggcgcaagggcggcagcattactgaccaaagaacctggtccgtggataaccgaactgaaaaaa

SEQ ID NO: 526276 - DNA, 75 bp, synthetic construct
  source 1..75: mol_type = other DNA
atgaagttgatatatttaaaatattttctgtcttttgtatttgttggtgttatggctatgattgtatgtattcct

SEQ ID NO: 526277 - DNA, 75 bp, synthetic construct
  source 1..75: mol_type = other DNA
gagaaagaaacgaaatggcagaggtgaaacgggtaagagaaaatgagcgcaataagattcgcgaaaaacaaattc

SEQ ID NO: 526278 - DNA, 75 bp, synthetic construct
  source 1..75: mol_type = other DNA
ttaattatcagtctgaacctttaacacttggtaaggcaaataaaatcgcatcagaatgcagaaaaagaaacgaaa

SEQ ID NO: 526279 - DNA, 75 bp, synthetic construct
  source 1..75: mol_type = other DNA
tcaaaacagaagaacagcagtcggtactggttctgcaccgtacccgcatgcaactggtgaagttccggaccgcac

SEQ ID NO: 526280 - DNA, 75 bp, synthetic construct
  source 1..75: mol_type = other DNA
tcgccatggcaaacaagctggcacgaacagtgtgggcaatagccgcacatggacgtaaatacgataaagaatacg

SEQ ID NO: 526281 - DNA, 75 bp, synthetic construct
  source 1..75: mol_type = other DNA
atatcgcaaaacatctgattcaggttcatttcatcgacgagcacacaggtgaagtgattgataagcaactacgtc

SEQ ID NO: 526282 - DNA, 75 bp, synthetic construct
  source 1..75: mol_type = other DNA
cttcagagtggaacatctttttgccagacgttctgtgtcttgtaagggggacactcgaggtgtagctcatgacgt

SEQ ID NO: 526283 - DNA, 75 bp, synthetic construct
  source 1..75: mol_type = other DNA
catccgtttaactactcggcgattaacaatgccggggtgcgcgaggccacgggcgagcttatctgcctgctcaat

SEQ ID NO: 526284 - DNA, 75 bp, synthetic construct
  source 1..75: mol_type = other DNA
catacgccaaacgagatcgcgcatatccctgccctgctgatgcatgtcccggatacgcttcctcagcaggatggc

SEQ ID NO: 526285 - DNA, 75 bp, synthetic construct
  source 1..75: mol_type = other DNA
caagcattgcaactacccagaaatatgacagacgcggcgatgagcgtttgaagagagcgagccaacgcctcgata

SEQ ID NO: 526286 - DNA, 75 bp, synthetic construct
  source 1..75: mol_type = other DNA
tggcgtcgattgcgccgggttttgcctttttaccgacgcttaacgaagtccagacgcaaaaggttaggcctttca

SEQ ID NO: 526287 - DNA, 75 bp, synthetic construct
  source 1..75: mol_type = other DNA
acgaaaccctgctgcacagccagaactatatcggctggagtggcctctggcgggaacagggtaccttcgccatcc

SEQ ID NO: 526288 - DNA, 75 bp, synthetic construct
  source 1..75: mol_type = other DNA
cgcggggtgaaacccgcctgcgctggcagtgtcagggcatctggcatgaacagatcctcccgattacccgtcgcg

SEQ ID NO: 526289 - DNA, 75 bp, synthetic construct
  source 1..75: mol_type = other DNA
aaacgggcgagattgaggatgatgaactcctacgagtcaggatcagattgctgacagcacaggcagaggcgcagg

SEQ ID NO: 526290 - DNA, 75 bp, synthetic construct
  source 1..75: mol_type = other DNA
gttgccgacaacctcccacagatactggctgattacctggctgaaactaccggaaacgtgccggagaagttgcta

SEQ ID NO: 526291 - DNA, 75 bp, synthetic construct
  source 1..75: mol_type = other DNA
ggaaaatatccgtttcacaactgagttggacgacattgtagaatgtgatttggtgattgagaatattactgagga

SEQ ID NO: 526292 - DNA, 75 bp, synthetic construct
  source 1..75: mol_type = other DNA
gaaaatgatggtaagtactggctaacgcaagtgctcgacgaatggagagaggatggccgaaatcctactgatttt

SEQ ID NO: 526293 - DNA, 75 bp, synthetic construct
  source 1..75: mol_type = other DNA
aaaacatggcgaaaagctgccgtgtaagtgcgacagcgttcgacaagtggggagtgactcccgttgaacgtaaag

SEQ ID NO: 526294 - DNA, 75 bp, synthetic construct
  source 1..75: mol_type = other DNA
tgaccagacgatagcggaaggtaagcggttatatgaaggggtaactaactttgatgtaaacgacttactggacga

SEQ ID NO: 526295 - DNA, 75 bp, synthetic construct
  source 1..75: mol_type = other DNA
tgggttgcccaccagttacgccagaatcctgattgtttatggatatacggtgatcacgatctgcttgacgagaga

SEQ ID NO: 526296 - DNA, 75 bp, synthetic construct
  source 1..75: mol_type = other DNA
ataatcttgaatatatcaatcctgagcctctggaaatgactgatgtttgcaagacagaagctctgattgcacttg

SEQ ID NO: 526297 - DNA, 75 bp, synthetic construct
  source 1..75: mol_type = other DNA
tagtgaatatgagtcgcagaagaaggttgctatgcagggtgatattgagcggcttactaagatttctcagaaata

SEQ ID NO: 526298 - DNA, 75 bp, synthetic construct
  source 1..75: mol_type = other DNA
agaatatcccagccgtgattagtagtcttcctgctggacatcgaattgtgaagatggttaaagcttcaaggggtg

SEQ ID NO: 526299 - DNA, 75 bp, synthetic construct
  source 1..75: mol_type = other DNA
agaatatctcaaaagttcttcaaaacatccctgaaggattccgtttaattgacgttagaccagcttcacgcggta

SEQ ID NO: 526300 - DNA, 75 bp, synthetic construct
  source 1..75: mol_type = other DNA
atcatctttgtgtctcctgagcctcaagaaatgccagatatctgcaaaactgaagcactatttaatcttgagcgt

SEQ ID NO: 526301 - DNA, 75 bp, synthetic construct
  source 1..75: mol_type = other DNA
taagcattactccgataagctggataagttaaagcaaaagcttaaaaaagagcttgatactatgaaagagcttgt

SEQ ID NO: 526302 - DNA, 75 bp, synthetic construct
  source 1..75: mol_type = other DNA
ccgataagtttggaggggcaggtaagaatttttatagattaattaaagatgtcgattttgaaaattatgattata

SEQ ID NO: 526303 - DNA, 75 bp, synthetic construct
  source 1..75: mol_type = other DNA
tcaattataaatatacttccaagcgtcaataagtttgggggggcaggtaaaaatttttatagattaattaaagat

SEQ ID NO: 526304 - DNA, 75 bp, synthetic construct
  source 1..75: mol_type = other DNA
tatctaccctcgggagctagtcatttgtctttgctggcaagtaataagggcgctgagtgtaatgttgaaattact

SEQ ID NO: 526305 - DNA, 75 bp, synthetic construct
  source 1..75: mol_type = other DNA
gcaaagtgattgatagcttcggtgactggtcgccacagactgagcatccgctacatattatccagcgtcaagagc

SEQ ID NO: 526306 - DNA, 75 bp, synthetic construct
  source 1..75: mol_type = other DNA
aatcgtgttcattcagtagataccgttgtggtgtctacccaacacagccctgacgtttctctggacgcgctacgg

SEQ ID NO: 526307 - DNA, 75 bp, synthetic construct
  source 1..75: mol_type = other DNA
tgatgcccgccacgctggtatacgcccatcgtctgatggagcgccaggcgcagttgcgtaaatcccaacggttac

SEQ ID NO: 526308 - DNA, 75 bp, synthetic construct
  source 1..75: mol_type = other DNA
tactattttgcatttgaagcgttcgaaaacgcgacgctgaccggcgaccctcaaattttcttatccgccagtaag

SEQ ID NO: 526309 - DNA, 75 bp, synthetic construct
  source 1..75: mol_type = other DNA
cagaaacacctgcgcaataacattggccagcttgtcaggaatatcctgaaaagccgccagatcggtgcgacctgg

SEQ ID NO: 526310 - DNA, 75 bp, synthetic construct
  source 1..75: mol_type = other DNA
catcacgctgacggggaacccgatccgcttaagcaacggcgcagagctgcggttcctgtctaccaacaaaaacac

SEQ ID NO: 526311 - DNA, 75 bp, synthetic construct
  source 1..75: mol_type = other DNA
agttttgaaagcacagaggaagcgattgaacgccgttaccaactgctggccagccgcgataacaaaaccgatctc

SEQ ID NO: 526312 - DNA, 75 bp, synthetic construct
  source 1..75: mol_type = other DNA
accgtgaagtgtgggcgggttatgacccggctcgcagcggagacacctccaccttcgtgatcatcgcgccgccga

SEQ ID NO: 526313 - DNA, 75 bp, synthetic construct
  source 1..75: mol_type = other DNA
acacacgacaaatggcgaaccacctacttttccacccccagcagcaaaacgcaccaggcgtacccgttctggact

SEQ ID NO: 526314 - DNA, 75 bp, synthetic construct
  source 1..75: mol_type = other DNA
atggctaaatattccgatgaattaaaagaagcggcccgcacgctttatatgaaaagctggacgccgaaagatatt

SEQ ID NO: 526315 - DNA, 75 bp, synthetic construct
  source 1..75: mol_type = other DNA
cccgtctggccggatggacgccggaacgagggggggggaagcatggcgaactacgcgataatgcgctgtaaaaag

SEQ ID NO: 526316 - DNA, 75 bp, synthetic construct
  source 1..75: mol_type = other DNA
gccacgcatcagacagttcagcactactacgaatcgataaaccgtggcacccgtagccaggtatcgatctcgccg

SEQ ID NO: 526317 - DNA, 75 bp, synthetic construct
  source 1..75: mol_type = other DNA
tttcgcatcgtatacgctggaatggtctggagattgtggagaagatggcacagaacaatgaaaaggtcatttttc

SEQ ID NO: 526318 - DNA, 75 bp, synthetic construct
  source 1..75: mol_type = other DNA
aacaaacacgctgaaaggatggcggaaattgccgccacgcgtccggcagtgtgcgacgacggtgtggcggcgacc

SEQ ID NO: 526319 - DNA, 75 bp, synthetic construct
  source 1..75: mol_type = other DNA
ttttcgccgtctcaatgaagtggcgtcagggatggccacccataaacactggcgcattacctatttctccacgcc

SEQ ID NO: 526320 - DNA, 75 bp, synthetic construct
  source 1..75: mol_type = other DNA
gtcatcacgtcaaactaatgtcggtcagaaacaagcacacggaacgaatggctgagattgcgcgaatgggagtgg

SEQ ID NO: 526321 - DNA, 75 bp, synthetic construct
  source 1..75: mol_type = other DNA
taaaaatgatcgacgttatcgaaaatcagcggattcagtgggatgcacaagaaaaagatatcgcagcgtcattta

SEQ ID NO: 526322 - DNA, 75 bp, synthetic construct
  source 1..75: mol_type = other DNA
ggcttcggcgtctctgctggacgaagctaccgctgccgccgaagcaatggcgatggctaaacgcgtcagcaaact

SEQ ID NO: 526323 - DNA, 75 bp, synthetic construct
  source 1..75: mol_type = other DNA
gatgacgcgcaaaaagcgctcgatcatcaggacgtctttggcgtgctgttacagcaggtcggcacgacgggggaa

SEQ ID NO: 526324 - DNA, 75 bp, synthetic construct
  source 1..75: mol_type = other DNA
gtgtgaagtcgtgcatcagttcggcggtcaggtttaccttgatggcgcgaacatgaacgctcaggttggcatcac

SEQ ID NO: 526325 - DNA, 75 bp, synthetic construct
  source 1..75: mol_type = other DNA
gtcgtaaacattgaagacgcgatcgcgcgccgcattgccctgctgactgaccgggaaaagaaaacacctggagaa

SEQ ID NO: 526326 - DNA, 75 bp, synthetic construct
  source 1..75: mol_type = other DNA
acaatacaacctgacgtacatcggtattgatgtgacgggcattggtgccggcgtgttcgacattgtcagtgcatt

SEQ ID NO: 526327 - DNA, 75 bp, synthetic construct
  source 1..75: mol_type = other DNA
tggactggcgatgaatggcgtcgcggtcgggccgaacgaaaggacgttgtattcccgaaagaagcagagctgcgt

SEQ ID NO: 526328 - DNA, 75 bp, synthetic construct
  source 1..75: mol_type = other DNA
ccacgcgccgaccatgtcgttcccggtggcggggacgctgatggttgaaccgactgaatctgaaagcaaagtgga

SEQ ID NO: 526329 - DNA, 75 bp, synthetic construct
  source 1..75: mol_type = other DNA
cgactgaatctgaaagcaaagtggaactggatcgctttatcgatgcgatgctggctatccgcgcagaaattgaac

SEQ ID NO: 526330 - DNA, 75 bp, synthetic construct
  source 1..75: mol_type = other DNA
cagcttctgcgcatatggcgggaatgcaggtggtggtcgtggcatgtgataaaaacggcaatatcgatttgactg

SEQ ID NO: 526331 - DNA, 75 bp, synthetic construct
  source 1..75: mol_type = other DNA
tatcacggcccggttggcctgaaacgtatcgctaaccgcatccaccgtctgaccgatatcctggcggcgggcctg

SEQ ID NO: 526332 - DNA, 75 bp, synthetic construct
  source 1..75: mol_type = other DNA
gccactgctgccgccgaagcaatggcgatggcgaaacgcgtcagcaaactgaaaaatgccaaccgcttcttcgtt

SEQ ID NO: 526333 - DNA, 75 bp, synthetic construct
  source 1..75: mol_type = other DNA
aatcagctggatgtacatccgcatgatgggcgcagaagggctgaaaaaagcaagccaggtggcaattcttaacgc

SEQ ID NO: 526334 - DNA, 75 bp, synthetic construct
  source 1..75: mol_type = other DNA
ttaacgaatttatgaaagataccgtgaatctcaaaaaggcagataccgatgacgcgcgtgcaagtcgcgactggc

SEQ ID NO: 526335 - DNA, 75 bp, synthetic construct
  source 1..75: mol_type = other DNA
atgaataaagccgtattaaataacgaactcattgccacaaagacgggagatattaccgtttataattatgatggt

SEQ ID NO: 526336 - DNA, 75 bp, synthetic construct
  source 1..75: mol_type = other DNA
agcagcgccaggcagaagcctggcagaaaacaaccgagcagtgggctgcggatgtaaaagctgacaaagaaatcg

SEQ ID NO: 526337 - DNA, 75 bp, synthetic construct
  source 1..75: mol_type = other DNA
cagttgtcttggcgtgaggagtcgaaaggtcgattccgccttgagtacccggtaatgttcccgtctttgaaggaa

SEQ ID NO: 526338 - DNA, 75 bp, synthetic construct
  source 1..75: mol_type = other DNA
gaaggcgcagtgattcaggatcagcggcaggatattgtccggtcctttgtgatcaatgagccgggcgattacaac

SEQ ID NO: 526339 - DNA, 75 bp, synthetic construct
  source 1..75: mol_type = other DNA
tgaagaatttactggtaccgtcattagattcagttccggcatgggtatatggtgtgacagggaaaataatatctg

SEQ ID NO: 526340 - DNA, 75 bp, synthetic construct
  source 1..75: mol_type = other DNA
ttaacaactttaacaagttaaaagtcaggaactttgttttcattttctgtatttcgatggttttttcgggtattt

SEQ ID NO: 526341 - DNA, 75 bp, synthetic construct
  source 1..75: mol_type = other DNA
aactttactgaatacgaagactggaaaaagcgtacgctgggtgcagaagcgcttgaacctcatcgtatcaaatat

SEQ ID NO: 526342 - DNA, 75 bp, synthetic construct
  source 1..75: mol_type = other DNA
tcggtaaagccatgtcagaagacggcatggtaaccgggaaagaaagcggtcagcgtagtgctgccgaagtgctct

SEQ ID NO: 526343 - DNA, 75 bp, synthetic construct
  source 1..75: mol_type = other DNA
cggagaagtacgagtttcaggctgccgaaggcgtagagctggatacagaagcgttgaaggaattcgagccggtgg

SEQ ID NO: 526344 - DNA, 75 bp, synthetic construct
  source 1..75: mol_type = other DNA
cttcaccgcgcaggccatacaccgcgcggaagaactcggcgtcagcgaacgcgtacattttattcataatgatgc

SEQ ID NO: 526345 - DNA, 75 bp, synthetic construct
  source 1..75: mol_type = other DNA
aacatcctcttaatactcaacgcaataaaaggacttccacattggatatcccacgtatttttaccatcagtgaaa

SEQ ID NO: 526346 - DNA, 75 bp, synthetic construct
  source 1..75: mol_type = other DNA
cacctatgaaacgatgccgaccatctctctggttggggtcgatgactctggtggcaaatccgaagctgttaccat

SEQ ID NO: 526347 - DNA, 75 bp, synthetic construct
  source 1..75: mol_type = other DNA
tgcaggggcgagttctggatggtgatcttatttccggatgggaaaaacgccaggtgatgaaggaggataacggta

SEQ ID NO: 526348 - DNA, 75 bp, synthetic construct
  source 1..75: mol_type = other DNA
tgcaggggcgggttctggatggtgaccttatttccggatgggaaaaacgtcaggtgctgaaagaggacaatggta

SEQ ID NO: 526349 - DNA, 75 bp, synthetic construct
  source 1..75: mol_type = other DNA
ttgccgccttccgggactactgggcagcggaggggaaagttttcacgcaggttcagtgggagcagaaattcgccc

SEQ ID NO: 526350 - DNA, 75 bp, synthetic construct
  source 1..75: mol_type = other DNA
gaatccgtcgccggatttccgacgacgggctgcactgtggggagcggctccgccagagccggaatttacacctgc

SEQ ID NO: 526351 - DNA, 75 bp, synthetic construct
  source 1..75: mol_type = other DNA
ttcagtgggagcagaaattcgcccgtcacgtaaatcacgtcagggcgcaggttaaaccagtcagcaagggggtga

SEQ ID NO: 526352 - DNA, 75 bp, synthetic construct
  source 1..75: mol_type = other DNA
gagcgggaaagactgcggaagcagaacactgattgtcacgatgagtcacgacgcgtcacgcatatgtcacgacaa

SEQ ID NO: 526353 - DNA, 75 bp, synthetic construct
  source 1..75: mol_type = other DNA
acattaaatgatataactgcacgtatagttacagaattaaaatctgtcctacaagaatataaacctgatattata

SEQ ID NO: 526354 - DNA, 75 bp, synthetic construct
  source 1..75: mol_type = other DNA
cttccgagctgtgaaggcaccccgcccttatgtggtagggcctcaagtcattgagacgggtaagaagtatgtgtt

SEQ ID NO: 526355 - DNA, 75 bp, synthetic construct
  source 1..75: mol_type = other DNA
ggaaaccacgaaggatgacggtaaaacttgggagcagttcatcccggaagagcgatacaagtatcagcttgtgaa

SEQ ID NO: 526356 - DNA, 75 bp, synthetic construct
  source 1..75: mol_type = other DNA
gaatacctggacggccttagcgaacccatcgggaaatttccgatgactgatggctggcatccgtcgctggatttt

SEQ ID NO: 526357 - DNA, 75 bp, synthetic construct
  source 1..75: mol_type = other DNA
aattactattacaggtaatactgttatcgatgctctacatatgacaaaagataaaatagataaagatgtaagtct

SEQ ID NO: 526358 - DNA, 75 bp, synthetic construct
  source 1..75: mol_type = other DNA
ttgtcggtaatacggttattgatgcacttatggcaattgttagcaaaatccgttcacggccagaattacagatac

SEQ ID NO: 526359 - DNA, 75 bp, synthetic construct
  source 1..75: mol_type = other DNA
tgtacggttcagtgatgtaaccaatgcatggcgaacttcaccagaagctttacaccattgttcctggggatacta

SEQ ID NO: 526360 - DNA, 75 bp, synthetic construct
  source 1..75: mol_type = other DNA
agtacaaagtcagatattcagcctccgtatattacaggtcttctcgataatgtagagagggcgttagataagata

SEQ ID NO: 526361 - DNA, 75 bp, synthetic construct
  source 1..75: mol_type = other DNA
gtttttattgtgctggatatatataacacatatcgtccggagaatgaaacagggttttattatcatatctataat

SEQ ID NO: 526362 - DNA, 75 bp, synthetic construct
  source 1..75: mol_type = other DNA
tggaacaacggcgaattatattttcccggtatgaatatttttattacatgatgaattcttaccctgtgtattcaa

SEQ ID NO: 526363 - DNA, 75 bp, synthetic construct
  source 1..75: mol_type = other DNA
cgttcgtcgtctgcacgatactgaccgttcaggtgcgtgggcgcttctctatctggaccggtcattggctggtta

SEQ ID NO: 526364 - DNA, 75 bp, synthetic construct
  source 1..75: mol_type = other DNA
agaagaaactggataaggatgaactggagaaattactcaggaatattgataaattctataatgcattttattcat

SEQ ID NO: 526365 - DNA, 75 bp, synthetic construct
  source 1..75: mol_type = other DNA
cgtgcttctggtttttttctgcacagaaggtacttctggcagcaatcgttacggaaacgatccgaagtttggttc

SEQ ID NO: 526366 - DNA, 75 bp, synthetic construct
  source 1..75: mol_type = other DNA
cggagcatcacgccccgctctggcagcaggtcagtcaggtggaacatcgaccactgagtgcctatgaggagctgt

SEQ ID NO: 526367 - DNA, 75 bp, synthetic construct
  source 1..75: mol_type = other DNA
gctggacgccgtggcgattggtgatgtacgcgacggcggcgatcggctggagaatctggagaagatgatcaacgc

SEQ ID NO: 526368 - DNA, 75 bp, synthetic construct
  source 1..75: mol_type = other DNA
acgatgaaagaattaagcttgagcaatcgctaaagatgtcaccgaagcaaattacctttgtgtctcctgagcctc

SEQ ID NO: 526369 - DNA, 75 bp, synthetic construct
  source 1..75: mol_type = other DNA
ccttgtaaaacgactaatcagtcaaatggtggatattcgacgatttgcgccgttcctgaaaaagaggattacacc

SEQ ID NO: 526370 - DNA, 75 bp, synthetic construct
  source 1..75: mol_type = other DNA
tggtgataatccaaccgaaatcgccagaagttatcttaatgactataactcacgtacttataccgaaacactaac

SEQ ID NO: 526371 - DNA, 75 bp, synthetic construct
  source 1..75: mol_type = other DNA
gcgctggagcaggaacatctgcagccgttaccggatacagacttcgataccagttacttcgatatccgccatgtg

SEQ ID NO: 526372 - DNA, 75 bp, synthetic construct
  source 1..75: mol_type = other DNA
cacctccaaagcgcaaacggcgattaaagactgggtgaatgcctataactcgctaatagataccttcagcagcct

SEQ ID NO: 526373 - DNA, 75 bp, synthetic construct
  source 1..75: mol_type = other DNA
tacccgtggttcaatgattgaagttttacactccaactttattcgcactgcccgcgcgaaaggtttacctatgcg

SEQ ID NO: 526374 - DNA, 75 bp, synthetic construct
  source 1..75: mol_type = other DNA
attggctgccgggcggtggctggaatggtggggcgcttaaattcatgatattgccaatggtggcgttgtcactcg

SEQ ID NO: 526375 - DNA, 75 bp, synthetic construct
  source 1..75: mol_type = other DNA
gccggaagtgatggccaatatcgaagcgaaatatcatcttaatgatccgatcatgacacagtatttcagctacct

SEQ ID NO: 526376 - DNA, 75 bp, synthetic construct
  source 1..75: mol_type = other DNA
tccaggtaggtgacgcaactattcgtattggtgacatttttcatacccattggggctatgagcaaactaatatcg

SEQ ID NO: 526377 - DNA, 75 bp, synthetic construct
  source 1..75: mol_type = other DNA
tttattcagagtctgaatgtactggataatcgtcggcgtgatcgaattatgcttaagtatttcgtttcgaaagtt

SEQ ID NO: 526378 - DNA, 75 bp, synthetic construct
  source 1..75: mol_type = other DNA
atgttaaaatttattctacgtcgctgtctggaagcgattccgacgttatttattcttattactatttcgttcttt

SEQ ID NO: 526379 - DNA, 75 bp, synthetic construct
  source 1..75: mol_type = other DNA
cagacgctgctcctgtgggcgctgccagtggtgttgttactgctgatggcgctgatcctctggcgggtgaggggg

SEQ ID NO: 526380 - DNA, 75 bp, synthetic construct
  source 1..75: mol_type = other DNA
tttgcttgatgacgtagagaaggtgctggataagataaatattctgatagataaagagtatgtttatgatggtaa

SEQ ID NO: 526381 - DNA, 75 bp, synthetic construct
  source 1..75: mol_type = other DNA
ccggcatcacaaccaccatcggcagcaacctgaccagttggctttcgacaacgggcattattaaagccgctaccg

SEQ ID NO: 526382 - DNA, 75 bp, synthetic construct
  source 1..75: mol_type = other DNA
gtctggaagcgattccgacgctatttattcttattactatttcgttctttatgatgcgcctcgcgcctggaagcc

SEQ ID NO: 526383 - DNA, 75 bp, synthetic construct
  source 1..75: mol_type = other DNA
cgggctgggcatgtatcgtgatttactggagcaaagttttattatgaatgacctgaagctctatcaaaatatacc

SEQ ID NO: 526384 - DNA, 75 bp, synthetic construct
  source 1..75: mol_type = other DNA
tcgagcggctggcgaacaaaacagagaacctgtacaactttatttccggaaagacacagcctgtagcgaatccgc

SEQ ID NO: 526385 - DNA, 75 bp, synthetic construct
  source 1..75: mol_type = other DNA
tggctgttgagcacagttgtgagattaatcgtgtcggggaaaggtttgctgaagtgagagtacccgtctgtgacg

SEQ ID NO: 526386 - DNA, 75 bp, synthetic construct
  source 1..75: mol_type = other DNA
actaccggacgattaatgccttaccacggatcttacctgccaataatgaaaataaactggcggaacttgagcata

SEQ ID NO: 526387 - DNA, 75 bp, synthetic construct
  source 1..75: mol_type = other DNA
ggttattttgcggagcaatatcaaagcattgcagaaaaaatgccccgcattttgtaaaccgggtttcgaaacaaa

SEQ ID NO: 526388 - DNA, 75 bp, synthetic construct
  source 1..75: mol_type = other DNA
aagaacgattgcatttcgggcgtgtagcttcggtttcatcagcatcaggcgcgatacaagatgttaccgaaagtg

SEQ ID NO: 526389 - DNA, 75 bp, synthetic construct
  source 1..75: mol_type = other DNA
tgcgaggcgggaaacagcttccggcgatgttgcgcctgttaaccagcgatttagtgctcgacgaacctgatgact

SEQ ID NO: 526390 - DNA, 75 bp, synthetic construct
  source 1..75: mol_type = other DNA
cgtttgtcggtgatcggcccgacgatgtgtggctggcgaagcttggcgaactcacggcagatgatgaatctgcga

SEQ ID NO: 526391 - DNA, 75 bp, synthetic construct
  source 1..75: mol_type = other DNA
gatgctcctggtacatataaggctggttatactatctgccgttctgcagattttaactcatgggaatatgtgcca

SEQ ID NO: 526392 - DNA, 75 bp, synthetic construct
  source 1..75: mol_type = other DNA
gttatacaatttgccgttctgtagatttaaattcatgggaatatgtgccagaccatcgcggtgaaatcgtctata

SEQ ID NO: 526393 - DNA, 75 bp, synthetic construct
  source 1..75: mol_type = other DNA
cgtaccacctggagcaggcctttccgctgctgatgaaacaactggagctcatgctcaccagtggtgaactcagcc

SEQ ID NO: 526394 - DNA, 75 bp, synthetic construct
  source 1..75: mol_type = other DNA
atgttgggaacgcgggtattactttcttccgcgacgttgccgccagatttgattcaggctctgttcgcggcttat

SEQ ID NO: 526395 - DNA, 75 bp, synthetic construct
  source 1..75: mol_type = other DNA
tgccgatcactactattcatctaacgacgcgcagcaaaaatggcaagatccgaattatatcgtctgggcaaatag

SEQ ID NO: 526396 - DNA, 75 bp, synthetic construct
  source 1..75: mol_type = other DNA
cgatcgccaaagcggcacgctcaaacaacgggtagacgaacaccttgtgggcgtcgcgcatcatgcgtatctgct

SEQ ID NO: 526397 - DNA, 75 bp, synthetic construct
  source 1..75: mol_type = other DNA
cagtaaaagcaaacatgtggtggcggcgcaatggtggcgtgcaccgctaagctggaacggctggatgcagcgcca

SEQ ID NO: 526398 - DNA, 75 bp, synthetic construct
  source 1..75: mol_type = other DNA
agtaaaaaccagtcatctactggcacctttcccagatgcgatgatcgatacagcattttttgatcgcttccacgc

SEQ ID NO: 526399 - DNA, 75 bp, synthetic construct
  source 1..75: mol_type = other DNA
ttacactccaattttattcgtactgcccgggcgaaagggttacctatgcggcggatcattttacgtcacgcatta

SEQ ID NO: 526400 - DNA, 75 bp, synthetic construct
  source 1..75: mol_type = other DNA
atcagcataccgtcacgctgtatgcaaaagggctgacctatcgggtggcgcaggggaacctcccccctacgctcc

SEQ ID NO: 526401 - DNA, 75 bp, synthetic construct
  source 1..75: mol_type = other DNA
cccgggacaacgcatcccgacaacaacaaccgcccctggtgggggctaccctgcaccgtgatgccctgtttcggg

SEQ ID NO: 526402 - DNA, 75 bp, synthetic construct
  source 1..75: mol_type = other DNA
gcagcgaaagaagctgtgcgtgttggctttgattatttcaaaggtaacctgaatagaatcagtgcgtcggcgaag

SEQ ID NO: 526403 - DNA, 75 bp, synthetic construct
  source 1..75: mol_type = other DNA
gtccgatgacgacgaagttgtaatgcaaggccttgagaatgtgaaaaaaatcttggctgagaactatgtccgacc

SEQ ID NO: 526404 - DNA, 75 bp, synthetic construct
  source 1..75: mol_type = other DNA
gattcaggcgctgttcgcggcttatcttgccgggcgtaaaatgtggcagtcgtcatgcggtacgaacggcagacc

SEQ ID NO: 526405 - DNA, 75 bp, synthetic construct
  source 1..75: mol_type = other DNA
acgcccgcattatgtatgcgcttgccgatgagcgggaagggtgccgttttaccgtcgcgctgggattgcgcacgc

SEQ ID NO: 526406 - DNA, 75 bp, synthetic construct
  source 1..75: mol_type = other DNA
gtgggtaatattcgtcattttaatgctcaggggcgcgttcccacaaatcgcacaacgcaaaccagcctggtgaac

SEQ ID NO: 526407 - DNA, 75 bp, synthetic construct
  source 1..75: mol_type = other DNA
cccctggtgggggctaccctgcaccgtgacgccctgtttcggtgcacgtctggcgcaggagggtaaccggttgca

SEQ ID NO: 526408 - DNA, 75 bp, synthetic construct
  source 1..75: mol_type = other DNA
ggttcattcagtgacgaagaagcattgagtctggaccaagcgtttccactaatgacgaaacagcttgagcggatg

SEQ ID NO: 526409 - DNA, 75 bp, synthetic construct
  source 1..75: mol_type = other DNA
cgcatgatatcagcgaaccctggtgggggctcagacgcagtgtctccccgtgttttggtgcccgactggtccagg

SEQ ID NO: 526410 - DNA, 75 bp, synthetic construct
  source 1..75: mol_type = other DNA
cgtaccacctggaccaggcctttccgctgctgatgaaacaactggaactcatgctcaccagcggtgaactgaatc

SEQ ID NO: 526411 - DNA, 75 bp, synthetic construct
  source 1..75: mol_type = other DNA
cttataacccgacaacgctgggtcacaaagggcaaattaaacgtgcgctgcaaactctggcagcagcgaaaaaac

SEQ ID NO: 526412 - DNA, 75 bp, synthetic construct
  source 1..75: mol_type = other DNA
ctatctcaaaaaccgtgaccgccgacatcccgatcgttggcgatgcgcggctggtgttggatcaaatgctggagt

SEQ ID NO: 526413 - DNA, 75 bp, synthetic construct
  source 1..75: mol_type = other DNA
ctctattccgctggttatcctttccgggcaggtcgcaacctcgctgataggttacgatgcctttcaggagtgtga

SEQ ID NO: 526414 - DNA, 75 bp, synthetic construct
  source 1..75: mol_type = other DNA
tatgtgccagatcatcgcggtgaaattgtctatagcaccgaaacaggagaatcgaaagaaatcacagctccgggt

SEQ ID NO: 526415 - DNA, 75 bp, synthetic construct
  source 1..75: mol_type = other DNA
ctggtggcagcagattgaacagtggcgcgctcgtcagtgcctgaaatatgacactcacagtgaaaagattaaacc

SEQ ID NO: 526416 - DNA, 75 bp, synthetic construct
  source 1..75: mol_type = other DNA
gtctgatgtaggccagcaccagatgttcgctgcgctttattatccttttgacagacctcgccgttggatcaactc

SEQ ID NO: 526417 - DNA, 75 bp, synthetic construct
  source 1..75: mol_type = other DNA
ggggctgggggcgtttccggcaacgcatcgtcaggcactgggcatgctgggaatgcacggtacctatgaagccaa

SEQ ID NO: 526418 - DNA, 75 bp, synthetic construct
  source 1..75: mol_type = other DNA
ggtttacctgcggcgctgggcgtcaaaatggcactgccgggagaaaccgtggtctgcgtcactggcgatggcagt

SEQ ID NO: 526419 - DNA, 75 bp, synthetic construct
  source 1..75: mol_type = other DNA
aaggagcaggacaacagcgagatgctggccgctgacgtcatcatcagccagaaacgcatcggtaacctgccggcg

SEQ ID NO: 526420 - DNA, 75 bp, synthetic construct
  source 1..75: mol_type = other DNA
gggcgttaaacaagtattcggttatcccggaggcgcggtccttgatatttacgatgcattgcataccgtgggtgg

SEQ ID NO: 526421 - DNA, 75 bp, synthetic construct
  source 1..75: mol_type = other DNA
aaacggaagacattccgcaggtgctgaaaaaggctttctggctggcggcaagtggtcgcccaggaccagtggtcg

SEQ ID NO: 526422 - DNA, 75 bp, synthetic construct
  source 1..75: mol_type = other DNA
gaatgcacggtacctatgaagccaatatgacgatgcataacgcggatgtgattttcgccgtcggggtacgatttg

SEQ ID NO: 526423 - DNA, 75 bp, synthetic construct
  source 1..75: mol_type = other DNA
ttaacgctgtgctggattacattgacgcggtgacggcaactgataccagcaccgcgccagatgtcatctggcctg

SEQ ID NO: 526424 - DNA, 75 bp, synthetic construct
  source 1..75: mol_type = other DNA
agaggcctgttcagcgatgcagatgcgtaccctctggaccaggcctttcctctgctgatgaaacaactggaactc

SEQ ID NO: 526425 - DNA, 75 bp, synthetic construct
  source 1..75: mol_type = other DNA
agaggcctgttcagcgatgcagatgcgtaccctctggaccaggcttttcccctgctgatgaaacaactgaaactc

SEQ ID NO: 526426 - DNA, 75 bp, synthetic construct
  source 1..75: mol_type = other DNA
agaggcctgttcagcgatgcagatgcgtaccctctggaccaggcttttccactgctgatgaaacaactgcaactc

SEQ ID NO: 526427 - DNA, 75 bp, synthetic construct
  source 1..75: mol_type = other DNA
cgcttcccgacgacaacaaagaccgcccctggtgggggctgccctgcaccgtgacgccctgttttggcgcccgtc

SEQ ID NO: 526428 - DNA, 75 bp, synthetic construct
  source 1..75: mol_type = other DNA
agcggaatatcacgccgcgcctgggagcccgtctggtgcaggaggggaaccggttgcattatctggctgaccggg

SEQ ID NO: 526429 - DNA, 75 bp, synthetic construct
  source 1..75: mol_type = other DNA
agaggcctgttcagcgatgcagatgcgtaccctctggaccaggcgtttcccctgctgatgaaacaactgtaactc

SEQ ID NO: 526430 - DNA, 75 bp, synthetic construct
  source 1..75: mol_type = other DNA
aaaagaaggaaatcacttccgccattattgcaaatggcgctgcaatcagtggcgaaagcctaaatccatgcctac

SEQ ID NO: 526431 - DNA, 75 bp, synthetic construct
  source 1..75: mol_type = other DNA
tggcacatgggcaaggaggggctgagataaaaaccgataattcggcaccaactttgacatgtaaccatgaagcac

SEQ ID NO: 526432 - DNA, 75 bp, synthetic construct
  source 1..75: mol_type = other DNA
taactaatttcaatattgcatctccagatatttgttctcggttcttgtctgaagaacaggctatgtatcttgcgg

SEQ ID NO: 526433 - DNA, 75 bp, synthetic construct
  source 1..75: mol_type = other DNA
tcgctctaactcctgtggtgagcgaattgtttccagtgaaaatgcgcgtgtcatttgtgccgttattccgactaa

SEQ ID NO: 526434 - DNA, 75 bp, synthetic construct
  source 1..75: mol_type = other DNA
cccgccatcagcataccgtcacgctgtatgcaaaaaggctgacctgcgaagccgacaccctcggcagttgtggct

SEQ ID NO: 526435 - DNA, 75 bp, synthetic construct
  source 1..75: mol_type = other DNA
gaatgccggataccaggaaaatctgctaaatgatgtgaatgctgacctgattaacttttacaagactctgcaacg

SEQ ID NO: 526436 - DNA, 75 bp, synthetic construct
  source 1..75: mol_type = other DNA
cggaaagattgcttccgggacaaaattcattacagtcatgaaaagtagagaaattaaaggaaacccaaagcgaaa

SEQ ID NO: 526437 - DNA, 75 bp, synthetic construct
  source 1..75: mol_type = other DNA
ctgtttacctctttctcagggagtttagtctccaggatttccggggcggttcaggcctttccgctgctgatgaaa

SEQ ID NO: 526438 - DNA, 75 bp, synthetic construct
  source 1..75: mol_type = other DNA
tgaactgaatccccgccatcagcataccgtcacgctgtatgcaaaaggtctgacctgcaaagctgacactctcgg

SEQ ID NO: 526439 - DNA, 75 bp, synthetic construct
  source 1..75: mol_type = other DNA
gcgaaattcatccttaaattacacagaacctcatcacattgtacctatgtccaggcaagatgcttttgacacatc

SEQ ID NO: 526440 - DNA, 75 bp, synthetic construct
  source 1..75: mol_type = other DNA
ttgtacctatgtccaggcaggatgactttaacacttcgcttgacgtcgaagaaaatataatatcgctgtgttgca

SEQ ID NO: 526441 - DNA, 75 bp, synthetic construct
  source 1..75: mol_type = other DNA
aaattcatcttggcaaggggtttgaagatatgttgaggaaaatatatgccgagcggaaagatgtattaaaaaaag

SEQ ID NO: 526442 - DNA, 75 bp, synthetic construct
  source 1..75: mol_type = other DNA
gcagaatctttgaagttggatgaagtatttccgcattttatcagtcagatggaattgatgttgaccactggtgaa

SEQ ID NO: 526443 - DNA, 75 bp, synthetic construct
  source 1..75: mol_type = other DNA
cgcatcccgacgataacaacgaccacccctggtgggggctaccctgcaccgtgacgccctgttttggggcacgtc

SEQ ID NO: 526444 - DNA, 75 bp, synthetic construct
  source 1..75: mol_type = other DNA
gacactgtatgcgaaggggctgacctgtgaagccgacaccctcggctcctgtggttacgtttatctggctgttta

SEQ ID NO: 526445 - DNA, 75 bp, synthetic construct
  source 1..75: mol_type = other DNA
cgcatcccgacgacaatcacgaccgcccctggtggggactgccctgcaccgtgacgccctgtttcggggtacgtc

SEQ ID NO: 526446 - DNA, 75 bp, synthetic construct
  source 1..75: mol_type = other DNA
cgcttcccgacgacaacaaagaccgcccctggtggggactgccctgcaccgtgacgccctgtttcggggctcgtc

SEQ ID NO: 526447 - DNA, 75 bp, synthetic construct
  source 1..75: mol_type = other DNA
cgcttcccgacgacaacaaagaccgcccctggtggggactgccctgcaccgtgacgccctgtttcggtgcacgtc

SEQ ID NO: 526448 - DNA, 75 bp, synthetic construct
  source 1..75: mol_type = other DNA
tcatcaagaaaactcaaattatgggatgcgctagagttcctcaaggaatactcaccggaaagaataatattctat

SEQ ID NO: 526449 - DNA, 75 bp, synthetic construct
  source 1..75: mol_type = other DNA
gacactggcatcaccaacggctgattgaatcatcgttgggcgttgttgagtaccacggcacgttagctggcaaag

SEQ ID NO: 526450 - DNA, 75 bp, synthetic construct
  source 1..75: mol_type = other DNA
ccacgcgcggaggccgtgccagtgccggaaattgatttccaaaaaagcctggccctttatccggtattcgatctg

SEQ ID NO: 526451 - DNA, 75 bp, synthetic construct
  source 1..75: mol_type = other DNA
atttaaccggttttttgtaccaatgcgtgatgcactgcgcgcgctgcgcggtgaattacgaaacacaatgcgtat

SEQ ID NO: 526452 - DNA, 75 bp, synthetic construct
  source 1..75: mol_type = other DNA
gcgcacgtcaacgggccttgattaatttatcgctttgttttccggagtacagtgataaagaaaaggagaatatcg

SEQ ID NO: 526453 - DNA, 75 bp, synthetic construct
  source 1..75: mol_type = other DNA
gaattctttgactacgcggtgggcgctgcgccgatgtctgaaaaagctgttttgcttctcggtggggatgttctt

SEQ ID NO: 526454 - DNA, 75 bp, synthetic construct
  source 1..75: mol_type = other DNA
cgccatcaagcaatcacgttcttgattgcgattcacgctacgcaaaacttgtttatgtggcgatccggtcagtcc

SEQ ID NO: 526455 - DNA, 75 bp, synthetic construct
  source 1..75: mol_type = other DNA
attcaagctactcatgaaatgaccgcacggaaagtgcctcaaggttcattaaccggcagagataattatctttaa

SEQ ID NO: 526456 - DNA, 75 bp, synthetic construct
  source 1..75: mol_type = other DNA
tggggatattatcttccggatcaggatcatggcccggaattcagtgagtttgcggatttttttgcgacgtataaa

SEQ ID NO: 526457 - DNA, 75 bp, synthetic construct
  source 1..75: mol_type = other DNA
ggacgtttcagaagctagctgttttcaataacaaacgtatcatcgaaccggaaactaatgttttttcaacaacca

SEQ ID NO: 526458 - DNA, 75 bp, synthetic construct
  source 1..75: mol_type = other DNA
gacgcaaaggtgtatacaccgccactgatgcggaaatataaacacgtaaaatttaaccgggttttcgtgccaatg

SEQ ID NO: 526459 - DNA, 75 bp, synthetic construct
  source 1..75: mol_type = other DNA
atttaaccgggtttttgtgccaatgcacgatgcattgcgggcgctgcgtggggaattgcgaaacacaatgcggat

SEQ ID NO: 526460 - DNA, 75 bp, synthetic construct
  source 1..75: mol_type = other DNA
gccctctgattaacataattcgcggcacccaaacgctggcacaaaaacaggtgcctaagggagtattaacaggaa

SEQ ID NO: 526461 - DNA, 75 bp, synthetic construct
  source 1..75: mol_type = other DNA
agagggcagttcagcgacgcggatgtataccatctggaccaggcctttccgctgctgatgaaacaactggaactc

SEQ ID NO: 526462 - DNA, 75 bp, synthetic construct
  source 1..75: mol_type = other DNA
ccggttcagcgatgcggatgcataccatctggaccaggcctttccactgctgatgaaacaactggaactcatgct

SEQ ID NO: 526463 - DNA, 75 bp, synthetic construct
  source 1..75: mol_type = other DNA
agaggcaggttcagcgacgcagatgcgtaccacctggaccaggcctttccgctgctgatgaaacaactggaactc

SEQ ID NO: 526464 - DNA, 75 bp, synthetic construct
  source 1..75: mol_type = other DNA
atctttctctcgcggcagagattcgattgaaggtaaagcgtcgatggttttcgtcggcaacatcaatcaaagcgt

SEQ ID NO: 526465 - DNA, 75 bp, synthetic construct
  source 1..75: mol_type = other DNA
tacctggtggggactgccctgcaccgtgacgccctgttttggtgcccgtctggtacaggaaggcaaccggttgca

SEQ ID NO: 526466 - DNA, 75 bp, synthetic construct
  source 1..75: mol_type = other DNA
ttaccttgccgaccgcgccggtatcagaggccggttcagcgatgcagatgcataccacctggaccaggcctttcc

SEQ ID NO: 526467 - DNA, 75 bp, synthetic construct
  source 1..75: mol_type = other DNA
ccgcccctggtgggggctgccctgcaccgtgacgccctgtttcggggcacgtctggtgcaggagggtaaccggtt

SEQ ID NO: 526468 - DNA, 75 bp, synthetic construct
  source 1..75: mol_type = other DNA
ctgaaaaacttcaacggcgagcagaatctgccggggtatacgaaagatcccgagcaaaagaaatactacggtggc

SEQ ID NO: 526469 - DNA, 75 bp, synthetic construct
  source 1..75: mol_type = other DNA
ttgttcatgccctggttctggggacgtttatctggtttgcaggaccagcctgcgcggacagtaacacggattaca

SEQ ID NO: 526470 - DNA, 75 bp, synthetic construct
  source 1..75: mol_type = other DNA
tatgcccgcctgttccactggaattgaccctggcgaaaacattccgagaagagtggcagtatttacaggtaaggg

SEQ ID NO: 526471 - DNA, 75 bp, synthetic construct
  source 1..75: mol_type = other DNA
gtaccgtagcaccacgcttcactgctcgactggtacaggaaagacataacctgcattacctggctgatcgggccg

SEQ ID NO: 526472 - DNA, 75 bp, synthetic construct
  source 1..75: mol_type = other DNA
gccgaaaccctcggctcctgtggttacgtttatctggctgtttatcctgcgaccgaaacggaaaatgtagtggtc

SEQ ID NO: 526473 - DNA, 75 bp, synthetic construct
  source 1..75: mol_type = other DNA
atgaagctaaacatcgacctcggcaaatacgttattaccggaaccaaacacgatctgattcttagcgaaagagga

SEQ ID NO: 526474 - DNA, 75 bp, synthetic construct
  source 1..75: mol_type = other DNA
cactgtatgcgaaagggctgacctgcgaagccgacaccctaggctcctgtggttacgtttatctggctgtttatc

SEQ ID NO: 526475 - DNA, 75 bp, synthetic construct
  source 1..75: mol_type = other DNA
ggcactgtatgcgaaagggctgacctgcgatgccgacaccctcggctcctgtggttacgtttatctggctgttta

SEQ ID NO: 526476 - DNA, 75 bp, synthetic construct
  source 1..75: mol_type = other DNA
actcatgctcaccagcggtgaactgaatccccgccatcagcataccgtgaccctgtatgcgaatggactgacctg

SEQ ID NO: 526477 - DNA, 75 bp, synthetic construct
  source 1..75: mol_type = other DNA
actcatgctcaccagcggtgaactgaatccccgccatcagcataccgtgactctgtatgcgaacggactgacctg

SEQ ID NO: 526478 - DNA, 75 bp, synthetic construct
  source 1..75: mol_type = other DNA
gtatgcgaaggggctgacctgcgaagccgatacccttggcagttgtggttacgcttatctggctgtttatccgac

SEQ ID NO: 526479 - DNA, 75 bp, synthetic construct
  source 1..75: mol_type = other DNA
gaatgctgtcagctccagtttgggaaatccgcctcgatgaaatcaaattcaccgacaacacgctgggttttggta

SEQ ID NO: 526480 - DNA, 75 bp, synthetic construct
  source 1..75: mol_type = other DNA
aatccggctcgatgaaatcaaattcaccgacaacacgctgggctttggtaaaaaaatgatttggctacgcgactc

SEQ ID NO: 526481 - DNA, 75 bp, synthetic construct
  source 1..75: mol_type = other DNA
ctgaatccccgccatcagcataccgtcacgctgtatgcaaaagggctgacctgcgaagccgataccctcggcagt

SEQ ID NO: 526482 - DNA, 75 bp, synthetic construct
  source 1..75: mol_type = other DNA
aggctgacctgcgaagccgacaccctcggcagttgtggctacgtttatatggctgtttatccgacgcccgaaacg

SEQ ID NO: 526483 - DNA, 75 bp, synthetic construct
  source 1..75: mol_type = other DNA
gcgaagccgacaccctcggcagttgtggctacgtttatatggctgtttatccgacaccagcagttcccgcaacaa

SEQ ID NO: 526484 - DNA, 75 bp, synthetic construct
  source 1..75: mol_type = other DNA
actcatgctcaccagcggtgaactgaatccccgccatcagcataccgtcacgctgtatgcgaatggactgacctg

SEQ ID NO: 526485 - DNA, 75 bp, synthetic construct
  source 1..75: mol_type = other DNA
actcatgctcaccagcggtgaactgaatccccgccatcagcataccgtcactctgtatgcgaagggactgacctg

SEQ ID NO: 526486 - DNA, 75 bp, synthetic construct
  source 1..75: mol_type = other DNA
actcatgctcaccagcggtgaactgaatccccgccatcagcataccgttacactgtatgcgaaaggactgacctg

SEQ ID NO: 526487 - DNA, 75 bp, synthetic construct
  source 1..75: mol_type = other DNA
aaaacatgctaattacatttccagatccggcgaatataagagctacaaatcgcgggaggatctggaattttcgtc

SEQ ID NO: 526488 - DNA, 75 bp, synthetic construct
  source 1..75: mol_type = other DNA
tgctttacttggcctgcttttatgcagttggatacggcgctggatatataacaggtgggataacttggcacacac

SEQ ID NO: 526489 - DNA, 75 bp, synthetic construct
  source 1..75: mol_type = other DNA
ttcacccgcggtgatatgctgaaggtctgtccgaaatttgtcacatcacttgccggtttttccccaaaacagacg

SEQ ID NO: 526490 - DNA, 75 bp, synthetic construct
  source 1..75: mol_type = other DNA
gagctacaggaacaacgcaatgctttgaatgggattcgtggcctgtttcggggggctgacaaaagggagattgat

SEQ ID NO: 526491 - DNA, 75 bp, synthetic construct
  source 1..75: mol_type = other DNA
atccggtaacatgccatcatgggcgaagaaaaatcccgcagagttatggaaagccgcagatgaatttgaacgaaa

SEQ ID NO: 526492 - DNA, 75 bp, synthetic construct
  source 1..75: mol_type = other DNA
aacggaggaatgctgagcgggaactcaagaccgccagagatgccgcaaatgccattcagcaggaacaggagcaaa

SEQ ID NO: 526493 - DNA, 75 bp, synthetic construct
  source 1..75: mol_type = other DNA
gctctactaccggatggttttgtattaatggatgccagatccgggaagtcgatttatcgacggcggatgcagtcg

SEQ ID NO: 526494 - DNA, 75 bp, synthetic construct
  source 1..75: mol_type = other DNA
gctgcagttgttcctgataaggatctggataaatatgacgagtatttaccagagtctttgcttgcgaaagggtag

SEQ ID NO: 526495 - DNA, 75 bp, synthetic construct
  source 1..75: mol_type = other DNA
ttcacccgcggtgatatgctgaaggtctgtccgaaatttgtcacatcacttgccggtttttccccgaaacagaca

SEQ ID NO: 526496 - DNA, 75 bp, synthetic construct
  source 1..75: mol_type = other DNA
aggcatacgcccgggaatatgacgaggaaacaacagaaaccgctgattttggctcttacgaagtaaaaggcaata

SEQ ID NO: 526497 - DNA, 75 bp, synthetic construct
  source 1..75: mol_type = other DNA
aaccgtttactggaggctgttaatcagaattgcccgaccagaattgtgttgggtagcgtggagaaggggaaagaa

SEQ ID NO: 526498 - DNA, 75 bp, synthetic construct
  source 1..75: mol_type = other DNA
atgagcgaaacccgatttgtaactctggcatccgactttaacaatattaaagaaatttattctgatgacgagtta

SEQ ID NO: 526499 - DNA, 75 bp, synthetic construct
  source 1..75: mol_type = other DNA
gggggctgacaaaagggagattgatgcgcgtattctggagcaaaaaagtgtgctggaaaccgctgaacatgaaag

SEQ ID NO: 526500 - DNA, 75 bp, synthetic construct
  source 1..75: mol_type = other DNA
tatggtagcgatgagagccgtatgttgcagaaggtgaatcctgaaacggagttcagtgcgggtgaggttaagacg

SEQ ID NO: 526501 - DNA, 75 bp, synthetic construct
  source 1..75: mol_type = other DNA
tgagcctcaccaactacaggcattaataaaagaggcaggtggcgaggtgcgcgacgtaatcataatcggcttgta

SEQ ID NO: 526502 - DNA, 75 bp, synthetic construct
  source 1..75: mol_type = other DNA
catttccgcaaccacatgctgattgagttcaataacatcaagacattactaaatcctgagcgcgaagatattaga

SEQ ID NO: 526503 - DNA, 75 bp, synthetic construct
  source 1..75: mol_type = other DNA
acatgcttaggatcgctctatgaatttgctaaacgccgttatgacggaataccagacagtaacccttttcacggt

SEQ ID NO: 526504 - DNA, 75 bp, synthetic construct
  source 1..75: mol_type = other DNA
tacttacgtcatctttacccttataagttgtggagaaaaagcacatctacacgagatctgaatgaggcgagaaga

SEQ ID NO: 526505 - DNA, 75 bp, synthetic construct
  source 1..75: mol_type = other DNA
tagaacagtgtcagggatagaggctatcaaacggtctttaggcgctgatcgcgttgcaacggttactacagttac

SEQ ID NO: 526506 - DNA, 75 bp, synthetic construct
  source 1..75: mol_type = other DNA
ggagtgaaggacaatttttgctgccacagatgtttcagcagcaggaacgctatctggaacacgttattcactacc

SEQ ID NO: 526507 - DNA, 75 bp, synthetic construct
  source 1..75: mol_type = other DNA
cacgcctggagttttgccattcacaatccgaaagcgagcattgacggcggcgaacagcctcatgcgcatatcatg

SEQ ID NO: 526508 - DNA, 75 bp, synthetic construct
  source 1..75: mol_type = other DNA
acaggaggaaaaagcactgtgtatacagcgatcctgggccaggggggcatcacgtagtaacgaacgtgatcaaga

SEQ ID NO: 526509 - DNA, 75 bp, synthetic construct
  source 1..75: mol_type = other DNA
gtccggaaaaatataaagaatataagcacctgacgccctatgccgggctgaaatcggtggtagatgaggtgcagt

SEQ ID NO: 526510 - DNA, 75 bp, synthetic construct
  source 1..75: mol_type = other DNA
gggtttcagcgcgcttgtgctgacggtgaaggcgcagatgtctgccgacgccctgctgcaatatttttccgccca

SEQ ID NO: 526511 - DNA, 75 bp, synthetic construct
  source 1..75: mol_type = other DNA
gcagtgccaatacgtacgccgaacagtgaagaaactagcttcgacaataaccctgaatcactggcacgcttttcg

SEQ ID NO: 526512 - DNA, 75 bp, synthetic construct
  source 1..75: mol_type = other DNA
gaaacagctgattttggctcttacgaagtaaaaggcaataaggttgagtttgaagtgttcaatcctgaagaccgt

SEQ ID NO: 526513 - DNA, 75 bp, synthetic construct
  source 1..75: mol_type = other DNA
aacaggcgcaaatccagagccagctcgacagtatggttaacggtgagcagtcgcagattgtcagcttaagggcgc

SEQ ID NO: 526514 - DNA, 75 bp, synthetic construct
  source 1..75: mol_type = other DNA
gggctacagtaatagcttattttatgctggcatttttccattatctcatagcaacaataatgttaaaggcaaacc

SEQ ID NO: 526515 - DNA, 75 bp, synthetic construct
  source 1..75: mol_type = other DNA
accggcacgcaggttaacggtgatgaagccaccgtgaacaataacggtaaaaccaccgttgacggcaaggattcc

SEQ ID NO: 526516 - DNA, 75 bp, synthetic construct
  source 1..75: mol_type = other DNA
ttgtctgtagacatgagtcccccagcgcaagaatttccggatataattattggaaattttggtgtagaggtaaaa

SEQ ID NO: 526517 - DNA, 75 bp, synthetic construct
  source 1..75: mol_type = other DNA
gtaattatacacagaaatgaaagaatcaaatactggctaaatttggctgattcttatgcggtgggatggatacca

SEQ ID NO: 526518 - DNA, 75 bp, synthetic construct
  source 1..75: mol_type = other DNA
acgtggcgctggcatgggcagtatttaaaatcttccgcattccggtgaatcagtggacgctggcgacggcggcgt

SEQ ID NO: 526519 - DNA, 75 bp, synthetic construct
  source 1..75: mol_type = other DNA
tgctgcaaatggcagtaacggatgcactaacaggcctcttaccgggtacattcaccaggcgttttttaattgctg

SEQ ID NO: 526520 - DNA, 75 bp, synthetic construct
  source 1..75: mol_type = other DNA
tccggcccccaatcccagagtgatatacgcctcggatgccagaacacagggaaaggttacaggcatgcggctgtt

SEQ ID NO: 526521 - DNA, 75 bp, synthetic construct
  source 1..75: mol_type = other DNA
ccttcctgaccttgtgctccaccccgagcaggagacaataaaatgcaaagaaaaacattactcgcagcccttata

SEQ ID NO: 526522 - DNA, 75 bp, synthetic construct
  source 1..75: mol_type = other DNA
ctgtcaggaatatggctatacagtatagctgtggcgttaattattttatcatcatcaccactgctctaccgtatt

SEQ ID NO: 526523 - DNA, 75 bp, synthetic construct
  source 1..75: mol_type = other DNA
ggaggatttgtcttatggcattcaacatggtgcataaaaggacataaagaaggcccactgggtccatggctatgt

SEQ ID NO: 526524 - DNA, 75 bp, synthetic construct
  source 1..75: mol_type = other DNA
ccatcgtcttaatattggcactggagacctgtggcttattgcaggtattaccgcatggtcagggttatataacgc

SEQ ID NO: 526525 - DNA, 75 bp, synthetic construct
  source 1..75: mol_type = other DNA
atgactaagcagcccgaagactggctcgacgacgttcccggtgatgacatcgaagacgaagacgatgaaattatc

SEQ ID NO: 526526 - DNA, 75 bp, synthetic construct
  source 1..75: mol_type = other DNA
aaaaactggcacgccgttatacatacatgaaacaagcgattccggtaaaagctaatctcgataaagcatatgcgg

SEQ ID NO: 526527 - DNA, 75 bp, synthetic construct
  source 1..75: mol_type = other DNA
cgcgaacgaatttgataaatatgtaatcccggtgacgccggataataaggcgattgatgaaagcctgaaaacggc

SEQ ID NO: 526528 - DNA, 75 bp, synthetic construct
  source 1..75: mol_type = other DNA
gtggcagcgttggtaaaaccttaatttcatcctacctgttagccccgcgtctgactggagcaaaattctatgcgg

SEQ ID NO: 526529 - DNA, 75 bp, synthetic construct
  source 1..75: mol_type = other DNA
aacttatcggagcggccgcaggtgttgaaaatggtcgctctgaagcatccttaaactctactgacagtcaagaac

SEQ ID NO: 526530 - DNA, 75 bp, synthetic construct
  source 1..75: mol_type = other DNA
ctccctgtcagtgcagaagttgttgcgctggctgatggcaataacaccgttgctgccagtggttttgtgtgggat

SEQ ID NO: 526531 - DNA, 75 bp, synthetic construct
  source 1..75: mol_type = other DNA
agttttaaaggtgatgatttctcccgtctgattgaggatgtggtttttgaagatgcagcgattattgatattggc

SEQ ID NO: 526532 - DNA, 75 bp, synthetic construct
  source 1..75: mol_type = other DNA
aagaagggaacaagccgccgaaatccgcacgacagattttccagtatctgcgcgagttagcggagaacgaagggt

SEQ ID NO: 526533 - DNA, 75 bp, synthetic construct
  source 1..75: mol_type = other DNA
gggtgcggaaattgtagatctggggaaaaacgcgctggataagatcccgctagatgcggatctgcgcgcagctat

SEQ ID NO: 526534 - DNA, 75 bp, synthetic construct
  source 1..75: mol_type = other DNA
atgactaagcagcccgaagactggctcgacgacgttcccggtgatgacatcgaagacgatgaaattatctgggtc

SEQ ID NO: 526535 - DNA, 75 bp, synthetic construct
  source 1..75: mol_type = other DNA
tatcacgcctgggaagacgaaatccgagccagaaactatggtagccgagtcttggctatctatcgcaaccttcgt

SEQ ID NO: 526536 - DNA, 75 bp, synthetic construct
  source 1..75: mol_type = other DNA
tatcacgcctgggaagacgagaatcgagccagaaactatggtagccgagtcttagctatctatcgcaaccttcgt

SEQ ID NO: 526537 - DNA, 75 bp, synthetic construct
  source 1..75: mol_type = other DNA
tgggtcagtaaaagtgaaattaaacgtgatgccgaggagctaaaacgccttggcgcagaaattgttgatctgggg

SEQ ID NO: 526538 - DNA, 75 bp, synthetic construct
  source 1..75: mol_type = other DNA
acaccggaagaattcaatgcgttttgtgcagggctgaaaacatttcttgtctcgtttgaaacgaataatgtgagt

SEQ ID NO: 526539 - DNA, 75 bp, synthetic construct
  source 1..75: mol_type = other DNA
aacttacggctaatcttaagatgattgccggggcgattggctgcctcaacaggaacgatgttgcacaaattatca

SEQ ID NO: 526540 - DNA, 75 bp, synthetic construct
  source 1..75: mol_type = other DNA
acggaaaaatcgaaatggcctggcaggaaactttctgggcgcatggcttcggcaaagtcaccgataaatttggcg

SEQ ID NO: 526541 - DNA, 75 bp, synthetic construct
  source 1..75: mol_type = other DNA
ctgcgttacccacgttatcgctggtacgaccgttttatgatcaagctaattatgaagatgtcaggcggtgaaacg

SEQ ID NO: 526542 - DNA, 75 bp, synthetic construct
  source 1..75: mol_type = other DNA
acctcagaagcgcagtgaaaaaagccgatcgctatgagcctgtcatcaacgacagttatcaggcgctggctgagc

SEQ ID NO: 526543 - DNA, 75 bp, synthetic construct
  source 1..75: mol_type = other DNA
aagtatcgcggtgtaaatgatgcaggaatgccatgctggcttgaaattcccccgaccaccccagaacaaatggta

SEQ ID NO: 526544 - DNA, 75 bp, synthetic construct
  source 1..75: mol_type = other DNA
atggatctattgattgttttaacttacgtggcgctggcgtgggcggtctttaaaatctttcgtattccggtgaat

SEQ ID NO: 526545 - DNA, 75 bp, synthetic construct
  source 1..75: mol_type = other DNA
tggcctaattacctgcgtccggttccggcaatgacccttattgaatatacgccggatatggataagtcttctgta

SEQ ID NO: 526546 - DNA, 75 bp, synthetic construct
  source 1..75: mol_type = other DNA
tgatgtcaccgaccagcgcagacgataagtttgtcgtagaagaagattgtgcgccggttgagttaatgggcagcg

SEQ ID NO: 526547 - DNA, 75 bp, synthetic construct
  source 1..75: mol_type = other DNA
agggggtgctgcaatcgttaacggtcgtgcccggaacggatggtgtgctgggaaccattgaactcgaccctaacg

SEQ ID NO: 526548 - DNA, 75 bp, synthetic construct
  source 1..75: mol_type = other DNA
atgccaaatcatgatcgattcgaatgccaaactgcgatcgattcagatgccattttgcagctggcgtgggcggtc

SEQ ID NO: 526549 - DNA, 75 bp, synthetic construct
  source 1..75: mol_type = other DNA
atggatctattgattgttttaacttacgtggcgctggcgtgggcggtctttaaaatcttccgcattccggtgaat

SEQ ID NO: 526550 - DNA, 75 bp, synthetic construct
  source 1..75: mol_type = other DNA
ttgctctacactctctggagctactacaaaatgtggggacgcatgacaacagaaactctccgccgtaacgaaaac

SEQ ID NO: 526551 - DNA, 75 bp, synthetic construct
  source 1..75: mol_type = other DNA
tggctgggatgatgggcgcggggtggatgccggaagggtcatcttaagcatgcaggggtggttaacaggaagtca

SEQ ID NO: 526552 - DNA, 75 bp, synthetic construct
  source 1..75: mol_type = other DNA
tacccgacaaataaattgcctgatttacgtggtgagtttattcgtggctgggatgatggaagagggattgatact

SEQ ID NO: 526553 - DNA, 75 bp, synthetic construct
  source 1..75: mol_type = other DNA
atcgtctggttaccagaccgacagaaactgtttctgataatacgtctaactatatgacgactgattatgattccc

SEQ ID NO: 526554 - DNA, 75 bp, synthetic construct
  source 1..75: mol_type = other DNA
ctcttatctggttcaggaagccaatatatcacccgacagcgtggtgcagttttcggtaaacgacattgccctgct

SEQ ID NO: 526555 - DNA, 75 bp, synthetic construct
  source 1..75: mol_type = other DNA
atcgtacaaaagaaataccagcatcagaagttatgggaagaggatatattgcaagcctgacgccgggtgctgata

SEQ ID NO: 526556 - DNA, 75 bp, synthetic construct
  source 1..75: mol_type = other DNA
ggcctaccccaccaataaattaccggatttacgcggtgaatttatccgtggctgggatgatgggcgcggggtgga

SEQ ID NO: 526557 - DNA, 75 bp, synthetic construct
  source 1..75: mol_type = other DNA
aacagaacccgcctctgctacattccagacaatcgctttagagtggcataaaggctctataggccatccctcatg

SEQ ID NO: 526558 - DNA, 75 bp, synthetic construct
  source 1..75: mol_type = other DNA
cccgctgctgggtttcttctgcccgttgctgacggtgatggcgatttatcgtggtcgccccggttggggatttct

SEQ ID NO: 526559 - DNA, 75 bp, synthetic construct
  source 1..75: mol_type = other DNA
gcaaccaggtctggttgatcctcgctggtggggcattatttgccgcctggcccagagtgtatgcagcggcgtttt

SEQ ID NO: 526560 - DNA, 75 bp, synthetic construct
  source 1..75: mol_type = other DNA
tacgctgcaaaatattacaggtagctttttggatatgaccacggggccaaataataatactgtcggcgcatttac

SEQ ID NO: 526561 - DNA, 75 bp, synthetic construct
  source 1..75: mol_type = other DNA
cggtgaatttattcgtggctgggatgatgggcgcgggattgactctggtcgtaacttattatctgcacagaatga

SEQ ID NO: 526562 - DNA, 75 bp, synthetic construct
  source 1..75: mol_type = other DNA
tgctggttggctcccgccgtatatcccaggacatcagcacccgtgatgaaggcgggggcggaaaggtcgtggtta

SEQ ID NO: 526563 - DNA, 75 bp, synthetic construct
  source 1..75: mol_type = other DNA
cacggcggcgtctttatgctggcaggaagagccagtaatacaagccttacgagcggcgctatgaataatctgggg

SEQ ID NO: 526564 - DNA, 75 bp, synthetic construct
  source 1..75: mol_type = other DNA
cggtaacctgcaggtgagcgtggaagaccttgtcagaaccggcgcgtttctggtggcgatgtccctgtggcataa

SEQ ID NO: 526565 - DNA, 75 bp, synthetic construct
  source 1..75: mol_type = other DNA
gtggaagatgtcgtcagaaccggtgcttttgtggtggcgatgtccctgtggcatagccatccgcagaagacaaag

SEQ ID NO: 526566 - DNA, 75 bp, synthetic construct
  source 1..75: mol_type = other DNA
ctgctggcgaaagtgcgtgattatctgtggaagaacgcgcatttggtttctacggtggtgagcggtaaagaagag

SEQ ID NO: 526567 - DNA, 75 bp, synthetic construct
  source 1..75: mol_type = other DNA
aatataacggtgtgtctgtcacgctttcggagctgtctgcgctgcagcgtatcgagcatcttgccctgctgaaac

SEQ ID NO: 526568 - DNA, 75 bp, synthetic construct
  source 1..75: mol_type = other DNA
gcctgccgatgccattgcccgggctgaaaatgtggtattgcgtctgtccgggatgaccgggcctgtccggatgga

SEQ ID NO: 526569 - DNA, 75 bp, synthetic construct
  source 1..75: mol_type = other DNA
gatggttcgtcaaaagcagcatcttcaacatctgctcgccagggcgccgcatcttatcccccgtcacattcggcc

SEQ ID NO: 526570 - DNA, 75 bp, synthetic construct
  source 1..75: mol_type = other DNA
atgatgcgttgatttatataagagatgagtttattgatgagcggaaattacgaggtgaatcacatgaaactgtaa

SEQ ID NO: 526571 - DNA, 75 bp, synthetic construct
  source 1..75: mol_type = other DNA
atgatcgtgcaaaaagagctggtcactatttacgattatgaggcccctgtacctgaagagccgttttccttcaga

SEQ ID NO: 526572 - DNA, 75 bp, synthetic construct
  source 1..75: mol_type = other DNA
agaaattaattcatacaaaatccgtcgcgaacagaaagaaatctccaggcatttaaaacctgctaaaagtatatc

SEQ ID NO: 526573 - DNA, 75 bp, synthetic construct
  source 1..75: mol_type = other DNA
tagaaaaggcattagaccttgccatttctgaatcattcttcaatgcaacgtcgcctgatggtataaagaatgctt

SEQ ID NO: 526574 - DNA, 75 bp, synthetic construct
  source 1..75: mol_type = other DNA
gcggagcagtacgtgttctgcggtgaaaaggatttctctctggttgagagaatgctggccgatagtgaacgctac

SEQ ID NO: 526575 - DNA, 75 bp, synthetic construct
  source 1..75: mol_type = other DNA
cgagacaatgaacgacctgcaaccgggtatgatcctcgaaggcgcagtgaccaacgtcaccaactttggcgcgtt

SEQ ID NO: 526576 - DNA, 75 bp, synthetic construct
  source 1..75: mol_type = other DNA
acgcgattgtcggcgcgtttgttgctgcactcctgttcgaagcaggaaagaaaggtttcgcgctttatatcacca

SEQ ID NO: 526577 - DNA, 75 bp, synthetic construct
  source 1..75: mol_type = other DNA
ctctttgtctgggtctactggacatggtgtatcgtcttgcttggcgcggaaattactgtcactctcggggaatac

SEQ ID NO: 526578 - DNA, 75 bp, synthetic construct
  source 1..75: mol_type = other DNA
ccccattctctttgtttgggtctactggacatggtgtatcgtcttgcttggcgcggaaattactgtcactctcgg

SEQ ID NO: 526579 - DNA, 75 bp, synthetic construct
  source 1..75: mol_type = other DNA
cgccagccggcaacctatctgcgccgcgcataaattgcagccggatgcagacggtattggcgctactctccagcc

SEQ ID NO: 526580 - DNA, 75 bp, synthetic construct
  source 1..75: mol_type = other DNA
aaggatttttttaatattctgaaaaagaaaaaaggaagcattcgctggagtaaaacttttgatgcccgtaaagca

SEQ ID NO: 526581 - DNA, 75 bp, synthetic construct
  source 1..75: mol_type = other DNA
gtcccaaaatttactcgtttgctgtgtattggatgattttgacgctggggccgctgctggcgggagccagtctgg

SEQ ID NO: 526582 - DNA, 75 bp, synthetic construct
  source 1..75: mol_type = other DNA
gatgagcgaaaattacggggcgaatcaccagaaacggtaatagccatttttaatcgcgaactacagaatatattc

SEQ ID NO: 526583 - DNA, 75 bp, synthetic construct
  source 1..75: mol_type = other DNA
gatattactgaagtggcgaaaaataacacgctgactgatgatgatttttctgcgggaaagtcttcgacggcgagc

SEQ ID NO: 526584 - DNA, 75 bp, synthetic construct
  source 1..75: mol_type = other DNA
caccgtggtgaaagcgggtgacattgtgaaggtgaaagtgctggaagtggatcttcagcgtaaacgtatcgccct

SEQ ID NO: 526585 - DNA, 75 bp, synthetic construct
  source 1..75: mol_type = other DNA
acggatatgcaacaacagatggtcagataacggtctacaactatgatggagaaacgcgcgaatacatgacgttat

SEQ ID NO: 526586 - DNA, 75 bp, synthetic construct
  source 1..75: mol_type = other DNA
ataaagcagcggccaaatttaaatacggtccggtttgggcgagggcaggttatattcagccaaccggtcagacgc

SEQ ID NO: 526587 - DNA, 75 bp, synthetic construct
  source 1..75: mol_type = other DNA
taattgtgaactacagaatatattcaaccaactaatagaatattactttattaaagggggaaactgtattccccc

SEQ ID NO: 526588 - DNA, 75 bp, synthetic construct
  source 1..75: mol_type = other DNA
cgctgcgcagggtgtgcaagctgtcggcgcgtaaacaaaagcaggtgacggcacctcaccaatggcaatttcact

SEQ ID NO: 526589 - DNA, 75 bp, synthetic construct
  source 1..75: mol_type = other DNA
gaaaggtcagtggctggaagccgccggttttgccaccggcacggcggtagatgtcaaagtaatggaaggctgtat

SEQ ID NO: 526590 - DNA, 75 bp, synthetic construct
  source 1..75: mol_type = other DNA
aaacggtggaaatacgctgcgaaggtgatgatgaaaacgaggcaatacaaactctcactaccttatttcgcgacc

SEQ ID NO: 526591 - DNA, 75 bp, synthetic construct
  source 1..75: mol_type = other DNA
atgagtcgtttatcccacctgtcggaacatagcgccgccgccgtgtgcaaagggccatcaagcctgaacgcgcgc

SEQ ID NO: 526592 - DNA, 75 bp, synthetic construct
  source 1..75: mol_type = other DNA
cactacgcaaggtgtgtaagctgtcggcgcgtaaacaaaggcaggtacaggaatttattggggtaattacaggta

SEQ ID NO: 526593 - DNA, 75 bp, synthetic construct
  source 1..75: mol_type = other DNA
gccggttttgctaccggcacggcggtagttgtcaaagtaatggaaggctgtattgtcctcaccgcccaacaaccc

SEQ ID NO: 526594 - DNA, 75 bp, synthetic construct
  source 1..75: mol_type = other DNA
aggcttaatacctgccttgcactgttgcggcccacgctgaacgagccgatcccgccgcatctgattgacggtttt

SEQ ID NO: 526595 - DNA, 75 bp, synthetic construct
  source 1..75: mol_type = other DNA
catgtagtgctctccgatactggtgatgcgctactggcgaatgaagcggtgagaagtgcgtatttaggcgggtaa

SEQ ID NO: 526596 - DNA, 75 bp, synthetic construct
  source 1..75: mol_type = other DNA
ttatgcggcgatccgcgcgccaccagcgggcgaattgtgtttgatgataaagacattaccgactggcagacggcg

SEQ ID NO: 526597 - DNA, 75 bp, synthetic construct
  source 1..75: mol_type = other DNA
tcttaactctcttatacggaaaattaatgattttgataaaacactacagcatgctgcggcgcgtagtgatataac

SEQ ID NO: 526598 - DNA, 75 bp, synthetic construct
  source 1..75: mol_type = other DNA
tggctctgcagagttctgctacaggtagcgcaacaaacgttggtgtgcaaattctggacagaaccggtgctgcgc

SEQ ID NO: 526599 - DNA, 75 bp, synthetic construct
  source 1..75: mol_type = other DNA
atcactctgcgattactgcctggcgctgacacagatactgaatggtcactcactgttacctgaaaccgaaaccac

SEQ ID NO: 526600 - DNA, 75 bp, synthetic construct
  source 1..75: mol_type = other DNA
atgagcgattcgtttactacgtcagaactcattaccgcgacacagcaggtatttaagttcaatccgttattttta

SEQ ID NO: 526601 - DNA, 75 bp, synthetic construct
  source 1..75: mol_type = other DNA
cggttgtacgacatattattaaaaatacccaggacgacgtcgtcaatgtagataagctgacctatgccggcaacc

SEQ ID NO: 526602 - DNA, 75 bp, synthetic construct
  source 1..75: mol_type = other DNA
agacaaatctttgccaatttatggcaaaggcgatcaaatccgtgattggttatacgttgaggatcatgctcgcgc

SEQ ID NO: 526603 - DNA, 75 bp, synthetic construct
  source 1..75: mol_type = other DNA
gaccgtcgatacgcgatcgatgcggataaaatcagccgtgagctcggttggaaaccgcaagagacgttcgaaagt

SEQ ID NO: 526604 - DNA, 75 bp, synthetic construct
  source 1..75: mol_type = other DNA
tgttgaattgcctgcgggcgtcgcggcggtaatcaatggcaacgagcagcagtggctggagctggaatctgcagc

SEQ ID NO: 526605 - DNA, 75 bp, synthetic construct
  source 1..75: mol_type = other DNA
gtggtcataacgagaagaaaaacctcgaggtggttcataccatttgcgatctgctggatgaaattgttccgaaag

SEQ ID NO: 526606 - DNA, 75 bp, synthetic construct
  source 1..75: mol_type = other DNA
tggcaaaccactgccaatttatggcaaaggtgaccagatccgcgactggttgtatgttgaagatcatgctcgtgc

SEQ ID NO: 526607 - DNA, 75 bp, synthetic construct
  source 1..75: mol_type = other DNA
attgctgccccctatcttccgtttgaacgcagcttgtatgctgaaccaccagatcctttattaaggcaggttatt

SEQ ID NO: 526608 - DNA, 75 bp, synthetic construct
  source 1..75: mol_type = other DNA
ccgtgctgtatggcaaatacaccatggaaggggagcagtttgatactgtcgaggttgatttcgggcgctctgaag

SEQ ID NO: 526609 - DNA, 75 bp, synthetic construct
  source 1..75: mol_type = other DNA
atattgaatcctatgcagacctcgcctccggtgcggttaacgtgatcatcatggacggtaaagcctggaagcagc

SEQ ID NO: 526610 - DNA, 75 bp, synthetic construct
  source 1..75: mol_type = other DNA
cgatgtagtgctcactatttgtgatttgttggatgagattgtaccgaaagagaaatcttatcgtgagcaaattac

SEQ ID NO: 526611 - DNA, 75 bp, synthetic construct
  source 1..75: mol_type = other DNA
gaattacccttatttactgagacgacagcttacgcaccaagcagcccttattccgcatcaaaagcatccagcgat

SEQ ID NO: 526612 - DNA, 75 bp, synthetic construct
  source 1..75: mol_type = other DNA
atgatttcagagcataattctgtgttggaaagatacccacgtatccagaaagtgctcaatagcactgtaccggca

SEQ ID NO: 526613 - DNA, 75 bp, synthetic construct
  source 1..75: mol_type = other DNA
tgctggaaaacggccatgtggtgctctccgataccggcgacgcgctgctggcgaacgaagcagtgagaagtgcgt

SEQ ID NO: 526614 - DNA, 75 bp, synthetic construct
  source 1..75: mol_type = other DNA
ttatgaaaaccgtctggtaccgaaaaaagtcgatatccgccagcgcatctggcagcccactcaactggaaggaaa

SEQ ID NO: 526615 - DNA, 75 bp, synthetic construct
  source 1..75: mol_type = other DNA
cggtatccctgcatattcctgtctggatgaacctggtatacataaggcgggttatgctatctgccgttcgatgga

SEQ ID NO: 526616 - DNA, 75 bp, synthetic construct
  source 1..75: mol_type = other DNA
atgagctttgaagctaaaaaggaacactccattgccattatggaaagcaagaagatgtggcgttgtaattatgcc

SEQ ID NO: 526617 - DNA, 75 bp, synthetic construct
  source 1..75: mol_type = other DNA
aatcgaagaagtggctgaacgttccgaagaagacgaattagaaatccgcgagatcgcgcgggaactaaatattga

SEQ ID NO: 526618 - DNA, 75 bp, synthetic construct
  source 1..75: mol_type = other DNA
gatgaaattctggtacatacaccggaagcggttgatctgtctcgtctgaataataacgctccgttgctgttcaat

SEQ ID NO: 526619 - DNA, 75 bp, synthetic construct
  source 1..75: mol_type = other DNA
aaacgctatccgcaaacaaaaatctcctgggtggagttccccgctggcccacagatgctggaggcgttaaacgtt

SEQ ID NO: 526620 - DNA, 75 bp, synthetic construct
  source 1..75: mol_type = other DNA
ccgaacagtgtggccttcagtagccagcagcagcgcctgaactggctggttaacgaaggttactatgatgaaagc

SEQ ID NO: 526621 - DNA, 75 bp, synthetic construct
  source 1..75: mol_type = other DNA
atggattcccccgattttgcccgcacggtagagactgccgtgcgcggtttaacggcggtgtcagatatgagtcat

SEQ ID NO: 526622 - DNA, 75 bp, synthetic construct
  source 1..75: mol_type = other DNA
tgacgcaggaaacgatggattatcacgcgctgaatgcgatgcttaacctctacgatagcgcaggtcgcattcagt

SEQ ID NO: 526623 - DNA, 75 bp, synthetic construct
  source 1..75: mol_type = other DNA
ttgtcattacgctgtttgcccacgcacacgccagcggttttcgttttcagacattcctcggagcatggaagtttt

SEQ ID NO: 526624 - DNA, 75 bp, synthetic construct
  source 1..75: mol_type = other DNA
ctgccacgccaacattcctcaactgtggtaaacagcagcgcggcgaactggtttcctgttttctgctgcgtattg

SEQ ID NO: 526625 - DNA, 75 bp, synthetic construct
  source 1..75: mol_type = other DNA
tgacgcaggaagcaatggattaccacgccctgaatgcgatgcttaacctttacgatagcgcaggtcgcattcagt

SEQ ID NO: 526626 - DNA, 75 bp, synthetic construct
  source 1..75: mol_type = other DNA
gagcggtgcaactgctgctgaactggaatctaccctgaaagataacggcgtttccggttatatcatcgaaaacgg

SEQ ID NO: 526627 - DNA, 75 bp, synthetic construct
  source 1..75: mol_type = other DNA
ctctgttgcacgcacggttctgcgagccgtccgtgactctgtggtctctgttgcccgcgccgtatggaactggat

SEQ ID NO: 526628 - DNA, 75 bp, synthetic construct
  source 1..75: mol_type = other DNA
aggacgaactgcgcacggagtctgtccgcactcagacccgtgaacagtttaccggtgcggtggaccggatatttg

SEQ ID NO: 526629 - DNA, 75 bp, synthetic construct
  source 1..75: mol_type = other DNA
caattgaaaaaccgctctcctccctgccttacccgatttcccgtcacatcctggaacatctgcgcaaactcaccc

SEQ ID NO: 526630 - DNA, 75 bp, synthetic construct
  source 1..75: mol_type = other DNA
aaagtgggtgtatgaactgtttccacgtctgcatgagcgccgtgttcagcgggcaggcaccatgtccggcggtga

SEQ ID NO: 526631 - DNA, 75 bp, synthetic construct
  source 1..75: mol_type = other DNA
aggcttaatccctgtcttgcactgttgcggcccacgctgaacgagccgatcccaccacatctgattgacgggttt

SEQ ID NO: 526632 - DNA, 75 bp, synthetic construct
  source 1..75: mol_type = other DNA
ctctgttgcacgcacggttctgcgcgccgtccgtgactctgtggtctctgttgcccgcgcagtatggaactggat

SEQ ID NO: 526633 - DNA, 75 bp, synthetic construct
  source 1..75: mol_type = other DNA
ggcttcgttgatgaaaacggcgctgcaccggaaagcaaagctgaatttgcgaacgtgaaactgtctccgaaaact

SEQ ID NO: 526634 - DNA, 75 bp, synthetic construct
  source 1..75: mol_type = other DNA
aagccgctccggttgaagaagaaaaaaccgaggaagtggctgaacgttccgaagaagacgaattagaaattcgcg

SEQ ID NO: 526635 - DNA, 75 bp, synthetic construct
  source 1..75: mol_type = other DNA
cagtccgctatcgttccgcgtatctgggtagatctggacttcactgtagttcagccggaatcgctgaaagttctt

SEQ ID NO: 526636 - DNA, 75 bp, synthetic construct
  source 1..75: mol_type = other DNA
aaaacggagccctgccatgaatgggatatggccggtattcagccttctcctgcacaggcacagaatattcgcgaa

SEQ ID NO: 526637 - DNA, 75 bp, synthetic construct
  source 1..75: mol_type = other DNA
gagcgtctgtgttgcctctgttgtccgtacggccctgcgcgctgttcgtgacacggtggtctctgttgcccgtgc

SEQ ID NO: 526638 - DNA, 75 bp, synthetic construct
  source 1..75: mol_type = other DNA
tcctgcttcgtgtctgggtcgtctgggcgtgaccgtcctgtctggtctgaatagcccgatcgctgttccgaaaat

SEQ ID NO: 526639 - DNA, 75 bp, synthetic construct
  source 1..75: mol_type = other DNA
atgcgtaacatcattaaactggcgctagcgggtttacttagcgtctctacactcgcggttgccgcagagtcttcg

SEQ ID NO: 526640 - DNA, 75 bp, synthetic construct
  source 1..75: mol_type = other DNA
gcaaatgcttgaggcgttaaacgttggcagtattgatctcggcagtaccggggatattccgccaatcttcgccca

SEQ ID NO: 526641 - DNA, 75 bp, synthetic construct
  source 1..75: mol_type = other DNA
gatcttaaaggtcacaaagttgcctttcagaaaggttccagttcgcacaaccttttactgcgcgcactacgccag

SEQ ID NO: 526642 - DNA, 75 bp, synthetic construct
  source 1..75: mol_type = other DNA
agagccagctggatagcctggtgttgggtgaacattctcaaatcgccagcctgaaagcacagctcgcggaagcaa

SEQ ID NO: 526643 - DNA, 75 bp, synthetic construct
  source 1..75: mol_type = other DNA
gatggcaccgatctcaatcaaacaggatcgttttatctggcagcccgtccctatgcggaaaaaaacggcgcattt

SEQ ID NO: 526644 - DNA, 75 bp, synthetic construct
  source 1..75: mol_type = other DNA
acagggcggcgtgcgggtgctgaaagatggcaccgatctcaatcaaacaggatcgttttatctggcagcccgtcc

SEQ ID NO: 526645 - DNA, 75 bp, synthetic construct
  source 1..75: mol_type = other DNA
ctacgttgggaaatctaactttgcttaaccttagcgtaaaccgttctgttcagaatgctgtatttctgaaaaaac

SEQ ID NO: 526646 - DNA, 75 bp, synthetic construct
  source 1..75: mol_type = other DNA
gaaaaaacaaccactatcgccccgttaacgccatacgataaatgggatggtgagaaatgggtgacggatactgag

SEQ ID NO: 526647 - DNA, 75 bp, synthetic construct
  source 1..75: mol_type = other DNA
atatcgtgttccattctatcaacgtgcctacgtatggacgcaacaaaaccaatggtcagctttgctggaggatat

SEQ ID NO: 526648 - DNA, 75 bp, synthetic construct
  source 1..75: mol_type = other DNA
aaacagcccgatcaaaaccgtagccgatcttaaaggtcacaaagttgcctttcagaaaggttccagttcgcacaa

SEQ ID NO: 526649 - DNA, 75 bp, synthetic construct
  source 1..75: mol_type = other DNA
cgatcttacccctgaacagctactggtaaggaaacggcaacaagcgatagctacgttgggaaatctaactttgct

SEQ ID NO: 526650 - DNA, 75 bp, synthetic construct
  source 1..75: mol_type = other DNA
atctttgaagatacgtactggtcagaaagacaacgtcgtggtcgtattaataaaccacgcatggagtggctagtg

SEQ ID NO: 526651 - DNA, 75 bp, synthetic construct
  source 1..75: mol_type = other DNA
cggggacctttgcgacggaggcaatccgctggcctgaaagtgtggatgaacacaaaaaggcaaatgcctttgccg

SEQ ID NO: 526652 - DNA, 75 bp, synthetic construct
  source 1..75: mol_type = other DNA
ttccgttttcatcatatttctactgacgaagtctatggcgatttgcctcatcctgacgaagtaaataataaagaa

SEQ ID NO: 526653 - DNA, 75 bp, synthetic construct
  source 1..75: mol_type = other DNA
gaaacgtttgagagcgggattcgaaagacggtggaatggtacctgtccaatacaaaatgggttgataatgtgaaa

SEQ ID NO: 526654 - DNA, 75 bp, synthetic construct
  source 1..75: mol_type = other DNA
gatcgccgttatgcgattgatgctgagaagattggtcgcgaattgggatggaaaccacaggaaacgtttgagagc

SEQ ID NO: 526655 - DNA, 75 bp, synthetic construct
  source 1..75: mol_type = other DNA
gatgcggaaccccttgaggtggagaacaccgcttattaccagcgtcaggtaatggccggtgatctgattattgtc

SEQ ID NO: 526656 - DNA, 75 bp, synthetic construct
  source 1..75: mol_type = other DNA
aatggccggtgatctgattattgttaccagcagtgacaagaacaccaaaagcaaaagcagcgagcccagcgcgga

SEQ ID NO: 526657 - DNA, 75 bp, synthetic construct
  source 1..75: mol_type = other DNA
cagcttacgcgccaagcagtccttattccgcatccaaagcatctagcgatcatttagtccgcgcgtggaaacgta

SEQ ID NO: 526658 - DNA, 75 bp, synthetic construct
  source 1..75: mol_type = other DNA
atttgaataataatgattggtgccgacgagttcaagatggctcttatcaacgtgagcgtttggggttagttaaat

SEQ ID NO: 526659 - DNA, 75 bp, synthetic construct
  source 1..75: mol_type = other DNA
attgtacaccgttatgacccagggtgtagtaggtgaaacctacaatatcggtggtcgtaacgagaaaaaaaacct

SEQ ID NO: 526660 - DNA, 75 bp, synthetic construct
  source 1..75: mol_type = other DNA
atgaagaaacgtgtttatctgattgccgccgttgtgagcggcgctctggcggtatctggctgtaccactaaccct

SEQ ID NO: 526661 - DNA, 75 bp, synthetic construct
  source 1..75: mol_type = other DNA
tctggatgatgaaaagaaaaaaaacttccgctttcatcatatttctactgatgaagtgtatggtgacttacccca

SEQ ID NO: 526662 - DNA, 75 bp, synthetic construct
  source 1..75: mol_type = other DNA
gttatataccgtggtgacgaaaggaatccctggtgagacctacaacatcggtggccataacgagaagaaaaatct

SEQ ID NO: 526663 - DNA, 75 bp, synthetic construct
  source 1..75: mol_type = other DNA
agaaatcttatcgtgagcaaattacctatgttgccgatcgtccggggcatgaccgtcgttatgctattgatgctg

SEQ ID NO: 526664 - DNA, 75 bp, synthetic construct
  source 1..75: mol_type = other DNA
aattggtaatgaacgcggtcattttttagatatcagtgaagatgcacccgttttgcaatctggagcaattagtct

SEQ ID NO: 526665 - DNA, 75 bp, synthetic construct
  source 1..75: mol_type = other DNA
tatgccgaggatcagtattttgttgatccatgcaagctgctcctgaccacgccgggaatcgatgcgcaaaccggc

SEQ ID NO: 526666 - DNA, 75 bp, synthetic construct
  source 1..75: mol_type = other DNA
gcgtgctttgcgtggtacccggggaagtctggggtggggcggttcaacgttatttccttgcactggaagaagggg

SEQ ID NO: 526667 - DNA, 75 bp, synthetic construct
  source 1..75: mol_type = other DNA
gcttgccctggacatcaacatggtgcgttctttaaaaagcatcctgccggacgccatttttacgatttctttggt

SEQ ID NO: 526668 - DNA, 75 bp, synthetic construct
  source 1..75: mol_type = other DNA
tatgggctacaagttccagttcatcaccctggcaggcatccacagcatgtggtttaacatgttcgacctggcaaa

SEQ ID NO: 526669 - DNA, 75 bp, synthetic construct
  source 1..75: mol_type = other DNA
cgggtctgcgtaccggggtaaaagtggcggtagtcgatgcgacgggtaaactggtggcgaccgacaccatttatc

SEQ ID NO: 526670 - DNA, 75 bp, synthetic construct
  source 1..75: mol_type = other DNA
ataaaatcagccgtgagctcggttggaaaccgcaagagacgttcgaaagtgggattcgcaaaacggttgaatggt

SEQ ID NO: 526671 - DNA, 75 bp, synthetic construct
  source 1..75: mol_type = other DNA
gctgtttgctgcactggatgttaacgccaaaattcatgaaggggagagtgggcgtcggctgtgggctgagtgcgt

SEQ ID NO: 526672 - DNA, 75 bp, synthetic construct
  source 1..75: mol_type = other DNA
gaagtctggggtggggcggttcaacgttatttccttgcactggaagaaggggtgaatttgttgccgggattttcg

SEQ ID NO: 526673 - DNA, 75 bp, synthetic construct
  source 1..75: mol_type = other DNA
aatatgttgagatgggcaacagcacttttgcttgcccgggtcatcaacatggcgcgttctttaaaaagcatcctg

SEQ ID NO: 526674 - DNA, 75 bp, synthetic construct
  source 1..75: mol_type = other DNA
caggccggtgcgacgccggtgtatctggaggccgcgcgtaacccgttcggttttatcggcggtattgatgcgcgc

SEQ ID NO: 526675 - DNA, 75 bp, synthetic construct
  source 1..75: mol_type = other DNA
gccaaagtttttcatgccgataaaacctattttgttcttaacggtacttcagcagcgaataaggtcgtgaccaat

SEQ ID NO: 526676 - DNA, 75 bp, synthetic construct
  source 1..75: mol_type = other DNA
gaatatagcgattttggcgtaccggcgacgattctggcgcattatctgcgtgagaacggcatcgtaccggaaaag

SEQ ID NO: 526677 - DNA, 75 bp, synthetic construct
  source 1..75: mol_type = other DNA
aaaaagttgggttcaaaaaaatgctaaagaattatgccaactttttgaaaaagcacgtaaaagctaccacaaata

SEQ ID NO: 526678 - DNA, 75 bp, synthetic construct
  source 1..75: mol_type = other DNA
aattcctcagactatcgacgagatgaattatcacacatctaaaatttctcctatttcgaaagttactagcactga

SEQ ID NO: 526679 - DNA, 75 bp, synthetic construct
  source 1..75: mol_type = other DNA
atgttatagtttatcaactaattggagatttttttaagataattgcatgggtgcttggttatttgctgattagca

SEQ ID NO: 526680 - DNA, 75 bp, synthetic construct
  source 1..75: mol_type = other DNA
atggttgcgccatcacaagctatttcaacgagtattgttaagtatacgtcagagtataagaatagtaataaggaa

SEQ ID NO: 526681 - DNA, 75 bp, synthetic construct
  source 1..75: mol_type = other DNA
taggtgaaggattattgtcattcgcggaatcgctggaaagccagaaaatacactttaccactgaagttattacgt

SEQ ID NO: 526682 - DNA, 75 bp, synthetic construct
  source 1..75: mol_type = other DNA
atttagcaccttgaagggtagtcgtagtgaagctataacgtttcttttaacggttacatgtatatattttaatga

SEQ ID NO: 526683 - DNA, 75 bp, synthetic construct
  source 1..75: mol_type = other DNA
ggagagatcaaaacgtttactcttaagtctgggaaacaagcaaaattcattaaaacggttgtattaagcggagat

SEQ ID NO: 526684 - DNA, 75 bp, synthetic construct
  source 1..75: mol_type = other DNA
attgatataggagtatggagcgaaacaaatctatccgtattatcaacgaaaattgcttgctctggcttgtttgat

SEQ ID NO: 526685 - DNA, 75 bp, synthetic construct
  source 1..75: mol_type = other DNA
taatttttctgatcgtttgaaaacttggctattattggcgaacttggttgatacaaaaaaagattatgatgaatt

SEQ ID NO: 526686 - DNA, 75 bp, synthetic construct
  source 1..75: mol_type = other DNA
taataccagaaaattatgatttatatttgactgagaattatggaaactggatgcaagaaaaaatgaaatttgact

SEQ ID NO: 526687 - DNA, 75 bp, synthetic construct
  source 1..75: mol_type = other DNA
ttaatggcctttctgtatttgtcaaaatagcaactctacttggacttaataaagtattcgcaatatatttaggta

SEQ ID NO: 526688 - DNA, 75 bp, synthetic construct
  source 1..75: mol_type = other DNA
ttaaaagtattgcaggtgctttaattgtctcaatgcctcacattgtattcgccaacacaaacaacaaggcaatca

SEQ ID NO: 526689 - DNA, 75 bp, synthetic construct
  source 1..75: mol_type = other DNA
atgatatatcgcatcagaaattggttggtagcgacgttgctgctgctgtgcacgccggtgggtgccgcgacgctc

SEQ ID NO: 526690 - DNA, 75 bp, synthetic construct
  source 1..75: mol_type = other DNA
caaaatacaaaagagatagactcactaaccaacctccgcgacaccctgctccccaaactcatctccggcgagcta

SEQ ID NO: 526691 - DNA, 75 bp, synthetic construct
  source 1..75: mol_type = other DNA
cagttagtacaaagcacagaaaaagaaagagtgacttgctcagtaaaacgcggagatgtttttcttacccgtaca

SEQ ID NO: 526692 - DNA, 75 bp, synthetic construct
  source 1..75: mol_type = other DNA
taatttatctaaagaacaaaaagccgaactggtgctgaatgcactggtagcaattcgttatctcaaaccgcaaat

SEQ ID NO: 526693 - DNA, 75 bp, synthetic construct
  source 1..75: mol_type = other DNA
tcgtgaagacactcaatttctccacaatcaacgtttaggtcgagtcattctcggaaaacatccctcttccgtaaa

SEQ ID NO: 526694 - DNA, 75 bp, synthetic construct
  source 1..75: mol_type = other DNA
catggtgaaatgtggatgcccatgccgggcgatgcggcctacgtttggttgagcgacactcatgagcaagtgaat

SEQ ID NO: 526695 - DNA, 75 bp, synthetic construct
  source 1..75: mol_type = other DNA
atgcgaattaaaccagacgataactggcgttggtattatgatgaagagcacgatcgaatgatgctcgatttagcc

SEQ ID NO: 526696 - DNA, 75 bp, synthetic construct
  source 1..75: mol_type = other DNA
tttagggcgtgattttgctttagccgaagcaatgaaaaccattgataagttaaaaagcggtgaaagttatgaaag

SEQ ID NO: 526697 - DNA, 75 bp, synthetic construct
  source 1..75: mol_type = other DNA
gacgaaacaaaggcagccacgccaaaggcagttaaatcactggcagacagtctggagagacgattactgaagccc

SEQ ID NO: 526698 - DNA, 75 bp, synthetic construct
  source 1..75: mol_type = other DNA
gcgatatctggatcaacgaccagcgcgtgaccgaaatggagccgaaagatcgcgggattgcgatggtgttccaga

SEQ ID NO: 526699 - DNA, 75 bp, synthetic construct
  source 1..75: mol_type = other DNA
cgatcgaatgatgctcgatttagccaatggtatgctatttcgctcacgttttgctcgtaaaatgctcacgccaga

SEQ ID NO: 526700 - DNA, 75 bp, synthetic construct
  source 1..75: mol_type = other DNA
gttcgcgttagtgtcaggatctcccgttcatttcaggtaagtctgctgtcgattttgaagcagcagctcatgctg

SEQ ID NO: 526701 - DNA, 75 bp, synthetic construct
  source 1..75: mol_type = other DNA
tatttgctcgatgcaaagcgaactgggacgtgacaccatcactgaaccgccccgggaatcctggagactaaactt

SEQ ID NO: 526702 - DNA, 75 bp, synthetic construct
  source 1..75: mol_type = other DNA
tctccagaaaaggcggaatgcgcagtgatggatcctatcctgatgccagtaataatgcggaagctttttatgtta

SEQ ID NO: 526703 - DNA, 75 bp, synthetic construct
  source 1..75: mol_type = other DNA
caggtggtgattaacgccgcatacctggtggcctgtgcagatggtgaatgtgaggcatccgagaaagcgaagatc

SEQ ID NO: 526704 - DNA, 75 bp, synthetic construct
  source 1..75: mol_type = other DNA
gcagaagaatgccgtatattgtttgacgatatcagaaagaacagtccgaaagcaggaagaccaaccgtaaataaa

SEQ ID NO: 526705 - DNA, 75 bp, synthetic construct
  source 1..75: mol_type = other DNA
gcagaagaacgccggaggctgtttgatgatataaggaaaaacagcccgaaagccggaagaccgactgtgaacaaa

SEQ ID NO: 526706 - DNA, 75 bp, synthetic construct
  source 1..75: mol_type = other DNA
gaacaggtattacgtaaccagcccaccttgtccgcgtttacgtcagaaattaatgcgattagcgcaaccattatc

SEQ ID NO: 526707 - DNA, 75 bp, synthetic construct
  source 1..75: mol_type = other DNA
aaagtttgagaaacgcgatctggcacaggcggtgattaacgctgcctacctggtggcctatgcagatggtgaatg

SEQ ID NO: 526708 - DNA, 75 bp, synthetic construct
  source 1..75: mol_type = other DNA
tggtggcctatgcagatggtgaatgtgagacttcagagaaagcgaagatcgaacaggtattacgtaaccagccag

SEQ ID NO: 526709 - DNA, 75 bp, synthetic construct
  source 1..75: mol_type = other DNA
atgaaaactccgagaggcattcgtaataacaaccccggtaatcttgataaaggagcgccgtggcaggggctaatt

SEQ ID NO: 526710 - DNA, 75 bp, synthetic construct
  source 1..75: mol_type = other DNA
tagtggatgttcttgggttgaaattgataactatgctgatttagctcttgctgataaaatattctcccaaaaaaa

SEQ ID NO: 526711 - DNA, 75 bp, synthetic construct
  source 1..75: mol_type = other DNA
ctgaaaaattacggtatagatgtatctactgaagatattaaaatatcatctgatagtgttattgactttttaaat

SEQ ID NO: 526712 - DNA, 75 bp, synthetic construct
  source 1..75: mol_type = other DNA
aggttcgccgtggcaggggctaatcgacaaccctgccgaaccgcgcttttgcacgtttaaagaccctgtttgggg

SEQ ID NO: 526713 - DNA, 75 bp, synthetic construct
  source 1..75: mol_type = other DNA
tctgcgtcgagctggcgtcgttaagccggtgaaaaccgtgaaggctgttcctgtaactaaagaaaccgcaggcgc

SEQ ID NO: 526714 - DNA, 75 bp, synthetic construct
  source 1..75: mol_type = other DNA
gcagaagaacgccgtatattgtttgacgatatcagaaagaacagcccgaaagcaggaagaccaaccgtaaataaa

SEQ ID NO: 526715 - DNA, 75 bp, synthetic construct
  source 1..75: mol_type = other DNA
catcaggaacgcccgacggcaggcagcatgttgtggctgcatttgccggaaaatcagctacatctttttgatggt

SEQ ID NO: 526716 - DNA, 75 bp, synthetic construct
  source 1..75: mol_type = other DNA
ggaagaagaaaccacaaccaatatcatcggcgcagtgaccgccgagggtaaaaaaacaggcatgaaagccctgtt

SEQ ID NO: 526717 - DNA, 75 bp, synthetic construct
  source 1..75: mol_type = other DNA
gacggacacaatggcagaagcgcatatgtgggcggtggacaaaccgctgaacccgtcgctggcccgcgacattat

SEQ ID NO: 526718 - DNA, 75 bp, synthetic construct
  source 1..75: mol_type = other DNA
actgtggcacaaacggaacagccataacccaaagattgtctggttacgcgaaaccattaaagatctttacatctc

SEQ ID NO: 526719 - DNA, 75 bp, synthetic construct
  source 1..75: mol_type = other DNA
tgcgtgccaaaattgatgggcagacagggtggcacaaaagcctgtccaacgtgggcgttaacggtgtcaccggaa

SEQ ID NO: 526720 - DNA, 75 bp, synthetic construct
  source 1..75: mol_type = other DNA
atcactgatgtgctgagtgccagcggtaaagcgggtgagtccggcacgctggcccgttcgctggatgccatctct

SEQ ID NO: 526721 - DNA, 75 bp, synthetic construct
  source 1..75: mol_type = other DNA
aaaaaacaggcatgaaagctctgttatctgctcaatcacagctcggcgttaaaccgcgcattctgggtgtaccag

SEQ ID NO: 526722 - DNA, 75 bp, synthetic construct
  source 1..75: mol_type = other DNA
acgacaaccactccgacatcccaagctggggcggcggttacggtaacatcttccaggatgagcgtgacgtgaaat

SEQ ID NO: 526723 - DNA, 75 bp, synthetic construct
  source 1..75: mol_type = other DNA
atgctggtgcgttgagtttctcctacatgtggaccaacgaatacaaagcgccgtggcatctggaaatggatgagt

SEQ ID NO: 526724 - DNA, 75 bp, synthetic construct
  source 1..75: mol_type = other DNA
tctgatgggtatagacccttcaacactcaccgttcattttaaaccgggcatcgaggcgggagagctgtttgaagg

SEQ ID NO: 526725 - DNA, 75 bp, synthetic construct
  source 1..75: mol_type = other DNA
gccagcaaaaaaagctggaagtcccttttaccctgctgtggcataaacggaacagccataatccgaagatcgtct

SEQ ID NO: 526726 - DNA, 75 bp, synthetic construct
  source 1..75: mol_type = other DNA
atcactgatgtgctgactgctagcggtaaagcgggtgagtccggcacgctggcccgttcgctggatgccatcgct

SEQ ID NO: 526727 - DNA, 75 bp, synthetic construct
  source 1..75: mol_type = other DNA
tcgcttaaaaagaatagacttcgtaaaggtgtggaatggcaaaacctgaatgtccgactggaagcacattgggta

SEQ ID NO: 526728 - DNA, 75 bp, synthetic construct
  source 1..75: mol_type = other DNA
gccacgataacaaagccgttgcgactgagttgctgagagtggcgcaaagcctgcgtgggtttgcttacctgtcag

SEQ ID NO: 526729 - DNA, 75 bp, synthetic construct
  source 1..75: mol_type = other DNA
tgatggtcgggccgtctggctgcgggaaatcgacgctgctgcgtatggttgccgggctggagcgggtgacggaag

SEQ ID NO: 526730 - DNA, 75 bp, synthetic construct
  source 1..75: mol_type = other DNA
tgtggcgatggggcgtgcgattgtgcgcgagccggcagtgttcctgtttgatgagccgctctctaacctcgacgc

SEQ ID NO: 526731 - DNA, 75 bp, synthetic construct
  source 1..75: mol_type = other DNA
acgctctgccgttcagtaaaaaatgccggatacagcgttatggcgggatggcggaagagtgcatcgtggtcgccg

SEQ ID NO: 526732 - DNA, 75 bp, synthetic construct
  source 1..75: mol_type = other DNA
cccgccagcctgtttgtggcgagttttattggcagtccggcgatgaacctgctgacaggccgcgtgaataacgaa

SEQ ID NO: 526733 - DNA, 75 bp, synthetic construct
  source 1..75: mol_type = other DNA
cccgccagcctgtttgtggcgagttttatcggtagtccggcgatgaatctgctgacaggccgcgtgaataacgat

SEQ ID NO: 526734 - DNA, 75 bp, synthetic construct
  source 1..75: mol_type = other DNA
acggcggcgttgccgaacagattggcacgccagttgaagtctacgaaaagcccgccagcctgtttgtggcgagtt

SEQ ID NO: 526735 - DNA, 75 bp, synthetic construct
  source 1..75: mol_type = other DNA
gaccaggcaaaacccgtgaccattgttgtgcgtgtgccacagggtgaaacggaagacgaaaccacgaccaatatc

SEQ ID NO: 526736 - DNA, 75 bp, synthetic construct
  source 1..75: mol_type = other DNA
ttctcctggaaatgctcgcacaactgggctttgtgactgttgagaaagtcgttgagcgtctgggaatttcccctg

SEQ ID NO: 526737 - DNA, 75 bp, synthetic construct
  source 1..75: mol_type = other DNA
acagccaatggttacattatttcctatgacaatatccatatcattaaattcaccgcgaagtccaatagttactcc

SEQ ID NO: 526738 - DNA, 75 bp, synthetic construct
  source 1..75: mol_type = other DNA
atctgcccagtcacagctcggcgttaaaccgcgcattctcggcgtacctggtcacgataacaaagccgttgcgac

SEQ ID NO: 526739 - DNA, 75 bp, synthetic construct
  source 1..75: mol_type = other DNA
gtccgtaaacgataaagactccctgaaagcagggaaactcaccatcgactacgactacacgccggtgccaccgct

SEQ ID NO: 526740 - DNA, 75 bp, synthetic construct
  source 1..75: mol_type = other DNA
cgtgctgaatgcagatgcgacggcttacgcctcagtccgtgcgctcggcctgcgcgccaaaattgacgaacagac

SEQ ID NO: 526741 - DNA, 75 bp, synthetic construct
  source 1..75: mol_type = other DNA
gcgctggaaaattccgtttccgggatggggattgtgcaggatatcagtgcctttacggccacgtttacggcgctt

SEQ ID NO: 526742 - DNA, 75 bp, synthetic construct
  source 1..75: mol_type = other DNA
gccctggaaaatgccgtttccggcatggggattgtacaggatatcagtgcctttactgccacgttcacggcgctg

SEQ ID NO: 526743 - DNA, 75 bp, synthetic construct
  source 1..75: mol_type = other DNA
tctgtcagtggtgcagtggcggcgctggatggaactatcactgaaattaatacgccaacccgtggctgggtttcg

SEQ ID NO: 526744 - DNA, 75 bp, synthetic construct
  source 1..75: mol_type = other DNA
tgctgatagcgctggtatggataggattattactcagcggatatggcgttttgattggaagcaaagagaatgccg

SEQ ID NO: 526745 - DNA, 75 bp, synthetic construct
  source 1..75: mol_type = other DNA
gatgcgatagtgatgcgtcatccgcaggaaggtgcagcgcgcctggccaccgagttttccggcaatgtaccggta

SEQ ID NO: 526746 - DNA, 75 bp, synthetic construct
  source 1..75: mol_type = other DNA
cattaatggcagcgtgaaagacagtaataatgtgatatggcgtttgcctgcttcagtggtggtcggcgtggatgg

SEQ ID NO: 526747 - DNA, 75 bp, synthetic construct
  source 1..75: mol_type = other DNA
gcagggggtgtcaacgtatggtgcgacagccgtcacggtgccggataaatacggtaatccccatgtgattcgctt

SEQ ID NO: 526748 - DNA, 75 bp, synthetic construct
  source 1..75: mol_type = other DNA
tcaaacagcggcgcggtcgcagcgctggcggggacaattactaccatcaacacgccgacccgaggctggacatcg

SEQ ID NO: 526749 - DNA, 75 bp, synthetic construct
  source 1..75: mol_type = other DNA
gacggccagatggtggcgctggtggctctggctattcacgatgccaataacacggccattgccgtttacaactgc

SEQ ID NO: 526750 - DNA, 75 bp, synthetic construct
  source 1..75: mol_type = other DNA
agagttgcgcatcaggcaggggcaaagcgtcgctctgccctcactcacaccgtttgaaggtgtcgacggtgcgat

SEQ ID NO: 526751 - DNA, 75 bp, synthetic construct
  source 1..75: mol_type = other DNA
cacggccatctccgtttataactgcttctcacctgctacgggttacggtgcagcgctgacgagtaacgtaaaaat

SEQ ID NO: 526752 - DNA, 75 bp, synthetic construct
  source 1..75: mol_type = other DNA
cccagaccatcagggggaataaagggcagggaacggcgacctacggtactacttctgtcacggtaccggacacct

SEQ ID NO: 526753 - DNA, 75 bp, synthetic construct
  source 1..75: mol_type = other DNA
ttatgctcagcagtctggttgtgccttttattgccactgcagggagcgctgcgcaaggcggtataataagctttc

SEQ ID NO: 526754 - DNA, 75 bp, synthetic construct
  source 1..75: mol_type = other DNA
ggcgggaaatgtgtggcaagccagtgcaaatcatcactaattatctaccgctggcaaattacctgatcgatcagg

SEQ ID NO: 526755 - DNA, 75 bp, synthetic construct
  source 1..75: mol_type = other DNA
gcagtccgtgccgcgcggtaagccagccagcaacgcaaaagcagaggcgaacatccgaaagatgaaaaacatgat

SEQ ID NO: 526756 - DNA, 75 bp, synthetic construct
  source 1..75: mol_type = other DNA
agcgacatcgacagaatcatgcgcgttacaggaatggaacgcattaaggcagtacgtgaaattattcgtgaacgg

SEQ ID NO: 526757 - DNA, 75 bp, synthetic construct
  source 1..75: mol_type = other DNA
gcaggccgtaccgcgtaacgtgcccaccagcagggagaaagcacgcgccaatattcaggaaataaaaaagatgct

SEQ ID NO: 526758 - DNA, 75 bp, synthetic construct
  source 1..75: mol_type = other DNA
accgctgaagggttgtataaaaccgatatgctgacggcgatggcagaacagaagatgctgagcgtggtaggaaaa

SEQ ID NO: 526759 - DNA, 75 bp, synthetic construct
  source 1..75: mol_type = other DNA
gggctttgtgaccgttgagaaagtcgttgagcgtctgggaatttcccctgccactgcgcgacgcgatatcaataa

SEQ ID NO: 526760 - DNA, 75 bp, synthetic construct
  source 1..75: mol_type = other DNA
gatgtacccggaaatcattcagagcatgaagaacgtggcggcatccgtgcaggatgtcggcctgctggttctgtc

SEQ ID NO: 526761 - DNA, 75 bp, synthetic construct
  source 1..75: mol_type = other DNA
cgattacagtcgtgcggcagaactgcaacgcctgaacccgcagttacgtgacccgaacaacataaccgccggggt

SEQ ID NO: 526762 - DNA, 75 bp, synthetic construct
  source 1..75: mol_type = other DNA
cgctgggagctttccgataaggaaagttcggcagtttttcccggcttcacgctggaccattcagaaaccgtttat

SEQ ID NO: 526763 - DNA, 75 bp, synthetic construct
  source 1..75: mol_type = other DNA
acttaacgctgtgctggattatattgacgcggtgacggcaacagatacgagcacagcgccggacgtcatctggcc

SEQ ID NO: 526764 - DNA, 75 bp, synthetic construct
  source 1..75: mol_type = other DNA
atcaaccgctacaccttccctgaacaaatggctggctttgctaatgccattcagtctcacggcatcgctgtgaac

SEQ ID NO: 526765 - DNA, 75 bp, synthetic construct
  source 1..75: mol_type = other DNA
gcaggcggacagctgtctgctgttgctggcgtggcagtggtacggcgattacagtcgtgcggcagaactgcaacg

SEQ ID NO: 526766 - DNA, 75 bp, synthetic construct
  source 1..75: mol_type = other DNA
gccatgcaactgggtgacgccatcaaaattatgaatgacaggctgaaacctcatatgagttatgacaacttcagc

SEQ ID NO: 526767 - DNA, 75 bp, synthetic construct
  source 1..75: mol_type = other DNA
gcgccgtttattgctcgtatggtcgagaatgccctgctggaaatcccaaccgggttgattgaagcctctcgcgca

SEQ ID NO: 526768 - DNA, 75 bp, synthetic construct
  source 1..75: mol_type = other DNA
ttgtgaacattttccgttccatcccgttcattatcttgctggtatggatgattccgtttacccgcgttattgtcg

SEQ ID NO: 526769 - DNA, 75 bp, synthetic construct
  source 1..75: mol_type = other DNA
tccgatgaataactgcgagtttaacggatttgttatgcctggtggctggactgacagggggcgttatgcttatgg

SEQ ID NO: 526770 - DNA, 75 bp, synthetic construct
  source 1..75: mol_type = other DNA
gcgcatacccatagtattagcgggaccgcaaatagtgccggtgcgcaccaacacaagagttccggtgcatttggt

SEQ ID NO: 526771 - DNA, 75 bp, synthetic construct
  source 1..75: mol_type = other DNA
ccagcatatctgccagtgaggcggcaacccatgcgactgatgctgcaggctcagcacgtgcagccagcacatcag

SEQ ID NO: 526772 - DNA, 75 bp, synthetic construct
  source 1..75: mol_type = other DNA
cggaagcattgccgggtctggtgaatgcggcaactatcaccctgattaccctggtcggttattccgcgatgggtg

SEQ ID NO: 526773 - DNA, 75 bp, synthetic construct
  source 1..75: mol_type = other DNA
tggctgaaagtggaagcaggcgggatcgccaggggggcacagtacggcaacaatggcacgttatcagtcagtgac

SEQ ID NO: 526774 - DNA, 75 bp, synthetic construct
  source 1..75: mol_type = other DNA
ggtgccattgccacagatattgttcagtccgagggaggcgcaattagtctctctactctcgctacggttaatggc

SEQ ID NO: 526775 - DNA, 75 bp, synthetic construct
  source 1..75: mol_type = other DNA
caggtcttacgtaatcagcctgcgttgtctgcgtttacctcggaaattaatgcgattagcgcaaccattatcggt

SEQ ID NO: 526776 - DNA, 75 bp, synthetic construct
  source 1..75: mol_type = other DNA
ttaagggcaagcccgccagtggtcggaccgtattgtctcaggaacaggacggcattaaatcgcacactcacagcg

SEQ ID NO: 526777 - DNA, 75 bp, synthetic construct
  source 1..75: mol_type = other DNA
ctgaaacgctcgccgcaacaccaaaggcagtaaaagcagcctatgacaatgctgagaaacgtctgcagaaagacc

SEQ ID NO: 526778 - DNA, 75 bp, synthetic construct
  source 1..75: mol_type = other DNA
cagtacggtaaaaggtgacagtgtcactttcaatattggtaacatcaatctgaatggtggaaaactgtggctgat

SEQ ID NO: 526779 - DNA, 75 bp, synthetic construct
  source 1..75: mol_type = other DNA
gcacatacccatagtgttagcggtacggctgcttcagccggtgcacatacccattcgatgacatttgtttcaggt

SEQ ID NO: 526780 - DNA, 75 bp, synthetic construct
  source 1..75: mol_type = other DNA
acggaaaccctcacccggtaggtttttcaaggccggtcgatgtacccatttacgtcaaaatcactatcgaacccc

SEQ ID NO: 526781 - DNA, 75 bp, synthetic construct
  source 1..75: mol_type = other DNA
cgaagagataaaggcggctgtatctgcctacattaactctctggcaatcggcgccagcgttcttctcagtcgcgt

SEQ ID NO: 526782 - DNA, 75 bp, synthetic construct
  source 1..75: mol_type = other DNA
cacaaacggctctgtgaaagatgccaacggcatcatctggaatcttcctgctcaggtgacaattggtattgatgg

SEQ ID NO: 526783 - DNA, 75 bp, synthetic construct
  source 1..75: mol_type = other DNA
gcgatgcagttgggcgacgccattaaaatcatgaacgacaggctgaaaccgcaggttaatgttgacagcttcagc

SEQ ID NO: 526784 - DNA, 75 bp, synthetic construct
  source 1..75: mol_type = other DNA
atgctgcgctatgtctactggcgcaaccttgcatagttatcgccgggcgagctatgcaactgggtgatgccatca

SEQ ID NO: 526785 - DNA, 75 bp, synthetic construct
  source 1..75: mol_type = other DNA
gccgcactcaatcgcggccattgttgaaggtggtgatgcgacggtcattgcgaacagcattcgtggtgtgaaagg

SEQ ID NO: 526786 - DNA, 75 bp, synthetic construct
  source 1..75: mol_type = other DNA
gcccagccactgcggcggcaatccttgcgtctaaggatccggcaaaaacgtggcaagagtatgaagcatcaggcg

SEQ ID NO: 526787 - DNA, 75 bp, synthetic construct
  source 1..75: mol_type = other DNA
gctggagaatctcggttatacctttggttttattatcgtcattatggcccgccagcaattatttaccgaaaacac

SEQ ID NO: 526788 - DNA, 75 bp, synthetic construct
  source 1..75: mol_type = other DNA
cccgccagtggtcgtgccgtattgtctcaggaacaggacggcattaaatcgcatacccacagcgccagcgcatcc

SEQ ID NO: 526789 - DNA, 75 bp, synthetic construct
  source 1..75: mol_type = other DNA
aaaatggcgcagctgttacagtggattatatcggtgccatcaaagatggttatgtcacgctttcaccgttaacgc

SEQ ID NO: 526790 - DNA, 75 bp, synthetic construct
  source 1..75: mol_type = other DNA
gagcaaccgacagcaatggtctgccgccgcattcaatttccgcgattgttgacggtggcgatgtgacagaaattg

SEQ ID NO: 526791 - DNA, 75 bp, synthetic construct
  source 1..75: mol_type = other DNA
cccagaccatcagggggaataaaggacagggaacggcaacctacgggacaacttctgtcacggtgccggatactt

SEQ ID NO: 526792 - DNA, 75 bp, synthetic construct
  source 1..75: mol_type = other DNA
tgtcgggcgctgggacatcccactgatggacataaaggcgtgcaacagctggcggtccaactggataaaacctgg

SEQ ID NO: 526793 - DNA, 75 bp, synthetic construct
  source 1..75: mol_type = other DNA
agcgtatcgtttatctatttgctgatgctgcttcgcaacgccggtcatacgccgaaacccgtggctcacgtgtaa

SEQ ID NO: 526794 - DNA, 75 bp, synthetic construct
  source 1..75: mol_type = other DNA
tcgctaatgtgcaccgtactgaagaaccgcagtgggaaaactacgatcgcgtggtcattggcgcttctattcgct

SEQ ID NO: 526795 - DNA, 75 bp, synthetic construct
  source 1..75: mol_type = other DNA
cttcagaactcattcgctctttgctgaaaagctcgcgcccatcagggttggcacaggcgatcatggaagtggggc

SEQ ID NO: 526796 - DNA, 75 bp, synthetic construct
  source 1..75: mol_type = other DNA
ccggttgagatcatgacagacacagccggtaccagcgacattatttttggcctcttctggctgctgggataccag

SEQ ID NO: 526797 - DNA, 75 bp, synthetic construct
  source 1..75: mol_type = other DNA
tgacggtaaatatccttccctgactatcagcagcctggagaaactggaggagccaccatcgttgcatcgtctcaa

SEQ ID NO: 526798 - DNA, 75 bp, synthetic construct
  source 1..75: mol_type = other DNA
gttcagcaatttgtcgcggtgcagcttaatattcgccgtccggaagtccttacccgctacgcagaacgggttacc

SEQ ID NO: 526799 - DNA, 75 bp, synthetic construct
  source 1..75: mol_type = other DNA
gcgggctgacaaagcagcgaattacggggcgttggacgaactggctcggggttgtgttgacctttctaaaatcga

SEQ ID NO: 526800 - DNA, 75 bp, synthetic construct
  source 1..75: mol_type = other DNA
aactgttgcttgagattgacgccagaacgggtttcacccgtgaattcagccatgtcagcgagtcaggtgcccgcg

SEQ ID NO: 526801 - DNA, 75 bp, synthetic construct
  source 1..75: mol_type = other DNA
actgaggcacagcatagcgccgcagtagacgcggcagaagcacagcgccagtcactgattgatgctgcaatggct

SEQ ID NO: 526802 - DNA, 75 bp, synthetic construct
  source 1..75: mol_type = other DNA
attacattgacgcagtgacggcaacagataccagcaccgcgcctgatattatttggcctgtattccctgagactg

SEQ ID NO: 526803 - DNA, 75 bp, synthetic construct
  source 1..75: mol_type = other DNA
gaaactcgagaatatatttccacttcaaatgaatatcttgctgttggcgtcggtatccctgcatattcctgttta

SEQ ID NO: 526804 - DNA, 75 bp, synthetic construct
  source 1..75: mol_type = other DNA
ggggcattatacgttcacgctaccggaggatattttgaagggggaactgagagaattaaattttaatttaaacaa

SEQ ID NO: 526805 - DNA, 75 bp, synthetic construct
  source 1..75: mol_type = other DNA
gtgacctgatttctaaatttaaagcgacaggtactgataactatgatgttggcggtgatgcttatactgttaacg

SEQ ID NO: 526806 - DNA, 75 bp, synthetic construct
  source 1..75: mol_type = other DNA
gcgtgaatgtgctggcaaaagacggcaccatgaaaattcaggtaggcgcgaacgatggtcagactatctctatcg

SEQ ID NO: 526807 - DNA, 75 bp, synthetic construct
  source 1..75: mol_type = other DNA
caccactgtgaccacgccgggcgcagagactgtgacttacaaagatgcttccggtaacagcaccactgcggctgt

SEQ ID NO: 526808 - DNA, 75 bp, synthetic construct
  source 1..75: mol_type = other DNA
gtgtgaacgtactggctaaaaacggttctatggcgattcaggttggcgcgaacgatggccagactatctctatcg

SEQ ID NO: 526809 - DNA, 75 bp, synthetic construct
  source 1..75: mol_type = other DNA
ctgagaactatgttgttagctatggtagtgataattacgctgcatctgttgcagatgacgggactgtaactctta

SEQ ID NO: 526810 - DNA, 75 bp, synthetic construct
  source 1..75: mol_type = other DNA
gatcatccagcaggcgggtaactccgtgctgtctaaagccaaccaggtaccgcagcaagttctgtctctgttaca

SEQ ID NO: 526811 - DNA, 75 bp, synthetic construct
  source 1..75: mol_type = other DNA
tcgccagtcttgatgagccggacagtctgaaacgactgagcaaaatgatcggcactgttgcaaatagtcggtggt

SEQ ID NO: 526812 - DNA, 75 bp, synthetic construct
  source 1..75: mol_type = other DNA
ttaccgcattcgtgaaagcgcaagaaatctcggcgctggacgaggccgttgacgtgctggatatgctgatcctca

SEQ ID NO: 526813 - DNA, 75 bp, synthetic construct
  source 1..75: mol_type = other DNA
ttgatgagcgagaccttactttcatcaacctgcgtaggggcaggcataaccggttgggaattgcccttcaactca

SEQ ID NO: 526814 - DNA, 75 bp, synthetic construct
  source 1..75: mol_type = other DNA
gtgcgcttctgcttgacgaaaatactgatgagagtgcgttgcgaaagaccatattcaaaagcgtgccggtcgcaa

SEQ ID NO: 526815 - DNA, 75 bp, synthetic construct
  source 1..75: mol_type = other DNA
agcagctacgcaaaggtcctgtaacggttagtgggccgtcttttacggaagcgctggaacgttatacccgactga

SEQ ID NO: 526816 - DNA, 75 bp, synthetic construct
  source 1..75: mol_type = other DNA
tcatgcagttgccagagccatctgtcacggtcaaaaaggtgagataagaaaacgatataccgacggtcaggaaga

SEQ ID NO: 526817 - DNA, 75 bp, synthetic construct
  source 1..75: mol_type = other DNA
cagctccgcaacctggcacgctatgccggaatggcatcggtgaaatatatcagcagaatgccagaagaacggcgg

SEQ ID NO: 526818 - DNA, 75 bp, synthetic construct
  source 1..75: mol_type = other DNA
aaaaaaccgtctgaagtggtgatggaggtcggtttcgctggtggcggatcgttgctggattttgccagtaacctg

SEQ ID NO: 526819 - DNA, 75 bp, synthetic construct
  source 1..75: mol_type = other DNA
ggtatgcaatttcccgatactgccatcgcccatgccaatgtgcgcatcgccggcagcgatatcatgatgagcgat

SEQ ID NO: 526820 - DNA, 75 bp, synthetic construct
  source 1..75: mol_type = other DNA
ggcactgtttttgaccttttttattatgtcgccggtgatcgacaaaatttatgtcgatgcgtaccagccattcag

SEQ ID NO: 526821 - DNA, 75 bp, synthetic construct
  source 1..75: mol_type = other DNA
gttaagcgaagctgggtaagcaatgcacaaatcgaatattggttgcaggacttgaaaaatccatctgtggttatt

SEQ ID NO: 526822 - DNA, 75 bp, synthetic construct
  source 1..75: mol_type = other DNA
tttttatcatggcatttgttgccgttattgaccgtttcttatttcgtcgcaagagtgttgatattttgagcattg

SEQ ID NO: 526823 - DNA, 75 bp, synthetic construct
  source 1..75: mol_type = other DNA
actcgacctgcaggcgagccgtatccctttcgatgtggtgaccggcaaacggctgtacagcaacatgctgatccg

SEQ ID NO: 526824 - DNA, 75 bp, synthetic construct
  source 1..75: mol_type = other DNA
gggtcaatccggggtgctacgtactgattcgctatatggcgctattgtttgtgccgattggcgtaggcgtcatgc

SEQ ID NO: 526825 - DNA, 75 bp, synthetic construct
  source 1..75: mol_type = other DNA
gtagaagccttgatggcatcgtcatgataaatgttgatggcgatagcatgatgcctacgctttgcccaaaggacc

SEQ ID NO: 526826 - DNA, 75 bp, synthetic construct
  source 1..75: mol_type = other DNA
ggcggtcaggaccctggcgctatcggccccggtggtacgcgggagaaaaatgtcaccatcgccatcgcgcgtaaa

SEQ ID NO: 526827 - DNA, 75 bp, synthetic construct
  source 1..75: mol_type = other DNA
ctgtccttctctggctggttacgcccctcgccttcgcgcaactgccgggtatcaccagccagccgctgcctggcg

SEQ ID NO: 526828 - DNA, 75 bp, synthetic construct
  source 1..75: mol_type = other DNA
ggcactgtttttgaccttttttattatgtcaccggtgatcgacaaaatttatgtcgatgcataccagccattcag

SEQ ID NO: 526829 - DNA, 75 bp, synthetic construct
  source 1..75: mol_type = other DNA
cagcctggaagagaagcaagcaatttccgggcataagaacccacgacagacagcagcatatgaccgaaaagttaa

SEQ ID NO: 526830 - DNA, 75 bp, synthetic construct
  source 1..75: mol_type = other DNA
ttcctcaatcacaaaggggtgagcaatgccagcattggtttctggatggcggtactggtcagtgcgggtatcctt

SEQ ID NO: 526831 - DNA, 75 bp, synthetic construct
  source 1..75: mol_type = other DNA
gaagtagggcgtgtaaacaaaacgctatatctcctcaattatattgatgatgaagattatcgtcggcggatcctg

SEQ ID NO: 526832 - DNA, 75 bp, synthetic construct
  source 1..75: mol_type = other DNA
ggagatcctcgcgagaagttgttgcaaggtgaagagtggcagactcagcgtattcctgtctgtcgggcactggga

SEQ ID NO: 526833 - DNA, 75 bp, synthetic construct
  source 1..75: mol_type = other DNA
aacagactggcagaatctgtaagcaaggttaatgaacttgctcgtccacagaacaataatttccatgacgaaatg

SEQ ID NO: 526834 - DNA, 75 bp, synthetic construct
  source 1..75: mol_type = other DNA
gtattctgacgcaactgaaccggggagaaggccgtcatgctgtggccagagccatctgttacggtcagcgcggtg

SEQ ID NO: 526835 - DNA, 75 bp, synthetic construct
  source 1..75: mol_type = other DNA
gcccattacggcgcactagatgaactggcaagaggatgcgtggagttaaccaggattgaaaaccactgggatgaa

SEQ ID NO: 526836 - DNA, 75 bp, synthetic construct
  source 1..75: mol_type = other DNA
cttgatatgctgatcctggacatcgcccgtgaggcaaagaaaacggggcagaaaaagcggctcaggacgctgaaa

SEQ ID NO: 526837 - DNA, 75 bp, synthetic construct
  source 1..75: mol_type = other DNA
ggccatccattacctggcagagctaaacggctcgaaaaaacggatcctggacgatgcacctgagcatatcatttc

SEQ ID NO: 526838 - DNA, 75 bp, synthetic construct
  source 1..75: mol_type = other DNA
acgtaggggcaggcataaccggttggggattgcccttcaactcacaaccgcccgctttctgggaaccttcttgcc

SEQ ID NO: 526839 - DNA, 75 bp, synthetic construct
  source 1..75: mol_type = other DNA
agatgcccgaaccggttttacccgcgaattcagccacgtcagtgaatcaggtgctcgggcgcaggatctccaggt

SEQ ID NO: 526840 - DNA, 75 bp, synthetic construct
  source 1..75: mol_type = other DNA
ttacgaagtcttgagttttcccgactgaacttttccggtctgcctgccattcaactgcgtaatctggctcgttat

SEQ ID NO: 526841 - DNA, 75 bp, synthetic construct
  source 1..75: mol_type = other DNA
tttcatgacgaaatggtggagcagtacgggcgcgttcgtcgtttcctgccccatctgctgaataccgttaaattt

SEQ ID NO: 526842 - DNA, 75 bp, synthetic construct
  source 1..75: mol_type = other DNA
acctgacagaactgttgcttgagattgacgccagaacgggtttcacccgtgaattcagccatgtcagcgagtcag

SEQ ID NO: 526843 - DNA, 75 bp, synthetic construct
  source 1..75: mol_type = other DNA
cagcgcctgacggcgctgtgtctggcatgcctgcaatccgggaaaccggaccaggaaaaaacttgcaggccataa

SEQ ID NO: 526844 - DNA, 75 bp, synthetic construct
  source 1..75: mol_type = other DNA
tagcagtgtgagaggggcgagccggatgagtaaggccggacatgtgtcgcttcggcagggcgttgtatatgcccg

SEQ ID NO: 526845 - DNA, 75 bp, synthetic construct
  source 1..75: mol_type = other DNA
aatggtagccaccagtaagactgagtggggacggcgttccgcgaccgtctggcggctaatggcaagaaaggaaag

SEQ ID NO: 526846 - DNA, 75 bp, synthetic construct
  source 1..75: mol_type = other DNA
gggcaatggccaattggtcgtctggcagataaatttggtcgcctgctggtactgcgcgttcaggtatttgtcgtc

SEQ ID NO: 526847 - DNA, 75 bp, synthetic construct
  source 1..75: mol_type = other DNA
ggagcacgatcaaaaactcaacctcatgcagcaaacgatgagttttctgacccatgatctgacccaaatgatgcc

SEQ ID NO: 526848 - DNA, 75 bp, synthetic construct
  source 1..75: mol_type = other DNA
atgtgttgcgtcctgatggtcgtcatcgcaccaaaaaattcgctaacacccactaaagggcacgatgagctggtg

SEQ ID NO: 526849 - DNA, 75 bp, synthetic construct
  source 1..75: mol_type = other DNA
agagatcaatattgatgaaagaattcagaaaaggatatttctggctcctcatgaaattgaagatttgatcgaatt

SEQ ID NO: 526850 - DNA, 75 bp, synthetic construct
  source 1..75: mol_type = other DNA
ggtgagccattgtattatcctaacttgtatataacaacacaagtcaggaatcggtcagagtctatatcaacaatg

SEQ ID NO: 526851 - DNA, 75 bp, synthetic construct
  source 1..75: mol_type = other DNA
atagattttgcagaatcgacaattgcaataagaagaagagcaaatgataaaacagatccgcgagtgtatcagcca

SEQ ID NO: 526852 - DNA, 75 bp, synthetic construct
  source 1..75: mol_type = other DNA
cggtgcgtatcacgggcgcacgcattacacgctggcgctgaccggcaaggtgaatccgtactctgcgggcatggg

SEQ ID NO: 526853 - DNA, 75 bp, synthetic construct
  source 1..75: mol_type = other DNA
catggcatcagtgaagatgacgctatcgccagtatccaccgaatcttcaaaaatgacgctgcgccggaagatatc

SEQ ID NO: 526854 - DNA, 75 bp, synthetic construct
  source 1..75: mol_type = other DNA
gtgtgggacgttgaaggccgtgagtatcttgatttcgcgggcgggattgcggtgctcaataccgggcacctgcat

SEQ ID NO: 526855 - DNA, 75 bp, synthetic construct
  source 1..75: mol_type = other DNA
cccacgatctgacacaaatgatgccgcgtccggtaagaggcgatcagggccagcgtgaaccagcgttactggcgg

SEQ ID NO: 526856 - DNA, 75 bp, synthetic construct
  source 1..75: mol_type = other DNA
cctaccaatttagataaaccggaagggcgtctggatattatcgcctggccgggatacatcgaacgcggacaaact

SEQ ID NO: 526857 - DNA, 75 bp, synthetic construct
  source 1..75: mol_type = other DNA
tattaggcgagaaaggttgtgaaacaaacggttttaactatttcgataaaatcgccttctggaaaacgcctatag

SEQ ID NO: 526858 - DNA, 75 bp, synthetic construct
  source 1..75: mol_type = other DNA
aaatggatgaactggtcattaacaccaaaagtgcagggcgatgtggcagcctggtttggctcgctgcccgtggtg

SEQ ID NO: 526859 - DNA, 75 bp, synthetic construct
  source 1..75: mol_type = other DNA
ataccgccttgattcccaactggaaagcgctcgatccgcgcgtggttaaaggcgactggtttaacgttggcggca

SEQ ID NO: 526860 - DNA, 75 bp, synthetic construct
  source 1..75: mol_type = other DNA
gtcgtggcttccagcgcctggccgtatcaggccaacgcgttgaaagccgaaggccaaccgatcgccaccgtattc

SEQ ID NO: 526861 - DNA, 75 bp, synthetic construct
  source 1..75: mol_type = other DNA
tacaacaccaaaaccttcccgacaccgccggatagctggcaagtgatttttgttgagcagaatctgccggacggc

SEQ ID NO: 526862 - DNA, 75 bp, synthetic construct
  source 1..75: mol_type = other DNA
actaaagctgggtgcagaatccaccagaaagcttccagtcctacttaaaaattcttttctttttctaaatgtgtg

SEQ ID NO: 526863 - DNA, 75 bp, synthetic construct
  source 1..75: mol_type = other DNA
caatttaatgaccctttattcattcgctcaggaaaaggtatcgcgccgacgacaacagggttgaatctgcatcac

SEQ ID NO: 526864 - DNA, 75 bp, synthetic construct
  source 1..75: mol_type = other DNA
aggttactcacgacagcgcgttctgcagtcagcaagcaagttacgtcagagtgggcgtgtggctcaccgttgtga

SEQ ID NO: 526865 - DNA, 75 bp, synthetic construct
  source 1..75: mol_type = other DNA
ggacgctgcgttgttcgttaaagccactcagccgcagttgggcatcagcgatccgtatcaactcaccgaagaaca

SEQ ID NO: 526866 - DNA, 75 bp, synthetic construct
  source 1..75: mol_type = other DNA
atgggcaaacgcgtgcagccgattaataccgcattgattcccaactggaaaacgctcgatccgcgcgtggttaaa

SEQ ID NO: 526867 - DNA, 75 bp, synthetic construct
  source 1..75: mol_type = other DNA
ttgaggtgggcgagctgtttgaaggccgtaaaatcacaccgctggtgtacgatctggacttagagcggctggccg

SEQ ID NO: 526868 - DNA, 75 bp, synthetic construct
  source 1..75: mol_type = other DNA
atctcgaacggttagcctggccgctgaccgatgccgcaggcagcgtgaagccgacaatgcaaaagttgattccgg

SEQ ID NO: 526869 - DNA, 75 bp, synthetic construct
  source 1..75: mol_type = other DNA
ggacaagtattttcccatcgtcaacaaggagcaggacaacagcgaaatgctggccgctgacgtcatcatcagcca

SEQ ID NO: 526870 - DNA, 75 bp, synthetic construct
  source 1..75: mol_type = other DNA
acccgcgcggagacatccaaccgcaaaacgaacccgatgctgcaggatgtcgcggtgggctggctgcagaaatac

SEQ ID NO: 526871 - DNA, 75 bp, synthetic construct
  source 1..75: mol_type = other DNA
acccgtgcggcgacctccaaccgtaagcagaacccgctgctgcaggatgtcgcggtgggctggctgcaaaagtac

SEQ ID NO: 526872 - DNA, 75 bp, synthetic construct
  source 1..75: mol_type = other DNA
gcgtcaaagggctgcgtctgggagcagatgattatctccctaaacccttttcactcattgaattggtggcgcgta

SEQ ID NO: 526873 - DNA, 75 bp, synthetic construct
  source 1..75: mol_type = other DNA
tcaataattttgtgaaattactatgttatattttcgaaaaaggtaagttatatagagaaatatgttcggaaattc

SEQ ID NO: 526874 - DNA, 75 bp, synthetic construct
  source 1..75: mol_type = other DNA
gggaatggtttttttgcccgctgtctgtggtctgtaactacatcaacgcagggtataagaatgcatcaacctgat

SEQ ID NO: 526875 - DNA, 75 bp, synthetic construct
  source 1..75: mol_type = other DNA
tgtaactgatgcaaatactactaaagctacaactatcacttcaggcggtacacctgttcagattgataatactgc

SEQ ID NO: 526876 - DNA, 75 bp, synthetic construct
  source 1..75: mol_type = other DNA
atggatgcgtctgttctgaccgatcttaacattactgatgcttctgctgtttcgctgcacaacgtaactaaaggt

SEQ ID NO: 526877 - DNA, 75 bp, synthetic construct
  source 1..75: mol_type = other DNA
agaataacactggtgatgctaccgctacttcaccgggaacatctgggacaacagttgtcgcagcgtcaattcatc

SEQ ID NO: 526878 - DNA, 75 bp, synthetic construct
  source 1..75: mol_type = other DNA
gtgttatacagtgttatacagtggtatactgtatggatattacttactgatatggtctttgcaatgagcaaatct

SEQ ID NO: 526879 - DNA, 75 bp, synthetic construct
  source 1..75: mol_type = other DNA
cattggttgcgggtcaaacggctccaaaatctcctggcgatgtaggaaccacaaaaaatgtcaccgcatatcaag

SEQ ID NO: 526880 - DNA, 75 bp, synthetic construct
  source 1..75: mol_type = other DNA
ctccatgaaaatccaggttggcgcaaatgataaccagactatcactatcgatctgaagcagattgatgctaaaac

SEQ ID NO: 526881 - DNA, 75 bp, synthetic construct
  source 1..75: mol_type = other DNA
aaacacagcgtgatggatatgctgggatgggtattctcgctgacactggtatcgatgctcgttttaataaaaacc

SEQ ID NO: 526882 - DNA, 75 bp, synthetic construct
  source 1..75: mol_type = other DNA
ggaaatatttcgcttaaaaaaacacttggaaaacaatttgctaatgtaaatgcatttgctttaattgaagatgtg

SEQ ID NO: 526883 - DNA, 75 bp, synthetic construct
  source 1..75: mol_type = other DNA
ttcattatgacaataaatggtggagttcatactgacactgtcacttatatatcaaagaagaataaaattatcggg

SEQ ID NO: 526884 - DNA, 75 bp, synthetic construct
  source 1..75: mol_type = other DNA
aaatatcaggaaaagagttcgatttcacgcaccttgagccattcattatgcacgtaaatagtgacatggctaaaa

SEQ ID NO: 526885 - DNA, 75 bp, synthetic construct
  source 1..75: mol_type = other DNA
tgaaggagtacgttttgtgcgcggcggcgtggtcaatccgttgatgcgtctgccgcgcagtaatctgcttaccgt

SEQ ID NO: 526886 - DNA, 75 bp, synthetic construct
  source 1..75: mol_type = other DNA
cgttagctgaagtgctgattgctattgctatttttgcatcactggttttaatggcgcagcaggtagctaacggcc

SEQ ID NO: 526887 - DNA, 75 bp, synthetic construct
  source 1..75: mol_type = other DNA
atgcagcaaacgatgagttttctgacccacgatctgacacaaatgatgccacgcccggtaagaggcgatcagggc

SEQ ID NO: 526888 - DNA, 75 bp, synthetic construct
  source 1..75: mol_type = other DNA
tccggtcgcgaaagccatcctcgctcgcgggagctgttaagctcgctaccgttagccattgattatgaagtgctg

SEQ ID NO: 526889 - DNA, 75 bp, synthetic construct
  source 1..75: mol_type = other DNA
ctcccgtttgacgaaagccagcaaaaaaagctggaagtcccttttaccctgctgtggcataaacggaacagccat

SEQ ID NO: 526890 - DNA, 75 bp, synthetic construct
  source 1..75: mol_type = other DNA
gaagggaaaggtaagtaatatgccgggagcagcctcttccaaagagcttgaggaaagggctactaaacttcaaaa

SEQ ID NO: 526891 - DNA, 75 bp, synthetic construct
  source 1..75: mol_type = other DNA
aacgccgcgcggtcttaagttcgaactggcggcggaatcgccgctgatgatgatcatgcttaatgcgctgtcgaa

SEQ ID NO: 526892 - DNA, 75 bp, synthetic construct
  source 1..75: mol_type = other DNA
ccgctgcaggtaaggatgttgcggcgctgaacggggtggatgtccgtgctttcaccggtcaggcgaaattttgta

SEQ ID NO: 526893 - DNA, 75 bp, synthetic construct
  source 1..75: mol_type = other DNA
actgtggcataaacggaacagccataatccgaagatcgtctggttacgggaaaccattaaaaatctttacgcgtc

SEQ ID NO: 526894 - DNA, 75 bp, synthetic construct
  source 1..75: mol_type = other DNA
ccacgctggaagtcgatgatcccgcaatggttgcgaggcagatggaactggtgctggaagggtgtttaagtcgta

SEQ ID NO: 526895 - DNA, 75 bp, synthetic construct
  source 1..75: mol_type = other DNA
gcaggcttcgtttatgtggcgttcatcattgatgtgtttgccggatacatcgtggggtggcgggtctcatcgtcc

SEQ ID NO: 526896 - DNA, 75 bp, synthetic construct
  source 1..75: mol_type = other DNA
gcgtaaagtctggcgtcagttgttacgggaaggaatcagggtggccagatgcactgtggcacgtctcatggcggt

SEQ ID NO: 526897 - DNA, 75 bp, synthetic construct
  source 1..75: mol_type = other DNA
ggcgaccgcgtaaaccgtcagtttgtggcagaacgtcctgaccagttgtgggtggctgattttacttacggtgtg

SEQ ID NO: 526898 - DNA, 75 bp, synthetic construct
  source 1..75: mol_type = other DNA
tcacgtgggtggactggtataacaatcgacgattgctggaaaggctgggtcatatccctccggcagaagcagaaa

SEQ ID NO: 526899 - DNA, 75 bp, synthetic construct
  source 1..75: mol_type = other DNA
ctgatttttacttacggttgtgcccggagttcagggcgggtcatggatgcttaaatgaaccgcgagtctgtctgg

SEQ ID NO: 526900 - DNA, 75 bp, synthetic construct
  source 1..75: mol_type = other DNA
ctccggggtaaaaaggtccgtacgaccatcagccggaaagccgttgccgcaggcgaccgcgtaaaccgtcagttc

SEQ ID NO: 526901 - DNA, 75 bp, synthetic construct
  source 1..75: mol_type = other DNA
ctttttaacggtggcggtcggcatggttctggcgtgtctggtgcagtgggaagcgttgcgtggcaaagcggtata

SEQ ID NO: 526902 - DNA, 75 bp, synthetic construct
  source 1..75: mol_type = other DNA
ctggtgggttaccttgttgttttaatgtacgcacaaggggaatacctgttcgccattaccacgctgatattgagt

SEQ ID NO: 526903 - DNA, 75 bp, synthetic construct
  source 1..75: mol_type = other DNA
tcgtatgacaacgcgatggcggagagcattaatggtctttacaaagcggaggtaatacaccgtaagagctggaaa

SEQ ID NO: 526904 - DNA, 75 bp, synthetic construct
  source 1..75: mol_type = other DNA
tatggggcttgccggtgttctccggggtaaaaaagtccgtacgaccgtcagcaggaaagccagtgccgcagacga

SEQ ID NO: 526905 - DNA, 75 bp, synthetic construct
  source 1..75: mol_type = other DNA
acgtattaccattgtccgcagcagcggcatcatcctgataaacgcagtgcccgtgcgcagcgcgatgactggctg

SEQ ID NO: 526906 - DNA, 75 bp, synthetic construct
  source 1..75: mol_type = other DNA
cgcttaccgatggtgaaaccggcaagaattatctctccgacgcctttaaatttggcggcgagcaaaagctacagt

SEQ ID NO: 526907 - DNA, 75 bp, synthetic construct
  source 1..75: mol_type = other DNA
tcgacgattgctggaaaggctgggccatatcccaccggcagaagcagaaaaagcttattatgcttccatcggaaa

SEQ ID NO: 526908 - DNA, 75 bp, synthetic construct
  source 1..75: mol_type = other DNA
cgctggcgaatgcctacgatgcggactaccgcgcactgttgcaaaaagtggcgaaagaagagggtttccccctga

SEQ ID NO: 526909 - DNA, 75 bp, synthetic construct
  source 1..75: mol_type = other DNA
aggtctgagtgacgtaaagctttcgcatacccaaacgctggcagctgcggagctctctaagcagaactttatcaa

SEQ ID NO: 526910 - DNA, 75 bp, synthetic construct
  source 1..75: mol_type = other DNA
cggtgctgaatgaatcgcggctggcaacagttgcaggagaggttgttgtccacagctacgataataagacgcggg

SEQ ID NO: 526911 - DNA, 75 bp, synthetic construct
  source 1..75: mol_type = other DNA
ataccgcgcactgttacaaaaagtggcgaaagaagagggtttccctctgacggagggcgtgttcgtctcgtatcc

SEQ ID NO: 526912 - DNA, 75 bp, synthetic construct
  source 1..75: mol_type = other DNA
atgtctcaggcaaatttttctcataacccgctgtattgcgtcgatattatccgggcttataaaccagatttcaca

SEQ ID NO: 526913 - DNA, 75 bp, synthetic construct
  source 1..75: mol_type = other DNA
gtgccctggctgaaatggaacgcgaactgatagttgaacgtaccagggcagggctggctgcagctcgtgccaaag

SEQ ID NO: 526914 - DNA, 75 bp, synthetic construct
  source 1..75: mol_type = other DNA
ttgtctggaagctggatcgtcttgggcggagtatgcggaacttggtaattctcgtggaggagctaaagcaacgtt

SEQ ID NO: 526915 - DNA, 75 bp, synthetic construct
  source 1..75: mol_type = other DNA
gtctttacaaagcggaggtaatacaccgtaagagctggaaaaaccgtgcagaagtggaactggccacactaacgt

SEQ ID NO: 526916 - DNA, 75 bp, synthetic construct
  source 1..75: mol_type = other DNA
atccttataaacgtagtgcctgtgcacagcgcgatgactggctgaagaaagagatacagcgcgtatacgatgaaa

SEQ ID NO: 526917 - DNA, 75 bp, synthetic construct
  source 1..75: mol_type = other DNA
gcacattcatgcactgatgcccccggggaaaggcgggctggttatgcaatttgccgcacagccgacctgaccgcg

SEQ ID NO: 526918 - DNA, 75 bp, synthetic construct
  source 1..75: mol_type = other DNA
ggggcaaccggaaaccaaggtgggcgatctggcactgttgcaaatagtcggtggtgataaacttatcatcccctt

SEQ ID NO: 526919 - DNA, 75 bp, synthetic construct
  source 1..75: mol_type = other DNA
cagcatagacaccagtactccgatggggcggtttttctttcacgttatgggggcactggcggagatggaacgcga

SEQ ID NO: 526920 - DNA, 75 bp, synthetic construct
  source 1..75: mol_type = other DNA
catggcagggcttcgtctatgtggcgtttatcattgatgtgtttgccggatacatcgtggggtggcgggtctcat

SEQ ID NO: 526921 - DNA, 75 bp, synthetic construct
  source 1..75: mol_type = other DNA
gatagtcgccagacaccactgaccgcgtcattaatcacgcaattccggcgagaatgcggctatctgcaaagttaa

SEQ ID NO: 526922 - DNA, 75 bp, synthetic construct
  source 1..75: mol_type = other DNA
gatgaaaatcatcaggtgtacggtgtgcgtaaagtctggcgccagttgttacgcgaaggtatcagggtggccaga

SEQ ID NO: 526923 - DNA, 75 bp, synthetic construct
  source 1..75: mol_type = other DNA
caatcgacgattgctgggaaggctgggccatactcctccggcagaagcacaaaaagctcattatgcttccatcgg

SEQ ID NO: 526924 - DNA, 75 bp, synthetic construct
  source 1..75: mol_type = other DNA
atcattgatgtgtttgccggatacatcgtggggtggcgggtctcatcgtctatggaaacgacattcgtgctggat

SEQ ID NO: 526925 - DNA, 75 bp, synthetic construct
  source 1..75: mol_type = other DNA
acaatcgacgattgctgggaaggctgggtcatatccctccggcagaagcagaaaaagcttattatgcttccatcg

SEQ ID NO: 526926 - DNA, 75 bp, synthetic construct
  source 1..75: mol_type = other DNA
gcagcatccgcaggtaaaagtacgcattatggaagggcaactggtgtcgatgattaatgaattgcgccagggaga

SEQ ID NO: 526927 - DNA, 75 bp, synthetic construct
  source 1..75: mol_type = other DNA
atgtacagtggcacgtctcatggcggttatgggacttgccggtgttctccggggtaaaaaggtccgtacgaccat

SEQ ID NO: 526928 - DNA, 75 bp, synthetic construct
  source 1..75: mol_type = other DNA
gcgtaaagtctggcgtcagttgttacgggaaggtatcagagtggccaggtgctctgtggcacgtctcatggcggt

SEQ ID NO: 526929 - DNA, 75 bp, synthetic construct
  source 1..75: mol_type = other DNA
agtctgattcaactgaaattgcaggccggacgtaaactgacgcaggcagaaacaactagacttaacgctgtgctg

SEQ ID NO: 526930 - DNA, 75 bp, synthetic construct
  source 1..75: mol_type = other DNA
cacacagcggcttaaggaagccggattactggcatcaacaggaagtacaggcgactcgtatgacaacgcgatggc

SEQ ID NO: 526931 - DNA, 75 bp, synthetic construct
  source 1..75: mol_type = other DNA
agcacaggcgactcgtatgacaacgcgatggcggagagcatcaatggtctttacaaggcggaggtaatacaccgt

SEQ ID NO: 526932 - DNA, 75 bp, synthetic construct
  source 1..75: mol_type = other DNA
tcgtatgacaacgcgatggcggagagcatcaatggtctttataaagcggaggtaatacaccgtaagagctggaaa

SEQ ID NO: 526933 - DNA, 75 bp, synthetic construct
  source 1..75: mol_type = other DNA
ggcagggcttcgtctatgtggcgttcatcattgatgtgtttgccggatacattgtggggtggcgggtctcatcgt

SEQ ID NO: 526934 - DNA, 75 bp, synthetic construct
  source 1..75: mol_type = other DNA
gcatcaatggcctttacaaagcggaggtaatacaccgtaagagctggaaaaaccggacagaagtggagctggcca

SEQ ID NO: 526935 - DNA, 75 bp, synthetic construct
  source 1..75: mol_type = other DNA
aaaaacagaacgctcagtgactgggatggtgtctggcaatctgtttatcctttattgcaaagtggcaaacttgac

SEQ ID NO: 526936 - DNA, 75 bp, synthetic construct
  source 1..75: mol_type = other DNA
atgactctggaggaaactgttttggcgattcgtcttcacaaactggctgttgctttaggtgtctttattgttagc

SEQ ID NO: 526937 - DNA, 75 bp, synthetic construct
  source 1..75: mol_type = other DNA
gacattcgtgctggatgcactggagcaggcgttgtgggcccgtcggccgtccggcacagtccatcacagtgataa

SEQ ID NO: 526938 - DNA, 75 bp, synthetic construct
  source 1..75: mol_type = other DNA
aaaggctgggccatactcctccggcagaagcagaaaaagcttattatgcttccatcggaaacgatgatctggcag

SEQ ID NO: 526939 - DNA, 75 bp, synthetic construct
  source 1..75: mol_type = other DNA
atcatcaggtatacggtggcgtaaagtctgacgtcagttgttacaggaaggtatcagggtggccagatgtacagt

SEQ ID NO: 526940 - DNA, 75 bp, synthetic construct
  source 1..75: mol_type = other DNA
atgccgcaatttttcccaggcagcagtcagtcgcaacgtctcgcaaccggcattcagccgctgcaactctcggaa

SEQ ID NO: 526941 - DNA, 75 bp, synthetic construct
  source 1..75: mol_type = other DNA
ttgaatctcaattgttccctgtctgcgccagtgacgaacatggagaagcactttttgacctcgtgcagccacact

SEQ ID NO: 526942 - DNA, 75 bp, synthetic construct
  source 1..75: mol_type = other DNA
actctctttccctcggtctgttaccgtccattatcagccagatgccgccgctctttacctgggcaattgaagcta

SEQ ID NO: 526943 - DNA, 75 bp, synthetic construct
  source 1..75: mol_type = other DNA
tcgccggcgtcattgtgggctggcgggtctcatcgtcgatgaaaacgacgttcgtgctggatgcactggagcagg

SEQ ID NO: 526944 - DNA, 75 bp, synthetic construct
  source 1..75: mol_type = other DNA
ttgtgggtggctgattttacttacggtgtgcccggagttcagggcgggcatggatgcttaaatgaaccgcgagtc

SEQ ID NO: 526945 - DNA, 75 bp, synthetic construct
  source 1..75: mol_type = other DNA
gagcttttaaagcaggttgccctcgacggctgtgggattgcctggctgccggagtacgccatccaacaagaaatt

SEQ ID NO: 526946 - DNA, 75 bp, synthetic construct
  source 1..75: mol_type = other DNA
caacaaatgaccagaacacggaattgcagcgtaacgcgctggagtgcgcaggatgtgaactgatttttgaagata

SEQ ID NO: 526947 - DNA, 75 bp, synthetic construct
  source 1..75: mol_type = other DNA
caacaaatgaccagaacaccgatttgcaacgtagtgcgctgaactgcgcgggatgtgagcggatttttgaggaca

SEQ ID NO: 526948 - DNA, 75 bp, synthetic construct
  source 1..75: mol_type = other DNA
ctgatagaagagttgcgccagcgtggcgtgaatttccgaaacctgactgacagtattgataccagtaccccaatg

SEQ ID NO: 526949 - DNA, 75 bp, synthetic construct
  source 1..75: mol_type = other DNA
aaatcagtggcactaagtccgacagaccgggactgaaaaaactgctcaggacattatcggcaggtgacactctgg

SEQ ID NO: 526950 - DNA, 75 bp, synthetic construct
  source 1..75: mol_type = other DNA
actgatagttgaacgtaccagggcggggctggctgcagctcgtgccaaaggcagagtaggtggacgccgtcctaa

SEQ ID NO: 526951 - DNA, 75 bp, synthetic construct
  source 1..75: mol_type = other DNA
ctcatgcttattggctatgtacgcgtgtcaacaaatgaccagaacacggaattgcagcgtaacgcgctggagtgc

SEQ ID NO: 526952 - DNA, 75 bp, synthetic construct
  source 1..75: mol_type = other DNA
catcgcgcgtacccaataactcgctattcgaaatctatttttattatcctacggggaaactatttaacgcgtcag

SEQ ID NO: 526953 - DNA, 75 bp, synthetic construct
  source 1..75: mol_type = other DNA
gtttctgaaacaaggccatgaaatcattgccaagaaccaactcgcccgtgaaaaattgattatttataatagcga

SEQ ID NO: 526954 - DNA, 75 bp, synthetic construct
  source 1..75: mol_type = other DNA
tcttttacgctacgaattaacggcaaagaccgtgatttgctggctattgataaaattcatgtcgatttaaactgg

SEQ ID NO: 526955 - DNA, 75 bp, synthetic construct
  source 1..75: mol_type = other DNA
caacaaatcatcaggatacagagttgcaacgtcttgcacttgagtcagctggctgtgagcgaatttatgaagaat

SEQ ID NO: 526956 - DNA, 75 bp, synthetic construct
  source 1..75: mol_type = other DNA
caaattgccgagaaatacgcgcaatgttgcgatattgtgacattcaatgccgatctctatttattattgtgtcgg

SEQ ID NO: 526957 - DNA, 75 bp, synthetic construct
  source 1..75: mol_type = other DNA
ctggcagttaaacgaaccgcactttcatgagcgttttaccaccatcatgaaagaaaatggcctgaaggcgaacag

SEQ ID NO: 526958 - DNA, 75 bp, synthetic construct
  source 1..75: mol_type = other DNA
gcactgatttttgatgtaggtgtttccacaatttatagaaaatttccggcaaataagagcaatgaatccccctga

SEQ ID NO: 526959 - DNA, 75 bp, synthetic construct
  source 1..75: mol_type = other DNA
aaatgccgattgatatggcatttgctgctgcgggatatggttttatttacggtttatggcccatcgcctggatta

SEQ ID NO: 526960 - DNA, 75 bp, synthetic construct
  source 1..75: mol_type = other DNA
tttttattgcggcgattatctctatcttcatcctcggcgtgggcatcaagaaagggattggcgtctttgccgaaa

SEQ ID NO: 526961 - DNA, 75 bp, synthetic construct
  source 1..75: mol_type = other DNA
ggattatggcctattgcgtggattattgtcgcggcggtgttcctctataaattaaccgttgccagcggtcagttc

SEQ ID NO: 526962 - DNA, 75 bp, synthetic construct
  source 1..75: mol_type = other DNA
acgctatcccaaggcgacacgctggtagtctggaaactggacaggcttggtcgcagcatgcgacatcttgtcgtt

SEQ ID NO: 526963 - DNA, 75 bp, synthetic construct
  source 1..75: mol_type = other DNA
cgctacaccgtgaagcacagtctgatttttgccagcgttatcggcgttatcaccctgctgcaggcgtatgtgttt

SEQ ID NO: 526964 - DNA, 75 bp, synthetic construct
  source 1..75: mol_type = other DNA
aaatgccgattgatatggcatttgctgctgcgggctatggctttatttatggattatggccaattgcgtggatta

SEQ ID NO: 526965 - DNA, 75 bp, synthetic construct
  source 1..75: mol_type = other DNA
accaggcctgaaacgcgctttaaagtgccttaaaagaggggatacattggtggtctggaagctggatcggttggg

SEQ ID NO: 526966 - DNA, 75 bp, synthetic construct
  source 1..75: mol_type = other DNA
tttatcggcggcgggctgaaatatccttatgtcgaaggattgcgtctcgacgaagcaatgcatccgctcacactg

SEQ ID NO: 526967 - DNA, 75 bp, synthetic construct
  source 1..75: mol_type = other DNA
gtttcccgctggaagagcgaatttaccgtatgcgctgcgtggaagcatggtcgatggtagtgccgtggattggtt

SEQ ID NO: 526968 - DNA, 75 bp, synthetic construct
  source 1..75: mol_type = other DNA
ttcctcgccagaaggtagcgatcatctatgatgttggtgtatcgacactgtataagatgtttccggtcagagata

SEQ ID NO: 526969 - DNA, 75 bp, synthetic construct
  source 1..75: mol_type = other DNA
gcgtcacctgggtgagaaaaaactgcacgaacgtctgccgtttatctgcgaactagcaaaagcgtatgttggcgt

SEQ ID NO: 526970 - DNA, 75 bp, synthetic construct
  source 1..75: mol_type = other DNA
ggactggcagcagcccgcgcacaggggcgaattggtgggcgtcgcccgaaactgacaaaagagcaacatgagcaa

SEQ ID NO: 526971 - DNA, 75 bp, synthetic construct
  source 1..75: mol_type = other DNA
cgtaatattcgccatgcaatggaaattggcgaactattcctcgtctatcaaccgatcgttgatattaacacccgc

SEQ ID NO: 526972 - DNA, 75 bp, synthetic construct
  source 1..75: mol_type = other DNA
ggctttgccgcagcacgacaagaagggaggaacggtggacgaaagccaaagctgacagtagaacaatgggagcag

SEQ ID NO: 526973 - DNA, 75 bp, synthetic construct
  source 1..75: mol_type = other DNA
aatatggccaggagccgggcgtacagatttatacgcatatatcagatcaatatagcccgttctacaccaaagtga

SEQ ID NO: 526974 - DNA, 75 bp, synthetic construct
  source 1..75: mol_type = other DNA
aaaggcctggactgaaaaaactgctcaggacattatcggcaggggacactctggttgtctggaagctggatcggc

SEQ ID NO: 526975 - DNA, 75 bp, synthetic construct
  source 1..75: mol_type = other DNA
acattatcggcaggtgacacgctggtggtctggaaactggaccgactgaggcgcagtatgcggcatcttgtcgtg

SEQ ID NO: 526976 - DNA, 75 bp, synthetic construct
  source 1..75: mol_type = other DNA
gcgcagtgtgcggcatcttgtcgtgctggtggaggagttgcgcgaacaaggtgttaattttagtagttatgttat

SEQ ID NO: 526977 - DNA, 75 bp, synthetic construct
  source 1..75: mol_type = other DNA
gacaagataagcggtacaaagtccgaaaggccgggactgaaaaaactgctcaggacattatcggcaggtgacact

SEQ ID NO: 526978 - DNA, 75 bp, synthetic construct
  source 1..75: mol_type = other DNA
ctggcgtaataatcttaagctgggatccggaaaataccgctcattacgcacagtcgacaccatattgtacaaaaa

SEQ ID NO: 526979 - DNA, 75 bp, synthetic construct
  source 1..75: mol_type = other DNA
ggcttaatctcacaaccacatattattcgctgtattcatctctggatgagaattcacaggtgacggagtatttta

SEQ ID NO: 526980 - DNA, 75 bp, synthetic construct
  source 1..75: mol_type = other DNA
cagagccttcccccaaaccaacgttttcgtttttatccctacctataccaactctgtatttttcacgaaacaaag

SEQ ID NO: 526981 - DNA, 75 bp, synthetic construct
  source 1..75: mol_type = other DNA
ctggcaggactggctgctgcgcgagcacaaggaagagttggaggacgtcgcccgaaactgacgaaggagcagcat

SEQ ID NO: 526982 - DNA, 75 bp, synthetic construct
  source 1..75: mol_type = other DNA
tcaacgctcagaaagcgcggcctctggccgcattctggggcgacgggacaacatcatcgtcagacgggcagaact

SEQ ID NO: 526983 - DNA, 75 bp, synthetic construct
  source 1..75: mol_type = other DNA
tgctattgataccagcacaccgatggggcgttttttctttcatgtgatgggggccctggctgaaatggaacgaga

SEQ ID NO: 526984 - DNA, 75 bp, synthetic construct
  source 1..75: mol_type = other DNA
cagcattgatacctcgacacccatggggcgctttttcttccacattatgggcgccctggctgaaatggagcgtga

SEQ ID NO: 526985 - DNA, 75 bp, synthetic construct
  source 1..75: mol_type = other DNA
acaacgtaatgcgctgaactgtgcaggatgcgagctgatttttgaagacaagataagcggtacaaagtccgacag

SEQ ID NO: 526986 - DNA, 75 bp, synthetic construct
  source 1..75: mol_type = other DNA
agaaatgctgtttctatatgggaccctgtttgccgagaaatttttgatgatctaataaaacctcgctgggagaac

SEQ ID NO: 526987 - DNA, 75 bp, synthetic construct
  source 1..75: mol_type = other DNA
aggtggacgccgtcctaagttgaccaccgaacagtgggcacagattggacgtttactcgaggccggagaatcaag

SEQ ID NO: 526988 - DNA, 75 bp, synthetic construct
  source 1..75: mol_type = other DNA
ttaggatgtgttcaggcccaggggtatctgtaccagaagccgttgccgttttctgcctgggacagaagtggaaaa

SEQ ID NO: 526989 - DNA, 75 bp, synthetic construct
  source 1..75: mol_type = other DNA
aaatctgccatttgtgaaccgttaaaaggggaaaatgcctggagttatgctgaaaaactcaaagtggcgctttcc

SEQ ID NO: 526990 - DNA, 75 bp, synthetic construct
  source 1..75: mol_type = other DNA
gtacttgatgataataaatattatctcttttcgcggagggcgaatgataaaatcgttgtttatcatcaggaacaa

SEQ ID NO: 526991 - DNA, 75 bp, synthetic construct
  source 1..75: mol_type = other DNA
ttattgttgttgctacacctgcagaattatttgattacgcttctgttctacagtttttcacaatgcttctcgatc

SEQ ID NO: 526992 - DNA, 75 bp, synthetic construct
  source 1..75: mol_type = other DNA
actgattgttgaacgaacaaaagctggactggaaactgctcgtgcacagggacgaattggtggacgtcgtcccaa

SEQ ID NO: 526993 - DNA, 75 bp, synthetic construct
  source 1..75: mol_type = other DNA
ttcctcgccagaaggtggcgatcatctatgatgttggtatatcgacactgtataagaattttccggtcggagata

SEQ ID NO: 526994 - DNA, 75 bp, synthetic construct
  source 1..75: mol_type = other DNA
tgcgcgggatgtgagcggatttttgaggataaaatcagtggcactaagtccgacagaccggggctgaaaaaactg

SEQ ID NO: 526995 - DNA, 75 bp, synthetic construct
  source 1..75: mol_type = other DNA
acgtttatgaaaatgcagagataacggctaactggcatcatccccggtttttattcaggggattgatcatgctta

SEQ ID NO: 526996 - DNA, 75 bp, synthetic construct
  source 1..75: mol_type = other DNA
atgcagagataatggctaactggcatcatccccggtttttattcaggggattgatcatgcttattggctatgtac

SEQ ID NO: 526997 - DNA, 75 bp, synthetic construct
  source 1..75: mol_type = other DNA
aacccgatcactaatacttttaaactcggccccggcgtcgatgtgaactatatgctgcacacgcagaataaataa

SEQ ID NO: 526998 - DNA, 75 bp, synthetic construct
  source 1..75: mol_type = other DNA
tatattttgcgcatggtgcctaaaggcacgcatgatgtgaagaagtttattaaaccggcagagctgcttggctgg

SEQ ID NO: 526999 - DNA, 75 bp, synthetic construct
  source 1..75: mol_type = other DNA
ctgcggctgttgcttaaacgtctcccgggccttgaagggctggcatggaatgacggtactccctttgctgacgag

SEQ ID NO: 527000 - DNA, 75 bp, synthetic construct
  source 1..75: mol_type = other DNA
tggatatgggctttgagccattgcaggtggcaaaactgcacgcactggaaagcggcattcaggtggattacgtgc

SEQ ID NO: 527001 - DNA, 75 bp, synthetic construct
  source 1..75: mol_type = other DNA
cgctggtgggatctggaaggtgagttcaaaccgctgcaccgcattaacccgctgcgtctgggctatattgccgag

SEQ ID NO: 527002 - DNA, 75 bp, synthetic construct
  source 1..75: mol_type = other DNA
gtgacctgcatggagatgctggagcacgtccccgatcctcagtcagtggtcagagcctgtgcgcaactggtgaaa

SEQ ID NO: 527003 - DNA, 75 bp, synthetic construct
  source 1..75: mol_type = other DNA
tgataagataggcctcggcgcgctaatcggcctttctgacagctggcgcgttgactgctatatggttgccgagca

SEQ ID NO: 527004 - DNA, 75 bp, synthetic construct
  source 1..75: mol_type = other DNA
tttgctatggctgcaacagcactactggcaaagccgctactctgtctccttcccacgcctgcgcccgtgtactgg

SEQ ID NO: 527005 - DNA, 75 bp, synthetic construct
  source 1..75: mol_type = other DNA
acgtgggttaggaagactgcgttttatcaccaacgcctttactcgtatgcgtttctgttttccgaacggtcaact

SEQ ID NO: 527006 - DNA, 75 bp, synthetic construct
  source 1..75: mol_type = other DNA
atgcaagcgatgactggcgcagcggcccacgcgaagacattattcgcagcatcgaaaccagcattaaaacagtga

SEQ ID NO: 527007 - DNA, 75 bp, synthetic construct
  source 1..75: mol_type = other DNA
atgaacgagcctcgttgtattgctcagttattgcgtaacgaaagccccatggcgattgacttcaccatcacccac

SEQ ID NO: 527008 - DNA, 75 bp, synthetic construct
  source 1..75: mol_type = other DNA
ccaggtggctatgccgacaatcaccccgagctggaacagttctcaccgcacgacgatcgcagaccggaagcggtt

SEQ ID NO: 527009 - DNA, 75 bp, synthetic construct
  source 1..75: mol_type = other DNA
cggcattctggccgagagtatggcgcgcgaaggcgcgacagtgaccggtctggatatgggctttgagccattgca

SEQ ID NO: 527010 - DNA, 75 bp, synthetic construct
  source 1..75: mol_type = other DNA
tgcacgttatgcccacctcggttttcgtattgccgatgaaaccctggtgctgatgcgcgagatgactcacgcagg

SEQ ID NO: 527011 - DNA, 75 bp, synthetic construct
  source 1..75: mol_type = other DNA
tcgttgaagcgggatttaaaggtgtggagattcgcgaggagctgacccgacggcggattgcggcggtagccagct

SEQ ID NO: 527012 - DNA, 75 bp, synthetic construct
  source 1..75: mol_type = other DNA
cccgcctttggcgaagatccgctacgcgtattgcgcgtagcgcgttttgctgcgcgttatgcccaccttggtttt

SEQ ID NO: 527013 - DNA, 75 bp, synthetic construct
  source 1..75: mol_type = other DNA
agtgatcaaggatggcattaccggataaaaagttatcagtccgccctggcggacagagggttagtgcagagcatg

SEQ ID NO: 527014 - DNA, 75 bp, synthetic construct
  source 1..75: mol_type = other DNA
aagagctggaaaatgccgttaacgaatacataacttactggaatcaaaaaagaataaaactcagtcttgggggac

SEQ ID NO: 527015 - DNA, 75 bp, synthetic construct
  source 1..75: mol_type = other DNA
gagcttcagaaaagaggtcttaagttcagtggcaaaacggtgcgaaaactgatgcaacagctcggcctgaagtct

SEQ ID NO: 527016 - DNA, 75 bp, synthetic construct
  source 1..75: mol_type = other DNA
caccatcgcccagtcacaggttggctacgccgaccgtattctgctgaccaaaaccgacgtcgcaggcgaagcaga

SEQ ID NO: 527017 - DNA, 75 bp, synthetic construct
  source 1..75: mol_type = other DNA
tcgacaagggcaatattcagttcgatcgtctggtcattgaatgcaccggcatggccgatcccggcccgattattc

SEQ ID NO: 527018 - DNA, 75 bp, synthetic construct
  source 1..75: mol_type = other DNA
tcaccggttttttaggcgcgggcaaaaccaccctgctgcgccatattcttaacgaacaacacggctacaagattg

SEQ ID NO: 527019 - DNA, 75 bp, synthetic construct
  source 1..75: mol_type = other DNA
cgcgaggagctgacccgacggcggattgcggcggtagccagctggaaggaacaacgttgtccaaagcctgattaa

SEQ ID NO: 527020 - DNA, 75 bp, synthetic construct
  source 1..75: mol_type = other DNA
accggtcaaagacagagattgggtggtggtcggcagtacgccacaggagatgctcgacgcgggctaccagcaggt

SEQ ID NO: 527021 - DNA, 75 bp, synthetic construct
  source 1..75: mol_type = other DNA
accgcatagcacgatggtgtttatcgggattcagttgccggaggaagagattcgggcggcgtttgcgggactcaa

SEQ ID NO: 527022 - DNA, 75 bp, synthetic construct
  source 1..75: mol_type = other DNA
aatggcccacgcagggatcacgccgcagtgggatctgccgaccgctaaggattgcgcgcgcgatgtagaagcagt

SEQ ID NO: 527023 - DNA, 75 bp, synthetic construct
  source 1..75: mol_type = other DNA
gatccgcatgagaacggttttcgaacaggctattgatcaacgttcttcaaccggtgcatggcgaaacgcactttc

SEQ ID NO: 527024 - DNA, 75 bp, synthetic construct
  source 1..75: mol_type = other DNA
gatccgcatgagaaccgttttcgaacaggcgattgatcaacgttcttcgaccggcgcatggcgaaacgcactttc

SEQ ID NO: 527025 - DNA, 75 bp, synthetic construct
  source 1..75: mol_type = other DNA
gccatggaagatgccctgtacgaaatcgcctccatgcgcctgtttgcccgattatccctggatagcgccctgccg

SEQ ID NO: 527026 - DNA, 75 bp, synthetic construct
  source 1..75: mol_type = other DNA
tttaatcactggatgggaaaaacgccaggtagcgaaagaggataacggcaatgtttcgcaaaccgcgaaatcccc

SEQ ID NO: 527027 - DNA, 75 bp, synthetic construct
  source 1..75: mol_type = other DNA
aatatttcgcaaaccgcaaaatctccggcagagcgcaagagggcgcagcgtgagagggaaagaaagcgggaacaa

SEQ ID NO: 527028 - DNA, 75 bp, synthetic construct
  source 1..75: mol_type = other DNA
ggtaaaaccagtcagcaagggggtaaaccatgcagcagcaccaggtggcaccgcatcacgggcagttcaggaaat

SEQ ID NO: 527029 - DNA, 75 bp, synthetic construct
  source 1..75: mol_type = other DNA
cacaggcagcacagcttgcgacggagggtatctcagggatggtgaataacatcacggagatgctgaacggaaaca

SEQ ID NO: 527030 - DNA, 75 bp, synthetic construct
  source 1..75: mol_type = other DNA
acgcgcggtgggcagtatgaacggcagtgcgggtctggtgtattcccccggtctaccatatcgccattcagaatg

SEQ ID NO: 527031 - DNA, 75 bp, synthetic construct
  source 1..75: mol_type = other DNA
aaacagcagagcgccctgacaaaaacagaacgtgagctggccctgtcccgactgaagggggaggaaaaagagcgt

SEQ ID NO: 527032 - DNA, 75 bp, synthetic construct
  source 1..75: mol_type = other DNA
aaacggccatcaacatcgaatatatgaaagccagcatccgtgccagggtggagcacccgtttcgcatcatcaagc

SEQ ID NO: 527033 - DNA, 75 bp, synthetic construct
  source 1..75: mol_type = other DNA
tcgtgatggtgacggcaaaaatcgaagagatcgaccgcctgctcggactggagattggcgcagatgattatatct

SEQ ID NO: 527034 - DNA, 75 bp, synthetic construct
  source 1..75: mol_type = other DNA
gccgcaagctggaatctctcgacgccgaacagtcctttatccgtgccgtttacggcgtcggttaccgctgggaag

SEQ ID NO: 527035 - DNA, 75 bp, synthetic construct
  source 1..75: mol_type = other DNA
gggtcattaacctgcctgcgctgggaagataaacactattttgtccagccgtcgaaccggcataaggatttgggt

SEQ ID NO: 527036 - DNA, 75 bp, synthetic construct
  source 1..75: mol_type = other DNA
ggatatgtatagcaaagagtcgccggaagaagcgccagcaccactgaaaccgtggtttgcgattcccggccccgt

SEQ ID NO: 527037 - DNA, 75 bp, synthetic construct
  source 1..75: mol_type = other DNA
tcgcctccatgcggctgtttgcccgtttatccctggatagcgccctgccggagcgcaccaccatcatgaatttcc

SEQ ID NO: 527038 - DNA, 75 bp, synthetic construct
  source 1..75: mol_type = other DNA
tcgcctccatgcggctgtttgcccgattatccctggatagcgccctgccggatcgcaccaccatcatgaatttcc

SEQ ID NO: 527039 - DNA, 75 bp, synthetic construct
  source 1..75: mol_type = other DNA
gttgattatcgacgaaggtcgttttcaggcttcatggcgcggcaaaatgcttgacctgacgcctgcggaatttcg

SEQ ID NO: 527040 - DNA, 75 bp, synthetic construct
  source 1..75: mol_type = other DNA
agccacggcgatcaggtactgccatatgtgcgccagacaccaccggatctgatcctgttggatctgatgctccct

SEQ ID NO: 527041 - DNA, 75 bp, synthetic construct
  source 1..75: mol_type = other DNA
ccgtgcgcagcgcgatgactggctgaagaaagagatacagcgcgtatacgatgggaatcacaaggtatacggtgt

SEQ ID NO: 527042 - DNA, 75 bp, synthetic construct
  source 1..75: mol_type = other DNA
gcgttgtgggcccgtcgtccgtctggcaccatccatcacagcgataaaggctctcagtatgtgtcactggcctat

SEQ ID NO: 527043 - DNA, 75 bp, synthetic construct
  source 1..75: mol_type = other DNA
gggtggactggtataacaatcgacgattgctggaaaggctgggccatattcctccggcagaagcagaaaaagctt

SEQ ID NO: 527044 - DNA, 75 bp, synthetic construct
  source 1..75: mol_type = other DNA
acgtattaccactgtcagcaacagcgacatcatccggataaacgcagtgcccgtgcgcagcgcgatgactggctg

SEQ ID NO: 527045 - DNA, 75 bp, synthetic construct
  source 1..75: mol_type = other DNA
ctggaaaaaataatgccctgctggataagctgcgtgagcagtacggggtcggaccggtatgcagtgaactgcata

SEQ ID NO: 527046 - DNA, 75 bp, synthetic construct
  source 1..75: mol_type = other DNA
acgtattaccattgtcagcaacagcgacatcatccggataaacgcagtgcccgtgcgcagcacgacgactggctg

SEQ ID NO: 527047 - DNA, 75 bp, synthetic construct
  source 1..75: mol_type = other DNA
atgccactgctggataagctgcgtgagcagtacggagtcagaccggtatgcagcgaactgcatattgccccgtca

SEQ ID NO: 527048 - DNA, 75 bp, synthetic construct
  source 1..75: mol_type = other DNA
ccggtgttctccggggtaaaaaggtccgtactaccgtcagccggaaagccgtttccgcaggcgaccgcgtaaacc

SEQ ID NO: 527049 - DNA, 75 bp, synthetic construct
  source 1..75: mol_type = other DNA
atggctacatacggcggtcagtttacgcttactgacaacgcgatggcggagagcatcaatggtctttacaaagcg

SEQ ID NO: 527050 - DNA, 75 bp, synthetic construct
  source 1..75: mol_type = other DNA
tgtgggcccgtcggccgtccggcacaattcatcacagtgataaaggttctcagtatgtgtcactgacctatacgg

SEQ ID NO: 527051 - DNA, 75 bp, synthetic construct
  source 1..75: mol_type = other DNA
ccggatacatcgtgggatggcgggtctcatcgtccatggaaacgacattcgtgctggatgcactggagcaggcag

SEQ ID NO: 527052 - DNA, 75 bp, synthetic construct
  source 1..75: mol_type = other DNA
accgtgcagaagtggaactggccacactaacgtgggtggactggtataataatcgacgattgctggaaaggctgg

SEQ ID NO: 527053 - DNA, 75 bp, synthetic construct
  source 1..75: mol_type = other DNA
ggtaatacaccgtaagagctggaaaaaacgtgcagaagtggaactgaccacactcacgtgggtggactggtataa

SEQ ID NO: 527054 - DNA, 75 bp, synthetic construct
  source 1..75: mol_type = other DNA
actcctggcatcaacaggaagtacaggcgactcgtatgacaacgcgatggcggagagcatcaatggcctttacaa

SEQ ID NO: 527055 - DNA, 75 bp, synthetic construct
  source 1..75: mol_type = other DNA
acttctggcatcaacaggtagtaccggcgactcgtatgacaacgcgatggcggagagcatcaatggcctttacaa

SEQ ID NO: 527056 - DNA, 75 bp, synthetic construct
  source 1..75: mol_type = other DNA
actactggcatcaacaggaagtaccggcgactcgtatgacaacgcgatggcggagagcatcaatggcctttacaa

SEQ ID NO: 527057 - DNA, 75 bp, synthetic construct
  source 1..75: mol_type = other DNA
actgctggcatcaacagggagtaccggcgactcgtatgacaacgcgatggcggagagcatcaatggcctttacaa

SEQ ID NO: 527058 - DNA, 75 bp, synthetic construct
  source 1..75: mol_type = other DNA
actcctggcatcaacagggagtacgggcgactcgtatgacaacgcgatggcggagagcatcaatggcctttacaa

SEQ ID NO: 527059 - DNA, 75 bp, synthetic construct
  source 1..75: mol_type = other DNA
actcctggcatcaacaggcagtaccggcgactcgtatgacaacgcgatggcggagagcatcaatggcctttacaa

SEQ ID NO: 527060 - DNA, 75 bp, synthetic construct
  source 1..75: mol_type = other DNA
actggtataacaatcgacgattgctggaaaggctgggccatactcccccggcagaagcagaaaaagcttattatg

SEQ ID NO: 527061 - DNA, 75 bp, synthetic construct
  source 1..75: mol_type = other DNA
tatggaaacgacattcgtgctggatgctccggagcaggcgttatgggcccgtcgaccgtccggcacagtccatca

SEQ ID NO: 527062 - DNA, 75 bp, synthetic construct
  source 1..75: mol_type = other DNA
aggatgtggttgatgcggtactggcggcgaaagcgcgcggtaaccgagtgattgcggtcggcaccacctcggttc

SEQ ID NO: 527063 - DNA, 75 bp, synthetic construct
  source 1..75: mol_type = other DNA
ctcatcgtctatggaaacgacattcgtgctggatgcgctggagcaggcgttttgggcccgtcggccgtccggcac

SEQ ID NO: 527064 - DNA, 75 bp, synthetic construct
  source 1..75: mol_type = other DNA
ctcatcgtctatggaaacgacattcgtgctggatgccctggagcaggcgttttgggcccgccgtccgtccggcac

SEQ ID NO: 527065 - DNA, 75 bp, synthetic construct
  source 1..75: mol_type = other DNA
ctcatcgtctatggaaacgacattcgtgctggatgctctggagcaggcgttttgggcccggcggccgtccggcac

SEQ ID NO: 527066 - DNA, 75 bp, synthetic construct
  source 1..75: mol_type = other DNA
cgtcctgaccagctgtgggtggctgattttacttacgtcagcacatggcagggcttcgtctatgtggcgttcatc

SEQ ID NO: 527067 - DNA, 75 bp, synthetic construct
  source 1..75: mol_type = other DNA
caaaactttgcggtataccttcaagccagtcatcacgcaggcttcgcgaccgcatcagtccttccctgaagcgta

SEQ ID NO: 527068 - DNA, 75 bp, synthetic construct
  source 1..75: mol_type = other DNA
ccgtcataatgtgattggtgataaagttgaactgccttttgtcgaatttgcaaaactgtgcggtataccttcaag

SEQ ID NO: 527069 - DNA, 75 bp, synthetic construct
  source 1..75: mol_type = other DNA
gtgctgagaacccgcagttgcctgccacaacggcaggggatgtcagcccggagatgactgaaaagctggcacttt

SEQ ID NO: 527070 - DNA, 75 bp, synthetic construct
  source 1..75: mol_type = other DNA
cggtattttcccagaaccagacggtcagacgggcaatggagcagttgcgcgagattggatatcttgattacacgg

SEQ ID NO: 527071 - DNA, 75 bp, synthetic construct
  source 1..75: mol_type = other DNA
ctcttcgatgagcgagcttttaaagcaggttgccctcgacggatgtggaattgcctggttgccggagtatgccat

SEQ ID NO: 527072 - DNA, 75 bp, synthetic construct
  source 1..75: mol_type = other DNA
ggctggcagagtataacgtaatggatgactgtggtgcggttttgcataacattgaaaccaaatggctttatgatt

SEQ ID NO: 527073 - DNA, 75 bp, synthetic construct
  source 1..75: mol_type = other DNA
ccatagaaataatgaaacaacatcctgtaaatatgattacgatggatacaaaatactcacctataaatcaggcaa

SEQ ID NO: 527074 - DNA, 75 bp, synthetic construct
  source 1..75: mol_type = other DNA
cgcccgggacaccccgccattggtgcccgttcgatcaaacagttactggattacagctggacaatgccgacgcca

SEQ ID NO: 527075 - DNA, 75 bp, synthetic construct
  source 1..75: mol_type = other DNA
catactgagtggcaccgtattgtgcttaaaggtcgtttggcagaagtcgctggtgagtacctgaaaaagggctcc

SEQ ID NO: 527076 - DNA, 75 bp, synthetic construct
  source 1..75: mol_type = other DNA
tcaaatcactgaaaaacagtaaaaagaacacgctttcgcgtactgatgcgacggaagaactgacgcgtctgtctc

SEQ ID NO: 527077 - DNA, 75 bp, synthetic construct
  source 1..75: mol_type = other DNA
ccgcgtaaaccgtcagttcgtggcagaacgtccagaccagttgtgggtggctgattttacctgggtaaggggtct

SEQ ID NO: 527078 - DNA, 75 bp, synthetic construct
  source 1..75: mol_type = other DNA
tcgatgtatcacggatgggtgcccgatcttcatatacacgcggaagatactctcctgcccttttatcttggtgaa

SEQ ID NO: 527079 - DNA, 75 bp, synthetic construct
  source 1..75: mol_type = other DNA
tcagtcatcacgtaagcttcgtgaacgtataagcccctcactcaaacgtatcgcgggtaccgtgatctcattttc

SEQ ID NO: 527080 - DNA, 75 bp, synthetic construct
  source 1..75: mol_type = other DNA
cagaagtggaactggccacactcacgtgggtggactggtataacaatcgacgattgctggtaaggctgggccata

SEQ ID NO: 527081 - DNA, 75 bp, synthetic construct
  source 1..75: mol_type = other DNA
cagaagtggaactggccacactcacgtgggtggactggtataacaatcgatgattgctggtaaggccgggccata

SEQ ID NO: 527082 - DNA, 75 bp, synthetic construct
  source 1..75: mol_type = other DNA
cagaagtggaactggccacactcacgtgggtggactggtataacaatcgaagattgctgggaaggcagggccata

SEQ ID NO: 527083 - DNA, 75 bp, synthetic construct
  source 1..75: mol_type = other DNA
gtactgtggcacgtctcatggcggttatgggacttgccggtgttctccggggtaaaaaggtccgtacgaccatca

SEQ ID NO: 527084 - DNA, 75 bp, synthetic construct
  source 1..75: mol_type = other DNA
caacgcgatggcggagagcatcaatggcctttacaaagcggaggtaatacaccgtaagagctggaaaaaccgtaa

SEQ ID NO: 527085 - DNA, 75 bp, synthetic construct
  source 1..75: mol_type = other DNA
cagaagtggaactggccacactcacgtgggtggactggtataacaatcgaggattgctggcaaggcggggccata

SEQ ID NO: 527086 - DNA, 75 bp, synthetic construct
  source 1..75: mol_type = other DNA
aatgtgttaagtgcggacatcagatgcgagaagcagacaaagaagcccgcgatcacgttcgcaaagatgagcaag

SEQ ID NO: 527087 - DNA, 75 bp, synthetic construct
  source 1..75: mol_type = other DNA
ggcgcaggattcaatggcgatgtggcgcgaaaataatattgatattgttgaatgcgttaagtgcggacaccagat

SEQ ID NO: 527088 - DNA, 75 bp, synthetic construct
  source 1..75: mol_type = other DNA
cacaacgggtgatgtcagcccggaaatggctgaaaaactgaagctcctcgagaaactgggcatcacccttgatga

SEQ ID NO: 527089 - DNA, 75 bp, synthetic construct
  source 1..75: mol_type = other DNA
tatgggacttgccggtgttctacggggtaaaaaggcccgcacttccgtcagccagaaaaccgttgccgcaggtga

SEQ ID NO: 527090 - DNA, 75 bp, synthetic construct
  source 1..75: mol_type = other DNA
cgtattaaccgcctgtaacaccacgcgcggcgtcggtgaagatatttccgaaggtggcagcgcaatttctggtgc

SEQ ID NO: 527091 - DNA, 75 bp, synthetic construct
  source 1..75: mol_type = other DNA
cttctgcattcactaccggcgtccccggttaaaagcaccgaatgatgagagtaaggaaaatccgttgccaccttc

SEQ ID NO: 527092 - DNA, 75 bp, synthetic construct
  source 1..75: mol_type = other DNA
atgtttattggctatgtacgcgtatcaacaaatgaccagaacacggaattgcagcgtaacgcgctggaatgcgcg

SEQ ID NO: 527093 - DNA, 75 bp, synthetic construct
  source 1..75: mol_type = other DNA
gtcaaaacggtcagcaagtctttcccccgcacgaacagttatgccagtggcaccatcacggtaagaatcagtgat

SEQ ID NO: 527094 - DNA, 75 bp, synthetic construct
  source 1..75: mol_type = other DNA
ggtgcagaaaacaaaaaacggtattccctatgtggctgggattggcgcggggattgaggatgttgatggtcagac

SEQ ID NO: 527095 - DNA, 75 bp, synthetic construct
  source 1..75: mol_type = other DNA
aacgacgtgttcctgaagcgcctgacagcccccaccattaccagcggtggcagccctccggtattttccctgaca

SEQ ID NO: 527096 - DNA, 75 bp, synthetic construct
  source 1..75: mol_type = other DNA
aagtgagccgtgttcctgacggcgttgccggatacagcgtgtgggggctgaagctgccgacgctgcgccagcgcc

SEQ ID NO: 527097 - DNA, 75 bp, synthetic construct
  source 1..75: mol_type = other DNA
atattcatgaacgacgtgttcctgaaacgcctgacggctcccaccattaccagcggcggtaatcctccggtattt

SEQ ID NO: 527098 - DNA, 75 bp, synthetic construct
  source 1..75: mol_type = other DNA
gagatagggaaaagccatctggctcaggagctgtggacgcagattgataacggtcagcttgcgcctgacctggct

SEQ ID NO: 527099 - DNA, 75 bp, synthetic construct
  source 1..75: mol_type = other DNA
atcagacgggagactgacggcgaaaaatgcggatatcagtggcagtgtgaatgcgaactcaggaacgctcaacaa

SEQ ID NO: 527100 - DNA, 75 bp, synthetic construct
  source 1..75: mol_type = other DNA
ggctcccaccattaccagcggtggcaatcccccaacgttttcactgacacctgatggtcgactttctgcgagaaa

SEQ ID NO: 527101 - DNA, 75 bp, synthetic construct
  source 1..75: mol_type = other DNA
cgacaccgaagtggactctgacaatgcggtctcccgtgtggtggcctccgtacctgccggcccatgggccggggc

SEQ ID NO: 527102 - DNA, 75 bp, synthetic construct
  source 1..75: mol_type = other DNA
tgtaagctgcaggtgctgaaaaacggggcagagatttttcatgaaccggcaacggatgtcagccgggtgttctca

SEQ ID NO: 527103 - DNA, 75 bp, synthetic construct
  source 1..75: mol_type = other DNA
cagtcagacacgcgcaatgagctgaatgccatgtatatgctgaaggtgcagaaaacaaaaaacggtattccctat

SEQ ID NO: 527104 - DNA, 75 bp, synthetic construct
  source 1..75: mol_type = other DNA
tctgggacggaacgtttaagccagcatacagcaacaacatggcatggtgtctgtgggatatgctgacccacccgc

SEQ ID NO: 527105 - DNA, 75 bp, synthetic construct
  source 1..75: mol_type = other DNA
tgctgttgatatcagggagtttctcgacaccatgaaactgaatcagtgtgccaccatcaggaaatacatcccgta

SEQ ID NO: 527106 - DNA, 75 bp, synthetic construct
  source 1..75: mol_type = other DNA
aaaaacggtgctgaaatttataaccgtaccgcgctggataatacgctggtttacagtggtgttattgatatgcct

SEQ ID NO: 527107 - DNA, 75 bp, synthetic construct
  source 1..75: mol_type = other DNA
gacgccggggtattttcagataacggcggtaccggtgctggcggtgtatgacccgacggtgcagtttgaattctg

SEQ ID NO: 527108 - DNA, 75 bp, synthetic construct
  source 1..75: mol_type = other DNA
gcagtgtgaatgcgaacgccgggacgctcaataatgtcacgattaatgagaactgtcagattctggggaaactgt

SEQ ID NO: 527109 - DNA, 75 bp, synthetic construct
  source 1..75: mol_type = other DNA
gctcgacctgtcgggtatcggcagatacaccaaagtgatgagtggcgatgcgcccaacctcgaaatattcgaatc

SEQ ID NO: 527110 - DNA, 75 bp, synthetic construct
  source 1..75: mol_type = other DNA
ctttctgcgaaaaatgcggatatcagcggtaacgtgaacgcgaactccgggacgctcaacaacgtcacgattaat

SEQ ID NO: 527111 - DNA, 75 bp, synthetic construct
  source 1..75: mol_type = other DNA
gccgttcgactgtgagtcagacgaaacactccggttcggggcgaaccagttaaacgggctaatccgctcattcga

SEQ ID NO: 527112 - DNA, 75 bp, synthetic construct
  source 1..75: mol_type = other DNA
tacacgggctaatccgctcattcgaaggtatgcccgttactttctatatccataacgaccgcaatacgtttaccg

SEQ ID NO: 527113 - DNA, 75 bp, synthetic construct
  source 1..75: mol_type = other DNA
agtgcctggcgaaacccagaccggcaagctgttccgtatgcgcggtaaaggcgtgaagtctgtccgtggcggcgc

SEQ ID NO: 527114 - DNA, 75 bp, synthetic construct
  source 1..75: mol_type = other DNA
tgaaatttataaccgtaccgcgctggataatacgctgatttacagtggtgttattgatatgccagctggtcacgg

SEQ ID NO: 527115 - DNA, 75 bp, synthetic construct
  source 1..75: mol_type = other DNA
gcagagtcaggtgctgctggcggcagacaggattgcgatgattaatcctgcaaatggcaacacaaaaccgatgtt

SEQ ID NO: 527116 - DNA, 75 bp, synthetic construct
  source 1..75: mol_type = other DNA
accgacagattgttattccggcggtggcattcagcggcgctaagcatgagagagagcatactgatatttactcct

SEQ ID NO: 527117 - DNA, 75 bp, synthetic construct
  source 1..75: mol_type = other DNA
aggtccagtccgtcaccgacggcgtgaaggtgaaagtgagccgtgttcctgacggcgttgccgaatacagcgtgt

SEQ ID NO: 527118 - DNA, 75 bp, synthetic construct
  source 1..75: mol_type = other DNA
gtgaaggtgaaagtgagccgtgttcctgacggcgttgccgaatacagcgtgtgggggctgaagctgccgacgctg

SEQ ID NO: 527119 - DNA, 75 bp, synthetic construct
  source 1..75: mol_type = other DNA
cccgcgtacctgccttcattgatacggaagtggactctgacaatgctgtctcccgcgtggtggcctccgtacctg

SEQ ID NO: 527120 - DNA, 75 bp, synthetic construct
  source 1..75: mol_type = other DNA
agcatatcgttctgccgtctgtgctcggtggggtgggcagtgtcggaagtctttacaaagacgccaacacacagg

SEQ ID NO: 527121 - DNA, 75 bp, synthetic construct
  source 1..75: mol_type = other DNA
ctgctggaaacgcagaccgtggacttcagcgtgggtgcggaagggcttcgccatgtaccgggggatgtcattgaa

SEQ ID NO: 527122 - DNA, 75 bp, synthetic construct
  source 1..75: mol_type = other DNA
gatgctccggcggttttttcttccgttattgatatgcctgcggggcagggaacgttgacgttaaagtttacggtc

SEQ ID NO: 527123 - DNA, 75 bp, synthetic construct
  source 1..75: mol_type = other DNA
gtatccaaatcatttccgaaacaggctggtacgtggggtaacacggaaacaccaaacgggacggttacagtcacc

SEQ ID NO: 527124 - DNA, 75 bp, synthetic construct
  source 1..75: mol_type = other DNA
gtggaccgggtgagcagtgaaatctcacagactgtcagccaggggcagtcagaaaacgcccgacagatagcacag

SEQ ID NO: 527125 - DNA, 75 bp, synthetic construct
  source 1..75: mol_type = other DNA
ccacctcgcagtatctggcatcggtggtggtggataacctgccgccgcgcccgttcaatatccggatgcgcagga

SEQ ID NO: 527126 - DNA, 75 bp, synthetic construct
  source 1..75: mol_type = other DNA
gtgaggtgacactgccggagacagggacatcgacggtgaacctgattaacggcagcggtaagccggtgcgcgtgg

SEQ ID NO: 527127 - DNA, 75 bp, synthetic construct
  source 1..75: mol_type = other DNA
caaataataatctgaacagcatgtgggctgtgaagctgcagcagatgcaggacggacgcctttatattgcgggta

SEQ ID NO: 527128 - DNA, 75 bp, synthetic construct
  source 1..75: mol_type = other DNA
tctgaaagtcaatgcatatgccctgaatgaacataccggcatgtcatccgtggccagcgacgtgaaccaccgctg

SEQ ID NO: 527129 - DNA, 75 bp, synthetic construct
  source 1..75: mol_type = other DNA
aaaaataggaaagctgcatctggcacaggggctgtgggagctgattgataacagtcagcttgacgatgagatggc

SEQ ID NO: 527130 - DNA, 75 bp, synthetic construct
  source 1..75: mol_type = other DNA
tgcaggtgctgaaaaacggggcagagatttttcatgaaccggcaacggatgtcagccgggtgttctcatcggtga

SEQ ID NO: 527131 - DNA, 75 bp, synthetic construct
  source 1..75: mol_type = other DNA
gctgtgtctccgtccgggaaaacacggacggcacctttgccatcacggcggtgcagcacgtaccggaaaaagaag

SEQ ID NO: 527132 - DNA, 75 bp, synthetic construct
  source 1..75: mol_type = other DNA
ttcagcgccctgaaggaccgccacacggcggtggaggtgaattacaccgacccgcagaacggctggcagacctcc

SEQ ID NO: 527133 - DNA, 75 bp, synthetic construct
  source 1..75: mol_type = other DNA
agttttcgaaagagtggaaagacgccaacgataaatggaatgccatgtggggcgtcaaaattgagcagaccaaag

SEQ ID NO: 527134 - DNA, 75 bp, synthetic construct
  source 1..75: mol_type = other DNA
agacacggcgcaccgtttcagtggtctgccgcccggggaatacaccctgacggtcagggcgattaacagctatgg

SEQ ID NO: 527135 - DNA, 75 bp, synthetic construct
  source 1..75: mol_type = other DNA
accgcgctggataatacgctgatttacagtggcgttattgatatgcctgccggtcacggtcacatgacgctggag

SEQ ID NO: 527136 - DNA, 75 bp, synthetic construct
  source 1..75: mol_type = other DNA
gaccaacggaagcggagaagacagccgtctggtgaccaccgccatcactgcggatacagagcatcgtttcagtgg

SEQ ID NO: 527137 - DNA, 75 bp, synthetic construct
  source 1..75: mol_type = other DNA
gggcaagcgcgataaagccccctggggggatgcgatggctttactgcgcaccccgtccaggcgatggctactata

SEQ ID NO: 527138 - DNA, 75 bp, synthetic construct
  source 1..75: mol_type = other DNA
gattctgaataatctccctgagcgcccctttaacatccggatggtcagggtgacggcggacagtaccacggacca

SEQ ID NO: 527139 - DNA, 75 bp, synthetic construct
  source 1..75: mol_type = other DNA
ggtgtggccgtacacgaacagcgatgtggtggtggatgataacggcgtggggttccgctacagcttcagtgccct

SEQ ID NO: 527140 - DNA, 75 bp, synthetic construct
  source 1..75: mol_type = other DNA
aagccggtgacgcgcaccattacgtccgcgaacattgaccgcctgcgggttaccttcggggtgcagtcactggtg

SEQ ID NO: 527141 - DNA, 75 bp, synthetic construct
  source 1..75: mol_type = other DNA
gcccgcacattaagcccgggaaggatttctggttttacgtgcgcagcgtcaacctggtggggaaatctgcgtttg

SEQ ID NO: 527142 - DNA, 75 bp, synthetic construct
  source 1..75: mol_type = other DNA
gcggatatcagcggagcaattaccgcgaataccggcacgctcaataatgtcaccattaacgagaactgtgtcatc

SEQ ID NO: 527143 - DNA, 75 bp, synthetic construct
  source 1..75: mol_type = other DNA
aaatatctgacggctcccaccattaccagcggcggtaatcctccggcattttccctgacaccggacgggcggctg

SEQ ID NO: 527144 - DNA, 75 bp, synthetic construct
  source 1..75: mol_type = other DNA
tgcgaactccgggacgctcaacaacgtcacggtaaatgaaaactgtacgattaagggcatgctggaggcgactca

SEQ ID NO: 527145 - DNA, 75 bp, synthetic construct
  source 1..75: mol_type = other DNA
agggaccattaccgtcagggtttatgacgatcagccgtttgaccggcagattgttattcctgcggtggcattcag

SEQ ID NO: 527146 - DNA, 75 bp, synthetic construct
  source 1..75: mol_type = other DNA
gccagattattattccgcccattatttttaacggtatagcgtatgacgatccggggagcggaaataacccgggag

SEQ ID NO: 527147 - DNA, 75 bp, synthetic construct
  source 1..75: mol_type = other DNA
ccgcgactggccggtgcagggaaaggcggactgcagattgtgctgggggcggcagccatcgtgggctctttcttc

SEQ ID NO: 527148 - DNA, 75 bp, synthetic construct
  source 1..75: mol_type = other DNA
atggcaaagctgctcaaggccatgaaacgcccggcagcgctgtggggggtaccaatggtgccactgctggctgtc

SEQ ID NO: 527149 - DNA, 75 bp, synthetic construct
  source 1..75: mol_type = other DNA
aaaggcaatcagtgggcaggtaatatcaccgactgtacggtgattgtgaccaaaaaagccgcttccggcatcagt

SEQ ID NO: 527150 - DNA, 75 bp, synthetic construct
  source 1..75: mol_type = other DNA
acacgcctcgtgaggcaaaggacaatcttaagtccacgcagatgatgagcgtgattgatgcgattggtgaagggc

SEQ ID NO: 527151 - DNA, 75 bp, synthetic construct
  source 1..75: mol_type = other DNA
atcctgcgaatggcaacacaaagccgatgtttgttggtcagggcgatcagatattcatgaacgacgtgttcctga

SEQ ID NO: 527152 - DNA, 75 bp, synthetic construct
  source 1..75: mol_type = other DNA
acaccagacggtacggttacagtcaccatcagcgatgatcataactttgaccgccagattattattccgcccatt

SEQ ID NO: 527153 - DNA, 75 bp, synthetic construct
  source 1..75: mol_type = other DNA
gtgtccggcaggccgtcagcctcagagggggcgattgatacggaaatgttgtcaccggcacttcagtcccggata

SEQ ID NO: 527154 - DNA, 75 bp, synthetic construct
  source 1..75: mol_type = other DNA
aatgcgaactcagggacgctcaacaacgtcacgattaatgagaactgtcagattaaggggaaactgtcagccaac

SEQ ID NO: 527155 - DNA, 75 bp, synthetic construct
  source 1..75: mol_type = other DNA
tcagtctgcgactgaccagcggaagcggagaaggcagccgtctggtgaccaccgccatcaccgcggatacagagc

SEQ ID NO: 527156 - DNA, 75 bp, synthetic construct
  source 1..75: mol_type = other DNA
acgggcgcgaggatagcttctccccggatgccaaaaccaaacggctgacaaccgtttacctcgataaagaccggg

SEQ ID NO: 527157 - DNA, 75 bp, synthetic construct
  source 1..75: mol_type = other DNA
gtattggtgccggtattgagaacacccctgacggcatgcagagtcaggtgctgctggcggcagacaggattgcga

SEQ ID NO: 527158 - DNA, 75 bp, synthetic construct
  source 1..75: mol_type = other DNA
ttaccgatatcaggcaggttgaaaccacagcccgctaccttggcacggggctgtactggatagccgccagtatca

SEQ ID NO: 527159 - DNA, 75 bp, synthetic construct
  source 1..75: mol_type = other DNA
tctgggacggtacattcatgcctgcgtggacggataacccggcctggtgtctgctggatatgctgacccacccgc

SEQ ID NO: 527160 - DNA, 75 bp, synthetic construct
  source 1..75: mol_type = other DNA
atcgatgttactcaccgatctccttcacggtaatacgcaccgttggcaaatcggcattcgtggaggccgtcggtc

SEQ ID NO: 527161 - DNA, 75 bp, synthetic construct
  source 1..75: mol_type = other DNA
gcctgctggtcgcggccacatgacgctggagttttctgtatcagcatggtgggtaaatggctggtatcccacagc

SEQ ID NO: 527162 - DNA, 75 bp, synthetic construct
  source 1..75: mol_type = other DNA
ttaagggcatgctggaggcgacccaagtcagaggggatttcgttaaagctgtatccaaatcatttccgaaacagg

SEQ ID NO: 527163 - DNA, 75 bp, synthetic construct
  source 1..75: mol_type = other DNA
atgaaaattcatcgaccactgtgggctgaggggacattcctgtcctctcagcagtttcagcagcaggcccgctgg

SEQ ID NO: 527164 - DNA, 75 bp, synthetic construct
  source 1..75: mol_type = other DNA
cgttcagtgatttcgcccgcgatcgccgtggagtgcgcgatccggaagcccgttgcctcgccggtaatcccggtt

SEQ ID NO: 527165 - DNA, 75 bp, synthetic construct
  source 1..75: mol_type = other DNA
ccgggtgaagcggcaccgtaccagaaacagataacacgggatgtggtgctggacagtcgttcaccggactgcgaa

SEQ ID NO: 527166 - DNA, 75 bp, synthetic construct
  source 1..75: mol_type = other DNA
ggtaacgaggaaagacctctgcgaggcacgactccgaaccggccagacggaggtcgctgtcttcacagcttacga

SEQ ID NO: 527167 - DNA, 75 bp, synthetic construct
  source 1..75: mol_type = other DNA
atgctctacacacataggttagcctcttacgtgccgaaaggcaaggaggagcagtctatgaagcagcacaaggcg

SEQ ID NO: 527168 - DNA, 75 bp, synthetic construct
  source 1..75: mol_type = other DNA
tcgccctgatcgtcatctgtatcaccgccgtagtggcggcgctagtaacgagaaaagacctctgtgaggttcaca

SEQ ID NO: 527169 - DNA, 75 bp, synthetic construct
  source 1..75: mol_type = other DNA
gggaatcagctgttcatgaacgacgtgttcctgaagcgactgtttgcggtgagcatcacgtcatccggcaatcct

SEQ ID NO: 527170 - DNA, 75 bp, synthetic construct
  source 1..75: mol_type = other DNA
ggggatcgcgaatgtgctctttgaccgcgatgccctgacgtccggaaagctgaaaacgcaggcagtacgcctgcg

SEQ ID NO: 527171 - DNA, 75 bp, synthetic construct
  source 1..75: mol_type = other DNA
cttacgtgccgaaaggcaaggagaagcagtctatgaagcagcaaaaggcgatgttagtcgccctgatcgtcatct

SEQ ID NO: 527172 - DNA, 75 bp, synthetic construct
  source 1..75: mol_type = other DNA
ggtgacattattgaaatctgtgataacgactatgccgggactatgaccggcggacgtatcctgtccattgatgct

SEQ ID NO: 527173 - DNA, 75 bp, synthetic construct
  source 1..75: mol_type = other DNA
cgttcagtgatttcgcccgcgatcgccgtggcgtgtgcgatccggaagcgcgtcacctcgccggtaatccctggt

SEQ ID NO: 527174 - DNA, 75 bp, synthetic construct
  source 1..75: mol_type = other DNA
ggttcgggatggactttattgaaaccgtcagcgcgctgatgaatgcaacgcccgggcgtgacctctgctggctcc

SEQ ID NO: 527175 - DNA, 75 bp, synthetic construct
  source 1..75: mol_type = other DNA
tggtcaggtgcagatgcgtcagggattcttcgctgtacagcagacctgtccacactgtcagggccgcggtacgct

SEQ ID NO: 527176 - DNA, 75 bp, synthetic construct
  source 1..75: mol_type = other DNA
attgcgatgattaccccggagaacggcaacaccacgccgctgtttgtggcgcaggggaatcagctgttcatgaac

SEQ ID NO: 527177 - DNA, 75 bp, synthetic construct
  source 1..75: mol_type = other DNA
cgcactgtcaggggcgcggtacgcttatcaaagatccgtgcaacaaatgccatggtcatggtcgtgttgagcgta

SEQ ID NO: 527178 - DNA, 75 bp, synthetic construct
  source 1..75: mol_type = other DNA
cgttcagtgatttcgcccgcgatcgtcgtggtgtgcacgatccggaagccctgaaccgccccgggaatcctggag

SEQ ID NO: 527179 - DNA, 75 bp, synthetic construct
  source 1..75: mol_type = other DNA
ataaaaaactgggtgaccaggccgtgaccatacagcaaatccagcgggttcagtcagacacgcgcaatgagctga

SEQ ID NO: 527180 - DNA, 75 bp, synthetic construct
  source 1..75: mol_type = other DNA
ggggcggcggatgtggacaagtgggcgctgtatgccattgcgcagtactgcgaccagatggtccctgatggtttc

SEQ ID NO: 527181 - DNA, 75 bp, synthetic construct
  source 1..75: mol_type = other DNA
gggcgctgtatgccattgcgcagtactgcgaccagacggtgccggatggtttcggggggaccgagccgcggatga

SEQ ID NO: 527182 - DNA, 75 bp, synthetic construct
  source 1..75: mol_type = other DNA
ggtcagaggtgacttcgttaaagctgtatccaaatcatttccgaaacaggctggtacgtggggtaacacggaaac

SEQ ID NO: 527183 - DNA, 75 bp, synthetic construct
  source 1..75: mol_type = other DNA
atgttaatcgccctaatcgtcatctgtttaaccgtcatagtgacgacactggtaacgaggaaagacctctgcgag

SEQ ID NO: 527184 - DNA, 75 bp, synthetic construct
  source 1..75: mol_type = other DNA
cagcatagatacgtcttcaccaatgggacgctttttcttccatgtcatgggcgcacttgccgaaatggaaaggga

SEQ ID NO: 527185 - DNA, 75 bp, synthetic construct
  source 1..75: mol_type = other DNA
ttgtctggaagctggatcgcctcggtcgcagcatgcggcatcttgtcgtgctggtcgaagaaatgagggagcgag

SEQ ID NO: 527186 - DNA, 75 bp, synthetic construct
  source 1..75: mol_type = other DNA
ttttgatattggcctgtccacgctctataaaaaatttccctcatcagcgacaaagaataaattgtgtcatccctt

SEQ ID NO: 527187 - DNA, 75 bp, synthetic construct
  source 1..75: mol_type = other DNA
gggctggaagcggccagagccaaaggtcgtattggtggcagacgtcctaaactcaccacgagtgagtgggagcag

SEQ ID NO: 527188 - DNA, 75 bp, synthetic construct
  source 1..75: mol_type = other DNA
caacaaatgaccagaacaccgatttgcaacgtaatgcactgaactgcgcgggatgtgaccggatttttgaggaca

SEQ ID NO: 527189 - DNA, 75 bp, synthetic construct
  source 1..75: mol_type = other DNA
gacgaattggtggacgtcgtcccaaacttacaccagaacaatgggcgcaggtcgggcgactaattgcatcaggag

SEQ ID NO: 527190 - DNA, 75 bp, synthetic construct
  source 1..75: mol_type = other DNA
cgacagaccggggcttaaaaaactgctcaggacactatcggcaggtgacacactggttgtctggaagctggacag

SEQ ID NO: 527191 - DNA, 75 bp, synthetic construct
  source 1..75: mol_type = other DNA
gtcggatcggcggcagacgaccaaagttaaccgcagaagagtgggctcaggctggaaggttgattgctgcaggtg

SEQ ID NO: 527192 - DNA, 75 bp, synthetic construct
  source 1..75: mol_type = other DNA
ggctgaacgtccgggaggctgctacacggctcaaggtgagcaagacggccctatacgccgcgctgcaaggcggga

SEQ ID NO: 527193 - DNA, 75 bp, synthetic construct
  source 1..75: mol_type = other DNA
tgccattgataccagcacgccgatggggcgttttttctttcatgtgatgggtgccctggctgaaatggagcgaga

SEQ ID NO: 527194 - DNA, 75 bp, synthetic construct
  source 1..75: mol_type = other DNA
actcaccacgagtgagtgggagcaggccgggcgtttgctggctgcaggggagtcacgtcaacgcgtggcactgat

SEQ ID NO: 527195 - DNA, 75 bp, synthetic construct
  source 1..75: mol_type = other DNA
gggcgttttttctttcatgtgatgggtgccctggctgaaatggaacgagaactcattgtcgaacggactcgggcc

SEQ ID NO: 527196 - DNA, 75 bp, synthetic construct
  source 1..75: mol_type = other DNA
caacaaatgaccagaacacggaattgcagcgtaacgcgctcgagtgcgcaggatgtgagctgatttttgaggata

SEQ ID NO: 527197 - DNA, 75 bp, synthetic construct
  source 1..75: mol_type = other DNA
gaattggaccggttgatactggatgcctggagtaacgtactgggcttcgcgtcaccgggtgaagcaaagcagtat

SEQ ID NO: 527198 - DNA, 75 bp, synthetic construct
  source 1..75: mol_type = other DNA
ttcaattgataccagcacaccaatggggcgttttttctttcatgtgatgggtgccctggctgaaatggagcgtga

SEQ ID NO: 527199 - DNA, 75 bp, synthetic construct
  source 1..75: mol_type = other DNA
aatcaagacagcgtattgcgctgatttttgacgtgggcgtttctaccatttatagaaaatttccggcgaataaga

SEQ ID NO: 527200 - DNA, 75 bp, synthetic construct
  source 1..75: mol_type = other DNA
gacctctgcgaggtacgaatccgaaccggccagacggaggtcgctgtcttcgtagcctacgaacctgaggagtaa

SEQ ID NO: 527201 - DNA, 75 bp, synthetic construct
  source 1..75: mol_type = other DNA
cttacgtgccggaaggcaaggagaagcagtctatgaagcagcaaaaggcgatgttaatcgccctgatcgtcatct

SEQ ID NO: 527202 - DNA, 75 bp, synthetic construct
  source 1..75: mol_type = other DNA
tcctcactgcctgcgcatcaggtactgcatcagctaccgctggtctgcaaaatcggtgcgcctgatgacgtcacg

SEQ ID NO: 527203 - DNA, 75 bp, synthetic construct
  source 1..75: mol_type = other DNA
atagcaaggctaatcaaaaacgggcacgacagaaaacaactggcaataatttacggcattggcacatcgacgatt

SEQ ID NO: 527204 - DNA, 75 bp, synthetic construct
  source 1..75: mol_type = other DNA
gccgggcgtttgctggctgcaggggagtcacgtcaacgcgtggcactgatttttgatattggtctgtccacgctc

SEQ ID NO: 527205 - DNA, 75 bp, synthetic construct
  source 1..75: mol_type = other DNA
aaatcagtggcaccaagtccgacagaccggggctgaaaaagctgctcaggacactatcggcaggagacacgctgg

SEQ ID NO: 527206 - DNA, 75 bp, synthetic construct
  source 1..75: mol_type = other DNA
tagtctggaagctggaccggctggggcgtagtatgcggcatctggtcattctggttgaggaactgcgcgaacgcg

SEQ ID NO: 527207 - DNA, 75 bp, synthetic construct
  source 1..75: mol_type = other DNA
taaacctgccgcctggcaaaataacctgccgctcacgccggaagataaagtttccggctataacaactactatga

SEQ ID NO: 527208 - DNA, 75 bp, synthetic construct
  source 1..75: mol_type = other DNA
ttcaattgataccagcacaccaatgggacgctttttcttccatgtgatgggtgccctggctgaaatggaacgtga

SEQ ID NO: 527209 - DNA, 75 bp, synthetic construct
  source 1..75: mol_type = other DNA
gttccggattgaggtcatctattatggaactgcaccgggttttatgaccacagggatacagatcacaacgatgaa

SEQ ID NO: 527210 - DNA, 75 bp, synthetic construct
  source 1..75: mol_type = other DNA
tgtggcgcaggggaatcagctgttcatgaacgatgtgttcctgaagcggttgtttgcagtgagcatcacctcgtc

SEQ ID NO: 527211 - DNA, 75 bp, synthetic construct
  source 1..75: mol_type = other DNA
cggtcagtaaaaccctggaagaccagagcgccaccatacagcagatacagcgggtgcagacagacacaaataacg

SEQ ID NO: 527212 - DNA, 75 bp, synthetic construct
  source 1..75: mol_type = other DNA
agaccagagtgcggcgatccagcagatacagaaggttcaggttgatacaaataataacctgaacagcatgtgggc

SEQ ID NO: 527213 - DNA, 75 bp, synthetic construct
  source 1..75: mol_type = other DNA
acagatgtttgctgacatcagccttgaaagccggacattgaaagacgttatcgaaaaaagctttgaaaccagcct

SEQ ID NO: 527214 - DNA, 75 bp, synthetic construct
  source 1..75: mol_type = other DNA
gtgattgatgccatcagcgaaggtccggttgaaggtccggtggatggattaaaaagcgtgctgctgaacagtacg

SEQ ID NO: 527215 - DNA, 75 bp, synthetic construct
  source 1..75: mol_type = other DNA
atgggtaaaggtggcggtaaggcgcacacaccgcgcgaggcgaaagacaatctcaaatccacgcagatgatgagc

SEQ ID NO: 527216 - DNA, 75 bp, synthetic construct
  source 1..75: mol_type = other DNA
atcagatcatcactgtgattaagtcggttgaagccggacgaactgtcaaggatatttgccgcgaggccggtatct

SEQ ID NO: 527217 - DNA, 75 bp, synthetic construct
  source 1..75: mol_type = other DNA
gtggccatcagggaccattaccgtcagggtttatgacgatcagccgtttgaccggcaaattgttatccggcggtg

SEQ ID NO: 527218 - DNA, 75 bp, synthetic construct
  source 1..75: mol_type = other DNA
agccgtttgaccggcagattgttattccggcggtggcattcagcggcgctaaacatgagagagagcatactgata

SEQ ID NO: 527219 - DNA, 75 bp, synthetic construct
  source 1..75: mol_type = other DNA
tctgatattaaaaaaataaaggatcttgaggacgagaaccgccgtctcaaacagatgtttgctgacctgagtctg

SEQ ID NO: 527220 - DNA, 75 bp, synthetic construct
  source 1..75: mol_type = other DNA
tactcctcatgccgcctgatagtgaagaaaaatggtgctgaaatttataaccgtaccgcgctggataatacgctg

SEQ ID NO: 527221 - DNA, 75 bp, synthetic construct
  source 1..75: mol_type = other DNA
gagcgccaccatacagcagatacagcgcgtgcagacgggcacaaatgatgacctggctgcactctacatgctgaa

SEQ ID NO: 527222 - DNA, 75 bp, synthetic construct
  source 1..75: mol_type = other DNA
aggcggaggccgagcaccaggcctctgacagaatccaggcagctgtcctccgtaaacagaatgaaatgcggcaac

SEQ ID NO: 527223 - DNA, 75 bp, synthetic construct
  source 1..75: mol_type = other DNA
acgactatgccgggaccctgaccggcggacgcatcctgtccattgatgccgccagccgcaccctgacactggacc

SEQ ID NO: 527224 - DNA, 75 bp, synthetic construct
  source 1..75: mol_type = other DNA
cagtgtgaatgcgaactcagggacgctcaacaacgtcacgattaatgagaactgtcagattaaggggaaactgtc

SEQ ID NO: 527225 - DNA, 75 bp, synthetic construct
  source 1..75: mol_type = other DNA
actggtatcccacagccagtatcagtgatttgctggttgtggtgatgaagaaatccaccgcaggcatcagtatca

SEQ ID NO: 527226 - DNA, 75 bp, synthetic construct
  source 1..75: mol_type = other DNA
caccatcacggtaagaatcagtgatgatcagaagtttgaccggcaggtcatgataccgccagtgttattccgcgg

SEQ ID NO: 527227 - DNA, 75 bp, synthetic construct
  source 1..75: mol_type = other DNA
gtccagatacggcggcatggaggcttctgatattaagaaaatcaaggatcttgaggacgagaaccgccgtctaaa

SEQ ID NO: 527228 - DNA, 75 bp, synthetic construct
  source 1..75: mol_type = other DNA
ttccggcggtggcattcagcggcgctaaacatgagagagagcatactgatatttactcctcatgccgtctgatag

SEQ ID NO: 527229 - DNA, 75 bp, synthetic construct
  source 1..75: mol_type = other DNA
gcaacaccacgccgttatttgtggcgcaggggaatcagttgttcatgaacgatgtgttcctgaagcggctgtttg

SEQ ID NO: 527230 - DNA, 75 bp, synthetic construct
  source 1..75: mol_type = other DNA
agggcgacccggcgtcggtatcgttcaggattgccgcaccggcagcgccgtctcggattgagctgacaccgggct

SEQ ID NO: 527231 - DNA, 75 bp, synthetic construct
  source 1..75: mol_type = other DNA
ctgtgggacatgctgacccacccgcgctacgggatggggaaacgcctggggaccgcggacgtggacaaatgggcg

SEQ ID NO: 527232 - DNA, 75 bp, synthetic construct
  source 1..75: mol_type = other DNA
agatccgcgaaattttaatcagcgagtcaacttgggaagaaatgacctgcttattcgcaccttccttaggttatt

SEQ ID NO: 527233 - DNA, 75 bp, synthetic construct
  source 1..75: mol_type = other DNA
gaagctgcagcagatgcaggacggacgcctttatatcgcgggtattggtgccggtattgagaacacccctgacgg

SEQ ID NO: 527234 - DNA, 75 bp, synthetic construct
  source 1..75: mol_type = other DNA
atgttgattaagttgtactacgccaattgcccgattgtccttcagtgcctgcacattaacaagcgacatatcttt

SEQ ID NO: 527235 - DNA, 75 bp, synthetic construct
  source 1..75: mol_type = other DNA
cagggcgaaccggccaccaccaccttccggattaacgcgccagcaaaacccgccaccattgaactgacgccgggg

SEQ ID NO: 527236 - DNA, 75 bp, synthetic construct
  source 1..75: mol_type = other DNA
tcgcggtcaggcccaccgtgccgggctgtgggtgataaagaccggactgctggaaacgcagacggtggatttcac

SEQ ID NO: 527237 - DNA, 75 bp, synthetic construct
  source 1..75: mol_type = other DNA
taccagtcgctattctctgggcgcatcgacacagaaagatgtttccaaccagatacaaagtattctggagaaaag

SEQ ID NO: 527238 - DNA, 75 bp, synthetic construct
  source 1..75: mol_type = other DNA
ttgctcgatttcaatagtggttattattccaatattattggcgttgaaggcggggcgtattatgtttataaatta

SEQ ID NO: 527239 - DNA, 75 bp, synthetic construct
  source 1..75: mol_type = other DNA
acggcgaaaaatgccgatatcagcggtaacgtgaatgcgaactccgggacgctcaacaacgtcacgattaacgag

SEQ ID NO: 527240 - DNA, 75 bp, synthetic construct
  source 1..75: mol_type = other DNA
ggttttatgtgcgcagcgtcaatctggtgggcaagtctgcgtttgtggaagccagcgggcaggccagtaatgatg

SEQ ID NO: 527241 - DNA, 75 bp, synthetic construct
  source 1..75: mol_type = other DNA
cagtccgcctgctgattcaggtgcagcgtaacggcaactgggtgacggagaaggatatcaccattaacggcaaga

SEQ ID NO: 527242 - DNA, 75 bp, synthetic construct
  source 1..75: mol_type = other DNA
aatatcaggtgctggcgcgctgggacacgccgaaggtggtgaagggcgtgagcttcctgcttcgcctgaccgtgg

SEQ ID NO: 527243 - DNA, 75 bp, synthetic construct
  source 1..75: mol_type = other DNA
gacggcgttgccgagtacagcgtgtgggggcttaagctgccgacgctgcgccagcgcctgttccgctgcgtgagt

SEQ ID NO: 527244 - DNA, 75 bp, synthetic construct
  source 1..75: mol_type = other DNA
gtcacaggggctgcgccacacgccgggtgacatcattgaaatctgtgataacgactatgccgggaccatgaccgg

SEQ ID NO: 527245 - DNA, 75 bp, synthetic construct
  source 1..75: mol_type = other DNA
ctgctcggcaatgcgctgtatgccggtatggaacggccagacgctgacgttcgtgcaggaccgcccgtcggatgt

SEQ ID NO: 527246 - DNA, 75 bp, synthetic construct
  source 1..75: mol_type = other DNA
gttccgggcaggtgagcaggagcagacaccgccggagggatttgaatcctccggttccgagacggtgctgggtac

SEQ ID NO: 527247 - DNA, 75 bp, synthetic construct
  source 1..75: mol_type = other DNA
atacaaataataacctgaacagcatgtgggcagtgaagctgcagcagatgcaggacggacgcctttatattgcgg

SEQ ID NO: 527248 - DNA, 75 bp, synthetic construct
  source 1..75: mol_type = other DNA
cgtaccggaaaaggaagccatcgtggataacggggccagctttgagccgcagtcaggcaccctgaacagcgtcat

SEQ ID NO: 527249 - DNA, 75 bp, synthetic construct
  source 1..75: mol_type = other DNA
agctgattgataacagccagcttgacgatgagatggcggagatgaagaccaccatcaccgaaacccgcaatgaaa

SEQ ID NO: 527250 - DNA, 75 bp, synthetic construct
  source 1..75: mol_type = other DNA
gccgccagcggtgcagcacctgaccgccgaagtcaccgcagacagcggggaataccaggtgctggcgcgctggga

SEQ ID NO: 527251 - DNA, 75 bp, synthetic construct
  source 1..75: mol_type = other DNA
gtcgattgaaaaagagctggagtgggtacgtcaggggactaaaggccgtcagtcgaaaggtaaagcacgtctggc

SEQ ID NO: 527252 - DNA, 75 bp, synthetic construct
  source 1..75: mol_type = other DNA
ggtcgtctgcatctggcgaagctgctgcaggttggtggcaacatgctgctgctcgacgaaccaaccaacgacctg

SEQ ID NO: 527253 - DNA, 75 bp, synthetic construct
  source 1..75: mol_type = other DNA
acgaactgtttattccacctggaccacgtctgggcgataaagtgttggaagtcagcaatctgcgtaaatcctacg

SEQ ID NO: 527254 - DNA, 75 bp, synthetic construct
  source 1..75: mol_type = other DNA
ggttcggcatcccgaacgaacaaaaactgggtatcatcaaatcgccagacgcatttcagctcatgggcgcgtcgt

SEQ ID NO: 527255 - DNA, 75 bp, synthetic construct
  source 1..75: mol_type = other DNA
aaggcaccgttgtggcgattactcacgaccgttacttcctcgataacgttgcaggctggatcctcgaacttgacc

SEQ ID NO: 527256 - DNA, 75 bp, synthetic construct
  source 1..75: mol_type = other DNA
ccggcgggctggatatcatgaaaatcggcaacaccgagatgccaagccgcgcctacgttggccgctttaacttta

SEQ ID NO: 527257 - DNA, 75 bp, synthetic construct
  source 1..75: mol_type = other DNA
tgaccaacaatcagttcgggctggggatttatctgtatacggatgctcccgttcctgatggtgtggcgatgacgg

SEQ ID NO: 527258 - DNA, 75 bp, synthetic construct
  source 1..75: mol_type = other DNA
gcacagcatagcgccgcagtagaagcggcagaaacacagcgccagtcgctgattgatactgcaatggcttccatt

SEQ ID NO: 527259 - DNA, 75 bp, synthetic construct
  source 1..75: mol_type = other DNA
ccgcgcattaaacagctggcgcgccgcagtacagtgacgccgggtggggctgcctgcagatataacgatattatt

SEQ ID NO: 527260 - DNA, 75 bp, synthetic construct
  source 1..75: mol_type = other DNA
gtcgatcgagaaagagctggagtgggtacgtcagggtactaaaggccgtcagtcgaaaggtaaagcacgtctggc

SEQ ID NO: 527261 - DNA, 75 bp, synthetic construct
  source 1..75: mol_type = other DNA
gcaggctggatcctcgaactggaccgcggtgaaggtattccgtgggaaggtaactactcctcctggctggagcag

SEQ ID NO: 527262 - DNA, 75 bp, synthetic construct
  source 1..75: mol_type = other DNA
ttcggcatcccgaacgaacaaaaactgggtatcatcaaatcgcccgacgcatttcagctcatgggcgcgtcgtgg

SEQ ID NO: 527263 - DNA, 75 bp, synthetic construct
  source 1..75: mol_type = other DNA
acctgattgcgcgcaccaaagctgcattacagaagaacccgaaaaatgtgttgctggcggtgtgctggatgcagg

SEQ ID NO: 527264 - DNA, 75 bp, synthetic construct
  source 1..75: mol_type = other DNA
ggagctggtgttcaccgccggcagtgccacggttactccgaaactgaatggagtggctggcccggcattccaggt

SEQ ID NO: 527265 - DNA, 75 bp, synthetic construct
  source 1..75: mol_type = other DNA
ggcggctgaactggacgcgctgggtaaagcactgaaagaaccagctcgcccgatggtggctatcgttggtggttc

SEQ ID NO: 527266 - DNA, 75 bp, synthetic construct
  source 1..75: mol_type = other DNA
acgcacgtatccgtgcttctctgccgaccatcgaactggctctgaaacaaggcgctaaagtgatggtaacttccc

SEQ ID NO: 527267 - DNA, 75 bp, synthetic construct
  source 1..75: mol_type = other DNA
gtggctattgaaggagagccacaggtcggcccttcatctgagccggattggtactacgtcatcgtactggccggg

SEQ ID NO: 527268 - DNA, 75 bp, synthetic construct
  source 1..75: mol_type = other DNA
tcttgagctgaactctatcggttcgctggaagcacgcgccaattaccgcgatgcgctggtggcattccttgagca

SEQ ID NO: 527269 - DNA, 75 bp, synthetic construct
  source 1..75: mol_type = other DNA
cttgccgattgtagagcagaccccgctattcaaacgtgcgattggtgaagtcaccgacgtggttgaaaaagagat

SEQ ID NO: 527270 - DNA, 75 bp, synthetic construct
  source 1..75: mol_type = other DNA
gatcgtatggcaaccgctataccgatgtagcgttacctgacgtcgtggcgatgaccgggactggtaacccgttcc

SEQ ID NO: 527271 - DNA, 75 bp, synthetic construct
  source 1..75: mol_type = other DNA
acacagtgactcccggtggtgaagtatgcgtatttaacgacatcattcctgctgaccattgtctgcatgatgttc

SEQ ID NO: 527272 - DNA, 75 bp, synthetic construct
  source 1..75: mol_type = other DNA
gctggatgcagggagagtttgacatgagcgccgccacccacgcacagcaacctgcgctgtttacagccatgctga

SEQ ID NO: 527273 - DNA, 75 bp, synthetic construct
  source 1..75: mol_type = other DNA
gacgtgaaagctgacgagcagatcctggatatcggtgatgcttccgcacaggaactggctgaaatcctgaagaat

SEQ ID NO: 527274 - DNA, 75 bp, synthetic construct
  source 1..75: mol_type = other DNA
tggtattccggcaaattcttgtttggatgctccaggctcacataaagcaggttatgcgattctccgttcagagga

SEQ ID NO: 527275 - DNA, 75 bp, synthetic construct
  source 1..75: mol_type = other DNA
atgaccgggactggtaacccgttcctgatgtcgttcttcacccagaccacagacggcaaactgaatctgatgcat

SEQ ID NO: 527276 - DNA, 75 bp, synthetic construct
  source 1..75: mol_type = other DNA
gaaagcggcggcagatattgccagccgggtaagcggcgtgaagcgggtaaccacggcgtttacgtttattaaata

SEQ ID NO: 527277 - DNA, 75 bp, synthetic construct
  source 1..75: mol_type = other DNA
gtatggcgacatcgtcatgcagctattacgtgggccttacccgctgctcaatgccaacattggccgggagcagat

SEQ ID NO: 527278 - DNA, 75 bp, synthetic construct
  source 1..75: mol_type = other DNA
atccccggagcaaagtgattcgggagcttagctgtgagcaagagatggcagtaaaggcggtctgcggactgaaaa

SEQ ID NO: 527279 - DNA, 75 bp, synthetic construct
  source 1..75: mol_type = other DNA
aaagattactggtcgtatacaatggaatggacttgacatagttgaaaacatgaaaaaaaataatgaaaaagttat

SEQ ID NO: 527280 - DNA, 75 bp, synthetic construct
  source 1..75: mol_type = other DNA
gtccagaaagagatcgactacgtcattgcgctgcttaagcacaacggcgacagccgcgcggaaaaccaccgcgaa

SEQ ID NO: 527281 - DNA, 75 bp, synthetic construct
  source 1..75: mol_type = other DNA
gtgggagtttaatctcgggcgctgcatcttctgtggacgctgcgaagaagtctgcccgacggcagcgatcaaact

SEQ ID NO: 527282 - DNA, 75 bp, synthetic construct
  source 1..75: mol_type = other DNA
tgaaaccatcatatctatgcatgaaggcaaccttgaaagccagcaactgacgtcaatgctctctattcagcagca

SEQ ID NO: 527283 - DNA, 75 bp, synthetic construct
  source 1..75: mol_type = other DNA
actgagcttgcgcctggctggctgaaacgcccgctgggtatcgccattgagctgctggcagccattccaagtatc

SEQ ID NO: 527284 - DNA, 75 bp, synthetic construct
  source 1..75: mol_type = other DNA
ttaaaaacaacatgcaaatatattaatcttaaactcaatcaatatatcaaagtaaatgggagtaatggtctttcc

SEQ ID NO: 527285 - DNA, 75 bp, synthetic construct
  source 1..75: mol_type = other DNA
cgttgcgttccctgtcaaaagtatgcgtggtgctgaacatttcgtgatgaatgccaccgaggaagaagcacggcg

SEQ ID NO: 527286 - DNA, 75 bp, synthetic construct
  source 1..75: mol_type = other DNA
tgcagatttttttgcgacgtataaagcaactttaccggttatcggacggctcagcaggatcagtggtgcacggat

SEQ ID NO: 527287 - DNA, 75 bp, synthetic construct
  source 1..75: mol_type = other DNA
cacctctgcgctggcgaacgaatttgcggaagcggaatccggtctgcacgttgccgcactgatggaactgggcct

SEQ ID NO: 527288 - DNA, 75 bp, synthetic construct
  source 1..75: mol_type = other DNA
cgctgttctctggccccgcatttggtatcggtatcctcgcggcaggcgtgatcctcgccatcatgattattccgt

SEQ ID NO: 527289 - DNA, 75 bp, synthetic construct
  source 1..75: mol_type = other DNA
ctgtgcggcctgcgtcaatgcctgcccgtcaaacgccttaacggttgaaactgacctcgccacaggagagcttgc

SEQ ID NO: 527290 - DNA, 75 bp, synthetic construct
  source 1..75: mol_type = other DNA
cgctgacgctgacggatgttacaaaaaatgcagcgtatggcgttgagatagaaagtctggtgctggagataaatg

SEQ ID NO: 527291 - DNA, 75 bp, synthetic construct
  source 1..75: mol_type = other DNA
cactgacggcagagtgaatctgatgcatcacaggaaagccggaaacacgaagctgggggagttcggcgattacgg

SEQ ID NO: 527292 - DNA, 75 bp, synthetic construct
  source 1..75: mol_type = other DNA
tgtttaacgcgcagtgccatggtggcagtgctgcagatgtgccgtgggtttgtggtgacacgacgtattactgga

SEQ ID NO: 527293 - DNA, 75 bp, synthetic construct
  source 1..75: mol_type = other DNA
accgaaaacggtgaagtgttcctgatggggctggtgactgaacgtgaagcgaaagcggcggcagatattgccagc

SEQ ID NO: 527294 - DNA, 75 bp, synthetic construct
  source 1..75: mol_type = other DNA
ccgcgtctgcaatcgtcctttcgccgtccagaaagagatagactacgccattgcgctgcttaagcacaatggtga

SEQ ID NO: 527295 - DNA, 75 bp, synthetic construct
  source 1..75: mol_type = other DNA
gtccagaaagagatcgactacgccattgcgttgcttaagcacaacggcgacagccgcgcggaaaaccaccgcgaa

SEQ ID NO: 527296 - DNA, 75 bp, synthetic construct
  source 1..75: mol_type = other DNA
gctgaccagatacgtatcgacaaactcagcagtgacaatgaagccatgcagaatcagctgaagtcgctgggcgtg

SEQ ID NO: 527297 - DNA, 75 bp, synthetic construct
  source 1..75: mol_type = other DNA
atgcctgggccccctggctggattcgttgattttgaccttcagcgttctggcacaattcatgttgatgggaagac

SEQ ID NO: 527298 - DNA, 75 bp, synthetic construct
  source 1..75: mol_type = other DNA
tcaaaaccggcacggcgacttcgtcttatccgctgaagccgattgcggttgataaaaacttccgtggtaagccag

SEQ ID NO: 527299 - DNA, 75 bp, synthetic construct
  source 1..75: mol_type = other DNA
acatcaaagatactgattatgattacgcgaaaagttatcttgataacgatgagtacttcaaggttttaaatgatt

SEQ ID NO: 527300 - DNA, 75 bp, synthetic construct
  source 1..75: mol_type = other DNA
aaactcgcctattcttgatgtcatcgcaatgaatgacaaaccagaaacaaaaaagaaaacaagggacatccacta

SEQ ID NO: 527301 - DNA, 75 bp, synthetic construct
  source 1..75: mol_type = other DNA
gaacctgttgaataaaggtcgcggtgaagatcagaagcgtattgagcaactcactacggaaaaccaggcaatgca

SEQ ID NO: 527302 - DNA, 75 bp, synthetic construct
  source 1..75: mol_type = other DNA
agaaggcacagtaatcagcgccaccagagacccggagtattactttgttgtggttctggcggggcagtcaaacgg

SEQ ID NO: 527303 - DNA, 75 bp, synthetic construct
  source 1..75: mol_type = other DNA
gcggacctgtcaaaggggcagtacggaaccgtggggcaggggctgcatatcgctaaaaaattgctgccgtttata

SEQ ID NO: 527304 - DNA, 75 bp, synthetic construct
  source 1..75: mol_type = other DNA
aaaagacagtctgacactggggctgaatgcgctgacgctgacggatgttacaaaaaatgcagcgtatggcgttga

SEQ ID NO: 527305 - DNA, 75 bp, synthetic construct
  source 1..75: mol_type = other DNA
acctgattgcgcgcaccaaagctgcattacagaagaacccgaaaaatgtgttgctgggcggtgtgctggatgcag

SEQ ID NO: 527306 - DNA, 75 bp, synthetic construct
  source 1..75: mol_type = other DNA
tgctggcggtgtgctggatgcagggagagtttgacatgagcgccgccacccacgcacagcaacctgcgctgttta

SEQ ID NO: 527307 - DNA, 75 bp, synthetic construct
  source 1..75: mol_type = other DNA
cctgctgccgacagccggagaggctgctgcgcagggctggaccatcaccggcggcagtgttgcgctggaagatgg

SEQ ID NO: 527308 - DNA, 75 bp, synthetic construct
  source 1..75: mol_type = other DNA
gcgcgtacaaaaacagggagagcgacaacgttttctttgtgccgttcatgaccgacggtaacggcaacaacacgc

SEQ ID NO: 527309 - DNA, 75 bp, synthetic construct
  source 1..75: mol_type = other DNA
agggaagctgacctgtaagttccgtctgactggtgctctgacaaacaaccagtttggactggggctttatctgta

SEQ ID NO: 527310 - DNA, 75 bp, synthetic construct
  source 1..75: mol_type = other DNA
atgcgctgacgctgacggatgttacaaaaaatgcagcgtatggcgttgagatagaaagtctggtgctggagataa

SEQ ID NO: 527311 - DNA, 75 bp, synthetic construct
  source 1..75: mol_type = other DNA
gctgacacggggtggcagactgagctgtaagtttcgactgtcaggcgcactgaccaacaaccagttcggtctggg

SEQ ID NO: 527312 - DNA, 75 bp, synthetic construct
  source 1..75: mol_type = other DNA
attctgaacgcagccgggcgcacctcagccttcatcagtggtaaggcaccggaaatcaaaccctcgcccggcggc

SEQ ID NO: 527313 - DNA, 75 bp, synthetic construct
  source 1..75: mol_type = other DNA
gcaaactgaatctgatgcatcacaagaaagccggaaacacaaagttgggcgagttcgggaattacagtaacgact

SEQ ID NO: 527314 - DNA, 75 bp, synthetic construct
  source 1..75: mol_type = other DNA
taccatttctgtcaaagaggggggcattattactgatattcgcaaacagggccaatggcttcctaatggctataa

SEQ ID NO: 527315 - DNA, 75 bp, synthetic construct
  source 1..75: mol_type = other DNA
cctctgcaatacaatacgcaccaaaaaaaggtggtgtcgttgaatctggtgactatatttatctggctacccctc

SEQ ID NO: 527316 - DNA, 75 bp, synthetic construct
  source 1..75: mol_type = other DNA
atcatcttttattatatcaggagcgacggcggcgacccgcgcaagcgatatagttacagttccaattaagaataa

SEQ ID NO: 527317 - DNA, 75 bp, synthetic construct
  source 1..75: mol_type = other DNA
gataataaatacgtgacaacctcatgtcgttttaaaacagaactgcaggtaaggttgcgtatccggtttgataaa

SEQ ID NO: 527318 - DNA, 75 bp, synthetic construct
  source 1..75: mol_type = other DNA
tatcgccgttcgtattttatttgaacattatgatggggaggtaaggacatcaataggagcagcaaacctgaacct

SEQ ID NO: 527319 - DNA, 75 bp, synthetic construct
  source 1..75: mol_type = other DNA
taccggcggtcatcaaaccggagcggctattattcttggcttcggatcttcggcagatgggccagacggatttcc

SEQ ID NO: 527320 - DNA, 75 bp, synthetic construct
  source 1..75: mol_type = other DNA
acgcgcgcaagcgatatggttacagttccgattaagaataatctttataatcttccttttacggttctttgtgag

SEQ ID NO: 527321 - DNA, 75 bp, synthetic construct
  source 1..75: mol_type = other DNA
ccactggccccggtggcaggctctgatttgtatgtattcaggccggtggcacatacggtggattttcatatccgc

SEQ ID NO: 527322 - DNA, 75 bp, synthetic construct
  source 1..75: mol_type = other DNA
caatgggcgcagagaagttctggatgcaaaggcatgtcttgcagatatctcgccaacggaaaatactgggcctca

SEQ ID NO: 527323 - DNA, 75 bp, synthetic construct
  source 1..75: mol_type = other DNA
cttatacacttgatgtgaatcataccggcattcaaccttttgacgctgttcgctgggacggcaagcctgtaaaag

SEQ ID NO: 527324 - DNA, 75 bp, synthetic construct
  source 1..75: mol_type = other DNA
ttaatggaagaaaatagtttcttttgtgatgactggagttacattgtaagaaatgcgaaactggataatgtattt

SEQ ID NO: 527325 - DNA, 75 bp, synthetic construct
  source 1..75: mol_type = other DNA
aaaggcgatgcgccgaccgttgccagacgggaaaaaagggagaaaaaagaccgccagcctgatccgcgttttccg

SEQ ID NO: 527326 - DNA, 75 bp, synthetic construct
  source 1..75: mol_type = other DNA
gaacggggaatacagccatcagttgcttgcaccggtggacaatatctccattgcgaaaaacgaactggcggtact

SEQ ID NO: 527327 - DNA, 75 bp, synthetic construct
  source 1..75: mol_type = other DNA
gaatgcgctgacgctgacggatgttacaaaaaatgcagcgtatggcgttgagatagaaagtctggtgctggagat

SEQ ID NO: 527328 - DNA, 75 bp, synthetic construct
  source 1..75: mol_type = other DNA
tgacggatgttacaaaaaatgcagcgtatggcgttgagatagaaagtctggtgctggagataaatgcaccggcat

SEQ ID NO: 527329 - DNA, 75 bp, synthetic construct
  source 1..75: mol_type = other DNA
tatgcccactcgcttgaagcaatcattccaggctttgccgcatcagcaccgattgaacgcgaagtcacgcgcgag

SEQ ID NO: 527330 - DNA, 75 bp, synthetic construct
  source 1..75: mol_type = other DNA
agccgagcaggcgggcgcacagtttatcccgggagttcgcgtcgatgcgctggttcgtgaaggaaacaaggtcac

SEQ ID NO: 527331 - DNA, 75 bp, synthetic construct
  source 1..75: mol_type = other DNA
atttcagttcatgggcgcgcagggagcattattccggatcgtatggcaaccgctattctgaacgcagccgggcgc

SEQ ID NO: 527332 - DNA, 75 bp, synthetic construct
  source 1..75: mol_type = other DNA
cgctggagctggtgttcaccgccggcagtgccacggttactccgaaactgaatggagtggctggcccggcattcc

SEQ ID NO: 527333 - DNA, 75 bp, synthetic construct
  source 1..75: mol_type = other DNA
cggatattaccaaaaatgcaacgtatggcgttgagatagaaagtctggtgctggagataaatgcaccggcatcat

SEQ ID NO: 527334 - DNA, 75 bp, synthetic construct
  source 1..75: mol_type = other DNA
tcagtgcggacacgggggccagccaggattcggcacgctggggtgtgggtaaaccgttatatcaggacctgattg

SEQ ID NO: 527335 - DNA, 75 bp, synthetic construct
  source 1..75: mol_type = other DNA
atagcgaaacatccgtccgcacagtctccctgctgccggcagacggagaggctgctacgcagggctggactatta

SEQ ID NO: 527336 - DNA, 75 bp, synthetic construct
  source 1..75: mol_type = other DNA
agacagtctgacactgggactgaatgtgctgacgctgacggatgttacaaaaaatgcagcgtatggcgttgagat

SEQ ID NO: 527337 - DNA, 75 bp, synthetic construct
  source 1..75: mol_type = other DNA
gattagcggcggcaaactgcttgaatattccgcgcacatggtaccggaaggcggtctggcgatggtgccgcagct

SEQ ID NO: 527338 - DNA, 75 bp, synthetic construct
  source 1..75: mol_type = other DNA
ccgctcgctgggaatggttcccgcttccgatccgcatcattacgcagttggtgttaaagagattattggtcttac

SEQ ID NO: 527339 - DNA, 75 bp, synthetic construct
  source 1..75: mol_type = other DNA
ctgaccaacaatcagttcggtctgggaatttatctgtataccgatgtagcgttacctgacgtcgtggcgatgacc

SEQ ID NO: 527340 - DNA, 75 bp, synthetic construct
  source 1..75: mol_type = other DNA
tcggggccgtctgaagatgcatccatacgcacaatctccctgatgccgacagccggagatgctgctgcgcagggc

SEQ ID NO: 527341 - DNA, 75 bp, synthetic construct
  source 1..75: mol_type = other DNA
ggaagttcacagcgagcagggctgcgacgttatttcgcgtctgaaagtgcgtatcaacgaagtctttacctcgct

SEQ ID NO: 527342 - DNA, 75 bp, synthetic construct
  source 1..75: mol_type = other DNA
tttatgcagttcttccgcgtgcgtgaatcttccatgaaaatggcggagatcctcaccggggtgcgtaaaacttac

SEQ ID NO: 527343 - DNA, 75 bp, synthetic construct
  source 1..75: mol_type = other DNA
gcctacaccacgtcggtggaaaacgcgatgggtattcaggtgccagaacgcgcgcagatgatccgcgccattctg

SEQ ID NO: 527344 - DNA, 75 bp, synthetic construct
  source 1..75: mol_type = other DNA
gcgcagggctggagcattaaggatggcggaattcagttgtcagatggtgtatttaagatcaccaggcagagcaat

SEQ ID NO: 527345 - DNA, 75 bp, synthetic construct
  source 1..75: mol_type = other DNA
ctggagctggtgttcaccgccggcagtgccacggttactccgaaactgaatggagtggctggcccggcattccag

SEQ ID NO: 527346 - DNA, 75 bp, synthetic construct
  source 1..75: mol_type = other DNA
cctgcgctgtttacagccatgctgacacagtttcgtgctgacctctccgtgtttaacgcgcagtgccatggtggc

SEQ ID NO: 527347 - DNA, 75 bp, synthetic construct
  source 1..75: mol_type = other DNA
gacaagaaaaacaacgtcgtgccgattggtccgctgcacgtcacttctgacgaaccgggtcacttccgtctgttc

SEQ ID NO: 527348 - DNA, 75 bp, synthetic construct
  source 1..75: mol_type = other DNA
gacagcatggattatcgtcagcgtccggcaccgactaccgatgctgaaacctacgagtttatcaacgaactgggc

SEQ ID NO: 527349 - DNA, 75 bp, synthetic construct
  source 1..75: mol_type = other DNA
tgtgcgtaagaaaaagagcaaagtggtgccgtacaaagaactcgagcgctacagcattgagcgaaaaaactcgcc

SEQ ID NO: 527350 - DNA, 75 bp, synthetic construct
  source 1..75: mol_type = other DNA
gtcgcgatctgctgaaagacgacatgatccagacccgccagctggcacaacagatgcgtcgtgaagtgcaggagc

SEQ ID NO: 527351 - DNA, 75 bp, synthetic construct
  source 1..75: mol_type = other DNA
aacctgccgggcggtccgttgatggtagaaggttttacctacattccgcaccgttttgcgctgggctttgccgaa

SEQ ID NO: 527352 - DNA, 75 bp, synthetic construct
  source 1..75: mol_type = other DNA
gtcgatggcgaaaacattatcgacgccgactaccgtctgttctacgtccatcgcggcatggaaaaactggcggaa

SEQ ID NO: 527353 - DNA, 75 bp, synthetic construct
  source 1..75: mol_type = other DNA
gaaaatgaaaccggcgctgaaaaaaacgctgatggcggtagcgtgcctgagcgcagtaccagcagcccaggctgc

SEQ ID NO: 527354 - DNA, 75 bp, synthetic construct
  source 1..75: mol_type = other DNA
attaccaataacgtcctgcaatcaatacaaatcgtaaatacagcactggaggctagccagcatgcaaaacaacaa

SEQ ID NO: 527355 - DNA, 75 bp, synthetic construct
  source 1..75: mol_type = other DNA
gaatgatgattgcgcttcacgtgctgtgcctgctgccgctgctgaccggttgcggaagtacgcggacagtttacg

SEQ ID NO: 527356 - DNA, 75 bp, synthetic construct
  source 1..75: mol_type = other DNA
ttatggcgggtatggatatcactcctgagcgtgaaaaacaggtactgttcaccaccccgtactatgacaactctg

SEQ ID NO: 527357 - DNA, 75 bp, synthetic construct
  source 1..75: mol_type = other DNA
aaattatattgatgattatggtggcagacctgttttaaaatttatttgcaataatactcgctgtttatcaaaagg

SEQ ID NO: 527358 - DNA, 75 bp, synthetic construct
  source 1..75: mol_type = other DNA
ttcgtgacggtgattggtattggcggcagtgaaaaacaggccagagaaggtgaatttgatgctgtgatgctggca

SEQ ID NO: 527359 - DNA, 75 bp, synthetic construct
  source 1..75: mol_type = other DNA
atgaagttgagctataagctggttatcgctgcattcttctttactgtcatcggttctttcatctggtctgccaac

SEQ ID NO: 527360 - DNA, 75 bp, synthetic construct
  source 1..75: mol_type = other DNA
ggatgatgactgtgcttcacgtcctgtgcctgttgccgctgctgatcggttgcggaagtacgcggacagtttacg

SEQ ID NO: 527361 - DNA, 75 bp, synthetic construct
  source 1..75: mol_type = other DNA
atgaggctgagatataagctggttattgttgccttcgttgttagcgtcattggttccttcatctggtctgctgga

SEQ ID NO: 527362 - DNA, 75 bp, synthetic construct
  source 1..75: mol_type = other DNA
gtgcctgctgccgctgctgagcggttgcggaagtacgcgaacagtttacgtgagcattccggtggttccgttacc

SEQ ID NO: 527363 - DNA, 75 bp, synthetic construct
  source 1..75: mol_type = other DNA
ttgatgatggtcgtatctatcaacgtccgtttggcggtcagtcgaaaaacttcggcggcgagcaggcggcacgca

SEQ ID NO: 527364 - DNA, 75 bp, synthetic construct
  source 1..75: mol_type = other DNA
ttgttgccttcgttgttaccgtcattggttccttcatctggtctgctgggcattactacagcaaatatcagcacg

SEQ ID NO: 527365 - DNA, 75 bp, synthetic construct
  source 1..75: mol_type = other DNA
tacgtcagggcaacactgaactgcagcagaaactcaacactgcgctggaaaaagtgaagaaagatggcacttacg

SEQ ID NO: 527366 - DNA, 75 bp, synthetic construct
  source 1..75: mol_type = other DNA
atcgcgcagtttctcagcagttaattaagaatctggcgacactaaaagcaggcaatgcacgcgtggtgaacagca

SEQ ID NO: 527367 - DNA, 75 bp, synthetic construct
  source 1..75: mol_type = other DNA
tagctattcagaaatcaggccgcctgagcgatgattcacgcgaattactggcccgttgtggtatcaaaatcaatc

SEQ ID NO: 527368 - DNA, 75 bp, synthetic construct
  source 1..75: mol_type = other DNA
gaaatggaagaatccaaacagcaactaatcgacaagctactgacccgtattcagggcgtaattcaggcgcgtgaa

SEQ ID NO: 527369 - DNA, 75 bp, synthetic construct
  source 1..75: mol_type = other DNA
accgggccagcggcctcaacctggtgacggcggctatcgtgctgtggaacacggtgtacctggaacgcgccaccc

SEQ ID NO: 527370 - DNA, 75 bp, synthetic construct
  source 1..75: mol_type = other DNA
aagtagaaaatggcctgcccgccgttcctgccaactggtcgttatatcgcgaaaaagtggctgggcaggtcgctt

SEQ ID NO: 527371 - DNA, 75 bp, synthetic construct
  source 1..75: mol_type = other DNA
gcggtcaaatccgcattattggtgggcagtggcgaggccgtaaactcccggttcctgatagcccaggtctacgtc

SEQ ID NO: 527372 - DNA, 75 bp, synthetic construct
  source 1..75: mol_type = other DNA
atcgaccggcgctactacgaactgtgcgcgctgtccgagttgaagaactccctgcgctcgggcgacatctgggtg

SEQ ID NO: 527373 - DNA, 75 bp, synthetic construct
  source 1..75: mol_type = other DNA
ccccttcgatgatgatgaagaggatgaagagtcagaacgtgaaaaagccattaagagggtagagaagaaaaagag

SEQ ID NO: 527374 - DNA, 75 bp, synthetic construct
  source 1..75: mol_type = other DNA
aagattcagaaatgcgaagctaaagaacaaggttaatgacctcgatgactttgatgatggtgacgatgatgactt

SEQ ID NO: 527375 - DNA, 75 bp, synthetic construct
  source 1..75: mol_type = other DNA
ctgcgcgttcgcgatgacgatattccggggttgattatggatggcgtggtcgatctcggcattatcggtgaaaac

SEQ ID NO: 527376 - DNA, 75 bp, synthetic construct
  source 1..75: mol_type = other DNA
gtttacggcatgtggggcttgtttatcttcgccccgctgttcgccgtttatttccaggagccggtcggcaatatc

SEQ ID NO: 527377 - DNA, 75 bp, synthetic construct
  source 1..75: mol_type = other DNA
ggcacgctcaacatcaagcacgtccgcgcccattgggatgaaatcctgcggatggccacctcgatcaagcagggc

SEQ ID NO: 527378 - DNA, 75 bp, synthetic construct
  source 1..75: mol_type = other DNA
ggatgatgattgcgctcgtcggcctgtgcctgctgcagctgctaaccggctgcgggaatacgcggacagtttacg

SEQ ID NO: 527379 - DNA, 75 bp, synthetic construct
  source 1..75: mol_type = other DNA
gttcaccgcattatgggcaacgctggcactgatgtatgtctcgctggcggtgatctccggaaaatatccgatgcg

SEQ ID NO: 527380 - DNA, 75 bp, synthetic construct
  source 1..75: mol_type = other DNA
gcggcaggcaccgggaaatatccgatgtggcccggaaaaatgaaatgtgtccgggtgggaaccgcagatgaacat

SEQ ID NO: 527381 - DNA, 75 bp, synthetic construct
  source 1..75: mol_type = other DNA
aactggtcaccgcattctgggcaacgctggcactgatgtatatgtcgtttgcggcaggcaccgggaaatatccgg

SEQ ID NO: 527382 - DNA, 75 bp, synthetic construct
  source 1..75: mol_type = other DNA
atggattacgctgtattaaataacgaatttatcgccacccaggcaggaaatattacggtttataactatgatggt

SEQ ID NO: 527383 - DNA, 75 bp, synthetic construct
  source 1..75: mol_type = other DNA
ccggtccgatactgctcgaacagttttggttccgatttagcgatgcctccgtctgtaacgtgcggttttcgccgg

SEQ ID NO: 527384 - DNA, 75 bp, synthetic construct
  source 1..75: mol_type = other DNA
aggaagttcttacggaagatgcttccctgccggaaaaaatcaggaaatgccatgtttatttccctgatgaccgaa

SEQ ID NO: 527385 - DNA, 75 bp, synthetic construct
  source 1..75: mol_type = other DNA
aggcatgccatgctgcccggtatgttgtcgcccgggttctgcgaggattgttatggtgtctgaagtacaccgtca

SEQ ID NO: 527386 - DNA, 75 bp, synthetic construct
  source 1..75: mol_type = other DNA
tgatgctgcagattatgtcagggagactgaccggtcactgatgcaactggtcaccgcattctgggcaacactggc

SEQ ID NO: 527387 - DNA, 75 bp, synthetic construct
  source 1..75: mol_type = other DNA
cagcgatcaccgggaaatatccggtgcgacccggaaaaatgaaatgtatccgggtggtaaccgcagatgaatatc

SEQ ID NO: 527388 - DNA, 75 bp, synthetic construct
  source 1..75: mol_type = other DNA
aacgacatcattctcattgactatactgatttcgtcagacttacggttaagcactccagccagatggcctggtga

SEQ ID NO: 527389 - DNA, 75 bp, synthetic construct
  source 1..75: mol_type = other DNA
gctgcgtctgctcagtgaaggcgacgaactgctattattgcaagatggcgtaactgccgcagttgacggtaaccg

SEQ ID NO: 527390 - DNA, 75 bp, synthetic construct
  source 1..75: mol_type = other DNA
gttatgctatctgccgttctatggatttaaaatcatgggaatatgtgtcagaccatcgtggtgaaattgtctata

SEQ ID NO: 527391 - DNA, 75 bp, synthetic construct
  source 1..75: mol_type = other DNA
cttgcagaagacacttccctgccgggaaaaatcagggaatgccatgtttatttccctgatgacagaacaatcaga

SEQ ID NO: 527392 - DNA, 75 bp, synthetic construct
  source 1..75: mol_type = other DNA
cggtgttcctggctgatggcagggaaatgactgtagctctgtataaagacgaaggcgaggcactgactgacgcgc

SEQ ID NO: 527393 - DNA, 75 bp, synthetic construct
  source 1..75: mol_type = other DNA
gaaggcgatgcacttactgacgcgctcttactcgctgaagacgaaagagttttgggatacagactcgaacctgtc

SEQ ID NO: 527394 - DNA, 75 bp, synthetic construct
  source 1..75: mol_type = other DNA
tcgatctgccaccagaaacaaaagcagaacggatgtaccgacgcgatatacaactcgcgttaaaagatgagaagg

SEQ ID NO: 527395 - DNA, 75 bp, synthetic construct
  source 1..75: mol_type = other DNA
aggaagatatcaaagtggctgttgcggatgatgattgtgcttcacatcctgtgcctgctgccgctgctgaccggt

SEQ ID NO: 527396 - DNA, 75 bp, synthetic construct
  source 1..75: mol_type = other DNA
attggcaagagcattgcgaaatacacgcacaggaacttcacgccggaaactttcgcacagtatgtggctgatacg

SEQ ID NO: 527397 - DNA, 75 bp, synthetic construct
  source 1..75: mol_type = other DNA
cggtgttccttgcggatggcaggaaaatgactgtggccctgtataaagatgaaggcgaggcacttaccgacgcgc

SEQ ID NO: 527398 - DNA, 75 bp, synthetic construct
  source 1..75: mol_type = other DNA
ctggttcaggagattaactttgtaagacaaacagcccctgccgggcagtttcctgtaagagaatgtctgccttct

SEQ ID NO: 527399 - DNA, 75 bp, synthetic construct
  source 1..75: mol_type = other DNA
gccgggaaaaatcaggaaatgccctgtttatcttcctgatgacagaacaaacagaaacaacggagataaaaatga

SEQ ID NO: 527400 - DNA, 75 bp, synthetic construct
  source 1..75: mol_type = other DNA
ggaaatctgccgttatcgtgctgttgatgctgcagattatatcagagagactgacaggtcactgatgcaactggt

SEQ ID NO: 527401 - DNA, 75 bp, synthetic construct
  source 1..75: mol_type = other DNA
actggtcaccgcattctgggcaacgctggcacttatgtatatgtcgtttgcggcaggcaccgggaaatatccgat

SEQ ID NO: 527402 - DNA, 75 bp, synthetic construct
  source 1..75: mol_type = other DNA
tggccacaatggccctgatggcgttatttgttttatggaaggacaacaccacgcccgggcagttactggttcagg

SEQ ID NO: 527403 - DNA, 75 bp, synthetic construct
  source 1..75: mol_type = other DNA
ccggaaaaatgaaatgtatccgggtggtaaccgcagatgaacatctgaaggaagtttatacggaagacgcttccc

SEQ ID NO: 527404 - DNA, 75 bp, synthetic construct
  source 1..75: mol_type = other DNA
tatcaatattactttgcagataaacaaatgtctgccaggggtttgtatgagtatcgatgcactacgatgggctaa

SEQ ID NO: 527405 - DNA, 75 bp, synthetic construct
  source 1..75: mol_type = other DNA
gcttcgtttgccgacgaagcacagcagcatcgctccattgccgaacaactggcgcatcaggcgaatctggttaac

SEQ ID NO: 527406 - DNA, 75 bp, synthetic construct
  source 1..75: mol_type = other DNA
atcgaatttccgccagcgcccgtcgcccgacgctacttgccccactgtggtgtgaaaatcgctggacgggaatgg

SEQ ID NO: 527407 - DNA, 75 bp, synthetic construct
  source 1..75: mol_type = other DNA
aatggaattttacggcgggaagtcaccgaaaatcgccagcgtgcatcagtttggtctgtcggaagaaaaccggaa

SEQ ID NO: 527408 - DNA, 75 bp, synthetic construct
  source 1..75: mol_type = other DNA
attcgaacgctggaaggctatcgacaccagggataagcgtgaaaagttcacggcgctagtgcctgcaattatgga

SEQ ID NO: 527409 - DNA, 75 bp, synthetic construct
  source 1..75: mol_type = other DNA
aaattagtgacggaaaaagcatcacgtacatgatcgccgggttaaacaaagaatatggcgatgtggtggagtccg

SEQ ID NO: 527410 - DNA, 75 bp, synthetic construct
  source 1..75: mol_type = other DNA
atatgtttgtcttttggttttttaagacaaatgtttaatagctggcttcagcttatctttagctctttgcttata

SEQ ID NO: 527411 - DNA, 75 bp, synthetic construct
  source 1..75: mol_type = other DNA
accgggcagggcgttaatattggcgctaagaggcttcgccaggctgcgatagatgcggcgaaaaagaaatatgga

SEQ ID NO: 527412 - DNA, 75 bp, synthetic construct
  source 1..75: mol_type = other DNA
aataacgggtaagaccgctaacctggccggacagggcgttaatattggtgccaaaaagcttcgtcaggcagctat

SEQ ID NO: 527413 - DNA, 75 bp, synthetic construct
  source 1..75: mol_type = other DNA
attatcataatcatttgaatggtacacctttaattgatggcagtatgaattttgatttttttgcatttgtccagg

SEQ ID NO: 527414 - DNA, 75 bp, synthetic construct
  source 1..75: mol_type = other DNA
atatatgtgctgtggtatggctttactgtattagcgagaaaacaacagacgcctgtacctgattttatctggaat

SEQ ID NO: 527415 - DNA, 75 bp, synthetic construct
  source 1..75: mol_type = other DNA
tattctttcagtttctgtacaagatgccgaacctctcaacctgatcgcaactggtgctacagcatttgtcgcggg

SEQ ID NO: 527416 - DNA, 75 bp, synthetic construct
  source 1..75: mol_type = other DNA
aatgatggcgcggttgatcaacgggcgctgggcgttaaccgggtgaagatattcgaacgctggaaagctatcgac

SEQ ID NO: 527417 - DNA, 75 bp, synthetic construct
  source 1..75: mol_type = other DNA
atgtgcggcattttctctgccgggatgtcctttgcgatgaacgccgcaaaaccgatgcatgaagccgctgccgca

SEQ ID NO: 527418 - DNA, 75 bp, synthetic construct
  source 1..75: mol_type = other DNA
tcggtctgtcggaagaaaaccggaaagacggtaagaaaattgattatccggcgcgtcctctgctcggctttaccg

SEQ ID NO: 527419 - DNA, 75 bp, synthetic construct
  source 1..75: mol_type = other DNA
ccgaaaatcgccagtgtgcatcagttcggtctgtcggaagaaaaccggaaagacggtaagaaaattgattatccg

SEQ ID NO: 527420 - DNA, 75 bp, synthetic construct
  source 1..75: mol_type = other DNA
atgccaccgaggaagaagcacggcgcggttttgccaaagtgatgtctgagtttggcgaatttttggggcacgttg

SEQ ID NO: 527421 - DNA, 75 bp, synthetic construct
  source 1..75: mol_type = other DNA
atgcggaaggatttcaaaatagacgggaaatatgtggtgctgtctgtaagctctcaaattcagtcaccctctgtc

SEQ ID NO: 527422 - DNA, 75 bp, synthetic construct
  source 1..75: mol_type = other DNA
gaatctcaggccagaagctatctgcaaagtcaaatcacctcaaccgcacaatcttatattgaagacacactctct

SEQ ID NO: 527423 - DNA, 75 bp, synthetic construct
  source 1..75: mol_type = other DNA
accagggataagcgtgaaaagttcacggcgctagtgcctgcaattatggaggctatcagaaatgatacaaagata

SEQ ID NO: 527424 - DNA, 75 bp, synthetic construct
  source 1..75: mol_type = other DNA
atgccgaccaggaatgacacaggagcaggcgacgatattatcacggaagcattctgggctctgaaagaacgcccg

SEQ ID NO: 527425 - DNA, 75 bp, synthetic construct
  source 1..75: mol_type = other DNA
taccaatattactttgcagataaacaaatgtctgccaggggttcgtatgagtatcgatgcactacgatgggctaa

SEQ ID NO: 527426 - DNA, 75 bp, synthetic construct
  source 1..75: mol_type = other DNA
aatggagttttacggcgggaagtcgccgaaaatcgccagtgtgcatcagttcggtctgtcggaagaaaaccggaa

SEQ ID NO: 527427 - DNA, 75 bp, synthetic construct
  source 1..75: mol_type = other DNA
ctgagcgccgaactggcgaaacgtctgcggcagagtcagcagcgtcgggtgatggctcagaaagccccggacggc

SEQ ID NO: 527428 - DNA, 75 bp, synthetic construct
  source 1..75: mol_type = other DNA
ggctacgggttattcccctctgaacaggcgcgtaaggactggcaaaacgcccgcaaaaaactctcgagggcaaag

SEQ ID NO: 527429 - DNA, 75 bp, synthetic construct
  source 1..75: mol_type = other DNA
gccggacagggcgttaatattggtgccaaaaagcttcgtcaggccgctattgagagggcaaagaaaatgtatgga

SEQ ID NO: 527430 - DNA, 75 bp, synthetic construct
  source 1..75: mol_type = other DNA
ccgtgaaaaaagctgtgatctgtctgttcctgctgatgtcgctggtgagctgctcgactacgcgaaccgtttacg

SEQ ID NO: 527431 - DNA, 75 bp, synthetic construct
  source 1..75: mol_type = other DNA
agctcggcagctacccgcgccagaacggactggccgtggccctgcgcgagctgggccggatcgagcgcacgctgt

SEQ ID NO: 527432 - DNA, 75 bp, synthetic construct
  source 1..75: mol_type = other DNA
tacggatgcccggaaaaccttagcgtacgattttttccgaattctgcgggctcccctcattaagctgaacgcctt

SEQ ID NO: 527433 - DNA, 75 bp, synthetic construct
  source 1..75: mol_type = other DNA
gaaaaagaaaatcgatggcgaaacaaatgatggcgtaagcagtgaaccggttagtcgtgccgttctgctgataga

SEQ ID NO: 527434 - DNA, 75 bp, synthetic construct
  source 1..75: mol_type = other DNA
gtttttgatgagcagcctgcaaactggttacagatttttgaccgtacgcaacaggtgcaggatcgttaccgtgtt

SEQ ID NO: 527435 - DNA, 75 bp, synthetic construct
  source 1..75: mol_type = other DNA
gtgccactaccaccagaacgttgacatattgccaggctgttctgtggattaacccattgttggcagccatcgaga

SEQ ID NO: 527436 - DNA, 75 bp, synthetic construct
  source 1..75: mol_type = other DNA
tgtagcgttacatgaaacgcagccgttgagacaaatggaggaaaatcgtccccgtttgcaggggacgacggatgt

SEQ ID NO: 527437 - DNA, 75 bp, synthetic construct
  source 1..75: mol_type = other DNA
tgcatcgttacatgaaacgcagccactgaggcaaatggaggaaaatcgccccgtttgcaggggacgacggatgtg

SEQ ID NO: 527438 - DNA, 75 bp, synthetic construct
  source 1..75: mol_type = other DNA
cgaagagagcattgttgccgccatgagctttgtcaaagcaggctttcgcggcgagaaacgccagttgttgatggg

SEQ ID NO: 527439 - DNA, 75 bp, synthetic construct
  source 1..75: mol_type = other DNA
cgcgacgaaacctattcggcggccttggccgagctggtcaaccaccagtatcgccacgcctttgccgcccactgg

SEQ ID NO: 527440 - DNA, 75 bp, synthetic construct
  source 1..75: mol_type = other DNA
gcaatgcgctggcccgtgccgtgttcttcaaccgccttggtgaaatccgtgaccgcagtttcgagcagcagcgct

SEQ ID NO: 527441 - DNA, 75 bp, synthetic construct
  source 1..75: mol_type = other DNA
gaaactggtgatgaccgacgccggcatcgaccggcgctactacgaactgtgcgcgctgtccgagttgaagaactc

SEQ ID NO: 527442 - DNA, 75 bp, synthetic construct
  source 1..75: mol_type = other DNA
gtgttcaaaaaattgttgggtaaatttattaaagagaatacttcgctacccacttcatttgtgccgctgtatgtg

SEQ ID NO: 527443 - DNA, 75 bp, synthetic construct
  source 1..75: mol_type = other DNA
gcggcggcctcttatagctgccactcaatgaatggcctcttcccccatatcaaccctggcgaactgtttgttatc

SEQ ID NO: 527444 - DNA, 75 bp, synthetic construct
  source 1..75: mol_type = other DNA
tggtcgggccgttgggcaaggtcaatacgtaaaccgcctttgggcatttatggatggggctattcagtctgatag

SEQ ID NO: 527445 - DNA, 75 bp, synthetic construct
  source 1..75: mol_type = other DNA
agatacaaaaatatggtgtgctattcagttgggggacgataaatacacaacaccacttaaattatttttaaaatt

SEQ ID NO: 527446 - DNA, 75 bp, synthetic construct
  source 1..75: mol_type = other DNA
aagctcgaaaatacgctgaattgtccggttgagttttcccgcgacgttaacctgcaactttcctgggacgtagta

SEQ ID NO: 527447 - DNA, 75 bp, synthetic construct
  source 1..75: mol_type = other DNA
tgctgaaattgttggggtaacccaggggatggtaagccatgtcattaccggacgggcgaaacttacgggggaaaa

SEQ ID NO: 527448 - DNA, 75 bp, synthetic construct
  source 1..75: mol_type = other DNA
ctggtcaccaacttcttccgcggctgggtgaccgatctgaccaccgctatttttgagaaaaagatgggcattcaa

SEQ ID NO: 527449 - DNA, 75 bp, synthetic construct
  source 1..75: mol_type = other DNA
gaaaactggcttcctgatgacatcgatttctccgcgttttcagtcgaaacactgtctggctggcaacctgaaaat

SEQ ID NO: 527450 - DNA, 75 bp, synthetic construct
  source 1..75: mol_type = other DNA
tgggcgctcttacaggcaacagaacaactcagtgcacagcaaattcagactcccggcgaaaccactaaccagctg

SEQ ID NO: 527451 - DNA, 75 bp, synthetic construct
  source 1..75: mol_type = other DNA
ttggtgaatttgaaaaaatatcctctccctggctgaccaaagcgcagagtgaaaactggcttcctgatgacatcg

SEQ ID NO: 527452 - DNA, 75 bp, synthetic construct
  source 1..75: mol_type = other DNA
ggttctgcaaacatatcattcaccagcaatagcggtagcaagaaagtaactaaatcagtgacggttaatcaataa

SEQ ID NO: 527453 - DNA, 75 bp, synthetic construct
  source 1..75: mol_type = other DNA
tcaagcttggtgcctgcaaggtatcatttggtggtgtggatctgggttacaccaaaggtggtgttcaggttgaag

SEQ ID NO: 527454 - DNA, 75 bp, synthetic construct
  source 1..75: mol_type = other DNA
gcgtttttagctcatttcatctaagcgagttggaaaatatgtctcctgatgaccttcatgaagaatatgggaata

SEQ ID NO: 527455 - DNA, 75 bp, synthetic construct
  source 1..75: mol_type = other DNA
tttggttttacctatggaaagtttgtctgtaacgattctctgattgggcaaacctcagccattaatatggcatca

SEQ ID NO: 527456 - DNA, 75 bp, synthetic construct
  source 1..75: mol_type = other DNA
ttaccttagctgatgccagaagcaaaagagatgatgctaaaaagctgctggttaatggcgttgatccgagtgcgt

SEQ ID NO: 527457 - DNA, 75 bp, synthetic construct
  source 1..75: mol_type = other DNA
tataaagcgacttggatacggtggcaggcttacaggtcatggatttaggcatatgatgtcaactattttacatga

SEQ ID NO: 527458 - DNA, 75 bp, synthetic construct
  source 1..75: mol_type = other DNA
ccattgtctactcaggcgttagatttactcaatgaactcaagacaatgacaggcaactatcgttatgtttttcct

SEQ ID NO: 527459 - DNA, 75 bp, synthetic construct
  source 1..75: mol_type = other DNA
ttcgaaaagaacaaaaactagcattaagaattcaatctgagaacgcattcgaaaagattgccagagagtggcatc

SEQ ID NO: 527460 - DNA, 75 bp, synthetic construct
  source 1..75: mol_type = other DNA
ccgctatgcaggtaagcctaaaatgatctcgcttggtgtctatccaacgatcacacttgctgaagctcgttctcg

SEQ ID NO: 527461 - DNA, 75 bp, synthetic construct
  source 1..75: mol_type = other DNA
cagcaaattgcgctcgaatggcacaacatgaaagtgaagaaatggtctgcgggatatgcctctgacattcttgaa

SEQ ID NO: 527462 - DNA, 75 bp, synthetic construct
  source 1..75: mol_type = other DNA
tattcgtcgtattggctactctgggcgcgttactggtcatgggttccggcacacgatgagcacgattttacatga

SEQ ID NO: 527463 - DNA, 75 bp, synthetic construct
  source 1..75: mol_type = other DNA
tattgattctgacagggctccggccaggggaattacgacaggcagaatggcaggagatcgattttgataatcgtt

SEQ ID NO: 527464 - DNA, 75 bp, synthetic construct
  source 1..75: mol_type = other DNA
aaaactcgatccgtggcacatacaatcacgcgcaatacctggacggacggcaggagatgctccagtggtacgccg

SEQ ID NO: 527465 - DNA, 75 bp, synthetic construct
  source 1..75: mol_type = other DNA
gaagatgaaacggccccatcttgtacccctctctacccaagcgctagaaatcgtacaacagctcaaagtaatgtc

SEQ ID NO: 527466 - DNA, 75 bp, synthetic construct
  source 1..75: mol_type = other DNA
acatgagaaaggatttaacagcgcttggattgaaacccagcttgctcattcggacaaaaactctattcgtggaat

SEQ ID NO: 527467 - DNA, 75 bp, synthetic construct
  source 1..75: mol_type = other DNA
ttccctggacgcaacgatcccagcaaatttatgagtgaagcaagcattaatcaggtgtttaaacgtattggatat

SEQ ID NO: 527468 - DNA, 75 bp, synthetic construct
  source 1..75: mol_type = other DNA
ctggcgctgggggtatatcccgaagttactctggctgatgcgcggaccaaacgtgatgaggcaaaaaggggtatc

SEQ ID NO: 527469 - DNA, 75 bp, synthetic construct
  source 1..75: mol_type = other DNA
atctcgcttggcgtttacccaacgatcacccttgccgatgctcgttcccgtcgtgatgaagctcgaaaacttgtg

SEQ ID NO: 527470 - DNA, 75 bp, synthetic construct
  source 1..75: mol_type = other DNA
gggcgaaatgatccgagtaagccaatgagtgaggccgctatcaatcagcttataaagcgacttggatacggtggc

SEQ ID NO: 527471 - DNA, 75 bp, synthetic construct
  source 1..75: mol_type = other DNA
cgttacgccatagttaccggccgtgcggaatacaatcctgcagcggatctaaccagcgctatgtcagggcatgaa

SEQ ID NO: 527472 - DNA, 75 bp, synthetic construct
  source 1..75: mol_type = other DNA
taaaagcgaaacgtcaccggtcgatctgtgcgtgattggcatcgtcgatgaggtggtgtctggcggtcaggtaat

SEQ ID NO: 527473 - DNA, 75 bp, synthetic construct
  source 1..75: mol_type = other DNA
ggccgtaacgatccaaataagtgcatgagtgaagccagcatcaatcaggtatttaagcgtattggctacactgga

SEQ ID NO: 527474 - DNA, 75 bp, synthetic construct
  source 1..75: mol_type = other DNA
acttcaggggctggggtattcaaagcccacttaagcaaatgctgctggcgggagctttatgaacgtctgggctat

SEQ ID NO: 527475 - DNA, 75 bp, synthetic construct
  source 1..75: mol_type = other DNA
atgcggtgtgggagatcccaaaagaacgtatgaaaatgcgtaggagccatattgtcccgttgccaaaacaagcat

SEQ ID NO: 527476 - DNA, 75 bp, synthetic construct
  source 1..75: mol_type = other DNA
tatctcgaagggagaagagaaatgatgcaatggtatgctaattatttatctgagctaattggtactcataaatga

SEQ ID NO: 527477 - DNA, 75 bp, synthetic construct
  source 1..75: mol_type = other DNA
acattggaggtaggcccatcgcagagattaagccgatggaattgctcgcggttctatcccgtcttaatgaccgtg

SEQ ID NO: 527478 - DNA, 75 bp, synthetic construct
  source 1..75: mol_type = other DNA
atggccaaagaaagggcattaacgctggaagcactgcgtgttatggatgctattgatcgccgtggcagttttgcg

SEQ ID NO: 527479 - DNA, 75 bp, synthetic construct
  source 1..75: mol_type = other DNA
gacgcgtgtgaaatatcgtggaattgcggtggcggataccgctcgtgagcgcccggtgttgaccgtacagctgct

SEQ ID NO: 527480 - DNA, 75 bp, synthetic construct
  source 1..75: mol_type = other DNA
atcggacaaaattcaccaatgtcgggcgtatgttgctggagcggggacgcgttctgctggaggcagcagataagc

SEQ ID NO: 527481 - DNA, 75 bp, synthetic construct
  source 1..75: mol_type = other DNA
ggcgaacaaatgcggtaacacctttgaggcgatcgcccgtgagtggtatgaaaaacgcctggacagatggtcaca

SEQ ID NO: 527482 - DNA, 75 bp, synthetic construct
  source 1..75: mol_type = other DNA
ttaccgttgaagttggcacatataccgcaggttctaccactcctgcaactgatttcgaaattatcccagaactag

SEQ ID NO: 527483 - DNA, 75 bp, synthetic construct
  source 1..75: mol_type = other DNA
agatgacatgagcgttgacgccgaaagtgcattcctgaccgatccacaagaagctaaacgctttgtcgaactgac

SEQ ID NO: 527484 - DNA, 75 bp, synthetic construct
  source 1..75: mol_type = other DNA
ccagatccccggcggttggtttttagatcgcgtaggttctcgcgtgacttattttattgcgatatttggttggtc

SEQ ID NO: 527485 - DNA, 75 bp, synthetic construct
  source 1..75: mol_type = other DNA
aatgggcagtcattctcgaggatgatgttatcgtcaatgagaaatttaaaaaatttctgcaatattttaatcttc

SEQ ID NO: 527486 - DNA, 75 bp, synthetic construct
  source 1..75: mol_type = other DNA
gaacgaaggtgagccgatggtcagaaggttatgcctcggacattatcgaagcctttaataaagatatttttccct

SEQ ID NO: 527487 - DNA, 75 bp, synthetic construct
  source 1..75: mol_type = other DNA
aactggaagaagaacgccagaaagtcagtgaactgaccgcacagctgaacgccgcacagaaaacacaaaaagcgg

SEQ ID NO: 527488 - DNA, 75 bp, synthetic construct
  source 1..75: mol_type = other DNA
ctgacccgtcaaaatctgacgcatcaaaatctgacccgtcaaaatttgatgcgtcgaaatctggcaaaaaagcgg

SEQ ID NO: 527489 - DNA, 75 bp, synthetic construct
  source 1..75: mol_type = other DNA
aatcaagcgaattggctatgttgggagagtgactggtcatggctttcggcatactttttctactatccttcacga

SEQ ID NO: 527490 - DNA, 75 bp, synthetic construct
  source 1..75: mol_type = other DNA
gccgagggaaaaaatcctagtgaggttcgaaaagaacaaaaattagcattacgaattcaatctgagaacgcattc

SEQ ID NO: 527491 - DNA, 75 bp, synthetic construct
  source 1..75: mol_type = other DNA
agtctgattcaactgaaattacaggccggacggaatctgacgcaggcagaaaccagccgacttaacacggtgctg

SEQ ID NO: 527492 - DNA, 75 bp, synthetic construct
  source 1..75: mol_type = other DNA
aaacagattaatctagatgaaaatagtataacatatacaaacaaaaaaaatatattttcaaggatgtatggtttt

SEQ ID NO: 527493 - DNA, 75 bp, synthetic construct
  source 1..75: mol_type = other DNA
ttggaactttagatgtgggaggaattgaaaagtgggttgttaatatgattaattatgaattggaaaataaaaatg

SEQ ID NO: 527494 - DNA, 75 bp, synthetic construct
  source 1..75: mol_type = other DNA
ctaaccttactgtagaagtaggttcaagtgctggtaaaacagttgctactgactttgtagaagtaccagaggtaa

SEQ ID NO: 527495 - DNA, 75 bp, synthetic construct
  source 1..75: mol_type = other DNA
attaagtgactataaaatagccgtttctgaaagagctgggaaatcattgttttatggtagttttataacacatta

SEQ ID NO: 527496 - DNA, 75 bp, synthetic construct
  source 1..75: mol_type = other DNA
taaatatagtgcattctcattctgatagacgtagtattgataggcggagcagcatttttaagaaaatatacatat

SEQ ID NO: 527497 - DNA, 75 bp, synthetic construct
  source 1..75: mol_type = other DNA
gaagtcaataaaagtaaattttccttagaacaagatattttattctttaagaaaatatacagagatgcacgtaaa

SEQ ID NO: 527498 - DNA, 75 bp, synthetic construct
  source 1..75: mol_type = other DNA
attatccctggatagcgccctgccggatcgcaccaccatcatgaatttccgctacctgctcaagcagcatcaact

SEQ ID NO: 527499 - DNA, 75 bp, synthetic construct
  source 1..75: mol_type = other DNA
aaagacaaaagcatgagtgatttcagccttacagaaagtgaaatactccagcttgctcactttgaaggtaatatc

SEQ ID NO: 527500 - DNA, 75 bp, synthetic construct
  source 1..75: mol_type = other DNA
aaactctaataaacaataagtctatgctagcatcgttagtgaacagagcaggacataagaaaagaactgagtatt

SEQ ID NO: 527501 - DNA, 75 bp, synthetic construct
  source 1..75: mol_type = other DNA
gctgcaaaaatggtgcgggaacgacagccaacaaccacggcggggctgtcaggagtgtgactggtatctcctgtg

SEQ ID NO: 527502 - DNA, 75 bp, synthetic construct
  source 1..75: mol_type = other DNA
atttttaattgccctgttcgagtgttgggtgcgggcagatatcagtcgtatctcgattgagctttttgacgccac

SEQ ID NO: 527503 - DNA, 75 bp, synthetic construct
  source 1..75: mol_type = other DNA
tttatgctggaagagaacgtcgtcagcaccaaaccgcgtttccactttatcgcggataaacaaaacgatatttcg

SEQ ID NO: 527504 - DNA, 75 bp, synthetic construct
  source 1..75: mol_type = other DNA
tgactctgacgcagaacgggcggttgttgtattcagaaatggtgcctgccgggccgttctccatcacagatgtgc

SEQ ID NO: 527505 - DNA, 75 bp, synthetic construct
  source 1..75: mol_type = other DNA
ccacccgggccatccgcgcactgagtgcggacctggcggtcgggaaaacatccaccggggacagtctgctgggca

SEQ ID NO: 527506 - DNA, 75 bp, synthetic construct
  source 1..75: mol_type = other DNA
cagaacctgtttcgtccgtgttttcccgtcgggtcgtacttgcgcttgccgtatcagctacttttgccagtacca

SEQ ID NO: 527507 - DNA, 75 bp, synthetic construct
  source 1..75: mol_type = other DNA
ccgtcacccacggcgacatcgacctgggcctgctgttcaacaccaacggttttatgctggaagagaacgtcgtca

SEQ ID NO: 527508 - DNA, 75 bp, synthetic construct
  source 1..75: mol_type = other DNA
tgattttcgtgtacagcctggtttttaccgtgttgctggcaatcccgctgggaatttatttcctcggcggcgatg

SEQ ID NO: 527509 - DNA, 75 bp, synthetic construct
  source 1..75: mol_type = other DNA
tcaatgtatgtgattcaatcttcgatgattttcgtgtacagcctggtttttaccgtgttgctggcaatcccgctg

SEQ ID NO: 527510 - DNA, 75 bp, synthetic construct
  source 1..75: mol_type = other DNA
gtggtgagcagttcgacgaaaaatcagtacgcatcagagacatcatcgtctcagcccgcttgttcagggagcaga

SEQ ID NO: 527511 - DNA, 75 bp, synthetic construct
  source 1..75: mol_type = other DNA
tcgcctccatgcgcctgtttgcccgcttatccctggatagcgccatgccggatcgcaccaccatcatgaatttcc

SEQ ID NO: 527512 - DNA, 75 bp, synthetic construct
  source 1..75: mol_type = other DNA
aaccaactggcgatgttattcaccctggccaacctgtttcgggtggaccaaatgatacgccagtgggagagatct

SEQ ID NO: 527513 - DNA, 75 bp, synthetic construct
  source 1..75: mol_type = other DNA
agacagcagaacctgaatacccggatggcctgagcgaaccgatcgggaaatttccgatgactggtgtctggcggc

SEQ ID NO: 527514 - DNA, 75 bp, synthetic construct
  source 1..75: mol_type = other DNA
ctaaaccccacacataacgcacacgagagtgctccgatcagtgagcaggaagttttgtcgttacaggcagccccc

SEQ ID NO: 527515 - DNA, 75 bp, synthetic construct
  source 1..75: mol_type = other DNA
tcgcctccatgcgcctgtttgcccgcttatccctggatagcgccttgccggaacgcaccaccatcatgaatttcc

SEQ ID NO: 527516 - DNA, 75 bp, synthetic construct
  source 1..75: mol_type = other DNA
tcaaacaacaccaaagttcgtatcgatccgattattgtcgcccaggatggttcgctttctggtcctggtatggct

SEQ ID NO: 527517 - DNA, 75 bp, synthetic construct
  source 1..75: mol_type = other DNA
gcggcagccgaccgtcttaacacctcgaacaacaccaaagttcgtatcgatccgattatcgtcgcccaggatggt

SEQ ID NO: 527518 - DNA, 75 bp, synthetic construct
  source 1..75: mol_type = other DNA
cgctttctcgcgcggcagctgaccgtcttaacacgtcaaacaacaccaaagttcgtatcgatccgattattgtcg

SEQ ID NO: 527519 - DNA, 75 bp, synthetic construct
  source 1..75: mol_type = other DNA
gacggatcctcacctaatgttgcgtcttgccattgaaacggtcgcccatgattacgatgtcgttgtcatagacag

SEQ ID NO: 527520 - DNA, 75 bp, synthetic construct
  source 1..75: mol_type = other DNA
ccgaccggcgcgccggtaaccagcagcggtttcctcggcgcaccaacgaccttagcgcctggtgtactggaaggc

SEQ ID NO: 527521 - DNA, 75 bp, synthetic construct
  source 1..75: mol_type = other DNA
ctggagggcagcgaaccgacgccggcaccgcagccagtggtcacagctccggcttcaacgcctgcaacaacacca

SEQ ID NO: 527522 - DNA, 75 bp, synthetic construct
  source 1..75: mol_type = other DNA
ggcggtggtcgtgacagtgatggcggtgccagcagttatctgaacgcgtcgtacagcggtgaccgggcttatctg

SEQ ID NO: 527523 - DNA, 75 bp, synthetic construct
  source 1..75: mol_type = other DNA
ttaccggatgatgacagtcacctgaaaggtggtgtgtttgctgcatcatacggttatggtctggataatctgacc

SEQ ID NO: 527524 - DNA, 75 bp, synthetic construct
  source 1..75: mol_type = other DNA
gggattacggaaccagtgcgtttcgtgtcaactacagtgccaacgcgaatacggggcgacacaacacgtcagcat

SEQ ID NO: 527525 - DNA, 75 bp, synthetic construct
  source 1..75: mol_type = other DNA
gacagtgatggtggtgccagcggttatttcaacgcgtcgtacagcggtgaccgtgcatatctgagtggtgcgctg

SEQ ID NO: 527526 - DNA, 75 bp, synthetic construct
  source 1..75: mol_type = other DNA
ggtaccagcagaaaaagctgttattacgatgccatttgattcgattaaggtcaaacgttatctgttacagattag

SEQ ID NO: 527527 - DNA, 75 bp, synthetic construct
  source 1..75: mol_type = other DNA
gataatactggagcttatgcttcagctgatctgatggcgaatgttggacgatgggtgatcaactcgacggtgact

SEQ ID NO: 527528 - DNA, 75 bp, synthetic construct
  source 1..75: mol_type = other DNA
agaggaatggctcagttcaactggaatttatctccgacaggaattctttcgggatagttatgattcaaaaagaca

SEQ ID NO: 527529 - DNA, 75 bp, synthetic construct
  source 1..75: mol_type = other DNA
tgtcatgactctccacctttacagacaaattcggtgctataccaatggcgacatcgactctatccgcttcacctg

SEQ ID NO: 527530 - DNA, 75 bp, synthetic construct
  source 1..75: mol_type = other DNA
cggcagccgcaatctatagcgataacaattatcagcgtgaaatgaacgtcaaacgtgcgcttaatcagtatttta

SEQ ID NO: 527531 - DNA, 75 bp, synthetic construct
  source 1..75: mol_type = other DNA
cggcagcagcaatctatgcagataataattatcagcgtgaaatgaacgtcaaacgtgcgcttgagcaatatttta

SEQ ID NO: 527532 - DNA, 75 bp, synthetic construct
  source 1..75: mol_type = other DNA
tgggttgtgaattcaaccgcaacatcaaccgcaggagatagtggatataactcctcaatagatatgtttaccgcc

SEQ ID NO: 527533 - DNA, 75 bp, synthetic construct
  source 1..75: mol_type = other DNA
ctctgcatcatatggctatggtttaaatgaaatgactctcaggagtggtgtcgtcctgaatcaggactaccaggg

SEQ ID NO: 527534 - DNA, 75 bp, synthetic construct
  source 1..75: mol_type = other DNA
ctcaccgccagcaaaaggacagcggtaaggaaagagggattacaggcaccctgagcacacagattgaaggagcca

SEQ ID NO: 527535 - DNA, 75 bp, synthetic construct
  source 1..75: mol_type = other DNA
gaagtaccactttataccagtggtgatgtgataatgacagtaacgggagaagatggaaaggaggaaacacaggtt

SEQ ID NO: 527536 - DNA, 75 bp, synthetic construct
  source 1..75: mol_type = other DNA
tctgggttacaccccggtgttcaatggtattgcgaacggaccgtcgagggtgacactgacacagaatggacggtt

SEQ ID NO: 527537 - DNA, 75 bp, synthetic construct
  source 1..75: mol_type = other DNA
aagtctggcgctggcttttccccagaaggggctggtgaagatgccggagaatgtggactgggattacggtactgg

SEQ ID NO: 527538 - DNA, 75 bp, synthetic construct
  source 1..75: mol_type = other DNA
acagcatgaagccgggcaacttggggtacaccccggtattcagcggcattgcgaacggaccctcaagggtgacgc

SEQ ID NO: 527539 - DNA, 75 bp, synthetic construct
  source 1..75: mol_type = other DNA
gcaacctggtggtaccgctgaacagctatgactggaacacggtgacgattgatgcgggcacgctgccgctgagca

SEQ ID NO: 527540 - DNA, 75 bp, synthetic construct
  source 1..75: mol_type = other DNA
tggcggtcgggaaaacatccaccggggacagtctgctgggcagtacgggaacgtacggcgtgtcgctgagccgga

SEQ ID NO: 527541 - DNA, 75 bp, synthetic construct
  source 1..75: mol_type = other DNA
cgtgccattcgtctgttaagcgcagaccttctggtcgggaagacgtccaccggtgacagcatgctgggcagcacg

SEQ ID NO: 527542 - DNA, 75 bp, synthetic construct
  source 1..75: mol_type = other DNA
aaacaccagtctcggcttcggaaaaatcattttcggcacgctgctcgcgttcatcgacaacgtgctggatgccac

SEQ ID NO: 527543 - DNA, 75 bp, synthetic construct
  source 1..75: mol_type = other DNA
gctgtagatacgctgggagatatatcggtggggcagtgccatatatccgcaacaaagttaaagtcaaccgaaaaa

SEQ ID NO: 527544 - DNA, 75 bp, synthetic construct
  source 1..75: mol_type = other DNA
agagcaatggctcagttcatccggtatctatctacggcaggaattctttcgggataattatgattcaaaccgaca

SEQ ID NO: 527545 - DNA, 75 bp, synthetic construct
  source 1..75: mol_type = other DNA
ttctgcatgtgcattttatgcctggcgataaagtgctgctggggtggagtaaagattctttttctccgtatgaag

SEQ ID NO: 527546 - DNA, 75 bp, synthetic construct
  source 1..75: mol_type = other DNA
aaaaacgccgttggtcgcgagcctcgcgggtattgctcaggccagtgaaacggcagtgatctttactgtcctcac

SEQ ID NO: 527547 - DNA, 75 bp, synthetic construct
  source 1..75: mol_type = other DNA
gttcgtggcagaacgacctgaccagccgtgggtggctgattttacttacgtcagcacatggcagggcttcgtcta

SEQ ID NO: 527548 - DNA, 75 bp, synthetic construct
  source 1..75: mol_type = other DNA
gaaaacctcagaaacgaatgcagctaacagcgcacaggcggcagcggcctcacagactgcatcggcaaactccgc

SEQ ID NO: 527549 - DNA, 75 bp, synthetic construct
  source 1..75: mol_type = other DNA
aaagcgagagtgctgcagctggttctgcaagcgcggcggctgcttctgccactgcatcagccaacagtcaaaaag

SEQ ID NO: 527550 - DNA, 75 bp, synthetic construct
  source 1..75: mol_type = other DNA
aaatcagatcagtctacgtgctcagtaagtaacgggcgcatatccagcgaaaaaaagactacgtggtcctatatt

SEQ ID NO: 527551 - DNA, 75 bp, synthetic construct
  source 1..75: mol_type = other DNA
agacgcagccagagagtatgcaagtcaggcagcagagccgtataaatatgtcttacagccactgcctgatgtgtg

SEQ ID NO: 527552 - DNA, 75 bp, synthetic construct
  source 1..75: mol_type = other DNA
tgaaagacggtgcaggaaaaccaatacagaactgtactattcagctcaaagcaaagcgtaacagcaccacggtac

SEQ ID NO: 527553 - DNA, 75 bp, synthetic construct
  source 1..75: mol_type = other DNA
ctggatcagcaactgctgcggctaacagccagaaagccgcgaagacgagcgaaactaacgcaaagtccagccaga

SEQ ID NO: 527554 - DNA, 75 bp, synthetic construct
  source 1..75: mol_type = other DNA
gaatagcagctactgcaactaaagatccggttacagggtggattttctatgaggcaactatagaagctgttgaag

SEQ ID NO: 527555 - DNA, 75 bp, synthetic construct
  source 1..75: mol_type = other DNA
gtaaaaacgcggacctttattcgaataggaggtcaagccacatcagggacacgtcatctattcggccatttgaga

SEQ ID NO: 527556 - DNA, 75 bp, synthetic construct
  source 1..75: mol_type = other DNA
ccaaattgctccacctgtttcacctggaacttatttgggcggggaatatttggatgttacgacaccacaatttga

SEQ ID NO: 527557 - DNA, 75 bp, synthetic construct
  source 1..75: mol_type = other DNA
tatagcaggaacgacaacagggagaaatatatgcacagttgctggtaataaaggcatagatgtgactggcgatga

SEQ ID NO: 527558 - DNA, 75 bp, synthetic construct
  source 1..75: mol_type = other DNA
catttatttgggcatgtgaggaattttcgtctctggcataaagagctaacagatgcgcagcttggggaggttgtg

SEQ ID NO: 527559 - DNA, 75 bp, synthetic construct
  source 1..75: mol_type = other DNA
tccggatgaagccgggcgttacagcatggatgttgagtatggccagtacagcgtcaccctgctggttgaagattt

SEQ ID NO: 527560 - DNA, 75 bp, synthetic construct
  source 1..75: mol_type = other DNA
gagccacgatttgaaaaagaaggtttattgattgaaggacagcgcactaactattttgttaaatccaatactccc

SEQ ID NO: 527561 - DNA, 75 bp, synthetic construct
  source 1..75: mol_type = other DNA
gctcagtaagtaacgggcatatatccagcgaaacaaaaaccacatggtcctgtattcagaacaccgcaattatcc

SEQ ID NO: 527562 - DNA, 75 bp, synthetic construct
  source 1..75: mol_type = other DNA
tttgataccggcggtcatcaaaccggagcggctattattcttggcttcggtcgttcaacagattacgacggattt

SEQ ID NO: 527563 - DNA, 75 bp, synthetic construct
  source 1..75: mol_type = other DNA
cgtatatccagcgaaacaaaaaccacatggtcttatattcagaacaccgcaattatccgtattggaggccagact

SEQ ID NO: 527564 - DNA, 75 bp, synthetic construct
  source 1..75: mol_type = other DNA
gccagacagcagctaaagcaagtgaagacgcagccagagagtatgcaagtcaggcagcagagccgtataaatatg

SEQ ID NO: 527565 - DNA, 75 bp, synthetic construct
  source 1..75: mol_type = other DNA
caatggtggaagaagtggcacgcaacgccgaagccgcctctcagagcgcagcggcggcaaagaaatccgaaactg

SEQ ID NO: 527566 - DNA, 75 bp, synthetic construct
  source 1..75: mol_type = other DNA
taaacgaaaacgcatcgcttgaaaaaatggttatggggatgcgtgtaaagtcagagcagtctacgtgctcagtaa

SEQ ID NO: 527567 - DNA, 75 bp, synthetic construct
  source 1..75: mol_type = other DNA
gattacattgacgcggtgacggtaacagataccagcaccgcgccgaatgtcatctggcctgaactgccggaggcg

SEQ ID NO: 527568 - DNA, 75 bp, synthetic construct
  source 1..75: mol_type = other DNA
aggcactgcgccgttttgagctgatggtgaatgaagtggcacgtcatgccggagcgtcatcacagagtgcagcgg

SEQ ID NO: 527569 - DNA, 75 bp, synthetic construct
  source 1..75: mol_type = other DNA
aatggaataagtcaagcaatctggaactcacagaaatatccacggattcttttaattttacttatggtagattta

SEQ ID NO: 527570 - DNA, 75 bp, synthetic construct
  source 1..75: mol_type = other DNA
gtacgctgaatgattttctcggtgccatgacggaggatgatgttcgtccggaggcactgcgccgttttgagctga

SEQ ID NO: 527571 - DNA, 75 bp, synthetic construct
  source 1..75: mol_type = other DNA
tacaaagtcagttgatgtttcaggcgataacaagtacgtgacaacctcatgtcgttttaaaacagaacgacaggt

SEQ ID NO: 527572 - DNA, 75 bp, synthetic construct
  source 1..75: mol_type = other DNA
cttccttttacggttctttgtgaggtacataagaactggtataaaacgccaaatgcagcgccgcgtgtttttgat

SEQ ID NO: 527573 - DNA, 75 bp, synthetic construct
  source 1..75: mol_type = other DNA
ttcctaaaaaaaccgcgtggagatatgtaactaagaatacaagcattcgttttggtgggcaaacttcaacgggtg

SEQ ID NO: 527574 - DNA, 75 bp, synthetic construct
  source 1..75: mol_type = other DNA
ccgcgacctatatcaataagtccggcgctcttaccattgcagaaattaatgagccacgttttgaaaaagaagggc

SEQ ID NO: 527575 - DNA, 75 bp, synthetic construct
  source 1..75: mol_type = other DNA
gataccgtttaatgactcgatggatatgattacaggatttggcccgggatataaaaaaataacagtgcgcgatga

SEQ ID NO: 527576 - DNA, 75 bp, synthetic construct
  source 1..75: mol_type = other DNA
gactgcagccaaaaaatcagaaaccaacgcgaaaaacagtgagacagccgcaaagacgagcgaaaccaacgcgaa

SEQ ID NO: 527577 - DNA, 75 bp, synthetic construct
  source 1..75: mol_type = other DNA
ccagaccaggtacgctgaatgattttctcggtgccatgacggaagatgatgtcatgccggaggcattgcgtcgtt

SEQ ID NO: 527578 - DNA, 75 bp, synthetic construct
  source 1..75: mol_type = other DNA
gaattgtggaataaaaatccaggcctgaagataagcgagacaaaaaccgattccaggggttttaaatatgcaacg

SEQ ID NO: 527579 - DNA, 75 bp, synthetic construct
  source 1..75: mol_type = other DNA
cgctcttaccattgcagaaattaatgagccacgttttgaaaaagaagggctgttaattgaagggcagagaacaaa

SEQ ID NO: 527580 - DNA, 75 bp, synthetic construct
  source 1..75: mol_type = other DNA
ctggcacgctgaatgattttctcggggccatgacggaagaagatgtcatgccggaggcattgcgtcgttttgagg

SEQ ID NO: 527581 - DNA, 75 bp, synthetic construct
  source 1..75: mol_type = other DNA
aaatccggatgaagccgggcgttacagcatggacgttgagtatggccagtacagcgttatcctgctggttgaagg

SEQ ID NO: 527582 - DNA, 75 bp, synthetic construct
  source 1..75: mol_type = other DNA
accatttaacgattcgctggatatgattacgggcttttcgccgtcatataaaaaaattgttattggtgacgatga

SEQ ID NO: 527583 - DNA, 75 bp, synthetic construct
  source 1..75: mol_type = other DNA
taaggctgacggcatgacatgctcatttgcaaataagaatataagcactgaaaccaaaacagtatggaaatatat

SEQ ID NO: 527584 - DNA, 75 bp, synthetic construct
  source 1..75: mol_type = other DNA
cgggcacgctgaatgattttctcggggccatgacggaagatgatgtcatgccggaggcattgcgtcgttttgagg

SEQ ID NO: 527585 - DNA, 75 bp, synthetic construct
  source 1..75: mol_type = other DNA
cgggcacgctgaatgattttctcggtgccatgacggaagaagatgtcatgccggaggcattgcgtcgttttgagg

SEQ ID NO: 527586 - DNA, 75 bp, synthetic construct
  source 1..75: mol_type = other DNA
cggcatcgtccaggaacgcggcgaaaacatcagagacgaatgcaggtaacagcgcgaaagcggcagcttcttcaa

SEQ ID NO: 527587 - DNA, 75 bp, synthetic construct
  source 1..75: mol_type = other DNA
attaaaaccagaaatggtagggcaaatttcagcgattaacatagtaaccgtttccggcagtaaaggttttgatgt

SEQ ID NO: 527588 - DNA, 75 bp, synthetic construct
  source 1..75: mol_type = other DNA
ggaaggataagaccacaggctggatttttgcagaggcaacgattcaggcaattgatggtgagttaaaaataggct

SEQ ID NO: 527589 - DNA, 75 bp, synthetic construct
  source 1..75: mol_type = other DNA
acgtatacggtttgataagtatgatggtagtgcaacaacttttcttggcgatgcgtacattgatacgcaaacgct

SEQ ID NO: 527590 - DNA, 75 bp, synthetic construct
  source 1..75: mol_type = other DNA
tggtgcagatgctggacgcgttaatagttacctggtaacgaaagagagaaagttcgttgctggatttagaattac

SEQ ID NO: 527591 - DNA, 75 bp, synthetic construct
  source 1..75: mol_type = other DNA
gtaactgatacaactgcaagcacccgcgcaagcgatatagttacagttccaattaagaataatctttatagtctt

SEQ ID NO: 527592 - DNA, 75 bp, synthetic construct
  source 1..75: mol_type = other DNA
agatggtggaagaagcggcacgcaacgctgaagccgcctctcagagcgcagcggcggcaaagaaatccgaaactg

SEQ ID NO: 527593 - DNA, 75 bp, synthetic construct
  source 1..75: mol_type = other DNA
catcggcagcaagccagacggcagcaaaagcaagtgaagatgctgccagagaatacgcaaaccagacagcagagc

SEQ ID NO: 527594 - DNA, 75 bp, synthetic construct
  source 1..75: mol_type = other DNA
cacaaaggccagcgaaaaaaacgcaaaatccagccagacggcagcgaaaaccagtgagacgaatgccaaagacag

SEQ ID NO: 527595 - DNA, 75 bp, synthetic construct
  source 1..75: mol_type = other DNA
gcgaaaacctcagaaacgaatgcagctaacagcgcacaggcggcagcggcctcgcagactgcatcggcaaactcc

SEQ ID NO: 527596 - DNA, 75 bp, synthetic construct
  source 1..75: mol_type = other DNA
agaaaatcaccagtccggaggcccatttattatggggtttggttcttctggaactatcagtcaggacggttattc

SEQ ID NO: 527597 - DNA, 75 bp, synthetic construct
  source 1..75: mol_type = other DNA
cgcaaagtccagccagacggcagcgaagaccagcgaaacgaatgccaaagccagcgaaactgcggcaaaaaacag

SEQ ID NO: 527598 - DNA, 75 bp, synthetic construct
  source 1..75: mol_type = other DNA
ttttccgccttcacatgccgggatcattaccgtctatgaaggttccagaccaggtacgctgaatgattttctcgg

SEQ ID NO: 527599 - DNA, 75 bp, synthetic construct
  source 1..75: mol_type = other DNA
tatccaaggtgcttagtgttatcgagcaccatctggaaccgacgttgcttgccgtacatttgtacggctccgcag

SEQ ID NO: 527600 - DNA, 75 bp, synthetic construct
  source 1..75: mol_type = other DNA
gtcgtgtacggcgatgttgttccttggcgttatccagccagacgggaactgcaattcggggagtggcagcgcaag

SEQ ID NO: 527601 - DNA, 75 bp, synthetic construct
  source 1..75: mol_type = other DNA
gcccgtcttacttgaagctaagcaagcttatctgggacaaaaagagatcacttggcctcacgcgcagatcacttg

SEQ ID NO: 527602 - DNA, 75 bp, synthetic construct
  source 1..75: mol_type = other DNA
gagtttgtgaaaaaacaaccacactccaacagattacagtggagtctggccagtaaaaaatggaagaccagcatc

SEQ ID NO: 527603 - DNA, 75 bp, synthetic construct
  source 1..75: mol_type = other DNA
taattgaatatcaatggcagtatattgacagccatcaccttaagatcgccaattcaatccgaaagctttttctgg

SEQ ID NO: 527604 - DNA, 75 bp, synthetic construct
  source 1..75: mol_type = other DNA
agatggtgactgttcagcttgagcaaaaagatggtgatatttccatccttgagcttaacgtgaccttgccggaag

SEQ ID NO: 527605 - DNA, 75 bp, synthetic construct
  source 1..75: mol_type = other DNA
ttcaacatgagcattacttgtttgaaggcgaacaaggcaaacgcgacagcatcattgttgtcgcacagctttgcc

SEQ ID NO: 527606 - DNA, 75 bp, synthetic construct
  source 1..75: mol_type = other DNA
caaaagaggcaccatacgctatggttatgcaggttaccgtcagctggtggcgaaaacgggtatgtcagatgcgaa

SEQ ID NO: 527607 - DNA, 75 bp, synthetic construct
  source 1..75: mol_type = other DNA
aggtgaacgaggcaaacgcgacagcattattgttgtcgcacagctttgccctgaattcactgcccgcctggtaga

SEQ ID NO: 527608 - DNA, 75 bp, synthetic construct
  source 1..75: mol_type = other DNA
gccgtaaagcttgatgaaacgacgcggcgagcattgctcaatgaccttatggaggcttcggctttccctggcgag

SEQ ID NO: 527609 - DNA, 75 bp, synthetic construct
  source 1..75: mol_type = other DNA
tcggatctgcgatcgatggagggctgaagccggacagcgacatagacttgctcgtgaccgtcagcgccgcaccta

SEQ ID NO: 527610 - DNA, 75 bp, synthetic construct
  source 1..75: mol_type = other DNA
cggacggaacagcgggacgcaatttccgcgaaaacaagtctcgtcttattgaaggggaagactacttcgaattag

SEQ ID NO: 527611 - DNA, 75 bp, synthetic construct
  source 1..75: mol_type = other DNA
cgatgttccataatcagggcaacccggtttttgattatgtctggaacacggtgcgtcgtcgctttggcggtcgtc

SEQ ID NO: 527612 - DNA, 75 bp, synthetic construct
  source 1..75: mol_type = other DNA
accatctcaaccctgttttttgccgatccggagttaaccccggacagtttcagcattcttaatactacaccggaa

SEQ ID NO: 527613 - DNA, 75 bp, synthetic construct
  source 1..75: mol_type = other DNA
tggcgctggggctgaaattcatcccggaaaaaatgatcaacagcttccagatcttcgccaaattcctcgttgcat

SEQ ID NO: 527614 - DNA, 75 bp, synthetic construct
  source 1..75: mol_type = other DNA
catcaactgtgccttcgccgtttccgctgctttcgccctgggcgaccacttaggcttcgccgctgccaacatgaa

SEQ ID NO: 527615 - DNA, 75 bp, synthetic construct
  source 1..75: mol_type = other DNA
gaactgatccccggtctggatccgatcttcatggcccctggcgacaaacccggcgaagtgatgcgtgccattgaa

SEQ ID NO: 527616 - DNA, 75 bp, synthetic construct
  source 1..75: mol_type = other DNA
cgatgccattccagtactgctcgagtggctggataaccatcaaacaagtgcttcctggcagtctgtccggttagc

SEQ ID NO: 527617 - DNA, 75 bp, synthetic construct
  source 1..75: mol_type = other DNA
taatcaccctcggtcttgccgctgcggtggtgaaattcctgcttggctgggaactgatccccggtcttgatccca

SEQ ID NO: 527618 - DNA, 75 bp, synthetic construct
  source 1..75: mol_type = other DNA
tggctgtattgccggtggtctggtggctatgtattccggtgtgcagatcaacggtcagccagtggaattcacctt

SEQ ID NO: 527619 - DNA, 75 bp, synthetic construct
  source 1..75: mol_type = other DNA
aggatccggcggtcagttcgaagaaggctttatggcaatgggcgcactgggcctggcgatggtcggtatgaccgc

SEQ ID NO: 527620 - DNA, 75 bp, synthetic construct
  source 1..75: mol_type = other DNA
gattttctagcgcgtatgtattcgaaggtgaacgaggcaaacgcgacagcattattgttgtcgcacagctttgcc

SEQ ID NO: 527621 - DNA, 75 bp, synthetic construct
  source 1..75: mol_type = other DNA
atacagagagcatgattggtgcgatggttcaatacgctcctgtaaaaggttcaggtacagcatctggagactatc

SEQ ID NO: 527622 - DNA, 75 bp, synthetic construct
  source 1..75: mol_type = other DNA
cgaaacagcggctgcgaactcagcgaaagcatcggcagcaagccagacggcagctaaagcaagcgaagatgcagc

SEQ ID NO: 527623 - DNA, 75 bp, synthetic construct
  source 1..75: mol_type = other DNA
atgcttgctggcttttcgcctggttataagcaaataactgtaggtgatgatgttattaaaatgccatccgataag

SEQ ID NO: 527624 - DNA, 75 bp, synthetic construct
  source 1..75: mol_type = other DNA
tattcaatacccttgatgattatcgattaagaactgatgccccggaattccgagcagctatagagtctgctattc

SEQ ID NO: 527625 - DNA, 75 bp, synthetic construct
  source 1..75: mol_type = other DNA
acattaataaatctggtgtgctgacagaggctgccattgacgagccacgatttgaacgtgatggcctgcttattg

SEQ ID NO: 527626 - DNA, 75 bp, synthetic construct
  source 1..75: mol_type = other DNA
taagaaacaatattcaccgattaccattcagtgctcttgttgaagttaataaaaactgggatatccctcccagca

SEQ ID NO: 527627 - DNA, 75 bp, synthetic construct
  source 1..75: mol_type = other DNA
atatatgtggttcagaccgacgaataaatgaaaatgccgggctggaaaaaatgcttattggtatgcgggtaaagt

SEQ ID NO: 527628 - DNA, 75 bp, synthetic construct
  source 1..75: mol_type = other DNA
ttccttttacggttctttgtgaggtacataagaactggtataaaacgccaaatgcagcaccgcgtgttttttaaa

SEQ ID NO: 527629 - DNA, 75 bp, synthetic construct
  source 1..75: mol_type = other DNA
tccgccttcacatgccggaaccattaccgtctatgaaggttccagaccaggtacgctgaatgattttctcggcgc

SEQ ID NO: 527630 - DNA, 75 bp, synthetic construct
  source 1..75: mol_type = other DNA
taattgaagggcagagaacaaattacttcacaaactcaaacgctccggaattgtggaataaaaatccaggcctga

SEQ ID NO: 527631 - DNA, 75 bp, synthetic construct
  source 1..75: mol_type = other DNA
ttactttgaaacaacatataccgccgcagagaatattgacgaagtggtatgcggtttttttataaccaatcctga

SEQ ID NO: 527632 - DNA, 75 bp, synthetic construct
  source 1..75: mol_type = other DNA
gttcatcaggtgggtacgacggttttccgtattgtgatataggtggttcagaccgacgaataaatgaaaatgccg

SEQ ID NO: 527633 - DNA, 75 bp, synthetic construct
  source 1..75: mol_type = other DNA
agataatttcgatcttcattatatttcaaaagaggctaccaaattacttggtgctatgctgcagttggttatgcc

SEQ ID NO: 527634 - DNA, 75 bp, synthetic construct
  source 1..75: mol_type = other DNA
gattacattgacgcggtgacggcagcagataccagcaccgcgccggatgttatctggcctgaactgccggaggcg

SEQ ID NO: 527635 - DNA, 75 bp, synthetic construct
  source 1..75: mol_type = other DNA
ggccttctccggcacctgccagagcgccgactgcaccatcgtgctcgacgcgcgactgccgcgcacccttgccgg

SEQ ID NO: 527636 - DNA, 75 bp, synthetic construct
  source 1..75: mol_type = other DNA
gctggcgattaccgtgctttgtggtagtgcgacggcggtagttggcccgattgcctttattggcctgatgatgcc

SEQ ID NO: 527637 - DNA, 75 bp, synthetic construct
  source 1..75: mol_type = other DNA
atgaacaccgcaatttttaacggcaaagcatccatgaccagcgttgaaattgcagagctggtgggtaaacgtcat

SEQ ID NO: 527638 - DNA, 75 bp, synthetic construct
  source 1..75: mol_type = other DNA
taaaagtatccccgggtatgcgggtaagctttgaagctgtcaatgactacggagcaatcatgaagaaaacagcaa

SEQ ID NO: 527639 - DNA, 75 bp, synthetic construct
  source 1..75: mol_type = other DNA
agtctgattcagctgaaattacaggccgggcggaaactgacgcaggcagaaacaacccggcttaacgctgtgctg

SEQ ID NO: 527640 - DNA, 75 bp, synthetic construct
  source 1..75: mol_type = other DNA
agatggtggtttttcttctgattcgtcattaacaatgactacgccgcaaattgaaaaagggccatgcgcttcatc

SEQ ID NO: 527641 - DNA, 75 bp, synthetic construct
  source 1..75: mol_type = other DNA
agtgaaactaacgcaaagtccagccagacggcagcgaagaccagcgaaacgaatgccaaagccagcgaaactgcg

SEQ ID NO: 527642 - DNA, 75 bp, synthetic construct
  source 1..75: mol_type = other DNA
accagcgaaacgaatgccaaagccagtgaaactgcggcaaaaaacagccaggttgcagcagcccaaagcgagagc

SEQ ID NO: 527643 - DNA, 75 bp, synthetic construct
  source 1..75: mol_type = other DNA
catcagatttataaacttagtcaagaattacaagaggttagggctttagctcaggggctggtaagttctgggcag

SEQ ID NO: 527644 - DNA, 75 bp, synthetic construct
  source 1..75: mol_type = other DNA
cggtgaggctactaaaactatgaaaacggagtggacgggcgtaaaaacacggacctttattcgaattggaggtca

SEQ ID NO: 527645 - DNA, 75 bp, synthetic construct
  source 1..75: mol_type = other DNA
ccagacggcagcgaagaccagcgaaacgaatgccaaagccagtgaaactgcggcgaaaagcagtcaggatgcagc

SEQ ID NO: 527646 - DNA, 75 bp, synthetic construct
  source 1..75: mol_type = other DNA
cttgggagcaaccttcaatacccggacagtgaccaatgctatgctggtagggaatggcgaaacggtggtggtcgg

SEQ ID NO: 527647 - DNA, 75 bp, synthetic construct
  source 1..75: mol_type = other DNA
gggcgcgtgccgggagccatgcgaaaacgcttatcgtaatctgtattacgcccagggttttacaattaaacagcg

SEQ ID NO: 527648 - DNA, 75 bp, synthetic construct
  source 1..75: mol_type = other DNA
gaacgtaaaacggtagggatcaaactgaaggtaaaaccccaaattaacgaaggtgattcggtattactggagata

SEQ ID NO: 527649 - DNA, 75 bp, synthetic construct
  source 1..75: mol_type = other DNA
agccctgttcccgtatcttcaggaaaaacgaatcgttatcgacttaaccggggtggagatcgtgctgcaaatagt

SEQ ID NO: 527650 - DNA, 75 bp, synthetic construct
  source 1..75: mol_type = other DNA
ttgttcaggaaatggttgaacgggcgcttgtcggtatttgtattcacgacagtatttctgagtgccattccggga

SEQ ID NO: 527651 - DNA, 75 bp, synthetic construct
  source 1..75: mol_type = other DNA
gcccctgacgtcatccgcgaccttgaaaatgtgatttcgcagttggatattcgtcgtcctcaggtcctggtggag

SEQ ID NO: 527652 - DNA, 75 bp, synthetic construct
  source 1..75: mol_type = other DNA
ggataaccggtacgccaacggggttcagtgagctggatgaaaaaacctgtggtttgcaggcaggcgatttggtgt

SEQ ID NO: 527653 - DNA, 75 bp, synthetic construct
  source 1..75: mol_type = other DNA
gtacgggtcaggttcgacggtcgttacacactgtttacgccctctgagaatgacgggccgggaggatatgcgtga

SEQ ID NO: 527654 - DNA, 75 bp, synthetic construct
  source 1..75: mol_type = other DNA
tctgtttgcacttgcgcagaacaggacgctccgggagcgcacggaagcctctctttcatccgcgctcgatacggt

SEQ ID NO: 527655 - DNA, 75 bp, synthetic construct
  source 1..75: mol_type = other DNA
agggcgggcgggatgacgggcaccccaacggggtttgatgaactggatgagatgacctgtggcctgcagcccggg

SEQ ID NO: 527656 - DNA, 75 bp, synthetic construct
  source 1..75: mol_type = other DNA
gcactggcgaaagaactcgggtgtccggtggtggccctttcccagctaaaccggcaactggagcaacgtgcggat

SEQ ID NO: 527657 - DNA, 75 bp, synthetic construct
  source 1..75: mol_type = other DNA
tgcgtctctggaagaaaatgactgggagtgtcttggtggtgccatgtcacagattgccgaatggggggagcgtct

SEQ ID NO: 527658 - DNA, 75 bp, synthetic construct
  source 1..75: mol_type = other DNA
ggtacagcgactggacagcatcagtgcgccggtgatgtgccatcagtgtgaaaacgccccttgtgttggcgcttg

SEQ ID NO: 527659 - DNA, 75 bp, synthetic construct
  source 1..75: mol_type = other DNA
ttctggacccgcgcgttgggaaggaatttccgctcccgacttatgccacctctggctctgccggacttgacctgc

SEQ ID NO: 527660 - DNA, 75 bp, synthetic construct
  source 1..75: mol_type = other DNA
attttcatcgtgccaacgccgcgattgcggcaggacaattggcggtagaaaagaaaatggatgaacttttaccgc

SEQ ID NO: 527661 - DNA, 75 bp, synthetic construct
  source 1..75: mol_type = other DNA
gacagcgacagaaattatgactacctcaatccaggtgctggaaaaccgcctcaaacgaaaccgcatggctggaga

SEQ ID NO: 527662 - DNA, 75 bp, synthetic construct
  source 1..75: mol_type = other DNA
aaaacagtttatttaacaccccacaaattagactatatgaaaaagaaagtttgatagagtataaaatccagtaca

SEQ ID NO: 527663 - DNA, 75 bp, synthetic construct
  source 1..75: mol_type = other DNA
gaaggtcaggcgatgtctgaagtaaaaggaaccatgttgacgcttcagggatctgcaatgacacagataaaaggt

SEQ ID NO: 527664 - DNA, 75 bp, synthetic construct
  source 1..75: mol_type = other DNA
gtgccgaccggactggcgattcatattgccgacccttcactggcggcgatgatgctgccgcgctccgggctgggc

SEQ ID NO: 527665 - DNA, 75 bp, synthetic construct
  source 1..75: mol_type = other DNA
cgacgcaggctttgcagttgctgaccgagagagaactcaagcgagttcgccagcagcgtattgcagccagcggtg

SEQ ID NO: 527666 - DNA, 75 bp, synthetic construct
  source 1..75: mol_type = other DNA
gctccggtgatgtgccatcagtgcgaaaacgcgccgtgtgtaagggcttgcccggtacatgcgctgacgatgggg

SEQ ID NO: 527667 - DNA, 75 bp, synthetic construct
  source 1..75: mol_type = other DNA
gagcaggtggtgcaggccaattctgcccgttgtattggctgtcagagttgcgtcagtgcgtgcccgtttgggatg

SEQ ID NO: 527668 - DNA, 75 bp, synthetic construct
  source 1..75: mol_type = other DNA
cgacacgtcgggcggtgacagcgccaacggcaacagagattatgaccacttctatccaggtgctggagaaccgcc

SEQ ID NO: 527669 - DNA, 75 bp, synthetic construct
  source 1..75: mol_type = other DNA
gcaggatgttcaatcggttcactcgtgggcgcagcctatgcatgtgatcgcttatccgcgctggaagagtgggta

SEQ ID NO: 527670 - DNA, 75 bp, synthetic construct
  source 1..75: mol_type = other DNA
gcgcggtgggttactgcgcggcgagcgtgtcttcaatcaataccgcgaaataatgccggaaacagagatcgaaaa

SEQ ID NO: 527671 - DNA, 75 bp, synthetic construct
  source 1..75: mol_type = other DNA
ccgctattgtcctcggactggggatcagcgcctgtggttatttcgttggcgatggagttaagcatttaaaaacta

SEQ ID NO: 527672 - DNA, 75 bp, synthetic construct
  source 1..75: mol_type = other DNA
atgcaatacgatgaattccaggctgaagcaacagccaatggtatacgaactggcagtatgacgattgattatcac

SEQ ID NO: 527673 - DNA, 75 bp, synthetic construct
  source 1..75: mol_type = other DNA
ttttcaaccaataatacggtgatttcagatgcgttgattgaatttagcggccagtacacctttggagacacccat

SEQ ID NO: 527674 - DNA, 75 bp, synthetic construct
  source 1..75: mol_type = other DNA
atcaaagacatggggggtctgccggacgctctgtttgtaatcgatgctgaccacgaacacattgctatcaaagaa

SEQ ID NO: 527675 - DNA, 75 bp, synthetic construct
  source 1..75: mol_type = other DNA
gctgccaataaccgggcgttcgcagagcgtcttattggcgtttacagactagccaaagcaggagtgaagaatggg

SEQ ID NO: 527676 - DNA, 75 bp, synthetic construct
  source 1..75: mol_type = other DNA
atcgagtatatccaggaaaatccagattgcagtagagaagatatatccctcgcacttggaagaagcgcaacttct

SEQ ID NO: 527677 - DNA, 75 bp, synthetic construct
  source 1..75: mol_type = other DNA
tatgacgatatatcccggccccattcggtttgccttacagcagtatattgaatggaatttaattcaaaaatacgg

SEQ ID NO: 527678 - DNA, 75 bp, synthetic construct
  source 1..75: mol_type = other DNA
cgcaggatgatctcgattttccaaatggtggtcgtacgattcgaattgttccgatcattatggggagtaagcgtg

SEQ ID NO: 527679 - DNA, 75 bp, synthetic construct
  source 1..75: mol_type = other DNA
ctgtttgatgacgtggttaagttgtttgaatttgatacaaccactcaaaagttagaaatcccggcaaaggaggca

SEQ ID NO: 527680 - DNA, 75 bp, synthetic construct
  source 1..75: mol_type = other DNA
atgacgatcacaaaacaacgggtagaagaaatcatatcccgcattgaaatgtatgggcatggtgccgggtatacc

SEQ ID NO: 527681 - DNA, 75 bp, synthetic construct
  source 1..75: mol_type = other DNA
aaggcaaaagcaaaactggctaatgataaaagtgggaagctggtacccctgtccaatgcggccaaaaaccgtaca

SEQ ID NO: 527682 - DNA, 75 bp, synthetic construct
  source 1..75: mol_type = other DNA
caggtttccgtattttacggggaatgacgttgccagtttggcaaccctgacagaagtcgggcgggatattcttgc

SEQ ID NO: 527683 - DNA, 75 bp, synthetic construct
  source 1..75: mol_type = other DNA
gtctgtggttctggcaacccgcaaatatgtggatgataaaatctcagagcacgaacagtcacgacgtcacccgga

SEQ ID NO: 527684 - DNA, 75 bp, synthetic construct
  source 1..75: mol_type = other DNA
gccgcagcaaataacatggcgttcgcagagcgccttgttggtgtttacagactagccaaagcaggagtgaagcat

SEQ ID NO: 527685 - DNA, 75 bp, synthetic construct
  source 1..75: mol_type = other DNA
agacgctgatcacgcggattcctctggagaaggcgatgaagatcacaagatacccgaatcgttagataatcacat

SEQ ID NO: 527686 - DNA, 75 bp, synthetic construct
  source 1..75: mol_type = other DNA
agctaagatcctcaaagacactgaaagtgaaagcaaaggtaaggagtcagctccgggaaaaacttccgatccttc

SEQ ID NO: 527687 - DNA, 75 bp, synthetic construct
  source 1..75: mol_type = other DNA
tgtgcgcggatttctcgatcatgaggttgctcacattttgtttaccgatattcgtgtgtccaacaaaatgagaga

SEQ ID NO: 527688 - DNA, 75 bp, synthetic construct
  source 1..75: mol_type = other DNA
gataccgcagaattaaacattgccattacacaaaaaggcaatgttccgacagagctttttcctaaactggaagac

SEQ ID NO: 527689 - DNA, 75 bp, synthetic construct
  source 1..75: mol_type = other DNA
agcaagcgaacagattccttttatctgaaagatgatcccacaatgccacgctataacgcagacgggtcagtgacg

SEQ ID NO: 527690 - DNA, 75 bp, synthetic construct
  source 1..75: mol_type = other DNA
tataccatcgccgatgcccttgatcgaataaatgttcccaacattatcaccggcttcactacatttggtagtcat

SEQ ID NO: 527691 - DNA, 75 bp, synthetic construct
  source 1..75: mol_type = other DNA
tttataaatgcaaactcgaaaattctgcaagtttaaatacattattaaaatgtgaatcaaatgaatttataaagg

SEQ ID NO: 527692 - DNA, 75 bp, synthetic construct
  source 1..75: mol_type = other DNA
ttcccggagcgtagatactgttatggcctgcaagttttttcctggtccggtttcccggattgcaggcatgccaga

SEQ ID NO: 527693 - DNA, 75 bp, synthetic construct
  source 1..75: mol_type = other DNA
ttacctgctgacgctctctaactgcgtgaagtggttcccggagcgtaggtctgatatccgcgttcgctatcggtt

SEQ ID NO: 527694 - DNA, 75 bp, synthetic construct
  source 1..75: mol_type = other DNA
gatcttatccttctggcagcacgtccgtcgatggggaaaacggcccttggactcactctgtgtcttaatgccctg

SEQ ID NO: 527695 - DNA, 75 bp, synthetic construct
  source 1..75: mol_type = other DNA
ttctttaaatactttggcgcggtcagtgtcattggtgtattatcattatttggtattgtaggattaacaattttt

SEQ ID NO: 527696 - DNA, 75 bp, synthetic construct
  source 1..75: mol_type = other DNA
agcatttaaatataaaacttttctgtcctatattaaaaacaaaacgtggtgtcatttgttctccattgtcatata

SEQ ID NO: 527697 - DNA, 75 bp, synthetic construct
  source 1..75: mol_type = other DNA
tggggcagacctttgcccgctggatgcagttatttcctaacattgcccgtgtgattggttatgcgtcgatggcac

SEQ ID NO: 527698 - DNA, 75 bp, synthetic construct
  source 1..75: mol_type = other DNA
ccgatgttgaatcgcctggcagatatggggcagacctttgcacgctggatgcagttgtttcccaacattgcccgc

SEQ ID NO: 527699 - DNA, 75 bp, synthetic construct
  source 1..75: mol_type = other DNA
ccgtgctgggacagctgaaccgcacactgggatcggaagccagcagcgcgtatgaaggctttatgaccggcgcaa

SEQ ID NO: 527700 - DNA, 75 bp, synthetic construct
  source 1..75: mol_type = other DNA
cggcaattgaaatgtatgacgcgctgaatgatgccgccgcaaaagggattgatgattccgcgcttaagaccgttc

SEQ ID NO: 527701 - DNA, 75 bp, synthetic construct
  source 1..75: mol_type = other DNA
cgcaaggtcttcggtaccgaaatgggtaccatcaaagacctgatggaaggggcgcgaggtgtcgggactaactac

SEQ ID NO: 527702 - DNA, 75 bp, synthetic construct
  source 1..75: mol_type = other DNA
gataacagccgtaaaattggtgaagtgcattttcatactaaagaagcgctttcaccctcccagctaatggaatgg

SEQ ID NO: 527703 - DNA, 75 bp, synthetic construct
  source 1..75: mol_type = other DNA
gaccgccaacggcattgaactgccggatgtggaaggggccgtggtgtccggtaccgccagtggtgactggacgct

SEQ ID NO: 527704 - DNA, 75 bp, synthetic construct
  source 1..75: mol_type = other DNA
catcaccagcagtgggccgcactgtatcgcctggtagacaccacttccttcagcgaagaaaaaacgctgcccttt

SEQ ID NO: 527705 - DNA, 75 bp, synthetic construct
  source 1..75: mol_type = other DNA
tcgccacatcaccccgcctccgccagctttgctgggcagtctggttgctggtgttagttacgctcatttttctgt

SEQ ID NO: 527706 - DNA, 75 bp, synthetic construct
  source 1..75: mol_type = other DNA
acgggaggggaattaaaagggattgataagggcggcattaataaagcaatcagcagtaattctaaatcggtgaca

SEQ ID NO: 527707 - DNA, 75 bp, synthetic construct
  source 1..75: mol_type = other DNA
ctccgcctgggaatttatcagtgcgggctggaatgcctttatttctctgctgaccgggttttctccgtctcaggc

SEQ ID NO: 527708 - DNA, 75 bp, synthetic construct
  source 1..75: mol_type = other DNA
cgcggaacggatgtgtccggtcagatgaacgatgccgtggcaggactgcagaaaagttatgaggagaaacagcgc

SEQ ID NO: 527709 - DNA, 75 bp, synthetic construct
  source 1..75: mol_type = other DNA
acagccgttatggcgtcggaaaagataccgtctggagcctggcaaagcaggtgcgcgaagatgccgcccgcgatc

SEQ ID NO: 527710 - DNA, 75 bp, synthetic construct
  source 1..75: mol_type = other DNA
atgcttgaggggatccctgtggggagttctaacttcggcaaacaaatagagtacatgtatgtcaacgggtatgac

SEQ ID NO: 527711 - DNA, 75 bp, synthetic construct
  source 1..75: mol_type = other DNA
atgaaaacgctaacggtattcgacccagcgatgtgttgtagcaccggtgtctgcggtactgatgtcgatcaggct

SEQ ID NO: 527712 - DNA, 75 bp, synthetic construct
  source 1..75: mol_type = other DNA
aatggctgaaagggcgtggagttcagatcgatcgttacaacctggcgcaacagccgatgagctttgttcagaatg

SEQ ID NO: 527713 - DNA, 75 bp, synthetic construct
  source 1..75: mol_type = other DNA
gatgcccctggcccatacaaaactggttatgcaatttgccgttctgaagattttaactcgtggatatatgtgcca

SEQ ID NO: 527714 - DNA, 75 bp, synthetic construct
  source 1..75: mol_type = other DNA
atcatggtcctgaatacagtgaatttgctgattttttgcgacctataaagcgacattaccaatcattggacgtct

SEQ ID NO: 527715 - DNA, 75 bp, synthetic construct
  source 1..75: mol_type = other DNA
gtggcgcgaggaagcctataccctcgatgaactggctgattatttgagcgcctcagcgcgtcgtagcatcgataa

SEQ ID NO: 527716 - DNA, 75 bp, synthetic construct
  source 1..75: mol_type = other DNA
acttcacgccggaaactttcgcacagtatgtggctgatacgcacacattaacgtacgttttcgttccattggccc

SEQ ID NO: 527717 - DNA, 75 bp, synthetic construct
  source 1..75: mol_type = other DNA
cttctgctgaagaataaagaaagtggacttttggctcaggcccggactaagggaagcccacgtcgatttgtgtta

SEQ ID NO: 527718 - DNA, 75 bp, synthetic construct
  source 1..75: mol_type = other DNA
atctggagcagaaggtcttccgttactgctattggacggtgaaacggtgatggcagggcgatacccaaaacgcgc

SEQ ID NO: 527719 - DNA, 75 bp, synthetic construct
  source 1..75: mol_type = other DNA
aggaaaaaaccgcggaaaaatcagcaaacatgccgcaaccggcgcatgcacggaccacctggactcttgcccgcg

SEQ ID NO: 527720 - DNA, 75 bp, synthetic construct
  source 1..75: mol_type = other DNA
ccctttgacgcctcggctgagggcacctgggccggtaacggtctcggctgcgtggtgctgcgtcgcctgagagac

SEQ ID NO: 527721 - DNA, 75 bp, synthetic construct
  source 1..75: mol_type = other DNA
gctgcggacgctgattggcaccatgaaaacggtgcgtgaccgtcaggcggagctgattgcacaaaatgagaaact

SEQ ID NO: 527722 - DNA, 75 bp, synthetic construct
  source 1..75: mol_type = other DNA
attatgaacatcttaataaatcttttaaaacatattctcctgtatctgacgatttttataaacaccaggataaac

SEQ ID NO: 527723 - DNA, 75 bp, synthetic construct
  source 1..75: mol_type = other DNA
ttaaatccagtaagggaatttatgaagacattatccctgaaggaaaacgtgagttgataaaagaacgttctgaag

SEQ ID NO: 527724 - DNA, 75 bp, synthetic construct
  source 1..75: mol_type = other DNA
tactatttctttgttcacaataaagaccagcatattatgactttagcagataatcctgcgtctcatcctaaagca

SEQ ID NO: 527725 - DNA, 75 bp, synthetic construct
  source 1..75: mol_type = other DNA
ttattatcaaagaaggtgacctgaataatgatatacatggtaatgttgatataaaggtttcagatgggaattata

SEQ ID NO: 527726 - DNA, 75 bp, synthetic construct
  source 1..75: mol_type = other DNA
gtttattccacgtattggcagtgaggttctggtgagttttatacagggcaatcctgactatccagttattgtggg

SEQ ID NO: 527727 - DNA, 75 bp, synthetic construct
  source 1..75: mol_type = other DNA
gtccagggtgaagcccccgttattcccggtgttttactggcaagagtggtgggtcctgactccgaagaatattat

SEQ ID NO: 527728 - DNA, 75 bp, synthetic construct
  source 1..75: mol_type = other DNA
cggatgtaaaacccagtaagggagtttatgaagatattatcccagagagaaagcgtgagttgataaagaaacgtt

SEQ ID NO: 527729 - DNA, 75 bp, synthetic construct
  source 1..75: mol_type = other DNA
tcttctggtgattgtctccttacagtaaagaaggatatgatcagcaatattaaccactccatgttattaactatt

SEQ ID NO: 527730 - DNA, 75 bp, synthetic construct
  source 1..75: mol_type = other DNA
gaaaatcttaaatgtccaagtgtaacactttctggttacaatgagggtaatctaagtgagattactataacgtca

SEQ ID NO: 527731 - DNA, 75 bp, synthetic construct
  source 1..75: mol_type = other DNA
aggaccgatcataactctctggatatgttacacggtacgcatctgagttgtgagattggagaacaacacaattcg

SEQ ID NO: 527732 - DNA, 75 bp, synthetic construct
  source 1..75: mol_type = other DNA
ataatgggcgtgtaaaaatcagctttctctggggagaaaagtcagcggcaggtacagataaaacctcctgttggg

SEQ ID NO: 527733 - DNA, 75 bp, synthetic construct
  source 1..75: mol_type = other DNA
tgatttgtgtgcttcagataataaaagctcacttaatttcagccgtgaatttaaaacacctattattcccggtgt

SEQ ID NO: 527734 - DNA, 75 bp, synthetic construct
  source 1..75: mol_type = other DNA
ataaacttgagcacttacctggggaaaccctgaagatatcaaataacggatatatcagtgaatggtctgttacag

SEQ ID NO: 527735 - DNA, 75 bp, synthetic construct
  source 1..75: mol_type = other DNA
cccgccgtgggcgctgctcgatctgctgttgctttttctcgacgtgcttctgctcctggtgctgctgctcgtcgc

SEQ ID NO: 527736 - DNA, 75 bp, synthetic construct
  source 1..75: mol_type = other DNA
caaccgcccgtttcttttccgacaaaggatgtcgccgtgctcctctgtttactgcgccggctgatgcggcgcggc

SEQ ID NO: 527737 - DNA, 75 bp, synthetic construct
  source 1..75: mol_type = other DNA
cggaacttttggcttaacggcgggctggcatctcgatatctggggaaagaatcgggcggaggttactgcccgcct

SEQ ID NO: 527738 - DNA, 75 bp, synthetic construct
  source 1..75: mol_type = other DNA
tgaaccggggcggatggtgaacggacaaccggctaaaccggcgtttccgacctcttttctggaggataacgccat

SEQ ID NO: 527739 - DNA, 75 bp, synthetic construct
  source 1..75: mol_type = other DNA
ttcaagatcctggtcgggcgtgacaacctcacggcaaacggcattgagctgccggatgtggaaggggcgattgtc

SEQ ID NO: 527740 - DNA, 75 bp, synthetic construct
  source 1..75: mol_type = other DNA
agcagcgagccaccacacaggcggtctacacgctgccggaaaattcaacgctgacaggcagtcgtgcgatgacgg

SEQ ID NO: 527741 - DNA, 75 bp, synthetic construct
  source 1..75: mol_type = other DNA
gaaaatcgatgaccataccgtccaggtgcaatggagtgccgacgtcagcccggcgctggcactgaatattctctc

SEQ ID NO: 527742 - DNA, 75 bp, synthetic construct
  source 1..75: mol_type = other DNA
atgcgtgataatgtgcagggttatcaacaaggattgaatgccgatatggtctggtttgatcaggtaaccaaataa

SEQ ID NO: 527743 - DNA, 75 bp, synthetic construct
  source 1..75: mol_type = other DNA
tgattcaatctacatcaacttactgatgcgggtacaactgcgggtatttcccggttcgattatgtttgtacccac

SEQ ID NO: 527744 - DNA, 75 bp, synthetic construct
  source 1..75: mol_type = other DNA
acccaggcggcgttaaacacggtcttgcagcaaatagaaaaagagcagaacaccattatcgcgaccgatcgctag

SEQ ID NO: 527745 - DNA, 75 bp, synthetic construct
  source 1..75: mol_type = other DNA
ggcgatatcattgcacagaaagatgtatggatgcagccaggtggttcagtaaccgtggatatgcctctggatgat

SEQ ID NO: 527746 - DNA, 75 bp, synthetic construct
  source 1..75: mol_type = other DNA
tacccatcaaagtttcctgcccgtgggctttcctggagcactggaagaaacaccgtttacctttaatccagccaa

SEQ ID NO: 527747 - DNA, 75 bp, synthetic construct
  source 1..75: mol_type = other DNA
gctgaccagcatcacccggctgggcggcgcgtttcagtggctggctggttcgcctatgcaggcgctacttactgc

SEQ ID NO: 527748 - DNA, 75 bp, synthetic construct
  source 1..75: mol_type = other DNA
atcacccctgcacttttgcacgaagtgatcgctattttgcatcacgatttgcgcaccaaatttggtattgccgaa

SEQ ID NO: 527749 - DNA, 75 bp, synthetic construct
  source 1..75: mol_type = other DNA
atgatgctggcgaccgaagaacttcgcgtggcgctggcaacgacgcatttaccactgcgcgatatcgcagacgcc

SEQ ID NO: 527750 - DNA, 75 bp, synthetic construct
  source 1..75: mol_type = other DNA
cttttctgcggcagctgtggccgtcattaaattctggcaaccgattaaggcatttttcagcgggttctttaccgg

SEQ ID NO: 527751 - DNA, 75 bp, synthetic construct
  source 1..75: mol_type = other DNA
ggtgcgttccagtggcttgctggctcgcctatgcaggcattgttaagcgccggtcgcatggtattcggcccgctt

SEQ ID NO: 527752 - DNA, 75 bp, synthetic construct
  source 1..75: mol_type = other DNA
tgatccccgatcaggcagagagagccaaaaaagccgttgagcaggtgaacacgcagaagaaacttaccgggctgg

SEQ ID NO: 527753 - DNA, 75 bp, synthetic construct
  source 1..75: mol_type = other DNA
attcccatgccaaactggtgctcgaatcgtatgtatttttctggtgaaccggcacagatcgctgagattaaacga

SEQ ID NO: 527754 - DNA, 75 bp, synthetic construct
  source 1..75: mol_type = other DNA
ggtttgaaccatgccccggactgacggctgccggacgtggtgttgtatcgccggagaatatcgcgttcacacgct

SEQ ID NO: 527755 - DNA, 75 bp, synthetic construct
  source 1..75: mol_type = other DNA
ggctgacgcacctgcagaacggtgtactgctggatgagcaaaactgcctgatgctgcatgaactctggctgcaga

SEQ ID NO: 527756 - DNA, 75 bp, synthetic construct
  source 1..75: mol_type = other DNA
aggtcgggtagttttcgacgccagcaaaccggacggcacgccgcgcaaactgttggatgtgacacgcctgcatca

SEQ ID NO: 527757 - DNA, 75 bp, synthetic construct
  source 1..75: mol_type = other DNA
cggcattgtcgccaacaacacgtatccggcggatttcatctaccagaacatgatgattgagagcaacatcattca

SEQ ID NO: 527758 - DNA, 75 bp, synthetic construct
  source 1..75: mol_type = other DNA
accgcgcaaactgctggatgtgacgcgcctgcatcagcttggctggtatcacgaaatctcactggaagcggggct

SEQ ID NO: 527759 - DNA, 75 bp, synthetic construct
  source 1..75: mol_type = other DNA
aaaatggcgaatgagcaaatagctcgtcaggttgagatggcaaaagtccgcaaccaaatgtatcgcctgttaacg

SEQ ID NO: 527760 - DNA, 75 bp, synthetic construct
  source 1..75: mol_type = other DNA
gttcgctggtgatcctctcctacgtaacgccgtctatttcgctggtgttcgcctggaaatacatgttcaacaacg

SEQ ID NO: 527761 - DNA, 75 bp, synthetic construct
  source 1..75: mol_type = other DNA
aggatacaccggcatgggcgagcctttgccagtgctctatttctatcacggttttggtgataccggacgttccgc

SEQ ID NO: 527762 - DNA, 75 bp, synthetic construct
  source 1..75: mol_type = other DNA
aaccagcaactacgtaattttactgtggttgttggcgataaagatgtcgtaaccggcaaggatatcgccgggctg

SEQ ID NO: 527763 - DNA, 75 bp, synthetic construct
  source 1..75: mol_type = other DNA
tacaaagcttatcagattatagccacattcgttgtgattctgactttgctgatttcatttataatgatcatatta

SEQ ID NO: 527764 - DNA, 75 bp, synthetic construct
  source 1..75: mol_type = other DNA
tgagtgaaaagagtcacggcagagaagaaatccgtcttcatattgtttgcgatgtccctgatgaacttattgatt

SEQ ID NO: 527765 - DNA, 75 bp, synthetic construct
  source 1..75: mol_type = other DNA
cgtcgatcttctgcatctctatgagcaggcaccactgtggttcgataatccgggcagtagctttgtgctggtggt

SEQ ID NO: 527766 - DNA, 75 bp, synthetic construct
  source 1..75: mol_type = other DNA
atttccatcgcgcgcacgctgccattgcggccggacagctggcagtggaaaagaaaatggacgagcttttgccgt

SEQ ID NO: 527767 - DNA, 75 bp, synthetic construct
  source 1..75: mol_type = other DNA
attaagccacgctgctgaagtcggttcaggcgataactggcatccgggtgaagaacttacgcagagccatatgtt

SEQ ID NO: 527768 - DNA, 75 bp, synthetic construct
  source 1..75: mol_type = other DNA
tggcctcaacgctggcagtcagttcattaagccacgctgctgaagtcggttcaggcgataactggcatccgggtg

SEQ ID NO: 527769 - DNA, 75 bp, synthetic construct
  source 1..75: mol_type = other DNA
gcgctggcagggctttcacaaggcgggtaccaggcgctggtttccggaatgaatcatctggaaagctttggctag

SEQ ID NO: 527770 - DNA, 75 bp, synthetic construct
  source 1..75: mol_type = other DNA
agaacccgaaatgatggtcagatattatatcagttctgctgatttaaccgcagagaagttcatcacagcgctccg

SEQ ID NO: 527771 - DNA, 75 bp, synthetic construct
  source 1..75: mol_type = other DNA
gatacggcacatcgctattaatattttgacgaatgataaggtattcaaggcagggttaagacgtaagatgcgaaa

SEQ ID NO: 527772 - DNA, 75 bp, synthetic construct
  source 1..75: mol_type = other DNA
atgccaaactggtgctcgaatcgtatggatttttctggtgaaccggcacagatggctgagattaaacgactggcc

SEQ ID NO: 527773 - DNA, 75 bp, synthetic construct
  source 1..75: mol_type = other DNA
ggcacagatcgctgagattaaacgactggccagcggtgcagtcacaccgttttatcgccgcgccacaaatgaagg

SEQ ID NO: 527774 - DNA, 75 bp, synthetic construct
  source 1..75: mol_type = other DNA
cggtatcccggcatgttcttgtttagatgcaccagttacacataaagctggttatacaatttgccgttcagcaga

SEQ ID NO: 527775 - DNA, 75 bp, synthetic construct
  source 1..75: mol_type = other DNA
gatatggactgaatatcagcagtcagggagaaaacttcattcaggtggattttgatacgccgtggtgtcagccgg

SEQ ID NO: 527776 - DNA, 75 bp, synthetic construct
  source 1..75: mol_type = other DNA
aaagagtcgactggtgcgacttctggaataacgaggatatgtcagcgtggtggaatcgtcagtgtgacaacgtgc

SEQ ID NO: 527777 - DNA, 75 bp, synthetic construct
  source 1..75: mol_type = other DNA
tgtatttttctgccgaaccggcacagattactgagattaaacgactggccagcggtgcagttacaccgctttatc

SEQ ID NO: 527778 - DNA, 75 bp, synthetic construct
  source 1..75: mol_type = other DNA
agtaattcgcatgtgatcccagcattgctgcgtcgcttccacgaggcgacggcacagaatgcgccggacgtggtg

SEQ ID NO: 527779 - DNA, 75 bp, synthetic construct
  source 1..75: mol_type = other DNA
gcaacgcctggtggcactattgtgaaagcgacacctacgtttgatcgcacacgcgcagatgatttgttgctggat

SEQ ID NO: 527780 - DNA, 75 bp, synthetic construct
  source 1..75: mol_type = other DNA
caggatgggaacgcaaatgatggtcacggactgggagccatccctgcttaagcaactcgaacataaattcacggc

SEQ ID NO: 527781 - DNA, 75 bp, synthetic construct
  source 1..75: mol_type = other DNA
gtgcggtttctggcgatgtaaaaaccagtgcaggccgtcgcgatgcgatcagcagcattaattctgtaacacgac

SEQ ID NO: 527782 - DNA, 75 bp, synthetic construct
  source 1..75: mol_type = other DNA
gcacactggaaactaccggcggcacattcggcgagatgtttctgacttccagaggaatgatcagtattcccataa

SEQ ID NO: 527783 - DNA, 75 bp, synthetic construct
  source 1..75: mol_type = other DNA
gccgcgccacaaatgaaggtattcagctgtttctggccggaagtgccggacttctgcagaccactgaagatgtgt

SEQ ID NO: 527784 - DNA, 75 bp, synthetic construct
  source 1..75: mol_type = other DNA
tatggcacggttctaataccagaaagcacactggagactaccggcggcacattcggcgagatgtttctgacttcc

SEQ ID NO: 527785 - DNA, 75 bp, synthetic construct
  source 1..75: mol_type = other DNA
ggggaactggaatggtcttccccgacagatgacgatgagctgccggaagtcaccggacctgcgtggatagtcgac

SEQ ID NO: 527786 - DNA, 75 bp, synthetic construct
  source 1..75: mol_type = other DNA
agatcgctgagattaaacgactggccagcggtgcagtcacaccgctttatcgccgcgccacaaatgaaggtattc

SEQ ID NO: 527787 - DNA, 75 bp, synthetic construct
  source 1..75: mol_type = other DNA
gggagacaacttcattcaggtggatttcgacacgccgtggtgtcagccggaaagcgacgttattgcagaattaag

SEQ ID NO: 527788 - DNA, 75 bp, synthetic construct
  source 1..75: mol_type = other DNA
ttcgacacgccgtggtgtcagccggaaagcgacgttgttgcagcattaagccgccgtttcagttgcacactggag

SEQ ID NO: 527789 - DNA, 75 bp, synthetic construct
  source 1..75: mol_type = other DNA
atgccaaactggtgctcgaatcgtatgcatttttctggtgaaccggcacagatcgctgagattaaacgactggcc

SEQ ID NO: 527790 - DNA, 75 bp, synthetic construct
  source 1..75: mol_type = other DNA
atgccaaactggtgctcgaatcgtatgaatttttctggtgaaccggcacagatagctgagattaaacgactggcc

SEQ ID NO: 527791 - DNA, 75 bp, synthetic construct
  source 1..75: mol_type = other DNA
gcctgatgctgcatgaactctggctgcagagcggtactggacagcgtcgctgggaaggattaccggacgatgtca

SEQ ID NO: 527792 - DNA, 75 bp, synthetic construct
  source 1..75: mol_type = other DNA
gctgccaggcatcagtccttcgccctggcggcagaggaattgtcgctgagccccagtgcggtaagtcaccgtatc

SEQ ID NO: 527793 - DNA, 75 bp, synthetic construct
  source 1..75: mol_type = other DNA
aaccgtgccccggactgacggctgccggacgtggtgttgtatcgccggaaaatatcgcgttcacccgctggctga

SEQ ID NO: 527794 - DNA, 75 bp, synthetic construct
  source 1..75: mol_type = other DNA
ttcattcaggttgatttcgacacgccgtggtgtcagccggaaagcgacgttattgcagaattaagccgccgtttc

SEQ ID NO: 527795 - DNA, 75 bp, synthetic construct
  source 1..75: mol_type = other DNA
ccgacagatgatgatgagctgccggaagtcaccgcgccggagtggatagtcgacaaggtggcgcattacggggga

SEQ ID NO: 527796 - DNA, 75 bp, synthetic construct
  source 1..75: mol_type = other DNA
agtctgattcaactgaaattacaggccggacgtaatctgacgcagtcagaaaccagccgacttaacacggtgctg

SEQ ID NO: 527797 - DNA, 75 bp, synthetic construct
  source 1..75: mol_type = other DNA
atggccagctttaacaatgaggtattggtttttttggcaattgaaaaagccagaggaatcaatagcacgacgccc

SEQ ID NO: 527798 - DNA, 75 bp, synthetic construct
  source 1..75: mol_type = other DNA
aaactgctgtttctcggatcgtcctgcatctacccgaaactggcaaaacagccgatggcagaaagcgagttattg

SEQ ID NO: 527799 - DNA, 75 bp, synthetic construct
  source 1..75: mol_type = other DNA
tctgggaccggacaacgacatgctgacgctttctggtgttcttatgccggaggtaacgggcggcaggctgtcgtt

SEQ ID NO: 527800 - DNA, 75 bp, synthetic construct
  source 1..75: mol_type = other DNA
ttcggtgatctcagtgcgcagctgaataatctgcagggaacggcaacatctgccttaagcgatatcagtaaaacg

SEQ ID NO: 527801 - DNA, 75 bp, synthetic construct
  source 1..75: mol_type = other DNA
cgggatcaaactgtgtgaatcttacaaccgccagtacggacgggattaccgctcagtcatgccaaccaacctgta

SEQ ID NO: 527802 - DNA, 75 bp, synthetic construct
  source 1..75: mol_type = other DNA
atgtctttacaacgaatttttattgctggtcatcgcgggatggtcggttccgctatcacccgtcagctcgaacag

SEQ ID NO: 527803 - DNA, 75 bp, synthetic construct
  source 1..75: mol_type = other DNA
agccttacgccattgccaaaatcgccgggatcaaactgtgcgaatcatacaaccgccagtacggacgcgattacc

SEQ ID NO: 527804 - DNA, 75 bp, synthetic construct
  source 1..75: mol_type = other DNA
gtgacgtcaaaaactgatggtgtggcagatgccccggttctgagcattcctgaagtgactgacggttatgccaat

SEQ ID NO: 527805 - DNA, 75 bp, synthetic construct
  source 1..75: mol_type = other DNA
atggtgtacagaccgaagtcacggtaccgaaaggcagcgctgccggtgataccctgacgctgacggtcaccaaac

SEQ ID NO: 527806 - DNA, 75 bp, synthetic construct
  source 1..75: mol_type = other DNA
tgcctttaatgccgagggtatggaaaaagttgttgcgaccattacgggaacatctgataacgttacggcagctac

SEQ ID NO: 527807 - DNA, 75 bp, synthetic construct
  source 1..75: mol_type = other DNA
tcaggaactgcagtatcagcgcagctggcgacatgtggctaacagccgggtaaatcgtcgtccgtccacgcagtt

SEQ ID NO: 527808 - DNA, 75 bp, synthetic construct
  source 1..75: mol_type = other DNA
cggcagaagcacagcgccagtcgctgattgatgctgcaatggcttccatcagtctgattcaactgaaattacagg

SEQ ID NO: 527809 - DNA, 75 bp, synthetic construct
  source 1..75: mol_type = other DNA
tcacactgaatgaggccctactggcgactgtcgcgggtgaagtcgtcatatacaactacgacagcaagacgcggg

SEQ ID NO: 527810 - DNA, 75 bp, synthetic construct
  source 1..75: mol_type = other DNA
tgagtgaccagctcagcaacctgcaggactctgctgcctctgcgattggggggattaagaacacggtaggaggat

SEQ ID NO: 527811 - DNA, 75 bp, synthetic construct
  source 1..75: mol_type = other DNA
cctgtcgctcaaacgagtggatgaatccctgtccgatatgttcggagatctcagtgcgcaactgaataatctgca

SEQ ID NO: 527812 - DNA, 75 bp, synthetic construct
  source 1..75: mol_type = other DNA
tcagtgcgcagctgaataatctgcaggacacggcaacatctgccttaagtgatatcagtaaaacggtgggagggc

SEQ ID NO: 527813 - DNA, 75 bp, synthetic construct
  source 1..75: mol_type = other DNA
acgctttctggtgttcttatgccggaggtaacgggcggcaggctgtcgttgctggctctggagcaaatggcagaa

SEQ ID NO: 527814 - DNA, 75 bp, synthetic construct
  source 1..75: mol_type = other DNA
aaaacgttgcttgctaaaatagaatcaaccagacaagaactaagaaatattatggatagaatcttggacaaataa

SEQ ID NO: 527815 - DNA, 75 bp, synthetic construct
  source 1..75: mol_type = other DNA
actaaaacggagtttttccgcgacggtatgccgcgccggattgagttccccctgtcgctcaaacgagtggatgaa

SEQ ID NO: 527816 - DNA, 75 bp, synthetic construct
  source 1..75: mol_type = other DNA
tcagtgcgcaactgaataatctgcaggacacggcaacgtctgccttaagtgatatcagtaaaacggtgggagggc

SEQ ID NO: 527817 - DNA, 75 bp, synthetic construct
  source 1..75: mol_type = other DNA
tcaggaactgcagtatcagcgcagctggcgacatgcggctaacagtcgggtaaatcgtcgtccatccacgcagtt

SEQ ID NO: 527818 - DNA, 75 bp, synthetic construct
  source 1..75: mol_type = other DNA
tctgggaccggacaacgacatgctgacgctttctggtgttcttatgccggagataacaggcggcaggctgtcgtt

SEQ ID NO: 527819 - DNA, 75 bp, synthetic construct
  source 1..75: mol_type = other DNA
atgatgatggtgctgggattgtacgtgtttatgctgcgcactgtgccgtatcaggaactgcagtatcaacgcagc

SEQ ID NO: 527820 - DNA, 75 bp, synthetic construct
  source 1..75: mol_type = other DNA
gcttcatcaatggcaattgctgagctttcagcattgacaagcttatcttttgacacagttccggatgtatttgat

SEQ ID NO: 527821 - DNA, 75 bp, synthetic construct
  source 1..75: mol_type = other DNA
catcatctttcctcgttgatatcagtttctttggtacgccaggaacgtcagggcagaacgcttttttgccacgct

SEQ ID NO: 527822 - DNA, 75 bp, synthetic construct
  source 1..75: mol_type = other DNA
acgctttccggtgttcttatgccggagataacaggcggcaggctgtcgttgctgacactggagcagatggcagaa

SEQ ID NO: 527823 - DNA, 75 bp, synthetic construct
  source 1..75: mol_type = other DNA
gtggatgtcacctttgaagatgaaaagggtgctaagcacaccgtgacgctggagaacggcgataacggctggaca

SEQ ID NO: 527824 - DNA, 75 bp, synthetic construct
  source 1..75: mol_type = other DNA
gtggatgtcacctttgaagatgaaaagggtgctaaccacaccgtgacgctggagaacggggataacggctggaca

SEQ ID NO: 527825 - DNA, 75 bp, synthetic construct
  source 1..75: mol_type = other DNA
tggagaaaggggataacggctggacatccagtgacccgacgctgatcccggacagcaatggcgataaagcgacca

SEQ ID NO: 527826 - DNA, 75 bp, synthetic construct
  source 1..75: mol_type = other DNA
gaccctgtaatcgctgaaatgaatgctcgcctggaggctgaatttgcagctgagaatgaacataccacccagggc

SEQ ID NO: 527827 - DNA, 75 bp, synthetic construct
  source 1..75: mol_type = other DNA
atttgggaactcagttgttgtgccagtatttgaagctgtagcaagattactagaaccgtatatacaaaaagctgt

SEQ ID NO: 527828 - DNA, 75 bp, synthetic construct
  source 1..75: mol_type = other DNA
gtggatgtcacctttgaagatgaaaagggtggtaaccacaccgtgacgctggagaacggcgataacggctggaca

SEQ ID NO: 527829 - DNA, 75 bp, synthetic construct
  source 1..75: mol_type = other DNA
cgtcaaccgtaacctcaaaaactgatgtgttaccaacagtgagtattagcgttgagacaacatcaacagatgtca

SEQ ID NO: 527830 - DNA, 75 bp, synthetic construct
  source 1..75: mol_type = other DNA
atggtactgagcatacttatactctctacagtagtgatagtggtgcgcaggtctatatagatgacaatatagtaa

SEQ ID NO: 527831 - DNA, 75 bp, synthetic construct
  source 1..75: mol_type = other DNA
aaaacgttacggttgctgctgatattgtagataactcgggtatttcagcgacaggtgttatttatgatggcaatg

SEQ ID NO: 527832 - DNA, 75 bp, synthetic construct
  source 1..75: mol_type = other DNA
aggatgtgaccgtgacaatcaccttaacaaatggtgcgggttatgcaagtgcgccagactattcaacacttgccg

SEQ ID NO: 527833 - DNA, 75 bp, synthetic construct
  source 1..75: mol_type = other DNA
cgtggtaacatgctggctaatacaagagtatatactggtgagggtaacgatacttttactatggatggtatgaat

SEQ ID NO: 527834 - DNA, 75 bp, synthetic construct
  source 1..75: mol_type = other DNA
tggtcagtattctgtaaccgcggaaatcacagacccggcaggtaacaccagtggccagggccagccggctgactt

SEQ ID NO: 527835 - DNA, 75 bp, synthetic construct
  source 1..75: mol_type = other DNA
gtaatcgctgaaatgaatgctcgcctggaggctgaatttgcagctgagaatgaacataccacccagggcgactag

SEQ ID NO: 527836 - DNA, 75 bp, synthetic construct
  source 1..75: mol_type = other DNA
atgaagtcgctgatgccaatatcacagggaaagatgatcctaaaattattgatggtaaaaatttcctgccacaac

SEQ ID NO: 527837 - DNA, 75 bp, synthetic construct
  source 1..75: mol_type = other DNA
aagcaaactggtacaacgatgaagaagcgcacacattcaatctggatatccgggaagttacactgagtggagaag

SEQ ID NO: 527838 - DNA, 75 bp, synthetic construct
  source 1..75: mol_type = other DNA
gaccatgacgtgcttttggctggcttcccttgccagccgtttagccttgcaggagtgagtaagaaaaattcgctg

SEQ ID NO: 527839 - DNA, 75 bp, synthetic construct
  source 1..75: mol_type = other DNA
gctggatgccgcgcataaagtgaaagacaaatgggcgcatacctcggtgcaggatcgcgcggcgattctgtttaa

SEQ ID NO: 527840 - DNA, 75 bp, synthetic construct
  source 1..75: mol_type = other DNA
ggcgtttaccggctcaacggaagtgggccaacaaattatgcaatacgccacgcaaaacattattccggtaaccct

SEQ ID NO: 527841 - DNA, 75 bp, synthetic construct
  source 1..75: mol_type = other DNA
cgaaaccagtgctgctgatgtaccgctggcgattgaccatttccgctatttcgcctcgtgtatccgggcgcagga

SEQ ID NO: 527842 - DNA, 75 bp, synthetic construct
  source 1..75: mol_type = other DNA
atttgggaactcagttgttgttccagtatttgaagctgtagcaagattactagaaccatatatacaaaaggcagt

SEQ ID NO: 527843 - DNA, 75 bp, synthetic construct
  source 1..75: mol_type = other DNA
cagggctttaccctgcgcgatattagtcgtttttatccggaacagcgtccgtcatttggcgaactgctggaaccc

SEQ ID NO: 527844 - DNA, 75 bp, synthetic construct
  source 1..75: mol_type = other DNA
tgaacaggaaacagatgctgtagtggaccctgtaatcgctgaaatgaatgctcgcctggaggctgaatttgcagc

SEQ ID NO: 527845 - DNA, 75 bp, synthetic construct
  source 1..75: mol_type = other DNA
aagctaactggtttaatgacgagcgagcacatacatttaatctcgatatccgagaagtcactcttagtgacaagc

SEQ ID NO: 527846 - DNA, 75 bp, synthetic construct
  source 1..75: mol_type = other DNA
caactatgctaaaaagcatgccgctaagggtaacggctttggttttggcctcgttaacccggaagataaagaaag

SEQ ID NO: 527847 - DNA, 75 bp, synthetic construct
  source 1..75: mol_type = other DNA
atgaagtcgccgatgctggtgttactggctcagatgatcccaaaattatagatggaaaacattttttaccccaac

SEQ ID NO: 527848 - DNA, 75 bp, synthetic construct
  source 1..75: mol_type = other DNA
ttcagaatctgaaaatggaatatgcagaacgtaacccggatggttcaccgatgacgcaaggtggtcagcctgttc

SEQ ID NO: 527849 - DNA, 75 bp, synthetic construct
  source 1..75: mol_type = other DNA
catcaaccggagacaacgctctaacgaagctgactgattcgcttcaagcgatgggtgccacaaccacctcatcaa

SEQ ID NO: 527850 - DNA, 75 bp, synthetic construct
  source 1..75: mol_type = other DNA
atgccaggaacagtaaactcctgtggttttggatttagcattacaaaagccccctattcttccggacaaaaacca

SEQ ID NO: 527851 - DNA, 75 bp, synthetic construct
  source 1..75: mol_type = other DNA
atgactcgtctgatacaggccagcctcgatctgcaggcattaaaacaaaatctgaccattgtccgccaggccgcg

SEQ ID NO: 527852 - DNA, 75 bp, synthetic construct
  source 1..75: mol_type = other DNA
tcgatctgcaggcattaaaacagaatctgaccattgttcgccaggccgcgccgcatgcgcgtgtctggtcggtgg

SEQ ID NO: 527853 - DNA, 75 bp, synthetic construct
  source 1..75: mol_type = other DNA
ctccggtgacgagcgaaatcagtgtagctaccgcctggttaatcaaggctggagcgttttgcttgtgtttgtatg

SEQ ID NO: 527854 - DNA, 75 bp, synthetic construct
  source 1..75: mol_type = other DNA
tttttacggtgtttgtggatggtgaaaacgaagtgggtaaagtgacctccgtcactcggcccaaactgacgcgca

SEQ ID NO: 527855 - DNA, 75 bp, synthetic construct
  source 1..75: mol_type = other DNA
tttttacgctgtttgtggatggtgaaaacgaagtgggtaaagtgacctccgtcactccgcccaaactgacgcgca

SEQ ID NO: 527856 - DNA, 75 bp, synthetic construct
  source 1..75: mol_type = other DNA
tttttacgttgtttgtggatggtgaaaacgaagtgggtaatgtgacctccgtcactcggcccaaactgacgcgca

SEQ ID NO: 527857 - DNA, 75 bp, synthetic construct
  source 1..75: mol_type = other DNA
tgcattaacatgaaaaacgaaggaaaaaagaatgagtggatgagggaggagtgtgtttgctttatttcccgggat

SEQ ID NO: 527858 - DNA, 75 bp, synthetic construct
  source 1..75: mol_type = other DNA
gtgcccgaccgcatccgttccgcgcttgggcttggctgataagtaatatgcaggcggcgcagtgcgtcgcctctg

SEQ ID NO: 527859 - DNA, 75 bp, synthetic construct
  source 1..75: mol_type = other DNA
atgataactccattaaatattcttgaggaagtggcagcacaaataaaagagaatacatccatgcttgaatttata

SEQ ID NO: 527860 - DNA, 75 bp, synthetic construct
  source 1..75: mol_type = other DNA
ggggcgaccgatggttttgcgttacttaatcttgaagaggccattatcctgcgcgagcgcggctggaaagggcca

SEQ ID NO: 527861 - DNA, 75 bp, synthetic construct
  source 1..75: mol_type = other DNA
aattaggttttcctgggctggtgacgggcgttctggatgttgacggtaatgtcgatatgccacgaatggaaaaaa

SEQ ID NO: 527862 - DNA, 75 bp, synthetic construct
  source 1..75: mol_type = other DNA
aatgctcagcagagtgatggtcgtgctgcaacagcaggcggccgaagaactgcaacggaattcctgctcccgttt

SEQ ID NO: 527863 - DNA, 75 bp, synthetic construct
  source 1..75: mol_type = other DNA
agcgctggcctttgctattaagtgggtggctgttggcatcgctgtgtctccgatactgtatgggctggcaaaact

SEQ ID NO: 527864 - DNA, 75 bp, synthetic construct
  source 1..75: mol_type = other DNA
acgattcctgtgcatcctattatccgcccgcgcggtggcgatttttgctatagcgacgctgagtttgccgccatt

SEQ ID NO: 527865 - DNA, 75 bp, synthetic construct
  source 1..75: mol_type = other DNA
gcgcagacagagttgaattatgcgcagccccaaaagaggggggcttaacgccgtcgttgggggtactgaaatccg

SEQ ID NO: 527866 - DNA, 75 bp, synthetic construct
  source 1..75: mol_type = other DNA
gcgtggcaagcctcaccgatgcgttatcgtaatcaaggattgtccatgtcatcagatgcacacgcggacgagtat

SEQ ID NO: 527867 - DNA, 75 bp, synthetic construct
  source 1..75: mol_type = other DNA
tgaattgaaagcgcctgtaactgatgacatcagcagagcggtggcttttgccattaagtgggtggctgtcggtat

SEQ ID NO: 527868 - DNA, 75 bp, synthetic construct
  source 1..75: mol_type = other DNA
ttaacctggaagaagcgataacgttacgtgaacgcggctggaaagggccgatcctgatgctggaggggtttttcc

SEQ ID NO: 527869 - DNA, 75 bp, synthetic construct
  source 1..75: mol_type = other DNA
tgtcgccgccggatacgccgatggttatccgcgtcatgcgccaaccggtacacctgttttagtggacggagtacg

SEQ ID NO: 527870 - DNA, 75 bp, synthetic construct
  source 1..75: mol_type = other DNA
atgaaaaacggccttgaactgaaagcgcctgtaactgatgacatcagcagagcactggcttttgccattaagtgg

SEQ ID NO: 527871 - DNA, 75 bp, synthetic construct
  source 1..75: mol_type = other DNA
gcagtaaatatattactaaagcctttatctcgtcgtttattgccattacggtgggggcgggaattacgctggcgg

SEQ ID NO: 527872 - DNA, 75 bp, synthetic construct
  source 1..75: mol_type = other DNA
cgccagtaactgatgacatcagcagagcactggcttttgctattaagtgggtggcggtcggtatcgctgtgtctc

SEQ ID NO: 527873 - DNA, 75 bp, synthetic construct
  source 1..75: mol_type = other DNA
tttttacgttgtttgtggatggtgaaaacgaagtgggtaaagtgacctccgtcactctgcccaaactgacgcgca

SEQ ID NO: 527874 - DNA, 75 bp, synthetic construct
  source 1..75: mol_type = other DNA
agtagccgaggtcaccatgacgtctgaaagaaacggctcgtatactgtaaaagcatccctagcgaatggagcttc

SEQ ID NO: 527875 - DNA, 75 bp, synthetic construct
  source 1..75: mol_type = other DNA
agattgagtcccgtctggactcgctggcgaagcaaaccggcagaacaaagacgttttatgcgcgggaagcaatac

SEQ ID NO: 527876 - DNA, 75 bp, synthetic construct
  source 1..75: mol_type = other DNA
gaggcagtaatacgcgagaagatgggctttaatccgcagactctccacgaagtattgcaatcatgtcagcaacaa

SEQ ID NO: 527877 - DNA, 75 bp, synthetic construct
  source 1..75: mol_type = other DNA
atcaacgcagcagcacgtcagaacggtatttcttacagcaaattcatcaatggcctgaaaaaaagcctctgttga

SEQ ID NO: 527878 - DNA, 75 bp, synthetic construct
  source 1..75: mol_type = other DNA
aaaaagcctctgttgaaatcgaccgtaagatcctggctgatatcgcagtattcgacaaagtagcgtttcaccact

SEQ ID NO: 527879 - DNA, 75 bp, synthetic construct
  source 1..75: mol_type = other DNA
cacatggtcgccgtgcaggtgatcacattgtggatgaaattgcggaaaaacaaagagttgacattgttgtcagtg

SEQ ID NO: 527880 - DNA, 75 bp, synthetic construct
  source 1..75: mol_type = other DNA
ataccgaacgctcaccgtcggagtatcgtcggcaataccacagccaactgacagaaaaaccaactactccagaat

SEQ ID NO: 527881 - DNA, 75 bp, synthetic construct
  source 1..75: mol_type = other DNA
agcctgctaaagtgctttccggtggtgaaaaaggccgtatgctgtttggtaagttaatgatgcagaaaccgaaca

SEQ ID NO: 527882 - DNA, 75 bp, synthetic construct
  source 1..75: mol_type = other DNA
aatggacggttactctgcggaagctcgcgccggtgaactgttgcttggcgtgggaattccagtggaacagcacta

SEQ ID NO: 527883 - DNA, 75 bp, synthetic construct
  source 1..75: mol_type = other DNA
ggctgtgtggaaaataatctcgatttagatgtagtgatgattattattgagggtgctttctgcggaattgtcaaa

SEQ ID NO: 527884 - DNA, 75 bp, synthetic construct
  source 1..75: mol_type = other DNA
tctggtcgataacgtattaagaatgttcatgccagatgaaaacataacgaaattaattcatcaaacgaatgaatt

SEQ ID NO: 527885 - DNA, 75 bp, synthetic construct
  source 1..75: mol_type = other DNA
cgtcacgcgtggcgctatctactggcatttcgaaaacaagacccaactgtttaatgagatgtggctgcaacagcc

SEQ ID NO: 527886 - DNA, 75 bp, synthetic construct
  source 1..75: mol_type = other DNA
tgagcgttaacgatcgcccgctgtgggagattgacctgctgaacttcatttaccggaaggacggcaaggacattg

SEQ ID NO: 527887 - DNA, 75 bp, synthetic construct
  source 1..75: mol_type = other DNA
tttttacgatgtttgtggatggtgaaaacgaagtgggtaaagtgacctccgtcactcagcccaaactgacgcgca

SEQ ID NO: 527888 - DNA, 75 bp, synthetic construct
  source 1..75: mol_type = other DNA
cgatgcagaaagcgatctgtatgaaatcgagatgcgcggacgtgtgacggaaattgatatgggggaagccaaaca

SEQ ID NO: 527889 - DNA, 75 bp, synthetic construct
  source 1..75: mol_type = other DNA
cgatggtgaggaaagtcagatccttgaggtggaaatgcgcggacgcatcacggaaatcgaccgtggcgaaaccaa

SEQ ID NO: 527890 - DNA, 75 bp, synthetic construct
  source 1..75: mol_type = other DNA
tttttacgatgtttgtggatggtgaaaacgaagtgggtaaggtgacctccgtcactcggcccaaactgacgcgca

SEQ ID NO: 527891 - DNA, 75 bp, synthetic construct
  source 1..75: mol_type = other DNA
tttttacgatgtttgtggatggtgaaaacgaagtgggtaacgtgacctccgtcactccgcccaaactgacgcgca

SEQ ID NO: 527892 - DNA, 75 bp, synthetic construct
  source 1..75: mol_type = other DNA
tttttacgatgtttgtggatggtgaaaacgaagtgggtaatgtgacctccgtcactctgcccaaactgacgcgca

SEQ ID NO: 527893 - DNA, 75 bp, synthetic construct
  source 1..75: mol_type = other DNA
ttgaccaagtatagtgattttgtcatttctgttgatacagctcttgttcatatcgctgcggcttatcataaacca

SEQ ID NO: 527894 - DNA, 75 bp, synthetic construct
  source 1..75: mol_type = other DNA
agcatctgcgggatttacagttcgatattgtattagacccctttgaaactatgccctcatttaagcatagcttaa

SEQ ID NO: 527895 - DNA, 75 bp, synthetic construct
  source 1..75: mol_type = other DNA
ataaaagattttattggaaatacaaaaatagtcatcattaacccattaggtgcaaaaaaaatatgccgacttact

SEQ ID NO: 527896 - DNA, 75 bp, synthetic construct
  source 1..75: mol_type = other DNA
ggcggcacgattgacggcacactgctgcgttttgcgggtgaatactacaccgatgcagaaagcgacctgtatgaa

SEQ ID NO: 527897 - DNA, 75 bp, synthetic construct
  source 1..75: mol_type = other DNA
catgatgggggcggtaagtattgatctcggtctggacgactccgcgcttgatgcgagctttgtcatggggggcgc

SEQ ID NO: 527898 - DNA, 75 bp, synthetic construct
  source 1..75: mol_type = other DNA
ggatagtcatcattaacccattaggtgcaaaaaaaatatgccgacttacgtttgagcaaataaaagttatatatc

SEQ ID NO: 527899 - DNA, 75 bp, synthetic construct
  source 1..75: mol_type = other DNA
cgcacgccgtattgcccgtgaacacggcggcatcgggcttatcatgatcgactacctgcaactgatgcgcgtacc

SEQ ID NO: 527900 - DNA, 75 bp, synthetic construct
  source 1..75: mol_type = other DNA
atgaataattttagaaacttcacgccatatacgccagatgaagataaaagagagcttgttgatgccggagtttta

SEQ ID NO: 527901 - DNA, 75 bp, synthetic construct
  source 1..75: mol_type = other DNA
tcgctgtgcaatgccctgtttgccggtgaagtgtcgccggtcagcgatgtagcggcctgtacacgtgaacctctg

SEQ ID NO: 527902 - DNA, 75 bp, synthetic construct
  source 1..75: mol_type = other DNA
tcaggtgaaaggcctgaatggtacgcaaacagtaaacggtactcaaacagttgttgattccggcagtgttgcaaa

SEQ ID NO: 527903 - DNA, 75 bp, synthetic construct
  source 1..75: mol_type = other DNA
gcaggttcagggactgaatggtagcaaaactattgaaatcaaagatcctttaactggggatgtgactgaaaaaga

SEQ ID NO: 527904 - DNA, 75 bp, synthetic construct
  source 1..75: mol_type = other DNA
atcgaaaagacggaacggcttagctcaaacatcaaaagaaaatggcaggaatttatggttgtccaccagagttgc

SEQ ID NO: 527905 - DNA, 75 bp, synthetic construct
  source 1..75: mol_type = other DNA
cggcgtgggcgaaagtggcgttcgcgataccgagtatgctgcgctgtaccgcgaacaacttccccggctcgacca

SEQ ID NO: 527906 - DNA, 75 bp, synthetic construct
  source 1..75: mol_type = other DNA
actacgagccagtgatcggcattatgggtaaaaccggggcgggaaagagtagcctgtgcaatgccctgtttgccg

SEQ ID NO: 527907 - DNA, 75 bp, synthetic construct
  source 1..75: mol_type = other DNA
aacccaccagcggtagtggtcaattgtccacggcgcagaagcagaatatcagccgcaaaatctgcctgctgcatg

SEQ ID NO: 527908 - DNA, 75 bp, synthetic construct
  source 1..75: mol_type = other DNA
tcactctgtaatgcgttgtttgccggtgaagtatcgccggtcagcgatgtggcggcctgcacccgtgaaccttta

SEQ ID NO: 527909 - DNA, 75 bp, synthetic construct
  source 1..75: mol_type = other DNA
gaatgattaagtgcctgccacgtgaggccaccagcccggtggtgtcgcaactccagccttcctttcgcacgacgg

SEQ ID NO: 527910 - DNA, 75 bp, synthetic construct
  source 1..75: mol_type = other DNA
agccgtaaaatctgtctgctgcatgagctgttccagcccgtacatccagtgtgtgccgtgtcggtccgtcttcag

SEQ ID NO: 527911 - DNA, 75 bp, synthetic construct
  source 1..75: mol_type = other DNA
tattccgaaacccagaatatgaccacttttggtgataccggggttgcggataaagcacaaaaccttgaaatggtt

SEQ ID NO: 527912 - DNA, 75 bp, synthetic construct
  source 1..75: mol_type = other DNA
atgattggtgacagactcggccttaccaaagaggcgatcgcgatgcttattagctccgacctcttttgctgcggt

SEQ ID NO: 527913 - DNA, 75 bp, synthetic construct
  source 1..75: mol_type = other DNA
tcgcgggctgcgtgtcgatggtgtagggacaatgataggcggaacgtttaacagcttcccccacacgtcattttc

SEQ ID NO: 527914 - DNA, 75 bp, synthetic construct
  source 1..75: mol_type = other DNA
ctatggtgtccgttctgatgagcggctctgctctggctgcgccggctgctaacgattccagtcaggccacactga

SEQ ID NO: 527915 - DNA, 75 bp, synthetic construct
  source 1..75: mol_type = other DNA
tcaccaggaaagttgatcatactcggtctgcaacacgtccttgttatgtacgcaggcgcggtcgctgtaccactg

SEQ ID NO: 527916 - DNA, 75 bp, synthetic construct
  source 1..75: mol_type = other DNA
ctcacgatttcttttctaagttaccggccgtactgcaaccgttgctgcatagcggcattatgctcgcaaccctta

SEQ ID NO: 527917 - DNA, 75 bp, synthetic construct
  source 1..75: mol_type = other DNA
ggaaccatgatcggcggaacgtttaacagttttccgcatacatctttttcacaaaacgtcggtctggtcagcgtg

SEQ ID NO: 527918 - DNA, 75 bp, synthetic construct
  source 1..75: mol_type = other DNA
ctatagcatcgcggttgatagagcttgagcatgaggttgagaagttaaaatgtatgcatggcaacggtgaaaaat

SEQ ID NO: 527919 - DNA, 75 bp, synthetic construct
  source 1..75: mol_type = other DNA
ggttcgatgattttcttaatttgctacttttccactttcagtatgctaatgcttgcacctactgattcatcaaaa

SEQ ID NO: 527920 - DNA, 75 bp, synthetic construct
  source 1..75: mol_type = other DNA
ctaacggtaagatttccagacgccgatatatattttcatttattttaataaatttcatttttgcctttcttatta

SEQ ID NO: 527921 - DNA, 75 bp, synthetic construct
  source 1..75: mol_type = other DNA
gcgttcacgcgttaggttcagccgatcgtcctgccgccgagctgggtgcgcttatcgcacatgcgatggtgggga

SEQ ID NO: 527922 - DNA, 75 bp, synthetic construct
  source 1..75: mol_type = other DNA
tgctcggcccttggttatccctttgataaattttaccgtcgattaattaacgaagggagagtaggtattatggcg

SEQ ID NO: 527923 - DNA, 75 bp, synthetic construct
  source 1..75: mol_type = other DNA
tatgatttcaactgacgataattttaatcataagttcagaacgatatcgaggtatcgcgattttgtaaactcccc

SEQ ID NO: 527924 - DNA, 75 bp, synthetic construct
  source 1..75: mol_type = other DNA
gcgaaatatcgccggtcagcgatgtggcagcctgtacccgtgaacctttgcgatttcgcctgcaggttggcgagc

SEQ ID NO: 527925 - DNA, 75 bp, synthetic construct
  source 1..75: mol_type = other DNA
cgatactttgctgtgcaaatatcgtctgtcaatgctacgcctacaatgaagttaaattccgtttaaataaactta

SEQ ID NO: 527926 - DNA, 75 bp, synthetic construct
  source 1..75: mol_type = other DNA
aaagcggtactcaggcctggtattgatacgctcatattcacagatatctatggcggaacgccatcaaatattgcc

SEQ ID NO: 527927 - DNA, 75 bp, synthetic construct
  source 1..75: mol_type = other DNA
gtgatgaactgaccggcaacgggaaggtgaagttcgctaacctcaccaccggcgaggtgcagtggcgaaaccgtc

SEQ ID NO: 527928 - DNA, 75 bp, synthetic construct
  source 1..75: mol_type = other DNA
atgtgttgaaagacagcggcggcaagccagatattattctgattgccaccggttcagagatggaaatcaccctgc

SEQ ID NO: 527929 - DNA, 75 bp, synthetic construct
  source 1..75: mol_type = other DNA
accgacggcactgatcctctcaaggcagaatctggcccaggtggaacgtacgccggatcaggttaaagagattgc

SEQ ID NO: 527930 - DNA, 75 bp, synthetic construct
  source 1..75: mol_type = other DNA
gggggttactgctgtttgggctaattatgggcgacagttttcacctgaattgtggaaagttttagtgaaaatcac

SEQ ID NO: 527931 - DNA, 75 bp, synthetic construct
  source 1..75: mol_type = other DNA
tttgcagagacgatgttgtttataataaatcggtggatgagtatatttcaagcgtagatcatttatgggaagcac

SEQ ID NO: 527932 - DNA, 75 bp, synthetic construct
  source 1..75: mol_type = other DNA
catgactgaagcagttaatacagactctatagccgttgcggaaattcttcgatatctgaattgttatcccacatg

SEQ ID NO: 527933 - DNA, 75 bp, synthetic construct
  source 1..75: mol_type = other DNA
ttaccgctgaacgtattagcgactacatgactgaagcagttaatacagactctatagccgttgcggaggcactgt

SEQ ID NO: 527934 - DNA, 75 bp, synthetic construct
  source 1..75: mol_type = other DNA
actcgcactctcgggcagttaacgattattagtgagcgttaccctcagttaaaggctcaagagctctatcaaaac

SEQ ID NO: 527935 - DNA, 75 bp, synthetic construct
  source 1..75: mol_type = other DNA
gtcgccagtattaaaggttattccaaccatgaaaaagacgttttggaagccgtaacattggctcgtagccaggct

SEQ ID NO: 527936 - DNA, 75 bp, synthetic construct
  source 1..75: mol_type = other DNA
gatgccccaggcgcatacaaagctggttatgcaatctgccgatctgcagattttaactcatgggaatatgtgcca

SEQ ID NO: 527937 - DNA, 75 bp, synthetic construct
  source 1..75: mol_type = other DNA
atttcatccttagctcgatggctaaggaaagagtcaaatcaggtttacttgatagagcaacaatagaaggttcta

SEQ ID NO: 527938 - DNA, 75 bp, synthetic construct
  source 1..75: mol_type = other DNA
ggcgtttccgagctggacgccattccaccgcagtcacaggtgctcactgaacagcgactgaaatattggtttaag

SEQ ID NO: 527939 - DNA, 75 bp, synthetic construct
  source 1..75: mol_type = other DNA
ggcagatgacagtacgctgctttcgggtgtttccgagctggatgctattccaccgcagtctcaggtgctcacaga

SEQ ID NO: 527940 - DNA, 75 bp, synthetic construct
  source 1..75: mol_type = other DNA
ctggatacaataagttccatgcccctgataccgaacccggttcggacaatcattcaggctgtacgcgacaccgtt

SEQ ID NO: 527941 - DNA, 75 bp, synthetic construct
  source 1..75: mol_type = other DNA
gaccgggcactggcggtggatgagcatttttatcatcaggtgattggcggggcataccggcaaaaggtgctcttt

SEQ ID NO: 527942 - DNA, 75 bp, synthetic construct
  source 1..75: mol_type = other DNA
gctatatgaccatcgtggatctgcccggtgtgggcgaaagtagcgttcgcgataacgagtatgccgcgctgtatt

SEQ ID NO: 527943 - DNA, 75 bp, synthetic construct
  source 1..75: mol_type = other DNA
cagctcatcaaccaggtcaattttcgcctgcctcgcctggagaatgagcgggaagctaaccattttgatgccgcg

SEQ ID NO: 527944 - DNA, 75 bp, synthetic construct
  source 1..75: mol_type = other DNA
tttgcatctctggggctgatggctgcgcagatacaatcacaaattgcagggcgacctctaccggaggctaaatga

SEQ ID NO: 527945 - DNA, 75 bp, synthetic construct
  source 1..75: mol_type = other DNA
tattaactgaatttttaacacaatatggtgatattctgatttctattgaggacccaccagaactaccagcacaag

SEQ ID NO: 527946 - DNA, 75 bp, synthetic construct
  source 1..75: mol_type = other DNA
gcgactacccggatacccaggctacgcgtgatgcgctgccgctgatggaaaatgcataccgtcagatgcagatga

SEQ ID NO: 527947 - DNA, 75 bp, synthetic construct
  source 1..75: mol_type = other DNA
ctgtgcggtgtcggtacgtttgcaatgggggctgcgggtaatggctgaacggatgattcattgcctgccgcggga

SEQ ID NO: 527948 - DNA, 75 bp, synthetic construct
  source 1..75: mol_type = other DNA
tagattttattctggatgagcatgagcggatatccagaaaacagggttctttgtgtatggcactgggtaagggct

SEQ ID NO: 527949 - DNA, 75 bp, synthetic construct
  source 1..75: mol_type = other DNA
ctctggcaggagagacaagatgaagcagaagagagcgaaacccgtcagcgcgaacaggatgccatccggaagttt

SEQ ID NO: 527950 - DNA, 75 bp, synthetic construct
  source 1..75: mol_type = other DNA
gatgccgtctacaccgacgccccgccgccagtaagcgtaatgcaggtgctgacggaccatcatattcaactggag

SEQ ID NO: 527951 - DNA, 75 bp, synthetic construct
  source 1..75: mol_type = other DNA
atgaaggctatgtggcagggcttatcaccgaacttatctcactgtttgagctactggacaggcaggtgaatctct

SEQ ID NO: 527952 - DNA, 75 bp, synthetic construct
  source 1..75: mol_type = other DNA
tacaaccctgtttcacctttgtcatttcacaaccatagatctccataattacgctgcatataataaatatgctga

SEQ ID NO: 527953 - DNA, 75 bp, synthetic construct
  source 1..75: mol_type = other DNA
gccgttattcataatgacgatgtccattcacgtgatggttttgtcgaaacctgcatcaaagcagggtttaatcac

SEQ ID NO: 527954 - DNA, 75 bp, synthetic construct
  source 1..75: mol_type = other DNA
gctaacacgctgatggtaaaagaggatttccgtatcattcttgccggtggcgaattacgcagccgcgatggcggg

SEQ ID NO: 527955 - DNA, 75 bp, synthetic construct
  source 1..75: mol_type = other DNA
cgccatcatggcggcgcggcgctgccttccagttcggttaacacgccgtggcacgatcgcaaggccacccagacc

SEQ ID NO: 527956 - DNA, 75 bp, synthetic construct
  source 1..75: mol_type = other DNA
tactttgtgtagatctttattatctccaagaattgcaggttcaaaaattattaatattgaaagtattaatacaga

SEQ ID NO: 527957 - DNA, 75 bp, synthetic construct
  source 1..75: mol_type = other DNA
ttcgggatggggatggagcgtctgactatgttgcgttacggcgtcaccgacctgcgttcattcttcgaaaacgat

SEQ ID NO: 527958 - DNA, 75 bp, synthetic construct
  source 1..75: mol_type = other DNA
catccgaacgtgctgcgtaacgttggcatcgacccggaagtttactctggtttcgccttcgggatggggatggag

SEQ ID NO: 527959 - DNA, 75 bp, synthetic construct
  source 1..75: mol_type = other DNA
ctgatctctgatgaaatttccaaacattttaaaaataatgatgaaagtcatcacgaagatattatttgcagttac

SEQ ID NO: 527960 - DNA, 75 bp, synthetic construct
  source 1..75: mol_type = other DNA
cacccacgggggtaatacatcgtctggcaccagtggttacagttctcttaattatcgtggagcttacggtaatac

SEQ ID NO: 527961 - DNA, 75 bp, synthetic construct
  source 1..75: mol_type = other DNA
gtggttttcacctgataaacgcagcagctgaaaggcgctggatgacgtcgtcaggtaaggctaatttcattacca

SEQ ID NO: 527962 - DNA, 75 bp, synthetic construct
  source 1..75: mol_type = other DNA
tctccaacgtgctggatatacgcgttatgcgcttgccatgggggaatatcgtagtggaaataacctgcaaagctc

SEQ ID NO: 527963 - DNA, 75 bp, synthetic construct
  source 1..75: mol_type = other DNA
tatagcatgtcaaacgatttgaaaggcagtatgaccaatctatctggggtttatggcacactgctgccggataat

SEQ ID NO: 527964 - DNA, 75 bp, synthetic construct
  source 1..75: mol_type = other DNA
gtcattggatgcgtacagacagtcagtcggcatttcgtaattcaaacgccagttacagtatgtcaaacgatttga

SEQ ID NO: 527965 - DNA, 75 bp, synthetic construct
  source 1..75: mol_type = other DNA
gtaatacatcgtctggcaccagtggttacagttctcttaattatcgtggagcttatggtaatactaatgtcggtt

SEQ ID NO: 527966 - DNA, 75 bp, synthetic construct
  source 1..75: mol_type = other DNA
tcgatctgcaggcattaaaacagaatctttccattgtccggcaagccgcgccgcacgcgcgtgtctggtcggtgg

SEQ ID NO: 527967 - DNA, 75 bp, synthetic construct
  source 1..75: mol_type = other DNA
aaggagaaaaaagaaaggtgaacagtgtgaacagttctttcgaaaaaaaaatttttatgtggataaaagatgcac

SEQ ID NO: 527968 - DNA, 75 bp, synthetic construct
  source 1..75: mol_type = other DNA
ggcaagcaggtgaacctctttatccgtagatacgaaagcgagcatggtagctacgaagttccgcttccgcaggga

SEQ ID NO: 527969 - DNA, 75 bp, synthetic construct
  source 1..75: mol_type = other DNA
aagccgctcagagagccagacaagctgcatctggtgagcgcaaaattgaactggtgctggataagcaggagcagg

SEQ ID NO: 527970 - DNA, 75 bp, synthetic construct
  source 1..75: mol_type = other DNA
tgcaatggcttccatcagtctgattcagctgaaattacaggccgggcggaggctgacgcaggcagaaaccacccg

SEQ ID NO: 527971 - DNA, 75 bp, synthetic construct
  source 1..75: mol_type = other DNA
gagatcaaaattgatgatgtcgccgccgctgccggaacggtgggctatgagttgatgtgcgcgctggcgttacgg

SEQ ID NO: 527972 - DNA, 75 bp, synthetic construct
  source 1..75: mol_type = other DNA
cgaattacgcagccgcgatggtgggatcattggcgaagcgacgctcgattttatctcccagttccgccttgattt

SEQ ID NO: 527973 - DNA, 75 bp, synthetic construct
  source 1..75: mol_type = other DNA
cgcacagcagcggcgcgcgtattgaatgggacggtggtttgccggatgaacctccggctattactggtgagcagc

SEQ ID NO: 527974 - DNA, 75 bp, synthetic construct
  source 1..75: mol_type = other DNA
agttgctggcgaacgggcagcagttcgttgcctgtggtacgcacagcagcggcgcgcgtattgaatgggacggtg

SEQ ID NO: 527975 - DNA, 75 bp, synthetic construct
  source 1..75: mol_type = other DNA
atgacacgattccattgcgtactccagcgccatgatttcagcaccatcatgagtggacgcattccggcactgacg

SEQ ID NO: 527976 - DNA, 75 bp, synthetic construct
  source 1..75: mol_type = other DNA
catggtggaagacactgcaaacactataaacaaaaaagtcggctggctgttacacgggcaagagtcgattctggt

SEQ ID NO: 527977 - DNA, 75 bp, synthetic construct
  source 1..75: mol_type = other DNA
atgctgaatttgcaacactgtcagcaatattcgcagacaaaattgaatcactggcagcagaagccgagatggaag

SEQ ID NO: 527978 - DNA, 75 bp, synthetic construct
  source 1..75: mol_type = other DNA
cagcacgaagatgcgcgaccgttcaaccttcacgcccggcgccacggatgatacggcggaatatctcgatgccaa

SEQ ID NO: 527979 - DNA, 75 bp, synthetic construct
  source 1..75: mol_type = other DNA
atcctggccgatgaaaaagagaatggtccggaagataccacgcaagatgacgatatgaagcagagcatcgtcaaa

SEQ ID NO: 527980 - DNA, 75 bp, synthetic construct
  source 1..75: mol_type = other DNA
aaaacctggggctgtcagatgaacgagtacgattcatcgaagatggccgatctgctggatgccacccacggctat

SEQ ID NO: 527981 - DNA, 75 bp, synthetic construct
  source 1..75: mol_type = other DNA
ctgagcggcgtcagtgttcgaccacagccaggcgacgaactggagatcacgatcgcaaaccccgatcgcagcaca

SEQ ID NO: 527982 - DNA, 75 bp, synthetic construct
  source 1..75: mol_type = other DNA
aagtgttactgcaaaatgagcgcgatgttccgttatccgcacgagcgttcaccgcgctttttgatggcggaccgg

SEQ ID NO: 527983 - DNA, 75 bp, synthetic construct
  source 1..75: mol_type = other DNA
acaagggctgaaaacgggcgatatcgtggtgatgatccacagtggatcgcgagatgttggcttttacgtcggaag

SEQ ID NO: 527984 - DNA, 75 bp, synthetic construct
  source 1..75: mol_type = other DNA
agaagccgcaggttctaaactggcgaaagcgcaggaattgggcattgaagtgatcgacgaagctgaaatgctacg

SEQ ID NO: 527985 - DNA, 75 bp, synthetic construct
  source 1..75: mol_type = other DNA
aaagcggctggataaatgtgtgttcggcgaagagaaaccagcctgtaagcagtgtccggtgcactgttaccagcc

SEQ ID NO: 527986 - DNA, 75 bp, synthetic construct
  source 1..75: mol_type = other DNA
ggctcagaatcgcaggttaattcgactgattaccagtaactccggaagctcaccgtgccttatagggcatggagg

SEQ ID NO: 527987 - DNA, 75 bp, synthetic construct
  source 1..75: mol_type = other DNA
ggattgaccatcgagcagactgttgaacacctcaagactcgctggccatacattcgggaagcgcttctcaacggg

SEQ ID NO: 527988 - DNA, 75 bp, synthetic construct
  source 1..75: mol_type = other DNA
atttccgtattattctcgccggtggcgaattacgcagccgcgatggcgggatcattggcgaagcaacgctcgatt

SEQ ID NO: 527989 - DNA, 75 bp, synthetic construct
  source 1..75: mol_type = other DNA
cgccgccgctgatctttttcctggtggcggttattttgtggggaagcctacgcagctccggcgcaattatgcggc

SEQ ID NO: 527990 - DNA, 75 bp, synthetic construct
  source 1..75: mol_type = other DNA
atgttagatttatttaaagcaattggcctggggctggtggtgttactaccgttagctaacccattaacaactgtc

SEQ ID NO: 527991 - DNA, 75 bp, synthetic construct
  source 1..75: mol_type = other DNA
gtgtcggctggagcaggcagcgccgcgcactaacggtgatctgaacgcgttgttggatgaaacggaggccgcctg

SEQ ID NO: 527992 - DNA, 75 bp, synthetic construct
  source 1..75: mol_type = other DNA
gttgacggtatgggagacaaaatcatcgaccagttggttgaaaaagaatatgtccatacgcctgcggatctgttc

SEQ ID NO: 527993 - DNA, 75 bp, synthetic construct
  source 1..75: mol_type = other DNA
agcgtaaagagtcgctgaaacactttgtttcccgccgtgcgatggatgttgacggaatgggcgacaaaatcatcg

SEQ ID NO: 527994 - DNA, 75 bp, synthetic construct
  source 1..75: mol_type = other DNA
caggtgctctcgcgcgagaacatggtcgaggcgtggaaacgcgtcaaggccaacaagggaagtgcaggtgctgat

SEQ ID NO: 527995 - DNA, 75 bp, synthetic construct
  source 1..75: mol_type = other DNA
atgcaccgaaaactgggggaggggcgaaagggaacaatgcttcgcctgccgggagtggtaatactaaaaacaatg

SEQ ID NO: 527996 - DNA, 75 bp, synthetic construct
  source 1..75: mol_type = other DNA
cgatcaataatggagtgctacaggtttatggcgcggcgactgatcccacgattaaaggagggcgcggtgatgcgg

SEQ ID NO: 527997 - DNA, 75 bp, synthetic construct
  source 1..75: mol_type = other DNA
tatagaagcacgggtgcgcatttgtattaaccaactgctttatacgcccaaacacaccgcacgcttattacaggt

SEQ ID NO: 527998 - DNA, 75 bp, synthetic construct
  source 1..75: mol_type = other DNA
ttttttccgcaaagctaccgacctgctgaatgattttcacgccatcaaacgcagcatcgatactatttcgcaggg

SEQ ID NO: 527999 - DNA, 75 bp, synthetic construct
  source 1..75: mol_type = other DNA
agtgcacatccaggggcagctgtatcgacgcgagtatggttttcgataggtggaaagggagttgtctgtgtaggc

SEQ ID NO: 528000 - DNA, 75 bp, synthetic construct
  source 1..75: mol_type = other DNA
gggctggttgctgcacgggcaggagtcaattctggtgccagatttcaacaccaaatgtcagtgccagattttagg

SEQ ID NO: 528001 - DNA, 75 bp, synthetic construct
  source 1..75: mol_type = other DNA
aggtgacgcagtggattaaaaaacaatttgcgccaaatggcatattaacggggatctatcaggatttactgcatc

SEQ ID NO: 528002 - DNA, 75 bp, synthetic construct
  source 1..75: mol_type = other DNA
ttttttgccggattacatggtccgtgaggcgatggcgcaatccctgctggttacccgacaaatccataacccgcg

SEQ ID NO: 528003 - DNA, 75 bp, synthetic construct
  source 1..75: mol_type = other DNA
gggaatgagttgtctcaattgacagcaaatgctgttaagcgattcattgaagaaaacgctgaaaacgctgctatg

SEQ ID NO: 528004 - DNA, 75 bp, synthetic construct
  source 1..75: mol_type = other DNA
ttgcaaaacagcagcacgccgtagaacgcacccgcgaactgtttgccaaaagtctgggctatagcaaaccgcaaa

SEQ ID NO: 528005 - DNA, 75 bp, synthetic construct
  source 1..75: mol_type = other DNA
ggcatgtcagccattcacctggtgaccactgtctttttgaagccgggcgatctgctggttgcgccgcacgactgc

SEQ ID NO: 528006 - DNA, 75 bp, synthetic construct
  source 1..75: mol_type = other DNA
gaatcaggtggtttgtagggcgccggggaaaagtttaattaatctcaacggtcaagcagttttggaaaaattatc

SEQ ID NO: 528007 - DNA, 75 bp, synthetic construct
  source 1..75: mol_type = other DNA
cgcccagggactggtaaaaagcgcggcgttggtaacgcgtctggcgcatggcgttaagcatggaatggactggca

SEQ ID NO: 528008 - DNA, 75 bp, synthetic construct
  source 1..75: mol_type = other DNA
ttcatgcgacgacccgtgatgataaacactggccggaagaacactggcgagaattaattggcttactggcaggtt

SEQ ID NO: 528009 - DNA, 75 bp, synthetic construct
  source 1..75: mol_type = other DNA
aaactgacactcacggcgtccagtccgcttatcggtgtctatgcccctacaggtgctactctgacggcaacgcta

SEQ ID NO: 528010 - DNA, 75 bp, synthetic construct
  source 1..75: mol_type = other DNA
agcaggaaggcgatgacgagcaggcggtacgcagcattctcggtcgtttgctgttcagccaggacgacatcaaaa

SEQ ID NO: 528011 - DNA, 75 bp, synthetic construct
  source 1..75: mol_type = other DNA
atatagggtgttcatggccgtggtggatcgggccggggtcgatgcccggggtaatctcctgttccaacgggcccc

SEQ ID NO: 528012 - DNA, 75 bp, synthetic construct
  source 1..75: mol_type = other DNA
gttgatctgccagtggagcctttcaaggtcacggtgaaggaatatggtttatcccctgcactaccgagtttattg

SEQ ID NO: 528013 - DNA, 75 bp, synthetic construct
  source 1..75: mol_type = other DNA
ctcggcaccaacggcgtcggtaaatcgactttgctgaaaacgctggtgggtgatctggaaccggatagtggcacc

SEQ ID NO: 528014 - DNA, 75 bp, synthetic construct
  source 1..75: mol_type = other DNA
taacgcgctggaagtggaagggctaaccaaggggtttgataacggttcgctgtttaaaaatctcaacctgctgct

SEQ ID NO: 528015 - DNA, 75 bp, synthetic construct
  source 1..75: mol_type = other DNA
ggtttgtacccacatggcggatctggattacggcgagctgcgcgtttatccgggtaactacgatgagtacatgac

SEQ ID NO: 528016 - DNA, 75 bp, synthetic construct
  source 1..75: mol_type = other DNA
atgctgggttatacccgcacacaaaataacactgatgatagtttgcgttgggataaacagcagagctttgaaaat

SEQ ID NO: 528017 - DNA, 75 bp, synthetic construct
  source 1..75: mol_type = other DNA
ctgaacaccgataccataaacagcgcggttaacgggcgttgggatggtcaatacggaaatgtctacgctaccgta

SEQ ID NO: 528018 - DNA, 75 bp, synthetic construct
  source 1..75: mol_type = other DNA
actggcaactcaagcaccgcacatgttgctagctttatcgctgatccatcgactatcgccgccaccaacagtgat

SEQ ID NO: 528019 - DNA, 75 bp, synthetic construct
  source 1..75: mol_type = other DNA
catggactgctcctgtggtaccggcactttcctggccatgactgcgacgcacatcttcaagaagaaactggctgc

SEQ ID NO: 528020 - DNA, 75 bp, synthetic construct
  source 1..75: mol_type = other DNA
gtacttcgccttaaaaagcggctctgccacattaacgtcattaacagcggtgaccgatcaaaacggaatcgcgac

SEQ ID NO: 528021 - DNA, 75 bp, synthetic construct
  source 1..75: mol_type = other DNA
ttcaggttcaggcacagttgaaacagcctaaattacgtggaaacgttcagacggcgcaaagggaggttgcaccat

SEQ ID NO: 528022 - DNA, 75 bp, synthetic construct
  source 1..75: mol_type = other DNA
gtgcgtttgacagttatttgttgctgcgtggtctgcgaactctggttccgcgtatggacctggctcagcgcaacg

SEQ ID NO: 528023 - DNA, 75 bp, synthetic construct
  source 1..75: mol_type = other DNA
ggagcaataacgacagcccagttagttactttgttgcaaaataacggggcattcagtacgaaagcatggatcgct

SEQ ID NO: 528024 - DNA, 75 bp, synthetic construct
  source 1..75: mol_type = other DNA
ggttggggttgggacagcctggaacgtaacagctaatggtgtgttgccggggatgatcgtcattggccccgacaa

SEQ ID NO: 528025 - DNA, 75 bp, synthetic construct
  source 1..75: mol_type = other DNA
gaaaacagggataagagcggtggcattcgttgaaagtgagattgatgaatggattgaagcgactattcggaactc

SEQ ID NO: 528026 - DNA, 75 bp, synthetic construct
  source 1..75: mol_type = other DNA
catttgcaacagaagctgaaaattcgtctaaggcagcaaaagcgtcagagacaaacgcaaaagcatctgaaacgg

SEQ ID NO: 528027 - DNA, 75 bp, synthetic construct
  source 1..75: mol_type = other DNA
aggattgggggtattacggccttattgctgaagaggttggtgagattgccccgcaatatgtccattggcgtgaac

SEQ ID NO: 528028 - DNA, 75 bp, synthetic construct
  source 1..75: mol_type = other DNA
tgccgcaaccgccacaaaattgcagacagcaaggaaaattgctggtgtggcgtttgatggctctgccgatattac

SEQ ID NO: 528029 - DNA, 75 bp, synthetic construct
  source 1..75: mol_type = other DNA
gccggtaacgctgatcctcgcggggctggtagtgagcctttattgtggggcaatcaatcagttactggttatctt

SEQ ID NO: 528030 - DNA, 75 bp, synthetic construct
  source 1..75: mol_type = other DNA
tgcgcccgttaaccctgatggggcttgatgatggcgtggcgcgcaatctggggctggcactgtcgctggcgcgtc

SEQ ID NO: 528031 - DNA, 75 bp, synthetic construct
  source 1..75: mol_type = other DNA
ctggattatccgcagatagtgttattaaaattagcgggcgcgtcctcgattatggctgcacagtctcatcggatt

SEQ ID NO: 528032 - DNA, 75 bp, synthetic construct
  source 1..75: mol_type = other DNA
ttatctgaacataaaacactatcagtaagttggagtcattaccgtcgaggtttacctttaagtaatgcagatctt

SEQ ID NO: 528033 - DNA, 75 bp, synthetic construct
  source 1..75: mol_type = other DNA
cgccgacgcgaattgcgctgctgctgttagcggcttgcctgacggcgaccgcgacaatgaccattggaccgttga

SEQ ID NO: 528034 - DNA, 75 bp, synthetic construct
  source 1..75: mol_type = other DNA
gccggtaacgctgatcctcgcggggcttgtggtgagcctttattgcggggcaatcaatcagttactggttatctt

SEQ ID NO: 528035 - DNA, 75 bp, synthetic construct
  source 1..75: mol_type = other DNA
ttggttaactacaggaagtaatggcggagcaataacaacagcacagttagtgacgttattgcaaaataatggagc

SEQ ID NO: 528036 - DNA, 75 bp, synthetic construct
  source 1..75: mol_type = other DNA
ttctgcatccaccgcgaccacgaaagcgtcagaagctgccacctcagcccgggatgcggcggcctcaaaagaggc

SEQ ID NO: 528037 - DNA, 75 bp, synthetic construct
  source 1..75: mol_type = other DNA
gaaacttagcagtgctgtcgacagcaccagtgaatcgctggccgcaacgccaaaagcagttaaagcagccaatga

SEQ ID NO: 528038 - DNA, 75 bp, synthetic construct
  source 1..75: mol_type = other DNA
aagcgtcggaaacccgtgcagaatcctcaaaaacggcagccgcatcgtccgccagttcggcagcgtcatcggcat

SEQ ID NO: 528039 - DNA, 75 bp, synthetic construct
  source 1..75: mol_type = other DNA
gccgttagatattggagcactgccaacaaccggaggaacagtttcaggtccgttgtctgttacaggtggattaac

SEQ ID NO: 528040 - DNA, 75 bp, synthetic construct
  source 1..75: mol_type = other DNA
tatatcgttgcaaatttttatataggcgtaggtagttgtcggactctccaaatccgagcgcattataaaaatggt

SEQ ID NO: 528041 - DNA, 75 bp, synthetic construct
  source 1..75: mol_type = other DNA
cagtgctcttccaagtatgactgtgcgaacttcctctgtttcaggtggggatatgggcatgagtttgtccacatt

SEQ ID NO: 528042 - DNA, 75 bp, synthetic construct
  source 1..75: mol_type = other DNA
taagttattcacactttcaagctcaaataccgctgcccgtaatgcatcatttaacttgtggggaaattcgtcaag

SEQ ID NO: 528043 - DNA, 75 bp, synthetic construct
  source 1..75: mol_type = other DNA
gcgggtaatcagaatacgactggtaacgcagcttcagccacgaagttacaaacggctcgtactatcggtggtgtt

SEQ ID NO: 528044 - DNA, 75 bp, synthetic construct
  source 1..75: mol_type = other DNA
tacaggtaatgctgcgaccgccacgaaacttcaggcagccagaacgattaacggtgtgtcatttgatggtagtgc

SEQ ID NO: 528045 - DNA, 75 bp, synthetic construct
  source 1..75: mol_type = other DNA
ctttttccggataaggttattagctatgaatctgaatatgatgttgtttttccgggaccatcaagaggaaagtat

SEQ ID NO: 528046 - DNA, 75 bp, synthetic construct
  source 1..75: mol_type = other DNA
aaacaaaccaactgcatctgacgttggtgcattacctcttaccggtggtacattatctggaggtttgacatcttc

SEQ ID NO: 528047 - DNA, 75 bp, synthetic construct
  source 1..75: mol_type = other DNA
cgaaaaggtgtgatgtatgaaaaatcaggtcatgtaattacagggcttggcattattggcgctgttgatggtgat

SEQ ID NO: 528048 - DNA, 75 bp, synthetic construct
  source 1..75: mol_type = other DNA
gagtggttacaccgtcaagcctcctaccggagacaccagtgagcagacactatttattgattattttaatctgtt

SEQ ID NO: 528049 - DNA, 75 bp, synthetic construct
  source 1..75: mol_type = other DNA
tgcaaattgcagaagattatcaggccttcaaccttggtattggtaaagatttaggactttttagtgccttttctt

SEQ ID NO: 528050 - DNA, 75 bp, synthetic construct
  source 1..75: mol_type = other DNA
atgttggtcagcaacatctgtcactctccgttccgcaaatatatgtcggcagaatggctcgcggctatgtttctc

SEQ ID NO: 528051 - DNA, 75 bp, synthetic construct
  source 1..75: mol_type = other DNA
taccggcgaaaccattcggataagccgattagccgaacctttctggcaggaccattttttgggcgcgcgcaggat

SEQ ID NO: 528052 - DNA, 75 bp, synthetic construct
  source 1..75: mol_type = other DNA
tggcagcattgtcgcggaaaatggtcaggtttatctgactggacttccacagtcagggaaattacaggtttcatg

SEQ ID NO: 528053 - DNA, 75 bp, synthetic construct
  source 1..75: mol_type = other DNA
actcacggtgctattgccagagcaacatttaatgtacaaatcggcgggaaagtattaatgacgttgaagtacggt

SEQ ID NO: 528054 - DNA, 75 bp, synthetic construct
  source 1..75: mol_type = other DNA
ggagagagaagggggcacctgtaacaaatatagcactggaaaaactggcagaatttaactcaacaaacgatatgt

SEQ ID NO: 528055 - DNA, 75 bp, synthetic construct
  source 1..75: mol_type = other DNA
atgcaaatgctattgcaggcatggagcacacttgtactttgacaccagagacgaatgtatctcagaacgggccgt

SEQ ID NO: 528056 - DNA, 75 bp, synthetic construct
  source 1..75: mol_type = other DNA
gatgcgtacctgcaccttgactccggagacgaatgtgtctcagaacgggccgttcggcttggcatcggccacgtt

SEQ ID NO: 528057 - DNA, 75 bp, synthetic construct
  source 1..75: mol_type = other DNA
cgcgcccgaagcgcaaaatgatccccgttttgtgttggcgaatgtaaaactttcctctctcaccgaattgaccgc

SEQ ID NO: 528058 - DNA, 75 bp, synthetic construct
  source 1..75: mol_type = other DNA
agcctgggcaccctgaccccggggacaaatatacacgctccgatggaaattacctggaagtgtgaaggtaatgcg

SEQ ID NO: 528059 - DNA, 75 bp, synthetic construct
  source 1..75: mol_type = other DNA
gcatttattgaaaactttgcaaaatcgtcaaactgtaaaaacgaaaatttcactcaggatatcaataatcttgtg

SEQ ID NO: 528060 - DNA, 75 bp, synthetic construct
  source 1..75: mol_type = other DNA
gtcgccgcgcaccggggaaaacattcgggtaagccggttagccgaacctttctggcaggatcattttttgggcgc

SEQ ID NO: 528061 - DNA, 75 bp, synthetic construct
  source 1..75: mol_type = other DNA
actttccgtgggacgcgtgcagacgcccgtactcggactggtggtgcgccgcgacgaagagattgaaaacttcgt

SEQ ID NO: 528062 - DNA, 75 bp, synthetic construct
  source 1..75: mol_type = other DNA
ctatctgcaactggcaccggaaaagcgccagcaggtgcagcgttgtttgataaacgacctgaacccgcaggcggt

SEQ ID NO: 528063 - DNA, 75 bp, synthetic construct
  source 1..75: mol_type = other DNA
atactgtcagacgtttcatgaatgaagattcgcttgatacgtatgtagactcaaaacgtgatgttctacctgcca

SEQ ID NO: 528064 - DNA, 75 bp, synthetic construct
  source 1..75: mol_type = other DNA
tctgcgccaacctggcggcggtgatcagccagaccaataaacgggtgttgttgatcgactgcgatatgcgcaaag

SEQ ID NO: 528065 - DNA, 75 bp, synthetic construct
  source 1..75: mol_type = other DNA
aatcgatattggtcgcctggttggcaccatcattgaagcacgctggtgggtgattggcattaccgccgtattcgc

SEQ ID NO: 528066 - DNA, 75 bp, synthetic construct
  source 1..75: mol_type = other DNA
acccaccgcgtatgccttcgggcgcatgacctttcgcggtaaggcggtggcggagatgctgacgctgatcccgct

SEQ ID NO: 528067 - DNA, 75 bp, synthetic construct
  source 1..75: mol_type = other DNA
gtctgaggtgctggcggaggaccagaagggggctgccccttttgtggtgataccaccgctgtttcgtcttgacgc

SEQ ID NO: 528068 - DNA, 75 bp, synthetic construct
  source 1..75: mol_type = other DNA
tatcctatcgatatgaattggaaggggggggttacatggagaatagtgaccgattatggtgggatcagtaaccaa

SEQ ID NO: 528069 - DNA, 75 bp, synthetic construct
  source 1..75: mol_type = other DNA
caccggcgaaaccattcggataagtcggttagccgaacctttctggcaggaccattttttgggcgcgcggcggat

SEQ ID NO: 528070 - DNA, 75 bp, synthetic construct
  source 1..75: mol_type = other DNA
tgctagcatcattgacgctattgcagaaaggaagagggcagaaaaagaactgggttttcatgaaaaccatggcag

SEQ ID NO: 528071 - DNA, 75 bp, synthetic construct
  source 1..75: mol_type = other DNA
gttgtatgacctggagcaggaggagatttccgcaccgggaattcaggcccgtcaggcactcgacagtctgatggc

SEQ ID NO: 528072 - DNA, 75 bp, synthetic construct
  source 1..75: mol_type = other DNA
gctggttcagtctgaggtgctggcagagaatcagaaggacccggccccctttgtggtgacgccgccgcttttccg

SEQ ID NO: 528073 - DNA, 75 bp, synthetic construct
  source 1..75: mol_type = other DNA
ctacactattacccgttacaaccacagcactcactacgcaatggcggtctggcagttaggacaagccgtggcgct

SEQ ID NO: 528074 - DNA, 75 bp, synthetic construct
  source 1..75: mol_type = other DNA
agccaaggcaagtaaagcggagaaaaatctcccgtaatgaagagatgctatcccgaagaacaggcattccctccc

SEQ ID NO: 528075 - DNA, 75 bp, synthetic construct
  source 1..75: mol_type = other DNA
aaaggatatacagaccaaggaagttcctgttcctgttcctgttcctgttcctgttcctgttcctgttcctgtaga

SEQ ID NO: 528076 - DNA, 75 bp, synthetic construct
  source 1..75: mol_type = other DNA
ggggtaagagcttctcaggtgtggttctctatgtgttaaagccaggctcacaccatagaaccgttccagaagtaa

SEQ ID NO: 528077 - DNA, 75 bp, synthetic construct
  source 1..75: mol_type = other DNA
agtgttgagactttcctgttaagacttgaagaggaaagagttttatggacagctaacatagctaccactggtaga

SEQ ID NO: 528078 - DNA, 75 bp, synthetic construct
  source 1..75: mol_type = other DNA
ctgctcctgctcctgctcctgcaaaagatgttgcaacaacggatattccaagggaaagcataagtgaaaaaattg

SEQ ID NO: 528079 - DNA, 75 bp, synthetic construct
  source 1..75: mol_type = other DNA
cgttgctatgtgcttcatgacgatccggctggtcagcacatacacattatcgcaagtcgcatagacctcaatgga

SEQ ID NO: 528080 - DNA, 75 bp, synthetic construct
  source 1..75: mol_type = other DNA
gggaactatctggggcagaccctgcagtctgcctccacgcaatcgtcgtctcagaccattgacggtaactggcac

SEQ ID NO: 528081 - DNA, 75 bp, synthetic construct
  source 1..75: mol_type = other DNA
ccgggatgctttttggtgcgcagctggctgcagggagcagtgatttccggttctctgagccggagattcagcgca

SEQ ID NO: 528082 - DNA, 75 bp, synthetic construct
  source 1..75: mol_type = other DNA
ggacagctataactattttcatcgtacttccctgacatccacggagatcatccgaaagaatgtgataatgaacgg

SEQ ID NO: 528083 - DNA, 75 bp, synthetic construct
  source 1..75: mol_type = other DNA
atccgcgctgggatccaggcagtgccttatggtcaacatgaagcggctcggtcactgggattacccaatccggtt

SEQ ID NO: 528084 - DNA, 75 bp, synthetic construct
  source 1..75: mol_type = other DNA
aggcctttgtggaagagcgtatgaagccgcagttgttgcaggagtttgagcagaacaaaggacagaccggagaag

SEQ ID NO: 528085 - DNA, 75 bp, synthetic construct
  source 1..75: mol_type = other DNA
aattctataaaaatgactttgtaattagtcatgatgaaaatattaaacaaatcaaaaatgacatgagtaatagat

SEQ ID NO: 528086 - DNA, 75 bp, synthetic construct
  source 1..75: mol_type = other DNA
ggctgcaaaccgggaaacgattcttgagaaaatccatcagcttgaagaaaaaattcgtctggaaagacaacagga

SEQ ID NO: 528087 - DNA, 75 bp, synthetic construct
  source 1..75: mol_type = other DNA
cggttagccgaacctttctggcaggaccattttttaggcgcgcgcaggattttgacggaggaaacgattttgtag

SEQ ID NO: 528088 - DNA, 75 bp, synthetic construct
  source 1..75: mol_type = other DNA
cggttagccgaacctttctggcaggaccattttttaggcgcgcgacggattttgacggaagagacgattttgtag

SEQ ID NO: 528089 - DNA, 75 bp, synthetic construct
  source 1..75: mol_type = other DNA
acgcggcccgataaaggcttcgactgtagcgggttggttttttatgcctacaacaagatccttgaggcgaagctc

SEQ ID NO: 528090 - DNA, 75 bp, synthetic construct
  source 1..75: mol_type = other DNA
accgaatggcttcaaaaccaagtacagcatttcacaacttgctgcagctggactaacgccacagcagccgctggg

SEQ ID NO: 528091 - DNA, 75 bp, synthetic construct
  source 1..75: mol_type = other DNA
gaactatttcaaagcgcacggctgggtgaaaggcgatcaggtcgcggtaatggcaaacggtcaggcgccaggctt

SEQ ID NO: 528092 - DNA, 75 bp, synthetic construct
  source 1..75: mol_type = other DNA
gggcgtgatgctttaccatacttgcccctggttgaatctgttaaatggacccctcatgttcaagcgtcgttatgt

SEQ ID NO: 528093 - DNA, 75 bp, synthetic construct
  source 1..75: mol_type = other DNA
ccgtctgcatcatactttaatatcgcgcgtgaacaatctccctggaagaaatatcctcttaaagaggcgcggact

SEQ ID NO: 528094 - DNA, 75 bp, synthetic construct
  source 1..75: mol_type = other DNA
gtgaaaaagaatgtcagcaacttacaggcctgagccgttcatgccgctaccgcctggaaaaagccggacaattcc

SEQ ID NO: 528095 - DNA, 75 bp, synthetic construct
  source 1..75: mol_type = other DNA
aatctgggaccgcctgatgacagatacgggcatgtacaccttcatgagttcatgccagcgtgatgagtggaatag

SEQ ID NO: 528096 - DNA, 75 bp, synthetic construct
  source 1..75: mol_type = other DNA
gaaacagcaaatgcatggttgccgacctttattgaagcctataacaaccggttcgctacgtcgcctcgtactact

SEQ ID NO: 528097 - DNA, 75 bp, synthetic construct
  source 1..75: mol_type = other DNA
tgatcgtagtcatcgaaagtatcagcaaaccattaccgataaaacagtattgattcactatacagggataactaa

SEQ ID NO: 528098 - DNA, 75 bp, synthetic construct
  source 1..75: mol_type = other DNA
aatggacgttatttcaatgcaggcgttatctatgtcaatcttaaaaaatggcatgaagcaaatttgacaccgtat

SEQ ID NO: 528099 - DNA, 75 bp, synthetic construct
  source 1..75: mol_type = other DNA
atgacattctcaagagtccttgctgtcacagttacattgaacgttactggcgcggcagggcagccgactgtatcg

SEQ ID NO: 528100 - DNA, 75 bp, synthetic construct
  source 1..75: mol_type = other DNA
aataccgttggtggcggaactgggcgttctctggcaactgcggcaggcgctatcgcaggtggcgtagcgggtcag

SEQ ID NO: 528101 - DNA, 75 bp, synthetic construct
  source 1..75: mol_type = other DNA
cgaatcctaaatctggatggagtaaggggccggatggggtaattacacaatggggtattttcggtttccccgttg

SEQ ID NO: 528102 - DNA, 75 bp, synthetic construct
  source 1..75: mol_type = other DNA
ctgagcgggtgaagaaaaacagtaccgcacaagccggatgtaaactgttcctgacgaaaccgttggggattggcg

SEQ ID NO: 528103 - DNA, 75 bp, synthetic construct
  source 1..75: mol_type = other DNA
cgctacgcatgtcgtcaggcgggtattgcgctggctggcggtcactccatcgacgcgccggaaccgattttcggt

SEQ ID NO: 528104 - DNA, 75 bp, synthetic construct
  source 1..75: mol_type = other DNA
cagcctggaaaagaaatccgagttctaatcgctggagaaaattgcctgatggaaccatcattcaaatgggaatat

SEQ ID NO: 528105 - DNA, 75 bp, synthetic construct
  source 1..75: mol_type = other DNA
atgctctactccaccattgacgttgtggtgcatatggaaaagcggaaaatcaaagaaatttattttgaccctgaa

SEQ ID NO: 528106 - DNA, 75 bp, synthetic construct
  source 1..75: mol_type = other DNA
atgctgtgcgcgatgattggttctggtctggcaggattgctatgcggcctgaacggcgttatggcgaatggcatc

SEQ ID NO: 528107 - DNA, 75 bp, synthetic construct
  source 1..75: mol_type = other DNA
acggcatcaacctgaaatatcgcttcccgatgctgtgcgcgatgattggttctggtctggcaggattactatgcg

SEQ ID NO: 528108 - DNA, 75 bp, synthetic construct
  source 1..75: mol_type = other DNA
attacactgacaatggcagatatccaggagtctctgctttctccagcaaccatgcctgcttatggagttaactca

SEQ ID NO: 528109 - DNA, 75 bp, synthetic construct
  source 1..75: mol_type = other DNA
gttgcgttatgcaaagaacaaggtttattggtgggactggcctccgcgtcaccactacatatgctggaaaaagtg

SEQ ID NO: 528110 - DNA, 75 bp, synthetic construct
  source 1..75: mol_type = other DNA
tgctgttaagccgcaagaatccgtttggcgatatcaaatcggatggcacggtgaaaacggctctcgaaaaccttg

SEQ ID NO: 528111 - DNA, 75 bp, synthetic construct
  source 1..75: mol_type = other DNA
cgattaacaaactgtccccggaaattgcccgtgaagtgaccgaaggtggccgttatgcatgccgtcaggcgggta

SEQ ID NO: 528112 - DNA, 75 bp, synthetic construct
  source 1..75: mol_type = other DNA
tttgagtggaaaggatgtcgctggtcttctcacataccttggtttaggagaagcggcgaaaagggatgtgggcac

SEQ ID NO: 528113 - DNA, 75 bp, synthetic construct
  source 1..75: mol_type = other DNA
gcttgtcttattggccttgtcgccactattgtccatcaaacgcggaatacgttctcagtgaaagaacattggctg

SEQ ID NO: 528114 - DNA, 75 bp, synthetic construct
  source 1..75: mol_type = other DNA
gtgctgttacgcagcgcaaatatcacaccacattatgttgcaggccatgtgctcctggggctaacagcaatttgc

SEQ ID NO: 528115 - DNA, 75 bp, synthetic construct
  source 1..75: mol_type = other DNA
cctcttttgccagtggtgatggatggatgaaattacccaacgggaaaatcctgcaatatggtcgtggtgcggtta

SEQ ID NO: 528116 - DNA, 75 bp, synthetic construct
  source 1..75: mol_type = other DNA
ttgcaactgatcgaaatgccaatgttatgtcgcaggaggaatgggaaacgttgcctgcgcttatatccggattta

SEQ ID NO: 528117 - DNA, 75 bp, synthetic construct
  source 1..75: mol_type = other DNA
tggacaatacgcttaccaatttgagtggaaaggatgtagctggtcttctcgcataccttggtttaggagaagcgg

SEQ ID NO: 528118 - DNA, 75 bp, synthetic construct
  source 1..75: mol_type = other DNA
ctggcattgtttactaccgcatttattattatttcgcagttaacgcatggtgtgaataagccctataacacactt

SEQ ID NO: 528119 - DNA, 75 bp, synthetic construct
  source 1..75: mol_type = other DNA
tggggcatttgagtgaaatgtgtcagggtgcaggcgtccaggcgcgcgtgaactacgaagcaattccgaaactgc

SEQ ID NO: 528120 - DNA, 75 bp, synthetic construct
  source 1..75: mol_type = other DNA
actttgccagctacggtcatctgatgggtgaaatgccgcgtgaagtgcgcgatctgctgtgcgatccgcaaactt

SEQ ID NO: 528121 - DNA, 75 bp, synthetic construct
  source 1..75: mol_type = other DNA
gtcatttctggccagcgataatgtgatggcagatgaatttgtcgccgggcatgtgattttcggtgttggcatgat

SEQ ID NO: 528122 - DNA, 75 bp, synthetic construct
  source 1..75: mol_type = other DNA
gtgaatatttcgttgcagggcatgttctgatttctctttctgcgatatgtctggcattgttcactaccgcattta

SEQ ID NO: 528123 - DNA, 75 bp, synthetic construct
  source 1..75: mol_type = other DNA
atgttatttttggtgttgggatgattgccgcctgcgtatcaaccgtggcggcgtcttccgggcattttctgctaa

SEQ ID NO: 528124 - DNA, 75 bp, synthetic construct
  source 1..75: mol_type = other DNA
gacctgacatgtgatgctgacggtttctactgccgtgaagttgtgaaacgaatgtttgaagtgtggtgtcattgt

SEQ ID NO: 528125 - DNA, 75 bp, synthetic construct
  source 1..75: mol_type = other DNA
cgccgtgagttggggctgattacgcctcctgtttctgaggtaaatgaacaaaatatggagacagatgatgcctaa

SEQ ID NO: 528126 - DNA, 75 bp, synthetic construct
  source 1..75: mol_type = other DNA
cgccgacgccgtggaaatgttacgcgccaacaacgaaattgacgccgggcgactggatgaagaatccggtgaatg

SEQ ID NO: 528127 - DNA, 75 bp, synthetic construct
  source 1..75: mol_type = other DNA
gttctttacgccgatcaagctgacctttatggtgtcgctgattttgtcagcgccggtgattctctatcaggtgtg

SEQ ID NO: 528128 - DNA, 75 bp, synthetic construct
  source 1..75: mol_type = other DNA
ggctccatcctcagaggtagcaagtctgcaccctaatcacgtctgggagattgatgcgtcgctttgtacgcttta

SEQ ID NO: 528129 - DNA, 75 bp, synthetic construct
  source 1..75: mol_type = other DNA
ctgcaggtgatggacagcgcgaagttctacaagaacaagcccgctaaccttgcccgtatcgccagtgaccgcgtg

SEQ ID NO: 528130 - DNA, 75 bp, synthetic construct
  source 1..75: mol_type = other DNA
tgcaccgcataccgaagtggccagtctgcagcccaatcatgtctggcagattgacgcctcactctgcacgcttta

SEQ ID NO: 528131 - DNA, 75 bp, synthetic construct
  source 1..75: mol_type = other DNA
cgatgaaggtttcggcgtgcgggtggcggaacggctatatgcccattatcactggcccgaaaacgtggagattgt

SEQ ID NO: 528132 - DNA, 75 bp, synthetic construct
  source 1..75: mol_type = other DNA
tgggggcaggcgagatttggtgggtctggtggtgaagatgccggatatcttaacgattttccttttgcctttccg

SEQ ID NO: 528133 - DNA, 75 bp, synthetic construct
  source 1..75: mol_type = other DNA
gccagtaccgtcggtgatgtacgtattgttgacccggcaatcacccagcctggtgtactgaaaccgaagaaaggg

SEQ ID NO: 528134 - DNA, 75 bp, synthetic construct
  source 1..75: mol_type = other DNA
gaaaaaagcaaaaaaactaaagaaaaaatccacccgcccgtcggggcggttgtcatatggagtacaggatgtttg

SEQ ID NO: 528135 - DNA, 75 bp, synthetic construct
  source 1..75: mol_type = other DNA
gcgaactaaacaagggcaaaacactgcttcacgccgggccgccaatgcgctggcaatactggagcagggggaagt

SEQ ID NO: 528136 - DNA, 75 bp, synthetic construct
  source 1..75: mol_type = other DNA
aaggggcgtgcgtgggcgcatgtctgttcgaaggttgggcgaaagatgaagcgcaggcgctggcaatactggagc

SEQ ID NO: 528137 - DNA, 75 bp, synthetic construct
  source 1..75: mol_type = other DNA
gagacatgctggtactgaagcagcaactgaaagaggcccgtattccacaggcggtggtggcgagagctgtcgatg

SEQ ID NO: 528138 - DNA, 75 bp, synthetic construct
  source 1..75: mol_type = other DNA
tgacccgtataaacatatcgatgacaccacgcttccggcctgtataccgaagcgcggtcaggcctctgacgtacg

SEQ ID NO: 528139 - DNA, 75 bp, synthetic construct
  source 1..75: mol_type = other DNA
ccatgcaggagcgtggcggcgcagacgtgctgcacggcgtgccgaaaatactctatctcgaccccggctcggcaa

SEQ ID NO: 528140 - DNA, 75 bp, synthetic construct
  source 1..75: mol_type = other DNA
ccggcgatgaccgttttactgggaaaaaccaccctgaccacgccggcaggacgtgaggggctttctccccgggtc

SEQ ID NO: 528141 - DNA, 75 bp, synthetic construct
  source 1..75: mol_type = other DNA
ctccgtcttcccgatttacgcggtgagtttatccgtggatgggacgacgggcgaaaagtggatacagggcgcgat

SEQ ID NO: 528142 - DNA, 75 bp, synthetic construct
  source 1..75: mol_type = other DNA
gattgaaggtgtctatggtgcgcagataatggcgggctacggggaattgcgtcttggtggtgaggtgcctgaacg

SEQ ID NO: 528143 - DNA, 75 bp, synthetic construct
  source 1..75: mol_type = other DNA
ttgcaggtgatggacagctcgaagttctacaagaacaagcctgccaacatcgcccgcatcgccagtgaccgcgtg

SEQ ID NO: 528144 - DNA, 75 bp, synthetic construct
  source 1..75: mol_type = other DNA
gtgactgataaacgcaaaaaacgcgcagatgccgggcgcagcgccctgacccgcgacgaagccgcgctgatatct

SEQ ID NO: 528145 - DNA, 75 bp, synthetic construct
  source 1..75: mol_type = other DNA
gcactggatgaagtcatggccacgctgaccacgccggcacgcagcagggttatcagcattgttaacggcaactga

SEQ ID NO: 528146 - DNA, 75 bp, synthetic construct
  source 1..75: mol_type = other DNA
aaaccgaagcgctggtcaccggtacagacaacgccgcagatgcagctgccgcacgcaaggcgaaggcgctgccgt

SEQ ID NO: 528147 - DNA, 75 bp, synthetic construct
  source 1..75: mol_type = other DNA
agccgagccctgcgtaactatggcctgcacccggaacaactggatgcccctgcaccgcataccgaagtggccagt

SEQ ID NO: 528148 - DNA, 75 bp, synthetic construct
  source 1..75: mol_type = other DNA
agcgaggtcaggcctctgacgtacgcgggctgcgcactgaacaacgtcccatgactcatgtggaggccgcgaaag

SEQ ID NO: 528149 - DNA, 75 bp, synthetic construct
  source 1..75: mol_type = other DNA
accaccggtgagtttttcccgttgtctgaagatgccatcagccgtgctctgcgtaactatggcctgcacccggaa

SEQ ID NO: 528150 - DNA, 75 bp, synthetic construct
  source 1..75: mol_type = other DNA
atgacagaaagcatcggaggaaaaaccgcactggactgggcgatgaaacaggattttcgctgcggctgctggctc

SEQ ID NO: 528151 - DNA, 75 bp, synthetic construct
  source 1..75: mol_type = other DNA
ggatgctgtcattaatggatacgcaggcccgtgatacatggtaccggtcactggagtacgataattttccggaaa

SEQ ID NO: 528152 - DNA, 75 bp, synthetic construct
  source 1..75: mol_type = other DNA
gctgtcattaatggatgcacaggcacgtgatacatggtaccggtcactggaatacgataattttccggaaatcag

SEQ ID NO: 528153 - DNA, 75 bp, synthetic construct
  source 1..75: mol_type = other DNA
agcccaacatccgctgggtaaagagattatcgagcaagaaagccaatggcagagttatgttcattggccgctgga

SEQ ID NO: 528154 - DNA, 75 bp, synthetic construct
  source 1..75: mol_type = other DNA
gctggaacgttattttgtcgatcgtaatctcgggcaggaaaactttgtcgcagctgaacaagccgcacgtgaagt

SEQ ID NO: 528155 - DNA, 75 bp, synthetic construct
  source 1..75: mol_type = other DNA
gcagccgtacgctgcgtaatattcagcgccgctttatgatcgatatcgatcaggcacggcgcgtagccagcgttg

SEQ ID NO: 528156 - DNA, 75 bp, synthetic construct
  source 1..75: mol_type = other DNA
cacattctggctgtacgaaagagtacattgctgcaaatcgacacacttatccgacaactggctgaagtatcagca

SEQ ID NO: 528157 - DNA, 75 bp, synthetic construct
  source 1..75: mol_type = other DNA
ggaaagaatgctacatctgttcagcgacaaaccgattcccgacaaccgggaaaacatcactattcgtctggatgg

SEQ ID NO: 528158 - DNA, 75 bp, synthetic construct
  source 1..75: mol_type = other DNA
atggagaaacctgaaacggcaatgaaagccatcacacacaatctcgatcgtgaaatctggcgtgacctgatgcaa

SEQ ID NO: 528159 - DNA, 75 bp, synthetic construct
  source 1..75: mol_type = other DNA
gactgggccatgaaacaggattttcgctgcggctgctggctgatggagaaaccggaaaccgcaatgaaagccatc

SEQ ID NO: 528160 - DNA, 75 bp, synthetic construct
  source 1..75: mol_type = other DNA
gaataaggatgaggtgtttgagcggggggtgatcaacgtcttcaggggactgagctggaattacaaaaccaattc

SEQ ID NO: 528161 - DNA, 75 bp, synthetic construct
  source 1..75: mol_type = other DNA
cactgctgcaaatcgacacacttatccggcaactggctgaaatctcagcaatgacagaaagtattggcggtaaag

SEQ ID NO: 528162 - DNA, 75 bp, synthetic construct
  source 1..75: mol_type = other DNA
agccgcgatttgctaatcagcgcctgtcaacttcatgaaattggtctgagcgttgatttcaaacaagcgccgcaa

SEQ ID NO: 528163 - DNA, 75 bp, synthetic construct
  source 1..75: mol_type = other DNA
tacgcaagtatttgaagcgtatagcaagtttattgggcgtgagcaacacgttgcgcttgatacgttgctacccgc

SEQ ID NO: 528164 - DNA, 75 bp, synthetic construct
  source 1..75: mol_type = other DNA
gttcgttggatgaattagtccagcatgcggatatcctgacattccatacgccactctttaaagacggaccttaca

SEQ ID NO: 528165 - DNA, 75 bp, synthetic construct
  source 1..75: mol_type = other DNA
gattgcggtggtggaatatgttttctcctcactgctgatgcttgccgaacgcgatggattttcactgcacgagcg

SEQ ID NO: 528166 - DNA, 75 bp, synthetic construct
  source 1..75: mol_type = other DNA
tgatgtgcgccgcgatgacgcgccgctgcgtaaagtcgccgggataccgggtgagttcgataaactgcgcaaaaa

SEQ ID NO: 528167 - DNA, 75 bp, synthetic construct
  source 1..75: mol_type = other DNA
acgttgcgctggatacattactgcccgcgccagagtttggtcgcattacgctgcatggcccgctcgatcaaccga

SEQ ID NO: 528168 - DNA, 75 bp, synthetic construct
  source 1..75: mol_type = other DNA
gttctcttgatgagctggttcagcacgcggatattctgactttccatacgccactcttcaaagacggacagtaca

SEQ ID NO: 528169 - DNA, 75 bp, synthetic construct
  source 1..75: mol_type = other DNA
ccgggcaacaggcagatcgacttgccgatctggaaagaatgctacacctgttcagcggcaaaccgatccccgaca

SEQ ID NO: 528170 - DNA, 75 bp, synthetic construct
  source 1..75: mol_type = other DNA
gtaaagagtgctatgaagacgagatgttcagcattaaatactttaagaaaggctcagcacacatcacgttcagga

SEQ ID NO: 528171 - DNA, 75 bp, synthetic construct
  source 1..75: mol_type = other DNA
atgacagaaagtattggcggtaaaacagccccggactgggccatgaaacaggattttcgttgcggttgctggctg

SEQ ID NO: 528172 - DNA, 75 bp, synthetic construct
  source 1..75: mol_type = other DNA
cacgcaagtgtttgaggcttatagcaagtttattggtcatgaacagcacatcgcgctggataccttattgccaac

SEQ ID NO: 528173 - DNA, 75 bp, synthetic construct
  source 1..75: mol_type = other DNA
ggttaattaccggagcctggtacagtgccttagggttggaactggaagatcaccagggattagttcatttcccta

SEQ ID NO: 528174 - DNA, 75 bp, synthetic construct
  source 1..75: mol_type = other DNA
tcagcggcaaaccgctccccgacaaccgggaaaacatcacccttcgtctggatgatcacattcagtctgttcagg

SEQ ID NO: 528175 - DNA, 75 bp, synthetic construct
  source 1..75: mol_type = other DNA
taatggatgcacaggcccgtgatacatggtaccggtcactggagtacgataattttccggaaatcagtgaagcga

SEQ ID NO: 528176 - DNA, 75 bp, synthetic construct
  source 1..75: mol_type = other DNA
taaaaggtgatttgaccggggttgcggcagaaggtactacctcggaaaaactgctcgctcggttgaaaaatatcg

SEQ ID NO: 528177 - DNA, 75 bp, synthetic construct
  source 1..75: mol_type = other DNA
gtgttacagacggcattggctttacgcttaccagaaatctcagtactgacagaaagtatcggaggtaaaaccgcc

SEQ ID NO: 528178 - DNA, 75 bp, synthetic construct
  source 1..75: mol_type = other DNA
gttcagcggcaaaccgatccccgacagccgggaaaatattattattcggctggatgatcacatccgctccgttca

SEQ ID NO: 528179 - DNA, 75 bp, synthetic construct
  source 1..75: mol_type = other DNA
cgaaactcgtctttttcttcgatgaggcgcatctgctgtttaacgatgcaccgcaagtgctgctggataaaattg

SEQ ID NO: 528180 - DNA, 75 bp, synthetic construct
  source 1..75: mol_type = other DNA
tgaaaggcgatttgaccggggttgcacaggaaggtacgacctcggaaaaactgctcgctcggttaaaaagtatcg

SEQ ID NO: 528181 - DNA, 75 bp, synthetic construct
  source 1..75: mol_type = other DNA
gggcgacggtttcggatctggggccgctgttgctggcgcgactgttgaatctcaacgatgtgcaatctggcgtgc

SEQ ID NO: 528182 - DNA, 75 bp, synthetic construct
  source 1..75: mol_type = other DNA
gaaccgggcatggtactgaccgtagagccggggctgtacattgcgccggatgcggatgtaccagaacaatatcgc

SEQ ID NO: 528183 - DNA, 75 bp, synthetic construct
  source 1..75: mol_type = other DNA
tcggcagcggtgaaaatggctgcattttgcattacaccgaaaacgagtgtgaactgcgcgatggcgacctggtgt

SEQ ID NO: 528184 - DNA, 75 bp, synthetic construct
  source 1..75: mol_type = other DNA
tgattgacgcgggttgcgaatacaaaggttacgctggcgatattacccgcaccttcccggtcaacggcaaattca

SEQ ID NO: 528185 - DNA, 75 bp, synthetic construct
  source 1..75: mol_type = other DNA
atttgaaacactggatttggttgattctggtcgtggttctggtggttggcgtgcgctggtggctgaaacggcgtg

SEQ ID NO: 528186 - DNA, 75 bp, synthetic construct
  source 1..75: mol_type = other DNA
cgaaaacctcaccgccagcgtggtgaaaaagccggaagaaatcgaagcattgatggcagctgcgagaaagcaatg

SEQ ID NO: 528187 - DNA, 75 bp, synthetic construct
  source 1..75: mol_type = other DNA
ttcaaatcgccagaagagattgccgtacttcgccgcgcgggtgaaatcaccgccctggcgcatacccgggcgatg

SEQ ID NO: 528188 - DNA, 75 bp, synthetic construct
  source 1..75: mol_type = other DNA
atcctcccgcgaaagggaaagagatagcggtagatgacggcattcttggtggattgaaggatattttgttcggca

SEQ ID NO: 528189 - DNA, 75 bp, synthetic construct
  source 1..75: mol_type = other DNA
ggtgaccatagatttcatctgaacagcgggcaacaggccgatcgacttgccgatctggaaagaatgctacacctg

SEQ ID NO: 528190 - DNA, 75 bp, synthetic construct
  source 1..75: mol_type = other DNA
ggtaaagaatgctatgaagatgagatgttcagcatcagatactttaagaaaggctccgcgcacatcaggttcagg

SEQ ID NO: 528191 - DNA, 75 bp, synthetic construct
  source 1..75: mol_type = other DNA
cggctctggactgggccatgaaacaggattttcgctgcggttgctggctgatggagaaaccggaaaccgcaatga

SEQ ID NO: 528192 - DNA, 75 bp, synthetic construct
  source 1..75: mol_type = other DNA
ggatctgcacacatcactttcaaaaggctggaactgattgacagaattaacgatataatagctaggtactttcct

SEQ ID NO: 528193 - DNA, 75 bp, synthetic construct
  source 1..75: mol_type = other DNA
atcgtcaacaatctggtgaggtgggaccgatggggattgcatcttatcaccgggcaacaggcagatcgactcgcc

SEQ ID NO: 528194 - DNA, 75 bp, synthetic construct
  source 1..75: mol_type = other DNA
tgttcagtatcagatactttaagaagggctccgcgcatatcacgttcagaaaaccagaactggttgatcggctaa

SEQ ID NO: 528195 - DNA, 75 bp, synthetic construct
  source 1..75: mol_type = other DNA
accgatggggattgcatcttatcaccgggcaacaggcagatcgactcgccgacctggaaagaatgctgcatctgt

SEQ ID NO: 528196 - DNA, 75 bp, synthetic construct
  source 1..75: mol_type = other DNA
atgcgcaggcccgtgatacatggtaccggtcactggaatacgataattttccggaaatcagtgaagcgaacattc

SEQ ID NO: 528197 - DNA, 75 bp, synthetic construct
  source 1..75: mol_type = other DNA
ggattttcgctgtggctgctggctgatggataaacctgaaacagcaatgaaagccatcacccgcaatctcgatcg

SEQ ID NO: 528198 - DNA, 75 bp, synthetic construct
  source 1..75: mol_type = other DNA
gaacattatgagcacatttgaacaactgcaccagaataaggatgaggtgtttgagcggggagtgattaacgtctt

SEQ ID NO: 528199 - DNA, 75 bp, synthetic construct
  source 1..75: mol_type = other DNA
catctgttcagcggcaaaccgatccccgacagccgggaaaatatcatcattcggctggatgatcacatccgctcc

SEQ ID NO: 528200 - DNA, 75 bp, synthetic construct
  source 1..75: mol_type = other DNA
atgtcagacatcacaatctcccgtccggaagtggtcaccgggcatacggacgttatttgctcaaccagtatccac

SEQ ID NO: 528201 - DNA, 75 bp, synthetic construct
  source 1..75: mol_type = other DNA
tgatggtagccgtaacgctacctgtcgcagcagcacagtacgtaaaacccggagtggttctaaccctgaatccgg

SEQ ID NO: 528202 - DNA, 75 bp, synthetic construct
  source 1..75: mol_type = other DNA
gtgttagccttcaatacccgtcatgttaactgtgtggagggtaacaccacgctttatgccctgccgaaacccgag

SEQ ID NO: 528203 - DNA, 75 bp, synthetic construct
  source 1..75: mol_type = other DNA
cgaatttaattatggcgtggaagtccgccatccacagtttttcgccaaaggagaagaggaacaaacgcttaatcg

SEQ ID NO: 528204 - DNA, 75 bp, synthetic construct
  source 1..75: mol_type = other DNA
tcttaaaagcgcgatggattactggcacaatcaggtggcgcgtattggcctcactggcgcatactctccacattc

SEQ ID NO: 528205 - DNA, 75 bp, synthetic construct
  source 1..75: mol_type = other DNA
aagcgctggcaaagcactgtggcggtagccataaaacggtgaacgatcgtatccatattgtgcaacgtttcgatc

SEQ ID NO: 528206 - DNA, 75 bp, synthetic construct
  source 1..75: mol_type = other DNA
ggcgttaatgttccatgcggcaaaagcgatgaatgtaaatgtagaaaactgcattctggttgatgactcagttgc

SEQ ID NO: 528207 - DNA, 75 bp, synthetic construct
  source 1..75: mol_type = other DNA
acgctggcgggcgcatccgcggtttcgcatgacctgtacgctaacgtcttcaaaaaaggcgcgaccgaacgtgaa

SEQ ID NO: 528208 - DNA, 75 bp, synthetic construct
  source 1..75: mol_type = other DNA
cgcgtaatgactactacacggcaggcggcaatatcaccggttttcagaacgggctggcgattgccggggactata

SEQ ID NO: 528209 - DNA, 75 bp, synthetic construct
  source 1..75: mol_type = other DNA
aggtctgattacagctgtggtgttgatgatcctcgggccaacgatttgggtacaaattctcggccacgaaaaagc

SEQ ID NO: 528210 - DNA, 75 bp, synthetic construct
  source 1..75: mol_type = other DNA
attccttacatggcaaatgcttgtttcaacattttttggactatactatcttggtgataggattcacattaatta

SEQ ID NO: 528211 - DNA, 75 bp, synthetic construct
  source 1..75: mol_type = other DNA
gtatctctgaggtaatcgatcgcacaggattttgcagagcttggatttatcgactgattaaaaataatagtttcc

SEQ ID NO: 528212 - DNA, 75 bp, synthetic construct
  source 1..75: mol_type = other DNA
tctgttcctgattgccgaacgtctgcgtaacctggggcgctacacctttgccgatgtagcctcttaccgcctgaa

SEQ ID NO: 528213 - DNA, 75 bp, synthetic construct
  source 1..75: mol_type = other DNA
aaggcgcggcatattgaaggctatgttcgtgaacgagtggtgcagggcatcacaaagcgttccctgcaaaatgag

SEQ ID NO: 528214 - DNA, 75 bp, synthetic construct
  source 1..75: mol_type = other DNA
aacatttacgggcgctgaatatccagatccagcgggtggagcagatcaaggttcgccatatcgaatgctacattg

SEQ ID NO: 528215 - DNA, 75 bp, synthetic construct
  source 1..75: mol_type = other DNA
aaacgtggctgaaagccattgagcgtggcgaaacccggctgaaagtggtgttcggcaccaaaggcgggcgtccgc

SEQ ID NO: 528216 - DNA, 75 bp, synthetic construct
  source 1..75: mol_type = other DNA
aggcgctggccaaaaaagctggcggcagttttaaaacggtagataaccgcattcacattgtgcagcggttcagcc

SEQ ID NO: 528217 - DNA, 75 bp, synthetic construct
  source 1..75: mol_type = other DNA
ggataatgttcctgcaggcctggctgcgcccgccagtatgatcacccgggtcggcgccggcatggcgcagttgta

SEQ ID NO: 528218 - DNA, 75 bp, synthetic construct
  source 1..75: mol_type = other DNA
aaaaaaggcaaagtgataagattggagacaatagcattggaaggaatgatttgaacagaatcaaggatgaattgc

SEQ ID NO: 528219 - DNA, 75 bp, synthetic construct
  source 1..75: mol_type = other DNA
tggcgggacgccgacaggtggtggagcatccgcgcctgaccaataaggcgctggggctgtcaggcgcttcgcgca

SEQ ID NO: 528220 - DNA, 75 bp, synthetic construct
  source 1..75: mol_type = other DNA
tggcggcagcgctggagctggcgcggctgatgggactgcgctctcaggaggcggtacgctgttcatgttcattgc

SEQ ID NO: 528221 - DNA, 75 bp, synthetic construct
  source 1..75: mol_type = other DNA
gcagagtgagcggctgaataaccgctcgctgggcctgtctggcgcatcccgtaacggtatgaagctggctatcac

SEQ ID NO: 528222 - DNA, 75 bp, synthetic construct
  source 1..75: mol_type = other DNA
atgggaatactggagcaggaaatgaagcggatggcgcagcaggcaggcggcagccacaaaaccgttcacgaccgc

SEQ ID NO: 528223 - DNA, 75 bp, synthetic construct
  source 1..75: mol_type = other DNA
tcacccgaaagtcaccacctttacccatctttcgcaattaccggaactgtggaaggcgcgtggttgggatattac

SEQ ID NO: 528224 - DNA, 75 bp, synthetic construct
  source 1..75: mol_type = other DNA
ctccagcgccggtgcacagtcaggaatcgatgccggtatggaagtgttttacttctgcgctgacccgcacaataa

SEQ ID NO: 528225 - DNA, 75 bp, synthetic construct
  source 1..75: mol_type = other DNA
cgtgcggaagtggcgcgtctgtttgatagcgaactggaggtgattgcgggtgctaacgaattgctggcgagcgtt

SEQ ID NO: 528226 - DNA, 75 bp, synthetic construct
  source 1..75: mol_type = other DNA
cgccagcctgttgtggatgctttcagagttgtatgaacaattgccggaagcgggcgatctggagaaaccaaaact

SEQ ID NO: 528227 - DNA, 75 bp, synthetic construct
  source 1..75: mol_type = other DNA
cattgacggcgcaaatgaaacgcgaagggattcgccgcttgttaacgttgagtggggaagagaattggtgctgtg

SEQ ID NO: 528228 - DNA, 75 bp, synthetic construct
  source 1..75: mol_type = other DNA
gcggtattcgacgcccgccacggctttgatgccgctgcctttgcggcacttagcggaacgttgaaagcgggaagc

SEQ ID NO: 528229 - DNA, 75 bp, synthetic construct
  source 1..75: mol_type = other DNA
tgtggctggtggatgaagggggattatctgaagaactgagtcaggcggtctgggcaggttttcgtcgcccgcgtg

SEQ ID NO: 528230 - DNA, 75 bp, synthetic construct
  source 1..75: mol_type = other DNA
tcaacgggaaggcataggacaacagcttattgtcagcgccctgaaatatacgtatgacctcgattatctttctgt

SEQ ID NO: 528231 - DNA, 75 bp, synthetic construct
  source 1..75: mol_type = other DNA
tacaacagcttctgactatgccaccgggcgtggcagcggtaactgctgcgcgcggacgcggtaagtcggcgctgg

SEQ ID NO: 528232 - DNA, 75 bp, synthetic construct
  source 1..75: mol_type = other DNA
tagcggaacgttgaaagcgggaagctggctggtgttgttactccctgtatgggatgagtgggaaaaccaacctga

SEQ ID NO: 528233 - DNA, 75 bp, synthetic construct
  source 1..75: mol_type = other DNA
atgagcgatcttatctactatcctgcaaagaagggagatgatgaacctgaaaacatcctgaaaattgtcaaagaa

SEQ ID NO: 528234 - DNA, 75 bp, synthetic construct
  source 1..75: mol_type = other DNA
cttatataatagatagagcaaagctcccattacaatttccaacacactgtcaaccagcagagttttgggagcaat

SEQ ID NO: 528235 - DNA, 75 bp, synthetic construct
  source 1..75: mol_type = other DNA
aaacgctacatctggcggatgaaaaattgatccgccgcctgaagccagggacgattttgattaacgcttgccgtg

SEQ ID NO: 528236 - DNA, 75 bp, synthetic construct
  source 1..75: mol_type = other DNA
acttgcggcagatgacgacgctattctctggcgacaagaccagccactaatgctggcggattttgttccccgttc

SEQ ID NO: 528237 - DNA, 75 bp, synthetic construct
  source 1..75: mol_type = other DNA
attttgtccagcatctcaaacgcgtacttgcggcagatgacgacgctattctctggcgacaagaccagccactaa

SEQ ID NO: 528238 - DNA, 75 bp, synthetic construct
  source 1..75: mol_type = other DNA
gaagggagatgatgaacctgaaaacatcctgaaaattgtcaaagaatggcggcgttcacaaggatggcctttgtt

SEQ ID NO: 528239 - DNA, 75 bp, synthetic construct
  source 1..75: mol_type = other DNA
taggggcaaatcaaccaacagcggcacagaccccaaaaacgccctctgcacccgaaaaaaagtgggcattttctt

SEQ ID NO: 528240 - DNA, 75 bp, synthetic construct
  source 1..75: mol_type = other DNA
ctggctcaggaaagaatacctggtgctgatagtccgaaagagcttttagagaaagcaaagagttaccagcataaa

SEQ ID NO: 528241 - DNA, 75 bp, synthetic construct
  source 1..75: mol_type = other DNA
tccaggccggagctaaggcaagcattgatggcagtgatcttgactcacatgaagccagtagtggttcacgggcca

SEQ ID NO: 528242 - DNA, 75 bp, synthetic construct
  source 1..75: mol_type = other DNA
gcacagtatgtgatgaaacacgcgccgcaggatgcagaagctattctgacaaacaccagttcaccggagattgca

SEQ ID NO: 528243 - DNA, 75 bp, synthetic construct
  source 1..75: mol_type = other DNA
ggccaatccggcatttgataccgaaaaggcaatccaggaactggggaccggcgaggcgttaatctcgtttctcga

SEQ ID NO: 528244 - DNA, 75 bp, synthetic construct
  source 1..75: mol_type = other DNA
caggtgataaggcttattcgctcaaaaggcgtgggcgtctggttcgtttcgcaaaacccgtctgatattccggat

SEQ ID NO: 528245 - DNA, 75 bp, synthetic construct
  source 1..75: mol_type = other DNA
atgcgcaccgatgccaacggtaaaggcgttatcaatatcctcagcgccgaaaagctttatcagatgccgaaacta

SEQ ID NO: 528246 - DNA, 75 bp, synthetic construct
  source 1..75: mol_type = other DNA
gacactgaaaaacttccatatactggtcaatggtgtcatgaactagatcacaatatgcgccgcatcggtagcccg

SEQ ID NO: 528247 - DNA, 75 bp, synthetic construct
  source 1..75: mol_type = other DNA
gcttattttttatataagaataaagttaaggttgtaaaagttcctgcttgtgaaatttataatttatctaaggaa

SEQ ID NO: 528248 - DNA, 75 bp, synthetic construct
  source 1..75: mol_type = other DNA
ggctctatgcaggttatggtgcagtcatttccgctatattttcagagttattagttctgattttatgctatggtt

SEQ ID NO: 528249 - DNA, 75 bp, synthetic construct
  source 1..75: mol_type = other DNA
gaggcaatatcggagatactcagagcagcatacgtggcgaagaaaatattgtaggaagacagtattctgaactac

SEQ ID NO: 528250 - DNA, 75 bp, synthetic construct
  source 1..75: mol_type = other DNA
ggcacaacaggaaatggcccgggaggcgtcgaacagagcagaaagcgccctgcatgggttcagcagcagtattgc

SEQ ID NO: 528251 - DNA, 75 bp, synthetic construct
  source 1..75: mol_type = other DNA
attgcagaacgccgtcgggctatggcgtggtcttttgttcaggaacaggtgcagcctggtgttgataatgcctgg

SEQ ID NO: 528252 - DNA, 75 bp, synthetic construct
  source 1..75: mol_type = other DNA
gagaattacattcagcatccctttccccaaaaaagcggactgcgccatgcttactcattctggtgatggcggtgc

SEQ ID NO: 528253 - DNA, 75 bp, synthetic construct
  source 1..75: mol_type = other DNA
tttcaggccattttcaccgaacccgatggtgaggctcgctccatgctattgcttaatcttattaatcatgctatt

SEQ ID NO: 528254 - DNA, 75 bp, synthetic construct
  source 1..75: mol_type = other DNA
agttctcagttccatggggaaagcgataccagttcagtctggatatccagaaggttgattacctctcattcaggc

SEQ ID NO: 528255 - DNA, 75 bp, synthetic construct
  source 1..75: mol_type = other DNA
gatgccgttcctcagtaagcacttcccacatgataagagccgacgctgggttgaaccgtttatcggcggtggcgc

SEQ ID NO: 528256 - DNA, 75 bp, synthetic construct
  source 1..75: mol_type = other DNA
aaagtggggaactttctgcgccgcacctcgctggatgaattgccgcagtttatcaatgtgctgactggcgggatg

SEQ ID NO: 528257 - DNA, 75 bp, synthetic construct
  source 1..75: mol_type = other DNA
ttgatgtatcgagagactggagattaaaaaatgatgatggtatggagttttataccttaagaaaaaagggattat

SEQ ID NO: 528258 - DNA, 75 bp, synthetic construct
  source 1..75: mol_type = other DNA
attaaaaatgttgatggtgaaattgactgcagcggcaaaatgtttgattcgctggatctgattattgccggtttt

SEQ ID NO: 528259 - DNA, 75 bp, synthetic construct
  source 1..75: mol_type = other DNA
cctgctgaaccgaaaaatggaaatcctgctgggaacgctggtgacaatagatccggtacgggcagcggtattgtg

SEQ ID NO: 528260 - DNA, 75 bp, synthetic construct
  source 1..75: mol_type = other DNA
ggacgacgggcgttgcagatacttagtttttccgtacaaaccgcgctgaatggtgattccgttgcagaaactaca

SEQ ID NO: 528261 - DNA, 75 bp, synthetic construct
  source 1..75: mol_type = other DNA
tttcactttaataatttgcgtgtgctgccgcgcgttgtcgatggtgtggggatcctgcgcggtattgaggccaat

SEQ ID NO: 528262 - DNA, 75 bp, synthetic construct
  source 1..75: mol_type = other DNA
ctaccgtttcacaggtagatattcagacggtacaggaacgcttacagcaaaatggcgtaaaagtctttttacagg

SEQ ID NO: 528263 - DNA, 75 bp, synthetic construct
  source 1..75: mol_type = other DNA
agatacttgaatcaaaaaagtacgaaaaccttgattcagatattgttgaaaaggttgtttccatttctgagaaga

SEQ ID NO: 528264 - DNA, 75 bp, synthetic construct
  source 1..75: mol_type = other DNA
tttactcgcgttacgccatgttgttgaagcgcggggaggaatggcgacggttgcccagaaagccggtgtatcgcg

SEQ ID NO: 528265 - DNA, 75 bp, synthetic construct
  source 1..75: mol_type = other DNA
atgacaaatctaaaaaagcgcgagcgagcgaaaaccaatgcatcgttaatatctatggtgcaacgcttttcagat

SEQ ID NO: 528266 - DNA, 75 bp, synthetic construct
  source 1..75: mol_type = other DNA
caccatattctgcgcgacgaagaaaacacccgttttcgccatacttcgacgaccacctcggtacgcgctttcaat

SEQ ID NO: 528267 - DNA, 75 bp, synthetic construct
  source 1..75: mol_type = other DNA
tcgcgatgtatttgatttccagtcacatactcatttttttgcatcggatagatggttatcggcggcctatattgc

SEQ ID NO: 528268 - DNA, 75 bp, synthetic construct
  source 1..75: mol_type = other DNA
ttgcataaactgaaagacaggttaaatcaaacctggtatcagatccgtattggcgatcgactggcctatatcagc

SEQ ID NO: 528269 - DNA, 75 bp, synthetic construct
  source 1..75: mol_type = other DNA
taccagcagaaagcatgttaaatgaaactcaaagaaatctttgcagttcagatttaaaattcgcgctttctgatt

SEQ ID NO: 528270 - DNA, 75 bp, synthetic construct
  source 1..75: mol_type = other DNA
tacctgtaaatgatatgttgaatgaatctcaaagaactctttgtggttcagatttgaagtttgctctttctgatt

SEQ ID NO: 528271 - DNA, 75 bp, synthetic construct
  source 1..75: mol_type = other DNA
cgagtgcgggcagtgcgccatttggggtactggcggacaatttgcgctacccgattttgcataaactgaaagaca

SEQ ID NO: 528272 - DNA, 75 bp, synthetic construct
  source 1..75: mol_type = other DNA
gagaatattgaatgtttcgccacgccgtttgctgaatttccttgaatctcgcggcatggcgccgattgcggaatt

SEQ ID NO: 528273 - DNA, 75 bp, synthetic construct
  source 1..75: mol_type = other DNA
catcagttattgggacaggttcagcaactgggccaacgttgaatcccgtagcattagccactctattaatgaaca

SEQ ID NO: 528274 - DNA, 75 bp, synthetic construct
  source 1..75: mol_type = other DNA
attcactttgggcctctatgaagagcgtggattcgtcatacacagactcagcgcttaccgatccgtaggaagtaa

SEQ ID NO: 528275 - DNA, 75 bp, synthetic construct
  source 1..75: mol_type = other DNA
cagtgccgcattacctgcccgttatatgcaaaccatcgaaaatgccgcggtctgggcgcaaattggcgacaaaat

SEQ ID NO: 528276 - DNA, 75 bp, synthetic construct
  source 1..75: mol_type = other DNA
cgacggcatttattattacctcgcgtattaaacgccatccacaaaaatggaatccacagtcgttacagtttatga

SEQ ID NO: 528277 - DNA, 75 bp, synthetic construct
  source 1..75: mol_type = other DNA
tttgggtgacctcaacaagccgctgagtaatcagaacttaattacctggaaagatacgccggtctataacgcgcc

SEQ ID NO: 528278 - DNA, 75 bp, synthetic construct
  source 1..75: mol_type = other DNA
aatccgcagcccggtgagtttgaacaaatcgacgaagagtacaagcgtctggctaacagcggtcaattgctgact

SEQ ID NO: 528279 - DNA, 75 bp, synthetic construct
  source 1..75: mol_type = other DNA
atctcgaatacatccgcgagtggagcctgtggctcgatatcaagatcgtcttcctgacggtattcaaaggctttg

SEQ ID NO: 528280 - DNA, 75 bp, synthetic construct
  source 1..75: mol_type = other DNA
ggtatttagtgccggactgctggcgttcgatgatgatttcagcacccatatcagcgtctggctgggctggtactt

SEQ ID NO: 528281 - DNA, 75 bp, synthetic construct
  source 1..75: mol_type = other DNA
atcatacttgaaatcacataataaaatgactcttaaagagatatcattaatatctggatttagtgtaaagcacac

SEQ ID NO: 528282 - DNA, 75 bp, synthetic construct
  source 1..75: mol_type = other DNA
gctggtggaacagttgcaacagcgcggtattcgcgtgggggtcgtgtcccggggatatggtggtaaggctgaatc

SEQ ID NO: 528283 - DNA, 75 bp, synthetic construct
  source 1..75: mol_type = other DNA
atggcgctggtaacgctggtggtgttccagatgatcggcgggatcaccgatttttatcgttcatggcgcggcgtg

SEQ ID NO: 528284 - DNA, 75 bp, synthetic construct
  source 1..75: mol_type = other DNA
aaattccgttccatgaaggtgatggaaaacgacgcggtggtcactcaggcgacacaaaacgacccgcgcgtgacg

SEQ ID NO: 528285 - DNA, 75 bp, synthetic construct
  source 1..75: mol_type = other DNA
aaaaactggagcagtcctcagaagcaaagccggttgcggcatcactgccgcacctggctgaagggaacttccgga

SEQ ID NO: 528286 - DNA, 75 bp, synthetic construct
  source 1..75: mol_type = other DNA
cggcatcactgccgcgcctggctgaaggtaacttccggacaacgccggtgcggaccgccaccgcgacaacgccgt

SEQ ID NO: 528287 - DNA, 75 bp, synthetic construct
  source 1..75: mol_type = other DNA
gcgaagctggcagaacgcgcaggaatgaatgtccagacgctgcgcaacaagctgaacccggagcaaccgcatcaa

SEQ ID NO: 528288 - DNA, 75 bp, synthetic construct
  source 1..75: mol_type = other DNA
aataaatgaaatattatcaagaactgatcgtgttattatcatttcaagaattaaaccgataaaagatgagagttc

SEQ ID NO: 528289 - DNA, 75 bp, synthetic construct
  source 1..75: mol_type = other DNA
tttatttttcttgctaccgacctgactgtgcgtgtttttggcgcgccgctggctcgtcgcatcatctttgcggtg

SEQ ID NO: 528290 - DNA, 75 bp, synthetic construct
  source 1..75: mol_type = other DNA
tttatctttctcgcgaccgacctgaccgtgcgtatttttggcgcaccgctggcccgacgcattatcttcgcggta

SEQ ID NO: 528291 - DNA, 75 bp, synthetic construct
  source 1..75: mol_type = other DNA
ttgcctgcggggccaatgcgtgagcgagccagtcgcttaaaatcggttgatgcggttattgtcaacggtggcgta

SEQ ID NO: 528292 - DNA, 75 bp, synthetic construct
  source 1..75: mol_type = other DNA
tattacttccgcacaggaattatcatgaccctgccggtactgtttgtaacgctgctggcgctggcgctacgcctc

SEQ ID NO: 528293 - DNA, 75 bp, synthetic construct
  source 1..75: mol_type = other DNA
gtgggccgcgacgctcggcaccggattcctcaccgccttcctctcttctattatgaacaatatgccgacggtact

SEQ ID NO: 528294 - DNA, 75 bp, synthetic construct
  source 1..75: mol_type = other DNA
ggccggattcattgccgataccgccagcctgccgcttattgtctccaacctggtgaatatcgtttccgctgattt

SEQ ID NO: 528295 - DNA, 75 bp, synthetic construct
  source 1..75: mol_type = other DNA
gcactgcgctggctggaagaaaaccaactggaagatggccacgaatgcctgcttcgtcgcgttatcagtagcgat

SEQ ID NO: 528296 - DNA, 75 bp, synthetic construct
  source 1..75: mol_type = other DNA
actttgctatcgttcgtgagcttgagattgattttcacagcggcatgaccgtaataaccggcgagaccggcgcgg

SEQ ID NO: 528297 - DNA, 75 bp, synthetic construct
  source 1..75: mol_type = other DNA
cctgttgtttacctggattgtcctgctcggcgctgccgttgctgccctgtttgccaatgatggcgcggcgcttat

SEQ ID NO: 528298 - DNA, 75 bp, synthetic construct
  source 1..75: mol_type = other DNA
ttctggcgcaacaccctgatgtgcagatcatcgtaaccgacgacggtttacagcattatcgtctggcgcgtgatg

SEQ ID NO: 528299 - DNA, 75 bp, synthetic construct
  source 1..75: mol_type = other DNA
tggtatttgcctgtagacgcacagctttcaggtgatgaaccagcgaaactgcttacgcaactaacctcgctggct

SEQ ID NO: 528300 - DNA, 75 bp, synthetic construct
  source 1..75: mol_type = other DNA
ttgcctgcagggccaatgcgtgagcgagcggggcgcttaaagtcggttgatgcggtaatcgtcaatggtggcgta

SEQ ID NO: 528301 - DNA, 75 bp, synthetic construct
  source 1..75: mol_type = other DNA
aattacttccgtacaggaattattatgaccctgccggtgctgtttgtaacgctggtcacgctggcgctacgtctc

SEQ ID NO: 528302 - DNA, 75 bp, synthetic construct
  source 1..75: mol_type = other DNA
ggttggtgcgttgtctattgatggcagcacggcgtctggcgtgatcaaagaagcgatggtttacgccaacgttat

SEQ ID NO: 528303 - DNA, 75 bp, synthetic construct
  source 1..75: mol_type = other DNA
acatgagggattttacattgatgataaggctatcaggccaagtgagtttataaacaagagttatggagaaataat

SEQ ID NO: 528304 - DNA, 75 bp, synthetic construct
  source 1..75: mol_type = other DNA
gagtggacgttggcttgtgtcgcgatcatcgtcgtattggcctttgctacccgttttctgtttagcacgccgacg

SEQ ID NO: 528305 - DNA, 75 bp, synthetic construct
  source 1..75: mol_type = other DNA
tgccgaccgcctgctcggcaaccgcactgcagtgattgccggcgcgctgttaatgacccttggccatgtggtgct

SEQ ID NO: 528306 - DNA, 75 bp, synthetic construct
  source 1..75: mol_type = other DNA
gataagtaatgtgttaggaattcagatattagttgcattaggatataaaaaagtattcagtaaaatacttttatg

SEQ ID NO: 528307 - DNA, 75 bp, synthetic construct
  source 1..75: mol_type = other DNA
agaaagtctgcggaaaggtttgctgcgagagttgttcctatgtctgcgcttcgaaggctgcgacggcacccagca

SEQ ID NO: 528308 - DNA, 75 bp, synthetic construct
  source 1..75: mol_type = other DNA
tggcgctaatgggctttgccgaactctttattgacccggtggcgattgcgcaaatcacgcgtctgaaaatgtctg

SEQ ID NO: 528309 - DNA, 75 bp, synthetic construct
  source 1..75: mol_type = other DNA
ggcatgtttatcggtttgttgattttcttaagcggtcatcgtcatttccagtccacgcgtagtatggataaaaaa

SEQ ID NO: 528310 - DNA, 75 bp, synthetic construct
  source 1..75: mol_type = other DNA
cctgtatgtagcccggagtacgctcaaagacatgatttaaccaacacggtaattaaccttagccactgtacgttg

SEQ ID NO: 528311 - DNA, 75 bp, synthetic construct
  source 1..75: mol_type = other DNA
aaagtggaattaacgcacgaggggaaacgcgtttattgggcgctaaaatcgtcgctggataccctgaatcaggaa

SEQ ID NO: 528312 - DNA, 75 bp, synthetic construct
  source 1..75: mol_type = other DNA
aatttgccgacatcttcgggaattggctttgatcgttctgatttagctgttatcgccgcgatgaatcatattggg

SEQ ID NO: 528313 - DNA, 75 bp, synthetic construct
  source 1..75: mol_type = other DNA
cacattaccgggcaggcagtggccaaaaattgaagcgtttattacctggctaagagaacaggtaaaaaccacttc

SEQ ID NO: 528314 - DNA, 75 bp, synthetic construct
  source 1..75: mol_type = other DNA
aaggcttgccagtggtgagctcgtcgcgccgtttggcgatatgacggtgaaatgccatcagcattattacatcac

SEQ ID NO: 528315 - DNA, 75 bp, synthetic construct
  source 1..75: mol_type = other DNA
acatcaccacattaccgggcaggcagtggccaaaaattgaggcatttattacttggttaagagaacaggtaagtc

SEQ ID NO: 528316 - DNA, 75 bp, synthetic construct
  source 1..75: mol_type = other DNA
tcgtttacttcaactccaggatactcagccagctgttgaccagcttcgaataccaaggagataccaagagaatag

SEQ ID NO: 528317 - DNA, 75 bp, synthetic construct
  source 1..75: mol_type = other DNA
aattatgctactcatctcgttgatggaaatgctccccgccgcattagccgccgaaggaatgtcaccggtattggg

SEQ ID NO: 528318 - DNA, 75 bp, synthetic construct
  source 1..75: mol_type = other DNA
tgttgccacatgctcacccgcaggatttaatgcaaaaatcagtgcagccgctaccaaaatcaatcaagcgcactg

SEQ ID NO: 528319 - DNA, 75 bp, synthetic construct
  source 1..75: mol_type = other DNA
tgacgaattaatgccattggccaaagaaattgatcccaataataaccccagctatggcgtgctatgtggaatgtc

SEQ ID NO: 528320 - DNA, 75 bp, synthetic construct
  source 1..75: mol_type = other DNA
gtgcggtatctggcgatgtaaaaacctgtgccggtcgtcgtgatgctatcagcagcattaactctgtaacacgac

SEQ ID NO: 528321 - DNA, 75 bp, synthetic construct
  source 1..75: mol_type = other DNA
gggtagcgaggatgtatcggtgtggtggaaccgtctgtgtgacaacgtagtgccggaaaaaaccatgccgtttga

SEQ ID NO: 528322 - DNA, 75 bp, synthetic construct
  source 1..75: mol_type = other DNA
aggttgataactcaaccgcaatcatcttgaaagatagcggcatcgaaatggtagtagtcgcaggaatgattatgt

SEQ ID NO: 528323 - DNA, 75 bp, synthetic construct
  source 1..75: mol_type = other DNA
gtcgcgatctcaagtccgaaatcaacatcgtaccgttgctggacgtgcttttggtgctgttgctgatctttatgg

SEQ ID NO: 528324 - DNA, 75 bp, synthetic construct
  source 1..75: mol_type = other DNA
ggcagtatgtgcaacgtgccctgaaccggggagaagcatggcacttccttagacgagccattgcgtcggtgaatg

SEQ ID NO: 528325 - DNA, 75 bp, synthetic construct
  source 1..75: mol_type = other DNA
ttgaggacacagaaccatcacaacaagtgactggtgataacctcccggacaccgaatcggatccggatattccag

SEQ ID NO: 528326 - DNA, 75 bp, synthetic construct
  source 1..75: mol_type = other DNA
gcgctggagcgggcccgggtggccgccgtgcagtccggctcgtctgagccatcccgttacttctttgattattcc

SEQ ID NO: 528327 - DNA, 75 bp, synthetic construct
  source 1..75: mol_type = other DNA
cgaaacgcgggcacctgaccgcaagtaccgttattcagtatcgcggcgcgattattcctcgcgaagccatgcctc

SEQ ID NO: 528328 - DNA, 75 bp, synthetic construct
  source 1..75: mol_type = other DNA
ctgccgaaagaaaaagtgatcgataccaccgctgcgggcgactctttcagcgccggttatttggcggtacgcctt

SEQ ID NO: 528329 - DNA, 75 bp, synthetic construct
  source 1..75: mol_type = other DNA
gtggccaaaaattgaggcatttattacctggctaagagagcaggtatgtcagtcttgtcagtagccgggataccg

SEQ ID NO: 528330 - DNA, 75 bp, synthetic construct
  source 1..75: mol_type = other DNA
gccaactgaaaattgaaattaaagaacgcgaagagacgcaaattcagctcgaacaacaatcctcatttttacgtt

SEQ ID NO: 528331 - DNA, 75 bp, synthetic construct
  source 1..75: mol_type = other DNA
taaaattaaaggtgcggcggggtcagtggggttacgccatctgcaacagctgggtcagcaaattcagtctcctga

SEQ ID NO: 528332 - DNA, 75 bp, synthetic construct
  source 1..75: mol_type = other DNA
ctgagtaagccgctttctgttccggcgctaaccgcgatgatcaagaaattctgggatacccaggatgatgaggaa

SEQ ID NO: 528333 - DNA, 75 bp, synthetic construct
  source 1..75: mol_type = other DNA
gtggtggagcaactggaagaatcacggcaacgtctgtcccggctggtgcaaaagctggaggagatgcgcgagcgc

SEQ ID NO: 528334 - DNA, 75 bp, synthetic construct
  source 1..75: mol_type = other DNA
atcaccgacgggttagcggtgtttgagaggatgatgccgggctatgtcagcgtgctggagtcgaatctgacggcg

SEQ ID NO: 528335 - DNA, 75 bp, synthetic construct
  source 1..75: mol_type = other DNA
ggaaaaatatctcaaaaccatccatgtttccgccgttactttggggaatattttcaacgatattatcgacatgga

SEQ ID NO: 528336 - DNA, 75 bp, synthetic construct
  source 1..75: mol_type = other DNA
cgacgataatcactcgtttggtcacggtaaagctgagtccctcgcggcgctggcgcaaagtatgtttatctccgg

SEQ ID NO: 528337 - DNA, 75 bp, synthetic construct
  source 1..75: mol_type = other DNA
acctggagctgggctttggcatctcactggccgtggcgttacacaatattcctgaaggtctggcggttgcaggcc

SEQ ID NO: 528338 - DNA, 75 bp, synthetic construct
  source 1..75: mol_type = other DNA
gtgaaattgccactgcaacagggattgtttctgataagagaacacctgttgcacgggtatctgataaggctaaaa

SEQ ID NO: 528339 - DNA, 75 bp, synthetic construct
  source 1..75: mol_type = other DNA
atttctgggctggcggaaattctcggcggcgtgctggcgtggttaatccttggtagcatgatttccccggtggtc

SEQ ID NO: 528340 - DNA, 75 bp, synthetic construct
  source 1..75: mol_type = other DNA
tggtgcgttattcgttgcaaccggcggatgacgaacatacttttggtcatggtaaagcggaatccctggctgcgt

SEQ ID NO: 528341 - DNA, 75 bp, synthetic construct
  source 1..75: mol_type = other DNA
ccgggatcggatgtgattatccatcaggatccttgctccgtcgtacccagggagagtaaaaagtctacgctttca

SEQ ID NO: 528342 - DNA, 75 bp, synthetic construct
  source 1..75: mol_type = other DNA
ctgacctatgaacagtggctggattatccggacgggcgcaaagcctgctttgaaatccgtaaagtgccgtactac

SEQ ID NO: 528343 - DNA, 75 bp, synthetic construct
  source 1..75: mol_type = other DNA
gacacaaaacgatccgcgtgtgaccagagtggggaactttctacgtcgaacctcgctggatgaactgccgcaatt

SEQ ID NO: 528344 - DNA, 75 bp, synthetic construct
  source 1..75: mol_type = other DNA
cgcgcgagtgaaaaaactggtccatcaactggcggacaccacctgttcggtgctgctgatccccgatgtctttac

SEQ ID NO: 528345 - DNA, 75 bp, synthetic construct
  source 1..75: mol_type = other DNA
cagtagcgcataacgaacagtatcgccagctcattgaaggctacatgctgcgccacaaagtgaaaccgggcatta

SEQ ID NO: 528346 - DNA, 75 bp, synthetic construct
  source 1..75: mol_type = other DNA
gtggccaaaaattgaggcatttattacctggctaagagagcaggtatgtcagtcttgtcagtacctgtgataccg

SEQ ID NO: 528347 - DNA, 75 bp, synthetic construct
  source 1..75: mol_type = other DNA
gtggccaaaaattgaggcatttattacctggctaagagagcaggtatgtcagtcttgtcagtatctgcgataccg

SEQ ID NO: 528348 - DNA, 75 bp, synthetic construct
  source 1..75: mol_type = other DNA
gtggccaaaaattgaggcatttattacctggctaagagagcaggtatgtcagtcttgtcagtaacggagataccg

SEQ ID NO: 528349 - DNA, 75 bp, synthetic construct
  source 1..75: mol_type = other DNA
tgaagggaaaattaaatcgatgctggtggtgatcccggataccgaaaccgatgcgaagggcattattcccgaaga

SEQ ID NO: 528350 - DNA, 75 bp, synthetic construct
  source 1..75: mol_type = other DNA
tctcgtcggctggcgaaaaatatgggcggcgatatcaccgtcaccagcgaacagggcaagggttctacctttagg

SEQ ID NO: 528351 - DNA, 75 bp, synthetic construct
  source 1..75: mol_type = other DNA
ctgaatgtgctgctggtagaagatattgaactgaacgttattgttgcacgctcggtgctggaaaagctcggcaat

SEQ ID NO: 528352 - DNA, 75 bp, synthetic construct
  source 1..75: mol_type = other DNA
ggtggtgaaggatgctttttatattcatcagcataaaggaaccaccagtgccgtgcggcgggtggtggagccgtt

SEQ ID NO: 528353 - DNA, 75 bp, synthetic construct
  source 1..75: mol_type = other DNA
gataacctgctggctgaagggaaaattaaaccgatgctggtggtgatcccggataccgaaaccgatgcgaagggc

SEQ ID NO: 528354 - DNA, 75 bp, synthetic construct
  source 1..75: mol_type = other DNA
cggcagatcgcgaactgatgaacgatattatcccgctgattagcaagcgttttaatgtccgtaaagatgccgatg

SEQ ID NO: 528355 - DNA, 75 bp, synthetic construct
  source 1..75: mol_type = other DNA
ctgcatctacaggaatatgctgcagaatcgttcactcccgccgaagcggatcaggcgaatcgttcggcgctgcaa

SEQ ID NO: 528356 - DNA, 75 bp, synthetic construct
  source 1..75: mol_type = other DNA
aatgatcaacccgtccggcaaacgccgatgtttacgctgctgcgtgatgcgggattttcaagttcaccacaaggg

SEQ ID NO: 528357 - DNA, 75 bp, synthetic construct
  source 1..75: mol_type = other DNA
caacgcacgcacctcaactcgccgcagtcaccgggctcgtcgtggacgtcctgtctatgcgcaacccgtctcgcc

SEQ ID NO: 528358 - DNA, 75 bp, synthetic construct
  source 1..75: mol_type = other DNA
gcggacctcaccctctggccgacgctgcaacgcttcgacagcggctcgctgcacgattttctgcgcgagcaaacg

SEQ ID NO: 528359 - DNA, 75 bp, synthetic construct
  source 1..75: mol_type = other DNA
cccaccagcgaaaaactgctgtcggtattgcgccccgcgtccggtcacgtcgctgacgcgctggggattaccgag

SEQ ID NO: 528360 - DNA, 75 bp, synthetic construct
  source 1..75: mol_type = other DNA
tggtggaaaaaggctgggtacagcgccgtcagggcgtcggcgtgctggtgctgatgcgcccgttcgattacccgc

SEQ ID NO: 528361 - DNA, 75 bp, synthetic construct
  source 1..75: mol_type = other DNA
tagtgtgcgatagcggtgcggggttttcgacggagcaagctgttttccttgccaacaatcttgcattcagtgtaa

SEQ ID NO: 528362 - DNA, 75 bp, synthetic construct
  source 1..75: mol_type = other DNA
tacttacactaatcaagaaaaagagttcgataagaaatacagaacaagcagtagagttaatttcattatttattt

SEQ ID NO: 528363 - DNA, 75 bp, synthetic construct
  source 1..75: mol_type = other DNA
gcgaaaagacaatggagtgaaggagaaattttgagggtgcgtctcaccgataaagatgagacgcggaaagattag

SEQ ID NO: 528364 - DNA, 75 bp, synthetic construct
  source 1..75: mol_type = other DNA
atcaccagcgacatttgggcaccgttacgcgccctcacccgcagcagttccaacgcacgcacctcaactcgccgc

SEQ ID NO: 528365 - DNA, 75 bp, synthetic construct
  source 1..75: mol_type = other DNA
gtcgttttgtagaaggtctgggtggcgcgcaattcgctgaacgtctgactattgaccgattgcgcgatctggcga

SEQ ID NO: 528366 - DNA, 75 bp, synthetic construct
  source 1..75: mol_type = other DNA
atcaaagctggagatacattcaacagaattgacgggcaaatttcagatgtgttctccgcacagcttctggcgcct

SEQ ID NO: 528367 - DNA, 75 bp, synthetic construct
  source 1..75: mol_type = other DNA
ccgtgacggtgaaaacagtccggcggagtactccgtcagcctgacgcgcaccgacatgattgaactcactatgga

SEQ ID NO: 528368 - DNA, 75 bp, synthetic construct
  source 1..75: mol_type = other DNA
cccggaagagattgaggctgcaggcggggatgagaataaacttccggcgaagtccatctggtggcagggggagga

SEQ ID NO: 528369 - DNA, 75 bp, synthetic construct
  source 1..75: mol_type = other DNA
aggaagaacaacgttatcgggatcgccagcgacaatttgatgaatggtccagaaaatgggtcactgtaactaggc

SEQ ID NO: 528370 - DNA, 75 bp, synthetic construct
  source 1..75: mol_type = other DNA
aacccagccagtccggcttacggtaaatataccgacgcgacgggtaaaaactatggcgcagccagccaggccgca

SEQ ID NO: 528371 - DNA, 75 bp, synthetic construct
  source 1..75: mol_type = other DNA
gagcgacggaacaccggtacaggcttattcttcattaatcggtaattgcctcattgccgttcccgttttactcac

SEQ ID NO: 528372 - DNA, 75 bp, synthetic construct
  source 1..75: mol_type = other DNA
ttggtcggtttgggagcggtatgctttacgttgttctcaatcgtttcaatattagaagcaggttctgctaaaaaa

SEQ ID NO: 528373 - DNA, 75 bp, synthetic construct
  source 1..75: mol_type = other DNA
gctccaggcattgctggaaaatgaggagtcccgcgaacagttactaaaagaaatcggcctggtgagcgggaaata

SEQ ID NO: 528374 - DNA, 75 bp, synthetic construct
  source 1..75: mol_type = other DNA
tgaagatattcaggaacaaaactttgacggtctgatagttaccggcgcgccgctgggcctggtggagtttaatga

SEQ ID NO: 528375 - DNA, 75 bp, synthetic construct
  source 1..75: mol_type = other DNA
gaaaatcagtttctgcgcctgctttcaaactcacctttgcaggtcgatattcagcttttgcgcatcgattcccgt

SEQ ID NO: 528376 - DNA, 75 bp, synthetic construct
  source 1..75: mol_type = other DNA
caaacggggattacgctacgacgcagtcagacgcggatcagcgcccgccgcgcccaggccaaagagtgccagcgt

SEQ ID NO: 528377 - DNA, 75 bp, synthetic construct
  source 1..75: mol_type = other DNA
tgatgggcggcggcgcgggatttgcacagcagccgctgttctcctcgaaaaacccggccagcccggcttacggta

SEQ ID NO: 528378 - DNA, 75 bp, synthetic construct
  source 1..75: mol_type = other DNA
gataagcgcattgcctttgtgacgggccatcccgaatatgatgcgcaaacgctggcgcaggagtatttccgcgat

SEQ ID NO: 528379 - DNA, 75 bp, synthetic construct
  source 1..75: mol_type = other DNA
ttacgagcatcatattctccatcctcatgcgcttctgacgcgtggctttgatgattcattcctggcaccacattc

SEQ ID NO: 528380 - DNA, 75 bp, synthetic construct
  source 1..75: mol_type = other DNA
caatgatgttttctatgagcacatgaaaaaaggaaaaaaactaagtcgattcaaaatttatttaacttcaatact

SEQ ID NO: 528381 - DNA, 75 bp, synthetic construct
  source 1..75: mol_type = other DNA
atgtgggaacaggggaaaatcagatacctgatatgtcagcttattcatcaggatctggctggcaaaaattgcctg

SEQ ID NO: 528382 - DNA, 75 bp, synthetic construct
  source 1..75: mol_type = other DNA
ggtgatctgcccggttttgttgaattgctgggatcggggtttgctgttgaatacctgagccgcaagaatccgttt

SEQ ID NO: 528383 - DNA, 75 bp, synthetic construct
  source 1..75: mol_type = other DNA
attcgcttctggttcgggatggttcaggctaccaggtggatatattgttcagtttggcacttttgcaggaaacac

SEQ ID NO: 528384 - DNA, 75 bp, synthetic construct
  source 1..75: mol_type = other DNA
tacgctaatgctcgtttcacttttaaagcgtccacttcaacttttcgttacgtgctctacgttggttttatgggt

SEQ ID NO: 528385 - DNA, 75 bp, synthetic construct
  source 1..75: mol_type = other DNA
aattgtcactcttgtcaccttctccgccatcagcctggtgtgcggtttcgtctattcaaagttcattgtctttag

SEQ ID NO: 528386 - DNA, 75 bp, synthetic construct
  source 1..75: mol_type = other DNA
cggctacattaggacgcaccggtttcatagctataccggttatgattggtggtattgagcaatcagtaatcattc

SEQ ID NO: 528387 - DNA, 75 bp, synthetic construct
  source 1..75: mol_type = other DNA
tgtaagacacataactttcccccggtcgtttacaacaacgaactattccatctcaattaactggaatgatatcgg

SEQ ID NO: 528388 - DNA, 75 bp, synthetic construct
  source 1..75: mol_type = other DNA
aaatcggacggcacggtgaaaacagctctcgaaaaccttggtttgggagaagcggcaaaacggaatgtgggcaca

SEQ ID NO: 528389 - DNA, 75 bp, synthetic construct
  source 1..75: mol_type = other DNA
ccgcaataatccgtttggtgatatcaaatcggacggcacggtaccaacggctctcgaaaaccttggtttgggaga

SEQ ID NO: 528390 - DNA, 75 bp, synthetic construct
  source 1..75: mol_type = other DNA
gggcagcagggaatatgaccaggacaggatttcttctacgctgtgatgcttctggtggcaattataattttcgct

SEQ ID NO: 528391 - DNA, 75 bp, synthetic construct
  source 1..75: mol_type = other DNA
gatgaatggaatgactgataatgcttatgccattacaggttctaataagtcttatattgccacagccacattgcc

SEQ ID NO: 528392 - DNA, 75 bp, synthetic construct
  source 1..75: mol_type = other DNA
ctttctggacggttactggtggcaatggaaattttgtgattcgtcaacctgacgggctaatcattcagatggtta

SEQ ID NO: 528393 - DNA, 75 bp, synthetic construct
  source 1..75: mol_type = other DNA
ttcgcaaatgccagattcacctttaagtcatcaaccacgaccctgcgttacatgttgtatgtcggatttatgggc

SEQ ID NO: 528394 - DNA, 75 bp, synthetic construct
  source 1..75: mol_type = other DNA
atgcacagaataccaggcgagataccgcaccataaaactaaaaatatcaagctgatggccattgttcaccgtcta

SEQ ID NO: 528395 - DNA, 75 bp, synthetic construct
  source 1..75: mol_type = other DNA
cctgtgttgaaacaatatggcatgaaggcgacggcgtttattgttacctcgcgcatcaaacgtcacccgcagaag

SEQ ID NO: 528396 - DNA, 75 bp, synthetic construct
  source 1..75: mol_type = other DNA
atacccgttttcgccatacttcgacgaccacctcggtacgcgctttcaataaccagatggcctggctgcgcgaca

SEQ ID NO: 528397 - DNA, 75 bp, synthetic construct
  source 1..75: mol_type = other DNA
atgcacagaattctaggcgagataccgcagcataactccaaaagcgccaagctgatggccattgttcagcgtcta

SEQ ID NO: 528398 - DNA, 75 bp, synthetic construct
  source 1..75: mol_type = other DNA
acgaactggtcgggtgtgccggtgtcgtccgggataatcaccgcaaatacagcgatatcagcaatccgaaaattg

SEQ ID NO: 528399 - DNA, 75 bp, synthetic construct
  source 1..75: mol_type = other DNA
cgcatcacaaaactaaaagcatcaaactgatggccatcgttcatcgtctgcagcagataatggtcaatgagaatt

SEQ ID NO: 528400 - DNA, 75 bp, synthetic construct
  source 1..75: mol_type = other DNA
tgacacccacagagctggtcgggtgtgccgaaatagtcagggataattacggcaagctggatagcatcagcaggc

SEQ ID NO: 528401 - DNA, 75 bp, synthetic construct
  source 1..75: mol_type = other DNA
atcggtaagtcgctatgcgtatcctgttctgaaacaatatggtatgaaggcgacggcatttattattacctcgcg

SEQ ID NO: 528402 - DNA, 75 bp, synthetic construct
  source 1..75: mol_type = other DNA
taaagcggctgtatattttaagaacagattctcttgagacaatgtcgcggctggtgagtaaccagccgcagggct

SEQ ID NO: 528403 - DNA, 75 bp, synthetic construct
  source 1..75: mol_type = other DNA
tgctgatgctgtttaccgcaagcgtcagtgccgcattacctgcccgttatatgcaaaccatcgaaaatgctgcgg

SEQ ID NO: 528404 - DNA, 75 bp, synthetic construct
  source 1..75: mol_type = other DNA
ggacggttcaacgatatcagtcgaccgaaagttaagacatatcaaccatataatatgcttaaacaaccaccacgc

SEQ ID NO: 528405 - DNA, 75 bp, synthetic construct
  source 1..75: mol_type = other DNA
tgccgaaatagtcagggataattacggcacgctggatagcatcagcaagccgacatattactcaccgccaccacg

SEQ ID NO: 528406 - DNA, 75 bp, synthetic construct
  source 1..75: mol_type = other DNA
cgcggtgcgccctggcagattgtcatcttctcgctcggcatgtatctggtggtttatggcctgcgcaatgccgga

SEQ ID NO: 528407 - DNA, 75 bp, synthetic construct
  source 1..75: mol_type = other DNA
tctccttggtttttttaatcaaggtgaagtatgcacttgcccatccagaatacttgttcatgaaacggtatatga

SEQ ID NO: 528408 - DNA, 75 bp, synthetic construct
  source 1..75: mol_type = other DNA
cccgcaccgacaaactctctggcgtttacgagcatcatattctccatcctcatgcgcttctgacgcgtggctttg

SEQ ID NO: 528409 - DNA, 75 bp, synthetic construct
  source 1..75: mol_type = other DNA
ttatcgctattcctgtgaccgagctttatacggtgcaggaagaggataaaaccgtggagcggaaacgaagtttta

SEQ ID NO: 528410 - DNA, 75 bp, synthetic construct
  source 1..75: mol_type = other DNA
gatattccgcagaactacgatatggcgctgctgaaatctcccgcagaagcgattaaagatcctgctacgttcaaa

SEQ ID NO: 528411 - DNA, 75 bp, synthetic construct
  source 1..75: mol_type = other DNA
cttgctgttcacctggattgtcctgctcggtgctgccgttgcagctctgtttgccaatgatggcgcggcgcttat

SEQ ID NO: 528412 - DNA, 75 bp, synthetic construct
  source 1..75: mol_type = other DNA
gccgctcggtattcccgttagcgcgattgcggctgttggagctgtgatcctgtttgtagtagctaaacgaggcca

SEQ ID NO: 528413 - DNA, 75 bp, synthetic construct
  source 1..75: mol_type = other DNA
gattaaagatctggcaaccttcagaaccggctggatcgtgttgatccttcttctggttggctttttcgtccttga

SEQ ID NO: 528414 - DNA, 75 bp, synthetic construct
  source 1..75: mol_type = other DNA
tgctgtggctgcacgtgctggcacagaaaaacatcaccatcagctggggctattacttccgcgtgggcatcgtga

SEQ ID NO: 528415 - DNA, 75 bp, synthetic construct
  source 1..75: mol_type = other DNA
acgtcacctcgacgctgtttgtctgttgggcggtccaggccgcgctcaatatcctctacggcattcctaagcaaa

SEQ ID NO: 528416 - DNA, 75 bp, synthetic construct
  source 1..75: mol_type = other DNA
ctaaccgaatacctttcaggtgtgctgaacgtactggcggataaaggactctggactgcgacgctgggtactggc

SEQ ID NO: 528417 - DNA, 75 bp, synthetic construct
  source 1..75: mol_type = other DNA
gattggcgcattgtcaattgatggcagcaccgcgaccggtgttatcaaagaggcgatgatttatgccaacgtcat

SEQ ID NO: 528418 - DNA, 75 bp, synthetic construct
  source 1..75: mol_type = other DNA
tattgtgattagcgtcggggatgcgcgtggtattggtgtggtgaaagcgcctgaagttaacggaacggcgctgac

SEQ ID NO: 528419 - DNA, 75 bp, synthetic construct
  source 1..75: mol_type = other DNA
cgatgcaacactgctttcggcgatgaccgggatcgcgcgctttgtgcaggacaaagatctgaaaaagatcctccg

SEQ ID NO: 528420 - DNA, 75 bp, synthetic construct
  source 1..75: mol_type = other DNA
gctttccgtcgggcgcgtacagacgccagtgcttgggctggtggtgcgccgcgacgaagaaattgaacactttgt

SEQ ID NO: 528421 - DNA, 75 bp, synthetic construct
  source 1..75: mol_type = other DNA
cgagtctggcgcgcgccattgctgatgtcctgcccaaaccgcaccggaaaggcgatggctttatcgagtgcggta

SEQ ID NO: 528422 - DNA, 75 bp, synthetic construct
  source 1..75: mol_type = other DNA
gatcaacctgacggagaacgaagcgaaggtctataacctgattgcccgtcagtacctgatgcagttctgcccgga

SEQ ID NO: 528423 - DNA, 75 bp, synthetic construct
  source 1..75: mol_type = other DNA
ttcactttcggcgttgcagattgaagcagcaaaacgctttggtctgagtgcgcagaacgtacttgatatctgcca

SEQ ID NO: 528424 - DNA, 75 bp, synthetic construct
  source 1..75: mol_type = other DNA
agccgactggctgtacggcatcaatatgacccgcgcttacaccattctcggtcgcaatgcgggttatcagggcgt

SEQ ID NO: 528425 - DNA, 75 bp, synthetic construct
  source 1..75: mol_type = other DNA
cttcgttaaccggttacgccaaccctgtacagtccaccgccagcgaaattggcgtttcctgcggtgggtttatta

SEQ ID NO: 528426 - DNA, 75 bp, synthetic construct
  source 1..75: mol_type = other DNA
aactgaaagacggctactacctcgaaccgacgattttgtttggtcagaacaatatgcgcgtgttccaggaggaga

SEQ ID NO: 528427 - DNA, 75 bp, synthetic construct
  source 1..75: mol_type = other DNA
cgtgacgcaaatgggggcgcaggtttctcacgggcaactggaaaccatcctcaactacattgatatcggtaaaaa

SEQ ID NO: 528428 - DNA, 75 bp, synthetic construct
  source 1..75: mol_type = other DNA
agggaacttccggacaatgccggtgcagaccatcaccgcgaccactccgtccggcagcagacctgcggtgacagc

SEQ ID NO: 528429 - DNA, 75 bp, synthetic construct
  source 1..75: mol_type = other DNA
cagtcctcagaagcaaagccggttgcggcatcactgccgcgcctggctgaagggaacttccggacaatgtcggtg

SEQ ID NO: 528430 - DNA, 75 bp, synthetic construct
  source 1..75: mol_type = other DNA
accccagacaagctcgtgactttgcccgcgccatgggatacctcgcgaaaactgatagtattgatgccagagtgc

SEQ ID NO: 528431 - DNA, 75 bp, synthetic construct
  source 1..75: mol_type = other DNA
ggtggtctatggcctgcgcaatgccgggctcacggagtatctgtctggtgtactgaacctgctggcagaaaaggg

SEQ ID NO: 528432 - DNA, 75 bp, synthetic construct
  source 1..75: mol_type = other DNA
cgtttgaatgcgttcgtcggacagctgacgtaattgaagattctatagcccgggcaatgatgacagattttattg

SEQ ID NO: 528433 - DNA, 75 bp, synthetic construct
  source 1..75: mol_type = other DNA
ccgtgtttattcaactagcgacgtaggcgggcaatcaagaccatattcagccattgctgctggtttacgagccag

SEQ ID NO: 528434 - DNA, 75 bp, synthetic construct
  source 1..75: mol_type = other DNA
gcccgacggaacaaaaaaattaacgatgattacggagctgggaatgactcccagcaaaatgtatgatcagaatca

SEQ ID NO: 528435 - DNA, 75 bp, synthetic construct
  source 1..75: mol_type = other DNA
ccgcgaaagatgcggtgatcccgggtttgcagaaagattatgaagaagacttcaaaacggcgctgttacgcgctc

SEQ ID NO: 528436 - DNA, 75 bp, synthetic construct
  source 1..75: mol_type = other DNA
gaaatctccggcacaaacaattacgttaatgtactgtattaataatgactatacagttgaggcactggcctccct

SEQ ID NO: 528437 - DNA, 75 bp, synthetic construct
  source 1..75: mol_type = other DNA
ccagtaaaaatgatggaattgtttatcagatgcccgtcacgagcctgacgggcggttctgacgctccatttccag

SEQ ID NO: 528438 - DNA, 75 bp, synthetic construct
  source 1..75: mol_type = other DNA
gttgaacgaaaaatcatcgagcatatacaagaagcattgaaagggattaacaatttccgacgaaaggctgttatc

SEQ ID NO: 528439 - DNA, 75 bp, synthetic construct
  source 1..75: mol_type = other DNA
cgggcggtctgggtactgcaaccgtcagcgttaagtccggtgagcatgttctcatcgataacagcgaagctgttt

SEQ ID NO: 528440 - DNA, 75 bp, synthetic construct
  source 1..75: mol_type = other DNA
cactgagtgagcgggtttattcaggtacgcatggtaatgagtcggtggcagaaggtgtgtttacagtgaatgctg

SEQ ID NO: 528441 - DNA, 75 bp, synthetic construct
  source 1..75: mol_type = other DNA
gaacaacttgaagtggtgacaaataaattacgaggcgttggatatatcgattcaccgcgaggcgctacgcctgct

SEQ ID NO: 528442 - DNA, 75 bp, synthetic construct
  source 1..75: mol_type = other DNA
tactgtgaagacaatgataatttcataattataggagcactaaacttactactagatgattacaacaaacacaat

SEQ ID NO: 528443 - DNA, 75 bp, synthetic construct
  source 1..75: mol_type = other DNA
cagtttatcaatgatgagtttaatttgcacataaatggactagatgctggtattgaattttgtgtcgatgaaaac

SEQ ID NO: 528444 - DNA, 75 bp, synthetic construct
  source 1..75: mol_type = other DNA
gtcgggggccgacctactcaaagcgtggccttcaatggcgcagcagcttggtgttctgcacagcctgccggttgt

SEQ ID NO: 528445 - DNA, 75 bp, synthetic construct
  source 1..75: mol_type = other DNA
cttgctgtttacctggattgtcctgctcggtgctaccgttgcggccctgtttgccaatgatggcgcggcgcttat

SEQ ID NO: 528446 - DNA, 75 bp, synthetic construct
  source 1..75: mol_type = other DNA
gggattatcatgaccctgcctgtgctgtttgtaacgctggctgcgctggcgctacgtctctctgtcactttgtaa

SEQ ID NO: 528447 - DNA, 75 bp, synthetic construct
  source 1..75: mol_type = other DNA
aatatcgtctggaacgccacagcaacctttattgccgtgattatcatcagtttgctgctggatgagtctggcttt

SEQ ID NO: 528448 - DNA, 75 bp, synthetic construct
  source 1..75: mol_type = other DNA
attaaacgtattgctgccggtacgcaaactatgacggtgtataaacctattacattgttggcaaatactgccgca

SEQ ID NO: 528449 - DNA, 75 bp, synthetic construct
  source 1..75: mol_type = other DNA
gttgattccggaaaaattaaagtcgttggtgaccaatgggttgatggctggttaccggaaaacgcattgaaaatt

SEQ ID NO: 528450 - DNA, 75 bp, synthetic construct
  source 1..75: mol_type = other DNA
attgcggctgttggagctgtgatcctgtttgcagtagctaaacgaggccatgccattaacaccggcaaagtgctg

SEQ ID NO: 528451 - DNA, 75 bp, synthetic construct
  source 1..75: mol_type = other DNA
gcccacgctggcctccgggctgcggctgcgtatcccggtgattgggccgatgcaggtgcatgatgttgatgaggt

SEQ ID NO: 528452 - DNA, 75 bp, synthetic construct
  source 1..75: mol_type = other DNA
tacgccgcagctcgatcttttggctcgtgtcgaacgagagctaccggtgcggctcgaccaagagcgcaccgatat

SEQ ID NO: 528453 - DNA, 75 bp, synthetic construct
  source 1..75: mol_type = other DNA
atggaagacgaaacgttgggattttttaagaaaacatcttcatctcatgctcgcctgaatgtgcctgcgcttgtg

SEQ ID NO: 528454 - DNA, 75 bp, synthetic construct
  source 1..75: mol_type = other DNA
tcctgaccattgttttggttatctggcaaccgaagggattagggatcggctggagtgcaatgctaggcgcaggac

SEQ ID NO: 528455 - DNA, 75 bp, synthetic construct
  source 1..75: mol_type = other DNA
tcatctgaacgggaagctcgtcgccagttcgccagccggtttgtcctggtattgtctgcccgtattccggtgcgc

SEQ ID NO: 528456 - DNA, 75 bp, synthetic construct
  source 1..75: mol_type = other DNA
gaagaaaaaatgcggctgcggcggagcagttaaagatggaattattgaaatccagggcgataagcgtgatttatt

SEQ ID NO: 528457 - DNA, 75 bp, synthetic construct
  source 1..75: mol_type = other DNA
atgagcgccatagattcccaacttccctcatcttctgggcaagaccgcccagaagatgaggttgaccgcatatta

SEQ ID NO: 528458 - DNA, 75 bp, synthetic construct
  source 1..75: mol_type = other DNA
agtctgattcaactgaaattgcaggccggacgtaaactgacgcaggcagaaaccacccgacttaacaccgtgctg

SEQ ID NO: 528459 - DNA, 75 bp, synthetic construct
  source 1..75: mol_type = other DNA
gtactgattgagaaaaaaggctattacgtcaacatgcgcattactggtgacgatgttgatttgtcgccgctggaa

SEQ ID NO: 528460 - DNA, 75 bp, synthetic construct
  source 1..75: mol_type = other DNA
ctgtgctgctcgcgaatgcatttactcgcagcatttattgatggaggcctgcactgaagctgctctcagcaattt

SEQ ID NO: 528461 - DNA, 75 bp, synthetic construct
  source 1..75: mol_type = other DNA
ggatttattgatatcagcgccacctcgaagaaaattattttctgcggcactttaaccgcaggcagtttaaaaacg

SEQ ID NO: 528462 - DNA, 75 bp, synthetic construct
  source 1..75: mol_type = other DNA
ggatttattgatatcagtgccacctcgaagaaaattattttttgcggcacgttaactgcgggcagtttaaaaaca

SEQ ID NO: 528463 - DNA, 75 bp, synthetic construct
  source 1..75: mol_type = other DNA
tcggcattgccgatggcattggcctggtcgcccgggaagaaggatgtgccgatgattttattctgacggtggaaa

SEQ ID NO: 528464 - DNA, 75 bp, synthetic construct
  source 1..75: mol_type = other DNA
tgctttaataaaattacgtctgttcacggttattcctcccgtgagtcagcgttatctttcttttgctgacgaccc

SEQ ID NO: 528465 - DNA, 75 bp, synthetic construct
  source 1..75: mol_type = other DNA
atttatactgattacagagggtatgctgtcgtaccaaatttatccgcatattcaaagagcaaaatatctgttgat

SEQ ID NO: 528466 - DNA, 75 bp, synthetic construct
  source 1..75: mol_type = other DNA
tctcaaaatattatcaagcctccactattggtgttggtaagtattttgaacaaatcggagcagtttcatttgatg

SEQ ID NO: 528467 - DNA, 75 bp, synthetic construct
  source 1..75: mol_type = other DNA
ccgtattctgtgggccggacatagtgagagccgaaaagctgctgaacaacagatagaatctctcctcactgccac

SEQ ID NO: 528468 - DNA, 75 bp, synthetic construct
  source 1..75: mol_type = other DNA
catgcaggtgaatggaacggctctgacatctgcgctggctccgttccttaaggggcgtggagggctggaagttgc

SEQ ID NO: 528469 - DNA, 75 bp, synthetic construct
  source 1..75: mol_type = other DNA
acgtcaacatgcgcataactggtgacgatgttgatttgtcgccgctggaaaaattcatcgttccagatccaggcg

SEQ ID NO: 528470 - DNA, 75 bp, synthetic construct
  source 1..75: mol_type = other DNA
tcggtattgctgacggcattggcctggtcgcccgggaagaaggttgtgctgatgactttattctgacggtagaaa

SEQ ID NO: 528471 - DNA, 75 bp, synthetic construct
  source 1..75: mol_type = other DNA
attatctgaaaattgaccgtggctttatcaacgccataggtacggaaacggtcatctcacccgtacttgacgcgg

SEQ ID NO: 528472 - DNA, 75 bp, synthetic construct
  source 1..75: mol_type = other DNA
gcgatggctaagcgaacgcggcgttaatttcatgcaaggctactggattagtcgcccgttaccgctggacgattt

SEQ ID NO: 528473 - DNA, 75 bp, synthetic construct
  source 1..75: mol_type = other DNA
atgttcatacgcgctcccaattctggacgtaagctcctgcttacctgcattgttgcaggcgtaatgattgcgata

SEQ ID NO: 528474 - DNA, 75 bp, synthetic construct
  source 1..75: mol_type = other DNA
tccctgcccgctcaccatttccagattgtgctggaaattaccgagcgcgatatgctgaaagaacatgaagcgtca

SEQ ID NO: 528475 - DNA, 75 bp, synthetic construct
  source 1..75: mol_type = other DNA
tgattgctcgtgacgcggcagaattacacaacgtactgccggtgggcgtaaagtttggtattaacattgcgccgg

SEQ ID NO: 528476 - DNA, 75 bp, synthetic construct
  source 1..75: mol_type = other DNA
gcaaggctactggatcagccgaccattaccgctggatgattttgtccgttggcttaagaaaccgcatacgccgca

SEQ ID NO: 528477 - DNA, 75 bp, synthetic construct
  source 1..75: mol_type = other DNA
aaactgctcacttccctacccgcacaccatttccagattgtgctggaaattaccgagcgcgatatgctgaaagag

SEQ ID NO: 528478 - DNA, 75 bp, synthetic construct
  source 1..75: mol_type = other DNA
caatggcaaaatcatgggtaccggtggatttattgatatcagtgccacttcgaagaaaatcattttctgcggcac

SEQ ID NO: 528479 - DNA, 75 bp, synthetic construct
  source 1..75: mol_type = other DNA
acggtaacgtcggcgtgcataaattcaatggcaaaatcatgggtaccggtggatttattgatatcagtgccactt

SEQ ID NO: 528480 - DNA, 75 bp, synthetic construct
  source 1..75: mol_type = other DNA
cttcggcaccgggcacagcgcgcttatctatcttgagcgttttacgctcgattatctgaaaattgaccgtggatt

SEQ ID NO: 528481 - DNA, 75 bp, synthetic construct
  source 1..75: mol_type = other DNA
gcagagaaatcatgaccgccatcaagcgcgaacaattttacgtggtgtatcaaccggtggttgatacacaagctt

SEQ ID NO: 528482 - DNA, 75 bp, synthetic construct
  source 1..75: mol_type = other DNA
caatgaattgattccggcgctcgacattaataaaaacgtcgatatggcgatcttacccggcacgccgatggtgcc

SEQ ID NO: 528483 - DNA, 75 bp, synthetic construct
  source 1..75: mol_type = other DNA
agattttctaattcatttaaaaataattatctaaatgtaagctcttcagccactgctaaaaacgacgtacaaagg

SEQ ID NO: 528484 - DNA, 75 bp, synthetic construct
  source 1..75: mol_type = other DNA
attaccgactgcgcgcgtcgttttatggcacatcctcaggtgaaaggacgtcgggtttatggacaggttgggttc

SEQ ID NO: 528485 - DNA, 75 bp, synthetic construct
  source 1..75: mol_type = other DNA
atttaatgtcggttcgccagcgcggcagcgttcagcatctggggtctggcgtgacggtcagcttgcggaaaacaa

SEQ ID NO: 528486 - DNA, 75 bp, synthetic construct
  source 1..75: mol_type = other DNA
aagatatcagcaaggaaattaacgggtattactgctgtttttatactgcctttttccttatggcgtgttctgcat

SEQ ID NO: 528487 - DNA, 75 bp, synthetic construct
  source 1..75: mol_type = other DNA
atgcaaacggaacacgtcattttattgaatgcacagggagttcccacgggtacgctggaaaagtatgccgcacac

SEQ ID NO: 528488 - DNA, 75 bp, synthetic construct
  source 1..75: mol_type = other DNA
aaacggacagtatcgttacatgggaaatcatggtcccatgcaactggaagtcccccgtgatcagtatgccggcgc

SEQ ID NO: 528489 - DNA, 75 bp, synthetic construct
  source 1..75: mol_type = other DNA
cgggggcgggaatcatcgcgcaatctacgccggaacgcgaactgacagaaacccgggagaaattagcgagcattg

SEQ ID NO: 528490 - DNA, 75 bp, synthetic construct
  source 1..75: mol_type = other DNA
gtgaaaaagtctcccagatggtcagttgggggcactggtttgcactgttcaatattctgctttcactcgtcattg

SEQ ID NO: 528491 - DNA, 75 bp, synthetic construct
  source 1..75: mol_type = other DNA
tctggcaacggcgggaatgacgctattactgatcgatagcgaagtctttactcgtttccatctccatcttaatcc

SEQ ID NO: 528492 - DNA, 75 bp, synthetic construct
  source 1..75: mol_type = other DNA
aggcgctgaaaaaactgacctgtgccatcagccagacactggaagaacaaccggtgctcaacagtaaatcgtggc

SEQ ID NO: 528493 - DNA, 75 bp, synthetic construct
  source 1..75: mol_type = other DNA
gtggtgaacgggtgaaagacgaaaaaccacagttaagtttgttattgcaagtgctgactgatgagaaacgattta

SEQ ID NO: 528494 - DNA, 75 bp, synthetic construct
  source 1..75: mol_type = other DNA
gttattctcatccgatggctttaccagcccgttgtatcgtcaggcattgttgtcagacttctcaatgccgagcgt

SEQ ID NO: 528495 - DNA, 75 bp, synthetic construct
  source 1..75: mol_type = other DNA
cgatggtctgaattactcacgttttgagaagcaaatgcctgcgctggcgaattttgccggacaaaatatcacatt

SEQ ID NO: 528496 - DNA, 75 bp, synthetic construct
  source 1..75: mol_type = other DNA
atgaagtaatggattatcagtggtgtgatttagcgcaggtattacgcggtatcgatgccacgccgtgggcattca

SEQ ID NO: 528497 - DNA, 75 bp, synthetic construct
  source 1..75: mol_type = other DNA
cagcaactccaccggctcagtgttgttcagggtatgctgaagcacattgatttttcgacggccagcccgactgtc

SEQ ID NO: 528498 - DNA, 75 bp, synthetic construct
  source 1..75: mol_type = other DNA
accccgctgatgttctccctgggccgttgaaagacggctttggaatgaagccgaaatccccggtaaaaatcaccg

SEQ ID NO: 528499 - DNA, 75 bp, synthetic construct
  source 1..75: mol_type = other DNA
ccgccttctggctgggggaattacccggaatggctggctggccagtcgttactggatattgcgctaaacagagag

SEQ ID NO: 528500 - DNA, 75 bp, synthetic construct
  source 1..75: mol_type = other DNA
ctgggaatgttgatgcatcttatgtaggtacttacggtagggtgtctggaggatatttttatcaagataaattag

SEQ ID NO: 528501 - DNA, 75 bp, synthetic construct
  source 1..75: mol_type = other DNA
ctcaccggtaaagaatacgttctgcttgagttgctgctgcaacgcaccggagaagtgttacccaggagtcttatc

SEQ ID NO: 528502 - DNA, 66 bp, synthetic construct
  source 1..66: mol_type = other DNA
atgtggcgtaaactgaactgcaccccaaatgttggacataatctgacatctgaaggtgcagtttat

SEQ ID NO: 528503 - DNA, 75 bp, synthetic construct
  source 1..75: mol_type = other DNA
acaattcataatgcaataactgataaagcgttagcaagttactttcgcagttcgggtaatttgttagaagaatag

SEQ ID NO: 528504 - DNA, 75 bp, synthetic construct
  source 1..75: mol_type = other DNA
cgaccaatatgttaatcaaaccactggtggtcagtatcatcaggcaacgccccgtcatggaatatgatgcatccc

SEQ ID NO: 528505 - DNA, 75 bp, synthetic construct
  source 1..75: mol_type = other DNA
cgtgcactaaacaaaaaagcgtggccaggtgtgtggaccaactcggtatgcggtcatccgcaactgggtgaaagc

SEQ ID NO: 528506 - DNA, 75 bp, synthetic construct
  source 1..75: mol_type = other DNA
ttggtttttcaccgctatcaaaaaccatcgtgttggccaaaatgcgcgatttaggtgacggaacaaaacgccgtg

SEQ ID NO: 528507 - DNA, 75 bp, synthetic construct
  source 1..75: mol_type = other DNA
cacttatgatattgccgagggttcggttgtcagtctggcggccggagggatcagttttgccctgacggcatcggt

SEQ ID NO: 528508 - DNA, 75 bp, synthetic construct
  source 1..75: mol_type = other DNA
cggggacggatctccggtacgcagttcatcaggaatcttgccgtggcatcttccggtgtggcaggtggtgctgtc

SEQ ID NO: 528509 - DNA, 75 bp, synthetic construct
  source 1..75: mol_type = other DNA
taacgccctgcgcggtcactccaatattcaggggctgacggacctggggctgctgtcgcagagcctgccgggtta

SEQ ID NO: 528510 - DNA, 75 bp, synthetic construct
  source 1..75: mol_type = other DNA
acgccattcgttggtgatgcgaacacgcagacgccggagtttaagtccttccttgtgaatgtggaaaaggtgtaa

SEQ ID NO: 528511 - DNA, 75 bp, synthetic construct
  source 1..75: mol_type = other DNA
acattcgtacgatggcgatgatccagttgctgctcggtaacatggggatggctggcggcggcgttaacgccctgc

SEQ ID NO: 528512 - DNA, 75 bp, synthetic construct
  source 1..75: mol_type = other DNA
tcacactgctgatgctgggcggctgcaccgcgccgcaacaacccgttgcgcctgcaccaaaacccgcaacaccgc

SEQ ID NO: 528513 - DNA, 75 bp, synthetic construct
  source 1..75: mol_type = other DNA
aaagtagccaaaacgctaagcgaatacgacttcagtcaggtgccggaactgaatggagctcagttccggcaactc

SEQ ID NO: 528514 - DNA, 75 bp, synthetic construct
  source 1..75: mol_type = other DNA
ttaccggatatgcagcaaacgctgctggataaacactatctgcgtaagcatggcgcgaaggcatattacgggcag

SEQ ID NO: 528515 - DNA, 75 bp, synthetic construct
  source 1..75: mol_type = other DNA
ctcgttcctctacgcgctcggctggacgcaacactccgttggtgcgcagaacattcgtacgatggcgatgatcca

SEQ ID NO: 528516 - DNA, 75 bp, synthetic construct
  source 1..75: mol_type = other DNA
attttgctcgcctggcgcgagatggtggttacaccatcgcacagtatgccgccgagtttaatcttaaccctaata

SEQ ID NO: 528517 - DNA, 75 bp, synthetic construct
  source 1..75: mol_type = other DNA
aggaagccggcttactggcctcaacaggaagtactggtgactcgtatgacaacgcgatggcggagagcatcaatg

SEQ ID NO: 528518 - DNA, 75 bp, synthetic construct
  source 1..75: mol_type = other DNA
ccatcggtattccgattcactggggctatgaaggtgttgcgaaaaaaggctttattgccaatacgttgacgccat

SEQ ID NO: 528519 - DNA, 75 bp, synthetic construct
  source 1..75: mol_type = other DNA
aaaccgctgctggaaggtcaggtcaactactggagcaactacccgaaattcttcgtctcgatgatgaaagcattc

SEQ ID NO: 528520 - DNA, 75 bp, synthetic construct
  source 1..75: mol_type = other DNA
ctcgttcctctacgcgctcggctggacgcaacactccgttggtgcacagaacatccgcacgatggcgatgatcca

SEQ ID NO: 528521 - DNA, 75 bp, synthetic construct
  source 1..75: mol_type = other DNA
atgtctcaggctgagcgtcgttatgaccgcctggctgtccggttgtcgctgattatcagtcgtctgttcgcgggg

SEQ ID NO: 528522 - DNA, 75 bp, synthetic construct
  source 1..75: mol_type = other DNA
ggacgatccggcgcttggtcgtgagctttacggcgaaggaaagccgccccgcgttattgatgtgggtcttcttga

SEQ ID NO: 528523 - DNA, 75 bp, synthetic construct
  source 1..75: mol_type = other DNA
acagcatgaactggcctgactgcctggatgatccggcgtttggtcgggagctttatggagaaggcaggccaccca

SEQ ID NO: 528524 - DNA, 75 bp, synthetic construct
  source 1..75: mol_type = other DNA
cgtctgatttatctcgaccttgagtatcagaatggctgctgccgtctgctgaccggtggacgtcaggaaattcgg

SEQ ID NO: 528525 - DNA, 75 bp, synthetic construct
  source 1..75: mol_type = other DNA
atggaaaagcagccggataaattagaagttctgatggactggtttttaggtgacgcgaaggaaatcaccgcaact

SEQ ID NO: 528526 - DNA, 75 bp, synthetic construct
  source 1..75: mol_type = other DNA
tgaaagcggggggaagtatggcgatagagtccagcgggaaactatccataaaagccgctgaagtctctgttgata

SEQ ID NO: 528527 - DNA, 75 bp, synthetic construct
  source 1..75: mol_type = other DNA
tctccttgtggccagccggacaaccgacgaccactgtaacaacgacgggtggtaacgcagcggcaaccgacgacc

SEQ ID NO: 528528 - DNA, 75 bp, synthetic construct
  source 1..75: mol_type = other DNA
tccatcaactcccctgcactggccgatccgacattgatcacccgtctggcagatcgttttggcgtgcagtgtatt

SEQ ID NO: 528529 - DNA, 75 bp, synthetic construct
  source 1..75: mol_type = other DNA
cacaaacaaataatcaatattggtgaattaaaagcgtacctggcaacacagggcgtggagattaggatatgttaa

SEQ ID NO: 528530 - DNA, 75 bp, synthetic construct
  source 1..75: mol_type = other DNA
ggtgaaaggcgtacagtttcgcaaccatgaaatcattggcgatattgtaccgctggcaaaacgctacgccgaaga

SEQ ID NO: 528531 - DNA, 75 bp, synthetic construct
  source 1..75: mol_type = other DNA
acgcggccaccggcaagtatcacgtcaaccagtatactggcgacgaaagccgtacccgcgtgacccaatgggaga

SEQ ID NO: 528532 - DNA, 75 bp, synthetic construct
  source 1..75: mol_type = other DNA
gcctggacgtacgtgatggccaggtggtcaaaggcgtgcagttccgtaatcacgaaatcatcggcgacatcgtgc

SEQ ID NO: 528533 - DNA, 75 bp, synthetic construct
  source 1..75: mol_type = other DNA
ggatcgatttggcgtgcagtgtattgtggtcggtattgatacctggtacgacgctgaaaccggtaaatatcatgt

SEQ ID NO: 528534 - DNA, 75 bp, synthetic construct
  source 1..75: mol_type = other DNA
gtgctggacgaggcgaaaatcggtgtcgcatccatgctcggtagtcgggtacgggtgaaaacctggagctgtttg

SEQ ID NO: 528535 - DNA, 75 bp, synthetic construct
  source 1..75: mol_type = other DNA
aaatgcttacagccattatccctgttgatttaaaaagaaggccaaatgacataattaaaaaatcaatatttatgt

SEQ ID NO: 528536 - DNA, 75 bp, synthetic construct
  source 1..75: mol_type = other DNA
gggccgaaatgaccgagctttcaaccaacgtgaagcgccacgacgcacaccgattttacctgcgcgaaggctacg

SEQ ID NO: 528537 - DNA, 75 bp, synthetic construct
  source 1..75: mol_type = other DNA
tggatggcgaagttgtcggcatgatcggcctgcatttgcagtttcatctgcatcatgtcaactggatcggcgaaa

SEQ ID NO: 528538 - DNA, 75 bp, synthetic construct
  source 1..75: mol_type = other DNA
aggtgaggtttgatcttaacgtcagtaaaagcgcatggttaacggcgatcccgctggcgcagcagttctggcaaa

SEQ ID NO: 528539 - DNA, 75 bp, synthetic construct
  source 1..75: mol_type = other DNA
cgaggcatttcgccacattgcacaagaaatgccggaaaaaatccggcaaatcgaagagaaagttgcccgcatggg

SEQ ID NO: 528540 - DNA, 75 bp, synthetic construct
  source 1..75: mol_type = other DNA
tctccgatatgtacgttaccaccaaaggtttcctgccctttgcgccagaggctgatttctgggtgggtaaacacg

SEQ ID NO: 528541 - DNA, 75 bp, synthetic construct
  source 1..75: mol_type = other DNA
ccgtttcacgagatacgcaagctaacaattaatcagccggaaatggcttatcttgcacatgatgatattcccagg

SEQ ID NO: 528542 - DNA, 75 bp, synthetic construct
  source 1..75: mol_type = other DNA
aagcgttaagcgatcttctggaactgtggtgggtgtaccacggtaagaatcatcgttatggcgcgatgaatcggg

SEQ ID NO: 528543 - DNA, 75 bp, synthetic construct
  source 1..75: mol_type = other DNA
cttcggcaccggacacagcgcgcttatctatttggaacgtttcacgctcgattacctgaaaattgaccgcggttt

SEQ ID NO: 528544 - DNA, 75 bp, synthetic construct
  source 1..75: mol_type = other DNA
atagagaccttgagtgaatataatcatgttattgtcagctcatacgattgtagttataagcatataaacacttca

SEQ ID NO: 528545 - DNA, 75 bp, synthetic construct
  source 1..75: mol_type = other DNA
gaataaccatatagacaaaatggttgaacgctattcctgcctgcgtgctttacgcatcgatctattctaccagga

SEQ ID NO: 528546 - DNA, 75 bp, synthetic construct
  source 1..75: mol_type = other DNA
atgcaaaacaaacaacgatgggagcaagactggtttttgggagccctcctgaacaaccatatcgacaaaatggtt

SEQ ID NO: 528547 - DNA, 75 bp, synthetic construct
  source 1..75: mol_type = other DNA
acaatttgtcactcaccagagcgtggcgcaaacagaagtgatctgggcgtttgggcgacttatcgccaacagcga

SEQ ID NO: 528548 - DNA, 75 bp, synthetic construct
  source 1..75: mol_type = other DNA
ccatcagccagacactggaagaacaaccggtgctcaacagtaaatcgtggctgaccagtttgcaaaacgattaca

SEQ ID NO: 528549 - DNA, 75 bp, synthetic construct
  source 1..75: mol_type = other DNA
gtgaacacggtggcctcagaaaatccggatgaagccgggcgttacagtatggacgttgagtatggtcagtacagc

SEQ ID NO: 528550 - DNA, 75 bp, synthetic construct
  source 1..75: mol_type = other DNA
tcgtaagtccgattgctggttacaacatggtatttcgttcgacttcatcacgtcgatacaagacggatatcgagt

SEQ ID NO: 528551 - DNA, 75 bp, synthetic construct
  source 1..75: mol_type = other DNA
tccggtgtggcaggtggagctgtcgggtcagtggcgggcgggatattgttcagtccactgggaccatttggtgca

SEQ ID NO: 528552 - DNA, 75 bp, synthetic construct
  source 1..75: mol_type = other DNA
ttgttcagggtatgctgaagcacattgatttttcgactgccagcccgactgtccgactggctcttcagaagggga

SEQ ID NO: 528553 - DNA, 75 bp, synthetic construct
  source 1..75: mol_type = other DNA
attgaaaatctgaacgcgaatctggcccgtgttatcgatcagaatgctctggagatcattttcgccgccggtata

SEQ ID NO: 528554 - DNA, 75 bp, synthetic construct
  source 1..75: mol_type = other DNA
atggctaacctacgcaaagaagcacgcggcagagaatgccaggtacgtatttacggcgtatgcaatggtaatcct

SEQ ID NO: 528555 - DNA, 75 bp, synthetic construct
  source 1..75: mol_type = other DNA
ttacggcgtatgcaatggcaaccctgaaactacagttctggcacattaccggatggctggaatttgcggaacggg

SEQ ID NO: 528556 - DNA, 75 bp, synthetic construct
  source 1..75: mol_type = other DNA
gttacgaacagttggcaagcgatgctctggcaggagaaattgtgggttcttctgcgggcggtgagcagccaaaat

SEQ ID NO: 528557 - DNA, 75 bp, synthetic construct
  source 1..75: mol_type = other DNA
tgttgaaacttcgtcctgtatggtatcgctcgacttgtgaaagggacagaaaggactggggacattatggcctta

SEQ ID NO: 528558 - DNA, 75 bp, synthetic construct
  source 1..75: mol_type = other DNA
aacaaccgatagtcctaacatgttcgtaagtccgattgctggctacaacatggtttttcgttcgacttcatcccg

SEQ ID NO: 528559 - DNA, 75 bp, synthetic construct
  source 1..75: mol_type = other DNA
tctttctctggcggggcaggatggttcaaactggctacggttacaatgccacaagcgagttccatcgtttacatc

SEQ ID NO: 528560 - DNA, 75 bp, synthetic construct
  source 1..75: mol_type = other DNA
taccgcgactcgctggacgacgctatcagcatgttgcgtgtgcgtgaagcctggcggctcatgtcggagaaaaaa

SEQ ID NO: 528561 - DNA, 75 bp, synthetic construct
  source 1..75: mol_type = other DNA
atgcgcatgatgggcatcaaaaccgatatcgtggttagcggctctttgagcaaagaagagttgcgcaccatcgtg

SEQ ID NO: 528562 - DNA, 75 bp, synthetic construct
  source 1..75: mol_type = other DNA
gcgcaatctgttggaatgtcacatgcggagtttatcgcggcgtatgaccagctttcgcagcgggcgcagcaatca

SEQ ID NO: 528563 - DNA, 75 bp, synthetic construct
  source 1..75: mol_type = other DNA
acgatatcgatatcctcgacgttcaggacaatatgattaagcaggtaaaagtttttcctgtaaaaccgctacgtg

SEQ ID NO: 528564 - DNA, 75 bp, synthetic construct
  source 1..75: mol_type = other DNA
cgtgaagcctggcggttgatgtcggagaaaaaagagttcaccaaagaaaccatgctgcgcgccgcggacgagatc

SEQ ID NO: 528565 - DNA, 75 bp, synthetic construct
  source 1..75: mol_type = other DNA
gatgtcgccaacacttgccgaagaagtcacgccgcaaaacgacggttcggtgattattgatggcactgccaacgt

SEQ ID NO: 528566 - DNA, 75 bp, synthetic construct
  source 1..75: mol_type = other DNA
aaaggagaaacgtcgcaacgagtttcacctttctcggatatgacttcaaagcgcgtacgctgaagaatttcaaag

SEQ ID NO: 528567 - DNA, 75 bp, synthetic construct
  source 1..75: mol_type = other DNA
cgtatatatctccagacgggcagctttacgctcaacaagcgactgaaattgtgaaagagcgtgcccggcaaggtg

SEQ ID NO: 528568 - DNA, 75 bp, synthetic construct
  source 1..75: mol_type = other DNA
tgctctatgggagtggattatctgcaggggttttatttcggcagaccggaaaaagtggatacattttgttgtgag

SEQ ID NO: 528569 - DNA, 75 bp, synthetic construct
  source 1..75: mol_type = other DNA
tacctggagattaacaatacctgatttttttggaatgaaagaaggagtgctgagttgtattattcctgaatgtat

SEQ ID NO: 528570 - DNA, 75 bp, synthetic construct
  source 1..75: mol_type = other DNA
atggggcagtttcaccagtctgtcgaaagccagctagggcaggggacagttgacgcgatgttgcagtacgctggc

SEQ ID NO: 528571 - DNA, 75 bp, synthetic construct
  source 1..75: mol_type = other DNA
agtgcaatgcagtcacgtctgctcaagtggatgcagtctaaatacagactttcgaaccggaaggctcagcgaaag

SEQ ID NO: 528572 - DNA, 75 bp, synthetic construct
  source 1..75: mol_type = other DNA
agagcccgatcgctcttttggtgataaggtaaaagtgcaggattttctgtgtgtggcggttgaggacgaaaaagt

SEQ ID NO: 528573 - DNA, 75 bp, synthetic construct
  source 1..75: mol_type = other DNA
attttgcgctcgatgaatgatgcgctaatcacccgcgtgaccggcgaagaaaacgggcaaatgcgtcttgaggag

SEQ ID NO: 528574 - DNA, 75 bp, synthetic construct
  source 1..75: mol_type = other DNA
accacttcctgcaaggtcaatggcgcaacattgcccgtgcacaaatcttgctgggcgagtttgaaccggcagaaa

SEQ ID NO: 528575 - DNA, 75 bp, synthetic construct
  source 1..75: mol_type = other DNA
aaaacctgctggggaatggcaaatatcacagcgactggatctctaacgccaacaaagtccgggtgatttactggc

SEQ ID NO: 528576 - DNA, 75 bp, synthetic construct
  source 1..75: mol_type = other DNA
cccaagctggacgatatcagctttacgctgcgtcgtggcgaagtgctcggcattgctggcctgctgggggctggg

SEQ ID NO: 528577 - DNA, 75 bp, synthetic construct
  source 1..75: mol_type = other DNA
ggagatcgtgaaactcgatgaccccaatcttattatcaacaaacgtttcaacgccgggaaacgccacggctattt

SEQ ID NO: 528578 - DNA, 75 bp, synthetic construct
  source 1..75: mol_type = other DNA
gcattaagcatggtcaacacattatcaggccaagctccgtggagaaacttgattttatcttcaaccgcatacccg

SEQ ID NO: 528579 - DNA, 75 bp, synthetic construct
  source 1..75: mol_type = other DNA
cctggcgggaatcaatgccagccatctttcggattatctggtcgatgaggttttggataacgtcgatctcgcaac

SEQ ID NO: 528580 - DNA, 75 bp, synthetic construct
  source 1..75: mol_type = other DNA
atgcgcaaaatgctgctggcggcagcactttcagtgacggcaatgaccgctcacgccgactaccagtgcagcgtc

SEQ ID NO: 528581 - DNA, 75 bp, synthetic construct
  source 1..75: mol_type = other DNA
tttacaggacagcattaatgaaatgggcgcgaaagcggtgctgaaaagcggcggtaacccattacagaatgtgct

SEQ ID NO: 528582 - DNA, 75 bp, synthetic construct
  source 1..75: mol_type = other DNA
aacggatggatgatactggcgaatggttctgctatcacccgctgtttggtaacttcctgcgtcaacgctgccagt

SEQ ID NO: 528583 - DNA, 75 bp, synthetic construct
  source 1..75: mol_type = other DNA
accacttcctgcaaggtcaatggcgcaacattgcccgcgcacaaatcttgctgggcgagtttgaacctgcggaaa

SEQ ID NO: 528584 - DNA, 75 bp, synthetic construct
  source 1..75: mol_type = other DNA
tggatggcccagggatttcccagcgaagcgattcatcatgcgctggcggcaggcgatgcgctgatgctgcgcgat

SEQ ID NO: 528585 - DNA, 75 bp, synthetic construct
  source 1..75: mol_type = other DNA
attctgagtgaaaagacatcccgacatatcgtggaaagcgttatcgggctggcaggaaagttgggtattgatatg

SEQ ID NO: 528586 - DNA, 75 bp, synthetic construct
  source 1..75: mol_type = other DNA
aacttcttaccgccagcattgaccagctttttgagggcggcgtcggtgaagattacctttcgcaacttctttcca

SEQ ID NO: 528587 - DNA, 75 bp, synthetic construct
  source 1..75: mol_type = other DNA
cagcatccggctggcctgtcgccatgctgatgatggcgatgctgattatggcgctgtcattcccgctgtggcgca

SEQ ID NO: 528588 - DNA, 75 bp, synthetic construct
  source 1..75: mol_type = other DNA
atgtataaaattaccgccactattgaaaaagaaggtggcactcctactaactggataagatattcaaaatctaaa

SEQ ID NO: 528589 - DNA, 75 bp, synthetic construct
  source 1..75: mol_type = other DNA
ggttagtggcgctatcgaaaccagcctgaaaaatccgctggataaaattgctggcgtggtgcaaaccgcctccgg

SEQ ID NO: 528590 - DNA, 75 bp, synthetic construct
  source 1..75: mol_type = other DNA
gttgcaggatatgcgtcaggccggggatgactcacgtcagggcagcgcgcaactgatctctcaactgttaagcga

SEQ ID NO: 528591 - DNA, 75 bp, synthetic construct
  source 1..75: mol_type = other DNA
gattacctttcgcaacttctttccagtactaaagaaaacaccacccatgcgcggcaacttaaggatggtctggtc

SEQ ID NO: 528592 - DNA, 75 bp, synthetic construct
  source 1..75: mol_type = other DNA
tacggtgatattgacccgacgcgtgctcgtcagcttctcgaagctgaacaagccgcagaaaccgcacgtcgggag

SEQ ID NO: 528593 - DNA, 75 bp, synthetic construct
  source 1..75: mol_type = other DNA
cgttgccgtttgaatccgcgattgaacgcattgtgcgggcagatccggaagctgacgcattgatgcgtagcgaag

SEQ ID NO: 528594 - DNA, 75 bp, synthetic construct
  source 1..75: mol_type = other DNA
cgttgtcatttgaatctgcgattgaacgcattgtgcgggcagatccagaggctgacgcagtcatgcgcagcgaag

SEQ ID NO: 528595 - DNA, 75 bp, synthetic construct
  source 1..75: mol_type = other DNA
ctggacaagatactcaaaatctaaattaacgaaatcagaatgtgaaaaaatgctctcagaaaaaaaagaagcagg

SEQ ID NO: 528596 - DNA, 75 bp, synthetic construct
  source 1..75: mol_type = other DNA
aaagaagcagccgtttccagagagcagaaagtaaaactgataaattttaattgcgagagacttcagtcctcgtga

SEQ ID NO: 528597 - DNA, 75 bp, synthetic construct
  source 1..75: mol_type = other DNA
tgggtgaagacggtagtgttgtgggctttgataagccagccggtcagaaagaacgtgcagttctggttgacggtg

SEQ ID NO: 528598 - DNA, 75 bp, synthetic construct
  source 1..75: mol_type = other DNA
gcgagagaaaatgaccagcggtatcgatcacctgggtagccaacttggcaacctgtttggacaactggaagaagg

SEQ ID NO: 528599 - DNA, 75 bp, synthetic construct
  source 1..75: mol_type = other DNA
tctttacgccacgctgatgtcgctttcatcgcctttgcaggccggtgtcgacttcaccctctttcaatgtactga

SEQ ID NO: 528600 - DNA, 75 bp, synthetic construct
  source 1..75: mol_type = other DNA
cgctgtctatgcagtccttacccgcgctggtgcgcgctgctggcggttcgctggcgcttgccggtgcgacaaccc

SEQ ID NO: 528601 - DNA, 75 bp, synthetic construct
  source 1..75: mol_type = other DNA
cgattcttacggtaacgtcatcattggaagtggtgactcgttctctgttaccagcaggaatattatcattggtga

SEQ ID NO: 528602 - DNA, 75 bp, synthetic construct
  source 1..75: mol_type = other DNA
tgcaaactatccccaaccaacgttgcaaacggcaatagtagccaattcgttggaggcgagattattggaaaaccc

SEQ ID NO: 528603 - DNA, 75 bp, synthetic construct
  source 1..75: mol_type = other DNA
gcaaaggttggattagatgttctctatgtagttactgggcaacgtaatccatcaatggttgcagaaaaggtagaa

SEQ ID NO: 528604 - DNA, 75 bp, synthetic construct
  source 1..75: mol_type = other DNA
aggaacgtgaacggttgggttacaaccagactgatttcgctgctttggctagcgcaggtaagcactcccaaatca

SEQ ID NO: 528605 - DNA, 75 bp, synthetic construct
  source 1..75: mol_type = other DNA
gtacagcctgagttaaagcacgcctggaatgaattcgaagaatcgttgcactcacaatatgaactggaggacggg

SEQ ID NO: 528606 - DNA, 75 bp, synthetic construct
  source 1..75: mol_type = other DNA
caccaatgtctggttggattattgaacatatgaataccggtaactatgaaggatggcgctggctttttgctattg

SEQ ID NO: 528607 - DNA, 75 bp, synthetic construct
  source 1..75: mol_type = other DNA
acaccagaggattttgctaatatatcttcaatattttttgtgtcctatttgatttttcaaattccgagcagtatt

SEQ ID NO: 528608 - DNA, 75 bp, synthetic construct
  source 1..75: mol_type = other DNA
ctgatgattggtctcaaccacttcgaccccagcacaccagagcaggtctccagcagcgtcaataatctactacgc

SEQ ID NO: 528609 - DNA, 75 bp, synthetic construct
  source 1..75: mol_type = other DNA
cgaaactagacaccacctttggtcagcagtttacaaacctcaacgaaatgatgggacaaaccgttggcgccattc

SEQ ID NO: 528610 - DNA, 75 bp, synthetic construct
  source 1..75: mol_type = other DNA
ggcacgccatctgaaagagagtctggtcactgatttacgcgatatgttgctgcatctggccgagagccagaaagt

SEQ ID NO: 528611 - DNA, 75 bp, synthetic construct
  source 1..75: mol_type = other DNA
caggattatccaaatccagcctgtatcagggacgaaactggaaaatttattttttgcaatatggaccgccccggg

SEQ ID NO: 528612 - DNA, 75 bp, synthetic construct
  source 1..75: mol_type = other DNA
caatattatttttgtcggcttccagcaacaagacgaacgagggctaacgaacgagcctgatgaagatccggacga

SEQ ID NO: 528613 - DNA, 75 bp, synthetic construct
  source 1..75: mol_type = other DNA
cagggttatcaccatcctctggcaacgaatcatcaaacacagtacggcaccgttggccaggcactgcatattgca

SEQ ID NO: 528614 - DNA, 75 bp, synthetic construct
  source 1..75: mol_type = other DNA
cattggctgaaggtttaccttatgttggcctgaccgaacaggatgttcaggacgcccatgcgcgcctgtctcgtt

SEQ ID NO: 528615 - DNA, 75 bp, synthetic construct
  source 1..75: mol_type = other DNA
tgggcctcagcgcgtgtgcgcatcagtaagttaccaacagatgcaaggtttcagcacagaacaactgcgtaatgc

SEQ ID NO: 528616 - DNA, 75 bp, synthetic construct
  source 1..75: mol_type = other DNA
atgaatgcgattacttcagtatcattgaggcgtatcagaaaattgatcgcttccccgaacagaaacagcccattg

SEQ ID NO: 528617 - DNA, 75 bp, synthetic construct
  source 1..75: mol_type = other DNA
aaatatcgcccgcgtgctgacctcgattggtcattatctctacacgccgcgtgaagatgcgttgtatatcaacat

SEQ ID NO: 528618 - DNA, 75 bp, synthetic construct
  source 1..75: mol_type = other DNA
gtggatggtgaaagacaaagcctacagccaggcacatttgccccttgcgcaacagcaaaccgccatcggtcacgc

SEQ ID NO: 528619 - DNA, 75 bp, synthetic construct
  source 1..75: mol_type = other DNA
tcagggcggcgtcgccgtcagaccttgcggagcgactgacacaaaaactgaaggagggctggcagccgtttggca

SEQ ID NO: 528620 - DNA, 75 bp, synthetic construct
  source 1..75: mol_type = other DNA
tgcgggttagcggaaactatccgtggcaggaacaggtgacaattgcggttgaatcgccccagccggtgcgtcata

SEQ ID NO: 528621 - DNA, 75 bp, synthetic construct
  source 1..75: mol_type = other DNA
caaactctgacatttagctgggctaaccggggtgaaggcgaaatgcggatctgggtgaatgaggaaaagcattgc

SEQ ID NO: 528622 - DNA, 75 bp, synthetic construct
  source 1..75: mol_type = other DNA
cccgccgatgcgccatttacgacatttgaaggtaatggattgttccgccataagatcttaatccaggcaccgggt

SEQ ID NO: 528623 - DNA, 75 bp, synthetic construct
  source 1..75: mol_type = other DNA
aagatgcgcctcatcccagaattaaacaattagcgagatttgcgcatacgcatcccggaggcccgccatgtcact

SEQ ID NO: 528624 - DNA, 75 bp, synthetic construct
  source 1..75: mol_type = other DNA
atgaacgcaataatatcgcctgattattactatattcttaccgttgctggtcagtctaatgccatggcgtatggc

SEQ ID NO: 528625 - DNA, 75 bp, synthetic construct
  source 1..75: mol_type = other DNA
gcaccgaaacaggagaatcaaaagaaatcaccgctccggtgattaccctgataatacaaccactatcgccccgtt

SEQ ID NO: 528626 - DNA, 75 bp, synthetic construct
  source 1..75: mol_type = other DNA
gcgaccaatatgttaatcaaaccactggtggtcagtatcatcaggcaacgccccgtcatggaatatgatgcatcc

SEQ ID NO: 528627 - DNA, 75 bp, synthetic construct
  source 1..75: mol_type = other DNA
ggcttatattgctgtgtctgttcggcccggccttactggctggctatatcaccgaacgcataacccggttgttcc

SEQ ID NO: 528628 - DNA, 75 bp, synthetic construct
  source 1..75: mol_type = other DNA
tcattttcgccgccggtatacaacaacgggccgcgaccaacatgttaatcaaaccactggtggtcagtatcatca

SEQ ID NO: 528629 - DNA, 75 bp, synthetic construct
  source 1..75: mol_type = other DNA
cggacaaaacggacagtatcgttacatgggaaatcatggtcccatgcaactggaagtccccgtgatcagtatgcc

SEQ ID NO: 528630 - DNA, 75 bp, synthetic construct
  source 1..75: mol_type = other DNA
tccacaaacaaataatcaatattggtgaattaaaagcgtacctggcaacacaggacgtggagatcaggatatgtt

SEQ ID NO: 528631 - DNA, 75 bp, synthetic construct
  source 1..75: mol_type = other DNA
aagatccgcgaaggtaaagtacccggtataaccgatcccgcagaagcgtcccggctgattcgtcggggacatctg

SEQ ID NO: 528632 - DNA, 75 bp, synthetic construct
  source 1..75: mol_type = other DNA
cggagaactgagggaatttgaactggcagacggaaactggctactggacaatgcctggtatgaaagaaacatggc

SEQ ID NO: 528633 - DNA, 75 bp, synthetic construct
  source 1..75: mol_type = other DNA
gctcttcagaaggggaccggtgcaggaaatatcagtgccctgaacaaagtaatgaagggtacgctggtgacatct

SEQ ID NO: 528634 - DNA, 75 bp, synthetic construct
  source 1..75: mol_type = other DNA
atattcgctggctggcaggcgtatttctgacaattgccggaatgatcatcagcttcatgtggggacttgatggta

SEQ ID NO: 528635 - DNA, 75 bp, synthetic construct
  source 1..75: mol_type = other DNA
aacgccccgtcatggaatatgatgcatcccatctcggcaatatggttaaccgactggaagaaacattacccccgg

SEQ ID NO: 528636 - DNA, 75 bp, synthetic construct
  source 1..75: mol_type = other DNA
ctcaactggaacatttgagcaaatcagaacgcaaagtcgctgaggtcattcttgcttcgccagacaatgcgatcc

SEQ ID NO: 528637 - DNA, 75 bp, synthetic construct
  source 1..75: mol_type = other DNA
ctttatgcacctcgacaaagatggcgcgatccgtatggattgctcctctgaatgtgcgatggcgggcctgctggc

SEQ ID NO: 528638 - DNA, 75 bp, synthetic construct
  source 1..75: mol_type = other DNA
tgttgctgtcggtaaaacgctggtttcttctgcgatgatcgaccgtgtggtcaatgatttgggccgtaagctggt

SEQ ID NO: 528639 - DNA, 75 bp, synthetic construct
  source 1..75: mol_type = other DNA
gctgcagggtagtgtcgataaggatgtctttacccgccttatggagggccggctgccggacggggcggatttaag

SEQ ID NO: 528640 - DNA, 75 bp, synthetic construct
  source 1..75: mol_type = other DNA
ctgaaatcccgggatgtggcggcactggatacgcgtaaatccaaacagcatgtcgatccggagatcaaaatggcc

SEQ ID NO: 528641 - DNA, 75 bp, synthetic construct
  source 1..75: mol_type = other DNA
cgctaatcagattgcctttggcaggctctaccgggaaaaactgaaagagcaggttgaggcgctgggctatgaaac

SEQ ID NO: 528642 - DNA, 75 bp, synthetic construct
  source 1..75: mol_type = other DNA
cactccgacgcctgccgtttccaatgccattctggttcacaacaaaaaaggtggcccgctggcagatggtatcgt

SEQ ID NO: 528643 - DNA, 75 bp, synthetic construct
  source 1..75: mol_type = other DNA
gtgtctggcggatgcgttactggaacgtgaaggcaagatcgacccgaatctgattgggcgtaatattctcgactg

SEQ ID NO: 528644 - DNA, 75 bp, synthetic construct
  source 1..75: mol_type = other DNA
atgaaaacagaacgtattctcggtgctctttatgagcaggcgttaggggatgcgatggggatgccctccgagctt

SEQ ID NO: 528645 - DNA, 75 bp, synthetic construct
  source 1..75: mol_type = other DNA
aaccttggcggcgacacagacaccatcggtgctatggcgacggcgatttgcggcgcgttgcatggcgttaacgct

SEQ ID NO: 528646 - DNA, 75 bp, synthetic construct
  source 1..75: mol_type = other DNA
atgtggtgacggttgaggcggcagaggcattcagtctcaacaacctcggacagtttgccgacaaactaccgtcag

SEQ ID NO: 528647 - DNA, 75 bp, synthetic construct
  source 1..75: mol_type = other DNA
ggcgcagtatcgccgccaggattgcattgcgcacgggcgacatctggctggcttcattcacgcctgctattcccg

SEQ ID NO: 528648 - DNA, 75 bp, synthetic construct
  source 1..75: mol_type = other DNA
cggtaaacccattgctgaactggaaaacaacggcgtgaccaacggcgcagcgatgcgcgtctcgccattaggttg

SEQ ID NO: 528649 - DNA, 75 bp, synthetic construct
  source 1..75: mol_type = other DNA
gagtggatgcagacgctgaaggaaaccgggttcgacatccgggcatatcgtgacgcggcggatcagcgtgcggag

SEQ ID NO: 528650 - DNA, 75 bp, synthetic construct
  source 1..75: mol_type = other DNA
gaaggactgccattaccggacagggaagatgcgcctcatcccagaatcaaacaattagcgagatttgcgcatacg

SEQ ID NO: 528651 - DNA, 75 bp, synthetic construct
  source 1..75: mol_type = other DNA
gcgatccgtatggactgctcctctgagtgtgcgatggcgggcctgctggcactgcgtgataagttcgatctggcg

SEQ ID NO: 528652 - DNA, 75 bp, synthetic construct
  source 1..75: mol_type = other DNA
tttgttgatggtctgttcgacggcagcttcggctttggcggcgaagagagcgcaggggcttccttcctgcgtttc

SEQ ID NO: 528653 - DNA, 75 bp, synthetic construct
  source 1..75: mol_type = other DNA
catcaaccgcgccgtcgacttgctcactcaggcaaaaaaaatcgcctttttcggattaggctcttctgccgccgt

SEQ ID NO: 528654 - DNA, 75 bp, synthetic construct
  source 1..75: mol_type = other DNA
gtgaatcgtttctgtcgcagcatggacacgcgcggttttcctgattttaaacttcatctggcacaaagtctggcg

SEQ ID NO: 528655 - DNA, 75 bp, synthetic construct
  source 1..75: mol_type = other DNA
gacgaacgcgcctgatgaagatccggacgatttaagcacgggatattacggttcagcgtaccggtcaccggagaa

SEQ ID NO: 528656 - DNA, 75 bp, synthetic construct
  source 1..75: mol_type = other DNA
tgctggcggcaaacctggcgcttcccgttcatcatctggtgacgttcacctggggcaatgtcagcgcgatagacg

SEQ ID NO: 528657 - DNA, 75 bp, synthetic construct
  source 1..75: mol_type = other DNA
cgccagctcgcgccgcagcttcctgccatgcaaaatgaactcttagataagcactatctgcgtaagcacggggct

SEQ ID NO: 528658 - DNA, 75 bp, synthetic construct
  source 1..75: mol_type = other DNA
atgaccgccgacgatatggtggtggttgagatagccaccggtaaggtggtggaaggcagaaaaaaaccctcgtcc

SEQ ID NO: 528659 - DNA, 75 bp, synthetic construct
  source 1..75: mol_type = other DNA
aacctgcacaacagagtgatttgattaacatcgcccaactgacggcgcaatattatgtactgaaaccagaagcag

SEQ ID NO: 528660 - DNA, 75 bp, synthetic construct
  source 1..75: mol_type = other DNA
tgttgctgtaggtaaaacgctggtttcatctgcgatgatcgaccgtgtggtcaacgatttgggccgtaagctggt

SEQ ID NO: 528661 - DNA, 75 bp, synthetic construct
  source 1..75: mol_type = other DNA
gaattcattaccggaaaacagcctgatatggtgaggcccaccgtaccttccggtgaaggtccggagagagaggcg

SEQ ID NO: 528662 - DNA, 75 bp, synthetic construct
  source 1..75: mol_type = other DNA
atgtctgcatcttcggttaagccgttaaatgttcaattacccgcaataacccttatcctttttgcactctgtatt

SEQ ID NO: 528663 - DNA, 75 bp, synthetic construct
  source 1..75: mol_type = other DNA
ggaagagatccgtaacaacgattacaacctcaatatcccgcgctatgtcgatacttttgaagctgaagaagagat

SEQ ID NO: 528664 - DNA, 75 bp, synthetic construct
  source 1..75: mol_type = other DNA
gtcgctaaaagccgacttctcgctggcaaaaccgctgatcattcacaatgtgttactctcagcactgggcgggtt

SEQ ID NO: 528665 - DNA, 75 bp, synthetic construct
  source 1..75: mol_type = other DNA
atgaccagtattaccagagaacaggccaagaaaattattgaagctgccgatgaggttattagtgcgcttgccgga

SEQ ID NO: 528666 - DNA, 75 bp, synthetic construct
  source 1..75: mol_type = other DNA
agcagcgactgcggcaggatgctgaatcagcaataccacgtctggcatggggatggtcggtgaagggggctttta

SEQ ID NO: 528667 - DNA, 75 bp, synthetic construct
  source 1..75: mol_type = other DNA
ggattgacccggagatccgtgccctggtggccgcgatgaacattcacggcttccgcacatatgcttcctgtcagg

SEQ ID NO: 528668 - DNA, 75 bp, synthetic construct
  source 1..75: mol_type = other DNA
acagtgcgccatcaactaatgacgcttacgcgtcagcagataccattgatgtggtgccggggtgccggaagtcag

SEQ ID NO: 528669 - DNA, 75 bp, synthetic construct
  source 1..75: mol_type = other DNA
attccacaagatatggtggagctgattgaggtgatgcgcgccgatttcgaagaacataaggatgaagtggactgg

SEQ ID NO: 528670 - DNA, 75 bp, synthetic construct
  source 1..75: mol_type = other DNA
accagatccgcgtgcatatggcccatattactcatccgctggtgggcgatccggtttatggtggccgtccgcgtc

SEQ ID NO: 528671 - DNA, 75 bp, synthetic construct
  source 1..75: mol_type = other DNA
ttgcgtctggaaactggacgtacgcaccagatccgcgtgcatatggcccatatcactcatccgctggtgggcgat

SEQ ID NO: 528672 - DNA, 75 bp, synthetic construct
  source 1..75: mol_type = other DNA
tcattgtgatattgacccgcacaatctatggtacgcaggggatcagaagagcattgtcgttactggctttggcgc

SEQ ID NO: 528673 - DNA, 75 bp, synthetic construct
  source 1..75: mol_type = other DNA
ttaaagcaacaggcggcgtaacactcgatactcaatatcgaatggtagaaccaattggcgagttagtatcggagt

SEQ ID NO: 528674 - DNA, 75 bp, synthetic construct
  source 1..75: mol_type = other DNA
caattgccaccattctatcatcaacagcatcttaagttagcctctaagaaattagaactcgggaaagggatcttt

SEQ ID NO: 528675 - DNA, 75 bp, synthetic construct
  source 1..75: mol_type = other DNA
ccggtaaaaatggcagcccttcttgagcagcgactgcggcaggatgcggagtccgttatgccccggctgatgtgg

SEQ ID NO: 528676 - DNA, 75 bp, synthetic construct
  source 1..75: mol_type = other DNA
cttgcgaaatcgaccgttgctgccgttatcgaatacctcggtttacaggaaacggtaaacagggctggtaacgcc

SEQ ID NO: 528677 - DNA, 75 bp, synthetic construct
  source 1..75: mol_type = other DNA
ccaaagccgatatcgtggtggttgggctgattggggaacgcgggcgcgaagtgaaagagtttatcgaccactcgc

SEQ ID NO: 528678 - DNA, 75 bp, synthetic construct
  source 1..75: mol_type = other DNA
ccgcccgccaccaaaggctatccgccgtcggcattcggcatgatccccaaactggtcgagagcgcaggcaacagc

SEQ ID NO: 528679 - DNA, 75 bp, synthetic construct
  source 1..75: mol_type = other DNA
tgtggtttgagacaggcgacaacggcaatgaatatttcaaatggagaagcaaacaaagcaccacaacaaaagacc

SEQ ID NO: 528680 - DNA, 75 bp, synthetic construct
  source 1..75: mol_type = other DNA
ggaagtggcgcatttgcagaccagttaaataatgccaccgcgccttttgttcagacgcagtttgcctggaatccc

SEQ ID NO: 528681 - DNA, 75 bp, synthetic construct
  source 1..75: mol_type = other DNA
tttagattaaaaagtaattaccgccaccacattacattcaccaacgaagacggaagtattcgtatgtttttgtgg

SEQ ID NO: 528682 - DNA, 75 bp, synthetic construct
  source 1..75: mol_type = other DNA
atggaaagacagctttatcccaaagatggccatgcttctggctgttcttgaatggggagttgttgatgatgagat

SEQ ID NO: 528683 - DNA, 75 bp, synthetic construct
  source 1..75: mol_type = other DNA
taaaaaacctcctgcaatacctgacctcaaaaaacctgactggcagcgttgagttccgtgaagcgttaaaacatt

SEQ ID NO: 528684 - DNA, 75 bp, synthetic construct
  source 1..75: mol_type = other DNA
aaaatggcagcaccggtcgtggcagtaatgatcaccggtattctgctgaatgttctttactggcttggcctgttc

SEQ ID NO: 528685 - DNA, 75 bp, synthetic construct
  source 1..75: mol_type = other DNA
aagcaaaactacgccgcctatatggagatcaaaccgctgatcccactcggcggctacgtggcaggtgccgacgcc

SEQ ID NO: 528686 - DNA, 75 bp, synthetic construct
  source 1..75: mol_type = other DNA
gacctgcaactgttccgcaaactggggctaaatccgcagcaaactgccgtgctggcaggggataacgaacaacag

SEQ ID NO: 528687 - DNA, 75 bp, synthetic construct
  source 1..75: mol_type = other DNA
aacaaagtccggataaccggctggatgttgaaatacgacgatgagctacgtaagttgggcattcggtggatggct

SEQ ID NO: 528688 - DNA, 75 bp, synthetic construct
  source 1..75: mol_type = other DNA
gatgcaccaggtacacataaagccggttatgcaatctgccgctctgcagattttaactcatgggaatatgtgcca

SEQ ID NO: 528689 - DNA, 75 bp, synthetic construct
  source 1..75: mol_type = other DNA
tcaggcgttggcacatagcgtgcaatctggcgactggtattcgatgttgtcggcacttaatcacgaacaagctcc

SEQ ID NO: 528690 - DNA, 75 bp, synthetic construct
  source 1..75: mol_type = other DNA
tggatgggcgaacacagtcagtaaaaataaacgatttcaatgaactgtttgaacggattgatcaccaggaatacc

SEQ ID NO: 528691 - DNA, 75 bp, synthetic construct
  source 1..75: mol_type = other DNA
tctggtttcggttcatgcgttcgcgctggataacgtccgcgccgtgccgttgttcagcctgtttgcactgattag

SEQ ID NO: 528692 - DNA, 75 bp, synthetic construct
  source 1..75: mol_type = other DNA
gcgtcagccgtcaggagatcagcctgaatttacagccgggtcagcaggtgacgctggcaggatacaccttccgtt

SEQ ID NO: 528693 - DNA, 75 bp, synthetic construct
  source 1..75: mol_type = other DNA
tgttcgaacatattgaccaccaggagtaccgcaaaattctcgcggacactgagcaggaaaagcacctgaaaaaat

SEQ ID NO: 528694 - DNA, 75 bp, synthetic construct
  source 1..75: mol_type = other DNA
gccatgatcatcacttatttttacacggatgtatttggtctgaaacccgtcgacttaggtattctgttattttct

SEQ ID NO: 528695 - DNA, 75 bp, synthetic construct
  source 1..75: mol_type = other DNA
aacttcaggcgtgatcgcctctgttctggctatgatcgcttgcacctggcttactcgactctacgacaaaataaa

SEQ ID NO: 528696 - DNA, 75 bp, synthetic construct
  source 1..75: mol_type = other DNA
gggatgctttaatttcaccgtttttaacttcaggcgtgatcgcctctgttctggctatgatcgcttgcacctggc

SEQ ID NO: 528697 - DNA, 75 bp, synthetic construct
  source 1..75: mol_type = other DNA
atgacgacacgcatcctgtcgtgcctgctccttttcatctgttttcttccggcacacacgcaggctgccatgcaa

SEQ ID NO: 528698 - DNA, 75 bp, synthetic construct
  source 1..75: mol_type = other DNA
ctggaagaaggggtgaatttgttgccgggattttcgccggagctgcaaggtgtttatagcgaaaccgatgcggat

SEQ ID NO: 528699 - DNA, 75 bp, synthetic construct
  source 1..75: mol_type = other DNA
aggatgactcgccgctggctgaggtgttgccgagcgtttataacaaatatccggtgcgctatcgcgactacaccc

SEQ ID NO: 528700 - DNA, 75 bp, synthetic construct
  source 1..75: mol_type = other DNA
gcaaacgcgtgcagcttccggcgctggtagctcatgcgggcgtgctgttatttgccgcggggatcgtggtttcca

SEQ ID NO: 528701 - DNA, 75 bp, synthetic construct
  source 1..75: mol_type = other DNA
cccaaagtgaagaagaaattagagaactggtttcggggcttacccacagtgcaaccggcaaagatcctgaaatca

SEQ ID NO: 528702 - DNA, 75 bp, synthetic construct
  source 1..75: mol_type = other DNA
actaacacttttggacttatcagtacccaaagtgaagaagaaattagagaactggtttcggggcttacccaaagt

SEQ ID NO: 528703 - DNA, 75 bp, synthetic construct
  source 1..75: mol_type = other DNA
atgtcataaccgtcatgttgcatgaggatacattgactgaaattaacgagttgaataattacctgactcgcgacg

SEQ ID NO: 528704 - DNA, 75 bp, synthetic construct
  source 1..75: mol_type = other DNA
ccctcaccgccacaagaaatgcggctggaggctctacgtcgctttcgcctggcacaagaactcacggaacgagag

SEQ ID NO: 528705 - DNA, 75 bp, synthetic construct
  source 1..75: mol_type = other DNA
gcggtttgataaggcagaaaaaatccctttaccgccacaaaaaatgcgactggcagctcttcgtcgccttcgcct

SEQ ID NO: 528706 - DNA, 75 bp, synthetic construct
  source 1..75: mol_type = other DNA
gtacccggatccggaaacgctgcaaattttcggcgtggtgacggccttcattcataaaacccggagggcagactg

SEQ ID NO: 528707 - DNA, 75 bp, synthetic construct
  source 1..75: mol_type = other DNA
gaagcgcagcaggtgcatcgtcagcatttcgatccacgtcaggtgcaggtcagcactttgctgtcaattaagacc

SEQ ID NO: 528708 - DNA, 75 bp, synthetic construct
  source 1..75: mol_type = other DNA
tggaagcttcacgtaacccgtttggtttcattggcggtattgatgcgcactgttttaatgaagagtatctgcgcc

SEQ ID NO: 528709 - DNA, 75 bp, synthetic construct
  source 1..75: mol_type = other DNA
cgggattttcgccggagttgcaaggtgtctatagcgaaaccgatgcggatggcatgaaacggttgtacggttatg

SEQ ID NO: 528710 - DNA, 75 bp, synthetic construct
  source 1..75: mol_type = other DNA
tcagaacatatcgccgttaagccatcatccccctctcagggtagtgaaaaaatctgccgttacgttttttgaaaa

SEQ ID NO: 528711 - DNA, 75 bp, synthetic construct
  source 1..75: mol_type = other DNA
cggcgcgcaaagcgaaagcggcgggatcgacgcgtttctgtatgggcgcggcgtggaagaatccccacgaacgcg

SEQ ID NO: 528712 - DNA, 75 bp, synthetic construct
  source 1..75: mol_type = other DNA
agttttacggcaatatcatcaccacacgcacttatcaggaacgcctcgatacgctggaaaaagtgcgcgatgccg

SEQ ID NO: 528713 - DNA, 75 bp, synthetic construct
  source 1..75: mol_type = other DNA
gcaggacaagccgcgcgctgatgcgattatggcgcttgatgaatctggcgactatcagccgctgttacgtgcaat

SEQ ID NO: 528714 - DNA, 75 bp, synthetic construct
  source 1..75: mol_type = other DNA
cttatgtcaatgggcaaaaatatcgcacaacaaaccgtaatggagtggtggtatacgacggaatgacaccttatc

SEQ ID NO: 528715 - DNA, 75 bp, synthetic construct
  source 1..75: mol_type = other DNA
cgatggatgcgctggcatcgcagcagatgtctttgtggtttatgaatggtggcgactggtttgccgcactgacag

SEQ ID NO: 528716 - DNA, 75 bp, synthetic construct
  source 1..75: mol_type = other DNA
taggcctgttgttcgaaaacgtgttgatggtgctgctcaagcccgttctgcctgctgcactaccgccagccagcc

SEQ ID NO: 528717 - DNA, 75 bp, synthetic construct
  source 1..75: mol_type = other DNA
taaacccgaacaacgctggtacggtctggaacaggacgaaggcgcgctggggcgatcgatggaacgctcgcaaca

SEQ ID NO: 528718 - DNA, 75 bp, synthetic construct
  source 1..75: mol_type = other DNA
cactgcttaacctgaaaacgggcgacaccattgacgtgggcgatgccaccttgcggattgccggagaagtgattc

SEQ ID NO: 528719 - DNA, 75 bp, synthetic construct
  source 1..75: mol_type = other DNA
tcttgctaaatcttggcttgctaccttttctggaacatgctcttctgagtttttagttctacgtacaaccaaatt

SEQ ID NO: 528720 - DNA, 75 bp, synthetic construct
  source 1..75: mol_type = other DNA
aactaataccgcactgcctagtatgactcaagaacacttaggtaattactcattttcattgtcattcaacctcag

SEQ ID NO: 528721 - DNA, 75 bp, synthetic construct
  source 1..75: mol_type = other DNA
tcgtaaatgggccatttggaagtgatttactagcaagtgaattgaaagaagaaggggtacctgtcgtatacattc

SEQ ID NO: 528722 - DNA, 75 bp, synthetic construct
  source 1..75: mol_type = other DNA
gatgtcattatggttcatgaatggcggcaactggtttatcggactgactgataagcaacgggaacaagtgaaaat

SEQ ID NO: 528723 - DNA, 75 bp, synthetic construct
  source 1..75: mol_type = other DNA
aatgccattaaacaattaaaaaacgtacaattaagcattgtcggtgatggtgagcaaaaagattatctttataaa

SEQ ID NO: 528724 - DNA, 75 bp, synthetic construct
  source 1..75: mol_type = other DNA
aggttaactcaacgacctacggttcaaaaatgccgcgagcgagttgggagctaactggtcagttaccagtaccaa

SEQ ID NO: 528725 - DNA, 75 bp, synthetic construct
  source 1..75: mol_type = other DNA
ttttatgggcgatacccaggagttccgcgctaaagtgaccagcctgcgcaaagtggactgggaaagtctgcggcc

SEQ ID NO: 528726 - DNA, 75 bp, synthetic construct
  source 1..75: mol_type = other DNA
cgcttttatggcgacacatgtacgcccgaacagtgtgacttttagcagccagcagcagcgcctgaactggctggt

SEQ ID NO: 528727 - DNA, 75 bp, synthetic construct
  source 1..75: mol_type = other DNA
ccagttctgctgtcggttttaacattcagctgaatgattgcgataccaatgttgcatctaaagccgctgttgcct

SEQ ID NO: 528728 - DNA, 75 bp, synthetic construct
  source 1..75: mol_type = other DNA
aactcatcgccacaaaggcgggagatattaccgtttataattatgatggtgaaacgcgggaatatatttctacat

SEQ ID NO: 528729 - DNA, 75 bp, synthetic construct
  source 1..75: mol_type = other DNA
aggcggtgccgccaaccggttctatctcttatatcaaccatgccacgtcgagtattcatccgattgtggcgaaag

SEQ ID NO: 528730 - DNA, 75 bp, synthetic construct
  source 1..75: mol_type = other DNA
ccggaaatgccgcctcgcatgccatcggtctggggcagatgaatttacacggttatctggcgcgagaaggcatcg

SEQ ID NO: 528731 - DNA, 75 bp, synthetic construct
  source 1..75: mol_type = other DNA
gtatgaagacacggttaaccgtgctaaccctatcgccgggcgcataaatatgagcaatctctgctcagaaatttt

SEQ ID NO: 528732 - DNA, 75 bp, synthetic construct
  source 1..75: mol_type = other DNA
gatctgctcgaccgctggcagcagcagctaccgccagaaagcccgaactactttttaatcaacatcgccacagaa

SEQ ID NO: 528733 - DNA, 75 bp, synthetic construct
  source 1..75: mol_type = other DNA
ctttatgggtgacacccaggagtttcgcgccaaagtcaccagcctgcgcaaagtggactgggaaagtctgcgtcc

SEQ ID NO: 528734 - DNA, 75 bp, synthetic construct
  source 1..75: mol_type = other DNA
cgctcctgaatttgaaaacgggcgataccatcgacgtgggtgatgccacgttgcgcattgccggagaagtgattc

SEQ ID NO: 528735 - DNA, 75 bp, synthetic construct
  source 1..75: mol_type = other DNA
tcgaagcggcagaagcacagcgtcagtcactgattgatgctgcaatggcttccattagtctgattcaactgaaat

SEQ ID NO: 528736 - DNA, 75 bp, synthetic construct
  source 1..75: mol_type = other DNA
cacaccgcagctggcgaacgtcaaagcggtggatgatatctacccgatgtatggcgatctgcaaaccaatccccc

SEQ ID NO: 528737 - DNA, 75 bp, synthetic construct
  source 1..75: mol_type = other DNA
agcggtgcgttgctgctgtcgcttttcggcggctggctgggggcacgactggtaaaagggaaggcgctgttcagg

SEQ ID NO: 528738 - DNA, 75 bp, synthetic construct
  source 1..75: mol_type = other DNA
aaagccaattattgccattgagccttggggctccgagcgtacgtctatgaaagttaagcaagccgctcacaaaat

SEQ ID NO: 528739 - DNA, 75 bp, synthetic construct
  source 1..75: mol_type = other DNA
ttcgatgatatggtttcgtggtacggaactggctggggaatgtctctgatgtttttcgggatacttatcatcgga

SEQ ID NO: 528740 - DNA, 75 bp, synthetic construct
  source 1..75: mol_type = other DNA
atcaatgtcagtgccttatgcagaatgctttcaattgatgcaaataatgtgcggcagcgtgtgtttcagactgga

SEQ ID NO: 528741 - DNA, 75 bp, synthetic construct
  source 1..75: mol_type = other DNA
atgttcctgctggatgtgatgccggaaagaacggcagaacattaccgtaataaaattgctgtctacctgcgctgg

SEQ ID NO: 528742 - DNA, 75 bp, synthetic construct
  source 1..75: mol_type = other DNA
aaaagtgatccatacacgaacaattagtcgatctgatataggctcatttacaggctcatttgtcgagcctgttta

SEQ ID NO: 528743 - DNA, 75 bp, synthetic construct
  source 1..75: mol_type = other DNA
acttggcgtaataaaagacaaatcagagcttattgataacccctgtctcaatatacagattggcgcgtggattct

SEQ ID NO: 528744 - DNA, 75 bp, synthetic construct
  source 1..75: mol_type = other DNA
gaactggctggggaatgtctctgatgtttttcgggatacttatcatcggatacgccctgctttattggtggcaca

SEQ ID NO: 528745 - DNA, 75 bp, synthetic construct
  source 1..75: mol_type = other DNA
aacagttaaccggacgcgataatcaacagattaagcgcagcatcagtttgcttgcagagcgcggcaagctggcag

SEQ ID NO: 528746 - DNA, 75 bp, synthetic construct
  source 1..75: mol_type = other DNA
agcgaccaagttgcagacagcatgtactatcaacggcgtctcgtttgatggttctaaaaatattgagctaacggc

SEQ ID NO: 528747 - DNA, 75 bp, synthetic construct
  source 1..75: mol_type = other DNA
atggagtggctattgcttttaaaaatattcaggctggggatggtaaaaaattcacgctatccagctccaacaact

SEQ ID NO: 528748 - DNA, 75 bp, synthetic construct
  source 1..75: mol_type = other DNA
ggtaagcggcggcgaagccacgacccaactgccgtttgtggtggcgctgtttactgctatcaaaaacgatccgca

SEQ ID NO: 528749 - DNA, 75 bp, synthetic construct
  source 1..75: mol_type = other DNA
gaagtgcttagccatgtccgcaaagcagtgctgtttatcgaagggataacggtgagtggcggtgaagccacgacc

SEQ ID NO: 528750 - DNA, 75 bp, synthetic construct
  source 1..75: mol_type = other DNA
cggaagatgttgagcacctggctggcgctttacaggagcgcggggtgagccggttgatatttccggcgctatatt

SEQ ID NO: 528751 - DNA, 75 bp, synthetic construct
  source 1..75: mol_type = other DNA
ttgccctggttttggtactggaaggtttagggccgatgctttacccgaaggcatggaagaagatgatctctgcaa

SEQ ID NO: 528752 - DNA, 75 bp, synthetic construct
  source 1..75: mol_type = other DNA
tcgctggtcgaagggctgggacgcagggatcttcggcgctatggggcgggttatgaaagttcgtttgtttatcac

SEQ ID NO: 528753 - DNA, 75 bp, synthetic construct
  source 1..75: mol_type = other DNA
gttagaagatgcagcttatttagaaaataagtttgcaagacgagttagcaagcatcagttttccatatcagaaga

SEQ ID NO: 528754 - DNA, 75 bp, synthetic construct
  source 1..75: mol_type = other DNA
tttctgataatgaaataactaataatagtcctgggagagatctgaacattgggacacacataagtttcaatgagg

SEQ ID NO: 528755 - DNA, 75 bp, synthetic construct
  source 1..75: mol_type = other DNA
aaaacctattatagcaatagaaccatggggttctgaaagaacttctactgtagtaaaaaatgctgcagatagaat

SEQ ID NO: 528756 - DNA, 75 bp, synthetic construct
  source 1..75: mol_type = other DNA
gaaggctttaaccggcgtgatttgcggcgttatggtgccgggtatgaatccagttttgtgtatcaccacgccaag

SEQ ID NO: 528757 - DNA, 75 bp, synthetic construct
  source 1..75: mol_type = other DNA
tggcactggccgtgggccatcatcggggtattactggcctcctgggtatgcagtctgttgattgagtgggtcggg

SEQ ID NO: 528758 - DNA, 75 bp, synthetic construct
  source 1..75: mol_type = other DNA
ccggataactaccctgtacttactgaatatccagcgaagacacatgaacaggaaatagctgaagcggagggaatg

SEQ ID NO: 528759 - DNA, 75 bp, synthetic construct
  source 1..75: mol_type = other DNA
taaggttcagtttgatgatcaaggtattacggttggtcaacatcttcatatagagatgagtcattgccagcgttg

SEQ ID NO: 528760 - DNA, 75 bp, synthetic construct
  source 1..75: mol_type = other DNA
gacgctcctggtacatctaaggctggttatacaatttgccgttctgtggatttaaaatcatgggaatatgtgtca

SEQ ID NO: 528761 - DNA, 75 bp, synthetic construct
  source 1..75: mol_type = other DNA
atttcatgaaatgggggaaatcatttgtcgtaacatcgaatctgttctcaacgaatcgcatgtttcgctgttcgc

SEQ ID NO: 528762 - DNA, 75 bp, synthetic construct
  source 1..75: mol_type = other DNA
gtgtggattcggggttgaatgacagggtcgccgatcttgattactactggctacaggagcggggaagtatgtgcc

SEQ ID NO: 528763 - DNA, 75 bp, synthetic construct
  source 1..75: mol_type = other DNA
tgttattttgttgctctggtgtttcagttgcggctgtaccagatgggaaaatagaaaaaccatttacttttaata

SEQ ID NO: 528764 - DNA, 75 bp, synthetic construct
  source 1..75: mol_type = other DNA
tctccggaagatggtgtatatcagtcaattgatcattacatgggactcaccagctcatcgctagatctcgatgaa

SEQ ID NO: 528765 - DNA, 75 bp, synthetic construct
  source 1..75: mol_type = other DNA
gcaacgatatcacgacagatgcatgtgcccgcgctgttcctgatgctcgctttactgagcggttgcagcagcacg

SEQ ID NO: 528766 - DNA, 75 bp, synthetic construct
  source 1..75: mol_type = other DNA
tatgtttcaggtatgacggacgagtacgcgacccggatgtatgagaaaatctttgttccgcgcaaaggatcaatc

SEQ ID NO: 528767 - DNA, 75 bp, synthetic construct
  source 1..75: mol_type = other DNA
aaagcagtgataatcagtttcggtttgtactaaaagcaggcaatggcgagattattctcaccagtgagctgtata

SEQ ID NO: 528768 - DNA, 75 bp, synthetic construct
  source 1..75: mol_type = other DNA
tggggatgagcagccgggcaattgccaaagaacaggggatctcctgcaataccgttaaacgttatttgcaggaaa

SEQ ID NO: 528769 - DNA, 75 bp, synthetic construct
  source 1..75: mol_type = other DNA
aagagtatctttctgatgttgaaagagccttagatgaattcgaaaaacaaagcactagtggcgacaaagtggcgg

SEQ ID NO: 528770 - DNA, 75 bp, synthetic construct
  source 1..75: mol_type = other DNA
atgtaccacattcccggcgtgttatcgccacaggacgtcgcccggtttcgtgaacaactggaacaagccgaatgg

SEQ ID NO: 528771 - DNA, 75 bp, synthetic construct
  source 1..75: mol_type = other DNA
ccgcgtaccctttccacgccgctgtttaatcgctatcagaacaatgaaacctatggttttcatgtggatggcgca

SEQ ID NO: 528772 - DNA, 75 bp, synthetic construct
  source 1..75: mol_type = other DNA
atgctgttttcgatacgcaatttcaatcaaggagtcattatagctggttggtttgaactcagtaaaagcagtgat

SEQ ID NO: 528773 - DNA, 75 bp, synthetic construct
  source 1..75: mol_type = other DNA
caaggttatccggcacgaaaacgttcagctactggagttcaaaggccagaagttgattgtagagctgttcaatgt

SEQ ID NO: 528774 - DNA, 75 bp, synthetic construct
  source 1..75: mol_type = other DNA
tcgcgaacaactggaacaagccgaatgggtggatggacgcgtcaccaccggcgcacaaggtgcgcaagttaagaa

SEQ ID NO: 528775 - DNA, 75 bp, synthetic construct
  source 1..75: mol_type = other DNA
atcgttatcagaacaatgaaacctatggttttcatgtggatggcgcagtacgcagccatccacaaaacggctgga

SEQ ID NO: 528776 - DNA, 75 bp, synthetic construct
  source 1..75: mol_type = other DNA
attattctcaccagtgagctgtatacctcaaaagcctctgcggaaaaggggatcgcttcagtacgcagcaatagc

SEQ ID NO: 528777 - DNA, 75 bp, synthetic construct
  source 1..75: mol_type = other DNA
tgacgctgatcttcctcgcgctaatctttttaccgcgctatctgaagcgcggcattgccaccatccccgattttc

SEQ ID NO: 528778 - DNA, 75 bp, synthetic construct
  source 1..75: mol_type = other DNA
ctcattgccaccggcgtctgttttctgccgattgttctctactccggctcgttggcgctcaacagcctgtttcac

SEQ ID NO: 528779 - DNA, 75 bp, synthetic construct
  source 1..75: mol_type = other DNA
agcatctttcccgttattggtacgctcgttggctctgcgcttggcgcgctggtcggcataataatgaccgttgca

SEQ ID NO: 528780 - DNA, 75 bp, synthetic construct
  source 1..75: mol_type = other DNA
cgcaaaggaaggcatccccccggaattcctgtcacattacgtgcctgatggaccctttgcatgtcttagacagaa

SEQ ID NO: 528781 - DNA, 75 bp, synthetic construct
  source 1..75: mol_type = other DNA
gaaaagaactgtcgtgttgcagtaaccatcgaggatgaaggcaagagatatgcgatcattcgtcaccgtaaacac

SEQ ID NO: 528782 - DNA, 75 bp, synthetic construct
  source 1..75: mol_type = other DNA
gagcgttctaaacgttatgacgatgccctggctgggctggccagtgccgaagttgagttaacggaagttgaactt

SEQ ID NO: 528783 - DNA, 75 bp, synthetic construct
  source 1..75: mol_type = other DNA
aatcccgctttccagaaataaccatgtgtcacgtgtggatgtggataaaaaactacaggaactgaaaaacatgat

SEQ ID NO: 528784 - DNA, 75 bp, synthetic construct
  source 1..75: mol_type = other DNA
aattatccccggcgctatttatcgggataagaacggcaacagagtaacagtaaaatcgataatgtttgaccgtgt

SEQ ID NO: 528785 - DNA, 75 bp, synthetic construct
  source 1..75: mol_type = other DNA
gaccgtgtgtattttatccgtgatggctattcatttcttagttcgctgaacgtggagatctttatttgcagattc

SEQ ID NO: 528786 - DNA, 75 bp, synthetic construct
  source 1..75: mol_type = other DNA
ttgctcacagccacagtattgagtttagtggtgagatggtaccccgttacgatctgggggtgactgattttagtt

SEQ ID NO: 528787 - DNA, 75 bp, synthetic construct
  source 1..75: mol_type = other DNA
atgggcataatcgatttaaacacagcagacatattcaatgctatcggtggtggctctccgctttcgatcatcgac

SEQ ID NO: 528788 - DNA, 75 bp, synthetic construct
  source 1..75: mol_type = other DNA
tttcatagttcgctgaacgtggagatctttatttgcagattccggcgggaaatcccgctttccagaaataaccat

SEQ ID NO: 528789 - DNA, 75 bp, synthetic construct
  source 1..75: mol_type = other DNA
tttcaatctgaaagccgccaatcatcaaattatcggctccagccagatgtatgccaccgcgcaatctcgtgaaac

SEQ ID NO: 528790 - DNA, 75 bp, synthetic construct
  source 1..75: mol_type = other DNA
ttatgcgttacgcgaaagtgagcagatagtcatcagcgttggggcatccggggcgattatgggaatagctggcgc

SEQ ID NO: 528791 - DNA, 75 bp, synthetic construct
  source 1..75: mol_type = other DNA
tgtcatcctgctcaatattaatgccgggcagattattggcgtttatcctgccagctacgttaatcaccttcgttt

SEQ ID NO: 528792 - DNA, 75 bp, synthetic construct
  source 1..75: mol_type = other DNA
tcagaaagaagactttcccgcaggtgatgcgcgtggaacgatatcggcgatgcgttttcgacctgaaaacgggga

SEQ ID NO: 528793 - DNA, 75 bp, synthetic construct
  source 1..75: mol_type = other DNA
gcgaattattgcgcgaatttccagactatgcgtggcaggtggcggtagccgatcttgcgcagagcgaggctatcg

SEQ ID NO: 528794 - DNA, 75 bp, synthetic construct
  source 1..75: mol_type = other DNA
gatctcgaacagagtgaagccattggcgatcgctttggggtttttcgctttccggcaacactggtgtttaccgat

SEQ ID NO: 528795 - DNA, 75 bp, synthetic construct
  source 1..75: mol_type = other DNA
cccggatcgggcgcgtaaagatggccgttactacgcgatagattttacgctggatgaaattaagtcgctgaaatt

SEQ ID NO: 528796 - DNA, 75 bp, synthetic construct
  source 1..75: mol_type = other DNA
atcacgcatcagaaagaaagctatccggctagtgatgcgcgaggaacgatatcggcgatgcgttttcgacctgaa

SEQ ID NO: 528797 - DNA, 75 bp, synthetic construct
  source 1..75: mol_type = other DNA
gtgaatcatcttcgtttttcagcggatggtagaaagatatttgttatggcgaagaacgggttaatccaaatggac

SEQ ID NO: 528798 - DNA, 75 bp, synthetic construct
  source 1..75: mol_type = other DNA
ttctgcgatgggattccgaccaaaaaatggtgagattatttttgccgatagccaggggatttcacgtataagagc

SEQ ID NO: 528799 - DNA, 75 bp, synthetic construct
  source 1..75: mol_type = other DNA
atgtctgcatcttcggttaagccgttaaatgttcaattacccgcaataacccttatcctttttgcgctctgtgtt

SEQ ID NO: 528800 - DNA, 75 bp, synthetic construct
  source 1..75: mol_type = other DNA
agtgcgcgtttatctgggcaaaaccggcttgttacggaaggcgggattattgttgcgggcagtcttcttcttacc

SEQ ID NO: 528801 - DNA, 75 bp, synthetic construct
  source 1..75: mol_type = other DNA
atggtagaaaaatatttgttatggcgaagaacgggttgatccaactggacaggacgcgctcgcttgatccgcagg

SEQ ID NO: 528802 - DNA, 75 bp, synthetic construct
  source 1..75: mol_type = other DNA
attgtcggttatgggatctgggggacgctgctgggtcgctatgaaacctggcgtgttgcaccgttatcgttactg

SEQ ID NO: 528803 - DNA, 75 bp, synthetic construct
  source 1..75: mol_type = other DNA
ctcgctcgcggtgtgacgccgcgcgttatggatacgcgtatgacaccgcctggcctggataaattacccgaagcc

SEQ ID NO: 528804 - DNA, 75 bp, synthetic construct
  source 1..75: mol_type = other DNA
cgatcacgggttctaacggcaaaagtacggtcaccaccttagtgggcgaaatggcgaaagcagcaggtgttaacg

SEQ ID NO: 528805 - DNA, 75 bp, synthetic construct
  source 1..75: mol_type = other DNA
gctcggctttatgttgaccctggcggcagcatttagctgggcgtgtggcaacatcttcaataaaaagatcatgtc

SEQ ID NO: 528806 - DNA, 75 bp, synthetic construct
  source 1..75: mol_type = other DNA
ccgcatcgctttgaagtggtgctggagcacaacggcgtgcgctggattaacgattcgaaagccaccaatgtgggg

SEQ ID NO: 528807 - DNA, 75 bp, synthetic construct
  source 1..75: mol_type = other DNA
accattctgaacgtgactgaagatcatatggatcgctatccgtttggtttacaacagtatcgtgcagcaaaactg

SEQ ID NO: 528808 - DNA, 75 bp, synthetic construct
  source 1..75: mol_type = other DNA
gtttgccacgcgccagtagcctgaaagcgttaactacgttcactggtttgccgcatcgctttgaagtggtgctgg

SEQ ID NO: 528809 - DNA, 75 bp, synthetic construct
  source 1..75: mol_type = other DNA
attgtcctcggcgcgtttactttcggtgaacgactacatggcaagcaactggcggggatcgccttagcgatattt

SEQ ID NO: 528810 - DNA, 75 bp, synthetic construct
  source 1..75: mol_type = other DNA
atgtcgcgaaaagatgggttgttggcgctactggtagtggttgtgtgggggcttaattttgtggtcatcaaagtg

SEQ ID NO: 528811 - DNA, 75 bp, synthetic construct
  source 1..75: mol_type = other DNA
gttgcaccgttatcgttactggtgcccgtagtcggactggcaagtgcggcactattgttggatgaacgcttaacg

SEQ ID NO: 528812 - DNA, 75 bp, synthetic construct
  source 1..75: mol_type = other DNA
gcagcatttagttgggcgtgtggcaacatcttcaataaaaagatcatgtcgcacgcaacgcgtccggcggtgatg

SEQ ID NO: 528813 - DNA, 75 bp, synthetic construct
  source 1..75: mol_type = other DNA
ctgccgtattgttagatgagcacttaagcgtactgcaatttttgggggcgctactaattatggccggactgtaca

SEQ ID NO: 528814 - DNA, 75 bp, synthetic construct
  source 1..75: mol_type = other DNA
attgttggttatgggatctgggggacgttactgggacgctatgaaacctggcgggttgcaccgttatcgttactg

SEQ ID NO: 528815 - DNA, 75 bp, synthetic construct
  source 1..75: mol_type = other DNA
caggtgctggagcaggtaagtcgggcgctggaagtgatggtggtgctggtcaccgcctgcggtatgttgctgttg

SEQ ID NO: 528816 - DNA, 75 bp, synthetic construct
  source 1..75: mol_type = other DNA
atcagatagtcccggaatcgttttatccggtggtgcgggcgcggttgacggcgattaacgacaagccgacagaag

SEQ ID NO: 528817 - DNA, 75 bp, synthetic construct
  source 1..75: mol_type = other DNA
gcggtggatgatatctacccgatgtatggcgatctgcaaaccaatccccctggcctgaaaccgcaggcgggcagc

SEQ ID NO: 528818 - DNA, 75 bp, synthetic construct
  source 1..75: mol_type = other DNA
acgacattgtggtgtgagttcgccatgctcgggtttgtctccggcctggtggccgcaattggtgcggaaacggca

SEQ ID NO: 528819 - DNA, 75 bp, synthetic construct
  source 1..75: mol_type = other DNA
tcgcggaacatcaaatagtcccggaatcgttttatccggtggtgcgggcgcgactgacggcgattaacggcaagc

SEQ ID NO: 528820 - DNA, 75 bp, synthetic construct
  source 1..75: mol_type = other DNA
gtgtttgatttcccgtgggagccagactggcgattgtggattgttctgccttgtagcggtgcgctgctgctgtcg

SEQ ID NO: 528821 - DNA, 75 bp, synthetic construct
  source 1..75: mol_type = other DNA
gacccacatgatccgggtaaaacggtggaaggttatcctgcgcctaaacgcgcggtgctgattgcgcgcaagccg

SEQ ID NO: 528822 - DNA, 75 bp, synthetic construct
  source 1..75: mol_type = other DNA
ctctgattgccaaaaatcatctttcacactggctggaaacgctgcccgcgcagattgccagctggcagcgcgaac

SEQ ID NO: 528823 - DNA, 75 bp, synthetic construct
  source 1..75: mol_type = other DNA
catcgccgttcgccgctggagcatctctggcagttgaaagatcagctggtgaatgaaggtgaactggtactggaa

SEQ ID NO: 528824 - DNA, 75 bp, synthetic construct
  source 1..75: mol_type = other DNA
gtggggctgcgaccataccgcctgttgttggcaacgcagcctttacgcgtgttacgtaatgatgtggtagcgaac

SEQ ID NO: 528825 - DNA, 75 bp, synthetic construct
  source 1..75: mol_type = other DNA
agcggtgcgctgctgctgtcgctttgcggcggctggctgggcgcgcgactggttaagggtaaggcgctgttcagg

SEQ ID NO: 528826 - DNA, 75 bp, synthetic construct
  source 1..75: mol_type = other DNA
attcttgatgtcggctgcggcagcggttatcacatgtggcgcatgattggcgcaggcgcacacctcgcggtgggg

SEQ ID NO: 528827 - DNA, 75 bp, synthetic construct
  source 1..75: mol_type = other DNA
gcgcgggcaacagcgtcatttttgccccgcatccggcggcgaaaaaagtctcccagcgggcgattacgctgctca

SEQ ID NO: 528828 - DNA, 75 bp, synthetic construct
  source 1..75: mol_type = other DNA
ggcaaaaacgctggaagtgctgaagaaatatggttacaccggtaaggacgacaaagtttatttgcaatgttttga

SEQ ID NO: 528829 - DNA, 75 bp, synthetic construct
  source 1..75: mol_type = other DNA
agataaactgcctgaatacactactgatgtgaatcagttatatgatgctctgtataacaaagcgggtgtaaatgg

SEQ ID NO: 528830 - DNA, 75 bp, synthetic construct
  source 1..75: mol_type = other DNA
taatatcaaactcactggcatggtgcaagatgctcagcagaataaactggtagtgcatccttataccgtgcggtc

SEQ ID NO: 528831 - DNA, 75 bp, synthetic construct
  source 1..75: mol_type = other DNA
tgagtcagtggattatggtgaaatgaaaacggggcaacgtgtttctggactggcatttggcgggattctcttttt

SEQ ID NO: 528832 - DNA, 75 bp, synthetic construct
  source 1..75: mol_type = other DNA
tgtataacaaagcgggtgtaaatgggttgtttactgatttccctgataaagcggttaaattccttaataaagagt

SEQ ID NO: 528833 - DNA, 75 bp, synthetic construct
  source 1..75: mol_type = other DNA
tccggagcgggcgcgtaaagatggccgttactacgcgatagattttacgctggatgaaattaagtctttaaaatt

SEQ ID NO: 528834 - DNA, 75 bp, synthetic construct
  source 1..75: mol_type = other DNA
ccagccaccgacgaacgctggcgcgaggcgattgtcacccgcagcccgctgatgctgcgtttgctggaacaggcg

SEQ ID NO: 528835 - DNA, 75 bp, synthetic construct
  source 1..75: mol_type = other DNA
tttatcccgatgatggctgactgttcgccgctgttgctggatcttaatgagaacgatccgggtattctggttacg

SEQ ID NO: 528836 - DNA, 75 bp, synthetic construct
  source 1..75: mol_type = other DNA
ccggagcctccgtgcgctggacctggctgccacagacctggaacccgcgatgcgtaaaatcgccggaaccctgct

SEQ ID NO: 528837 - DNA, 75 bp, synthetic construct
  source 1..75: mol_type = other DNA
gcgcgttctccactgatgcaatgaaacgcctgatgaccgcgagctggccaggcaatgtgcgtcagttggtcaacg

SEQ ID NO: 528838 - DNA, 75 bp, synthetic construct
  source 1..75: mol_type = other DNA
tctctattaccgcctcaacgttgtcagcctgaaaattccggcactggcggagcgcacagaagacattccgctact

SEQ ID NO: 528839 - DNA, 75 bp, synthetic construct
  source 1..75: mol_type = other DNA
ttcagtttcctcaccaaacctgttgataaagacgcgttgtatcaggcaattgacgatgcactggaacaatccgcg

SEQ ID NO: 528840 - DNA, 75 bp, synthetic construct
  source 1..75: mol_type = other DNA
cgcaggggcgcatctggcagtgggtatcgatcccacgcagctattcctctgccagtttgaagcagtgcgtaaact

SEQ ID NO: 528841 - DNA, 75 bp, synthetic construct
  source 1..75: mol_type = other DNA
cagcgacatctcccgttgctgataacatcaaaaatgaaaacggtgaacagaactcgtttgccgcagcgcatacta

SEQ ID NO: 528842 - DNA, 75 bp, synthetic construct
  source 1..75: mol_type = other DNA
gtgagcagtataacgatgcctggtttggtgacagtgccaatgaaaatatcatgcagttcagtgatatttatctga

SEQ ID NO: 528843 - DNA, 75 bp, synthetic construct
  source 1..75: mol_type = other DNA
aacgaaatgagtggttggtttgatctgacgttaaatcaacgtgtctataatcaaaacggaaaaaccgccaatgct

SEQ ID NO: 528844 - DNA, 75 bp, synthetic construct
  source 1..75: mol_type = other DNA
ctgtgctggattacattgacgcggtgacggcaacagataccagcaccgcgccggatgtcatctggcctgaactgc

SEQ ID NO: 528845 - DNA, 75 bp, synthetic construct
  source 1..75: mol_type = other DNA
ctgaataccaacactacctggattggtcagtacggcctgcgcattacctccggcattcctgctgacaccttaatc

SEQ ID NO: 528846 - DNA, 75 bp, synthetic construct
  source 1..75: mol_type = other DNA
attggtcagtacggcctgcgcattacctctggcattcctgccgacaccttaatccctgaaagcgtattcgcttaa

SEQ ID NO: 528847 - DNA, 75 bp, synthetic construct
  source 1..75: mol_type = other DNA
acggcctgatgatgcgcttcggcggcctgctggcggtgaacaacgtcaatcttgaactgtacccgcaggagatcg

SEQ ID NO: 528848 - DNA, 75 bp, synthetic construct
  source 1..75: mol_type = other DNA
gtcccaagacacctcaggcagcaaaggctgttgaggcggcagttcagacgctggcccaacaggctctgacaaata

SEQ ID NO: 528849 - DNA, 75 bp, synthetic construct
  source 1..75: mol_type = other DNA
gcgcgacaagatcggctcgttcaaagagcgtgaagatatgcagcgctggctcaatgagtggatcatgaactacgt

SEQ ID NO: 528850 - DNA, 75 bp, synthetic construct
  source 1..75: mol_type = other DNA
accagaaattcgcttctatggaacgtatatcaatattctggataacgaattatcgaattttaagtttaatgagaa

SEQ ID NO: 528851 - DNA, 75 bp, synthetic construct
  source 1..75: mol_type = other DNA
gctggatgctgacttctgttttacggcaaaacctgcaacgcgatacgtttaatgaatttacgttacaggttgcca

SEQ ID NO: 528852 - DNA, 75 bp, synthetic construct
  source 1..75: mol_type = other DNA
ggatgagctgattgccgaactgcgtaaccatcacaacaccactatcttgttgattgaacacgatatgaagctggt

SEQ ID NO: 528853 - DNA, 75 bp, synthetic construct
  source 1..75: mol_type = other DNA
cgatcacgtactgaaacgtgaggcgacgtacccaacggggctgcctaccgaaccaccgtgcgtcgccattccgca

SEQ ID NO: 528854 - DNA, 75 bp, synthetic construct
  source 1..75: mol_type = other DNA
atgtcgcgaaaagtcgccttaagctgagtaatccgtggcatctgcttgctgttggatttggtagtggattaagcc

SEQ ID NO: 528855 - DNA, 75 bp, synthetic construct
  source 1..75: mol_type = other DNA
ggttaacaacctggctggtctggcgtcgtggtgcgaaaacgcgtccgctcgaggcatttattcaactgctggatg

SEQ ID NO: 528856 - DNA, 75 bp, synthetic construct
  source 1..75: mol_type = other DNA
ctggcgatgagccgcaaggtctgttttctctcgggtcgctggaaagcaccgccgctgtgcgtattccggcaacgc

SEQ ID NO: 528857 - DNA, 75 bp, synthetic construct
  source 1..75: mol_type = other DNA
ggtatcccgtggcatgaactgccagcttcacacaggggaaacaatcagatgagcttgcctttacctcagaattaa

SEQ ID NO: 528858 - DNA, 75 bp, synthetic construct
  source 1..75: mol_type = other DNA
ttgaccgcaatgtacatggcggcatggggatcatgatagatgatattgtcgccggggtgatctccgctggcatcc

SEQ ID NO: 528859 - DNA, 75 bp, synthetic construct
  source 1..75: mol_type = other DNA
tggaagccgtggccgatccgctggtttgatcgcaatgtacatggcggcatggggatcatgatcgacgatattgtc

SEQ ID NO: 528860 - DNA, 75 bp, synthetic construct
  source 1..75: mol_type = other DNA
gtttattgatgggcccattaaccatactgccattgacgggataccggtataccgcgaggaactgatgatcgtcac

SEQ ID NO: 528861 - DNA, 75 bp, synthetic construct
  source 1..75: mol_type = other DNA
cggcaaaagtattaccaatgtaacaacctagaatgcggcgtatgcttctcaacactggaagctttccataaattc

SEQ ID NO: 528862 - DNA, 75 bp, synthetic construct
  source 1..75: mol_type = other DNA
tccgcgtcgttacttctgtctgcaatgtcacgtgccgcaggccgataccgcgccaatcgtggggaatacctttac

SEQ ID NO: 528863 - DNA, 75 bp, synthetic construct
  source 1..75: mol_type = other DNA
tgctggagggaaaactgaatgcggcgtttattgatggacccattaaccatactgccattgacgggataccggtat

SEQ ID NO: 528864 - DNA, 75 bp, synthetic construct
  source 1..75: mol_type = other DNA
ggctggtctggcgtcgtggtgcgaaaacgcgtccgcttgaggcatttattcaactactggatgtgtctgactcgg

SEQ ID NO: 528865 - DNA, 75 bp, synthetic construct
  source 1..75: mol_type = other DNA
atggatctgacccaactggagatgttcaacgcggttgccgaagctggcagcataacccaggcagcagcaatagtg

SEQ ID NO: 528866 - DNA, 75 bp, synthetic construct
  source 1..75: mol_type = other DNA
catggcctcgccggagaacttccgtttcagtgaagagcgtggttttgaagtgcgtccgaagtggaaccctccggc

SEQ ID NO: 528867 - DNA, 75 bp, synthetic construct
  source 1..75: mol_type = other DNA
gtacgaccgtgttggtgatgctgtttttggcgctgcacttgttgattccaggctgaatggttctgacaaggaggt

SEQ ID NO: 528868 - DNA, 75 bp, synthetic construct
  source 1..75: mol_type = other DNA
atggccagactgattaaaaacattgatacgataagccacggctcgctaaaagcgggccgtttgcttaatgggcta

SEQ ID NO: 528869 - DNA, 75 bp, synthetic construct
  source 1..75: mol_type = other DNA
caatcagccggtaaaaattgactacaaccaccagaccctgattaaggggcatccggcaccggctgccggttttgt

SEQ ID NO: 528870 - DNA, 75 bp, synthetic construct
  source 1..75: mol_type = other DNA
ggatgacctttataacgccttaaaccctccgttaaaggatacctccatgaatgagcaattacgccagttgctgac

SEQ ID NO: 528871 - DNA, 75 bp, synthetic construct
  source 1..75: mol_type = other DNA
gtttaacgccgatgaaatgcagtggcgtgaaggtgaagggttatttatccacccacgctggacggcggcggccca

SEQ ID NO: 528872 - DNA, 75 bp, synthetic construct
  source 1..75: mol_type = other DNA
atgcgctgccgggaaacatcctgccgatgcatttactggtttgattaatgaactggaaagcgccgggcaaacggt

SEQ ID NO: 528873 - DNA, 75 bp, synthetic construct
  source 1..75: mol_type = other DNA
acctgccgcagagtcgcagcgggcgctggttggctctggcattgaagcgcaggtcaacggagagcgggtgctgat

SEQ ID NO: 528874 - DNA, 75 bp, synthetic construct
  source 1..75: mol_type = other DNA
gtcggcgacggtattaacgacgcgccagcgatgaaagccgccgctattgggattgcaatgggcagtggcacagat

SEQ ID NO: 528875 - DNA, 75 bp, synthetic construct
  source 1..75: mol_type = other DNA
gagacatgggagcaaattttttatcagttactacgtatggagcagaactattagtttttttggttttctctgtgt

SEQ ID NO: 528876 - DNA, 75 bp, synthetic construct
  source 1..75: mol_type = other DNA
tatatttcagattttttttgttttattattttatctaacgattataaatgaaagaaaacagcagaaaaaatttat

SEQ ID NO: 528877 - DNA, 75 bp, synthetic construct
  source 1..75: mol_type = other DNA
ggctgacgctgctgctgattggctgcccgtgtgcgttagttatctccacgcccgcggcgattacctccgggctgg

SEQ ID NO: 528878 - DNA, 75 bp, synthetic construct
  source 1..75: mol_type = other DNA
cagcacggcagcaccacgctggagcagttgctggacaaggccgagtccgaaggacgcatcttcaaaagtgaacgc

SEQ ID NO: 528879 - DNA, 75 bp, synthetic construct
  source 1..75: mol_type = other DNA
cctgaccatgatgacggtttcgcctgtactaccgcttcaatgagtgaacaaaacaaagtgtttgagcaggctttt

SEQ ID NO: 528880 - DNA, 75 bp, synthetic construct
  source 1..75: mol_type = other DNA
aaacaaagtgtttgagcaggcttttttcacgatgataaaccagcgccagttacgccctggggaaactttttctga

SEQ ID NO: 528881 - DNA, 75 bp, synthetic construct
  source 1..75: mol_type = other DNA
aacatcggcaatagctttcgcatgttctcgcaacttgacagagattttcactccttactgctttcagctgccgac

SEQ ID NO: 528882 - DNA, 75 bp, synthetic construct
  source 1..75: mol_type = other DNA
tcctgcggactggtaaatcgtgttgtcgccagagaagcgttacacgatgccgggcagcaactggcacaacgtatc

SEQ ID NO: 528883 - DNA, 75 bp, synthetic construct
  source 1..75: mol_type = other DNA
tcagcgcggatatgtttgctatgatgttaaaagtatctgccgggcagctggtttttgcagcccggcatgacaagc

SEQ ID NO: 528884 - DNA, 75 bp, synthetic construct
  source 1..75: mol_type = other DNA
cacttacgcgaatgcggtgtcctgacgcaggtcggaaatgaccacgtcatcacgcgtaaacctgatcacaacgac

SEQ ID NO: 528885 - DNA, 75 bp, synthetic construct
  source 1..75: mol_type = other DNA
cacgtttgagcacaatgggcgtaaatgggactacgggaagtcaacgcaggcgcgtcttgagccgtcggtggcggc

SEQ ID NO: 528886 - DNA, 75 bp, synthetic construct
  source 1..75: mol_type = other DNA
ggcgaggaaatctctgttcactcggctcgtaaacgctggtacgcgcagcgttctctcgatgccatcaagtcccga

SEQ ID NO: 528887 - DNA, 75 bp, synthetic construct
  source 1..75: mol_type = other DNA
caggagcaacaccccatgaatgagcaattacgccagttgctgacggcgctcggtctgaccgtggctgacggtgac

SEQ ID NO: 528888 - DNA, 75 bp, synthetic construct
  source 1..75: mol_type = other DNA
acaacgatgttcctgtttctgctgatgagctgattgccctcagcgatgcagccgcaaaagccctgtttgccaaag

SEQ ID NO: 528889 - DNA, 75 bp, synthetic construct
  source 1..75: mol_type = other DNA
gaaattcatgtcagacagcgcacgatgaaaaaagagattgaagcgctgggtgatgcggaagctatactggcgtat

SEQ ID NO: 528890 - DNA, 75 bp, synthetic construct
  source 1..75: mol_type = other DNA
tgcgcaatcaaccgcgccacaggaagacagtcgtctgaaagaggcatacagcgcctgtatcaacaccgcacaagg

SEQ ID NO: 528891 - DNA, 75 bp, synthetic construct
  source 1..75: mol_type = other DNA
aaagagaatctgccgctgattacgcttatcgtgatgatggcaatcagctggggtctggagcagttcaatcatccg

SEQ ID NO: 528892 - DNA, 75 bp, synthetic construct
  source 1..75: mol_type = other DNA
aatgaattaggcgtacaggcggctatagctacgcttaacgaagcaatgaaaagtgcacagcctattcatgaacag

SEQ ID NO: 528893 - DNA, 75 bp, synthetic construct
  source 1..75: mol_type = other DNA
ttacgtgtctttaagcatggaagaaaaaacatcggtagcgcgttatgtgttctgcctcactttcgtaagacgcat

SEQ ID NO: 528894 - DNA, 75 bp, synthetic construct
  source 1..75: mol_type = other DNA
ggaagaggattttggtcgagtgccagtgccggaagagattgacccgatggcgttcggaagtgctgttatcttccc

SEQ ID NO: 528895 - DNA, 75 bp, synthetic construct
  source 1..75: mol_type = other DNA
tgccatcagtgaactgaacgcgctgggggtcaaaggagtgatcctcaccggcgataatccacgcgcagcggcggc

SEQ ID NO: 528896 - DNA, 75 bp, synthetic construct
  source 1..75: mol_type = other DNA
aaaacatcggtagcgcgttatgtattctctcttacttttgtgaagcgcatggaggaagaattcggacgcgtacca

SEQ ID NO: 528897 - DNA, 75 bp, synthetic construct
  source 1..75: mol_type = other DNA
ttgtgatggatgcgtcgatccgcgattatatgtctttaaatgctgaagaaaaaactgccgtagctcgttatgtct

SEQ ID NO: 528898 - DNA, 75 bp, synthetic construct
  source 1..75: mol_type = other DNA
ctatttttatccgggcccggaatccgaacccattcttgccgccgccagaaatgcacttgacacatggctgaaaac

SEQ ID NO: 528899 - DNA, 75 bp, synthetic construct
  source 1..75: mol_type = other DNA
aaacgccacgctttacctttacccaggtcctgaaagcgaacccatccgcgctgctgccgtgaaaaaactggaagc

SEQ ID NO: 528900 - DNA, 75 bp, synthetic construct
  source 1..75: mol_type = other DNA
cccattatgactccagcgatgcaggtggtagttatagcaatatgatttccgtgcgtctgaatgacccgcgcggca

SEQ ID NO: 528901 - DNA, 75 bp, synthetic construct
  source 1..75: mol_type = other DNA
atcacgaagtattaaaagatatggaagctggtgcgtatgacgctgatttgaatctggcgttacagattgttgata

SEQ ID NO: 528902 - DNA, 75 bp, synthetic construct
  source 1..75: mol_type = other DNA
atgaacgacatcaaaacagcttattcactcggcagcgatggcatgttaatcactcgttatgctgaagatgcaagt

SEQ ID NO: 528903 - DNA, 75 bp, synthetic construct
  source 1..75: mol_type = other DNA
tctatgccgcgctttacgtcgagggggtgcagcgtgtcgaacttgtcgcgccggtcgctgacatcgtactcaatg

SEQ ID NO: 528904 - DNA, 75 bp, synthetic construct
  source 1..75: mol_type = other DNA
gcgtaacggtgagcgtgaagaggtggcaattaacagcctgcgccctggcgatgtgattgaagttgcggcgggtgg

SEQ ID NO: 528905 - DNA, 75 bp, synthetic construct
  source 1..75: mol_type = other DNA
agctggcaagagtggatttataaaggcctgacgctgctgctgattggctgcccgtgtgcgttagttatctccacg

SEQ ID NO: 528906 - DNA, 75 bp, synthetic construct
  source 1..75: mol_type = other DNA
tcccaccgccgaatcacagcgggcgctggtcgggtctggcattgaagcgcaggttaacggtgagcgcgtgttgat

SEQ ID NO: 528907 - DNA, 75 bp, synthetic construct
  source 1..75: mol_type = other DNA
catgttccagcacgccaactctctctgaaaacgtctccggcacccgctatagctggaaagtcagcggcatggact

SEQ ID NO: 528908 - DNA, 75 bp, synthetic construct
  source 1..75: mol_type = other DNA
gattgagcggtttatcgaccgtttcagccgtatttacacgccagcgattatggccgtcgccctgctggtgacgct

SEQ ID NO: 528909 - DNA, 75 bp, synthetic construct
  source 1..75: mol_type = other DNA
gcgataatccacgcgcagcggcggcaatcgccggggaactggggctggaatttaaagcgggcctattgccggaag

SEQ ID NO: 528910 - DNA, 75 bp, synthetic construct
  source 1..75: mol_type = other DNA
gataaagttcctgcaggagccaccagcgtagaccgtctggtaacgctggaagtgctgtcagaaccgggtgccagc

SEQ ID NO: 528911 - DNA, 75 bp, synthetic construct
  source 1..75: mol_type = other DNA
cagggcgtcagcgcgttaatggcactgaaaccggaaaccgccacacgcctgcgtaatggcgagcgcgaagaagtc

SEQ ID NO: 528912 - DNA, 75 bp, synthetic construct
  source 1..75: mol_type = other DNA
gaatcaacatgcgccgctggcgatggtcggtgacggtattaacgacgcgccagcgatgaaagctgccgccattgg

SEQ ID NO: 528913 - DNA, 75 bp, synthetic construct
  source 1..75: mol_type = other DNA
tagaccgtctggtaacgctggaagtgctgtcagaaccgggagccagcgccattgaccggattctgaaactgatcg

SEQ ID NO: 528914 - DNA, 75 bp, synthetic construct
  source 1..75: mol_type = other DNA
gaatctgcggtgcaaaaagcgggctattccctgcgcgatgaacagtccgccgaagaaccgcaagcatcacgcctg

SEQ ID NO: 528915 - DNA, 75 bp, synthetic construct
  source 1..75: mol_type = other DNA
attgaccgcattctgaaactgattgaagaagccgaagaacgccgcgcacctattgaacgttttatcgaccgtttc

SEQ ID NO: 528916 - DNA, 75 bp, synthetic construct
  source 1..75: mol_type = other DNA
tcctgccgccgaatcacagcgggcgctggtcgggtctggtattgaagcactgattaacggcgagcgcgtgttgat

SEQ ID NO: 528917 - DNA, 75 bp, synthetic construct
  source 1..75: mol_type = other DNA
agttcaccgaaactgaagcaggggtgccggaacgtatgagatcacggcgtcggcaggaaatgaccagccttcgaa

SEQ ID NO: 528918 - DNA, 75 bp, synthetic construct
  source 1..75: mol_type = other DNA
atggaaacacgtcgcgaagagcgtatcgggcagttactacaagaattaaaacgcagcgataagttacacctgaag

SEQ ID NO: 528919 - DNA, 75 bp, synthetic construct
  source 1..75: mol_type = other DNA
aagcaattgataatgaaatcccttttaccgccgtttgttattcgctaaatacctttctggcgctgaaagagaaac

SEQ ID NO: 528920 - DNA, 75 bp, synthetic construct
  source 1..75: mol_type = other DNA
tgtccgccactcaggattgccagcaggcgacgcaggcatttgccgaaaaaagtagcgtgagcttccataatcaat

SEQ ID NO: 528921 - DNA, 75 bp, synthetic construct
  source 1..75: mol_type = other DNA
ctttgcagcgtttgcttgttggctgtggagaaggggcgcaacattgtctggttgaagaaaccttctccttcagag

SEQ ID NO: 528922 - DNA, 75 bp, synthetic construct
  source 1..75: mol_type = other DNA
agtaaacctgcaacgcaaggccgccacgcacgcagccggcgtgattcgtttcaccaaaaacgacattgatcgcgc

SEQ ID NO: 528923 - DNA, 75 bp, synthetic construct
  source 1..75: mol_type = other DNA
gacgtaacgataacaacgtctacgaccgtacattccgcgccggtaactatctgaagctgggctggccatccgtca

SEQ ID NO: 528924 - DNA, 75 bp, synthetic construct
  source 1..75: mol_type = other DNA
ctcaccggaaccggtacccacgcctgttaaaaaacaaaaacggaagaaaacagtaactgacgatgttaacccctg

SEQ ID NO: 528925 - DNA, 75 bp, synthetic construct
  source 1..75: mol_type = other DNA
agtgaggcggcttatattcagtgtccttcctgttcaggacggattttgcctgaacaaaaacgcgagctgaacgga

SEQ ID NO: 528926 - DNA, 75 bp, synthetic construct
  source 1..75: mol_type = other DNA
gtgcatatcagtaaaggggcaacctgttttaacctggaagagttgccggtaaaacactgggcgatgtcgatggcg

SEQ ID NO: 528927 - DNA, 75 bp, synthetic construct
  source 1..75: mol_type = other DNA
gaggcggcgtatctactttgcccgcactgcagcggcattatcactgcggagaaaaagcgtgagctcaatagtgca

SEQ ID NO: 528928 - DNA, 75 bp, synthetic construct
  source 1..75: mol_type = other DNA
tatccaattgtcgaagaaacgtttgctgaagcttctgcggcgctgggctacgacctgtgggcgctgacccagcag

SEQ ID NO: 528929 - DNA, 75 bp, synthetic construct
  source 1..75: mol_type = other DNA
gttgctgattgacggggagcacgcgccaaacaccattcaggatctttatcaccagctacaggcggtagcgcccta

SEQ ID NO: 528930 - DNA, 75 bp, synthetic construct
  source 1..75: mol_type = other DNA
gctgatgggctattcggagagcaagtcgatgctctacctcgaatcgcgctgcatcttcattaccaaaggcgccgg

SEQ ID NO: 528931 - DNA, 75 bp, synthetic construct
  source 1..75: mol_type = other DNA
cagggacctggtaccggctatcgcatcagtgccgaacgctgggcggaaattaaaaatattgcgggcgtggttcag

SEQ ID NO: 528932 - DNA, 75 bp, synthetic construct
  source 1..75: mol_type = other DNA
gtgccacgtcaccaatctcaaagataatccggtgcagattgccgctgacgccgccgaggccgggatccgcggctt

SEQ ID NO: 528933 - DNA, 75 bp, synthetic construct
  source 1..75: mol_type = other DNA
ggatgccctgaaagaccgggtgaataacgcgttatggcgtgactcgccaggtccaggctatgtgcatttccctga

SEQ ID NO: 528934 - DNA, 75 bp, synthetic construct
  source 1..75: mol_type = other DNA
tgaacaaaaacgtgagctgaacggacgtggggtctggttgcgggatggtgaatccatcaatgcggatggcagtcg

SEQ ID NO: 528935 - DNA, 75 bp, synthetic construct
  source 1..75: mol_type = other DNA
ctaccggcgctgctctcctgctgctggcggcggcggtgttctggtgtttcaactgcctgaacaccctgacgctga

SEQ ID NO: 528936 - DNA, 75 bp, synthetic construct
  source 1..75: mol_type = other DNA
atgcgggcggggatataaggcgaaaagcccgcagggctttaaagatcaatcaggtgttgactgactctgaacgta

SEQ ID NO: 528937 - DNA, 75 bp, synthetic construct
  source 1..75: mol_type = other DNA
ccgggaaagatgctgttttgcagcttttgcgtgatgcttatgaagcaagtacgcaaaattgtatcggttggctaa

SEQ ID NO: 528938 - DNA, 75 bp, synthetic construct
  source 1..75: mol_type = other DNA
gcattgagaattacatggcgcaagtcaacgaattactttgtctgttggtgcaggtggaaagtaaaacagcactgg

SEQ ID NO: 528939 - DNA, 75 bp, synthetic construct
  source 1..75: mol_type = other DNA
gtgcggtcgccccggcgtgctgacgcaatgttccgttgaggaggcgactgagctggagctggggatgcgcgggtt

SEQ ID NO: 528940 - DNA, 75 bp, synthetic construct
  source 1..75: mol_type = other DNA
gcatgcttcatcgaacagattttcacgatgattaccaaacggtaatggcatacaaagtttctgaagtcatcgctg

SEQ ID NO: 528941 - DNA, 75 bp, synthetic construct
  source 1..75: mol_type = other DNA
tcaattcacgctggttttgattgggattccggtaaagtgcttattttcccatcacagccactgaccacgctaaca

SEQ ID NO: 528942 - DNA, 75 bp, synthetic construct
  source 1..75: mol_type = other DNA
ccaaatttgataaacccggaaaatctccctttatggatatggacctggtgccgaaatatgctgatgaaagtggcg

SEQ ID NO: 528943 - DNA, 75 bp, synthetic construct
  source 1..75: mol_type = other DNA
cccacgtcatactaaaaacccatttcttaatgatacaagtctacatacaaaaactggcgtcagacgtattactac

SEQ ID NO: 528944 - DNA, 75 bp, synthetic construct
  source 1..75: mol_type = other DNA
cgcaaaccggtaatgaccaggcagtgaaaaccgattgtgataaggtctggcaggaaattcgcagcaataacaaat

SEQ ID NO: 528945 - DNA, 75 bp, synthetic construct
  source 1..75: mol_type = other DNA
gcgcctgtatcaacaccgcgcaaggttcgccagaaaaaattgaagcctgccagagcgtgttaaacgtgctgaaga

SEQ ID NO: 528946 - DNA, 75 bp, synthetic construct
  source 1..75: mol_type = other DNA
cttaatgatacaaatatacatacaaaaacaggtatcagacgtatcacaacaggaaaagaccgcttagccgtagta

SEQ ID NO: 528947 - DNA, 75 bp, synthetic construct
  source 1..75: mol_type = other DNA
atgatagaaaataagatacaaactgaagtaaagaaatcgagaagaggtctcccacgttatactaagaacccattc

SEQ ID NO: 528948 - DNA, 75 bp, synthetic construct
  source 1..75: mol_type = other DNA
aagctttatgtggatggcgtatcagctattgagggtttatcctcatccggtaagaaagtattcaagatactgtat

SEQ ID NO: 528949 - DNA, 75 bp, synthetic construct
  source 1..75: mol_type = other DNA
gccagcagcaggcgatggtgtcgcaaatcaacacgctcaccagcggcatcgccagctataaccagcaaatcgccc

SEQ ID NO: 528950 - DNA, 75 bp, synthetic construct
  source 1..75: mol_type = other DNA
gaatgaaagaacttgctgacaagaaatttattgctgagaccatgatacagaactattattttattaatccagact

SEQ ID NO: 528951 - DNA, 75 bp, synthetic construct
  source 1..75: mol_type = other DNA
atatgtttaatggtgatcgtttaactttcatgaaaacttattacttgaaggacaaaaagaaaacagcgaataata

SEQ ID NO: 528952 - DNA, 75 bp, synthetic construct
  source 1..75: mol_type = other DNA
tcgacagtattcgccgcgtctccaaccagtatcaggtgaatcaggtgtggtatgccgccagcgattacggctatt

SEQ ID NO: 528953 - DNA, 75 bp, synthetic construct
  source 1..75: mol_type = other DNA
aaatttatgaagccaatctgaaagtcatttccgccggggccgagattttcgattcggtgctggaaatgtgcagct

SEQ ID NO: 528954 - DNA, 75 bp, synthetic construct
  source 1..75: mol_type = other DNA
caatcatcagcaatatcggcatttacagccagcaaaaccagacggaagtcgatgccgcgtccggtaatgactcca

SEQ ID NO: 528955 - DNA, 75 bp, synthetic construct
  source 1..75: mol_type = other DNA
gggttctgcccctggtcccgcacagccagacagtggaagctgacgaccgcccggtggcgctcgagggtttctggc

SEQ ID NO: 528956 - DNA, 75 bp, synthetic construct
  source 1..75: mol_type = other DNA
ttgatgtggcaggcttggcactttacaaattcattcaggttttgtcgactattataataactaagatattgttac

SEQ ID NO: 528957 - DNA, 75 bp, synthetic construct
  source 1..75: mol_type = other DNA
tgtccgccactcaggattgccaacaggcgacgcacgcatttgccgaaaaagccggcgtgagcttccacaatcaat

SEQ ID NO: 528958 - DNA, 75 bp, synthetic construct
  source 1..75: mol_type = other DNA
ttggaacatggaatagtttaagaccgcttaccattaacaacgccaatggtgctgtttcaatcggtaatggtttaa

SEQ ID NO: 528959 - DNA, 75 bp, synthetic construct
  source 1..75: mol_type = other DNA
gaatatcagtttgtcattgtgcaggcgcgttctgacggtttcgtcgaaaaagtgtatcccctgacgattggcgat

SEQ ID NO: 528960 - DNA, 75 bp, synthetic construct
  source 1..75: mol_type = other DNA
gcatgaatatttcgaaagataaagtcgtggctcagatccagggaatggacccggtctggatcagtgctgccgtac

SEQ ID NO: 528961 - DNA, 75 bp, synthetic construct
  source 1..75: mol_type = other DNA
aacaataatttgtcgaattcttccatacttaataacttactctaaaaatagagaagcattaaaatgcaaacctta

SEQ ID NO: 528962 - DNA, 75 bp, synthetic construct
  source 1..75: mol_type = other DNA
aaatatgctgtcacgcattcttcatgtgggccattcaggtttagcggaagaggaatggggcatggacaacagtct

SEQ ID NO: 528963 - DNA, 75 bp, synthetic construct
  source 1..75: mol_type = other DNA
cgttacaggagcgtttcctggcgctggcaaaagccgtggaggggactcctgatgcccttcgctcggatcggtatg

SEQ ID NO: 528964 - DNA, 75 bp, synthetic construct
  source 1..75: mol_type = other DNA
gctggccggattcgggtttacgccggatcaggcttcccggctcacccaccttatccgttggccccagatgagtca

SEQ ID NO: 528965 - DNA, 75 bp, synthetic construct
  source 1..75: mol_type = other DNA
gcgtaagaatgggatctgctgccagttataaaccatcaagcaatgttgtttcctggactcagaatctaggaagcg

SEQ ID NO: 528966 - DNA, 75 bp, synthetic construct
  source 1..75: mol_type = other DNA
acgctcagggcactgctggaaagtggccacaacgcagcactgtatgatctgtaccgtttccgctcagccctcgcc

SEQ ID NO: 528967 - DNA, 75 bp, synthetic construct
  source 1..75: mol_type = other DNA
gcgtgcagaagtctgggatggcagattggcacgtgcgcatggaacgaccagctgctgagtgagacactttcccgt

SEQ ID NO: 528968 - DNA, 75 bp, synthetic construct
  source 1..75: mol_type = other DNA
aggcggcatatcactctatactggcccggtgatcaccagttaccgctatacccattatgactccagcgatgcagg

SEQ ID NO: 528969 - DNA, 75 bp, synthetic construct
  source 1..75: mol_type = other DNA
aggcggcatatcactctatactggcccggtgatcaccagataccgctatacccaatatgactccagcgatgcagg

SEQ ID NO: 528970 - DNA, 75 bp, synthetic construct
  source 1..75: mol_type = other DNA
ttgaaaacgcaacgctgctttttaatctttcccaggggcgtcgtgattatgaaactgaacatttcaatgccactc

SEQ ID NO: 528971 - DNA, 75 bp, synthetic construct
  source 1..75: mol_type = other DNA
aggcggcttatcactctatactggcccggtgatcaccagataccgctatacccattatgactccagcgatgcagg

SEQ ID NO: 528972 - DNA, 75 bp, synthetic construct
  source 1..75: mol_type = other DNA
aggcggcatatcactctatactggcccggtgatcaccaggtaccgctatacccagtatgactccagcgatgcagg

SEQ ID NO: 528973 - DNA, 75 bp, synthetic construct
  source 1..75: mol_type = other DNA
aggcggcatatcactctatactggcccggtgatcaccagctaccgctatacccactatgactccagcgatgcagg

SEQ ID NO: 528974 - DNA, 75 bp, synthetic construct
  source 1..75: mol_type = other DNA
gcctcgcccccagcatctctggcagcccgagctgatcgagatattcgaagagaagttagccaaacgcgctgtaac

SEQ ID NO: 528975 - DNA, 75 bp, synthetic construct
  source 1..75: mol_type = other DNA
tatggaaagcacgccagtttgctgaccgctattgctgctcatacgactactttatctccaccgttctttccgcag

SEQ ID NO: 528976 - DNA, 75 bp, synthetic construct
  source 1..75: mol_type = other DNA
gatggaaatcgtgcctgagcgtgtgatttacgcgcacttcccggaagaactggaagaagcacggcgattctgttg

SEQ ID NO: 528977 - DNA, 75 bp, synthetic construct
  source 1..75: mol_type = other DNA
atgaataccgcattatccccgctgtcatctcagcctgaactttttccactggcggttatggctcaacatgattac

SEQ ID NO: 528978 - DNA, 75 bp, synthetic construct
  source 1..75: mol_type = other DNA
tgagtggattctggagcgtctgcgtggcattacccgagataaacgcatccgcatcatcttctccgcagtctggtt

SEQ ID NO: 528979 - DNA, 75 bp, synthetic construct
  source 1..75: mol_type = other DNA
gtttgtcgcgctgtaaagacgaggctgaactcttcgagacgaagtggtttgattaccgcgacatgcacccgctta

SEQ ID NO: 528980 - DNA, 75 bp, synthetic construct
  source 1..75: mol_type = other DNA
aggcggcttatcactctatactggcccggtgatcaccagttaccgctatacccagtatgactccagcgatgcagg

SEQ ID NO: 528981 - DNA, 75 bp, synthetic construct
  source 1..75: mol_type = other DNA
ggactacggcgggctggggatgtttaaagtagtatgtaattccgtccagtccctctgccaaagtactcctgcgaa

SEQ ID NO: 528982 - DNA, 75 bp, synthetic construct
  source 1..75: mol_type = other DNA
caattttgcccaggcgactgtctcccccgacaggacacgtatcatttttaatgcttcgaataaaagcgcaacggt

SEQ ID NO: 528983 - DNA, 75 bp, synthetic construct
  source 1..75: mol_type = other DNA
actcaacacctaagcagcctgccctctaccttccagttaggctttgtggcggactacggcgggctggagatgttt

SEQ ID NO: 528984 - DNA, 75 bp, synthetic construct
  source 1..75: mol_type = other DNA
acagaagaccttgagacagcaaggaaacagatgcttaaagagattagcaacttaaaagagtcagtatctattgaa

SEQ ID NO: 528985 - DNA, 75 bp, synthetic construct
  source 1..75: mol_type = other DNA
caccgaattctaccctggtgtttgacgtagagctgctggatgtgaaaccagcgccgaaggctgatgcgaaagccg

SEQ ID NO: 528986 - DNA, 75 bp, synthetic construct
  source 1..75: mol_type = other DNA
tcaagaaaggcggtaagatcaaactggttattccaccagaactggcttacggcaaagcgggtgttccggggatcc

SEQ ID NO: 528987 - DNA, 75 bp, synthetic construct
  source 1..75: mol_type = other DNA
gtgtccgttctgtctggctgcgccacaatcttgaaaacttcaaaaagcgtctgaaagcactggaagaaaaagtgg

SEQ ID NO: 528988 - DNA, 75 bp, synthetic construct
  source 1..75: mol_type = other DNA
aggcggcgtatcactctatactggcccggtgatcaccagataccgctatacccagtatgactccagcgatgcagg

SEQ ID NO: 528989 - DNA, 75 bp, synthetic construct
  source 1..75: mol_type = other DNA
aggcggcctatcactctatactggcccggtgatcaccagataccgctatacccactatgactccagcgatgcagg

SEQ ID NO: 528990 - DNA, 75 bp, synthetic construct
  source 1..75: mol_type = other DNA
gccggaaatggcgaaccggtcacggcagaggtactggcacagcggcaggctgaagaggccatccgccgtgaaacg

SEQ ID NO: 528991 - DNA, 75 bp, synthetic construct
  source 1..75: mol_type = other DNA
catcagggaaaaatgtgcaatgggcggacgccaatggaaacgttacttgatggaaagcgcatctgggtcgagaaa

SEQ ID NO: 528992 - DNA, 75 bp, synthetic construct
  source 1..75: mol_type = other DNA
tgatacctactcgaaggttgctcattgcaagctgtatgtcaccaaaacaccgattactgcggctgatttactgaa

SEQ ID NO: 528993 - DNA, 75 bp, synthetic construct
  source 1..75: mol_type = other DNA
ctttaacattcacgacgatcagaaaatggtgctggatttcctgttgcaggaaaaagttctgttggtgcaagggac

SEQ ID NO: 528994 - DNA, 75 bp, synthetic construct
  source 1..75: mol_type = other DNA
tttaacagcttatatttctaaggtgggagataatgttgttgcaggtgatgtaaatgctgttggagttatgactat

SEQ ID NO: 528995 - DNA, 75 bp, synthetic construct
  source 1..75: mol_type = other DNA
gccaatcgcttttgatgctatcgacaaccaacccgtcgatctgctttttgccctgctggtacctgctgaccaaac

SEQ ID NO: 528996 - DNA, 75 bp, synthetic construct
  source 1..75: mol_type = other DNA
ctggtggcgaaacgtctggcggacaaaaccatctgccgccgtttacgcgcagcccagagcgatgaagagctgtat

SEQ ID NO: 528997 - DNA, 75 bp, synthetic construct
  source 1..75: mol_type = other DNA
atgataaaacggacgttattagcggcggcaatttttagcgcattacccgtttatgccgggttaacttccattacc

SEQ ID NO: 528998 - DNA, 75 bp, synthetic construct
  source 1..75: mol_type = other DNA
atatttctattatccccgattacagacaatcctggaaagtggaacataaattatcggatattctactgttgacta

SEQ ID NO: 528999 - DNA, 75 bp, synthetic construct
  source 1..75: mol_type = other DNA
tagggtacagccgttggcagcatgatgactatctgaatgcgatagtaaactggtatcatcaacaatataaaactg

SEQ ID NO: 529000 - DNA, 75 bp, synthetic construct
  source 1..75: mol_type = other DNA
taatatcacctatacaatccgtgatggtaatggcttgcctggccaaggtaaccaacagtcagactatttgattcc

SEQ ID NO: 529001 - DNA, 75 bp, synthetic construct
  source 1..75: mol_type = other DNA
tgtgttctctgacgtaaatggtagcacaaataatgctccatatctcgagccaaaatcaggcgataccgcagcaaa

SEQ ID NO: 529002 - DNA, 75 bp, synthetic construct
  source 1..75: mol_type = other DNA
cggtattctctgttcttgcaagtggctctgcatttgctgcaccagcaccaaatgattctagttcagcaacgctaa

SEQ ID NO: 529003 - DNA, 75 bp, synthetic construct
  source 1..75: mol_type = other DNA
acattactgatccagaaggtacaaatattaatatcggtgaaaccaaaacagctggcgttacaaaagatggtgatg

SEQ ID NO: 529004 - DNA, 75 bp, synthetic construct
  source 1..75: mol_type = other DNA
ctctggctgtggtatctgcacttctcagtggtagtgctatggctgacgtgagtggaaatggtcaggctgataact

SEQ ID NO: 529005 - DNA, 75 bp, synthetic construct
  source 1..75: mol_type = other DNA
tatgaaagctactggcgatgcgggaaatgtgaaagctggtgttgttgacgccacaggtattatgactatcaaggc

SEQ ID NO: 529006 - DNA, 75 bp, synthetic construct
  source 1..75: mol_type = other DNA
cagataaaacgcggtgatttactgtatgtggatgtggcaaaaggctatggcacaggcctgctggtttcccgtgcg

SEQ ID NO: 529007 - DNA, 75 bp, synthetic construct
  source 1..75: mol_type = other DNA
gatcaccatgtggtcctcactgaaatcccattttggatgttcgtacaaagaaatcagtgaggagcagttcaccga

SEQ ID NO: 529008 - DNA, 75 bp, synthetic construct
  source 1..75: mol_type = other DNA
gttaagttgcgtaaaatgaaggacaaattcaactgtagagatatctctatggttgctgctgatggcaagttacgt

SEQ ID NO: 529009 - DNA, 75 bp, synthetic construct
  source 1..75: mol_type = other DNA
ttcctgcgatgtaccatgggaaacaaggcaccatacagtgaatgggcaactggagataaaggaagaatacactga

SEQ ID NO: 529010 - DNA, 75 bp, synthetic construct
  source 1..75: mol_type = other DNA
caacgatattccgggcgtttcctgcgtgaaaccgcgcggtgcgctgtacatgttcccgaaaatcgacgccaaacg

SEQ ID NO: 529011 - DNA, 75 bp, synthetic construct
  source 1..75: mol_type = other DNA
aattagagaatgtctgttatgacatccgtggtccggtgctgaaagaagcaaaacgcctggaagaagaaggtaaca

SEQ ID NO: 529012 - DNA, 75 bp, synthetic construct
  source 1..75: mol_type = other DNA
aaattgattctgagggagtagtgaagatttatgacttcggactatctagaaatgttgatgaagctaatacaatag

SEQ ID NO: 529013 - DNA, 75 bp, synthetic construct
  source 1..75: mol_type = other DNA
cttaaacagcgcaatatcattgccgtcgatgaacatatgaccattctcagcgctctgatttgccgcagtgacctt

SEQ ID NO: 529014 - DNA, 75 bp, synthetic construct
  source 1..75: mol_type = other DNA
tgaaactgaacatttcaatgccactcgcggccagggtgcagtctggtacaaatggaataactggctgacaacccg

SEQ ID NO: 529015 - DNA, 75 bp, synthetic construct
  source 1..75: mol_type = other DNA
acgtatccagccaattacagagcatcttaatatggggttgacggcaggtaaaagttggtacgacacaccaaccag

SEQ ID NO: 529016 - DNA, 75 bp, synthetic construct
  source 1..75: mol_type = other DNA
gcagctattagaaattaaaggcgtatttttctcagataaaatatataatatcaattacttagagttattatcaaa

SEQ ID NO: 529017 - DNA, 75 bp, synthetic construct
  source 1..75: mol_type = other DNA
tggcagaaatgtataacatcagtcgcactacggtacgccacatactccagcatttaagcgcatgtggcgtgctca

SEQ ID NO: 529018 - DNA, 75 bp, synthetic construct
  source 1..75: mol_type = other DNA
cagcgccagttacgccctggggaaactttttctgaactgcaactggctcgggccgcgggtgtcagcccggttgta

SEQ ID NO: 529019 - DNA, 75 bp, synthetic construct
  source 1..75: mol_type = other DNA
gcacgaaagcaggtcctgaacctctcgatatatgggaactctgcacgattgacgaagcagaacaaagattgacag

SEQ ID NO: 529020 - DNA, 75 bp, synthetic construct
  source 1..75: mol_type = other DNA
ggacagtatataggctctttccgcaacatgccgacaagcagcattaccgcatatgttgagcaattgcgcccggat

SEQ ID NO: 529021 - DNA, 75 bp, synthetic construct
  source 1..75: mol_type = other DNA
ctgaacacggtattcgcgcgcttggtcgcaatttgctgtcgtatcagcgtcagggttatgacaccatcagcgaaa

SEQ ID NO: 529022 - DNA, 75 bp, synthetic construct
  source 1..75: mol_type = other DNA
acgttcagcggctacaacgctgacaaccggttaagctggcagcgcagcctgccaggcggcagccagaatccgcag

SEQ ID NO: 529023 - DNA, 75 bp, synthetic construct
  source 1..75: mol_type = other DNA
cgggcatctgctccagacagcgctggacggtatcacggtcagtgaatatgagcgtgacagtctgcaccgtcaggt

SEQ ID NO: 529024 - DNA, 75 bp, synthetic construct
  source 1..75: mol_type = other DNA
ttgacagatcaggacaaacctaaaaaggcagtcaaaatgactccaatagtccataaagtgatcgtgctcacataa

SEQ ID NO: 529025 - DNA, 75 bp, synthetic construct
  source 1..75: mol_type = other DNA
cgtcatggtacacctagggacgttgaaggccagaagcttttagtaaagaaaggccagattatttttggcaagcgt

SEQ ID NO: 529026 - DNA, 75 bp, synthetic construct
  source 1..75: mol_type = other DNA
caataaaatggaaaacgctagcaacgcaaaccttcttatttcccagtattaaccaacaaaagaaaatgctcaaag

SEQ ID NO: 529027 - DNA, 75 bp, synthetic construct
  source 1..75: mol_type = other DNA
cgtggcacaaggctggcagaatcaaaaccgaggagagtcaggtaacattacccttaactatcgtggaccttatgc

SEQ ID NO: 529028 - DNA, 75 bp, synthetic construct
  source 1..75: mol_type = other DNA
gcaaaccggtggttttcaaaccttcgatgttcctcaagcaggtcaggtgctggcgaatgtcgcagatcagtatgc

SEQ ID NO: 529029 - DNA, 75 bp, synthetic construct
  source 1..75: mol_type = other DNA
atgattgacagccaggttcgcgatgcgacagctgcgtatatgcgtggcgttgaatttcctaacccacctggtgag

SEQ ID NO: 529030 - DNA, 75 bp, synthetic construct
  source 1..75: mol_type = other DNA
aggcatcccttaaactcagtcagacaggcagcgatctgctgaataaccctgaaacaggtttgcttaacctgaaat

SEQ ID NO: 529031 - DNA, 75 bp, synthetic construct
  source 1..75: mol_type = other DNA
gaaacaccgtaccggcagcgaattgctttcgggcgtgagaacggcaggctggtgcgggtagcctccagcagcgga

SEQ ID NO: 529032 - DNA, 75 bp, synthetic construct
  source 1..75: mol_type = other DNA
taaccgggatggccgtttccgaggtcgctatggggttgttcagcaacccagtggatgtcaccaccgggcaaaaaa

SEQ ID NO: 529033 - DNA, 75 bp, synthetic construct
  source 1..75: mol_type = other DNA
cgcgacgggcttcacctgtacctaccgctgggaagagattgagggggttcccagggtggtggagcactcgaccag

SEQ ID NO: 529034 - DNA, 75 bp, synthetic construct
  source 1..75: mol_type = other DNA
accctatctaccacaccagcgctcttgccgggtttttgattggggctatcattggcattgccattattgccgttg

SEQ ID NO: 529035 - DNA, 75 bp, synthetic construct
  source 1..75: mol_type = other DNA
cacggtgcgctttgcgtatgaccgcagcgggtggctgacggcagagcacagcgtgcacggcagtataaaatatca

SEQ ID NO: 529036 - DNA, 75 bp, synthetic construct
  source 1..75: mol_type = other DNA
gaaaccccgtaccggcagcgtattgccttcgggcgtgagaacggcaggctggtgcgggtggcctccagcagcgga

SEQ ID NO: 529037 - DNA, 75 bp, synthetic construct
  source 1..75: mol_type = other DNA
cacggatgaagagaaacgggagacgcgctggcattacactgcggaggggtggattgccagcctgagcaacggcaa

SEQ ID NO: 529038 - DNA, 75 bp, synthetic construct
  source 1..75: mol_type = other DNA
ttggtcgtgatggtacatttgttacagacaaagaaggtgcattgaaatatttcaatggtattgaaaatggagaaa

SEQ ID NO: 529039 - DNA, 75 bp, synthetic construct
  source 1..75: mol_type = other DNA
ggaccggggagaacgaagccggacgacgtttgtgtgggaagggttccggctgttgcaggagacaacgtggcaggg

SEQ ID NO: 529040 - DNA, 75 bp, synthetic construct
  source 1..75: mol_type = other DNA
ggctgttgcaggagacaacgtggcagggaaagcggacgtacctgtacgacgcggaacagccatacacgccggtgg

SEQ ID NO: 529041 - DNA, 75 bp, synthetic construct
  source 1..75: mol_type = other DNA
accggttaagctggcagcgcagcctgccaggcggcagccagaacccacagcagacagccacacccccgtcacaca

SEQ ID NO: 529042 - DNA, 75 bp, synthetic construct
  source 1..75: mol_type = other DNA
ataatcaggagttctgaattagaatatatacattctggtcgattaaaacttggtgaaatactttatgcaagtaag

SEQ ID NO: 529043 - DNA, 75 bp, synthetic construct
  source 1..75: mol_type = other DNA
atattagtgatatattgatgtctcccgatgatgttatgagagatatttttataggtaattccagacatgcagggc

SEQ ID NO: 529044 - DNA, 75 bp, synthetic construct
  source 1..75: mol_type = other DNA
gttaactatctatttaacggaattaagcaaaataataatggctacggtagccgtagtcagtttttatctctggac

SEQ ID NO: 529045 - DNA, 75 bp, synthetic construct
  source 1..75: mol_type = other DNA
gttgctgaccgcgtgaccgtgcagtcggcggtcattgtcgactacaccatcgatgccgcgctttatctttatccc

SEQ ID NO: 529046 - DNA, 75 bp, synthetic construct
  source 1..75: mol_type = other DNA
gcgtgccggtgagacattgctggaaaccgccatcagtcaccagaagtctgcacttcacacgccggcacaacaggc

SEQ ID NO: 529047 - DNA, 75 bp, synthetic construct
  source 1..75: mol_type = other DNA
gtgcgtgatgcgcgggctatcagtccgtctccggcaaatgtgacggtttccatcctgtccactgaaggcgacggc

SEQ ID NO: 529048 - DNA, 75 bp, synthetic construct
  source 1..75: mol_type = other DNA
gaacctattctggccgcggctgaatcgtcgttcaggaagtggctggctgagcaggggcttatcggtcaggacgtg

SEQ ID NO: 529049 - DNA, 75 bp, synthetic construct
  source 1..75: mol_type = other DNA
ctgattatcaccccggcagatgattcgactatcccgccgacaccggcagtgatggagtctgacaccgattatcgt

SEQ ID NO: 529050 - DNA, 75 bp, synthetic construct
  source 1..75: mol_type = other DNA
ctggcgtcagcgtgtgaatgaggccgcacgggcggtgatgctggcctgtgcagccggtaatgaccttgatgtgat

SEQ ID NO: 529051 - DNA, 75 bp, synthetic construct
  source 1..75: mol_type = other DNA
gccggactttgaaacgctgtttgcagaacgtaaggcagaatttgtggcgctccatccgaaagatgagcaggaagc

SEQ ID NO: 529052 - DNA, 75 bp, synthetic construct
  source 1..75: mol_type = other DNA
gcgcagaaatcatcccgtaccgcgtggaggccaccatttttctctacccggggccggaagcagagccggtaatgg

SEQ ID NO: 529053 - DNA, 75 bp, synthetic construct
  source 1..75: mol_type = other DNA
tagggtagaagaacttttaacagtttctgatattgaagcttctaccatacgtaacgcgctacgacaaaagaaaga

SEQ ID NO: 529054 - DNA, 75 bp, synthetic construct
  source 1..75: mol_type = other DNA
tgcctgcgccgcagattgtcgatgtgccggactttgagacgctgcttgccgaacgcaaggccgaatttgttgtgc

SEQ ID NO: 529055 - DNA, 75 bp, synthetic construct
  source 1..75: mol_type = other DNA
gaggatgacggcaccgcatccgatgagcttctgaccatcgttgaaaaagcactaaatgctgaagaggtgcgcccg

SEQ ID NO: 529056 - DNA, 75 bp, synthetic construct
  source 1..75: mol_type = other DNA
gaaaacaacggcgtcgcctctgatgagctgctcgccgttgtccgtaatgcgcttaacgccgaagatgtcagaccg

SEQ ID NO: 529057 - DNA, 75 bp, synthetic construct
  source 1..75: mol_type = other DNA
agtgatgcgtacgctggaactggaatctgaacccgtcaccaaattgctgcaggagaacgcttaccgtgagttgct

SEQ ID NO: 529058 - DNA, 75 bp, synthetic construct
  source 1..75: mol_type = other DNA
caccatcgacgtgggtgatgccaccttgcggattgccggagaagtgattcaggaaccggattccggttttaaccc

SEQ ID NO: 529059 - DNA, 75 bp, synthetic construct
  source 1..75: mol_type = other DNA
tatcgcgccgactctcgaaattcgccctggctatcgattcaatatcatggtcactaaagatctggctttcgagaa

SEQ ID NO: 529060 - DNA, 75 bp, synthetic construct
  source 1..75: mol_type = other DNA
ggtcagattgtcggccaggtatctcaggacgtttatgataccgcgacgggtaaatacctgcttattcctcacggt

SEQ ID NO: 529061 - DNA, 75 bp, synthetic construct
  source 1..75: mol_type = other DNA
cactgtcccgtctggctgcgttctctccgctgctgttactggggatggggcagatggcccatgccactgacctgc

SEQ ID NO: 529062 - DNA, 75 bp, synthetic construct
  source 1..75: mol_type = other DNA
atggatgttatgggaggcggtagttccgggcttattgaagcaccggcaacaccgccagagattccgaaacaggat

SEQ ID NO: 529063 - DNA, 75 bp, synthetic construct
  source 1..75: mol_type = other DNA
cagccgtgatacctctgcaatggcaatggatgttatgggaggcggtagttccgggcttattgaagcaccggcaac

SEQ ID NO: 529064 - DNA, 75 bp, synthetic construct
  source 1..75: mol_type = other DNA
cgcaggaaggcagcctcaatccaggaaatgtacgactgccgggtacttggcatccggcgtaatgaactgaaggtg

SEQ ID NO: 529065 - DNA, 75 bp, synthetic construct
  source 1..75: mol_type = other DNA
attcagagctgttgtcttcgctgttggggttatatggactcctggtgcttacctttaacattgttatcagtggac

SEQ ID NO: 529066 - DNA, 75 bp, synthetic construct
  source 1..75: mol_type = other DNA
caataccctttggtagtttagttagtttaatatctaaaaataaaacaaacactggcattgtagctgatttgggac

SEQ ID NO: 529067 - DNA, 75 bp, synthetic construct
  source 1..75: mol_type = other DNA
accgggcctcatgtccgcccgtacccaacggtattcagctgataatgaagcccaaaaatgaacgaatttatgttg

SEQ ID NO: 529068 - DNA, 75 bp, synthetic construct
  source 1..75: mol_type = other DNA
tacaaccggagccggggatttgtcgattcagagctgctgtcttcactgctggggttgtatggactcctggtgctt

SEQ ID NO: 529069 - DNA, 75 bp, synthetic construct
  source 1..75: mol_type = other DNA
catccggcgtaatgaactgaaggtggaggagatcccacgggatgacatcatccgggaagctgcatattttagaga

SEQ ID NO: 529070 - DNA, 75 bp, synthetic construct
  source 1..75: mol_type = other DNA
ttagagcataagtttttagttgtacataaaagtgataaacctgaggatgtttacgaatcttatcaattaattaaa

SEQ ID NO: 529071 - DNA, 75 bp, synthetic construct
  source 1..75: mol_type = other DNA
accgttcgctcttccccaaagcccgtcccggtcagtacctgaaacatgacgacaggctgatggctgaagggcgtt

SEQ ID NO: 529072 - DNA, 75 bp, synthetic construct
  source 1..75: mol_type = other DNA
tcccggtcagtgcctgaaacatgacgacaggctgatggctgaagggcgtttcccggtacagaccggccttcacct

SEQ ID NO: 529073 - DNA, 75 bp, synthetic construct
  source 1..75: mol_type = other DNA
gaaggaaccgcgttgctgcgcggcggcaatgattcgccgcgccatcatcgttgccgccgtctgtctttccgtcgc

SEQ ID NO: 529074 - DNA, 75 bp, synthetic construct
  source 1..75: mol_type = other DNA
aacgcggttatcatgctggtgatgacgctggttgaacgtaaagttcgcctgcctggcaacatggggggcaaataa

SEQ ID NO: 529075 - DNA, 75 bp, synthetic construct
  source 1..75: mol_type = other DNA
ggtacctggtgatcccggagctgctgccagagaaaatcggcatgtggtttaaggcagagctggatcccaatattc

SEQ ID NO: 529076 - DNA, 75 bp, synthetic construct
  source 1..75: mol_type = other DNA
gtgatatgaagtcacgtggagaactgaaagaccgcagtcgctggattgccgaatgtgccgagcgtaaacgcacaa

SEQ ID NO: 529077 - DNA, 75 bp, synthetic construct
  source 1..75: mol_type = other DNA
tgcggcacgtatggggttggctccgatcccctctcttattttcgccatccgtggggcgattacggggcttaaagg

SEQ ID NO: 529078 - DNA, 75 bp, synthetic construct
  source 1..75: mol_type = other DNA
cgcagatcacgctgcctctaatgaacatgttggggatgggaaccaccgcagctggtagttcacagagtggtaatt

SEQ ID NO: 529079 - DNA, 75 bp, synthetic construct
  source 1..75: mol_type = other DNA
aactgattgctgctggcaataccgcgcttattaaagagacggggactgcgacgcagaagttggcactggaatacg

SEQ ID NO: 529080 - DNA, 75 bp, synthetic construct
  source 1..75: mol_type = other DNA
ttgctactaaaaaaagacagccatttgccgatttccggctccataaaagcacgtggcgggatttatgaagtcctg

SEQ ID NO: 529081 - DNA, 75 bp, synthetic construct
  source 1..75: mol_type = other DNA
attatgagcgcccgcattggctttaaggtgacagtgcatatgtctgctgatgcccgggcatggaaaaaagcgaaa

SEQ ID NO: 529082 - DNA, 75 bp, synthetic construct
  source 1..75: mol_type = other DNA
actccatttaacctcggcgctacagcagtaactcgattcaatcgtgcggcacgtatggggctggctccgatcccc

SEQ ID NO: 529083 - DNA, 75 bp, synthetic construct
  source 1..75: mol_type = other DNA
ggcgtatgtgttgattaacgcttttatcatgctggtgatgacgctggttgaacgtaaagttcgcctgcccggcaa

SEQ ID NO: 529084 - DNA, 75 bp, synthetic construct
  source 1..75: mol_type = other DNA
ttttcctgatggcccagccgattaccggtatgcgtggtgatgtctaccatgaaattcttctgcgcatgaaaggtg

SEQ ID NO: 529085 - DNA, 75 bp, synthetic construct
  source 1..75: mol_type = other DNA
agcatcttcaggagttaggctgccagattgcaattgatgattttggcacgggctatgccagttatgcgcgactaa

SEQ ID NO: 529086 - DNA, 75 bp, synthetic construct
  source 1..75: mol_type = other DNA
tcaccaaaaaagagttcgcgctctggctactggcattaggtgctttattgttgctgttatgcatgccgttaaatg

SEQ ID NO: 529087 - DNA, 75 bp, synthetic construct
  source 1..75: mol_type = other DNA
gcggggtttgctatcggttggttgatttgtggcctgtctggctgcgagttcgtgtttccctggcgcgcgctgaac

SEQ ID NO: 529088 - DNA, 75 bp, synthetic construct
  source 1..75: mol_type = other DNA
acacgggtagtaatgctgtttttggtgtgatcactcatgtcatcaatgatgcccgaagtggggaatttgatgatt

SEQ ID NO: 529089 - DNA, 75 bp, synthetic construct
  source 1..75: mol_type = other DNA
gtggaggcatccggtgccagcctggagaaggggcgaaacgaccagttgcttaccgcgcttcgtgcgctgctgtta

SEQ ID NO: 529090 - DNA, 75 bp, synthetic construct
  source 1..75: mol_type = other DNA
cgatttgccacctggcgcgaatgaagaaaatgctggtagtggcagagtacgttgaaaacgaagagatccgcgagg

SEQ ID NO: 529091 - DNA, 75 bp, synthetic construct
  source 1..75: mol_type = other DNA
tgtgggtcattgagcatacgctgcaatttatggctgaaaacagagcgaagatgcccgctcaccgttttgctatta

SEQ ID NO: 529092 - DNA, 75 bp, synthetic construct
  source 1..75: mol_type = other DNA
gcccacgcctgggagtcgtttaccgccattacgcttgcgtatgtgttgattaacgcttttatcatgctggtgatg

SEQ ID NO: 529093 - DNA, 75 bp, synthetic construct
  source 1..75: mol_type = other DNA
aagcaaaaactttctcactggctgtcaccattgctggaaccgggtgaagatgtttatcagctttcgggtaacgat

SEQ ID NO: 529094 - DNA, 75 bp, synthetic construct
  source 1..75: mol_type = other DNA
cgctgtttctgatacttttccagtttgctgcatttgtaggattactggcgagcagagaaaatctggtcggcgtca

SEQ ID NO: 529095 - DNA, 75 bp, synthetic construct
  source 1..75: mol_type = other DNA
cattaccgcactggatagccatctcaagcaatttcgtttcttttgggatggaatgccgatgcaaccgcagattgg

SEQ ID NO: 529096 - DNA, 75 bp, synthetic construct
  source 1..75: mol_type = other DNA
acgttttgggcacgagattagcgaagatgctctgcgcgatgccattgcgctgaaaaaccgcgaacgtcgcgcact

SEQ ID NO: 529097 - DNA, 75 bp, synthetic construct
  source 1..75: mol_type = other DNA
gcatgaggggggggcggctatcagaaaaggttgtacgcagacttatggtggaagaacagcttgtcgtcagccgta

SEQ ID NO: 529098 - DNA, 75 bp, synthetic construct
  source 1..75: mol_type = other DNA
tggcgtatcgtgacgttggcaatacatttcccagaccgcctgccacggcaacgatttctgctcttccagcagtgc

SEQ ID NO: 529099 - DNA, 75 bp, synthetic construct
  source 1..75: mol_type = other DNA
ctctaaaatctggtacgggcagattaaagacatgtccgtcagtgatgccagtgtgtcggcgctgaaaaaatatct

SEQ ID NO: 529100 - DNA, 75 bp, synthetic construct
  source 1..75: mol_type = other DNA
atccaagaactaagaagaacttataaagagaagaaagaaatatatgataaactagtaaagcaaatttctatttat

SEQ ID NO: 529101 - DNA, 75 bp, synthetic construct
  source 1..75: mol_type = other DNA
taacgacgcggatattgaccggatccgggagatcaaacgctggattgacaatggcgtgcaggtcagcaaagtcaa

SEQ ID NO: 529102 - DNA, 75 bp, synthetic construct
  source 1..75: mol_type = other DNA
ttgccagtcaacaaggatggcgcattgatgtcctcgcccactcgctcaatcaactacgccctgaactgttcgaag

SEQ ID NO: 529103 - DNA, 75 bp, synthetic construct
  source 1..75: mol_type = other DNA
ataatgtgacgttttatcacgaaaatcttgaagatgatgtcacaaagcagccatgggcgaaaaacggttttgaca

SEQ ID NO: 529104 - DNA, 75 bp, synthetic construct
  source 1..75: mol_type = other DNA
ggctatcggcgtcgtgcgcgtttaagtctgaactttcagccgaaaacacaacaactccagatgggatttcgcaaa

SEQ ID NO: 529105 - DNA, 75 bp, synthetic construct
  source 1..75: mol_type = other DNA
tagaaggtgttccggcgctggtggaaaaaggccagcagaatgcgcgtcttaatggcttacagaatgtgacgtttt

SEQ ID NO: 529106 - DNA, 75 bp, synthetic construct
  source 1..75: mol_type = other DNA
tgcaaaacgaccgtctggcacagcaggcagaggcactggaaaaccaggggaaatgggcgcaggcggcagcacttc

SEQ ID NO: 529107 - DNA, 75 bp, synthetic construct
  source 1..75: mol_type = other DNA
gttacaacaagctgttcaacggtgcgccgccggaaggtgacattgctgtcgagtactggagtacggtggcgaaaa

SEQ ID NO: 529108 - DNA, 75 bp, synthetic construct
  source 1..75: mol_type = other DNA
ttgatagtctgcttcgcggtgaactgactgagcagcagaaatatgagcaagcatgtcgcattcgcgatgaccgga

SEQ ID NO: 529109 - DNA, 75 bp, synthetic construct
  source 1..75: mol_type = other DNA
aataaaaaaagcgacaacagcaactcatcaatcatacttgagcgaaaaatcccagagtttgcagatgcaatttaa

SEQ ID NO: 529110 - DNA, 75 bp, synthetic construct
  source 1..75: mol_type = other DNA
gaatccgctgacgcataaacgcgttcttcaggccgacaatgtgccgtacattctggctgaaatgatgatggaagg

SEQ ID NO: 529111 - DNA, 75 bp, synthetic construct
  source 1..75: mol_type = other DNA
gataaaaatataattttagataaagttagttcgaataaagaattgtctcacgtcaacgtattacattcaaaactt

SEQ ID NO: 529112 - DNA, 75 bp, synthetic construct
  source 1..75: mol_type = other DNA
gggcaattgctactaaaaaaagacagccatttgccgatttccggctccataaaagcacgtggcgggatttatgaa

SEQ ID NO: 529113 - DNA, 75 bp, synthetic construct
  source 1..75: mol_type = other DNA
ctattgaaacagactactccacctcggatgtcgggcagctcagcacccgtgtcgcggcctttattgagatgctgt

SEQ ID NO: 529114 - DNA, 75 bp, synthetic construct
  source 1..75: mol_type = other DNA
gcgaaagccaccgagcaatgcgtggcggaaacgggtgatgtgtacgacgcgctggcggataaatatctggcgatt

SEQ ID NO: 529115 - DNA, 75 bp, synthetic construct
  source 1..75: mol_type = other DNA
atttcactcacttaacggcggacaaaatgccgactacattccctttctggcgaatgtccctggtcaactggcggc

SEQ ID NO: 529116 - DNA, 75 bp, synthetic construct
  source 1..75: mol_type = other DNA
tttcacaggacgggccggatgtgcagcaggcggtgacacaggccattgccggattaagtgaacgaaaagtgcagt

SEQ ID NO: 529117 - DNA, 75 bp, synthetic construct
  source 1..75: mol_type = other DNA
gctggtgaagaagcaataacccgtgattatttccgcattctggttatttcagcgcgtaatgatacaaatatcagt

SEQ ID NO: 529118 - DNA, 75 bp, synthetic construct
  source 1..75: mol_type = other DNA
taagtgatagcaatcaaaaaaatgaagaatacaaatctcgctttgcagattattttaatgtggaagaggaatgta

SEQ ID NO: 529119 - DNA, 75 bp, synthetic construct
  source 1..75: mol_type = other DNA
ggctggctggcgcaggaagaaggtattcgtcttgaaccttcggcactggcgggtatggccgggcctcagcgcgtg

SEQ ID NO: 529120 - DNA, 75 bp, synthetic construct
  source 1..75: mol_type = other DNA
ctgccgtgtggtgttggcggtggtcctggtggcgtcgcattcgggcttaaactggcgtttggcgatcatgttcac

SEQ ID NO: 529121 - DNA, 75 bp, synthetic construct
  source 1..75: mol_type = other DNA
gtaagttaccaacagatgcacggtttcagcgcagaacaactgcgtaatgccactcatctggtgtgggcgacggga

SEQ ID NO: 529122 - DNA, 75 bp, synthetic construct
  source 1..75: mol_type = other DNA
aaagtctttagcgcgggtgacagtgattaccgctttgcgctggaatccatctcaaaagtctgtacgttagccctc

SEQ ID NO: 529123 - DNA, 75 bp, synthetic construct
  source 1..75: mol_type = other DNA
tcccaccgggcttccctttaactcagttattgccctggaactgcatggcggcaaaccgttgtcgccgctggtcaa

SEQ ID NO: 529124 - DNA, 75 bp, synthetic construct
  source 1..75: mol_type = other DNA
aataccgttgagctggctacgcttggcgcgacactggcggcgggcggtgttaatccgctaagccaaaaacgcgtt

SEQ ID NO: 529125 - DNA, 75 bp, synthetic construct
  source 1..75: mol_type = other DNA
cgccggactggagaaacgcattgccgggctgaaaacgaacgcagagaaaatggagatgcacaaacagagcggtgc

SEQ ID NO: 529126 - DNA, 75 bp, synthetic construct
  source 1..75: mol_type = other DNA
acttagcatcgaagagatcaaatccctgattgtggacgataaatggctggcaacacttgaaagcaatatcatcgc

SEQ ID NO: 529127 - DNA, 75 bp, synthetic construct
  source 1..75: mol_type = other DNA
ggcggtagttcctggtgtgatggggattgccgcgttctcaccaccgctggatgaagagggcaacagcgtacgcgg

SEQ ID NO: 529128 - DNA, 75 bp, synthetic construct
  source 1..75: mol_type = other DNA
ccttaatggcctttatttttactgacagccttgttttcgtatcccagaaggacaccggcgttctggctactttcg

SEQ ID NO: 529129 - DNA, 75 bp, synthetic construct
  source 1..75: mol_type = other DNA
tctcgtttaacgccaaaacgtcaaccgacgagcagaagaaacacgacgactttgtcgaccgtatgatggaaaaag

SEQ ID NO: 529130 - DNA, 75 bp, synthetic construct
  source 1..75: mol_type = other DNA
agaacatctaccccaccctctcagcagggaaaagatagtaaaagaaatgattattgaaaggaatatgtgttattt

SEQ ID NO: 529131 - DNA, 75 bp, synthetic construct
  source 1..75: mol_type = other DNA
atgatgaaacagtgcaggcactggaaaacttcctggaagaaaacagcggggaagaagggccactagccgatgcaa

SEQ ID NO: 529132 - DNA, 75 bp, synthetic construct
  source 1..75: mol_type = other DNA
aattttaatatggctgctgtcggcgtgatgaagaagggaatgtcgatgagtttattttcttctccgggaaataca

SEQ ID NO: 529133 - DNA, 75 bp, synthetic construct
  source 1..75: mol_type = other DNA
ggttgccggacaatccggtggcggaaaatctgcttcggtgaaagaactaatcgacagaattattcagaaatataa

SEQ ID NO: 529134 - DNA, 75 bp, synthetic construct
  source 1..75: mol_type = other DNA
attgctgacttacaggcccgtatccagacgtcacagggtgctattcagggtgagcaggcgaagctgaatctgatg

SEQ ID NO: 529135 - DNA, 75 bp, synthetic construct
  source 1..75: mol_type = other DNA
gccctgggtattacttctggcgtactaggtactcttactgcggttggcggtgcattagcgatgaaatatgcctaa

SEQ ID NO: 529136 - DNA, 75 bp, synthetic construct
  source 1..75: mol_type = other DNA
tatcgaaattcactatatatgatgttaactcgttcctttattaaatcatatttgcttctgggggatgggaataaa

SEQ ID NO: 529137 - DNA, 75 bp, synthetic construct
  source 1..75: mol_type = other DNA
catgccgcaagagatcccgatggctgccggtgcggttgtggtttcactctgctccacctccgatgaaaccatcga

SEQ ID NO: 529138 - DNA, 75 bp, synthetic construct
  source 1..75: mol_type = other DNA
ttttagaagctgaacaggccgcagaaaacgcacgtcgtgaggcggagcaagctgaactggagcgtcgtggtgagt

SEQ ID NO: 529139 - DNA, 75 bp, synthetic construct
  source 1..75: mol_type = other DNA
gcgataactctgacagcggtgggtacaggtattacggcggcatgtatgacagagaagtcagaatccttaggctta

SEQ ID NO: 529140 - DNA, 75 bp, synthetic construct
  source 1..75: mol_type = other DNA
ggcttaggaatcgcagccggtgtattaggtggcgtaactactgttgccggcggattagcgatgagatatgcctaa

SEQ ID NO: 529141 - DNA, 75 bp, synthetic construct
  source 1..75: mol_type = other DNA
aaggtgttattgaataccagcccgtttttaattgcctgacatgcagagaaaccactatttatttctctcgccaat

SEQ ID NO: 529142 - DNA, 75 bp, synthetic construct
  source 1..75: mol_type = other DNA
tgttggcagcaatagttaccggatgttcatcgccacctcctcccgttcctgtggagtgggataaagccgctgccc

SEQ ID NO: 529143 - DNA, 75 bp, synthetic construct
  source 1..75: mol_type = other DNA
caatccggcactgatttctttaatgccaaaaactggcttcggcagaatggagcaaaaggtgttattgaataccag

SEQ ID NO: 529144 - DNA, 75 bp, synthetic construct
  source 1..75: mol_type = other DNA
ggttcgataaagaggcgttgatcaatgaactggacgcgatgaccgcccgcgttcgtcagcagtgggaagaaggcc

SEQ ID NO: 529145 - DNA, 75 bp, synthetic construct
  source 1..75: mol_type = other DNA
ggttacaagtcctggccaaaacatcaggtggtgctggttttggtgctctggtcggagaagaactgtctataactg

SEQ ID NO: 529146 - DNA, 75 bp, synthetic construct
  source 1..75: mol_type = other DNA
ggcagtgtaagagcgaacaacggggttctttctccagtgatggagaagcggatgattaatctgttaatcatcgtt

SEQ ID NO: 529147 - DNA, 75 bp, synthetic construct
  source 1..75: mol_type = other DNA
tcaatggttttacggtaacccctgtatgcaataatcatttctccatctttatggcaagacaaaaccgtattgctc

SEQ ID NO: 529148 - DNA, 75 bp, synthetic construct
  source 1..75: mol_type = other DNA
gcactaacgttgccagacttgctgaacaggcacctgtccattgggtatcggtcgcacaaattgaaaatagcctcg

SEQ ID NO: 529149 - DNA, 75 bp, synthetic construct
  source 1..75: mol_type = other DNA
tgaggattatctaaaaaaccccgcattctgggagaaaatgaacaatggttgggatgagttcagtatcccaaaaga

SEQ ID NO: 529150 - DNA, 75 bp, synthetic construct
  source 1..75: mol_type = other DNA
cagcgccgataacgccggaggccattgaaaacgcaattgaatacatccgcagtatcgcttttcacatcgatgaag

SEQ ID NO: 529151 - DNA, 75 bp, synthetic construct
  source 1..75: mol_type = other DNA
tggcagatgcgcttggtgtattcggtgatgcagcagtacagaaagttctggataacctgtcacagcaaaaacttg

SEQ ID NO: 529152 - DNA, 75 bp, synthetic construct
  source 1..75: mol_type = other DNA
atgacaactttcaccgacaaagaactgattaaagaaatcaaagaacgaatcagcagcctagaggttcgagacgat

SEQ ID NO: 529153 - DNA, 75 bp, synthetic construct
  source 1..75: mol_type = other DNA
acgtggagttgagcgacggcactttatcgtggttagggaacgccttgttctggatgccgctaccagaaccgccgc

SEQ ID NO: 529154 - DNA, 75 bp, synthetic construct
  source 1..75: mol_type = other DNA
cgtggagtattacagagaccatgagcaggcggcacaggcgctggaaagcggcacctggacgcagcggacgtgtgc

SEQ ID NO: 529155 - DNA, 75 bp, synthetic construct
  source 1..75: mol_type = other DNA
aagaatgctgattactggatgccagatattggtgagcaagttttgtgtatctttcatcccgcagggccgcaacaa

SEQ ID NO: 529156 - DNA, 75 bp, synthetic construct
  source 1..75: mol_type = other DNA
acaactggcctatgtgaaccagcgtctggatgacatgcctgcgacgcagcactacgcccggctggtgattgatga

SEQ ID NO: 529157 - DNA, 75 bp, synthetic construct
  source 1..75: mol_type = other DNA
cataactattcattactggcgcgcctggctgaatttcaccatttcaacctgccgctgttggtgggtatgtcacga

SEQ ID NO: 529158 - DNA, 75 bp, synthetic construct
  source 1..75: mol_type = other DNA
gtcaaagaaaccgtagaagcgatgcgggtggtggaagccactctgtttgcaaaggaaaacaaacgctatgagtaa

SEQ ID NO: 529159 - DNA, 75 bp, synthetic construct
  source 1..75: mol_type = other DNA
ctggaggcggctgcagaaaccggtttaccggtttgtctgatgcatatgcagggaaatccaaaaaccatgcaggaa

SEQ ID NO: 529160 - DNA, 75 bp, synthetic construct
  source 1..75: mol_type = other DNA
gccgccagcgccgatagcgttggaggctattgaaaatgcaattgaatacattcgcagtatcgcttttcacataga

SEQ ID NO: 529161 - DNA, 75 bp, synthetic construct
  source 1..75: mol_type = other DNA
agagcctgttctgtttcagtcctgcactcgccccacctggaatagcggtgttccgtggacggaatggaaagaacg

SEQ ID NO: 529162 - DNA, 75 bp, synthetic construct
  source 1..75: mol_type = other DNA
cgtggagttgagcgacggcactttatcgtggttagggaacgccttgtactggatgcctctaccggaaccgccgca

SEQ ID NO: 529163 - DNA, 75 bp, synthetic construct
  source 1..75: mol_type = other DNA
ccagccgcgtcttggcactccaaaatcaaaatatgtcagcgccgataacgccggaggccattgaaaacgcaattg

SEQ ID NO: 529164 - DNA, 75 bp, synthetic construct
  source 1..75: mol_type = other DNA
attatcttcaaatataggatggaaaaaaggagccgaaaacgcccttaaaaataaaatccattctcattcatttgt

SEQ ID NO: 529165 - DNA, 75 bp, synthetic construct
  source 1..75: mol_type = other DNA
tgctgcaggagcgacttcagcagatggagcgggatatggtccgtgacctgcagaaagagaaaaccctgggcggag

SEQ ID NO: 529166 - DNA, 75 bp, synthetic construct
  source 1..75: mol_type = other DNA
tcctttctgcatgacacgcagctgcagcagcgcagcggagaaacgccggatttcagcaacacgctgttcctgctc

SEQ ID NO: 529167 - DNA, 75 bp, synthetic construct
  source 1..75: mol_type = other DNA
aagcaattgaaaatctcaagcagaagttagtggagtgcaatcgctataactactgcgcagatgcagttaaagatg

SEQ ID NO: 529168 - DNA, 75 bp, synthetic construct
  source 1..75: mol_type = other DNA
acgggttctatatagccgcattggagtacgacgacgatgagccaattggcggtgtaacccactggatgcctctac

SEQ ID NO: 529169 - DNA, 75 bp, synthetic construct
  source 1..75: mol_type = other DNA
tggcctggctggaagggcgttcatgcagcgacgacagactgggtaaagccgagaatcaaccagtacgcggcaatg

SEQ ID NO: 529170 - DNA, 75 bp, synthetic construct
  source 1..75: mol_type = other DNA
tattacgattggtcgagaaacaaatggtgggcagttactgacgatggggaagaaccggcatcgaaagtaactcac

SEQ ID NO: 529171 - DNA, 75 bp, synthetic construct
  source 1..75: mol_type = other DNA
gttttgctgagcaaaatatttcgttcacgcgccatatgagctccggcaacactacagacaacggcatctttggcc

SEQ ID NO: 529172 - DNA, 75 bp, synthetic construct
  source 1..75: mol_type = other DNA
ggaagggcattcatgcagcgacgacagacagggtaaagccgagaatcaaccagtacgcggcaaccaggctgccga

SEQ ID NO: 529173 - DNA, 75 bp, synthetic construct
  source 1..75: mol_type = other DNA
gaccactgggatcgcaactggccggaagagacaaagcgacaggtgattcgtgatgcatggctgatacaccgacac

SEQ ID NO: 529174 - DNA, 75 bp, synthetic construct
  source 1..75: mol_type = other DNA
gacctgaatgatattgaaaaaataacatatataaaagcaggcaggaagtttctcgcgcaaatggatggaagacaa

SEQ ID NO: 529175 - DNA, 75 bp, synthetic construct
  source 1..75: mol_type = other DNA
gaacagaaaaaacattaaagcaaaaggttgcttttgctcagcttgaacttaatcgtcttaagtctctggaaaaat

SEQ ID NO: 529176 - DNA, 75 bp, synthetic construct
  source 1..75: mol_type = other DNA
aaccttgccgtagcaccacttttcaggcaatgaataatgtccgtaaggccgggggatggatctgttttgacccaa

SEQ ID NO: 529177 - DNA, 75 bp, synthetic construct
  source 1..75: mol_type = other DNA
gtggtcggttgtttgaagggacaccatcacaaatgtatcaatcacttaaaaagttaagtgcgttacctgacgata

SEQ ID NO: 529178 - DNA, 75 bp, synthetic construct
  source 1..75: mol_type = other DNA
acccaccatcaccacgatcacgttggcggcgtaaaagaactggtggaaaagtttccgcaaattgtggtgtatggt

SEQ ID NO: 529179 - DNA, 75 bp, synthetic construct
  source 1..75: mol_type = other DNA
cctgaaagaagccgtggagtacggtcagtcgcgaaaatggatagcgcacgcgcccttgttgccaaaggacgggga

SEQ ID NO: 529180 - DNA, 75 bp, synthetic construct
  source 1..75: mol_type = other DNA
taagctggttgcgagcggcaagctgaaaaccaacccgatgaaagggatggtagccgcggtttctgtcggtattgt

SEQ ID NO: 529181 - DNA, 75 bp, synthetic construct
  source 1..75: mol_type = other DNA
gcggccgcacgatggaaatccagcgtctgatcgctcgtgcattgcgcgccgcagtagatttgaaagccctcggtg

SEQ ID NO: 529182 - DNA, 75 bp, synthetic construct
  source 1..75: mol_type = other DNA
aatcgtcttaagtctctggagaaatcagaacgtaagaaagttgaaacaaggctaaagattatacttggcgcggaa

SEQ ID NO: 529183 - DNA, 75 bp, synthetic construct
  source 1..75: mol_type = other DNA
gacctgaatgatattgaaaaaataacgtatataaaagcaggcagaaagtttcttgctcaaatggatggaagacaa

SEQ ID NO: 529184 - DNA, 75 bp, synthetic construct
  source 1..75: mol_type = other DNA
gaacagaaaaaacattaaagcaaaaggttgcttttgctcagcttgaacttaaccgccttaagtctctggagaaat

SEQ ID NO: 529185 - DNA, 75 bp, synthetic construct
  source 1..75: mol_type = other DNA
tgctgttctacgccagtccaaaggcatcgtactgcactggtcagtcgatcaatgtcaccggcggtcaggtgatgt

SEQ ID NO: 529186 - DNA, 75 bp, synthetic construct
  source 1..75: mol_type = other DNA
gtagtaccaaaacagattaccgatcaacagctacaaattacatatacatctgttaaaacagataactataaacag

SEQ ID NO: 529187 - DNA, 75 bp, synthetic construct
  source 1..75: mol_type = other DNA
tgtccctgaaaatatccgcaacaaaattctagcaaagatccgtcgcgctattgaaaaaaataagatttcattaac

SEQ ID NO: 529188 - DNA, 75 bp, synthetic construct
  source 1..75: mol_type = other DNA
tatattgattcaattaattgatttggttaaagagaactatatattttcatttggtgtgattgttggtgtgtttgt

SEQ ID NO: 529189 - DNA, 75 bp, synthetic construct
  source 1..75: mol_type = other DNA
ggtactgaaggcgctggtcagccatccgcgtgagccgctctcccgcgataagctgatgaaccttgcccgtggtcg

SEQ ID NO: 529190 - DNA, 75 bp, synthetic construct
  source 1..75: mol_type = other DNA
atttagttgttgctctaggcgataaaaagtatgtattcacacaagttaaagaaataaattatcttgaagactact

SEQ ID NO: 529191 - DNA, 75 bp, synthetic construct
  source 1..75: mol_type = other DNA
aattcaaaaattacccaatagtctttattggctcaggcatttcaaaaagatatttagagaactacccaacgtggg

SEQ ID NO: 529192 - DNA, 75 bp, synthetic construct
  source 1..75: mol_type = other DNA
attgccattaacgacgcgcaggccgcagcgtgggcggagtatcaggcgctggaaggcgatataaccgatatggtc

SEQ ID NO: 529193 - DNA, 75 bp, synthetic construct
  source 1..75: mol_type = other DNA
atgaatggtgatcctatggctttgttcaatatgtcagaactgcaatttaatgccgtaaaagctgccgcccgcgca

SEQ ID NO: 529194 - DNA, 75 bp, synthetic construct
  source 1..75: mol_type = other DNA
agctgttaagcagccttgaacatattgtttttaaagatgaaacacagaagattaccctgacacacagaccaacgc

SEQ ID NO: 529195 - DNA, 75 bp, synthetic construct
  source 1..75: mol_type = other DNA
aaataactctatttcaattggcggcatgatgtggatagcatatgcaagtatatctttttcaattggcggaatatt

SEQ ID NO: 529196 - DNA, 75 bp, synthetic construct
  source 1..75: mol_type = other DNA
ggccagtggttatggacgtgacgaagtaaagcgcaatacggaaatattccgtgggcaaattattgatgtcacgcc

SEQ ID NO: 529197 - DNA, 75 bp, synthetic construct
  source 1..75: mol_type = other DNA
gggaaattatgctggtgaaaattcaggccagcggctacggacgtgacgaagtgaagcgcaatacggaaatatttc

SEQ ID NO: 529198 - DNA, 75 bp, synthetic construct
  source 1..75: mol_type = other DNA
gcggacgcacaatggaaatccagcgtctgattgcccgggcattgcgtgctgcggtggatttgaaagcgcttggtg

SEQ ID NO: 529199 - DNA, 75 bp, synthetic construct
  source 1..75: mol_type = other DNA
catgcgaagcgacaacggtggagataagctatacgtagtgttaagcgcgctggatggatccaactggacgacgga

SEQ ID NO: 529200 - DNA, 75 bp, synthetic construct
  source 1..75: mol_type = other DNA
ttaagcgcattcagatcctgcgtgatatgggcgtgggcttatcggtagatgattttggtacgggcttttccggat

SEQ ID NO: 529201 - DNA, 75 bp, synthetic construct
  source 1..75: mol_type = other DNA
gaaatctttaagcgcattcagatcctgcgtgatatgggcgtgggcttatcggtagatgattttggtacgggcttt

SEQ ID NO: 529202 - DNA, 75 bp, synthetic construct
  source 1..75: mol_type = other DNA
ctgaaggcgcatggcgcgggtttgatgaacaggaaaccaccgttgccgttgctcgctatgcaccgttcaacgcca

SEQ ID NO: 529203 - DNA, 75 bp, synthetic construct
  source 1..75: mol_type = other DNA
gaaggcttcattgcgatggaaagcccgaacgatcctaaaccgtcaatcaaaattgttaacggcgtcgtcaccgaa

SEQ ID NO: 529204 - DNA, 75 bp, synthetic construct
  source 1..75: mol_type = other DNA
ctcgcgcgaagcaagctaaaagacgacacggctataggggtgatcggggtaaccgctctaggatgcaacggcctg

SEQ ID NO: 529205 - DNA, 75 bp, synthetic construct
  source 1..75: mol_type = other DNA
tagcgccggaagaggtgctggctttcattcacggtaaacaggcgatcacctctttgcgccattttatggcgggca

SEQ ID NO: 529206 - DNA, 75 bp, synthetic construct
  source 1..75: mol_type = other DNA
gccacggaaaccgaaggtattaccgcacttccgggggcagtcgctttactcaatcatctgaataaagtggggatt

SEQ ID NO: 529207 - DNA, 75 bp, synthetic construct
  source 1..75: mol_type = other DNA
aagaggggatgaaagaaaagaaggagggtatccactatatgacccgagaattacatgcgataaactattcagcag

SEQ ID NO: 529208 - DNA, 75 bp, synthetic construct
  source 1..75: mol_type = other DNA
tgccaggttatcgccgtcaatgcgccggcagataccccgcggttaaatgaggtggatttggttcttcatagtctg

SEQ ID NO: 529209 - DNA, 75 bp, synthetic construct
  source 1..75: mol_type = other DNA
atcttgatggtacgctggtggactttctgcctgcggtggagcgggcatggagcaactgggcgagacgtcatgagc

SEQ ID NO: 529210 - DNA, 75 bp, synthetic construct
  source 1..75: mol_type = other DNA
cattcacggtaaacaggcgatcacctctctgcgccattttatggcgggcaaatccgaggcagacattgccgccga

SEQ ID NO: 529211 - DNA, 75 bp, synthetic construct
  source 1..75: mol_type = other DNA
atggggttacccccaatcaccgacgaagaggtggaagccgcgacctacgctcacggttcgaaagatatgccggaa

SEQ ID NO: 529212 - DNA, 75 bp, synthetic construct
  source 1..75: mol_type = other DNA
tggttctccatatataaaaggttgtctggtaactggttgggaaaatgggtttaaaggtaagaactctcctgaagg

SEQ ID NO: 529213 - DNA, 75 bp, synthetic construct
  source 1..75: mol_type = other DNA
ttggttatcagaaagggtactatttaccaaaaactgcttctgatgtatgggatgcattggttgcaaaagactgga

SEQ ID NO: 529214 - DNA, 75 bp, synthetic construct
  source 1..75: mol_type = other DNA
ttcttcttcgctggcagcttcttagcgccatactgatgtttctggctagtacgctcaacatccgttttcggcggt

SEQ ID NO: 529215 - DNA, 75 bp, synthetic construct
  source 1..75: mol_type = other DNA
ccattaagatgattttccccagcgcctcaggaaacagtagtgggcttccggcaggcgaagaaccgtttatcgtgc

SEQ ID NO: 529216 - DNA, 75 bp, synthetic construct
  source 1..75: mol_type = other DNA
ttttacgtctgctgggcgagaaaggggtgaatgcacttgaacgcctgatgggattgattctggtgatgatggcaa

SEQ ID NO: 529217 - DNA, 75 bp, synthetic construct
  source 1..75: mol_type = other DNA
tgcatggcattcagcccagcctgttgtttaagtggaaaaaacaatacctggaaggaagcctcactgctgttgctg

SEQ ID NO: 529218 - DNA, 75 bp, synthetic construct
  source 1..75: mol_type = other DNA
ttaacaatcagatcctcgatgctcgcgatcgtcaggaacagcaagagcaggaagccgctgaaattaatgccgttg

SEQ ID NO: 529219 - DNA, 75 bp, synthetic construct
  source 1..75: mol_type = other DNA
cctccttatgatgatccgaaagtcattgccggccagggaaccattggtctggaaattatggaagatctctatgat

SEQ ID NO: 529220 - DNA, 75 bp, synthetic construct
  source 1..75: mol_type = other DNA
ataccccgtggtcaaaaggatttctcgcgtcatcctatgcttctcgcggcttaaaaatgcgctttacttccggct

SEQ ID NO: 529221 - DNA, 75 bp, synthetic construct
  source 1..75: mol_type = other DNA
atgtgtccaggccaaaaaaggtaaagcgtcagccaaagcaatttgttaagaccgtgaatggcgtaacccttgaac

SEQ ID NO: 529222 - DNA, 75 bp, synthetic construct
  source 1..75: mol_type = other DNA
ccatgccattcctcacgcgtcaggggcaggtgcgttacaaagtgatgatggggcgtccggaagactggaaccaca

SEQ ID NO: 529223 - DNA, 75 bp, synthetic construct
  source 1..75: mol_type = other DNA
tcaacaaccagatcctcgacgttcgcgaacgccaggaacagcaagagctggaagccgctgaattacaagccgtta

SEQ ID NO: 529224 - DNA, 75 bp, synthetic construct
  source 1..75: mol_type = other DNA
gcgttaattgtcgccacgttccaggccaccattgtgctggcgattggtatctgggcgtatcaaatccccttcgcc

SEQ ID NO: 529225 - DNA, 75 bp, synthetic construct
  source 1..75: mol_type = other DNA
cgtttatcggcgtgtttgtctttatgatgcccgccattctcctttccggttacgtttcgccggtggaaaacatgc

SEQ ID NO: 529226 - DNA, 75 bp, synthetic construct
  source 1..75: mol_type = other DNA
gaagaattctgttttaagccagttaaattcaagtgagcataatttcagtcattctgaaatgcaaggaaaaatata

SEQ ID NO: 529227 - DNA, 75 bp, synthetic construct
  source 1..75: mol_type = other DNA
ggatgccattctggatgagctgctcggcgtaccggcagagccactgactgaagcgggagataccaccgcagagaa

SEQ ID NO: 529228 - DNA, 75 bp, synthetic construct
  source 1..75: mol_type = other DNA
ggcgaacagccagagccggaaccgcaaccggaagatatcacctcagaaaacggcgatattcagccggaatcaccg

SEQ ID NO: 529229 - DNA, 75 bp, synthetic construct
  source 1..75: mol_type = other DNA
tggcagcatcaccaaaaagtggttacgttgatagacgataatattcgcgaagagatattacgcccggagtggata

SEQ ID NO: 529230 - DNA, 75 bp, synthetic construct
  source 1..75: mol_type = other DNA
gaacaatggagaaattctgttttaagccagttaaattcagataaacacaattccagtcattctgaaatgcagggt

SEQ ID NO: 529231 - DNA, 75 bp, synthetic construct
  source 1..75: mol_type = other DNA
aaatatgaagataaagttaagtctaatatactgtattttccttttaaacctgcattgtatgataaatatctattt

SEQ ID NO: 529232 - DNA, 75 bp, synthetic construct
  source 1..75: mol_type = other DNA
aactgggtgatacaggcgatataagtcaggcatatatcgaatgggcacagttaaaacaggaaaaggataaacttg

SEQ ID NO: 529233 - DNA, 75 bp, synthetic construct
  source 1..75: mol_type = other DNA
gatatatgacaacccgggggtgctgaactctgtgataggttttttatcagcacgtaaatctaaaaaacaaccacc

SEQ ID NO: 529234 - DNA, 75 bp, synthetic construct
  source 1..75: mol_type = other DNA
tgtaaaaaacaaccacctcatggagttgttcttgtcattccggttgataagttacttgctcatgattacacttat

SEQ ID NO: 529235 - DNA, 75 bp, synthetic construct
  source 1..75: mol_type = other DNA
cccaacaatttcgaacaattcgttggtggtttttcagagatttaagcgtactggagttgtcaggtaagatatatg

SEQ ID NO: 529236 - DNA, 75 bp, synthetic construct
  source 1..75: mol_type = other DNA
ctgctgaagcagtgaaggaagtcctgcgctctgaagaagtcagaagcgcactgaaacagcaacttcggcagaacc

SEQ ID NO: 529237 - DNA, 75 bp, synthetic construct
  source 1..75: mol_type = other DNA
gaactgggacgcttgctgatggacagtcatcgcaatgatattttgctggttgagcagatagaccgcctgacacgt

SEQ ID NO: 529238 - DNA, 75 bp, synthetic construct
  source 1..75: mol_type = other DNA
gtcaccacaatgatattttattggtcgagcagatagaccgtctgacacgtctcagcaacagcgactggatgacgc

SEQ ID NO: 529239 - DNA, 75 bp, synthetic construct
  source 1..75: mol_type = other DNA
catcgacggaagatcagttcgccgagcgggcaaaagagatgctggagcagttcgttcaggaacgggggcataaaa

SEQ ID NO: 529240 - DNA, 75 bp, synthetic construct
  source 1..75: mol_type = other DNA
tgaactggtacaggcaaccagcggcacgctgatgattttgcgccataccgcaccgctaagttcggctgatcgcga

SEQ ID NO: 529241 - DNA, 75 bp, synthetic construct
  source 1..75: mol_type = other DNA
aagaagatgtcacaaagcagccgtgggcgaaaaacggcttcgataaagtgttgctggacccggcgcgagcaggtg

SEQ ID NO: 529242 - DNA, 75 bp, synthetic construct
  source 1..75: mol_type = other DNA
tggattactgccacaggaaaacgcggaagttactgttactgaagataaaaaacagtacgcccgcgctaaagtcgt

SEQ ID NO: 529243 - DNA, 75 bp, synthetic construct
  source 1..75: mol_type = other DNA
tgaacagggctgatgaagatggaatattgtgggtcagactcgtcgttaatcttattgttacggatcctgctgacc

SEQ ID NO: 529244 - DNA, 75 bp, synthetic construct
  source 1..75: mol_type = other DNA
atgaaaggtattatcctggcgggcggttccggtacccgattgcatccgattacgcgcggcgtatcgaagcaactg

SEQ ID NO: 529245 - DNA, 75 bp, synthetic construct
  source 1..75: mol_type = other DNA
ctgctgaagcggtgaaggatgtcctgcgctctgaagaagtcagaagcgtactgaaacagcaactccgccagaatc

SEQ ID NO: 529246 - DNA, 75 bp, synthetic construct
  source 1..75: mol_type = other DNA
gcttcgaatgccctgaaaaagtggactggagtaaagccgggatcgacaaagtcgccatttttcttaatgcagagg

SEQ ID NO: 529247 - DNA, 75 bp, synthetic construct
  source 1..75: mol_type = other DNA
tagcttaggagcggtgttctttcctcgattttatgatgagttcgtttctggagatggcacaagaactctggatat

SEQ ID NO: 529248 - DNA, 75 bp, synthetic construct
  source 1..75: mol_type = other DNA
ctgccgctctatctcaatgccgacagtccggtggcctgtgcgctgcaccgggctttaacgcttggtacgcagcag

SEQ ID NO: 529249 - DNA, 75 bp, synthetic construct
  source 1..75: mol_type = other DNA
caatttcagtcattctgaaatgcaaggtaaaatatataaaaatattattggttttttaaatggtcctgctaacgg

SEQ ID NO: 529250 - DNA, 75 bp, synthetic construct
  source 1..75: mol_type = other DNA
ccagttatcaccgtactaccagaattgcttttacgccaggtaccggattggcacgcttgcagagaatgattgttg

SEQ ID NO: 529251 - DNA, 75 bp, synthetic construct
  source 1..75: mol_type = other DNA
cggacgagatcgccggctaacgtcttcagaagaacgtcgcctttctcgctatttccgcgaaaaaaatctgatgtt

SEQ ID NO: 529252 - DNA, 75 bp, synthetic construct
  source 1..75: mol_type = other DNA
tttacttgatatcaaatatattcaatgcattaattccatttatattgcttcctattttgacaagaaacctaactc

SEQ ID NO: 529253 - DNA, 75 bp, synthetic construct
  source 1..75: mol_type = other DNA
actcgtaccacatattattggtatcttctttctaagcgcaattgataggattttaatcaatagtgaacttggtgt

SEQ ID NO: 529254 - DNA, 75 bp, synthetic construct
  source 1..75: mol_type = other DNA
cgatactgcggtgatccgtcgtgcccgtgcgctgggtatgtattgtgcgcctggcgtcgctacgcccaccgaagc

SEQ ID NO: 529255 - DNA, 75 bp, synthetic construct
  source 1..75: mol_type = other DNA
ggcattcgcgcgatgtgcctctctcccgccgggcgcgcaacttcctccagatgttgcctgtggcgctgcatggcg

SEQ ID NO: 529256 - DNA, 75 bp, synthetic construct
  source 1..75: mol_type = other DNA
ggacaaatacctgaaaaccgtctccgtacacaaaaaagggcaccttcaggagttttatcgcgcgaatgtcatccg

SEQ ID NO: 529257 - DNA, 75 bp, synthetic construct
  source 1..75: mol_type = other DNA
gaactgccgggtgcgccgtcacaggaagaggcggtaattgctttcggtaagttcaaactcaacctcgggacgcgt

SEQ ID NO: 529258 - DNA, 75 bp, synthetic construct
  source 1..75: mol_type = other DNA
atggacgaaatcaccaccgtggacatcgccgcatatcgcgatatgcgactcgctgaaatcaacccacggacagga

SEQ ID NO: 529259 - DNA, 75 bp, synthetic construct
  source 1..75: mol_type = other DNA
ctattgcggcacagaaaggcgaacgcgtcccatctcccggagctttgcctgtaaacgaccctgactacataatga

SEQ ID NO: 529260 - DNA, 75 bp, synthetic construct
  source 1..75: mol_type = other DNA
gtcattcccgtgacgtgccattatctcgccgggcacgcaatttcctccagatgctgcccgtagcgctgcacggag

SEQ ID NO: 529261 - DNA, 75 bp, synthetic construct
  source 1..75: mol_type = other DNA
gcttctttaacaggtttaaatacagttggcgctgcaaatcggcgttattatgatataacctcaaagagtggtttg

SEQ ID NO: 529262 - DNA, 75 bp, synthetic construct
  source 1..75: mol_type = other DNA
ttccccatcaggaaagcgtgaattgattctgtcgctttcctcatcgctcatcagttgggataaaatggttaagga

SEQ ID NO: 529263 - DNA, 75 bp, synthetic construct
  source 1..75: mol_type = other DNA
ccaataaatcagggacgaatgcatctgaatatgattcatcatacatattatcatcattaagatctaatataatgg

SEQ ID NO: 529264 - DNA, 75 bp, synthetic construct
  source 1..75: mol_type = other DNA
acacttacatcacaacattccggtctttatagtgattagtggatgtgagcacatcagtggatattcagtgctggc

SEQ ID NO: 529265 - DNA, 75 bp, synthetic construct
  source 1..75: mol_type = other DNA
tcagagaccgaacgcaaaacaaggatgagttaataaatgtacaggggcaattagacgtactgaatcagaccctgc

SEQ ID NO: 529266 - DNA, 75 bp, synthetic construct
  source 1..75: mol_type = other DNA
gagaatatcaaagaggcatatggacgtgatacggttccgggcgcgttttcatcttttgtgaagtacctggatgaa

SEQ ID NO: 529267 - DNA, 75 bp, synthetic construct
  source 1..75: mol_type = other DNA
tcagtcattaacagcaataatagagagccggtgattgattctgtatgggatatttatgagcggcagatttatcaa

SEQ ID NO: 529268 - DNA, 75 bp, synthetic construct
  source 1..75: mol_type = other DNA
tttatatttttaataacacaaaaatgtacacatccccagattactttacggtatggatggattggttgaatgtgc

SEQ ID NO: 529269 - DNA, 75 bp, synthetic construct
  source 1..75: mol_type = other DNA
gagattttactatttcctgataaactgagtgatatgaaggattcactcgatgtatttatttcttcgttttgtatc

SEQ ID NO: 529270 - DNA, 75 bp, synthetic construct
  source 1..75: mol_type = other DNA
aatggcagattcgtgagaaggctttttggtttggaatattacagattagtcagagtgtcattgtatccgtgttaa

SEQ ID NO: 529271 - DNA, 75 bp, synthetic construct
  source 1..75: mol_type = other DNA
tcggatggagaggatgagttaatgacaaaggacttttctccggaatcaagaagttttcttgaatcaatggggata

SEQ ID NO: 529272 - DNA, 75 bp, synthetic construct
  source 1..75: mol_type = other DNA
tggctgggatgtcctgtttattttacgttgggatggattgatgatgggaccccaaaaggtatgttcaggtttgat

SEQ ID NO: 529273 - DNA, 75 bp, synthetic construct
  source 1..75: mol_type = other DNA
ggtggtgtgtctgctcattatctgcattacgattctgacattcacactgacccgacaaacgctctacgaactgcg

SEQ ID NO: 529274 - DNA, 75 bp, synthetic construct
  source 1..75: mol_type = other DNA
ggcgtcggtgattctggagaatctgccgccccggccctttaacatccggatggtcagggagacggcggacagcac

SEQ ID NO: 529275 - DNA, 75 bp, synthetic construct
  source 1..75: mol_type = other DNA
gaaatcagggaaagattgcggcgaacagtaaggaaggaacaattacgttgaaatgtgataatcttttcggcgaca

SEQ ID NO: 529276 - DNA, 75 bp, synthetic construct
  source 1..75: mol_type = other DNA
aggcacacctgattttactggagaaagaaaatctacctggtttatttcagataccgtgattgcaaatattggcgg

SEQ ID NO: 529277 - DNA, 75 bp, synthetic construct
  source 1..75: mol_type = other DNA
tttacgtggtcaatcaggggacgccgctggcaaacggtacgccggagcaaatccgtaataacccggacgtgatcc

SEQ ID NO: 529278 - DNA, 75 bp, synthetic construct
  source 1..75: mol_type = other DNA
ttatataacatttttagttcgtcccaaccctgttgctttaaaatatggtatcctatcagcggtgatctttacaat

SEQ ID NO: 529279 - DNA, 75 bp, synthetic construct
  source 1..75: mol_type = other DNA
tgaccttagatatggtgcgtgatgcacaggttaggctcccacaaattaaagaacaaaagagaatcgcaggtgttt

SEQ ID NO: 529280 - DNA, 75 bp, synthetic construct
  source 1..75: mol_type = other DNA
aggaataactattttgatattagtcagtgcatatcactacaaaaggaagcgatcctaaaatgctttctaataaag

SEQ ID NO: 529281 - DNA, 75 bp, synthetic construct
  source 1..75: mol_type = other DNA
tgagcagatctacatgctctctttatctgtgcctttatctggctggtgggggaatagttacgccacatattccgt

SEQ ID NO: 529282 - DNA, 75 bp, synthetic construct
  source 1..75: mol_type = other DNA
aggcgtaacgttaagccaggagttgggtgaaaccatagctcttgttaaagcaccaggggctgccgggttagaaat

SEQ ID NO: 529283 - DNA, 75 bp, synthetic construct
  source 1..75: mol_type = other DNA
caatactgctcgtcaaggcacaaataataactatgccagtgataacacccgtgagcagatctacatgctctcctt

SEQ ID NO: 529284 - DNA, 75 bp, synthetic construct
  source 1..75: mol_type = other DNA
cacctacggtctggtttttctgctttcaggacgatgtcatcattcggcgggtgtcggtcgtttgttttagtttat

SEQ ID NO: 529285 - DNA, 75 bp, synthetic construct
  source 1..75: mol_type = other DNA
tggacgtaaccatcaaagaagaagacggtagcgaacaacgatttactcaaccttatgcgtcgttagccatcctca

SEQ ID NO: 529286 - DNA, 75 bp, synthetic construct
  source 1..75: mol_type = other DNA
ttgggccgttggtggagatataagtggatcacttttcatccgtcattgacagttgatgttagcgtgggtgaattg

SEQ ID NO: 529287 - DNA, 75 bp, synthetic construct
  source 1..75: mol_type = other DNA
tcaaaaagctaattaaaaaaaatatttttcctgagctatacaatgagcaatgcaataaaatcccctcctcatcga

SEQ ID NO: 529288 - DNA, 75 bp, synthetic construct
  source 1..75: mol_type = other DNA
aacatcacggtaaacaacagcatcacgtccaccgagggtaagctgaatgttaatctgtcgggcgccaggaccagc

SEQ ID NO: 529289 - DNA, 75 bp, synthetic construct
  source 1..75: mol_type = other DNA
ttggtgtgctcttgcataacaccaccctgaacgccagtcaggggaatattgcggttgatgcccagtctgcgactt

SEQ ID NO: 529290 - DNA, 75 bp, synthetic construct
  source 1..75: mol_type = other DNA
ctgctgtcagggctggtaatgatggcgaatccggctctggctgccgggttgccggtcgggggacagattgtgggt

SEQ ID NO: 529291 - DNA, 75 bp, synthetic construct
  source 1..75: mol_type = other DNA
ccgtatcacaactccttatttaacatattattccctcctttcacttcttcgaggaatcgtctacacattaccaga

SEQ ID NO: 529292 - DNA, 75 bp, synthetic construct
  source 1..75: mol_type = other DNA
gggaacagtacgagtgggaatgccatcaaccttacaggcactgccacgctgacggccagtaacattactcttacc

SEQ ID NO: 529293 - DNA, 75 bp, synthetic construct
  source 1..75: mol_type = other DNA
acggcgcccgcattgacgtttctgcaacgcagcagggtaacggcggtacggctgtgctgtggtcagacagctaca

SEQ ID NO: 529294 - DNA, 75 bp, synthetic construct
  source 1..75: mol_type = other DNA
cagttctttgccgtgatgcaaagatcgcttggcaggctttaggtagaataaactataccagaaagccaagtgaga

SEQ ID NO: 529295 - DNA, 75 bp, synthetic construct
  source 1..75: mol_type = other DNA
ttacagacatatagagcagatactataacgctggattgtgattctgaagagtttcaaatacatggtggtttatgg

SEQ ID NO: 529296 - DNA, 75 bp, synthetic construct
  source 1..75: mol_type = other DNA
ttttggtttagctccaaaacatttagagcatgtgttaggaaaaaaattcttgacagatctacctgcaggcacagc

SEQ ID NO: 529297 - DNA, 75 bp, synthetic construct
  source 1..75: mol_type = other DNA
cattaagtaattacaatttacaacctgaagtttatttattttatgaacatggccttttaaagactcaaatacatc

SEQ ID NO: 529298 - DNA, 75 bp, synthetic construct
  source 1..75: mol_type = other DNA
ttcaaaatgtaactgacttaaatagtcaagtttcctctaaggaacagaaagttgatgaattacagaatcaaaaca

SEQ ID NO: 529299 - DNA, 75 bp, synthetic construct
  source 1..75: mol_type = other DNA
ggccgctgattatctggtaacaggtaaaaagccggaagacagataccgtgacgcccagcaacaactgaaagaagc

SEQ ID NO: 529300 - DNA, 75 bp, synthetic construct
  source 1..75: mol_type = other DNA
gagaattacgcgatgaagatggctttacccctgacgttattcaggctcagatccttcatggttttccctacggtt

SEQ ID NO: 529301 - DNA, 75 bp, synthetic construct
  source 1..75: mol_type = other DNA
tcgtcgaattcgccaaagacttgatggataaagaaggtaaaggtctgattgaagcgacgcttgatgcggtgcgga

SEQ ID NO: 529302 - DNA, 75 bp, synthetic construct
  source 1..75: mol_type = other DNA
accggtgtacgccatatcaaggaagtttttatccttatccccaagaaaaacagtaagtccacgctggccgcgggg

SEQ ID NO: 529303 - DNA, 75 bp, synthetic construct
  source 1..75: mol_type = other DNA
gtattcttcggcaggatatcattctctaccaagtgttctggattcatacagagatggtcgaaatggttcatttga

SEQ ID NO: 529304 - DNA, 75 bp, synthetic construct
  source 1..75: mol_type = other DNA
ggagtatcaacaggctcaaggaccggctggctggacggctcagcaaggattttatgtataccggaatgagcgatt

SEQ ID NO: 529305 - DNA, 75 bp, synthetic construct
  source 1..75: mol_type = other DNA
tccagatagggaaaaattcagcaggcaacacaaatacagcatcatgctatactgactttgatttatacttcggtc

SEQ ID NO: 529306 - DNA, 75 bp, synthetic construct
  source 1..75: mol_type = other DNA
tcggggcgtgttgatgccggggtgcatgtgatggtgatacgtgtccagaaattttctaacgatgatatctggctt

SEQ ID NO: 529307 - DNA, 75 bp, synthetic construct
  source 1..75: mol_type = other DNA
tgaggatttccctgaagtaaaaatatggaatctatctctcggacagaaagaagcctgccatagtgataatttttc

SEQ ID NO: 529308 - DNA, 75 bp, synthetic construct
  source 1..75: mol_type = other DNA
aattttttccagagctcatttaaaaaatggcccaatataccggcggtggctagagttactcttcatgaaaaagct

SEQ ID NO: 529309 - DNA, 75 bp, synthetic construct
  source 1..75: mol_type = other DNA
ggaagatggttgaataactatgctggttttcctcaatgccaagctgaaattgttgatgttgcagcctttcccaaa

SEQ ID NO: 529310 - DNA, 75 bp, synthetic construct
  source 1..75: mol_type = other DNA
gcacatgtagattgtgccgactccattgtaaaagcaaaccaaccatcatccttttccagaagaggccccgggcct

SEQ ID NO: 529311 - DNA, 75 bp, synthetic construct
  source 1..75: mol_type = other DNA
aagtaccctcaaggcacacaagggaatacgtggagactaaaaatagatgtgcaacgtagagcagagcaagataaa

SEQ ID NO: 529312 - DNA, 75 bp, synthetic construct
  source 1..75: mol_type = other DNA
ttgataaaatcgaacccttcatttgtgacagaatagcagatgagggggccaaaacatatatcttgaaattatttg

SEQ ID NO: 529313 - DNA, 75 bp, synthetic construct
  source 1..75: mol_type = other DNA
ctgcggaccgggtaccgtatcgctggcgctggctgacaaactcacgacgatttatggcgttgattacagtcaggg

SEQ ID NO: 529314 - DNA, 75 bp, synthetic construct
  source 1..75: mol_type = other DNA
ttgatgaagctgtttatgagggactttaccggaccgtgggaaaacgccggatgagtcagttcattgaagatttgt

SEQ ID NO: 529315 - DNA, 75 bp, synthetic construct
  source 1..75: mol_type = other DNA
gtgaccaggcgcggatcgtttttgatgatgcgcgtcagatgtgccttttatcccgaccgttacgcaggcgggtga

SEQ ID NO: 529316 - DNA, 75 bp, synthetic construct
  source 1..75: mol_type = other DNA
gcagtcgctgcgggcacgctggccggaggtaaaaattattatcgccggtgataacgattttcaggacgggggcga

SEQ ID NO: 529317 - DNA, 75 bp, synthetic construct
  source 1..75: mol_type = other DNA
cctttcgccaacagcgtgatgcctggcttaactggccgtccagggtggcgccgctaatggctgctgatctggatg

SEQ ID NO: 529318 - DNA, 75 bp, synthetic construct
  source 1..75: mol_type = other DNA
atcatggaaatcatcgaagggacatcgcaaattcatgaaatccaaattgcgatgaattacatgatggggagtgaa

SEQ ID NO: 529319 - DNA, 75 bp, synthetic construct
  source 1..75: mol_type = other DNA
aattctcgtcgtttggccggaagggctggcgtcaatgaagattgggcatggactggaagagatgctgccaccgga

SEQ ID NO: 529320 - DNA, 75 bp, synthetic construct
  source 1..75: mol_type = other DNA
gcatagttcatctggttgcacactatcagagcattgcaacggccgctgaacagctcaataaagtaccttcggcgt

SEQ ID NO: 529321 - DNA, 75 bp, synthetic construct
  source 1..75: mol_type = other DNA
attttcagcacaggcagtggatacgacgattactgtgacgggtaatgttttgcaaagaacatgtaatgtaccagg

SEQ ID NO: 529322 - DNA, 75 bp, synthetic construct
  source 1..75: mol_type = other DNA
ggcggggtttacgttctccaggatgaagtgatagggcgcgaagcccagtcagtcatcttacaaacatcgagtgtg

SEQ ID NO: 529323 - DNA, 75 bp, synthetic construct
  source 1..75: mol_type = other DNA
aggaatatacagccgccctgaccccgaaagatgcgggtaatcaggtaggccgggctgtgaaccgctttgcactgg

SEQ ID NO: 529324 - DNA, 75 bp, synthetic construct
  source 1..75: mol_type = other DNA
atttgaacaaaaaattaatgctgctaaagcatatagtgaaattaaatatgatggtaagtataaagacttactgga

SEQ ID NO: 529325 - DNA, 75 bp, synthetic construct
  source 1..75: mol_type = other DNA
aaatatcttcatgttgaagattatgacttgtggttgaggttaattaatcaatacaaaatagctaatatcaaagat

SEQ ID NO: 529326 - DNA, 75 bp, synthetic construct
  source 1..75: mol_type = other DNA
agcttaagaaagcacaagcgaaagcacgggcgctgatagacaccgcgaagttattagacctgaaatcaaatccat

SEQ ID NO: 529327 - DNA, 75 bp, synthetic construct
  source 1..75: mol_type = other DNA
tttctgcactacctagaattattgagtatgcttacgtattagtgcgatcttctgatcaaagaattagtgggatta

SEQ ID NO: 529328 - DNA, 75 bp, synthetic construct
  source 1..75: mol_type = other DNA
cgaccacagggggcaaaaacattaaacttgcagcctcgcagagctacgggttatatcactggaaacccgttggag

SEQ ID NO: 529329 - DNA, 75 bp, synthetic construct
  source 1..75: mol_type = other DNA
acctgtgcaggaagacggaagcgtggctggttaagcgccaggcaaaagatcagctacagtgcgtagagcaggggc

SEQ ID NO: 529330 - DNA, 75 bp, synthetic construct
  source 1..75: mol_type = other DNA
cactgcctacgccgctggtgggtttaactgggagaaccaggtagacctggcgaagcaatgtgtatctgcctttca

SEQ ID NO: 529331 - DNA, 75 bp, synthetic construct
  source 1..75: mol_type = other DNA
aggcatatgctcttttttgaaatttatcggtggctaccgttaatattcgctgttcccattgcaagctcctggtgg

SEQ ID NO: 529332 - DNA, 75 bp, synthetic construct
  source 1..75: mol_type = other DNA
atagatgcttctcatattggtccttcatgggggacagagtataaagtcaagactaatggaaagattgaggtttcg

SEQ ID NO: 529333 - DNA, 75 bp, synthetic construct
  source 1..75: mol_type = other DNA
aaataacgcccttgccggtgccgcaggcgctgccaccggcgagatggtgggaatgattgccacacagatgtacgg

SEQ ID NO: 529334 - DNA, 75 bp, synthetic construct
  source 1..75: mol_type = other DNA
gctggtcgtgcttcgcagccataactttgtatcggctgagcaggctgccgcctttctgggcgtggtgccgatcga

SEQ ID NO: 529335 - DNA, 75 bp, synthetic construct
  source 1..75: mol_type = other DNA
tagggagtctctacgggtcgtttgccttgctggctataaagctcgcaaggcctgcggagcaggttacacagcgtg

SEQ ID NO: 529336 - DNA, 75 bp, synthetic construct
  source 1..75: mol_type = other DNA
tacacgacaacgtctggtcgcatggtagggataccggtttttcttttgcgcaaaaatgggcagtaccaagaaccg

SEQ ID NO: 529337 - DNA, 75 bp, synthetic construct
  source 1..75: mol_type = other DNA
tattggttttacaggttcttctactgttcctcattctgaaaaaatagagatgaacggcgatactacaaaggaaat

SEQ ID NO: 529338 - DNA, 75 bp, synthetic construct
  source 1..75: mol_type = other DNA
tgaataactgccttgacgagatcgtgtatttttttaccaggctggaatataaggtggttatctttgaagatcttg

SEQ ID NO: 529339 - DNA, 75 bp, synthetic construct
  source 1..75: mol_type = other DNA
tttgcaggaaaaaatatcggagtgtgcctttactgtcgatattgaaaaacttcagtgtcctggtgatgcgcttca

SEQ ID NO: 529340 - DNA, 75 bp, synthetic construct
  source 1..75: mol_type = other DNA
acggggagtcgtgctgctcattctcgctcttcgtcgagaaattcttttcgtggcgggggcggatcttcaggaggc

SEQ ID NO: 529341 - DNA, 75 bp, synthetic construct
  source 1..75: mol_type = other DNA
ctggcttacgcgccgaacgcaaagtcatcagcaagttaagcccccgaagttacctaaaaagaagcctgatcccga

SEQ ID NO: 529342 - DNA, 75 bp, synthetic construct
  source 1..75: mol_type = other DNA
tctcgcggtagtttttaatatgtgccgcgcatttcctatgatgctggcccccaaaaataaaaacactaaagtgaa

SEQ ID NO: 529343 - DNA, 75 bp, synthetic construct
  source 1..75: mol_type = other DNA
aagcaatcctttaggggcaagtatgaaaactttatcaaaatatgcccaggcatgtggcgcaacaattaatattaa

SEQ ID NO: 529344 - DNA, 75 bp, synthetic construct
  source 1..75: mol_type = other DNA
gtatccaggttccccgccgcgcaagcccccgcacccgtattccggcgggttctgttgggcttgccggagaattca

SEQ ID NO: 529345 - DNA, 75 bp, synthetic construct
  source 1..75: mol_type = other DNA
aataaaatacaaatcggttttaccagataataacaccgaaaaatttatagcgtcgggttcattatttacaattta

SEQ ID NO: 529346 - DNA, 75 bp, synthetic construct
  source 1..75: mol_type = other DNA
acctatgcgggaagatggaagcgtggctggttaagcgccaagcaaaagatcaactacagagcgcagagcaggggt

SEQ ID NO: 529347 - DNA, 75 bp, synthetic construct
  source 1..75: mol_type = other DNA
gcctgtattggggcagtcatccccggaagtttatgatggcgaccgctatgacctgctgtatatgaaaattatctg

SEQ ID NO: 529348 - DNA, 75 bp, synthetic construct
  source 1..75: mol_type = other DNA
ctataccactggatgatgaaaagagtgtccatgaacgagtggataatgcccgtattgatttacgctcaaaatact

SEQ ID NO: 529349 - DNA, 75 bp, synthetic construct
  source 1..75: mol_type = other DNA
tatccggcctacggagggtgcgggaatttgtaggcctgataagacgcgcaagcgtcgcatcaggcatctggcacc

SEQ ID NO: 529350 - DNA, 75 bp, synthetic construct
  source 1..75: mol_type = other DNA
tgagaggacgctgcgtaacgtggtgtgtgaaggatttgatgacagcgtgatcctgccgccgggggcggtgatgac

SEQ ID NO: 529351 - DNA, 75 bp, synthetic construct
  source 1..75: mol_type = other DNA
cacaccgctatttagcgatgtggatgagttatacagtttgctggaagaggcggcgcaagcggaggctgaagagta

SEQ ID NO: 529352 - DNA, 75 bp, synthetic construct
  source 1..75: mol_type = other DNA
agtcatggttatgtggccgaagcgacaggtagcattaaagatgggccctggccttgaagagatactgccaccaga

SEQ ID NO: 529353 - DNA, 75 bp, synthetic construct
  source 1..75: mol_type = other DNA
aactgcgccgccgtgtgcaaattggcctgaacaagggcgaagcgaagaacgcgctggcccgagccgtgtttctga

SEQ ID NO: 529354 - DNA, 75 bp, synthetic construct
  source 1..75: mol_type = other DNA
cacggcgatgccaaacattatccgactctcgccagtctgatcggcggcaacatcaacgtgaagcatattcgcgcc

SEQ ID NO: 529355 - DNA, 75 bp, synthetic construct
  source 1..75: mol_type = other DNA
actttccacttgttctcggccttggccgagttcgagcggaatctgattcgggagcggactcaagcaggcttggct

SEQ ID NO: 529356 - DNA, 75 bp, synthetic construct
  source 1..75: mol_type = other DNA
tttacgaaggtgtggcgttcagccatctctatcacaccgaacgtttacggaacatcaatccggatttgagtcgca

SEQ ID NO: 529357 - DNA, 75 bp, synthetic construct
  source 1..75: mol_type = other DNA
gctagtccgacgtctgccagtaatcttgaatggtttatcaataatttcatggagaacgaccgggaaaccgctgct

SEQ ID NO: 529358 - DNA, 75 bp, synthetic construct
  source 1..75: mol_type = other DNA
tgtggaaactgaagcgccgcggtgaagcggataacaaggggtcgatgtggtggctgactcaggctggtgaaagtg

SEQ ID NO: 529359 - DNA, 75 bp, synthetic construct
  source 1..75: mol_type = other DNA
ccatctctcccggcaacatttattgccgcttttgtttacatattctgccgctaaacaattccccattcctggcgt

SEQ ID NO: 529360 - DNA, 75 bp, synthetic construct
  source 1..75: mol_type = other DNA
gttgaaaacgaagagatccgcgaggcggtgctctctttggggatcgattatatgcagggttatcttattggtaag

SEQ ID NO: 529361 - DNA, 75 bp, synthetic construct
  source 1..75: mol_type = other DNA
ggcggtgccggggtttgtcaccatcctcgtctttgccgggatgttcaacgactcctttggggtcatcaacaacgc

SEQ ID NO: 529362 - DNA, 75 bp, synthetic construct
  source 1..75: mol_type = other DNA
tgctgtctgtttttgtcgtcggcctggcgctatggcagttccgcgccaccaaatctttcaaaaatgacgacatgg

SEQ ID NO: 529363 - DNA, 75 bp, synthetic construct
  source 1..75: mol_type = other DNA
ttggcgacgcgcgcgggcccgggcggcatgcgtggtgcggcctgctacttgcaatcgtgccgggtttcggtcagt

SEQ ID NO: 529364 - DNA, 75 bp, synthetic construct
  source 1..75: mol_type = other DNA
acggggaatcgtaatgctcattctcgctcttcgtcgagaaattctttccgcggtggtggtggttcttcaggaggc

SEQ ID NO: 529365 - DNA, 75 bp, synthetic construct
  source 1..75: mol_type = other DNA
accatctttttgttgttcgccctgacaaggctgatagtcactatatttgctcatttttaaatagcttccatggtc

SEQ ID NO: 529366 - DNA, 75 bp, synthetic construct
  source 1..75: mol_type = other DNA
tatcttcctgagattgaggattatcaccgaagcgataagttaccagatgaagaggcattgctcgctattgctgat

SEQ ID NO: 529367 - DNA, 75 bp, synthetic construct
  source 1..75: mol_type = other DNA
tattatgatggctttgcgatgcctcgaacaggcccttttgcaggttcagaacactggtctcatttataatgttac

SEQ ID NO: 529368 - DNA, 75 bp, synthetic construct
  source 1..75: mol_type = other DNA
attgacttcccaagtgtccgctcgctagcggttcctaaagttttacctctagcccaaaaatacatcggggataaa

SEQ ID NO: 529369 - DNA, 75 bp, synthetic construct
  source 1..75: mol_type = other DNA
ccgaacaattgtctgaaaggcggattgatccttggcactatcaaccgcgatttgaaagacaaattaataagataa

SEQ ID NO: 529370 - DNA, 75 bp, synthetic construct
  source 1..75: mol_type = other DNA
gggttacgaattggcgtatatcaaggcggactctgaatgtaacgggatgtttgtcagggcgtaccgggtctatac

SEQ ID NO: 529371 - DNA, 75 bp, synthetic construct
  source 1..75: mol_type = other DNA
aactggaggctaaagggctgtaccgaagagcgacggcgcggtgggctgaggttatgcaactggtgaacaccgata

SEQ ID NO: 529372 - DNA, 75 bp, synthetic construct
  source 1..75: mol_type = other DNA
tcgccagcttcgcaaatccgggcgcgcgtctggacgtttgacccgtctgagtctatcgacattgcttttttttcc

SEQ ID NO: 529373 - DNA, 75 bp, synthetic construct
  source 1..75: mol_type = other DNA
cgcggggagaacccggaagaagtacgcctgccgcccctgtcagaccgagtaaacgttatggcagtcagagagcat

SEQ ID NO: 529374 - DNA, 75 bp, synthetic construct
  source 1..75: mol_type = other DNA
atctgttattgctttattaatgtgttcaccaagtcgtgcctcagagattttggctttacctgctgactgtgaaat

SEQ ID NO: 529375 - DNA, 75 bp, synthetic construct
  source 1..75: mol_type = other DNA
taaattaaagcgcacgagtcttgatggcggagtctcgtttctgaactactctgatagatactatacgctacataa

SEQ ID NO: 529376 - DNA, 75 bp, synthetic construct
  source 1..75: mol_type = other DNA
gggggcacttcgttcctgaatccaaaagacgggcattacacactgagaaaactatggaaaatgataactggatta

SEQ ID NO: 529377 - DNA, 75 bp, synthetic construct
  source 1..75: mol_type = other DNA
gataatgctaaatttgccgatggcacacctgtcactgccgaagcagtaaaactttcttttgagcggctactaaaa

SEQ ID NO: 529378 - DNA, 75 bp, synthetic construct
  source 1..75: mol_type = other DNA
attactattgggtgaaatcatgtattaaaaagcggtttaagtatagtgctttagataatgtccctggtaataaga

SEQ ID NO: 529379 - DNA, 75 bp, synthetic construct
  source 1..75: mol_type = other DNA
tgaagagtggcgcagcgagcaagcggtgccgctgtttgttagcgaaggaacgatgcagcagaaagtatcttctat

SEQ ID NO: 529380 - DNA, 75 bp, synthetic construct
  source 1..75: mol_type = other DNA
cataaatttattctcaaatatggctattaattttttatatggtaaagaattttccgtaagtgcaaaaatactctc

SEQ ID NO: 529381 - DNA, 75 bp, synthetic construct
  source 1..75: mol_type = other DNA
attgattctttaatttatataattaataaaattaaaaaagatggtgaattgctaaattacttacatgagaaattt

SEQ ID NO: 529382 - DNA, 75 bp, synthetic construct
  source 1..75: mol_type = other DNA
ttccttctcacaaaatccctgcgccagataatgacgaatggcatcctgcgcccacgcatagcgcaacgagtgcgg

SEQ ID NO: 529383 - DNA, 75 bp, synthetic construct
  source 1..75: mol_type = other DNA
ccctgggtgatggtaaaaaactatccggggatcgcccatatcctcgcccggtttggccacctcgatcagctgctg

SEQ ID NO: 529384 - DNA, 75 bp, synthetic construct
  source 1..75: mol_type = other DNA
gtgcatgacaccctggaaaccctgacccggatgattcaggaccggtgctggcagcggctgatactgatggtggat

SEQ ID NO: 529385 - DNA, 75 bp, synthetic construct
  source 1..75: mol_type = other DNA
tctaaaagaaaaaaagaaagatgtgtatatatctttcatctagtgtcgctaatagacagtgaattaattacactt

SEQ ID NO: 529386 - DNA, 75 bp, synthetic construct
  source 1..75: mol_type = other DNA
ttaaattcctgaaccctgaagctaacaggttttttttacttttcggtacacctgttggatttccgacatttatgc

SEQ ID NO: 529387 - DNA, 75 bp, synthetic construct
  source 1..75: mol_type = other DNA
cgcagaagaacatgaacaccgaggtgctgaataaccgcaccactgatgtgataaacaaccatgccgaaaaaatag

SEQ ID NO: 529388 - DNA, 75 bp, synthetic construct
  source 1..75: mol_type = other DNA
attctgagcgtactgccggaatggccctccaaccgtgttggcgaactcctgccatggaacgtagttctcaccaat

SEQ ID NO: 529389 - DNA, 75 bp, synthetic construct
  source 1..75: mol_type = other DNA
atcctgggcatgctctttacaggcgtcatcttcaacaaccaccgctggcgctgtcccatgagaatgcccgccacg

SEQ ID NO: 529390 - DNA, 75 bp, synthetic construct
  source 1..75: mol_type = other DNA
ggccagacgaagcggccccgctccaggcgtttggtgaagaggcacagtccgtcactgtcagcccacaacactttt

SEQ ID NO: 529391 - DNA, 75 bp, synthetic construct
  source 1..75: mol_type = other DNA
cggttctattttgcccatctaaatatgagaaattcgaatgttatcatgatggatgagcctgtttctcgtacggga

SEQ ID NO: 529392 - DNA, 75 bp, synthetic construct
  source 1..75: mol_type = other DNA
aaactaaagaccagtaccaaacaatcgaattgggtagagtacacttccagtagtaaaacagtaaatgcccgtatt

SEQ ID NO: 529393 - DNA, 75 bp, synthetic construct
  source 1..75: mol_type = other DNA
actatttattggctgcacaacagggtgatatcgataaagtaaaaaactgccttgcgctgggtgtcgatattaata

SEQ ID NO: 529394 - DNA, 75 bp, synthetic construct
  source 1..75: mol_type = other DNA
tctggctaattatctgaatatgggggacagcggctcccccctgtttgcttatgattccctgcaaaaaaaatgggt

SEQ ID NO: 529395 - DNA, 75 bp, synthetic construct
  source 1..75: mol_type = other DNA
acagagcgcaaaaagtcacgctgataatgcagcccgaagtgcgcaaaacgcgaaaagtcacgccgataatgttgc

SEQ ID NO: 529396 - DNA, 75 bp, synthetic construct
  source 1..75: mol_type = other DNA
acaacaggagtcacgtgataatctggggctaaaaagcgcggccacgatggaaccacaggcagatatttacgactg

SEQ ID NO: 529397 - DNA, 75 bp, synthetic construct
  source 1..75: mol_type = other DNA
tttaatcctgctaatgggcctcttgcaaactatctaaataatggtgatagtggctctcctttatttgcgtatgac

SEQ ID NO: 529398 - DNA, 75 bp, synthetic construct
  source 1..75: mol_type = other DNA
gaccagcgcggaaatagaagagagcgacctgttttacagtttcctgactcgtgaatatgtcaatctgcgcaacag

SEQ ID NO: 529399 - DNA, 75 bp, synthetic construct
  source 1..75: mol_type = other DNA
cagggaaacacgacctgggatatgcatggaaagaaaggaaatgacctgaacgcaggaaaaaacctcctgttcacc

SEQ ID NO: 529400 - DNA, 75 bp, synthetic construct
  source 1..75: mol_type = other DNA
atacaatagtgttatgtgggatctcgaccaatatcggtgttgaatccaccgcccgcaatgcctgggaacttggct

SEQ ID NO: 529401 - DNA, 75 bp, synthetic construct
  source 1..75: mol_type = other DNA
gaactgggtctgaccatggttgatgagagcggtttaatgctacgccaactcatgcgccaggcgcgtcagcgtatc

SEQ ID NO: 529402 - DNA, 75 bp, synthetic construct
  source 1..75: mol_type = other DNA
ttgacccgcgcagcataggccgtttcttccgtggcgaggggaatacgcttgcagatcgcaacaataaccccggca

SEQ ID NO: 529403 - DNA, 75 bp, synthetic construct
  source 1..75: mol_type = other DNA
ggcaggggttatgggataaggctgttgactggtggaatggtgatgccacgcagtacgggcaatcagttaagcgac

SEQ ID NO: 529404 - DNA, 75 bp, synthetic construct
  source 1..75: mol_type = other DNA
cttgcatatatggatgcttatggtttcgataagccattaaatctaactaattttggcaaagatttcccaaaagtg

SEQ ID NO: 529405 - DNA, 75 bp, synthetic construct
  source 1..75: mol_type = other DNA
atggaaacaaattgagccggtagaaagtatcggccaccactatcgcctgctggtgcatatccgcgccagtgcgat

SEQ ID NO: 529406 - DNA, 75 bp, synthetic construct
  source 1..75: mol_type = other DNA
ttgcactggtcagttccactctggccctttcagggtgtggtgcgatgagcacagcaataaagaagcgtaaccttg

SEQ ID NO: 529407 - DNA, 75 bp, synthetic construct
  source 1..75: mol_type = other DNA
ataagtcaaaactggataaaggatttattacagaacaggaagcacgtaagcttgaattgggtcgctcccaacggc

SEQ ID NO: 529408 - DNA, 75 bp, synthetic construct
  source 1..75: mol_type = other DNA
caaaggtattatcactgaacaggaagttcgtaagcttgaattaggacgatctcagcgacgttttatggaagcact

SEQ ID NO: 529409 - DNA, 75 bp, synthetic construct
  source 1..75: mol_type = other DNA
aagaacggcggagatctgggtaaagctctggcctcgtataactgggggatcggtaacgtgcagaaatacggcatg

SEQ ID NO: 529410 - DNA, 75 bp, synthetic construct
  source 1..75: mol_type = other DNA
actcgtttggtgctggtgcaactggtgcaaacgtatccgtcgaaattggtagtatgacacatgccagccctgcat

SEQ ID NO: 529411 - DNA, 75 bp, synthetic construct
  source 1..75: mol_type = other DNA
tggtgaacttaaggtttatatcaaaaacgcgaccagtggatggcaacgcctatatactggcactgaaatggatag

SEQ ID NO: 529412 - DNA, 75 bp, synthetic construct
  source 1..75: mol_type = other DNA
gcacaatggaacttagccgcgaaatggtggcgatctattcagagcacagggccactttcagcaagcgcgtaatca

SEQ ID NO: 529413 - DNA, 75 bp, synthetic construct
  source 1..75: mol_type = other DNA
cattttgagctttgccctcgtgaacatactcaacgaatcttaccgatggtgcaggatatcctgaccaccagcgga

SEQ ID NO: 529414 - DNA, 75 bp, synthetic construct
  source 1..75: mol_type = other DNA
ggcattgcgcaagggctggcgcttggcgcggaattaccgatgattggcgtctccacgctaatgacgatggcgcaa

SEQ ID NO: 529415 - DNA, 75 bp, synthetic construct
  source 1..75: mol_type = other DNA
ggggttagatgcgattgagaatatgacatcaggtggactaatttatgccgtatctggtgtacctggattgattgc

SEQ ID NO: 529416 - DNA, 75 bp, synthetic construct
  source 1..75: mol_type = other DNA
ttttaccgttatatctttttatataatgatttcgatggggcttgtgatcttttaggtgccgatttttctatggtt

SEQ ID NO: 529417 - DNA, 75 bp, synthetic construct
  source 1..75: mol_type = other DNA
ttgcgcttgatcttaaggacaacctcagtgacgaggctaaattcaatatcgaactgaggaatgccattaaattga

SEQ ID NO: 529418 - DNA, 75 bp, synthetic construct
  source 1..75: mol_type = other DNA
gcctgtaaagtcatccttaaagaaaaagcgccggacattgcgtttagttacaccaccgatcctgaagtggcattc

SEQ ID NO: 529419 - DNA, 75 bp, synthetic construct
  source 1..75: mol_type = other DNA
cagtgaaagtgagaagaaagttctatcttattttgaaacggccagaaaacttggtgcttcagatattcatttttt

SEQ ID NO: 529420 - DNA, 75 bp, synthetic construct
  source 1..75: mol_type = other DNA
tctataggagaatatataagaaccagaagattgacaaaatcagctatacttgtaattttcacaaaaaagaaaatt

SEQ ID NO: 529421 - DNA, 75 bp, synthetic construct
  source 1..75: mol_type = other DNA
ctggacacgcggttgtcagagctggaaaaaaatggcggggcagcccttgccgttcttgatgcacaacaggcccgt

SEQ ID NO: 529422 - DNA, 75 bp, synthetic construct
  source 1..75: mol_type = other DNA
cgcttcgatgcaactgctggcggtgaaacagcagaagcatggaccgttggtgctaaatacgacgctaataacgtt

SEQ ID NO: 529423 - DNA, 75 bp, synthetic construct
  source 1..75: mol_type = other DNA
atgaaacaaatgtcactaattgagatggatggatttctgaaaggaaaatgcatcccgcgagacttaaaggttaac

SEQ ID NO: 529424 - DNA, 75 bp, synthetic construct
  source 1..75: mol_type = other DNA
aagtacgggcgcagggggtagagatgtacgcagataacctcgacaacgtagcagacgacgcagaacgaggtggtt

SEQ ID NO: 529425 - DNA, 75 bp, synthetic construct
  source 1..75: mol_type = other DNA
aacagaagaaacaatttgctatcgcttttaaagtcgacggtgccgcaaaatacgtatatctgcaaaacaaaggag

SEQ ID NO: 529426 - DNA, 75 bp, synthetic construct
  source 1..75: mol_type = other DNA
cggcagcaccagtgaaaaatgtaaatgaaaacatttaccaggccttagaagatgcggaagtgttgcttaaaaata

SEQ ID NO: 529427 - DNA, 75 bp, synthetic construct
  source 1..75: mol_type = other DNA
gatcaactgaaaggggtggccatcgctgccatagaaactaccctggccagggatgctgataacctttctaaaatc

SEQ ID NO: 529428 - DNA, 75 bp, synthetic construct
  source 1..75: mol_type = other DNA
taatcggcgggctgatcgcttcgtatgtgcatattaacgtggtgacatcgtttgccatcgacagtacccacagcg

SEQ ID NO: 529429 - DNA, 75 bp, synthetic construct
  source 1..75: mol_type = other DNA
gtcgctgctgcaagcgagctttaactacgaaaggatgcaggcgggcggttttacctgggcgatgttgccgatcct

SEQ ID NO: 529430 - DNA, 75 bp, synthetic construct
  source 1..75: mol_type = other DNA
tcaccgcaacccaatatggtgcagcgtttcatcgccgcagctctaccaatgaaccacgcctgatggtcagcaccg

SEQ ID NO: 529431 - DNA, 75 bp, synthetic construct
  source 1..75: mol_type = other DNA
ctgttgcgtcagcatgttgaggttattcaaaattctggtttgttcagtatcgattggtataggaaaaactatcct

SEQ ID NO: 529432 - DNA, 75 bp, synthetic construct
  source 1..75: mol_type = other DNA
ttagatatatctcaaacgaagttaaagaaaattgagtcagaacttggcttattgaaaaaatcacacagtaagatc

SEQ ID NO: 529433 - DNA, 75 bp, synthetic construct
  source 1..75: mol_type = other DNA
acttgccttgcaagttcaattggagatcagtcaaggcaaatccgctcaactcgctgttgataatgcagcgttgaa

SEQ ID NO: 529434 - DNA, 75 bp, synthetic construct
  source 1..75: mol_type = other DNA
ggtgtacagcattttcgtcttatgcactttgaattaagcgcacttaaaaaggcggtgttaatgtatgaagtttaa

SEQ ID NO: 529435 - DNA, 75 bp, synthetic construct
  source 1..75: mol_type = other DNA
gattttttccggaagaagccacatggagcgggctggttccgtcactggtacgggagtaccgttacgacagcgcgg

SEQ ID NO: 529436 - DNA, 75 bp, synthetic construct
  source 1..75: mol_type = other DNA
gggggatgagacgctgacgttcagccgtgatgaggcgggacgtgaagtgctccggcacagtaaccggggttttgc

SEQ ID NO: 529437 - DNA, 75 bp, synthetic construct
  source 1..75: mol_type = other DNA
atggcctacaccctgctgatgtattacttcctgcgggtgaaaaaagcgcatccggtgctgttaatcggcgtgact

SEQ ID NO: 529438 - DNA, 75 bp, synthetic construct
  source 1..75: mol_type = other DNA
tgtgtcagcagacaccgtcagcggtggtgcatgaggtgacccggaagcgtgaaaaaacaccggctccgctctgtt

SEQ ID NO: 529439 - DNA, 75 bp, synthetic construct
  source 1..75: mol_type = other DNA
tcacggtcacctgggctgtggggcatctgctggagctggccgccccggaagcgtacggggagcagttcggggttc

SEQ ID NO: 529440 - DNA, 75 bp, synthetic construct
  source 1..75: mol_type = other DNA
agctgaagaaagtgctgcgtgataacgccggtctgggcacagaggcgacgcgtgcgggcgtactcgaaaccctct

SEQ ID NO: 529441 - DNA, 75 bp, synthetic construct
  source 1..75: mol_type = other DNA
atgacagcagatcaaattatcgagggcatcctcggaaaggaagggggttatgtcgatcacccctcagataaaggc

SEQ ID NO: 529442 - DNA, 75 bp, synthetic construct
  source 1..75: mol_type = other DNA
gtccatgccggagcaggcggaatcactggagcagctaaggttgatgaacgcggggatcaacatccgcacatttga

SEQ ID NO: 529443 - DNA, 75 bp, synthetic construct
  source 1..75: mol_type = other DNA
caacggttcagggcccgcggaaaagtgaatgtggtgacgggctggcgaagcctgttttccggggaggcagcagaa

SEQ ID NO: 529444 - DNA, 75 bp, synthetic construct
  source 1..75: mol_type = other DNA
gacagaacaacgatcctcgcgttttccggcaggagttcctggccgagttcgtcgactggtccgctgcgtcgctgt

SEQ ID NO: 529445 - DNA, 75 bp, synthetic construct
  source 1..75: mol_type = other DNA
cattcttgactgggatgtggtgcagatcgacggcgcgctgctggaagagtggattccgtccgttttcacccggct

SEQ ID NO: 529446 - DNA, 75 bp, synthetic construct
  source 1..75: mol_type = other DNA
tcccgcagtggcctgccctgtgcggtggaagacggaaccggggtgaggcggagaataacgcgaaaccggtacggt

SEQ ID NO: 529447 - DNA, 75 bp, synthetic construct
  source 1..75: mol_type = other DNA
atgcgtctctatttatgtgaaaaaccttcacaggccgctgatatagccagagtacttggggctgccagacgtggt

SEQ ID NO: 529448 - DNA, 75 bp, synthetic construct
  source 1..75: mol_type = other DNA
ggggatcaacctgacgcgtctgtataccctgaaagccagggagtgtggtgtgtccggcgtcctctctgttggcag

SEQ ID NO: 529449 - DNA, 75 bp, synthetic construct
  source 1..75: mol_type = other DNA
caggatactgcccggagaggagaccgagaagttatatgaagccggtaagggacgcagccgggctgactggctgac

SEQ ID NO: 529450 - DNA, 75 bp, synthetic construct
  source 1..75: mol_type = other DNA
tcaccgttatttctataaaaaaacaaggttttattcaacgagtatggtgggatctatatggattgaataaatata

SEQ ID NO: 529451 - DNA, 75 bp, synthetic construct
  source 1..75: mol_type = other DNA
actacttaaaattactgcttaacggcgcttactgttccactgatcccccttttttcttcggtaattatctagtgt

SEQ ID NO: 529452 - DNA, 75 bp, synthetic construct
  source 1..75: mol_type = other DNA
cattaatccggatacattagttcttggtattcctttatcaacatgtttacgttttttaatcccagaagttattga

SEQ ID NO: 529453 - DNA, 75 bp, synthetic construct
  source 1..75: mol_type = other DNA
acaccaaaaaatcactaaaagtgctctttattggggaatcctggcatattcatatgattcattcaaaaggatatg

SEQ ID NO: 529454 - DNA, 75 bp, synthetic construct
  source 1..75: mol_type = other DNA
ctcagggcagtggataaacattgcgcggataaatgggtaagactgtatattcgcaggtggctgacagcgccggtg

SEQ ID NO: 529455 - DNA, 75 bp, synthetic construct
  source 1..75: mol_type = other DNA
tggcgctcatcagcacggaaggggcaacagcgtggtgcgcagaatatgatgaatggggcaacctgctgaatgaag

SEQ ID NO: 529456 - DNA, 75 bp, synthetic construct
  source 1..75: mol_type = other DNA
caacctgctgaatgaagagaacccgcatcagctgcagcagcttatccggctgccggggcagcagtatgatgagga

SEQ ID NO: 529457 - DNA, 75 bp, synthetic construct
  source 1..75: mol_type = other DNA
cactgaaattttatgataacgatggtgcgcggcaggaagtgattgccgaagcctgtaaagtcatccttaaagaaa

SEQ ID NO: 529458 - DNA, 75 bp, synthetic construct
  source 1..75: mol_type = other DNA
acgaagttttcgtgcgtggcaaacagggcttatcacaccgccatgttggcagtttacatgctgccgatgagcgga

SEQ ID NO: 529459 - DNA, 75 bp, synthetic construct
  source 1..75: mol_type = other DNA
atgtggagaatgctggacaacctgttccagatgaacagctctcttcagaagataaattcattgagggtgaagaca

SEQ ID NO: 529460 - DNA, 75 bp, synthetic construct
  source 1..75: mol_type = other DNA
tggtatgcaatctcagtatgagctttgggttgcttcgcaaaccgctcgcccaaacattcgcccattatttcacca

SEQ ID NO: 529461 - DNA, 75 bp, synthetic construct
  source 1..75: mol_type = other DNA
atgacgcaacccactgatgtggaaccgtttatcgcgcagacaggcattgatctactggccgtctcggtaggcacg

SEQ ID NO: 529462 - DNA, 75 bp, synthetic construct
  source 1..75: mol_type = other DNA
tcatgcatttatcaactaaatcaaaattatagtttcagtcgtattgatgggcgtaatttcgatatctttgtgaat

SEQ ID NO: 529463 - DNA, 75 bp, synthetic construct
  source 1..75: mol_type = other DNA
tggagtcatcagtccggtactggcgaatttatttctgcactatgtgtttgataaatggctgtcgttacattatcc

SEQ ID NO: 529464 - DNA, 75 bp, synthetic construct
  source 1..75: mol_type = other DNA
tgacgccgatggcctgtgtaccgccagggttaacggcctggaggaaaccatcctctacagccgggatgccgcagg

SEQ ID NO: 529465 - DNA, 75 bp, synthetic construct
  source 1..75: mol_type = other DNA
ggtaaaggcgtgttcgacgttacaacaaataaagcactccaagcgcatatagacagatatactaaagctggtgtg

SEQ ID NO: 529466 - DNA, 75 bp, synthetic construct
  source 1..75: mol_type = other DNA
cggaaaccgggatgtacctggtgagtgatccgctggggttgcagggaggtgagcagacttaccggtatgtgccta

SEQ ID NO: 529467 - DNA, 75 bp, synthetic construct
  source 1..75: mol_type = other DNA
gcgcactgacgatgtgattaacgttgccgggcatcggctgggtacgcgtgagattgaagagagtatctccagtca

SEQ ID NO: 529468 - DNA, 75 bp, synthetic construct
  source 1..75: mol_type = other DNA
ccggcgcacgtctggtttgtctcgcaattgccaaaaacgcgatccggaaaaatgctgcgccgcacgatccaggcg

SEQ ID NO: 529469 - DNA, 75 bp, synthetic construct
  source 1..75: mol_type = other DNA
cgcgatcctggggatctgacgaccattgatgatccggcgtcgttggatcagatccgccaggcgatggaagagtag

SEQ ID NO: 529470 - DNA, 75 bp, synthetic construct
  source 1..75: mol_type = other DNA
tgagtctatattcttttattgtgcaaagtgctccctgtacactgaccaatgtcggtgaacaacgtggaacttaca

SEQ ID NO: 529471 - DNA, 75 bp, synthetic construct
  source 1..75: mol_type = other DNA
gctggcccagagccacgcccgccgcgcagacagcaagaaacaactggccgtggtgccgctggatatctggaacga

SEQ ID NO: 529472 - DNA, 75 bp, synthetic construct
  source 1..75: mol_type = other DNA
ccggtgtgtcacgtaatgacaaggtcgttatagagccggggatgcgtgcgtgggatgcactggctaaagctgccg

SEQ ID NO: 529473 - DNA, 75 bp, synthetic construct
  source 1..75: mol_type = other DNA
agcaataaaggatcggcggtagcgtacttgaatgctcttgcaaagagtgggaaacatttcagcgcaggactgatg

SEQ ID NO: 529474 - DNA, 75 bp, synthetic construct
  source 1..75: mol_type = other DNA
aaattttaccattccatattctatcgcatctgtacaagatagttctaacaccgcagacatttttccaggaactcc

SEQ ID NO: 529475 - DNA, 75 bp, synthetic construct
  source 1..75: mol_type = other DNA
cattaaagttcattttttaacacagaacgctttaaggtttaaagtcggaagtcgtcattacattattaatttccc

SEQ ID NO: 529476 - DNA, 75 bp, synthetic construct
  source 1..75: mol_type = other DNA
atttctaaaacgcagggttatgatcctgaatcccgtctgagcagagccacgcttgaatttcaggtaatagcctga

SEQ ID NO: 529477 - DNA, 75 bp, synthetic construct
  source 1..75: mol_type = other DNA
gcttaccggttcaccagtacgccagaaaccgataacacctggccgattgaagtcaccgccgaagatgtcaaaggc

SEQ ID NO: 529478 - DNA, 75 bp, synthetic construct
  source 1..75: mol_type = other DNA
gtacgtttgctcgaggttttgataatgtccgccagggtgatgaactggatgtcccggctcaagttagtgaaaata

SEQ ID NO: 529479 - DNA, 75 bp, synthetic construct
  source 1..75: mol_type = other DNA
ggaacttcagggcaaggtcatgtttcctggcaaatcattaatgatcaaggggggctaagtcagacatattcgaag

SEQ ID NO: 529480 - DNA, 75 bp, synthetic construct
  source 1..75: mol_type = other DNA
tagattgttatgataaatacggtggcgatacataccagattgaacaatataaaaaacatttagaatcttacggtg

SEQ ID NO: 529481 - DNA, 75 bp, synthetic construct
  source 1..75: mol_type = other DNA
gtgtggatcactattgcaccgttcgtgacagcaagaatcacgctgggcgtggatgaagattttagcctgaagaac

SEQ ID NO: 529482 - DNA, 75 bp, synthetic construct
  source 1..75: mol_type = other DNA
aggcagccgttatgatctggtggatcgcaacaacaatatcgttctggaatatcgcaaaaaagaactggttcgcct

SEQ ID NO: 529483 - DNA, 75 bp, synthetic construct
  source 1..75: mol_type = other DNA
ttcctgaatcatcaatactatacttagcaagtaaaggtgttttctcatttatctgcttgagtgcaggatcaagga

SEQ ID NO: 529484 - DNA, 75 bp, synthetic construct
  source 1..75: mol_type = other DNA
tgcgagtaaccgcaacgttcgtaacaaggggactcaggctgatatgagaaaggcgattgagtctttcaagaaact

SEQ ID NO: 529485 - DNA, 75 bp, synthetic construct
  source 1..75: mol_type = other DNA
gccaatgatggtgatgttaaatatttcacctatcagtccactgatattcctggtttaactctttggatacaggag

SEQ ID NO: 529486 - DNA, 75 bp, synthetic construct
  source 1..75: mol_type = other DNA
ccggtgccgtgtggaaatccgcccaccttgccgggcgccggtgctgtgtggaaatccgcccaccctttccgggcg

SEQ ID NO: 529487 - DNA, 75 bp, synthetic construct
  source 1..75: mol_type = other DNA
gccgggcgccggtgctgtgtggaaatccgcccaccctttccgggcgccggtgccgtgtgggaatccgcccacctt

SEQ ID NO: 529488 - DNA, 75 bp, synthetic construct
  source 1..75: mol_type = other DNA
aatccgcccaccttaccgggcgccggtgctgtgtggaaatccgcccatcttgccgggcgccggtgccgtgtggga

SEQ ID NO: 529489 - DNA, 75 bp, synthetic construct
  source 1..75: mol_type = other DNA
agatgatacaaaagtcatgcttattgataccgattacggtaaattgatacttaaagctgatgaatcccctaatga

SEQ ID NO: 529490 - DNA, 75 bp, synthetic construct
  source 1..75: mol_type = other DNA
ggcaggacgactgttaaacgaatacccggatatgtccgccagtatgttacgggcaatgctggttaatcatgcatc

SEQ ID NO: 529491 - DNA, 75 bp, synthetic construct
  source 1..75: mol_type = other DNA
acggctggtcggcggaagatcgtaaaagctgggcactccggcgctatggttttcctgtagcggaacgctttaatc

SEQ ID NO: 529492 - DNA, 75 bp, synthetic construct
  source 1..75: mol_type = other DNA
ttcccggaggccatgagagacagctataaaaatacccctgcaacgagaaaccgggagattgagcgcgacgtaacg

SEQ ID NO: 529493 - DNA, 75 bp, synthetic construct
  source 1..75: mol_type = other DNA
ttaaccgcattggatagcgttgatgtttggactaatgaggatcgcaaaagctggtcagtgaaacagtatgggttt

SEQ ID NO: 529494 - DNA, 75 bp, synthetic construct
  source 1..75: mol_type = other DNA
agttgcgcatcatcccaaacgtatcgatctttatacacgttttgagcactggttacaggagcaggatatttccag

SEQ ID NO: 529495 - DNA, 75 bp, synthetic construct
  source 1..75: mol_type = other DNA
agtattgctctgtatggcgacgttgaagcctgtaaccagagcaatttctggcagccgcagctatggctgtataac

SEQ ID NO: 529496 - DNA, 75 bp, synthetic construct
  source 1..75: mol_type = other DNA
ggcgcgagcttatctcgctgggcgtgtatgtgaatcttatcctgccgcctgccgcgcctgcaggcatcacgctgc

SEQ ID NO: 529497 - DNA, 75 bp, synthetic construct
  source 1..75: mol_type = other DNA
gaagcgatggaagtgctgcgctacggcagccgcccgtatatttttaccgcctctccttctccgtcctgcattgcg

SEQ ID NO: 529498 - DNA, 75 bp, synthetic construct
  source 1..75: mol_type = other DNA
acgcctacaacgaacaggggctggcaaaccgcgtcacgccggacagcctgccgccggtggagtggctgacctacg

SEQ ID NO: 529499 - DNA, 75 bp, synthetic construct
  source 1..75: mol_type = other DNA
cagttctactatgacgtgcgtattgaagataaaccgctggcgaacggctgcgcgggcaaaccgattgttgagcgc

SEQ ID NO: 529500 - DNA, 75 bp, synthetic construct
  source 1..75: mol_type = other DNA
accgccgatggaccaattcaggagaattacaacccgctcactggcgcgcagcaaggggcaccgaatttctcctgg

SEQ ID NO: 529501 - DNA, 75 bp, synthetic construct
  source 1..75: mol_type = other DNA
cccgctgacaggcgcgcagcaaggcgcaccaaatttctcctggagtgccgctcatttgtatatgttgtataacga

SEQ ID NO: 529502 - DNA, 75 bp, synthetic construct
  source 1..75: mol_type = other DNA
tcagggactgatatctcaatgggggaagggaatgataccattctggctctgggtactgaagggaatacagctgat

SEQ ID NO: 529503 - DNA, 75 bp, synthetic construct
  source 1..75: mol_type = other DNA
tggtgctgtagcgctctttgatagtccactttttgacagccaccttacatcattgaccgataccatttctcatcc

SEQ ID NO: 529504 - DNA, 75 bp, synthetic construct
  source 1..75: mol_type = other DNA
aagaaaatataatatttctctgttccgataggtttatacacagcaaagaaaaaccaagaaacattttttttctgg

SEQ ID NO: 529505 - DNA, 75 bp, synthetic construct
  source 1..75: mol_type = other DNA
attagagataatattatagcatcatctaccgaagagtatcatattcttttgacaaatcaaaggagatattatgtt

SEQ ID NO: 529506 - DNA, 75 bp, synthetic construct
  source 1..75: mol_type = other DNA
tgtcgcaacaagggaatcattacgggaactcgcagaacgtgccggaatgattaacgcgaatattcagggggtgag

SEQ ID NO: 529507 - DNA, 75 bp, synthetic construct
  source 1..75: mol_type = other DNA
cattaatacttaatcaggaattagtgcaaatcatttcaaacaaaaaaatcgatggtctctatacctatccgatgg

SEQ ID NO: 529508 - DNA, 75 bp, synthetic construct
  source 1..75: mol_type = other DNA
ctattaccccaaaaacgcgggtaaaacgaaaagagtgaaggccctgattgattttctgatatccactacggggcg

SEQ ID NO: 529509 - DNA, 75 bp, synthetic construct
  source 1..75: mol_type = other DNA
gtattctttctggagctgagcaggaagcgttgtacgggctacctgattttgatgatgcacagaggctgacatttt

SEQ ID NO: 529510 - DNA, 75 bp, synthetic construct
  source 1..75: mol_type = other DNA
gtcgctgcagatgttaaaaagcacacgctaactcttgaaggcgttagattgaagcttggacaaactaatgtgcgc

SEQ ID NO: 529511 - DNA, 75 bp, synthetic construct
  source 1..75: mol_type = other DNA
ggcactggcgcagggcagcgaagctcaaaagcagatgttgcaagacgccattaaccgtttctggtggccagcctt

SEQ ID NO: 529512 - DNA, 75 bp, synthetic construct
  source 1..75: mol_type = other DNA
tgctgatatttggggattctggattttccagatcgggggcgctgaaaatcgcgttaagcacctctcgcaatctag

SEQ ID NO: 529513 - DNA, 75 bp, synthetic construct
  source 1..75: mol_type = other DNA
ttattttaaggccaaacatctgtttttccgtttcgggtggaaggatgttaaggatgactgcgattttatcctgcg

SEQ ID NO: 529514 - DNA, 75 bp, synthetic construct
  source 1..75: mol_type = other DNA
gacaagaacttcacaacaatgcggcacccaccaggaagcattcgcctgtgctggcattgcgatcacactttgtcc

SEQ ID NO: 529515 - DNA, 75 bp, synthetic construct
  source 1..75: mol_type = other DNA
ttattaattctgattttaacttcagacatcaaagtaacgctaacctgtcaaataatactcttaatattaagtcct

SEQ ID NO: 529516 - DNA, 75 bp, synthetic construct
  source 1..75: mol_type = other DNA
acaatacatatctgataattgtgtcgtgttaattggcggtcatggacctatgacggagcaattaaataatttatt

SEQ ID NO: 529517 - DNA, 75 bp, synthetic construct
  source 1..75: mol_type = other DNA
aagaataagtatagagtctttaggatggggcgtttgttcgaaattttctccacgcctatttcattatctgttatt

SEQ ID NO: 529518 - DNA, 75 bp, synthetic construct
  source 1..75: mol_type = other DNA
cccaatcttaccgacgacgccccagcttcactgctttcagcaccacaaatttattattcgtggcgatggtggtgc

SEQ ID NO: 529519 - DNA, 75 bp, synthetic construct
  source 1..75: mol_type = other DNA
caggctgcgaaggacaagctggcagagctgaatgcagacaatctgatcacgccggaagagaaggcgcagctggaa

SEQ ID NO: 529520 - DNA, 75 bp, synthetic construct
  source 1..75: mol_type = other DNA
ttaaacttggaaggaacggaggggtgaatataagagaagtcgatttactgaagagtggagcagatgctatagagg

SEQ ID NO: 529521 - DNA, 75 bp, synthetic construct
  source 1..75: mol_type = other DNA
tggcaatttgacagtcaaaggtaatatttccactttctctctttctaatccatgggttattctcggtaacgtaac

SEQ ID NO: 529522 - DNA, 75 bp, synthetic construct
  source 1..75: mol_type = other DNA
gggatgagacgattagatcagttacggcgtaaaacgcataatattgctgcgctaaaaattattgcccgccgtagc

SEQ ID NO: 529523 - DNA, 75 bp, synthetic construct
  source 1..75: mol_type = other DNA
gccaaaatggtggaagcaccgatttaccgcgttattggatcacgttggataaaaacgtgatctgggattacccga

SEQ ID NO: 529524 - DNA, 75 bp, synthetic construct
  source 1..75: mol_type = other DNA
tacccaaaagactttatggcaggcaatggtggagtgcgtaattttcatggtgaaacttgctggtatccttatctg

SEQ ID NO: 529525 - DNA, 75 bp, synthetic construct
  source 1..75: mol_type = other DNA
atgagtggacgaatcacaaccttatgcactgcatttggggtggttatcgcagcagtgggactttacctaccatat

SEQ ID NO: 529526 - DNA, 75 bp, synthetic construct
  source 1..75: mol_type = other DNA
actgattatcgtcgctcaatgaatactggtaataattcaaaactagttgataatccttctcaaccatttgatata

SEQ ID NO: 529527 - DNA, 75 bp, synthetic construct
  source 1..75: mol_type = other DNA
tctgcgtgctgctgacaggcgaatagggatgaggcgattagatcagttacggcgtaaaacgcataatattgctgc

SEQ ID NO: 529528 - DNA, 75 bp, synthetic construct
  source 1..75: mol_type = other DNA
atttcagaataacttcacattgtaacctaggatgtgatcagtgttttcgtacacctggaattcaggactcttctc

SEQ ID NO: 529529 - DNA, 75 bp, synthetic construct
  source 1..75: mol_type = other DNA
cgtattgaactaattgaagcagtacgtgtaccagttaataataatcaattctttgatgatggtcgttatgttagt

SEQ ID NO: 529530 - DNA, 75 bp, synthetic construct
  source 1..75: mol_type = other DNA
cgatgaagatgctgttatgcagaaaatcagtggtggcgtctccatcgccgggattaacgacatcatttcctgtga

SEQ ID NO: 529531 - DNA, 75 bp, synthetic construct
  source 1..75: mol_type = other DNA
caaattttgctgggtcattcgaatcaaaaaatgaccgatatttacaacgatgcacgcggcaaggagtggaaaaaa

SEQ ID NO: 529532 - DNA, 75 bp, synthetic construct
  source 1..75: mol_type = other DNA
aaatctcaccctggatgatgtggtgtcatcctgtcgcgattgcgttcttagtccgtggctattgcaccatcatca

SEQ ID NO: 529533 - DNA, 75 bp, synthetic construct
  source 1..75: mol_type = other DNA
tagttgggcaactttcgaagaacgggacaaagccaatgttgttatggaacccaattttgacattattatccctga

SEQ ID NO: 529534 - DNA, 75 bp, synthetic construct
  source 1..75: mol_type = other DNA
ggtattacgtgcaatgctggtctgaaggtcaaggatggcttggagatgacatcagcctacgtgattgcgatgtaa

SEQ ID NO: 529535 - DNA, 75 bp, synthetic construct
  source 1..75: mol_type = other DNA
tcagcgcactcaatggcatgttaagaatggagtgcaaccgtcgtgagaatgctgacgcaaatattcaggcttctc

SEQ ID NO: 529536 - DNA, 75 bp, synthetic construct
  source 1..75: mol_type = other DNA
agtcggtcttatcaaactgcagcgctggagtcgggccacggacacctacggtgttaagcaccagcgaaaagaacg

SEQ ID NO: 529537 - DNA, 75 bp, synthetic construct
  source 1..75: mol_type = other DNA
gatgattaccatcgtgatgggtaatggcaatgtgcgaaccaaccaggcggggcttgagcttatcggaaacgctga

SEQ ID NO: 529538 - DNA, 75 bp, synthetic construct
  source 1..75: mol_type = other DNA
atgccaccagcatagctcagtctcttggtctgaattatcgcgtatccaccgccgacctgaagatgatgtacgcac

SEQ ID NO: 529539 - DNA, 75 bp, synthetic construct
  source 1..75: mol_type = other DNA
tgcgcgcgctccatcccctgaaagccagactactcaccgagtcagttctgatgaaatccctgagtcagtgggtcc

SEQ ID NO: 529540 - DNA, 75 bp, synthetic construct
  source 1..75: mol_type = other DNA
gatcaccgggcgtgtggacgacgtgctgaacgtctccggtcaccgtctggggacggcagagattgagtcggcgct

SEQ ID NO: 529541 - DNA, 75 bp, synthetic construct
  source 1..75: mol_type = other DNA
gtgcttgaccgcctgatacagcagcgcggctttgacgggcggacgcagcgttaccgttatgacctgaccgggaaa

SEQ ID NO: 529542 - DNA, 75 bp, synthetic construct
  source 1..75: mol_type = other DNA
cggcgggcgggattgtcggtagtttatctcaatcacaactaggcgatctgggcgagaaattagtcaattcgcaat

SEQ ID NO: 529543 - DNA, 75 bp, synthetic construct
  source 1..75: mol_type = other DNA
caggttccacctgtccatgttattttaaatgaagattcctatattcaagaagttctcgatggacagcaacgatta

SEQ ID NO: 529544 - DNA, 75 bp, synthetic construct
  source 1..75: mol_type = other DNA
aaatagatcctttaggattaaaagtgatcgttgtagctagtgatcctaatgaggcaaaattattacaggaggcat

SEQ ID NO: 529545 - DNA, 75 bp, synthetic construct
  source 1..75: mol_type = other DNA
gctatctctacgacccgctgggccgccggacggggaaacgggtgtggcgtcgcgagcgtgatctgacaggatgga

SEQ ID NO: 529546 - DNA, 75 bp, synthetic construct
  source 1..75: mol_type = other DNA
gctataaccgtaagggacgtctcacaggcgagcgccagacggtacatcacccggagacgggggaactgctctggc

SEQ ID NO: 529547 - DNA, 75 bp, synthetic construct
  source 1..75: mol_type = other DNA
gctgttgcgcttcatatccaagaagcggcggaagaacttcaacttgatggcgtggatttctcaggccaggcagat

SEQ ID NO: 529548 - DNA, 75 bp, synthetic construct
  source 1..75: mol_type = other DNA
tccgattatatttatgggatatagaataggtgatccgaatataaaaaaagtattaaaaacaatattctcatacat

SEQ ID NO: 529549 - DNA, 75 bp, synthetic construct
  source 1..75: mol_type = other DNA
ggtcgataacgaaggtaacccgctggaaggcgctaccgaaggcagtctggtgatcaccgactcctggccgggtca

SEQ ID NO: 529550 - DNA, 75 bp, synthetic construct
  source 1..75: mol_type = other DNA
atttgaggactatattttctaggattcatgaaggaagtctagatctccaacccgatttccagagggcggaagtct

SEQ ID NO: 529551 - DNA, 75 bp, synthetic construct
  source 1..75: mol_type = other DNA
ttgaatgactcagtgcaatttatgaatagatcattggcccaaataacaggcgagaatatgattggtgcaaatggc

SEQ ID NO: 529552 - DNA, 75 bp, synthetic construct
  source 1..75: mol_type = other DNA
tgcatgtgggtcatttggcacagcggctggccgcctgtcgggaacgcccgtacaaggggatggtcttttttgact

SEQ ID NO: 529553 - DNA, 75 bp, synthetic construct
  source 1..75: mol_type = other DNA
caaggacctgatcgacaagccgctggacagcctgcaggcctggctggactactcgaaaacccagcgcgagcagaa

SEQ ID NO: 529554 - DNA, 75 bp, synthetic construct
  source 1..75: mol_type = other DNA
gccatgctcgccgccatcgaatcggcgcggtacagcgtcgccttgacctcgtacatcttcgacagccaaggcatc

SEQ ID NO: 529555 - DNA, 75 bp, synthetic construct
  source 1..75: mol_type = other DNA
cgatacccgaggctgtatcgccgccacttgccggtctggcccacctggtgggacgcgccaccggccagtcgctga

SEQ ID NO: 529556 - DNA, 75 bp, synthetic construct
  source 1..75: mol_type = other DNA
agtgtatatggcgaaggatgtgaacgcttttgcaatggcgaatggctgcatccgtgtctacagtggcttgatgga

SEQ ID NO: 529557 - DNA, 75 bp, synthetic construct
  source 1..75: mol_type = other DNA
ctttatgaccgcatcaatgacgcagcggcgcttgctggtttaatcaattctttactgaactcttctgccgtaagg

SEQ ID NO: 529558 - DNA, 75 bp, synthetic construct
  source 1..75: mol_type = other DNA
caggcatgccaggagatggacagcaaggcgacgattgcaccagccagtagcgaatatgctaaacgcctgacagca

SEQ ID NO: 529559 - DNA, 75 bp, synthetic construct
  source 1..75: mol_type = other DNA
gacggagcgtggtgctgcctgggttcggccaattgggacgcgcgcagtttgcgcctcaacttcgagttcaatgtg

SEQ ID NO: 529560 - DNA, 75 bp, synthetic construct
  source 1..75: mol_type = other DNA
tgaaatggcggatgaagttgttagtccgtctcagtatttaattgattggatgttgagtaagcactggaatgttcc

SEQ ID NO: 529561 - DNA, 75 bp, synthetic construct
  source 1..75: mol_type = other DNA
atgatttttagtgataatatgcttcagaattacttccaaaacgaaccgttgcaatacatcatgcaatacacagga

SEQ ID NO: 529562 - DNA, 75 bp, synthetic construct
  source 1..75: mol_type = other DNA
ggtattgcttatgtgcttgatgtgctggcgaggcgtcacaatattcttttcgtagtttccgcaggtaattttaat

SEQ ID NO: 529563 - DNA, 75 bp, synthetic construct
  source 1..75: mol_type = other DNA
tgaagactgggagttttttgcaaaaatatcgttacagggatataaattgcaagtcgtcccagaacctctattttg

SEQ ID NO: 529564 - DNA, 75 bp, synthetic construct
  source 1..75: mol_type = other DNA
tgcgcattcaagaaaatcgatgaatctaacagcccgttagttagcgtgtgtatcactcacttcgaacgtcaccat

SEQ ID NO: 529565 - DNA, 75 bp, synthetic construct
  source 1..75: mol_type = other DNA
atatcattacagggatataaattgcaaatcgtcccggaacctctattttggtatagagttgcaaactccggcatg

SEQ ID NO: 529566 - DNA, 75 bp, synthetic construct
  source 1..75: mol_type = other DNA
ctttcaaagccctctgtactgagcgacgttgcacataacgccagcgttctctattcctacatttcatcaattcat

SEQ ID NO: 529567 - DNA, 75 bp, synthetic construct
  source 1..75: mol_type = other DNA
agcgccagtcaaaaaccgtgccgtataaagagatcgaacgctacggcattgatcgtaaccgttcgccgctgaagt

SEQ ID NO: 529568 - DNA, 75 bp, synthetic construct
  source 1..75: mol_type = other DNA
tgtcctcataaaatttgacctgaacatcaaaggtggcgaagtgaggggagagcttcgcaccgacgcacgactaaa

SEQ ID NO: 529569 - DNA, 75 bp, synthetic construct
  source 1..75: mol_type = other DNA
catccggcatttagtgcagaaataaacagagacgcactttgcttgctattaaggcataactatattcctgcacca

SEQ ID NO: 529570 - DNA, 75 bp, synthetic construct
  source 1..75: mol_type = other DNA
gcgcttgaactgagcctcaccggcaagcaggcgccgcaggccgcgctcgataatgcggtgaaacagatcacgatg

SEQ ID NO: 529571 - DNA, 75 bp, synthetic construct
  source 1..75: mol_type = other DNA
cgaagcgcgtagcgagctgcttaatgatgattgcctggacttgcctctggctttagcgaatctggaagcctttat

SEQ ID NO: 529572 - DNA, 75 bp, synthetic construct
  source 1..75: mol_type = other DNA
tctgattggtggtgttcgccgcgatattctcaaagagcaacgtctgcaaacgctgaaactggtgcgcgagatgcg

SEQ ID NO: 529573 - DNA, 75 bp, synthetic construct
  source 1..75: mol_type = other DNA
ctgccggggacgaagacgcagatgacgatacggtcgaagacctataaaggaagcggctttaatgaactgcggttt

SEQ ID NO: 529574 - DNA, 75 bp, synthetic construct
  source 1..75: mol_type = other DNA
cactgctcaagcaccttataaagcgggtgccgggcgtggaaacccgaaattcaatatagagcacaaccgcgctca

SEQ ID NO: 529575 - DNA, 75 bp, synthetic construct
  source 1..75: mol_type = other DNA
aacgtcatgacgatgtactgaaaaagatccgcacgcttgaatgttccgcatcattcactgcccgcaatttttcgg

SEQ ID NO: 529576 - DNA, 75 bp, synthetic construct
  source 1..75: mol_type = other DNA
ccttatgggacaaaaaagaacatcggttaacattagcacgtgatagagttggtgaaaaaccgttgtactggggat

SEQ ID NO: 529577 - DNA, 75 bp, synthetic construct
  source 1..75: mol_type = other DNA
tgctgtggccctgggtgttttttcagcaacattaggggcatatgccttatctcttggggctcctgctattgctgt

SEQ ID NO: 529578 - DNA, 75 bp, synthetic construct
  source 1..75: mol_type = other DNA
tgcagcccatggaaaaggtgcgatcgcaagattcgaccccaataatgatggaagttggtcatttgctcactatgg

SEQ ID NO: 529579 - DNA, 75 bp, synthetic construct
  source 1..75: mol_type = other DNA
attgtttttaccgatccgtcgaatttaccctggatcactctcactggcgccatttacgggatggtattcctctat

SEQ ID NO: 529580 - DNA, 75 bp, synthetic construct
  source 1..75: mol_type = other DNA
tccccggccctaaacacaacccccactcaccacaacctaaactcatccgcatcctgccatgccggaaacttttct

SEQ ID NO: 529581 - DNA, 75 bp, synthetic construct
  source 1..75: mol_type = other DNA
cgacagcttaaaactggaatccgccagcttcgtcgatgaaaaattgcgggcgctacactccgatattctgtggtc

SEQ ID NO: 529582 - DNA, 75 bp, synthetic construct
  source 1..75: mol_type = other DNA
gaggcgctgctgggtggtaacgactgggtactgcagccccagcagtgcgaagtgggtaaggacgttccatccttt

SEQ ID NO: 529583 - DNA, 75 bp, synthetic construct
  source 1..75: mol_type = other DNA
atgaaggcatcggcctgatttgcgggccgaccggctccggcaaatccaccctgctgacggccacctatcagcacc

SEQ ID NO: 529584 - DNA, 75 bp, synthetic construct
  source 1..75: mol_type = other DNA
gaagctttactggcacagatattcacctgaaagtattacaatgcaagcactcagcagtgctttgattaacaataa

SEQ ID NO: 529585 - DNA, 75 bp, synthetic construct
  source 1..75: mol_type = other DNA
tggaggcggtcaaaaacgccgataccagcggctgcgacccggtgccggaaatgatcgcccgctttaaaaaagcgc

SEQ ID NO: 529586 - DNA, 75 bp, synthetic construct
  source 1..75: mol_type = other DNA
ctgtcccagccgtaccgtttgccggggcagcagtatgatgaggagtcgggactgtattacaaccgtcaccggtac

SEQ ID NO: 529587 - DNA, 75 bp, synthetic construct
  source 1..75: mol_type = other DNA
ccgctcctgagaatcgaaacagagaatggcgaacaggcgaaggcgcggcaccggagcctggcggaggtgttgcag

SEQ ID NO: 529588 - DNA, 75 bp, synthetic construct
  source 1..75: mol_type = other DNA
taaacaatccgatcttgaagaatggatcagtacgcaagcagctcaaggaaaaggggtgttggatggtaataactg

SEQ ID NO: 529589 - DNA, 75 bp, synthetic construct
  source 1..75: mol_type = other DNA
ttaatttattcaaagcacggcgagtatatggcaggacaggtacaaggggaatacgtggagttgagcgacggcact

SEQ ID NO: 529590 - DNA, 75 bp, synthetic construct
  source 1..75: mol_type = other DNA
cccgctcaagatgattggattttaatttattcaaagcacggcgagtatatggcaggacaggtacaaggggaatac

SEQ ID NO: 529591 - DNA, 75 bp, synthetic construct
  source 1..75: mol_type = other DNA
gttgcagtcagaaaacggtttgctgggaatgggcgcatttcctacggaagacgaactggacgccgacatgattaa

SEQ ID NO: 529592 - DNA, 75 bp, synthetic construct
  source 1..75: mol_type = other DNA
atgaattgatggctcaccggcacgtcagtcggcgcggactgtttcgtgcgtttgtcagcgcggcaaagcacacaa

SEQ ID NO: 529593 - DNA, 75 bp, synthetic construct
  source 1..75: mol_type = other DNA
ggactggtgtcggctgacaacgaatgctgtgatggttgtggtgaatgcgctatacagtgccctcacaatgctgta

SEQ ID NO: 529594 - DNA, 75 bp, synthetic construct
  source 1..75: mol_type = other DNA
gcagcgatttgcctgccagtatatggctgattgggtatctggcgatgaggctgtcgaattacagtatatgctgga

SEQ ID NO: 529595 - DNA, 75 bp, synthetic construct
  source 1..75: mol_type = other DNA
attgcggtgctggaagtgacgcaggataactcagtggcagacggttcgacggcgaacacgctgctggtgagggtg

SEQ ID NO: 529596 - DNA, 75 bp, synthetic construct
  source 1..75: mol_type = other DNA
aacatgataaaccggggtgtcgatgttcttgtcattattccgtataacggtcaggtattaagtaacgttgtaagg

SEQ ID NO: 529597 - DNA, 75 bp, synthetic construct
  source 1..75: mol_type = other DNA
gctctggctgaacgaatggggttacgtccgtcagccatcagccgcctggaaagcaatcctttaggggcaagcatg

SEQ ID NO: 529598 - DNA, 75 bp, synthetic construct
  source 1..75: mol_type = other DNA
gtcacagagaacccaggaagatatcaaagtggctgttgcggatgatgattgtgcttcacgtcctgtgcctgccgc

SEQ ID NO: 529599 - DNA, 75 bp, synthetic construct
  source 1..75: mol_type = other DNA
agcggaaataccttgtagataaaatattccatgccgggtttaaaggaataaccaccagcgagccgggtttatggt

SEQ ID NO: 529600 - DNA, 75 bp, synthetic construct
  source 1..75: mol_type = other DNA
gtgccgagaatattattgtggtaatgacccacgcctccaaatccggcgaatccaaactgcttcctgactgtaccc

SEQ ID NO: 529601 - DNA, 75 bp, synthetic construct
  source 1..75: mol_type = other DNA
actgattgggtatccggcgatgaagctgtcgaattacagtatatgctggaaatgtttttccgtgccgatatcgct

SEQ ID NO: 529602 - DNA, 75 bp, synthetic construct
  source 1..75: mol_type = other DNA
attacggaatacatcgttgcgagcgattccttattccttaatcaatgcctggaatagtagtccaggacctgatcc

SEQ ID NO: 529603 - DNA, 75 bp, synthetic construct
  source 1..75: mol_type = other DNA
cattaattgagcagatttatcatatttttcgtcgttatccggtgccgcagaaatttgtggtttgttgtgaatatt

SEQ ID NO: 529604 - DNA, 75 bp, synthetic construct
  source 1..75: mol_type = other DNA
aggctggagggggaaatccgggcagaccgcgtgagcagtgaaagccgccagtggctggcacagtgcgggctgacg

SEQ ID NO: 529605 - DNA, 75 bp, synthetic construct
  source 1..75: mol_type = other DNA
tgatcaatcaaattattgccgcgcagggaaataaagaaaaattactgctgttagggcgagcactggatcgcgtat

SEQ ID NO: 529606 - DNA, 75 bp, synthetic construct
  source 1..75: mol_type = other DNA
cttgatatgctaattctggacattatccgcgaagcaaagaaaactgggcaaaaaaaaagactcaggacgctgaaa

SEQ ID NO: 529607 - DNA, 75 bp, synthetic construct
  source 1..75: mol_type = other DNA
cataccaatgagcgctttctggtcaattcgtggattgaaaacagcagcggtgtaaaagaaaagtcattcatcatt

SEQ ID NO: 529608 - DNA, 75 bp, synthetic construct
  source 1..75: mol_type = other DNA
gatggaatatttacatatataaagtcccgtcacagtgaagattacgacatagaaagggatggctcggggcatgat
